United States Patent Application Publication US 2005/0228172 A9 - sequence listing, part 181

SEQ ID NO: 812752 - DNA, 346 bp, Homo sapiens
taaaatcttgctaggtcctggtagagggaaaacagtccccaagagtagaagatggccaagctgttagcccccacgtagtctagcagtatgttggggagggaggttgttaactctgattttttttctctcacacattaaacagaaaaatgtatcatctcctccatcaccatcacaagagactactgcactgccaagccagtatctgctgcaggaagtggagtgatgggtaacttcargatctagcctgagccagtttcttttgtgggagcataaagatgaaagaaaatggagccaggctcccctcatcctgacattttttgttttacacaaaaatctgtataggaca

SEQ ID NO: 812753 - DNA, 586 bp, Homo sapiens
ctcgaggatggagaaatggcgagagcacactggacaagggagggaaagggggtcttatccttaatgcagctagtccctactactgtgtctttcccctattggctagggttggactgcatagtctaagctaaytccaattggctattttaaagagagcaggggtacgagccagagtggcagggtgagtagtttcagtggaaaggatggttacagagcagatgactaaggtcagagcaggtgactaaggacagagcaggtgactaagggtgactaaggacaaagcaggtgatagaggctgggagggggttgtttactgagactaagggcaaggagacataaaaaacaaggaagttaaactttaaaatggagaacaaagaacatggaagctgaatatatggacatattggttcttagaagaggaatttatggaatccttcaatatccctttcaatttttatagtccttcctcttcaaacctttttaacatgtcttggctttgttgttcaacttgatcctctaaaaggaaaagcttatctgaataaagtggaggagagctaagggagggtttagtaagtgctgtttctat

SEQ ID NO: 812754 - DNA, 638 bp, Homo sapiens
gagctaagggagggtttagtaagtgctgtttctataagtctttgcactagcccacggatgcatggtatgacacaacacccaacaagaatgagtacacctgttatggctgtaagagaagtaagaattgaggctatgattcctttctatttactgaaccacctctctagccatcttaagaaagggttgtcgactccagaatttttagttaacttattagataaagcagtaagtccttgtagggcccttgttatgttcccatcaagggcagtgttgtttgggatgagggtacaacactgagttttaatcataacaaacactatcttttttggctaatatcatttctgtggccattctattcttccaggccatctgtctagtaggccccaattgttctgctattcctttgacaacatccctgatgtaattgataaatcgctgttgattataatagatgtaatttatccaatctatgtttttattgatagtcaaccaccaaaatattgactcaaatcctgcagttatttgatcccaggctttaaatttatgtggtacccttgtgrgcctaattgtatctaaataaacgtgggagtggaaagaccaataaggggcttcccttggtttacaacgttgtgtttttc

SEQ ID NO: 812755 - DNA, 547 bp, Homo sapiens
acgttttgactgggtgaatgctcacgttctcaaactactatagcagccctatgaatcatactcctttcttctcctgaaaagaggatgtccaaaatggacattaactcaacccaagtgtataactgaggtcctaaaaattgatcaatttgatctgccactccgtaagggtcatctagtaatggcttaagctccttttttaaactctggaattctgaactggttaagggagtatccatgaagtcaatggttcctcctccttgtggcacctatcttaagggaaggagatcaggggctgactctttagttgtagagggaaaagggaagtttcggatatcctttttatattgttctatttcacattggagtccctttagggaggggtccttaggctgttaggggacagactcttgggatgataatttccaagagtcaggattgtaaggagggggaatawcgtgagtaggtgaagaatctggagcaggatcttgggcagcagcagctgtctgaggagagggcttggggtcactgagcaggggaagatggtcta

SEQ ID NO: 812756 - DNA, 451 bp, Homo sapiens
tccttgcacccttcttttgcttcatccactctggccgcttcccttttgggwgtctaggcccctcttggtattggcatgccagtttgaaccccatggcaggatctgtcctaagccgtatgaggtgaccatggaaccgcagataggacccactcactccacacagcggtagtgcgtagtaccattcacacaagcagcactgcaagcagtagtgtttgtgatcatttaaacacacttttaacctccagaatatcttgaccagcaaggaaatacttcgtcacccctgcgacattgcttaacttggtctgtgtacagagttacctgattgctgcggtatgtgagaatcctttccccaagctatcatcctgtttccttctgggttgttgagagcccgagtttatttgtcgcactgggtggttccccatctctcaccctgaggccaccacaatgaggc

SEQ ID NO: 812757 - DNA, 451 bp, Homo sapiens
tccttgcacccttcttttgcttcatccactctggccgcttcccttttgggtgtctaggcccctcttggtattggcatgccagtttgaaccccatggcaggatctgtcctaagccgtatgaggtgaccatggaaccgcagataggacccactcactccacacagcggtagtgcgtagtaccattcacacaagcagcactgcaagcagtagtgtttgtgatcatttaaacacacttttaacctccagaatatcttgaccagcaaggaaatacttcgtcacccctgcgacattgcttaacttggtctgtgtacagagttacctgattgctgcrgtatgtgagaatcctttccccaagctatcatcctgtttccttctgggttgttgagagcccgagtttatttgtcgcactgggtggttccccatctctcaccctgaggccaccacaatgaggc

SEQ ID NO: 812758 - DNA, 549 bp, Homo sapiens
aaaagtataaaagaaaattcyagctgattcttacaacagtcgtggaaggaagtcgctatcctcctcatttcccagatgaggagacatgggcacagagaggttgagtgacaatgctgtcctcacccagctcctaagtggacaagataggatctgagcctgaaaacctgaccttaaagtgtagggcaggagtcaccctaccatccagctcgttagtgggaatgggcaggaggggaggaatccacagagcttggcaactcattgggtgttggcatgagggaggataagggaaggcataaaatgaccccagattttgagcctgaacaacgtggaagatacaggagtcccactaacaaaggtaagaaaaaacagaaccaggaggttggagagtttaaacatgctttctgacatcagccagtgtatctgcagtcccttacacagctggaaacgcagagctgtcatgggggaagacagtatacagctcaatatatggaacctgtttgcacctgctcaggaatgacagttgatgccataaaggggaaagagatttga

SEQ ID NO: 812759 - DNA, 655 bp, Homo sapiens
ccctggcaatttgtgcattttgtttcattttgctgtgatatagttttcaatatgaaacatggttaacgcagaattgaaagacacaagaaaattaacaagaamaatcatcctacacctattaattgcatagctgttttgcaccaagcatttctttgcaccaggtacacaagtttcgtgtaccccatatctctaatcttcccaataaccttgggagattgcatcatcttgttacagaagaggaaacagggttagagaggttaacacctaacacagaatgaacaggaggtagattctggaaatgtgacttattccaaagctcattagtgtccacaccgatgcttgctgctagacactgacactcactgagattccccaggtgcaggctctcagaacattcccatataccagccagagggagccccagagctttcagtaagaaccatttttagccatgccaaagaacaaccctcttaaatcagttggaaaacacagctcataatgtctctatttaattagaactacatctgaagcaggaatggaaaaacattacatagtatttagtaacaaaaaaacaaaactaaagccatgtgacttttgtggtatcattgaggtcgtcttggatttggtttcttcatggataatgaaagtagtatta

SEQ ID NO: 812760 - DNA, 306 bp, Homo sapiens
attttaaaaaataaatgaatacaagctaatctcaatttttcctagatttagtacatagtacattaatgttcatgtggattattttcytgagcagatcctgacattgagactcctaaatacttccatgtatctaattcaagcaattgcaggaaggacagatttgtatgcaagaccatttctaggaaatatatcagtaatttttaaatctcctaaactctgctcatctccatcaacatttggaacttgcagtgccaagcggaagtttcctgttttcctttgttctaaccagaattatatagatgggct

SEQ ID NO: 812761 - DNA, 468 bp, Homo sapiens
ggtgtctagtagcaaataatagcaaggtccgagctctggaaaagcgtggcaagaatcgccaagccccattagttcttgttttaaaacattttcagggttttctgacaatagtcacccctatgtcacaataaggatatgttatctgaatcagggcagccaattatcgtacttagtaaaaatgattagctggctcttggggaacagacattatgtttctcagcacctgaaagcagaataaaatggagtaaaaaaaaattagttgagaacatttataatggaaatagggccaaagtagatatatattgcccgattgacttccatcttgctgtggagcttcagtgcctacaattrggagatttccttatttatgcacttgaagggtttttcttccccccattccctttccctcattcgcttcattttctgtaccataagagggagcttaaatgttgttgctgttggtataga

SEQ ID NO: 812762 - DNA, 402 bp, Homo sapiens
agacttttgcatattagatatcctttaattattgtattgctttgttatcctcctaagcagaaaggaaaattctttatgaactcatattttgccaatcaactatgaggtaatggcctttccgacaccagctaaaacaaacctttaatttagtagttactcgtgttggatgaggcagatatgattatagcatatagcattttttagggagagtgcattttaaacaatgtggcccttttttgcttttagattttaggagtgaaaacaagaaattgatgggaaaataagacacaacatgctgttgttaatccacgaattttttttttaattatacttttaagttctagggtgcatatgcacaacaygcaggtttgttacatatgtatacatgtgccatgttggtgt

SEQ ID NO: 812763 - DNA, 616 bp, Homo sapiens
gaataatgtaattaatgcaaagttttaggccctgaattctgctgtcagaaatgaaataaatcagtgccatggayattaccttttctttagaagtttttattttaatcaaagagtgctggtaaagaaaggatttatttttatcttttttttttttttttttgagatgcagttttgctcctgttgctcaggttggagtgcagtggcgtgatcttggcttactgcaacctctgcctcctgggtttaaatgattctccagcctcagctttccaaatagctgggattacaggtgcccgccaccatgcccggctaatttttgtatttttagtagagatgaggttttgccatgttggccaggctggtctcaaactcctgacctcaggtgacctgcctgccttggcctcccaaagtgctaggagtacaggcgtgagacaccacgcccagccaagaaaggatttttaaattatcttcttcttgttttctatgaggagttcagatttaaagtgttgatttttattaatatatagagattttcagaccctaagtagagtgtatctccaaaattaggagcctaagaaggaaatctgtctccctgaattggaaataacataagtatgga

SEQ ID NO: 812764 - DNA, 589 bp, Homo sapiens
gagggtcagttgtatgcaaagcaaatacaagggtaagatcagctcctacattcaaagggtttaaaatctaggggacaggtgggaaaaacaggtacatkgtaatacatggcagaatgtgacatgtgctccaaaacaggtacacaattcagattataaaggtcatttctagccgggcatggtggctaatgcctggtggctcacggtggccccagtactttgggaggccgaggcgggtggatcatttgaggtcaggagtttgagaccggcctgaccaacatgacgaaataacatctctactaaaaatacaaaaaaattagctgggcctggtggtgcacatctgtagtcccaactacccgggaggctgaggcagaagaatcacttgaacctgggaggcggaggttgcactgagccaagatcacaccactgcactccagcctgggcacagagtgagactctgtctcaaaaacaaaaaaacaaaaaaacaaaaaaacatttccagttggtagtaagaaaaggcttcatataagttgtagtatttaatatggagcttaaaatatgtgtgaaaggtgggaaggaagagcatcttgta

SEQ ID NO: 812765 - DNA, 594 bp, Homo sapiens
tggcagaagtcattcttaaagattttgtcttttatcccatgggctctgrggagacgctggagcttctgatcaggaggatgacatatagtaattggcagtggcatgcagaataatttagaggagagagggaaagaagagaatcaaaaaggacattataatagtccaactgaggtgaggaaagccttggctggaatgggaacagcagaagcaaaaagtaaaaaggacctaagagtgaatttaactttttttcctgccctagcacacttgagaagacaaatcctattaacagtgattcactctgcattcaaaactttgttataagtgcagcagaaaacccaaattaaaaggctaagctattaaagtatattgctacaaatcattaaactatataaaaacaaggaaggttaatgttacagagtggagagggtgaggaggctatgcccggctcccactctcacagccactgcagtacattgagctccacagagacagtgccggggcaagtgagagccggacgggcactgggtgactgtgtgcctcgctgaggaaaaataactcaacatgggcaaaggagaccctaagaagccgagaggc

SEQ ID NO: 812766 - DNA, 634 bp, Homo sapiens
atgtaaatggattaatcaaaccatttacaatatgtctccaatcaaaagacatttaaaaattcagctatatgctgccttcaagagatttactaataaggacacatatagactagaagggaaaaaayggacaaagatattccatacaaaccaaaaccaagagagagcagggatagctctacttatatcagacaaaatagactttcagtaaaaaaactataaaaagaaacaagaaagatcattgtataatgataaagagtccattcactaagaggatataacaattgtagatacataggcacccaacattagagcgcttaaatatataacgcatttattaaatgaagaaagagatagactgcaatacaataatagtaagaaactcaataccttaatttcaactatggacagctcatttaaacagaaaataaacttcaaaaattggccttgaattacgcttttgaccaaatggacctaacagacatatacagaacattctatccaacagcagcagaatacacatccttctcaagtacacatagaacattttccaggaaggatacgttcagctacaagataagtcttaacaactttaagaaaattgaaatcatatcaagtgtattttgggctacaaagg

SEQ ID NO: 812767 - DNA, 599 bp, Homo sapiens
gttgcatggttttctgacggaactctgaaactatgggaaagaataaattgcttcagatttgtgacctacagaaacctaactggttaggataatcgttatattttcattgaatggatcacattttctctaagacatgtgtgtcttgctaaggcatcaatatttcttgctgttccctggtaacctaagcctgtcagcaagtcatggaatagtatgtcctatgggatgataaaataaagccctagtagtcaaatttacagaacagaactcaagtggatacagcctaaaacaaaatggcaaaagtgcagttgagccttgaacaacataggtttgaactgtgtgtctacttaacatgtaatattttttcagtaaatatattggaaaacttgttggagatttgcaaggatttttaaaaacttacagatgaactgcatagcctagaaatgttgaaagaataaggcaaagttaggtatgtggtaaattcattaaatatagatactagtctatttcatcattttctaccataaaatatacatgaatctactataaaaagttaaartgtatcaaaacttatgcatacaaacacaaactatacatggtgc

SEQ ID NO: 812768 - DNA, 648 bp, Homo sapiens
cagatatggaggagctttttctccttttctgtttcctggaagttcatagtttrtatgaagtaggaattatttgtactttgaagatttagtagaattcatctgtaaaaataatctaggtttcatgggggcatttgctgtagggagtttttactgatttaatgaataggtatgttcaggtctttatttcttcttatggcttttgttatttatatttctctggaaaattgttcattgcacccttgttttaaagcttattggcataatgttcctaccatagtcttaaaatgattacaccagaataactgtagttgtaccccctgtttctcattcttacgattattcatttgggccttttatcttttttatcttgatcagtcttgtcggcagtttacccctttttaaattaattttttcaaaaattagggaatcatttctttcgcttttaaaaaatttcattaatttctgctttttatttccttctactttctttttgttcacctgttaacttcttaacaacttctagtttagcacttggttcattaatttttcaaatttaaaatttttctaatgtagccatttaaggctataaatttccctctaattgttgctttagctgaatcttacaagtcttagtacgttttgttttta

SEQ ID NO: 812769 - DNA, 590 bp, Homo sapiens
gtggcctggagagattgttagaagtcatttgtttcctgccttgatttttcttggaatttggaagaawcactctaaagtttattgaaaaaacagcagatagaaagtgcaaaaacacttgtgaaaaatgagaaagaatagacctactcttccagttagtaaaatttataaaattacaataatgaagataaaatagtatgtgactgtcacaggaatacacaattacctaaatagaaaggatagctcccatataaacacatcataataaaaacttcacatgaaagtggaaacaccaaaccaaaatggaaaagaggaattatttaacaaatggtaaaacaaagtattggatagcttattagcagttttggagggagggtagaatagcaaattatatagatgctttggggtttaaatatagagaaaggaagagagaaggaaagacaggtaaattaaaataagaaaaataattagaattcaatgtcaggtttctggcctaggttaactatttaaacttttcaactaaaataccattaatgcttcttttttttgagacagagtctcactctgtcgcccaggctggagtgcagtggtgc

SEQ ID NO: 812770 - DNA, 632 bp, Homo sapiens
agcaactagtagtatatttattttgtatatagacaattacctctctttataatagtaatttattgatgggtgtgtgtgtgtccctgcttggaataatggactgatgtgtaaattcagggaaaacatcagaaatgactaattagaaaacataaaggaatactactcttgtatttccagttttctactttattttaatataccaaatgtagtcagccttagacattgcctttattattcactggttggttttgttcttttcttacgtttagtccaacaacacacatagttttcaaagaggtaaaactaaattttatgggaattcagcttaaagaatggcaggaaggactggccttgatgacacatgaccatttatcctcatcattttaatgtgtttcctttaatagtctcacttcagacaaaaacatatactatcatcctgcctctactatgcaaatggaaaaatatggtaccttctaatgatcagaagttagaacgggtcttgggaataaccattagtcctaataaatagsgtaggatagtccattcaaaaatattatttaaaattcatttttattaagatatgcatctagcatctactttttgaaaagttttaagctccacacccgttttta

SEQ ID NO: 812771 - DNA, 519 bp, Homo sapiens
caaataccaatatttattgagtcccatctcttaaaytgttgtgcccttggcatttgaccatcattctatttccatgtaacagctttaaaagggaggtgccataatccccatttaagatgcagaaccatccacttgttcacatcagcaatattgtgttcagtttttagtgccactttttaataacgacattggtaagctctctccacagaaggaggagcaaaattgtgatatatctagaggtcatattatttaagaaattgataagaaagtggaagaataattaggacttgggagttcataataacttctttcagctactaaaatggttgtcctggggaagaattgtttgcagagctctccaaaggcagaatgatggctaatggaggaaagtcaaatgaagacttcgtgttactgtcatgcctaacataaggaggagctttgtgacaggcggaactgctcatatataatatatgggagtatgagatgtgctgcttagtgaggcatctactctttcattca

SEQ ID NO: 812772 - DNA, 527 bp, Homo sapiens
atacgttaattagctggatttaactrtagtgtacatatacttcaaaatatcatgttatacatgtaaaacattttttctaatttttaaaaaataaaagaatacattttaaaaataattataattactatattttcatcataggaaaatctcacaattttgtttttccccggaaatatttgcaaatagattatctctaaagttttcttctttcctgtagtactcatatacattaaactatagatagaatatatgggcttcttttaccagtcactatctggaaagcttttaatgaaaatcaaatgaaattattttcaatgtgatccctagcgctggatgttattttcctcctaatttggccagtaacaggtcatattgaaagattttgctggtatttctggtaagtcaggataatttattgttctgatggcctgatttttttcattacatcctttcattgccctcggaggggtactataataatcgaacaacccatttccaagatttattgtctaaaacttcaaagagtc

SEQ ID NO: 812773 - DNA, 596 bp, Homo sapiens
gcactgctctcttcaaagctgtcagacagggatgtttaagtctgtagaagtttctgctgccttttgttcagctatgccctgycccccagaggtggagtctacagaggcaggcaggcctccttgagctgaggtgggctccacccagtttgagcttcccagctgctttgtttacctactcaagcctcagcaatggaggatgcccctcccccagccttgctgctgccttgcagttggatctcagactgctgtgctagcagggagcaaagctccgtgggcgtgggaccttccaagccaggcatgggatataatgtcctggtgtgccgtttgctaaggccattggaaaagtgcagtattagggtgggagtgtcccgattttccaggtgccgtctgtcacagcttccctttgctaggaaagggaattccccaaccctctgtgcttcctgggtgaggcgatgccccaccctgctccgtgggctgcacccactgtctgacaagccccagtgagatgaacccagtacctcagttggaaatgcaggaatcacctgtcttctgtgtcactcacactgggaactgcagacgggagctgctcctatttg

SEQ ID NO: 812774 - DNA, 578 bp, Homo sapiens
ggatattgacctatagatttcttttttgttgttgtatccttgtctggtttttgcatcagggtaatactggcctcaaagaatgtgtcagggagaattctgtcttcttcattttttgaaatagtttgaggagaattcatgttagttcttcttcgagagtttggtagaattcagcagtgaagtcatgtggtctgtgacttttctttgttgagagacttttttttttttttttgagacggagtctcgcactgtcacccaggctggagtgcagtggcatgatctcggctcactgcaagctctgcctcccaggttcacgccattctcctgcctcagcctcctgagtagctgagactacaggcgcccgccaccacgcccggctaattttttttcatatattttagtagagacggggtttcactgtgttagctaggatggtctcgatctcctgacctcatgatctgcctgcctcagcctcccgaagtgctgggattacaggcatgagccacygtgcctagctgagagacatcttattactgcttcaatctcattacttgttattggtctgttcaggctttctattt

SEQ ID NO: 812775 - DNA, 643 bp, Homo sapiens
tatctagaagacctgcattgtaataaatatcaaagaaagcttcaggttgaagacaaatgatcccagatagaagcccagatatacaggaaggaagagcactagaaatggtaaatgagtgggtaaaaatacaagaytattaaaaaaatttatccaaaagacaattgagttttattatttaaaaacacaataatgtcaatgaatgataggaattgtagcatatgtagaagtgcaatacatggccagaatagcacagagaatgaggaggtgtaaatagaattatgctattggacatggtggtttaattttaattcaagatacattgtgatatgtgaaagatccatattataatccctacagcaaccactaaaagttaaacaaaattgtattaggaaggaagaaaggagaaagagagggagggagccagggagaaggggggaaggagggaggaagatgagtgtggaaactaaattagcattaaatttgagaacttagaaaatgacagtaaaactttaggaaatcaagaggaagaaattagtaacaaaagaaataaatgaggtatttacaacagtatagatgttaaagaaatgtaacaatacaaaagctaattagtaataaaagtaacacagtaggcacaattctggta

SEQ ID NO: 812776 - DNA, 544 bp, Homo sapiens
cactatcttccatgtcttttaacctatraaaaatatttttcatcactttgtctctctgcccagcattccaagtaattcttctgatctttattttattttattactattagttttattgagacagggtctccctctgtcacccacactggagtgcagtggcgcgatcacggctcactgcagactcaaccttctgagctcaagtgatcctcctatctcagcctcttgagtagctgggactaaagacgtgcactaccatgcttggctactttttgtatttttttgtagagatgggattttgccatgttgccgaggctagtatcaaactcctgggctgaagcaattcacccaccttggcctcccaaagtgctgggattccttaattctagttcgttaattctccaaagctgcatcagatttgtggttgagttgatatagtgtttttattcaattgttttagttttcttttctacaagttgttccttgtttaggtttgttaaatcatttttaaagtttcctgtgccaggagtatattttcagtttggtt

SEQ ID NO: 812777 - DNA, 590 bp, Homo sapiens
acatgtttcaggatattagtgtctttcagaaatattactgaaatggattttatctgagggaagagggcatcttgaaaaaaatttgttttgatacagggtctcgctctgtcgcccaggctggagtgcagtggtgtaatcatggctccctgcagccttgagctcctgggctcaggtgatgctcacaccttagccttctgagtagctgggactacaggtgtgtgcaaaacacagtttgtttgttttttaaattttttatagacacaaggtctggctatgttgtccaggctggtctcaaactcctgagctcaagtgatacttccaccttagtgtcccaaaatgttgggattacaggcatgattcactgtgtccacccccagggtttcttcaccacaccagcacaatgtcagcagtgaaagggcctggaagctggtaaagcttaaaagatacagactggacccgaggcactgagttggtttaatactgtgagctgcaatgtgggtgctcacttragtgtgccatgaatgtgaaaatgcatttccaaggcatctaaactacccttacctgcctctgtgaaaaaatcagtcactatg

SEQ ID NO: 812778 - DNA, 590 bp, Homo sapiens
acatgtttcaggatattagtgtctttcagaaatattactgaaatggattttatctgagggaagagggcatcttgaaaaaaatttgttttgatacagggtctcgctctgtcgcccaggctggagtgcagtggtgtaatcatggctccctgcagccttgagctcctgggctcaggtgatgctcacaccttagccttctgagtagctgggactacaggtgtgtgcaaaacacagtttgtttgttttttaaattttttatagacacaaggtctggctatgttgtccaggctggtctcaaactcctgagctcaagtgatacttccaccttagtgtcccaaaatgttgggattacaggcatgattcactgtgtccacccccagggtttcttcaccacaccagcacaatgtcagcagtgaaagggcctggaagctggtaaagcttaaaagatacagactggacccgaggcactgagttggtttaatactgtgagctgcaatgtgggtgctcacttgagtgtgccatgaatrtgaaaatgcatttccaaggcatctaaactacccttacctgcctctgtgaaaaaatcagtcactatg

SEQ ID NO: 812779 - DNA, 635 bp, Homo sapiens
ttgagaaagttcaaagaaaagtaacaagggattaaatcaaagcaatagccacagtgttgagacttggcagatgttgggctgatgatttcgtgattagctcgatgggttagggagtgagttagagaagtccaagtgattcttatggaagctccagtcataagggtttagacaaaggaaaagaaaacagttaatgagaaaaagaattaatcagagaagaagaaagagaaccagtggaataccaaaagaggctagagattcgagtaggaggcagcatctaatgatacagacagataatacgagcttaatatagaaagcctggtgattaagtggtttctggtgatttggagcccactagccatggaatagcagaaatgaaatacaaattataagggtgtaaaaaaagaaataaacataccaagtttagtgtacccatttatttttggtagaatggaataatgtgtgagatgtaacttaattaattagagtggggtggggaggtagttctcaaaagcagattaaaytggctatgcctccacagaaaaatactagaagaaactactctttaggttttaaataagaaggcttagactctccattcctggctctgccacggaccagttgtatggcttagtagt

SEQ ID NO: 812780 - DNA, 620 bp, Homo sapiens
ttttaaaacatatgttcacaccacccagagggaaacagcactaaacactttgacatactttcagcctttttcatagaaagatagatagatagatagatagatagatagatagatagatagatagatagayagacagacagacagacaaacagatagatatagatatatccctttttcaattactgtttccccaaccttttaattatttgtaacatgaacattttcccaggtcaaccaatatttctgtgcagcacaattttaatgaaggatgatattctatttaacagtggtccataatttttttatccagaaccctactgacaaaattttaggttgtttctaattttgtgctggtatacataacatcataagcattcaacatttttacaacaaagcttcatccttaagacaaattccaggaagcataattgcttgtcaaagggtatgaggttttcaagtttttgataaatggcaattagactttttaaagacacccaaagaagttctctctttgtcctttttgcaccagtgggaaggaagattcactactatgtgacatttctaacacagatgttttggagtatgtatcggtttcctagtgctgtagtaacaaatgtgcc

SEQ ID NO: 812781 - DNA, 589 bp, Homo sapiens
ctgtcatctgcatcagtgtccttggtcccaatgtatcctccatgatgctggcagtatgtctgagcacccacacctctgattccaaccactccagtgttttctcactgcctcctggaacaactacaaattccttarcaagatcctttatgatctgttccttgcagacctcaacttgcttacaggcagtatgtataatggttaaggatagactcaaaagccagacaatttgaatccagctctaccattgataagctctagaattttcatcaagttacctaactttgctgggctctttttcctcatctattaatggggataatatctacctcataaggcatttgtaagaattaaatgattggacatatatgaagtactctggcatggagtaagcattatatgaatgttagcaacaattattatctacccagtcttgaattattttcccttaattccaccatccattacagctatatagaacattgttcattccctacatactctcttacttatctgttcctctctttcctcatatcatcctatgtagtgaacagacctaatgggaccttcagtcagtcctttattctggtat

SEQ ID NO: 812782 - DNA, 542 bp, Homo sapiens
gattaaatcagtaatcaaaaacctcaccacaaagaaaagcttaggacttgacggcttctgtggtgaattctaccagacatttaaataagacttagcaggtatgcttgtcaaacttttccaaaaatgattagggaaccctttcaaaaccatcatacaaggccagcattaccttgataccaaagctagataaggacactctatgaaaagaaagttacaggccaatatccgtgataaatatggaagcaaaaatcctctacaaaatactaacaaacaaaattcaattgtacaacaagatcagacaacacgaacaagtgggatttatccctgagatataggggtggttcaacatacaaaaataaatataccaaattaaccaaaaggaaggataaaagccatatgataatctcaatagatgcagaaaaagcatttgataaagctcaacactctttcatgatgaaatctctcaacaaattaggaatagaaggaatatacctcracataataaaggccatatatgacaagctcacggctaacattgtact

SEQ ID NO: 812783 - DNA, 590 bp, Homo sapiens
taaaaaaaaagcttacgttcatcttttaatcccttggattgtatgccaaaaattctagtatttgaaaatgggccttaaatcaaaaaaggcagataatatcaactggcaatgttagtaagaccttgaaggattttaagcaggggagtgagatgattacattagaaagaatgctctagcagataacacaagcaagaaggaagaaagatctgtccacgataatgtggtggaaaaccaacagataagggcaagtatctggggcaaaactgataaactcacccaactgagaccaggagtcttagtaaagattgagttccctgtgaaggacagaaaacccaagataacactgtcttaaacaaagtagaaatttatttctttgagaaattcagagcagttcacatggggtttccatgatccccagagacctggctatttccagctcatggctccttctaccttgctgctccaccactytcagcacatggctccaacatcatgatacaacatggtagtcagagctctagccatcaatgtatcttatctacattccaggaaaagaatagagaaaaggttaaaaagaaaataaagttact

SEQ ID NO: 812784 - DNA, 626 bp, Homo sapiens
aagaatagagaaaaggttaaaaagaaaataaagttactgttaaggacacttcctgggagtcataattgacaattccacttacatgccattggacagaacttaatggtatggcctaactgcaaagaaggttgggaaatgtctacttccgggtggccatgtgtccagctaaacatggaaggttttactactaaggatgaaaagatatataggtattagaagacaactaatgatctctatcatgccagatgtataacctggagaggaaagaagaaaggcagattattgaggagtgtgtgagggcactgcattaacttgtaggactttgtaccttcagaattgttctttcccaaacacatctctacttctggccccacgccttgattcctgctaagtccacctgaaaaatctgcccacctcccactccccatgctcaatcctaccatttttcctattaatattcggctcatccttcaaatcccatctcaaatgctatgttaatcatgacgttattcttgactttctccaaagggatagaacttgtccctctagaatttcatgtatagtttttytagggccttagtctcctcttaacaccatgttgtcttaggtcattagtacagctgggt

SEQ ID NO: 812785 - DNA, 658 bp, Homo sapiens
tttttaatgctttcccagtgcctagtcttttgcttttgacacgagttacttttagaattttatgtatttcattgtctcataaatacagcttcattctttttttttttttttttttgtaataagcaagagtatagagattaaatagggtcttgggtccacttaaattgcccacaggtcaaaacattctgagaaacaacgctgccagtgattaaaaagagccaatttagaggctaatttagtaatttattaattaatttactaatttcttaaatgtatttagaggctactttagtagttatcctccctgttagacaggcacaaaaagatccttggcctctgtcccttctctttacctctcacgttgactgttgatctggtggattctacttccttcaataccttcacagctgtccccttcttacaagtcccactgccactggctgtcttcaccccaggagatgcagtgccttcatccctgctccccctctctccgccttccatctgcccaccaccattctcaatgtcggctttgactgggtcattccccttctcagaarctttcaattgcttttaaaaaatgtattctcaaatcctggtccgctgttccaggctcccatcccttgcccttctgcccctgcagcttccgaatcattccacc

SEQ ID NO: 812786 - DNA, 565 bp, Homo sapiens
ccagtgggagcctatttgagttggcttttgaatcrtttgattcatcttgtgtatttcagatctagaatcatatttctcttgagaatcttggtttcttttactgaaaaatggtatgtgggccacagtctagaaactgggagcattcattgttactaggttgttcattgtttcttgggattttttttagcatgaaatatattgagagttcatattgagacttccagtgcaaatttagttctgtagagtcttattttttttatcttccatctatatctcctttctctgtgctaagtatctaagttttctatgacagtgggattgatggaattagaatatcatataattacccacccattttttctatcttaccatgtctctgaaacagttttagaataacaataccaaaactactaccaacactatgatttctgaaaacagtttaagattttcttttctttttttttttttgtagttgttttgactgtaggatatatcccaattaccgattttttttttttttttcagagacagaggctcactgtcatccaagctggagtgcagtggc

SEQ ID NO: 812787 - DNA, 571 bp, Homo sapiens
attggaggtcataacacagaatgaattcaaagaattactccagattttgcccacttgataaatgtctcagtcggaaacaataatttcattattttgcccagaamagtttcctttggaatatcatgctcaccctaattccaatttcaatcccttgtactgtttcttaaggtcacagtgactgattccaaagacaaacggtcccaagatagcatagtaaacatcacaattatataccaaggttttcatggtaaggagaaacatttacgttacagagaaaaggggaaaaatttaaagcccctaaaaacataaaatcttgtaagatgtcctagctctccacatctgtttggctcctgggccagagtttggaaaacagtttgagtctgacagacaagctgccatcttgatttagcttctaagggcaaggaaccagaatccagggaaagaagtatttgcatggaaatcagactgtatgtagctctcaagttggaagaacaagagtccacagtgcaggagtctgggcagcaaggggtacctaatcatattttaaaacctcacatttatattaaacatt

SEQ ID NO: 812788 - DNA, 621 bp, Homo sapiens
agtatctgctgccttactgaatgaatggagggacggatggaagaactctcaaatgaagtaatatataatgtacagtcactccctcatgagcgttrcaatccagcaggagttacaaaactaataaaaataatacaactagcaaataacacaagtcagaaactaaacgacagagggccctgaaagcctggagcaaaatgctcttggaaactgggactcttattagaaagacatctgaaaacttgaacctgggtcctacagaaaccatcacacccagttctggtgggtgccattctccaaataatgacagctaacacatattgaacatttatcatgtgttcatctatattatcttatttaatcctcacaacagctcattaggtagctattattaatcatcccccttttacatatgatgaaacagacacagagaggtcaaagtcctaatgcaggataaagcattaaccctctagtctttgaaaaaatgaaaagaaaaataacatcaaatggcttttcagaatcagaattttacaataaactagcaagttgtttgtttttaggggtcttagggggagtgggtcattataaaaagtcattaagcccaaaatctgaccacgatggcca

SEQ ID NO: 812789 - DNA, 565 bp, Homo sapiens
ctcaattaaattcaattacaacaaatcctcaaaatacacacaaacatttcaagcaattatccccacacactgtaccagaatgaggctgcattcagcccaggacagagcatatcctttaactgcttaggccctgccttctccaattcatatacacacctgagggcacactctcaaatcaccactgctggcctctcctgtcagttctaaggtagtaccacagggaggtcctaggagagaaagtgaaaccaaaagcaaggtggatatttacagttttttggccacccagcacctatttcactctctttcattaatgctacagaaccaggttaaaggtgacccctttatatattgaccccatgttgtttacttcttcattcagactgaccattaactcaaagctcacggataccaaattcaaatttttatatcaattgctttaaacatagcccaaataaggrtattttcagcctgttttgcataccctgaaaaactgcacccaacatccactagctacaggtaaaacaaaccctgagcatgtaaaagactgtatgttgctgctgccctc

SEQ ID NO: 812790 - DNA, 594 bp, Homo sapiens
gctgaggcgggcagactgcctgagctcaggagttcgcaaccagcccgggcaacacaatgaaaccctgtctctactaaaatacaaaagtaattagctgggcgtggcagcatgcgcctgtagtcccagctacttgggaggctgaggcaggacaattgcttgaacgcgggaggcagaggttgcagtgagccaaaatcgcgccactgcactccagcctgggcgacagagcaagactcagtctcaaaaaaaaaaaaagaaaaaagtctaggtcttttagtcagaaataaaaattattctggcttaaggaggtgttttaaaagaaaagatatgagaagaaaccttcaaagtttagagagaaaaaaaaaaaaacggaaatccaagtgaaaaaatataggcctgaaccaatgggaatgggaaggagaggctgaataagagaaagtattaagggcagggattactgactaaataattctgcaaggcaaaggataagaaaagagaataaaagatgatcaaagtttggacatacatggcccagagaacagtggtaccaaagcccttacccttaccstcagtaaagggcaaacagaccaggagtgg

SEQ ID NO: 812791 - DNA, 605 bp, Homo sapiens
caggagaaagcaaaataaagtacacatctcaaaacctggaaccagatgaaggaaaaaaaaatctatcctaggaattcataaaccccaaactgattttaatgtgggtttgcagactaaattcattctattggaygacccaagaaacctcagtctgtgattttagtataaagtgatactgggttggaagtaccaccaaacatctgacaaaagattactcaaatctttgaagaaagacaccaatcattcccattgataatgttcaaaagaatatgacctcaaagtcaaagttacaatacacaaaaaattgaaggtaacatgaccaagaaacagcaaaaataatagagaatgagatgaaaactgcaaagacttcgtgtactgaaattgacagaaaatataaaaatattacactttctgtttaaggaaataaaagcaggtattaaaaatgattaagagaccttatcaatgaccaagcgaaatttttaaaagaacagaaatttgagaaataaaaaatataataattaagagtgaacaaagttaacaaaactctaagagcagttttaataagaatttgtaactaaatagcagtgatttagaaagcaaaacaa

SEQ ID NO: 812792 - DNA, 487 bp, Homo sapiens
tgggtctagtgggaggaggcagctaacggaaacttagtcattgggggattttatgctgagggcagttttgctctgtgtttccttgcagacacctctgcagagcatcaggctctgtccctgctgtgaggatctgcaaggctagcccttgccctttacaaatctcctttcttttctttctttaaaaatggacttgccttggattaataacgatgtgctggagagcttcttatctctgcctggaattatgctttcataataatattacccttaacctttaatctaaaaagtagaggggaattaaaaataattcacaaaggaaaaagcaaacctccacaatcgaaagagatagggttaggggcagaagaaatggcaagaagacatcaggctggaaatggtgrcatttaatcggggattaggcacgaagtgggtgaggcaattccagatgacaagaaccaacccgaaccatctaatggaacctttgtcaagg

SEQ ID NO: 812793 - DNA, 520 bp, Homo sapiens
ccagatgacaagaaccaacccgaaccatctaatggaacctttgtcaaggttttcaaatactctagtgccctttaaaaatcattttctcctctgcccttatgtttttgtccagacttagaggtgaaagtgaaataatcgagggtgagatgctggctctattgactttttctcaaagggatgcgagctacaaatttcatgggaaatcctcttgctgagtaaaagcccttaagaacaggattggctacatgatttgcagaggccagtgcaaaatgaaaacatggagtttcttgttcaaattattaaaagggtcaaggagacaggcaagcatgaaacccaatgtagggcccttctgagcctggggaccctgtgtgactgcatagatcacacacccatgaagctgaccctgcttagggggtctctgaagtttcacactattctcattttctgacttaataatgtttcttyttccattttcaaagcttcagggatgtggtaattgtgtgtgtgcgcactattttta

SEQ ID NO: 812794 - DNA, 637 bp, Homo sapiens
caatgaatattaaaaacacattcctagagctggccctgtggcttggcagccgcgcacagcatggagacctgygagggagtcaaaggaagcctctttgcttttccagagctgtcagggcttggcaggagctgaggtgggaaccttcggtgtatgaggaaagtggaaggaggaaggtggcggtgactatgcccagcggtgtgactcctgtctcctcctggcagagcctagggtggcttcaggagggtttcatagaagaagtcagtctcagccgtttggtgctccaattcagagctgaagcggagccagactgagaaggaggagggatggggatagaaaaacaaacaccagagaacaaacagacagaaggtagtgctgggaacagccagcctgtgtcctgcaggaaaatcccaagtcctctctctctccctccaggccgcctacagcatggtgtagcatgagggccttcgctgctgctgagacatagactgggaaagtgtttatctccatgaaataaatacattgatctgccttttttctttcaatatttgctgtgcagtgggggatgaattcctctagtggtgtgctccagaaccttcaaaggcacattaaccaaacattaaaggtacgtaatgatctt

SEQ ID NO: 812795 - DNA, 600 bp, Homo sapiens
agaggtggacagtgagcaagagtttagggggaaagaagctgaaaaaggacagtaccggtccaggggttggaacagctggaggactccctggtaccacagcacaaatggggctgggtgccccaggaacaagaacatacacacataccccaccttccacacaccttttttctgtaaacagacctcatttctcggaccacagaagtggacacatggctgagctgttccctgccttgggaacaagccaatctgcacagaagcagaagcagcacagagagcagaggcagggggacgggaaacacatagggaaaagacagcaggggaggcctgaagagagaaggaacaatggtgagacaggaggaggaagggagggagtaggggaaggagagagagagaaagagggaaacagagatagagtgcgcatgtgctagctgactgaccgtggagccatggatctaggtgttcctgaggccagttccatgtcccaagcatggtgatgtaaattaatgcattctgcctctcggcttatgctattygaaattaggctgtatcattcacagtccaaagagttactatttcagttgtatataaagaaccttaaaa

SEQ ID NO: 812796 - DNA, 596 bp, Homo sapiens
ttgaatgattccatttgtatgaaatgcccggaacaggcaaagctatggagacaggaagtagattagtggttgccaggggctggcggatgaaaagatgggggtaaatgctaaagggtatagggcttctttctggggtgatgaaaatgttctggaattacacagtgtgatggttgcccaactcagtgaatacactaagaaccactgaattgtacactttaaaaggatgcatatggtctgtgaattatatctcaattttaaaaaagaataatctccctactactgcttaaggaaaaaaaaagggatgaaatctttgtcattctgttctatttggtgactatattgaagaggactgactttgaatgagaaaaaaattttttgagaaataaaactgtatccagttaacagtaaatatttaagcagcttactcctcctacaatgtgacaggtattattaccactggctaaaaaaaawggatcttataaatcaatttagaatagaatgaccacgggcagagtagtctgtcttctaaaatgatagtatctgggcaagctgggtgtgactgtcacaagttatcagaactcgccaattcccggtct

SEQ ID NO: 812797 - DNA, 645 bp, Homo sapiens
tggcttacttaggtagtcaatattccaagagggaagtgggacctaatagcctgcagtttccatgagacttgraaaagactcaggtgactggacctggcgggaaattttcagaactaactattcaagacactgagaaaaagtagagctctgatctctcaaaggttagaaaagacttaccatgttagcagtgataaagacttgcaatatgcagtaggtgggtagaaaagaatattctatgagggctttgtgtcaagttttggagttgggatagaaaggaaaaatgtcataactaaaaatatcagtctgattaaaattgtaacatgtgatatgttataaccatatttacaaatggtctagaccagtagtttggatgctaaaaaaattatctttccctgtgtcctttcatttttctttttctttttattttcctctcttttaatttttttctccctcattctcttcttcctttctcttcatcattggatgaaggaaagcccttcccctaactcatctgaacaatttttaaagcaaaagaagagttagaaccatactatctggggtgatgtgtcttgagacagctatagcaatagcatctacagcctttcaaatcaaagagttataattataagagggagattgtgctca

SEQ ID NO: 812798 - DNA, 649 bp, Homo sapiens
ttcacctggctgctacagttttattctgctacaactcactgtctgtaatttgatcctttatccttttctttaggtcttcctacaaattaaagttttgtctgtttgtttttagtaacaatgagcctcagaacttctaataagcagcataattgccatgtggagaaggctacattatacaacaccaatttctctctgaagatccaccacctccggatgaatgttactgattcctactgtctatttcatagatcttcaactcttgttcttttgtttaaagatatgagtctaagcttagacatatatgatgctttcaattcaaaaatgttgtttagaaaaggcgctcatttaaagaatttgctgaaagctaaaggataaccaaagcaaaaggcacacacagggtaacataaatctagaatatatgttttgccatatgtatttttctcatttccaatctattgttaaatacatggcatcctcctaccacacccttacttccactaggcagagcatccatttattctctaccatgcacaagtctttggcttcaaagtcataggtttccatggttacagttcttcattggtgttcttattttcctcaggtaactgatrttaaactggacttccctctcttgctcaaacctctgagg

SEQ ID NO: 812799 - DNA, 626 bp, Homo sapiens
tgtaaagcaaacaagagaaaaagaacatagcaggcaaaagccaactgaagggacagggatcagaaaaacatggaaggtaacagtaaaatcattacagaaatgaaccaaaacacatgagacatagcaagataggaaaaaggagaaagaataattatggtcagtacttccaaagagtttgatgtaaaatggaaccaaaagatggggttgtagctagaggtaaagaaaaaataaagaagcaaaaacccgatgatgtagaaataggggagaataacaaaacgatacgaataaccccaatgtcctttggtagactagataaataaattatggcacaccacaaaatgcaccttaggccgaaaacttttgaatctactactcagtgaaataaataatgaataaataatatatttcatacactcctacacatatagttttctatatgtataaactacagactgaattgtttttcctgagaggaagtgtgtgattaaggacagagtaaggagaggggcttacttttcattctgygtacctttttacttaaacaaaaacatttgttttaccatatacgtgtcttatttaagaatatatttaaaaataaatgtgtcaaaacaactttccaacaatac

SEQ ID NO: 812800 - DNA, 562 bp, Homo sapiens
tgtcggatgagcacaaggaggccgttttcttytggtaggttggtttcttcagtaagtacacgtggagctcaaacatagaaaggcaacacaggggctaccgacactatgtgcaggacttgtaatctcgaattatctcatgactgagcgcactggaaccatgacaccaaccctttacaatgctgtcagagaattttattattatgattcctcatgaaaatttattatttattggaaaatataaagatgatttggaaccttaactatgccgttttcagtacagtaaaaatcaaaattttatattatttttctagacgaaagaaatacaaatacatattcatactactcaaatgatacccatttatttaaattttatgactaaaagctgtcataaatttagctataataaaaattgccagcacagccttaaaatccatgcgctgtgtcaacatcgttacttgtatgtattgatagtcaggatgttaaattatcttgtattcactagttaggtatgataataataacaaaaatatatattgagaagtctggtgtcttgccaggtatt

SEQ ID NO: 812801 - DNA, 562 bp, Homo sapiens
tgtcggatgagcacaaggaggccgttttcttttggtaggttggtttcttcagtaagtacacgtggagctcaaacatagaaaggcaacacaggggctaccgacactatgtgcaggacttgtaatctcgaattatctcatgactgagcgcactggaaccatgacaccaaccctttacaatgctgtcagagaattttattattatgattcctcatgaaaatttattatttattggaaaatataaagatgatttggaaccttaactatgccgttttcagtacagtaaaaatcaaaattttatattatttttctagacgaaagaaatacaaatacatattcatactactcaaatgatacccatttatttaaattttatgactaaaagctgtcataaatttagctataataaaaattgccagcacagccttaaaatccatgcgctgtgtcaacatcrttacttgtatgtattgatagtcaggatgttaaattatcttgtattcactagttaggtatgataataataacaaaaatatatattgagaagtctggtgtcttgccaggtatt

SEQ ID NO: 812802 - DNA, 479 bp, Homo sapiens
ctaaactgtgtttttgtcatttgtgtagtatatatttttccatttcttcactttcagcttatatgtgtccttgaatccacggtgaatttcttatagatagtatgcagttggatcttgatttttttgtttatttgttttttttccagtctctctgtatattgtttttattggagagttcagttcatttaaagtaattatttgtaggaaaaaatttgctattgtcattttgttaacagttttctgtttgtcttgttctttagtctttttttttctctcttgccttctcataatgtattttgatggttttatgtattgataaattttgattcctttctcttattttttgtgtaacttctatacctattttcattctgactaccaagggacttacctaattttttttttcataattacaacrgtcaatcttaatataataacgacttaatttccctcgcatacaataactctctgcttttacc

SEQ ID NO: 812803 - DNA, 609 bp, Homo sapiens
tgtcagtcagttcaggctgctataacaaaatagttggctgggaggcttaaacaacatacatttaattytcacagttctggagaataggaagtccagaatcaaggtgccagtagatttggagtctggtgaccgtcctcttctttttttgctgatggccttcttttcattatgtcctcacgtggcctctctttggtgtaaaagaaagagctcttgtttctccctgttttaatgagggcattaataccatcatgaaaacctcaccatcattacctaattacctcccaaaagctttaacatataagtttggtgatgggggacacaaacattcaatccatagcagcatacatatggaaacatagtattcaacaataaaaataaatgtactattgattatgctgaataaaaaaaagcattacctgcctctgaaaaattaaaagaatatattctctataatcccaattatataaaattatttcaaaagcagggaaaactgtagctgaagaaagcgtatctgtgattgcctgaggatggctaggtgggggagaggcaagagggaaaaattataaaggaacataggagaattttggaatttctagatatgtttattat

SEQ ID NO: 812804 - DNA, 550 bp, Homo sapiens
tccactaataacctcccagtttctaggttttctttgcattcattagtctaatgtatttgtcagttatagttttagtcttctctctcctcctatctgctgttgtttggcattctacagcttattcttatattaaaaacatcgataatccttgaatcttagttctaaagcaaacccttgaggaagggagtgtgagtgatgacaattcctagcacctggaaacctgctgttgacaaaggaggaaacaggcagggcccagaaatgtgaaatttcaccatagctactacagctgtcctactggctaggacccagatttcccagaatgtgctttgcatagtgctaataggcggtgggccacagagggagggtgtgaggaagaggggaagagagagaggagggggagggggaggggaggtaaaaaagtggagagggagagggagggagraagagtgggggaagaaagagaaaggaaaagggaaagagggacagagagggagagggagggatatggacggagtgaaggagggggagagagagagaaaggaaagacaca

SEQ ID NO: 812805 - DNA, 601 bp, Homo sapiens
ttgatccaaatcaatattataaattgtcaatatattccttctacaagacttctatgaagggattcatgggcaagatggctcttggaatgattgctgagtgtgtgtaagacattcatatgccaacaaatawgtgaaatccagctggaatccatcaaaatagaaacaactggaaccagctagtattttcatattaaagagtggtttactttggcttgactttgtagtgtataggagtagtgacgcagacagtaatcagggcttatctacaggttattgattatattctatagaaaaaaagaatctttgaaacttttgaacaaaggagtggcatgattcctgctattacttagagaaattcaacactaagagaaagacaatcgtatttttgataaaatgccacagcagtgacataattactttctgttcattgagcatgaagagagttaatgaatatcagaaaaagtctagtaaataatgttcttttcaaatcagttatattatgtgtggtttatttctgtcattcatcagtgttccattatgaaagttatagacatataacatttgttcatatggtcttattttaaaatgcctgctttgagct

SEQ ID NO: 812806 - DNA, 603 bp, Homo sapiens
tatgacaaactcactgccaatatcatactgaatgggcaaaagctagacacattccctttgaaaactgacacaagacaaggatgccctctctcaccactcctattcaacatagtattggaagttcwggcaagggcaatcaggtaagagaaagaaataaagggtattcaaataggaaaagaggaagtcaaattttctctgtttgcagatgacatgattgtatatttagaaaacaccatcatctcagtccaaaatctccttaagctgaaaagcaacttcagcaaagtctcaggatacaaaatcaatgtgaaaaaaccacaagcattcttgtacaccaataacagacaaacagacagccaaatcatgagtgaactcccattcacagttgctacaaagagaataaaagacctaggaatacaactcacaagagatgtgaaggacctcttcaaggagatctacaaaccactgctcaaggaaataagagaggacacaaacaaatggaaaaacagttcatgctcatggataagaaaaatcaatatcatgaaaatagccatactgtcctaagtaatttatagattcaatgctatccccatcaagctaccattt

SEQ ID NO: 812807 - DNA, 639 bp, Homo sapiens
tatttaaataggccatgggagtcagggaagacaaaaggtctaaatacttttctcttcaatattttgttttatggaaatatttttatattgaaataattgtatttaaatttagattttgtgataaaagttaatttaaaggtatgaactataaaaccaccacaggaaagaggataatgtttcaacagttacttgttaatgtaacagtttatacaataaaaagtaacccacagtataggatttttcacatttacaaagtgtcaagtgtttacttcttcatcaatatcgcctacattttcattatttaacatctttgcccaattcccactgtaaccaagtgtatttccatgcagtcaagttactacccagcttagtttgaggttaaatgtaaaaagctttgacgttttctgttctcagagtcctcctgcagaagcctttgttctgacctttcacccacacccccaggacttctattcactaaaaatgtggaattatccatgctaatcctggaattctggtcattaaaagaaaaaaaattgtgtatatcattctctgcatcaatttcaaaagttattcttcacacctatatttagagatgcagctgaagcttaaaaatawtcaattgggcatataattttataa

SEQ ID NO: 812808 - DNA, 562 bp, Homo sapiens
taaaaccataaaaaccctagaagaaaagcgaggcaatatcattcaggacataggcatgggcaaagacttcatgactaaaacactaaragcaatggcaacaaaagccaaaattgacaaacgggatctaattaaactaaagagcttctgcacagcaaaacaatcaccagagtgaacaggctacctacagaatgggagaaattttttgcaatctacccatgtgacaaagggctaatatccagaatctacaaagaacttaaacaaatttacaagaaataaacaatcaacgccatcaaaaagtgggcaaatgatatgaacaggcacttctcaaaagaagacatttatgcagccaacaaacatatgaaaaaaagctaatcatgactggtcattagagaaatgcaaatcaaaaccacaatgagataccatctcacaccagttagaatggtgatcattaaaatgtcaggaaacaacagatgctggagaggatgtggagaaataagaacacttttacaatgttggtgggagtgtaaattagttcaaccattgtggaagacagtatggtgac

SEQ ID NO: 812809 - DNA, 667 bp, Homo sapiens
gaattgggggataaaaaacatgggcaaataatttttctaagaaaaaaggaacagaatgagygaagggataaaggaatgaactgttcccaatgagaaagaactcgatttggtcaggacattgttgaagggcaataagaaatgattgtgaactgagattgtagccagctaatgaaaggttctcaacaccagagtaagaacttgggctttttcagtaaaaaagaaggaagtgcagatatacttccttttattgtgcatcaccttattgcgttttgcagatattgtggttttgatgaattggtttctttcaatcctgtgtccaacaagtctatgagtgccatttttttcaacagcatgttctcatttcatgtctctgtcgcattttggtaatttttgcaatatttcaaatgtttccattattattaaacctattttaatgatctgtaatcagtgatctttgatgtttttgtaagtatttggaggcagcatgaaccatacccatgtaaggcagtgaaagtaataaaaaaaagtgtgtgttcggactgctctcctaaccagctgttcccacatccctctctccttgagacaaaataacattgaaattaggccaattaataatcctacaatagcctctaactgttcaagtaaaaggaagagtcacatatctctc

SEQ ID NO: 812810 - DNA, 538 bp, Homo sapiens
gtttagttctaaagaaaaatataagatgaaacacataaggcatggcttgttaataatttatgcctaaaaccattatataataaaaatctgcatattttgcaacttggcatttgtttcatctgacacaataataaaaaagatgaatagtactatcagcacttggaattacccaactacagctgatatagtacctcccagacttctagtttctaaaattctgggtgaagtgggacaatttgaactataacagtctacatggtagtaatattaccttttggccactggctcaatactaatccttttttgttttttaatatataaaatatgctgaaattgtatctcttaaaacacatttcaattaatgtaattaaaaacagaagggtaacagcttccttttagaagacttaagacttagttatgaaaaatctgccatatttgttaaattaatccaacatttttwgggtcaaatatagatcatactacatttttcaatttagagtctgtgataaatacttgtacaaataactataaacacaac

SEQ ID NO: 812811 - DNA, 538 bp, Homo sapiens
gtttagttctaaagaaaaatataagatgaaacacataaggcatggcttgttaataatttatgcctaaaaccattatataataaaaatctgcatattttgcaacttggcatttgtttcatctgacacaataataaaaaagatgaatagtactatcagcacttggaattacccaactacagctgatatagtacctcccagacttctagtttctaaaattctgggtgaagtgggacaatttgaactataacagtctacatggtagtaatattaccttttggccactggctcaatactaatccttttttgttttttaatatataaaatatgctgaaattgtatctcttaaaacacatttcaattaatgtaattaaaaacagaagggtaacagcttccttttagaagacttaagacttagttatgaaaaatctgccatatttgttaaattaatccaacatttttagggtcaaawatagatcatactacatttttcaatttagagtctgtgataaatacttgtacaaataactataaacacaac

SEQ ID NO: 812812 - DNA, 618 bp, Homo sapiens
agattatgttagaaacctggataggttacattggaaaccagggattgaaaagattgaagtttgtctggctgattttcagagatagtgccccagatacatagcaaaactaccattagcaaaactaccatttcccgctgtgccacctgacttacattcacaggcagtaaactcctgactctattgacacatctttgtcattccaattattttaaaagcagaggtctttattaatttctgcaaataacttacctatctgaaactcttggttatgtctctgtactccttcttaggcaggatcttctatatttcctctgtctcattcatcttgcttcacacctgcatggagctaatctttcccatgtgttaaaactttctttcccaaatattcaagtcatcttttgtagggtttttgtcataatcataatttctagtaagaataattttaggagttcaataacacttggccaatgaatgaatttgttgtgccaggcattgtgtaaagtagtttatatcatctaatttttatagaaatgctatggattaggttctgttattatcccatatcttatttcaaacartggaaatagaggatcctaggtattatgacttgcacatgac

SEQ ID NO: 812813 - DNA, 591 bp, Homo sapiens
gagggttgggagctacaggttaggaaagccaccgctgatcagagtaggtaataatgaagacgttagcccaaagctccaagcaggttcttttcagaggctttcccggagctgctataatacttgagaatctttaaaaactaccaccaactgtctcaggcaaagtggattattctcaaaattttgctagaaagccactgtgaatttcatctttccaagcatcaagctgcaaacacctctgaaaagactgatggcttcctcttcatttccttcttctgactctccagcaaatttttctcattggcaaactctgacccagaaccacacaggtaagtggattctgaaaaatgtaattcccagccttacaaaaagtggcagtggtgtcctgggcccaaaagtgagaaaacaaacaccagacatgctaaaaggtctgcatctgattgctcttccatctttccattttttctgtaccatgatccattttggtatatgaatcragagagatgatcacaaaaccaaatccttctacagatatcacaagaaaagtgtatctggatgcttaataaaaacaaagttaaattacaatacatgaat

SEQ ID NO: 812814 - DNA, 397 bp, Homo sapiens
gtgggcctggaagaagcagcattcaattggctaaagggcatcaaggaagtcctcactctggttgtgaactctacctggaacaggaagctcagttttcaggctttagactgtccttggctctaaggtcaggtttcactggggacacgaccctttctggctaggaatttgactgtttactgtcactatcaatcccccctctgaagaggtacgtctaactgacattattacagggatggtgacaggtctaactgcttcatgctgacaggggcattgttttgggaaaacagcagttagatgtctctcagaggtctacctatgggtycccggtaaaaagagccatcatctgaggctctatttccatgaccatttggagtttgatggtctctaggtaagaaga

SEQ ID NO: 812815 - DNA, 610 bp, Homo sapiens
agttaatatgctggaagaagaggatagcttttagtctatttccagcacacggcctacactcactggtaccccatacaacaggaatgaatgccgacttagcatttttgccttcacagcgctggcaactaaaaggctcacagatactctgatctttaagcagataatcatggaattctcaacatcatatccactaggttaggctgagggttcatctataaaagtatttttccaaaaataatgcttaaaagagacttctagaaacagtgggactgtatcaggatcaacagaagacttcttgacccaaagattcaaatatagaactaggaattgattttcacatgtagtttttaggtaaaggacatctctttcagttgattcctacagccaagactagctttgatcctgggagattcagaaacctcaagatgggtagctggcttgagtaacatcctagataatagtcccagtcaaaaaccccattgaggttgaaggactggaaactgacctgtgtgaaaaagagctatcagtgcaggaaaagactcatgctgattttgaccttcctctgrcccttttccctcaactgcttggtggggagtagcgaggagaagga

SEQ ID NO: 812816 - DNA, 433 bp, Homo sapiens
tgatcactacacattctatgcatgtawtgaaatgtcacatctacttcaataatatgtacaaatattatttatcaaaaagcaggcatgtaggtgagttgattttcttccatgtcttcaaactcctggtaatacttgtccacaaaatttctctataataaccggaacatgtcatccatgataatgtgtactatatatccaaccacaacatcaaattctgtatcagaggcagaagagaaggacagcatgaagctcgattcctccaactgtcctttggctggtggccctccaccctgcccacagcccggccagctcagccccgtctctgtcccatacagagccacagccacagtgagagcctggcagcctgcccggaggaggcttcttggcccagcccggtcaacacccacatgcaccaccaccaactttttgctat

SEQ ID NO: 812817 - DNA, 552 bp, Homo sapiens
gcccaggcccccgagggttctagggggtcccatccctgggaaggtggaatctgggaggtgagggggacctaggaccccattgtgtgcacagcttgggctaaggcatgagataagaccagggtgacaktacaggagtatccaagaactgacttcacctaacttctgcatttgacttcccatccccaatgtgggtagggccctgccctctggcgattggaaagaggcgcagggtgcaaagaagtcccctcctctgacctcctgcagggctccatcttggcctggatcagcaggggggcctgggcaggagggaggctgtggtcttgggatggggtggcagttccaggcccacagcggggcaagagacatcctacaccttcctcccatccttgccccgaaagtcatgggcgctggggttcaaggtgccctcactatttgacctttcttgctggtggctttggtgtgtcattctggtccccagcctctgtttcctggactgtaagtggggataataataggtcacccctcccctgcaggattaacctcagcgattgt

SEQ ID NO: 812818 - DNA, 636 bp, Homo sapiens
cactgagtcattcattcaacaaatgcccattgcgtacctactgtgtgccatagtgtgacgggctcagtatattgcctcattcattacctcacaaggttatctgttaacagccacaagtcagaggcttttgacstacagggtcccgggagagccaaaatagtatttgtttgtttggaataataaaagctgtcttcccaggccacaggaattaaaactaggagtgctaaatcagcaattgtctagccttgcctgagcttctcaaactgtactttagaattgcttgggggaacttgttagaagtacaaaccttggccagaacctcaaagaaccagactcaggcaatccaggatggggtccaccaatccaaggttttaaaaacaagaaccagatggggataggtgatgagttagccactggggattcagaaacccgagagggtggggtggcagtagttgggctttgcaggccagactggtctgggacactttgtgatgaacacaaaccttccctcttccattttgacctttctgccctggtgggctgcttttacgtaagagtattatttcttccttttgtaggcaaagcaaaaagtgtgagaaccagctgctctaaataaaacaattgaaggtggagttc

SEQ ID NO: 812819 - DNA, 557 bp, Homo sapiens
tgataataaccaggagttgaaaatgtattattacataattttcctataaatgcagatttttaaatycctagtatacctaacatgcttacaaacacatgtgatttatacttaatatgattatgtttataatgtaggctcttaaatcataaatgtatactggattaaaagtggccattttttgacagtaagcccctactctctttttagctactacttaaagaggtacatgtaaatcttctgtctctgggttttatgtttgggggtgtaaatggctcctgcagctgacagtgagtcagcacacattcagagaaggctggagataaagctgaatttgaatgcatctagttcagggttctcccttccagtccacgtggaaataataagaataataccaccttccttttttgatcgcactttacatgtatgtaggtgtctgagcttcacaagccttttatagtccattcagcactgcattcattcaacaaatcattaatgaaaggtggctatgtaccaggcatattgtttcatgccaggtacacactggtgagaaaaactcc

SEQ ID NO: 812820 - DNA, 650 bp, Homo sapiens
cccacaggcgctgactaggagcccacggcattctccctgctctccctatcataggagaaccgcaggcagccaactgtcccttccacgccccaatggaacctctctcctctcctgcccattgtctaccacagatcagagatggctctttctatgcaggggtggggacccagccatctctatcagctctgccggcactgcaggggtgactgactagaggcgggaagccctcctgggcctcaaataactaggcccaagctttgactccctcatggctgctctagggactgcaagggaggacacgggcttggcctttcctaaagggctgctttctttcaaagtcaaggggatgctattttcttctttgtgtttctttggttctgacatcagaattctcctcagtgcagataacattgccctctggaatgggtgagaatcctaacacctgggttttcggttctgcccagcgtggcttaagtctccaccttaagtgaatctcacctgagacagctacagggtttgttttctggggagaggaattaatgacttgarcagcactcacgggtcttaaacttagcatacagtttcaaataacccatgcccccacttattgaccccttactgttctaagcacttcatactttaaactgact

SEQ ID NO: 812821 - DNA, 627 bp, Homo sapiens
ctgttgagtatgcccatatcatgacatctggcattccagagggcaattgatctaagaaagaggaaagcagccayaggtccttctaagacttgtatggtttggctgtgtccccacctaaatctcatcttgaattatagttcccataatccccaggtgtcatgggagggacctggtgggaggcaattgaatcatggaggcagttacttccatgcagttctcatgacagtgagtgagttctcacgagatctcatggttttataaggggctttttcttttctgccaggcacttctccttcctgccatcatgtgaataaggacatgtttgcttcctcttctgccatgattatgtttcctgaggcctccttagccatgcagaaatatgagttaattaaacctgtttcctttataaattacccagtctcaggaagttctttatagcagtgtgagaatggagtaatacaatgacctagtctgaaaagtcaaacattgttacttctcccatattgtattcgttaaaagtgagttactgagtcctactcatattgaaggggaaatctcaactatgcctcttgacgggaggaatatcaaagaattttgaaaccaccacaccacccaaacagggcacac

SEQ ID NO: 812822 - DNA, 607 bp, Homo sapiens
ttgtcagatgctggtgcacctgtytacttctatgagtttcggcaccggcctcagtgctttgaagacacgaagccagcttttgtcaaagccgaccacgctgatgaagtccgctttgtgttcggtggtgccttcctgaagggggacattgttatgttcggtaagggactggccacttcccacagttcacatgaagccccttgcttaccccaccacgatgcaagcgcctggaggacttcggggttggcatttaattacctctgtggtttataggcggacacaacctttctctggaaaatgccctcccttccatttttagaagccaggatgaaaaagtgccatgacagttgcttgatgagggcttctctttgtactgaaacctacaggtttggccacttcagggcactcaagcaatctaaatatttttttttttaatatactagaaccattttcttccttttctttgaccactggtcttaccctccctccccttcccagaaatcccatgaggccacaacctgaggctttaagaggcaaggaccatgtttttcataattccagctcaaagtggtctgcacccagaagagctttgtaaatgcttgtgaaatgt

SEQ ID NO: 812823 - DNA, 595 bp, Homo sapiens
ttgtcagatgctggtgcacctgtctacttctatgagtttcggcaccggcctcagtgctttgaagacacgaagccrgcttttgtcaaagccgaccacgctgatgaagtccgctttgtgttcggtggtgccttcctgaagggggacattgttatgttcggtaagggactggccacttcccacagttcacatgaagccccttgcttaccccaccacgatgcaagcgcctggaggacttcggggttggcatttaattacctctgtggtttataggcggacacaacctttctctggaaaatgccctcccttccatttttagaagccaggatgaaaaagtgccatgacagttgcttgatgagggcttctctttgtactgaaacctacaggtttggccacttcagggcactcaagcaatctaaatatttttttttttaatatactagaaccattttcttccttttctttgaccactggtcttaccctccctccccttcccagaaatcccatgaggccacaacctgaggctttaagaggcaaggaccatgtttttcataattccagctcaaagtggtctgcacccagaagagctttgtaaatg

SEQ ID NO: 812824 - DNA, 358 bp, Homo sapiens
tggtttaaaaagtagtaaatactttttcatttgctgtcgtttggaaccagttaaagcctagtgaaatatgattactttttttttwaaaaaaaatgaattttagtttgcttcttaatacttttagagctctgggaataccagtaacagatcatacctatgaagactgcagattgatgatttcagcaggacagctaacattgcctatggaagctgggctggtggaatttactaaaattagccgaaaattgaagtaagtgtattttaaaatgactacactttcataaagttgtccaaaagggatctgaaatcctgtttattttctcctgctttattaatgctcagctctagttcccatttg

SEQ ID NO: 812825 - DNA, 578 bp, Homo sapiens
taaattatagatttttaaacaaagctaaatatagagcaattaagaaatggctccacattctacccctaagaaaaaaacagctgaactggagctaaacacagcacatgcatatgcatgtgaaataggcgaggaacagagggagctggttagagtaaaatccaaactccttccagcagttcttccagcatagcccccatactcctgcctcagggtcttggtacatgctgttcccactgcctgatgcacctcctctgttttattcttctcatagctggctctttctcttcctttagaatagaaacattcttagatttttcccattcgtccaattcctatctcagtctcgttttcttcttccttgtatcctatatgacaactggccattttctcattgatttacttttttttttaatctgattcccccactagagccaaaatctccatttgctcttctgcaccattaagacgatatttccattctgcctgttgctgtgaggacaaataagataatctgagycaacccaccctcaatgatcacctctcctttgaactcagtagcatttctagtctgtggcatg

SEQ ID NO: 812826 - DNA, 598 bp, Homo sapiens
acttcctagctctgtggcctgctacaggctcttttctcatcttcgcatgactttcctgccatttttagccatagaaccacagccatgccaagtattcccttctctggaaaccttccctttctgttgtcccctgctgtcccccgcctcccccatgctgacacacagcaggctagagataggagaggagaaggaaaatgaggcaggtaggtagggtcttgaaagtcagagagggaaaagccttttgaaaaaatcacttttgcaaaagcctccaccccaactcagcagaaccctttcaccaaacatggagatccacccgcagaaagaaagagaaagcaatttcacacattggtaaaaggcctgtggcagaagaaaaggaaaagccaccagttggcagtaggtggtacagagatccagcaggaaagcccaatcaaatgggagattgggacatttctgggaagcatatgggccccagccctcgctggctgacactcctgtctgagaaggagggcagccagttgtccaaaaagytcgggcagccacgtgtcaggccttgttcatggccaagaagagcaggaaggttgactgttctagggcagag

SEQ ID NO: 812827 - DNA, 629 bp, Homo sapiens
ttcacttccttcctctcctgtgcactcctcctttcctacctgaacattatcttcattcccaaatttggagttggtcctgtgttcccctgaacattatcttcattcccaaatttggagttggtcctgtgttcctgggggcacgttgccggtgcataggtgtggggctgcaagcctgcagtccgtctcaccatggggctccatgcagtggagtttattcctggatggacatctggacctgcaagatttatggggacccacaagatgctgccaaaggctctttttatgggtagttgcaacacagaacagaatatcactgtggtcaggcaccctggagacagagagagcaggggtgcctgactggctgtgcatccaacaaatggggcagtactaactagtcctagtgctagtacttacctcataggattattgcgaggatgagctaagataatggggtgtttccagaggtgcagagaccacgggtggtattgaaaatgatttgaaataatgcacagacaaggcattaaatagcactgactcaaacagyaagtgtattaggtcctttttagctctctttgaattcttctaattacgtcaagaaagtctccagttgatgctattgtgtctttaat

SEQ ID NO: 812828 - DNA, 563 bp, Homo sapiens
gtctgtatgtgttacagaagcattcatgtcagaggtggcatgatgttcagacaggggaaaggtagagttgtcagtcaaaatgtgtatgttgggacagaggaagtatgtaggtttttagacaaagcaacagccaggcacagaaacctaagtaatttttctttgctaaaattctgtatactagttctgtgtattactaagacactgctcattacctagttcccttatttcttctaaagagcaccatggcatttctccaggccctcagtgtgctctgtaacaatttatatcagacctctggccacttgaggtaggcacatgagtcggttatggccaatgagacataagccaagaagtctggagaaaacttcttatgtcctgataccagtatcatcctttcagtatcttcttccttcttgtttcttcctggaataagggtctgggatacagcagccatctcrtgaccatgaggtgaaatgcataagggcataggcctcctaagagggagtggaatgtctgaaagaaagatcctgtaccaccatccccagccaccatcccagccctgg

SEQ ID NO: 812829 - DNA, 569 bp, Homo sapiens
gccattatcaaacatcaaaatgtaagaagaaagggccttctcctgtggtagtgattccctccacaggtataacttatttctcaagtaagttacagttcccattatttcaaaagctattgtgacaacttcmaaatccccttccttaaattaatttaaattaatatataaacacaattgatgtcgagatctttaaaaactgttttattgactttactgaggcacactttccataccataaagttcacccattgtaaatatagaattcaataactttttgtaaattttcagagttgtgcaggcatcatcacaatcccattttagagcattgccctaactcccttatgttctgttctcctgcgtatcggaggctctaggtcctagacttcaaaatctctcaccaatatagccattctagcttgagttactgatctctccagtgtttatgctcacttgtagtgactccccatccccacccctagtcctagggaacaactgacctgctttctgtctctgtaaatttgcctgttctggactttttatatagttgcaatcatacaatgtatagtctt

SEQ ID NO: 812830 - DNA, 782 bp, Homo sapiens
catagctgcatagccttccatgggccgccgccttttcaccctgctgaagaacacggagcttgtttccagttttaaccgtttgctcttttattcaacaaacaaggtcacttcctcctgctatgtttttcaactcactacatgtgaagcatttgttgggaaagaagccatattgacccccatgctactaagccaccttgggcagcgcttggtgtctctgaaccttgcttcctgtctgtaaaatggaggaaaattcaattaatcctgtctctgcacctggccaaggtttcctggaggacaaattagaaagtggctgtaaaaatgctttgcaaaatctgaagcagtgtagacacatgagggaatgttatgtggacaggactatggccctgctagattctatcctcttgggagggcagacactggggactcggtaatacttgccgaataatgaatgaatcttctcatctgaaaaataaggaaatcaaaggcccggtgtctctggaacgtttaacaagggaagaggagaaggaggaaaggcagagcccaccctgactgtgttcctcttgtcttttctcctcccacccttcttccttccttcctttcttttattcaacacatattctctcccctggttttttgttttgttttgttttgttttgtttgagacagggtctcactctgttgcccaggctggagtgcagtggagccatctcggmttagtgcaacctctgccttctggatctgcgtcatgcgatcctccctcctcagcctcaagagtagttggg

SEQ ID NO: 812831 - DNA, 472 bp, Homo sapiens
taaatagagaaataaaatcattgctgtgagtgatcagcgcatccaaggaaataaaataattgacgtgacaggggctggaagacgccagctccagccagagtggtgagggagggagagcctcactgaggaagcagcgtgagccaagctgcagggaaccagacggtgatggtgacagtgatggggagcagcaagcacaaaggaacctgaggcatggagcatcgtgcactccaagaaccaagcggaggccagtgtgtctacagcacagagctgagagacagaggcccgacggcgacgaaaggcccgaggaaggcccaggacacgccatcaaatcctgaaatcagaaggtgctgggagagcccctcaagcggcccagagtccagtgcacacaactycattcaaggcacacatgggaactccagactgaagatagactgcaggtgctcatgtcacatacaagactgtttgacagcct

SEQ ID NO: 812832 - DNA, 545 bp, Homo sapiens
caaggttttacataaatgagcacacaaatcaaggtatgggacattccctgcaccccagtaggttcccacatgtccytccaaaggcagtcacttcttcgcctctatcacagacatccactttgcccactccccagcgtcacaggaacagacacgtgcaccccacttctccgctgcctctgcttcctttgctcaacatgatgtctacacgagtcacccacacttgggggtggcaactggttgttcatctttattgctgcgttcatgccttcctgttaatttttgttttccaaagggtcagtttccacccaatccttttgccccatccatgtcaccatgaacaaacagaagaccacagatcagatcagcccgttccttccttcccaccatttgctgggtagctcgtttaaggtttaaagcatttccatcaccatgtctggcaaccagacaccactcagcggagagctacctctcctctgacggacctttgtgcagaaagtctcacggctgaggcagcctgctggccccacgggcaggaggagacagga

SEQ ID NO: 812833 - DNA, 635 bp, Homo sapiens
tgccctgccttcaggtcctgctcagctctccacctcccgatgccaagtggtgcagaggtgaaaccacaggctctggcttctggaggacttgggttcgagtccctgatccacagcttgccgactggggaccgtggattcactactgtacagctccaagctctttccctcatctgtcaaatgaggatggggattctcagtagcagtgccaaggatggcctgggaggttttgctcccccataatcttctttggcatctgctgccattctctgatgtggccaagtgacattttctcagtttaatgaaaagtattagacaaaagcagctttcaccaggcctttggccctggtgtcaaccagatggctgtccctaaaccaagcccacagagaaattatggagctgctgctggaagtggcacccacctcacagagctgtcacgatggctcagcgagatgctgcaggtagagtcttcactcagtgcctggcatgcactaagtaagtgctcaataaatgtgacatcgcccacgtccagggctacctcccacactgacttccgcctgccacccaggcttggagccgtctcacacgcccmgtgctcagggaataaaagctgactttaatagcccaattccaataga

SEQ ID NO: 812834 - DNA, 471 bp, Homo sapiens
atgtaatagattttattgaccatatggaactgatataaaaatcgtgttgcatggggtagtctggattggaggcaggaatgtgacacraagaatatcatttccataaccagctgggtggctttctgagttcctgggccagcccccaggaccccctgcaactcttccaccagcccccgggcatttacctgctgctgtcacggaggaatcccaggccagcgagaagtctgaggcctccccctcttcaactgaaagagagaacagagatgggcctgtgagtttgaaggctgtacaaatagatcaggtaaggcacagggcgaggaagaaggaacatttgtgggggtccttattataatacccatcaccaggggagagggggcaaagcctacaaagaggcctttattggtttcacagagatgtaaaatgatcggaataaaacaggaatagcaagcaagttaagtgctggatcagtta

SEQ ID NO: 812835 - DNA, 471 bp, Homo sapiens
atgtaatagattttattgaccatatggaactgatataaaaatcgtgttgcatggggtagtctggattggaggcaggaatgtgacacgaaraatatcatttccataaccagctgggtggctttctgagttcctgggccagcccccaggaccccctgcaactcttccaccagcccccgggcatttacctgctgctgtcacggaggaatcccaggccagcgagaagtctgaggcctccccctcttcaactgaaagagagaacagagatgggcctgtgagtttgaaggctgtacaaatagatcaggtaaggcacagggcgaggaagaaggaacatttgtgggggtccttattataatacccatcaccaggggagagggggcaaagcctacaaagaggcctttattggtttcacagagatgtaaaatgatcggaataaaacaggaatagcaagcaagttaagtgctggatcagtta

SEQ ID NO: 812836 - DNA, 551 bp, Homo sapiens
atgttccctgttcattaaatcagttagcacagctagtaactatattaagtattttgctgtcgggtttcagcaatgtatsttcatggatttccaatgctatttctcacagagacagacgcagacttcctgacagtcccttcccattggtttaaagatgccaagtcttccatctctgcaaggccaggtgcattacacccgatggaggcatccacttaagaccctgcatatcacagtccaaatcattaattcagactaaagtgcagtgcttgatagccagaagcaagatatgggataaaggaagagggacatcttggcaaggaaggattcgagtagacatgcttggagcatacctgtcacaaccatgtctttggacagccctctgcacccactctgcagaaggagagggcctcagtcaccatggggggtaccagataaccctgatccctgacagcagctaattattccagggttggacatcagaggtcatcagttgtctaactgaagcatttgaaggatagaaaccaagttggagatgtaaaattcagagagaa

SEQ ID NO: 812837 - DNA, 660 bp, Homo sapiens
tgaacataacctccatcaaggtcaagacacttttgcaagcaatgatgcccaccatttagttcatccctaaagaatcgagggtcctggcaattgaattatgtcagtagtcttttttacgttattaactgatgaaaaaatgggtgctcttaaagaattttttaagatttggggggaaaacaaagtcagaagaagccaaattaagactgtgaggtggatgcttaatgattttctattgaaatcctcccaaaattgcccttgtttcatgaaaagaatgagcagcattgtcacggtggagaaggattctctggtgaagctctcccagtcatttttctgctaaaactttggctaactttttcaaaacactgtcataataagcagatgtcatcgttatttagccctccagaaagtcaacaagcaaaatgccttgagcatcccaaaaagctgttgccatgacccttgcttttgactagtccacttttgcttcaactagaacacttccacctcttggtagccattgctttcattgtgtttcgtcttcaggattgtactggtaaagtcatgctttctttcctgctacaattcttcaraaaaatgtttcaggatcttgatcctatttttttaaaatttccactgaaagccctgcttttatatgcagctgat

SEQ ID NO: 812838 - DNA, 600 bp, Homo sapiens
ctgtaaacctgcactctcctgtgcactgttcatcctcaaggggtgaaagtagcatagcaattgggccaattacctcacagctgctgaatttatgaacttatttcagcctccccagtagctgggattacaggtgtgcaccaccatgcccggctaatttttgtatttttagtagagatggggtttcatcatgttggccaggctggtctcgaactcccgacctcaggtgaaccacccgcttcaacctcccaaagagttgggattacaggtgtgagccactgcacccagccttaaatgcattttcagcttctattttcaactgatgatgggcattgtacattgtaaagacaataaatctttccaataaattagtgggaaaggagctcaaaacccagccgggtgattcattattttaatgacttcctgctttactgcaaaacctctctcttcattcggtgttggcagtttgagcccctgtttaggatttagcctcactatgaagcttctataaatttctgggtatctgtcatgtaggtcactctccttcaggaatgatgaggagkctggaaaacggttgctccaagggaagggggaatttttcaa

SEQ ID NO: 812839 - DNA, 296 bp, Homo sapiens
ggggttacatcccagcccatgggctgacagttaagcagaaaagccacctctaggggtcagtcatgatctagtgattctgatgaggagggggccccaccagcctctgtccagrgtcttgtctggaaaaactgctccctggcagaaacgggctaataatttgagaggaagccatagctgaaattctcaactgtgtgagtgtgtgtccagtttgaaaaagcatatccaacttaaacatttatattgaaaaaatggaaagctattccccttgttttggaatacaaactacagaaagtaac

SEQ ID NO: 812840 - DNA, 296 bp, Homo sapiens
ggggttacatcccagcccatgggctgacagttaagcagaaaagccacctctaggggtcagtcatgatctagtgattctgatgaggagggggccccaccagcctctgtccagagtcttgtctggaaaaactgctccctggcagaaacgggctaataatttgagaggaagccatagctgaaattctcaactgtgtgagtgtgtgtccagtttgaaaaagcatatccaacttaaacatttatattgaaaaaatggaaagmtattccccttgttttggaatacaaactacagaaagtaac

SEQ ID NO: 812841 - DNA, 619 bp, Homo sapiens
tcaaaaaaggcaaaaaacaaaacaaaccctgggttttgcttcatgaggactgactgatcactgctccctggcagctctcatcactctaatgagtgcctaagcttagcacaaaccctgtttctagcatctgaagcattttgaggttagtaaaggccaagattgatgttaggctcacctttgaaggactgttgctgaagtaatagaaaatcttttctcgaggagaaagcattgtttcatttttatgtggggaaatgtagacaggatgattttgagacaactgtattcggcgaggggagcctgttcttacaaatggatagggagagagtggaggagcatccatctgtttaaaaaaaaaaaatcagtaattctaagaaaaaaatttataattatttttactgaaaatgattattgagtgaagaggtgtgctaaaccagtagttttatgaatgacagagtgatgtattagcaataacttaacctaaagaaaaatattctaayagcaaaccttaagtgcttagtttgtgccagttattattttaagcaatttttatacattatgtcatttcatccttacaacaaccccatatgctaggaactagttatattcccattttatatat

SEQ ID NO: 812842 - DNA, 516 bp, Homo sapiens
ttgaatactacatgtaaggaactatgccaagtactagaaataattttctctagagccagaattatctacagtctcacacccaaggccaaaaatgaccagggaaagtattcaaaatgcagattccaggsctccatccaggtaattctgatccagtgagctgagactggggactggttatttgcacttggacaaatgcaaagtttgcctgctgaggccaatgagccatgcatgacatgtatgtttgtccctctatctggctatcatttactgagcacttgctatgtatcaaaccctgagtaggcactggggattggaataacccttgcactcaagtcactcatggttattgaaaaagattgggttcggcagctgtaatggttcctgctatttcagatactacaatctttaaaaggtgcttttgcaaaaaatcttaagcaagaggcagaaacgtattcactaacttattggtccagttgttgtaaagtttatggtgaacaaaatgtacaaggcatttat

SEQ ID NO: 812843 - DNA, 643 bp, Homo sapiens
gtgccaggctcctagttctgagccactgccttttcatccaatgcgtggttggaaaagaggttcaaagagttggaagcatagaaactracccctgttgagcatttgctgtgtgtcaagcacttgtttcatggtaatgagacaggagttattttattttgataatttttttattcttatttttctttttttgaatgccattagagttcattttcatcttccatcatttttcattgcattgtgtttggagagtgcgacacgggacaggcggtggagcccaccaggtcagagcccgagctcaagtcccagcttttccaccttctacctgtgtgactgtgagtctccctgagtctcagcttctccacctgcaaaatggggatacaaagaatagcggcttcagagagcttcctggagtgcaggagccattgttggggtgctgactataacccctggcccactggagaggtcccctgttgtcagtttccttacttgccaatggctttgcatctcaggctctgcctgagaatgttcttgagaactgcaagaggaacagtttggaaagttaaagtttcaggaaagaccctcacccagagagggctgggagatggtgggtaaatgccccagcttctttgcccctggtgggacc

SEQ ID NO: 812844 - DNA, 516 bp, Homo sapiens
attccaatacaacacacacacagaatcagacscacttggttttctaaatggaaattagatttgcattaaaagactaagtgtgttgttctctctacagagcctctggaggagacattccaggggggattctactcctttctttaaaaggacatttgaaatcccatgcaaacatgagccccatagactttttctccacatgactaatccagtctcctgcgacctctctttagtgtgacggggacacagaaacgaagcctgcagcttccgccgaccccaaacatttggttacattaatcacagagcgtttttggactttgagcatccagaatgaaagactttctggggagacattgatcaaacagtctacaggtatctgtacatcgagggacattaatcatttctgcattatctcactcaccagtagaatatgtaaatgtgattcctgtcaatgataaggggaagtgaaattattcttagagattggtccatctggagctgttgatacaatcttaccta

SEQ ID NO: 812845 - DNA, 451 bp, Homo sapiens
tgccagctggagctctcctgtgtgaggtgtctgtcagcccctgctgggaggtgtctcccagtcaggaggcatggaggtcagggacccacttgaggaggcagtctgtcccttagcagagctcaggcactgtgctaggagatccactgctctcttcagagctggctggcaggaacgtttaagtctgctgaagctgcacccacaagccgccccttctcccaggtgttctgtcccagggagacaggagttttatctataagcccccgactggggctactgcctttttttcagagatgccctgcccagagaggaggaatctagagaggcagtctggctacagcagctttgccaagctgtggtggactcyatccagtccaaacttcccagaggcttcgtttacactgtgaggggaaacctgcctactcaagcctcagtaatggcagatgcccttccc

SEQ ID NO: 812846 - DNA, 451 bp, Homo sapiens
tgccagctggagctctcctgtgtgaggtgtctgtcagcccctgctgggaggtgtctcccagtcaggaggcatggaggtcagggacccacttgaggaggcagtctgtcccttagcagagctcaggcactgtgctaggagatccactgctctcttcagagctggctggcaggaacgtttaagtctgctgaagctgcacccacaagccgccccttctcccaggtgttctgtcccagggagacaggagttttatctataagcccccgactggggctactgcctttttttcagagatgccctgcccagagaggaggaatctagagaggcagtctggctacagcagctttgccaagctgtggtggactccrtccagtccaaacttcccagaggcttcgtttacactgtgaggggaaacctgcctactcaagcctcagtaatggcagatgcccttccc

SEQ ID NO: 812847 - DNA, 557 bp, Homo sapiens
tttagggtctttgacatatttctgagaagctagaagtctacatatatgaccagagctgtgcacagctgtgcacatgcttatgaaagaccagagtaggtcytaatctctcagagacttgactgacctcaagtctctgcccaagcaggaagtgaaggctaaggcagagttgtaatcacctggctgagtgttaaaggcattccccaccatatacacagagtcactcaaaaaagactgggagacatattagctctaggcctttaaggaaatttttgtccaatcattagctgaccatgaagctaattgaatagagatttcaatggccacatactacaaagatacagactttacagaattagttcagaaaaataaaaacaaaaaaacagtaacaactacaacaggaagtaacaacagatcttggggaatacagatggtctgatttgcagagtcacatattatataattggaaatgtgttcttttcaacaaaaaattatagaacctgtaagtaaacaagaacttatgatccttacctagaaaaagaaatatgcaatctatagaa

SEQ ID NO: 812848 - DNA, 532 bp, Homo sapiens
gaagtgtgagatcttagagaaaaagaatcttctttcctcctcctttatcttcttttctcctcctctgcttccttcccctkctcctccttcttcttctctgtttttcttacaagggttaaacaagggtctattttgagcttagcacaaagtctgttcccactttctccaagtgtcccacctaagtgctgaagctcagtaaataagcccaattggaagtggatacatgattagttaattgttcagtggcaaagttcttacagttgattttctctgcaatcactctagaaaaagataagtaaaagccttggttggtgggaaagatggtctttttgaagataaaaaacatattcagaggaatgtttttgggttagttctttttttttttttttttttttgcacttagcatctgacaaagagagagtcattaatgccatagcgtgcatatgagactgtaatgagatgattctcacctgagtgatttctgaggcattcatctcattgaatctaaataccagggatccagactccacca

SEQ ID NO: 812849 - DNA, 556 bp, Homo sapiens
ccctaccacgggctttctggatgttgtccaatgagagattggcttggaactgtaaaattagccatctgcctattaaaaatgtaaccagctgcatccgatgaaacacagtgactattgaaatgaactcatccgggagagaactcgagtcccctgcttggacatttttccaatctactgctagactgagacactccacaagcaaagagcctttcgtccttgtttggaggaaaacggcatgactctcaagaacgaagaagacttgcgggtttgttttgttgctaaaattctggcatttctcaggatgagttggacttgaagtgcagatttctcagtttgtctgccatttgtttaaaacacctccctgttgcaagaaaaataaaatataaaataaataagcacacccctagtgtctccctcccttcaagattttatggtaaatcctgggcatttctaacaaaccttaatccaagcctaaaatactctaagcagcacataataacttaaaactgagagctggtgccatarttattcctgcaagtgctaccatttcgccaga

SEQ ID NO: 812850 - DNA, 661 bp, Homo sapiens
ccagcgggtccgacagggcatggacggaagtaaatggaagccggtaggtaagtgttattttaccgcgcacccataaagaggctggggagaaaccagaaargagagcaagtcttgtttaaaaaaaaaaaaatcagctgaactgcaagcatgaccagcatcctgttgggaacactcaaaggtcaatgttgtaaggaatacagaaggagttacttttccacgtgccttaataagtttatcatcgcgtgcataaatggaaagataaagcatgtggatttagaaacttccttgatttctctcttccttcatttttttaattgtctagataaaatcagttatgacagaaactcgcgttttctgagtctcactttctttttatctttttttttctctttctccttttatgagaggcaagtgtttcccttaatctgagattaagtgccaagtggtaaagccccagagttactccgggacattcgtgataaatccttctagcaccagagcccacattcttaaccatgagacatactcacttcttaggtgatacaccaaatcggaaggtgaaaatataaattaaaaaatgaatattcaggaaaaagtatttttatatctgtgtttttagaactgcaccctttaatgattgacggtttgggaagagtatgac

SEQ ID NO: 812851 - DNA, 661 bp, Homo sapiens
ccagcgggtccgacagggcatggacggaagtaaatggaagccggtaggtaagtgttattttaccgcgcacccataaagaggctggggagaaaccagaaaggrgagcaagtcttgtttaaaaaaaaaaaaatcagctgaactgcaagcatgaccagcatcctgttgggaacactcaaaggtcaatgttgtaaggaatacagaaggagttacttttccacgtgccttaataagtttatcatcgcgtgcataaatggaaagataaagcatgtggatttagaaacttccttgatttctctcttccttcatttttttaattgtctagataaaatcagttatgacagaaactcgcgttttctgagtctcactttctttttatctttttttttctctttctccttttatgagaggcaagtgtttcccttaatctgagattaagtgccaagtggtaaagccccagagttactccgggacattcgtgataaatccttctagcaccagagcccacattcttaaccatgagacatactcacttcttaggtgatacaccaaatcggaaggtgaaaatataaattaaaaaatgaatattcaggaaaaagtatttttatatctgtgtttttagaactgcaccctttaatgattgacggtttgggaagagtatgac

SEQ ID NO: 812852 - DNA, 602 bp, Homo sapiens
ggtttgaaaaattcccccttcccttggagcaaccgttttccagmctcctcatcattcctgaaggagagtgacctacatgacagatacccagaaatttatagaagcttcatagtgaggctaaatcctaaacaggggctcaaactgccaacaccgaatgaagagagaggttttgcagtaaagcaggaagtcattaaaataatgaatcacccggctgggttttgagctcctttcccactaatttattggaaagatttattgtctttacaatgtacaatgcccatcatcagttgaaaatagaagctgaaaatgcatttaaggctgggtgcagtggctcacacctgtaatcccaactctttgggaggttgaagcgggtggttcacctgaggtcgggagttcgagaccagcctggccaacatgatgaaaccccatctctactaaaaatacaaaaattagccgggcatggtggtgcacacctgtaatcccagctactggggaggctgaaataagttcataaattcagcagctgtgaggtaattggcccaattgctatgctactttcaccccttgaggatgaacagtgcacaggagagtgcaggtttaca

SEQ ID NO: 812853 - DNA, 539 bp, Homo sapiens
ctaagaaccttgaataaaggttagatgaattgctaactagaataactagtttagagaagaacataaatgacctgatggagctgaaaaacacagcaaaagaacttcgtgaagcacacacaagtatcaagagccgaatcaatcaagcagaagaaaggatatcagagattgaagatcaacttaatgaaataaagtgtgaagacaagactagagaaaaaagaatgaaaagaaatgaacaaagccttaaaaaatatgggtctgtgtgaagagaccaaatctatgtctgattggtgtacctgaaaacgacggggagaaaggaaacaagttgggaaacacacttcaggatgttatcaagagaactttcccaacctagcaagacaagccaacattcaaattcaggaaatacagagaacaccacaaagagagcaaccccaagacacataatcrtccgattcaccaaggttgaaatgaaggaaaaaatattaagggcagccagagagaaaggtcaggttacccgcaaagggaagcccatcagactaaca

SEQ ID NO: 812854 - DNA, 640 bp, Homo sapiens
ggagttgggccagggcctaagcaggatccccttcccgaagaggggctcttttgtgtctggtgaaccacaagctcagggctgtatctgccaatatgtttttggcagaagccatctaataaaatcccatccgcgctgttctatgaaatgcagtcacaaatttggatgatgattgcctgatgccatattttggtaacagctaatctccatgtcttagatggtttttattcattgcctccccccttccctccttcaccactctgcttggtgcatgttttaacgacaaatgatgtataatctgagtttcatgtagcatggtctaatggaaaggcactgagccagtcatatggagacaggggtcctattattggcactgccctttgcttaataatagcttaacaactacaacaaatatttatcctgtgctgaaatgctctttcagcattcttcatgtattcttgaatcttcctaacagtcctgttagacaatattattatcctcgtttaggtgaggaaactaaggctcggagtattggaaatttccagtacttgtattggaaagtatgatattggacaartattttcaatacgtgtgttgaagatattggaaatacttgtccaatatcatccttcatctctctgaa

SEQ ID NO: 812855 - DNA, 647 bp, Homo sapiens
atttttttttcctgacaaaatgagtggcaacagtcttttgttagaatgatatcataaaaaattgagtttaaaagtctgattcttgtgtcttaatactgggtgtgagaggcatatacattcctaaatttgttgagacaatatttgacaaaggtttacaataatattcaaggagtgacctccatgggcagggaaaggggcctagaagtcccctctctggaaacagtcatgagtgggctggacaatcattggatggagactgggagaggtgggctggacctggagtcaacacctacctgcacacaacaatcacctgtggtaatttacaaactgagacactcagagtgaagctcaagaacctctattttttaacaagcacctcaagttatattcatgttgctatgcaagctccagttctctgagaatcattgccctagatcactgtactccaaacttccctgaaagtaagaatcatctggcagcacttgttaaatgttcactacaccaggcctctctcayggacttggtgatgacttgtgtagagtccatgaatcagtggggtttgggaataactgaactaaaagattaacagaatcctttataccactaagattttgtagcttagatgaaagtttccatttaattttagt

SEQ ID NO: 812856 - DNA, 644 bp, Homo sapiens
attaaagaaaaatactaatccgaatstaaaacatgataggtcatatcatcctattgcttatgacctgtcaaagctcccccttgccctccagatacagagcaaattactcagaaggattcacagagctgttcaacatctggaacctgctcttctctctgggcatgtttctagtcattcacatgtgccctatgtacggtcacactgagttacctgggatgctcccagacaggcccaaatgttcatgcctcagtgcctttgcatgagttttcacctggatgggacttccttctccttatcttccaggacaatgcctccttttccttaaggcttcctcttcttagaagccttccctgtcccttgccaagcacaagtgtttgctctgtctgtaccactccccaggcacttcatcattagggtggtcatctgattactctattggctgtgggttcctggaaagcaggttatcgagcaccatcactgtagaatatgtagctgattcatggcagatactcaaatgttcatggggggataagtgagcaaaacagagaaaaatgaggcaatgttagatattatgccagtacagttaaatagatggggatttttttaatgttctcaggaggattatgtaaaggaagtgcattaaa

SEQ ID NO: 812857 - DNA, 377 bp, Homo sapiens
gtggacaacagcaaaagcaacaataacaaccaggaaacaaacaatgcaaaacaacaatatccacaaaattaaacaaaaaccacaaaaaacccaactagtggtctggagctaggtcacatatttgaagggggaagaacaagttggtaaagcattcactagtaagaagggaaaattggaaggcccttcctgcagtggaaggaatgtggctgctgctcgcatccccagatgagacatatgcttcagctttagccttctgactctgccagttatttctacccaatttcccatgcagagaatggagaaactcatcccagctkcaggaaggactatcatcagcctctcaaacccttccatgatgttttcatctcataagatgc

SEQ ID NO: 812858 - DNA, 599 bp, Homo sapiens
agaagtagagtttctaggtcaaatggcatgcacattttaagrgactatatatataaaaaatacaaaatataaatatatatcaatataatgtaaaatgtgtgagcaagcagctcattgcatgcaccctgccaacacattttcattaatataaacaataaaaaactcaaaaagaaattattttcaaaatgataggtaaaaattggtttctcatttctaatgatattcatcttttttctattgatttttgagagttcttttggtattaaagatattagccttttatagtatgctgcaatatttttccctttgccatttgctttgtttctctgattatagtagttattatcatatgcaagtgttaccttttttggtagccaaatatatctttttttgtggtttataggttttccctttccatttatgcttatatggggctgacttgcccctagattaaataaaaaatacacataaattttcttcaagttacttttacagtttcatttattttattttattttaaatctttaatctatctggaatttattttggccagcatattttttttgaaccatctagaatgctttcagtacacaggagca

SEQ ID NO: 812859 - DNA, 599 bp, Homo sapiens
agaagtagagtttctaggtcaaatggcatgcacattttaagasactatatatataaaaaatacaaaatataaatatatatcaatataatgtaaaatgtgtgagcaagcagctcattgcatgcaccctgccaacacattttcattaatataaacaataaaaaactcaaaaagaaattattttcaaaatgataggtaaaaattggtttctcatttctaatgatattcatcttttttctattgatttttgagagttcttttggtattaaagatattagccttttatagtatgctgcaatatttttccctttgccatttgctttgtttctctgattatagtagttattatcatatgcaagtgttaccttttttggtagccaaatatatctttttttgtggtttataggttttccctttccatttatgcttatatggggctgacttgcccctagattaaataaaaaatacacataaattttcttcaagttacttttacagtttcatttattttattttattttaaatctttaatctatctggaatttattttggccagcatattttttttgaaccatctagaatgctttcagtacacaggagca

SEQ ID NO: 812860 - DNA, 611 bp, Homo sapiens
taggcagcagcatttgcggttcaccaagatccactgttctatagccaccactgttctgcagccaccgctgctaatacccaggcaaacagagtctggagtggacctctagcaaactccaacagacctgcagctgagggtcctgtctgttagaaggaaaactaacaaacagaaaggacatccacaccaaaaacccttctgtacatcaccatcatcaaagaccaaaagtagataaaaccacaaagatggggaaaaaacaacagaaaaaccggaaactaaaaagcagagcacctctcctcctccaaaggaacacagctcctcaccagcaatggaaaaaatctggatggagaatgactttgacgagctgagagaagaaggcttcagacgattaaactactctgagctacaggaggaaattcaaaccaatggcaaagaagttaaaaactgtgaaaaaaattagacgaatggataactagaataacygacgcagagaagtccttaaaggagctgacggagctgaaagccaaagctcaagaactacgtgaagaatgcagaagcctcaggagccgatgtgatcaactggaagaaagggtatcagtgatagaagatgaaat

SEQ ID NO: 812861 - DNA, 497 bp, Homo sapiens
gtactcactaagattttcaatttccttcttaacctgtaagaagctgattaaattaagcactattgacatccaggctcttaaaatagaaaatcatttaaagggatgggcagtctgaataacaaatagtgtcactctctggttctcctttctgccaccctcccttggttctaaagataggatatttaaatggatggagccctgtaggcttgtaggtttccctggtgaactcaactctccacgtgctcagtagctacttgttgaagaaaataacagaaccaggctgattaattttaaattgatgctttaaccttaaattctggataataaacctcaaatgaacacctgacaatggccgggaattctactatgcttccatagtgagtgtacttgcctattctttcagatagttatttcacacaatctgctctctcttccarcttcccacatctcccctcttcttttcaatgaatgactttgtcttattattaagaaaattg

SEQ ID NO: 812862 - DNA, 563 bp, Homo sapiens
gagatagtgaaaaagcaaacgagagatattaaccatgcccctgggatccactttggtcayattctatgtaggcagaaatcttctgatctccaaattccccttggaatactgcattacagagtttgactctactctctccttagtgtcttcctatgggtattttatcactcattcacccagaagcttccagcaagcatttgttgaatgactgctgtgttccaactactgtgctaagcacttgaaataaaatgtaaaagaagagaggcacgattcttattctccagaatcttcactctggaggggagacatataaaatttacaagtaagatccaaatgctgagaaagacccagccacacccagagccagaagaggcacatcctaaacagaaaactaaagccagaggcagaaggagaagttagtattcctggaacccaccagtgaggcagggagtggagcaggaaaaaatagggtctttggatataattgagcacctatggctacacaagtcactcctcaaggagacatggattttctgttcttctatcactttccacagtatttt

SEQ ID NO: 812863 - DNA, 643 bp, Homo sapiens
catgggatagtgttgtctacggatatcaggtttcatggaaattggcaagcccctatactccactagtggaggaaatggcccactagtttggactgacacagaggaggaggcgtttcaaaaccttaagaaagcattaactgaggcccctgctctagccctccaaatatctaaaagccattttacctttttgttcatgaaagccagggagtcactaaaggggtactcactcaaactttggggccatggtgatacccagtggcctatttgtctaagagactggaccctgtggcctctgggtggccaagttgtctgtgagccatagcagccacagcaagcctggttcaagaggctgataaactgactctaggtcaaaatttaacccttatggctcctcatgccatagagacattgttaagaagtgcttctggcaaatggatgttgaacgctcgcatcctgcagtatcacaatttactgttagatcagcctcgtttaactttctctcccacaaggtgtttaaatccagstaccttgttccctgattcagaccttaccccacctatccatgactgccaggaactgttagtgactatggaaactggccgacctgatctccaagatgtgcctttaaaggaggtggatgcca

SEQ ID NO: 812864 - DNA, 651 bp, Homo sapiens
gttctctattctgtaccatcatctatttgtctctctatttttatttctatagttctataatatgttttggagtcaggaagtttgataactctaactttgttcttctctgaagctattttggctactcataatcccttgatattccatatgaattatagaaattaatatttttgcaaaaaaagtcagcattcctgccaggcaggccttgaaattttatatgagttttaggacttaaaataatatgtgtgcaaaaaatataacatttggatcttaataggaaatactttgaattcgtgcttcactgtgagtagtattgacatcttaacaatattaaaatttctgagccttgaacatgaggtcaagagtaggatgctttaagtttcatacattttttgatttaccagtttccttctgcttgtgatttgtagttgaggggttattatattgcccaggctggtctccaacttttggcctcaagctattctccctcctcagtctcctgatgtgtttggattacatggatgagccactgcacctggcctccttattgtttttctgtcatttttatgaattgaaggtaatttttggaaatgtttataaatatgtatctctttagaaggtttytcatttttaaggtagtcaaaaacacat

SEQ ID NO: 812865 - DNA, 520 bp, Homo sapiens
agcttgtgtgagttccagagtgaaggatccaagtgactgaccrgagtgaggggctttcggggtggcccgtgactgggagacccacagaaagctggtgagtggggctgatctgcctggtgtccatagcctgagctgccccggacagctgtgccttgtcaagaaaggactggaagtgtgttgcagaaaccactgctggcatccagcctcaccccagaggtaggggagggacctggctgtgctgctggctgtttgtgctggggaaggggctgttggcttgtttctctggcttccagcagacttgtgaagagttgttaccaaaacggaggggttttgaaaacagcccaggaggccagagaggaaacatttagagaagagataaacaaaagaagcgacagacttctcactctaacaaaaggggctttggtttacctgtgaaacttcactcctcctcttcccctagccttaatttataaagctggtccatggctccaagagattaccctattttaaagccctagtt

SEQ ID NO: 812866 - DNA, 543 bp, Homo sapiens
tgtgtcaagttgagggtagggatccctctcagacgtgccccaacttttctatgtatgtactcatctgtctgcctcagggacagtttcctcttgttctttgctgaatctccattgtctaccccaatgtctagaactatttgttgcaggggtgaatgacatttatgtctcctcccgcctagttggagagataaggatgttccaatgtacagtccagagaaaaggcaggcatgagggaggcgttgaagaggcctggagtcctcagggagcctgtggaaagccagcgctgcctctgccgccagccacaggggatgggagctgcagggacatttgggaattgggggtgtgaggagtctacatggataagggctcagagttgggaacaagcagggtgaaaaagatgtctccctaaggcatagcagttgaaactgatggtattttggaggttttggcagtagttgccgtttattcatatttcttaattactttattatacrcaaacataaagaaacgtcctagggaggcagctgttcatgtcactgtccc

SEQ ID NO: 812867 - DNA, 556 bp, Homo sapiens
acgcatccattttttcagtgttttcacatttggagctcacttcatgaacttgagtgtcttacattttctacacaaatcagattggtgtaatttaaatactttcaacgtatctttattgagtttctccactgtataaagcactactatatgaaggttagaatgaatcacaggcacactgctttaaaaatcttagtaggtgacagggcatggtggctcatgcctgtaaccccagcactttgggaggctgaggtgggcggatcacctgaggtcaggagttcgagaccagtctggccaacatggtgaaaccctgtacctactaaaaatacaaaaaattagctgggcatggtggcgggtgcctgtaatcccagctacttgggaggctaaggcaggagaattgcttgaacccgggaggcagaggttgcagtgagccgagagcgtgccttgcactccagcctgggcaatgagagcaagactccgtctcaaaaaaaaaaaaaaaaaaaawatatatatatatatatatatatatacacacacacacactaataggctaacttca

SEQ ID NO: 812868 - DNA, 633 bp, Homo sapiens
acaaggtgacgaaatgattagtgatgcagcagggatgtggaactaaggtcatcccaactcttcatctagtttgttttctagcatgggcagtcattagtctactcattcattcaatacttggtctggcatagtgatatattcaagcaatagcgagaagaacagggacttcgagcttcatgctctaattgctgaaccatgatacatgttgtaatagcgatatgattttcacataatgatagggcatgacaagtaagaaaagacagaaagcggcaggtggtagtagtagtagtgaaatgttgacatcaaggtcatttctagaaatatttctacatgcaccagccacagtgcaacccgttcagaattaaagtgaactcactgctttgctgaacttctctccatcagtttagttcccacttgtggcttggaagtgttccagtgttaaatattgattttgtgcagaataagtgcctatttttgtgcccttcctattcatcatatccaaatgggtgtgacttcagaaattttttgaggtgcttgcttccttaaataatatacatttctaatattgcattagaaacgagagggttcctcctggtgtttagaaygcaaaggaaaaataaaaagggaactgct

SEQ ID NO: 812869 - DNA, 454 bp, Homo sapiens
ttattagctgattgggtttctcctgaaaaaaaaatcacacttgcttttatgtcaaaactaaagaaataatttttgaawttttttttacttgtaatgtatatatcatcatgttcactgtaagttgaatgttaatagcctctttcctctgttctttgtattctctgaggttttatttttagttttcaatgggtaatctcacaatgtcacagctctcctgactttgccacatccagacctaaatctgccagatctcctttgcataatgaacaatgtgaatatttctcgacatgtacagcagttaaaacaccaaggtactgcagggacaggtgcaatgcaaatacacagatggagaaactgaaagacttcattaacatcatataatctcactaatgatcaactctttaagggaagctctttcttcagggataaaaggagagaaagcaactggaacaat

SEQ ID NO: 812870 - DNA, 495 bp, Homo sapiens
tctcctttgcataatgaacaatgtgaatatttctcgacatgtacagcagttaaaacaccaaggtactgcagggacaggtgcaatgcaaatacacagatggagaaactgaaagacttcattaacrtcatataatctcactaatgatcaactctttaagggaagctctttcttcagggataaaaggagagaaagcaactggaacaattctgtataaaggaatcgctgtttccccaggctcttggcattaggtacctgccagaatggcaaaagctttgtatctgttcatttctttcttgcaataatgtccttgggtagttcttcctcctagtcttttcagatgatatcttaggcctcttctcttttgctctgtatgtgccctcaggtgagctagtcaacttgcccaaatgtcacttcacttgaaacatcactgacatgcttcccagccatacctcccccgctgacctccagatccccattgggtggccagtgcaatgc

SEQ ID NO: 812871 - DNA, 634 bp, Homo sapiens
aggtgcctctgatttcactggctgatttagtggaagcaaatcaatgaacatggttattgcaaaacctttttcscaaaatgtaattaaaaatccttatcagtttgcatattaaatgaatgattaatattttcccaaataggcagaatcaaaagcttcctagaaaatccgggtaaaattgtaatgctgctgtgtgaaggtatattcacagtcagcatgcagcaacgaggaagcaggaagcctcctgccttgacaaacccgcgtggttcctgaaaacgtagtcttttggtgagctgatggcagaattcacaacttaacatgaagatattctgctctcattcagcacacgcaagtgaaccttggctataactttctacaaggtttctaaaattgagaaacaggtggatttaaaaccagagatacagtcaatggagtgtagactactcagagggctatggctagagttaaatggcagcttataaaaatgttatctggggcccaccttgaacctttgaagaaaaaggatggttcttgatgtaatttgcccatagggcctggtgcctgtggtgtgctctgaaagagagcatctatatccaaaaagatgtgcctgctgagaagggctgctggcagctgtggt

SEQ ID NO: 812872 - DNA, 597 bp, Homo sapiens
cccgaactccgcgcctctgggcttctctggaagtgacgcagcactgctggggattgggatgggagggggttctgcagagagcgcggcaggcaggtggcagagcgggagtgggtccaagcgggtgtcgcgcacacacgtacacacactccaagcagcgctcggggacagatgtgcgaacatctggggtaggagatggcccctgagtcttcacgacccctcccgctccgcacagcacacggaacctgaagttgcatgtgtgtgcgcgccagtgtgagtgccagtgtgtgcgcgctcgcgcgctggggcctactggagtccgtgtctgaatacataatatactgtgggcatcctcacggcgcgcgcgcgtgtgcacacacacacagcgaatcacacaaacatacataatttacgcagcatccaggtctgtgagtggtaatttaattccgcttcaagctgggaatttaraaataaggcaagggggaacggcggaggcccagaaaatctccccaagtgggacccccacccatccctttggcaggatttgcagctgccctgaagaccacttatggcaaagaaagagctgcaaacgtgcggatc

SEQ ID NO: 812873 - DNA, 597 bp, Homo sapiens
cccgaactccgcgcctctgggcttctctggaagtgacgcagcactgctggggattgggatgggagggggttctgcagagagcgcggcaggcaggtggcagagcgggagtgggtccaagcgggtgtcgcgcacacacgtacacacactccaagcagcgctcggggacagatgtgcgaacatctggggtaggagatggcccctgagtcttcacgacccctcccgctccgcacagcacacggaacctgaagttgcatgtgtgtgcgcgccagtgtgagtgccagtgtgtgcgcgctcgcgcgctggggcctactggagtccgtgtctgaatacataatatactgtgggcatcctcacggcgcgcgcgcgtgtgcacacacacacagcgaatcacacaaacatacataatttacgcagcatccaggtctgtgagtggtaatttaattccgcttcaagctgggaatttagaaataaggcaagggggaacggcggaggcccaraaaatctccccaagtgggacccccacccatccctttggcaggatttgcagctgccctgaagaccacttatggcaaagaaagagctgcaaacgtgcggatc

SEQ ID NO: 812874 - DNA, 580 bp, Homo sapiens
agaaacccatagaaattcacacccttatcaatctctgtggttaccatacttgtttgccaagaaaggaaccccagtatcagcagaagttctgattaccaaggcagcatttgaaaatgctcactgtctgtttggttaaggaagagaagagctagcttatattcatattattgtctatcatcccatgttctttctacgctctcttggatgactttcccagagcactcaccaggagtcagggtctttatgatgctctcccagcttcgggcctcaactccactcgtcagtggagaccaccgcggagaagcaggtgggggcagcagaagccttgaggacagggcagctggaccttcagtctctacttgggtgtccttgaaaattctgttaaccaatttggaaccacttttctcacctacagaatgatgggttgacttgaatgatttttaaccttatctggttttgagttttggctatgactctttcctgatcgcattctcactcrtggatttaaaacaggctttagtctgaattctgtaggccaacctaagcaagttgaaattaatgctcttttatccttaaactg

SEQ ID NO: 812875 - DNA, 580 bp, Homo sapiens
agaaacccatagaaattcacacccttatcaatctctgtggttaccatacttgtttgccaagaaaggaaccccagtatcagcagaagttctgattaccaaggcagcatttgaaaatgctcactgtctgtttggttaaggaagagaagagctagcttatattcatattattgtctatcatcccatgttctttctacgctctcttggatgactttcccagagcactcaccaggagtcagggtctttatgatgctctcccagcttcgggcctcaactccactcgtcagtggagaccaccgcggagaagcaggtgggggcagcagaagccttgaggacagggcagctggaccttcagtctctacttgggtgtccttgaaaattctgttaaccaatttggaaccacttttctcacctacagaatgatgggttgacttgaatgatttttaaccttatctggttttgagttttggctatgactctttcctgatcgcattctcactcgtggatttaaaacwggctttagtctgaattctgtaggccaacctaagcaagttgaaattaatgctcttttatccttaaactg

SEQ ID NO: 812876 - DNA, 597 bp, Homo sapiens
aatccattccctcccaccttccccaatggggcagacacatgtatacgaagaagcagcatcagtaaaccggcaccctagatgaaaggcaactgctcatccagaaggcaccaataacacagtcatgtttccattaaggggcaccttggcttatgcaaaactgtacttttgagatatgacatagaaaatcacatttttgtgaatcaaaatgtaaataatctaaaaaaggcactatttgaagggagcccaaatttttaacatgactaagggctccagaactgatcaaccctgtaagtttagtttgacatggaattaagtatatttgcttgaaattggttctgaaactattatttagacaaaaacgtgtaaaaatctttgaaaggcctttgtatcattctatggtctttatttgtattgtcgttattattactcctgttattagtgatgaatttgcccaggtcagggaaattcaatgtatttatgcttttcttcaccttgccaacygtaagtcatatcaaatgcaaatccatcccatccatttccccaagtaattccgatttttgtacattttttttcttgcagaatctctcatagaatcat

SEQ ID NO: 812877 - DNA, 590 bp, Homo sapiens
atatgttttttaaccttcgtactcaaccccatyccaagttgggcccaataaccaccctgggtgaggagacatttcagttcttccctctcctcccttctctcgtccacctcctcctcctctcaacttaaacagactactgtttttcctacgtcagtcccagacttgttattctctatgacttattccaagattggatgtaactgataaaggctaaacattcattatgagcttctcttttataaggcaacatgagacagatttgctttagggctggagaggtggttccgcagacacccagtggctgttatcttgacatttcaaagacaccagaagacaagggggtcttgtttgagtgtgctaggggaaccttctcttgggtcaggtgggttggggatagggatgggagaagccacactgcatcccatgtggcctctatttctttaggtacctggagatgacaatgacagccaacagaaacccagccagagctagataaggcaacaaaaagcttcaatctcttctccaagtaaacaaaacttgtacagtatattattttcttgtaaaatgtaccccaggagaagtaacataag

SEQ ID NO: 812878 - DNA, 593 bp, Homo sapiens
agctctaaccttaagaatgactctgacaaggttaaaatatatgcagataaataactggaacaaatatactracatgttaataatggaggaattattatttccattttatgttttctgtattttccccttttacatttgtatttaatataaaatatatattttatatagacataatttataaaattagaatcttatataaatgataaattgatataattacaaaaaacaattattttttaatctggtcatactgaaatcatatagatttataataatgaaaattgctttctaaaattattggcatgattaatctgtgctcatgttttccagttttcctgtcagtaatgaattataatcagaatccacattatgttcaagaaaagacatgaaataccagaacatctaatcaataatcaaatcagtaggtacttactgcatatttgtgtacctagaacttttataagcatgcctcattctagcccataaacttcctgttagatctttttggagaacctcagtttgctaacatagatagtatccacaatgccttcttgaaaaccaatttataaagcagatcctttaaacatagttca

SEQ ID NO: 812879 - DNA, 559 bp, Homo sapiens
gggcttatcagtaacagaagcattcagcctaagaaaacactttaagtgtaaacaagacacagaatcgcacatctagccacattccactgaaatctgtctgaatagagagaagtagagatccacacgaaatagtttctcttttaagttagcaccaatgtgcccatttctcatactgccattcacaatctttataagcaatttgctatattgctattacattccacatattccaagcaaagtttttaaaaaagcaagataatagagacttaaattactttaaaattctacacaaatgtcatacttttcaacttatttgtaaccataattaaattggtttaaaggaacagtaaaaatcttgttataatattaatatcaatgcagtttatttataattgataaatatatatgtatattactagttgtttacaaggatgccaagtaccatccactttcatctcaactctcttgaaactgaaatttgcttactcggtcaagctttgtattgtagtttcttaaagacaaatacrtttcaatgataatgaatggaaagtaactatat

SEQ ID NO: 812880 - DNA, 619 bp, Homo sapiens
ttggagacatgaacaagtctatgctttctctttagaaatgtaaaaatatgctagtagtatgctagattagaaattctcttctagactttggatttgtgaatatggaaagaattatttgagtatttagattatttttagtcatctaaagtcccattaatttgtagtcctttcaaatataccactttgcactaatattgggttgagacgatgtcatatataaataaccagctaatttgatgacgacagcaaactggttgttcagcattgtgtaggcagatcagatgaattatttattggttctattttcttttgaagttgttctttgtcatcattaatgaatgtataaatgtacagtatttaggtatgcatttttcttactaatgttttttattcctgctggatgaaagagcttttgtgtaagagagcaattttgagaagaaaagggagaagaaaatgaatgtgttatgtaaaacatggttttgtttttctgtcttgcttcggagaagggagatgtatcctctggtggcatcttgytctatccatttttgcctgttagcagaattacccacctggtgaggagcacattggagaaatacatggtacatttaggtgggaggag

SEQ ID NO: 812881 - DNA, 624 bp, Homo sapiens
gtgggttaaaacaaaacaaaacaaatatgatagagcccatatgtgacctaaaagcttaaaagattyactttctggccctttaaggaaaagtttggtgataactaagaaatgtcttgtatctttcgttaaaaatttaaaatcgctctatcttatgttaaaaaaaattttggcgttgatgtatataaacctaatgccataagcaatattattgtcttgactttcagtgtaagttgatgtcacagagaacacaccaaaggcaatggtttaaatgaaacaggatctaattttgctcttgcaaaaaattaccaagctaagcttttcaaggctgatagggtgactgcaacctcaatctgcatcttccgtctcccagccaatgggaagatggaggggcaaatggaaacacaggcaatttcaccttatccagaagttagtctcatggacatggtgtgcatcttttttgttcacattctgcttactggaatatggccatgtctagctgcatgggagactgggaatgttgtccttagatggacagccttcttccaagcttgaattaagaagctccattattaaaagccagggagaatgattactgatggacatcttggagttcctgccgcaaag

SEQ ID NO: 812882 - DNA, 388 bp, Homo sapiens
tgtttcaaaacagagctccatataggaaaaaaaaaaaagagtgagtaaagttggaaatttctaggctggtgtatccgagaggacactggggcactgcccattgtgggtggggagcagcggccagacggrcctgcacctctctaatctgcacacaaccacccatgttctccacggtgcattgttgccacagagctggagtcttcccattcttcaggaggagaagctctgtaggtggagagggttgttgctggttttaaaaaattgttttaaagatgaaagcaataaatgaacatgagttgacaaagttttgagcagaagaattgatgagaaatatttattgctgagtgctactgcagaactgtgattaggagaaaagttatacctgaga

SEQ ID NO: 812883 - DNA, 648 bp, Homo sapiens
tctccagagttgttcacctacttccagatgaagaccatcctggaggagggtggagtgagagggttcctggctctcctgtcctgctcctgtccctcgtcctgttcctgagrctctgctgtcttcctgatcctagagttcatgaattattccagttatcttcaaacaattgcctttttgcctgagctactacaaattgagtttctgttccttgcagcccagagaaccttaaccatcacagcattaggtggcctggctcctgcctctctagcttcatttcctggccccttgccttaagttccacactgtcattctctctgggcccgacactgtttcatacctccttgcctttgcttctgtcattctctctgctggaccaccttttccacttttctttgcctggtagaaatggactcttcccagaaaacctagcccaggaagatttcccaagcttgcttgtcacctatcacattagtcacctctcaccagtcacattatctgtttatttgtgtctctctcattctagcctatagtttcttcgggtaggagcaagtcatattcctcttcgtatctcagtgcccacctcaatgcctggcatataatagacagctaaaacatgtttgttgaataaaactcagaaaaataaacaaa

SEQ ID NO: 812884 - DNA, 648 bp, Homo sapiens
tctccagagttgttcacctacttccagatgaagaccatcctggaggagggtggagtgagagggttcctggctctcctgtcctgctcctgtccctcgtcctgttcctgagactctgctgtcttcctgatcctagagttcatgaattattccagttatcttcaaacaattgcctttttgcctgagctactacaaattgagtttctgttccttgcagcccagagaaccttaaccatcacagcattaggtggcctggctcctgcctctctagcttcatttcctggccccttgccttaagttccacactgtcattctctctgggcccgacactgtttcatacctccttgcctttgcttctgtcattctctctgctggaccaccttttccacttttctttgcctggtagaaatggactcttcccagaaaacctagcccaggaagatttcccaagcttgcttgtcacctatcacattagtcacctctcaccagtcacattatctgtttatttgtgtctctctcattctagcctatagkttcttcgggtaggagcaagtcatattcctcttcgtatctcagtgcccacctcaatgcctggcatataatagacagctaaaacatgtttgttgaataaaactcagaaaaataaacaaa

SEQ ID NO: 812885 - DNA, 594 bp, Homo sapiens
caaatgtggaaggaatgacagaattagaaaaaattataattttgcaattactaatgtaatacttgttacagtgaggatcggcaatggatrttaaaatcactgggtgaaatttgttggggaacaagctactcgagcatgttaaagcattaccctacagatgcttattaattacggggtatctttgccatggacagatatggtaaaatatccagtgaatcaaacttagcatcaccaacaatggaacagactgccattatatgcctcttgatatggccattgtgtatgacacaatggatttgctgtgacaatacctatctatccacttaacagaaatctcaaggaataaggttctagacatgaggcacatttggcataactaaaggactggtttaaaaacccaagctattaaatgtaattaatgtaattaaaaatctgattggacttacagataactgcagtgtaattaaaacaagcatgtggagccttttagtattttcagatatgactttgtggtgatttatcatgtaattctaatttattgtgtcgtgattctaattatcagaaaaacgaatgcttcagatttttatgaaatga

SEQ ID NO: 812886 - DNA, 659 bp, Homo sapiens
caacagagcaagactctgtctcaaaaaaaaagaaaaaggaaaaagaagcctgcagctgtactstaaagaggagcgaggtataaagtcctagccttcactgaaaccaggaaagctaaaaacaaagtgctttggagaaacctcctacaagatagagagaaagatggatgacagcggccttgggacagctccccacaaactacatgtctcgccatgttcctgggatgatatcacggtattccaacaagacttaggtcccactgcagcggagcctggtccacgtggcctacgtggaggcatgcaaggttgccagggtaccgggccggagccatttccctagagctgccacctgactgtgctctgtggaaggaactggacatgggaaagctttttaccatggagtctggattggagggtgcctcatcgtcctacactggcttgcacccaaggaaactctcctgagatagaactacagtttggtcaagaaaaatttctcagatcaacttgtttttaaaatgcttagtttttaaaaatattcagagtcccttgaaattcaaaacaattcattaatgaaatgacttttttaaaaaattaaaagtgaggtttccacattaaggactcctgctctttcttttcacccctcagctgcccagaacatgcat

SEQ ID NO: 812887 - DNA, 703 bp, Homo sapiens
cccagaacaatgacctcttcatgcccaaggcagtaggttcaggaatcatctactctttcaaggttgattgcaaamatctttccatgccttacaaggtattaagattaactcattggagagaactatgtgaactacatgttgtacatttcaccccaaattaagtctatttcaacagactccaaagtaaatggaaatatttcagaatgtagctctactgcctgtggagaatatcgtgtttatctcactgattgttgtcttcctcatgtaaatttcctgcttagaaaactctcaggagtccccgccctctagtgaatgacaaagaaaaaaagcttctcagattggtgttgcctggtgggtcctaatccaccttccagctgcatttccgtgactcctcagtgcttaaacccaaccttgcctttcactgcttcctgacctcatcctccacttgttttccatggtatgtgggcttagtccacctagaaagccctttcccaacctctgcctgtaaaaattcacttatttttcaggtcttatcttgaatgttctttcataagaccaataggagtcctattgtagactccttgtttgttattctcctatagaatttaccacattttgctttattttatagtggcttttgttgttgttcctttgtccatacctaatgagcactaattggatcttcatggtacttttggtcttg

SEQ ID NO: 812888 - DNA, 639 bp, Homo sapiens
atcttaggtgatttgcatggggcttatgtgcagtaacagatctctgatgcaggcgtctacgttcactccacaacygtgcccctgatttttctgactttaactttttttgtgtgtatataagtgattttccaaggtcacaagacagtgaaaccagacctttggtgtttttaattttgggatccaatgctctttccagtaaccacattgttaacacgatttactctaagaacaaaataggacatttgaaaggtctgcctgcgctgagagtaatattcctcattggaactgtgatgatccatgtttagcctctggaaatagtgaacagctgaatgggtgcagagtagttgactaagagctttggactgaactctatagccaggctgcttgggttcaagttccacttcttccatttgttagcatgtgaccttagacaacatagtttacctctgcattctcatccatgaaaagagcttgataccaacaacagcaacagactgctgattattaagtgacatatgtaagaatgtctggtctgaggaagtgtaagcactagcttctgtcattattatcatcactgtcactatttgtattgctttttgtcatatgagtgtgtaataggaaatagtctggtctttgaaa

SEQ ID NO: 812889 - DNA, 595 bp, Homo sapiens
gctgttttccctttttttgttcttacatatggagamctttttgctcttgaggaccagtcctcaggagacaggagaggggaaaaattctgttgtttccaagtcaacatacaattcaaaataaaacagaagaagctcttaagatttattttagtaaactttgaagagctggttaatgccatgtgaggtctgaaggttttagattttggagggtaaacgctttgctttttaaaatagtaattgccatttatggggcattagactttgaaagtatgttttgaagccaaatgtttcattaaaaataaaatctaagaaggaatacctaaagagaatgttgcttacttttatttgatgcctttccacaaactgagataaaagaaatatttcccccagttctgaaaagatttctattttgtaagaggtttagtggtttcactctgttaggaatttttagagactctccaaacacatggtcagataggttacaggaggccgtcatgtgaaggactttgggtcgtataataaaatttgttattatctattctgatggccgtcttctctgggttttgagtttccctgggccagtgggcagtacctg

SEQ ID NO: 812890 - DNA, 596 bp, Homo sapiens
tctgggtatctgattattttgttttttttaaggtctatttctctctgtccttcagattgagcaatttctattgttttacattaagttcattgaatctttcctctgtcttctccattctgctattgagcctatccagtgagattattattattttttaatttggtcattggttcttcatgtctcctattttatttttttcttgcaaaagatatactttgtcatttgtttcaagcatgcttgtaaattacttaatacaatatttttataacggctgctttaaaatccttgtcagagattttcagcatctatgtcatctggtgaattattgactatattttcttatttaagctgcaatttgtctggttcttgttatgacatcaaagtgatttttttaccgtaccggcgcattttgggtatttcattatgagaccatggatcttagttaaatcttttgtttttgttggcgtcctctaaaggaaggcrttacgtcattactgacaaatggtagtagagtccagggtccctcttcaacctcttgtgacacctcagttggggagggatttctcattattgttaggcagagttggaagttctgg

SEQ ID NO: 812891 - DNA, 630 bp, Homo sapiens
ctttcacttcccttgctcagattctttttaccctgggatttaccctgagattttttatcctgtaaaaaaactaccctgtaattttttttaccctgaaatattacyctgtaatatttttaccctgggatttaccctgtcacaatccataacttggttttagctcctgttcttctggtttcatttagtcctcagtgccctgaagcacgtgccatcagtgtcccctttctccctttctgtcatcatccagtgggcttttccctgacttccaactcccagtattttcatctcagtatctcatttctttttcagcagaagcacagaaaacagctttgcctatgatccatgatcagtgagccagaagtgcctgggaattaacaaaccctgggagcagctttcaacaatgacctcaggacaactcctgagatataaataccccagctcccctgcctcttggatgcagtaatttgaaggggtatgttccctggctctcagagtttcctcagtgagattaaactcaagttgcatacaatactagtgggactggtaaagcaccctttttctttttttgtattccttcccttcttctttacccttacacccagcatttcctaaaattgctatttgcactca

SEQ ID NO: 812892 - DNA, 648 bp, Homo sapiens
tcaccttcactgtcttgaagaaatctctcctgagacttttgacctgctccaaacttagattaattgttttctaggtctgctgtgcagttgtgggatctttattcatgagtcttctctttcctatatcatattcttgtttcccaaatttcatatcttccttcttcttactcttgtgttggagaagcacactctccactagcttcttgagaagacttgcataagaagtaaaatttttgacatttatgtacttctgaaaatgtccgtattctaccttcacatatgattttaatttttactgcatatagaattctaggttgcaaataattttccataaaaattttgaaagcatatttctattgttctctgatttcagattggaattagagaaatctctgccattgtgattcttgaaactttgtttgaaattccttccctttaaacttgtttctggactcttaaattttattattttaattattattaataatttttttagagatgagttcttcctttgttgccccaaactggtctcaaactgctgggctcaagcagtcttcccatcttggcctcccaaagtgctgggattacargtgtgagccaccatgcctggcctgtctggactcttactggattgtctagttcctactc

SEQ ID NO: 812893 - DNA, 565 bp, Homo sapiens
tctggaggtccactccagaccctttttgcctgggtatcagcagcagaggctgcagaacagcggatattagtgaaaagcaaatgttgctgtctgatcgttcctgtggaagttttgtctcagaggagtacccggccgtgtgaggtgtcagtctgcccctactcgggggtgcctcccagttaggctactcaggggtcagggacccacttgaggaggcagtctgtctgttctcagatctcaagctgtgtgctgggagaaccactactctcttcaaagctgtcagacagggacatttaagtctgcagaggtttctgctgccttttgttgggctatgccctgcccccagaggtggagtctacagagacaggcaggccttgagctgcagtgggctccacccagttcgagcttcctggctgctttgtttacctacaatggtgggctcccctcccccagccttgctgctgccttgcagtttgatctcagactgctgtgctascaatgagcgaggctccatgggcgtaggaccctccgagccaggtgggatacaatcttctagtttgctgtttgc

SEQ ID NO: 812894 - DNA, 545 bp, Homo sapiens
acattctcaacagcaatgtataagagttctctttttgcacatccttgccaacacttatctttcatcttttggataaaagctattctaacaggtatgaggtaatatctcattgcagtcttaatttgcatttttctaatgattagtgatactaagcattttttcatgtatttactgtccagttgcatgacttcttttgaaaaatatctgttcagaccatttgcccatattaaaatcaggttatttgttttattgctgtattaggtcaatcttgcattgatataaagaaatacctgagactgggtaatttataaagaaaagaagtttaattggcttatggttctgcaggctgtataggaagtgtggtgctggcccctgcttagcttctggggaggcctcaaggagcttttactcatggtagaaggcaaagtggaagcaggcacgtcacatagcaaaagcaggagcaagaggggtggggtgaggtgtcacacacttttaaaygaacagatctcatgggaactcactcactattgtgaggatagcaccaa

SEQ ID NO: 812895 - DNA, 545 bp, Homo sapiens
acattctcaacagcaatgtataagagttctctttttgcacatccttgccaacacttatctttcatcttttggataaaagctattctaacaggtatgaggtaatatctcattgcagtcttaatttgcatttttctaatgattagtgatactaagcattttttcatgtatttactgtccagttgcatgacttcttttgaaaaatatctgttcagaccatttgcccatattaaaatcaggttatttgttttattgctgtattaggtcaatcttgcattgatataaagaaatacctgagactgggtaatttataaagaaaagaagtttaattggcttatggttctgcaggctgtataggaagtgtggtgctggcccctgcttagcttctggggaggcctcaaggagcttttactcatggtagaaggcaaagtggaagcaggcacgtcacatagcaaaagcaggagcaagaggggtggggtgaggtgtcacacacttttaaatgaacagatctcatrggaactcactcactattgtgaggatagcaccaa

SEQ ID NO: 812896 - DNA, 543 bp, Homo sapiens
ctccatccagcgccagtgaccaccagcacagtattgaatttgatgagcattatgttattaaataattattaacaaaaatagctactgttgtttatcattttcagaggctgcactaacctttctacatacattatctcatttaattctcacagtaacaccacactgcaggttctgggtctatcccctttttacagatgaggaaattgaggcttaagcaagttgctgaaagtcaaccaaccaacacatggtcaagctagaagttgaaaccctgtctgtcccaggactgtctgactccacagtcagtgtttgcaggcatgtcagaaaatgttgcccacagtttgctaagttacatgttaagtagtctcaaaatactctttgttttgcttctctggtttctctgcaaaagaactaacaggtactaatggtataaaatggtataaaagcggccaaactcataatgaagacttttttctttttcttttttttttttttttaccgttaatrtagaaaagatgatttctgatgaagggtgcctttacttca

SEQ ID NO: 812897 - DNA, 533 bp, Homo sapiens
aagggtgatcctaaggccaggggcatggtggggtcgggtggagggctggaaggctgtgagcacaagcctttgtggtacacatgtttaattgcaggagtgtcttggggacatctaggtggggacggccatagggttgtcagaatagtggtgcagggctgagcacagtggctcacgcctgtaatcccagcactttgggaggccaatgagggcggatcacttgaggccaggagtttgacaccagcctggctaacatggtgaaaccccatctcaaccaaaagtacaaaaattagctgggcttggtagcacacagctgtagtcccagctacttgggaggctgacacaggagaattgcttgaaccctggaggcggaggttgcagtgagtcaagactgtgccactcaacwccagcctgggcgacagagtgagagactgtctcaaaaaataaataaataaataaataaataaataaataaaaaagggggtggcgcacagagctcaggggagaggaaagatgacgatctccactgagatcat

SEQ ID NO: 812898 - DNA, 538 bp, Homo sapiens
tcaggctgtaggtagctcttggttttctgtttgtgactaagttagtttttcagggtgacattaagaataggcaggaagagtgcttagatatctgtggattatccatagtgaagtatgtggaccttctctgctgaatgcccggaacttggagcagctcacctgggaggtgtatgtttagggaatacaaatttatgttgattttagtttaccctagactgaaaatgtattaacatcctatacattaaagcaaatgtagttttaaaaaataaacggctttttaaaatgtactttggcagatagcaagcactcaaaaaaaagagttttaaataaagctgtgataatcagaagttaattatttagcaacctcagtaagctagcatctatacaatagttgactaaaatatacccaagagaaaaagtacatttgggctgggcgcggtggctcacgcctgtaatcctagcactttgggrggccgaagcaggaggatcacctgaggtcaggagttcgacaccagcctggccaacatggtgaaacccc

SEQ ID NO: 812899 - DNA, 538 bp, Homo sapiens
tcaggctgtaggtagctcttggttttctgtttgtgactaagttagtttttcagggtgacattaagaataggcaggaagagtgcttagatatctgtggattatccatagtgaagtatgtggaccttctctgctgaatgcccggaacttggagcagctcacctgggaggtgtatgtttagggaatacaaatttatgttgattttagtttaccctagactgaaaatgtattaacatcctatacattaaagcaaatgtagttttaaaaaataaacggctttttaaaatgtactttggcagatagcaagcactcaaaaaaaagagttttaaataaagctgtgataatcagaagttaattatttagcaacctcagtaagctagcatctatacaatagttgactaaaatatacccaagagaaaaagtacatttgggctgggcgcggtggctcacgcctgtaatcctagcactttggggggccgaagcrggaggatcacctgaggtcaggagttcgacaccagcctggccaacatggtgaaacccc

SEQ ID NO: 812900 - DNA, 588 bp, Homo sapiens
cacatctgcttttgcattcaagcagttgtgatgtgttgttttgtttgaagcatataaagaaaatgtggcctcacacagctatgtagtttggaaaaaggaggagtattttcataaccttttaaataattgtagatattcctttttgatacttaattaaaactttgacaaatggtagtttgaaaggttggtggcagtgtgaaatctgaatccatatcagtgaacttttaatatttattacattaaaatatttggtttaccttgcatgctgagtaggtttttacttatgtatgattttgtaatatcatacattgattatttggaaacattagtttactgagttatgtagatctttccattgttgacacagttcattatacaatattaaaatatcacattctgtaactttaccactgatctcattaggaaagtgtttagtaaagctatactttcagggatcatttctatagctttttactaaaaaagtrtttaagtattaggaaactgtcaagctcgtagtggcagacatgttttccaaaattaattttcacttgaaagcctgaatttcactggcaccaactgtcagttggt

SEQ ID NO: 812901 - DNA, 403 bp, Homo sapiens
actggggtagtagcatagcactagagttgtgagaatttcctgacagattagatgtaagaaatcaatgatgggtccaaggctttgcagctgaggacttggacaaatagtgttgccattaactgagttggaaaaaaaacgcagggggatggctttggggggaagttgaggagtgcatattgataagacatctatatggagatgttgaataggcagttgaagatttgagactggacttcagaggagaggaatacaggcaggagatacaaatttggaagttgacaatatttatatggtatgtaaagccgtaaaactagatgagatctccaagggaggagcatrttgaagaagcccaaggattgagccccagttacccttgagagttttaaaggccaaggagagggag

SEQ ID NO: 812902 - DNA, 612 bp, Homo sapiens
aagagctcagtcttggttaatttcattctagaaagtctgggcaaaaacacacacaaaaaaaaaacaaaaaaaaatagtcaaatgattttccagattaatatggtttgaatggatctgaaagttctctctsctagctcccctctccatttctcttttgagttctcactgtctgtttctgcatctctgtttctctataagttgtatgcatattctaaaatacctgcgtcttgccactaaactttgtatgagtcatcacttatgaagatgaggcttctaggattccctctctataaatagattatttttaaggagtcaattcttaagccagtatttgtaaaacattttccttgaagtctaatgacagaaaaaagttacttgtgcccttggaagttgtggaaacacaaccatagcatcctacaaaaagcatgcaattcatttaaagtttttttttaaatcttaaaatttcatgtgaatttgttttttaaattattgacataatttaaaatttgtccatattgattttaatataagaattttatttttcaatatctatgaattaaattaaatatgtgtatatgtatggacatctatggatgtgtgtgtgtgtgtgtg

SEQ ID NO: 812903 - DNA, 462 bp, Homo sapiens
aaagagaccctcaaggacgaaactgggtattgatggtataaccaacagtgctattttctaaaccaaaggtaaataccatcattttttcttgttaggagaaatattttgtttggaaaatatactctcctacacccagccttgtatttaactagatcagtcataggaattccatcccccttgcaatattgattaggaatatgacgccatcatggccaaagaagaaatgtgaaagggggcttctgtagagaattttcctgctccgataatggcacagctgtgatgagatggcctttcttcttctcttaggtattctgtctagccacctagaattaaagaagtcatctgtgactcaaaaggaacatacggggtgacaatgttgacacaaacrtctttcttccttgatgtcaacgttgcaccagtgaattgtccaagccctactttgggctcctctttagagaaaat

SEQ ID NO: 812904 - DNA, 407 bp, Homo sapiens
ggaaactgatgtgtcccctaagcacagatgatctctcaatttcayataaaaatgcaataaaggcttggcctgatcccagcactttgggaggccaaagtgggaggatcacttgggccaaggagtttgagactagcctgaaaacatagtgagaccctatgtctacgaaaaaaaaacattaaataaaccaggcatggtggtgtgcacctgtggtggtcccacctactcaggaagctgaggcaggaggattcttgagcccaggagaacaaggctgcagtgagccatgtgccaatgcactacagcctggacaacagagcaagaccttgtctcaattttaaaaaaaaagccacaataaagatattttcagagagaaaaggtctcacattttccaattatttatcagcaatcac

SEQ ID NO: 812905 - DNA, 621 bp, Homo sapiens
atattttttaaatctcataaaatacttaaaagcatgctgtttaattttcttttcttttttctttttttttttaattgaaacggagtgtcactctgtccccatgctgsagtgcagtggtgcgatctcggctcactgcaacctccacctcccgggttcaagcgattctcctgcctcagcctcccgtgtagctgggactataggcacacaccaacatgcccagctaatttttgtatttttagtagagatggggttttgccatgttggccaggatggtctcgatctcttgaccttgtgatccacccacctgggcctcccaaagtgctgggattacaggcatgtgccactgcacccagcctatttaattttcaagtgtttgagagtctcctgtaatctttgttattgattttagtttaatctattagaatgaaagagtaacatttgtatgatttcaagtgattttaatttttaaatttgttttgtgacctggaatacattctatcttggtgaatgatctctgtccacttgaagacaaggatgtacattcttcggttgttggttgatatgtaaaacgtcagtgtgaaaacatccagctttgatgatgttgttcagtttttctatatc

SEQ ID NO: 812906 - DNA, 600 bp, Homo sapiens
gggctcctttgggctctttccagaaaattaaaaccataaattaaatataaatggtcaaagccacagaacaagcaaggccttcttagtgtccacagagaggagttctattaccaccactcgctttggagaagagggaggttacctgtaattcttgttctcttgaaggtgtatattttataataggtctccattcaccaccctgccttccccaaggagttcttagctgcttgattttcttggctagagaagaactggcagttaggggttagcaaattcttaggacccctggggtagatacattgcagttctagcaagagttcatactctcttaaactgtgtttctggattttaattttgcctcaagctgtatgttaagagaagctctctctgatgaaaataactctgcacttagggagaaatgcttccctcaagataccatgtctttattaacagaaattttcccctcaccttgtttatttacatttatttatttatttatttatttatttatttatttattttgagacagagtcttgctctctctcccaggttagaatgcagtggcacaatctttgctcactamaacctccacctcctggg

SEQ ID NO: 812907 - DNA, 581 bp, Homo sapiens
aaaaatacaaaaattatctgggtgtggtggggcatacctgtaatcccagctacttgggaggtcaaggcacaagaattgctaaacctggcaggtggaggctgcagtgagccaagattgcmccactgcactccagcctgtgtgatagagatcctgtctcaggggaagaaaaaaaaaagccaattgtatgtatatctttatagattggagtatttctaacccaagtatgtccattattattatttatttgtattattattttaatgagacagagtctcactctgtaccccaggctggagtgcagtggggctattgtcactcactgtaacctcgaactcacaggctcaggtaatcctccacctcagcctcctgagtagctgggactacagcgcaagacaccatgccttgttaattttttgaagtttttgtagacacagagtctctctatggtgcccaggctggtctcaaactcctgacctgaagccatcctcccacctcagcccccaaagtgttgggattacaggcatgagccactgtgcctggcccagggtatccattatttgatccaagggtacaatgtggcc

SEQ ID NO: 812908 - DNA, 455 bp, Homo sapiens
acccttgggaaacagcaccccattcaagaaagctacaaactgatcaaatgttcaacttggccactgcaatggcacaaacatgagtggatttcaagggctaaaacygagctatttgtcctttagtttttacataaagttaagtgattgttgtaaaagaaatgtattaggctgtcaatattgatgaagcttaccatagtacaacaataaagaaaaaaatagggtaagagatttattctgcataattattagaaaataggggcagctaacatatcatttttcccaataaagtccattttcagtctataatataaatcagatcatatacttgccaaacctcaagggagttttttttttattttttatttttttgggagttttaaaggtaaaggtaaaggacacaccatatccctgggcccaatattgtgactttgtgctaccaacacacacagagatga

SEQ ID NO: 812909 - DNA, 619 bp, Homo sapiens
atggctggacatttgctatatgggcaatgtttkttggtggcagtaggaaaatgagaactagctcatatttgctaatacttggaaataaaacttactataccggtgattatgaaagtaggtattagaaagccccctgaattctggatagttaactgaaaatattccaggtaaaactacaaagaactggtaacaattgcaagatttacaaacactaacaagttatcttgaattatatactcctgaaaaaattcaataagcaagaagcatatctatggtatgtttgctcttttgttcaacagatatttatcaaattccttttctgtgccattccttgtgttaagtgctggggaaagagtcatgagtcttcctcttatatagccttggccaattggtagggaaataaatagataatataatggcaaattgagataaatgatatgaaggaaaccaacatggttgtgttagagaaaaactgcatgtacctactgtagagtggtcaggtgaattttctccaagaagtgactcttaaactgagactaaaggataagaaaactaaaatcgtgccaagaactgatgactgttctgggtagagaaaataatgagagtaagttttatgggt

SEQ ID NO: 812910 - DNA, 511 bp, Homo sapiens
gtagggtgaaaggaagggaartagagctaaaaagaaggtagaagacagctccccagttgagaaatgtattttttaatgaaactcctatagcaacacttagcttttgcctccttgtgatttgtttctttccatttcaaaagttgttcatatttcagtaaatatgagtcacctgccttattgttacttgtagcagtatcattagtgaggatccttcagggaatgggcccttaagcatttgcttcaaatgacagatgactggttccatgctattaaactgatctctcaccccattccagaccctagccagacactggaagcactaacaccatcataattcttactctggaccttctatgaaccagtttactttcaggatgttgttcatttgttttggctgaacacatcaagtttctctgaacgtttactgctctccattcagcacaggtcaaatctccttcataaactctgccttcacatgtgagacttgccactctcctcagacaccctttcc

SEQ ID NO: 812911 - DNA, 627 bp, Homo sapiens
cagctttcccacctgtaaaatggaaataataatgcctgtcttccacatatggcaactggaggacaacatgagaaaaagagctctttgtgcactgtaactctatgggtgtgtgttgtccttatcagatgctaccccaccatgtgaaacagaacatcatcattcttgggcaattctgtgtttgtttttgtttttttaaatgccctgagcaaagctttgcactctcctcaatatggcatcctccctggaggcttctactgccactgcttacaaggtggttcttaccactccaatcttacaatttccatttaaaaaaaaaataaaaacagacaaaaaaacaaaaatggttactccagaattctactttaagtcaatttctcattttccatgtgtgcttgtttccttctttttatctaggaagtcacattaaaaagtacttttctaccccacaatttgttaacaagctcctctgaattataaaatattggggcagaagargtagagataaaaattgtttcatgtgctccctttgcacatggtttaaatagttgagaacagaatgaaggaaagtttgcagcctttgaatctgtaaattgatcataaaaagcaggcaacaataaaagagccaat

SEQ ID NO: 812912 - DNA, 568 bp, Homo sapiens
caattatctcccactgggtccctcccacaacacatgggttataagagctacaattcaagataagatttgggtggggacacagccaaaccatatcacattgtacttggcattagagatatgcagtctggactttgccctctgtagagtcctcatcttaaggataatgtgttaactcaaattctcacatgagaaagaaatatgtttttacttaaaaatgcatgaaatcatgaaaaaaaaaccctccaagaaaagacaggtgaatatttaactgatctgttttggaggaaagataattacagcatataacacaagaaaccacaaaggaaaatctataggtttaagtatattacgattaagctcatatctacacacaaactattatcaactacattgaaaatcaaaaagtgagctggggaaaatctctaacacatttactgcagatggagggtaaatataatttttatatagagttatttgaattagcaaagaaaagatctagtaatccaatagaaaagtagacaagagacaggaatagataattcaccaaaraaatatattaccaaaacat

SEQ ID NO: 812913 - DNA, 644 bp, Homo sapiens
ttgtctagggagagggttactctggctagatatcttccctctcagctcaacctcccagwggcccaccagtgaaattcctccccagccacctccccagtgtttatggggcccccaggaaactgatgcacccttacctggccgaacagggcatgcgggcccctccattgctgctggctctgtgtggctgcctctgtccactctccttcccattcctgccccccttgggccatgggatgccagcctcttcctttacaggcaccccagtttctgtgagcaagtctccaggagttcacccctacttccagaaagcggagggggaagcagagcccctaccctcggttaggaacaagggcagtttcaggggtgtgtggtctgtgcacttccatgaggcctcaggtcagaagtgctggcggttggtccaatgctcttctgtcttgaagtctcttaatttttaaattaggggcaacttgttttcattttacactgggctccaaaaattatttaggcggtcttgactgttctcatccgcttatagaaaggaggagggtttctggcaatggtgggagtggagagctggttctggaggctgttgaagccccaggaggtacacagtggttttcacctctctttagagtggaagatgc

SEQ ID NO: 812914 - DNA, 502 bp, Homo sapiens
ctgctggtgacctctgctgcttggggcmtccaattcatgtcagttcccctcccctgtctttccagctgttcagtcgtattcccacttcccaccaccatctccccgcaccgcacgctggccacgtggaaggtttgcggaatggggcccaggggcttgtggaaggtcacgcagcccatccagggcacagtcggaactaaaactgagccctcttgaagcttggctttcaggggtcacaaactcaaagccttcaggggccagatagccaagggtagagtgtggggtggctctgggttgggcaatggttgggggagtctgtggcaaagtaaaaggtatgtgccccattgagggccaggtgtgtgcaatcctcgccaagtctaagagcgagtccagtgttcacggagggcagtgacccgcccagggtcacgcagggattcagaaccactgggtactccgggttcacagtgtgatctttccaggatgccacttactgactgaggacttg

SEQ ID NO: 812915 - DNA, 502 bp, Homo sapiens
ctgctggtgacctctgctgcttggggcatccaattcatgtcagttcccctcccctgtctttccagctgttcagtcgtattcccacttcccaccaccatctccccgcaccgcacgctggccaygtggaaggtttgcggaatggggcccaggggcttgtggaaggtcacgcagcccatccagggcacagtcggaactaaaactgagccctcttgaagcttggctttcaggggtcacaaactcaaagccttcaggggccagatagccaagggtagagtgtggggtggctctgggttgggcaatggttgggggagtctgtggcaaagtaaaaggtatgtgccccattgagggccaggtgtgtgcaatcctcgccaagtctaagagcgagtccagtgttcacggagggcagtgacccgcccagggtcacgcagggattcagaaccactgggtactccgggttcacagtgtgatctttccaggatgccacttactgactgaggacttg

SEQ ID NO: 812916 - DNA, 587 bp, Homo sapiens
agcagagctctgataaaggacgtgcatttgagcataaagatgaccaaaggggccctgaaggagggtgctgccagcaagggagttcctgggtctgtaagtcttgtggtctctccacygcgtgtgttcttttgcagcagccccgtagctgggtggagcctccgggcctgacgtggaccttcactggagaagtgactcaggtgggaaaagtctccccgggcctctccacctgcaggatcgccttcctacaccttcccccgcccgcttccttcgcgcgggctcctcccaatgaccaccagcagaactgcagcctcctgccttagctgacctggagcccgaggtagctcagatgccagctccttcctccaagagaccctagaaatgccattggctgctactctgatgctctggcagaaggcatgccgttgaagtgtactgtgttcgatgtaaactattatgagtttgcatctggctaaacgtgctagtgagttaattagccacctggggtagaaacaagaaaactatgggtggcctaggcagagctcgatggagcaggaattaggggaactgagaaagacaggcaagagact

SEQ ID NO: 812917 - DNA, 516 bp, Homo sapiens
cgccaagatggccgaataggaacagctccagtctacagctctcagcgtgagtgacacagaagatggatgatttctgcatttccaactgaggtactrggttcatctcactggggattgttggaaagtgggtgtaggacagtgggtgcagcgcaccgagcatgagccgaagcagggcgaggcatcgcctcacccaggaagcacaaggggtcagggaattccctttcctagccaaggaaaggggtgacagacagcacctggaaaattgggtcactcccaccctaatactgcgcttttccgatggtcttagcaaacggcacaccaggagattatatgctgtgcatggctcggagggtcccatgcccacggagcctcactcattgctagcacagcagtctgagatcaaaccacaaggcggcagcaagtcttggggaggggcgcccgccattgctgaggcttgagcaggtaaacaaagcagcccggaagctcgaactgggtggagcccactgcagctcaaag

SEQ ID NO: 812918 - DNA, 627 bp, Homo sapiens
ttgggaggcccaggcggcaagatcacttaagcccaggaggcagaggttgcagtgagccaagatcgtgccactgsactccagcctaggtgacagagtgagaccttgtcaaaaaaaaaaacaacaaaaaaaaaacagattatcggaatgatattggtctgccaatggcaagaaatgtcccctctcgcctgcgatggctttccttgcattccagtaactcctgggatgtccttcccattcttctggaaaccgtgttttctgacccacacacacaggggttagaaaacccctgtgttcgtacacaaagtacatactccatactcagagccagccaggagtattggaaattggtgaacagggtaccccacccagcacagcaaggtcaagtttgggatatcacaagatttggcactgagaaatttgaaatttttccattcaatcagtggatcttaatccttggggggtcactgatgcctttgaaaatctaataaagctacacacacacacacacacacacacacacacacacacacacacacaatgcacatagaaacaaaaacttgccaccaatttcaaggtgttcacaacctccctgaagcttccccaaggattctttagagctgccctatc

SEQ ID NO: 812919 - DNA, 625 bp, Homo sapiens
tttgggactgtggggtttcttgggaggtagcaaagccctgggcaaactggaatgagctggtctcccaggtaggaggttcagacgtgactcgagcatcaggctcttctcaggacgttcagctctctgtgcctgggaacctttcagtacccaacagtgtctgacacacgaggtgctcagtaagtagagagaaatgtgccttgcacctggagctcaacaaacgaacaattttcttcagctttaggctcaactggaaaatagtcttcaggggccttgaacatggggtgcaggtgagtgtcagtgggcacagccctgatcttgctctgccctaccccacaccgctcatcctcagaaaccagtctggattagggacaacccggtggctggggtcagctggcaggcagccaggcagggttctgctccccagagaccggtaagtgatccctgctcttcccagccatgcctaagccatatgcacccccaagaagcctcaaagagtgggcaatgtccatgaagtctgggctcttggtgaacactggtcaccaagcattcaccaagatgttcatacagatagggaaatgagtcccatcgaagacaattygcatatgttgtttgtaaaagaaggaaa

SEQ ID NO: 812920 - DNA, 638 bp, Homo sapiens
atgttagagaagtttatctgttcaattgtttatttcccaggtgatgggatactcygtcatggattcagcacagagtgcctctttggagagaactgtcccaagtttccactacattaggaaaaatcgaggtcatttcttattacattctacaaggcactttgaatttgtagcagtgaggatggtcagagtacttgatgagatgtggctgagttgagaaaagaaagatggatgctggtcaagtgcttcaagttatggtggccaagagcagtgatggttacagctgttatcaggggcaccagcagttctagacacaaagctggaagctgaaaggtcatcaccgtaaggacatacaattctttcaagaataatgtcatgaatacagagtgagccagttggagatgggccctttcatgcttattatcttctcaatgtttcaagtctgttccaatgactcttcttgagcaaacatgcttgatattatgatttggttttggcctttaatacaagccctttagatagcattttgcttactcccagttagttggaaatgtgctctcttaaaccatagtccactcaagtacattgcataaaacatatacagatttcgacctatgacaaataatgtgttttctgcctct

SEQ ID NO: 812921 - DNA, 613 bp, Homo sapiens
aactgcctgttatcgtatactaagaaacagtggggaataggccgcatgcagccgacccaaagattctgtaaaaacctgggaaagrtccatttcaaagctctttgcatcttttattctttctcctcaaaggaagagtttttttattaaatacttttaagggttttttgttggtagtcatactccttatttctctcaaagggcagtactgcatgggcacctggcattgagtacaaagctggaggggaatcaggatgataacaatgatgtcatttaccaggaggtggtccagggagcagggatgctcagcatgtgtcctgcccaatctgaagtcctgcagagcctttggattagtgccccaaccccataccagccaactttactcagtcccataaaagtcacagtgtaagagaagagagctaaaaatattttattctattctatctaggccttcttacatactctaggttggccagagcaagggcacttggtagaaacatcatgctgtacaggtgtgcgttcatgtgttttgtgtttggagggttggtgttatgcatgtgttatgtgaatgagtgtaaatttccctttcttttgaggctcagggtgtattgcaaag

SEQ ID NO: 812922 - DNA, 600 bp, Homo sapiens
ttagtgcccgtattttataacctttgttcagctcagcatctataaatcctgtattttgtactcaaggagaaaacagcttattttggttgtattagttacattcaagaaattatgtgttgtatttgttttctctccctcgattgctccccaccccatcctgcctctctggagcccaggggactttttggcatagtcctccataaattataagctattattaggtcatcattgtaaaaaatcctgggtcaagataacaagaaaggcttgctgtagctccagactaaaatgacccccactggggtccacagataggcccaccagaggattaatcatagcctgtgattcctgagttatagtcgcaaaaaagcaggtaaccacaactatgccaagtgatcatgaaaatgtccttctgtgaaggattctgtgtatgatgagccttcagatgggtgaaatatggcaaatcagaaccccaaaactaacccasttatcacattagaagactgcagttctggttgctcaaggggaaccagcacttggtttgaggctgcgctggaagtggttggacgtgcttcctgccgtttagtctgtgctttggggaga

SEQ ID NO: 812923 - DNA, 496 bp, Homo sapiens
aagatttttcatagaacaataacaacataaaagatatgtgattccatcaaaaaagatatgaacttatttakcttttgctattgctataatcatcagtaactagacttaggtgtacatatctttaacctgcatacttttgcctaatactttttttacatgtgcataactgttttttaaagaaccaagcacacaatacaggaaggcaaaaagtaagatataagatacagcacacgaattttgcctggctagttccagaagcactctagaaaagtatagttgttaggttatgtttggaggatcataatgaacctttccaggaaaggatggaacgtggagatgatgcacattaatgacactgatgtggtgttgtgaaaatatgaagagctgtaaggacttatttaggagatttgccattggagagtcttgcaaacaatatcaacttttgactgactgaatgaataaagttttgcagctgcacagataacacagaagagag

SEQ ID NO: 812924 - DNA, 465 bp, Homo sapiens
tcatgaacctatgggaaataaagggttctgctaaactaatggatctttctgatcagttttattatctgcccacctctaccaactttttcgctacctttccattgacctttgctcagagaatttttaattttttttaagtcaaagagcaacagaaaagtccattttcttcgaagtggaaggtacattcacagggtgttttatttctaataagcagtgtactgtaaggtagtacaaaagcattggccttaataccataagacctgagtttgaatgctagatcttaatagtttctcatctttggaaagttagaataagctatgttatcctgctgtaatggacaactgtaaacattgcagtgacctaaaataataaagatctatttcttactcatgctgcatgcccatcstctactcttcattgtccttaattcaggatacaggatcctggacaatccgccttctgaaa

SEQ ID NO: 812925 - DNA, 502 bp, Homo sapiens
ttttctcagaacttctttacatcaaattctataatatctgtctgataatatccaacttttcctgcctcggccacaactggcatccaagatgacagaatcacctcctacaaaggtttctatcatttcatgtagttagttcattaagttcttcctatggctgaaactgtaatctgaaatggcagtttcctattaccatcacctcttcctaagacttgaaattaatgcagttagaacaagagaatgttccaaaacttgggaatttctacactggcctgtccattcctactttctaagaaatcgtctcactttacatgacccttcttttcctaaatcaaaccagaatgcctaggagccactctctactgatgctcctgaggacagttctaaaacttaggtctacagcgaaaagcagcttcaagccctaaagaactttttttcttggaagtcagttggaggctttraagtcaaggctttgagatgcaggggcagtaagaagaattaa

SEQ ID NO: 812926 - DNA, 577 bp, Homo sapiens
cagacaataaaaagctacacagcaccatgccaggttatgataaaggctttgcagcatattcagtgatacgggtgccatgtgtcaccaggcgagtgaaggaaggtatctctgacatggcatcgcaacacaggcttgcatgaaagaagggagaaagcacacaaaacacaaagcaagagtgttccagacaaagggaatggcaaaaatgatggctctaaagcaagaagaaagggcctactcttcaagtggaaaaacagacttcatgattattaataagaaatctaaactgatacaattaataggcagaaaataccaataaagactcaacaagaaaaatgttttgatggataatgcttcttattaagcattaaattctcatggtcatgctggagaaatgaaagaaatctctactaattgagcatctcctacgtgtggggcacgcctctactcattctcacacgcctttgtactcctgtgtgaagaagagattatatcttcatgtctacttgacagatgaaragagagacccagagaggataagaaacttggccaaggtcacaaagcaagtggcagaactgcc

SEQ ID NO: 812927 - DNA, 610 bp, Homo sapiens
aatcagacttgcactggggcaagcccctgatggagccccgcgtttctaygccctgtttgtgtcctttgggtatccaccacgactgccaagagggcacccagagactacaaatatgtgagctgcagctgagcaaagggatgtgtttactttccatcctgaactacaacttgacctgtagcaaaaacaaaaatactgcaatgtgtatttttttcccagaaatgataattatagtactccaaacatttttcaaacttcaactaccaaaatagaaaaggcatttcaacaaataatttattaaataggtacttatattcttggtagcccttacatggaaatcatactttttccccccttcatagccattaaagggcttggcttctggctcaaagccatcttccagggcaagatggggttcagcctcccaagcagaggtaggtggaaaaagtactccctgttcatcacagtcagtatgggtttataagcacctttttctatttcaaaataccagcaatttaagcagtacagtgtgtatacggaggaacttttgcacatctggctgacgggatgtgctggaatggaagcctaaggctagatacacccttggtcccaa

SEQ ID NO: 812928 - DNA, 610 bp, Homo sapiens
aagtaatcgcagggcccgtgcccctgttgaaatgttacagctgggatctggcagaaatcctgggccactcagtccagctcaacaatccgatatcacacatcgagagctggccaagtcccaggaacggaaggctccctgccttcacttccgtaggtctaggggaagacaatggcatctgctttcacggctggtaggatggctttagagagtaagacaggatgggagtgagagctgcatgaaggactagtttggaaaaggaggaagggaaactggcacatcacgctgtggaaaggagaactgggctgggaagtggagaataagttttagtttagcaacataggttattcccacttcagagtggaatttccaactgcctcagaaaatagatgctttggaacaatgaatcagcttgtttatgaacacgtaatgattttgtagctgtttaccgagtgtgtacatgcagcaggtactaagctggattgcggctggggatacacagggttctggccctaagtttagggaatttagtttagggaagcttttatatataaccacaaatgagaacacaatgggaggytgactattaaatcctctccccagagcacacaaa

SEQ ID NO: 812929 - DNA, 571 bp, Homo sapiens
tttcacttgaaccaccatcttcctaacgcctttacctttcctgcctctttatcctccttctgtatctgtctcccaaacccaacttacttaatcccagagatggcaaacctgaatcaggcaggaatcctagaagagtagagggggactctagacacctcaagaaggtctgtgacctctaacagggcatcactactcattccatgccaaagggtaaactcaatgagggcataccttccatgtactcaagagaagccagatttttacgtgaagtatgccagtttttaaatatcagtgactaatttaaaaatagaaaaaaaggggcacattaaagaaaacatgtcttggggtaaaattcagccccaagaactactaactgcaaactgtgattcaaccctttgacttcctctgtgctgatactcaagctgttaagagcagctagagaaaagtcagagctactctgcatcttctaccctgaagccccccatcatgcctcasagacctcggttcattcctgacgatcacttcttccatgatgccttctctaactagcagcacaaagataaacagctga

SEQ ID NO: 812930 - DNA, 707 bp, Homo sapiens
ttctcaaataaattttaagtgacttcagtaaataaaaatatacagcatatacttggacagtaacactcaatattttaaaaataactattgtctctatattgatccaaagagttaatgaaattctaatgaaagtctcagcaggtcttttattgttgctgaaattgataaactgttttgaaaatttaaatgggaatcagactatcaagaacagctaagaatatccaacagcaaagttggatgacatattacctgatatcaaaacttattactgtatacacatgcagtaattgagaccatgtaatattggtgcaaaaataaaaaaaagagaccagcagaatggaacagagagaataaaaagagatccacatatacatatttactcgctctgtgacaaaaaagccactgtagcagagcgggaaaataacggccatttcaatgaattctgttgggtcaattgcctatttatgtaaaaataatttaaatgttactctgcacaaaaataaatttcatgtctcaatgaggaagccaaaaaataaaactgctgaaagataacattggtggagatctttataamattgggattgacaaaaatttcttaaagaagataaaacagtgttaacttaaagattaaaaacttgataatttgaactttgctaaaattaagaatctctattcagcgaaagacacaattaaaagagtgaaaaaag

SEQ ID NO: 812931 - DNA, 635 bp, Homo sapiens
tgcatttattagctgatggacatctgtgttgtttctatttttttgactattatgaataatgctgctatgaacatttgtgtacaggcttttgtgtggggatatgttttcatttctcttgggtatatatctaggagtgcaagtcccaggtcatgtggcaactctgtgtttaactttttgagaaactaccaaacttttttccaaagcagctgcaccattttacatttctgccaatgatgtatgggtgttccaatttctccacatcttcacaaatatttgttattttctgtcttttttattattgtcatcacagtgggtgtgaagtggcacctcactgtgattttgattttcctaatgactagtaattttgaacatattatgtttttattggctttttgtatatctttgaagaaaagtttatataaaccattctccttacccttttttggttttacttgtcttttgattgggttgtaagagttcattatatattttgaatagatttttatatattctggatagactcttgttagatacatgatttgcaaatattttctcccactctgtatgttatattttctctttctcgagagcaycctaaaaagtgcttaagagagtacaacagtttttaatttcaa

SEQ ID NO: 812932 - DNA, 570 bp, Homo sapiens
cctcctgtattagggttctttagagggacagaactaatatgatatgtgtgtgtatatatatgagtttattaaggaatattaactcacataatcacaaggtcmcacaataggccatctgcaagctgaggagcaaggaggacaaagcagaagaacttgaagtttgatgttcaagggcaggaagcatccagcatgggagaaagatgtagcctgggaggttaagccagcctagtcttttcacatgcttctgcctgctttttattctggccttgctgacagatgattagattgtgtccacccagattgagtgagtctgcttttcccagtcaactgactcaaatgttaatctccttcggcagcaccctcagagaaacacccaggatcaatactttgcatccttcaatccaatcaagttgacactcagtattaaccaccacaagtccaccccttgtcaacttgaacccatacacatctcctgagatcatacataatattagaataaagacaatgataaggtcataattatgccaaacacaatacaactatccttcatacaactggaaatacaccaat

SEQ ID NO: 812933 - DNA, 570 bp, Homo sapiens
cctcctgtattagggttctttagagggacagaactaatatgatatgtgtgtgtatatatatgagtttattaaggaatattaactcacataatcacaaggtcccacaataggccatctgcaagctgaggagcraggaggacaaagcagaagaacttgaagtttgatgttcaagggcaggaagcatccagcatgggagaaagatgtagcctgggaggttaagccagcctagtcttttcacatgcttctgcctgctttttattctggccttgctgacagatgattagattgtgtccacccagattgagtgagtctgcttttcccagtcaactgactcaaatgttaatctccttcggcagcaccctcagagaaacacccaggatcaatactttgcatccttcaatccaatcaagttgacactcagtattaaccaccacaagtccaccccttgtcaacttgaacccatacacatctcctgagatcatacataatattagaataaagacaatgataaggtcataattatgccaaacacaatacaactatccttcatacaactggaaatacaccaat

SEQ ID NO: 812934 - DNA, 570 bp, Homo sapiens
cctcctgtattagggttctttagagggacagaactaatatgatatgtgtgtgtatatatatgagtttattaaggaatattaactcacataatcacaaggtcccacaataggccatctgcaagctgaggagcaaggaggacaaagcagaagaacttgaagtttgatgttcaagggcaggaagcatccagcatgggagaaagatgtagcctgggaggttaagccagcctagtcttttcacatgcttctgcctgctttttattctggccttgctgacagatgattagattgtgtccacccagattgagtgagtctgcttttcccagtcaactgactcaaatgttaatctccttcggcagcaccctcagagaaacacccaggatcaatactttgcatccttcaatccaatcaagttgacactcagtattaaccaccacaartccaccccttgtcaacttgaacccatacacatctcctgagatcatacataatattagaataaagacaatgataaggtcataattatgccaaacacaatacaactatccttcatacaactggaaatacaccaat

SEQ ID NO: 812935 - DNA, 542 bp, Homo sapiens
aatattttctcccattctgtgggttgtctcytcacattgttgtttgtttcctttgctgtacagaagttttttaacttgatgtgatcccatttgtccatttttgctttggtttcctgtgctcaaaaaatattttcccagactaatgtccttgggagttttaccattgctttcttttagtggtttcacagtttgaggtctttgattaagtctttaatccattttgatttgatttctgcatatggcaagatagaatgcagctatagtctagtttcattcttttgcatatggatacccagttttcccagcaccgtttattgaagagaccgccctttccccagtgtatgttcttgtcacctttgacaaaaataagttcattgtagatgtgtagatttatctctgggattttaattctgttccactgatctatatgtctgtttttatgccagcaccctgttatttggttactatagttctgtagtataatttaaagtcaggtaatatagttccttcacttttgttctttggcttttttgggtcctttc

SEQ ID NO: 812936 - DNA, 558 bp, Homo sapiens
tgttgtttgtttcttttctcttgctgcttttaggatgcttcctrtatccttgacctttttggagtttgataattaaataccttgaggtagtcttctttgggttacatcttcttggcgttctataaccttcttgtagttggatatttatgtctttctctagattgggaggttctctgttatcatctctttgaataaactttctacccctatctctttatctacctcctctttaaggccaataactcttagatttgccctcttgaggctattctttaaatcctgtaggtatgcttcattgttttttattcttttttttgtctcctctgactgtgtattttcaaatagcctgtattcaagctcactaaattcttttttctgcttgatcagttctgctattaaaaggctctgatgcattcttcagtatgccaattgtgtttttaaactccagaatttctgcttgctcctttataattatttcaatttctttgttaaatgtatctaaattccttctctgtgttatcttgaatttctttgagtttcctcagaacagcaattttg

SEQ ID NO: 812937 - DNA, 621 bp, Homo sapiens
catccaaagcctaatccagagcaaggttctaactttcttcarttctatgaagactgagagagatgacaaagctgcaaaacaaaagtcagtagctagctgaggttggttcctgaggtttagtgaaagaagccacctccagaacataaaagtgcacagtgaagcaacaagtgctgatgtagaaaagctgcagcaagttatccagaggatctagctaagatcactgatgaaggtggtcacactaacaacagatttccaatgtagacaaaacaaccttccattagaagaagatgccatctaaggctttcatagctagagaggaaaagtcaatgcctagcttcaaagcttcaaggaacaggctgactctcttgttaggggctaatgcagttggagactttaagttgaagccaatgctcatttgccatttggaaaattctggggtgcttaagaattatgccaaagctactccacctgtctgctataaatgaagcaacaaagcctgaatgacagcacgtttgtttatggtatggtttactaaatatattgagcccactattgagatctattgctcagaaaaaattccttttgaaatattactgctcactgacagtgcatctggtcacc

SEQ ID NO: 812938 - DNA, 626 bp, Homo sapiens
ggtgttgacttctctctagctatgaaagtcctagaaggcatcttcttccaatagaaggctgcttcatgtacattgaaaatstattgtttagtttagccaccttcaccaattatctaagctagagctttttctggataacatggtgcaggttctacatcagcacttgctgcttcaccttgcacctttatattatggagatggcttcttttcttaaaccttataaacaacctctactagctaccaacttttcttctgcagcttcctcacctctctcagccttcatagaattgaagagagttaggatcttgttctgaattaggctttggcttaagggaatgtggccggtttgggcttctatccagaccaatacaacttttccgtatcagcaacaaagctgtttcactttcttatctttcatgtgttcactggagtagcacttttaatttccttcaggaacttttcctttccatccacagcttggttgtttggtacaagaagcctagcttttggcctatctcagctttccacatgccttcctcactaaacttaatgagttctagcttttcatttaatttgagagatgtgtagctctccttttcatttaacacttagagaccattgtaggg

SEQ ID NO: 812939 - DNA, 501 bp, Homo sapiens
ctaagaattgaataaatatctatatgtaaaaagygctttggtatgtttccacaaagtttgagtgtggtttcacgtgatcactccagccaataatcattaaaggcctcagcactcactggcaaacccatgcctgttcattattaagcactgaaaatgatgagccaatgaagaatatgataatgcaatctttagaatcatttatggttatgagcattgattcaccaaataaaggcttaaaatgtaatggccctgaaaatggaaagactatgtgtaagaatttttagaaactgtaagagaagaatggtaataaactgtaaagaggagaccaaattcattagaataaaaaaaattgagatgggctgaagacactaaggaacgattggaatgagaagaatcgccaaatgtggagcacctaatcaaaaagagaaccagaaatgaataatcaacaaggagctgtaatcaacatgggagagcaaagaagaaaagaccggctgggagagc

SEQ ID NO: 812940 - DNA, 559 bp, Homo sapiens
tagctctggtgcttgttaatactaaatgttttccagcttacctataaggaaactgagtcttaggaagcaattgcagggcctctactttgtgcatgagaatgagtgacggctggggaarcctgggatttggcctgatgttcaagcactggcacctgcctgccttttctctgtaaacatctgaccctagaatgctccaccagggcgagaccatcatcaccaagcagcagctgcatggtatttatcaaaggaggcgtggtttcctttgctgtggctctccgcattcgtggcagttattcatttttgaagcagaggtcacttttctttcactggtgaggtactttgacaaagacgaagaagggagacaatggtaatgatggtggagtcagggggaagtggggatgggattggcattgggtttgaaggctgacagtcagaggaaggggagggactgaggataaaatacttgctgtgctcatgttgtccaagagtttgcattctctggtagtcagtgatcaaatgaagcagggagtttcgtgttcaaaagcagcacctacaggtt

SEQ ID NO: 812941 - DNA, 550 bp, Homo sapiens
agggaaagaacatgtgtgttttaccagtggaaygcattctttgtgttatctcttcgatttttaacattttatgtttccagtttataaactttgcctccagtttgatgaagaaaatttagctattagaaagtatttaaaatctcaaaagtatgacattttaaaatgttagcaggtttaaagataacttagtttttcaactcttaacccaaaattatacttgtatactataatttgtgttgaattacttggtattatttatcatcctagtaagatctattttatataatttgattcactttttatattgaattatgttaattgtttttgtaatacacctttcatatttcttcaaagaaaactagtgttgggttattgctaattttgcttcgtggtttggttatttacatataaaaattatattgttttaaaaattgcaaagtgatcgtttattgacacatcagcaagaattaatgttgaaatgcaagttttttcccctatccttaactaagtgtgtagatatctttgttttgtttctttaatagatagcaaa

SEQ ID NO: 812942 - DNA, 550 bp, Homo sapiens
agggaaagaacatgtgtgttttaccagtggaatgcattctttgtgttatctcttcgatttttaacattttatgtttccagtttataaactttgcctccagtttgatgaagaaaatttagctattagaaagtatttaaaatctcaaaagtatgacattttaaaatgttagcaggtttaaagataacttagtttttcaactcttaacccaaaattatacttgtatactataatttgtgttgaattacttggtattatttatcatcctagtaagatctattttatataatttgattcactttttatattgaattatgttaattgtttttgtaatacacctttcatatttcttcaaagaaaactagtgttgggttattgctaattttgcttcgtggtttggttatttacatataaaaattatattgttttaaaaattgcaaagtgatcrtttattgacacatcagcaagaattaatgttgaaatgcaagttttttcccctatccttaactaagtgtgtagatatctttgttttgtttctttaatagatagcaaa

SEQ ID NO: 812943 - DNA, 550 bp, Homo sapiens
cttagtacagatggtccctgatttaccatggtttgacttaggatttttcagctttaccatggtaaccatacaactattctgtctttcagtacagaactcaatgaatcggccgggtgcaagtgcccgtctgtaatccctgcactttgggaggccgaggcggacggatcacggggtcaggagatcgagaccatcctggctaacacggtgaaaccttgtctctactaaaagtacaaaaaattagccgcgcgaggtggcaggcgcctgtagtcctagctactcgggaggctgaggcaggagaatgccgtgaacctggggagcggagcctgcagtgagccgagatcgggccactgcactccagcctgggagacagagcgagactccgtctcaaaaagaaaaaagaactcttttttttttgacagagtcgtgctctgttgtccaggctggagtgcagatcttggctcactgcagtcccgacctcccaggctcaagtgatcctcccacttcagcctcctaarcggtgagtagctgggaccacaggtgccccactatg

SEQ ID NO: 812944 - DNA, 599 bp, Homo sapiens
acacctttgatgtattagtttggtgggagcggggagttcaggggaaaaaaagacgctgagggaaagaactatgggcccaataggaagttgatatctggaatctttttggtcactaaataagctagattgcatcagagactctagcaaaaacaataatttctcagatgtttattgtgtgtgaccatgctgagtcagagggtgcgtcaaccccactctgggaggaaagtgctcacaaggagagaggaatgatctcttcctgggtaagaggatcttttttttttgagacggagtcttgctctgtcgcccaggctggagtgcagtagtgcgatctcggctcactgcaagctccgcctcctgggttcacgccattctcctgcctcagcctcccgagtagctgggactacaggcgcccgccaccacgcccggctagttttttgtaaatttttttttagtagagacgggctctcaccktgttagccaggatggtctcgatctcctgacctcgtgatccgcccgcctcggcctcccaaagtgctgggattacaggcgtgagccaccacgcgcccggcctaagaggatctatttagtaaaattccttg

SEQ ID NO: 812945 - DNA, 670 bp, Homo sapiens
gattaatgctgaaaaacaactcaaatgaaccaatgaaccaaaagataagccaaatccagaaacagctgtggctcaacccccagcaatggactggaaatccatgagacagctccgcagatagagaatgaaaagtctgttcttacatacgttatactcagagtaagtaatcttatgtgtaaaagcagccagggaaaaacaaaatcaaaatgtcccttccccaaaacccttctaggaaacagtcatcttgtgaaaaaacaaagttttggcccagtgttttgaaaatatcttacagtgaggcatacattttttaaaaatgtataacccaaatttattacttatttattgctacataacaagtcacttccaaacactgtgctgtaaaacaacagtcttactatctgtcacattttctgtgggccaggaattcaaacagagcacagtggagatggctaatctcctccagaatgtctggaacttcaaccaaaaaacttgaaggctggaggctggaataggctgatggcttcttcatgtacatgcctaacagttcatactggctgttgactaagggccagcagcatcacccacacctggcctcactatgtggcctgggcttcctcacaacatggcagctgggatcaaaaggcawgcatcagcagcgtgcagtagcaca

SEQ ID NO: 812946 - DNA, 670 bp, Homo sapiens
gattaatgctgaaaaacaactcaaatgaaccaatgaaccaaaagataagccaaatccagaaacagctgtggctcaacccccagcaatggactggaaatccatgagacagctccgcagatagagaatgaaaagtctgttcttacatacgttatactcagagtaagtaatcttatgtgtaaaagcagccagggaaaaacaaaatcaaaatgtcccttccccaaaacccttctaggaaacagtcatcttgtgaaaaaacaaagttttggcccagtgttttgaaaatatcttacagtgaggcatacattttttaaaaatgtataacccaaatttattacttatttattgctacataacaagtcacttccaaacactgtgctgtaaaacaacagtcttactatctgtcacattttctgtgggccaggaattcaaacagagcacagtggagatggctaatctcctccagaatgtctggaacttcaaccaaaaaacttgaaggctggaggctggaataggctgatggcttcttcatgtacatgcctaacagttcatactggctgttgactaagggccagcagcatcacccacacctggcctcactatgtggcctgggcttcctcacaacatggcagctgggatcaaaaggcaascatcagcagcgtgcagtagcaca

SEQ ID NO: 812947 - DNA, 642 bp, Homo sapiens
tcatataaaataaggtcaaaacaaccaggactactttgtctaaaattatttgtcttattttgctcataggaattcatagwggttttgagatagagcacttttcaatgcgctggacacggtgttctgttttgggtacagtggaaatgactttcctttattttattgcttgtttggcttatcgagggagctgagccttacctaacaagtagctcacatctcttgtcagaggcagtaaatcgatctcgatcaagtttgaaactgagtgaattgttatctaatctgttattctgtggaaatctttctcttctgctacagagaagctaagagacaagttttcccatcactctaggtgtcattctgtttaatcctaacatctataataagaccaataaatagctgtttgttccgatccatagtctcaggctgcctctctccaaagaggctgaagccacttggccttgagatcgcccatctgcactgtgcacttctgattagtgttttggaactccattatacaggtgcaatcttctgggctcagcagttccggttgctctgcccaacagtggtggatcctgaaactgattttcacaccccagtgtagagatgaacgcatgacaggccccccacacagatgtaagaact

SEQ ID NO: 812948 - DNA, 642 bp, Homo sapiens
tcatataaaataaggtcaaaacaaccaggactactttgtctaaaattatttgtcttattttgctcataggaattcatagaggttttgagatagagcacttttcaatgcgctggacacggtgttctgttttgggtacagtggaaatgactttcctttattttattgcttgtttggcttatcgagggagctgagccttacctaacaagtagctcacatctcttgtcagaggcagtaaatcgatctcgatcaagtttgaaactgagtgaattgttatctaatctgttattctgtggaaatctttctcttctgctacagagaagctaagagacaagttttcccatcactctaggtgtcattctgtttaatcctaacatctataataagaccaataaatagctgtttgttccgatccatagtctcaggctgcctctctccaaagaggctgaagccacttggccttgagatcgcccatctgcactgtgcacttctgattagtgttttggaactccattatacaggtgcaatcttctgggctcagcagttycggttgctctgcccaacagtggtggatcctgaaactgattttcacaccccagtgtagagatgaacgcatgacaggccccccacacagatgtaagaact

SEQ ID NO: 812949 - DNA, 642 bp, Homo sapiens
tcatataaaataaggtcaaaacaaccaggactactttgtctaaaattatttgtcttattttgctcataggaattcatagaggttttgagatagagcacttttcaatgcgctggacacggtgttctgttttgggtacagtggaaatgactttcctttattttattgcttgtttggcttatcgagggagctgagccttacctaacaagtagctcacatctcttgtcagaggcagtaaatcgatctcgatcaagtttgaaactgagtgaattgttatctaatctgttattctgtggaaatctttctcttctgctacagagaagctaagagacaagttttcccatcactctaggtgtcattctgtttaatcctaacatctataataagaccaataaatagctgtttgttccgatccatagtctcaggctgcctctctccaaagaggctgaagccacttggccttgagatcgcccatctgcactgtgcacttctgattagtgttttggaactccattatacaggtgcaatcttctgggctcagcagttccggttgctctgcccaacagtggtggatcstgaaactgattttcacaccccagtgtagagatgaacgcatgacaggccccccacacagatgtaagaact

SEQ ID NO: 812950 - DNA, 575 bp, Homo sapiens
tgagtaatacgagatgaccatggtgtctgtatccaacgcacaggcttctgtcgattacggaaattcatgagctgcgttcaaactcaccagatgagttcaatcaacatggtgcaaacatcgcatacataatctattagtttaccccaaagaaactgaagccttgaattcaagtagaatgaagtcatcagtaataaagaaaaaaaaaaaagaaactgataaagcactgttttctaagaacacacttttcttccatttgtggtggaaaaaaaaaattgtactgagactgtaaactattcttccatatgcctataaatgcataaatttaaaaatatgggtttgatcagattgctgttctcaaataagggaatggggcaggaatacaaaatcagctgttcaggattcagaaagtcccctgtggctgacaggagcatggctatttacccagaaaagaaatctggcccaagagaaaaaacaggaaaacagcccagaaagtcatggaccatctaagtgcaaaacatgctgtatcttctcccttgtgtgaatattttttwaaaatatggaacactgtgcaaacc

SEQ ID NO: 812951 - DNA, 620 bp, Homo sapiens
acatgggaacatttgtttccggcttctttcacttagcataatgttttcaagattcatccgtattctagcttgtgttattctttttatggccaaataatattccattgcatggatgtatcacattttgtttaaccattcatcagttgatggacatttgagttgtttttttttctgtttggctattacggataattcttccatgaactttcatatgtgagtttttgtgtggaaacgttttcatttctcttgggtacatacttaggagtggaagtgctgggctatactatatggtatgttaatctgttttgcattgctataaagaaatacctgaggctgggtaatttataaagaaaagaggtttatttggcccacagttctgcagtctatacaagcatagcactggcatctgctcagcttctggtgaggcctcaggaagcttttactcatggcagaaggtggagggggagcaggtatgtcacatggtgagacagtgagcaggagagacgaggaggtgccaggctgttttttagcaawcagatcttgccttaactaatagagtgagaacttgcccattaccatggggagggtaccaagcaattcatgagggatccgcccccatg

SEQ ID NO: 812952 - DNA, 532 bp, Homo sapiens
accggaatgtcagtgagaatctgtggggacttctgtcccatttcagaatggaaggctcttctgtgtttagttttgacttctctccctttccaaattttccatagtgtgactctattaattagtagtctaaaacatagtcagttactgttcacttctcctccagatgccatgtggttcccaatacacctagagactacattagcttcaagtcatcttgagttcccctaaacattcctcttcttcccatctaccctcatttatttcaggttacggaaagagggccatccccattagctcaggtgaactggaaaacccaatcactctatttataacaagagcacaggtgtattgggccagcactgttctaacagctttagaacccagaagagctttagagctcttagacacaacccagctaaccctcagaacaatcctgcgaggtgggtaccatcatgattcccatrataaagatgaggaaaccaaggaatggaaaagttatggacatgtcccacaaccagtaagcattgttagg

SEQ ID NO: 812953 - DNA, 461 bp, Homo sapiens
cagtggctcacacctataatcccagtgcttttgagaggctgaggcaggaggattgcctgagaccagcagttcaagaccagcctggacaataatagcaagatcccatctctacaaaaaaaattaaaaattagctaggcatggtggcacacatctgtagtcctagctactcaggaggctgaggcaggaggatcaccagatcccatgagtcagaggcgtcagtgagctatgattgtgccactgcactctagcctgagtgatagagcaagaccctgtttctataaaaagtttttaaatactcattgtaaaatactgtacatagtgctttataatctgctttttatatgataatatatgacaaacatctttcattgaccataaatagatttctcaatattatccattatggctacagagtaaacctatacaggsatgtctctacttactcaaccaattccttattt

SEQ ID NO: 812954 - DNA, 528 bp, Homo sapiens
caccacgcccggctaattttttgtatttttagtagagatgggttttcaccgtgttggccgggatcatttcgatctcctgacctcgtgatccgcacgcctcagcctcccaaagtgctgggattacaggcgtgagccaccgcgcccggccaacaaatggtacttctagataccgttttatatggttctggccctccccggtgaagttttatttaaagaaaaaagaattatcttggagagatacattcatggggtttaaaaaaaaatagaaaaaaaaagcacacagcgaaaaacgtctttatatcccagaggcaacttttcttgctagtttcttacatgcatagagttatgtgattatataacccttctcttatttacacttgctgttttcacatagtgccaatcattccatattagcatatatagattttatttctttaacatccacagagtaccccaaagtatgtactatggacataccaacatttayttgacaactcttctattagtagatgtttgcatccccctttt

SEQ ID NO: 812955 - DNA, 520 bp, Homo sapiens
aagaaattcagtcctcaccctccttgactttctacagtmctttgacactggtgaccacgctctgccttaaaatgttctctcattggctttcctgatatcctctcaatctcactcctctctgactggtcattctcctgccttctgtgacctgtcttcctcctgctccctgaataaaatccctccccaaggttccattagattctttcttttcctctctttactctcattccctaggtgggttctttctcccttggcttcacgtgaaggactcccagatcttacaacttcatccctaaccccttcccagtgtcccagacctgcatcaaccctgtctgttgtgcatgttcaccaaaatatagcccagtgcagtcccaccaacacgactaagcaaccaaaaggagctatccagaagcagctcagcctgcctcctcccacctgaccacaatgctgcatctcctcaggattcagctcaatgccttggattcaccaccaaccctttccttcaccgtccacttcacca

SEQ ID NO: 812956 - DNA, 474 bp, Homo sapiens
ccgtaatcccagcactttgggaggttgaggggagtggatcacaaggtcagaagatcaagactgtcctggctaacactgagaaaccccgtctctactaaaaatacaaaaaattagctgggtgtggtggcatgcgcctgtagtcccagctactcgggaggctgaggcaggagaattgcttgaacccaggaggtggaggttgtggcactccagcctgggcaacagagcaagactccgtctcaaaaaaaaaaaaaaaaaaaagactgtagtttgttaaagaggttacacggtacacggtatctgtatacacaaggggctactaaggtggatattgtggtaggctgaaaaatggccctcccaaagataccaggttattttcctggaacccgtaaaaattatctttattgggaaagaaaagggggggtytttgtagataagagtaagttaagactcttaaaatggggagcttgtctggac

SEQ ID NO: 812957 - DNA, 488 bp, Homo sapiens
atatcgcatcttttttcaccttcatctctaaaggttcagaaaaacactaatgcagctataagtagagagagaatgggcaatggagcatatgcaataaaacrttacaattggagaatctggcgaagggagtacaggagttcttgatattattctggaaactttgaaattacttcaaaataagtgaaagaataatatatatattatataatacatatacacacctacacacattcagggatcggcaaattaaaactgcaatgagataacactatacaaccacaaaaatggctaaaattttaaaagattgacagcaccaaatgttggagaggatatagagaaactggcttcccatgcactgttagtaggagtgtaaaatgttacaaccactttgggaagagatctgacagcttcttacaaaactaaaagtataccctatgacccagcaattccattcctaggtattttgccaagagaaatgaaaatgtatg

SEQ ID NO: 812958 - DNA, 583 bp, Homo sapiens
gtggcagattcccttcccaaagaggattgcagcattatctccctcccacgtgtgcttctttacaaagtgactttgagcccttcctgttagaggtgaaatgtatgtttcctcgccctgattctgggcaggtttgtgatgacagtggaagtcatgctaaatgatttctgaagctatatataaagctaatatagcctaagcaagtgttactaaggttttataaagtcatacagcctttgaatttttctttatcttggaactcagccatcataatgtgaagaagccgaagcagcctgtgaagaggcgctagtggaaaggaactcaggtgcccctgccctcagtcccagctgaactctcagctgacagccatcaccaacttgccagccacaggagtgagccaacttgagagtggatctttcagtcccagtggagccatctcagctgacacaccatggtaaaaagatgaaccatccttgctgatccttgccagtgctgcagatacatragcaaaataaatgtttttgttgttttaagccactatattttggagtgttttgttatactggtgtgttaaacaggcctctat

SEQ ID NO: 812959 - DNA, 507 bp, Homo sapiens
ttgagcaaagcttgctcaaagctgctccatcagcaggwtgtcagcccggggtccagcgaggagtatggaggaggagctgacctgctagtatgaagggtttaaaggaacttaaggccgcatgtggtggctcacgcctgtaatcccagcactttgggaggccgaggcaggctgatcaccggaggtcaggagtttgagaccagtctggccaacatggcaaaaccttgtctctactaaaaatacaaaaattagctgggtgtgatggtccatgcctgtaatcccagctactagggaggctgaggcaggagaattgcttgaacccggaaggcagaggttgcagtgagccgagattgtgccactgcactgcagcctgggcaacagagcaagaatccttctcaaaaattaaaaaaatcaaaaagtaagagaataaaggaacttaagtacccgccagttcactcgttcatccaatcatcggtataggcaggatcctgtgcaacattcagaggggag

SEQ ID NO: 812960 - DNA, 617 bp, Homo sapiens
tgtctgatagaattcagctgtgaatccatctggtcctggactttgttttgttggcartttttttattactgtttcagtcgtgctacttgttattggtctgttcagagtttccatttctttctggtttaatctagaagggttgtatatttccaggaatttatccatttttctctaggttttctagtttttgtgcataaaggtgttcatagtagccttgaatgatcttttgtatttctgtggtatcggttgtagtatctcccatttcgtctctaattgagcttattcagatcttctctcttctttttttggttaatcttgctaatggtctaccgattttctttatttttccacagaaccagctttttgtttcatttatcttttgtagtgtttgcttcagttttatttagttctgctctgatatttgttatttcttttcttctgctgggtttgagtttgatttgttcttgtttctctagttccttgaggtgtgagcttagattgtctgtttatgctctttcagactttttgatgtagacatttaatgctgtgaacttactaaatgtagtgccgcttttgctgtatcccagaggttttgatgggttgtgtcactattgttc

SEQ ID NO: 812961 - DNA, 618 bp, Homo sapiens
tctatctccatgaggtcattttttttttaaatttttcacatacaagtgagaacatgcaatacttgtctttctgtgcctggcttatttcaccaacygaaatgttattctctacttctgtccatgttgttgcaaattataggatttcattctttttatggctgaataatattccaccatgtatgtgtatcacattttctgtatccatttatccattgatggacacttaggttgattccctgttgtggctattgtgaattttgctgcagtaaccatgggatcgcggatatctttttgatatcttggtttctttcgggtagataccctgtagcgagattgctggatcctgtggtggttttatttttggcaacctccgtgctgtttttcatagtgactgtactgatttacattcccaccaatagtgtataagcattcccctttctttgcatcctcaccaacatctttaattttttgtctttttgataaaagccattttgagatgagatgatatctcattgtggttttgatttgcatttctctgatgattagtgatgttgagtatcttttcatataccaatcgggcatttgtatgtcttcttttgagaaatgtattatttagat

SEQ ID NO: 812962 - DNA, 644 bp, Homo sapiens
ggcaggagaatcgcttgaacctgcctgggtgacggaggttgcagggagccgagattgcaccattgcactccagcctgggtgaaagagcgaaactctgtctcaaaaaaaaaaagttgtctcttacatacaactaaattgtcaaatttgttctgaattagaattgctaggagtaggacacaggtgcacatttctgatgaagaaacagtcttctaaggtggagggtcaatcaactttttctgtaaagggacagagagtaaatgttttagactttgttggccatatggtctctgtcatgatttaactctgctattacagtatgaaaccaatcatagacaatatgtaaacgaatagatatggttgtgttccaataaaactttatttagggacattgaaatttgagtttcataaaattttcatgtcacaggaggaatttggtacagaggccatagtttgctaactagtgctttaaggcagtggttctcaaactgtattgtgcatcgtaaaacacactttgctgggcctcatccccgtagtttctaaytcagtagatctggggtggagccttgtaatttacatttctaacaaatttccaggtggttgccttagggaccacacttcaagaaccactgccctagctgacttat

SEQ ID NO: 812963 - DNA, 607 bp, Homo sapiens
ttggttcatcgcccaaagtactaggctagactttgcrgttggtaacttccctaaggagttctgctttatagaggaaactagggcagatttttaaaattaaaaataaagctaactttttcactagaaaaagttacattacagtgttacaaagtgataagactggttcaaagagaaggcagacattacttcttgtggggtcagcaggggaagcttcctaaaggaagtgcaatttgagctatacctgaaaggatggaatggattactgacagaagtgctgaatggatgagggttggggaacaacctttcatgcaagtacaggagcactaggatgaacaaacagggaagcaggaaatggactcttaaggaattatgaataaattaagttggctggtgtatgtaggtatgttgagggttttataacaggtcagcaactttttccgtaaactttttagtaagtaccttaggctttgtagaccagcagtccctaacctttttggcaccagggactggttttgtggaagagtttttccacggaggtagggggttgggagatggtttcggaatgaaccgtgtcagatcatcagattctcataaggaacacacaacc

SEQ ID NO: 812964 - DNA, 598 bp, Homo sapiens
gatgctcgctgggaaatacatgcatacacacataaccttgtatacccaaagcacttcattatggctcctaatccagatgatatggaagaagatccttaatcactgagctaacctaaataaggaaggatttcattttatggactgatattttgctgtgtaacttgttctttgtagattgtcatctgcagtgctgcaaagatatgaagaaatatgataacgaataagtgacaccagtactgtagttcataatgagtaggtacaggcgggaaactgaataataagaagtcataatggaatcaaggtgaagctttttataaacttttttagcctaagcaataactggttttgtattttttcttaatccttcactttaatacaataggctcacttaatttgtcttcccatttctctttatatatatatatataaatataaatatatgtttgtttgtttttttaatgaaaaacaagtcaagctagcatccagttactatatagcttggctaaattatacaagacttacaagattgattactcgacaggcttgtatttaagagrtaactgtgaggttaccattatgtgatgttactataaggact

SEQ ID NO: 812965 - DNA, 609 bp, Homo sapiens
acagcagccatagtgttaagtcattatgagcttcatcttaaagataagaaaactgaggcarggggagattaacttactgccaaatttcaaacagttagtagtatttgagaccagtagtatggctctaatcttacccttagccctcccaaccattatgctgtactatctacccataaatacctccaggaaacattcccctcttggtaatttgtccttctatagaagcttcaaagattaaatcaaattaattttcaaaaaaaatttttttttagaaatgttattttccctgtgatagaggatgacttcccagtttcaccaaagtctgtttatatcaacacacacaaaatggaataattctgagtcactaggcaatcaatctactgtggttttactatgtaaggtgaaaattaactggaacgatgtttgtttgctatacttacatagtcaaactttacaagccatgaaattaattgcactctttgtatttgttgttaaatgcctaagaagttttctaaaaattttgtaaaggcactgtcagagaatctggagttgaatgattattccagatactgtataacctgcataactttttgtctttaagtcgtgttt

SEQ ID NO: 812966 - DNA, 581 bp, Homo sapiens
acaacttttagggaaaaaacaattattggagagctatatgtcaattcccagaaatcacacagggctgtgaatttttcatgttgccactagtcagaaggcagagaccatgctaaacatacagggcattcagtagagattccagaaaaactatgtcttagaagtagagctaaaattagccctggaataatggctactctggatcatctctccaaaaaaagcttaaaaatagccttaaaagggtcaactgtatctgtaagtaattaaaaatgctaatgagaaaaagtccaaaacacaacaaaaagcacaatgtctataattctatcaaaaactactagacacatgaaaaagcataatggatacccaagatggagaaaaattactcggtgggaacaaacccaaaacaaaagaggtaactgaattagtacacaagaaaattaaaacaactatcataagtatgctcatatgctcaaggatacaaaagaaaacaaaagcayaatgagatcagtaatgaaatattctacaggattagattagctgcccactagacacttgttaaaaaaaaaaaaagaagtcagtgaact

SEQ ID NO: 812967 - DNA, 640 bp, Homo sapiens
agaatagagaggagaaagctyggatcctatggaaagaccataaatggcagagaaaattcagatacaaacacagaccttcctagctccatagctacccccgtagtccatgcacagcaatccttcagaacctggtggatgcaggcaaagctttccttagaaattaatgtgtcaaggtgtttgggctgttctttgagcaaatgaataagcaaggattagaaatggaattccaaatcaagaaacgaacattccagctcaggccaatcctagtgggaccaaaacaaggtaagataaaaagaagcacacctaaatcaaaccagttgtaatgagcaaatgagtaatttaggttaaaaaaaaagggatcaacaactgcaaaaaggtactgcgtttttggtgttattttttccctgtatccctctaaggatatctttagtactgcccatgcccagaccacaccaaaccaaaggtggcaaaacccaacaaaagttggaaacttagcaatctcacaacatctacttcttagccttgttctgtttcttgtcttgggatatctgatatccagccacagtgttttgactatgcatgtggagtgcctgatattaaaccttccataaagagccctgttaattgggtcatcacgggc

SEQ ID NO: 812968 - DNA, 640 bp, Homo sapiens
agaatagagaggagaaagcttggatcctatggaaagaccataaatggcagagaaaattcagatacaaacacagaccttcmtagctccatagctacccccgtagtccatgcacagcaatccttcagaacctggtggatgcaggcaaagctttccttagaaattaatgtgtcaaggtgtttgggctgttctttgagcaaatgaataagcaaggattagaaatggaattccaaatcaagaaacgaacattccagctcaggccaatcctagtgggaccaaaacaaggtaagataaaaagaagcacacctaaatcaaaccagttgtaatgagcaaatgagtaatttaggttaaaaaaaaagggatcaacaactgcaaaaaggtactgcgtttttggtgttattttttccctgtatccctctaaggatatctttagtactgcccatgcccagaccacaccaaaccaaaggtggcaaaacccaacaaaagttggaaacttagcaatctcacaacatctacttcttagccttgttctgtttcttgtcttgggatatctgatatccagccacagtgttttgactatgcatgtggagtgcctgatattaaaccttccataaagagccctgttaattgggtcatcacgggc

SEQ ID NO: 812969 - DNA, 593 bp, Homo sapiens
atccctctattactagaaagggatcccaatccagaccccaagagagggttcctggacctygtgcaggaaagaatttgtggtaagttcatattgtaaagtgaaagtaagtttattaaggaagaaaataaacaaaagaatggctgttccataggcagagcagcggcatgggctgctcacctgagtatacttacagttacttcttgattatatgctaaacaagaggtggattattcatgagttttctgggaaagaggtaggcaattcctggaactgagagttcctgcccattttagaccatataaagtaacttcctgatgttgctatggcatttgtaaactgtcatggtgctgttggaagtgtcttttagcatgctaatacattataattagtgtataatgagcagtgaggacgactggaggtcacttttgtcaccatcttggctttggtgggttttggctagcttctttaccacaacttgtttatcagcaggggctttgtgacctgtattttgtaccagcctcctatctcatcctgtgactaagaatgccttaatctcctgggaatgcagctcagtaggtctcagccttattttt

SEQ ID NO: 812970 - DNA, 643 bp, Homo sapiens
tggggtagagactcattgtaacaatgggatgctgaaatacctattcctacggatcaatatagtaatcgtagtagacaaatgatgaaaaatatgggatatcacctgggaataggactaggaaaagataaaaatggccaatcagaacctttagaattaaaagggcaaatagatcggaccagattggggtgtcatttttagaagcggccatcgttgagcctctggctcccatttctcttgtctggctaactgccaaaccagtttgggtggagcaatggctgctgaaacaggaaaaactggaggctttaaaagaactggtacaggaacaattgcaaaagggacatatagagcctactttctccccttggaattctcctgtatttgtcattaagaaaaaatcagggaaatggaaaacgttaacagatttaagggctgttaatgctgtgattcaacccatgggcgcactgcaaccagggctgccctccccaacaatgatccccaaatactggcctctcatagtgatagatctaaaggattgcttttttaccattcctttagctgcccaagattatgagaaatttgyttttactgttcccgccataaataataaagaaccagcagacagataccattggaaagtactacc

SEQ ID NO: 812971 - DNA, 572 bp, Homo sapiens
aacaaactcagtgtcattgtgcaaaygtaaaacctcattccacatattcttccttgatccccacacccatgttcacctctccttccaagcccagtctctatctctattcccccgcttttttttttttgcttttctttcttttgagatggagtttcactccgtcgcccaggctggagtgcagtggcgtgatcttggctcactgcaacctccgcctcctgggttcaaacaattctgccttaggtgcccgcagccatgcccggcttttttttttttttttttttttttagtaaagatggggtttcaccatgttggccaggctggttttgaacccctgacctcaaataatctgcctgccttggcctcccaaagtgctgagattacaggcatgagccgccacacacagcccatgttcccccactttccatcgcagaagcctgaccaggcagtcatgccattcccccatcaggagggcacaacagggcaagggaagaagccctatactcaaatccagagtctctaactgccgggggtggggggcagaaaggctgagaacaatcagatagagggtatga

SEQ ID NO: 812972 - DNA, 563 bp, Homo sapiens
agagagtggagttcaggagaaaggaaccattccaatatagctgattctagtttgattctctaatctcattgtctcagtttattggccacctgcaaactcaaaacttcatgaaagaatattctttaggaatagaccagagtccccttcccccacgtgcatacacccacactttgtgggctcactcactaagtttaaaaataggaaccatggtgttgccatgacgcccggtgctactcagcagcgttccttttccctttgatgtgattcctcttcatagcatgatttagtgagaatctggctcagagcggcctctagtggctcaatccttagggatgcgcttccttccccagcccagttccaaattcagcccagttccaaaattaaccaccttagccaagttggacacttgtgtgtttagaaccattctccatgcaatcagctattttttttcagaatctttctcatcagccacaagtattacaccggggagtacctactgagtgctcagaagtgtgyggaacagcccaggtattcaccatctctctggccaggagagaccagca

SEQ ID NO: 812973 - DNA, 461 bp, Homo sapiens
agtagttgagatggctcagtaatgtctgcaaccacacatttaataaagaaaacctaaattacatctgcatgttacgaaattgaaactgcatcaacttttgttttttctagtgacaggaattggctttctgattgcgaaaacaaagctagtgtttttggaatgtgctttccaaatagaaagtgtgtcttagtttcctgataggtggattctgaaactttttatctagctttagattttatgaatttgtatctagcttaaacatgctcatagataatggagccaggtaatatagactaagtacttaaaaacaagtactcttctctttgtcacatttgaaagaaaatayattttatgaaaataatttaaaaaataaactgacttggttatttgagaatagtttctcataattgttattatatactctgaagcctaagatgttatctcatttgataatctgctta

SEQ ID NO: 812974 - DNA, 486 bp, Homo sapiens
gtgtttgatcaaattttgagagcaatcctcttctagtaacagtcttcttctctgggttctctctcttctccattaaagttagctgagcacaaggaagatgaagatttctgagacattagaaacctcwgatggtcttttcttaaaccatagtgtcatgaaaggggaacctcagtagtatacacagggtgctcaaagtgaatcacacatttcacttgtaagagtcttgatgcggtgagagtaagaagcatgagctagacactagtgggttgacactggagtagaacagactgagttgacatcattttaaaaaataagctttttttctgatggaggactttttctccctataaaattctgaaaaattttttttttaatacctgacatctttgtttgcttttgtgttgtgctagcattggtatgaaagctggattgttctgaggttcgttcttctagatgtgaaacaggaatgagacgaacataaagaac

SEQ ID NO: 812975 - DNA, 540 bp, Homo sapiens
agcagcacaattcacaatagcaaagtggtggaaccaacccaaatacccattaattaatgagtagataaagaaactctggtagatgatagatagatagatagatagatagatagatagatagatagatagacggaatactactcagccataaaaagggtgaattaatggcatttgcaatgacctggatgagattagagactattattctaagtgaagtaactcaggaatagaaaaccaaacatcgtatgttctcactgatatatgtgagataagctatgaggacacaaaggcataagaatgacacagtgaactttggggagctgggggaaatattgggaggggagtgagggataaaagacaacaaatatgggacagtgtatactgcttgggtgatgggtgcacaaagttctcataaatctccactaaagaacatactcaggtaaccaaataccacctgtaccccaataactcmtggaaaaataaaatttttttaaaaaagaaaaaaacccaaagaaccaagtactgtcattactcacctga

SEQ ID NO: 812976 - DNA, 540 bp, Homo sapiens
agcagcacaattcacaatagcaaagtggtggaaccaacccaaatacccattaattaatgagtagataaagaaactctggtagatgatagatagatagatagatagatagatagatagatagatagatagacggaatactactcagccataaaaagggtgaattaatggcatttgcaatgacctggatgagattagagactattattctaagtgaagtaactcaggaatagaaaaccaaacatcgtatgttctcactgatatatgtgagataagctatgaggacacaaaggcataagaatgacacagtgaactttggggagctgggggaaatattgggaggggagtgagggataaaagacaacaaatatgggacagtgtatactgcttgggtgatgggtgcacaaagttctcataaatctccactaaagaacatactcaggtaaccaaataccacctgtaccccaataactcctggaaaaataaaattttttwaaaaaagaaaaaaacccaaagaaccaagtactgtcattactcacctga

SEQ ID NO: 812977 - DNA, 495 bp, Homo sapiens
atatccacaatctcagtttccaaagatatgtagcctcctcacagtgtgccctaaaaaaacaattatcttcagttaatatttacttccctatatttatatagatattgccaagccyttccctttcaagctgcagtctcacagaagagcaatggtgatgaaggttgcagctggtggcaggaacactgacattttctctaattgctcttcttcaaactggcctaaagttaaactgtaatttagttaccagattggactcttgaaatattaagggaattaaacattttcagaaactctttaaaatgtctaaagaaataaacaaaaaagtgcttttcaagactcttatgtgttactagcgatatttagaaactctgctttgaactctgagctggtcagtggcctcttagttccatggtatataagcattagaggtggacataaccaaggaattatgagtttagtagaaaataatatatagtcttttttttaaggccctaa

SEQ ID NO: 812978 - DNA, 534 bp, Homo sapiens
catactgtgtgttttagactttcttttgagttcgctcagattttgctaacatgtatgcaaaatgttggcaagcttgtaaagtctttataagtctgagtgtgtctttattttgccctctctcttgaatgagagttcacctcagtaaaagctccagattgtcagttaatttcactctgcactgagaaggtatcattacattctctttggcttccgttgttgttttccagaagtctgtgtcaatctaattgttgctcatttgtaggtaatctcttttgtgtctgttagcttttaagatgtcttcaagcttttctattctgcagtttcactacaaagtgtctagttacagatttgagtttatttatcctgctccctgcacagagtgtacttttgatctgaggttcattgtcttccttcagttgtggaaaattaagagctattatcttttcaaatattggtttctttcattctttttcgtcctttcttktcctgagagaagctttggaatggtattgactggcttcaaattctgtctgc

SEQ ID NO: 812979 - DNA, 587 bp, Homo sapiens
gagggatggacatgattgttttagaaatatggmttagtcaaaaagcaaacacatataaagaagattctttatatttctttgcccaggattttacacgtacacacatgcacacacatacacattttaaatcaagtttattcaccacctatctctagcttccttgaataattcaaccgttacagaaaaaaattctaaaaatattctttccttttggatctgaaatatattgatataattcaattgcatctacccaggcgttcttcagttcaatagcctcctgaatttgttgttattgttgctctgaaagttaatggggtgtggagtgaacaaaatgtttgtgtagcagtgagggtttctagaaagagggattctacttttccaaatatgtatgtaggaggttttagtatttgtgttatttctgagttcttatagtggtttagtggagtgatttaaaataaggtcagcccagagtagtttccgcaacataaaggatagttttgttgaagatcaagtttatcccctgcttcttttactgctacccaatacagcagtcctatttcttaagagttcacatttccttcttttac

SEQ ID NO: 812980 - DNA, 645 bp, Homo sapiens
ataatggctgaaacaagtaaatagaacattagtaaacataaagatttgagcaacactattatgcaacttgaccttattgaccttcacagaacattgtattcaacaaggataaaatatatgttactttttaatgaatacacttcagattgaccacattttgggctataaaccagttgtaataagtttaaaggagttcaagttattcaaagtatattctgtgaccaaaatggatttatattaaaaattaataatagaagatgcttagaaaaccccaaatattggaagactaaataaaattctattaccttatgggcaaatgaagaaatctaacttcagggccagatgtatttattggtgaaatctatgcaacatttaggaggaaataataccagttcaacacaaacttttccagaatattgaagaagagggaatactttataatttattgtatgatatcagcgttactctgatatcaaagttataaaaagtcgttacaaacgaagaaaagtacagaccaatatatcctataaatatgaatgcaggcctggtgcaygcttataatgccaacaatttgggaagttgaggagagatgattgcttgaggccaggagtttgagactattctgggcatcatgaagagactctg

SEQ ID NO: 812981 - DNA, 651 bp, Homo sapiens
gtactgttcaatgtttgtattttcatattctatttcagattcctagtgtgccaataaattatgttcctaaagtgctttgcaaattgtactttagttttcttatcaaaatcagtgtagaaatcrtcaacatttttttctgtttagaaagtgtgttattagttcctacttgaagaacccattctccttcctatatattaatgataagaataatggagttcccccgcccccttttttccttccttaatccatcataacagcaaggagtgatgaggaagtcctcagtgttagtagaggaaacaacaggaggtggagaggaatagcagaagaagaaagaaacagagggaagaaacagagttccctggttgtgatagaaagagaagatgatagggttttaggagccactggcaacaatgaagaggtaaattctgtgacaacagggtaagaaaaggtaagaatacttagtgacatcagcagtagcagaggaaaggctggaaaactagcatcagtgaggaagagacaggtattccagttcatcagctacagaaaaggggttacttttggtggctttataaagaggagaagccctttggctagatttctcttttgtatgtaacaggtatttttgttagtggttcataaatgagcgaacat

SEQ ID NO: 812982 - DNA, 665 bp, Homo sapiens
tttgattactttcagggcctgctatttgtcgtgtgatgctatactacagtcagcctggaatttggtatcttattgttacaaacagtctcttttgtccatatatatatatatatwttttttttttttttttttttaagacagggtgtctctctgtctcccagactggagtgcagtggcgcaatctcagctcactgcaacctccgccacccaagttgaagtgattctcctgcctcagcctccctagtagctgggattacaagtgtgcaccaccacacctggctaatttttgtatttttagtaaagagagggttttactatgttggccaggctggtcttgaactcctgacctcgggtgatccaccccccttggcctcccaaagtgctgggattacaagtgtgagccaccacgccagctcttttgtcagtcttcagatctctgtttcaatgctaatgctggtcagttgtgcctgaatttcaagggaggagggcacagtgaggcatgtctaaccctccctttccatcatggcttgaactagtttttcaggtttactttggaatgcccttggccaagaggaggagtccattcagttggctggggggcttagaattttatttttggtttacagtggaagatggatcctttgcaatgtgaattggccactccc

SEQ ID NO: 812983 - DNA, 616 bp, Homo sapiens; identical to SEQ ID NO: 812763

SEQ ID NO: 812984 - DNA, 565 bp, Homo sapiens
tcagattaaaggatttaagattctggcaggtacattttgatgcatgtatctggtatcctttatgtgtaagagataacagagtcataatgcctagaggcagagccctggggtgtgactggaacatttcctgtttaacaaagtctgttttatctaagagttactgttgccatcctcaaagcagcaaatcacctggatcattgtgctttcaaaccagcctcagaaatgatgcccacgaagcagacaaagttagagagctccttctagagaggggctattaataggcttcaataaggaaaagttcaaacacatgcagatcaggaaaaaagaaaatgacccaaatgaaaggtctgagatgtaagagggaatcatgcacaaacgcagtggtaaatatgtgggcacatcaagcaaaaatcaaccaaacaaaattattrataatgtacaaattgtggggttagaagagagacttaaaatactggatagcattggtatgcatattgggaagaggatcagagtaaaattattcttggattcttaaatgactcatgaggagagtaaaattattaac

SEQ ID NO: 812985 - DNA, 505 bp, Homo sapiens
catggaggtcagtgccttgacaatttccctggctagcaaggggtcctgtaagaaggggtcccagagaatgaagccgagtgtactccctcttgctctacaccccagcttcgaggacctagtttaagcctgtgrgtaactggtcacagagctctacattcttagaggcaaagaggaaagcagaggagaggcaaagctgcagttgtgtttggttgggtgctagcacactggccagccgcaaggggagaaaaatcatgactccacctctgagctgaggggagctcctgctgcaggttcctcacccctgctgccaaactcaaaggcttatggggcccagtgagagagtgtgtatgtgtatgtgtgcgtgcatgtgcgcacaggtatgtgtagctagaaagcacctggctccagccagttgttgccaagtggggctttgagctgtgtatggcataaacacctatggccaacagggcacgtgggagctgaagcccagcacattctctgttca

SEQ ID NO: 812986 - DNA, 505 bp, Homo sapiens
catggaggtcagtgccttgacaatttccctggctagcaaggggtcctgtaagaaggggtcccagagaatgaagccgagtgtactccctcttgctctacaccccagcttcgaggacctagtttaagcctgtgggtaactggtcacagagctctacattcttagaggcaaagaggaaagcagaggagaggcaaagctgcagttgtgtttggttgggtgctagcacactggccagccgcaaggggagaaaaatcatgactccacctctgagctgaggggagctcctgctgcaggttcctcacccctgctgccaaactcaaaggcttatggggcccagtgagagagtgtgtatgtgtatgtgtgcgtgcatgtgcgcacaggtatgtgtagctasaaagcacctggctccagccagttgttgccaagtggggctttgagctgtgtatggcataaacacctatggccaacagggcacgtgggagctgaagcccagcacattctctgttca

SEQ ID NO: 812987 - DNA, 631 bp, Homo sapiens
acttacatacataaatagaaaaaaatgaggcagaaagagacagcatgtgaaatgttaatagtcagcattayaggctatttatttttgccataagcgttttgttgttttccatgatttcttcattgaacaaatggttttgtgattaaatcttaaagagaaacacaagagataccccgaggtgtattgtggtgcaataagaaattgtgcctaattctactgtagcaatttacaaagcaacaatcatctagtatgtagcaggtgtatgttgaaggcattgctctcttcataaagtatgggcaactgtcatcacacagcttataacctcattttcacctgcccttaaggtagttgctttaaactgctggcacacagctgattgaaatgtggggaatccctggctgagagctaccttgctgggtgctctctattcacattctttctgggaatggaacatctccctggctctggtttgtacatgtggtcgtcatggcttctttgttagcatttgaggcttttatatatattttatatatgcatatataaataaatattttatataaatatatacaaataatatattatataaatatatgatttatgtatatataaccatataaatatatgatttata

SEQ ID NO: 812988 - DNA, 573 bp, Homo sapiens
cacaagattttggagtacatggaagccaaactattgaacaaagctcacccttcatgaaagcatcttcaaaattctagtaacacaagtccctaagggggaatgggaattgcgagcttctaaatatacttgaaaaagcaaagcactcgaataagaccagtgactggagctgccgttgtctgaatttctaaacattgctagcaggtggaaagatctcaagaaaccttttctgagaaagaagtcaatatgaggacaaagactttctcttgcaaacatagtaaatgcagtgtccaaaatcaagctcttgtgagaacatttctgtcaaccgtgttcacattcatggattgtgacttcaggacaaatggcagctactaatcgacatgctgatgaaactaaaacttctctcaaaggccattaagtttctgggtaccatctgtgccaacastaattcagataatgcagaaggcttgctaaattttgggatttcttttctgttcgagttctgaacaatttgagaaaatgtgatatagagaactaaaatacgaggagagactaagttagagtgactagtcaagt

SEQ ID NO: 812989 - DNA, 568 bp, Homo sapiens
caggatccggcagtaccttgtaattgtatacattaatatttctgcagcaaaatgcatgaatttttacactatgtatgataaatgactaaatattcttcttttttttttcttgagacggagtcttgctctgtcgcccagactggagtgcagaggcacgaccttggctcactgcaagctccgcctcccggtttcacgccattctcctgtctcagcctcctgagcagctgggactacaggcgcccgccaccacgcccagctaattttttgtatttttagtagagacggggtttcaccatgttagccaggatggtctctacctccttacctcgtgatccgcccgcctcggccgcccaaagtgctgggattacaggcgtgagccaccgcgcccggccctaaatatacttctgtcaatttagtatcacatgagttcaagtcaggaaagattttgccactaattcagttttgaaaaaacttggtttgcaaagcttttcaggtttcaggatttcaaaaaaggattatgaatctgtacrtataacatcaggaggtgaatccttgaagtaatagaaag

SEQ ID NO: 812990 - DNA, 578 bp, Homo sapiens
cccaaaagatttataattgaagatttcagtgatgtttcttacattctgagttttcaaaggagattttcatatacttttgatagttctagcagaacaagatagtgctgctgctcaacagtacatcagacaaggaagtcccacggcactgagagctgaattgtgggctctcattttgaatatttccagccaacctgaggtaagaagaaaaaaagggtgggtcagattttagctttggggtatttatttttcaaagaccagttattcaaaattgaaaaaacttttgtttcttaatctattattaaccccctttttaaattttcaaaatcactatagttttaggttctaaaataagatttaacatataatttaatattgtctgcttaatattgaagtttttgttattaataattaatgaaatggtgtgaccttacatatacaacaaaacagtaagtaaaattttgagaagtggagactgacaatttagatcygtgaagatgtgtggttgaatacggatgttagactacggagaaataaagaaaggcaactcaggttaagtaaatggattctttgtccctata

SEQ ID NO: 812991 - DNA, 377 bp, Homo sapiens
ggcatttaggatccttatgtattcctgttgaactgacccctctataattatgaattgttattctttctttttaaaagatggggtcttgctgtgttgcccaggctgggctacagtggcatgatcatagctccctgcagcctcaaactcctgggctcatgtgaccctcctgtctcagcctccctcagcctcccaagtagctaagacaacaggtgcataccaccgtgcctggcctgaattgtcattctttatgtcttataatacttttggttttaatgtcgatttcatctgataggagagctatacctgcttttaaaaatttctacctacttatctrcttttttagtatttttctgaatatatttttccatccttttact

SEQ ID NO: 812992 - DNA, 551 bp, Homo sapiens
gcataccacgctatttaaaaagaaggggcctacactgtggcacacgtctgtggtcccagctacttgggaggctgaagcgggaggattgtctgggcccaggagtygggggctgtagtcagccttaattgcccactgcactccagcctgggaaaataaaaaaaaataaaaataaaaatttttaaaaaagggatttggaacagtacaaattcaggtttgaaccctggctctacctctccctggcagtaagatctcaatggctataccttgatgaacctcagcctcctcatcgtcaaatggggtaataaatgaatctagttcatggcgcgtgggtatgggtgcagtgaaatgacacaagtgaggtgcttaaacagtgcagagggcactcctagccttccctcatgccccctcctgcaccataggagtcttactctatccctggagatagagtttgctaagtgtgccagagacagtggtcttgtcctccccatcctgaccagaaactcacatacaagtgtgtctacaggatgccacagagagcagcctcaaccagt

SEQ ID NO: 812993 - DNA, 608 bp, Homo sapiens
acatagtaagcccttaataaatgtttgtaggtttgaactgatttactgtaggatgtactagttacatctatcaagttttggctctctgtaagattaaagccagacacattttaaaaaatctttttatttaggtgcgtcttacatacagtaaagcatatggatcttaagtggctcaatggtcttttaatgtataccctgggtaaccaatacccaggtcaagacatagaatttgtcccgtaccctagaagacttcctcatgccttgacacatttttgagcatatatacatgaataaacagattttacaattttattatatgttttcttttataaacaaccattaatgtcccagaataaaaaagggaggtgcacaagaaaggtcaagcacaaagctgaactaaggacataaaaatcttcaatgctagttgacagttggtattaaattgtttgactgttcagaatcaggaatcttctacttaactgaagagatgtgacccaggaaattctgcygtcaggtgaatttctgtcaaaaataatcttttcccatcaattcctaccataaaattggaaacattctctggggatccaaatactggcctctggctgtag

SEQ ID NO: 812994 - DNA, 608 bp, Homo sapiens
acatagtaagcccttaataaatgtttgtaggtttgaactgatttactgtaggatgtactagttacatctatcaagttttggctctctgtaagattaaagccagacacattttaaaaaatctttttatttaggtgcgtcttacatacagtaaagcatatggatcttaagtggctcaatggtcttttaatgtataccctgggtaaccaatacccaggtcaagacatagaatttgtcccgtaccctagaagacttcctcatgccttgacacatttttgagcatatatacatgaataaacagattttacaattttattatatgttttcttttataaacaaccattaatgtcccagaataaaaaagggaggtgcacaagaaaggtcaagcacaaagctgaactaaggacataaaaatcttcaatgctagttgacagttggtattaaattgtttgactgttcagaatcaggaatcttctacttaactgaagagatgtgacccaggaaattctgccgtcaggtgaatttctgtmaaaaataatcttttcccatcaattcctaccataaaattggaaacattctctggggatccaaatactggcctctggctgtag

SEQ ID NO: 812995 - DNA, 341 bp, Homo sapiens
ccaagtcatttcatctgcctctgagactccacttacccatctgtaaaataggttgacaayagctgcctctcaggatgctggtggtgattagcgatcacgcagtataggtagggtctggtacagaattcatgttcgacaagtgggagctgccgttattggctgtcgtttagttatttttatgaatgaggcaatagaggtgcttgtctgaccagcatccgctgacctctcttcaagtaactgccccgtttgcctctaaagaaccattcctctcctgttccccaccaaatggttccgttggtgttggctcctccccaggctccagggacaggcgtgtgaacccg

SEQ ID NO: 812996 - DNA, 615 bp, Homo sapiens
tttgtttccttttttaagaggtataaaaataaaaaacaggatagtattaactctatttactcactaacataggttggctctcatcctgggagatgaaatacatattctccaaggtttaaaaaaaaaaaaaaaamaaaaaaaaaactaaagataacaaaagtgttagcataaaagtaaaaacttattgaggacaactgagaggttgctgcctttatgaaatagagagagtacagtgaatttgaagttttgttttaaaggtgatgtatactttagcacaacagttggatttgtaatggtaccaaggacctgaataaatcgataatttcatacaagtaggagtacatttgcactgttttccagtcttttagttttaagatgttttctaacttctagaacttctatgtgtaggcaagatagtacctgttccatgtaggcactcagtaaacagtgcttcagtaaatgaattcacagaaaatgggtaaataattaaatgtagtggtagaataaagctagaataaatatggtgctcatgtaagaaaaagaaagtagaaaattttaaggccagagttttgtagaaaaattcattattttcgctctgaattggtatacaacaat

SEQ ID NO: 812997 - DNA, 558 bp, Homo sapiens
gacgcttaagaaaaacgagaagtcaacatgactcttttgatgacttgacttagagtttcacgttttggcctttggcataatgcagggatgtggaggtttaataaatatttggtggttaagatgctgtagtttaaaaaggccttctaaaattatgtgatatacaaagataaaagcaaaactctagagttaaatattatgagaaccaaagtagtataatgagagctaccaaaaagtttacttgaaaaatgcatttcatttagttcaatctctcttacatagaagaggttctacaaatgttggctttgcaagacaaactaatgttagtaacttccaggtgatcaggaaagtcaaaatctaagaaacacaaaaaagcattactttgcaatgattattttcatttcttgctttgaaggaaagatgaaargctatttagttaggtgttcttgttttattctacagctgcatcaaagcaactacctcaaaatttacaaaacagttcatagagccccccggtaattgaagtataggctaaatgatcacatcaacaacatatgaaca

SEQ ID NO: 812998 - DNA, 259 bp, Homo sapiens
ctgttggatttatcctttgctcactctattttctcaagactgatgaagacagctaaatcgcacatctggcrtatcttcttcaagctattttctactacctacatcaaataaaatgaattccaaatacttcactctttacaagtcaattaaagaagaattcactctaaaacaaaacaaaaaaaaaattacatgatttcaagaactctttcctttaacaagtatttttctttaaaaagtatgtccctatttttattgacaa

SEQ ID NO: 812999 - DNA, 607 bp, Homo sapiens
tttcaagcagtctcctgcccactttcctgtgcctttgttatagctgtcactgtagattgtttccgttgtgcatataattgcttcattgctagtaactggcttaatgttgtcacagaccttattggctcttcttacctcagatttacatatagcatcccaaggctttctttagggcatttatcatttttcctccaaatgatctggtgacagtatacagctattcaagttttcatcagccagcagatgatacggtctttcttctttgctgccacaagccagaaaagagaggaaatcaggggaaatgctttcattactgcacttcaaggaggcgctgtcatggagtcagggagggaagtttcccaaagttcactgaactgacactggaagaagctcttgtgggcagccccatccctttgtgacaccgcaacgaaagcacttcatcatctcttgccgatcctgctttcatgcagacagcgaggcatcttstaatgccagttgcctttcctgtttacttcttgctccaggaaaaagtctgagcaattttttaggacattaactattactgttgcatactgatatgcaagattttgttatactttcttgaaaa

SEQ ID NO: 813000 - DNA, 496 bp, Homo sapiens
taatcctccaacacacttttaagtgcttgtgtaattcatttacttatgtcacatagcactatatgtctttgtaaaaaggagccttaacatgtaagtgcttaacctttatttcttaatcatgagcttttaaatwgttattgtgctgacataattaggtgtagcacctaaaacgctttgtgtgtacagctataaaaagaaagtaatgtgatctaggacagacagtaaagctgtatctaggaagaaatcctatggaaggttgaaattcaatgtggtaactgccaattatctaaaaggaagtctattactttatgataaaactgtcaaaataatgattgggtactcctacaaattgtacagagaatcaataaaaccaatattacgtcacagtttgagaatttaggaattccacttttcttcttattcatgagaagacgctaatatatttaagaatgagatgatacgaagtttttcttttgtgcttcaccttatagctctt

SEQ ID NO: 813001 - DNA, 496 bp, Homo sapiens
taatcctccaacacacttttaagtgcttgtgtaattcatttacttatgtcacatagcactatatgtctttgtaaaaaggagccttaacatgtaagtgcttaacctttatttcttaatcatgagcttttaaattkttattgtgctgacataattaggtgtagcacctaaaacgctttgtgtgtacagctataaaaagaaagtaatgtgatctaggacagacagtaaagctgtatctaggaagaaatcctatggaaggttgaaattcaatgtggtaactgccaattatctaaaaggaagtctattactttatgataaaactgtcaaaataatgattgggtactcctacaaattgtacagagaatcaataaaaccaatattacgtcacagtttgagaatttaggaattccacttttcttcttattcatgagaagacgctaatatatttaagaatgagatgatacgaagtttttcttttgtgcttcaccttatagctctt

SEQ ID NO: 813002 - DNA, 616 bp, Homo sapiens
tgttttgtgtactttcttaaaattcctaaggcagcctgtattctatatttgttttgcaggtggaagatgcaatgctgatgtttgataaaactaccaacaggcacagaggtaagattaccccagtgtaagagggttgcgttcaccctctcctggcctctctgtctgtcatccccagtcccactgacaaaagatacagtgaagagtccagagtcaagcaggtagaggtgaccatccattgaagatctttattcacggagagtcccagtagcacaaagagttccagtactggatagctgaaaaaccatttccttctggcctaggaactcctgtttagttatgcagccatccctgacacacatattcagatgtacctctctaatcctgcctttctgggtcccttgctaacctcggcactaagcgatccaagtggaaattattcacagcagtgactcaattgagttatcaatttgtattgaaggaggttctttaggagcagactgtcaatctaaagagccaaaaaatcaaaataaaacattgtaggttcgttgggtgtgtagtgattacagscttgggaatgctccgtggggcctctggaatgtgtagagggcatctgtac

SEQ ID NO: 813003 - DNA, 595 bp, Homo sapiens
atctccaatgcccaccacagatgtgaccraggaggataatgaacatggaagaaccaccagaggggtgacccaggggacacaaacgaaaaggaattccactaacgagtggaaacaggtctaatcaaggaaattctccagctgcctcacaatgcctgtcctatcagatttcataattgctactgaccaatgattgctgtgtgtcctccacccgtcctttttacgaaggaaagtttctgttgtagttatcttgaccttgatatgtagtgatatagcagggagtgctgaggaatcccagggaagaaaccatgttcactcaagactgctctccctccacagtgtggagatactgctggggagccctgcagtccccatgccagtgagtagagtcttaccgggatcattctttccgggctctggctttataatggaagcccagtatcagcctctcacttgcaaccctgactcctctcctcacctgactgtaaggtatattaaaagtctggtatataaggacaggtgagctccagaagacatctaactgcaaatccaacattctgctgtggcatcctctttatttataacacccttcttgctc

SEQ ID NO: 813004 - DNA, 596 bp, Homo sapiens
aactcaacagcaaaaaaactaataacatgactttaaaatgggcaaggatctgagtagacatctttcaaaagaaaacatacaaatggccaataggtatatgaaaaaatgctcaatgccactaatcagggaaatgcaaatcaaaaccacaatgagatatcgcttcacacatgtcaggatgcctattatcaaataaaagacaacaagtggttggcaaagatgtggagaaaactggaatctttgtatactgttggtgttaatgcaaaatggtgcaactgctatggaaacatggtgtatatattcatctatatttgtatatatgtatatgcatattatatatacatgcatatatatatgcacacatatatgcacacacacatgcacaatggaatattgccttttttaaatgccaagataagaaacaatttattacagaagaaaaatttctcatccaaaatatagaaatcaatacaactttgccacaatcaatatacacgaactgtacaaatgtatacccattcataatttaccaaataaaakatgattaacaaagttcacaaaatagatgaaaatacttttacccaggaaagttacaaacc

SEQ ID NO: 813005 - DNA, 607 bp, Homo sapiens
cttttttcttgctgcttttaggatcctttctttatccttgacctttggaagttcaattattaaatgtagtcttatttgagttaagtctacttggtgttctataaccttcttgtgcttgaataktgatattcttctctaggtttggagagttccctgttgttatccctttgaataaactttctaccccagtctctgtctctacctcctctttaaggtcaaaacaattagatttggccttttgaggctattttctccatcttgtaggcatgcttcattcttttctattcttttttctgttgtctcctctgcctgtatattttcaaacaacctgtctttgagcttccttcttctaactgatcagttctgctgttgagagactctgatgcattcttcagtaagtcaactgaatttttcagctttagaatttctgcttgatttttcaaacttatttttgttaaatttttgttctctttgttaagtttttctgataggattctgaattccttctctatgttattgatgtggtttggctatgccccacccaaatctcatcttgaattatagctcccacaattcccacatgttgtgggagggacctggtgggagg

SEQ ID NO: 813006 - DNA, 607 bp, Homo sapiens
cttttttcttgctgcttttaggatcctttctttatccttgacctttggaagttcaattattaaatgtagtcttatttgagttaagtctacttggtgttctataaccttcttgtgcttgaatagtgatattcttctctaggtttggagagttccctgttgttatccctttgaataaactttctaccccagtctctgtctctacctcctctttaaggtcaaaacaattagatttggccttttgaggctattttctccatcttgtaggcatgcttcattcttttctattcttttttctgttgtctcctctgcctgtatattttcaaacaacctgtctttgagcttccttcttctaactgatcagttctgctgttgagagactctgatgcattcttcagtaagtcaactgaatttttcagctttagaatttctgcttgatttttcaaacttatttttgttaaatttttgttctctttgttaagtttttctgataggattctgaattccttctctatgttattgatgtggtttggctatgccccacccaaatctcatcttraattatagctcccacaattcccacatgttgtgggagggacctggtgggagg

SEQ ID NO: 813007 - DNA, 621 bp, Homo sapiens
ttctaatatagatctgtttttaactgtcttgtttctctaactatgttatgagccacttcgatgtagggcctgggtttgattctcttcttaagtaatctcctgtgtcttattgctrttttgcttttttaaacttaatttttcatgggcctgtaaatgccttagcctctcaattaaattagaaactcattaaggtagagactgtatggctcataagacatcatactctgctgtacctagagtacatgtttaataaatatctttttaaaatgtctgaatgattgcatcaaagtcaacaccttttggcaaagaaaataaagatattatgtaagaccagcaatgtgctctatactctctttaaattaattctaaggatcattaaactgggcttattgttctcaatcaaggggaagtctagtccaatttttttaagtataaaatcagaattataggctttgtaaagaaattctatgtcacattcaagtacatgaagtgaaagtgctttttgaatcaatccgtccaccctacacagaattgttttatgagtatatgaaagtttgctggctttcatgctaaagcagagcaaattttacctttgtttgcattattcatttgctttacaat

SEQ ID NO: 813008 - DNA, 656 bp, Homo sapiens
ctctttcccttctgaagaaggtcataagaccttcattcaagaggtactctttctactgcagaggaaaagaatatccttatcctcaaagacacagatatgcttcacagaatctgaataaaaagtctgggtgcggtggctcacgcctgtaatcctaacactttgggaggccaaagttggcagatcacttgagttcaggagttcgagatgagcctacccaacatggtgaaaccctgtctctacaaaagtacaaagattagctgggtatgaggcaggataattgcttgaacatgggaggcagaggctacagtgaggtgagattgcaccactgcaccccagcctggacgacagaatgagactctgtctcaaaaaaagaaaaaaaaaaaaaaagaattggaataaaaagtccttgctaagtctcccccagtttattgccatgtcatacctgctttgtccagtcatacttccccgagactgttcactcttcatcaaacctagcatggaaatacacaggtttccctgatttggggggtctttatttctgaaggctcccaygttatgtaaacttacattaaatacatttgtatgctttttctgctgttaatctgtcttttgttattggtgtctcagccatgaacataacgttgggtgatgttaaa

SEQ ID NO: 813009 - DNA, 537 bp, Homo sapiens
acagaaaatccatggctccttgaggagtgacttgtgtagccataggtgctcaattatatcccaagaccctattttttcctgctccactccctgcctcactggtgggttccaggaatactaacttctccttctgcctctggctttagttttctgtttaggatgtgcctcttctggctctgggtgtggctgggtctttctcagcatttggatcttacttgtaaattttatatgtctcccctccagagtgaagattctggagaataagaatcgtgcctctcttcttttacattttatttcaagtgcttagcacagtagttggaacacagcagtcattcaacaaatgcttgctggaagcttctgggtgaatgagtgataaaatacccataggaagacactaaggagagagtagagtcaaactctgtaatgcagtattccaaggggaatttggagatcagaagatttctgcctacatagaatrtgaccaaagtggatcccaggggcatggttaatatctctcgtttgctttttcactatctc

SEQ ID NO: 813010 - DNA, 632 bp, Homo sapiens
aatcctgtctacagaaacaatggggatgcaagtggtcagcatctagtgctccatgacttttggttayaaggaagcaggccaaagtgcagcctgataaatgcttaattataaccatatttctgtccagaatccttgttaaccctgtgaggacagctttagtagcatattctggtctcctagtcatgttttaaaatggcatttctcaaccttatgcattcagaggatgatcatttatcatttctcttcataagattaaaattatatattcagaaatatctctatccagaaatttatctcaaccagaaggcccaagtttcctttacgttggtgcacatcaacatgaaggaaaccaagagagtcccgtgaccagactgttaagttcccagggcagagagtggatatcaatcatctgggcttcttcactggttacctgtgtgccaaagatacagcagcacttcctcctcctctcagcttcgtgaatgaatgaatggggataggccacggctcttgcacatacttacacatactcacatgcctggtcttctcagcttctttcattgcccttcaccacctgggcctcctgtctggtggtgacataataagaaatatatgtttagtctcccgttggaatt

SEQ ID NO: 813011 - DNA, 632 bp, Homo sapiens
aatcctgtctacagaaacaatggggatgcaagtggtcagcatctagtgctccatgacttttggttacaaggaagcaggccaaagtgcagcctgataaatgcttaattataaccatatttctgtccagaatccttgttaaccctgtgaggacagctttagtagcatattctggtctcctagtcatgttttaaaatggcatttctcaaccttatgcattcagaggatgatcatttatcatttctcttcataagattaaaattatatattcagaaatatctctatccagaaatttatctcaaccagaaggcccaagtttcctttacgttggtgcacatcaacatgaaggaaaccaagagagtcccgtgaccagactgttaagttcccagggcagagagtggatatcaatcatctgggcttcttcactggttacctgtgtgccaaagatacagcagcacttcctcctcctctcagcttcgtgaatgaatgaatggggataggccacggctcttgcacatacttacacatactcacatgcctggycttctcagcttctttcattgcccttcaccacctgggcctcctgtctggtggtgacataataagaaatatatgtttagtctcccgttggaatt

SEQ ID NO: 813012 - DNA, 554 bp, Homo sapiens
taatccagcatccagcaattgagcttaagtgtcactcctggctagatatccaggcatgccccrtgcccactaggtcccatgggtacaacaaactccaggcaccagtacatgatgttattcattgaacggcactcactttatgatctgtggctggcacactgttaattacatggcaaggagaggtcaatatcaagctaaaatggaacccagctgtcccacaatataatcacgtccacctgagacactgagccgtcacctttaaatcacttgtaagcactagctttcatagcctctcttctatcaataagccacaccacaaatgcagtccctgaatcctgcagtttttcagcataaagcgacattttcttagcacactccaaatttaaagcctattttctcaataaaagaggaaaggggttaagaatggtaaaaaatcaatggcgaagtgggacccgagataaagtggagggggcagagagaaaggtgatatagaaaaaaggagtggaagggaaaaaaggaaggcgggaaaagaaaagagaaacagcatttgaaac

SEQ ID NO: 813013 - DNA, 642 bp, Homo sapiens
ttctcacttcactaagtatattccagactttttttttctcaaggccaaagagaataaggtttagaagatgaaaaggtggatagaattgtcctatctgcttcgayttcactggtaaacgtataataaaataaaggcaaaataccttatctttacccttatataataataatagcttacatttataaaagatctattatatattgttacatacaacttcagaaattttattttttgtttctagaatttccatttggttgcttcctactgttttccatttctctaccaacacctctaatttctctgctaagattctcattcattgaaaacatggtttgtttttctcattggggatagttatcacagtcgttttgaaccttttgtctgttagtttcaacatctggttcatctgagagctggagttgattttcttttgtcctcattctccatgatctgggaattttggattcttttccagatattatgaatgttaggtggtgaagattctggattctgttttttctccaatgagtgttgcttcctttgttttagcagatagttctcttgtctgtgcacaaactgcaaactgtttccagggctacaagtctggtcttagtgagatcttctgtccatagctaggttgct

SEQ ID NO: 813014 - DNA, 631 bp, Homo sapiens
accacctccagtagatgcccctgaactttaaaagctgtactgcagaggcctccctcttcctggtctccattttccagccctttccctttgccctaatgctcataagtsacagggaaggctgcagtgggaatgagggagaacccttcaagaaacaaggaaaagctttagtatatgacatcacagataaatatattaaagggctggggggatggagagaaccaaattcaaatctgctaacttcaggctccatctatgaacaatagaaggcaaaaagtgaaggccgatttctgggttatcatgaagcaggaagatgagcactcaggacctgtcatgaaaatacttgctttccctcactgctttgccctggttatgaagcaaggtcatcaacaaatgaacaacatcaagaaggcaggcagaggctcaataagctgagaatggagacaaggcctcttggatttacctgaattgaatgtaaagagcgactgagaccttgtagacagcatgttcccttttccttaaatagcaagacagcacagcctcgaggctgaggtgggggaggactggcgtcagggtgaaaggggccaaacactggccctgccacttgcttgctgtgagcatttgcgaaggattt

SEQ ID NO: 813015 - DNA, 595 bp, Homo sapiens
tgactccaacagtgatggtggatttttctattttctcttacatatagcaccatcagttttcacttcttgtatggtgagccaatgcgattgtttattaatttatttttacagttttatgttctttttaaawttttttttgcatataagttggtgttatcagatacatgtagataacaaaacggttaatagaatgaagcaaatgaacatatccagcatctcacatagttaaccattttttctccttcgtggcaagagcagctaatatctactcaattagcaaaaatcttgaatacagtattagtaactatagtcctaatgtggtacattatatttctaggtttgtttagcctatctatctgctgctttatatcctttgacatatatctccccataccctctaccttaatcctagtaaccactgtttcattctctatctctgtatattcaaccttttaatttttagattccttatataagtgatataatacaacttttatttttatgtctggtttatgtcacatagcataatgtcctccagtttcattcatgttgtggcaaatggcaaaatctttttttttttggtatggctgggtaa

SEQ ID NO: 813016 - DNA, 511 bp, Homo sapiens
tgtattcagatggtggcagctccatcagtctgtgttgcagaattagagaaacaaacagagcctccaaatgacctgcactggacatgtagtgtgagtgagaaacacatatttgttgtttaagcgactgaaaytgggattatttttactactatgttgtaacgaagactttcctgattaaaccaccctgccattaaaagtcacatgtgcacaaatgagagcatatgtcaaatccaggagaaagctatccctaaggttatctcactttatctcatgagatcatctgaaagtttcatgtctgcatgccaaaatttagcttgctaacatttaacttgacatagctccctagacataggaaaaactaaaatactctaaaacctgatctgtcatagtgacactgttcctcacaggaattttatgaagggacaggaaaggaaggggtagaatagagctgtaattccctcctgcacatccagcagagtttatgcttaataaaaaagcacaaaatatatat

SEQ ID NO: 813017 - DNA, 632 bp, Homo sapiens
cactctcttctggcttgtagagtttctgctgagagatcagctgttagtctgatgggcttccctttgtgggtaacccagcctttctctctggctgcccttaacattttttccctcatttcaactttggtgaatctgacaattatgtgtcttggagttgctcttctcgaggagtatctttgtggtattctctgtatttcctgaaattcaatgttggcctgcctttctagattgggaaagttctcctggataatatcctgcagagtgttatccaacttggttccattctccctgtcactttcaggtacaccaatcagatgtagatttggtcttttcacatagtcccatatttcttggaggctttgcttgtttctttttattcttttttctctaaacttctcttctcgcttcatttcattcatttgattttccatcactgataccctttcttcctgatcaaatcggctactgagtcttgtgcattcatcacgtagcaaatgctgagagattttgtcaccaccaggcctgccctaaaagagctcctggaggaagcactaaacatrgaaaggaacaaccggtaccagccacttcaaaaacatgccaaattgtaaagaccatcaggctaggaagaaaat

SEQ ID NO: 813018 - DNA, 522 bp, Homo sapiens
tcagtcaagtgtttgaaatagtggagttcagacagtacatttttattctgtcctttcaatcttcttttaagactctatctttgaaggccactgaagccttacctccttccaaggcccctcccagatcacagaagcacccatatttgcccctctccgtttgcaatatcgatggctattatggtcatctcccactggtcctactttctggaatggtttcttaatagattcatgaagtacacaggaacctcaggtctctggtataattatgatgataattttgacaaccatatctactattgtgaacttctttatgtgccttaatctctatacaatcattgtgctcacaataaccctaaaaggtaatgttattacaatttccacattataaagaagttgaacctgagaaagctyctgactcactcagggtcacacagcccgagagctggctgagctgggatatgaagatgtcgatctgactccaacaatcttagcttttgactgtctccatagaaggcactatct

SEQ ID NO: 813019 - DNA, 507 bp, Homo sapiens
gtgttgaaaggaagaagtaaataataataggatcctatcagctcagaacagtgagacagtccastgtgaatcacaaaagaaaccccgagaaaaagaagcaggagctgttgaggcagtgtggaaccagtacaatttaaaaaatgttgactacaagagaataccagtcattcttttgatatttgcataatatggatttgtgaacagcaaataatacttctgaaagccatgtctaccatttatatcgcatgtgtatgtgatttcaaattagcttgcctgctaagttacctcttaatccaacagagtgtaacaaagctgaaggagcaagtgcaatgcattaaatacacatttcttaaaaataaaggcctagccatgcattcagcctgtccttaataccacatattatatatttacacagccttgctgtattggttccagcttacttactataagtaagagtatctttttaacttttgaaagatattttcttagggaactcatgaggtttct

SEQ ID NO: 813020 - DNA, 638 bp, Homo sapiens
ttatttaggcagatagtgagggtaaggaagtcctcagtaaggttttccttttaatgaaaagcagccctcaaatcgttytcttttcttacaatgagcagcctgtaaaatcaagctgcagacatagacaagcaagctagaagcttgcacgggtgaatgccagcagctgtgccaataggaaaaggccacctgggactaggcatgtccaacttcgtatacttggtcatcatttcctacattctcacacagaagagagcactcaaaaaatagttttgagaatcatttgctaatgatttaatactattataagggaataaaagacttttcttttaaatgagtgcttaaaggcgattggaagccctgctaaagttcaggggtgaatgccttattatttttttatatttgggggcaagggctttccagtgaagactggaaaacctgctagacagattctaaaagagctgtaacactgggtgaatgctgtagaagcacatagtgttagtaaggtgtgggtcagatacggctttagagaatgtagcaactgaaagcccagatgggaagctccgtaggcagctggataagctaatatttctaaataatatgttcagagattcggactgaatgcaattgcaaccttctcc

SEQ ID NO: 813021 - DNA, 615 bp, Homo sapiens
aacagaaaatgaacactggggacaaagttagtgaaatgcaaataagatcagtagtttactatgaagtgtaactattgtgcaatatgctaatgttatcctcctgattttgatgattatgttataattctctgkgttgatcatattaggaaaagttgagtgaaagatatgtgtgaacccaaccttctgcattgctattgcaacttttctgtaagtttgaaatcattttaaaataaaaagtttttaaaatgtaaatttatctatctctgcctattcaaggattctctaagacacttgttttaacctttttggagattaactaactctttgatgaaaagttcgtaccatctgtcccaaagagccttaagtccactgctatagtttgaatgtcccccaaagctcatgttggaatttgatccccaatgtcacaagtggggcctagtgagaggtgtttgggtaatgggggtgggtcccttgtgaatagatgaatgccctccctgtgaaggaggggagtgaatgagttctcactctgtaagtttccccaagagctggttgttaagaagaacctggcactcattacttttctcttgcttcctctctcatcatgttatctgcaca

SEQ ID NO: 813022 - DNA, 572 bp, Homo sapiens
gctggaggtggtgcgcaagcacacaggggccaaagtaactaagcaacacacctgtcaatcaaagaggcaaacactggctagagattaggcagccttgggaagggacacacacacacacatacacacacacacacacacacaaagacgcaaactgcaccaagctgggggctgatctcatctcacagaggctggtttgctctccccctcttagagtgtaatactgtgcttaatacacttttgtttctttgttttgctgtgggtgtctcgtccaattctttgggacaccaaaagcctggaactgcatggcaccatctggtaacagtatgatgttcgacacccttggcatttgttgtaaattcctgctaataaaaatgatttgaagctgttttctgtttttttgtttttaacttttaagttcaggggtacctgtgcaggtttgttacataggtaagctggtgtcatgggggtttgttgtacagattatctcatcacccacgtattaagcctagtacctaccagttatytttcctgatcctgtccctcctcccaccttccaccctctgataggttct

SEQ ID NO: 813023 - DNA, 395 bp, Homo sapiens
tctattatttctgggtcttatgcatttaatgagtyacaatgtccttcatttctccctcttcaatatgatcatgtcacagttcataacagtgagggaaagaactctagatacaatctgacttctatcttagatgtaggaaaaacctttgtaaattcaatgttaatttctagaaacactctaggatggtttactaagcagatgatatgtgagcacttaaaagagaatattttttgatcatcaggagttgcatggattttctgggattcagaattactttgaccagtctaagcacttggctgaaaccagcaaggtgaaatggagagggaataatagagctaaaatctactgtttcctagcaaatgggtaggcactgtgttagatgttatctcatttaa

SEQ ID NO: 813024 - DNA, 623 bp, Homo sapiens
ctctgctattattgtattgcagtctagctctccctttagatctattaatgcttgctttatatacttgggtgctcttatgttgcatgcatagatatktataattgttatatcctctagctgaattaacctctttatcattatatagtgactttctaccctctttttacggactttggcttgtagtctatctgataaaaggatagctagtcctgctctttttttggtttccatttgcatggaatatcttttatccattccttaactgtcagtctatgtgagcctttataggtgaagcaagtttcttataggtggcatattgtttggtcttgtttctttatccattcagccactctgtcatttaattagaaaatttagtccacttacattcaatgttatcattgataggtaaaaacttactactgacattttgttacctgttttatgtttttttttttttatttcattttgttttttttaactcctctcttcctttctactgtcttctgtggttattttctttggcagtatgttttattttgttgctcttaatttttagtgcatttattatagtttttgctttgtggttaccacgaggcttacaaaaaaacctcttataaatataa

SEQ ID NO: 813025 - DNA, 467 bp, Homo sapiens
aattaacggatctagacaataattgtcaggggttgttatcatcgtaaaaataaagatcatacatcatgtgacccagtgaaagcaaacaatgctacctataaagtgttctagctaaaacatcaagctaaatctgatcaagtctctctgtataattgttaatgtatggtaaataaagaggagaatatattaaatgacactatgaaaatgcagtcagaaaatacagactatgagaaactctgtgagacaaatggccgaatgtcctgaacaaatacatttcaaaaaggaggaagagaaggaaaagaagaaaggaaagcaaaatcataggaaatatggtagagtttwcagaaatgtgttgcttcaatgagtggcaaaaacagcactagactaaacaatactttggtcctgcctaacaaagcttaaacaacaagatctgaaaagatcaaactgtttgcaactaatttaactgt

SEQ ID NO: 813026 - DNA, 473 bp, Homo sapiens
ctacccaccctctacaatgtgattgtataggagaaacgatagtacagtatatatagagttcagtattatmagcagtttcagacatccattggggatcctggaatgtatcccctgtggaaaaggggtgactactgtaataaaacaatttaagatgatataagagaaaccaaacatgtatgtcagataaataaaagtcagacacattcacttctttaaaggactctaattggattttaagaagtctaaactcaaaaaagtgatataatatgtaagaaaagttactcaaaaaattggaagtatcatttccatccttttaggatgggaaaatacagtaagcaaatgaaaataaaagtaaagcaggggtcaggatattaaggatattaatgttaggcatggttgaattcgaggaatagaactttatggtaataataagtaaatgcaacccacaatgaaattctgagcctaatgcatct

SEQ ID NO: 813027 - DNA, 515 bp, Homo sapiens
tttcagtacattttttctgttgggggatcctgctttatttaatgatttctacaagatctttttatagtaataaaattattctttggttattttgatggcaaatgctttcccagtaagttgtttgccaattaatttatttactttaaagtattttctaatagaatcttttgaagttgtctcataaaaattcagaaagtattattttatactttcctatatcaaactgatgtatttaaaaaacacatcactcttatttattatcttttggctaaaattatacatttcttaaaaggtacacagaaatttaagttttgtcagaattccagctctttgaggaaggaggtctgactatttactccccactgtgtcccaaaaccaaacctacagctgttcctagcacacagtaggtatactatttagytcaggtatactattttactaataagttcagtattattttggaatttgtatgaaagtagcaaatcagactcccaaatactttccaggaataaaag

SEQ ID NO: 813028 - DNA, 645 bp, Homo sapiens
taagagtccaggtgttgaaggtgacatctggcagtgatttctgtgatcagtgctggggtccaggccagtctatttatgcagcctctcctcctttggccattgtcagttttcaggcctgcttgtccagccttctggtcaattctgagaaccatctaatatctttccagtaagttccttttttgcttaagagagccagaattggttcctattgttcgatactgagaaacccagcagatacagatactgggtaatattagagcaatacatggtaaagactgaaaacataggttcaagaagggtgtggatatgttcatggctaatggatttttactatttacatatctatgtacaattctattattttcataataaaagtacattacttttaataatgcattataattgtccattatggaaacattttacaatttttccttcatgtctttttggtaatgattttggcagtgctataattatcgtattgcctcttttcatttagcatatcataatcatttttctatgtcttcaataacatatttttaagaggccataaaatatttgtttcaggctgtgcctgtgcaagargcctggagagagtgggtctgaaggtgggcccaggatccactaagtcaagaggaaggggtg

SEQ ID NO: 813029 - DNA, 637 bp, Homo sapiens
gtgcttgaaatggactcattcatgggcagatgcagattcatacagacagcaaagcttcatcaatgtggatatagctaggaaatttcatttgctggcacarcatgtgatagggacagatacatgaaactgacacgaagaaggcattgtctacatatattcagatgtgcccaagtctcgaaactgattcaataattgtgcccctattatgtcttctatatcacaaatatttctgtactgaatcatattttaaacatattaggatgagtcattaaaagactccctacactttgttctttcgcagactatggctttattctgtgagttaactaccacggctcagtatgtttgtttacaaattcatttttatgttcaaagggtttccatacaattggacaccactttttttaaggaggtgaaattgcagcaggatgaacctgacagtaataataagcgaagtttttctgattatatacgtaaaacttcaacacaagtcaccaaggtaggaagagaattcacatttcctgaatattttttgaaatcatatctcatttgtctggaaaggattaagatcagccctgcagaggtctgctctgaggctccttgtttagcgagtctgtgatttagggatatctgtcca

SEQ ID NO: 813030 - DNA, 637 bp, Homo sapiens
gtgcttgaaatggactcattcatgggcagatgcagattcatacagacagcaaagcttcatcaatgtggatatagctaggaaatttcatttgctggcacaacatgtgatagggacagatacatgaaactgacacgaagaaggcattgtctacatatattcagatgtgcccaagtctcgaaactgattcaataattgtgcccctattatgtcttctatatcacaaatatttctgtactgaatcatattttaaacatattaggatgagtcattaaaagactccctacactttgttctttcgcagactatggctttattctgtgagttaactaccacggctcagtatgtttgtttacaaattcatttttatgttcaaagggtttccatacaattggacaccactttttttaaggaggtgaaattgcagcaggatgaacctgacagtaataataagcgaagtttttctgattatatacgtaaaacttcaacacaagtcaccaaggtaggaagagaattcacatttcctgaatattttttgaaatcatatctcatttgtctggaaaggattaagatcagccctgcagaggtctgytctgaggctccttgtttagcgagtctgtgatttagggatatctgtcca

SEQ ID NO: 813031 - DNA, 582 bp, Homo sapiens
ataatctgagtgatacatacttctactacgttttcgctgcccataacwccctgggaagaaatcagaaaaaaaaaaaaaaattattacctcctgctagctacctatcaatgttagacaactgtaatgtgttttatactgagaaaatatatagaagaaacgtttcttccactgaagatcttccaaaaacagtaccaaatagtattttatgtaataatgaaaaataataataacacatggcatagctgagtacagaacatacatgcaatataagtttgtgtatttttaaacatgcactcatatatttaaatttcaagaaatgtttattgacatgtgaatcagaagactctgcaaataataatggacacaattaaatgtagcttcaacagtaatgaatttctattacttcttaatgagaagtctagaaataagactgcagtgggattgactaactcagtggctaaaacaagtcatcaaataccaaggagctttacatctttccatagaatagcttgagtgtgataactatgcttttcctcactgttttaagatagttgaagcttgtttctggcaatgaagggtgtt

SEQ ID NO: 813032 - DNA, 582 bp, Homo sapiens
ataatctgagtgatacatacttctactacgttttcgctgcccataactccctgggaagaaatcagaaaaaaaaaaaaaaattattacctcctgctagctacctatcaatgttagacaactgtaatgtgttttatactgagaaaatatatagaagaaacgtttcttccactgaagatcttccaaaaacagtaccaaatagtattttatgtaataatgaaaaataataataacacatggcatagctgagtacagaacatacatgcaatataagtttgtgtatttttaaacatgcactcatatatttaaatttcaagaaatgtttattgacatgtgaatcagaagactctgcaaataataatggacacaattaaatgtagcttcaacagtaatgaatttctattacttcttaatgagaagtctagaaataagactgcagtgggattgactaactcagtggctaaaacaagtcatcaaataccaaggagctttwcatctttccatagaatagcttgagtgtgataactatgcttttcctcactgttttaagatagttgaagcttgtttctggcaatgaagggtgtt

SEQ ID NO: 813033 - DNA, 532 bp, Homo sapiens
attattgcactccagcctgggcgacggagtgagacggcttctmagtaaataaataaataaataaataaataaataaacatacatcagactactttgtacagggcttgttcattttctacactgtcttccctatccactagccctcccgcagccactccacagttgtaggtactgtactggatgcccacctgtctcctgtggacatatcacactacacatgaaaatttctatggagtgacattcccagaaaagctaaaatcctattagtctctcttggtcagttaagctcaacagtgtttgacatttttgctagaatcatgtcctatgctagaccttcagtgtaagaaagtgaatagcataagaaacttgattttgggtgggagataaaacaataatgggtgcaaagattttaaaaagtgaccaccttgcctttattctgcttttcagattgtctcctcatggtggcaggaacatgaagggaaatgtctaattttctcctttcatttaatcataaaatactaatttttggagg

SEQ ID NO: 813034 - DNA, 532 bp, Homo sapiens
attattgcactccagcctgggcgacggagtgagacggcttctaartaaataaataaataaataaataaataaataaacatacatcagactactttgtacagggcttgttcattttctacactgtcttccctatccactagccctcccgcagccactccacagttgtaggtactgtactggatgcccacctgtctcctgtggacatatcacactacacatgaaaatttctatggagtgacattcccagaaaagctaaaatcctattagtctctcttggtcagttaagctcaacagtgtttgacatttttgctagaatcatgtcctatgctagaccttcagtgtaagaaagtgaatagcataagaaacttgattttgggtgggagataaaacaataatgggtgcaaagattttaaaaagtgaccaccttgcctttattctgcttttcagattgtctcctcatggtggcaggaacatgaagggaaatgtctaattttctcctttcatttaatcataaaatactaatttttggagg

SEQ ID NO: 813035 - DNA, 532 bp, Homo sapiens
attattgcactccagcctgggcgacggagtgagacggcttctaagtaaataaataaataaataaataaataaayaaacatacatcagactactttgtacagggcttgttcattttctacactgtcttccctatccactagccctcccgcagccactccacagttgtaggtactgtactggatgcccacctgtctcctgtggacatatcacactacacatgaaaatttctatggagtgacattcccagaaaagctaaaatcctattagtctctcttggtcagttaagctcaacagtgtttgacatttttgctagaatcatgtcctatgctagaccttcagtgtaagaaagtgaatagcataagaaacttgattttgggtgggagataaaacaataatgggtgcaaagattttaaaaagtgaccaccttgcctttattctgcttttcagattgtctcctcatggtggcaggaacatgaagggaaatgtctaattttctcctttcatttaatcataaaatactaatttttggagg

SEQ ID NO: 813036 - DNA, 613 bp, Homo sapiens
aacaaggcatgaatttttgaatttacaaaatataactatgcaaagtatagcaattaatgaaaattattcaaatgacatgtgattctgtattctgtggctatatcaatgattttttaaatgtatgtttatagtataattacccttgttagactcgtttgccatttggcttatatcatgagactctggtattgaggacagtcttatttttcctctggatattccacagaataatacctttgaggacaaaggtttttgctgtttagtgaattgttttccctttttaatgagtatgtgatacttgaattcaattaatgattgtgagcctccagtgtacacatcggacaggactgcacattccttaacttgacagcagtcactggaaagaacattcaatgaacaggtaacattttcatttcctttgcctctgttttatttggggaatagggagcaggtgtagtaagaaacccaagttccataaaaaagactcacctttgaggaaagggaggaatttacattccagataatgcaaacctaacacacagtgattamatgagcagtgatttctacctggagtgcattttgtactcaataaaaactaaattaacaatatctg

SEQ ID NO: 813037 - DNA, 643 bp, Homo sapiens
aaaggccagatctgaattccaagtattatctctgtcaaattccttattgctaccatttcccccccgggaagaaaagctgtcaagcatccttaaatggaagaagagagcctcttttcatttaaaaataaaaaagcttattttcagctatagatagggtactttctttaaaaagctgtctctctgaataatggccatttcactgccaaatgtatgttttgatcttgcagattacagagtgtgactgcacacaatcccagacgagtctcagtttattgatgctcattagcttataccattgctaaaatatgtttatctacaatttgggattagattaaggtcagtgtttccaaatccatgggctgcaaggtgagcacagaaatgaattatccatggctcaccactctcctctgtccaggataggaatagaaggacaatcagattacccttgcctcctctttctttcttagacagtgaaggatactttaataagggtagatgggaagggactgtacagtcacattcttttaacataaaaaggaaaaaactatctgaattaacgaaggaacacaaattgtaggctattttaaaamtcatcaaagaaatctgtactaacaaaaactaaatattaacaaatcattgttga

SEQ ID NO: 813038 - DNA, 573 bp, Homo sapiens
agttactatttttcctgcaataaaaaatgtataaatgtcacattctttttttttttttttttttttttttgaaacagggtctcagtctgttacccagactggggtacagtggtgtgatctcagttcaccacaacatccatttcccaggttcaagcgattcgcttgcctcagcctcccgagtagctgggattataggcgtgtgccaccatgcctggctgattttcgtatttttggtagaaacagggtttcaccacattggccaggctggtctcgaacacctgacctcaggtgatccacctgccttggcctcccaaagtgttgggattacaggcgtgagccacggcgcctggccaaaaaaaatacataagtgtcttattctaatgggaaaaaagtttgaggcaaaatttggcaaattagaaaatcggcttgttagctcactggctgatcattttctcaaatcctgctcatttgtgattactctttaggcaactgttgagcctggtgcaamtctttctctaattttccagataaagcccatcctccttcctccactccccacctccgctttactga

SEQ ID NO: 813039 - DNA, 635 bp, Homo sapiens
ccatttaagtttatgtaagtgcacactacgataaaatcatagagagaggcatttctcagaatgtatccctgtcattaagtgactcatgactgtaattctactgctagacttttgggtggggaaagaaacaccttgctgtagtcctcaagcaccaaattaattgctatgctctaaatggcttattttgtatttttacacttgcttttttctactggaatgcactttccatacttacccatttgacatatgtttacttgtattttcgcttccagcccaaatgttactcctctcatacagttttcttgaatcccataggcagctcctgggaacatccattacactttgctcggttcccatgtgagaatttgttctgtgaaagacgtcataaggcattgagttctaaagcagtagaaataaacaaggcaccatccctgatctcaaacaaccaatagattagtggaggagacagaaatttagatttatgattttatctagctttggtctctggaaacagttgaaataagaaaacctctattttttgtccagtkatacttatatacgtcagagtactcagtttgcaaaacaaataaactgagtgtggctgagttaggcataaagggattgtatgaaaatgt

SEQ ID NO: 813040 - DNA, 646 bp, Homo sapiens
actttacttgcccctgtgaatgaagcagacacaagtcattctaggcggatggatctgattagagggactgagaggaccacagggtggggcgcaagacttctgagtggcagctgttatcacagtcatgagcagcatctgactctgattggcacctccacatcctgctgtcagagttcctaaatgagggaatatccactggacttcctttgcctcatcctgtttgctgtggagtccgatctccttccagatggcactggcatgtgcagagagagttgtacatttttcttgggaagagtgatagttattgaatccttctcagaaaagctccacgggtagagaataggtacaaaaatggaatgctagtcagagaagtatgtaaaatgttcaaagaaaatttctaggccccggaccatgttatttcctagagctattgtctaattttcaaaaggttcaaaaacacaaccctcacacaaatatgaacataatgtccaagttctattcagctcattaattagtgaggaagcyactaagatgttaataggggttcaaaggagaatttgagaagctggatatttatggacagtttaatatgaggatattaggaaaagattgcttaggtgagagacacaattgattgatattttgt

SEQ ID NO: 813041 - DNA, 516 bp, Homo sapiens
cggtgtattctatatatacgtgtgtgggtaggggtgtgtgtgtgtgtgtgtgtgtgtgtgtrtatatatatataaaattaagacatatgtatatatatgtcttaatttaaaattagtggcattgcatttcccccaaattaaagcaaatttgactctctatgaagtcacgctgcgtgttttctgtaattgcaagggtcttgcagggacagtgcgcatgcagctccctggtgagaggcagaccatggacagttgagaggggatgcagatgagataggggtgcaggtggggtgggaagcaatgagaccagttggctaggagagttcggggcagaatggccatatgcagaggtcccggttcaggcagcctgggaagctcagagagggtcaccagatggctctggaaataaagggcaatggtagcaagtgttgacacttgaggaaagctcagagagggtgaccagatgaccttgaggagtgaggacaagttgggcagtgtgtctcccagagacagaatgaa

SEQ ID NO: 813042 - DNA, 592 bp, Homo sapiens
tcactgaaacttaccttccttgctaaaaacttcaggttcctttctctcctcatgccaaattgttcacaaaatctaaaccaaggaaacaatgagattttaaactgcattacatgttttgtgaaactctcttctcctccttccccaagctatccacttctttgtctctaaggtagaatatactgaaaataaaatgcaaggatgcacttaaattcatataaattttagcactggaaaaatctttggtttaatccaactctgttacttttttattttattatttgtcccagattaccaagatattttataatagatgtgaattacctgaaaattctctgacaagcatggataataaaaacaaaatgaaagaaggcggaatgtttattcatacccatacctaatatgttgcaatcatttctatgacatatatgccctcatttctttcacatagcttatttcatttaccctttagcacaggtgtgcaaggtggccaytattaccttcattttaaagatgaaacagaaggtcaggagagctatgtgactttcctgagttcaacaaataagctaaatgaggaaccatgtcagtgctgaga

SEQ ID NO: 813043 - DNA, 375 bp, Homo sapiens
tgtttgaacttcccactttagcattaaaaatctcacaataaaagaatgtcttaatccagaagaccagtaattggatcttccattattgatgaaattgcttccaatacatccatattaaaaaatgagaaattrtcttagggaagatattcacttccagatacatggcaagtttttcttccagctagagctttgtaattaacaaatacttatgataaattaacaataaataatgtattaatttgtacattccaataacatcaatggccctcacggcacttagtgaaaattaattaatttacaatccttccttctaaaataaagggattgtttcccatcataaattagggatcaagattattataatgccatccaggg

SEQ ID NO: 813044 - DNA, 685 bp, Homo sapiens
ctgacatcctcacgcttgttcacagacagagtcttattataagccatctgatttgatcagattgctaagaaacaattactcaattatttagctcaattggttagaacactgtggtaatggggtcaaggtcatgggttggctcccctgtgtgggccagttaacttggatcttttccattaccacaggctctcctcccaaccccagagagtcttaaaaatacatgccagtggtcaaaagggcacttgccaagaatatgtggatggagcagcatgaatccatcacttctcccggaaaaacagctcaatgccagttttgttgaccatatgtggattaacagtaacattttcacaggtgaaagacaaaacacgattccagactttgtaatatcgcagaattgcagatctagagctctaaaagaaatttgtagaatatataaaagcctatcatgaaacttaaatttatagagaaagttttaaacatgagccagtgatttctattaaaaatatttttgaaattaaaaatttgtttagtgaaataccttgatttttaaatattggctcatgttttttaaaaattaatactctgtggcttccaaataaggtctacatgggtcaaattcaggctgtgggatcccartttgcaaagtattggtatactgaaatacctatatatttatatgtacgta

SEQ ID NO: 813045 - DNA, 571 bp, Homo sapiens
ctgtctagggaaagacaaaaatgtagtcacaaagaacctaaaaatacttttaaaaaataacacttgttaggttacattagaaaaggttaggttagattacctttttttttttttttacaagaaataaaaagtagacaagaaataaagatgttccactaaggaaagagccaaccccacaagtattccttaagatactgacaatatggctaataagcaaagtgaacatggtcttaatcctgcacctaggcctacatttgcaacttggttcttaaaagtggccatttttcttcacccagctaaggcatttagggtccttgcacacatgttcatctcttcttaatggttactgtgcactgtaacataattacctgcttttgtttaccttttccattagaaaataaactccttaagagcaaggaatagggctcattaactaacatttctcaggaaataataggcacttagcaaatgtttgggccatgaacaaatgaatgtgtcccaaattcaccagactgtggaagccagmaagaagatctgaccatctcttgcagaagaaataaagaatggtaac

SEQ ID NO: 813046 - DNA, 471 bp, Homo sapiens
cctgatttcactgagcacttagaacttctgttttgaccatcttgctgttctgcgttgatttgccaatacagataatatgcacagggtgcaaatgtgcaatcttttcttctttttcttttggtctttttatctttttttgtcggggggagggtctatttctcaatcctgaagttcccctcacagcattctcttcagtttattgaaagaatgtgacatgaaggagaaggtactttgtatgtttcctatcatgtgaaaaaagctcacttccatttgcacataggtcagcaaggaggtttcatctcctttaccagctttcatctctgtaacagctacttgtgagttttgttgtgargtctcatccaggctctgagagaaagtgtgctgtgatcaagggaagatgcctacctctgagtgcagaagtgaaaagtttccattctagatagaggggcaaagttctgcaaatgaccagct

SEQ ID NO: 813047 - DNA, 598 bp, Homo sapiens
aatattcatattaattaaagattaaatatgggcctatgtaagaatatggccatttagaacatttagaaaaagtgaaataggttgaaggtcaggtcactggcctgttcacgggtaaaaggggtgagggggacttttattttttcctaaaaataaaagctgtttacattataaattatgaaatccatttcagttgatttaaaaatatcctagttatattagctgcatgtagacaaaatctcaatataccctggtagcttgttatatatttttctttcatattattatgaaaacgtagatgtcataaattatattttattaagccatgttttcattgcaactcactacataaggattaaattttaaacacctcacaaattcaccaaactaactcttaagattatctgaggattttcttcttctaacatagaagtagctttttgtgattttactaatttaaaaagtaacacatgttaattgttaaaataaaccaaagcaaacaaacaaacartaagaaaaattcagaatctacaagaagttctaaaaaagaacaaaaagaaaatcctccataagatgattacccagacataattgctgtttt

SEQ ID NO: 813048 - DNA, 601 bp, Homo sapiens
aatctattttactcatctcattatcacttctattcccaaacccaagcatttattgcagtgctttatttatatagagagcaatgtggtgctgccgaaagtttctctttactggcygcgtctttggacaaatcccaatctcctggttcttcagctatgaaagatgagaaacatccccctctcagtattgtgtgtaggattaagaataaaaatacttggccaggcgcggtggctcatgcctgtaatcccagcactttgggaggccgaggtgggtggatcacgaggtcaggagttggagaccagcctggccaacatggtgaaactccgtctctactaaaaaaaatacaaaaattacctgggtgtggtggtgcacacctgtagtcccagctactcgggggcctgaggcagaagaattgcttgaacctgggaggtggaggttgcagtgagccaagatcatgccactgcactccagcctgggtgacaaagcaagactccatataaaaaaaaaagggataaaaatattttattaattacacaattctatgcaaatgttagttattaatattataaactgttaatgaaaggacaaaggaaggggagaggg

SEQ ID NO: 813049 - DNA, 613 bp, Homo sapiens
aatgtcagtaaaaaataccctagtttagggggcaggatctagcaccaagaggtaaataaaaacaattttgcattatttatttaatttttttaaattttacaataatgaatttactgyattgtcgcacaatttctgtctagactacattgtgttaaaaccttaccttttttgtattgtaagccttttgaattgttcctggcaccaaacagactgttctagcacaaaacctaatttacagtaatgcctaaagtgttcaagaagctatcattaagatttctttttcttttctcattttttaaggtatatgcttctcggtcagaaaattaaattagtggtggtgataatacattgcaatctttactgacaagtgagaaaggcaatgcacaatgcacagatagtctaacattttcaaaaccttccaggaactaaagacaccagttgctggaagatctggtcttggcctgtcagcctgccaaaaaaaaaaaaaaagttatttcctacaatataaactgactgaaaatgcctcacagtgtcttcaagagagctgggtcagggaagggaagatgatcatactgttagtttggctgtgttatctgtatgtgtttcggctgtt

SEQ ID NO: 813050 - DNA, 642 bp, Homo sapiens
catctattcatttattctttcgttgatcccttatgacttgtgaaggactttgttgaaggctgaaaggaattttaaaagtagaaaacagtatgctatagtagaaaggtcagagactttaacataacaatgtttagctcaatcccggcttttccacttaataagggtatgatcttgaacaaatcacttatcctccctacatttcagttccatcatgtttaaaactgtaataagggcactttcctactttactctgttctttgaggtttaagagagataatacgaaataggtagcaatcctttgtaaactataaacatgtcaacaacataggtattacaaggaaaggatgtttttcctgctacaaaggagtttccatcaatttctggaggcaaggcatctttacataaaatggttttggtattagttaaaggaaatttttgattagtcacagtaaatattaaaaaaataaaataaaaaaacacagaggcatcaagatttgagatgaccccaaaggatgggtttgactacactaggttaagaaaaagagaaaacatgtatagttagagagttctgtgaactacaatatgaaagtagaaatataaaataaaatattttcagtcrattatttatgcacacaaaaacat

SEQ ID NO: 813051 - DNA, 422 bp, Homo sapiens
caaactctgtgcactctcagctaatgatggtgggtgaggtcctgcaagcaagaaatgcaagtccatacttagaatgcatgtmtaagatgagttgctgcccctttcgaggaagaaggggtccaatattgtcaacttgccactaaaatggatgtccttgagatacaatactataaagagcacacaagttggactctattcctcacaagctggacatttgacagtggaaatagctagataagcttcagtgagggagagctcaggcttttggtcccatgcagattgtccattccttcatcaggctacaccattcatgcatctattgtgcaagtactggggctgctgatgagcagtctggctaacatcagctgactaggtcattcattcttttttcttcttctactcttccagctttatcaagctac

SEQ ID NO: 813052 - DNA, 595 bp, Homo sapiens
ctagagtgttccttggtccaatgtgatgttatgtgggatcctgtgttggtaatcaaactctgtgcactctcagctaatgatggtgggtgaggtcctgcaagcaagaaatgcaagtccatacttagaatgcatgtataagatgagttgctgcccctttcgaggaagaaggggtccaatattgtcaacttgccactaaaatggatgtccttgagatacaatactataaagagcacacaagttggactctattcctcacaagctggacatttgacagtggaaatagctagataagcttcagtgagggagagctcaggcttttggtcccatgcagattgtccattccttcatcaggctacaccattcatgcatctattgtgcaagtactggggctgctgatgagcagtctggctaacatcagctgactaggtcattcattcttttttcttcttctactcttccagctttatcaagstacaactaacaagtaaaattgtatatatatgaagtacacaatgtgatgatttgatatgtgtgtatattatgaaatgattaccacaatcaagttaattaacacatccagcatctcacatagtta

SEQ ID NO: 813053 - DNA, 635 bp, Homo sapiens
ggtcaggagtttgagaccagcctggccaatatggtgaaaccccatctctaataaaaaataaataaataaataaatamaaaaattagccgggcatggtggcaggtgcccgtagacccagctactcaggaggctgaggcaggagaattgcttgaacccaggaggcagagttggcagtgagccacgatcatgccactgcactccagcatgggcagcagagtgagactctgtctcaagaaaataaacaaacaaacaaacaaaacagttttatttcttctttccaatctctatacctttaattttctttttttttttttttttgttttattgcattagatatgactctggtacattattgaataggagaggagagagagggcatcttgctttatcactaatcttgggagaaagcgtctagtttctcatcattatatattatattacatgtgggttttatggagatattctttatcaagttgagggagataattctattccaaattttctgagtaagaggtgttgaattttgttaaatgctttttctatattagttgataaatcatatgctatctctttttatcctgttgatgtggtgattttgtaaactgacttctgaattttcaaccagtcttgcatgc

SEQ ID NO: 813054 - DNA, 635 bp, Homo sapiens
ggtcaggagtttgagaccagcctggccaatatggtgaaaccccatctctaataaaaaataaataaataaataaatacawaaattagccgggcatggtggcaggtgcccgtagacccagctactcaggaggctgaggcaggagaattgcttgaacccaggaggcagagttggcagtgagccacgatcatgccactgcactccagcatgggcagcagagtgagactctgtctcaagaaaataaacaaacaaacaaacaaaacagttttatttcttctttccaatctctatacctttaattttctttttttttttttttttgttttattgcattagatatgactctggtacattattgaataggagaggagagagagggcatcttgctttatcactaatcttgggagaaagcgtctagtttctcatcattatatattatattacatgtgggttttatggagatattctttatcaagttgagggagataattctattccaaattttctgagtaagaggtgttgaattttgttaaatgctttttctatattagttgataaatcatatgctatctctttttatcctgttgatgtggtgattttgtaaactgacttctgaattttcaaccagtcttgcatgc

SEQ ID NO: 813055 - DNA, 625 bp, Homo sapiens
aatcatacattaattcgtcttaccatgagggtcctaactagtgtatggctttgaattacagagaaaagcagtggccaggccgggtgcggtgtctcacgcctgtaatcccagcactttgggaggccgaggtgggcagatcacgaggtcaggagtttgagaccagcctggccaacatggtgaaaccccacctctactaaaaatgcaaaaattagctgggcatggtggcaagtacctgtaatcccagctactcagcaggctgaggcaggagaatcacttgaacccaggaggcgcaggttgcagtgagctgagatcgtgccactgcactccagtctgggcgatagagcaagactgcatctcaaaaaaaaaaaaaaaaagaaaaggaaaggaaaaaaaaagacaaggcacagcagtggcctgttggagtgcaggtacctctggtcatctcactagtcatggaatctttgtgagatcagtgactgttagtgctcaggactttgagcagtcagttgcgctgggcatgaagcaggggtgtggacgctaattaacaaggttcccttaactgggagttctgaagattttgcccaaytgtatgcacaccttttctgataatatacactgctaggtg

SEQ ID NO: 813056 - DNA, 336 bp, Homo sapiens
tgagggaactggaaactggggcatttataggtggtggaaatgatgtgagttttgaaaagtgaggaaattcctttcccaaagggatattgggctttcactgtcctctatttcagtcagttctgaaaatgtacatgccattgggttttgccagtcctgttggctggcttctgctgagagggaaggaaaagaatgagacagtgaaggaaagtgagctaaacttagtgggaaggcccaaggctccaggcagtggctgaaggcagtttcctaattacttagcctccctgggagataggaataaagttttcccraaaacaggataagagaactgggaggagc

SEQ ID NO: 813057 - DNA, 655 bp, Homo sapiens
tcctctttggatccttacctatttccccttctttcttctttccttccttcttccatctacccgtcaacccacaagcatttatctgayactgtattaggtcctggaggtacatacacagctaaggttttttatctgccttaaagaaacttaaaaagacaaatatgtaagcaatgaagtttgcaatacaatgtgatcagctcattacagagaaatttataagacacaataggtgcacacacacatgcacacacacccacacacacatatacacattgaagagacaaatcttctagggaggactaaaagagaagataagagcagggacaactttccagcagaagtgtctaagagcaaaatcttgaatattaatgttatgacatacacaaagacaaagagctgtccagtcgggaggaaaaatacatgcaaaagcacaaaggttggaagcaaaatatatttgaagaatagtgcctgacaacaatagctaatatttttggggtgcatagagtgtttcaggtactgcctaagtagcttaactcagtaacactttaaattttgttttattattatgcccatcacacaaacaagaaacgtgaaaccacgggtcacagagccagttaattactggagcaagggctgaaacttagacttttgtgtt

SEQ ID NO: 813058 - DNA, 620 bp, Homo sapiens
acagatcgtggccagactgcctccttaggccagaccctgacccatccctcctcactgggtggggcctccctgcaaaaatttcagcaactccagcccagggtttagggacagaactctgatctctctgggactgagccccttggaggaggggcggccaaggtctctatggatcagcagacctagtcgttccccctgctgactctgaggaatttgggcagcccagatgagtgggattcccccagtgcagcacacaccctcctccaagggatagccagagtgcttcattaagtggatcctggatcctgtgcctcctaactgggtgagatgagacccctcagcagaggttgacagacaccttatacatgagcattccctctggcatcaggtcagttcccctggggacagagatcccagaggaaggagcaagcagccatctttgctattcaatagcctccacaggtgacaccttctgatgcaggagggaacgaggtgaatagagtctggagtggacagccaaaaaaccacagcagcyctatggaagagagacctgactgtcaaaaagaaaaacaaacaaatagaaagcagcaataacaatagcatcaacaaaaagtccctataaa

SEQ ID NO: 813059 - DNA, 494 bp, Homo sapiens
gaatggctattattaaaaagttaaaaaataagagatgctggcaaggatgtagaggaaaggaaatgcttatacactgttggtggaagtgtaaattayttcaaccattgtggaaagcactgtggtgattcctgaaacagaattactatttgactcagcaatttaattactgggtatatacacaaaagaatataaatcattcaaatttaaagatataagcacaggtatgtgcatcacagcactattcacaatagcaaaaccatggaatcaacctaaatgtccatcagtggtagactggataaagaaaatgtggtacatacacaccatggaatactttgcagccataaaaaagaacaagatcatgttctttgcaggaacatggatggagctggaggctatcattgttagcaaaccaacccaggaacagaaaaccaaatgctgcatgttctcacttatgagagctgaacgctgagaatacatggacagaaggaggggaa

SEQ ID NO: 813060 - DNA, 616 bp, Homo sapiens
cataacaaatacaattttgctaaaagtaaaattagtgcatcaatggatttttaatatacaacacaaaatttctcactgagttttaacttttactaaccatatatagagctggtggccyattttcccacactcttatcaacacctttaaaaagtcttgtcaataaaatgaggttcagttgcacacagcaaaaatgcccaaatttattggttaaaacactgtaaaactgtatttctctctaaagtatcagaaatttggaactatacaatccactacatgttaagggtctctgatttctgtcatcatcttcacaattctagagcatgactctaatacttcaaggtaaaccatggtacaaacatctgctagagctcccgccatcatttctgcatcacaaagtggaaggaggaaaaacgaggggacagaaaagaggccctttcaagtgacttaactttcttttaggactgctcccagaaatttcatactaagcctccagttacattttattgaccagaataccacatgactatactcagatacgagtgagattatgaaatacggattttttcttgatggcaatattgtcaagtaaaaagcaaaattttattggtagagagg

SEQ ID NO: 813061 - DNA, 552 bp, Homo sapiens
gaaattctccaacatccactccaatggagtaggctttgatgcttttcctcccattccaccctttgtgatgcactttcactctcactttcactcctggacagaccagaccaggtcctattacagcaggttcagactctgcttagccaggagcatgcctgtcacagctagctgcagctatagagctggtcctatgggctgtatgcagtgtcataggtctggtttttcccacacttgccttggagcacacagtacacactaagagatctgtgtctccccacatcacgccccacattggtctctcccaggaccatctctttcactcactttcacacacctccccatccctgaaacagtttttctttctgaccgactcacgagccccacccacatctggtgtcggttagggtgtgagtttcatccaaatcaatggccttctccaaytgtcccaaccccctcaggtcagactagtcctcataccctggcaggtgatcaggctccccttccatctttatgggacaggtcttgccttagggccaaaaccttaccacggtt

SEQ ID NO: 813062 - DNA, 552 bp, Homo sapiens
gaaattctccaacatccactccaatggagtaggctttgatgcttttcctcccattccaccctttgtgatgcactttcactctcactttcactcctggacagaccagaccaggtcctattacagcaggttcagactctgcttagccaggagcatgcctgtcacagctagctgcagctatagagctggtcctatgggctgtatgcagtgtcataggtctggtttttcccacacttgccttggagcacacagtacacactaagagatctgtgtctccccacatcacgccccacattggtctctcccaggaccatctctttcactcactttcacacacctccccatccctgaaacagtttttctttctgaccgactcacgagccccacccacatctggtgtcggttagggtgtgagtttcatccaaatcaatggccttctccaactgtcccaaccccctcaggtcagactagtcctcataccctggcaggtgatcaggctcccyttccatctttatgggacaggtcttgccttagggccaaaaccttaccacggtt

SEQ ID NO: 813063 - DNA, 562 bp, Homo sapiens
tcccagctcagcaatactagctacgtgtggctactttagcttgctgagcctcagtttacccacctgttaggtgggactgctctcatatctatacaggccttarcacagggccaggcaataagggagggctcaactagaggcaactcccttcccttttcctacagggtagcatgaaaaaaatgcacaaagctctctgggcaaagttcatctcccaagagatgaactcagtggctctcaaccttggaatcacctggggagattttacaacttcagatgcctgatcttcaccccagaccaactgagtcagaatcactaggggtaggaacttttggaggcactataatgaggtgtaatttacgtactatagaattcactcatttcaagtatgcaatgcgatgacttttcataaattcgcaaagttgtccaatcgtcaccacaatccaatttgagaatatttttatcacctcaaaaatattctccgtgctcatctgcagtcacttcttgttctataggaggggttttaaaactaccaggatgattccaatatgcagcccagatagag

SEQ ID NO: 813064 - DNA, 541 bp, Homo sapiens
ttttaaaagacacttatttcttgcatttttatatgtttcattttgcataattttcggrtatatattaggtgtatatatttatggggtacatgaactgttctgacacagggatgcaaagtgaaataagcacattaatgtagaatggggtatccatcccctcaagcatttatcctttgcattccaaacaatccaatgacactcttttagttatttttaaatgtacgattaagttataattgactatagtaaccctactgtgctatcaaagagaaggtcttattcattatattttttttacatccattaaccatccccacctcccctccacttcgaccccccaacccctccagccccttactacccttctcagactctggtaatcatccttctattctcaatctccatgaattcagttgttttgatttttacatcccacaaacaagtgagaacatgaaatgtttgtctttctgtgcctgatttatttaacttaatagtctccacttgcatccatgttgttgcaaatgactagatctcattcttt

SEQ ID NO: 813065 - DNA, 595 bp, Homo sapiens
agtgacagggaaaatggatccaagttggaaaacactcttcaggatattacccaggagaacttccccaacctagtaaggcaggccaacattcaaattcaggaaatacagagaacaccacaaagatactcctcgagaagagcaaccccaagacacataattgtcagattcaccaaggttgaaatgaaggaaaaaatattaagggcagccagagagaaacatcaggttacccacaaagggaagcccatcagactaacagcagatctctcagcagaaactctacaagccagaagagagtaggggccaagattcaactttcttaaagaaaagaattttcaacccagaatttcatatccagccaaactaaccttcatatgtgaaggagaaataaaatcctttacagacaagcaaatgctgagagattttgtcaccaccaggcctgccttacaagagctcctgaaggaagcactaaacatggaaaggaataactggtaccagccactgcaaaaacatgctacattgtaaaaaccatcaatgctaggaataaactacatcagctaatgggcaaaatarccagctaacatcataatgacaggat

SEQ ID NO: 813066 - DNA, 564 bp, Homo sapiens
gaagactatacattgtatgattgcaactatataaaaagtccagaacaggcaaatttacagagacagaaagcaggtcagttgttccctaggactaggggtggggatggggagtcactacaagtgagcataaacactggagagatcagtaactcaagctagaatggctatattggtgagagattttgaagtctaggacctagagcctccgatacgcaggagaacagaacataagggagttagggcaatgctctaaaatgggattgtgatgatgcctgcacaactctgaaaatttacaaaaagttattgaattctatatttacaatgggtgaactttatggtatggaaagtgtgcctcagtaaagtcaataaaacagtttttaaagatctcgacatcaattgtgtttatatattaatttaaattaatttaaggaaggggatttkgaagttgtcacaatagcttttgaaataatgggaactgtaacttacttgagaaataagttatacctgtggagggaatcactaccacaggagaaggccctttcttcttacattttgatgtttgat

SEQ ID NO: 813067 - DNA, 567 bp, Homo sapiens
gcagaccagggctgggatggtggctggggatggtggtacaggatctttctttcagacattccactccctcttaggaggcctatgcccttatgcatttcacctcatggtcaygagatggctgctgtatcccagacccttattccaggaagaaacaagaaggaagaagatactgaaaggatgatactggtatcaggacataagaagttttctccagacttcttggcttatgtctcattggccataaccgactcatgtgcctacctcaagtggccagaggtctgatataaattgttacagagcacactgagggcctggagaaatgccatggtgctctttagaagaaataagggaactaggtaatgagcagtgtcttagtaatacacagaactagtatacagaattttagcaaagaaaaattacttaggtttctgtgcctggctgttgctttgtctaaaaacctacatacttcctctgtcccaacatacacattttgactgacaactctacctttcccctgtctgaacatcatgccacctctgacatgaatgcttctgtaacacatacaga

SEQ ID NO: 813068 - DNA, 549 bp, Homo sapiens
tcaagctaggtggacaccatttatgggctgcacattgtatacctctaccaatccttcctgagggaactacagtttatatatatgacaaactggcagttgaccccacaagacagcatstgtgagagcactcaacttagtatcaccacctgggaatgacagagcatctctgaacagagaagagaattgaaactatcagggaagacttctggaaggttagtggaaatgaacccagacctttactaccttggggaagcagaaagtgtctggactcaaagtttcaagcagataaagaaaaaaacctatttagcagtgcctcagatcaggttccctaaaaagaaagcataaactacagattcgaatgcattaattgcaatgtagaatatcctccttttaaagcaaggggtcttttgaactctccgtgagtcaatcagtggtcatgggccctcccttcaagtgaaggggtaacctatgggcaagaagttcagcagctaaggccagatgcactggccaggtaaagggaatttaggtgggaacccaccagcatatgaa

SEQ ID NO: 813069 - DNA, 518 bp, Homo sapiens
agagaaagggaactggattcatcagttacatrcatttagaaaaatctgtctcattcatcagcagcaatgaaggagaaaagttggcaacagagccaagtatacttactttctaagtagccaataattggaggcatttaaaaatctttttcactaaaatatacattttttgctcaaactccagatttctgacatttccttattctactgataatgacttcatgtgagcaaaatggaatgaaagattgaaaaaaatcagatatatgctacccataaaggtttatcaatatgatatatctaaacatttatgtacttattggtttaacttagttgatataaatgaatatgcatatcatacacatcatgtgaacagaagagcagatcagtggctgggggtaggggattaactgcaaaggggtacaaggaaacttgtggtgatggaaatgttctatatttattatgtggtggttgttcacaactgtacatgtttgtcaaaacttaccaatagcacatttaaaatt

SEQ ID NO: 813070 - DNA, 651 bp, Homo sapiens
ctaattaggtttagtagaagtttggaacacagtcctactttgacagatgaccctcaggttaactcagccctaaagacaattcctatctgttcagagtcagtagtatgcacaggccaagaataaagaatatttattttaagctcagtgtggtacaaggctctacaaagaaggcagcttgtaaaagtgtctgtggcctgggtatttttggcagacaattatcaaggtatagtaacagctaaattaaagttggtttttgacaataagcttctttcaggcagcagtcagattgaatctctgtaattcattgaggggacactggtagtcaaaaaaaaagaaagaaacacaaaacaatttcacaaacagtataatcaatctctaatgattaaaaacaggccaggtgcagtggctcatgcctctaatcacagcactttgggaggccaagacaggagaacagctggaagccaggaattcaagaccagcctgggcaactgagagcaaggccctgtctctataataattttaaaaactagctggacatggtggcacacacctgtagtccaagatactcgagaagctgaggatygcttgaacacgggagttcgagactgcaatgagctatgatcataccactgtacctcagcctgagtgaca

SEQ ID NO: 813071 - DNA, 614 bp, Homo sapiens
aattagttcaaccattgtggaagagastgtggcgattcctcaaggatctagaaccagaaataccatttgacccagcaatcccattactgagtatatactcaaaatattataaatcattctactataaagacatatgcacacgtttgtttattgcagcactattcacaatagcaaagatttggaaccaactcaaatgcccatcagtgataaaccagataaagaaaatgtggcacatacacaccatggaatactatgcagacataaaatgatgagttcatgtcctttgcagggacatggatgaagctgaaagacatcattctcagcaaagtaacacaggaacaaaaactaaacacctcatgttctcactcaaaagtgggagtcgaacaatgagaacacatggacacagggaggggaacatcacacaccagggcctgtcaggaggtggggggcaaggggagggatagcattaggagaaatgcctaatgtagatgacgggttgatgggtgcagcaaaccacaatggcacatgtatacctatgtaacaaacctgcatgttctgcacatgtatcccagaacttaaagtattaaaaaaaaatatttagatagattatgttc

SEQ ID NO: 813072 - DNA, 614 bp, Homo sapiens
aattagttcaaccattgtggaagagagtgtggcgattcctcaaggatctagaaccagaaataccatttgacccagcaatcccattactgagtatatactcaaaatattataaatcattctactataaagacayatgcacacgtttgtttattgcagcactattcacaatagcaaagatttggaaccaactcaaatgcccatcagtgataaaccagataaagaaaatgtggcacatacacaccatggaatactatgcagacataaaatgatgagttcatgtcctttgcagggacatggatgaagctgaaagacatcattctcagcaaagtaacacaggaacaaaaactaaacacctcatgttctcactcaaaagtgggagtcgaacaatgagaacacatggacacagggaggggaacatcacacaccagggcctgtcaggaggtggggggcaaggggagggatagcattaggagaaatgcctaatgtagatgacgggttgatgggtgcagcaaaccacaatggcacatgtatacctatgtaacaaacctgcatgttctgcacatgtatcccagaacttaaagtattaaaaaaaaatatttagatagattatgttc

SEQ ID NO: 813073 - DNA, 548 bp, Homo sapiens
aaaatgtatgtgtagggccaagcgttgtgactcatgcctgtaatctcagcacttggggaagctgaggtgggaggatcacttgaggccaggagtttaagaccagcctaggcagcatagcaagaccctgcctttacaaattaaaaaaaataaattagccaggtgtggtggtgcatacctgtaatgcccccttcccaggaggctgaggcaggaggattgcttgagcacaggaatttgaggctgtaatgagctgtgattgcagcactgcactccagcctgggtgacagagagagagtctctaaaaaataaaacaataaaacagaaaacatggcctcaaatcctttgaccttcttcccatgatctcaacccttgaatctggacaggcatgtgactgctttgaccaacagctgcggcagaaatgacacaatgtagcttccaaaactaggtcataaaaggccatggaatttcccttcacttgctcaacctccattcttggagcytgagccttaaggtaagaagtgcaactaccctgaggctgccatactgtgagg

SEQ ID NO: 813074 - DNA, 540 bp, Homo sapiens
acagcagaatgttaattaatgtatacagaaggtatgatggaaatggaaaatcatgattaggtaaacgctacagtagtaactgttacaggcagaagccaacaatggatgctaaaattagtgggtwagaagatattggcatagtctcaaagagacttattaattagaaaggaaaaaaatagcaactttttagtgaagaaaactggcagacagcaccttaatgaagtgatcaaagttaacatcaccagcaataagacaaaatggtaccatgtacccctgcttcactgacatgatgtaattagaagggcacaacatagtttctgtggtattcctgacagaaatacacagcctcaatggaatccctaagaaacattagacaaacccaaactgatggacattctactaaactggctagctagtactcttgacaatgtgccaaggaaagatgcagacagagtaactgtcacagatggagaaggctaaggatacttgacaactaaaagcaatgtgggaaactggatcataaaaggaccttcatagcaa

SEQ ID NO: 813075 - DNA, 558 bp, Homo sapiens
tcaccaaagaggtgaaagatcactataaggagaattgcaaaatactgatgaaagaaattgcacaggatacaaaaaaaaaaatggaaaaacagaccatgctcatggattagaataattaatattattaaaatgaccacactacccaagtaatctacagattcagtgcaatccctatcaaaatgccagtgacattctttacagagataaacaaaaatctaaaatatttatggaacaacaaaatcttccaaatagcaaatagccaaaaccaaagcaattctcagaaaaaaaagatggatgcattacactagcattacactattttagacttcaaaatatactacaagtttgtagtaaccaaaacagcatggtactaacataaaaacggaagcatagaccaatagaacagaatagataactcagaagttaatccacacatctatagccaactaattttgacaaaggcaccaagaacacatgttggggwaagtgcagtcttttccataaatggtgctggaaaaattggatatccatatgcagaagaataaaactagactttca

SEQ ID NO: 813076 - DNA, 356 bp, Homo sapiens
gataacaagaatgccagaagttcatattggataggcagtggaaactatactgtcatgtttctacttttcaaagtgaaaataaacatgacaggtgctcatytggctgttcaagcactttccacttaaatagcaattcctccagcttaccaactgcagcctgaagttataatttattactggtttctgtattattcccttgcctcggcagaaagcagaacatagcacctacatttcaagacccatgagaggtaataaagtataattattttaaatttatgattaagccataaattatgtgtactttttactttagctggtcattcagaggttggtgaggaagggaatggggtcagaga

SEQ ID NO: 813077 - DNA, 631 bp, Homo sapiens
gatgaaggatgatattggacaagtatttccaatatcttcaacacacgtattgaaaatayttgtccaatatcatactttccaatacaagtactggaaatttccaatactccgagccttagtttcctcacctaaacgaggataataatattgtctaacaggactgttaggaagattcaagaatacatgaagaatgctgaaagagcatttcagcacaggataaatatttgttgtagttgttaagctattattaagcaaagggcagtgccaataataggacccctgtctccatatgactggctcagtgcctttccattagaccatgctacatgaaactcagattatacatcatttgtcgttaaaacatgcaccaagcagagtggtgaaggagggaaggggggaggcaatgaataaaaaccatctaagacatggagattagctgttaccaaaatatggcatcaggcaatcatcatccaaatttgtgactgcatttcatagaacagcgcggatgggattttattagatggcttctgccaaaaacatattggcagatacagccctgagcttgtggttcaccagacacaaaagagcccctcttcgggaaggggatcctgcttaggccctggcccaactc

SEQ ID NO: 813078 - DNA, 645 bp, Homo sapiens
agtcatatgcagtcatgtgcactggagttgatggtgaagtccaggcagtgatgggcataggaggcctgagacagggccaggcaagatggttaggagataaataacagtagaggaaaaggaacagtgcccacagagtgaggaacagatctgtaacaagccctgtcttcctccactgccctggaaaggtgaatcttgaaaatgtagggtggggtgtggtggctcacacctgtaatcccagcacgttgggaggccaaggcaggcggatcatctgaggtcaggagtttgagaccagcctggccaacatggtgaaaccctgtctctatgaaaaatacaaaaattagccaggcatgatggtgggtgcccgtaatcccagctactcaggaggctgaggtgggagaatcacttgaacctgggaggcggaggttgcagtgagccgagatccattgcactccagcccgggcaacagagtgagactctgtcttaggaaaaaacaaacaaacagacaccagaagaaagaaagtgtgggatggaggaggggaagcyagatccttttagtgtgtgttgcggtgctgggagtaggggaggaaacgaggcacttgcctcaggcacaacgttttgggttgtgccaaaaaactcatgcagcaa

SEQ ID NO: 813079 - DNA, 637 bp, Homo sapiens
ttcattttcttattgttgagttttaagagtgttttgtctattttggataatagctctttatcagatacctcttttgtaagtgttttttctctgtctatggctcatcttctcattctcttgacagtrtcttttacagagcaggagcttttaattttaatggagttcagcttatcaattatttctttcatgaatcctggttttgctgttgtatagttgattccaataacaaaaacaatgacaataacaaaactgacccaaagtgggatgttaattgcctcaaaagcagtcatttggtatcaacctgagttttgtggtaatgttttatttggcatgtaaagatccttttatgcaaatcatttccatggacccataatataaaaacataagtatttccaattactttatcagtgtagctattccaaatgaaatgtctgcagtagcaacagagcagactgcatatgtcagtcctgactggagactagcaggcagcaaccactcctcaagctgcttctcctgacatcttgcttgactcaaagccaggaatgatcaacaaaggcgtttttccatcccgtgggagtctagtaatggtgttctatagaagaagcagcggagactactgctgctaatgactgtagac

SEQ ID NO: 813080 - DNA, 608 bp, Homo sapiens
aatttcttaccttggcaagtatactttcaggacaaactyttggaggtagaattgttggattaaaagataattatatttctaggctgggcgtggtggctcacgcctataatcccagcactttgggaggctgaggcggacagatcacttgaggtcacgagtttgagaccagcctggccaacatggtgaaaccccttctctttcaaaaatacaaaatttagccaggcgtggtggttcatgcctgtaatcccaccctactcgggaggttgaggcaggagaatcacttgaatccaggaggcaggggttgcagtgagctgaggttgtgctactgcactctagcctggccgaagagtgagactctgtctcaaaaaaaaagaaaaaaagttaattgtatttattattttaattgtcaaattgatctccatagtgtttgtaggaaattacccttccaccagcaatgtatgagtattcctgtttgcccactgctgtgcgaataccatatgtcatataatttttgatcctgtcagtcaggtagttgaaaattctatatcattgtggatttaatttgtatttttcttattaggagcatgttaagcatcttttgtatattt

SEQ ID NO: 813081 - DNA, 587 bp, Homo sapiens
ttaacttaatcacctctttgaagatcctatctccaaacacagtgacattctgaggttctggggttagggcttcaacatatgaatatggggtgagggagggacagaattcagcctgtgccaccacccttcaagtctctcctccagtggcatttttccgggagtgtcaccagaggcctctgcacagggctgtctgggcagttcgctgcaggtgctgcatgtctgagccttcttctgctggccaagacccttgcactgcgtggagctccacccatccagggaaaggagagcctttttctttgccagaggctctgtctgctcatgaagccatgcatgggctctgtctgccctgggagaaccctatctctaactctaatacaggacccccatgagcacctgaaaacacagatttcccctctctgcatcctgccacctgcaccctttcaactctcccgcatcaccctgtatgttttctgtgatgcatgccaatagmtcatcctggtggttcagggttctgctctgtatttgactgtcttaacctctggaaaggatctggccctattcagtgtcacatcctccttttagtgcca

SEQ ID NO: 813082 - DNA, 614 bp, Homo sapiens
cgtggacacggggcttcctcatcgaggattactgggcttattcacacccactgtccrggctcgttctgagagagatggggcgaagtcactttggaagaggtcacaacagatgtcagccaggacagccagctctgtgcagagcagaaccaaggccccagagccttcggagcagcccatttgcaggcgttccagcagtttgctgctgcttgcctctcctctccccacctttcccctgcagcctcagtttcttggtcctctgggctttccaaagcagcagggctggcaggctcctcactgcccccagcaggagaagtggcctggaaaaggcaacagtatgaacggccatactgagtcgatcatatttgccaagcccctgaccccccaaagtcctcgccttggtcagctctcaggtcagtgtcctctgccagtccttctaacctggctcccctcttcttcacccctcggccttctcctgacacactgaccttcctctttgccaaacctttcaagttctcctcctctcagggattttatacttaaacttctttctgctcgaccccaagccccctagccatccttcacgtggctctctctgcttttatatcacctcctcc

SEQ ID NO: 813083 - DNA, 580 bp, Homo sapiens
tgtcatagactagaagccagctttycacaaggggtcagaaaggaaggagggtgaagctcagattcctgtctgcccctagacttccagaaagaaaatttggattctttctgtatttaggagtacacatagacacaagcagcttcagagtcaaaccagaagtcacgtgagaatcccaagctacagtggagagtctcgaaatgctaggctctcaaggatttattggagacctcattgtgttgtcggccacccctcccctgaggccatgcctccacggaaaaattgtcatttgagagacaggttgtcccactaagagggctcaggatatgatttctccttggccttttagtttggttgttcccttgtgaagggctctcctggatcccttcaaaacctaattatggctgtaaaaactgttcagagagcgaagcagtgcttatgtggatgttgggcagtgtctgctctggcacatttgttcacaggtgggccagccaagcagctcggcactgatgggcattgattttgtaatatgtgagcaacttcactggttctgttctcatagactctcttttgttttggaggg

SEQ ID NO: 813084 - DNA, 602 bp, Homo sapiens
gtgctgctttcatagggtctgacaagtcccctctacgtggatgttcttaaatactcagcctcctktctgtctggattaattggttggtagctatgagctggacaagcctatttttactgcatgtgccagcaagacttataccaaattagcacttgaaaaattttttacagcagcaaccaccatgaccacaaaagaacctgaagatgtgtctgtatttttgagccccctttgaggctgtccttcttctcacccactttcccctgttaaggctctctcatgccatcactatgatatgtagatactgaaagagacctggaggtgcccttatcccacagcctattcttcttccctttggggttcctaagaaagggagctatgcacacaaggaacaatcgcagggttgaaggtgcagtctcatttcattaacagctgagttagcattcgaagtggagctcttttcctttttctaaaatgttttcattgacaaataataattgtgtatatagggtacagtgtgatgttctgatacatgtatacattgtagaatgtttacatcaagcttattaatgcattgacagttacagttatatttaaaatctact

SEQ ID NO: 813085 - DNA, 635 bp, Homo sapiens
ctttgttcacttgtttatctgctgaccttccctccactattgtcctatgaccctgccaagtccccctctgtgagaaacacccaagaattatcaataaaaaataaawaaattaaaaaaaaaaaaaaaagaaactgaagctaagagaagtgaaataacttgtgcagcactcacacctgcctgactccaaagcccaggctctaggtcattgtgccacccacttctcttcatagacagactcttagtgcccagtgggtaaagattgatttgctcctctccagctgctaaagtccactttaccatgggctgtgctggctgggaagaaatcctctgtcctctgcaactcagagccttgcctgtctgcaccgcttcttgggttcactacaaggcatatattgtcacatagagaggtattttttccatcttcactccaaacaggttgtgataatattgctcagaagatcaggttggtaggaatgaaatcaagacagactcagttccaatcctaaatgggattacgaaggtggtgatctagaccctttcttttactgctggttggtgagaaaagctatgacacctgctgggtatgagcccccctgaccctcacccacccccactagccttacacactgtgcctg

SEQ ID NO: 813086 - DNA, 586 bp, Homo sapiens
gcggtggaccaccccatcaagtttacattttcagtaagttcctctatcaaagagtagaagcagattagccagggccagggctgaacttggrggttggccagtgagaaaccgccatggtgatggttgaggcagggggtaggtgggtctgaaggcgagcgggcccagtgaaacggatgagaagctgtgaattcggaaggcaaggtgagatcaccagccagcactggtgattggctgaaagggaaaagaaagacccctgggttcctcgggctggatagtgggtgaggagggcagaagtgaatccatttcttgggagctgcaagtccagctatctatgcctgtccccaaaaagccctggcatgtgtcccaaagggtctttacaaggaagtcccctgcagtgctctctgtgactgaaaaaaataaaagtagaatacagcctaaatgtcctgtgatagggaataattaaattaattacggtatatccagcttgtaaaataatatgcagcagtttaaaaggctgatatttacttgaataggaaaagagtgagttgtcaaatgatatattgactataaagtcatttaagtaaac

SEQ ID NO: 813087 - DNA, 711 bp, Homo sapiens
catgcatttgtcagaaataattcagagtgattacttatacmcttcgcccagtttctcccaatgaaaacattttgcaaaattataacaatatcacaaggaggatattggcatttacacaaaaataaaatgaaagttccagaagtttgcctgccttgaggaaagggtccaagccctggtgttgactttcacttgcaaatttcttaaccatggccttgagctctttaataagctgatccctacctacattctccacattggaatttggctcgtttttaactttgaattgagttttccggtaatgtttatgtcttggtcatcatggtgaaatcacttcgcctttaggttcttatttctcatatggaaaggaggttaaaaaagcacacttggaaaaagggcaaacagggccaagtcctcactggattaacccaccctgacatcccagttgtccttctacccataggtgacattcaaaatatgtaacatcctatatggcaaaaggcaccatggaattagaacaaatgccagttatataaaccaggccctgctctgccaggtgtgaacccttcaattttcaagctgtagggagatctgagactctcagaagatggcccagggcagtggaggttgcagaggagttttggggggagctcaaggtagtagctattttaaaaagagcctggacttattttagtatcttaacaaccaatacag

SEQ ID NO: 813088 - DNA, 629 bp, Homo sapiens
gtcatgctccataaatagtagctatgggtgttatggttaatgcgatatgtcaactattaggayggtttgttgaggaagttaagttcttaatctcctcagtccttttggaataatggttctattaggccattcttgcattgctataaaggaatacctgagactgggtaatttataaggaaaataggtttaattggctcacgattctgcaggctatataagcatggcaccaatatctgctcagcttctagggaggcctcagggagcttttactcatggcatggacttttactcatggcaaggaggcaaagtggcagcaggcatgtcacatggccagagcaggagtgagtgagagagagagagagagagagagagaaagagagagagagagagagagagtaagggaggggctgcacactttaaacaagcagaccactctggggggctgtgaaattccaaggggtcactgggctgaacagatggctggcagatattggttttaactcacacctggctgagtaaataatgtttactcaagaggacattcctgaggacaggaatgtcgtgaggacagcaccaagccatgagagattcggccccatgagcccaaactcctcccaccaggccccagc

SEQ ID NO: 813089 - DNA, 536 bp, Homo sapiens
ctatttgagatccttagacaggaactatttatgaacaccaggagaaggtgcttagcactagttggctgtaaagacagaagcatgtttccatgactgctctttwtgttaatctgagacttctgagggctccaacatagtctaaataaactctgattcagaggtgtactctatgaaacagatacaattggaggttgaggggcctggagccctgcctgatcctgtacctcatacctccaaagcctccaaggcattccatggagccataattgacactctggagtgtcagttctccaagcccagttcctgagcacagacacaagcctttggaagcctgactggcagctcctccaccttgacagcaccatgtgctttagggtgggtgcccccaccattgcttcacctcaccctgtgcccaagagtccaggttcctgctgggcaaaaccaggcgtttcctattattcttgaatacagcatgaaggatggctggctgccctgccaggaacaatttgattcttccttgttagtttttcattagg

SEQ ID NO: 813090 - DNA, 614 bp, Homo sapiens
ctctcctttataacaaagaggaagcagctcttaggtacagagcttcccatcactaacatttaactagaattaaacaactctgggatgtttaaacamgcatttttatgttttctttctttcatttgtggcagacaatactggtttacctgtacaataagtgaaacagagttaccatatgaaatgcattttttacaaacctaggataatttcagatgagattgagcacattcagggtggtatggcagtagacccaagataatttcaaagaaaaatattaagtaaatagtcatacaggttttacaaagaaatgccaggatagtgaagttgggaagccaagagctaaaggtggggaaacactgccttgggctttaaagttcagagccaggttcaaatggccccgtgcttgtgaagccttcctcaatccctcctctgccacatcagccaccggctccctccccaccttaagatatttagctcacgctgtgagtgttatcattggctctgtatcttttagccagagtctgagtctttttatccctgttagcactctcagttctttctatccttattcaaatgacatggttttggatccttctccattttagtcaccctct

SEQ ID NO: 813091 - DNA, 614 bp, Homo sapiens
gtggtggatgtcaaagttgcccagcaaggcttgaaagccaaccttactagctgtgtgcaagccrcttgatttctaaacctcaatttcctcatcatttaaacaggagtaattacaattccattagtgtagggaccccatgaaacaatggatggggcgatgattagcagactttatgcaaaaatgaggggttggtgttacttaactctttggccgtgctcattggcatataggctgagggccgatcaaatgagtttccttggggtccctgatgaatttggcgttttctggctttgttcattcagctctctgcctggaatgttctcgtttccccctctgcctgatttccatccaatactcgtggattgtccatagcatttcctcggtcttcatggaacaagaccttgctcaaccctttaatatcccaatacctttgcctcctacagccttaactcgacatggtatctctgagcacagtggcaaccactacactggtggtcgccttgcatctgacactgggaatgcctccaaagagaggcccaaaggaagctgggaggagtggctctgtcagtctttgctgaggaataggaatcatcatgaatgtgagaactcctcca

SEQ ID NO: 813092 - DNA, 647 bp, Homo sapiens
agacattgattgcgaccatttttgccagtttgttttcattgtttgatacggtggtcgacttttttttttctttttctttttttgagatggagcctcgctctgttgcccaggctggagtgcagtggtgcaatctcgactcactgcaacctccacctctcgggttcaagcaatcctctgcctcaacctcccaagtagctgggattacaggtgcccgccaccatgtccagctcatttttgtatttttagtagagacagggtgtcaccatctcggccaggctggtcttgaactcctgacctcatgatccacctgccttggcctctcaaagtgctggtattacagtcgtgagccaccatgcctggcctcactggtagacttttagaatcccttaattcactattttcactgacatcactccatgacagagatttttttaaaacactctatttaatggttgcatcatatttactacgatatccctaactattgttacattgagggacattcatcggttgttttcattacgtcrttaatggacattcatcggttgttttcattacatcgtatctagtgctgcaacactcacacattcatctttgcccacatctctgattatttccttggtctagatttctaaatgtgaacacat

SEQ ID NO: 813093 - DNA, 572 bp, Homo sapiens
gctcttgcatgcatcgatgtatcatgttactcagtccacmtgagataactgtgaatggcaccattttacagagagggaaactgaggcccagagagacctcaagtctcactgaaggtcccatggcacagccaggactaagagctaggccatctggccacatgtctgagctgtggctcttgatgctctgagcttctgtgaagacccagtggacagtgctgtggatggaaggaggaggtcttcacttagaggacgattgtgcctcttattctgcttggcatctgaccctcactgcaggagccacacactcctggactgtgatgggtacctttttctgtttctggtaaggatgactgtcaggtaggaaggtacaatagcagcccccattaattgagcctgcatggtgtgcctggcacaattctaagcactgtttaattctcccaaccagccccatgaagaagcttctgtaaatatctcaattttttagataaagaaattgagtcttggtaaagtcaagaaacttccttaaggtcatgtggtcagtggtggagcctggatgtaaacccagctcttct

SEQ ID NO: 813094 - DNA, 639 bp, Homo sapiens
gtcatgctccataaatagtagctatgggtgttatggttaatgcgatatgtcaactattaggayggtttgttgaggaagttaagttcttaatctcctcagtccttttggaataatggttctattaggccattcttgcattgctataaaggaatacctgagactgggtaatttataaggaaaataggtttaattggctcacgattctgcaggctatataagcatggcaccaatatctgctcagcttctagggaggcctcagggagcttttactcatggcatggacttttactcatggcaaggaggcaaagtggcagcaggcatgtcacatggccagagcaggagtgagtgagagagagagagagagagagagagaaagagagagagagagagagagagtaagggaggggctgcacactttaaacaagcagaccactctggggggctgtgaaattccaaggggtcactgggctgaacagatggctggcagatattggttttaactcacacctggctgagtaaataatgtttactcaagaggacattcctgaggacaggaatgtcgtgaggacagcaccaagccatgagagattcggccccatgagcccaaactcctcccaccaggccccagctccaacattc

SEQ ID NO: 813095 - DNA, 550 bp, Homo sapiens
tatagctggcaaataaccacataaaaagatggtctagatcatatgtcatcaagaaaatgcaaatcaagacaawgataatgtaaaattggctgaaatctggaacagtgacagcaccaaatgctggtgaagatgtggagcacagaagctctcattcattgctggtgggaatgcaaaatggtatgaccactttgggagagagtttggtggttttctacagaactaaacatagtcttaccatatgatccaaaaattgcactccttgttatttattcaaaggagttgaaaacttatttccacacaaagaaaccctgcacatgatgtttacagcagccttattcttagttaccaaaacttagaagaaactaagatgtccttcagtaggtgaatggataaataaactgtggtacatccagacaatggaatattatttagcactaaaaagaaatgacctgattgggcaccatggttcatgcctataatcccagcactttgggtggccaaggtagaaggatcacttgaggccaagggttccagacctacctggacacca

SEQ ID NO: 813096 - DNA, 501 bp, Homo sapiens
aaaacatatggctagtgaatayattgctaaggcccttccaagggccttgctacatgtaagagaaacatctaaaattggaaaataagaaagttgaaagtaacaaatttttaaaaagttataaccaaattcttatcgaagcaagctggtataactgtataaatattagacaaagtagactttaagtcaacaagtacagataaagatagtgatttcataaagataaaacataatcattttaatttttaaaaggtattcagataataacaaagcaagaaaaaaatacacaaatccacaatgaagcaagtaaaatttccttacaacatctctattgagacacaattcacataaaataaaattcacctgtctaagatgtacagtccagaggtttttaatgttcatagaattatgcaaacataaccactatctaatttcaaaaacatttttatcactccccaaagaaactccatacacattagcagttactctcaattgaactccttc

SEQ ID NO: 813097 - DNA, 607 bp, Homo sapiens
gaatgggagaaaatttttgcaaactatgcatctggcaaagatctatgtccagcatctataagtaacttaaacaaatttacaagaagcaaacaaacaaacaacaccattaaaaaagtggacaaaggacatgaayacacacttttcaaaataaaacatatatgtggccaacaatcatatgaaaaaaagctgaacgtcactgatcattagagaaatgccaatcaaaaccacaataagataccatctcacacgagtcagaatggcaattattataaagtcaaaaaagtaacagatgctggcaaggttatggagaaaggaatgcttatacattgtttgtgggagtgtaaattagttcaaccatcgtggaagacaatgtagtgattccccaaagacctaaagacagaaataccatttgaccccgcaatcccattacagggcatatacccaaagaaatataaatcattctactataaagacacatgctcgtgctctttccgccatctttctgcactgccgcaatggtgcgcacgaatgtcctggctgatgctctcaaaaggatcaacaatgcaaaaaagagaggcaaacgccaggtgcttcttaggccgtgctc

SEQ ID NO: 813098 - DNA, 469 bp, Homo sapiens
gtagcattacatctaaaaatactacataccttatttataatcctctattgctaaaaaatgctaacaatcatctgagcctttaatgagttgtaaacattttgctgatggagagtcttgyctcaatgttgatggctgctgactaatcagtctaatggttggtgaagattagagtagcagggcaatttcttaaaagaagacaacaatgaggcttgccacattgattgactattcctttcacaataggaaaagtatgcaatgctgtttgatagtattttacccacatgagccactctcaaaaattgcagttaatcttctcaaaccctgccactgctttatccgctaagtttatgaaatattctaagtcctttgttgtcctttcaacaatgtttacaggatcttcaccaaaagtagatttcatctcaagaaactactttctttgctcatccacaaaaagcaacttctcatccat

SEQ ID NO: 813099 - DNA, 589 bp, Homo sapiens
aaagcaagtctcaagaaatttcaagtaattggaatcatatgaaccatattttattacaatgcaattaaggtagaaaccaatttttgaaaagttaaccaaaaagattctatacatttaaaaatctgaaggagaaactgaaaaataattaatgaggaaagattgaaattacattcacgtgttgcataacattttgatcaatgatggactgcatgtacaatggtggtcctatacaattataaaatcatattatcaccataccttttccatgtttagatgtacaaataccatcttgtcataattgcctacagtatttattaccctaatctgctgtagaggtttgtagcctaggtgtgtagtaagctataccatttaggtttgtgtaagaacaccctatgatgttcaaacaacaataaaatagcttaacgaaacatttctcagaatgtatccctgtcatgaagtgacacacactgtayaatggtaatttaaaaacaaagaacttgctggaagtacagttgggattgctttgaatccagaaaacataaacatttaagttttcttctaaatattttagctgcatcatatatatata

SEQ ID NO: 813100 - DNA, 578 bp, Homo sapiens
actagaacgtaaatcttatgaaagcagggattgtgttttcctggtgcctgaaagygtctatagtgaatatttaataaatatttatttgcatgagtgatattcaaaactctcttcttcctttcctagtgtcaaatattggtgcagatggaatgcttgattttccaaaaacatctcttctggaacttatgataggaagaaaagatgttatttctgtggatgctgctgtgaaatttataaaattagcttttacctatgaggagtggagtttatttgaatcttctgctgtacatcttatttattttctccaggtaatatatgcaaaattatcctcctggttttttttttgttaaaatgacatccaattactaattaacgtgtgggatatacttccccaagaggcaggatgatccagagtcaaagaaagcagagaaggatttaactcttctgattgcaatggaaccactaatcaacgtgaagagaaacaaaggtttgatctttcctttggaaaactataaagaaggacagtcaactcaaatttatttaaaaaaaattgctgttcatggtaagtatttatttgt

SEQ ID NO: 813101 - DNA, 578 bp, Homo sapiens
actagaacgtaaatcttatgaaagcagggattgtgttttcctggtgcctgaaagtgtctatagtgaatatttaataaatatttatttgcatgagtgatattcaaaactctcttcttcctttcctagtgtcaaatattggtgcagatggaatgcttgattttccaaaaacatctcttctggaacttatgataggaagaaaagatgttatttctgtggatgctgctgtgaaatttataaaattagcttttacctatgaggagtggagtttatttgaatcttctgctgtacatcttatttattttctccaggtaatatatgcaaaattatcctcctggttttttttttgttaaaatgacatccaattactaattaacgtgtgggatatacttccccaagaggcaggatgatccagagtcaaagaaagcagagaaggatttaactcttctgattgcaatggaaccactaatcaacgtgaagagaaacaaaggtttgatctttcctttggaaaactataaagaaggacagtcarctcaaatttatttaaaaaaaattgctgttcatggtaagtatttatttgt

SEQ ID NO: 813102 - DNA, 578 bp, Homo sapiens
actagaacgtaaatcttatgaaagcagggattgtgttttcctggtgcctgaaagtgtctatagtgaatatttaataaatatttatttgcatgagtgatattcaaaactctcttcttcctttcctagtgtcaaatattggtgcagatggaatgcttgattttccaaaaacatctcttctggaacttatgataggaagaaaagatgttatttctgtggatgctgctgtgaaatttataaaattagcttttacctatgaggagtggagtttatttgaatcttctgctgtacatcttatttattttctccaggtaatatatgcaaaattatcctcctggttttttttttgttaaaatgacatccaattactaattaacgtgtgggatatacttccccaagaggcaggatgatccagagtcaaagaaagcagagaaggatttaactcttctgattgcaatggaaccactaatcaacgtgaagagaaacaaaggtttgatctttcctttggaaaactataaagaaggacagtcaactcaaatttatttwaaaaaaattgctgttcatggtaagtatttatttgt

SEQ ID NO: 813103 - DNA, 562 bp, Homo sapiens
acacagccaaaacaggtgacatgaccaggttcaacagcaataaccaaaagaatataatagaaactaggtacaaactatcagactgaacacttcttataaacaggttgtccttcacctgctcggatgttagtacaaggctatataaatcaccagttagtaccttttattcaggtttggtcaagagtcagaactatggctccaggccataagataagcacagcattgcaacagagcagctgacatgaattctgtacctacacagttcattctccaaatctccaccaaactgtcttaattatgaatctctcatcatcattctttctgaatcttttatgatatttataaacaaacatggtagacccataataattgaataaatgctattcgaatactgttgtgtaacatgtttaaagagaagtttggctggtggtttggttcattttttcctacaacctgcttcaagtcatccctggtgtgctgttccttctttcagagtaaacacttatttgayggtgatatgatggataatgacagcatggtggcatttaagaagcttatgcat

SEQ ID NO: 813104 - DNA, 491 bp, Homo sapiens
ttcgttttgcagcatccttactacagcttcatcttattttcttgtctttatttactcggctcctattttttcacctttatttttcaattctataaactgtatcaaatcctctttaraaattagtcagatatatgtaataaaagtgggtacccttcttacagtctcacaacactttaatatatcccttacattgcttcctaaattatttttaaattacagattagaaaagttgttccacttttcaaatatgttcatggctctcaatttttaaacattcaaattttaaaataatgacatttagggctcactgtgaccttcctctatttccattttgcaagcagatttttaagttttcttctgtcatcgctccttcccttatcacaacctaaacactaggcacatctaaataattttctgttggcaaaatacatccttttctttctcagcttttcgtgagctgttctttccaccaaaaatattgtctctggcca

SEQ ID NO: 813105 - DNA, 525 bp, Homo sapiens
tttcccctgctccaggaatgttataaaaatgaaatgcaatagagatttttaactataaatatagacggataawgttgcctagggcccgccctggaacctcgctggttctctacaaagggtaacttctattacttgttagccatgctttatttctaattttgctcctttagtacattagtcttccctattttcatctcagtggttttgcctttgcccaaagggatgcatgacataatcacccatctatctgtctgttcatttattcattaattcatttataaacattttattatggaaaactttacataaacataaaagtagagagaatggtataacagaccccgaggtacccatcaccctgacacaaccactaactcattgctgcttttatttcacctatactccctctgtctccttccctactggattagtttgaaatatattcctgacatcgaatcatccacgtaaatgtatcaatatatatctctaaaagatgacgactggtttaaaaaacataactgcaat

SEQ ID NO: 813106 - DNA, 591 bp, Homo sapiens
taatgtggtgatactctaaattgatagtccttagatacttgtcaatgttagtttagaggagaagtggtgcatgcatggagaaggatggaggaggaggctcgcttttgtcaatctttagtttctcttttattattcccaattatttatttaattttttaagagacagagtctcattctgtcacccaggctagagtgcattggagcgatcacagcttgagctatgattactgtaaactcaagctcctgggatcaagcagtcctcagcttcccaagtagctatgactactggcatgtgccactatttccagctaatttttaaaattttttgtagagacggtgtctcacgatgtttctgaggctggtctcaaactcctggcctcaagcgatcctcccacctcagcctctcaaagtgttgggattacaggtgtgagccactgcttctggcccccaataatgtattattgttccactcaccaaagaaaaagttcatcagactagctgcttagtgactctgtgttggtactgggcctgctccttgaggcaactcttcttcctcactccttctgcaamaactttattccatattttatt

SEQ ID NO: 813107 - DNA, 539 bp, Homo sapiens
ttgataacaccaaaaaaattttctgtatattattttaaaccagtctgacagtaataccaaaagaaaacttgacccacaaaatatctaatgatttttaacatttctgctgtcaccatcaataactaccttttatttccagatttttatctgtatttaatttctgcaaacataaacagacatgagaatgtaataatggagggaaagtaaaagaagaaaaatgactttaagaaatgctgctgtttcacaagagaacataaaccaggaaaaaaaatgttgctgtaatttttacatttcttcactagtttaaatagtatctgtaattttcagaacaatctaatagtcaccagaaagtacaaaatgagcccttctcacatgtgttctatctaggcttactcaacatattaactttctctttgcttaaaacaagagtcttgaaaatgagtgacttgaagagtaggtttctctgtcctgataaagayaggtaattactaggatcacactgtttaaatgtaacagttacaactactgggtagttcagc

SEQ ID NO: 813108 - DNA, 531 bp, Homo sapiens
aactctgccacaaaatggaacagactgcatgagagtatgactgccacaaaatggaacaaactgcatgagagtatgactaccaggaggtggggatttcagaggaccgtcttgaagagactaccacaccctattagaatcaagcatttcttgtcttgactggtcatttcctttttctgagcatggggtagcagagagatcacttatggccacagcccccagagtctgggaacctgaccaattctactatttaatcctatctgggggatccaaatttcccccttttcctttggccaacggagatactgcactatggctaggaaaatagtggcactttgttaatcccttcttggccgaactacctagattcaagtcttgactccttcacttattagctttgtgatactgggcaaggttttcagcttctctgtgcctcagttttatgtaaaatggggctgaaacatgatacatttcatargattattttatggctttaagaggtaaatatatataaaataagtagcgcaatgcaag

SEQ ID NO: 813109 - DNA, 619 bp, Homo sapiens
tcttttagtcctttttatcacctgatttctctggctagaacttccaatactgtattaaatagaagtggtgaaaggrggcatcttttccttgttcctgatcttagaaggaaatatttaagtcttttaccattaaggatgatgtttactgttggtttttcatatatggtttttattatgttgaggtagttttcttctattcctagtttgttgagtgttttaaccatggaaaaagtgttgaattttgtcaaatgttttttttctgtaccagttgagattatcatgtgttttactcccttaattgtgttaatgtgatgtattacattaattgattttcatatattgaaccatccttgcatttcagaaataaatctcacttggtcattgacataatccttttgataggctgctgaattttgttgaggatttttgtgtcaacgcttataaggtatattcatctgtagtttttccccttatagtatctttttctggctttggtgtcaaagtcatgctggcctcatagaataagttaggaaatcctccttcttcaatttcctgcaaaaatttgagaaggattagtgttagcttttttaaatgtttggtagaattcaccagcaaagcc

SEQ ID NO: 813110 - DNA, 733 bp, Homo sapiens
atatattagaaggtagggatccaattttctcatcaccatttatttaaaagtccattatttttcacttagttgcaawaaacctctgccatatgtgaagtatccatatatgtccgtgtacttttctgacctctctacatttagttacattgatctatgcgttaacccagcatagtaatgcagtatcttaattaaaatagctatatgataagtcttcttttaaaaaaatttatttccataggtttttggggaacaggtggtatttggttacatgagtaagttctttagtggtgatttgtgagattttggtgtacccatcacctgagcagtatacactgaacccaatttgtagtcttttatcactcaaccccctcccccacttcccccaagtccccaaagtccattgtatcatttttatgactttgaatccccacagcttagcttctacttatgagtgagaacataaaatatttggttttccattcccgagttacttcacttagaataatagtctccagttccatctaggtttctgtgaatgccattaatttgttcctttaatggctgagtagtattccatcatatatatatatatatatatatatacacacacacacacacacacaccacaatttctttattcagtcagtaattgatgagcatctgggctggttacatatttttggacttgagaattgtgctgctataaacatgtacatgcaagtatcttttttca

SEQ ID NO: 813111 - DNA, 733 bp, Homo sapiens
atatattagaaggtagggatccaattttctcatcaccatttatttaaaagtccattatttttcacttagttgcaataaacctctgccatatgtgaagtatccatatatgtccgtgtacttttctgacctctctacatttagttacattgatctatgcgttaacccagcatagtaatgcagtatcttaattaaaatagctatatgataagtcttcttttaaaaaaatttatttccataggtttttggggaacaggtggtatttggttacatgagtaagttctttagtggtgatttgtgagattttggtgtacccatcacctgagcagtatacactgaacccaatttgtagtcttttatcactcaaccccctcccccacttcccccaagtccccaaagtccattgtatcatttttatgactttgaatccccacagcttagcttctacttatgagtgagaacataaaatatttggttttccattcccgagttacttcacttagaataatagtctccagttccatctaggtttctgtgaatgccattaatttgttcctttaatggctgagtagtattccatcatatatatatatatatatatatayacacacacacacacacacacaccacaatttctttattcagtcagtaattgatgagcatctgggctggttacatatttttggacttgagaattgtgctgctataaacatgtacatgcaagtatcttttttca

SEQ ID NO: 813112 - DNA, 590 bp, Homo sapiens
cagcccattaagtatgcaatattcttatgtctaaaaactgtacatatcttaatttaaaacatttcttgctgaaaaatgctagtgattatttgcaactttagcaagtcataatcatgttgctggtggatggttttacttcaatgttgatggcttctgacttatcagggtggtggttgttgaaagttggggtggctgtggcaatttttaaaataaggtagcaatgatgtttgctgcatcaatggactcttccttttatgaaagatttctctgtggcatgtgaggttattcgatagcattttacctgcagtagaactttaaaattggagtcaattctttcaaacccttttgctgctttatcaacaaagttcatgtaatattctaaatcctttgttgtcatttcaacaatattcacaacatcttcaccaggagtagattccatctcaagaaatcactttctttgctcatctgtaagaagcaacttctcatctattaaagtgttattatgaggttacagcartttagtcacatcttcaggttctacagctaattctaattctatcaaatctgtcgttgcctcctctactgaagtt

SEQ ID NO: 813113 - DNA, 619 bp, Homo sapiens
gggagacaaaattcaacacaagacataaggttaactgtgaaagaaaagggatgtttaacatagaaagttagagttggtaggaactttagaaacctatacgactttcaaatgggaatgccccggcccagaggaatcaggtgacttaccagctgatcacacagccagtggcagagctaggactgggattcagattgctaagttcaaacacaatacgcttcccaccacctaggtttcaacttactgataatagaatacttgtacaaatgatttcatttaggaactattttttcctggtaggcaaattactttgttaaataagattttaaggtttggactacatatttcacatactttatggggaaaactctggatgcttctcaagaacaaatatgttaaattattaaaaaataagaatttaatctctatttctcctccttctagtgatgattaaataatgagggcattgtgcaaaatactctacttatactatttcaatttatctttattgaaatcttagagggtagatctcattattcccaktttaaagatgaggaagaagagaaagatgttaaataaatctaccaaagtcacccgataataagttacatagctaggattc

SEQ ID NO: 813114 - DNA, 613 bp, Homo sapiens
gtctttgttgaaccattatcacgtctttcatcgttttcttaaattttcttctcacttggtgatgcttctctgagtagaagcagaatggattgtggttattgtarcagttatccatttagctactaatatttgatattcattagtagacaattattaggggaaaaggacgtttaaattttatattctcagaggtataggaactatgtatatgagcagaacacacgtaaggaaaagtgcaaaagtctagggattacccagttcagtttctaaatttaagtataagttgtaaaaacaatttagaatagtttctaactatacttttactcccaagagaagctttagatacagggggatttattagtgaaactgcttttatgaaggaaggtggatgaaggggaaagctatttactggtctagtctctcctgaaacaaggattccccacctgactacaagacagaattggctctagagtgaagtctgtgtgctaagtgactttaacttgtgataggactcaggtggaatggtacagcttgccttaacactattacttatgaggaataggatgggtttgttttcatgtttctgctacttaatttgaaaacaaagattgtg

SEQ ID NO: 813115 - DNA, 634 bp, Homo sapiens
atgttgccatgtggggacaatatcataatataacatactattctgtgtgtgtctgcacatgtataatacagatattattttaaaatatgattacaaatggcataatctctttctkaaaccatacaggtttttgttgcattttttttcattaacactatgccctgagactttattaccaaagggaagaggagaggaggcattttctattcaagaagcccacaaataggaattaacacaggtgcaacagggggaattcttcattgaaaagggacaaaaagtagaaattcctctggtacaaaaagagggggttcagagagaatggatcttgggttgggatactgctggggtcccctgagggaacttacccatctctggcctttgtgagaagataggcaccctattgaaggatatgccccatgtaattgatttaaatgtgccctcctgccccccaaaatgtatccaacttctaatccttggaacctataaatgtgaccttttgtggaaaaaagggtttgggcagacataattaagttaaggttatctcgatgagattattctggattagattgggctctaaatccaatggcaaataattagaagagaaggggaaacagatgcagagacacagagagaa

SEQ ID NO: 813116 - DNA, 635 bp, Homo sapiens
acttatttctgcacaccacactgcacaggctattatttatgtcttttttttaattatgatttcccttaaactgtcaaataactcagaakggcagggtctcagaggcaataagaatttccctcagaacaatttacatgccaatctaaaactagttatgagttctgatgtgctatgagcaacttgtgaaatgtttcttagctacaaacacgtaactctacccagacatgttcttctggtggaagaggggagactgctgactgctttatgccttttaagtacacggtaacatggtgactacaaaatagttcttttgctacaattgttaacttgcatggaattcaagagattccattttcaagagaattgccatgatgttcttcaaataaggtaccaggatggagtgtgaaatatcaaactccttttatgcccaaggccaaacagaatgtaagagtttcaaatattaattggcctctgagtgctaaattaaaatgtcaacacaacaaaaacattttgtgaagacaagtagggtagtgttacttgtgccaaatgttggtatcccctgtcttggttgcaaagcattttgaataaaacagctgaccttctatgcttgatggtagaaacacaactgtgggaaa

SEQ ID NO: 813117 - DNA, 617 bp, Homo sapiens
actgatgcttgtgagtataaatgttatatttgaacacaatgaatactttgaaatatcaaggacatagaagaagtatttggatgcaagcaagaaatataggattggtgagctttttgggtagctgttctgtgtacttaactataaacacctctactgctgaataaggttagtgtaaccccataccaggtgccctctccttccaccatcaagcacatattaagtgaaatttttaaacagttaagcaaaactcatttttttacttgtagggactgtgcatagattaatttgttaaatagctttcttttcagattgttatttactcacattttctttctaaaggaactgctctatggggagaatgaagatactataaaattatttaatgttattgaacttcatatttataatgtcaatttaccatggtcaacatgaatttattattattgtcacttggcatgtgtaactttttgaatgatttaataagcacttgataaagtytgagactttttgtttccaaaattgggtttgatttcagtatagccctaaacaagaaaagctaacactcctagaataaggaaatattaaatatttaacttgtttgaggtctttttattctg

SEQ ID NO: 813118 - DNA, 553 bp, Homo sapiens
tccctaaagctcttgtcttctgggtcctcaccagaattgcccttaatactccacagatatctacactttttctagccttgtcctccaaactcttccaacatctacctatcaccctgttccaaagccacttccacattttcaagtatttattataacaacagccctgcttcttgatactaattttctgtcttagttcattttgtattgctataaccacagattaggtaggttataatgaacataaatgtatttggctcacaattttggagcctgggatgtcaaagatcaaggggccacatgtggtgagggctttctttgtatgtcataaaatgatgaaagacatcatgttggtgagagagagtgagagagggcaaaagagggggcaaatatgcttttataaaaacccactcctgagataataaacttaatcccacaataatgacagaaatccattcatgaggccagaaccattatgacctaaacacctcccagtaggtcccactctcaacactgttgcactgaggatcaaktttctaacacatgaactttagga

SEQ ID NO: 813119 - DNA, 537 bp, Homo sapiens
tgtaaatctcattatgccattggctatgaattattcccctttgggaggcatcttctgccactgtgtgctaatttaaagcatactrtagagaactgaactcaaataagttacaggcagtgacaagtctctttttttaaaaaaaaagtgaagaaagtccactcttcattgagacaggagtgggtaggacaattattattggcaaggtagggcaaaacttgtgacaacttgggagatacctagtgaaaattaaaatataagtctagagagataattttgcttttcaaaagtcctatggggtctagatagccttgctcctgaaaatgagaatagttaatattttagagcaaaacccatttcattatactatgagacttttttttttagctgatgaaacaaattatctggtaaacagctggtgggagggtaggaagacagccatcctcatgaaggacgttcatgaatctcatttgggccaataaatggaccaaaattctaggcattttagccatgaactgttcatgtcaattattttgccta

SEQ ID NO: 813120 - DNA, 537 bp, Homo sapiens
tgtaaatctcattatgccattggctatgaattattcccctttgggaggcatcttctgccactgtgtgctaatttaaagcatactatagagaactgaactcaaataagttacaggcagtgacaagtctcttttttwaaaaaaaaagtgaagaaagtccactcttcattgagacaggagtgggtaggacaattattattggcaaggtagggcaaaacttgtgacaacttgggagatacctagtgaaaattaaaatataagtctagagagataattttgcttttcaaaagtcctatggggtctagatagccttgctcctgaaaatgagaatagttaatattttagagcaaaacccatttcattatactatgagacttttttttttagctgatgaaacaaattatctggtaaacagctggtgggagggtaggaagacagccatcctcatgaaggacgttcatgaatctcatttgggccaataaatggaccaaaattctaggcattttagccatgaactgttcatgtcaattattttgccta

SEQ ID NO: 813121 - DNA, 577 bp, Homo sapiens
ccttctcttgctgaattttttcatagcctcccaataatgctcatccttggaatgggctrtactgcccagtcttcagtaaaactctaggaaaaatcaagaaagtagcaacgagttcagataacaggatcctaactatagcaggatcttcagaagttactgtgatagtgagaaacaatgaaacaacacatgtgtaaataaataaaactgtcccccagcctcacacaccttccccaaccatgcccagtatggcagaaactgttgggtacttaacaaaatgtgtttgttcacctttctgggtatacagatggactctatttcccatttatggtgaggtgtggccatgtgatggacccgtagccaacataatatgggcagaagtgatgggtgtcacttcaaagcttagcccataaaaccctcccctgacagctcaactacgctccttttgtctctcgctagttggaatgcagacacctcctagggactttggaagactcctgttgaagatggcagagtctccattggcttgggttcccaaatcactgcttagaaaaggctgccctgccaacctcaatgtggt

SEQ ID NO: 813122 - DNA, 558 bp, Homo sapiens
ttgttatggcagttagcctaccatagttaatacactggaagttataacgtctttctcaataagtgtatttctctttcctcagtttcatkacaagctcctggaaagcagaatctgtgtatcccctaccgtatcccctgcaggatctcatacagagactggcacaggacacataattagtaaatacgttggtcagagagattatgtctaccttttattctggaacatgagtaggaacatggccaaatcatatgggtttttcattttgctttgaaatccatcttgggtgtgaaggatcttttatgtatgtatagcagctcaggactggcatggtcaacgaagtgtgacacacattttttattatccataaatggattatctgctgtgacccagctcttccatcattccggcacattcctcctgtcagcagctgtgtcgtaggcgctgagagggaccctgagccaagggagaatcagaaacaggtggggtgggtttgggggtgggtgctggtgttactgactgggtatgagttgtgaatacatctgcaagtcaaataaaatg

SEQ ID NO: 813123 - DNA, 642 bp, Homo sapiens
ctgcaaccttcaccttccggtttcaygtgattctcctgcctcagactcctgagtagctgggattactcgcacccgtcaccatgccaggctaatttttgtatttttagtagatatggggtttcaccatggtggccaggctggccttgaactcctgacctcatgatctgcccgcctcagcctccaaaagtgctgggattacaggcgtgagccactgcacctggccaattaaaaaaataaatcttaaaacaaaacattagcatatcaaatccagcaataaataaaaagaatgtaccatgctaaattttatttattccagcaaactgagaaaagaagttaaattccttaatttgacaaaggttatctacagaaaaaccttagcaaagaatacttaatcacaaagtattgaatgcttcccccaagctcaaggggaaaaggactagaaaggaagaagaagggaaagaaggggaaggagaaggggaaaagaagggaatgatgagaaaggggaagaggaaagggctgggggagggagagtggagagaaagaaaaaaggaaagaagggaggaatcaaacaaaggcacagtatcaaattctaggacattgaggggaaagaacatgttaaaagcttctggaggaaaaaggaaa

SEQ ID NO: 813124 - DNA, 407 bp, Homo sapiens
gaagttaagggtgctgggactggttttctttctccactgtctataaataagcttgtttcccaaattcctagtcctctgtaccagacaccaatataaaagaaggaggctaggcrcagtggctcatgcctgtaattccagcactttggaaggttgaggtgggcagatcataaggtcaggagttcaagactagcctggccaacatagtgaaaacccgtctctactaaagatacaaaaaattagccgggcatggtggcgcatgcttgtattcccagctactcgggaggctggggcaagagaatcgcttgaacctgggaggcggaggttgcagtgagccgagattgcatcactgcactccagcctgagctacagggtaagactttgtctcaaaaaaaaaaaaaaaaaagaac

SEQ ID NO: 813125 - DNA, 567 bp, Homo sapiens
tattttgccaagcctgggcacggtggcttacgtctgtaatcccagcacttcgagaggccgaggcggacggatctcttgaggccagaagttcaagaccagcctggccaacatagcaaaaccctatctctactaaaaatacaaaaaaattagccgggtgtggtggcacacacctgtagtcccagctactcgggaggctgaggcaggagaatcacttgaacctgggaggtggaggttgcagtgagccaagatcgtgccactgcactccagcctgggtgacagagcaagactcacatactccactgcaccctgtccccccaacacacaccatacaccaaccgtggccacgttcctatccatctgcccttttagccttggccataggggaatttattaattttacttatttatatcccaccttattgtcaagacccagcatacaaagaataaattttagtcagataaaatccatcaatytgaaagatatctttgtaaaaagaaaacaaaaacaggaaaataagacggatttgggaattaggttaatttccaaaatgtaggccagcaagacta

SEQ ID NO: 813126 - DNA, 543 bp, Homo sapiens
ttcaccatgttggtcaggctggtctcaaactcctgaccttgggtgatccgcccacctcagcctcccaaagtgctggaattacaggcatgagccacygcgcccggcctccacattgttttctacataatttaaaattctttttttttttttttttttttttttttttgagacagagtctcactctgtcgcccaggctggactgcggactgcagtggcgcaatctcggctcactgcaagctccgcttcccgggttcacgccattctcctgcctcagcctccccagtagctgggactacaggcgcccgccaccgcgcccggctaatttttttgtatttttagtagagacggggtttcaccttgttagccaggatggtctcgatctcctgacctcatgatccacccgcctcggcctcccaaagtgctgggattacaggcgtgagccaccgcgcccggcccataatttaaaattctaatgtgtttaaaataattattagtttatgtttcggggaacatggataaagatataactttgttacaaacaac

SEQ ID NO: 813127 - DNA, 505 bp, Homo sapiens
agtgtgaattcacaatacttataatttaaattttaaaaaaattataaacgtataattttatacttgaggtccaaagtcttctaccataaaatgttgagaatttcaaaagctaaattttgaaactattataaaatggtgccatcccaaaagtcagaagccacacatgcactacaagtactttctaaaatcatctttcactacaagtactttctaaaatcatctttctcttggttcattttaggcttaagaaataccaaataaaattaaattccttgggtttaagaattctgataatgttttaaacaacacctgactataagcttctttaggactcagtccacacttagtgcatagtctcatctgtagatgcccaaatatttgtccacctactgataactggtcaacacactcatatccatactctaratcaactatggatgccatatgtagacttaagcaccacacatttattaagagctgacatatttcggatgtgaaaagtcca

SEQ ID NO: 813128 - DNA, 633 bp, Homo sapiens
gaagtcgggaacttctggcacctrtgcagtttgataacatgcttcatttgttgcatgtcttattagcatattaaatattaagtgtccacctttgcatgtgagtgttgagtattataatgaaactatggtggaagttcagttgttcttctggtcttgtacacagctgggagataggattaaacccccttgagtaagatttatggtgggagctgcttattagtttccttaaggtcctggaatcaatggtaggcatcttgagtaagatttccagtgcaaggtcttgatggtctctttggggtcgctgctggccatgcctgccaccaacttgcaatagaggtccttggtgggctacaggggtcaagtcccatccctgctctgtcttcacgacaataggataaagtgatcctatagttgaagactgcaggacagactgggcataggacgcagtaagagatgtagctaactctctgggtaggaagctatgctgatgagaactaaagtgaggccaagttaacagggaggaccattggccccgtttgagctgagatgacaggccattaattcctagctgtagactggatagatgacaaggacaagggacaattaccactcccaccaaataagccagtgaaa

SEQ ID NO: 813129 - DNA, 604 bp, Homo sapiens
ggtgaaagaactgcagggcgttcattcgtatttacttacttttctcaccaggcacaggacgaggtggtgaacagtgcaatccttatggagttgtggggctggtggaaaataactcaagagagtagaacaggaaatgtgtgtaattctaataagtggaggcagcgccttgtccgatcatttggtaacctagcttaactcagttggttaaaacactgttcctcaactattctcagtccaagatgtgccaagtgcttaactcagttggttaaaatgattttctatatttcctagatggcatccctctttctctttcatccagggggtgtctgtcaccctttccctccatccagataagggcatgtgcatgcacacccatatgtcctctgctagggctgagatctttcacctttgctgtcaagtctgttttgcaaaacctacccaggtttccagaagcactaagtgggacttgatggatgcacttgaggcttaagtgacaaggtgggctcatagtgtttccattgtctgtgtgaggaaggaactaagggcattgatggaactggtgttgcgagtcctcaggacagcacrgctcccaccactgctgtga

SEQ ID NO: 813130 - DNA, 630 bp, Homo sapiens
atgcccacatggtttttaacaaagctaggtcaagaggtcatgcacatttccctcttgaggtctcctgccctagattcatccaaattccctagagcgtacttcattcagagcaggttttcacagactcccctaaagaaatagcagaagagtcttcagtcctctttggcaaatgctccatgtggcacatgtggggacacttgccctctccacattgctgctcttgatgaacaggtttcttttctttctttctttctttcctttcctttccttccctttccttaccctttctttctttctttcttttctttcttccttctttcttttctttctttctttctctttcttttctttctttctttctttctttctttctttcttttcttttctttctttcttctttctctctctctctctctccctccctccctctctctctctctctttcttttttttttggttacatggataagttctttagtggtgatttctgagattctggtgcacctgtcacccaagcagtgtacactgyacccagtgtgtagtcttttatcccttaccctgccacccttccccctgagtccccaaagtccatcgtatcattctgatgcctttgcgtgctcatagcttagc

SEQ ID NO: 813131 - DNA, 626 bp, Homo sapiens
tagatgctgttatgtgactactgtggrtattatattctgctatggaaataatgagcggctggtaaaggggaagccacagtcctgtgtagaggggcaggatcttgtctgatagtgaggccattgaccacccatgctagaatttggaacttccagggagtgggttgcgagatggtgcttctgcatggagacagaccaaaaacttggagaaggaatcaggtaagatggctgcaattgcagcagcctgtttgggctgtggggtggccctctctgacgtttgtggatagaccagagtctggaagccacaggagatagccagcttgggctcggtaagtgtgatccttccgctttcctgtagttgctgggtttatttccttgcgctttaccttagagtttggtacagcccttctgcaagacccagacggtctcagctgcgtcagggaaagctcagggaaaaccctgtgattcgtatttgacttagatcaataaagtggtagcagttcattcttcgttgccagcatgggcaagaccgcagtatctgaagctagaggaccttggggaaggcaaaaatcagaggactaagttagggttactaataccccatatctctttatggaaatcttccttac

SEQ ID NO: 813132 - DNA, 667 bp, Homo sapiens
cagcccttctgcaagacccagacggtctcagctgcgtcagggaaagctcagggaaaaccctgtgattcgtatttgacttagatcaataaagtggtagcagttcattcttcgttgccagcatgggcaagacmgcagtatctgaagctagaggaccttggggaaggcaaaaatcagaggactaagttagggttactaataccccatatctctttatggaaatcttccttacagtattcaagattggaggttctgctttacaaaggagtgtgtgtactcacagctcagagcatttctaagtagggctacacattagttgcagggtggaagagggatcacttattccaaaaattggtctggaaattgttgtaactctgactctggcctgaggttaccactaccattatttttgccatcgtgaccgttaactacaggaattgtgttttcgtctcagaaatttaaaaggtgaaggaaacttagatatcaccaattcaactcctcatttttcagatgaagtacagagttgatgggtgccttgccaaagtttagaagtctaaatttgttttcttctcattgcttaacaagtgcaagccatgtggaatttattcaagaggatgtggtgagttgccgtgtgttaagctgcaatgatagaaagtttaatttagcactt

SEQ ID NO: 813133 - DNA, 637 bp, Homo sapiens
cccccattcccaaatgaagggcagcccagttggttgtgctgtcagcaaacattgctgtttgcaaaggcatgacctgccttagggagaggtaaggggaagagcaggcacttttgcttgggcatcttcttgttcttttttgctgccatcgttatgcatttgccagctgggctgtcgaagacaccagtcaggaggagctgcttttccaagattcagagcctgcagctggcgtcctctcctggccatgctgtttccataggattaagatggagctctggggactttcagtcctgagctggccccctgggatgaagctgggctttcatactaattgttttccaaggcagtttacagctgggtcatttgcactcatattttttcatgacacgatgcagcagaggattaacacgtaaaagaaaagggctgatggtgggaatggctctgcacagaaattcccgattgtcctttctggcgggaagtggagtctgccctctttgttgggatcctgctccacagtttggaagcaggtgaaactttcagatggcctctaatcaacctggggtgcttccyggcggaggtgctatgttagggggcacgtgaataatagagagggttgcctatctcctcaccctctctccat

SEQ ID NO: 813134 - DNA, 546 bp, Homo sapiens
gaactgccacctctacttctggaaggtgccccagacaggaccactgtggaagccccactctctgtccaggcatcttccatcaggcagcagccgcccccatcattgctaggcctggcttagagaccctggagatgggaaacaaaatgcttcaaagggaggcagtaaaatggggtcaccgagcacttgaaaggcagctctgtgactaatgccatgataatagataaaacttggttgcgtgatctggctttgaatggtccccactcacacaaccccaggctcttggggcctgacacagttgtggccgatgcttcccagagaggatcggatggttttaaacattttgggccccaggatgatgttcatacgcatctccttctgagattacttcatacatggcgagcagcgtggctgaatctgrtcttgtggtatttattatctgaatccatggatgggaatttccctcctcccctccctgcaccttgcctttcccatatatgttcatgcaaaatagactttggatccagactgcatagtgcccccgaaaca

SEQ ID NO: 813135 - DNA, 546 bp, Homo sapiens
gaactgccacctctacttctggaaggtgccccagacaggaccactgtggaagccccactctctgtccaggcatcttccatcaggcagcagccgcccccatcattgctaggcctggcttagagaccctggagatgggaaacaaaatgcttcaaagggaggcagtaaaatggggtcaccgagcacttgaaaggcagctctgtgactaatgccatgataatagataaaacttggttgcgtgatctggctttgaatggtccccactcacacaaccccaggctcttggggcctgacacagttgtggccgatgcttcccagagaggatcggatggttttaaacattttgggccccaggatgatgttcatacgcatctccttctgagattacttcatacatggcgagcagcgtggctgaatctgakcttgtggtatttattatctgaatccatggatgggaatttccctcctcccctccctgcaccttgcctttcccatatatgttcatgcaaaatagactttggatccagactgcatagtgcccccgaaaca

SEQ ID NO: 813136 - DNA, 576 bp, Homo sapiens
ctgagcacctaccatgtctccgggcatttagacacgttttctatttgatttatataagagccacacaaggtgagcattattatatcaatttcagagatgggaaaattgagggaggaggcaacyggcccaggtgtcactcagcaagtggcaggctgtgactccaacctggagttggacacacaatgtgggcttgtgttctttgtcactatgacacagtgcctccaaaaaggcacaaatctagaacccagttttgagtgtggcccttaaaaagtctgacgaagagtctgaggctcaaatcccaaacatctcccaaagtctgtgccgtcacagactccagagtggggcccactttgtggggtgggggctcaggaatttggttggcctctgctgatggagcagagcttccagcctggggttctcagagtctaccccattggtgtctgtctggaggacagcggggtggctgatggtcaacctgcataaatgaccaaggaggctgtaagaaataaatcaccaagcaggaagagcctggaggggtagaagaagcaactcaacaacaacggaggcctggaagga

SEQ ID NO: 813137 - DNA, 568 bp, Homo sapiens
tatattccgagaaagagaaaagcagtttctgacatgcagtagatgctggcacactaggctttggtattcttgttgaacaaaaataattttagagaacatcaacatcagacgaggccactccatgatcatggtggatcaggacaaaaataagactacttcataatcgtgtgtgaatgtagacaaaaacacaaatgctgtccaacccaccaaatgaaatacacaaaatgaaaataccaaactagtctacgtagctgttgcctctttgccaatgacagcttaagcctcattccagtcttccctctttctagataagatttattaagatacccaatcatagaattacccccacttcctgacaatatcctgtttagagcatagagcaaagttccaccaccttaaaccctctatcagatcacctaacacaaacccaatcttactaaaagatttttttgaacaccttaccagtatgccacgtggttccccgtgatgtgttcttccttgctgcaatgagyagtaaattcggcttgttcaaccacaggtgtgttcctggtgatctttgactagaaag

SEQ ID NO: 813138 - DNA, 538 bp, Homo sapiens
gaactaaaagccagatttcaatgctactggttactcagtgcctgatttgtctacattttgcttaacagactttcccattatgcaccaaacagtactatctaggtgaaaagtgaataataaggaaatataaataaatattttctcctaaaaatgcaactttcagatatgaagcacaatatgtatatgatttctatttatatttgtggacagtaagatttattagtaaggatcattatttttaggtctttgagatacaaaaattctgagattccaaataagtcctaaagtacatttagtataaaaaatgtatcatgaaaaatgaaacacactttggcaaattttccaataggttaaaagtaaaaggattttccatcagctctcggtgaatttgaaagcatatttataaccaggattccccattcactaagcatttaatgaataaacagccastgaccaccagcaaacttgcagctctggaggcaggactgtgttttggatccccagtacttagcaggctgtgtggttcttagtagattct

SEQ ID NO: 813139 - DNA, 432 bp, Homo sapiens
tctgtctttgcctttatggggcttaggaactagtaaggatttgggaagaagacagggatccccacaaatgtggagtaaattactgtcaattttctacaaartaatcagaagtgctcaatccagtgctatttcattaattccacagtttcaaaaaaaaagtaggtatatgagccctgagagaaagtttagggctacagtcaagaaaatcagttgcttaatggtgatggttgaagccacaggagtcaattagaatgactaaaagaaaatacagaaagaatatgtgttgagggcggatattttctagatacctacagagaacatagaatcaagatgacaatgaagtattgtcaacatcgtaatctgtttggactgctataacaaaaataaacttggtggcttataaactacacaaagatatttctcagtgttctt

SEQ ID NO: 813140 - DNA, 593 bp, Homo sapiens
gtacaattggcccattactgctaccaatggggcacaaggattggtccacctgacatccccatccccagcaaaacctcaccacagcctccactacaaatgcaacctaaaccactgagaacatcacagacrccatatatgctgtttaaagccaaagaaattgtacaggaactgcactactgcctgcatgcagaatctaagccaaagtgccctatccaaccaacaacatagattcatcttcaggaaaatgtcctcacctatgaaaacaaagtcaaaaaaattagaagtgactgttacatcagatgtgcagatagcaatgtaaaggcaaaaaaagacatgaaaaagcaaggaaatatgacatctctaaaggaacacaataattctccagcaacagataccaataaaaaagaaatttataaaatcccagaagaattcaaaataatgatattaaagaagctcagtgagatataagacaacacaaacaaacaataaaaagaaatcagaaaaacaattcaggatatgaattttaaaattacaaaaagatatcattaaaaagaatggaatagaaattctggaactaaaaactttatttaatt

SEQ ID NO: 813141 - DNA, 593 bp, Homo sapiens
gtacaattggcccattactgctaccaatggggcacaaggattggtccacctgacatccccatccccagcaaaacctcaccacagcctccactacaaatgcaacctaaaccactgagaacatcacagacaccatatatgctgtttaaagccaaagaaattgtacaggaactgcactactgcctgcatgcagaatctaagccaaagtgccctatccaaccaacaacatagattcatcttcaggaaaatgtcctcacctatgaaaacaaagtcaaaaaaattagaagtgactgttacatcagatgtgcagatagcaatgtaaaggcaaaaaaagacatgaaaaagcaaggaaatatgacatctctaaaggaacacaataattctccagcaacagataccaataaaaaagaaatttataaaatcccagaagaattcaaaataatgatattaaagaagctcagtgagatayaagacaacacaaacaaacaataaaaagaaatcagaaaaacaattcaggatatgaattttaaaattacaaaaagatatcattaaaaagaatggaatagaaattctggaactaaaaactttatttaatt

SEQ ID NO: 813142 - DNA, 534 bp, Homo sapiens
ctgaaaagtctttgagatagttgagtatacatttacatgatagctgacgataagggcacagtttatccagagaaatgtgaaacttccacmagtacatagaggggtgaatataacagggtgattttttttaaatgaggaaatacgtaaaagcctgtcatggttcatttgaagctttgaccattgtatttagcctatgtagtaggaaatattcagtgacagaaaaaatattagtaaacaaaaatatgtaattataactacaattatacaatgctttgagttcttactttgtgcctggaactttttaaaggcatatattaaatatttaaatatctcagaacaatccaagaaagtagacatttattatcatttccattttacagaaaaaaattaccaatgcactaagaaactaaatatgttggccaagtcaacagcgctagaaactggggagccaggattcaaacagagcaatttggctccagaatttatacccttaaccataatgtcatattggtgctttggtttggaagaaagggc

SEQ ID NO: 813143 - DNA, 629 bp, Homo sapiens
cagacagctaaatcaatagtccttattgtaaagtgtcctgagctgagttcctaaaatttcttttagactacaatattgttgactccttgggttaatgtcacagagcctgattcatgactgaaaatgttcccaagcctctattagaggacggttttgaaattgaggtaaaagatataaatcacttagcacattatatagcctcagtaagtaatttcattctccttcttaatagttagagacaatacaactttgtttgcttcacacaatatcagtttataaattttttctggccataatttttaatagttactccttctattctcaaacatgtccctttctgaataataagttgtacgttcaccatataaagagtagaagctgaaaagttaagcatctaacaaaagggggcttttctttaagtgaagaacctagtagcctacatagaaatcagagaagtttcttattctaaaaactaagcggcagatttcacatgaaagtagagtttgggccagcatatgctaattttttcccctgacttaaagaaatctgtctgaaataatcaattttgaagcaggtatttttttttttaagggtcactgytggctgatggcccagacatattttctata

SEQ ID NO: 813144 - DNA, 384 bp, Homo sapiens
atattgtgttttgagaatcaagcagcagggtcttgctcatggagggggaatgraggcaagtggtgataatactgcctctggggcaaagacaatacctttgccccaggtattggggcaactgtattggttccctgcagtaggtaacatcattgacctaataggccgaaatacacactccatatagagcagagatttgtattcatcttatttttctatcaaaatctcttaaattgtatgaaggagaagtactttcattagattattgcttcaaaataatgttttctacagatataataaaaagtcttttcaaagattaatcttctggataatttgccagaactacaaacacagagaaaaacaactcttatccactacttaagccag

SEQ ID NO: 813145 - DNA, 604 bp, Homo sapiens
ctagtctccagaaccgtaagtgaataaatttttgttgttttaatccattacatttatggtaattttatagcaggccaaggaaatgaatacgggaagatatactcacttctagctctttttcctctgctgtttccaagaataaatctgggcggaagggtttcattccattggaattttccactctgaaaatcttctctggttgggtgagaaaaatataaattacaaagaagaatacagcatgaagaaatggaaggaatttcaacagaaatccagttgattcactcccctggatggctcttagctcagtgagagtgctgcagagcctagaccagcactcagtagacaggtgttgattcaatgaggcacccagtgaaagggtctcatcccacttataaccagaaggttaccttaaggataggctaccaggtggggcacagtgcctcaaagctgtaatcccagcacttcgggaggctgaggttgggggatcactcgagctcaggagctcagtctgggcaacatggtgaaaccccrtctctacataaagtacaaaaattagccaggtgtggtggtgtgcacctgtcgtcccagctacttggaaggctga

SEQ ID NO: 813146 - DNA, 599 bp, Homo sapiens
aactgtgacaccccagaggtatccatctttstttgcagctttttgggcctggcccttgacttgccatcccaaagttgtttaaggtcatcagcattgcctcttcctcctcctcccatcccagcctgctctcaatggtttgtctctgtgggaagaatgcatctaatagatttaatcatatgaaagtacagggactgacaaagcccaatatactattagaatcaggagccctgcattataataaggtggccatgatttagtgtccaaatggaggctctttttcctgcacaaatgctaaaccagatggcataatggaataacaggaatacaccaaaactctcctgggcaaatttggacaatggtcaacttaattataatggaagacaatgtcttaacctaggaatatacatttctaaaggtaggattttaatatcagtgacaggaaaattttgctttaggacatagggaactttccagtaacccttgctttattttacattatttaatttctacctattttaagtgtaagattgaccctcaatagcagggcttcttcctgtctttccatattgttactttcatgccaatgtggtggatgtgtc

SEQ ID NO: 813147 - DNA, 599 bp, Homo sapiens
aactgtgacaccccagaggtatccatctttctttgcagctttttgggcctggcccttgacttgccatcccaaagttgtttaaggtcatcagcattgcctcttcctcctcctcccatcccagcctgctctcaatggtttgtctctgtgggaagaatgcatctaatagatttaatcatatgaaagtacagggactgacaaagcccaatatactattagaatcaggagccctgcattataataaggtggccatgatttagtgtccaaatggaggctctttttcctgcacaaatgctaaaccagatggcataatggaataacaggaatacaccaaaactctcctgggcaaatttggacaatggtcaacttaattataatggaagacaatgtcttaacctaggaatatacatttctaaaggtaggattttaatatcagtgacaggaaaattttgctttaggacatagggaactttccagtaacccttgctttattttacattatttaatttctacctmttttaagtgtaagattgaccctcaatagcagggcttcttcctgtctttccatattgttactttcatgccaatgtggtggatgtgtc

SEQ ID NO: 813148 - DNA, 603 bp, Homo sapiens
atacagatcatgccaaaacagaaacataaaagccatttgctgaaagttcaacgtataaatatatacatgtatagtacatatattcattctctctccaaacatgcacatacacacataataggcagatactacactgaatgaaaaggaaagagaagaagaattaagttaaacttactaagtgcctaactacaatttcagtaaaaaactaccaaaagcccatgctacatagtcatatatatatatgttaaaaactacaacttggcacttgaggtcaggagttcgggaccagcctggccaatatggcaaaaccccatctctactaaaaatatgaaaaattagctgggtgtgttggcaggcgcctgtatttccagctactcaggaggctgagccaggagaatcacttgaacctgcgaggcggaggttgcagtgagctgagatcgtgccattgcactccagcctgggcaataagagtgaaactccacctcaaaacaaacaaacaaacaaacaaacaaacaaaaaactacaacttggtacctgaaatcccagcaataattcatggtattgagagaaagctgaggwtcaatgaaccttttttaatgaaag

SEQ ID NO: 813149 - DNA, 602 bp, Homo sapiens
ctctaaaatcagaatgcattttacagttsatggcatgtgacagcttaattggcatataaaataatggcatcaggtcagaagttacatggtattcaaagactgataattgaccattagatttagccaagtgtaggccatcagtggatttgaccagagggttaagacgtagggatggagtgggtttaggagcaaatgaaaggagagaaactggaactcttcagagtgttgctgtgaaggggaggaaagaatggggtagtggctggagaaggaagttgggatatagagagtttttgggttattaaaatggaggagatgaagcatggctgtgtgccgataggaatgtttctacagagattagcatatttatgatataggagagaatggctgagtagcccattggagaaaggagtgaaggcctaagtggtaatgccagccttaggtagcagaaaggaaggtagagctgttgggggcagatgctcaggtggatgaaacagatggaggagtttgctctactctgactgcttcagttttcctagtgaagtggaggaagcaaggtcattggctgggaggaaaccagggaaggaagggttagaatttagagg

SEQ ID NO: 813150 - DNA, 584 bp, Homo sapiens
cctggagaagtgtaagtgtagaaaatactattgcagcactaaaatagaaaatatattttaaatgttatcagtattatatttgtggcatctgtatgttatttcctaaatcactttctccaaaaaacattctcacaccccagccaacaacccccaaaactgttaggtgccatttctgcaggccctaatagtaccctggtcttaaccacacactagtacttgtcatatttcattgcctgagtattgcttcacagctaatttgtcttattccctattgaaattgagcatctaccatagtgactgagacataatagaaactaaaaaatatttttaaatgaaaatgagtgaatagaagaataaaggagtgacgtttccaagatccaaaacaaaatgtattggcaatctcattttaataaaatgagtatatatgtactttatgtacatcagaatgtgattctccagctttctgaggtcatggaactatgttacctaatgctattacacttagaaattcaagctaaattattgyttaatctctgtctagcagtgccagaaaggaaatgtactctgtcaagaaaatggaggcc

SEQ ID NO: 813151 - DNA, 658 bp, Homo sapiens
ttagttgaatcaatgaatattaatttcataataaacacgaatttactagttcaaatttgaatacactgaaagtaaaarttacattgtaactattgttccgctaaaggatagctaagttatttacaagttacaataactaagaggaatatttgttagctcatttgaacttacaagaatgttgcatctttacactgaaaatcttacaagaaaaacgcacaatattttaaaatcatgcaacatatgcaatttataataatagcttctccactggcattgggattaaaatatatatatacttgatatgtaacattcatttagtactattccaaatcctaaggaaatgaaatgcaccatcttcactctgctattccacatattgctctggctttaatccaatcttaaatttcccctgtagcctgaaaactactgtaatccacatgatctcaaaaatcactttagtatttctaatgatcttgatttcagatgagaactgtaaggttttcattctagtatgattgaaaatatatcttttaagcactaatctcctttcttttgactttttaatatctatttgttgcagacatgttaaacaatctaaaggaacattcacctatgttctttaggaatacagtagaccttcttatctgcatgggggcta

SEQ ID NO: 813152 - DNA, 619 bp, Homo sapiens
ccactgaaattttgactgtttgtttaaccaaatctttgcatttttaccatttggctttgattttgttttacaaaaaaggatgacatttggccttggggaagtgaaaaagaaatattgagtagaygaagaagagctgttgctttctatggcttaatacaggattgagatgattatcattttataatcaggaagttttagttttctactattttgttggtaaaaactgaggacaattttcattgcatcactttagccctaaacttagctgacaaactgtcattctaattcaagccttcttctttggttcatgtgtgtatttttgtgtgattttcttcatcttgccaaatctcgaaatctttcagtgaattcattgttgaaaaagaaaatattttgtttcgtttttgaattagaatattccagtttggtcttgttttcataaaaaagatggtgattaatacatttaggcaccttcagaattgttctcaatattttagcctttcttttaaagttaaagtacttttaaaacttttttcttttatagtcaatatgttcagtttttaaaaattatctttaacaatatttgttattattatatttctttagtttcaaagctttaaaa

SEQ ID NO: 813153 - DNA, 598 bp, Homo sapiens
agtagtagatgcaggacatcattattttggcaatattcaggtatctttgatattcactatggaataaattatttcaacatatcgagaacagatccaaggaggtgacctcaaagacctgaaggttaattaatggactaggctatcctgactcaaaatgaataggaattcagaaagggaagaagagggaaagctgtgtatttctgcagggattcatgactagttagatggacatattttattatgttttttcacaagggaaacatttttcttcattgtatattgaggtgtggtctcttataataaagattgttttagtctttacccaataaattttccacagtatctggtataaactctggctagataactttttactttatagaatttttccctaatgtaatgtgtgaaggagtgaggtagctatcagatttccatttataagctaactgaaaacatggaaactccacaaacagcccatataacctgaaaattgagcaaaatgactatatatacacacacacacttatatatgagctatgtctatatgtgtgtgtattatttagaatactatttwtctatacatcagtttgttctactc

SEQ ID NO: 813154 - DNA, 612 bp, Homo sapiens
attttcagtcaagaaacagggccttagagtactgttgctagagtcaggaactcaaaactccagacattaacactctcttctgaaaaccaaccagggaatggcagatctgtcttcttgtttgaagttttacctctktctcagccttaatgaataagagaattaagaaagtggtggaactttttctgcttgtaagagactgagacctgcagcctcagaagtggaaataaggcaggacagtcttgccgagtttgttattttaaaaggctgtttccactcatctttgagctgacaccaggttcctattgattctaacggggctctttcctgaggaggaaacagactcatgggcagtcagagttaaggcaccagccccaccgtgccttatgacttctacctagaagcccatgtctcataataatgccagtcagaggccagtctgactgctgtgtctatggtagttatcttggggacgagcaatccacatcttgtgtatttagcaggcttgtagttaaaacagattggaaatttgactttcctgtttagtctttggaattgagttaattccattgtggatcctgcgtgattcaggtgctttggctgttgggcaggagt

SEQ ID NO: 813155 - DNA, 511 bp, Homo sapiens
tttggcaaatgcaaattctgaagatcctcaacaggtggacttaagggggatataaattattgtgagaagagaggataaagttacagatttagaaatgattatagaggttacttgaacyacttctacgcttctgatatactcctcaatatggcttctgctctctctaccccctttatgtcctttctaccaaaagttctaagttcacctgtgacctcttagtttcaaaatctaaagaacatttctcagtatttccaacagaacatttggcagcatctgccactagtataatcaaaacaataaataaataaatcatacatacattaaaaaaaaaaacagacaaatacataggctttgagaaggaagggactggttcaccagctaagggtttcttcccacatccctgataacaggttagattactcttttggctcctcttctaaccagttttttagtgtctgaatgtgtctctcttaaaatgtggtccccagaggtaaaatatatttttcatatg

SEQ ID NO: 813156 - DNA, 637 bp, Homo sapiens
ccaagcccctttggcctgtttgaacagcagcaataacaacagtagagaagacagggtgtgcatgtgaactgggtaaaaggtccccacttcccagccgaggtcagcatctggagagacttagatttcagagagggattcagactgagtcatcgacaggtataaggactgtcagcaacttttccatgttccctcttcataagccccaagtctcagcctgctgggaagatccggccctatgaaggcatccactggactccccgggaaaattaatggagtgagtttgaattggagaagtgacatggaatctaactagagatctgacttccaaaacagtgacaccctaaggctacccctcctagcctaggaaagggaccagtgagagcactggcctccaagccctttcctgcactgtaaccctagctacccgtctaggagatacagacaccatcctgtccatttacctttctccaggcaagaactcactgagccccaagaaaagaaaaggctgatagtgtctcttctcaaaaggccaggaatttagctctctctctttctgtgccaaaaatgtwcagaacatagtcgtttcctttcattaagggaaaaaaaagctgagtcccaccagggaagctaaggtgta

SEQ ID NO: 813157 - DNA, 547 bp, Homo sapiens
cagaataacttttacataggaacaaaatttaaccagtcaagtgacgaacatgtggtcatcatggttgcaaggagctatggcatggtccaatctctctagaagtttacagtttaattaaacayataaaatcatcatgccagaaaaggtttgtgggggggaacggagaacattctgatgctactttgtgtgatactggctgtcaatgtgattagcagaaagtaatgtgagacacatgactggtaaagcaaagattttataaaagaaggggaagggaatcagagtggagagaaatgacgccagctacacggagaagaaccagtgggaaacctgcagagctgagttaggtgaacagctaggaaggctgcccagcaagccaaaccacagggttcagaggcaggaaagacacagccccaatctgagctggccttggtatctaagaagagggcatggtccaaggcagaactaatgggactatcatgaaatcagggtccagaccacggagaaggggacctaccacagatgaagcagctggtcagggtaagggtcg

SEQ ID NO: 813158 - DNA, 625 bp, Homo sapiens
atagaaactttccaaactgaaaaagcaaagataaaaatgaatgaaaaaattagaatggactatataagaactatggcacaattacataaggtataacataccattaayttataattatttttatttttgtaaggtcggtagtgatgcctctttttaaatcctgattttagtaattataatcttctccctttttcttggtatctaaaggcttgtcaattgtagtgctctttcaaataaccgatatttagttttgttgatttttttctattctctatttcatctatttctgctctattctttagtattttctgacttctgcttgctttgggtttagttttctcttcctttccagttctttaatgtgaaagactaggttattgatttgagatctgccctcttttttaacatagacatgcatagctgtaaactcatctctaagcactgctgtagatgcaacccccgttttggaatgttgtgttttaattttcattcatttcaaagtatttccttatttctcacatgatttattttttgagccatcgattatttaagagtgtgtatttaacttccaaatattcttaaattttccaaatttactgatgttattggcttctaatttaattcc

SEQ ID NO: 813159 - DNA, 358 bp, Homo sapiens
ataaaacaattataatgagatattttacattctttccttcatatttagcctttgaaatccggtgttttttacacttacagctcatctcaattcagacactaaattttcattggaaatacttgatctgtrtttagatttcataaaatttacagttgaaaaagcagagtcacatacctgaggcattccaaacatactttaaaatctttccaataactgagttgagtatctgtttttaaatttaaactaattaaaattaaataaatattaaataaattttaaaatgtggttcctcagttccccgggccacatttcagatgttccgtatgtatctgcacatggttaatggctaccagcaaac

SEQ ID NO: 813160 - DNA, 358 bp, Homo sapiens
ataaaacaattataatgagatattttacattctttccttcatatttagcctttgaaatccggtgttttttacacttacagctcatctcaattcagacactaaattttcattggaaatacttgatctgtatttagatttcataaaatttacagttgaaaaagcagagtcacatacctgaggcattccaaacatactttaaaatctttccaataactgagttgagtatctgttkttaaatttaaactaattaaaattaaataaatattaaataaattttaaaatgtggttcctcagttccccgggccacatttcagatgttccgtatgtatctgcacatggttaatggctaccagcaaac

SEQ ID NO: 813161 - DNA, 583 bp, Homo sapiens
tcagactccccattgctaggactataggtgcacactgccacgcccrgctaatatttcattttatgtagagatggggtcttgctgtgttgccaaagctgcatcaaggtttactgagctattgtcaacagcttcatcttcctcccagaaaggacagctgaaggtttagggtggcacagtttgctgtacctattcagtagtggagctgggatttgaacccaggtggtctggttcctgattctgaatggttatccactatactacatggtgtctgtatttctctggtaaggatagagatatattcccagcttggccagctttgctgttggtttagagtacctaaccatgctatttctcccggcctaaaatggggtaggggggctcagctgggtacacctatagccctcatcatccagtcagtagttctctaagtctgctcaactcccctccggggtcttcctcctggctttcctccattcttacagctgctttttaggatgacagctttgggttttttttttttcttaaaaggttagtgctcatttcctcctcagcccataattcaggttaaaaagaacccggaaca

SEQ ID NO: 813162 - DNA, 522 bp, Homo sapiens
tctcttgagaatccctgcagagtttcacgttgggggaactcaaatgggtaatatttaaaacgggactataagccaggcacagtggctcacgcctgtaatcccagctactccagaggctgaggcaggaagatcacttgggctcaggagttttagaccaacctgggcaacataacgggaccccatgtctgaaaaaaaaaaaaggaaagaaagggattgaaggagcttgccaagggtaggctgcctaaattcacattttccctgggtctttccgtgaaatggggacaccagaaacccaagggtcgggtctagtgccctcaactctctggggatgagagtcttgccttggggtagacaagaggcagggcagggaggagcagagccctggggtgcggccgtcctcaccgcctgttgctctactcaccccagtgcaaaccttcccgtggccgcaarcgtggcatctgctggtgcgtggacaagtacgggatgaagctgccaggcatggagtacgttgacggggacttt

SEQ ID NO: 813163 - DNA, 593 bp, Homo sapiens
atggggaggacggaatagagaggaaccgcggcctgcagacagaactgatggaccttgctcaagaattgacrtcaggatgagaatgagggaaagtcagggatgtcttctccacccagtgtccctcaagcaactcaaatacaatgtgttccacgttgaactcatcctgtaagctcaggctcttggcctctcttatgattttatctaatgctttacaaagtacaagttcaataacaacacaatttgaactcatcatcttccccactaagccatccctcttccttctcttaatccttctttagccccctcctcttattccccattcctcctcctcctcctgtttgctgtctcagagaatggcactgcatccacccagctgtccaagcccaacccccggcctcagtcctgactcttcatttaccccttccatccaataagccaccaggtgctaggaatcagtgacctcatggaccaccctcaccctcggcccttctctccatctccccagccctggttcattcagatcatgctcacttctaccctggatccttgcaattcctgctgcagggatgttccacccaatcccacaccatgta

SEQ ID NO: 813164 - DNA, 383 bp, Homo sapiens
aacacaccctcctggcatggctccatctattcttggggatctggttttcctgcwctccaagaaagctcatcttgtgccatttccaaaagctgtcttgcattccagctacacttatgtcacacctggtaaagggcccgccatccctccgcctccctacactcaccagatggaaggtctggaaggtagtggattgggccaggcccctagggagcccctcctctgtgggaagggatcagactccagccacaggagaggggagtgacaggagaggccaggccctgggccacgtaccgaggaaggttaggggggcagggactgtgggcctcaaatggtgagctttctccccccatggcccattgcaaaggcaggggtcggggtgcata

SEQ ID NO: 813165 - DNA, 383 bp, Homo sapiens
aacacaccctcctggcatggctccatctattcttggggatctggttttcctgcactccaagaaagctcatcttgtgccatttccaaaagctgtcttgcwttccagctacacttatgtcacacctggtaaagggcccgccatccctccgcctccctacactcaccagatggaaggtctggaaggtagtggattgggccaggcccctagggagcccctcctctgtgggaagggatcagactccagccacaggagaggggagtgacaggagaggccaggccctgggccacgtaccgaggaaggttaggggggcagggactgtgggcctcaaatggtgagctttctccccccatggcccattgcaaaggcaggggtcggggtgcata

SEQ ID NO: 813166 - DNA, 544 bp, Homo sapiens
tcccacctcaacctcccaagtagctgggactacaggcacataccaccatacctggctaattttttttcttttttttttttattgtggagacgggaccctccctctgctgcccaggctggtcttaagcttctgggctcaagtgatcctcccgcctcagccccccaaaatgctggaattacaagtgtgacccactgcacctggctgactaaacattttaatgcatctttaaaaaattgtcacttgggaataatggaaccttcttagacccttgtcagagaggactaagtagaaaatgtagtcactaaactggctcaagccataagaatattttttacacaactaaaaaatatggaaaagtaacttttgaaatttttttcccttagagctttttaggggaactctttggtaccctttttctttttaaggtatgacctatgacttaggtcagkcataggacatttttttcagaagcttgaaagatcactgcatcacctgctacccttgagtcctgcacaaattctgttgcagcctgttccagagtagc

SEQ ID NO: 813167 - DNA, 632 bp, Homo sapiens
atttgatttgtgaatatgatatgtagtagtcccaaagaatagaaaatccaacaatctggcaagtacttaacagtgtgtgttattttttactgttgttcctttttttctttttctgttacatatatcccagtcacttttttttttttttttttttttgagatggagtcttgctgttgttgcccaggctgcagtggcacaatctcggatcactgcaacctccacctcctgggttcaagtgattctcctgcctcagcctctcgagtagctgggattacaggtgccaccaccacgcccggctaattttttgtatttttagtagagatggggtttcaccatgttggccaggctggtctcaaattcctgacctcaggtgatctgcctgcttcggcctcccaaagtactgggattacaggcgtgagccacagcacccacccctggtcacgtttttaaagccactttcatatccagtttcaatggctcacacctgtaatcccagctacttaggaggccgagcagtagggattgcttgaggccagaagttcaagaccagcctaagcaacatagcaagactctgactctaaaaatwaaaaaataaaaaataaaaaacctcccttcaaggaaagccttactta

SEQ ID NO: 813168 - DNA, 647 bp, Homo sapiens
gtcactcaaagactttaggctataagaggctgactaaaagcaatccaatctcatgccaaattctattgtataaatctcgctctaaaggccgaaaaaatcagcgctcgacacggactcattgtcaccacccgtcacctaaaatctactcagcgtcggcaaaggagccatgggttctagcaactaacttacctgttgaaattcgaacacccaaacaacttgttaatatctattcgaagcgaatgcagattgaagaaaccttccgagacttgaaaagtcctgcctacggactaggcctacgccatagccgaacgagcagctcagagcgttttgatatcatgctgctaatcgccctgatgcttcaactaacatgttggcttgcgggcgttcatgctcagaaacaaggttgggacaagcacttccaggctaacacagtcagaaatcgaaacgtactctcaacagttcgcttaggcatggaagttttgcggcattctggctacacaataacaagggaagacttactcgtggctgcaaccctactagctcaaaatttattcacacatggttacgctttggggaaattatgaggggatctctcagtgcyaagtccccaaagtccatgatagcattcttagtcaacagcacccact

SEQ ID NO: 813169 - DNA, 560 bp, Homo sapiens
tcttccagtgttttattgtcaaaagcagaggagttcccttgatataaatctaactatcttccttctttaatgtatgtccatttcctcttgttctatcctctgaacatgggcaaaaaatttccaatatcctcctcacaaaaggcttccacttatttgatgacagaaggtaagttatgcctcaattttcttatcctgaacaattccagttcctttaacttttactcagagaagttgctcctcatttctttaatcactatagtttccctttggaatcctgtccaatttctccacataccttattaatagggactaaaagtatggaattatttaaaattgcaagtgatgcatcttttattaacctccatattctaccaaaggaaatgttgtaataaaaatggcaataaagtgctctctgtattgtccaattggtcagaactggtgcactatttatggattacttataggtaattactggtaattataataatagctatgatgcaatgaacgtttcctatgttccaggcactgaataytttgctgtcaaatcctggcaacaactc

SEQ ID NO: 813170 - DNA, 557 bp, Homo sapiens
ctagagcttaccccacacccagagcccagacaagctttgtcccaggctgttgtctgttgttcaggtccatttatcttccgtaaacatcatttactcctccttgagaaytgcctacatcccccacttttctctcctttatgaagaggtcatttaagcttcaaccatctggcccttctttgagcctcatattttgtaggacacccttgtgcttgcacctaataaatgtgtattccttttctctgttaatccgcctattgtcaggttgttttataggctggaattattgaaacttcagggggtgaaagttcattttcttctacagtcacatgtttctgttgttaattccctagtaggacacttgagtttttttcctaattgcatttttccataaggtattgtggtacaggtggcatttggttacataagtaagttctttagtggagatttgtgagaacctggcacacccatcactcgagcagcatacactgcaccatattttttgtcttcttttttttttgagacggagtcttgctgtgtcacccaggctggagtgcaat

SEQ ID NO: 813171 - DNA, 471 bp, Homo sapiens
attaggtttaaaagaaagacaaaaatatgacaatgttctcaaaagttagttttctatatgctgtatttgtacttccattattactgaccatatactaacatgatctaatcagacttaaacagtttttcaagattctgcacagaatatattatttaagtataaatccaacaataaaaatggtttccagatatgctttcacaaaccactggttacctaagaataataaaaaaaaaccaaaaaccagcattaatatagatctaactgtaagaagactgctaaggaattctgtactcagctctaacccgctcaacacagctgtcactatcttgggtgccaatgatacaaaaagccacagcggatggcaaaatgttgagtcmactctgacaagatggactttttcaggaagaaatgtgagtcagttcttgagtacaaacacagaagcaagcatgaaaaacacttaggggtgtcaat

SEQ ID NO: 813172 - DNA, 592 bp, Homo sapiens
aaaaaagatataccattaactttataagtctttcccttattaataaatgtttttcagctttcagggtaaatttagatatgaatgtataaatattgtttgtagccctaaaataacaaatgtacaaaagccattcacttactgaagttctaaatcatatcctttgttttctcaagcttctaaatcctgaattgataccattttctaagcaatcctatcataaaacttatcaacacttgtgacattaatcccataaaacttatcaaagtttgtgatattataataaactagctaattatagtaatagctcctataaagagatgacttagaacatctataagaaaatattctttcaataatttaaaagaaagttaaaatttctactgagcattattattattattattattattattattattattattattattattattttgagatggagtctcactctgctgtccaggctggagtgcagtggcacgatttcagctcactgcaacctccawctcccaggttcaagcaattctcctgcctcagcctcagtaactgggattgcaggagcatgccactgcacccagctaattttcat

SEQ ID NO: 813173 - DNA, 586 bp, Homo sapiens
atcacctgaggttgggagtttgagaccagcctgaccaaaatggagaaaccccatctctactaaaaatacagaattagccgggtgtggtggcgcatgyctgtaatcccagctactcaggaggctgaggcaggagaatcacttgaacccgggaggcagaggttgcagtgagccgagattgtgccattgcactccagcctgggcaacaagagcaaaactctgtctcaaaaaaaaaaaaaaaagtgaattacttaaaacaagatctggcacacagctgaccctcagtggatgctagctgtcatcattaacatgattttacagatgaggaaactgaggctcaaatgggtgacttcattgataaatttcacttagctaagtcagtggtagagctgaattttgcaccctggtctgacagatactttttttttttttaaagagatggggtctcactatgttgcccaggctatagtgcagtggctattcccaggtacaatcacagtgcacagcagcctcaaactcctgggctcaagcaactttcctgcctcaccctcctcagtagctgggactacaggtgtctaccactgcacct

SEQ ID NO: 813174 - DNA, 626 bp, Homo sapiens
ggcacaagcacagcccctttcacaggcacagggaccctgccagggtggccgagtgagggtgagttctcacaacggtggtcagtctcagccctggttctgagatgcccactactcccttgaggtagctctttctggagtccctgttatctggctttgtgcccgacctccaagcccctgagagggagaggcttcaactgattttcctgagaggttcagtagcccctccgcaaatttctggatacaaacaaatgcgtgggctagcaggattgtctgatcctatcagcagaagcttctgggccctgactcctgcccagctcagatgccatctcatctgttgacagtcatctagcttggacgggtgaagaaaagctcccgtcacctcccactctgcaccggctccacgagctctcttgctctttttcaggtagtgctgcctcagggcctttgcccttgctgtttcttctgcctggggccctgttcccagatatctgcacagctggcatcttctcatcctgtaggcctcagcttggatgtcaccttctcagagaggcccactctgcagccstgcccccagatattcactaggacacccccttttcctttcaaggcactggtgacggtcagag

SEQ ID NO: 813175 - DNA, 615 bp, Homo sapiens
ttcttcttgggtgttgagacatctgacttccagagaggccacaagcctctccagggttctttcctgactggatcctaacaagccaagtttgtgctytgatcctcaggggcttcccaggccaggggagcagcgagaagccactgggacttcagagctgccgagggtcaggacagaagcaccaaggcggggcaaacacctggcaggtctgacctgggctcctggtgcggaggaaacctggctggggaatgcagtgagaacggctgcgtgtcctgtggggagacagcaagtgcaatcctcactaagggaacaacgcctggcacacccagaagtagctgtaaaatttcactccagacacttatctgggtttgttcaacatccgttgatcacttttgaaagttactactggctgggcatggtggctcatgccagtaatcttagcactttgggaagccaaggtgggcggatcacttgagcccctgagttcgcgactggtctgggtgacatggcaaaaccccatctcaaaaaaacaaaaaaagaatattactgtgtaaaacatggactgcaaagatatacacccaacctatggtgacagctgcctctgggaagtgggtgaga

SEQ ID NO: 813176 - DNA, 440 bp, Homo sapiens
cctgatatacaacaaactgcacatattgtaagtatacaattgccaagttttgacatatgtatgtacccaaaggtttccttgtggtccgctcttgttctttagcaatcactgacctgttttctttcactgtagattagtttggattttctagaattttatataaatgtaatcatacagcatgcacgctttttaattcagcttctttcactcagcatatttattttcgtttcatccacattgttgcgtgtatgaagctcgtttcctctggttgctatgtggtattccattgtatgattatactagtttatctgttaatggacatttggctgtytccagttttggggtgttacaaataaagctgccgtgagcatttttgtgcaggtcttcatagtgacgtgtatcttcatttctcttgcttaaatacctaggagtggaatggt

SEQ ID NO: 813177 - DNA, 636 bp, Homo sapiens
gagggtcaccagccctggggactggtgtcgggaagaggtagcttgcatctgtgactgccagacccctccaaatgtgaggtcacatgggcccatgrgtgtgaggagaggagccgggtggtgaaggtgtcggcaggcatggtgctgtgggacaggaactgtcacctctgctccgacatgagatcacaggtctatctatcctgttcaagttgggttttaaaataaaattgctccttgttctgactgcagctgtcatttcttttgttatttctgaggccgtttgttagtaagaggaataatttagagcttggaggtggacttcgtcttggctagttgctaggcacccactttctcaaggcacggggccctagatgcaaaaaggatccccagcagtaagacctggggctgtctcacttggtggcagcatgtgcctcccctcccacccttcattctcccaggcgtatagacagcagagtgccagtgtggcatttccacagacgaaccaactgctgtaagcctctgaaacaggaatgttacatatatggctctcatgccacctggccctattcacctgtccatggcagacgtggccaatcaatcacagactttctcatcgaactcagatgcattctcagaatc

SEQ ID NO: 813178 - DNA, 598 bp, Homo sapiens
tccaatgggatggctacacttggatgcctcacgagcatcttctatctaaagctggacctattcttgacccagggccccagacttagcactattcctctcctcttctgctttttcccatctccgtctctgtaaatattcacacagttggccaagcccgaaaactggggtcggtccttgaacctctttctcctttcctcccacatcttattcatcagtaagccctgttgtcgctctctgtccacttttctttaattccactgccacctctcacctggaggctgacaatctcctgctgtggtctcacaccatcatccatcactttcatagcagccaattgatcttttagatgtgcaaaatgatcttgtcacatcggcttaaaaaactgtaatggcttcctttgcacttggagtgaaacctaaactcctgaaggcccttgaggttttccctaggtcttgtgaagtcccccaaggtcccaaaagttcctgccttgcttcccactgttccatcagcccctcctctttgtgcaccacactcctgtctctctggtcytcttccagatctttgaaatgaacaatgtcttcgctgcactgagattttt

SEQ ID NO: 813179 - DNA, 628 bp, Homo sapiens
ttggaagactatctaaaagacgtctcaatttagcaactgcagggacagacatatccaacatttcaaccaactagaagggggaaaaaaagtcttttaaatgaaatctggcattatttgtgaatttttaaaaatcagatttccatctaggtttaatgtttgggcctcagtctttgtttttgaaagatcactgattaatatagtccacgtattttacaggcctcagaggaaaagaaaagtactttcaaaacatcaatcagaatgaaaagcaataatggcttaaaagtagttaacactaatgtttacaagggttttgtaaacctgtgccatgattatttttaactttctattgaaaaaaattcaaatgtacaaaaaagttgcaagaatcatacaataactcctgtacatccttcttccagattcaccaattgaattcaccaactgaaaagtggcattttgccatgtttgctttctctctctccacactcacacataattaatgaacatttgaggataagctgcagaatygagatccttattctttaaatctctaatcctgtgacagattaaggacccttgttcttaagaacaagaatattctcttacataatcacaatataaaccctattag

SEQ ID NO: 813180 - DNA, 634 bp, Homo sapiens
aagacatcaggaaaggtaatatctctgtgtttctctttcacttacttgggtgatcaaccttggggggtgtgattatttctagcaataattatgtagctggtggacaaaaaagatggagctggaagtgcaaggcctgggttcaagcccctgttctgccactgacttggacaaatcccttcccttcctttcctttcccttccccaaatctgtgtctccaccacaataggttgaaggggtataagtggatcagagttcctcatattttcctgccaaaacctccctaatagcagagaccagggactgggatactgccaagggcctcacgacaaagtctagagatactatcaacatgcccttgataaatcttgaatcttgacctaaatcttcatgcaaatgttgcatcctactctggaatatgaccataaaatcaataaatcccccctctgaatttttgagaaaaaaggatgctctagaagatattcagatgtatgctggattttgtgtttcctyggatacagaaataagtgcccccagggttccaggtgccttggagagaagagcataggtttagatgacccatgagggccagtccggagttggcattctgaacttgggtgacactgtcctcctatag

SEQ ID NO: 813181 - DNA, 625 bp, Homo sapiens
ggtacagactttgtggaaggcaatttggaaatatttatcagatttttcgagtgaataccctttgacccaacaatttcacttctaggaatccagccaaagaaacactcaaacargaacacaaaggttataaatgaggatactccctgcatcatcatttaaaacagcaaaaaactggaagcaactaaatgttcaccaatggaagactgtaaataaagtctggtgcaacgattctgtagacctccttatggctattaacatggaacagatttatatactctaggtgctatctcctagactaatggttcctaaccctggctgcacattccaattacccccatcctcagagattctggattatttcatctatggtggagcccaggtaatgttattttttaagtgcctaggatgatactgatgtgcaactaaccaagattggaaacttaactcatgtagctaaccctactagttctatcctatttcatagaaaactgagaaactaggaaaacatagaaaactaggaaactgaggcccatagaaggaactgtcttgcccaaagtcagagtatgtttcctccaaccccctcccctccccaaggagagaaatgaaggaatcttgactcagacct

SEQ ID NO: 813182 - DNA, 484 bp, Homo sapiens
ctgcttgggccacactgtttaacttgcagctcccctctactttatccctctccatcccagttagtttctctccaaagcacttaacaccttctaatatagtgtataatgttcttatgtattgtgtttactgtctttgtctctattgtttaaatgttggctctagaagggatttttgtttgttttgttcatttctgtttgcccggtgcttggcacatagtaggtactcaacaaatattgcttggttggatgaatggatggatgattggatgcatggatggttggatggatggatagttggatgggtggatggatgaacgggtgggtggatggatgattggtggatggatggattggtggctgcatggctggctggctggctggctggatggatgkatggatggatggcaggatgggtgaatagttggatgggtggatggatggttgatggatgaatgaatgggtggaagcatggatggatggaggg

SEQ ID NO: 813183 - DNA, 385 bp, Homo sapiens
actgatgcagagcccatggatatggagggctgactgtactgtattgagcttctaaggtatgcagagtattggcactgaggggatgtgcaaatacaacaacaaaccaagcatagtctttgtttactaggagctggtagtaactgtgggaagacacaaaacagtaaaatcactttgtaaggtttatgagagttttgagaggccagggaagttaaagagtggagaaatggagaaaatgggagaacttgtactgaayccattaggacagaggaggaagggaagagaaggaaggaggccaaagaaagaagaaacccttcttagagcactcagggtcttactgaaaactttacccataaaaagagaatgtcactgatagactccttttaga

SEQ ID NO: 813184 - DNA, 587 bp, Homo sapiens
ccacacacttcctctcggcagaagtgttctgttggccaggcaaagtggctcatgcctgcaatcccaacagtttgggaggccaaggcgggaggattgcttaaagccaggagctggagaccagcctgggcaacatagcaacaccccatctctaaaagaaaaaaaaaaaattagctgttcatggtggtacagcagccgtagtcccagctactctaaggccagaagatcacttgagcgcaggaattcaaggctacagtgagctatgattgtgccactgcattctagccagggtaacagagtgagaaaaagaaaagaaaagaagaaagaaagagttgtacgtttcctgccaagagtcaagagcaaattttacctgcctggctacctttttaggggaaatcccatggaccaagttaccccacaggctgacttcatgaggacaaatcagtcttggtgactaagcacccctttcctgagaactctgtgatgcacaccaggagtgcctcaccctctgsgacggtgtgaagatcggcaacctgatttcatcacattcatactggctgacgaaaccccgctcccatgccaggtccagc

SEQ ID NO: 813185 - DNA, 576 bp, Homo sapiens
aaaataagcaaatcaaaatagaagctacctatcaaaattgtgagacacccttattacacactggtacatgatagtttttaatttacttaaagacagggtctcactgtcgtccaggctagactgcagtggtatgatcacagctcactgcagcctcaaattcctgggctcaagcaatcctcctgcctcagcctcccaagcagctgggactacaggtgtgcaccacctgcctggctaatttttacatttttttgtagagatggggtcttgctaatgttgcccaggctggtctcaaactcctggactcaagagatcctcctgcctcagcttcccaaaatgctgggattagaggcatgagccaccatgcccagtctcccatcatctacttttaaaaacacaataggttcatatgtccatagtccacaaattaatctatgactctatatttacaaataacrtatatagcatatcacttgataaataacagtagtttataaaaccaatatccgctgagccatttttggtcaataacaaacaaccactgtacttcactgaatctaagatgcatcagttataaga

SEQ ID NO: 813186 - DNA, 589 bp, Homo sapiens
aaaaaaatcagaatacatgaatcaaagcaagaatttctaagcacccagacactcttaacactcttgggaattgtttaatgtattttttgaaactaggaggtctcagaattgaactttttttaatttaaaaaaaaaattaactgctgacatcctctaagggaggaggcaaaagaatggaaaatctggtgaagtgataagcagtttttaaagaggtttacaaccagtttttaaacagtaatccctccgggaaatgaaaattcctctcctaatccctttgagggcaatatatttgaatcaggaacaagaacatcttgcttctaagtataaatatgaaccttttagagtatcttctgcattaaatagcaagtagaggagaggacaatttctaatttatcaaaaaaaaaataagcatcttggacttatatcttttgctagacacatgcaaagaggcttcagtaaaatgcaattaaggaacttcaaggttttcgttgacagtgattacytaactggagcttactcctgtgaaatgaaactaccagaaaccctcaacatcaatttgcttgtcactaaaccacaggtttacgcgtag

SEQ ID NO: 813187 - DNA, 652 bp, Homo sapiens
acaggggcctggcagcaggaggaccagtcaggaggctgccgaaggacgatgaaggctgagttggaaggaggcaatcatgtcctctcatgcttacctgtgttcgtgatgtctcgggaagcgtaaattgatggtgtttcaaagaaatcaaaatgtggatagaaccacttttcccctcatatgagcaaactgtgggtgcaaaccactgtgttaagtgctgggacaaataacagaaatgggaaggccaccctgaacttgagttgctcacagatttttttttttttttttgagacagttttgcttttgttgcccaaactgcagtgcaatggtgtgatctcggctcactgcaacctcctcctcccaggttcgagcaattctcctgccttagcctcccaagtagctgggattacaggcatgtgtcaccacacccggccaacttggcatttttagtagagatggggtttctccatgttggtcaggctggtctcaaactcccgacctcaggtgtctgcccgccttggcmtcccaaagtgctgggattacaggggtaagccactgcgcccagcctagatctttttattttattactattggtttattttgagacgagatctcactatgctgtctggtctcaagcgatcttcccacctcggcc

SEQ ID NO: 813188 - DNA, 652 bp, Homo sapiens
acaggggcctggcagcaggaggaccagtcaggaggctgccgaaggacgatgaaggctgagttggaaggaggcaatcatgtcctctcatgcttacctgtgttcgtgatgtctcgggaagcgtaaattgatggtgtttcaaagaaatcaaaatgtggatagaaccacttttcccctcatatgagcaaactgtgggtgcaaaccactgtgttaagtgctgggacaaataacagaaatgggaaggccaccctgaacttgagttgctcacagatttttttttttttttttgagacagttttgcttttgttgcccaaactgcagtgcaatggtgtgatctcggctcactgcaacctcctcctcccaggttcgagcaattctcctgccttagcctcccaagtagctgggattacaggcatgtgtcaccacacccggccaacttggcatttttagtagagatggggtttctccatgttggtcaggctggtctcaaactcccgacctcaggtgtctgcccgccttggcctcccaaagtgctgggattacaggggtaagccactgcgcccagcctagatmtttttattttattactattggtttattttgagacgagatctcactatgctgtctggtctcaagcgatcttcccacctcggcc

SEQ ID NO: 813189 - DNA, 577 bp, Homo sapiens
aatattaattaaaaagaaaaaataaataaaaatttcttacctccattgttacctgaaaatttgataaatcctgattttgatgtagcatggaagataatgcaaaaacaaaaatacataatcactaatattaatagttacttatttaaaaactgaagtgatattagcccattgatcagttaaaaataaataaaacaagtacaaaaatagagtaacctttagaggaatcagggcttgccttgacataattaaaaccagatgggaatgcaagcagctaaagcaatatacaaagaacaaagtttggaggcatctatctgacttcaaaagattctacgaggccataataaacgaaacagcatgatattggcataaaaacagacacacagaccaactgaacagaatagagaattcagaagtaaatccacatatttacagccaactgatttttttttctgtgtgaattcygccacaaacagccaactgatttttgacaaaggtgacaacaacatacactggtgaaaggacactctcaataaacggtgctgggaaatctagatatccctatgcagaagaatgaatc

SEQ ID NO: 813190 - DNA, 636 bp, Homo sapiens; identical to SEQ ID NO: 813177

SEQ ID NO: 813191 - DNA, 587 bp, Homo sapiens
tggctacttcaataaaagcagaatcaaagatcctccgacagcccgtctgcagggaactccttcatgtgaatcttacccatgaatggaattcgctttttgaatttaacargtgacaataccagacttctttttcaaccctaataacctgtgaccaatttccctgaactgacacaactgccctccaaagacccacttttcttgctgagctgctaaaagcaaaacaaaccccgaaaacaaaaaccaaagcctccctaatctgcgttctttctacaggcaaccgagtgcagccgctggctacacagaggacaagaagcaaaagaagctgccacagagaaggtgtgaaaggtgcaggaaacctctccaaagaccaggacatttggctgggcacagaagccctcattaggagcacgtcttccacactgagaaaaacagcaggtgtgccggcggtgcttgggcactgagcagacatctctagcccgacgattactccaatggaccctttctcatggagcccacactcttatgaagacctcagtcagaaccgcagaggccgcgctgccctgaggcctggtgttggagctgtcctg

SEQ ID NO: 813192 - DNA, 540 bp, Homo sapiens
ccacagaaatgaccatgttacaatagcagccaacaccttcctggtggttggtgagcaatgacaggggaaagaaagcaaaaaacaaaacctggagccccagccctctgctgaaaggtgtgttcctttaagaagaacacacaagaggcactcatgcagctgtgagggtctttaagcgggttccccaattcacacctgtcctgtgagagcagtacgggagagggtgtgcggcgtggtgcgaacgccagaggcaggccatttgggattaaaacccaccattcctgactccctagatgtgactttgggcaacttacctccacctctctgggcctcagtttctcatccataaaatcacattaacaacgatgcaaatgtcaaagggcttttgtgaggtttaaacaataaaagaaagaggtgctttacttagggttaygtaaagtactccataaatgttaattaccatgattatccattaaagaggcaccagcagaagtgtccagtaccactggtcctgtagaatctacatccttcatctctccaagg

SEQ ID NO: 813193 - DNA, 603 bp, Homo sapiens
ccatggtggtacctttagtcccagctcttggagaggctgagactrgaggattgctttagcctaagaggttgaggcaaaaaagagagagaaagagaggtcagaattaccacccacctacccacattgaagccgtatcctactttggggtaatattctaaaattgcagtaatgggccaggcacggtggctcatgcctataatcctagcactctgggaggccaaggtgggaggactgcttgagctcaggagtttgagaccagcctgagcaacacagtgagactttgtctctacaaaaaatacaaaaaacaaaacaaaacaaaaaacccacaaaaattagccaggtgtggtggcatatgcctgtagtcccagctatttgggaggctgaggccagaggctcacttgagcccaggagatcgaggctgcagtgagctatcatcatgccgctgcactccagcctgggtgacagagggaaaccttgtctcaaaaataaaataaaatcgcagtgatggatacacaagtccgcagatacactaaaaaccactgctgtgtacggtttacatgggtgaattctatgtgaattataactaaataaatctgttaaaaa

SEQ ID NO: 813194 - DNA, 630 bp, Homo sapiens
tccgatatatggtggggagaagagggaggcgttggtgagcaagcacccgtgggcagaccctgcccctccgacctctcccagggcccggggaagctctctccttggttgcctttgcctgccttttggcaaacccttgaaattgctgtttgcttgggatggagcggggagggcgagccaggtcctgtaactggggtgtgacttctcacctgctccctccaaggccttaggaaagagattcaggaaggacgccgcctcctaccgaagcctctatggagtggagcaaaaggggaaacacctcagcatggtccctggcagctacatcaaggatggccccaagaaatctggtaagggaaaaaccttggccccggccaccagaatcctgctccataatctcctcctctagaagaaaccgaaagctcacgccattcttagagcagtagcgtccacgtcaatccaaccattgtgcacacaggagtcagaagcccacatggaggctcagtagggaccactcctggggtcgctcttggcaagcrgggtgtgacatgaacaggaggcaagtgtctgtcaaggccctgccccatctcgagtgttcccttctcaggaaaccagcctcatgtgtccaggttcctg

SEQ ID NO: 813195 - DNA, 506 bp, Homo sapiens
gtgcatccctttagaaagtaagcaatcagaaaacaagcctcggctgtgtgatcattgtgcttccgtaagactggtccttgacatccgagtcagaaccagcataggagaaactggtttttctcctgaccaaaagaagagtccttagaaagggcttcttaggaaggaaggcttaggagtaaaaaaaaaaaaaaaaaaagtgggaggggtccagggtcctcagagggacattagaaagcacgaagtgtaaaggggctggttgagaacacacacacatgccccacgcccatggcacgacttggctttgtggggacttggcttccttgtgtgcagagtgggggactgattggggcagtgagagagggaaatgctatcaacatatggaggcaaggaaggagacctttgtrtgcttacaaccacagaccccaaaaggggacctgaaacctttcagagctggtaggtgcctcaacatcagcaagtccaggaccttattcatttgaataaaagaa

SEQ ID NO: 813196 - DNA, 569 bp, Homo sapiens
tggatgacaaggcctcctccacattgatcactttggccagagccgtggaaggcatctaagaattagagtagggagatgatcttggaactgctaatctagtgctcctcctgggatgccacacagccctagccatgcctaactctgctcttactgtgacaccagggagcagcatcacctgctgttcaatcacaaaccactgtatgcttaggaaaacattgttttccacggggtcaggcaggagttcttttatttgtcctcaacagtcctctttccagcccccacgggaaaggcacagacactggctgcttcatgtccaaggcataaaactggctgcttttatgctgtcagccttccaagcccctgtagggttggcccccacgggctgagtctcccctgtaacttagcccagatgatagacaaccagtgattaatagctcaggttctagagtcaagtcttgattctaccaagaaaagttatttcacctccagaaagcttagcttctccatgttcaaaatggkgataataaaaatacctaatttatagcatcatcaggagaattcagtaaggt

SEQ ID NO: 813197 - DNA, 574 bp, Homo sapiens
cttttttccctctcctttacatcagtgaaccagcatcttgcccttcagaccctacagcacactcttgggctcatgaagtgtatgacacatcctccttgggggatcggccatgtcctcgctctcakgaccacatgaattcttctgtatgtcttttctcacagctgagtactctcttcctgacccccttgtggaatggggaaaggaggctgtgacattgtgcttgtgcaaacaataattgagagctttccgagtctcctgcatcttcataaatgattttttgttttatgctgggacagtagttctttaaatagaatattctcccatggaaatcgcccacaatgctgagagtacaccttgcaaaaggtaagtctagaatatagggtgcctcctcagcattgcccagaagctgaagttaggactctctagaataccaaaaacaaatttatagcagttcattaatgtaaggaattatgaaaactgtgtgccaccattatccatagatgaaacaagagccaccacgcaagcacagacacaaagccctgaagatgaagccattgacagggctctcatttat

SEQ ID NO: 813198 - DNA, 554 bp, Homo sapiens
gcagccccgtgtaatagaaatcgcttattatgagggttggctaaataaaggcacattgkgaccagtcacaatttctaaatgaatcctcctgactgatctggtcctgacactttcaaagctgccgttattactgaacctgaacatgtggaaaggacaagtcaagacagaatgataaaattcttgaatgcttttgcttaaaattattcattctcttgtgtgtgtgtaaatggggacacacacacacacatacacacactccatagacactctcgcatacttaaacggttccctaggtgcacttttatcattttatctcatctcactttggtagtttccattgtagtccttctgtagactaattctctaaatatttagaaaaataagagggtcttttatctgtgtgtagtcgtggattttgctgcctcttaaagcattatcttttctaagtccttaagtgttagaagtgggaaaaccatctttcttttaaatttagcaaatggcacttatgtgcatatgtactgatgccatatacacacttacactgtaatagaaac

SEQ ID NO: 813199 - DNA, 521 bp, Homo sapiens
gccaggaggctgggtccagatggcggcagcagggtctatttctggctattcgtaaccccaggccagggttttagatgggttttaraacatttagatgaatgagttgtgtgctcctggtcagcggcacttgctgtatcgtgtgcccttcacaaataaacctagctagcagatgtagcgtgggccctgcccgtgggggcccattgacattttgctaattactcaaagaggaggcctggagcctgaacgatggacgtctgatggctcatctcatccagggattgcctcgtgcctgttacgagtctgtccccagctgccatcctgccagctctgccttctttttggagaagattagatgattctcatgtaccgagcatgcccagtacagggcagggcctgggtgagtgctcaggttggtgcagtttgtacctgaatgatgactgtggagggctttgtcgtgagcctggccactgggaggggaggatgcaaagataagttctgtcctccacagtcaaagatctcag

SEQ ID NO: 813200 - DNA, 549 bp, Homo sapiens
agcagatgggcttcatccaggcctcaactgtcagcctggacgaccccagatcacacgggcgtgggccgtggtcagccgggagcgtccacgtggtcagccagcctgatgtgttcggtgactcagccaaagcttaaaacacggaagccgggtagcgctgggcggctgcgtgtcagagaatgagtgtttcccgatggaacggcgggatagaaatggccgcagactctccctgcttccaaccaatttcgctttgcggtgctcacctgtaagcgactgtccaaaagtccacagatgcgcagggctctgggtgagacctctgccagggtggcgtctgctgcagtcctttgctgttaatatagttgtgtgcctcacaccactgcttctagtgtcttccgtgtggattggtaggcaccattagtatcrtaatcattcttttaaaaccaaacaatacttgtgtgcaccctcagttggctgctgctgtaaatgttctccgtaacccaacctgctggtcgagaaggatcctcgttcggccacttctgaattgcaagctac

SEQ ID NO: 813201 - DNA, 639 bp, Homo sapiens
caggcaccactgccagggattctgagacaggaggtctgggatgccccagaacttgcgtatcaaacaaactctcagggatggccagtgccacgggtctccaggctgggaacayggatcccagtccaggctagctgcctctgtagccctcgggagcccattagaaatgcagaccctccccctgcccagatccactgcacgagaatctacatgtctatgagattccgggggcacctgtctgtggagtttgaggagcacagccttagatgctagtccccggtgtgggcaccatgcaccactccttctgcatttgtgtcactacctgcttctgcacgtaggaggcacctcaaatgccatttagaatggatgctcagtaagccaaatgtggcctcctttttcccttttggaaaggaaggtccttctttctcaaaccttgtgtctagaatgttccccaatgaggggaggatgtctcactaaaaacactgaaaggacattgcttatacactggccttctgtagagagcctctggagcctcgaggaagtgtagctcctaacgcagtcggctgcactgactcaattatacatctattggaccttcccaagtgcagagctgccactgtcacttctgatcgtaacaaccca

SEQ ID NO: 813202 - DNA, 639 bp, Homo sapiens
caggcaccactgccagggattctgagacaggaggtctgggatgccccagaacttgcgtatcaaacaaactctcagggatggccagtgccacgggtctccaggctgggaacatggatcccagtccaggctagctgcctctgtagccctcgggagcccattagaaatgcagaccctccccctgcccagatccactgcacgagaatctacatgtctatgagattccgggggcacctgtctgtggagtttgaggagcacagccttagatgctagtccccggtgtgggcaccatgcaccactccttctgcatttgtgtcactacctgcttctgcacgtaggaggcacctcaaatgccatttagaatggatgctcagtaagccaaatgtggcctcctttttcccttttggaaaggaaggtccttctttctcaaaccttgtgtctagaatgttccccaatgaggggaggatgtctcactaaaaacactgaaaggacattgcttatacactggccttctgtagagagcctctggagcctcgaggaagtgtagctcctaacgcagtcggctgcactgactcaattatacatctrttggaccttcccaagtgcagagctgccactgtcacttctgatcgtaacaaccca

SEQ ID NO: 813203 - DNA, 636 bp, Homo sapiens
ccaactctacacaaaatttaaaaattagctgagtgtagtggcgtgtgcctgtaatcccagctacgcaggaggctgaggcaagcrgatggcttgaacccaggacttccgagaccagcctgagcaacacagtgagacactgtctctacaaaaaataagccaggcgtggtgacatgcacttgtagtcccagctactcaggaggctgaggcaggagaatcgcttgaacccgagaggtggaggttgcagtgagccgagatcatgccactgcactccagcctgggtgacaagagtgagacttggtctcaataaatgaatgaatgaatgaatgaatgaatgaaccatacaggtagaattaccctataacccagcaattgcattcctaggtatacacccaagggaactgaaaacatatgtccacacagaagcctgtaaacaaatgttctccgcggcattattcacaatagccaaaaggtagaaaccacagacgttcatcgagggatgagtggattaaccaatcgtggtctatccacacaacggagtatgattcacccacaaaaaggaatgaaccactggtccatgctaccatgtggatgaactttgaaaatgtgatgctcagcaaaagacgccagatgcaaaga

SEQ ID NO: 813204 - DNA, 621 bp, Homo sapiens
aataagaaaattatccagccatggtggtacctttagtcccagctcttggagaggctgagactrgaggattgctttagcctaagaggttgaggcaaaaaagagagagaaagagaggtcagaattaccacccacctacccacattgaagccgtatcctactttggggtaatattctaaaattgcagtaatgggccaggcacggtggctcatgcctataatcctagcactctgggaggccaaggtgggaggactgcttgagctcaggagtttgagaccagcctgagcaacacagtgagactttgtctctacaaaaaatacaaaaaacaaaacaaaacaaaaaacccacaaaaattagccaggtgtggtggcatatgcctgtagtcccagctatttgggaggctgaggccagaggctcacttgagcccaggagatcgaggctgcagtgagctatcatcatgccgctgcactccagcctgggtgacagagggaaaccttgtctcaaaaataaaataaaatcgcagtgatggatacacaagtccgcagatacactaaaaaccactgctgtgtacggtttacatgggtgaattctatgtgaattataactaaataaatctgttaaaaa

SEQ ID NO: 813205 - DNA, 613 bp, Homo sapiens
ttccaattatacgtatgttggactattttatataatctacaagatccttgaggttctgttcattttcttawttttttctctgatattcactttaaataattttattggtctatcctcatgttcacttgcccttttctctgtcattgctactttgtttttgtaggggaagaaaaatatatatttttttctcgaccctcataaattttcagttacagacttctgtaaaaaaagacactttaacaacagaaaaacggaagtttattaacatggatatttcatatatacatgagagatacccagagaatgagtaattctcaaagaggtggctttgaatttcagcttatatagcatcgtcaacaaagaagagtaaatttttagaggaatgacaagaaaatgaaaagagttttgaatctctagggccattaaattgtgagaaggcatataaattatataaatatagatttctttggtgttatctccaggtctacaagggtctaaagttaacttttgttctccctggcagagaaaggaggtgggatatcttttggttttattaatttgtgttcagcttttaggcaaatgaggggtaaacacaagagttttcctgcatctg

SEQ ID NO: 813206 - DNA, 613 bp, Homo sapiens
ttccaattatacgtatgttggactattttatataatctacaagatccttgaggttctgttcattttcttatttttttctctgatattcactttaaataattttattggtctatcctcatgttcacttgcccttttctctgtcattgctactttgtttttgtaggggaagaaaaatatatatttttttctcgaccctcataaattttcagttacagacttctgtaaaaaaagacactttaacaacagaaaaacggaagtttattaacatggatatttcatatatacatgagagatacccagagaatgagtaattctcaaagaggtggctttgaatttcagcttatatagcatcgtcaacaaagaagagtaaatttttagaggaatgacaagaaaatgaaaagagttttgaatctctagggccattaaattgtgagaaggcatataaattatataaatatagatttctttggtgttatctccaggtctacaagggtctaaagttaacttttgttctccctggcagagaarggaggtgggatatcttttggttttattaatttgtgttcagcttttaggcaaatgaggggtaaacacaagagttttcctgcatctg

SEQ ID NO: 813207 - DNA, 605 bp, Homo sapiens
ttgttttttgtttttttttcttttagcagtttaccaccttatggccccctaggtttctgatgagaaatctgttgataatcttattaaggttcccttttatgtgataagktgtttttcttttgctgctttcaaatttctcgttgtctttttgtttgttttttgagacagagtctcagtctgtcacccaggctagagtgcagtagtgcaatctcagctcactgcaacctctgcatcccaggctcagatgatcctcctgccttagcctcccaagtagctgggactacaggcatctgccaccacgcctggctaatttttatatttttttgtagagatggggttttgccatgttgcccaggctggtgtcaaactcctgacctcaagtgatctgcccaccttggcctcccaaagtgctgggattacaggcgtgagccagtgtgcctggccctttctaaaggttgattataatgtgtcctggtgtgggtctctgaatcctgttttgagtttgttgagcttcttggatgtttgtattcatctctttcatcaaatttgggatgtttttggccattgtttcttcagatgttttctctccctttctctttctgttt

SEQ ID NO: 813208 - DNA, 586 bp, Homo sapiens
ccgattagatcaaaatctttgaagggtgatagggttagggcggtgggatgttgggtattggtatttatgaaggtgctctaggtgattctagtatgtaaccaggggagaaccagtgttttggagcattcatttaaaaataaactgactttggcgggcgacatggctcatgcctgtaatcccagcactttcggaggccaaggcaggtggattgtttgagcccaggagttcaagaccagcctgggcaacatggtgaaaccccatctctacaaaaaagaccaagaaaaaaaacaaacaggcatggtggtgcgtgcctgtagtcccagctacttgggaggtgagaagatggtttgagctcaggaggcagaggttgcggtgagccgagatctccactccagtctgggctacagagcaagaccctgtctcaaaaaataaaataaacagtttaaaattctgtttgaagaactttgggattcactttgaatagtcagtaattacccaggattattgcaaaacagagaccagcactcacagtactgagcaatacctcagcagcgygctcgggcagaggaggtgagtgcagttttgg

SEQ ID NO: 813209 - DNA, 573 bp, Homo sapiens
tttgcttgtaagatggataatagataaagctaggttgaactaaacaggggaatggctctgagttctgaactcccagatcgttccaagcagactttttccccatgtcatcatagtcagtttccagggatgagtgggacagtcaagtttttataactgctttcctttagtattataatctttttcattcttctcaaatcaaaattctgaattttctagtacagcttgctttttcgtgagtctgctttttttaaaaaatggattattttctgcagctatctcacataggagaaaaaggtaaagttttataaaaataactatatatcaccttctcccatctctcccacaggcctgatactgtgtaaaatatgtcatgggcagaaaatatatattctgaatatatatgattttcttttgtcttacttttggctacttctctgaagttgtaaacaaaaggacatgctgatccagtgtttaggacctgmtaaaaggttgtgaaactctttgtgactctaagcccatctcccacctccagcctatagataagatgaggaatgttggggataagaatcactt

SEQ ID NO: 813210 - DNA, 616 bp, Homo sapiens
ttcatttttaatggggtaatatgaattcatcaacatggacagattcatacacagaattacaaacacaacttgcacacatcctgtagatataaacagtcctttgcatactatrtccggggttggtgccacgttgcccctaggtgtccatcaacctgctcaggggccggcaacgccccctggtggctgccacaagaacagtttaattctaatttcacttcattaccttcacactcgccctaaaaagatttatgcacatgccaagttcccttttttccgttcccattggcaaggaacttcatcccatacatgctcttttatatgtgcattacaaaagtaacaacactccagaagtattagaaaacaaattcagctgtaatttctatcatcgtatcctaacaacaattatttacacaatactctgtgcttcacgctcctgtttgagaggatgtttgacccatcaggcttccctggcacatgaacaaaactcagacacagcctcagctagggggcaaagcagtgtcaacacgcaggcaccctgggcagtatcattccccgaagcccctcatacttaatgcagtcaagagagaaccctagattccactccacctagattcca

SEQ ID NO: 813211 - DNA, 560 bp, Homo sapiens
gagacagagcaagtaccataaccagattsaaatatggcaagaatattgcaataaacagacaagaatttaaagcaactatgattcatatgctaaggatgctaacgggaaaaaacagacaacatggaagaatagactgataatgtaagcaaggggaaaaatcaaagagaaatgctggagaccaaaaacactataacataaatgaagaatgcctttgatgggtttattagtatactgttcatggttgaggaatctgagcttgggaatatgtcaatagaaacttccaaagctgaaaagcagattttttaaaaagactgaaaaaaagggaacagaatatctaagaactgcgttcagttcagcagcacatatactaacactggaacaattcacagatcagcatggcccctgcacaaggatgacatgcaaattcgtgaagcgttagtatttttataatatatatttttaaaaacaataagaactgtgggacaattattatacaaaaggtacaacatacacataatgagaatacagaaagagaaaatatttgaagccgtaatgacaga

SEQ ID NO: 813212 - DNA, 600 bp, Homo sapiens
ctgacattaggaccctaaagtagaaagacatgtagtccagccaaatsaaattgaacctgtaattctgtaaaagggcatacttttctaagtttggtgctatctagatactaaaattttgattcagatactcacaagagactactatggtccatgtgttagatatatctatatctccaaaacatgttttaatcaggactttataaagataacaagtaaatggatttgtttggaaagactaagcccatgctctagggtgcgaaccatttacagcttactctcacagaggttcatgtataataaactataatgtgatactttctgtgtaacatcatttattatttctctggcagcagcagctggaaattactgctcagacacttcatgctctgtgatccaagggctaccatggcacagtgctgaaagtatttaatttggtgtcctgaggttagcttttcacctactttccagtttagtgacagagacacctgttgtaaacccagtctaagctaataaaagccaatgaactctggccaaagtacaagttttgtcagtgaaatttgaaggcactgctgtggcacttttccttcatttcactcaccc

SEQ ID NO: 813213 - DNA, 600 bp, Homo sapiens
cttgtgactgctgaggccacagactttgtttgtatgataaaagtcttactttgtaattaaaacattcctcaaatgtttatcttaggaaataattctggaataagaagctaagattatttttctagttttctttttttttcttccttgagatggagtcttgctctgttgcccaggctggagtgtaatggtacaatcttagcttactgccacctctacctcctgggctcaggtgactctcccacctcagcctcccaagtagctgaatttacaggcacttgccatcatgcccagctaatttttgtatttttgtagagacggggtttccccatgttggccagactggtcttaaactcctgacctcaagtgatctgcccacctcagcctcccaaagtgccgggattacaggtgtgagccaccgcacctggcctatttttctagttttctaatgaggggttagaaatacaacattttcacatagatatctattgggaatgatgcttgcgaaattgaartaaggagaaaatgggtcttgtgatctttggaaaggtaaggtaccactgtcattgggaactttaaatttggaatgctaggcccaagtgg

SEQ ID NO: 813214 - DNA, 533 bp, Homo sapiens
cactgcactccatcctgggtgacagagcgagactccatctccaaaaaaaaaaaaaaaaaaaaaaaaaaaagatgtaaaagaacawtaagtggaaaggtgacccatgaacctaaatggaaagattccatagtatacaattattaaattattcttttataactataaattcaataacatgccattcaatatcttaaaaggatttttatggagcttgacaacttcaaattcatttgaaaaagaaagcataagagaatagccaggaattttttggggaatgatgaactatgaggggaacttgtcctgttgggaaccaaaatattaaggctatagtaattaaaataattgttagaaataccgaatgcatgcggggcttaaaacctagatgacgggttaattggtgcagcaaaccaccatggcacatgtttacctatgtaacaaacctgcacattcggcacatgtatcccagaacttaaagtaaaataaaaaataataattgttattggcataggaaataactcactagtacagaatgg

SEQ ID NO: 813215 - DNA, 610 bp, Homo sapiens
gcttctgtttccaaatccatgtatctttcaaggttgccttccctgcccaactgctcagacttgtgagtcacgcatgcaccctgggagagtactcaacattcctatatgtcattgaattcttgtaactctttacatatttatttgatattcttgtaactggatgacatctcccttaccagcagggactgtgtcatatttcaggggctcttgagaaactcagcacctgctgcttgatagatgtgtgccctccctgcccacccacgccctatatcgatctgaaacaccccagggccagggccttgagttgaggaagaaaccacagggtagaggttataaactggatgagagctcaagcagacccttgtttccagccagctctgcccctagcaggctgtgagactgaggttcagccacttcacctttctgagtctcaaatttcccttctgcaaagtggggcatagaatacctacttctcaggacatcgggagacagcgcacaccaaagtgtctggcacatrgcagatgttagatgaatgagcagatattgaacctcagagtcctggggttgatcccagcttcaccccttcctggctgggtgatgtcaggcacac

SEQ ID NO: 813216 - DNA, 566 bp, Homo sapiens
gccacagggatcctttgtccccaacaggctctctcctcctgcccaaccctcccctcaccataatcattgtgctttgcactcaggatggkagagggattagggaggggtgggggagcactggctggggagtccagaaacccccaaacatcacattccctctccaagcctcagttcccccgtctgtaaaaggggaagataatttctgccatgcctcctccatattggagaccacagtgggcagcttagaggttattccgagtatgggtttggtcctagctctgtcatctgtggggcctccacgcaagccatttgccttctctgaacctatttccgcatctgcaaagtggaaatcaaagagggcttggctcggaggagacaaggcatgtacagcacttgactcagaggctgttctaagagaagcagcggcctctgagcaccaaggagtctgtgccagtgcagggcattctgctttttctactgcacttcccaaccatcaaagcccttccttaggccatctcaggtcttagcccagagaagttcagcaagctatctaagggtcacacagc

SEQ ID NO: 813217 - DNA, 255 bp, Homo sapiens
ataatgagattttaagagaaaggaacatattgtaccacttttcgccagcacacaaatatctgcttatatggtttctcttacatttattttcattttggtatgatattttattcatagaatggtatccagattatttaacaaatagaaatcatttgagatctaaacaatactttcaaaratgtcaaattattacttttatatgttaaagtgctatttgctgtcatattaaaaagttactaaacttcatgaaatata

SEQ ID NO: 813218 - DNA, 516 bp, Homo sapiens
aagaagaaatatagttttactacttcaataataatcttgttatttaaccttgaaaaaaacattttctaattgtcaattttctacttctgagaggcacttcaaataaggtaacctttcagcatttccatcttaaaattattcaatccaattttgcagtaagacatgacaaaccactataagtttcatttaattttttctttctctatcagataaaaatccttcaaatctatatggagttgacatgataaattaaaattacttacatagaaagatcttgagattgttttgtggttataatcatcctatttctgctcctactgtatgcattttgtctgtatgactaacttctaaaccattaatcattttaattaattcaggcaacatgytattgccaatgtttaaaacaggtgcctcaaatgccaatattctactcaagatttgtttaagatttcaaatttccaatccacctcttcttcattaaacaggacctattttcccctgatactgtctcttttt

SEQ ID NO: 813219 - DNA, 633 bp, Homo sapiens
ataagaatctgcatcatttctaatgtgcaatttaaagaaataagaaagcaagygagctataaagagaaaggaacaatgagcttccaggttgctgacccaagccttgttctccctccttttgactttcccggctcagggtgtttttgttatagacagacacaaggaggtagctgtgcttattgtttcttttttaaaatgaaagttgcatttattagggtgacccatgcggccaagacaagcaggttgccactcagaccagagtgaagtgatgtggctctccctccttatagatactcctcccccaagtaatctctcttcagttcctccccacactatctgctcaaccctaagtctaccctactgctgaggagaggcccagattccataaaaaggaacagggccttagaatttgaggttccttttcacacatcttgacgaaaggccacatcagcgattaggtgctaagctttataaagtgaagaatctctgtccacttctggcagatacagatttgcacattcttatccttgagaaccagttaggtactattgtggtcaaagattaacgacttcacctcaaagtgttatgcaactgcagtgccttatggctcttaaccttgcatagacccaagag

SEQ ID NO: 813220 - DNA, 622 bp, Homo sapiens
tttgaaatctcactttgcatcttagatattctatgcttgcctctatcataaagagatttgaggcattgaagtgtgccttaaactatatggttttaaaaagaactgtaattgcagctgactaatagatgatagaaatagacatgtacatctgtgttctataaaagtcataactctacatatattttcaaaacaaaaatgtgttatacaatgccttctactgtgagttaaaaagagatattttaaacgcctctgaaaaaatgtttgaaaatgtcatttttggcaagggggagggtgacatacatctgaggaaagtgaatgaaaattattatgccagcatccctatccattctgctgaaaaattttgatatttgccctgtcatatccatggatacttattaagtgtctagaattttgactgcattcttcattgtatgttttagagccaactacctgattcagagtgcaaaatccatgaaataatttccacaatgattatgacaaatttaaactccagcaggaaagcttaaaacaatttgatygcacaggttgttagataaataacattgtcagtacagtctaaagatcccagaaacaagattgatttctttgttcatactaacaa

SEQ ID NO: 813221 - DNA, 482 bp, Homo sapiens
ataattagtaacagggttctttgaggattgaatacctatacagtatgsgttctgcaaggagtgaatatccatagagaaatatctaagattcaccaatttcccctttctttttacatattgttaagaacacaatatcattcagcattatcagaatgattccttcagggtttctccttgaattataactgcaggtgactcagctgactcattctatgatctacaatcagatcaagatcactcttacagatattttgttttgtaatattatgaaccacgattgcagtgttctatgctatcccaagaaaatgaaaggagtgcaaatgaagtcgagttttttagatcagacataatcaagaaaaattttagttaagccacactcttttatcatcagaaaaagttagagaaagtgtgtagttttgtgttgtgaaagtatatatgaggtatattgcttaatgttcaaatatgtaaaacgttcaaatata

SEQ ID NO: 813222 - DNA, 482 bp, Homo sapiens
ataattagtaacagggttctttgaggattgaatacctatacagtatgcgttctgcaaggagtgaatatccatagagaaatatctaagattcaccaatttcccctttctttttacatattgttaagaacacaatatcattcagcattatcagaatgattccttcagggtttctccttgaattataactgcaggtgactcagctgactcattctatgatctacaatcagatcaagatcactcttacagatattttgttttgtaatattatgaaccacgattgcagtgttctatgctatcccaagaaaatgaaaggagtgcaaatgaagtcgagttttttagatcagacataatcaagraaaattttagttaagccacactcttttatcatcagaaaaagttagagaaagtgtgtagttttgtgttgtgaaagtatatatgaggtatattgcttaatgttcaaatatgtaaaacgttcaaatata

SEQ ID NO: 813223 - DNA, 592 bp, Homo sapiens
tacagccatttggacagtttcttacaaaactaaatgtactcttactgtacaattctgcaatcatgcyccttggtatttacccaggagttgaaaatttatatttacacaaaaacctgtacttggatgtttatagcagctttattcacaattgccaaaactaggaagcaaaatgttgttcagtgggtgaatggataaataaactgtggtttaatcagacaatggaatattttttcaggcctaaaaagaaataagctatcaagtgggaagagtcatggaggaaacttaagtgcatattattaagaaagaagccaatctgaaaagactacatcctgtataattcccacatattacattcaggaaaatgtaaaattatggagacattaagaaaaatcagaggtttgtgaggagggagacatgaatatccagagcccaaaggatcttcagggtaatgaacctacttggcatgacactataataactgatacatgtcattatatatgtgtccaacccatagaatctacaatactgtctcagccagttcaaactgctgggacaaaactaccatagactgggtggcttaaacaacagaaat

SEQ ID NO: 813224 - DNA, 671 bp, Homo sapiens
tataggcgtgagccaccacgcctggccatatggccatatttgggataagttgtgcactactgtggttgactgtaatgcagtcctcagattggttcacttagggaaatactttcccaaccatgttctaggacagacttttgtaaagtgaattaaatgttcttttgactgccatttaaattcctatgtgtgtacataaaaatatacatatatatacacgccattttttaaagagatattgcctagactgggcctgaactcctgggttcaagcaatcttctggcctcagcctcccaagtagctgggactacaggcacatgccattgtgcctggtctatgcactttttattttggagtaattgaagactgaagactctcaagcagttgcaaaattagtacagaagaaaaaaaatagtgcagaggattttcacccagtttcccccaatggtaatgttgattgaacttcaccattgcacatcattaaaacaggaaattgacattggcacaggactgttcgcaccaacactgaccacgttcggatttcaccagcgtttccatgcatgcctgttgttgggagtgtgwgatgccttgatcactgtatttttggaactgcattccacagcccctgttgtcccttcttgttctggccctccacagtggtgaagaagggagtt

SEQ ID NO: 813225 - DNA, 603 bp, Homo sapiens
gggcgtaggggaagggatgaagaaaacacacccacacacgtgtgccacacacgtgcacacctggagctggagggcccagcccggggcccagctctgccactcactgatgtgactctgaacaacagacttyctctctgtgcctcatcttatcatttttgtgaacatttaaagagataacacacacaaagtgcacagcataagactcagtgtgtaggaggtgctcaacaaacatcagctttcttttttatttttttgagacatagtcttgctctgttgcccaggctggggtgcagtggcgtgatctcagctaactgcaacctccacctcccaggttcaagcgattctcctgcctcagcctcccaagtagctgggaccacaggtgcatatcaccacactcggctaatttttgtatttttagtagaaacagggtttcaccatgttggccaggctggtctcgaactcctgacctcaagtgatctgcccgcctaggcctcccaaagtgctgggattacaggcatgagagaccacacctgccagctttcattcttattcaacatgcttttatgggttccttgagggactactatatgcctcctagtgtat

SEQ ID NO: 813226 - DNA, 648 bp, Homo sapiens
cattcatttcacagagttgtgcctttcttttggttgagcagttttgaaacactctttttgtagaatgtgtgaggggatatttggagcgttttgcaccctatagtggaaaaggaaataaattcacttaaaaactacacagaagcattctgacaaacttgttcctgatgtgtgaattcatctcacagaggtgaacctctcttttgattaagctgttttgaaaaactctttttgtagaatctgcaagaagatatgtggagcactttgtggcctatggtggaaaggaaataactttgcataaaaactagagagaagcattcggttaaacctctttatgatgtgagcattcaacatagaaagacgaagctttgttatgattgagcagctttgataacgtctttttataatatctgcaaatcgatatttggagtgctttgaggcctatagtggaaaaggaaatatcttcacataaaatctagacagaagaattgggagaaattactttgtaacgtgtgcattcaactcayagagttgaaccattctttgattgagcagtttggaaacagtctttctgtagcattgacaaatggatatttggagcactttgaggtctatgggggaaaaggaaatatcttggcataaaagctagac

SEQ ID NO: 813227 - DNA, 425 bp, Homo sapiens
ttaactgtgtggaaatactctttttgtagtaactgcaaatgggtatttgaagcactttgagtccaattgctgtaaaggaaatatcttcacataaaaactagacagaaacattctgagaaacttctttgtgatgtgtccattcatgtcacagagttgaacttttcttttgattgaacagttttgaaacactctttttgtaaaatctgcaaatggatatttttagcacttacctcctccagtggaaaaggaaataacttcacataaaaactggacagatatgtggttggagccaagatggcygaataggaagagctctggtctacaaacagctctggtcccagtgtgaggggtgcagaagtcggatgatatctgcatttccatctgaggtaccgggttcatctcactatggatggccagacactggg

SEQ ID NO: 813228 - DNA, 539 bp, Homo sapiens
cctatggtagaaaaggaaatttcttcacagaaaagctagacagaagcattctcagaaacatcactgtgatgtgtgcattcaactcacagagttgaaactttgttttgattaactgtgtggaaatactctttttgtagtaactgcaaatgggtatttgaagcactttgagtccaattgctgtaaaggaaatatcttcacataaaaactagacagaaacattctgagaaacttctttgtgatgtgtccattcatgtcacagagttgaacttttcttttgattgaacagttttgaaacactctttttgtaaaatctgcaaatggatatttttagcacttacctcctccagtggaaaaggaaataacttcacataaaaactggacagatatgtggttggagccaagatggccgaataggaasagctctggtctacaaacagctctggtcccagtgtgaggggtgcagaagtcggatgatatctgcatttccatctgaggtaccgggttcatctcactatggatggccagacactgggcacagg

SEQ ID NO: 813229 - DNA, 461 bp, Homo sapiens
tgtgaaactgctttgtgatgggtgcattcatatcacaaggttaaacctttcttcgtattcagcagttaggaaacactgttttcttagagtctgcagagggatatttgggagctcattgaagccaatggygaaaaagcaaatatcccaggataaaaactagatggatgcaatctgagacaccacgttgtgatatgtgtattcacctctcagagttaaaagttttctttaattcagcatttggaaacactgtattggtagaatctgtgaagggataatttgagcacatttaggccaatggcaaaaaagcaaatatcagtggataaaaactagatgaaagctatctgagcaacagctttgtgatctgtggattcatctagcatagttaaacctttcttttcattgaacagtttggaaaaaatgttttggtaaaatctgcaaagggctattagggtgcacaggaa

SEQ ID NO: 813230 - DNA, 573 bp, Homo sapiens
tagtctttatgtgaagatatttccttttcctcaatatgactcaaagagctccaattatccagttgcagattctacaaaaagagtgtttccaaactgttcaatgaaaaaaaggctcaactctgtgagatgaatgcacacatcacaaagtagtttcacagaatgcttctgtctagtttttatgtgaggatagttccttttccaccatagggcccaaagagccccaaatatccacttgcagattctacaaaaagagtgtttcaaaactgctctatcaaaagaaaggttcaactctgtgtgttgaacgcactcatcacaaagaagtttctgagaatgcttctgtctagtttttatgtgaagatatttcattttctgccacaggccccaaagcactcaaatatacacttgcagattctagaaaaagagagtttcaaaactgctctatcaatagaaaggttcaactctgtgagttgaatgcacacatcacaaagtwgttctgggaatgcttctgtctagtttttaagtgaagatacttcctcttccaccaaaggtcacagagcactacaaagatccact

SEQ ID NO: 813231 - DNA, 650 bp, Homo sapiens
ttcaaaactgctctattaaaagaaaggttcaactcagggagctgaatgcacatattacaaagaagtttctgagaatgcttctgtctagttttcatatgaagatatttcgttttagaccattggcatcaaagcatttcaaatatcctcttgcagattctagaaaaagagtttttcaaaactgctcttacaaaagactggttcaacagtctcagttgaattcacacgtcacaaagaagtttctgagaatgcttctgtctagtttttatgtgaaaacatttccttttccaccatagacctcaaaatgctccaaatatcctcttgcagatactacgaaaagagtgtttaaaaactgctgtattgaaagaaaggttcaattatgtcagttgaattcactcatcacaaggaagcttctgaggatgtttctgtctagttcttatgtgaaaatatttccctttccacaataggcctcaaagtgctccaaatatccacttgcagattctacaaaaagagggtttcaaaactgctctaacaaaagaaaggttcaactctgtgagttgaatgcactcatcacaaagaagtgtttgasaatgcttctgtctagtttttacatgaagatatttccttttccaccatagacctcaaagcacccc

SEQ ID NO: 813232 - DNA, 650 bp, Homo sapiens
ttcaaaactgctctattaaaagaaaggttcaactcagggagctgaatgcacatattacaaagaagtttctgagaatgcttctgtctagttttcatatgaagatatttcgttttagaccattggcatcaaagcatttcaaatatcctcttgcagattctagaaaaagagtttttcaaaactgctcttacaaaagactggttcaacagtctcagttgaattcacacgtcacaaagaagtttctgagaatgcttctgtctagtttttatgtgaaaacatttccttttccaccatagacctcaaaatgctccaaatatcctcttgcagatactacgaaaagagtgtttaaaaactgctgtattgaaagaaaggttcaattatgtcagttgaattcactcatcacaaggaagcttctgaggatgtttctgtctagttcttatgtgaaaatatttccctttccacaataggcctcaaagtgctccaaatatccacttgcagattctacaaaaagagggtttcaaaactgctctaacaaaagaaaggttcaactctgtgagttgaatgcactcatcacaaagaagtgtttgagaatgcttctgtctagtttttacatgaagatatttccttttycaccatagacctcaaagcacccc

SEQ ID NO: 813233 - DNA, 505 bp, Homo sapiens
gctttttctcaggtagtttccttgtagtttttatcctgtgatattcctttttttgactatggccccaatgagctatcaaatatcccttcataggttctcaaaaaacagtgtttccaaattgctgaatgaaaagaaaggtttaattctgtgagatgaatgcacagatctcaatgcagattctcagaaaggttctttctagttcttatccgaaggtatttcctttttcaccataggcctcaatgggctcccaaatatcctttcgtgaattataccaaaactgtgtttacaaaatgctgaatgaataaaaagtttttactctgaaagatgaatgcatacatcacaaagtggtttttcagatatctttcttatagtttttatcccggatattaacattttccttactggcctcaaagacctcccaaatgtccattcayagaaagacaaaaacagtgttttcaaattgctctatccaaagaaaagtttacctcagtgaggtgagtgcttt

SEQ ID NO: 813234 - DNA, 626 bp, Homo sapiens
gtttttcagatatctttcttatagtttttatcccggatattaacattttccttactggcctcaaagacctcccaaatgtccattcacagaaagacaaaaacagtgttttcaaattgctctatccaaagaaaagtttacctcagtgaggtgagtgctttcatcacaaacatttcctcagaaagcttctttctatttgttatctgaagatattttctttttcaccatatgctttaaagccttcccaaatatcccatagcagatattacaaaaacagtgtttccaaactgctgaatccaaaaaaaggtttactgtgagagatgaatgcacacatcacaaagcagtttctcagaaagcttctttctagtttttatctgaagatatttattttttcaccgtaggcctcaattcactcccaaatatcccttcacagattataccaaaagagtgtttccaaactgcttaatgaaaagaaagttttaactctgttatatgaatgcacacatcacaagcactttatcagaaagcttctttccagtttttatctgaagacgttttstttttcactgcaggcctcaaagcactcccaaatatcccatagcagatactacaaaaacagtgtttccaaa

SEQ ID NO: 813235 - DNA, 506 bp, Homo sapiens
cagaagcttcctgagaaacttctttgttatatccacactaatctcactgagttgaaccatacttctgactgcktagtttggaaacagtctttttgtagaatctgaaaagggatatttgggatcactttaaggccaatggtgaaaaaggaaatatcttcacataaaaactagaaagaatctttctgagaaacttatttgtgatgtgtgcgttcatctcacagagttgaaactttcctttgattgagcagtttagaaacagtctacttgtagaatctgcaaagcgatatttgtgagcagtttgaggcctatggtgaaaaaggaaataacttcatattaaaactaaacagaatcttttgggaaaacttccttgtgatgcgtgcactcatcccacagggttgaacaatccttttgacagaaaattttggaaacacagtgtttgtagaatctgccaagggatatgttcattcacatagatgcctgaggtggaaaagtatatcttcttatgg

SEQ ID NO: 813236 - DNA, 483 bp, Homo sapiens
acgtttctgtgatgtgtgcattcaycacacagagttgaaacatatttttgattttgcagtttggaaacagtctttttggagattctacaaagggatatttgggagcactttggggcctatggtgaaaaagaaaacatcttcacatcaaaactagaaagaagctttctcagaaactgccttgtgatgtgtgcattcaactcacagaggtaaaagtttcttttcactgagcagattggaaactctgtgcttctagaatctgcaatgcgatatttgtgagtgctttgaggcctttggtgaaaaaggaactatcttcacataaaaattagacagaccctttctgagaaactgctttgtgatgtgtacattcgtttcacatagttgaactagtcttttgattcagcagtttgtaaacagtctttttggtgaatctgcaaagggatatttggaagcgatttgaggactatggtgaaaaaggatatatct

SEQ ID NO: 813237 - DNA, 581 bp, Homo sapiens
cttctgtctagttttacgtgaggatatttcattttcagcaagaggcctcaaagcgctgcaaatatccatttgcagacactacaaaaagagtgtttccaaactggtcaatcaaaggaaaggttcaattctttgaattgaatccacttgcagattggaaaacagagtgtttcaaagcagctcaactaaaagaaattttcagctctgtgagatgaatgcaaacatcacaaagaagtttctcagaattcttctttccagtttttatgtgaagatatctccttttcagctctaggcctcgaagtgctccaaatatccaccttcagattctacaaaaagagtgtttccaagctgctcaatgaaaagaaatgttcaacactgtgaagagaatgcacacattacaaacaaatttctctgagtgcttctctctagtttttatgtgaagacattttctcctcagctataggcctgaaagcrctcttatatccatttgcagatactaaaaaagagtgtttccaatctgctcaatcaaaagaaaagttcaacactgtcagttgaacacacacatcccaaagaagtttctgaga

SEQ ID NO: 813238 - DNA, 633 bp, Homo sapiens
tataaaagaaaaacccatgagtgcatactggtatcaattaattattttatatataaataaatgcaggagaatagaaaaatctcccacacagaaggatttcaaataatttatgtagatacgctgccctcagggaagtggggcctaactcctcacttcttatgtttaggctgcctatgttcactttgctgtaaagagaacagtacagacagggagtaaaagaataactttatggcggagaaatctgacaaacactatctcacccaggtaatcaaagctaacatccacagagataagttatgttgataagatgcatccttgagatggtgtaatgtaaatgacactttacctctgtggtcttcctcccaaaaactcataaccccagtctaataatttaaataaacaaacaaaaatttccaacaaataccagtaaagcagcattctacaaactaccatctgtaatactcaaaactatctaggtcatcaaaaacaaaaaagatccaagaacttgccacagacaagacggtccttaggartcataataactaaatgtggtaggatgtattgaatggaatcctagtatcaaaagaataactttagtaagaagtgagaaaaacctgaataaatgatgtactt

SEQ ID NO: 813239 - DNA, 633 bp, Homo sapiens
tataaaagaaaaacccatgagtgcatactggtatcaattaattattttatatataaataaatgcaggagaatagaaaaatctcccacacagaaggatttcaaataatttatgtagatacgctgccctcagggaagtggggcctaactcctcacttcttatgtttaggctgcctatgttcactttgctgtaaagagaacagtacagacagggagtaaaagaataactttatggcggagaaatctgacaaacactatctcacccaggtaatcaaagctaacatccacagagataagttatgttgataagatgcatccttgagatggtgtaatgtaaatgacactttacctctgtggtcttcctcccaaaaactcataaccccagtctaataatttaaataaacaaacaaaaatttccaacaaataccagtaaagcagcattctacaaactaccatctgtaatactcaaaactatctaggtcatcaaaaacaaaaaagatccaagaacttgccacagacaagacggtccttaggagtcataataactaaatgtggtakgatgtattgaatggaatcctagtatcaaaagaataactttagtaagaagtgagaaaaacctgaataaatgatgtactt

SEQ ID NO: 813240 - DNA, 343 bp, Homo sapiens
gcggtggcgcgagctgttgtcccagccactctggatgctgaggctggaaaatcacttgaacctgggagacagaggttgcagcgagccgagatccagccactgcactccagctctctcactccagcgaccgagcgagactttgtctcaaaaaacaaaacaaaacaaaaacaaaaacgtaataatttccagttctatccatgttgttgcaaatgactgaatctcattcttttttatggctgagtagtactccattgygtataaataccacatattccttatccattcatctgctgatggacacttaggttgtttccaatcttagctgttgtgaacagtgctgcag

SEQ ID NO: 813241 - DNA, 584 bp, Homo sapiens
attgtcttagatacgtataggaaagcctggtttccctgatcctccttggctgggttcatgtctcagtctcaacggcagcccacagaagggtggtagggactctcccaggggtgtgtgagagcacttggwctcccctctccctttttggagcagggcaacagctgcagccatgtctgtagatccccggtatctagactatcaaaataatgcctggctgaggctgctgtagtctcagatgcctgtaggattccatgtggatttcttttctggagcaatatatctgtgcaattttaggcagctccatatatcaggcctgaggtcctaagctagttggggttttcttgcacagccaagatcataaaagctctttttggagtgtggagccctagggatttctctcttattgtttcccagcatccaggagcctcttggggctctcagtcagtccccaaaccctctccttatttacttctggtgcttcccatcacttctctggtgagtcctagcattctctactagacaatctctttaaaatatatctacttactcttctggttcctctccatgaaggaggcacatactac

SEQ ID NO: 813242 - DNA, 556 bp, Homo sapiens
aaatgcttgaggggatggataccccattctccatgatgtgattatttcacattgcaggcctatattaaaacatctcagataccctataaatatacacctactatgtatccaaaaaaakactttttttttatttttattttgagattgtctcggtctgtcgcctaggctggagtgcggtggcatgatcttggctcactgcaacctctgcctccctggttcaagccattctcatgcctcagcctcccaagtagctgggattacaggcatgcaccaccatgcccggctaatttttgcatttttagtacagacagtgtttcactatgttggccaggctggtctcgaactcctggccttaagtgatctgcctgctgtggcctcccaaagtgctgggaggtgtgagccaccatatctggccataaaattaattatttttttaaaaaaatacaaagggcagggttaaagaatgaaagtgactcatcagacagacaaaagtggaataaggaatctggggaagaaggactaacggtgggactgaaaactgccctctacttatatt

SEQ ID NO: 813243 - DNA, 591 bp, Homo sapiens
tggttacatttcctagacttccctgcactagctgtggctagtgactaaattcttgctcgttgaaaatcagcaaacacgaagtgtgttggtgccactttcatggggggccttcatacatcagacacatatttctctagtttcttatcctcttccctgaagaggatgggaactggagattccccggatcatggagattagggccataccctaggagatgagggagtaatacaggcaagaaacctgagtccctggaccaccacacagagcagtcctaccctgacagcctgggttacccacattagaactgttccatgagagagaggtaagcttttacatcctttaagccactgtcttttgttaaagcactgtaactttaactctgaataaatcctctctcatcactcccaccttggtctgtattccaaccatactgaacttcccatcatgtccaaatataacatgccccctgtaktagtccattttcatgctgctgataaagacatacctgagactgtacaatttacaaaagaaagaggtttaattggacttaaattccatgtgtctggggaagcctcacaatcatggcagaag

SEQ ID NO: 813244 - DNA, 631 bp, Homo sapiens
agccataccccagacaggaaagaatggtggcctgaaataaaccacagcagtgaaaatgaggaggaaaggctggattcaacagacgtctccaaggtgggtttaatggaacttggcaccccgaagtacagggcaaaggagaggaaggagtcaagtctggcccagtggctggggacaccatgaacaccaagagaggaaatatagcagtggcacaggacttagtggatgagaaataataaaatatacacacatacaaagaacaatgagctacacctggcatataccaagtctgaggtttccacaggtcaaggtagtcagtgggaaggtgtggctgaggagactcctgggtgtgggggagtttctgctcagtggggcaatggaaaccacgaattaacgggcccaggaagatctagagaaagaaaagaggaaggcttgggctgtgactctgtgaactgtcaggagttttagggcagacgagaagctgaagaagacccacccatggaacccaaggttggaggcgtcggagaacccctgagagagaggattgattgccacagaagccgcatagggagtttccagcaggactggatgatcacagagaccmaataggatccagacccaacctcgaccattt

SEQ ID NO: 813245 - DNA, 524 bp, Homo sapiens
gtgaaagatatggcatcaccagtcactggggaaagggttttctgtttattgaatgtgccaggccagttggttatctgtaccaatagaacttggakctttaccttaaagaatacacgaaaatgcctgtaatcccagcaccttgggaggctgaggcgggcggatcacggggtcaggagatggagaccgtcctggctaacatggtgaaaccccatctctactaaaaatacaaaacaattagccaggcatggtggcggtcacctgtagtcccagctactcaggaggctgagggaggagaatggtgtgaacctgggaggcagagcttgcagtgagctgagatcgcgccactgcacttcagcctgggcaacagagcaagcctccgtctcaaaaaaaaaaaaaaaaagaagaatacacaaaaataaattccaaatgaattagagatctaaacatgaaaagtaaaacattgagggaaaaatgaagaaaaaaatattaacacaggtacagaaaagaatttcttaaataaaata

SEQ ID NO: 813246 - DNA, 524 bp, Homo sapiens
gtgaaagatatggcatcaccagtcactggggaaagggttttctgtttattgaatgtgccaggccagttggttatctgtaccaatagaacttggatctttaccttaaagaatacacgaaaatgcctgtaatcccagcaccttgggaggctgaggcgggcggatcacggggtcaggagatggagaccgtcctggctaacatggtgaaaccccatctctactaaaaatacaaaacaattagccaggcatggtggcggtcacctgtagtcccagctactcaggaggctgagggaggagaatggtgtgaacctgggaggcagagcttgcagtgagctgagatcgcgccactgcacttcagcctgggcaacagagcaagcctccgtctcaaaaaaaaaaaaaaaaagaagaayacacaaaaataaattccaaatgaattagagatctaaacatgaaaagtaaaacattgagggaaaaatgaagaaaaaaatattaacacaggtacagaaaagaatttcttaaataaaata

SEQ ID NO: 813247 - DNA, 600 bp, Homo sapiens
ttacaacactatttacaatagcatacgtggtatcaacctaggtgcctatcaattatggattggataaagaaaatayggtgcatatatatatgaatactatatataaaaaagccataaaaaagaatgaagtcatgtcctttgcagcaacatggatgctgctggaagccattatcctaagcaaatgagtgcaaaacagaaaaccaaataccacatgttttcacttataagtaggagctaaacattgggtacacatggacataaagatcggagcggtcgacactggggactacaagaagggggagggagggaggaaagggttgaaaagctacttattgggtactatgctcactaccttagcgatgggttcaatcctaccccaaaagtcagcatcacacaatataccttgtaacaaacctgcacatctacccctcaatctaaaataaaagttgaaaaattttttaaaaatacacagaggccgggagcagtggctcacgcctgtaatcccagcactttgggaggccgaggcgggccgatcacgaggtcaggagattgagaccatcctggataacacggtgaaaccccgtctctactaaaaataca

SEQ ID NO: 813248 - DNA, 607 bp, Homo sapiens
ttctaatatagatctgtttttaactgtcttgtttctctaactatgttatgagccacttcgatgtagggcctgggtttgattctcttcttaagtaatctcctgtgtcttattgctrttttgcttttttaaacttaatttttcatgggcctgtaaatgccttagcctctcaattaaattagaaactcattaaggtagagactgtatggctcataagacatcatactctgctgtacctagagtacatgtttaataaatatctttttaaaatgtctgaatgattgcatcaaagtcaacaccttttggcaaagaaaataaagatattatgtaagaccagcaatgtgctctatactctctttaaattaattctaaggatcattaaactgggcttattgttctcaatcaaggggaagtctagtccaatttttttaagtataaaatcagaattataggctttgtaaagaaattctatgtcacattcaagtacatgaagtgaaagtgctttttgaatcaatccgtccaccctacacagaattgttttatgagtatatgaaagtttgctggctttcatgctaaagcagagcaaattttacctttgtttgcattattc

SEQ ID NO: 813249 - DNA, 655 bp, Homo sapiens
taactggtcctatcacggagatgacacttaccatgtaagattcaggaagatggcaattaaggagacttcagcatggtgcctggtgtgcagtaaacacagagaacgtaaccatcactgacagcatgttgttcaattattaccataaacctaataagctaagagttagaaatattctcatttcatgaacttgtaaagtgaaacccaagaagggcagttgatttatttatttgtgcaacatcaggaagctaaatgaggttttcttatttctaagccatcttctttttactacaccaggctgtctttcatttgcttgggagtaaaaggatcaataattagctttctgaggtcttgagaagttattagcctccagtaaagctagaaactatgtgggctcctgaggtgatttttgcatttgtggctgtggcaaattgcagctcgagggttctaagctcttaatttgttatcattagcagatgtgatagattagctttccaagtggttctaatattgcctcagtgttgagagccactgtctcagagacattccaccacctgagtaggaacgactgcracatgtccagggagtactgtttgtaatagcaaaaaactgggggcatgggggtgggaaactccaaatgctcgacaggagacaggat

SEQ ID NO: 813250 - DNA, 603 bp, Homo sapiens
gaagtctagtcttactgataatcaagccagcgagaacttatagcttagtattatggtacacatgtgatagtacagtcatgttgctgcatcatatttcagtcaatgacagactgcatataccgtagtggtcccataagattataatggagctgtattaggctgttcttgcattgctataaagaaatacctgagactgggcaattgataaagaaaagaggtttaattggttctgcaggctgtacaagcatggcacccacatctgcttggcttctgcggaagcctcagggagcttttaatcatggtggaaggtgaagcaggagcaggcatgtcacatggtgaaagcaggagagacttatgaacaaccagatctcttgagaacttgtgaacaaccagatctcttgagaacacactcactatcacgaggatagcaccagcccatgagaaatctgcccccatgacccaatcacctcccacctggcaccacctccaccactggggattacatttcaacatgargtttgggtggggacaaatatccaaactatattatgagctaaaaaattcctattgtctagttgcataatagccattgaaaggtcatag

SEQ ID NO: 813251 - DNA, 547 bp, Homo sapiens
tttgggtttaggagtttgagactagcctgggcaacatagcaaaatccagtctctacaaataatacaaaaaaatagccaggtataatggtgtgtgcctgtgatccrgctacttggttggctgaggtgggaggactgctcgagcctaggactggttgacagaaagagactctatctcaaaaaaaaaaaaaaaaaaaaagtgaaatcaaacagtaatttttagccagcagcctttggaaccaaagtgtttgagtttattcttttgtgggcctcttctctttcctttctggattaggagatcttgatcaatgcagtgggatgacattaggagaaggaaaaatgacttcaggagtcataagtataaaaaccggcttcagattgagaatcagctgaatattcaaatcgtaaaagagtagaagtgcttcggatagtgtctacaaaatacaaaaattagccaggcctggtggctcatgcctgtaatcccagctactttggaggctgaggcagagaatcacttgaatccaggaggtggaggttgcagtgagcagtg

SEQ ID NO: 813252 - DNA, 575 bp, Homo sapiens
cctgtagaaaacagtgtggtgggggatgctcggcctgcagatcagacaggccrgggtcaaagccccgaactaccacctgaactagtcctggccgagtggcgctgatgctctaggccgagggcccccttgacagaacagccatcatctagctccgccgcagggtaggggaggtggcagtgtgggccgcagccctcggctgaagcgggggccaagcggggctctgcctggtgcagggggtttcctctatggggcaggggctcccaaattagccctggtgacatctggagctcacctctgggggctctgggggctgagagagcaggcggggcccagttctatcaatcatctgccttgttcctgggggatcgcggtcagtcccagcctccccacaagtcctggggcggggcaggcctgctggaaacccaagatgcagagaagagcgccaagcacctgagacagggctctgagcacggaaggcaaggacgcctccctcagcctcagctggggagccagtggccctgcatgcactttctcccgtctggggagcctgagccctgacccagtcccgaggccca

SEQ ID NO: 813253 - DNA, 595 bp, Homo sapiens
tgggggttgggaagcctagagctggaacccacaggccagagtctgagctttcatcccccacccccgaagacgctcccccagccactgcctgcgcatcgggggagacaagctccccccacgcccaccttgcctccagcagggctgttcctcccctcatctgctggcatcagttttttctttaactgagccccatgctggggaagggagagctccaggggaccaggcagcagagaggggaggagagaagccatcaaacaggccgggggctgggaggccatgcactcagcatagagccccacatggcagcagggggctggatggccggcttagagcccattctctcctggacactgttctggaatggcccctggcccctccgttccaaagatgggaccctccggtccccggggacccgggatgatgtcccccaaaccacctctcttcccagacttcatcaatggcaatgaatggtgcatcctggctggggccgccgcccctcactgtgagacttcagcccagacgagcgcccagcccctcctggggtctcagatagtcagaawgaaaggctcacggctgccatgcacttccacaggac

SEQ ID NO: 813254 - DNA, 494 bp, Homo sapiens
gtgtcgcatgcctgtagtcccagctacctgggggcctgaagtgggaggatcctttgagctctggaggtggaggcttcagcgagctgggattgcaccattgcactctagcccgggtgacagagtgagaccctgtctcaaaaaacaaaacaaaacaaaaaaaaccaccaaaaaccaaagtcacataaaatgtcttcataaatacaatagaggcaaacctcatgtgatttgtgttcatggacttggaggggccaaaggcccaacagaagtgagaggaggagggaggggaggggtgcaagggccaagggtagaggccgggaggggccagcatggtggcctgagtccactgcaggtggcactgctggctttggtgtcctcatttcatctcctgtgacctctgcccttggcrtgtccccaggtacctcctgtgggctcctggctggggtggggtaggaggaggaagctgagggtggccagggtctgtgtccatcgagggg

SEQ ID NO: 813255 - DNA, 511 bp, Homo sapiens
ggggcacataggggctagtgtgagccctgcatgaggattaacagggcatgcattgcaatacagagcacgaagctgctgtgaccttcccctctgatcgcygtcacagggcctagcctgcacgtagcctcctgggcaggcacacccctggacccctccctggtgctctgctggaggccacgctgggctctggaatcttactgcacagagctcctggagacccaccctcaacccttgggccccctcttccttcctgggtcctggagggggctgttagggggcatgaggccacgcagcccttgagcacctactgtgtgcaagggcctggcgtttgtgaagcaggctgcggccatcctgggtgggagtcagggaatgggggtcccggaagtgctggcttttctggtggctgtgggggatcagggggccttgctgtgtatctgtgagctgagccatcctctgaggggctgagcgctggcaggaacctatcacgtttcccaggggcagggttgggcat

SEQ ID NO: 813256 - DNA, 511 bp, Homo sapiens
ggggcacataggggctagtgtgagccctgcatgaggattaacagggcatgcattgcaatacagagcacgaagctgctgtgaccttcccctctgatcgctgtcacagggcctagcctgcacgtagcctcctggrcaggcacacccctggacccctccctggtgctctgctggaggccacgctgggctctggaatcttactgcacagagctcctggagacccaccctcaacccttgggccccctcttccttcctgggtcctggagggggctgttagggggcatgaggccacgcagcccttgagcacctactgtgtgcaagggcctggcgtttgtgaagcaggctgcggccatcctgggtgggagtcagggaatgggggtcccggaagtgctggcttttctggtggctgtgggggatcagggggccttgctgtgtatctgtgagctgagccatcctctgaggggctgagcgctggcaggaacctatcacgtttcccaggggcagggttgggcat

SEQ ID NO: 813257 - DNA, 455 bp, Homo sapiens
gacattttcaggaaactgaatccacaggctggagccttctgcttccccacaacccaaacggcccccagccagccaaacagccacgagaacccagctgctagcaactgccagcaggaaacccactaccagccgctcacagatggacagcccatcccaggagctggccccacctccccgcccctctgctgaccaacccagcagctccttgggtgggtgtggccaccctgctgccccaacctgctcccggaccctgtgccaggaggtgcttcgcctcagcggggccttgcctcccccagagccgctctgctgcctgaccttgcaatgtcatgggtcctctgggcacyggcgcagttgggtgggatcagctttggccagcaggtggggggcaggtgggtaaatcctccctctctgccatctccgcttccttcctcctgcccggcttccctgcctttttc

SEQ ID NO: 813258 - DNA, 625 bp, Homo sapiens
tcccaggatgctgaagcattgaagtgcctcgaggactgttagaaagattttcttagaaagaaacatttgctacccagggcacagaacagctcctcgaggtctcgtaaaccagtgtggactcggccctgctcccgagacttggaggaaaggcagaaagggcggcaagtcacacgcaaggcaattttcaaagaaaagggcacaactcataggaggcaggggaaggattccatttcacctacagtcatggccccgcgtcttcagggaataggtgctgtctggtgcatcacattattagtgctggagggcatcgcagtcctgggggaggtcactgccagcatggcagcccataggaagtgggagggtgggattcaagggcaaggcgggtggtgggtcctggcccctgatgaggcaggtggatggtggacctgcctccaccctacccagcaggctggccaccagggcgtgtccacagactccagacaagaaggagagagtaaaytgaggcatgtggggcccaggccctgggcgcaaggctggaggcctgaagtggcatcccatcagctggaatcaggattgcctcgatctttgattcttgagacaggaggagtgtggcggtggccccagc

SEQ ID NO: 813259 - DNA, 565 bp, Homo sapiens
aaacatttgctacccagggcacagaacagctcctcgaggtctcgtaaaccagtgtggactcggccctgctcccgagacttggaggaaaggcagaaagggcggcaagtcacacgcaaggcaattttcaaagaaaagggcacaactcataggaggcaggggaaggattccatttcacctacagtcatggccccgcgtcttcagggaataggtgctgtctggtgcatcacattattagtgctggagggcatcgcagtcctgggggaggtcactgccagcatggcagcccataggaagtgggagggtgggattcaagggcaaggcgggtggtgggtcctggcccctgatgaggcaggtggatggtggacctgcctccaccctacccagcaggctggccaccagggcgtgtccacagactccagacaagaaggagagagtaaattgaggcatgtggggcccaggccctgggcgcaaggctggaggcctgargtggcatcccatcagctggaatcaggattgcctcgatctttgattcttgagacaggaggagtgtggcggtggccccagc

SEQ ID NO: 813260 - DNA, 504 bp, Homo sapiens
acgaggcagcatgctcacagacacacgtgcacacacacaagcacactcagaacaagctgtggggcctgcggtgaggacaccaggcaggcaaggcggctgctgcagaaataattagtcmctggtagacaggcctggctcaccttctccaaagccaaaggggggctaccagcccccagctctgggaaagggctctgagggcccgcccccaccttgcagtggttcctgggacctgcagggagcatcccaagcacggcccgtggggtgcgggactctgccatgtgatccctgaggctgggcctggccggacgtgccttggcccctgcaaaccgtgcacatccccaggtcccccagcacagcagcagtgcagggagtggagacgtgaagatggggagtggagacgtgaagatggggaagaaggaggttggaggtgcagggccgccctgtgttcttgttggagtgggggtaggagcactccaggtctggttgggccctgtgagggtgttg

SEQ ID NO: 813261 - DNA, 646 bp, Homo sapiens
cgtggggcaggcaggtgtccagataggcaaygcccgctgggaactgtactgccttgaacttgcaattcagcctgacggtcaaatgccaagtgacaaaaccatcggtggtggggatgactccttcaacatgttcttcagtgagattggggctggcaagcacgtgcccagagcagtgtttgtggacctggagcccactgtggttgataggtcctcgggcactggatggcagctttcctgggagagtgggagagcattggtaaaaccccacgtgcgctcctgtgaatccccctgcagaatggatgggatagacaagcaaatgcccatggcattgttagggcggaaactgaaagtttcatgtttagtgtatgtgagactcagctcctaatttaggatgtatgggaaaagctgctttgccagcagtaagatgggctgtggagagattcccctgtggctgcctcagccctgcacaggtggccctgcctgcagggtgtggggcattgattccctcctgaatgctgtgcactgtctcatgctggtgcatgaagagtcttgatgtgcatcttaggcgtagaaggtaagtacagaacatccatttccttcatccagattagaagtcccagatagtttccaaagagagctgcaaaga

SEQ ID NO: 813262 - DNA, 573 bp, Homo sapiens
ttattaattatcccactaaaaggtaagcaccactgagtacagggatcttgtcttttatgccagtgtgaacccagaacatggaacaaccaccaccataggagatgctcaaaaaaatttgtgaatgaatgcaaatctgttgggagtttcaagacttctaaggaatacaaggtatcccaggtactttttagggtttaacaatctgtaaacaatccccatagcagcttctccatataacacaagatatcataaatcttaagtatacataggtgtaccaaaacgaattaagaaagcactactgggtggggagctaggggagggatagcattaggagaaatacctaatgtagatgatgggttgatgggtgcagcaaaccaccatggcacgcgtatcactatgtaacaaacctgtgcacattctgcacatgtatctcagaacttaaagtataatgaaacaaaaaaaagaaagaaaagaaaacactactgcctgggyatggtggctcatgcctgtaatcccaagaccctgggaggccaaggtgggtagatctcctgaggttgggagtttgagaccagcctg

SEQ ID NO: 813263 - DNA, 618 bp, Homo sapiens
tctatgacaaacctacagccaacatcatactgagttagcaaaagctggaagtattcccattgaaaatcggcacaagacaagaygccctctctcactactgttattaaacatagcattgtaagtcctggccagaacaattaggcaagagaaagaaataaagcacatccaaatagaaagagggaaagtcaaactattcctttttgcagactacatgattctatgtctagaaaaccccatagtctcagtctgaatgctccttcagctgataacttcagcaaagtctcaggatacaaaattaatgcacaaaaatcactaacatttctatacaccgacaacaacctaactcagagccaaatcagaaaggcaatcccattcgcaattgccacaaaaggaataaaatactgaggaatacggctaaccagggaggtgaaaggtctctgcaatgagaatgacaaaacactgctcaaagaaatcagagatgacacaaacaaatggaaaaacatctcatgctcatggataagaataataaataaaatagtcatactgcccaaagcaatttacaaattcaataacattcttcacagaactagaaaaaactattttaaaattcatatggaa

SEQ ID NO: 813264 - DNA, 630 bp, Homo sapiens
atttgtgtagccagtttatctccaccctcacactccttttgtttttaagcggtggggaaaaaacctagtcatgtaaagaaaatcttttataattgttaaaatgtattatttatcaatagtgaagtaatgtgggtagtttttttatagtttttggcagatgattcacatttgtgctgtgtctaggttgacaaagaaacccactattaatgggcaagaagtgatacggtctagcggaataatacattttgaatgagacctgtggtctttccctgcttttcttcttttctctgggcctcagtttctatatttttaaatcaattaaaattgcctttattttgagcaaaagaaggtaatagccagggtaccattgatcaattgataaaaccacttcactgaaaattatttttctcttgtaattaactgttgacacttctatttgaatgcgtttccattctgcggttaaaagatatattagttggccgggcgcggtggctcacgcctgtgatcccagcattttgggaggccaaggagggcagatcackaggtcaggagatcgagaccatcctggctaacaaggtgaaaccccgtctctactaaaaatacaaaaaattagctgggcgtggtggcggg

SEQ ID NO: 813265 - DNA, 606 bp, Homo sapiens
gtcatgatgaggcagtgatagcagcaagtgtcactttgaccctcacccttggaaagtgggctatgcatagctagagttagaacaggaggttctaaycctgcttccacaattacttcagtaacaggcttttgtatccatgattacttaagctgacttagatgcattttctaccctgtattctagtgtacacaacacaaacacacataagccctttacctgtggagaagagggagatggttgattcagtgggagtggggagtggcagagggtgccttaactttttctggcttgacccctacttccttatgtgtttccttcatatacctctgtcactttagagatgtaatcatgtctgttccaagttgtatcgttattatcaagaagtcctataaatgtagcaaatgtgactattttatagaaatgcacaatagtttataggccttggagaagtctgataatagtatgtaaatatccttcattgaagtcatagaaccttctagtaggaagctccataggtgataactgcaagaggattaatgtttgtttctccagtaaacaccggaagcaaggaatcaatctgtcactgtttatcattcagtcttgagc

SEQ ID NO: 813266 - DNA, 617 bp, Homo sapiens
ttagattttggccattctataagtgtgtagtgatatctcattgttattttaatttgcacttctctgatgaaaaatgacgtggagcatcttttcacgtgctgcttgtcatctgtatattctatttggtgaaatgtctgttaaggtctttggtccattttttaactgggttattggtgttattgttgagttttaagattttgtacattttgaataacactcctttattgggtatgtctttttgcaattattttctctcaagctctttcaagtttcctatgggggaagcttaactcattgattttagatctttcttctttccttttcctttccatttctttttttttttttttaagacagggtttccctttgtcaccccgtttggaggacagtggcgcagtcttcactcactgcaacctccgcctcccaagctcaagtgatcctcccacctcagcctcccaagcagctgggagtacaggtttgcgccactatgccgggctaatttttgtattttttgtagagwtggagtttcgccttgttgctcaggatggtctcgaactcctgagctcaagcaatctgctcaccttggtctcccaaagtgctaggattacaagtgtgag

SEQ ID NO: 813267 - DNA, 593 bp, Homo sapiens
tgtttttgttactgtagtarccttgtagtatagtttgaagtcaagtagcatgatgcttccagctttgttctttttgcttagagttgtcttggctatggagggctcttttttggttccatataaaatttaaagtagttttcttctaattctgtgaagtaagtcaatggtagcttgatggggatagcattgaattgataaattgctttgggcagtatggccattttcacgatattgattcctcctatccatgagcgtggaatgtttttgcagttgtttgtgtcttctcttatttccttgagcagtggtttgtagttctccttgaagaggtctttcacatcccttgtaaattggatttctaggtattttattctctttgtagcaattgtgaatgggagttcactcatgatttgtctctctgtttgtctattattggtatataggaatgcttgtaatttttgcacattgattttgtatcctgagactttgctgaagttgcttatcagcttgaggagattttgggctgagacgatgggatttgctaaatatacaatcatgtcatctgcaaacagggacaacttgacttcctctcttcc

SEQ ID NO: 813268 - DNA, 599 bp, Homo sapiens
aataatgccacacatctccaaccacctgatctttgacaaacctgacaaaaacaagcagtggggaaaggattccctatttaatcaatggtgttgggaaaattggctrgccatatgcagaaaactgaaagaaaacccttccttacaccttgtacaaaaattaactcagatggattaaagacttaaatgtaagacctaacgtcgtaaaaaccctagaagaaaacctaggcaataccattcaggacataggcatgggcaaagtcttcatgattaaaacacaaaagcaatggcaacaaaagccaaaattgacaaatgggatctaattaaactaaagagcttctgcacagcaaaagaaactatcatcagagtgaacaggcaacctacagaatgggagaacatttttgcaatctacccatctgacaaagggctagtatccagaatctacaaataacttaaacacatttacaagaaaaaacaaacaaacccattaaaaagtgggtgaaggatatgaacagacacttctcaaaagaagacatttatgcatccaaacaacctatgaaaacacgctcatcatcactgatcattagagaaatgcaaatcaa

SEQ ID NO: 813269 - DNA, 580 bp, Homo sapiens
gtgtcacactttaagaattgggattccacttaaacaccctgatcytcgtcccatgaaccagcatcacagactcaatctaatgctaccctcgtgaaatcatgaatggaagatggtcgattcagatggcccttccatagacagagcacttactgcatgctcagaatgtcactcagtgctttgccaagtcatctcttgctacatctcattatggtggttgggaagcagcgttttttgagcacccactgtgtgctatgtgctaaggatgggaagatgacagtgagcagggcagccctggttcctttctttagctcagctgcagttggtaggaaatctttgccaagcagtgtgcaggggagttcacctcccacagagttgggcagggggtcactagggtggggtccagactagggagaagccagtgaggcacctaacctaaggaggcactcactctcaagggtgtgcaagtgtgcacaagtgtgcaattggcaccagagtgtaagcaccttgttacattttgcactgtgagcacttcacttctcttactttagttccaagggaatgctgcctaaggaaggagaaa

SEQ ID NO: 813270 - DNA, 647 bp, Homo sapiens
cagtgacatctttatcttcatttcccggcctcatctccacctggggcaaaaatgaagtgggrtgatgggcaggcagagggaatccaggacccacccaggcccaactcccagcccactgtctcccaccccagctggggaagctacagggcccagccaagcaggtggtggcagggtcaccttgggaagaggtattggggcctgggaagaagggggaagatattatgcaccgaaggctgcagctgaggacactaatctgaacagacaaggaatcaatgggaatttctatttagggaggaaatcaataggaatttcaaggtaggaaaaaagggaattacctttaattggagttctggtccagccagttctctagtgaggccagggctcacctggtcctcaagggatggccagaagggaccctcaacctgccccagccctgcctggagtgcctcccaccaggtaagagacaccttctctcaaggaaccatttaatctctggctaggaagccaggattgagtcggcgaacagagatctccagaaccaggcatagagagctccgtctcctcatccgttaggtggggacaacagggacctcatcagtgagaagcgaatcccaggtgcgtaagaggcaccttacgcgtatggcacc

SEQ ID NO: 813271 - DNA, 626 bp, Homo sapiens
catcccctggctctctctgtggataatggttcttacagccgtttccatggactgagtcctcccttggtgcctggggattactttgtgtcgtgagacttaatctgcccagcagcccactggatggttatttattttatttttatttttatttttttgagatggagtcttgctctgtctggagtgcaatggtgcgatctcagctcactgcaatctccacctcctgggttcaagcgattctcctgcctcagactcccgagtaggtgggattacaggcgtgtgccaccatgcccggctaatttttgtatttttagtagagaccgggcttcaccatgttgtccagactggtctcgaacttctgacctcaaatgatccacctgcctcagcctcccaaagtgttagaattatagcgtgagccaccacgcccagcccggatggttatttttaatattcccgatttacagatgaggagactgtggctctgggcagtggagaaactcatcctgggtcacataactgggaaccactaatccaaggggtctgagagccactctgggactcttcccgatgccctgggcctccctgggcatgcatcttcctacaggatccsagcttgctcccgtcatgcc

SEQ ID NO: 813272 - DNA, 499 bp, Homo sapiens
acccataactatatagacctactatgtacccacaaaaattaaaaattaaattaaattaaataaacaaatgagagaraagagataaatctcccatgcagaagaattccaaataatttgtgtaaataatctgccctcaaggaggtgaagtgtgactccccatgccttaaatgtggcgtgcatgtagaaacttccttccaaaaagcagagtatgaaaaaggggggaaaggagtaacttcacagggagcaagatgacaaaattccttcatacagatgatcaacatcaacagagttgtcatgttgatagtatttaccctggatatgacgtgatgcaaaaatgacatattacctctgtggtttccccttcaaaatccataacttcagtttaatcatgaaaaaacccaactgagggatattctacaaaacaattgacctttacccctcaaaactgccatcaaaaatgaaaaaaaaaatgagaaactatcacagtaaagaggcgcct

SEQ ID NO: 813273 - DNA, 544 bp, Homo sapiens
gcctctacaaaaaatacaaaaattagccaggcatgatggcctatacctttagttccggttacttgagaggctaacgtgggagaactgcttgagcctgggagattgaggctatgagtgtaccactgcactacagcctgggtgacaaagaaagaccctgtttaaaaaaacatgcactcggccgggcgcggtggctcacgcctgtaaacccagcattttgggaggccgaggtgggcagatcaggaggtcaggagattgagaccatcctggttaacacggtgaaacaccgtctctactgaaaaaaaaagaatacaaaaaattagctgggcgtggtggcgggcgcctgcagtcccagttactcaggaggctgaggcaggagaatggcgtgaaccaggggggcagagctttcagtgagccgagatcgtgccactgcactccaggccgggcgacagagcaagactcctgctcaaaacawaaacaaaaacaaaaacaaacttcaatcaaaaaaacatggacatgctctcaaaagagttagctcaagcatctg

SEQ ID NO: 813274 - DNA, 591 bp, Homo sapiens
gtctcacacctgtattctcagcactttggaaggctgaggtaggaagatcccttgagcccaggagttcaagaccagcctaggtaacataggaagaccccatctctaccaaaaaataaaagaaaaaatatagccaggcatggtggtgtgtgccttcagtcccagctattcaggaggctgaggcaggaggattccttaagccagggaggtagaggctgaagtgaatcatgattgcaccactgcactccagcctgggcaacagagcaagaccctgtctcaacaacaacaacgagttgtttgttgtttagcccaggatttctatctcctccatctgatgtggtcagtgactcagatgtatgaagatattgagcaggagtcaccagttcagtaggggatactcagtaaatcagaaataagatccagagaaggggtgagcagaactaacccatgacctcaagttcatttgtaggatagattttaggagacataactgcaaggataaaaagcaccacaccaagaagggttaatccagtcatcagttcttgacaccaaaggtcattcctgatgttyctgaagctcaccagggcccagagg

SEQ ID NO: 813275 - DNA, 635 bp, Homo sapiens
agaggcggtgaatccgagactttcattcaggtgacgatccctcgcgggcactcactctcgctcacactacaatcagatcctccatgcggctttcatatactctgtcacactcgcagccagaatcccctcggatggactcttgcaaacctccagccccatcccgggatccgtgcgtcttctacagccaccacttgggccagcgtccaggacgcccaagcgtaacctccccactctaaaccgttaggaatcagtggctggactcaccgcgtcataaaagcataaactgtgacccgatgagtccgcgcactcggaaaacaagagaacgctcccacgtctccgggcgcagcttgtgccagcgactactaggtcagggggcgcagctgagagaattcaagcaacctccccgcaaccggttccgccgcgtttgtgggctggtagcccggaatacatttcccagaggccttcgcggccgacgtgcttcgcgcaggaacgcagccgcctcccgactggaggacgcggtagcggagctgctcaaagcgaggtgctcagccctgggaggctcagggctgcccgaggggcttagtcccagagccagtgctgtyaggggctgagcatgtgaatagggcagtcggaag

SEQ ID NO: 813276 - DNA, 559 bp, Homo sapiens
tttgaataatgtatattctttataatactttatagcagtagtcacttagtggctttcagtgtgtattccaggtcacaattaggcaataatttaacaaattatgttgcaactgtatatcacaggctrctacaggctcatcctttaatgctctggaaagcactagattttcattgccttcttttccatacaggtcagataacaatgtgagattcccccaaaccctataaggaaagaccattcactcccttaatagtccccatactatatatcaaggttctttgttacaagaagcagaaacaaacactgatttaagcggaaaagacttttgttggaaagatattgaagaacacatatatggtcatttgctttaccttcctcagttcttcacccttcttcgtattcacagcctcaggctttgtaatatccactccctaagatgttacatttctttccactagaggcagcatatattccttaccccatcgattttgggctcaaccatggaatttgcatagtccaatcaggcattcgaaggtgtgatgtaagcagagacttcaaa

SEQ ID NO: 813277 - DNA, 641 bp, Homo sapiens
agttctatacagtatttacgcaggtggggaacaggagagccagggtttgtgaagcttaagcctgtgcaattttaggcggtcagttgaatttaaaggaacacagaaatttcatggttttgcaaagtttacaaaaactcatgacacagtgaacacattgttaggcctgcccaatggccatgtgcaaggaagggccctaaagcttaagcctcattatctcctgtatacagttcctataaatagtaaataaaataaataaataatgatacaacataaaacttaatgacagaactaagacgcaacagttttcttatacacatgaatttaaatagctatgctttcatgttaaaatagacctttatattggataataaaattaaaaatgcatataaaaaaaaataagtaaaagaagacaaaatttagaaggcctgccaggttggacaactgagttagctagctttgccatatccccatctccctaaccataaaaaccaccccatgggaacaaacayaacttgacatttttcatttctctgaagtgagtgcccatcattttctcatttttacgactgcattttattaatttgcaaatgaaaacaaggaaacattaaaagattggctcagccattagccatcccaatata

SEQ ID NO: 813278 - DNA, 573 bp, Homo sapiens
catcattttctcatttttacgactgcattttattaatttgcaaatgaaaacaaggaaacattaaaagattggctcagccattagccatcccaatatagttgaggtttggtcctcctaattgaaaccaagatttcggtttcctggaaaatgtcagaaagactgttcatttctcagggcctgttatctgaccatcatgaggaggagctggaaatctgtcagatcagatagtttcatttttgagtactgatgtcctatggacatcatcagcctcagtcagccacacagagctcagaagctgaccccagccagagaataggtgtttgttttctatgattgtttatgatttatatgattgtttataattttcctatcttgtaagcttgtatcttttcctattctttttaaaattgtatatactcctaagaaatgaaattttatttgtatttaaatgccttgattcgatgtgacattggttttctttccaaatgagctaaacmttacccaggaggggtgtaggaatggggttgtaaggatgacgtaggaaaaagtattatttaaaacaaacctttactc

SEQ ID NO: 813279 - DNA, 552 bp, Homo sapiens
agccgtgtaagaggtccacgacctctggatamaaataggctgacctttgcaggatcgccccacatgtggtctgaggaatcggggcgtcgttgctcctctggaatgccactgaagggccaaggtccaaggagtgcctggatgtgatagagcctgtgaactcagactttcctgatgccaggaagaaaggtggatggggaggcctgactgatagcagagacacagccagcgggcaagggtggcctggattaggaacagaggcagtgggaaaggacaggaggaggcagagggaataatattgcaggacaaaaactaacaatacagggtgagtatcccttagataaaatgcttgggaccagaagtatttcaaatgtcagctattttcagatgttggaatacttgcatatacataatgagatatcttggggagataacctaagtttgaactgaaatttatttatgattatgattcatatataccttatacacatagccattagttttacccaatatttttaatcactttatgcatcaaagttcgtgtaaattgagcca

SEQ ID NO: 813280 - DNA, 659 bp, Homo sapiens
gctacatgttgtaatgcataatactgtcagttaatttacaaagacatctacttcaaagtacagtttgaaattatgtttgtgtgtaggtgggttacacaatctattattataatgcagtaaagaaaacctctcaaaatatttgttttttaaaaaaggcatgggatttagtggctggataatcaagagaccaggcggtctctacggtgaaacacaaaacactctactttctatctcctcttccacaaggtcgcctcagcctggcatcatggtctcatctgctgcaaattctcacaccggacacactcaagtgcaaaaacaaatgcaatggtcccggggcatggggagggggatagcaggactcgtccaccagccaattgcgacaatgtgtggcatcttgacagctcccttctccaatatagacctccatctatgctctcccctgttctctctctccaccactgtcctccagacataagcaatctactctgagcctcatctaccttcaggatgcttaccatcactttaccttttctattctcactgccaccatcactgaggataataygggagccgagagttctgcattaagtaaatagcaccgtggcttgtactctggacagtaaaagctcttgtcttcttctacttcattccacctgcca

SEQ ID NO: 813281 - DNA, 569 bp, Homo sapiens
ttgcattggtctcatgggatcctgcccccaacaacaatgcattattaaattgtcccttttaagggtgccctcagagtattctcyctctgaggaaaagtgccagagtggaatccaagattgatgagaggaattgttttcttttgtagtgtgggaaaagggtgattaggaaaggaaagtcaaggagaacctggcagacaatagacagtttaacacaaggtacacgtggaagttgaagctcctaaaatctgtttccttatatctactcacgtccctgtaaagttttttcctgtactctcagaggcatacatatcacaattttaagacagcttatcgtgtcacacaatccctgggacctttacaaattccacaaatgttagatttcaatccagtctctgagaagcacattactatatacacacccacgtcctctgcccacttcctctgcgcccccccccaccaaaaaaaaaccagtaagtaaaaagactggcccatgatcaggtaacaggtgcaatgaaaaattaaaatacactgaactagaggaaataaatgtatttgaacctcctaggcca

SEQ ID NO: 813282 - DNA, 620 bp, Homo sapiens
caaatctgccaacacctttctatcaatatgtatatatatgtttcaagttgatayatatacacacatatgtatatgtgtgtgtgtatatatatacacactgtgttattggttttagttttaaaatgtgaaacataataatagcatgtttgtatgtaaatggaaatgatcctttagatagggaaacacttacaatagaggagagaagggagaattactagagcagcatgtctcagtccatttggactattataacaaattccataactgggggcttataaacaaaagaagtttatttctcacaactctggaggctaaaagtccaagatcaggaagctggaaaatccagcctgggaagggcccactttctggttcatagttgggaccttcttgccctagccttacctggtggaaggagtacaggagctcccttgcacctcttccataagggcacctatcctatcaggagggctccaccctcatgacctaatcatctcccaaagcccaacctcctgatatcaccaccctgggggttaggagttcaacataggaatttggggaggacatcgccattcaggccatagcaaggtgtctttgatgaatgaaagggtgtgggatccatg

SEQ ID NO: 813283 - DNA, 616 bp, Homo sapiens
attttgagatgtgttctttcaatacctagtttattgagagatttttaacatgaaacaatgttgaattttatcaaagggcttttctgcatctatggagatagtcatgtggtttttatttttagttctgttcacgtgatgaacatcatttattgatttgggtaggttcaaccaaccttgcatcccagggatgaagccaacttgatcgtggtggataagctttttgatgtgctgcaggatttgatttgccagtattttgtcgagaattttttcattgatcttcatcaaggatattggagttgttgttgttgttgttgttgttgtatctctgccgggttttggtatcaggataatgctggcttcatagaatgagttaggaaggagtccctcctctttaatttttttgtgaatagtttcagtagaaatggtaccagctcatctttgtacctccagtagaattcagccatgaatctgtctgatactgggctttttttggttagtaggcctgcctcagaacttgtgagtggtctattcagggatttgatgtctttctgatttattcyttggtgggtgtatgtgtctgggagtgtattcgtttcttctagattttctagtttat

SEQ ID NO: 813284 - DNA, 589 bp, Homo sapiens
aaaagcccttacactactaataaaggttttgtaagacatagctaaggtgcaggcagacagtggttgtgattcctcacccccaatcaccacctgtcatgactggactagacagactggcctggtcataggaaaaaccgtatagctgcaagcctgcaaccttgctaatgatgcctttaagcaaaatgtctccatcaccaaaatcgctgatgagaagccaccctgtctgcagacaatcagatcccatacgaaaggtgggagaaagaagcttaaatgggcacaacaaattctttctccatgacttaggaacagaatacattacttccccaggagtaaggttgttagtgcccaggggttactctaatatgggtctctgtatctggaaaaacaagaggtaagtgctccccaaaaatttctcatctgcaatttttattgaattatacatacctgagaggtttctgtaaatgaggtgatgtttttgaaaccacttacatgggatatttaatagcattatcttattttttattgtttttatttattyatttattttttgagacagagtctctctctgtcacccaggctagagtgcggt

SEQ ID NO: 813285 - DNA, 601 bp, Homo sapiens
ccatgcatgccagatagaacaatagagaagagttaatagtgggcattcatttacaagatgttgggaaaactgaaatccaagcatgaggaaagtgaggtcacctaggaattagcastggcaggaagccagtttctttccttgggttggagagaaacagtgagaatcagagcccagaactggaatcacctggagggaactagaaccatgaagggaagaaccagtgaaaaagaaatttccttttccactccctctaattccctgtgtctcctagtggttgaatctatccagaagccagttgacaaggaagcctgaaaatgtaaccttgcagcgcccagttccctacaatatagagcaagaagcagagaatgaagataaaagaaaatcataagtgaccagcagacttagaatcactgttttaatcccttcatcaattgtatacatgattgcttcaattatctccagatgaagaagacttctcaaatttccttaccaacaaatgtcatagtcacactctcatagccaggaagttatctttctgttattaaaaaattattttagaagttatttatttttgtatacaatgggtaattactgtcttgtg

SEQ ID NO: 813286 - DNA, 491 bp, Homo sapiens
tcctgccctgccgtcttctgactttgaggcctcgtatcccagtccaaraccatttcaaacggtagaactggtgccagacacttggaggaggcagggcaaagactcgccagtccgtataaacccttttggagaagccaagatgggatgagctccgcagcacgttcccgccagactgctgcaggcagagttccgcggaaaactgaaccccgggagtcctcaggggcccatctaccccggtgcaccgccccctcctttcactgcggggactcggagctgtgggactggagcgcgcaccggcagacttgcgcgcaggttggagttggcgcacacccgcgccagccggggagcggcgtttacgcactggtaccgcgagcgctcaaagcatctctcgggaagtgctttaaggctgggaaatttactatacacttatgccgggcaaaaattggatcccacgccggggaggagaatctgctgtttcactctgtattttt

SEQ ID NO: 813287 - DNA, 610 bp, Homo sapiens
agcaaggaaagaagaaaggaaggaagaaaggaaggagaaaagaaagaaagaaaacttgaaatacattggacttaaaatttttctaaatacctattgagtcaataaaaaaakttaggtagtggtagattgtttaaaaagtaaagaatacgagagcactatatatcagcatttatggaatggagacaaaatgaattttattggtagatgttttcactatttgacaattgaaaataaatgaactgagtattaaaataaaaaatccagaaaatgtgcatttaaacgaacttaggtagggggagaaaaataaagataaaagatacattaaagaatgaaaggcaatagaattggtaaataaactattttggcaagtattttggaaaaaatagaggaagtagaaattaaaaatgtgaaaagatgatgtataattgtatgttattaaattaaaaagtcactatgaaatagatttttttcttaaaaatataaattaacaaattgaaaaagcagaaaaactataagtggcagtgatgaaataaaatgtattatagagtttctttcataaagggctcaagggcgagctggttttatgggtaagttcctttgctaattccaa

SEQ ID NO: 813288 - DNA, 540 bp, Homo sapiens
cagcctctgctgcttagcctggatcctttgcyccatctaagtagtttcccagtggcctgggagcacatcagatcccccagcacagctggaacccaacccaagggtccaggggatgaagctgctggctggtccctgtatcctggggttgtggtacagagctcgagagtgttgagctgagatctgtggctggtactggagctggggaggagtcctcatactcagagcactgaaaggggtgataagacatatcggttcatgggttggtgtgggagcagggtgttcctccctccacagggccagtttggaaagaatgtggcctatcgccctgccatagcctctgcctgagggagtctcgtggcccagaacacctaataaaggaaataaagacagaacaccagtgatcagagaggtctcccccaaggcctagaaatggacccggtgagggagtcagctctccctcctccaccacagaggacagctgcaaatatgaggaaatacaataaagccctgcagataagcacttatcttctggctataatt

SEQ ID NO: 813289 - DNA, 540 bp, Homo sapiens
cagcctctgctgcttagcctggatcctttgctccatctaagtagtttcccagtggcctgggagcacatcagatcccccagcacagctggaacccaacccaagggtccaggggatgaagctgctggctggtccctgtatcctggggttgtggtacagagctcgagagtgttgagctgagatctgtggctggtactggagctggggaggagtcctcatactcagagcactgaaaggggtgataagacatatcggttcatgggttggtgtgggagcagggtgttcctccctccacagggccagtttggaaagaatgtggcctatcgccctgccatagcctctgcctgagggagtctcgtggcccagaacacctaataaaggaaataaagacagaacaccagtgatcagagaggtctcccccaaggcctagaaatggacccggtgagggagtcagctctccctcctccaccacagaggacagctgcaaatrtgaggaaatacaataaagccctgcagataagcacttatcttctggctataatt

SEQ ID NO: 813290 - DNA, 545 bp, Homo sapiens
atattaatcacagtcttgtcaaatgtcttacaaaatgcacagccaagtgaaaaagtctgcattgctatactgtgcttatctgttacgtttccctgggttttgtcaacatctgtgcccatgaggatgtgtctcctggggaaaccgtgtactacggcaggaaaaagatggagtaccgaagttctgctcactgagaaccgctgcagtagtccctcccctgctctgtccgaagctggcttttgccttgatcaccccaggaaggagtacacggctgggtttctttctctgcgtttatatcattttctggtagagcccttaagctgagggagtaaaatcctcaaactactgtgaagactccattcccattagttttctgtgtcaataacgtattgtgttattacttttattcttttgcttcacctgaaaggctcagcaaaagtcctgtgctactgcatgatgagtaaacagagaaaaataaggaatttatattatttaggaaaytggttggaagaaaagcttctcactgaagttcgcttatttcagccaac

SEQ ID NO: 813291 - DNA, 519 bp, Homo sapiens
tttcttaaaaaaagtcatatcataaatgagcatgcaaagcacmtactgcctcattcaaaaaatgtttaatcattagaaatagggcattgcatctattatcatttttaaagtgttaatgtgatagcaatctgaaacaacaaataaaacatctaagaaaggaaagctatacaccttttcttcttaggattattctcagtattgcagcatgttgatggctttactaaacttaccaggctattttctcacctaaaagttggacatcagtgggcaaaatattgccctactgatactacagtgatctatacattttaaatattctttaactgttccaaaatatatatattcattttaaacaaaataggaaaaagaaacagatatgaaaaagacattacctgtaagtccactgcccagaggaaaatgccattaaaacttattcttatacatattcttccagagaccatactctgaatatggatattatacatatatatatatatatatatatatatatatatataa

SEQ ID NO: 813292 - DNA, 463 bp, Homo sapiens
tacgtattaattttttttatattatggtttctacttttgtcatacatctattaatgatgagctgtttattcaaaagtttttaaccaaaagaacagtctgctaaaagaaaatcctttccattacgatatctttgacagcttttggctcagaaattagaaaatgaaatgataaccaccaacaaagggattctgcagctgagtatggatttcctcccagtgacaggcatttttgtaagcacagagcctaataattgtttgaataaacaatgtgtgtgtgtgtgtgtgtgtgtatgtgtgtgtgtgtgtgtgtggtgtgtaatctacacagaaaattgaaaaaaaattttcacaatggttaatggtattaataggaataaatccagatatcttaaaaagagagacagagagagagakagagaaagaggagctctgaaaataattcattaagactctttttatcctga

SEQ ID NO: 813293 - DNA, 579 bp, Homo sapiens
ttaacccccttgctacactgactttgaacggatcatcagatatacstagcaaagtgcttggcagaatgcagatgcccgtaattgttcattccttttcctttctaagactttcatcaagaggagtctaggaaactaaacagtcaactccagaattttgccataacattccttaatgactaatactgtatgaaatatatgatattcatgtactttgttacatattataggtgacgtgttttcaatgttactaccttttttgtttgtttctgggcaagatgtgaggtgattcctgtagatctgaatttgaagcaatctaacatttgtaagaacaatctagtatttttctagaaggtgggaagtaggattaattcctcctgaatcaccttagggaatctactaattttaggctacagaaatatgttaaggatttcaactcctgcccctagctaccactcagaacaaatgaggtaactgcgaaatcaaggtgcttgtttatgattatgtctgattgggagaatttgtggcaacccaaatatggaaacataaataatatctcatgccataaactggtaaacattt

SEQ ID NO: 813294 - DNA, 618 bp, Homo sapiens
ggtcaatatttatttatagttattcatatatatatcttttcctttgctcttcattccttcttttacttacttgctttcattgaacttattttttttttgtatgaaaaattccctttgttatttcatttagtttgtgtacctgtggagtgtattttacaaaacactcattttggcattcattttgaaaagaaaactatactggatagaatattctagtttggacattatttctttaagcatttaaaaaatatcccaatattttctggcttccacttagtatgttgaaatgtcagctctgcagttttatcattgctcctttaagctaatgtgtctttccaaggccttttcccaggtcctcctctcccagccccatggtggtttttaagaccataattttaggcgtttttactgtgagcatttaagtgatggttttctttgtgtttttcctgcttatggtctttctaaatatttaagcttatatttttctttggttttggaaaattcatagccagtatctagttttatattgcttgatcccaactaattatctcctytttttgtttggactacaattgcatgtacgctggataacttcaccacgttctatatgtctcaagt

SEQ ID NO: 813295 - DNA, 618 bp, Homo sapiens
ggtcaatatttatttatagttattcatatatatatcttttcctttgctcttcattccttcttttacttacttgctttcattgaacttattttttttttgtatgaaaaattccctttgttatttcatttagtttgtgtacctgtggagtgtattttacaaaacactcattttggcattcattttgaaaagaaaactatactggatagaatattctagtttggacattatttctttaagcatttaaaaaatatcccaatattttctggcttccacttagtatgttgaaatgtcagctctgcagttttatcattgctcctttaagctaatgtgtctttccaaggccttttcccaggtcctcctctcccagccccatggtggtttttaagaccataattttaggcgtttttactgtgagcatttaagtgatggttttctttgtgtttttcctgcttatggtctttctaaatatttaagcttatatttttctttggttttggaaaattcatagccagtatctagttttatattgcttgatcccaactaattatctcctctttktgtttggactacaattgcatgtacgctggataacttcaccacgttctatatgtctcaagt

SEQ ID NO: 813296 - DNA, 611 bp, Homo sapiens
agactctcccaccatcaccatgacagtttataaatggccatggcaacaacctagaagttactgcccctttccatggcaatgaccaagaagttaccaccccattcctagaaagttytaaataatctgccctttaatttgcattaacccattccctaatttacatataattaaaagtgggtataagtgagtgtaaatacagttaccaacccctcatatgttgccaactctgagtgcacttactgcctataacttagcactgctcctcaaggagcagtatcgtttaaaaaaaattgctggccagcaccactggcttgccgttgaattatatttcgtttgtgaggccaaaaaccctcctgggctaagcctcaattttggggctcgcctcccctgcatcatcagtaagttgtatcttcagatagatccagtaaaatcaaaatatacgtgaaacaaaaatctcactattcagaggggagtttgcttgagacttacttattttatagcaatttgtacaagaaagacttttgcttgttttatttttcagcagaaagtgtaccaaagggagatggttttgcctcctgtgacttaattcctgtgcagaatttgttttgttt

SEQ ID NO: 813297 - DNA, 548 bp, Homo sapiens
ttttgttcatttttaaagcttttcttttaggtgaaagggtatagctgctttctgctactgtattttggccakatacctttcttttggaagctgaaaattactgtattactcattagttaaagaggaaattacagtgaaaattatacaatatctattttgatgaaaaacaattaaagctatagatataaataaagcaggacttccagtcataatttataataataaattcacttattaaaaaataaaaaataaaatgattagatatgaacaccaaggaattaaaaaaagagcagagtaaactcataggcactggaaatgtaaataataaggaggaacaggaactaaatgaaggggaagaaagagaggggggaacaataaaacctaagctcaacatttgacaagatatgtaaaaaagaaaaacctggtaagaacacccaagaaataaaagagaaggcataaatattatttgttaattattgttgcaaatataaagagcatacctactaatttagcagtactttaaaatattatgagcaacttatgctaat

SEQ ID NO: 813298 - DNA, 640 bp, Homo sapiens
catcctttagaagaatatgttattgcacatcttttggcagtgagcccttggtgtttgttagaaagtgtctttattttgccctattttattgaataatgttttacctgagaatataattctagactgacttaactttttttcagcactgcattttctacagtctttctggctttcttttttctctgaaaagtctaattgttgttcttttgtggataatctgactccttttctctgagtgcttttaaagatcacttctttttctttagtttttttgcagtttcatgtagtgtgtctagatgtggatttcttgtttatttgctctccttgagactgtgtcttctgaatctgaggttttgtcttttacccattctggaaaaatttcagccatggtgtcttgaaatattggttctctcttccttccttgtttaattagatgtatattttcttattctattctttgtgtctcttaatctctcattttctatctcttgctctctttgctgcttcagatctgccattttgtctaattttatgtctgtgtacaccagttaggtttttaatttcrttttttatttctagaaattctattttgttctttttgtcctgtctgccaagtcatttttgttagcctcttgcttct

SEQ ID NO: 813299 - DNA, 630 bp, Homo sapiens
atagttttttggtggagtctttagatttttccaaatataagatcatataatctgcaaacaaggataatttgactgcttcctttgcaatttggatgctcgtttatttcttgctcttgtctgaatgctctacaaaaatttaatatataaatatatgtaatatatattatatgtataaagggatcaattcagcaagaggatgtatatagatagatgtgtgtgtatgtatacgtatatatatacatatatatatatagagagagaggatatatatgtagtgaccttcttagctcttcttaacagtttctattttgaaatcttttttttctgatatagctactcctgttcttttcttgtttccattggcgtggaatatctttttccatccctttattttagtctgtgtatcttcataggtgaaatgtgtttcttgtaggcaacagatcattgggccttattttcttatccattcagccactctgttttttgattgcagaatttagttcatttgcatcacatcagtgctcaaaaagttgtggattttggagcattgtgtatatcagatttttgaattagggaaattcaacgtgtattggcaagagttaaacawtccactctttcctggagaaccta

SEQ ID NO: 813300 - DNA, 457 bp, Homo sapiens
cagtagctgccataagaactgaccacaaactaggggcttaaacaacaggaatttctgctytccccatcctggagacgaggagtctgagatcaaggtgtctcaggcctccagaggctctaggggaggatcattcctgcctctcccagcccctgggggctccgggcatccctgggcttatggccgcatcactccagtctctgtctttcttcacgtggccttctctgtgtctgtgtctcctcttctgtctctcagaaggatgcctgtcattgggtttagggtcatcctaatgcaggattatctcttctcaagagccttcccttaattacatttacaaagaccctatttgcatgtagggttccattcccaggtactgggagtcaggacatgggcatatattttgagggccactgcccaatgtgtgataattgtgtctgcttcctgctagaggctctagtgg

SEQ ID NO: 813301 - DNA, 559 bp, Homo sapiens
tgctcgggctggtctagtactcctgggctccagtgatctgcccgcctccgccttccaaagtgctgggattataggcgtgagccaccaagcctggctgagatgggaacttctgaagaacacagggaaccctccagaaagagctttcaccatctgccacacccagagagctggcaatcatacagtcaagtaaaaactgccctattcccctgctccccatccgcttccctgcatcctcacccaccacctccacttagactctgaaagcaaccagcaagtggggagaggggtattcgggagagaatagacaaaagccaccatgcccagtccctggcagctggcagcccccaactaaggccttaactagggcaggaggaagaagatttctctttgaagaaaaatgcaagagtcatttaatatctttgggtggctgctttaaatctctaagtcgatactggatttcgtgacataaaatgtacatacctaagcatgaccagaagagcctcggggtcagctgagctttcagccargggaaggggaaatgcttcccttgctttagctc

SEQ ID NO: 813302 - DNA, 608 bp, Homo sapiens
atcacttacaacatattgtctgtctaccacactaaaacggtagctgcaggagaacagggaccctggctgtcttgcccastgctgtctttgctgcatcccacagagggtctggcacttatagggacacaagtaatacctgtgggtgataaataacagctttgcccttgtctagtctacaggggtatttgttttttgttattcattttttaatttttatttttttgagacagagtctcactcagtcacccaggctggagtacaatggcttgatctcagcttactgcgacttccacctccagggttcaagcaattcttgtgcttcagcctccagagtagctggaattacaggtgcacgccaccacacccagccaatttttgtatttttaatagagacaggagtttcaccatgttgtccaggctggtcttgaactcttgacatcaagtgatctgcccacctgggcctcccaaagtactgggattacaggtgtgagccactgcacccggcccctacaggggtatttggaatccagtcctccttggaaacagaaagatggacatgaaaactgcctaagggcctcctgaacccaatcagaggaggagtgcatgta

SEQ ID NO: 813303 - DNA, 453 bp, Homo sapiens
actctatagtaaaaatgatgatatatcttgctggattcagatttctatggcacttctcttattttaaataagactattcacatttcaaattatactccaagtacaacaataagaaaaggcttttttattaatttttttaacataaagacttattcatgaggggctgaaaggaaaataatttatcataacatttattcacaatgtttcttctcttctgacagcagaaataagagttatattaaacaaggcagtaagaactctcagtattacagaaatataagcattggtatataatttcaggtaatgggatgaggtaaggccattttgtccactaatatattttatccttggtaacagccacatgagtcaacatggaattggagaaagcaaaggtaatttaattctgtatgccctactgaacwctgtgcacttagtactaaaagaagaggcaca

SEQ ID NO: 813304 - DNA, 573 bp, Homo sapiens
tttttctctattctcgaattgctacattcartcagtagtaataacagtcatgatgtaattatgagtaagaataatgacagctactgtcacctcctgagtcctattatgagtcaggcactatgctgagtagttatgtatttttacacatattctctcatttacatgcttttacatccattacctcatttaacattcctacagcccattttataggtgagaaacctaacagagtgaggaaggtacatgtccagtgtcacatggtcagaaagaatagctctttataagtagtcataatcataattcaatcctccttttcacctctaaatcactgtcatcatctctagagcttttctccctgaccccaacctctctccatttaaaccaccatatattcaagcattggcttgctgagaagtctccaaaacaagcaaccctggccgggggcagtagcttacgcctgtaatcccagtactttgagaggccgagagatgggaggaccactcgagcccaggagtttgagaccaacctgggcagcatagtgagacccccgctgtacaaaaagaaattaaaaat

SEQ ID NO: 813305 - DNA, 474 bp, Homo sapiens
ttttaactttagtgtaacattcttttatcttcattactttgccaggcctctgattttacaamtcttcctcctacttatcggctctcactccccatcccctcaccctcactctgacgctttcttcccaaggaagccctggcaccccaccccttcctctgcctccctctaattcagtacagtcagatgctcccttgggccctcattctggctcccaagtatccagaggtcatgggtttgtgattcagatgactaaactcatgctacccaagtacaatgcacaagcctttttgattctgctgagtaacacgaatcatggggttctttcttatgcaattaatcaccctcaaagacaacgtggagtagttttttgtttttttgtttttttttttttttttttttttttttcttaaaaagacagtagtttttgtctaaagaacgaaatcaagcaatagttcagacattgactacatgtat

SEQ ID NO: 813306 - DNA, 474 bp, Homo sapiens
ttttaactttagtgtaacattcttttatcttcattactttgccaggcctctgattttacaactcttcctcctacttatcggctctcactccccatcccctcaccctcactctgacgctttcttcccaaggaagccctggcaccccaccccttcctctgcctccctctaattcagtacagtcagatgctcccttgggccctcattctggctcccaagtatccagaggtcatgggtttgtgattcagatgactaaactcatgctacccaagtacaatgcacaagcctttttgattctgctgagtaacacgaatcatggggttctttcttatgcaattaatcaccctcaaagacaacgtggagtagttttttgtttttttgtttttttttttttttttttttttttttyttaaaaagacagtagtttttgtctaaagaacgaaatcaagcaatagttcagacattgactacatgtat

SEQ ID NO: 813307 - DNA, 630 bp, Homo sapiens
actagatgctggctctctctgacacacctggcctcgagtgctggctccactagctgggcgaccctgagccagacactgagcctctgtaagtctctaggaatcgcaggggcactgcacacaacgcgctcagcacgcagctcgatacaccgttgtgaccgttgcttgtgactgttgctgctgctgccaccctcgccactcagactccactctgcctcctccgctcaactctccgcttaagtgagtccctccctaagagaggcttgccccatctcccactatggaaatcacacccatgagacaagatgcacccacaaatgccagccttcagaagccacacaactcaagtgctcatcaccgtccagcacagggcctggcacagcaggcacctactcgtgtctgacggatgaatgaagagatgggaaccttgctttcttgtcacctgtgtctctcttctggttccaccccaccccagaatctgtccctgacagctccttaccactccatgcaatgggtcttcctgaccaggccacggacaggcaccaaagcctgtccacatggcccagtcaccatccastgcctgaatctggccgaaacaagctcatcaaatatccgatgcccactgtcccctgc

SEQ ID NO: 813308 - DNA, 501 bp, Homo sapiens
gcccctgctctatgccgggcctggtttttgaggcagggacgtgtccatgaacaaaacaggcaagatcctgccttcttgcggctcggccgcagtgggcacagaggaggaggagtgggagcgaatgccacgccgcactccctgaagcccaaaagctttcattctccacagtgctcttctcaccccagcaggtgctcctgccccactttatagcggagaaaacaggcacaaagaggttgcccgcatcctgcctcactctttcttgagcccagtggtcctcagactgtggtgggcacctgcatcctctggagggcttggtagaacccaggctgcggggaccccccagagcatccaacacggcaggtctgggtgggcttcggaacatgcaggtcctccaggctcccggggctgctgctggggcctcgggccaggcggcggtgacctgttacccgaccacagagyttagaatgaaccagaaatgaaggctggtgccagctcagacac

SEQ ID NO: 813309 - DNA, 448 bp, Homo sapiens
cacactttatgaaatgagaaaggagctgaaagataattcaagagaagggtatgaaactgaagaatgccttgtcatcaaagggcaggaagtaccttagctgggttatcccagtctggcacctggtcctcagtcttcaagttcagaaactcaggtcatcatttcctaggaactgggtggattctgggagattgcctcacaccaaccaaactcacaagagattcagtaataagccagagtgccattttttttccttcacaatggaaaatgaacctgatactgcagtttatcttaacagagcacacctacactatggggaagtctacttaagagaccaaatgatagatcagagggttgtctggtaaacttagattcccaagtcagctggaaacatayctagagataatctcttagggtagaatagttgcctgtgagaagtttgcccaaagta

SEQ ID NO: 813310 - DNA, 597 bp, Homo sapiens
tctacaatggcagctttccatggaactgttgtccttcccacataaggcatgacacgtcaatgtaaattgcgcctagttgggttctatcattatsaaataactggtagcaacgttgaatgaagctggatccaatctgctcccaaatgggcttgtctcccactctggagcgtcacccggcctcagggagacctgaggggctggcacaatggcagcagcggtggcagcaaaccagtgtggtctgcgtgagctttttttcatatgatggttgaccacatgtatgtcttcttttgaaaagtctattcatgtcctttgcccactttttaatgggttttcttaattgtaaatttaagttccttatagatgttcgatattagacctttgtcagatgcatagcttgcaaatattttctcccattctgtaggttgtgtttcttttcatattctagtgaactactactgtacatatacttaatactaactgaaaaatagaaagcttgtccacattagtgtcagggttaaaaatatttagaatgtttatgacaatgcaaaaagagtttaaaatatcagaataaatatgttaaggcatttttgtatttat

SEQ ID NO: 813311 - DNA, 609 bp, Homo sapiens
tatattattttattttattccttataatccttggattgggtttcaacattcccctgaatctcaatcatcttcgttcctattcatagtctaaattctacttctaccatttcagcctggttaaraaccattgctggagaactagtgtgggtgtctgtaggtaagaagacactctggctttttgagttgccagagttcttgctctggttctttctcatctgtgtgggctcatgtcccttcaacctttgaagttgctgtcctttggatggtggggtttttgttttgttttgttttttgcttttatctccattgatgtccttgggggtttgtggcataaggtggggtccatcgactggcttcatttctagtagattttgaggagccaaggctcagctcaacactcccacactgtatactctaactctaaggggctggtatcgggtcactggctttgttctctggtccctcaaagttgggacctgctgtgttaaatgggccaaagtgttcctggtccgatggccacaacactccaacgagtggtgccagccaaagcgcttcatcaggcagtggcaatgtgattaatgcttgtttgcatgtgccagcagcagtggt

SEQ ID NO: 813312 - DNA, 611 bp, Homo sapiens
cctttgaagatgtcagtacactgagtaagaagttgccataaaagagcttgccagagaggtgaagcagctttttaatggctaaaaaaacccttgcagacacatccttgtgtttttaatttgtcagagtttctgcagtattttctgattaatgacacatgattataacggcatagcaggcatatttttatacttggttaaatgaatagtttatttcacattcttttagagctagataagaatagggacactttcctaggaagtccaaaactattctgattgattgacatatttatgctaattttgtgggactggcccaattcggaattactatatgttgccagcttttgttctttaatagtctgtttgctaataacattacaattcacatgtggtagttaaaatgcaattcactacagtttcattcttttcatgtacatggaacaatatgtgcctgaataattaatttgtgcaccaagtcatgtcaaaccaaattaatgttttaagacattcmtgagctcaatctacacaaccgcgggctgccatagggttcagaagagaaagggttgcttaggggaaaaaaatgcagctataactataatataacattaatg

SEQ ID NO: 813313 - DNA, 491 bp, Homo sapiens
tttctaatggagttgtatatagctgtttttgagcagctgtttgtaaatgagaagctgkgatggaagaatcttaggaaagtgatgaaggctgttctttatttcaaccctaaagagactatgaaaaggaactagactgagcaaacactaaacttggattattgtgttgtgatgtgattgtgtcctttaggccaaaggcgaataccccaacagtatgattgggagttgggtttctcctgaagggaatggcatttcctacaatcgataaacctgggaagagttcaaagatgggacaggaaataaggaattgaaacacgcggcctggatttttaaacttcataggggacagactcttttgctattatgtctactcaaggtcgagtaaacacaggtgttcacatgatgatgatgccttggttgcgtgtaaaaagactcagaatttaagtaattcgagtaactaattactaggccatatcaggaaatgactgacttcc

SEQ ID NO: 813314 - DNA, 635 bp, Homo sapiens
atgaacttctgagtttgaattcttttgtttaagaatgttgaatattggatcccagtttcttctggcttgtagaatttccactgagaggtccactgttggattgatgggcttctttttgtagatgatctgacctttctctctggctgctcttaacatttttttctttcattttgaccttggagaatctgatgattttgtgtcttggggatgatcttctcatggagtttcttactggggttctctgcatttcctgaatttgaatgttggcctgtcttgcttggttgggggaagttttcctggatgatatcctgaagtatgttttctaacctggtttcattctccttgtctctttcaggtgccccaattcatcatagatttaatctctttacataatcccatatttctcagttttttttcattccttttcattcttttttctctattcttattcacctgtcgtttttcagaaggatagtcttcaagttcttagattctttcctctccttggtctattctgttattaatactagtgattgcatcatgaagttcttgyagtgtgtttttcagctctaagaggtcagttttgttcctctctaaactggctattttggctgtcaactaccatgttgttttat

SEQ ID NO: 813315 - DNA, 503 bp, Homo sapiens
ttaaaattttatgtattacttgcagtatctctatctctttgcttcatgattgtaacacatgctcttgtgtggtagtttaacrtatatttactgaagatgcacattaatattgataaatggtagtattatttcagtcttacaatatgctgaaccttttcctgcaccttatcttattattttaaagaactgtatataagaaatactactatactaattttactgacaataatataaaaacttagaaaaaatatgcgtttgcaaatcttacaaagctattaagtaaatagaaacaaatgtaaagacttatcccagaatctgaatgccgctaacatttgttaactgatacttaattccagtatagggatcttataatctaaataggactacagaagtgaacaagacatcaatataataaagattaccaaatagggagtgtattatgcatatatgaaaataatttgagtttaataccttaataaagtaatatgataaaattcacaact

SEQ ID NO: 813316 - DNA, 615 bp, Homo sapiens
catttaaataaatattttgaaaagagaagaataaagttctttaacaatgctgttttaaaggaataaataaaatttgtrgagataaaaatacagggctgggtgcagtggctcacacctgtaatcccagcactataggaggccaaggcaggcggatcacttgaggtcaggagttcgagaccagcttggtccacatggtgaaaccccatctctactaaaaacacaaaaagtagcctggtgtggtggcagccgcctgtaatctcagctacttgggaggctgaggcagaagaatcgtttgaacccaagaggcagagattacacggagccgagatcacgccattgcattccaagcctgagcaaagaagactctgtctaaaaaaaaaaaagaaaagaaaagaaaagaaaaaaattacggtagcttaaatgaaactacagtgactgggttcaacagccaattaggcactattggcgagaaatagttgaagacagttatcatgaggtcaatcaaagcatcaagatgacaggcagaattatgaaattggagaatataaaacataatttgttcatgatatcatgttagaaaaatacatttttaattcagacataaaacttcagaaa

SEQ ID NO: 813317 - DNA, 620 bp, Homo sapiens
gcagtcttgcttcagggtatatgtccaaagaaaatagaaccagtatgttgaagagatatcttcacacttatgttcattacagtgttattctaatagccaagaggtrgaaacaatctaaatgccccttgagggatgaaaggatgaagaaaatttgacatataagtaaaactcacattcccagtggaatactattcaccttaaaaaagaaggagctcctgttacaacaacagggatgaagcttgagggcattatgctaagtgaaataagccagacaaagaaagacacatactgtgtaatctcacttatgtgtaaaatcaaaagcaagttgaacttacaggagtagagtagaatagtggtggctaggggctggtgggaagggtaattggagagatattggacaaaaggtacaaacgtttacttatatataaaacgaataacttctggagatataataaatagtagggtaattatagtcactaacattgcagtgcatatttgaaatttgataagagcagattttaagagtcctcacttccccacatacagatggcaaccgtaggtggtgatggatttgttaattaatatgatggtaataatcaatatgcaatgcatacatatat

SEQ ID NO: 813318 - DNA, 620 bp, Homo sapiens
gcagtcttgcttcagggtatatgtccaaagaaaatagaaccagtatgttgaagagatatcttcacacttatgttcattacagtgttattctaatagccaagaggtagaaacaayctaaatgccccttgagggatgaaaggatgaagaaaatttgacatataagtaaaactcacattcccagtggaatactattcaccttaaaaaagaaggagctcctgttacaacaacagggatgaagcttgagggcattatgctaagtgaaataagccagacaaagaaagacacatactgtgtaatctcacttatgtgtaaaatcaaaagcaagttgaacttacaggagtagagtagaatagtggtggctaggggctggtgggaagggtaattggagagatattggacaaaaggtacaaacgtttacttatatataaaacgaataacttctggagatataataaatagtagggtaattatagtcactaacattgcagtgcatatttgaaatttgataagagcagattttaagagtcctcacttccccacatacagatggcaaccgtaggtggtgatggatttgttaattaatatgatggtaataatcaatatgcaatgcatacatatat

SEQ ID NO: 813319 - DNA, 557 bp, Homo sapiens
agtgaatctaataattttaaattttctcatttgtgctttatggctttcacaytgacagtctagggacaatgctgagtcttggatgggaaagtcaaggacaagaatggttagcaggcatctttcagtcaatgcagatgagtgtcgaagagatttaaagaggcaaaatgtgtgccaaaagtagcaaaaacagctgggaaacttttagatagtcttacaaaatgacctatgccaacaatgatgactgcagctatcaaaatcaatatttataattgtaagtagtcatagaataccatgtttattttttatgaatttgaaatctaataagtttaacttatttttcatgtatatttacttatttgaaacttccaaaattatttttaataattttgtaagagtcaatcaaaagtattaatacaataggagtaaatccaggcgggtatgttacacattgtcttacttagatttattttctacaaaccatatttgaatttgcagaagcactacattgatgaatttattaaataattaagtactcccaatatctggacagtgttcta

SEQ ID NO: 813320 - DNA, 601 bp, Homo sapiens
gaaaatatttgcaaaacatatatctaataagggcctagtgtctaaaatatatagagaactcttacaaccaaataagacaaacaacctaatttagatatgaacaaagtatttgaataggcatttcaacaaaaatggacaaagggccaacaagcacataaaaggatgcttaacatcacctataattatgaaaatggaaatcaaaaccacagtgagatacagcttcacatgcactaggatggctttaataaaaaacaaaagacaaagccccccaaacctggaaaataacaagtgttggttaggctttggacaaagcagaacctttatccattgccgataggaatggaaaatgctgctgctgctgtacagaacaccttgatggttactcagtaaattaaacatagaattgccacatattccagtaatttcattcctgggtatatactgaaaagaactgaaaatgagtgttcaaacaaaaacttatacacaaatgtgtacagtagcacyattcacagtagttaaaaggtagaaacaactcaaatgtccatcaattgatgaatggacacattcatccatacaatggaatattatttagccatataag

SEQ ID NO: 813321 - DNA, 606 bp, Homo sapiens
aataacaatttgacttttactactctaagtttattgaaaaataaattatggattatatgatttcttacctcatggagctgatttgaggatagagtcagacaacacatgtgaaagcttatattcactttgaatagsgtgacgctataaaaaatgaaaaaccagctctgctttgcacagtagaaaactcacagaactgtcactctgcctggcacatggtaggaggttattaatatttgttatatgaatgaaatatctttgggaactctatgcttttgttcctcaaattcatatagtgccacaaagaacttttttgatgttagtatttcataaatatatccagaaagtgaaatttaagtggctaaagaattatacctactttttattaatattattttttcaacaaagtacacaattaaaattatacaaatatgttttttatagtacactcaatagatttttttatattaaataaaaaataatggctgccattatatatttatctgattttattgaattgcattgaagtgaaattgttgctcgttattctacacttctttctccaccacataaaacttactcattgttccaaatgataattttcatcta

SEQ ID NO: 813322 - DNA, 583 bp, Homo sapiens
ccacacacttcctctcggcagaagtgttctgttggccaggcaaagtggctcatgcctgcaatcccaacagtttgggaggccaaggcgggaggattgcttaaagccaggagctggagaccagcctgggcaacatagcaacaccccatctctaaaagaaaaaaaaaaaattagctgttcatggtggtacagcagccgtagtcccagctactctaaggccagaagatcacttgagcgcaggaattcaaggctacagtgagctatgattgtgccactgcattctagccagggtaacagagtgagaaaaagaaaagaaaagaagaaagaaagagttgtacgtttcctgccaagagtcaagagcaaattttacctgcctggctacctttttaggggaaatcccatggaccaagttaccccacaggctgacttcatgaggacaaatcagtcttggtgactaagcacccctttcctgagaactctgtgatgcacaccaggagtgcctcaccctctgsgacggtgtgaagatcggcaacctgatttcatcacattcatactggctgacgaaaccccgctcccatgccaggtc

SEQ ID NO: 813323 - DNA, 607 bp, Homo sapiens
gaccattctcgtgaaaagttgaaagcttgtttctccatgacaaaaagtcccaagaaagaatgycaactgctaatgctgttggtaggaacaaagagaatacaagaaggaatacaaagagaagcagtttaagaaagtaaacaatgggataaattaaaagctacaaccgatgttaacctgggcttgagcaatgttatgtccacatcgcttgaaatggaaacagggaaaagcaaatcatgagactgtttcagaaagggctccaaatatgagcagataactcatcaaataaaaaggaaaactttaggcaaagtttaaaagtgacagagcttattttaataacaagattaaatcttttagtgatggaagcagcacttagacgaccccctaatatttttctccttgagcatgggagatgggggaaggagacatgatacactagaatgttgtattcaaagtgggagttctgagagtgtcttgagatccatccttcctgaagaggtatggggtcagtgaaaacacctgatgaacagatattcacagcagtgttggctgaagcagcaaagaattggaaaacattcaaatgtccaaaaagtcagagcccctctaagcc

SEQ ID NO: 813324 - DNA, 607 bp, Homo sapiens
gaccattctcgtgaaaagttgaaagcttgtttctccatgacaaaaagtcccaagaaagaatgccaactgctaatgctgttggtaggaacaaagagaatacaagaaggaatacaaagagaagcrgtttaagaaagtaaacaatgggataaattaaaagctacaaccgatgttaacctgggcttgagcaatgttatgtccacatcgcttgaaatggaaacagggaaaagcaaatcatgagactgtttcagaaagggctccaaatatgagcagataactcatcaaataaaaaggaaaactttaggcaaagtttaaaagtgacagagcttattttaataacaagattaaatcttttagtgatggaagcagcacttagacgaccccctaatatttttctccttgagcatgggagatgggggaaggagacatgatacactagaatgttgtattcaaagtgggagttctgagagtgtcttgagatccatccttcctgaagaggtatggggtcagtgaaaacacctgatgaacagatattcacagcagtgttggctgaagcagcaaagaattggaaaacattcaaatgtccaaaaagtcagagcccctctaagcc

SEQ ID NO: 813325 - DNA, 597 bp, Homo sapiens
catcacaaagcagtcttcgtgcacagccttggattctcctggagtccaaggaatgcaggtcttccagagacatcttcaagtactctcctacttctgggcatggggtgacttgaggaatgttgaagccattctgaccacctatggcacagaggaagaactctttatagggcagtcaagttctaaacccttttgccagtgattttataatcctatcatttccaaaaagctaatttcaggctctaaaagcctttattttacttctgatttctggaagtgaaagcctcctttaacccttgacatattctcatttcttggtttctgaaaggattctggggccaacagtgaataaacctggtaaaaggacacgaattctgaggtaagcccccaacctactttccagacttctctctgaatcatattatcaatacatatgtagacgacactctgttcctcacatttcatttcctcccagacacaagccacccagcacacttcaccataagactgtccaatttggaawagatctagtcaaatgaacgctattatagctccctacactttaaacacatccttacgcaactctaatacagtttgttt

SEQ ID NO: 813326 - DNA, 626 bp, Homo sapiens
aggggtgaatatgcagagcacagtatttttagggcagtgaaactcttctgtatgttataatgatgaatgcatgtcattatatatttgtccaaactcatagaatgtataacacccagagtgaacctcatgtaaactatggagtccggtgataatgatgaaccaatgtaggttcactgacacaaatggacccctctgatggggatgctaatgggggaggcagtgcatgtgtagggtggggtgtatacgggaaatctctgtaccttctgctctgttttgttgaaacctaaaactgctctaaaaatacagtctctaaaaaagttcaagacagttacatttaattaaggacattaaactaagcatggggcctgcatgggtcacactcacatgaagctggtcctgtctgctgggtctcctcacctggcctgaccctggccatcacacccaggcagtggaagccaccacacagtcactactgggcccaccttcattcattcatttattcattcaacacagatttactgcgtgtctrtgacactccagggactgtgctcagtgctggggacatagcagtgaaaatacaagtccctgccctcacagagctcaaattccagagggagagacaaaca

SEQ ID NO: 813327 - DNA, 515 bp, Homo sapiens
tctaagctttttttttttttttttkgagacaagatcttgctctgtggcccaggttagagtgcagtggtacgatgatagctcactgcagccttgacctcccagggtcaaacgatcctcccactgtagccttctgagtagctgggactacaggcacacaccaccacgcctgactgatttttatattttttgtagagatgaggtttcaccatgttgcccagactggtcttgaactcctgggttcagatgatcctccctactagccttccaaagcactgggattacagatgtgagctactatgcctggcccctgagctctttctttttaaccaatttattatcaagtgtttaaggtattgaaaaatgagtagactcctccccaccactgtattcatgactagctccttcttttaggtgtctgctcagtatcagatactcagaggatccttccctgcttgatctaaagttggtcaccgcctctgatatgttttatctcagccctttttagtttcccatag

SEQ ID NO: 813328 - DNA, 648 bp, Homo sapiens
tgccgtcttacaaattatatgaattcgtaagcttccaactgttatggagttacccattttgagaaatctgtgctaaaaggacccaaacaatgctgatgacaatgatcaggataataagtacgctgggaagacaacaaaatgatttaaatcttagacaagtcattctaggtgtctccactgtttcagttcttgcattcattcttgtggtatcttttcccttttaccaataaaaaagctccctgacatcacattgtggcagtccccatggtttgccgcagttactgcgggactgaacgaaggaggacgaatgaagaaatgaaaaccaaggaaaaaaggagctgtttaaagaagggtccagggaagaagaagagggctcccagcttctagtgagcaagggcagcagccctgagcttctacagcccttcatatttattgagtagaaagagcagggagcaggaggtaatgattggtcagcttctcaattgatcacaggttcacattattgctaacaggtttcagatgtgcctaatctcaagaaacgccgcgcctggggyatgactgccctcagcattccctctgggtggcagacgcagtttgccaacattctgcattcatgagaacagtttactgtttactcatataacctcc

SEQ ID NO: 813329 - DNA, 603 bp, Homo sapiens
tcttgaaaatgtggcaattctagataattcgaacaaagaatgcactggcttccactgatgtatattcaagaaggaacttatttttctgaactaactaaaatggcattttgtttcagttattctgttgctcacagcctcactcctatggttagatgttgacaggagatttgaactagaagtttccttattcctcttcatatctcttaatactgtgccatgctaccacttaagtatggatttaactaaacttaatcaaaagagaaaaaatcaatagtttttatgctaaaaacctttccctttggaaagctcaagtcattaatcagtggagggacagtaaagggcacttattaaagcataggctttgaactaagacagggtcagaagctcattttaacgtccacactttctatctatgttgaatcacaaaagtttatagtctgtcagcctccatttttcatctcctctgggatgagccttatatgttaatgttataataagcatgttaagkactaaagtatataagcaaatgaattaatataagttctggtgtatagtaagaactcaataaatggcagctactattatttttattgttttcaacat

SEQ ID NO: 813330 - DNA, 543 bp, Homo sapiens
ctcaagcatgaaagtaactcacatttccgatgcttaactattttttccttatagaatctatccttgtcttaaatttttctaaatctccttttatctttccaagcttatctgtatgaaaatctttcattaaatgtaaacacagatagatacatgtagcatttatagaaaaaattcacacttccactgtcattaacttgctcccttttaaaaaggagcttagaagctcctttttaatgaatatgtgtttgacttctagacaatactttctatgtaatttgtggggcccagggcaaaatgaaaagccaggacaccagctgaggaagaggacattaccatcccttcccagagcctaccttcccaacccatgggggacaggtgccacccaaggcattacaacctccctgtaacctctctacytgatgtgctcagtacctaaattgtgggtgggtgagaggccattgcagagttgtccagcaaaggcaccatgatcttgtaagccaaaaatgggatggtcactgatttgatcagcacagagctgcccca

SEQ ID NO: 813331 - DNA, 603 bp, Homo sapiens
tggattgaactcaacaaataaaagcaaattggacagaaatgtgcaggttatgttacttttcatcgaaaaactaaagaatataagcatatacatacacgttcatatttaaacatggaagaatcamccaaaatattttgaacagttatgaaaagaggaagggaacagtattgagcagtaaggaacagaagttcatccttttctaacataccttattgaaatataaaaaaatacatatttttaaatcaagctattaaaaacaagtaaaaagtgaactaaaaatgaactaaagtgtatctattggtgacaaaaccttgcagagtggaactattccaagtacttttaaaatgcaacacacgaaacgacaactcaaacactatgcaagctgaaaataaaagtactatgagaaaatctaaaattacctcctttcagtgatcatattggtggtggcacttttcatatagttgttttaatattcttagatataggatagataattatgttgtgaaccagaattttcagtagagagtggaatttatcaatctaagtttgatactggaaaagtaaatgtatgttaacagtcaatggtgatgtatttggaagtat

SEQ ID NO: 813332 - DNA, 656 bp, Homo sapiens
ttaagattgagtctcactctgtcgcccaggctggtgtgcagtggtgcgatctcagtttactgcaacttctgcctcctgttttcaagtgattcttgtgcctcagcttcccctgtagctgggattacaggagcacgccacaacgctcacctaatttttgtatttttagcaaagatagggtttcaccacggtgtccaggctggtctcgaactcctgacctcaagtgatccacctgcctgggcttcccaaattgctgggcttactggtgtgagccaccactcccggcccaaattacctatctctgaatcatcaactaattctgcgttattactcccctatctttcttagaaagagagagagataatatatatatatttatatttatatattatgtatatattatatattatacatatatatttatattctatctatctgtctatctatctatctatctatctatctatctatctatctatctagacagaaggcaaggccctagaaatactcctcactagttatagaggctttctctcacaaaacaaagtagtcccctttggactctcagttgcacctcttttgcctgcaccagaaggtgacaaattttatatcttataaatatrgttggggcaacattctatccatctttcaccaccaaa

SEQ ID NO: 813333 - DNA, 585 bp, Homo sapiens
ttaataatccttttgtatttttttaagctgaagaatccaataaggtgaaaagtttatatctataagaacacagaagaaaatgtataaaccaactccatgcctagtactcaatcctaacttactatgtaaagcaactcactccacctgttcccttgggcaatagtttgacttgaaggatctaataagatagattttttttttaacttttagtcttcaaagtgtctttgaataaaggtgaaaatataaaattctagcatatcccaaatgcaaaatggaaaattaatgtcatctagcaattagaaaaattatctgccatagtagagcctttataatagctgcacatttgtctttcttgacctgataggcttagatcatgtctaagtcacaatcatctcatttacagcttctagcacagggctttgcagctaagagtgtcagtaaatacttgaacaccmataaactatagaatatatgaagatcaaatgtgtatacatattactaaaaaagttcttactttttttaagaattaaggagtattttgaaaatctcaagtttcacttgcatgcaaccatggtttactaaagt

SEQ ID NO: 813334 - DNA, 499 bp, Homo sapiens
agttcttctatatgaaatatatttaattcttccataatcacaaatcatgtgtgtcataaacacaagtacacacattaaaaatatgtctccagctgggcacaatgtaatccctgcactttgacaggctgaggcaggaggatcgctggaggctaggagttgagaccagcctgggcaacatggtgagactctgtctctacaaaaaaattaaaaaacaaaacaaatcaattaaaaaaatctgtctctataattagaatattttatttatacatagtcagacaggttccctcagtcacagaagagtacttgctcctcccagttctgagacattgacccttgagttctatcctcatcctgctgtgggtcgggagttttgatgagggagatactgaccargagatgaagtctccaaaggggtctcttggtctcctcctcacccctccagactcccatgccagggtctccccgtggccgcctctgggtagagctccacaatcttcag

SEQ ID NO: 813335 - DNA, 614 bp, Homo sapiens
tgatgctgtaacaggaagtgctactgcttcgtaaagcatccctgatcactcgtgctgaagaggagctatgctctactcatcctcaatccctaccacagttccatgcacgttcgaggtgcccaaccaatggtgcgtggaaagtggaggaaagcactcatgcaccaacaaataggacactgctcatctgaactgcttccaagtgagctgaaaatgaatatcaagtattcaaagaaccctcacaacggaaataatttctagaagtacatcttactgctctacttgtcatttagggtaaagcttcaattagaataaaagagttctgtccttaacgatgggttgaaacagcagttgaatccttcaggtcctcggtaaacacagacctgggcttcttccaggttagcaagtgaaagtccatctgcactacctgcaggaaacttcataatctcttttttaaatgacacaagaggacctaatttatgcagtcagcaaatattttcagtatactcactatacaagcgccrccctaactgggatctgaacataaggaagagatggtctctgtctttaagagttactcggatatttattaaagaaggaaatgagggaaaaaggca

SEQ ID NO: 813336 - DNA, 631 bp, Homo sapiens
tacattacaaactttgattactgctatggaagaaaaatacagagtgctctaagagagaataacaataggaactgtatttaaattgaaggactataagaggagtctgaggatatgaaaaatagagctgatgcccaaagatgagaaaaaattaattaatgaggacaaataaggtaaaaccattcccaatagaaaaaaaatggaatctacaaagaaaagaacatggcacccttgatgagctgagataaggccaacataactaaaagagaatgagccagtggcatgagatcagtctgcagagacagtcatgggccagcttatgtaatgtctttttggataatgttaagcatttgattctgtcatcattcttagttcaacagaaagccactgacggctttcttcaagcaagaaaatgagcttatctgatttacattttttaagtcactaaggttgctaggggaactgattaagtatctgctaatgtaggagagatgacaaattatacaatggtgatagccacasaagaaaaaagaagtagaaagattctaagtacactctgaagatgatactggtagcaaaggtgttagattagattagatggggggatgaaggactggctagtgtcagcaataat

SEQ ID NO: 813337 - DNA, 601 bp, Homo sapiens
agattactgttaattattttagatgtgctaatggtattatgtttatattttagagtctttattttgtagaaatacacactgagatatttacagataaaataatatgctgtccaggatttacttcaatataatccagggaagggtggatagggaaatggctgggtatacaggtaaaatgagactggccatgagctgattgttgaaactgaataacaggcactaaggagtcagtatactattctacttttgtacatgcttcaaattttccataaatttatttctcaaaagtccatttgataggaaaaaaatcctctgaataaatagaaatataaggggtaatctggaatatccaaagttcagaatttaatcacaacgttttttcaatccaaaaatatgtgattcataaaacatacctttaaaaactagtaacctactatttaaaacagtaacctctattgaacctctatttgaaaacaatatcactatttaagaattcaataaactatawcaatatcactacttaagaattcaataaattcccaaagtccattataaaacagttccttgataactgaaataatgtcactttgatcaatgtcca

SEQ ID NO: 813338 - DNA, 498 bp, Homo sapiens
atactcattatgcatataatagactaagaattaatatctagattatataaaaatgtcaacaacaaaccccctatcaaaagaaaagaaacaaaaccagcatttcatagatgagaaaacatgaatggccgatawcatatgaaaagctactcagtttcatcagtaaccagggaagtacaaattaaaaccagagtgacatgttcttttacacctaccaaacgagcaaacatttaaaagtctcacaccatcgagagcactaacgagaatgtgaaacgagagacactttcataagctgctgttgggactgtaaactggcacaaatactctggaaaacatttgacattatctagtaaagttgaagatgtactaacctgacaatccagcattggcactcctagttacatatcctatagaaacttttgaacatatatatcagaagaatgcataattatttctaccacagtactatctttataacaaaaaatttagaaacaaaccaaa

SEQ ID NO: 813339 - DNA, 534 bp, Homo sapiens
tgaagatgtactaacctgacaatccagcattggcactcctagttacatatcctatagaaacttttgaacatatatatcagaagaatgcataattatttctaccacagtactatctttataacaaaaaawttagaaacaaaccaaattttcatctataggagaatgaataaatatgttgcaaattatttgtaaaatgaaatgtcctaaatagtagttaaaaatgaataaactaaagcaaaacgtgcaccaaaaaggaagtcacgaagtgagacttgtatgtcttctgtgtgattccatttacgtgaagtcaaaacagcaaaactaaatatgaatgagtgataaaactataaagaaagcaagaaaatcatatacacaaaactcaggacagtaatcatctctagaacggagacgatgggattggggaagagcacaaggaggacttcggggggtgtgcgtgtgtgtgtgtgtgtgtgtgtgtgtgtgtgtgtgtgtgtgtgtgtgtgttctagtataaaaatttcataataataaagt

SEQ ID NO: 813340 - DNA, 526 bp, Homo sapiens
ctgtttctactgaaagcatatcacttttacattatcataaagttgaaaaattggaagttgaaccgtcttaagttggggactgtctgtaaaccacttttctgaaatgttgaacaaggaagatwatcttttttaagcttttaagattcattaatacagaggtgatacatgttttattccttgatctagatttattatgctcttttaattttataaaaaattaactttaaaaaagcaaccttaaatcctgaatgaattattcttaaaaaatcgctgcaattgggtatacctaattacgagaactcaggtcatgaacacacctttctagtgttaaataagaggggtgagctaaaataggagtacaatggggacaagagaggaattgaactcatagtctagaaatttcagccaggaagtgacttcggaggtttatcatctaatcaggtcccttgtctctctctctttttttttttcaaaagacttatgccctggcatttaggtcccttgtctctaaacaaagtgaaagcta

SEQ ID NO: 813341 - DNA, 541 bp, Homo sapiens
gacaaaaggctgccctgttcccactaacaaagctaaaaggtaaacctcaagatcatcaaagttcttgagtaatttaactgcaccccagaaaaaagcttcagaatactttcagggataaattaaaaaaaaaaaatcttgaggggaggagccaagatggctgaacagctctggttgcaaacagcaacagctctggtctacagctcccagcgtgagcgatgcagaagatgcatgatttctgcatttccatctgaggtaccaggttcatctcactagggagtgccagacagtgggcgcaggtcagtgggtgcagcgcgccgtgcacaagccgaagtagggcgaggcattgcctcactcgggaagcgcaaggggtcagggagttccctttcctagtcaaagaaaggggtgacagacagcacctggaaaatcgggtcactcccacacgaatactgcgcttttccaacrggcttaaaaaatggtgcatcaggagattatatcctgcacctggctcggagggtcctacgtccacggagtctccctgatt

SEQ ID NO: 813342 - DNA, 541 bp, Homo sapiens
gacaaaaggctgccctgttcccactaacaaagctaaaaggtaaacctcaagatcatcaaagttcttgagtaatttaactgcaccccagaaaaaagcttcagaatactttcagggataaattaaaaaaaaaaaatcttgaggggaggagccaagatggctgaacagctctggttgcaaacagcaacagctctggtctacagctcccagcgtgagcgatgcagaagatgcatgatttctgcatttccatctgaggtaccaggttcatctcactagggagtgccagacagtgggcgcaggtcagtgggtgcagcgcgccgtgcacaagccgaagtagggcgaggcattgcctcactcgggaagcgcaaggggtcagggagttccctttcctagtcaaagaaaggggtgacagacagcacctggaaaatcgggtcactcccacacgaatactgcgcttttccaacaggcttaaaaaatggygcatcaggagattatatcctgcacctggctcggagggtcctacgtccacggagtctccctgatt

SEQ ID NO: 813343 - DNA, 587 bp, Homo sapiens
tatttttatgagcttcaaccacgaagtctttgaggggaatatgrccagagagtattagggttggattcgagggtgcataccagtggcagtactgcttacaaatcagccaatattgcattcctttgcaggaactctgtcacactgtttctgaagaagtataactgtgcttctttgccagcagctgcacagacatattttccacattactcaagcttctgctggtggccacctggatgtgacagacagagtcaagcctaaactgaattaaaagttgtcagccatcttaattcatttccaggaagttaaaaattatccacaatatatttcctgataatatgaaaaaccaaggatttttttgccctattttgaatatttccatttagaacataaatagatgagcagtgctgatagtgttcccttaaagtcgtttgtatgtggctgcctattttgtcctatttatgttaacaatgaacttggtgaagctaatgagaaggttattttagggccttggaaaccgcagtaaaggaaaatgacagttcccatagaaccgtacgtagtgtgactgaaatagaaaggtggtgactggc

SEQ ID NO: 813344 - DNA, 591 bp, Homo sapiens
tcattaacatatgtcttaaatgacaaggaagaggtgttgaagataaaattactttttcctatgagtatgaatcagcaacatgcagtaacaagcaagtaataatagttctgcgtgtgagtgcctacagagggtaagaaaaatagcatcagattgaaaaagcaagtgcacctgcagaagggacccaggaggctgcagagcacagctcccttgagcatcatctcaaagtgtctcagagcacagtgaccctaattctggcaagtcaggttggcatgagatggatggagcacactgaaatctccagatggtcagacagcccaccctcagctgcccctggagctcggcaaaggcaagctacaaggcactgctacttggccaagagtttaaaacaacagcttctgattctacagtgtctgtggtttcacaaccacttaaccttaagtaaggaacagctagagtyagctgaatgaataaatacacgttaacgttacataaagagggaaaaaaagcaatacttgagcacatagacttcaaatagtgtccagctagctgtgtccttggcatcccagtgatctgggtctttatctttgattt

SEQ ID NO: 813345 - DNA, 574 bp, Homo sapiens
aactccatctcaaaaaaaaaacaaamaaaaaaaaaaccagaacaacaaataccatattcatggtggtacagacaaagactaagctattggcatagacaaggtccaattgaggaagcacactctgtcactggtgatgaggaatccagagttggtcattcccctaaagctcagtcaggagcagtcacctgcagggaaggctaccagcagaagccagcagcactgtgaccttatggaaagtggacagtgttcacaggcacattaggtaaatactgcttcagtgacccaaagaaaaatgcaaaatcacagaagattgtagcaagagtgacttatgactgaatctcagagaactgaactgtaggcttaactatcccctgcctgagctcagagaaagaacccaagaaagagccctagctgagctttggaaataggaaagctagaggccaggagcttttttctgcttacctgaaacaccatttcaggtgtttttgtagcacagaaatggctactaaaagtattagggtgcagaaaacaatggtccaaatgatggtgcttcagcatgctgagcacactgaac

SEQ ID NO: 813346 - DNA, 680 bp, Homo sapiens
attgttattatttttgtttaaacagtcaatatattttaaagatattcaaattataagagaaaaagtcttacgtatttgtccatgtagttatcatttttgttgctstgaattttctgtataatcatatttccatcaggtgttattttccttctgcctgaaggatttcctttaacatttcttatattgcagatctgttagtgataaattattccggctttggtatgtctgaaaaagtatttattccaccttcatctttaaaaaatatttttgctgggtataaatttctaggtaacagtttgttttttccttcagtagcttaaagatgttgctccactgtcttatcacctgtatcattgtttcctatgaggagtcttctgtcatccttatctttggtcttctgtatataatgtgtcttttcttctctggctacttttagtattatctcttcatcactaattttgagcagtttgattctgatgtgccttagtgtactcattttcttcatatttttgtgcttaggatttattgactttcttggacctgtaggtttttagttttcatcaaaaccagaaaattttcagctattattcctttgaatagcttttctgtccctcccgctactttagggacaacaattacatataaatcaaactgcttaaagttttcctacagctcactga

SEQ ID NO: 813347 - DNA, 606 bp, Homo sapiens
aatatccatcttttaaaatgttctttgtccaactatttaattatgtaaaaattattgttagcttgtgggccatacaaaaataaatgccaggtcacatttgctgacttctgcaaaaacatgccttttctgcttaaatgacctactgttggcttctgatttgcagctaagaaccctgactaatacatttagtctatgcctgttttgggagaaggttattcttaagccactgagaaaggcaaacactcattctgcttttcttcaactgccagagaagaattttttacataaacctccatgggtcacctgctgcaatttttagcaactcataggctccttgaactgtctgatataaccccagaatctcctcacaaggaaagatttgaaatatatagtttttgttcctctcctatagattaccttgctctggagagccaatgttcatctgagtgagctatttgtttcgttgtcacctgaaccacatgactgtggatagatacagctcagcggccatagctgtagctcagtctttctgtaactgaygggaaagatatgtgaaataagacacatagacatggcaataaaatgaagtaggctgcaagatgaaag

SEQ ID NO: 813348 - DNA, 620 bp, Homo sapiens
aaataagaccaagggagtcaaccaaagctaagccccatgcatccaaatcttagcagggataactatagccaccagttatctgggcatgtcagcaatcttgggattgtggagctgtccttactcccttgattcattttgatttacagcttctgataacccaaattgcttcttcttgctaaaaggccattaaacttcaaatggcgatgcaaatgaaaccatgcatggatgtgccattcttccatggacccttaaacagacctcaggaggagccctaactgccactttcccaaaacagaactccctgtcagcaggaagcagtttagaatggtgattgtctactttccccaacagccgttgggggtctccactcctgaagaagggaatgaaaggagttagctttctttaggcagacagtaaggaaaggtccccagagaacctgtgaccagccccacaagtgctgacaccagatgttttgtgcagataagagaacttacacagttctcttaagcatgcctgcagtggactaagggcccgcatgcgcactgsggggatggaggggagccacctggaattcatgccttatacaaatatggaacccagccccatcagcttagatatat

SEQ ID NO: 813349 - DNA, 626 bp, Homo sapiens
acagcaatatatacttctatttyttcttcccactttttggtactatcattgtcataatttctccttctacatatgttataaaacctgcacattcattgacattattttttgctttaaggagtcaattattttttaagacatttagaaatgaggaaaaagtcttttttttttttttttttttttactcacacatttaccacttctagtttttcgttcctttgtgttgatccaaattttcatctggtataattttctttaacctgaagaactttatcatttcttgtagactgctcatgaagaattatgtcaggttttgtcatttttgaagagtagtttaattaaacacagattcctatgttgagagattttgtttttctttcagcaatataacgattttgttccattgtcttttggctttcattgttctaataagaaatctatcaacattatctttttcctttgtatatgatgtgtcatttttctatagcagcatttaatatttgattatgatgtgcaccagtgtattttattcatacttaacttgtttgggattcactggacttcttggatatgtggttttatagttttcattaattttggaaaaatttctgccattatttttaaag

SEQ ID NO: 813350 - DNA, 530 bp, Homo sapiens
ctttggcccaacaatcaggctctatcctattatccagtcctaattgtatgcctcattccaggtaaactgagataatcatcattttgcaaatatacactgtacttttttacttctgaactttcttgtcccaccccaatcccacatcctctaccatttttgcttaggaagatctttcccttcgaagcttaattcaaacaattattctaggaaactgttttaatgaaaatagtttgaatagtgtaaaaccaaggacatattttataaggatgctttctagaacagtcttcaatataattccatgccctcatgtccaactattccaataaaagcatttctatgtgggccaggctatgatgcattccaagtctgattctacaatgggatgaatttagggacrcattttagagtgtggatggatagattatcatgggtgtccaatcttttggcttccctgggccacactggaagaattgtcttgggccacacataaaatacactaacactaacaatagctgatgagcttccaaaaa

SEQ ID NO: 813351 - DNA, 530 bp, Homo sapiens
ctttggcccaacaatcaggctctatcctattatccagtcctaattgtatgcctcattccaggtaaactgagataatcatcattttgcaaatatacactgtacttttttacttctgaactttcttgtcccaccccaatcccacatcctctaccatttttgcttaggaagatctttcccttcgaagcttaattcaaacaattattctaggaaactgttttaatgaaaatagtttgaatagtgtaaaaccaaggacatattttataaggatgctttctagaacagtcttcaatataattccatgccctcatgtccaactattccaataaaagcatttctatgtgggccaggctatgatgcattccaagtctgattctacaatgggatgaatttagggacgcattttaragtgtggatggatagattatcatgggtgtccaatcttttggcttccctgggccacactggaagaattgtcttgggccacacataaaatacactaacactaacaatagctgatgagcttccaaaaa

SEQ ID NO: 813352 - DNA, 616 bp, Homo sapiens
tatatcaaagaagcatatttgagttcaaataaaatttttctagtcttatgcaaaatgtaaacttcccatcttttttcatgttttcttttacatcatcttcatcacattcttttttgcagtgggaacgcctatcaattctgttttttaatctatgttctatttccccagtagatggcaccccattacaactttcaattactttctgactacaaattcagtgcaaccagcccagaaaatcaatgcagactgaagagaatgtgggagtatttgttcatcaaaaacagataaataagcaaaaatttacactgggcacctaacatatgcatctatttttttaaaatttaaacctctaatttaaaatttaaattaaaatttagaaaaatctaaattaaatttaaacatttttctagtttaaattttagaaaaattgatgcatatttttgatgcatgcctaatataaagtttagaaaatttaaatttaaattaggttctaaaataaggtataagaaagtaattagaatgtttttatacaaacatgtcagactaccrtgtgttagcctgagtgctacccctcaaaatgacaaatgtttgagattatggatgatcaagttgattc

SEQ ID NO: 813353 - DNA, 620 bp, Homo sapiens
ccttctaataaaacacttttggaatacaacctgaaatgtatatataccctttattcctaaacattcatttttagaaatataggaaaataatcaacaatgtgcacaaatgtttatctgcaagagtctccacttaagcattagtcattagagtgaaaagtttggaagaaactaaatgtctgacaatagggaactggttatataaattgtgtgctcatataatatagtcatgaaaaatcatgctctagaagaatattaaatggtattgaaatggtcgggttcacagaagcaaaataagcagcatgcagaaaaatgtattcacacgtgatacagttttgcaaagaaaaatacattcatgtgtaatattagtgtttcatatggaaaataaattagaaaggtaacaatgataattttatttctatattaggagttgagattatggaatatttgggggctttgtgcaatttgcacgttttctacaatgaacattagtatcaaaataaaaattaatttttaaaaataaatgcccagaatggtgtaaacctgggagtctcaatataatcagaaatgaagaaaacccaytgcacagagaagaagatgtaaattctgacttgtgaaggttt

SEQ ID NO: 813354 - DNA, 596 bp, Homo sapiens
cttcagcaaagtctcaggatacaaaatcaatgtgcaaaaatcacaagctttcctatamatcaataatagacaaacagagagccaaatcatgagtgaactctcattcacaattgcgacagagaataaaatacataagaatacaacttacaagggatgttaaggacctctcaaggagaactacaaaccactgctcaaggaaataagagaagacacaaacaaatgaaaaaaacatttcatgctcatggataggaagaatcaatatcatgaaaatggccatactgcccaaagtaatttacacgttcaatgctatccccaccgagctaccactgactttcttcacagaattggaaaaatctactttaaagttcatatagaaccaaaaaagagcctgcatagccaagacaatcctaagcaaacagaacaaagctggaggcatcatgttacctgatttcaaactatactacaaagctacagtaaccaaaacagcatggtactggcaccaaaacagatgtacagagtaatggaaaagaacagaggcctcagaaatgatgccacatatctacaaccatctgatctttgataaacctgataaaaac

SEQ ID NO: 813355 - DNA, 589 bp, Homo sapiens
cccagaacttaaagtataatagaaagaaaaagaaagaaagaaagaaagaaagagagaaagaaagaaagaaagaragaaagaaagaaagaaagaaagaaagaaagaaagaaagaaaagaaagaaggaaggaaggaaagaaggaaaggcaagcaagctcgattccatgttagttctcatttttcacttcaatcctagtagatatattgttttaaggtataaaatcttgattaagacatttatcaaacttctattagttcaccctaagagatcactcagctttaagcagcccaaaatgtttttcagcctttcttttaagcttgtcttcactgaacttttctcgaggcaatagaaggaacttaatacatttgaagacacttgaacacataaataaaaaggtaatttgcattctgtgtgtgtgtgtgtgtgtgtgtgtgtgttttttaattttcaacacaaagactctatttttttgatacgattctaatgcttttctgttcagcacatttttggctgcatgagtagcagtgaactctggatgacatctgaaaattctcatcctggggaaaggctggcttcagactcaggaggg

SEQ ID NO: 813356 - DNA, 627 bp, Homo sapiens
aacggtggtgaatttaggcagcatggctggctgatgggaaagttatgtaactatttcaggaagtagattttaaggcagtaaagagactaggaaaggagaagacagaaatttgtgtagcatatcttacatcatatcgtcatatcatactgttacaatgtgtaaggccaggcctcaggttttccagatataaatcagatgctatcatgaaaaaattaactggccctgactcaaggtctgtgtagttttaagcccatgcatacataatgtttcttatgtgtctggtagaaggcactgggaaagaaaaagagaatgataggaacataagatttatggatgaaaaaataataaagacattaccaaaatgggctaagtccttgctcaaatgttaccttctaaattaggcccaattccccatttaaaatcagctccccttagcttcccatttttctgatcttactttcttcccccccatagatcttaccaccatccaacatcttaaaacatttattatttttattgcttattgcctcttttccctgcatggagctccatgagggcaagtrcttttgtttgttttgctcatatatcccaagagctgaggaacaatgcttggcataaaataagtat

SEQ ID NO: 813357 - DNA, 527 bp, Homo sapiens
aaaaatagcagttattgaccagaatagtaagctgcttaaaattgatgttatggagggtttgcagttatggtaaaagtacrattgtttatccatgggaataagtggccaaggtaaagaggagaacaatatctctagaagtggggaggccaaggaactgagagaacagacattggaaaggatctgctatagggatactgaactcactaataagtaggagagaattagaggtagacaaagtgaaacataagttaattatctccaaagattaacaagcagtaaccaggaagtgctggtgatatatggtggcacgagggtagagatgacctcaacaaacccagtcacttccagaatgcatacagatctggcttaaaatgttctggtcaggctgggctcagtggctcatgcctgtaatcccagcactttgggaggctgaagcgggcggatcacgaggtcaggagaccatcctggctaacacggtgaaatcctgtttctaataaaaatacaaaaaaattagccgggcatggtgg

SEQ ID NO: 813358 - DNA, 648 bp, Homo sapiens
ctctgaccttcctgcacctggatatttatttcttttccaaggttaggtaagttttgttattatttctttaaataatctttccactccttgttcttgctcaattccctctggaacatcaataaatcttagatttgctcttttaaggtaattttctatatcttgtagatgatcttcattccttttaaattttttcttattcctcttctattttcagtatttcatatttcagtattttcaaaaaacttgtctttgaactcactaattcttacctctgcttcatccattttgctattgagagcctctaatgagtttgtcagatcaggaaatatatttctcaggtccaaggtttctgtctggcttttaaaaattattttaatttctttgtcaaatttctctgatgatttctgaattgttttttcatttttgtaaatatttattttcattcatattgtgtaaataccaagaaatgaaatagctagatcacacagtaactgtattaatactttaaattttttaaaattatactttaagttctgggatacatgtacagaatgtacaggtttgttacctaggtatacacatgccatggtggtttgctgcacctgtcaacccgtcacctacawtgcatatttctcctaatgctatccc

SEQ ID NO: 813359 - DNA, 610 bp, Homo sapiens
attctttggtctttgattttagctggtttggttcatgaggatcccagctaaggcatactccaaactctkggtattatcctcctgacagtcataatagtcatctccctggtgcactgtattctctcaaaagttttaaatgtttgcatacagtcatctatagaatgtcaaatggtttctcttcaactggaacaacaaaaactcaaagaaatgcatgattatgagaacaccataacctatgaacgacacactgtgactggaaaccctaaatgatggtaactaagagtagtgctaatgccctaagctttgctcacactctcacctacgtaaaaacctgaccaaaaggatgagttaaacaaaattatgggaggtcattgttttggactgagctcatacactaggccttaacagaccagaccagatcaaatcaagatggagtcactcatgctaaatgcaacataatcaaattgaaactttaaagaagcagatagccccccaaaaaagaccagaaatgtttttctctcttgaaaacaggacattccagcataataaggaagtctcctctaggctaccttttacaaaaaagtaagttaaagtcctgtttacaaggact

SEQ ID NO: 813360 - DNA, 608 bp, Homo sapiens
caatcctgaaaatagagagacatgtgacctgtcagacagagaattcaatatagctattttaagaaaactcaaagaaattcaagataacacagggaaggaattcaaaattctatcagataaattcaacaaagagattaaaataattttaaaaaatcaagcagaaattctagagttacaaaaatgcaactgacatgctgaagaatgcattagagtctctcagtagcagaactgatcaggcagaaaagagaatgactgaccttgaagacagctatttgaaaatacatgctcagagaagacaaaagagaaaaaaaataaaaaacaatgaagtatgcctacaagatctagaaaatagactgaaaagggcaaatctaagaatcattggccttaaagaagaggtagagaaagagatatagatagaaagtttattgaaaaggataatatcagagaactacccaaacttagagaaagatatgagcattcaagtacaagaaggctatagaacaccaagcagatttaacccaaagaagacgatgtcaaggcatttaaataagcaaactcccacagctmaaggataaagaaaggatcctaaaagcaggaaaaaaaaaagt

SEQ ID NO: 813361 - DNA, 553 bp, Homo sapiens
tgaattccatttttgtaagattacgaataggaagatgaataaggatttatttcagtatcttgacatctttcaatgcattcatcttagtctctcagcctattcatttctaaatgtagcacaagaccaaaagagctgcaacagagcttcaaatgtccgtatgatcaggaattgctttggaatcccagtttttatagtagttttactaaattaagttgacctaagcacctcagagacagtaatgttattctggggctcatacaaaagttgtgatggaatttaaaggtttctacgggaaatctgatttagttcagatccattcttccaaggctttctatgaatgtttctaaacttgatcacaaacatataaagtggttgatccaaataagtaaactatgaaagcagctaaggctaaaaagtatatcttayatacaattacattcaaactttttttgaacttgacccacagcaagaaagacatttacatataatatatacttatagaaatgcatataattaaaaataaaattccgtaaaataatacttttaagtgcaa

SEQ ID NO: 813362 - DNA, 667 bp, Homo sapiens
tgcacaaaagtggtttaaacttgtgcctcctaaacctgcacccccyacctcaacatctaaagcagcatatgaaggtcaataattgtgtactcatctttggaggaatgagaccccctccagccccagctggtctcaccttcacacctccacatgacctcagaaaaagatgctggcatctaagcatgttacacagggcacctggcttgacctctctttgtcaacagaatcagggtgcatctcagaagacctgtagaggaagactcccttcaaaagcccagagcatatgggctgaaggtcacttatcttccatctgtgatgccccacatttcccctggggctttgccatccattggcattgtcattctctctaattaggtaagtcgagagagttggggaagggggagaggaggaaagagaggagagagaactggagaatgcgcattcctaaagatccatgcacaacacatttggagttgccaattcatggcacattttgtaaatttccattacaaaggacagaattgtatcccattccaatagaatgcaaatgaattcctttgtgtgtatattcaatttaaagaaaaatatataaataactgtacaggtggtggaatgattatgatgaatagaggagcctggatcctgagatccacaaacaaccatcatt

SEQ ID NO: 813363 - DNA, 667 bp, Homo sapiens
tgcacaaaagtggtttaaacttgtgcctcctaaacctgcaccccccacctcaacatctaaagcagcatatgaaggtcaataattgtgtactcatctttggaggaatgagaccccctccagccccagctggtctcaccttcacacctccacatgacctcagaaaaagatgctggcatctaagcatgttacacagggcacctggcttgacctctctttgtcaacagaatcagggtgcatctcagaagacctgtagaggaagactcccttcaaaagcccagagcatatgggctgaaggtcacttatcttccatctgtgatgccccacatttcccctggggctttgccatccattggcattgtcattctctctaattaggtaagtcgagagagttggggaagggggagaggaggaaagagaggagagagaactggagaatgcgcattcctaaagatccatgcacaacacatttggagttgccaattcatggcacattttgtaaatttccattacaaaggacagaattgtatcccattccaatagaatgcaaatgaattcctttgtgtgtatattcaatttaaagaaaamtatataaataactgtacaggtggtggaatgattatgatgaatagaggagcctggatcctgagatccacaaacaaccatcatt

SEQ ID NO: 813364 - DNA, 584 bp, Homo sapiens
taactgtacaggtggtggaatgattatgatgaatagaggagcctggatcctgagatccacaaacaaccatcattatcttcttgagtgacctgaggtgagtaacttaacctctgtgaacctyggtttatttgtctgtaaagcaagaatgatgcacctgccccacccttctgaactaacagaatgaccgaggctctgagcagccaggggtgctgtgagatgatttatgagccttgaccttgggctgctactggaaaatcaaggctccaccactgcagtggggctcttactaacaaggcttggtagcctattttggagtctgtcccaaaagactgaaataaattaacttcatgagggattttttcccccaaaatagctataatctataccatcagtcatgacagagcacaaaaattcaactgcctacagggctcagtggtcccataagttatggaaaaaggcaaggtataaagcaatagggaagggtgaagactgtggcaaactgttgaatccatgcccttgccccatcttaggggccaccaagctctactagcaggctgtcgcatggggctaagactcaagattga

SEQ ID NO: 813365 - DNA, 557 bp, Homo sapiens
aaaacaattttaaaattctataaaaccaaaaaggagactaagtagccaaaacaatcttgagaaagaaggacaaagctaggggcctcagacttcctgatttcaaaacacattacaaagctacagtcatcaaaacagtatagtgctggtataaatacagaaatagttcaatggactagaatagagagcccagaaataaacccacatatatgagatcaaaggatcttcaacaagggtgtcaagactacacagtggggaaggatagtcttttcaacaaatggtgctgtgttgtattttcctctaatttggtcttgagtcctttttctggatagtggctataaactctagtcttgcctttatggggctccagggtatttggtcatgaatatttaaaatgtatccttcgtgggatacttctttattgagaagatgcctcaatgtctgacycatgaccaggtgttcctctcacaggaaacatgtttatgctggtgaacactctgtggctcttgtctgccctgtgtccagtttattcctaccaagatagccactctctaggagaa

SEQ ID NO: 813366 - DNA, 609 bp, Homo sapiens
accactcgccttgtctaagacacatggtcaaatagaagtgggcagggaatgtaagcactttgcattgttgctttagtggacctcttctgtctgctgaaaagcgtttggtccagctatctgaggagttccactaattgcctcattaggcaatctcaatgcagaaacaatatttaagtacatcagtgcaactcttgggtatatgtaggatttaatagcagatgaagccaaatgagctgaaatggaaaatttatttcttttttaataagccttcttaaattctcattaaaaaaagacagtaagcaattcatgcttttcagcaagctgtagtttttcttaagttgtaaatgcctctgagccatttagagaagctctgaaatattttctgcaaattattctaacattttcaagcatgggatatttaataagagctttacttcttctaaagttagatgtacaacctgtgaatcacatcaaaatgcacaatatgtaaatatayacgtaatacatgcattcataaaggagaatgacctttttaaaatatttaaggctttagtaattatgttaaaaatatccccaacaatggttactgaaatccacacttggttttat

SEQ ID NO: 813367 - DNA, 635 bp, Homo sapiens
gatttgctccaagttaagtctccactgtsagtatcagaggtaggatgcatataaataaaaatagatgcaaagaaagaaatatatagttatgcaaaaaggacaagaaggtatacataacagatatatttatcccacaagtaaagccgagacttgatgattcatgagtagcagagatatggttgagttacacagatttgttctctggagtaagataaacttgtcatttcagctgctaccattatggactctgagcagaaaatcaaatattttcaagagttggcttatattatcaatgaacacatatgaccatgtgagttaattgaaaaattcagatgattttaccagatataaatatatattatcatttggataaaactaagatctaataacttatgaaagaaaaattatatttttataatcaggaagtaaattttttatgttaataaattcactttttaataattttcataatttgtgaccacgatgtggtctagacttgatataaaatgccacacttagaaggtatcttttttagtcaataattcacaaaaattgttaaggcatatttgcttaattgaaaaccttaataaaatcatagtgataataaaaagaagattttatcaaaatatttcttc

SEQ ID NO: 813368 - DNA, 688 bp, Homo sapiens
acctccaacattgggaatcacatttcatcatgagatttggaggggccgaatagtcaaaccacagcagggtacatgcctagattgggaattactggccaaatgggatgctcattttggtggcttttactcactgctgccatgttgcattccagagaggcaccaatttattcttctagcagcaatgtttgaagatgtctattttttatacccttaccaaaacagtattagcattttgaaagctgtcaaattggccaagatttaagtataactcacagttttgatttgcatttctttaacattaatgaatttaaacatcttcagtctgttattattattggccacttttttctattgtacattgcctgttcatgtccttaatctttttcctactgcagtattcatcttgacaggacaataaattgtcctgaaataaaataaattgtcctgaaagtattcatcttatgttaagggtatttaagctttcttatatgtgctatccatattttgcctagtttatatgtcctttaacttgagttatgttggattatttattctgtgggtttttccccccagagcattcctgcaaaacctgtgggtttaaaaaaaaagttttaggtaatcggccaggtgcagtggctcatgcccgtaatcccagcactttaggatccsagcttgggtgggtgaatca

SEQ ID NO: 813369 - DNA, 521 bp, Homo sapiens
gcgggaaggcagtccttgttcaagtggacattcgccatttagactgttaaaattgcttcttcctctcagatcctggttttctttaaggcacttgtgtccccttgtccgggcttgacccatcaggatccttaacccaggccctggagggagccctctcattgcagtcctggtgtctggacttgcggctaccacaccacatgatgtctcaagccaccctgcttcctctgtttttcccaagctttgttctcttgcctctcttgagttgtctggtaaccttccagtaaattgccaacgtgctggtactcactggaatttgttgcagttgcctgtcagcgaagaatcttgatgggtaaagatgggtatagctccaggatgtgctactaagacaagcatcagaagtacttgcaccacacatctccaggcaaacactctgcctccagaggtccgtgayggttaatactgtcaactggattggattgaaggatgcaaactattgttcctgggtgtatatgtaagggtgt

SEQ ID NO: 813370 - DNA, 490 bp, Homo sapiens
gaagtcagtcatttcctgatatggcctagtaattagttactcgaattacttaaattctgagtctttttacacgcaaccaaggcatcatcatcatgtgaacacctgtgtttactcgaccttgagtagacataatagcaaaagagtctgtcccctatgaagtttaaaaatccaggccgcgtgtttcaattccttatttcctgtcccatctttgaactcttcccaggtttatcgattgtaggaaatgccattcccttcaggagaaacccaactcccaatcatactgttggggtattcgcctttggcctaaaggacacaatcacatcacaacacaataatccaagtttagtgtttgctcagtctagttccttttcatagtctctttagggttgaaataaagaacagccttcatcactttcctaagattcttccatcmcagcttctcatttacaaacagctgctcaaaaacagctatatacaactccattagaaa

SEQ ID NO: 813371 - DNA, 565 bp, Homo sapiens
taagtattcctatgtctgtgccatggatttacgtcatgttctgacatgtggaaccagaacttagatattaatcaaggtaacagagaaaagcattcatattaacatttcatgaaaatgtgattttaaatagaaaaatgtccatccaggtaacattttcttgtcagatcatagttttaaaattcagccatagaagctggctttggaagttgtttgggatgagatttgaaacaacaaagagaataaaaaccttttgaactatcgttgattaatactgactaacacccaactagaatatgcatgtcattttcctttgtaaatacaatgatacgtatgaagtcccccttacaatattttccaaagatgttttaaaaaaagcttttgccagacaggatgtacaacattacacagattttaacaaaagtaattggcgacataaagagatagactgatgggaraccagtatttgaatctatataatataggcaaaaatttatctattgatttacttatttatgtttttaaattttttttacacagttttttgaaacatagtcttactatgttt

SEQ ID NO: 813372 - DNA, 583 bp, Homo sapiens
gggctgcggggctcttgttggccgcacgtggcagtgcagctggagaggaagcctggggcacgtcctgtgcggtgccaccaaggccccacccctgccccttttccttccaggttctgttactcacagaagtgtttctggtgggctctgcgggagaagacactaagggccccacaggcttgtttcatggtgttgcaagccaagctggcccctgcctgttcctgtagctctggggccaggtcagccgtggccccacctaccagaactgtgctctgctggcagctgtgcttttgccaaacccagggcctcagcgaccatgacttctgctaaaaagcaatcatgagtgcgtggctggggacagacctctctgaagtgtctcctgttgtgaggggctcactttggagccactgaagagccgactgtgccacccacttgcgagcctcagtcccttccaagctgcactggtcattgggaattgtgtaaacacctctggggataagctgaggtgactaaatgatatatttatattrtaagattaaactgactttcttggccttaacaaggtccttatataaaatttccaccc

SEQ ID NO: 813373 - DNA, 580 bp, Homo sapiens
ttgcccatttttatggttatttcttgatgatatgctaaacaaggggtggattattcatgtctcccctttttagaccatatagggtaacttcctgtcattgccatggcatttgtaaattgtcatggcgckggtgggagtctagcaatgaggacaaccagaggtcactctggttgccatcttggttttggggggtttggccagcttcttaactgcaacctgttttatcagcaatgtctttatagcctgtattttgtgccgacctcctatctcatcctgtgacttagaatgccttaaccgtctgagaatgcagcagcccagtaggtcttgcctcattttacccagccccattcaagatggaattgccctggttcagacacctctgacagtgatacgaccattgcgcaggcctgggactgagacacagagaagtgaatggtgaggccaggcacagtggctcatgcctgtaatcccagcactttgggaggccgaggcgggtggatcacctgatgtcagcggttcgagaccagcctgggcaacatggtgaaaccccattgctactaagaatacaaaaattaggcca

SEQ ID NO: 813374 - DNA, 617 bp, Homo sapiens
caggcttaaggatgtggactgggaccccattcttcgagggaatgatgagaaatacatttactagctggccaggtgcagtggctcatgcctgtagtcctagcactttgggaggctgaggcaagaagatagcttgaggtcaggagttcaagaccagtctggccaacatggtgaaaccccgtctctattaaaaatacaaaaattaaccaggtatggtggcgggcacctgtaatcccagctactcgggaggctgaggcaggagaatcacttgaacctgggaggtggaggaggttgcagtgagctgagattgcaccactgcactccagcctgggcaacagagtgagactcagaaaaaaaaaaaaaagaaaagagaaagaaaacagaaaaataaaaataaatttactagctgggcaaccaccatctctcctttccttccttcctcctgtaagcattcgttgagtgcctactgttttctattcctcctatttgttgagcacctactgtgtgccaggaactatgcttagtgctggtgccacaaagatcaacaaagccccarccgcaaggaataatagtctagaatagtgtttctttgattttaatatgcagacagtcccctgggg

SEQ ID NO: 813375 - DNA, 617 bp, Homo sapiens
gacttaagaaaaaaatgagaaacatctgttggagcagtaaacagctgtcccccggagtttcacagctctgagaggatgccgccaaggtggggctcctccccacacctgcggcttccaggttctcgtgacaatccctgcacaaacccagggcgcgcatgatgatagcaggttccttccaaacaggaaaagaagtcgtaactgaaaaccctcacttcttccatccctgcagaaagccaagcctcttcaccacaggagactgttttgtttccttcttgagacagcaggaagtgggagacttggaaaatctattgtcaactgatatacgatgcacgcggacatgcagaagatgggagtgaagttgctgcttcagatcagtcacagtacttgcgtctcagtcacagaaattccatgagggtgggctgctatattcccactatttatgtggcgttaccagaggcaacttccaaaatccacgaggaagcaaaactgtgggatggctcattctcagaaacatagatggactttggagaacttgtctatgcatttttttkgtttgtttgagaagacccattatggctttcttgtttatatcaatataggaaggaagctgtcaaaag

SEQ ID NO: 813376 - DNA, 657 bp, Homo sapiens
ccagtgatgcagggtatggacttgaaaggatcccttctgtgatggttaatattgagtgtcaacttaattggattgaaggatacaaagtattgattctgrttgtgtctgtgagggtgttacagaaagagattaacatttgagtcagtgggctggggaaggcagatccacccttcatctggtgggcacaatctatcagctgccagcgaacataaagctggcagaaaaacttgaaaaggagagactagcctagcctcccagcctacatctttctcctgtgctggatgcttcctaccctcaaacatcagactccaacttcttcagttttgggactcagatgggctgtccttgttcctcagcttacagacagcctattgtgggaccctgtgattgtgtaagttaatacttaataaactcccctttatatatatatatatatatatatatatatatatatatatatactctctatataaagtatatactatatactatataaagcatatagtataaaaatataacatatatactatatactttatagatataaaatactatacataaaatatatgctatatataaactaatacaatatatatcctattagttctgtccctctagagaaccctgactaatacagattttggtaccaggagtggg

SEQ ID NO: 813377 - DNA, 563 bp, Homo sapiens
aaatgtattccacagatatttgaaagccatctaytcaaaagcacataacttactattttaaacaatgatttcgaagaactgatacaggaaaataaaatcagccaagaatgagcaaaaaagggaacttaaagtgactttttttaaaaaaaagaagggggcttgcatttatctgatttataaatggatgacacagaattatgttcacaactataataaagaatttaaaatatactgtagatatgagcagaaaattcacaaaagagaaaccacaatgaagaaacctggaaaattgtccgatattactcataattacagaaataaaaacacagcggtggagtgtaatttttacctaccaaatcataaagattttttatttagattttagaggggggtggccaaggacatggtgaaacacagcactctcacatattactacagtgaatataaattgatacaaaccattttagaaaagccatttggcattacagatcaagagctttaaaaatgtgcatacctttgaccccgtaattcaatttctgggaatctttcctaaagaaataatg

SEQ ID NO: 813378 - DNA, 563 bp, Homo sapiens
aaatgtattccacagatatttgaaagccatctactcaaaagcacataacttactattttaaacaatgatttcgaagaactgatacaggaaaataaaatcagccaagaatgagcaaaaaagggaacttaaagtgactttttttaaaaaaaagaagggggcttgcatttatctgatttataaatggatgacacagaattatgttcacaactataataaagaatttaaaatatactgtagatatgagcagaaaattcacaaaagagaaaccacaatgaagaaacctggaaaattgtccgatattactcataattacagaaataaaaacacagcggtggagtgtaatttttacctaccaaatcataaagattttttatttagattttagaggggggtggccaaggacatggtgaaacacagcactctcacatattactacagtgaatataaattgatacaaaccattttagaaaagccatttggcattacagatcaagagctttaaaaatgtgcatacctttgacccygtaattcaatttctgggaatctttcctaaagaaataatg

SEQ ID NO: 813379 - DNA, 610 bp, Homo sapiens
caagaccctgtctcaaaaaaagaaaaggatacggaaaatagtcagtactcaacaaatcttagttcaattgaatttgacaaccaaataccatgcatttatgcattaataagagtttgatgttctgaaatctggacatgttaaaaaaatggccacatggcaattgaaaatcccttttttctgaccccttgcctaattatcagtcacaaatagcagcaaccaaccccagttccctttcattttcaatgcacgctctgcaattagacattggttaggagaaaagaaaatgtattaaagggatggttatttgcttcctctcctaaaatcctgtggatgattgattcataaactacacattatgaagttgaggtctcttttttatacagtagttgtagtttcaaaaatgaatggctttatcaaaacaaagctgaaaatggatttcttagtccctcccttctgtgatgtctttttggaacaattagcttgaaagtcagctttctttgtctaggatccttctcaatcyttccacccactcaaaactattagcagttcaactaacttattttcatttacttcatgtatttaatacctatcttgttctcaaaaagaaaaa

SEQ ID NO: 813380 - DNA, 559 bp, Homo sapiens
tgcccttctccttctcacctccctgcatctctctgaccacattcaccttgcctcccctcttctagtaccagtaagtaagctttcctaggcaaagrcagaatctcaccacagcgaaatttgcctcaattgcaatcagcaacagagagggaaaaactgtccaaattaagctgcttgattacggaaattaatcttgtcatttagcgtccctgttctgcagaacagggcctttgattagcctccttgtttcagaatattacaagcagacgtttattaagcagaaggcttttttttttttttttttttttttttgtagtcaggcaagtcacaggaaaagtaaaggtagcaaggggcttcttaaaaaagggcaccaagtcaaggactgtcagtctgcttctgagtccgtctcacagagcaggactgtcatagaatcaggaaccttaaccaacccacccagcttaggatggctcctctgaagggaagtttaagcagcagtagaaagataatccataatctgttatgcttttagtaatggaatgaaccttttgacctagagacaaag

SEQ ID NO: 813381 - DNA, 587 bp, Homo sapiens
atttgatagaatattttctaccttggtaaatataacatataaactagaaaagaatgtatattctctctcctgttgtttgatgcaatattctagaaaggtcaatttggtcaagctggtagattttatatatatawaatatatatataataaatatatatatattttgtgtgtgtgtgtgtgtgtgtgtgtgtgtgtgtgtgtatgatggagttttgctcttgtagcccaggctagagtgcaatggcccgatgtcggctcactgcaacctccacttcctgggttcaagtgattctcctgcctctgcctcccgagtagctgggactacaggcatacactaccacgcccagctaatttttgtgtttttagtagagagggggtttcaccacattggccaggttggtctccacctcttgacctcaggtgatctgcccacctcggcctcccaaagtgctggaattacaggcatgagccaccgcacccggccaattaatctcttttaacctatctacatatttatatttaacatggatttgtcatagatagcatatagttgggtcttgctttgtatccaatctgtcaatatatgc

SEQ ID NO: 813382 - DNA, 569 bp, Homo sapiens
ctttctactctagcttaagagaactagaatggcctctggcccagtgggaattctgggaattgttcttcttatggctccttgataattgtttttttccmcagaaagtaaccttgtccagacatggaatttcacctataatatgcacagatttgagcaaaaactcaaaaggaacccagcgcatattaccggagctccttctaaccttaggaattccatcccacaaaactctcatgccttatcctccccaaatgctgatctctgtctcctcaactcagtcagattgctgggttactcctcattgaacctcagtcctggaattatctccaggtaaacagcctagaaaaaccttacttttcttttctcaggaataataatcctgtgctacccattgtccaatgtctaaaagtagccattttcttttcccccttccaattttctagttatttatggtgggagggtaatttcagattgccacactccctcatggctggaagtgaaagtatcacaatttttgtttctaatgttcaaatcagatcatatagttcctgcttataaaccttcagtggctt

SEQ ID NO: 813383 - DNA, 569 bp, Homo sapiens
ctttctactctagcttaagagaactagaatggcctctggcccagtgggaattctgggaattgttcttcttatggctccttgataattgtttttttccacagaaagtaaccttgtccagacatggaatttcacctataatatgcacagatttgagcaaaaactcaaaaggaacccagcgcatattaccggagctccttctaaccttaggaattccatcccacaaaactctcatgccttatcctccccaaatgctgatctctgtctcctcaactcagtcagattgctgggttactcctcattgaacctcagtcctggaattatctccaggtaaacagcctagaaaaaccttacttttcttttctcaggaataataatcctgtgctacccattgtccaatgtctaaaagtagccattttcttttcccccttccaattttctagttatttatggtgggagggtaatttcagattgccacactccctcatggctggaagtgaamgtatcacaatttttgtttctaatgttcaaatcagatcatatagttcctgcttataaaccttcagtggctt

SEQ ID NO: 813384 - DNA, 610 bp, Homo sapiens
tggaaaaatgcaagtgctgtagtttgaccgtccaaacctttgttgaaattcgatccccaatgttggaggtgggtcctaatgggaagtgtttgggtcatggaggtggatctctcatgaatggcttggtgccctcctcaaggcaatgagtgtgttctcaatctattagctgctgtgaaagtcaccctaagagcaggttgttaaaaagagtcttgcaccttcctgcttccgctctcccacctcgtggtctctggacacaccagctccccttcaccttccaccttcagaggaagcagcatgaagccctgactagaagcaaatgatggcgccatgcttcatgtacagcctgcagaagtgtaagccaaataatcctcttttctttataaattacttagcctcaggtactcctttatagcaacataaatgaactaagacagcaggcaagttaattttctgattctccatagaaccagtacaagtaaattctaagttgccccaaatgacaatgacagagctgggagaattctcagtgtttattaaytgctggtgatcctctcttctaggatcccctagaagatgccagctcaggcccaacaggcatggagtcacagaa

SEQ ID NO: 813385 - DNA, 584 bp, Homo sapiens
agccaacttggacatctttggtgtcttggtgactaaggagggaaacccagtttctctcaaaagggaaatgaagagaactgctgtatatgtcccctatgaaccatgggagcagtaagtaaaacttggtaaaggtcatcaaattagttctgccaggctctcacctgtgactgtgaaggcacctcatgtaaagtaacatgccttcctgggaatggcatttgataacagcagatttgttctcagtaatatgttttcttttcatttcatttcttttctgttcttttccagatagggtctcactgtgttgcccaggctggcctctaacttcaggagttcaacagtttctcctgcttcagcttcctgggtagccaggacaggtgtgtgccaccaggctaatcttcagtaacgtgttttctttgatctatcattgcatgttttgttagcctcccatggctggattgaatcttgaatacctcccatgatcttatcacacccatcttaacyagaatatttccattcaacattgtggccacaaattttccaatcttttgaaatgaggtcaaagctcttcatttgaatttgcttat

SEQ ID NO: 813386 - DNA, 579 bp, Homo sapiens
cgcaccactgaactccagcctgggcaacagagygagactctgtttcaaaagaaagcaacaacaacaaaaaacaagagcaggtgagtatcaatgagaagaaacccctatccccagcagttggtgagttgagaatcatgccaaggaggacactcggaacagccaggtcagaaagcagcagcccctggtgatggcctggcccgcccagacagtgaatgccgttttctaaacctggtgagatgataaaattttaacctgctatgtaaagctatttttaaacatggaggggaaaaaaataacctttccctgggtaaaaccgtaacagtcacttagagcacaatggatctttattttttatgaccaagttataaattgttgaaaataagagtttcaaatggaaatgttgacataataatcttatctatagcagcatgaataaccaactataaccgttattattctgtgttctatgaacgttggcttttttgaaagttcaacttgctcaatatgtttgccttttaacatgagttaagaggtaatttgcatgaacacaaataaagaagtatcaattcagtggcatta

SEQ ID NO: 813387 - DNA, 525 bp, Homo sapiens
gcacccaagaaacagttgggtctcctcttttagtgtgaaagtgcagcatctgttcacactgtggggtgagcagtccacagagcagagcccacggktctgcaatccggggctctgccccgtgcccctctctggacacactttggcaaggacatggttccagtccactgctctgtgcccagaggatatctcaagccccacaatcacccaggaaaatggctttagttccagaaccagagagaaaagggaggcttcctggggaaagacaaggacagctagaggttcatttctgcccttggttctcctttctgcacgtcatgtgtaatcctgtctctaaatacctccctggctcagctgggcattctcatgccaactgggatgaagagcagctggttcaggctgtgattggttcctgggacctcttcttcccctactgccaaggctgcagttgccaccaaatgatggtttcccctccccctgacactgcctggagcccagctgacttcacacttcactcctccctcctgc

SEQ ID NO: 813388 - DNA, 597 bp, Homo sapiens
ttttgtctctttgccttatgtgcccccttcccctacagcacttctctcattctccatcaaatgcctgaatgtttctaaactttgcatgaattatatcttgagtatatgatgtgtgtgtgtttgtgcatgtgtatgaagagaaagtttccaagatacattcaagaagagtaacaaaaggcaaaaatagacagaattcgatgtgaaagtgcctcctaaagaaacaagcagcatgaacaagaataaacctatcccctacacctcacagtcaaccgcagggcgccacggacagggagaaacacaggaaaggccatcggaagggaaacgaccaaccaccaaggggtgcccattgactgggtggagaacagacttcccaaccataagcggcgcaataatatcttcagaggccaaaataaaatgaaaagccaacttggaactctatggccaattaagcttttcggacataaaaartttactacccacatatccttgctctaaaaaaagaaaaatctgtgacaagaaacaactcaaaatacacacatacatgaaccaaagggaaggaggggaaaggaaagacaacaattgatagactatgtttta

SEQ ID NO: 813389 - DNA, 597 bp, Homo sapiens
ttttgtctctttgccttatgtgcccccttcccctacagcacttctctcattctccatcaaatgcctgaatgtttctaaactttgcatgaattatatcttgagtatatgatgtgtgtgtgtttgtgcatgtgtatgaagagaaagtttccaagatacattcaagaagagtaacaaaaggcaaaaatagacagaattcgatgtgaaagtgcctcctaaagaaacaagcagcatgaacaagaataaacctatcccctacacctcacagtcaaccgcagggcgccacggacagggagaaacacaggaaaggccatcggaagggaaacgaccaaccaccaaggggtgcccattgactgggtggagaacagacttcccaaccataagcggcgcaataatatcttcagaggccaaaataaaatgaaaagccaacttggaactctatggccaattaagcttttcggacataaaaagkttactacccacatatccttgctctaaaaaaagaaaaatctgtgacaagaaacaactcaaaatacacacatacatgaaccaaagggaaggaggggaaaggaaagacaacaattgatagactatgtttta

SEQ ID NO: 813390 - DNA, 563 bp, Homo sapiens
tttaaaacttttgtagattcacgggatacacatgcagrtttgttacatggatatattgcacaagggtgaggtttgtgcttctagtgtgctttgacatcactcaaatagtgaacgttgtacccagtaggtaatttcaaccatcacccctcccacctcggcttttggagtctccagagtctattattccctttgtgtgtccatgtgtacccattgattagctcctgcagataagtgagaacatgcggtgtttggttttctgtttctgagttacttcacttgggattttatttgaatattttcaagcctagcctttggaagtcgttaccgtaaaattgtgtgctaacttccctcagtctctcgctctctcttctttgggaaggagctctccagcttcttggtctttgtgaataccctcattccagaatgacttgtgttccttcctgacccagtcactatgtcctgtggaagtagagggccctacacatttccctcaggatgaagagaactatttcacttttttgcaatcactgaacactttttcaaccttttctttgatggggagt

SEQ ID NO: 813391 - DNA, 572 bp, Homo sapiens
aatatgttcaaggaaacaataacagctgacttcccatcagaaataataaagaacagagagtgaagcaagatggcagaagagaagcctatagcattcatctcctctgctcccccaaacaccaaattttaacaactacctccatgtaggaaagcactgtcacaagaaccaaaaatcaggtaccagcttggccttagtggggtagagcaacaagcaggctcttagggtccctgagtcccggcctagggtcttggacagcatctctggacctgccctgggccacaggggagctcacggtcctgatgtgtgggtcttaggcttggcagcattcaccaccagctgacagaagagccctagggtggcctagcagaacccccttgtggactggtggaagtggaggctacaggaagaggttcctctgcctgtggaaaaggaagggaaggacggaaaggactttatattgtggtttgtacrccaatttagcttcagtcgaatagaatatcaggtaaattgataaggtttttgtctccaatgtctggctcctagacatcatcactggagatgtctgggtcctg

SEQ ID NO: 813392 - DNA, 651 bp, Homo sapiens
gcactggccaagtggtggtggccataggggtgyttgcatcaccatatcctgagttccaggtggctcagcagagatagaatccttttgtttgtgagaaagtaaggcaaaagaacaagaatctgcctgataatccagagaattctttttgatcttatccaagaccacaaaggtagtacctctacaagtctgcaaaaaccacagtattattgggcttaagacccaagaaccttcaaattgctggaaagccttcccaagcacaagcacaaacaagcccagactgtgaagactacaatacatacctaactcttcaatgcccagacattgatgaaaatctacaagcatcaaccccatccaggaaaacatgacctcaccaactaaatgaggtaccagggactaatactggagaaacagagatatatgaccttttagaaagagaattcaaaatagctgttttaaagaaacagagaaaagcaagataacacagggaaggaattcagaattctatcagataaatttaacaaagagattgaaataattaaaaagaatcaagcagaaactctagaattgaaaaactgcaattcacatgctgaagaatgcatcagagtctcttaatagcagaattgacaaagcagaagaaagtgagcttgaaga

SEQ ID NO: 813393 - DNA, 638 bp, Homo sapiens
gaatatgaaagcaagtttattaaggagaattgactcacacgatcacaaggtgaagtcccacaataagctgtttgcaagctgaagrgcaaggaagccagtccaagtcccaaaacctcaaaagtagggaagccgacagtgcagccgtctgtggccaaagacccgagagcccctgtcaaaccactggtgtaagcctgagtttgaaagctgaagaacttggagtcccatgttcaaaggcaggaagcatccagcacaggagaaagatgaaggccagaagactcagccagtctagtccttccacgttcctctgcctgcttttattctagcctcgctggcagctgatggtgcccacctggattgagggtgtgtctgcctctcacagtccactgactcaaatgttaatctcctttggcaacaccctcacagacacacccaggaacaatactttgcatctttcaatccaatcaatttgacactcaatattaaccatcacacctttccttcttgtgtccacctggaggccccagctctagcctcatcctccctgggaagctaccactggcatccccagtcccggggcttctggacctaatacctcagcccacaccatgacctggcacagccacaatacagcagctggg

SEQ ID NO: 813394 - DNA, 583 bp, Homo sapiens
tcaatgtgctcccaaaaatcccttcacagattctaccaaaacagtgtttccagactgctyaatcaaaaggaagatttaactctgtaagaagaatgcacgcatcacaaagtggtttctgagaaagcttctttctaatttctatctttagatatttcctttttcaccattggcctcagtacgctcccaaatattccttcgcagatgctaccaaatcagtgtttccacagtgcactatcaaaagaaagttttaactctgtgagatgaatgcacacatcacaaagaagttcctcagaaagctttatttctagtttttctctgaagatatttcctttttcactgtaggcctcaatgtgagcttaaatatccctttgcagattctaccaaaacattgtttccaaactgctcaatcaaaagcaagttttaactctgtgatctgaatgcacacaatacaaagcagtttttcagaattcttctttctactttctcactgcagacatttcctttttcaccataagccccaatgagctcccaaatatcccttcacagattgtacagaaacagtgttttcaaactgctcaatcaa

SEQ ID NO: 813395 - DNA, 583 bp, Homo sapiens
tcaatgtgctcccaaaaatcccttcacagattctaccaaaacagtgtttccagactgcttaatcaaaagraagatttaactctgtaagaagaatgcacgcatcacaaagtggtttctgagaaagcttctttctaatttctatctttagatatttcctttttcaccattggcctcagtacgctcccaaatattccttcgcagatgctaccaaatcagtgtttccacagtgcactatcaaaagaaagttttaactctgtgagatgaatgcacacatcacaaagaagttcctcagaaagctttatttctagtttttctctgaagatatttcctttttcactgtaggcctcaatgtgagcttaaatatccctttgcagattctaccaaaacattgtttccaaactgctcaatcaaaagcaagttttaactctgtgatctgaatgcacacaatacaaagcagtttttcagaattcttctttctactttctcactgcagacatttcctttttcaccataagccccaatgagctcccaaatatcccttcacagattgtacagaaacagtgttttcaaactgctcaatcaa

SEQ ID NO: 813396 - DNA, 595 bp, Homo sapiens
cactatgacatcacaaaactgggtagataaccttttattagcctttggaagcaagaggcactggccactgagtcagcaaccccaacaggagtagaatatgctgtctgtgttcctgccaacactttggttctgaaagaaaatgctgactcttggatattatgtctttctatataatggagataaaaagtatcaagaagcaaaattcccttctaagtgttgaattcaaaaccatttgtgaagaaggcttttggaagcagaaaacttttgaaggccattctgggttttctcgtccatttcttcacaccctagggtggccatgaaactcaagatcagaccagatctcttggggttcctggagtcaccataaaaaataaattggctttctgtaggctataaaatctaaagctggtttgtccacactgaggtgccattaaaagaacagtgggcctggattttgtagacctgagtttggaatctggctccgccacttactagttgtgtttycttgaagatatcagttagtctctgggtttgtttctttgtttgcagagtgcaagaattggaatggcagtgaatgcacagaccctgtacaatc

SEQ ID NO: 813397 - DNA, 493 bp, Homo sapiens
tggcagagggccagaatgttcatatcccttgccatgcagaattactcatccatctatattttcttgaactctgttacatttaggtagtgtaagaaagtgtgtattcggtgaactgtgtggagagttagtgtatgggatcattgcttgttggtagttttaaaaactgtagatgatttggaaaggaagaaggtttagactttgacagactcacaaagatagatcagttctttcttactttatgtacaatattccagagatacatgttctcagtaacaggaggtagtacagatttggggctgtgatgctttcaaactttgccagactctttcatacaatttaattgcacaggcccttagttgatggcatgaagaaaaagttttatacagtagatgaaatgcatgtttatttttgatgtggtttggtttcctttcttgggacaacttatgcaygtaatatattatattcctcatacccccatccttctgctcttaaa

SEQ ID NO: 813398 - DNA, 617 bp, Homo sapiens
aacatcagcaagaccctagtgaggaaaggaagatgcacgtggacaatcaccttggcttttttttgccattctcctggtaaccccgcccattttcgttacctgtgaaaataagccaattactagaaaagcaagctcaatgtatccaattagcaaattaagacatttagtaaaaatgaagcctcagaatcttgaaagggcagagtgaacagggagcactttcaactccttttatcttcatcaatacttttaattctggtgatttgaagagatattaatagaggcaatagtactctgttaatcttgactatattaatacgagattagggaagtttggggggctacagctacatttgagaatctgatgacagctgtggactgtggactaacacttgtgtgcccagacccaggcagtttactcatggcgtcgggcagttcacagaccccacggtgaggatcttgatttgggggatctgccaccattctstttggctcttttggtttgtatgttcctttcagacttgatgagctttcacatttgtttcaactcagattaaacagctcacactgtttcatcattttaaatgctgtaaaacaaggccaggtgcggtggctcacac

SEQ ID NO: 813399 - DNA, 605 bp, Homo sapiens
agcaatttacactttgcgcctggccacgtggggttttttgctcattcctacatccatttattagtgaaatattccaagtattaacctaatgttcagaattgtcaactagggatgattagatatgaaaataagggagcaaagtgaaaagtgaaaaaaaaaatcatacaatatttcacactttcctctaatctccagcctcatcagagtttatgtaagatagtaattctaaaaaccgcagcagcaccatttactaagcagttactgtgtgccggtctctgttttgagtgcttaattttcatttcctcattaaaccatcaaaacaatcttgtgaggtaggtagtgttattgtagccattttacagaagacacaagtaaagccaagagaggctaagtaacctgctcgagactgtgcattccaggtccaaactctggaagccctactgtaagtgttcctctcttgaccactctccttctctaagtcmctcccctctgcagagtgacactgagtgaggttcatctcctggatggctaggaaggctcattttctgtgtccttcctgcccatgaagggtaggttgcccatttaatgtaactactttttttcat

SEQ ID NO: 813400 - DNA, 648 bp, Homo sapiens
tgtccaaagctcagcaaatacctttccctatatagctgagtattctttcccatgttgctccattttcctcccttttgacagataagaaaaggtaagcmtgactttatgaacctttttctgagttgtcactctctaaacaactttcctatttctgaactgcccagcagaatttggagtgagcaaattagagatattgagaatggtgtactctctgtccacagctaccttttatgagtacgagaacaggaaaagggcaagagagtgcccagggcagcagagaattcagggctagagaaattctgtttctgttggccaaggtgaataggacacaagaaagtctaactacaattaagaaacctagtcgggaaaggtagggatagtcatggaagaagtgagtttcctctagaaatttttccccctttgggactcataaaatagggtttctaatagatggagttttgcctgaataagaaatcgagcagtgcactgggtggtctctgtcattacagcaccggttctatgcatgtgtgaataagggcttatccaaatcaatcctgcatgaaagaatataccttagtaggaatttaaaggaggaccttaaattcattagtattccgagaactgtgagtgaaactgtttagccctgaa

SEQ ID NO: 813401 - DNA, 606 bp, Homo sapiens
tgtgaccttagcatggctatgatatcactaggagataggagtttctcagttccattggaatcgtatyggaccaccatggtatatataagcaatccatccttgaccgaaacgtcatcctgtggtgcgtgactgtaataggatatattgcctcaccacagtatttgtagtatagaaggacttggagaaagatcacttacacttaaattattaaggtttaaatttgaagctttagtggcaaagatatcagttggcaagggggaattcataaaacacatagaatatactgctttcttttcagcctgtgaaaataaattaatgagtttgaatattggaagaaatagaaaatgaatttgatcttataaagcatccacagtatgtatgtatgtatgtatatctgtgtgtgtgtgtatatatataactggaacagtgagaatcactatttttgaattctgaaaatattaagaaggtaataaccccctcaaatacagaaaaagcgctagtaaaatggtgagtgatcctattaaggtaataatgcaaatgagacaacagccaactactaatgaaatgacccatcacagacacatatgtgttaaattaattgtgaag

SEQ ID NO: 813402 - DNA, 493 bp, Homo sapiens
tgaaaaagctttttgccagtttttgtctgaagatatttccttttgcaccataggcctcaatgtgctcctaaatatcccttcacagattctaccgaagctgtgtttccaaagtactcaattgaaagaacagtttaactctctgagatgaatgcacacatcaaaaatcagttttccagaatgcttctttctagtttttttctgaagatatttcttttttttaccatagacctcaatgcattcccaaatatcccttggtagattttacagaagcagtgtttccaaactgctcaatcaaaataatggtttaactatgtgagatgaatgcacaaatcaaaaagcagtttctgagaaagtttcttcctagtattaatctraaaatatttccttgctcaccattggcctttaagtgcttccaaatatcccttctcatattccacaaaagctgtgttgtcaaactggtcaatcaaaagaaaggtttaactctgtgagatga

SEQ ID NO: 813403 - DNA, 567 bp, Homo sapiens
aatcccttcacagattctaccaaaacagtgtttccagactgctyaatcaaaaggaagatttaactctgtaagaagaatgcacgcatcacaaagtggtttctgagaaagcttctttctaatttctatctttagatatttcctttttcaccattggcctcagtacgctcccaaatattccttcgcagatgctaccaaatcagtgtttccacagtgcactatcaaaagaaagttttaactctgtgagatgaatgcacacatcacaaagaagttcctcagaaagctttatttctagtttttctctgaagatatttcctttttcactgtaggcctcaatgtgagcttaaatatccctttgcagattctaccaaaacattgtttccaaactgctcaatcaaaagcaagttttaactctgtgatctgaatgcacacaatacaaagcagtttttcagaattcttctttctactttctcactgcagacatttcctttttcaccataagccccaatgagctcccaaatatcccttcacagattgtacagaaacagtgttttcaaactgctcaatcaa

SEQ ID NO: 813404 - DNA, 567 bp, Homo sapiens
aatcccttcacagattctaccaaaacagtgtttccagactgcttaatcaaaagraagatttaactctgtaagaagaatgcacgcatcacaaagtggtttctgagaaagcttctttctaatttctatctttagatatttcctttttcaccattggcctcagtacgctcccaaatattccttcgcagatgctaccaaatcagtgtttccacagtgcactatcaaaagaaagttttaactctgtgagatgaatgcacacatcacaaagaagttcctcagaaagctttatttctagtttttctctgaagatatttcctttttcactgtaggcctcaatgtgagcttaaatatccctttgcagattctaccaaaacattgtttccaaactgctcaatcaaaagcaagttttaactctgtgatctgaatgcacacaatacaaagcagtttttcagaattcttctttctactttctcactgcagacatttcctttttcaccataagccccaatgagctcccaaatatcccttcacagattgtacagaaacagtgttttcaaactgctcaatcaa

SEQ ID NO: 813405 - DNA, 491 bp, Homo sapiens
tttttaaccataggtctcaaagggcttaaaaatatcccttcttagattttacaaacacactgtttccaaacttctcaatyaaaagaatagtttcactctgtgagatgaatgcacacatctcaaagctgtttctccaaaagattctttctggtttttatctgaagttatttccttattcaccataggcctcaatgtgctcccaaacatcctttcccagatcctacaaaaacagtgtttccaaactgctcaatcaaaggaaaggtttagctctgtgagatgaaagcacacatcgcaaactcattctgagatatctttctggtttttatctgaggatatttcctttttcactataggcctcagtaggttcccaaatatctcttcccagattctacaaaaacagtgtttccaaactgctcaatcaaaagaaatgtttaactctgtgagatgaatgcattaatctcaaagcagtttctcacaaagcttctttctag

SEQ ID NO: 813406 - DNA, 614 bp, Homo sapiens
ttataatttatcaatgtaaacatatggtgatagaatacataaacagacatttaaaattatgtacaaagcaggaagtcctttctttttttgtacgatcttcaccaatttcagggaatttcagaggacacattaaaatgacattgtatgaacttgcctttaaaattaaattcagaattatgcaaaaccgattgatgtgaagacataaaacctcttagaaaatttgttccacaaaaattatcatctttagttttactaaaaacttttcagaaatgtatcccaatactgtcactcacaatttttaacgactccaataagaactaaatcagccaaaaaaaatcggtttctaaaattaaaattatcaaaaattatttgtgaccttacatttgccaagtgactgacattgctttcaaatatgtcaattggaaattaagttgctaaaagtaaaatttctgatgacctgataaatgaatttgcaaaaatataagcccgagaaatttatcatcaattaaggtattatactgataaattgttatttgttgtattgtatraattatgacacaaaaatattttcttaattttaaatttatattgttgaatatcatgattaccttaat

SEQ ID NO: 813407 - DNA, 422 bp, Homo sapiens
ggcttttggagtgccattgagagaccagggaaaaactcttcttgctggaactgaaagccactgagctcaggtcagaaatcctagctgctggggggtmaaggggtcagtgctcaagatcagagatgtctttgggtgattgatatctttaagtgcttcagggggatgtgaaggaaagtaggctctgtcagtgcttgtgtgcgggcagcctctagactctagactccccgccctacgggatgtcactttctccagggaatgaatggcatctatggaaggggtcaggagttcggagagacacccaggcttgcaagagagctcttgggatggtggaaccttgcagctggatttcatttctgatttttgtcctgggtctagtatatggactgtggaccccagacaagttggaattaaggtgttctgac

SEQ ID NO: 813408 - DNA, 422 bp, Homo sapiens
ggcttttggagtgccattgagagaccagggaaaaactcttcttgctggaactgaaagccactgagctcaggtcagaaatcctagctgctggggggtaaaggggtcagtgctcaagatcagagatgtctttgggtgattgatatctttaagtgcttcagggggatgtgaaggaaagtaggctctgtcagtgcttgtgtgcgggcagcctctagactctagactccccgccctacgggatgtcactttctccagggaatgaatggcatctatggaaggggtcaggagttcsgagagacacccaggcttgcaagagagctcttgggatggtggaaccttgcagctggatttcatttctgatttttgtcctgggtctagtatatggactgtggaccccagacaagttggaattaaggtgttctgac

SEQ ID NO: 813409 - DNA, 607 bp, Homo sapiens
gtgctgagtttcagacacgcarggatggacagcacacagctttggccctccaggcgcttgcatccgactgtggagagccactcttagaaacccagggagcaatccaagtctgtgtgtgacgccactcctggacctggggaacacagagcccctgccagtgccctgggagctggtattcttgcaggggtggagacagacctgtcttttgtggcctgttagtttccttgtggctgttgcaccaatgaccacaaacatggagacttaaaattacagacatttgtgctctcacagttctggagaccaggagactgaactcagcatcactgggcccacatcgaagtgtggcatggccctgcttcctcagggggctcccagggagaatccgttccttgcctcttctggcttctgctggctccggtgttcctgggcttgtggctgtatcactccagcttcagtgccagcaccttcaaatttctccgtgctgaattttcacatagacttgccctctgtctgtgtcaagcctccctctgccttcctcccttaaggtcacttgtcactgcgtttaggtcccaccaggataatctttgcatctcaagattctgttctt

SEQ ID NO: 813410 - DNA, 504 bp, Homo sapiens
atccacaaatctagcacccaaatttcttttttctgttcttttttttttttaatttgagatggagtcttgctctgtcacccaggctgaagtgyagtggcgcaatctcagctcactgcaacctctgcctcccagattcaagcgatccttctgcctcagcctcccgagtagctggaattacaggcgtgtgccaccacggctggcctaattttggtatttttagtagagatggggtttcaccatgttggccaggctgatatcgaactcctggcctcaagtgatctaccccccttggcctcccaaagtgctgggattacaggtgtgaaccaccatgcccggcctcaaattgcttttacagaggcaagtggccaccgagtctgtgattgggatcctcctgtggagacctgtggagactcgtggctcactacctttgaaggcagtgttagggtaatctctccacatttccctgccgaaagctctgagtgttagtaaattccttctcatatt

SEQ ID NO: 813411 - DNA, 614 bp, Homo sapiens
aatgataaaggggtcaattcagcaagaggatataacaatttgataaatatatatgcaccaaacactggagcacccagatatataaagcaaatattattagagaatygcttgagcctgggaggcgaggcagaggctatggtaagccaagatcacaccactgtactccagcctgggtgacagagtgacaccgtgtctcaaacaaataaacaaataaataaaaaaaaactataccaatcctactcaaactattcaaaaacacaaagaaaggagggaatacttccaaactcattctatgaggccagtattatcttgatactaaaactagacaaagacacatcaaaaaaataaaactatacaccaatatttctgatgaatattgatgcaaaaattctcaaatactaccaaatcaaactcaatattcgataactcatcaatattcactaactcaatcactcatcattcattatgacgaagtgagatttagcctagggatgcaaagatagttcaacatatgcaaatcaattaatgtaatacatcatatcaacagaatgaaagacaaaactatatgatcatttcaattgatgctgaaaaagcacttgataaaattcaacagc

SEQ ID NO: 813412 - DNA, 621 bp, Homo sapiens
ctctggttcttcaggattgctttaagtggcaccakctattttagcattatcttttgcaacaccttcatctaattcttcaccaccagccctcgggcctgatgattgaactgtgacatcctcaaaatctaatgtgtctctaccagctagtacctcctcagctgctgtttttacatcattgccttcttggtcaagttttccatccaacttcattttaggattctctggacaatcaacattttcactgctttctgctgcaattttctgttttggattttcagtcacctcgttttgggcttccactgctgactttctgtcagtagactttacctgctcttcttccttaatttcacttaaatctgtgttctgataagttaactctttttaaacatctttaagggtttctatgggtactggggattttttcctcttctttttctttttcttgttctttctcttctgcaatgagtccaatgcctctccctgttggtcattcttttcttcatctggctctttcatatctgagggttcactttgagtgtctactgtacttggacctgtcgcctcctgacccttgctctcagttcctgctggagaaccaggaacttctgtcttgattggttt

SEQ ID NO: 813413 - DNA, 589 bp, Homo sapiens
atatatatatatatatatatatatatacatgtttcatatgcacgcattgtcatatatagcccayggtatatatatgtttcatatgcacacattgtcatatatagcccacggctatattattatgcaggttccagtgtcacagaaactcgttaagcttttctgtgtctccgtgcctaaaatctactgacaaaaatacagtttaaccacacacacacttaaatacagtttagtgggaaaaggaggtgctatttatacaggatagatcgaagttttaaaatagtgaaataaatctgctttctgttaaaataaaactcataaaatgtgcgaccaatattactgggtcatccgtttcttcttattttctcacagtgatatttcaggtcttttgggatagtcactttgtggctatcttggaataaaacagtcatttcaattctgtgatgggtcataagcagggtgtctggtcatttagggtcacagccctaaaaggccgagcctaattattgggagtaggagctggcggggatcggctcctaggacctgtgtggggatcttggaagtccctcccctctgggctgtgctgtccctc

SEQ ID NO: 813414 - DNA, 629 bp, Homo sapiens
aggttctggtttccatggtggggtgggatgggggtatacacacctctaccagggggaccatttaggatcccactaaacctaaagttatagctgccatctggtcatttttggctctccatgccagcagtctatcaggcaaagaaaggaattactatgctggtgagggtgattaaccctacttatcatgaggagctgggcttgctactgcataaagggagcagcgaagtgtatctgtaactcaagagattcaccagggcatctctcaatgctttcatgactggcaattatcacattcagaagacttcagtaaccaagtctgataagggagtagtaaccaggagttcaggttacttcaaggatgaaggtctcggtgaccccactgggcaagtaacataaatcggcagagatgatggccaatcatgagggaaagatggaataggtggtagaagaatgtaataataaatatcacttgcagattcagaaatatctgcagcagggggtactgtagcctgtcctgctaagtccaytgtcattaagcttaaataaatgaataaattgtaaccagctatgaccctgaagaatcaatgatagaattcagggaacctaacatagggaataagcagatctca

SEQ ID NO: 813415 - DNA, 635 bp, Homo sapiens
cagtcagggtaacagagcaagaccctgtttcaaagaaaaaaaaaaaaaaagagtcccaaactactgcytgtgggccaaatctggcctgctggctgcttttgtaaataaagtcttattggaacacagctacacccattcatttatgtatgtctgtggctgtattcctgcaagaactggagtgttaataaattacaaaagaaactgtatggctcacaaagctgaaaatatctgctctttgcagaaaatgtttgccaacctctgctgtcaaggagtacggttgcatttgtatgttgatcttacgttgctaaagtcttattctcttgggttttcttttttttttctttttttagagacagggtctcaatatgttggccaggctgatctcttggactcctcctgagtagctgggactactgcaactgggctcttgggtttttctatgcagataattttactcctttctaatccttatactaccttttaatttacttgtcctagcttagctgtgctggccacagcctctgtgcagtgtgtggacaagcagtgattcggatctttgtctccctctgattttatcaagcctcaagtttgtttgtagtcgatcatggttggactctggtaaatgaaagaggctg

SEQ ID NO: 813416 - DNA, 538 bp, Homo sapiens
ctggttgaagtgtgagatcttagagaaaaagaatcttctttcctcctcctttatcttcttttctcctcctctgcttccttcccctkctcctccttcttcttctctgtttttcttacaagggttaaacaagggtctattttgagcttagcacaaagtctgttcccactttctccaagtgtcccacctaagtgctgaagctcagtaaataagcccaattggaagtggatacatgattagttaattgttcagtggcaaagttcttacagttgattttctctgcaatcactctagaaaaagataagtaaaagccttggttggtgggaaagatggtctttttgaagataaaaaacatattcagaggaatgtttttgggttagttctttttttttttttttttttttgcacttagcatctgacaaagagagagtcattaatgccatagcgtgcatatgagactgtaatgagatgattctcacctgagtgatttctgaggcattcatctcattgaatctaaataccagggatccagactccacca

SEQ ID NO: 813417 - DNA, 562 bp, Homo sapiens
ccctaccacgggctttctggatgttgtccaatgagagattggcttggaactgtaaaattagccatctgcctattaaaaatgtaaccagctgcatccgatgaaacacagtgactattgaaatgaactcatccgggagagaactcgagtcccctgcttggacatttttccaatctactgctagactgagacactccacaagcaaagagcctttcgtccttgtttggaggaaaacggcatgactctcaagaacgaagaagacttgcgggtttgttttgttgctaaaattctggcatttctcaggatgagttggacttgaagtgcagatttctcagtttgtctgccatttgtttaaaacacctccctgttgcaagaaaaataaaatataaaataaataagcacacccctagtgtctccctcccttcaagattttatggtaaatcctgggcatttctaacaaaccttaatccaagcctaaaatactctaagcagcacataataacttaaaactgagagctggtgccatarttattcctgcaagtgctaccatttcgccagatattag

SEQ ID NO: 813418 - DNA, 625 bp, Homo sapiens
agaaaaagaaagaaagaaagaaagaaaaaagaaagcaagcaagcaggcaatcaagcagcaggcaggctgggcacagaggctcatgcctgtaatcccaacactttgagacacctaggtgggaaaatcacttgagcccaagagatagagaccagcctgggcaacatggcaaaatcctgtctctacaaaaaatacaataattagctgggcatggtggcgcatgcctgtagtcccagctactcagaaggctgaggtgggaggatcaactgagcctagggaggttgaggctgcagtgagtcaagattgagcctcttcagccttggagactctgtcaagaaagaaagaaagaaaagaaacaaagaaaaaatgggaaaaagaaaagaaagaaagaaagagaaaggaaggatggaaggaaggaaaagaaaggcaggcagacaaataaagaaagagagagagggaggaaggaaggaaaagaaagacagacagacagataataatatsatgacacaaagaaagaaaaaaagaaagagagaaagaaagaaagagccctccacaactatgattctctccgctctccctttaacaaatgtttctgttctctcaagttgctcagccaatcaggagactc

SEQ ID NO: 813419 - DNA, 597 bp, Homo sapiens
ctaaagcactggaattcagctgggtctcctcttaaattgcacgagtgctgcgctctagctgtctaccttcattacctgcccacctggatgtagctgggtaagatctcagaaagggtagyggttatgcgctgggatttgaaatattttaactctttggttcaaatacgtggctcgtgaaccgggaggttccatacagttacataacaagtaatctgtcaagtcaatagttgcagggctgatctctcaaatcctaaggggcaggtgaagacaggaaggatggcttcccccctacttctgccgtcgttacccgatcctgcttccggctccacttgacacccttgaagggcttttatacacgtctttattagggcatctctccccttctgttcaggtctgaatggactttaaaaccagaggctctgctggggagagggattattctcatcatctttgtgttcctgaagccatcagtgcatcagggtaggcagtcaataaagtgttttgaataaatgatcaggataaagagttctaatcctctgtctgagcttcgctccactataatgttgagcatattctggccttggtttcctgatctta

SEQ ID NO: 813420 - DNA, 607 bp, Homo sapiens
agagtggctaaagattgacctactgtgggaccatggaattctctgcatacattaaaataatgtagtagtccttcatgcactgacatagaaagatgcccaacacttatcaaaaagtaaaataaaattgaaaaataatttgcatggtatggcaccatttatgtttatatttttcttacacacacacacatacacacacacacacacaaagacattggaagaatggaacccaaggtgttgatgttggttactgatatggtttggatctgtgtccccacccaatatcatcttgaactgtaatccccaatgttggaggtggggcctggtgggaggtgattggatcttgggggtggatttctcatgaatggttagcactgtctacttggtgctgttctcgtgatagtgagatctcgcgatatctcactcacgggatcactatatacttacaaagtgtatagtacctcctgcaccattgtctcytgttcctgctctgtcatgtgtgacacctccctcctcctttgcctttcgccatgactggaagctgcctgagtcctacccatgattcgggagcagggaaggaaagtgctgggtaaaggagggcttggtccct

SEQ ID NO: 813421 - DNA, 586 bp, Homo sapiens
aaaaaaaaagttgacatgggggtatccttgtggatagaccttgggaattctaacggaggctcagagctcacattttccaagaagctcccccagactcagatgtctcctttcctctcctctgccagcaccctctccaccctcagcccccaacccccaaaagagccacacagcagacttccctagtgccctggacctttagtctaatgatcagaaaactatttttcccagccaagtattcttcaaactggtggaaccaagatacagagtggggtaaggccccaagataagattggccaccgaggcagccatcagtacattcaaaggaggtcaccaagagaaactgaggcaggatagacatgaaggagaaacaccagattttctactttattacaacttcctcaaacacaccgctcagccagctgttgagggtttcaataagcctgctctgtgctgagctctgcaggcatcatctcatctaaggctgtagtaactctatgcrgtactaggcccatgtcggagatgataaccagtttcagagagaagggacttccccaagtgcacaccgcttgcaaacgtcagcgctgga

SEQ ID NO: 813422 - DNA, 707 bp, Homo sapiens
ggtgatttagaaaggtcttattattaccaagtggcattcttctgaatactgcttcttacatcacaggactaaacaaaacttggttctgtgactattctgtttatcagaatttttagttgaagagatttttgwcataaatgaactatcaatctatttgaatatctgttcaccttggaggcagtgtcccagtagaaaacacataattatctgcgtgtttcctgtagaggaagagaggaggtaaactgtaaacctaaaactcaccagcaatctcataactgtagggtcatataaccatgggcagttcctgccccttgtaacttttgatgagatttgtgaaccaatagactgagtttaggttttctttgttcatgtttcccctacaaggagacaaattaattaaaaaaagatgccaaagactattagaaaactgatcccaaagattattagaaagaaaatagttccagataatcagccatggagttactaaagtttctgctcattcatttaagcagcacttttagagtacctactacatgaagcatggtactgagcatgggatacagagagaagcaggcccagtgtccccgcgaggactgcacatgcactccaaagagaggagacggacgggagaaacacgtgcgatgtagagtcacagcagtactcatgggtgtgcaaaggtcagttcttcctaggggagataggatcca

SEQ ID NO: 813423 - DNA, 622 bp, Homo sapiens
agctgccccatgctcagagtttctgattcagtgtgtctggggtggaacctgagaatctgcacttctaacaagttcacttgggtaaggctgatgctgatgctgctggcccagggaycacgctttgagaaccaccactctcaagccagacaaaggtgtcatgcagacattgaaatagaaatcactggctagaaatctctaacctagaatggtgatgctaagctactgggtgtcaattgctaacaagcaataccagctaggaaaatagaagagcaaagacccataatcctgactccttcatggacttatcagggtcagaggattccatgctagatgagcactttgtctaagaccccttataattaagacgttcagaatttccgactgaaggacctcccaactccacttctgggaacatgctgccttataaatagcctctgaaaatccctgggagcacctagaccactgcttctgtgaaatccagcatgaatctaattgaagctgcttaatcgaacaccaagttgccctcagtgtgatttttacatcgctggctcctcagttgcttccccacccggccctaccccacatgcacacacaaatatactgaatctgagagtccttcagg

SEQ ID NO: 813424 - DNA, 589 bp, Homo sapiens
tgtggtctcagctacttgggaggctgaggcaggaggatctcttgagtcgacgagtttgaggctgcagcgawctgtgtttgtaccactgcaccccagcctgggtgacagagcaagaccctgtctcaaaagcaaaaagaaaaagcactaatgatatttaattaaactttcaaaaaataaattcagatttgttttttaaactttaattttgaaatttaacattcatttattataattctatttgccttttaattttaataattttgcatattttaagttgtttttgtagcccagctaattttgcatattttagaagagaaataacttttgggaaaacaaataaacaacttttaaattttaatatttcacatttactttaattacacttaatgaaaatagattcacattttacgtactttaaatataatttttaactctatgatcattactgtcaataggacacaaattaggtgaataacttgacttaacataataatgtttctgacaagatagcaagaaaaataaatttaatagaataaatactcaattatttatacattatgtatcattttaatcttcgaaaatgacaact

SEQ ID NO: 813425 - DNA, 642 bp, Homo sapiens
gaattggtgggttcttggtctcacttacttcaagaatgaagccgtggcccctcgcggtgagtgttacagttctcaaaggcggcgtgtccggagtyttttccttctgatgttcagacgtgttcggagtttcttccttctggtgggttggtggtctcgctggcttcaggagtgaagctgcagaccctcccggtgagtgttacagctcataaaggcagtgtggccccaaagagcgagcagcagcaagatttattgcaaagagtgaaagaacaaagcttccacagcgtagaaggggaccccagagggttaccactgctggctcgggcagcctgctttttctctcgtatctggccccacctacatcctgctgattggtccattttacagagagccgattggtctgttttacagacaggtgattggtcaggcatggcgggctgcaggtaccgagccctgccccgcggggaggcagctaaggcctggcgagatatcgagcccagcgccggtgggtcagcactgctgggggacccggcgcaccctccggagctgctggcccgggtactaagcccctcactgccaggggccggcgggcagccgttgctgcccgaatgcagggcccgccaagtccacgcccacccggaactc

SEQ ID NO: 813426 - DNA, 656 bp, Homo sapiens
tggaaggtgtgagaacgtggtgtattctcggaattcaatgcaaatagtttagtataacttgggggtggaatgaagtggggaatgatgctgatgaacatcttaacgagtgcccgccaaggggtttcgaagttttcagcaggcaggtctcagcagccagggatcaggctcccaatttacttctctgcctgagattggctcagcttgatggaactgaacctgtgggcacagggtgtaagtgacttcacctgggagaggctggctaggcctgaggatggtatttggttttatcttagtaactactgagaatagtatagaccaagttatgtttctctatgaagatttccatttaaacaaaataagtgagttgtcttgatttagtgttttggctatttactgtttcaacacattaacttttaactgaatgtctgccaagtttatgtgtgatggcttcatctacttgagagatttgtaaaattaagagaatatttgaaacttagatgctatttgacgatatttcaaaatttctctgaagatttggtaccagttccagtgctttccaacatgaggtttattaaaaaaaactttaaattttgccatgtggtgtttatttgagctttttaatgtasagacagttggactagagttcatgaaatatt

SEQ ID NO: 813427 - DNA, 574 bp, Homo sapiens
ctcatgacctcggaatcactaatacgaagagggtggaggattctaggggacttcctcagacaaactgacataatgagagcagtttaagttataatcagggtatcacttaaaaatgtaaatagcatgcagaaagctccctccatcattttatatattttgtgagaatgtctcctttaatttcgaggccaaaaatgctaattttaacacaagtcatcaatgcttttatttggactggcaataggatattgttctgaccagtagaagaaggcaaagacagtgtgggggtcgtcagttttcagtaagcagcctttcacttgttctctctagttttatcaaaattcttcagccatggtggaaggtcaaccacatgttcccaactccagaatctttggggattctgggttaatgggaaagaagtagtttcccacacagtggtgtttatggtggagaagggttgaggggatctgggagttcggtgttcctttkaacacctagaactgcttgtgttttcagcaactccaatcctcagtttttctatggctcaggggggctaattggcttacttcttgtttat

SEQ ID NO: 813428 - DNA, 564 bp, Homo sapiens
tgcctctgagggtgtgataatgattcgtacccagaaattgttggccaacatactgctgagattaaaattaggattaaagaaacataaaataattaggatcaaggaatagctacaccaataaagtagacttctgttgcatttaaggaggaatttctttgccaaggaagaagaactggtgaaattaggaattctgtatcctgagggatgttcaaccatcagcaagatgtacatcgtctttgtagctggaatgagaatcagaccttcatttcccggtgaccaagatatcaagtaatttaggggatgaatagtaggtcatttcagctgtgtttcagcagagagggaggatgagcatgggagcttatgtgtgtgcacagtgaaggtgttgcttaggagaagcagaggctgggggaggtttgtatgcctcaacaagatgctgacctttgatctaaacctgtgtgcatttgttatccaatctcgaattcctccctcttaccaacaagttctgctcctgaagatccagcttaagtctaattttctcwgtgacaattttctctgacctttcta

SEQ ID NO: 813429 - DNA, 557 bp, Homo sapiens
ccttttccagctcctatggagactatggcatttctgttaatctgctttttttyacattgcctagttgtgataattttgatttggccttgggttttgtttgtgtcatctgaggacttcttcctctcaactggtcattttggttggtctcgaatatttcagctctgtgtttcattacttaaagtggcccgttctacaagggtagctccaatcaagcaaggtagattgaagtattgttcacagatattcactgggcttcatagaaggagaattatattatcctgccccatgggtatacagcatggttatgtagcttgctctggccaatgaaaggtgagtggaagtgagacctgtcattaccaggcagaaggcagcatgtggtttatcatagttgtctttctcttctaccctgatgataggcgaagttgcagacagagtctgcttcccagagggtccagcagtttcaaaggcaactggtgaagaacaagtcatgcgaataagaaataaacatttgttgtaattgtaagccttcatgatttgttacaggagcacgaactagc

SEQ ID NO: 813430 - DNA, 629 bp, Homo sapiens
tccgatatatggtggggagaagagggaggcgttggtgagcaagcacccgtgggcagaccctgcccctccgacctctcccagggcccggggaagctctctccttggttgcctttgcctgccttttggcaaacccttgaaattgctgtttgcttgggatggagcggggagggcgagccaggtcctgtaactggggtgtgacttctcacctgctccctccaaggccttaggaaagagattcaggaaggacgccgcctcctaccgaagcctctatggagtggagcaaaaggggaaacacctcagcatggtccctggcagctacatcaaggatggccccaagaaatctggtaagggaaaaaccttggccccggccaccagaatcctgctccataatctcctcctctagaagaaaccgaaagctcacgccattcttagagcagtagcgtccacgtcaatccaaccattgtgcacacaggagtcagaagcccacatggaggctcagtagggaccactcctggggtcgctcttggcaagcrgggtgtgacatgaacaggaggcaagtgtctgtcaaggccctgccccatctcgagtgttcccttctcaggaaaccagcctcatgtgtccaggttcct

SEQ ID NO: 813431 - DNA, 507 bp, Homo sapiens
agtgcatccctttagaaagtaagcaatcagaaaacaagcctcggctgtgtgatcattgtgcttccgtaagactggtccttgacatccgagtcagaaccagcataggagaaactggtttttctcctgaccaaaagaagagtccttagaaagggcttcttaggaaggaaggcttaggagtaaaaaaaaaaaaaaaaaaagtgggaggggtccagggtcctcagagggacattagaaagcacgaagtgtaaaggggctggttgagaacacacacacatgccccacgcccatggcacgacttggctttgtggggacttggcttccttgtgtgcagagtgggggactgattggggcagtgagagagggaaatgctatcaacatatggaggcaaggaaggagacctttgtrtgcttacaaccacagaccccaaaaggggacctgaaacctttcagagctggtaggtgcctcaacatcagcaagtccaggaccttattcatttgaataaaagaa

SEQ ID NO: 813432 - DNA, 570 bp, Homo sapiens
ttggatgacaaggcctcctccacattgatcactttggccagagccgtggaaggcatctaagaattagagtagggagatgatcttggaactgctaatctagtgctcctcctgggatgccacacagccctagccatgcctaactctgctcttactgtgacaccagggagcagcatcacctgctgttcaatcacaaaccactgtatgcttaggaaaacattgttttccacggggtcaggcaggagttcttttatttgtcctcaacagtcctctttccagcccccacgggaaaggcacagacactggctgcttcatgtccaaggcataaaactggctgcttttatgctgtcagccttccaagcccctgtagggttggcccccacgggctgagtctcccctgtaacttagcccagatgatagacaaccagtgattaatagctcaggttctagagtcaagtcttgattctaccaagaaaagttatttcacctccagaaagcttagcttctccatgttcaaaatggkgataataaaaatacctaatttatagcatcatcaggagaattcagtaaggt

SEQ ID NO: 813433 - DNA, 634 bp, Homo sapiens
catagtggttctccttgtaagtgaaactgacttgtagtgtctctgtgtgttctctgacctgagggaaggggaaggcagagctggcgcacaagccagcatgcatctggctgaactgactgttctcactttgagattacgttaagtgtgtttcagggttcacactacctacatggaagcggcatcttctattcctttgagtttgtaatgatcccaatttggtgtacatctctgaagtcctttcctcagaggtagccagccctgatatttatctgtttttctaccacatccgtctcccctactgtcagccagaagaggaaaaaatgaggctgccatgccatttgcttctctccagatttggtgatagtattgaaaattctcagaattttgactcataacaacataatgatcctaggggcatgggcaagttttgaagttgagcccctgtgcaactcttcactgtgctccagaattacatttctttccttgaccccaggtttttgatggttttttgtatgatgtctaccttaccacccgatattgttctgttggtgcatttttgctagcttttactcttctttactcattttatttggtgttgggagaggaacawtcaatctactatctaatcttgaga

SEQ ID NO: 813434 - DNA, 542 bp, Homo sapiens
caaaatatatttttccccacacatattttttaaattggttttaaaaaagcgttttagagcattgtttgtgataccttcttagtgaattagtgacattttaaacgtttttttaaagaaacaatattaggccaggcacggtggctcatgcctgtaatcccagcactttgggaggctgaagtgggtggatcacctgaagtcaggagttcgagaacagcctggccaacatggcgaaacctcatctctactaaaaatgcaaaaattagccgggtgtggtggcacatgcctgtaatcccagctactcaggaggctgagggaggagaattgcttgaacctgggaagcagaggttgtggtaagccgagatcgcaccactgtgctccagcctgggcgacagagcaagactccgtctcagaaaaaaaaaaaaaaaaaaaaaaaaaawatatatatatatatatatatatatatttatatatatatatataattatatatataagtttaataatttgataattttttaagtatgggaagccccagattgtgta

SEQ ID NO: 813435 - DNA, 291 bp, Homo sapiens
ctcactgcaacctctgcctcctgggttcaagcaattctcctgcctcagcctccygagtagctgggactataggcgcgtgccatcacgctcagctaatttttatatttttttagtagagacggggtttcaccacgttggccaggatagtctcgatctattgacctcgtgatccaccctccttggcctcccaaagtgctgggattacaggtgtgagccactgtgcccagccaggtataagaattcttttaagcctcttaatatatatgtagaggagcaaaaaagaaaagtttt

SEQ ID NO: 813436 - DNA, 610 bp, Homo sapiens
cctgctctatgcctgggaggctgattctaggatggcatcatccaggccccccttggcttccctttggagttggtcagtgggcgacactggcaaaagatgggagcgtagacagaaagatatcaggatacctatcaaacctcaatcccttgctgccttgtcatggagtggtccatctctttctggggtctagcaagacctccacccccagacccagacccctgcagcttccaatgtggaaagaggcttcccaaggttcctagaccccgggtgccccactctcccttcctggttcccttaactctgccttcatgtctattaatagtagcttcaggtactctctccagggaaatctttggacatccatctgcttcctgttagaggcttgatcaactgctaggcctggaggactgtcagttgggggactgcctagagtggtggggggtagcttacaggaattaaggcaggggtgagcagggccctgccagctgttgcaaaacaaaaacaaaaacaaaaacaaaaaaacmtgcaaaaacctatcatacctcatgagcctttgaaaggctcagccaggcctggcaccattgcatgtgtatgggagaaaggctgatga

SEQ ID NO: 813437 - DNA, 627 bp, Homo sapiens
tggccaagggggtcaggcagggggaccacaggggctcatgggtcttggggcactgccttatcagatgcagaggctgggcctcggtggagggaggggtcctgagcgtggcaggggacaggagctatctgaccataggacacgagttcttttccttggccacctaccccaatcttgttctgccaacagctatgcttcctggggtttcctgagcagatgcaacaaaaacaccccctgctgctcaggttccccatgggggccgccactctccctggcatcccctcttccagaatttgctttagatgaagccacacaaacagtactgtcccctcctgccctgacctgagcaggccctgtgggggctggagggcccatccacggctccttccccaggactgggtgcaggtctcaggagaagctgcagtggaagtggctgctccccactgaatccctgcatctgtgctctttgcctgggtgtgcccggccaggtgtgggaggaggagccttccagggcagtgcgtcctattttgactcgggggtttcaggatgacttcctgcgggcagcctccagggactgtccccttgccaggcaraagcaggatgtgtgggaaggcttgacattttttgtaa

SEQ ID NO: 813438 - DNA, 618 bp, Homo sapiens
atgagtcttgttcagtgatgtgttgcaagggcttagaatagtgccaggaatatagcggatgctcaacaaatattgtcgaatgaaggaatgaataagtgagaccattaacacttcacaaatacttctagtatttcaggggtataaatgtatttctaatgttttctaggctcattaacacagcaggcttaaaactagaaagataatgatgaaaaaatccagagtttcaagtagacctagacctaatactagaactctgaatttggtgatgaaaatgctcaaatagggaccgtttaaaaaactgagcaaaaatctaaaatgtatgagtgttattaggatggcataggacaagaacacatacagattgtcttttttcacttgaattactatgaaatgctcatttttgtctgtgatgttcttcccttatcattgtattaaagataaagatatattgattttaacagtattgattcagttgtttcaaagagggaagaaaaactcagcctgtgcttttccattgggattgtgctatttaaaacagtatggcagaaaagcaagtgagcatgactgtttaattacagtagaamatgctaccaattcaactattgattttacttcatt

SEQ ID NO: 813439 - DNA, 618 bp, Homo sapiens
tatagtattggtatctaaaatctgagtttgtttcttgatatgtatttaataaattatactggaaacatcatgaaccctttatgatacaattagataagattttcaatgaaagataattccatatataatatttttcattatttcttcacccatattcaaaatttcaaaactaattgtaaatataaaactattttatgtatgtgtcttactagctatttcattcattcattcaaattctaagttccttccttattaaacttatgttctataggaagaagatgaaatgaatataaagcatgcaaataaattagtaaggtaatttcaaatattaagacatgctatgaagaaaataatttaggataatggaatcagaaataccatactgtggacggcctaatttagactgggaagtcagtaacaacatttctaaggaggtgacattgagttgagacttaaatgatgagcaaaagccaatcttgcaaaaatttaggtaaaaagcacttcagacaaggggaatagtcaagataactcctaaatatgaaatgagcttaatgtgttayatggtaggaaagaagccttgagcagtggttctatagtactcataatatgtacctgaaa

SEQ ID NO: 813440 - DNA, 496 bp, Homo sapiens
caaattagtaggtatcctgcatttgtatttgctaaatctaacagccttgtttggggagaagactctgaaatggagtttagtgtgcagaatgttgaaaagcagcgctcctgggatcaacacctgtgaaggcaggaaaaggaagcaggattgggcagagggagaattgcactgcgatgaaagcctgagcaacaactttacatgacccatgaggacttctggagctacatttgcttatcagagggtcctctactgggctgaaatgactgggctttgatagcttccctcttcactgctcaatcagtcattggatatggtcaagacaactctctgtggctgaaatgcccttgaaggggcagacagctgaagaccatctgcttatagctttcccagcagcttagcaaaaaattcctttactgaagacgagtctgggcractaatttccttgtcctttatagagaaaaaaagcaaagtgcaaaaaaaaagaaagcgtgtaatg

SEQ ID NO: 813441 - DNA, 623 bp, Homo sapiens
cagacccactcccaggttacaggtcacctgggttaaagccaggctgggtcttatgccccttctttatattgcaagtcctgaaaggcatgtggtgaacagctccctcatcctgatggggtagggtcaaaactcaraagaaatagacgctttgctagccacaagaagagggaagagacactgtgggagctttgcctcattttgtgaatccaggttaggtcatccctgaagtttctgtcccaggacctcagcaccagagtggccacattattggatcaataatctgaccactaatctcaagtatttctgtctttgatcatgctgactagtgttgacttctgaaggagcctctacttttccctttcagaaggagcagggaacaaatttcagaggagcagtgtacaatgaagatagtttcctcccataagtaacgtaatgtctgttcaagcccaatccacctaatattgaaaaacttaatctagaaaactccaggtaaacaaagtcacctttgtgtattcaccacttcaggttactctctgttcattttaaatttctcctcttcttcctcctttttcctagggtggtcaggtacttatgtattatctcggaatggggtggatgtcagg

SEQ ID NO: 813442 - DNA, 530 bp, Homo sapiens
tctggagcaagttatctaatttctgtcttatcacctgtaaaatgaagatgatgaagcttaccttacacagtagttagcaagattagagtgctacatgaagaacacckgatcataagattcttagtcataagaaattaaccaattctaactaatttaagcaggaatataatgcgttaaatgtttttaagtagctgtatgagctatgggaggaacagagcaacaagcttagaggctacagagccagaaccagtgctctaaatcagatggagaacagtaggagattgcattttggagacagcattgccattcccacttagcatgggcacagtggtttgcactgacaacatcaataccaccaggcacaggatgttgccattaaaacctctgccactgctacttctggaaattgggtatatcacctgtcaaccaagtcagaatgaattttgtatggcacttgtttcttacagtcagctacaaagattggcatgggtgtgtccaattgaaagagtctggatcacaaatttgccctt

SEQ ID NO: 813443 - DNA, 607 bp, Homo sapiens
aagttatataaaaagtaaacatagttttgctatgtgacccaacagttccacatctatgtatatacacaagatacattgaaaacatatgttcacatataaacttttaccaaaactcatagcagcactattaaaattgctaaaggagtggaaataacccacactcataccaaatgatgaaagataaaatgttatatatatatatatatatatatatatatatatatatacacacacacaaacacacacatactataatgtcattaagccataaaattagaattaaacattaattgatgctccaacatggatgaatttggaaacattatgctaagtgaaggaagccagacacaaagggccacatattgtatgactccatttacatgaaatcaaaataagcaaatacatagaaacataaagaagattaatgttcaccagggatcgagggaggggtgtgaagggtgactactgatggctatgggattttttagggggtgataaaaatattcyggaattagtagtgatggtcacctaactttgtgaatgtaccaaaatccactaactgtatacttaacaagagtaaatgttacggtgtgtgaatgatacctta

SEQ ID NO: 813444 - DNA, 507 bp, Homo sapiens
cactgtatttctgaaataataagactcgaaagtcaaagttactccttgatccatggggtgaagaamggatgttctgttagcagacctaaaaacaacatgaatctcattgtacctctccatcagagctcttgagtgaccaggtccattgtcaatgagtagtaataatttaaaaggaatcttttttctgagcattaggtctcaccaatgggcttgaaatattcagtaaaccatgttgtaaacagatgtactgtcatcaggctttttttttccatttatagagcactatagagtagaattagcataatctttggggccctagaacttctagaatggtaaatgagcattggcttcagattagttaccagctacattagcccctaacaaaagagtcagcttgtcatttgaagtttggaagccaggaattgacttctgtctaactgtaaaagtcccagatggctccaatataggaccattttatctacattgcaaatctgttgtttagggtag

SEQ ID NO: 813445 - DNA, 615 bp, Homo sapiens
actatgacctcttagacatccagagcagaaaactctgggtaatacggtgcgttcagcatctcccaaatgctcttacttcctatcttaatctacggcttctacctccartgtcaagattggcatgctctgttacagctttctcaatttgtcttctgtgatttgtggtaatgaatttcagaccaactatcatgttaatcattcctagaatatacattatcttacttctgtcacaaaggtatgtttgtgtttgtttgttttcagaaatcaacccaaggaggcactagtgaggcaaacaggccttttgatacactgaaagacccttcggaaagatatttcatcttacgtcactcagaagtaacaaatgtattatttttcttttatcacatcagtcagttgtgaaacatacagtcgaatttttacagttacagccaaatcaaggttttcatttgactagcataagaaaaaatggaccttattggtagtccctatgtctgaagaagatttaagaaaataggacatattaacttaaatttacatcataaatatatactttaaggatgtctgttcacagtaaatagtctatatccaggggtgaacggattgcacaaaacataa

SEQ ID NO: 813446 - DNA, 503 bp, Homo sapiens
ttgctcattcctgggcataggtcgaactaactttgggaaggaattccgttcattgtttgactctgaaacaaaattgataaaagccctttgccaaaaagactcccttcttatctggggtcaagtctgccttttcaggactaacaaattagctacaagatcagaaattacaatttaggggtcatgcaacctctggctccaagagtctgaacctccttaaattgctcttggagataacatcactattgtaaaacctaagatgagtgcttgaaatattttgcagaccctgcactccatggatcagctcacaccacccagaccagtaatctgacccaagaacagaagacattaagaaaacctaatttcaaccccctatgattccatctccaacctgaccagycagcattccccacttcccaagcccctacccaccaaattatcttttaaaactctgatcccaaatgctcagggagactgatttgagtaacaataaaactccggtgtcc

SEQ ID NO: 813447 - DNA, 555 bp, Homo sapiens
attatttgaaagagcttgtgcttatgaagttataagaggagtcttcaccaaatggaataagtggttcagaaagcattgtaataactacatgataaactgcttacataagcaatgcgtatcttttaggattgggtgaagacagttgtttttggaagatattttattatgtagaaggtaggcacaatttcatatgattcatgattgtttaaaaagaccgtgagtttgttacaaatgaactttttaacagaatgtaggtatcattgtttggtaagcttgtgtctgcagcttgtatctggtgaatcaaaagcctgtgtatttgatgtgtttttgtgtttcattctaatttgaaaattaacctgtgcatgttactaatgagtactttggatgtgaccagatagtttaacaaatacttgaggatcttttgagtaggagtagggtttatatgcytgggggataagacttagccatgaacataaaccttcaactgacattaggttgttgaaaaagaccatgtgtgtgtgagtgcaaaaacataagatagtaagaatccaaaaa

SEQ ID NO: 813448 - DNA, 371 bp, Homo sapiens
tgatcctgaaattccaactgatgaggtcgagaatgaatttcagtcacagcagaacatttctgcatctgttcccaatccaaatgtgatatgtaattctatgtttcctgttgaagacgtatttcgccaaatggacttccccggtgagtcctccaataatcggtcctttttctcagttgagagtggaaccaagatgtcaggcttacacatttcaggaggacagtcagtccttgaacccataaaatccgtcaaccaatccattaaccaaacagttagccagmcaatgagtcaatctctgattcctccatctatgaaccagcaacctttttcgtcggaattaatttcatctgtaagccagcaagagcggatcccac

SEQ ID NO: 813449 - DNA, 599 bp, Homo sapiens
tgtccagggttgaagaggagtgtctttcaacacttgacagtcagcgtattttcttgactccatctttttctaggttgggctccctgaaggggatagactttatgttgaactttgaatgaaagaatgatgagtgggagggaaggcgaaaggaagattgtttcgagcatatgggcatgggaaagtaaggacaagaaaaataggtgaaggaaagaaaccctttaggtaagggtcgtaggggaaatagtcaatgtgacaggagatgtgtgcaatcctgactggcaagttccacgtaattggtgatgagataaagacaggttaaacagaagccatttggtaaccttggcaccatgcccatatataaccaaatgtcttatattgttctcaaggctgtgaaagtaactacctcttgtcagcagcagagagcttttgataaacttaatatgtgccacaaaacttgaattatcctgttttctttcaacttctgtctctggaaaattctgcctctgagcaacaaaaaatgaataatgataatagtggattacratccataggataaaataaaaatgaattcatactgatacaaacaaatgattgaataa

SEQ ID NO: 813450 - DNA, 661 bp, Homo sapiens
tcaatccaaactggttgttaggtagaatgcagtcattcctagagttagttagcatatttggcagaatatcagtctttaaaaaaagttttcttttaatcaaagaraaaattaaaagatttacacacacagttacatatacataaaaaggcatacggtaaaaaaaaaaaaaaaatgcctaaattaattttattaaaaccagggtttctcaaagcttatttgaccacagaactcttttctattttgtattatgaaaattgagtataaataaaactggggaatataagagcattttggactcatcaccgagtttcaccagccatcactaaccattactattctgtcctatttgttttatctatagtcacttctttttcctgaagtatcttcaatgaagtttcagacagcatatgttattgtacagagtatgcatctaacaatggggcgatcttcttacataaggtgtccttatcacatccgtcaagattgaaatagttccttaatataatctaatactcagttgatattcaaagtccctgatttaaaaagtcagagcttttttttttcagtaaaaacctttggaactatttgctgattctactgattcaattttactaccaagagctggcaccaaccaatcacgtattagaaaaacttgcaatca

SEQ ID NO: 813451 - DNA, 558 bp, Homo sapiens
cctggggagatgtctcagtcacttttctccagcaggaagctgcttcatgttggagcctcctgggattggcagagttaaaaatcctttaacccaggatgccttgggccttttgttcagccctgacaatagaattgggtggagggggctgggaaggcaagtagctgggttagagatgcatccgtggggtgggggtatggggaagcttgtgttcagccactgggtacatgaaagcaactgtgtgtgtgtgtgtgtgtgtgtgtgtgtgtgtgtgtgtgtgtgtgtgtgtgtcgggggagggtataagggagcccagggacactggggcaccagctcgttaacacgtgtgtatgaatgccggctgtgcgcttggcaaatccttaattacacagggagaacttcctgaaccgggaactcagtatcggtccctgaaaggttgggtaatggcttyttcttgcatctggaatccaaggggaccaatctctctggctcccctgggctctcagattcttctagatgtctttgtcttctaaaattctgggatcccaagggaagacacat

SEQ ID NO: 813452 - DNA, 626 bp, Homo sapiens
ttattggagcttgatgcctctaaaaacttcatcattggaatcacctctggtgctttaaaaaaaaaaaaaaaaaaaaaatccacttacctacacaggtgcaagtaaatcagactttcatgtaatgagacgcaggcctcatcatttgtaagctccccaggtgatttgattcaaagacaagcttgaggaccggtgacatggatctctacacataacctgcctaaatagattctctagaagcagtttatagagaaattccacatgaactctggaagaggatatgaatttgatgtacagtatgtcctcacttatcgtctttgaaagtctcttggaaacttcacttttaagcaaaattatgtatactgaaaccacttattcctcatcaacatcataacaactttgaacacaacaacagtgttggaggacctgctgtacattgtttccataaagtcaatgttcagggaattccaaaatgaagtgaggacttcacgtatataaaaagatggttatgattccacctggatgacagggttactggtcagaaactaaaggaggccacctaggtatagaggattcagtyatgaggtttctgctaaacaaaggatcccagaatcctcacccattccagt

SEQ ID NO: 813453 - DNA, 668 bp, Homo sapiens
gctggctcttacttcctgatttttcctaggatcctttctatactgccaccctcggttcrcaccctgggacattatcttccatattctagcaagatgcggctgctaaagtcgcggggggtatacagccttcaatattattcgtaattttgtaggggaattgtaaacctgatgtcacaggactctgtatactgtgatgttattcccaatatcctacctttaccttagtaataatgtcacattgtgtgtacaccttgtggtgttattcttattctcctaaggagaggttgcttttattgtcacatggggtatgttccttttgatagtattcataatgtcctagagggatgtcactccttatgtcacagggtttgtacgccttgtcaaattagtcgtattaacgtcataagatgtcactccttatatcacagagggtgtacactctgtgatattgtcgtcatattctagggaaatgttacttttaatgtcacagaggttgcacaccttgtgaaattattcgctataattttgtgggatgttacccctaatgtcacacggcgtgtgcacacagtgatgttacgtccgatatgctatggaaatgttactcgtaattcacaggtcctgtccaccctttactattcttcgtaatcttctaggaaaacgttactgct

SEQ ID NO: 813454 - DNA, 611 bp, Homo sapiens
ctgcagatgatagtgtcaaaccaagtggaacaaagaaagaagatctggatgacaaagagaaaaaagatgaaactcctgcacctgtatataggrccaagtcaattctggagagctgggtatgggagtaagcaaccaggtaatctttgatcagagatagaaattagtatagacattttgcctccagatcctcaggtggttttagaaattggttctctaattctgtaggagaaggttgatactggtataggcttacacgtcattgaaactggaaaaggtagctagatattcttctactcatgttttggataatgagatattttatgcttcacacacttggagtatgtcatctactgtaatacggtatctgaatgaatactttaaataaaatacatttctgtaagttaattgtatactttaaaaatctctgaaaaatttgagtagcaagtctcagaaacttggttctaaatattaagaatatatccttccttgggagggagcatgtagtaaacatgttagtgtgattgtaagcatactgtctttctggaggtcgctgtgttcctgcatccactgttttcatttcagggatgttcacggaacgccagacaccaaaa

SEQ ID NO: 813455 - DNA, 556 bp, Homo sapiens
gcttgaaacacgcacttttaaatcaatactagaaaagaacaacgaaaatagtggctttctttgttggccsttcctatgtactgggctctgtgcagggcatgtcatctgagctgtcactctgtttagtaccagctccccccttaacaggtgtggacgccgagctgggggaggagcaggcatgtggggccctgggcgtaaatctccaggagtgctggtctttacaggtcaagtacaagttgaattttgcatctttttgggaaagtcttaggcatttcaatatcatgctttggtttaatttttctattatttgttagtctttaaactaatgataatagggctcttctgcctttagaagaattagaactatgatttaatttgcaaatgaaagtaggtgttctccagagtgggcaatgtttagattaaaataaaggttttggttttagatttcaaggccagcttgagatgctgttctgggttcccacagaggtggttctgcctttctccaggggtcctaggcctgtagggtggtttggtcatgttagtaatctgtgtggat

SEQ ID NO: 813456 - DNA, 495 bp, Homo sapiens
gtatgtgccgctccctcaagtgaccataagcagttgtaattaacatttgcactggctgatcccatgccttgcaccatgcacaggtctcctttccagtccatcggccctcccgtctccaaggatctatccttcattaaagattgtgtgtttgttaaatattttctccttttcattcctttataagtgctctaggaatacatagcctaccctgaggatgtaattctttgtagaaacccttcagatatgctgttccctgcctggatactcagcgtctgggtcttattcctcatcttagctcagttgttgcttccacaagtcccttactgaccctcagaatagcggtggtctgtcctccagtctccctggtacycccatagtcatccgttgcacagttttggacttgaaatcctgtgattagttgtgtcagcggtgccctttgctgccttccttgttagagtgtgcaactcagtcttcacacggtatctgtggaaccag

SEQ ID NO: 813457 - DNA, 643 bp, Homo sapiens
actttgactcccccaaaacttaactactaatagcctactgtaagccttacaaataacacagtcaattaacacatatttaatatgttatatgtcttatatactgtattcttaacaaacatgccagacaaaagaaaaaagaaaatcataaggaaaatagatttactagttattaaatggaagtagatgatcaaacaggtcttcatcctcatccttttcatgggcagggtgtggataaggatgtagaattgttggttttgctaagtggacgtgcacagttcaaacccctgtggtgcaaaggccaactgtatagccattgaatagcaatttatttttagaaattaacctcactaaaatactcttagaaggatgccaagaaaaaaagtgaataagtatttttggttcatctattacatcatttcatttcattatttcatttcttttcatcatttcatttcatttcctcatttcatcctttcatttcatcatttcatcatttcatttcatcctttcrtttcatcatttcatctcatcatttcatctcattttatcatttcatttcattctttcatttcatttcatcatttcatctcaacatttctcatcatttcatcatttcatctcatcatttcatttcatctcatca

SEQ ID NO: 813458 - DNA, 634 bp, Homo sapiens
aaattggaatatacaaataatggaatattatccagttttttaaaagcaggagatctgattatttttacactaaggataaatctggaggacattatgtaaataaaataaatgagtcataaaaggacactgtgtgattccagttaaatatctaaaatagttaaactcttagaaacagaaagtagaatagtatcagtcagagcctcaggggaggagataaaagggtagttgttgtttcatggctattgaattttagttttgcaacataaaaacattctagagatatgttgcataacaatgtgaatatatttaatattatttaactatgtacttaaaatatttaagatggtaaattttatgtggttttgactacattaatagtgaaaaactttctaaagagatacatatttatcaatcttttcaaaaattaccttcaaatcctaaaaatatcagaaaaacaataaagaggccaggtgcagtggctcatccatgtaattgaaacacatcaggaggctgaggagggagaatagcttaagcccaaaagttggagaccagcatgggcagcgtaaaaagacctcagctgcaaatcacaagmagaaggaaactggcaaatgaaaaaatatgtgaaacttaaaac

SEQ ID NO: 813459 - DNA, 503 bp, Homo sapiens
acacgcagagaaggtcatgtgaagatggagacagaaattggagttatgcagtcataaatcaaagaaggccaaggattgccaggagccactggaagccaggaagaagcgagggagaattcctccctagggtcttcagagggagtatggccccaccaacatcttagtttcagaggtccaggcttcagaactatgagagaatatatttctgtcctcttaacccaccaagtgtgtgataattaggtatgatggtcctaggcaactactacactctaattcagaagttcttctggattttattatatcatgtgttggtaggaagtacctgggtgtttcatttgcatgatatgttggtaatcttagaattatcatatcttgcaagtcatttttaagtatgttgtaatgtagtcagaagctttttaaatatgaaatttaattcttgctggtgtcaattacatttraaaaaatacaaaatagctatataagattctaggatctttcagaat

SEQ ID NO: 813460 - DNA, 491 bp, Homo sapiens
agagcacgtctctacatctatacctgcattctggaatcagggaggaagccaaaacggatgacaagacactaggtcagccgcgtccaaccctttgactacaaggacttttccacctatctgtggtggtgggtatcatgaaaattatgcacaaacctttttttttttttaagctcatcagctatcgttagcattagtgtattttatatgtggcccaggagcattcttcttccaatgtgaccctgagaagccaaaagacacctgtgcactagatcaaaaggctactccttctggaagcaattgtaaagaatttctgacattatcttcacatgacaaccaatgggtagtgggacagaatgcaaaaatcttcaagtatttttcttgttggttttttttttttgagtcagggtcttgctctgtggcccaggctggagtacactgstgagatcacagctcagtgcaggctcaagtgctcctcccacctcagccacagt

SEQ ID NO: 813461 - DNA, 485 bp, Homo sapiens
tgtatgggtagttgatgcttatttctagtatcgtgggtcagaaacaacacctaaatagtacagagtttttattgcatacaacatatttcagagtcagtggtaggcttctcataattgtcctgccaagacgaagcttaagtttatgcagagccagttcctgggtttccatttttcacaagagtccctatatctcaaagagaggatgtgtaagaaggacttgggggttggtgtcgaataccatagacttctcccttctgcgaggtaacaatgcttattctaccatagatacctatagagaacagagctgtcacccttgctgtcaaaaccaaaaataaattctactggaaaagtctaagagagaagtggtgtcatgactactgatgagtcaaacctcccagcctctgctgagctggtccagttggtacctcatagtatcgyccactgtagtataatatgtacagctagattatttgaaaattcaagtg

SEQ ID NO: 813462 - DNA, 567 bp, Homo sapiens
tttgataaaaaattacaaagaatttcaagatgaccataataggccatgcacaaggcctttctaaatgggtagagtgatcatgaagccatgggcattgttttgttttrtttaatcttactgtttggttgtaaagcagatctttaaatcaagagaaaaaaagaatgccaaagaacatctcaatcaaaatgttttaaacattatagaagattagatccatataaatgaaagggataaagaaaaagcacatatccaacctcaaatataaagcatggaattcttatgtgaactccattatagcacttgatatttcagctctattttcatttttgaacaactctagatatatctatatattttagtctaaaatttaatttttataagttctaagttcttccccaaattctaccttagataaacaattcagagatacctgtgtttcctattctattaggtggaaccatatgaaattgtcagtattcagccttttctgtcctacaaaaaaatgacagctttgtgtttccacctaacacatggcagcccaataaatatgtgacagtcaggaccata

SEQ ID NO: 813463 - DNA, 586 bp, Homo sapiens
cttctcagaatgtgagcttatttggaaagagggtctttgcagatgtaattagttaagatgaggttatactggagtagggtggatccaaaatgtccccagatcccaacacaaatggtgtccctgcaagaggagaagagacacaaaaagacacacaggagagaataccacgtgaaggcagaggagagattggagtgcagtgtctacaacccaaggaacaccaaggactgaacaagcaccagagactagaagagaggccattttctctcagagcctacagaaggaaagcagccccactgacacggtgattaggatctccagcctccagaactgggaccaagtaagttcctgttgttttcagccgcccagcttccagtaatttgttacagcagccctaggaagctaatatactcacgcttagctgcctaaatgtctaattctcaaaataataccaagggacaaacagaatgaacaccaataaagcaaaatgtayaacaagcctgttctaaaacacacaaaaaagacttcaaggcaaacaaaaattttgagttaaagtttccatttattaatttaccatatagccttctta

SEQ ID NO: 813464 - DNA, 606 bp, Homo sapiens
gggagtaaccaaataaaaagaaatgtttagtgttgsgggggaagcagtttactgtcttgtagcagaaatgaacatattagaagacaatttcaacaaagaattacaaaaaaaaaaaaatgccataggaagtgagagagggctcatggatgaatctgaaaatctttcatttaaaaaaaaaatcaccttagtctgtttcagtcttggttcaaactattttggagtgtgttagttcaatgggaacagccctgcctttaacagactggaaactatgggtattctggagttttttttttttcacgtttcctagagtatgtagtaacctaggaggagttggtgggtgtgatctattccttctcctttccctgcttgaaaaaataaaaaaatgcctttccatggttgagggaaaaatatgggggctggccaagaaaagaaagggctgtcacagcaactacgctgagctgctcgctgtccagctggccctctaacagaccacgtccaaattccagactggaaaacaaactagctcacgatattcgaatggaaaattcatggggaagatccagattcagccctgggaggaatacctcacccagaaaataaattcaa

SEQ ID NO: 813465 - DNA, 600 bp, Homo sapiens
tgttttggaaagttagctgagtattgctttaaattgatgaaataagttgttggagaccactctatttttttattcactgttgaaaagttgaagttagttgtttgcttaatactccaagctgatgaggcatttcattatcttaccactaatacactctagaaatggaatcattagagaacagaagtcattgaaatgtaaacatgtgaataatttacactttcaactggtgttaaataaaaggttttaatctagacagagatctgacaataaatattcatttctaatttccagtgagtaaactttatctctttctaaaagccttctcatttgatttttttcctggaagataatggcaaatttgacacggacacatttgggaataaaatttccctctggtcaacacaaccatgaagagttattatgaaaatcaaaatttgaaataattgcaaacattgtaattagtagccatttcaggattcttatgtactattacccacatggyctaccttcctggtacagttttcctaggggatgtggatgagaagcagaggaaaggaattgcctctcgacttggacactttgttggatgcttgccaggcc

SEQ ID NO: 813466 - DNA, 571 bp, Homo sapiens
taatgacaatttagagttagatgtttattgctttttaaaaacttcataagggaaaaacttaagacaattcactgacgtacttcgtgtgtgtcgttttccttctgcttggagggtatcagctaagggtgctaattacagagcccggggccaggagctggctctgcacacactggtctcatcccgggtgctactgttgcatgaagggcagaggtgttggtaaccctgatgctggcatatatgctgtcaagttggcctatgattttaagagtattgatgaatattaatattccaggtgaatagtctgaactctaacctaagtttaatgagctcaccacatatattgttgggctgacttgttaaaacactcaaatgtagtttttggaactctagagattcactaatatccaggcagtaagattaaaaaacaataaaggatagctgttgagaaacatgattttagatgaagccagaggagaaaattagatcctagagtaatcagcatcatcaatgggagtttaactgggtttagccattayggaatcactaggcagcctcgaatattaaaatatta

SEQ ID NO: 813467 - DNA, 480 bp, Homo sapiens
aggtcaggagtcagagaccagcttgccctaaawagcaaaactctgtctctactaaaaatacaaaaattagcaaggcatggtggctcatgccggtaattctagcactttgggaggccgaggctggtagactgcctcagctcaggagctgaagacccagcccaagcaacatggcgaaaccctgtctctactaaaaatacaaaaaattagccaggcgtggtgcgtgcctgcagtccccagctactcgggaggctgaggcacgagaatcactggaacccaggaggtggaggttgcagtgagccgagatcgcgccagtgcactctagcctgggtgacagagcaagattccgtctcaaaaaaaaaaaaaaaagatattgacatgaaaccaggcacagtggctcacatctataatcccgaaacaatttgggaggttgaagcaggaggatcccttgagcccaggagtctgagacctgcctgggcaaca

SEQ ID NO: 813468 - DNA, 626 bp, Homo sapiens
aactacttacttggcatcgcacttggatatctgttggacaattcaaatttacacacatcctaaacccgtctttccccttcaaaagacaagcaacarcaaacaaaacaaaacaaagcaaaaataaaccttgttgcacttgaacgccttttcatctcatttgatggcaatgtcatcaaagcccccgttgctcaatccaaacatctctttctcaatccatcaggaagtgcgagtgactctaaaaactctctccaggactcacttcccactgccaaggtgcagctctgagacggtgtcacttctcacctggatcactggcttctgtccccccatttctatcattggccctcaagattgtttttcttacagcatccagggtgatccttttaaaatgttaagtcagaccataacagttctctgctaaaaatattctgagatgccttcccatttcacccagagtaaaagctggagtctttacaatggtccttaaggaccaccccaggcgccccacccacccctcacgtctcctgccctgtcctccttctgcccttgcacttgtcaccactctgacttcatctcctgtgctctccactggcctcctgaccattcctgctgctttagagcattgt

SEQ ID NO: 813469 - DNA, 626 bp, Homo sapiens
aactacttacttggcatcgcacttggatatctgttggacaattcaaatttacacacatcctaaacccgtctttccccttcaaaagacaagcaacagcaaacaaaacaaaacaaagcaaaaataaaccttgttgcacttgaacgccttttcatctcatttgatggcaatgtcatcaaagcccccgttgctcaatccaaacatctctttctcaatccatcaggaagtgcgagtgactctaaaaactctctccaggactcacttcccactgccaaggtgcagctctgagacggtgtcacttctcacctggatcactggcttctgtccccccatttctatcattggccctcaagattgtttttcttacagcatccagggtgatccttttaaaatgttaagtcagaccataacagttctctgctaaaaatattctgagatgccttcccatttcacccagagtaaaagctggagtctttacaatggtccttaaggaccaccccaggcgccccacccacccctcacgyctcctgccctgtcctccttctgcccttgcacttgtcaccactctgacttcatctcctgtgctctccactggcctcctgaccattcctgctgctttagagcattgt

SEQ ID NO: 813470 - DNA, 626 bp, Homo sapiens
aactacttacttggcatcgcacttggatatctgttggacaattcaaatttacacacatcctaaacccgtctttccccttcaaaagacaagcaacagcaaacaaaacaaaacaaagcaaaaataaaccttgttgcacttgaacgccttttcatctcatttgatggcaatgtcatcaaagcccccgttgctcaatccaaacatctctttctcaatccatcaggaagtgcgagtgactctaaaaactctctccaggactcacttcccactgccaaggtgcagctctgagacggtgtcacttctcacctggatcactggcttctgtccccccatttctatcattggccctcaagattgtttttcttacagcatccagggtgatccttttaaaatgttaagtcagaccataacagttctctgctaaaaatattctgagatgccttcccatttcacccagagtaaaagctggagtctttacaatggtccttaaggaccaccccaggcgccccacccacccctcacgtctcctgccctgycctccttctgcccttgcacttgtcaccactctgacttcatctcctgtgctctccactggcctcctgaccattcctgctgctttagagcattgt

SEQ ID NO: 813471 - DNA, 649 bp, Homo sapiens
ttttgaacggagccagtttgccatgtttttctacccagcactctgcaattccactgttggctccctggcatctcctcaagttatttccttctcctggtgcaytgatccatcttaactcttttgtgaagcttacctgtcaagaagccaccccttcccaggctgaagggaactctcccctctgataattcagaacatacattaagccacactcatcactggatacagtttttaaacagccttgggatgtctcctgagtcactgcatgattatctcatttttcccaaccaaagtgtagattccccaaggggagcaactgtgtctttaacctttttgtatttctcacaatcagagagtgggtgtcaaattgtggaagtggggtgatgagtctttgttttcaacgagaactgcagaattgcactgaaaaagcaataagatcgttcgctggtcaccagtatgtctggttctcctccttctgggaatatgaggaattgcatttcccaggcccctggaaattaggtgtaaccatgtcattcattttccaaatgaaatgtgagcagaaatggcataatcactttccagaaagctttgttagtgaataatataccctttttgtcccccttccatggtgactgcagctagatgtcaaggt

SEQ ID NO: 813472 - DNA, 607 bp, Homo sapiens
ttccaatttccttgtttatgaaggaagggcaatgagaacagtgattttaattatcaaggttaagtaaggcctgattccttccttaggagaacacacctcrataacctgggaaatcaaagcttaccaggcaagaggagcaactcacagaaaagccctggctcctccaaaatatttacccggcaggaggcctcgtacagtgccatctgctccttttatctgactgaaacttcctctttgaaaatcactaatggaatagaaaaaagaaaagtcacgggcatgattcccagaaggttattgctaaagcgggtgtgtgttatctgggaagcaaagaacaggtccctgcctgttccttagcctgtggccttgtgtgtctttatggaatgggaacttatccccttgaaagcagaaagaacccagcccccagccccagaatactggataaatcagcatcaatgggggcagggaggaagggtgtgtgatgtaccaggagcccaggggatagaaggtcctccccaaggcagatgtcaggaaactcaagtgcctttaggcacagcaggcaacataaatgtcctggggggtaagatgatcaaaggcaggctgggtctgg

SEQ ID NO: 813473 - DNA, 526 bp, Homo sapiens
gtaagataataaatatgtgttgttctaagacacctaagtttgtgataacttattacaacagcaggagaaactgatacatggttgtaggttccttccagcttcaatatccccatattctaaggcgacagacrgtagtatgggccccagagtcctgcctcctatctttgaatccttgctttgccactatctgtatgactctgagcaagccatttaaccatcctatgcttcatgtccttatctgtaaaaacagtagatgataagatctaactcagagatattgtgaagattaaatgagaaaatatatgtaaagccatgaacttgagtataattgctcaaaagcagttacagctttgtataaatcttcaaaggaaaacttgtcagttcatatcaaagctttgaaaatgtatatttgccttattttccaggaatctaatcatggttatacacaacaatgtatctataaagatgcttatcatactgtcaaagaagaataaacaattatgacaattccatattatgaaacatt

SEQ ID NO: 813474 - DNA, 544 bp, Homo sapiens
atatttagaggaatacaaaatttcccattactcaagaaggtgaaattcacatctggcatttattcaaacattatcaggtatgcaaaggagttcaaaacaagcccgggcaacaaagtaagactgcatctctagaaaaaataaaatgaaatttctgggcatggtggcacgtgcctgtggtcccaactacttgggaggctgaggtgggagaactgcttgagcccaggacattgaagctgcacagagccatgatcgcgccactgcactccagcctgggtgacagagtgaggctctgtcttaaaaattaattaattaatacataaataggttaaaagtacaagggcagaaaaagatataccatgttaatataaacacaaaacagaaatgattacattagtatcagacaaagtaggtaacagagcaaagaatacatgcaaagccactaatagaagccatagaaacaagtytaaataaatgtaaacaaatgtaaaacatgtaaaagaaacaagtctaaataaatgtaaacaaatttaaaacatacaaatta

SEQ ID NO: 813475 - DNA, 560 bp, Homo sapiens
agttgaatccacacagattactaacatgaccaaaccaccctacaggcctaggacccctggagaaaggcagaaccacctctgtgggaacccagaacagcatctcaagctggccttgaaatctaaaaccaaaacctttattttaatctaaacattgcccactctggagaacacctactttcatttgcaaattaaatcatagttctaattcttctaaaggcagaagagccctattatcattagtttaaagactaacaaataatagaaaaattaaaccaaagcatgatattgaaatgcctaagactttcccaaaaagatgcaaaattcaacttgtacttgacctgtaaagaccagcactcctggagatttacgcccagggccccacatgcctgctcctcccccagctcggcgtccacacctgttaaggggggagctggtactaaacagagtgacagctcagatgacatgccctgcacagagcccagtacataggaasggccaacaaagaaagccactattttcgttgttcttttctagtattgatttaaaagtgcgtgtttcaa

SEQ ID NO: 813476 - DNA, 603 bp, Homo sapiens
gtctggcgttccgtgaacatccctgaaatgaaaacagtggatgcaggaacacagcgacctccagaaagacagtatgcttacaatcacactaacatgtttactacatgctccctcccaaggaaggatatattcttaatatttagaaccaagtttctgagacttgctactcaaatttttcagagatttttaaagtatacaattaacttacagaaatgtattttatttaaagtattcattcagataccgtattacagtagatgacatactccaagtgtgtgaagcataaaatatctcattatccaaaacatgagtagaagaatatctagctaccttttccagtttcaatgacgtgtaagcctataccagtatcaaccttctcctacagaattagagaaccaatttctaaaaccacctgaggatctggaggcaaaatgtctatactaatttctatctctgatcaaagattacctggttgcttactcccatacccagctctccagaattgacttggycctatatacaggtgcaggagtttcatcttttttctctttgtcatccagatcttctttctttgttccacttggtttgacactatcatctgca

SEQ ID NO: 813477 - DNA, 627 bp, Homo sapiens
gttttaagtttcacatattttttcatttgccagtttccttctkcttgtgatttgcagctgaggtctttttacgctgcccatgctggtctccaacttttgggcttaagctattctccctcctcagcctcctgatgtgtttcaattacatggatgagccactgcacctggcctctttattgtttttctgatatttttaggatttgaaggtaatttttgaaaagattgataaatatgtatctctttagaaagtttttcactattaatgtagtcaaaaccacataaaatttaccatcttaaatattttaagtacatagttaaataatattaaatatattcacattgttatgcaacatatctctagaatgtttttatgttgcaaaactaaaattcaatagccatgaaacaacaactacccttttatctcctcccctgaggctctgactgatactattctactttctgtttctaagagtttaactattttagatatttaactggaatcacacagtgtccttttatgactcatttattttatttacataatgtcctccagatttatccttagtgtaaaaataatcagatctcctgcttttaaaaaactggataatattccattatttgtatatt

SEQ ID NO: 813478 - DNA, 497 bp, Homo sapiens
gctactactgtggctgaggtgggaggagcacttgagcctgcactgagctgtgatctcascagtgtactccagcctgggccacagagcaagaccctgactcaaaaaaaaaaaaccaacaagaaaaatacttgaagatttttgcattctgtcccactacccattggttgtcatgtgaagataatgtcagaaattctttacaattgcttccagaaggagtagccttttgatctagtgcacaggtgtcttttggcttctcagggtcacattggaagaagaatgctcctgggccacatataaaatacactaatgctaacgatagctgatgagcttaaaaaaaaaaaaaggtttgtgcataattttcatgatacccaccaccacagataggtggaaaagtccttgtagtcaaagggttggacgcggctgacctagtgtcttgtcatccgttttggcttcctccctgattccagaatgcaggtatagatgtagagacgtgctct

SEQ ID NO: 813479 - DNA, 563 bp, Homo sapiens
tatggtcctgactgtcacatatttattgggctgccatgtgttaggtggaaacacaaagctgtcatttttttgtaggacagaaaaggctgaatactgacaatttcatatggttccacctaatagaataggaaacacaggtatctctgaattgtttatctaaggtagaatttggggaagaacttagaacttataaaaattaaattttagactaaaatatatagatatatctagagttgttcaaaaatgaaaatagagctgaaatatcaagtgctataatggagttcacataagaattccatgctttatatttgaggttggatatgtgctttttctttatccctttcatttatatggatctaatcttctataatgtttaaaacattttgattgagatgttctttggcattctttttttctcttgatttaaagatctgctttacaaccaaacagtaagattaaayaaaacaaaacaatgcccatggcttcatgatcactctacccatttagaaaggccttgtgcatggcctattatggtcatcttgaaattctttgtaattttttat

SEQ ID NO: 813480 - DNA, 594 bp, Homo sapiens
gtgatctgcccacctcagcctcccaaagtgcrgagagtacaggcatgagccactgcgcccagctagctctgcttacagtttttaaatgacttcttagtctacttaggagaaaatataaactctttaccagagcctactggacttcccaaaacatgatgtatgtttatctcttccctttagctcacttggttttagccgactgaccttctgttctctgagtaaaacaaacttattcctgcaacggggcctttacgcctactttgccttctgccccagaaacagttctcacaggttttcccatgactcttttcttctccttattcagcatcaccccaaacatctccccctgagtggccttcgccaggacattcttcttaaatatctttccttacctcatcctgtttggttttgtttataacaggtgtcagctacaatactggttttgtttgtttatttactttttcttacaatggaaagcccatgagagcagggttgtgtctgctttattcacaactttaacctcagtgccagtacagaaccaggaccgtactagaaactcaatgaacatttgttgagtattttgaatgaattaat

SEQ ID NO: 813481 - DNA, 492 bp, Homo sapiens
caattatgcacttgaattttcaaataatctagctgtacatattatactacagtggrcgatactatgaggtaccaactggaccagctcagcagaggctgggaggtttgactcatcagtagtcatgacaccacttctctcttagacttttccagtagaatttatttttggttttgacagcaagggtgacagctctgttctctataggtatctatggtagaataagcattgttacctcgcagaagggagaagtctatggtattcgacaccaacccccaagtccttcttacacatcctctctttgagatatagggactcttgtgaaaaatggaaacccaggaactggctctgcataaacttaagcttcgtcttggcaggacaattatgagaagcctaccactgactctgaaatatgttgtatgcaataaaaactctgtactatttaggtgttgtttctgacccacgatactagaaataagcatcaactacccatac

SEQ ID NO: 813482 - DNA, 357 bp, Homo sapiens
agataacaagaatgccagaagttcatattggataggcagtggaaactatactgtcatgtttctacttttcaaagtgaaaataaacatgacaggtgctcatytggctgttcaagcactttccacttaaatagcaattcctccagcttaccaactgcagcctgaagttataatttattactggtttctgtattattcccttgcctcggcagaaagcagaacatagcacctacatttcaagacccatgagaggtaataaagtataattattttaaatttatgattaagccataaattatgtgtactttttactttagctggtcattcagaggttggtgaggaagggaatggggtcagaga

SEQ ID NO: 813483 - DNA, 559 bp, Homo sapiens
gtatctaagatatataaggaacwcttataagacaaacaacctaatatttttaaatgagcaagaaatctgagcagacactttaccaaagatatgaatggcaaacaagcacatgaaaagatgcttaacatatctgtaattatgtaacttaaaaccacaatgagtatcactccatacacacctacaagaggacgaacattaaaaaataaagtgatggtgaagagcacctggaactcttctacatggcaagtaaaaaggcaaaatgatgcgttttagaaaattttagaaaaattttgcagtttcttataaagttaccataaaattttatatttccataatccacaattgccaatcttattccaaggtatttatactaaagaaatgtaaacacatacctacacaaagactgtacatgtaagcttataacagctttcttcataacagccaaaaactggagaaaattcaaatgtctatcaattggtgaatggataaacaaatagcagtgaatccatacaatgaatactactctataataaaacggaacaaaccactgacacatgct

SEQ ID NO: 813484 - DNA, 600 bp, Homo sapiens
gaaaaaaatattgctagccctttgatatttagaaatctttacatagtcataattatgtgaatacttattaccaaattaatcaaaacacttytgccctaagaaaaaaagtttttgtttttaccaaaaagtcctgccttatgacatttaaagattatgataaagctatagtgagaggaagtggggaaaggaagtggagattgaataagagagcgaaatcctcaactactttaacaggatgtctatagacaatgtcttaagttgataaatcaagaaaaagcctgaatgagcaaattatttaaacacaaagacgtaagtagtagatgaaatggctgaaacgttcttgaaagtggcagattggagagcagtatgggtaagaaatggagcagaggtacactgctttcccatctaaatcttccagaataattaattttaaaaataccatgtgcaagcaggacatgatggtgcatgcctgttttcccagctgctggagaggctggggctagttgggaggatttcttgagcccaggagtttgaagctagcctgggcaacatagccagaccttttctctaaaaacaacaacaaaacagaacaaaaaaacc

SEQ ID NO: 813485 - DNA, 643 bp, Homo sapiens
ttgactttctcatttccttcctcatatgccttattctgctttccacagcttctatkctttcaaaatttggttctgattcctaaaatatttttgtctttttgtattttttatttctttccctaactttctcaattcctctattgtctgatcacctcttcttgtaattctttagtttctgtttctgtttcttccttcatattgctgactattgtattatattcactttagttcctgaaagatattaggttgtaatttgtatctatgttgtggcaacattttttcaggcatgtttttattatctttccagatatactgtctctacttttttacatttttgtatggaaacaaaatatattctgttctattaattatatcctagattttactgaactatagggaaagagtggacattggacagagtagcttcttatactctaaggctcctcctcactgctacagtgaaaaattaaaatacagaaactctgcatagcccctctttctccattgtcggactctcccatagttgagatctgggcttctcagttctctttcttttaccttttagaaataatattttgcagatgatttcagagcactacaccttctgagcccctgtcactttctttttgttgccctctgccac

SEQ ID NO: 813486 - DNA, 490 bp, Homo sapiens
cagtcaatattgtcaataattgatcaacagtacgctgatgtgataggggagtacaaagaattatgtgtcctccagtaacttttattattcctayaaattaggcatttataagcacacttagttgtacaaatattgtcctatacactaggtatgaaagaaaaacaactttatcataccaaaccaaatttctattttgagcacaagttcagctggtagacgcttaattaaaacaatttggtgttaaccctactgagttataatttcaggtggctgaaatatcaacaaagtgttccgtgtttatattagattagtggtcatgatttagccacagtggccccaagtgagatgtatgtcacccagtatttaacctatcctgtccagataaaaatatctcttgtttctgttctgaaattttccatgttatcttcttccacataattaaaccttgatcatcagtaccatacctctacgttggctcacaaaaatagag

SEQ ID NO: 813487 - DNA, 490 bp, Homo sapiens
cagtcaatattgtcaataattgatcaacagtacgctgatgtgataggggagtacaaagaattatgtgtcctccagtaacttttattattcctacaaattaggcatttataagcacacttagttgtacaaatattgtcctatacactaggtatgaaagaaaaacaactttatcataccaaaccaaatttctattttgagcacaagttcagctggtagacgcttaattaaaacaatttggtgttaaccctactgagttataatttcaggtggctgaaatatcaacaaagtgttccgtgtttatattagattagtggtcatgatttagccacagtggccccaagtgagatgtatgtcacccastatttaacctatcctgtccagataaaaatatctcttgtttctgttctgaaattttccatgttatcttcttccacataattaaaccttgatcatcagtaccatacctctacgttggctcacaaaaatagag

SEQ ID NO: 813488 - DNA, 551 bp, Homo sapiens
tgtacttacacaaacctagatattgtaccctgttacatacctaggctatatgatatagcttgttgatcctaggctacaaacccatacagactgtwactgttctgaatactgtatgcaattgaaacacaacaggaattatttgtgtatctaaacatatctaaacatagaaacggcacagtacaaatacaatataaatgatttttaaaaagtggtacagctgtctggggcacttatgaatggagattgcaggactggaagttgccctgggtgagtgagtgagggagcagtgagtgaacacgaaggcctaggacattgataaacactactgtagacttcataaacgctgtacacttagaccaaactaaatctaaaaaaaaagcaagtgattgccctgtgatagctgtgatgtcacatggcaataggaaatgttcagctttattataatcttctagactatcttcatacatgtggtctgttgttgactggtactccattgtgtggcacatgactttatacacacacacacacacacacacacacacacacacagt

SEQ ID NO: 813489 - DNA, 554 bp, Homo sapiens
catgctggtgcatgtggaggcgcctcactgtatctctgggattttagctgaatgacttgttcagatttcccagctattaccccactgctctattcactactgtggaagacagacgatgaatgaaaaaaagatcccattgctatttttgacaatttaataaatgtatattttgcataatttataattaagtctcaagtttgtggactcttataatgtgctctaaacatttgagtatagattcattggatcgagaatactctcttcagtaatgacttaaaattcagtagttcagaggaaaatatatagggatgtgtgtgtgtgtgtgtgtgtgtgtgtgtatttatacacctgtaatatatatatatgtgtgtgtgtatttatacacctgtaatatatatgtgtgtatttatacacctgtaatatatatgtgtgtgtgtgtatatttatacacctgtaatatctaatatatatataatatatatataaagtcaattgmaggtgtttcatagagaagctctttaaggctgactgaagcaactgacatgtatcctcat

SEQ ID NO: 813490 - DNA, 506 bp, Homo sapiens
gctaattctcaatcaactagaaaaagctgacatctctataaagagartaaattcataaaatgcaaaggacaggcacaacagagtatttagtaagtagtgcgtcatctttattagagaggtacatctaaactaattggaggcaaagttagtttgaatgaatgacagttcacatggcccaggcaactttggtttttagaataagtgttagtaaatgatgtttttttgctttcaagggcagagagtaactggaagtgggtttgtgattagcatatctaatgtccatttagggtgaaaccaccattctgaaatcatgccgcatgatttgtcctgcccctggtcatgttcctcctcctctgccattctcatgatatcagtgtttgcctgggtgccatgtgaccgcatctcatggccacttcacgctcagtgcgttccaggcctctgaggtcattcccagtctctgttacccacaggactctgtgtacccacttctctgacctcatcttcat

SEQ ID NO: 813491 - DNA, 506 bp, Homo sapiens
gctaattctcaatcaactagaaaaagctgacatctctataaagagagtaaattcataaaatgcaaaggacaggcacaacagagtatttagtaagtagtgcgtcatctttattagagaggtacatctaaactaattggaggcaaagttagtttgaatgaatgacagttcacatggcccaggcaactttggtttttagaataagtgttagtaaatgatgtttttttgctttcaagggcagagagtaactggaagtgggtttgtgattagcatatctaatgtccatttagggtgaaaccaccattctgaaatcatgccgcatgatttgtcctgcccctggtcatgttcctcctcctctgccattctcatgatatcagtgtttgcctgggtgccatgtgaccgcatctcatggccacttcacgctcagtgcgttccaggcctctgaggtcattcccagtctctgttacccacaggactctgtgtacccrcttctctgacctcatcttcat

SEQ ID NO: 813492 - DNA, 585 bp, Homo sapiens
ccatctgatctttgacaaacctgacaaaaacaagcaatgaggaaaggattccctatttaataaatggcattgggaaaactggctagccatatgcagaaaactgaaaccagaccccttccttacaccttatacaaaaattaactcaagatggattaaagacttaaatgtacgacctaaaaccataaaaactctagaagaaaacctaggtaataccattcaggacataggcatggccaaagacttcaggactaaaacaccaaaagcaatggcaacaaaagccaaaattcacaaatgggatctaattaaactaaagagcttctgcacagcaaaagaaactatcatcagagtgaacaggcaacctacggaatgggagaaaaattttgcaatctgtccatctgacaaagtgataatatccagaatctacaaggaatttaaacaaagttacaagaaaaaaacaaccccatcaaaaagtggacgaaggatatgaacagacacttctcaaaagaagacagttatgcaaccaacaaacatggraaaaaaaagctcatcattactggtcattacagaaatgcaaatcaaaaccac

SEQ ID NO: 813493 - DNA, 635 bp, Homo sapiens
aagaactctttggaacctgtgatcccctggctataataagtccctgaaccctgaagacctcttagttgcaaacagtatgtcatctgtgattttacagttaayttctcacacatggaaatgactcaagaagtgtcttcagaggttattaagaggattccatagttatacaataaaatacatcctactcaagtttctccctccttcctcagcctttttttttctgagccccttcttgagatctcccctttcctgttctccatctttctgcccactcttcctggtctctggcctccagtcttcccatcattcaccaccctagatttttctgagtgccatgaacaccagtcttgtcccaagtatggaaacaagccagggaatacctcgcgccttgaagctgaaacacatcgagccaacacaaatctgttggcaggaacagcaggcacaagagtcacattcagagtacaaaaacagctatttataaagcctccttcctgatttttgggtgttcactttcccttgaaccaaaggggccactgccccctcttggaaaagatgattccatgcacagctcggtgcctgaggatcactgcgtgcctgttctgatgagcagtgagagctggggacagcatgcagcg

SEQ ID NO: 813494 - DNA, 493 bp, Homo sapiens
cagatgctaagttatttatgtgtatggagtatcagtatgctactggttcttccctagcctcctgcttcccctttgatacatgatcagaaggctggagaaggagagagagttggggaaaggcaaacagatgtttctggtcacagggcggtgttcacgctttagtcctctgcccaccgccctgacctagtaagaacagaaagagaacccacaaggtatcaaagtccgctttcctattctcaactagaatacaaggtcaaaaacatatcttcacttgctgaggcctggatctctactccaacccaactctgatcaaagcacagcgctgagcaccatttctgggaggatttaggccacatggtaaattccaccagagagggaaagttaatttgctcaggtaaagttgaataaaattaaaaaatggaagcttcagaaacaccctcacttaaagagctggtgagyaggacaggaaaaaccaatcaataaaagacaaaaa

SEQ ID NO: 813495 - DNA, 619 bp, Homo sapiens
cctggggctacgagctgtatactaactgtaaggccgggcttctcccacacttttctccttgtcctctgaggggcaggctatcatccatggcaagcagatccccagacactgcctaaatcatctccatgaaaaccgaggctgcagtcaggtaggtgggacctcttccaggcttcctttcttctctggtctctggccacatagtgagtgctgagacagggagtgaattcaaagcatatagatagaatatttcatttcccttctacccccttagaaaatacattccattatttgtaaattggaaagtaaaaataattactatctttaaaaagggacttttttttcctgagatggaatctcattcttgttgtccaggctggagtgcagtgctacacgatcttggctcactgcaagctccacctcctgggttcaagtgattctcctgcctcagactcccaagtagctgggattacaggtgcacaccatcacgccaggctaattttgtatttttgtagagacagggtttcaccatgttggcyacgctggtcttgaactcctgacttcgggtgacctgcccaccttggcctccaaaagtgctgggattacaggcatgagccaccac

SEQ ID NO: 813496 - DNA, 559 bp, Homo sapiens
caagctcatttaggaagctggatccactgctgcggaggtcagggagtaaacatggcggcctccaatgggagacactaaagagtagattctttcttactcgttgttgattgaggcagtatggaaagatttgttttgttttatatgtaggtttaattttattttttatgtaacaaacaaagccctgtttgaagtgttttacaaatgttaacttgctcaatcttcataacaacttcacggggtagctgccatttttattatccctgtcgaaatactttgtgcacacagctgataagtggaagagccaggattccaaaccagatagtttaactctagaaccttgctttactgcctctctcattgctgggccttcccacatgagctctccttgtctggaggctccttcagcatctctttacctggcccatgcygacctgcccttgaagtattactcagtattctcctctaataaataagctttttctgcttccccaggcctagatttggtgcctgctctatgtgcttccgtagcacccagggcatcttgtataacaatttcaca

SEQ ID NO: 813497 - DNA, 541 bp, Homo sapiens
attggtggttttagcccaagagctctctgctttctatgtgattagctgagtcttatccctgtcctggattacagctctacttatttctctaccccgtcctactttctttccattccttccataggtttccctctcaaaagcactccttaataagtactgcccattaacctctatgttggagtatggctgccagtgaaagtactgttggaagtggtctgagcaaactggtcataagatggagttttagagctgcattaatccccaaccagcttgcagtaagagcgccatcaatggtgggaattacagttgaatcgttacaactttcactacaccgggcgcggtggctcatgcctgtaatcccagtactttgggaggccaacgtgggtggatcacctgaggtcaggagttcsagaccaacctggccaacatggtgaaaccctgtctctactaacaatacaaaaattagccgggtgtggtggtgggtgactgtagtcccaggtactcaggaagctgaggaaggagaatcacttgaacccaggag

SEQ ID NO: 813498 - DNA, 602 bp, Homo sapiens
tctattgaatttagcagtaagactgattgaagaacaatagttgagttactgcaagttaaaaaaatccaactatataatgatccaactatataatgaataccaggtaagcatctttgctttagaaatggatgaaagcattctgcatagaaataaagttttatggcttggtgaggtctggtttacctctaattaaaagtcatagaggaaatctggttttcagaattactaatgaggcagtcatggaaatgagctgctcacatttcccacagctgggaacattgttcactgatggcctcagctgtatctgatctattactgtgttcatgcttaggccaatcttcccgcaggctgttctaatcaatgactgaacacaatggagttattagtgtgagtccgttcaaatagtccacagtcctcctgggtgactttagcttaacgatctgatattggtctatttaaacctttcttaaaacttatttgtagtccaagattcttctctctccttttcctctcctttcacaagtgtgagatttgcattgcattttgaagacactgygtgtcttatgttccctctcctttattcttcataggcatttcctcca

SEQ ID NO: 813499 - DNA, 643 bp, Homo sapiens
acatagtgatggaaaccaagaactgagatgcacttcctcagaaaggggatgtagaatgtgaggaaagggggagtgggactagagyccttaggaagatgagcattcaggggtagagaagacaaagagaagccagggaagaaacgaagaagaaagcatccaagagctagcagaataaaggcagaatggtgtcgtgagagccaagaaaaggagagaagaaaagagtgagtaataatgaccaactacaggaattgggaatggctcgggcagttggcggcctggagagcacttctacccacttctgaagggtagttttgagatgacaacctaattgtagtgggttgagaaatggatagaagttgaggaaaacctattccccgccctcaaggagaggagagcttggtggcagctacggataattaaacaagcaattacaaaaggcatggtctttgacttggattcatgagtgtgtccccaaaagttccaaaaaaatcatggaccaagctatatgcacctcatctggatgtgcattaatctgggaagagatgtatagctttcataaaatccaattgcctaacatgaggaaacaagaaaacaggatactaaatagagacaggtcaggatcctaagccctcagaaaggacaa

SEQ ID NO: 813500 - DNA, 585 bp, Homo sapiens
gaattcactcatctgccactataaaacccagatggaatgtggaggatgacactgaacttccasaaactcaaccaaatagtgaccccaattatagccactctgccacctcaggtacatggtaagcagcaaccgatagggcaaatgtaccttttctatccctattaggaaaaaaaatcaaagacagtttggattcacatggacaagagtatacatgtacagcttccgcctcatgccatctgggaatctggcagcaaatcacactggtccactttatcaataacattgtcaatcaagaaaaatgatgagacaagtctcaatcattttagatttatttgccaaagttaaggacacgcacccaggagacagacatctttctctgaagatgatttttgagggcttcaaatttaaaggggaaagggcaggatattgagaagtacacaattttcaggtaagggggtgggtgggaaaagatagtcatgcctttgtctggctccatgaatctgcatgtttttacataagatgacataaacggggcagaagaaaaacgtagggaatctgcattctacataacacagacaaaatggg

SEQ ID NO: 813501 - DNA, 515 bp, Homo sapiens
ttatcaaacaaaggcaaatttaaaatagcaagaatatgtcattttgcataaatgtttaaatgataatacaaaatattggtgaaagtgaaggaagggcattacccttcrggaaagaaattcagcaatgtatgtaattccccaagaaattaaatgatcatttgtgacgacattccaaatggctccatgaaacatcacatgacacatgtgccataattacttcacccaatgccttaatattgactatttagtttctttaaacacatacaaatgatactgcgataaaaatatttatatatggccagttatggtggctcatgcctgtaatcccaacacttttggaggccgaggtaggaggatcactcgaggtcaggagttcgagaccattctggccaacagggtgaaaccccttctctactaaaactatgaaaaatcagctggatgtggtgacgggtgcctgtggtcccagctactcgggatgttgaggtgggaagattgcttgagcctaggagttcgag

SEQ ID NO: 813502 - DNA, 571 bp, Homo sapiens
aatacacatttttctatttgtgcatgggacattctgtgcatggaacgttctccaaaataaatcatatgcttggccataaatcaaatctcaacaaattcaaaaaaatctaaatcatatcaagtatcgtttcatattatagtggaataaaagtagaaatcagtagcaagaggaactctcaaaactctacaaatacatgggaactaaacaacttgctcctgaatgttcattaggtaaatgaggaaatcaaggcagaaatttttttaaaatatagaaagatcttaaagtcacaacctaatgttgcacctcaaggaactagaaaaacaagaaaaaaaccaaacccagagctagcagaagaaaagaaataacaaagatctgagcagaactaaatgagattaagacaaaaaaataataatgaggattaaggatcatcatggtggacgggacacagactagattgcagctctgacttggatggacagagcagcatgcagaggctcaygtcgtgaattttagctccagaatgactactggaataaatcaggaatcccaagaggacccacagaccctctga

SEQ ID NO: 813503 - DNA, 512 bp, Homo sapiens
agggaaaataatcacctccttttgttccttcagaaacgtgactcacttatcttttttatcaaaaatgtcatagaatacctcatagaactaagaaaaaatgtgaatgggtsaaggaaagaattcaattaatagtatatttgaatcactgattacttcctttcctccccatttccctgggcagccaatgctgatgctgacatactgacacttgcctctcttattgtataggtactgctgagtgacttgaaaactaccaagtatacaagaaatacactttgaaaacaactgtacttatacacccaaaggggaaattctgaatatcttataactgaagttgtaagataacagcatccttagttatagctgtagcaagaaagagataggaaattgagcagggaaaaaccatctatgattgtgcccggatccaaaattttccagtgggtatgcttagtttggccctaggactggtctagacaagtgccttggatagctcccaaaatgcccatatgcag

SEQ ID NO: 813504 - DNA, 626 bp, Homo sapiens
ttgctgggttgaacaatcagtttatgtttatctttttaagaaacaactaaactgttttccaaagcaatgtgctgttttacactctcagaagcaacgtatgaggcttcyggtttctctacatcatcaccaacattcagtagtgatggctttttattatagtcattctagtaagtctaactgcataacaaatgaccccaaaacttagtggcttaaaatcaaacatttattccacaatttctgtgggtccagaatccaagtgtcctaggtcctctggctttcagatttcaaacaaagctacaatcaaggtgttgtctgtggctgtagtcatctcaggttgattaggggtcagggggagaatctgctttcaaactcactcaagcggttgttggtaggattcagttccgtatgggctgttgtactgagggcctcagttcctcactgactgtgggctgaaagcctccctcagttctttgccacgtgggcttcaccatagggtggctcacaacagggcagctggcttccatcagagtgaccaatttgagagggcaagaaagtatgagcaagactgaagccagagtctttttgtaacctaatctagaaatgacagcccattacttagagtctgt

SEQ ID NO: 813505 - DNA, 626 bp, Homo sapiens
ttgctgggttgaacaatcagtttatgtttatctttttaagaaacaactaaactgttttccaaagcaatgtgctgttttacactctcagaagcaacgtatgaggcttctggtttctctacatcatcaccaacattcagtagtgatggctttttattatagtcattctagtaagtctaactgcataacaaatgaccccaaaacttagtggcttaaaatcaaacatttattccacaatttctgtgggtccagaatccaagtgtcctaggtcctctggctttcagatttcaaacaaagctacaatcaaggtgttgtctgtggctgtagtcatctcaggttgattaggggtcagggggagaatctgctttcaaactcactcaagcggttgttggtaggattcagttccgtatgggctgttgtactgagggcctcagttcctcactgactgtgggctgaaagcctccctcagttctttgccacgtgggcttcaccatagggtggctcwcaacagggcagctggcttccatcagagtgaccaatttgagagggcaagaaagtatgagcaagactgaagccagagtctttttgtaacctaatctagaaatgacagcccattacttagagtctgt

SEQ ID NO: 813506 - DNA, 425 bp, Homo sapiens
atgctaaatttttcccttaccctattcagctgaggacaagagaaactcacccagcctccagttctatcattacagttcatggctatcactctcgtggaatgggaagcatgggaaagcgcagacttatcaaattataaggatgctaaaagtcggggattatacccatgaaccaaaggaaagctcagagtagggcattgcctctggaaggaaaacatgcaaagcagcacctgtgcccacataaagtcagagatgtctgacactcagattggaccccaaagggggtgccccgggggatcctctggacctcaacctctccaaaggaaacaccctcggcagaggttytgaggcctagtactaagccctgcttagaattttctctggcagttgcaatactgtttggccccaatattgtttggaatctggag

SEQ ID NO: 813507 - DNA, 595 bp, Homo sapiens
gacttttatatattaaaatattttattaaccattgttaaatagtacatgatatttcaaaaacacaatgagatgatcatctggaacacctccatgcgaatacaactgtcattttgtaaaattctaagttttctcatttgtatattttcacagaattttaagtttatatatttttgattttcttcatattatatatctaagcattttccatggcattacaaagctattataattatcatcctaatgtttatgttatagtcaaccaaggggaaatactataattttcttaatcattgaacattcaagttgcttccaattttccagtattagaaatatgcaataaatacatatgtacataaatctttacttcttttgaatcctttgcacagaaaagtattaatcagttaaaagtatgcacatttttagagttgccaatatgattaaatttattttcaaagtgatcatatatatttgtattacctcagcactctcaccagtggggcccataacragaggtactggtactcgttcatcactagtcctctaacaaattgtctatcatctataaatgttcactaattgagttcatgagtgaat

SEQ ID NO: 813508 - DNA, 632 bp, Homo sapiens
gtggtgttcaactttaatacaaaaattattttcattatcatagcctcacagtctacttgttaaatgactataaccttagtcattttacagataagggaactgggtaagttttatgccaaagtggtattttcaaattttaggatgagtaaaggtggctagctatagacctttcaaatgtcaagtctctaaaaatgactctaaggatattagaggtggccagagagaggagaaactctacatggatgtctatgtgtattttttcatctttttattataaaataaaacacagatacagagaattacatgctatatatatggcttagtacattgttgtaaggtgaaaatgcttgtaatcagcacccagatcaagaaagaaaattttgccacctagggcaaaagcctcttctatgtgccccatgccttcctctctccacaagaaatcattatcctaacctctgcagtaatcgtcttcctggattttttcctgatagttctgtcacccaaatgtacatccctagcacaatagtttggttttgccatttttaaaaaatgtaactgcgtttcttttgttgcttttggcaaccagttacattatttgtaacaacttgttrtcattacagaggaagtttata

SEQ ID NO: 813509 - DNA, 557 bp, Homo sapiens
tatatagaaatatagatatcaaggaatatttaataattgaggggactgcctaaacaagtctgacatccataggacaggccatcaggaagggaagattatggacaggctgggastcacagggatagatgaaagctgctgtccatgagtagattttcttcaggaaaattctttatttcaggaaacttacctctgcttttaaagccttgcaattgtttgaatcaggcccatccagattattcaagattatctccttattgcaagtcaacttgctaggagctttaattatgtctacaaaattctttcacagcaatacctacatcattggctaaaataactggggactctagcttcaaatattttgcagctctgttgttggtgcatacacgtttaggactgttatgtcttcttggtggactgaccgttttatcagtaggtaatgttctgtctgactctgttaatttcctttgcttcaaagtttactttatctgagattaatgaagccactcctgctttctcttgattaatgtttaggatatctttttccattcttttacttt

SEQ ID NO: 813510 - DNA, 513 bp, Homo sapiens
caaccaggaacaaagaccccaaaactaagatagaaaaatctagaagtcaaaacaactattataatgttgtaggagactctttcatgacctcacctgagggctattaactattattaagataaagctcaagagagcatgcctttctcattaccaagcccattatataattcagagacctttttttttttttaacgacagttataagtgacagaaggcagtgtggtagcaaaggaagagacagaaaggtcatcaaaagcagacacaggagaactcgaacttgctctggagatgatttaaacattttgagatggacattttgatcaaaaggaaagacagtaagaaaaacaagaaaaggtctgcctattgccctaatcctcctgagtaaaccaggagcattgcagagctcactcaacctctcaggctgacctggtatagaaaaaagagcatggygatcttgaataggttactaaacatctctgagcttccacttcctcagctttcaaatggaaggtc

SEQ ID NO: 813511 - DNA, 517 bp, Homo sapiens
atttgtgtattttagtagagacagggtttcaccatgttggccaggttggtctcgaactcctgacctgaagtgatctgcccgcctcagccacccaaagtgctgggattacaggcatgagccaccacatctggcctaatttttttttttttttagagacaggatctcactatgttgtccaggctggtctcaaactccaggagtcaagcaatcctcccaacttggcctcccaaactctaggattgcaggtgtgagctactgtgcctggtccagaaatgcatactcttgatcccaccccaaacctactgaatcagaatctgtactttttatagtgtattaacataaactacatatttaaagttttcataagtgttgacatctgtatctgtaaaaccatcatcacaatcaagctaatgaacatatccatcaccaccaagagtttgcttatagccctttgccatccattckcaccccccacaccacaccaatctccaggaaagcactgatcaatcacctttct

SEQ ID NO: 813512 - DNA, 625 bp, Homo sapiens
tccaatggccaaatagaggctctgyagttaacaacactgtttcactgcttgcctttaacagatcttttgtttagtgctttcagaactgctaccaatttattgctagctttatcaaggtggtgatgttgattatgattgcagaaaaacagctagtcaggaagagcacaactaaacaaaatgccaaaacctagatttttaagtgtcaaaatcatttttctaagtataattttgtcacatatgaatcatttgcatttcaacctattccatgaaaaaagcttattctgcttacaatttgaaatgatagtataacttttctgtgacaagcttcttttttagatgctacccataaaacggcttgttcagtcttacaaacataaaatttaaaaagttcttacaaataaccaatctgttagagatacttactttaattttttctgctaaagctgatgttatattgatttctctttctccttcatcatacatttgaaaaataagattatgcataatatcacccgctatccaattaacctcatcctgatgtttgatctgaattgccttttgtccttctacactgaatatttgtagtcttgcaacatggctactgggaagcaacttaatagtcttc

SEQ ID NO: 813513 - DNA, 610 bp, Homo sapiens
tagtaaagatacaatgtagtacctaatctaatgctagaccatgtatacaagcctaaggaaaggaaataaatacctaaagaagccaggtttaaggatgtcctcagcatttaccatgaattctttcaaatctttcaccagtgggattttagagaattctgggcatctgttattaaactgaatggcaatttagataaagtccaaataataacagacaggcttatgatgacataaaccgaagacatcacctaatctacttccatgagtaatatggttcctaaagctgattccaaagctaatttcatcagatttgaccagatgtagatctttgcagtggcaaaattttactctgtgaaaggtaaagaaagggaaaaaaagtaaaaaatataccatgatggagaaaagcctaatttttctgaggaatggaatttaagtgtttacaggtattttcagaataaactgtaaagctcatttgaaaaaagatgcaatgtggcatacaagataaaataaatcccctgggaaagatggcacattaaacatatacacctactttcactgtctcttaaaatcccastaatatgacagtaaagggatgtattttattattaaagga

SEQ ID NO: 813514 - DNA, 544 bp, Homo sapiens
gagttgtatgtgcagattttggtatacatggggatcctggaaccaatctcctgcataaaccaagggacaactgtatatcttcgttctgcccattcaagtccgagtcatcatggkctctcattctaaccacgtagtagctgcctcaatgaaaagtcctctttcactcttgcactgctccagctcattttcctcattttacgccaaagtgatttttttgaattgcagaactgtgtatatcactcacctgttttatattatttcatctttagtggcctaggaaactagtcatagctctgcaatactccacgcatgatctggcccttcctctctctccaacttgatctcatcctcacttaccatacctctaaccacaactgttttcttttggttcttatcgaaccccagttttcccaactctagaccaaattttgttccttaaatgtgtctttcccctctaggacaggggtgacaaactatttggaaagcgtcaggtagtaaatacttaggctttgagagctgtatgagctgtttcttatgattacgt

SEQ ID NO: 813515 - DNA, 576 bp, Homo sapiens
agatttatcttcacattttgagattctcctgcttggtctagtccattgtttgctttcaaccatatcttgtaattccttccatgaatttttttattacagaagttcttttttwaaaaaacaaaaaactatgcctttggtaaatttctcattcatatcctgaatttcattttctcactactttatattagttttcagctatctcctgtatctcatagagcttctttaaaaatcagtattttagctgggcttggtggctgatgcctataatcccaggaggctgaagtgggaagatagcttgatgccaggagttcaagaccatcctggacaacacagtgagacactctctaaaaaaatttttttttaatttaacaagtgggcatggtaatatatacctgtagtcccagcaacttaggaggctgaggtgggaggatcacttgagcccatgagactgcagtgagctatgattgtgccgctgaaattcacccagggcaacagagcaagaccacatctcaagaaaataaaataatcagtattttgaattttttatttgatatttcaaagatttctttttggtta

SEQ ID NO: 813516 - DNA, 666 bp, Homo sapiens
acagttaaaaaggattttaaccttggaaagcagaagagctttctttctctgagaaaggagcacaytggatagaggaaagaagtatatacagaaagagaagtggagaattttttaaactgcatgaatcctcttttctctcctttacacttaatgaaagctaagaaaaacttctaattttttcatttatgaaaaacttcacatgcgcaaaagaattttatgtacgacacattaggtaaaaagaaaaataaaccaaaaagcagattaggaatttgaacattaccaataccttggcagcccctccccaatcataccccttttccctcctcttctgaggatatccaggattacagatttggtcgtccttttccttggttaaagtattttactacatgtatatgaagccctaaataatgtattaaatttctatttttaatttttatttatttttttgagacagggtcttgcttcaatgcccaggctggaagggagtggcatgatcacagctctatgcagccttgacttctcaggttcaatcaatcctcccacctcagccttctgagtagctgagactacagatgcatgccaactcacctggataattttttttttgcagagacagggttattaaaaaaaatttatatgaatgtcatcaaattattatttggt

SEQ ID NO: 813517 - DNA, 620 bp, Homo sapiens
ttgtgattggctttcacttagcatagtgttttcaaggttcatccctgttgaagcatgtgccggtacttacttcctttttattgccgaataacattccattgtgttgccaacagcattccacattttatttttctatcacgtggtggacattgggttgtttctactttctggctattgtgactaatgcctctgaacactcatgtataagtttttgtggggacataacgttttcatttttcttgggtgtagatcttggagtggaaattgctgggtcaaagctctatgttgagctttatgaggagctgccaaattattttctaaggtgtctgtaccattttacatttccactagcaatgcatgaggattccgataaccacattctcggtaatacttattactgtctttgtgattatagccatcttactggctgtgaaatggtatcttactgtgattattttgctttttattttcattattatttttgctgggggcactctgaggaaaactggacagcctgctagacaaatttgctttttgttatctgagcagtagttctcactgtggtttgggagtccccrtaccctgttaagggtaccatgagatgaaactattttcatagt

SEQ ID NO: 813518 - DNA, 459 bp, Homo sapiens
gcagtgaggatcttggagtaggtctcacctcttcctggtcccatatatccaggactggggtatgaggagagaaagcatctttttctccctcagataatatatcttgggtaacactggtttgtagcagaggctggcaaacttttgctgcaaagggtccaacaacaaacatcttagactttatgggttttatacagtctctgtcacatattttttttttttttgagacggagtcttgctctgtcatccaggctagagtgcagtggtgtgatcttggctcactgcaatctctgactcctgggttcaagtgattctcctcctcagccttccgagtagctgggactacaggmgccctccacaacgctcagttatttttgtttttatttttagtggagacagggtttcaccatgttggccaggctggtctcgaactcctgacctcaagtgattcgccagcctcag

SEQ ID NO: 813519 - DNA, 508 bp, Homo sapiens
ctgtattactgttcacaaatattcactgtctctccctgaaggggaatgatactatacatcacttctctgttgaaggcaggcataaccaggtaacttactttggccagcgaaatataaactttaaaaagctttacaagtcagtgtgtggttcaacatgttctcttttccctgcttctgcgattgcagaagcatatagtgagatggaatttctatcagccagatctaataaagtctgcaaccacaatgaacaaagcccccttactaacctgtggtggacatggtagcttgagcaagaaagcaactttgctgctttcagctgctgagattttcagattgctactgaagccttatcaagacttacaccttacacaaaaaaatttcttcccattctaggactgatatgaaaactgtgaatttcatatatggattatttgcatgcattaaatgttcataaatgtctattctgaaacatctctccaaggctcayagaaattttctttctgtagca

SEQ ID NO: 813520 - DNA, 572 bp, Homo sapiens
atgaaaatagaacctgctagcaaagcaggatttcgttaaaaaaaaaaaaaaacatacaaagggtgcattggcttcattctgtcagagttgacattctayctgcacataattgggtttgtgaatgacaggtttctgaggaataaggcatgatttagagagaggagattctgcattctcctctaccccaaaacaacctctgcaaatcctctaccccaaagttgcagcattaaatcatggcttccgtatctcagcagccataattagccctttcatggcatacacagtattgtcaggcggagaccctctctttaactatctccaagtagcttggtcatctgcaccagtggccgttatcatttggaaaatgactaacaatctataccaattaacttgcctgccattacttgaaaggattcatcatgagtagactggggacagggttggtggcaggaatacttatccttgagattttgacaggttatttacaacaccgaaccctgaaccacaaggtcttgttttatgtgagaagtgataggatgaaggcaaaaaagggatcttcctttagaacatga

SEQ ID NO: 813521 - DNA, 484 bp, Homo sapiens
gattaaaataaacacaatcagaaatgacaagaaggatattatcacttaccctacagaaatataaacaaccatcagagaatattatgaacacctctatgtacataaactagaaaatctaggagaaatggataaatgtctggacacatacacccttccaagaatgaaccaggaagaaattgaatccctgaacagaccaataatgagctctgaaattgaggcagtaataaatagcctaccaaccaaaaaaagcccaggatcagatggattcacagctgaattctgtcaggtgtccaaagaagagctggtatcattcctactgaaactattccaaaacactgaggaggagtgactcctccctaasttattctatgaggccagcatcatcctgataccaaaacctggtagagatacaacaacaacaacaaaaagtcaggccaacatccttgatgaacattgatgcaaaaattcttaaaaaattactggc

SEQ ID NO: 813522 - DNA, 484 bp, Homo sapiens
gattaaaataaacacaatcagaaatgacaagaaggatattatcacttaccctacagaaatataaacaaccatcagagaatattatgaacacctctatgtacataaactagaaaatctaggagaaatggataaatgtctggacacatacacccttccaagaatgaaccaggaagaaattgaatccctgaacagaccaataatgagctctgaaattgaggcagtaataaatagcctaccaaccaaaaaaagcccaggatcagatggattcacagctgaattctgtcaggtgtccaaagaagagctggtatcattcctactgaaactattccaaaacactgaggaggagtgactcctccctaacttattctatgaggccagcatcatcctgataccaaaacctggtagagatacaacaacaacaacaaaaagtcaggccaayatccttgatgaacattgatgcaaaaattcttaaaaaattactggc

SEQ ID NO: 813523 - DNA, 609 bp, Homo sapiens
taactttgaggggttctagattgcaggtatagtggaaatagcaagaaaactagaattaagagtggagcctgaagatggggccatctcatgatcgaacttgaatggatgaattgttgctttttatggatgagagaagaaagtggtttcttgaaatagattctactcctggtgaagatgctacgaacattgttgaaatgacaacaaaagatgtagaatattacataaacctagtggataaagcagtggcagggttgaagaggattgagtccaattttgtaataagttctactgtgggtaaaatgctatcaaacagcatcacatactacagagaaatcttttgtgaaaggaagagtcaatcaatgtgtcaaacttcattgttgtcttatctttggaaattgccacagccaagccaaccttcagcaaccactactctgatcagtcagcagccaacaatatggaggcaacactctccaccagcaaaaacattattcactgaaggctcagaggatcaacagcactttctagtaataaagtatttttaaattaatgtacactttttagacagaatagtatcrcacacttaatagactacagtataatgtaaacaaa

SEQ ID NO: 813524 - DNA, 647 bp, Homo sapiens
ctacagaggacccctgccgttggcctatctcttaacagatgtttgctsggtgctggccatgtgtcaggcactatgctaggtgctgggaggattccgaaacaagaaagcatgcaagattcctgccctcctgggccttaaaggaaagtagggaagccaaacattaaataaataattataccaataagtatctaattacaagttttataagtgttaataacaaaaattgcagggtttgctacaaagcatgtaactgaggacctaatcttgtattaggggccagccaaagtagttctttgaggagatacatttaatctgacacctgatggatgagtaatagtcactaaaataaaagccaaataaagaattttatacactcccaaaagagatattttacagctttacaaggctcaaatccaactaattcacccctgtctctgggtagtactggatgttctattttaccacttatgagacaatgctttggaaagccaaaaactaggcagtcacacttggtatctacccttcatccttcctgcgacagtttgaagtgagagttgagtgttctggatgatgaatctaattgcaacttattctgtgctaaaacatagttatggtcaaggtaaaattactaacctttggagatattc

SEQ ID NO: 813525 - DNA, 528 bp, Homo sapiens
ggcactcaccaccacgcccggctaattttttgtatttttagtagatatggggtttcaccgtgttaaccaggatggtctsgatctcttgacctcatgatctgcccgcctcagcatcccaaagtgctgggattacaagcgtgagccaccgcgcctggccgggtctttcttttcaatcagcagagaatattggtcaaatcaggacagttgatactgatagaatgctgttacctaatgcacattccatgttcagatttcctcaattgtcccaacaatggccttcatagctattactcctttctgtttacctccccagccaccctggatctaatccaggatcatgtgttatatttagttgtcatagctctttagttttctttcatctccaatagttcctcagcctttgtttttcatgtcttggcttttggctttttttttttctattctaacatcataatgtcttgttatttttgaagagttcatttcagttattttataaaatgttcttcagtttgagttttcagaggtttc

SEQ ID NO: 813526 - DNA, 580 bp, Homo sapiens
atcagggtaattaccatatccatcagtttaaacatttatttctttgtagtaataacactcaaaaatcttctcttctagctatcttgaaatatataatacattgttatttgctrtagttaccctactgtgtaatagaacaccagaaacttgtaaccttgtacctgttaaccagtctctcccattccccatcttctatactctccccagcctctggtaagcactcttctactctgtacttctatgaaatcaagtattttagattccacatatgagtgagagcatgtagtgtttgtctttctgtgcctggcttatttcacttaaaataatgtcctacagattcattcatgatgccacaaatgacaggattttattatgtcttatggctgaatactatttatgtgtgtgtgtgtgtgtgtgtgtgtgtatgtgtgtgtgtgtgtgtcattttctttataaagtcatctgttgttgggcacttaggttgattccatatcttggctattgcaaatagtgctgcaataaacatgggagtgcagatatctctttgacataaccaatttcatttcttttggatacatac

SEQ ID NO: 813527 - DNA, 231 bp, Homo sapiens
ccagggcagaaggcaacctcaaataccaagccaagcttgtaaatcacatatatgcaccatatatatatwatatatatatgatatatattttatatatcatatatattatatatgaatatatattttatatcatatatgaatatatatttttatgatacgtgaatatatattttatatattcatatataacattatatttgcttatagtgttatatagtttgctatatagtc

SEQ ID NO: 813528 - DNA, 231 bp, Homo sapiens
ccagggcagaaggcaacctcaaataccaagccaagcttgtaaatcacatatatgcaccatatatatattwtatatatatgatatatattttatatatcatatatattatatatgaatatatattttatatcatatatgaatatatatttttatgatacgtgaatatatattttatatattcatatataacattatatttgcttatagtgttatatagtttgctatatagtc

SEQ ID NO: 813529 - DNA, 409 bp, Homo sapiens
attttttacaatttcaaatatcaagttaatgggcaatttcttggaaagtctgcacagaatccatttcttatgattttatctcttggtatgaaaatcagaccacatctcagtttctcaggaaacttagcatttctcaggtgtcaaactatgccatagccaagtttgccgatatttgaataataaaggtcactaagtcaaatcttgtttaggtattattgtcatcaagatatgaagtatttcactttagtgaatgtttcagaagatagaatttataactgtaaagttttgaagcttattttttctaactttaaacatataggtaggaacakttctcaaatatgtgatacgtttctgtcctttctgaagcaaagcaatctgggtgactaggggccatcattacataaacaat

SEQ ID NO: 813530 - DNA, 555 bp, Homo sapiens
gagaggcatgatggctcgtccagggccacacagcagaaggcccgtgtctgctcaatgactgaagatacgcggctcttttcttgattctccattcattcgttcattcactcactcactgtaacacacgcacatatcctctgggtactcactattccattgcacagcaacctgaaggcttccagctaagcttgagcacctgaggaccagcgactctgcctgggggcttcatccagcagctgcagcctgctggcccctgccccagaaggccaccgtggtgctagagtaggctgtaaagtgctatcccccgagtagccttgatgcacaactgacctggtgagagttagtgataaacagttctgcatcatcgcccaaggttccccagctgtccatagtgttatgtgctcattcccataccctttgttggctccttcccttccctgtatcattttcctgacaacctgaaggtgattcttgggatctcattcaagccaaaaaccttgcactggaatwtttttccggactgggcttctgagggtagcaaatgaagacattcat

SEQ ID NO: 813531 - DNA, 555 bp, Homo sapiens
gagaggcatgatggctcgtccagggccacacagcagaaggcccgtgtctgctcaatgactgaagatacgcggctcttttcttgattctccattcattcgttcattcactcactcactgtaacacacgcacatatcctctgggtactcactattccattgcacagcaacctgaaggcttccagctaagcttgagcacctgaggaccagcgactctgcctgggggcttcatccagcagctgcagcctgctggcccctgccccagaaggccaccgtggtgctagagtaggctgtaaagtgctatcccccgagtagccttgatgcacaactgacctggtgagagttagtgataaacagttctgcatcatcgcccaaggttccccagctgtccatagtgttatgtgctcattcccataccctttgttggctccttcccttccctgtatcattttcctgacaacctgaaggtgattcttgggatctcattcaagccaaaaaccttgcactggaatatttttcyggactgggcttctgagggtagcaaatgaagacattcat

SEQ ID NO: 813532 - DNA, 623 bp, Homo sapiens
ttatttctcatcataatttatacgtcatgtctatgtgcaaattgtagtattttattgaccatttttcattttcctttcatcactctatatacctcattttcacacagctcataataattttatattatgtgttccataatataaaatgggatacatttactattaattacaatatttacattgaaatatggtaggagaaacaatatagcattctgtatatctctgtttctttcaagttacaaattttgtttctgggaactataaagcattcttaatttcattataggtaggtcaatagctattcttgttcccatcttatagatgaggaaaactgagactcataatggtcaagcgacttactcagatcatatagctaagtgcagagacaggaattgaaataaagtcttccaaatctaaattcactgcccttttaatttcttcatgctgccacctaaagtatacctcaggtacattggtgcctcattcattcttctttggcttgcattgygggcaattaacttttggagggaattcagaggggttgctgcagacaattgctatagcggcaattggtcatagactcttagctttgtgacagctcaagtcaatgacaggcacagtac

SEQ ID NO: 813533 - DNA, 572 bp, Homo sapiens
aaagacaaagagatatattctttcatttccctcctgttgagaagttatgtattggcatgtgaccgtattcctacacaaagatttagttgcaataaaatagttaactaacttaaaagaatgtgcttcagtctccctctgagggaaagatagagcaggtacattaaataagcatttgtcattagcaaagaccactagcaaggacccaatgtcgtggagtttggagcatgccctgggcggttgagacaagcgttcagggaaaaaaatgaatttacttctgactattttgtgttaaatgggttactccaatttaataagcttctgttgtgccctgactatatgtctgcactattctgggcactgggacctcactgttaaacatgacacaattcctgcccccatgcaagaactgatatcaaccttgatagaggtttataatatcttatgatctggacactaccacagaagamggagtgatagagagacagaaaatggatgtcattttcagcctgggtgtataactcaagctggtgtataactcagcctggaatgcataactcaagctaacaacaact

SEQ ID NO: 813534 - DNA, 557 bp, Homo sapiens
aacagaaagcagagaatgatctaacaggttcattttagcatcacagatatcactgaaggaaatatttaaatgccacccttccctgctcagatgtgagtccttattctgcaacagacactagggatgtggagaggcagtgttttaaaagacagcaaagatatattatggtgtcactttttgtaaatgaaaataggctgaattcatatcacccagattacgttaatgattggcctggtatccgaagtcgaggttccaaatttgaacagaatatcttcatggggaaacaggcctcactgggaccaaatgctgacataaaactcagaacttattaatcatcactataaacccagtttttccattcccagttcccaggtcatgatactctgccatgaatttaaatgcagatgaaagatctattattaatcttattctcaattttttttctttttagttcttcttaactttcacaatcttaatagattatgaaataattcatatgggcttakagaatacctttcttaaggaagatacatgaaagacaaagaatttaaaatgta

SEQ ID NO: 813535 - DNA, 521 bp, Homo sapiens
taacacacccagtgccacagggtgataaaaatggtattttaaaagaaaaaccactcagcaggacacaagaattaaagtaacaatttggtaagactcttagaaatcacagatgttgatagcatttctcatsataggggacatgtaaaacaagctgaccataataaatgattagttgggatacttttgtattttaaagaaaaaagataaaacagtgacacggtttcccttccagaccctttttgtaatgtcagcaacagtacatgatatagaacagtaagaaaataatgtctttgtagttgccaattgcttaaatctttacgaagaaaacatgatcatctttcagtcaactgactgatctgagtacatggcaccaaagaaagcccttcagaaaatagaagctaaatgacataaagtagtttggaaaatcttcaagcacctccctttattccaattatccttttccaaagtctggctttcttataatccatcactttgattacaaaacagctctcttctgggaa

SEQ ID NO: 813536 - DNA, 370 bp, Homo sapiens
cccaggggatctcaaaggaacctgaaaaactagtccatgatgggaagacagggtgcctcatattatggtcagattacagggtgcytcatattaccctcttccctttggaatttaaatacaactgaccagcattaacattaaaacagagatcttaagactaaccaaacagaccctttgtggcaataaaataccaaatcccaacctgactctggtatagcatcacatgacagcaggccccaaaggaaatttaccccccaatatatttatttgacgtattttgaaatggccctacaaagctgtctcttgtgggggaaactgcattctgtagagaatctccttctcttattaggtcttttctggagagtctgac

SEQ ID NO: 813537 - DNA, 370 bp, Homo sapiens
cccaggggatctcaaaggaacctgaaaaactagtccatgatgggaagacagggtgcctcatattatggtcagattacagggtgcctcatattaccctcttccctttggaatttaaatacaactgaccagcattaacattaaaacagagatcttaagactaaccaaacagaccctttgtggcaataaaataccaaatcccaacctgactctggtatagcatcacatgacagcaggccccaaaggaaatttaccccccaatrtatttatttgacgtattttgaaatggccctacaaagctgtctcttgtgggggaaactgcattctgtagagaatctccttctcttattaggtcttttctggagagtctgac

SEQ ID NO: 813538 - DNA, 623 bp, Homo sapiens
aagataattttcagaaagtacaatgatgcattcaagtaaagggaaagaaaaacaaggggacctctgagtctaggagagaaacagaccagaraggctactttgtaacaccatgaggttcaagtgtgctcctccaactggagtctgtaagaggccttacatagtaacaatgagctctttttttctttttattgtgaaataaaccacacatatgaaagattgcatgaaaagaagatacagagctaaaatattaataatacaaatacctgcatacctactaactaggtgaattattagtactttagaattcccctacccaatgccctttcctatcctatattccctgttccaaattctgagtaaattattccttgctattctttatatattttaactaattactgctgtttaaaaacctttattgtagaaaatgttaaacatatacaaaatcacaaaattagatcacagtagaatgaagactcatgcaccctacctatgttttcaacaagattttacttggcctggtttcctccatgccctaccttcttgccccactcaccaacagattatttcaaacaaagcccagacatcattgtatctaccattacattcatttagaacaaatc

SEQ ID NO: 813539 - DNA, 384 bp, Homo sapiens
aaagtggaagaattgaaaaagatattccatgtaaacagtaaccaagaaagagcagaggtggctgtacttagacaaaataaagtctaaaaactgtcacrcgaaacaaagaaggccattatttgatgataaatgggtcaagccatcaagaggacataacaattataaatacatatgcactcaacatcagagcacctaaaggtataaaccaaattttaatagacatgaagggggaaaatagatagcaatataagaatagtaggggacctcaatatcccattttcaacaatggatacatcaactagacagaaaagtaataaggaaatactaggcttgaactacacttaggaccaaatgggcccaattttccatacaacagtagcagaa

SEQ ID NO: 813540 - DNA, 589 bp, Homo sapiens
aaagcagagctctgataaaggacgtgcatttgagcataaagatgaccaaaggggccctgaaggagggtgctgccagcaagggagttcctgggtctgtaagtcttgtggtctctccacygtgtgtgttcttttgcagcagccccgtagctgggtggagcctccgggcctgacgtggaccttcactggagaagtgactcaggtgggaaaagtctccccgggcctctccacctgcaggatcgccttcctacaccttcccccgcccgcttccttcgcgcgggctcctcccaatgaccaccagcagaactgcagcctcctgccttagctgagctggagcccgaggtagctcagatgccagctccttcctccaagagaccctagaaatgccattggctgctactctgatgctctggcagaaggcatgccgttgaagtgtactgtgttcgatgtaaactattatgagtttgcatctggctaaacgtgctagtgagtgagttaattagccacctggggtagaaacaagaaaactatgggtggcctaggcagagctcgatggagcaggaattaggggaactgagaaagacaggcaaga

SEQ ID NO: 813541 - DNA, 589 bp, Homo sapiens
aaagcagagctctgataaaggacgtgcatttgagcataaagatgaccaaaggggccctgaaggagggtgctgccagcaagggagttcctgggtctgtaagtcttgtggtctctccaccgygtgtgttcttttgcagcagccccgtagctgggtggagcctccgggcctgacgtggaccttcactggagaagtgactcaggtgggaaaagtctccccgggcctctccacctgcaggatcgccttcctacaccttcccccgcccgcttccttcgcgcgggctcctcccaatgaccaccagcagaactgcagcctcctgccttagctgagctggagcccgaggtagctcagatgccagctccttcctccaagagaccctagaaatgccattggctgctactctgatgctctggcagaaggcatgccgttgaagtgtactgtgttcgatgtaaactattatgagtttgcatctggctaaacgtgctagtgagtgagttaattagccacctggggtagaaacaagaaaactatgggtggcctaggcagagctcgatggagcaggaattaggggaactgagaaagacaggcaaga

SEQ ID NO: 813542 - DNA, 545 bp, Homo sapiens
aatccattatctataaaaacacattattcttcaattggccttttagagaaaaaaaagagagagggaagggaggggttaatttggtgagggggcttggtcgtaattagcccactgctgcaaaastgagatacagaaatccatcggcaccagctttgggggcatggagaggcagcggagagatgggggacgggttgtcagtcttggatgaacagtggagcggtcgggttggcgtctgggcattgtgtgtgcttgtgtctctgtgtgtgtgtgaaattttttcatcccaccaccaatctccccctccatcctcccccaattctgccatgatcttgccttctatttccacacactgctccccccaccctaggcgcacccccccttcctccagccctttccatcttcatgaaaaaaattctgattttgatggctctgcggctcttttttccctttttccttgctttttttttttttttgcaacacaacagtcgtgcgatggcctttcctacatgccacacggatgcagccttctgataggagggcaaagt

SEQ ID NO: 813543 - DNA, 521 bp, Homo sapiens
actgcactccagcctgggccacagagcaagactctgtctcaaaaataaataaataaaaaaaaaataaaaaaaatgcagtgtatccccctgtgtaaggaaaaagcaggtcagcgtctgagcaaccaaccaagaaacagcaatagtcgtaatgccatttgtcaaacatgtcaacatggggttgtatttaaaaagtaaatgacgaaatgcatgtaaactttataacacaaaggtttttagctgggttttcttcccaaactatattaacatagtttaaagctaagttttatggttgtgtccgtgttacatgtcagtgatgttgttaagctaagaattctttttcactgtgaagcagtacaaattcatgactttgctaacaatctatgactgctgagcagtaatacagctaacamttactgagcacatactatgctctagaagtgtgttgagcatttcacatgtatggttttacctgaaccttagaacaatattatgaggtaggtgctatattattatctctgttt

SEQ ID NO: 813544 - DNA, 634 bp, Homo sapiens
gggggcccaggctggcaggtgtggggtgcaaggacccaccacctcaggatcccccctcctgcaggacccagagctctgggggtgggagggaacccctcgtttcctggcggcagctgcccaaggctttggtgggccggtattgaaagcccaggcctgcagcttgggtgagcccttaggcagtgaaacctctggagagggaaggccatgtggtcaggccaggcgggctagggggctgggccctctgggcagggaggcggtgagagcagatcaggaagggaaggaacgggggagccaaaagcggttgagactggttcttataaatagcccttgcacaagtggctccaattttgaccttttgttatgtaaatgtggccagcttgggaagggccctgcccaggcctcctgctaccacacccgcaggccaagaattgtgtgtctgccaccagcgccccctggcctaggtggcccctgggtgtccttaatctcctgtgtgtgttagaggggcaggyattgcacccaccgaactccctagacctgttcgctggtccttactcttcctggctgtcagatccaactaccaggctctgtggccacagtctcctgctgggctgcccctggtgccccagccagagac

SEQ ID NO: 813545 - DNA, 586 bp, Homo sapiens
tctgggaatgtcttaatttctccttcacttttgaaggacagttttgtcaaatatagtattctcagttggcaggctttactctttcagtactttcaatgtatcatcccaccaccttctggcctgcagggtttctgctgaaatatccactgataatcttctagaggctcccttgcacatgagaagtcacttttctcttgctgcttttaaggttctctctatacttactaccactaaattctacacttaaaaatggtataatctgttatgtatattttgccacaataaaaacattggaaagaggtaccatagaagagtatattacatgcaccataggctggaaaacattttcagagattaggctattctcagtaactcacatatctagttctggtaaacactgattgatttaaacaaatatcaatgaacaaagtattacatgcaccgcgtgcagctaaacagtgtttcgctgacataacactagtacctagatctgataaactatctaaacaggcatcactgaaactatrctacagaaaacacagaatgctaaccacagtatttccaagagtctacgctacacctaggc

SEQ ID NO: 813546 - DNA, 620 bp, Homo sapiens
catttgtgactcacatacactgtgaatcaggcctgcaacccttctgtcagttgttgcatgatactgtatgtgccatagtgacataatgcaactgaggtctgggctccttgatgtcatataatatcataagtgacatggtgtgaacaaggctgcctccccctcttgggttatcattggctatcatataggacatagtgatacaaagtgacaagtgtgtgtccccctcaagtgttatatatcacatgtgacatggagtaaggtgagcctgagtccttctcttggttgtcctagattattttattttatttttttgagatacagtctcactctgtccccaaggctggagtgcagtggtgcaatctcagctcactgcaacctctgcctcctgggttcaagcaattctcctgcctcaggtgcctgagcagtggggaccacaggcgtgcaccacctcacccagctaattttgtatttttagttacacagtaacaaatgtgactgaggtctacctgcgctctcagctgatgctggcacctttattgcctaggtgtttaatgcttctcaggtstgcatcctatctcccgtcacacactctcatatgctatgtaggatgaggacacagc

SEQ ID NO: 813547 - DNA, 563 bp, Homo sapiens
gcccaggcccccgagggttctagggggtcccatccctgggaaggtggaatctgggaggtgagggggacctaggaccccattgtgtgcacagcttgggctaaggcatgagataagaccagggtgacaktacaggagtatccaagaactgacttcacctaacttctgcatttgacttcccatccccaatgtgggtagggccctgccctctggtgattggaaagaggcgcagggtgcaaagaagtcccctcctctgacctcctgcagggctccgtcttggcctggatccgcaggggggcctgggcaggagggaggctgtggtcttgggatggggtggcagttccaggcccacagcggggcaagagacatcctacaccttcctcccatccttgccccgaaagtcatgggcgctggggttcaaggtgccctcactatttgacctttcttgctggtggctttggtgtgtcattctggtccccagcctctgtttcctggactgtaagtggggataataataggtcacccctcccctgcaggattaacctcagcgattgttgctggcatca

SEQ ID NO: 813548 - DNA, 302 bp, Homo sapiens
ctccccatgtccatcgtggcagggactcaatttatcatgctcccttaggtaagctgacaggaagatgcatgctggaccccyttttttttttgagatagggtctggctctgtcacccaggctggagtatagtggtgtgatcatggctcagtgcagcctcaacctcctgtactcaagttatcctcccacttcagactctcaagcagctagaactacaggtgcacacctccatgcctggctaatttttgggaaaagaaaatttatagagacagtttgtctctatattacccaggctggtctgtaa

SEQ ID NO: 813549 - DNA, 592 bp, Homo sapiens
ctttctgaacaaatcaaatctgattattcagttgaggttctcaattgccttttttgcttctgtagagactggtctctagcaaataagaaacactaattcaactgatatttttgaaaaattacaagacctgggcatacagagtgctatgaagagtgcctaagaagaagccatgtttcagacatcctggccagagaccagacatggacatcacatcaatcacatatgcaagtcagtcttcatttccagtcacttcttttttcctgccaaagctttcatgtaccctaagtctttgaacaaaggctgttgcttcactgacctgaattgttaacgcaaacgaaattgattatcagtaccaatgctacatctcatcactcatgaagagaagagttcaaaatggaaagagccatttactaggtgtgtgactttgtcaagcgtcttaactacctttcatctcactcagccattcatttatacattgaacaagtgtgtgtgtgtgtgtgtacgtgcatgcacgtgtatatgaagaaagagaggraggaggacaaccagctgtgtcaggtaccactgcaggctctggagagataggagtaag

SEQ ID NO: 813550 - DNA, 524 bp, Homo sapiens
tttagcaaagatactggtggcattttgcctctgccctagagatacgtggaactttcaacttgagagatgatttagggtatcttgaggaagaaacttctaaacaacagaagtgttcaagagttgactttggtgttgttaaaagcattcagttttatgtattcacaaagatatggtttggaattggaactcatgtttaaaagggaagcagagaataaaagtttggaaaatttgcagcctgatgatgtgatagaaaaaacaaaaaagaaaaccattttctgaggaaaaattcaagccagctgtagaaatttccataagtaaggaggagcccaatcttaatcaccaagacaatggagaaaatgtctccagggtatatcagagggctttgtttgaaatgcttgttttctggtgccataaagaaatagcacttgaacataaatttaatttatttagtaagsccatttttactttttgcagaaagggtacacttgccagcagttttgccacgagagtacatggaataaagg

SEQ ID NO: 813551 - DNA, 627 bp, Homo sapiens
acataatgtcattactgaaagaaatygaaatagcattaaaaactgtacagattactctatgctgagggcagaaactagcacttgattaaagactttaacagattggctcattttggggatcttttcatctccctaattaccagtttttaatacaattatgaaactatcttattttctgacaaacttatacaattattgtgaggcttagtaaaataatgatcttaaaacagagaaataattctcttattctcctaaataatataagatcaaaatgtttcccttcataagaaatttttgctgactgcaagatcagggaataattctcctatcctgtgaaatatttttaaaatatttaataattgataaaaattaataaaaataatttttattaaacaacaaaaagtgaaattattttacaaatgcagggtagtagtgttattttgtaggttgaaactctgacaaattttttcttaagtttgaaaaaataaataaaaactgtaattttaactgtttttctggcttacagttacgttttttctataaacatgtatttgatttaggccctcttcctatggatatttatatggcatctcaaacaagaacagcctaatttttttaaatgtctat

SEQ ID NO: 813552 - DNA, 603 bp, Homo sapiens
gatatacacttcaaacaaatccagcatcttaaagactcccatttttgtcattaactatccaataataatgtttgagactcacatcaaaacaatatagaaragaaagaaagagggtgagggtacagatgacaaaaaactgtctgagagttattaattggtgaagctgggtgatgagttgatataagttctttataatgtctttcctattgtgccaacttttatgttatgtttgaaattatccattatatttgaaatataccgtgtttcatgctattgatataaaactatatgcaaaaaaaaaaaatcaaagtttaaaaaaaggtgcagaggatatagataatatgctaacttttgggcttaaaacaaaagaatatggaggtagaggtacacatatttgtttatgtgtataaagttgattctgaacaaaataaaacttaaaaattaaatcatatttctatataatttaataaaaatgactggttttaattcatcaccttaaaatatttgtatttatgtttaagacgttggacagcaacttgtgatcatgcatgtctcctcatagtccaccaggacatgactcaacacatttttactgtcaagcat

SEQ ID NO: 813553 - DNA, 506 bp, Homo sapiens
ttctttacgtaagttttccatagaagaaaaaggtgagttataatgtgatccttcctataaaatttaaaaggagaraaaaataaaaaaaaaattgaaggaagcaaaaccatacttgttttgcatatttagatttcatgaagtctatggtttttataccagcaataaattactttcggataaagcttttatgaaatcatagtttataaatatttagtggtaaaaaaaaacctaaaggtagacatcatccagcacttagaatagaaaactggatggaccctagagattatttttattaaccttcttcatttactgataagggaaacagagccctagtgggtaaatggctgagagagctagcacactgtagtgcaaacaccgtataaatactccttgaataaataaatgaatggattggcccaaaattacccagaaagttagtacagacaaaaaatcagaatgactctggattctgaagcctgtgttttcttgccatatttctctgtata

SEQ ID NO: 813554 - DNA, 527 bp, Homo sapiens
cctgactgtgggctcagcccctggcaggagagggtgtctgagctggtgagtgcagagttgtgtggtatccagctggttgctccaagtgccggcacaggagctggctccgtgcaccgcttgcggctggaccaggcatgtcacaagtgactcccacagtgggctctggagtccagactaggggaaggtggtggtaaccaaatgggtcaggcaacccagaagccccagaggtgggtgttacagcatgctaacagctcttttagatctgccctctgcagcctgacgaacaggggcatgttaacagccctatcagtcctgttaccccactcccgcccatggccctggggctggcctggccccccgccctgcttcttgttgcatagggtggctaccaggcgctgctggtggggcagagagctaccrtgttactctcttcttcctacccatgtttggtggcatcctgagctcttgtcctgtgtccaagaatgagattacactaacaatcggagggtgaggaggacagagaagag

SEQ ID NO: 813555 - DNA, 474 bp, Homo sapiens
agatgttttaacaaactaggaatggaagatgattattttaatctgattatattaggacagaacatgctataggaactaacaggctccattttcaagagcttaacatataaaagtatatttyttgctcacacacagtctgcttatggtctataggcatttcagagtagctctcttccaagacatgactcagatctagaagggatttgtcttatatcccttatcacctattcctattcagcatttttctgaaagtctcagctactgagttaagcaagaaaaaaaaatgatgatagaaaaagaaacaaaacttattaatcacataagattataaaacacaatccaaaagaatcttgagattaattactaacataagtttatcaagtttgctaggtataaatttatacttgagatcagttgcactttttgtaaagaggcaacaagtgaattaatttttaatgataccatttttaatag

SEQ ID NO: 813556 - DNA, 595 bp, Homo sapiens
gtggataactgtgagtcaattaaaccttttttccttataaattatccagtcttgggaatttcttcatacagtgtgagaacaaactaatacaacacgaatcccctgatattgtgaaagatactccagctcccaaggagaagaacgtgggcaaacagccctcatgatggcatctggctgacaatgtgtgaagccccagtacgtgagaggggaggagagcctccctctactactcacctttccactggggatcccagcaacctaggctgagggagagcacttttttctcccaagtcctggagctaacttggagagaggcttggaagtgctgagaggaaaagacacagggaaaagctgcaggcattttctcagacccaggactgaaagcaggatgccgtttttaacccgagtgcatacaaagtcagccattctttggcaatctggcaccgtggctgcacaggcatttttgtcttgggccagagattggagcgcttgctctggagtggtgtagaggtctctacagccagaattayagaaagtgcctcatcagtaggcactggaattgtgctctcccctgtcacaggcctggagctggagg

SEQ ID NO: 813557 - DNA, 613 bp, Homo sapiens
agacttttactatccacctctccaagaagattagtcaagttgtcattttctactcatcttattctagagctttctcacaatctcaaccttctgcccccactgccagatgtatggagaagagctgacaccatacctaatgaaattattacaaacaatcaaggtggaaagagtcatccctaattcattctataaggacagcatcatccttatatcaaaaccttgcagagacatgcaacaaaaaaaggtaacttcaggccaatacacttgatgaaaataatgcaaaaatcctcaacaaaataactaacaaactaaatccagcagcacatcaaaaagctaatccaccatgatagagtacgctttatccctgagatataaggttggttcaacatatgcaaatcaataaatgtgattcatcacataaaaataattaaataccaataccacatgaccatgtcaatacacacagaaaaggattttaataaattcaacatgcttcatgttaaaaactttcaacaaactaggtattgaaggaacatacmtcaaaatagtaagagccatctatgacaaatccacagccaactgaaaggtcaaaatctggaagcattcccttgga

SEQ ID NO: 813558 - DNA, 644 bp, Homo sapiens
gtaatgggtacatttattaatgaaaacttttctttggtaatgaggtctgtgagttattcctcttctacatgaagaaggacttcctttgatttatcttatattgttcatttccatctctctatgcagcttgatgtagttgacacctcttaagttcctcattgcccttagtccagttacatgctctttaaaaaaaaaaaaaaataagacatggaaaaacatttggaaactaggaattgggagatatatccttctattaccttcatgactttggtcaatttttaaaactcctttaggcctcagtcttgtcacctaaaaaatagggaaaataacactagagccatctactgtactggatggttatgaggctcatagtataaccatacatgtaagaaaacctcaaaacacaagaaactcagcacaaacacaagagcttattactctgatggaaggagccagtcactccttcctcttgcagactcccttgccaggctgcaaaacttcactaggtcccttggtctcccaaggcaacttgccgtagcatccgactrgcatttttgcctccacataaggcggcatttgctctttaggtataataaattacctgcactccactggggcagaggtggaaagcggtgaggtagaac

SEQ ID NO: 813559 - DNA, 634 bp, Homo sapiens
ggggctggccgggactcagatacagttcccaggtcccaagctaagagttccgtcagttccaacataggcagtgaagctcatgcatcagtggggctgtgggcactcctatgctctggcttagtttattccagagtggcctgctccctgttctgcggctctcttggctgaagatattctaagagtcagaggaggaactgctgcagggtaagacagactggaagggcattggagggaaagggcttggacacagggcatttcaggggcacaatgtcaggctttaaatgaccctgaaaaaattttccctgagaggacttgttaaaggtgggaatgaggttctctggtgttcaaagtaatgggtttctaaacatcataatgcctcttaatccaaaatcaataaaagtttttctttttttttccttttgtttagctcagatagcaaaattcttggtttcataactacaagaactggttggtctggtagctactgctacctgggacatgaaggagctctggaccgtctgattagcccatgcyctaatcagaaaggagtttaaaaagtgctctctgctcaggttggctcaagagggtccggggaccatagattagtccctgggttgagaaggctgggcatggt

SEQ ID NO: 813560 - DNA, 534 bp, Homo sapiens
gggtctgaattctgggtctggtgctgattcatgatgcaacattgaatgtgtcagttaacttatttatgtttcagttctcctatctacaaagtgactgtaaggtaaactttattacattgactagatgcgctgtcacagaatgtttcttggagcataatcttactattcccagtgattgcagaggtccggagctgttcctttgctttatgaatgttaaagaatgaattagggtacttttcagcttgatcactctagcatctcatggtgcaatattgttgcccatgtttatgatatatgaggatatagtgacccttgtccacaacacaaatcctagacatggaactgttcctatgggaataagatgcattttatggtcttccaggtctgttgagtccaaccaaacacctacagcatgccaggtgatctgctaggctctgggttaccgggatgagatggcacagaccmtgccctggaggagcttatgttctcatggaggcagcttaatctctaaacaattaactttagttcaagatg

SEQ ID NO: 813561 - DNA, 524 bp, Homo sapiens
cagacaatatgattggctatggaatctttcggtaaattatctgaatgacaattcagcaaggtagctaaatataagaccagtatatttttaaaaatcactttacttaatatatttcaggaacaaacagaacatatatgtttttaaagattccattcacaacagcaagaaaaaaatgacacacttaagaatataaatagcaaaagatgcataagaattttttaatataattataaaactttatcagttactttaaacaggaacaaaataaatgtagagctataccatgtttatggatagaaaggctcratattataaagttatgaactgctcccaaattgatacataaattcaatgccattccaattaaaatactgactgtgtatcttacagactttgacaagctgattcttaagtttgtgtcaaaatgcaaagtgcccggaatagttaggaacatcttaaaaatgaaagcaaggtagagtacttctcatcaagacttattgtaaagccatagttattaaaataat

SEQ ID NO: 813562 - DNA, 642 bp, Homo sapiens
  misc_feature 641, 642: n = A,T,C or G
ccttctttgcagccacactcagtcttgcttggaatgtaggcttttccccaactccccgctgctgtggcaggccaggtcattgcagctaacctgactctgggtttaccccgcccaagggttacacatcaatgctaggacaggtactcccagaaggcttcctatagcaacaacatatgcggaaaggattatgtcattaattctgatcagtttaactgcaagatcttatggtgtttggaatctctttctcttatgcagctggagtttcagagttctcactattgacttctcgggaaattaatatgcaatatgaagcaatttctttgcttgtcagctcaactctaacagattatgaaaaatctaactagtatcagctgccttcattgacagataaatgtcctcccttctcactggcctctgtctccttgtcaccggcattttagcaaaggtcagtctctaaattgaacaaaggatgagacaaaatattgtgttcatgtgtgggaaggtcacttagtcatctctstgtttcttgattaggctaactctccactgcaacattttactttcgttctgaggttatctccaaagagtcccccaaaactcatttctatgtgtatgctttatctttactacctgagaattcnn

SEQ ID NO: 813563 - DNA, 607 bp, Homo sapiens
cccctgctgtcacaccaccacaccatcaacacaggagacttctgtgaccggggtcrggggaggggttccccatacaccaagcatgaaccctagctgagtgtcctcttccaattcagtttcacactatctacctggagatagtgtcagatcccacaggttgggggctcagtccccacaagcccccagtaaccctggacaccagtctctaatccaggctcccagaacttctaaccaactggctttgagttggggttcccatgaccccctgtttggatttaatttgctggatcagctcacggaactcaggaaaacacttatttacatttacgggcttattataaagactcctgcgaagggtacagatgaagagctgtgtagggtgaggtatgtgggaaggggtgcagagcttccatgccctccctgggcaccaccacccaggaacttccacatgttcagctatccagaagctcctcaaaccaggactcttgggtttttatggaagcttcttgatgttggcattcctttccccaggctatagcgtgggaccctatctggggagggtcttaaaaaccacagtcagaaaggttaggcaagattagagtcctgc

SEQ ID NO: 813564 - DNA, 562 bp, Homo sapiens
tcagtcacaggaagtctcattgaaaataaaataaccaaataggctttgaaagaaaaatacttgcattaggaaaccacataacaatttcagggctgggcgcggtggctcacgcctgtaatcccarcactttgggaggccaaggtgggcagatcacgaggtcaggaggtcaagaccatcctggccaacatggtgaaaccccgtctctactaaaaatagaaaaaaaaaaaaaaatagccaggtgtggtggtggcaggagcctgtagtcccagctactcaggaggctgaggcaggagaatggcatgaacccgggaggcagagcttgcagtgagctgagatcgcgccactgcactccagcctgggtgacagagccagactccatctcaaaaaaaagaaaagaaaaatttcaattttcagaggagaaggattagctgtttgcaaaattacaatagcctaaagccatatcaccaaaatttggttacttaaaatatataacagtgccatgaaattttactttccatgaaaaagctcagaacatagtcacatagtgacagacatttgaaaa

SEQ ID NO: 813565 - DNA, 530 bp, Homo sapiens
tgagaataaaggacgggactactgtatctcactcagatcctgccaatgctacatattttcctcctggaatgtttttcaaatgattctgggaaaaaaacaaatttcaaggttgctttaccctgggattcctggctcaattcttaggccaaaggaagatatactacatgacagaattaagttgccagttcttatccacagaacagaatgaatttaaaccataaagatcctcaccttctccgagttgacttcatgtgatatgagaaacacattccatgggtcatttcctttctcctgctcaataccataatcccttgcaaaattactagtccatttcaaactcctagatatatacgtgctccaggatgcctttgctatgagaatacaatctaattccaagtacatttctcacatcaattttgcaaatatattcaatgaatgttgtattttattcttaaagttcataaggaagaatacattcatgaaaaggcaaaggaaatattataaagagamatggattgagtgaaactacc

SEQ ID NO: 813566 - DNA, 525 bp, Homo sapiens
aagtgctgggactacaggcatgagacaccgtgcctggagtggttactgttttcacattggcccaccaggctttccagcaaggatttgtcactgactttcagagacaatagaaatcatgtcacctctcttgcacttcctcctatacatttactgacaccatacgtaggaataacttgccacttagtttgtcttagatactgtattgtctgtggctgtgagttttaccctcttcatagctctttctggttgcatgtggagattcaaagagatgaaaaactatgcctttttgataaggcttcatttctccctgaatttttaataataacaaggtaggtctgtctcaaagtgaatagttcctaaaagcaaaacctcaacttctaatttctgaaatatagagacacagatgaaaattcattcatatacagaacatacagtaaatatccacaattaggaatcaggaataattaatcaaaacatmtcaacagaattaagtgtttatatttctgcaagaaaatctatgctgat

SEQ ID NO: 813567 - DNA, 600 bp, Homo sapiens
ccatttgatggatttttttccatttatctcatgatcacattcatatatatatatatatatakagagagagagagagagagagagagagaggttttttttttttttgagatggagttttgcttttcttgcccaggctggagtgcaatggcatgatcttggctcacgacaacctctacctcctgggttcaagcaattctcctgcctcagcctcccaagtagctgggaatacaggcatgcaccaccacgcccagctaattttgtatttttagtagagacagggcttctccatgttggtcaggctggtcttgaactcccaacctcaggtgatccacctgccttggcctctcaaagtgccgggattacaggtgtgagccactgcacccagcccatgttcatatttttaaaatattgagcatatgtataatatttatgatagttgtttgaaagtcttcatctattctaccatttttgtcatttatgaaaaaattctattttttgtgtatgagtcacacttttttgcttctctgttagacataacagttcattgaatgctgggtattgcaaatttgtgttgctgactgctgaacattaatgtattcc

SEQ ID NO: 813568 - DNA, 531 bp, Homo sapiens
ttgagtctatgttcctgtgtttaatttttcctcttcttataaggacactcatcatatacaatttaatccagtatcacctcagcttaactcgaatacawctgtacacaccctatttccaaataagaccactttcacagattatgcatgaacatgacttctaggaagacactattaaacccagtaaaaatttgtattttaatatatatatatttgtttgtttgttttgttttgttttttgagacagagtctcactctgtggcccaggctagagttcagtggtgtgatctcagctaactgcaacctctgtctcctgggttcaagtgattcttctgccccagcctcccaaatagctgggactacaggcatgtgccaccataccctgctaattttttctatttttagtagagacatggtttcaccatgtttctcaggctggtctcgaactcctgagctcaggcaatccgccagccttggcctcccaaagtgctaggattacaggcgtgagccaccacacccagcctaaacccagta

SEQ ID NO: 813569 - DNA, 617 bp, Homo sapiens
ttataaaaacaatgaaatttataggttgactatagaggccaaatgtataatggtcaagagtgcagatttggaaacaagcagaactgagtttgaatactggctacaccgcttgtcacttaygtgaccctaggaaagttacttaatgttgaagtcatgtaaaatgttctgcagaggtcctagaacccattaagttcttagtaatatgtgttatctatggttatttatcatgactgtaaaacatgaaagcccattcatttaatgtatcaccctcaacttctcatcattcagattcttttctaattcagtcagaatcagtaaggtttgactgtacatatataaaataatgtataaatattgaaatacagggtcacataagcaactgatcattgtgctttttatttcatcttttttttttttttaagaaaaaaatcctctagattttcctcacccagaaattcttcctagacagcccctttaagaactgtagctctttcaggattcttcattatactgaaagaatttaaccttatttatgttgtccagtcaaaaacttggtagttcacttttaagagcatgttttctaaacatctctggtaaatggaaattttgactttatg

SEQ ID NO: 813570 - DNA, 510 bp, Homo sapiens
cctttatcccatgtaaatggcaatgtagatataataagcaaatgatataataataagcagattgatataataagcaaattgcaatgggaaggggagaagggaaaagatattcatactcaccagactatggaggattcaccaccagactgggaagcaacagcctgggtcggctccagagtcggccacttgtccgtgcacagacaaggaagaggtctcatgaagctttggcacaatctaggaccctagctcttttgtaacgagttgtttggcatgaggtccaggcacgaaggcccttcgtgaccaggctcaaggaacacaaaaaggtcaacttgtttttgcgattgtctgttgtttttcttatatacttatttatttattttttgagacggartcgtgctttgtcacccaggctggagtgcagaggcacgatcttggctcactgcaatctctgccttcccggttcaagtgattctcctgcctcagcctcccaaacagctgggattacaggtg

SEQ ID NO: 813571 - DNA, 420 bp, Homo sapiens
tggatccattcctgtctggatgccctgttgaggcggggactagggaggacggcatagcttttcctttagaacagtggtttccaaagtgggtgtgcacctaggggtgtgcaagatgatccttttgggtatgggaagacaaaattggaatttctatttatagttaaaaaattaatcctggcctggtgcagtgactcacacctgtaatctcagcacgttaggaggctgaggcaagtggatcacttgagcccaggagtttaaggccagcctgggcaacatggcaagactctatctctacaaaaaattwaaaaaaaaattctccaggtgtggtggcatgcagctgtggtcccagctactctggaggctgaggcaggaggatggcttgagcctgggaggtccagcctgcagtgagctatgatcatg

SEQ ID NO: 813572 - DNA, 420 bp, Homo sapiens
tggatccattcctgtctggatgccctgttgaggcggggactagggaggacggcatagcttttcctttagaacagtggtttccaaagtgggtgtgcacctaggggtgtgcaagatgatccttttgggtatgggaagacaaaattggaatttctatttatagttaaaaaattaatcctggcctggtgcagtgactcacacctgtaatctcagcacgttaggaggctgaggcaagtggatcacttgagcccaggagtttaaggccagcctgggcaacatggcaagactctatctctacaaaaaattaaaaaaaaaattctccaggtgtggtggcatgcagstgtggtcccagctactctggaggctgaggcaggaggatggcttgagcctgggaggtccagcctgcagtgagctatgatcatg

SEQ ID NO: 813573 - DNA, 543 bp, Homo sapiens
cttccattctgtaggttgtatgttcactctgttggttgtttattttgttttccagaagctttttagttgaattaagtctcatttttctatttttgttctcgktgtatttccttttgagaacttagtcataaattctttgctgacaacaaagttctgaagagctcttttggggttttcctctaggatttttataatttcaggtcttatacttaagtctttaattgagttaatttttgtatatggtgagagatgggggtctggtttccttgttctgcataaggctctccaactttctcagcaccatttattaactagggagtcctttccttagggtatttatttatttatttttactttgtcaaagatcagttggttgtagttatgtggctttgtttctgggttctctattttgttccattgcctatgtgtctctttttataccagtaccatcctgttttggctattatagccttgcaatataatttgaagtcaggtaatgtgatacctccagctttattctttttgcttaggatggtttggcta

SEQ ID NO: 813574 - DNA, 543 bp, Homo sapiens
cttccattctgtaggttgtatgttcactctgttggttgtttattttgttttccagaagctttttagttgaattaagtctcatttttctatttttgttctcgttgtatttccttttgagaacttagtcataaattctttgctgacaacaaagttctgaagagctcttttggggttttcctctaggatttttataatttcaggtcttatacttaagtctttaattgagttaatttttgtatatggtgagagatgggggtctggtttccttgttctgcataaggctctccaactttctcagcaccatttattaactagggagtcctttccttagggtatttatttatttatttttactttgtcaaagatcagttggttgtagttatgtggctttgtttctgggttctctattttgttccattgcctrtgtgtctctttttataccagtaccatcctgttttggctattatagccttgcaatataatttgaagtcaggtaatgtgatacctccagctttattctttttgcttaggatggtttggcta

SEQ ID NO: 813575 - DNA, 645 bp, Homo sapiens
tggcccttaaaactattttctctccttcagactttgcaaagcagtattatctgttgaggtcaaaattcagagagtagattgcatgagtttgratgcaccaagtatgtcttcctactgtgtaagatgtgcagtgcccaactcgagggttgccatacatacacacagtaaccacaataaagggtgcttctggacttcagctgtgcccaacctgcccaagcagatgtgccactcggcactgccaggaggtttctcacaggtcccttctcagctctctctctaatggtacctttaaagtgtggcttttccaaatcttcctacgacccttcctaagcctctaccactctccctccaccttgcaggggttgctacctgttacctctcctgttactgagaaaaacccaggcttagagatggaaatcacatcaaactttctgccatctcaactggatcatcctcctggacctgccttcccctctcccactccagtttaaaggaggctggagctccatgcacctggcttctgctcctcatctggtgtcttcctacttaacactctgagcacaggcctgtgacgcacagcctgggcaagaagcccctctttctggctctgcctttccacactgagcagagtgaatagggacacag

SEQ ID NO: 813576 - DNA, 411 bp, Homo sapiens
cataattaggctattgggtgttgggaaggagaccacagaggtgaaatgccattctcatcacatcctatcaagggtacacggtgtcaacatgacatcrctgtgggcattaataggatgattttttttttttttttaccttaccagggaagcatggagctccctgaaggatgagccagacctcagtttccaggcatatgtgggagaggctgtggggaaaggggcttgagcttcagattcagtcatggaaaagggagagaaacccgaccaggcagagatcatatgcctgctgggaagccacagtgatttacactgctgagtggagaattgctgagtaaatattgcttccaaggagggaggatgtgccctgctgcctgctcccacccagtgcctggtaagtggatgcccaaaaaa

SEQ ID NO: 813577 - DNA, 374 bp, Homo sapiens
agatattttattattttgtatactattgtggacaaaattttttaaatttcatttttggattgttcattgtgcatatgtaggaaatatgtaggaaagattgatattttatgtattgatcttttatcctgaaacatttccagacctagtaccactatgtatatgtatatatgctatatatatgtaagacagttttctacatactggatcatactgtctgtgaataaaaacaaagttttatctcttcttttccagtctgtatacaatacactggattgcyctttcttgttttcttttattgaccagaacctccagtactacactgaataagagtggtcagagcagatctcctttggttttcagcctacacgtgtctt

SEQ ID NO: 813578 - DNA, 561 bp, Homo sapiens
ctttattttaaagagtaatctttttcaatatacggaacacttcacaaatttgggtatcacccttgcaaaagggccatgctaatctctgtattgttccaattttagtataygtgctgccaaagcaagcactaaactaatattatttcattttcattcacagttattatcttaggataaatgaggagacatgacattaggattaaagggtatgcaaaatctaaggtttttgacacatacaatctattgctcttccgaatcgatgcctgaactaatttatatgctcactagcaacgtacaagcatgcctattcactacactcaacaaggagaccctttgagagtaggaaaaaatgcatttattttactgtgtaatagttattatttactattttgatacagtgttttaaatttgtgcctttgattgctaacaaaattgaactttttaaatatttgatgttcttgtatttcttctttgtaaactgtctgttcatgacctttgtctacttttctattaggctgttcatttcttaacatagtaattaaaaaaaaacaggtagggcca

SEQ ID NO: 813579 - DNA, 620 bp, Homo sapiens
gctcatagacctacttgtaaaagctacagctatgaaacttccagagcgaacgcagaagagcatcttccccatctagaagtagggaatgatttttcagagaaaacacacacacamgaaagcaccaatcttaagagggaaagctgaaacactgggcttgagatctgttgaagctgaagtgtggggacaactagcaggagaggccaggcaggacactggtgtctgctgcatggtgaggcctggcctggaggaagccacacattaggctccttatttcagctaacatttcaagccaaaatctgcatttggagcctacctcaggtcaccttcttatgacctaccagactagactaagtgactttgaatggcttctagaatgctctagctgcagatgcccaagcagatgagcctctgagtacttccctaggtgcctgttctgctaagacccagcacccccagggtgtggcatagaccctccatctgcttcctcactggcgaggcttagggctcatctgcattagctgctctctgcccagctctgtcataccttcacccccttcctcagagctaatgaaggaggcagaaaaaatttaatttcctctaaactagaggctgatcaatta

SEQ ID NO: 813580 - DNA, 620 bp, Homo sapiens
gctcatagacctacttgtaaaagctacagctatgaaacttccagagcgaacgcagaagagcatcttccccatctagaagtagggaatgatttttcagagaaaacacacacacaaraaagcaccaatcttaagagggaaagctgaaacactgggcttgagatctgttgaagctgaagtgtggggacaactagcaggagaggccaggcaggacactggtgtctgctgcatggtgaggcctggcctggaggaagccacacattaggctccttatttcagctaacatttcaagccaaaatctgcatttggagcctacctcaggtcaccttcttatgacctaccagactagactaagtgactttgaatggcttctagaatgctctagctgcagatgcccaagcagatgagcctctgagtacttccctaggtgcctgttctgctaagacccagcacccccagggtgtggcatagaccctccatctgcttcctcactggcgaggcttagggctcatctgcattagctgctctctgcccagctctgtcataccttcacccccttcctcagagctaatgaaggaggcagaaaaaatttaatttcctctaaactagaggctgatcaatta

SEQ ID NO: 813581 - DNA, 620 bp, Homo sapiens
gctcatagacctacttgtaaaagctacagctatgaaacttccagagcgaacgcagaagagcatcttccccatctagaagtagggaatgatttttcagagaaaacacacacacaagaaagcaccaatcttaagagggaaagctgaaacactgggcttgagatctgttgaagctgaagtgtggggacaactagcaggagaggccaggcaggacactggtgtctgctgcatggtgaggcctggcctggaggaagccacacattaggctccttatttcagctaacatttcaagccaaaatctgcatttggagcctacctcaggtcaccttcttatgacctaccagactagactaagtgactttgaatggcttctagaatgctctagctgcagatgcccaagcagatgagcctctgagtacttccctaggtgcctgttctgctaagacccagcacccccagggtgtggcatagaccctccatctgcttcctcactggcgaggcttagggctcatctgcattagctgctctctgcccagctctgtcataccttcacccccttcctcagrgctaatgaaggaggcagaaaaaatttaatttcctctaaactagaggctgatcaatta

SEQ ID NO: 813582 - DNA, 484 bp, Homo sapiens
gtgcccttggctttcagaggccagtccaaggaaaaaagctcatgaaaaggggagaggtctaacttttaccatgtatctatcatgtgccaggcccttagctcacaaatccrttgggttatcccacttcacagctgtctaatctgaggctcagagaggccaagtcacttacctaaagtcacacagcagaggttggacttgaactaggtctttccgattccagaacccgaaagcttgtcattgctctaagtgtccaaatgctccagtaactgctctaatgggggccccattgaggaagcacacagcaggggaaataacagccttcccatttccagagcacatagcaaggggcaggggataacaaaagtcttgtaaaatgcagcatggggctctgtaatcccactccttccccctccatgcctctaagccccaagaaaatgcgtttccatatactgggtttctgtttagcaaggttcacctgtgtctc

SEQ ID NO: 813583 - DNA, 667 bp, Homo sapiens
gttatcacttagggaaaaaaggcagtcaacaaatatatttaattctatctaggaaaaatgtagccaaatcttttttcccattaacaaataatgtaagccttaatattcaagggtaataaaaaatacaagtcttccaaacagttaacttactgaaaacttttttaaaatcaacatttgctaaattcagaaacagatagtaggtactttatttatatatatataaaattactgtcaattttatatatatataattttacataaaaatataattttatatgtatgtaaaattgacagtaattttttgcagaaaattcacaatccagttttttgattccacactgcacatcccaccccctcaagaccagagaacacagggtctaggctaacacatcaaaagcagctctggagacttaattccattgtggtaatacagctttcttactctggcagaagctccataccgttcagcaacccactgaacgtagggaaggaatgggaagctcctgtgttccaaaagagttctgaactggctcttcatctgtcccttagcccctgcattctagttttattgttcttctccccccagattgactatccatgttctggtcactcctcattgttaaatgyggttaacactttacataggcctctctgtggaggctgtgta

SEQ ID NO: 813584 - DNA, 561 bp, Homo sapiens
taccttaaacttggtggcttgagacaacatagatttattatctcagtgtgctgaaattcggaaatccaaaaatcgatctcactgggttaaacaaaatcgacagtcaaggttttggcagtgctgtttctttctggaagctttaggggaaaatccattttttcttgccttttctagctcttacaggtagcctgcattctttggctcatggtctctttgcatcaatctgacctctcttcccatcctcacgtcttctctgacacaggccttcctgcctttctcttataacgacccttgtgactacattgggattacctggataattcagggtaacatccccatctcgtgatccttaatcatgtctgtaaagtcccttttgccatgtgagtaacatattcaaagattcctgagattaggatgtgggcagcattgagagcccttattcagcctgcaagggcactccaccacaacttcctggctagcttgccttcccttctcttacttagcttggacttcccaccmccagggtttctctcatgagctagatcagagtagtgcaggtgt

SEQ ID NO: 813585 - DNA, 499 bp, Homo sapiens
atataacataccaaaacctgtggaatatgacaaaggcagtactcagaagaaagttaatagcaataaagacctatatcaatatagaagaaagagcacaaataccctaatgttgcamctcaaggaagtaaaaaaacaaaaactaactaaactcaaaattagaagaaatgaaatagtaaagatcatagcataaataaacaaaaatagacaaaaaatacaaaaatcaaccaaatgaaggattgggtttttgaaaatataaacaaaatcaacactctttagccagaaagaaagaaaactcagataaaatcagagatgaacaaggagatattacaactgatgccacagaaatacaaagaattataagagaatattatggacaactacacaccagggagtcctagctgtataacagctcactctcacaagaactaatccagggtgtccaatcttttggctttcctgggccacattggaataagaagaattgtcttgggccacacat

SEQ ID NO: 813586 - DNA, 596 bp, Homo sapiens
tttccgcatcatgtattcttggaacccttgtcaaagatcagttgactgtgtatgcatgggtttatttctgagctccctaatctgtttgattggtatacatatctttctttatgctggtaccataatgttttaattaccatagctttgtgatatgttttacaatcaggaattgtgatgcctccagctttgttctcctttcttaagattgctttggctactcaggatcttttgtggttttatatgaaatttagggttgtttttctatttctgtaaaaaggtaccattgggattttgatagggactgtattaaatctgtagatcactttgggtatgaacattttaacgacattaagccttccaattcatgtacatgagatgtctttccacttatttgtgtttaatttctctcatcagtatcttctagctcagtgtacaggtttttaacctccttagttaagtttattgctaaatattttactatttttgatgctattgcaaatgggatttttaaaaattttcttttcagtttgttgtcrgtgtatagaaacaccactgatttttgtatattggttttgtatcttgaagctttgctaaat

SEQ ID NO: 813587 - DNA, 383 bp, Homo sapiens
ttctttttagcactgaatcatatttcattgtaaggatgtaccacagtttatatatccattcacctaatgaaggacatcttggttgcttccaagttttgacaawtataaataaagctgctataaacatttgtgtgcagggccttgtgtgggcataagttctgaactcatttgtgaataccaggagcatctgctgaatcatatggtgagagtatgtttagttttgtaagaaactgtcaaactgtcttccaaagtggctgtacattgctgtaccagcaataaatgagaattcctgttgctctacattctcaccagcatttggtgtagtcattgttctggacttcggccattctaataggtgtgtagtagcatctcattgttgtttt

SEQ ID NO: 813588 - DNA, 383 bp, Homo sapiens
ttctttttagcactgaatcatatttcattgtaaggatgtaccacagtttatatatccattcacctaatgaaggacatcttggttgcttccaagttttgacaattataaataaagctgctataaacatttgtgtgcagggccttgtgtgggcataagttctgaactcatttgtgaataccaggagcatctgctgaatcatatggtgagagtatgtttagttttgtaagaaactgtcaaactgtcttccaaagtggctrtacattgctgtaccagcaataaatgagaattcctgttgctctacattctcaccagcatttggtgtagtcattgttctggacttcggccattctaataggtgtgtagtagcatctcattgttgtttt

SEQ ID NO: 813589 - DNA, 568 bp, Homo sapiens
tgcatttacacagacatacctaatcctatctcaaatgtcaaaaacggcacataatttttagtggaacactttcttgccattcttaaatccaaatgtattcattacaactaactatgagcatctgaatcctccattgtcttaatgtggctgtgcctgagcatttagatcttgaaatacaatcttttaagttacctgctcccttttttctctacagttaaggcattatattaattttttaagtgatatgtgtaggtactattatattgaccatcagtttcactttaaatagtaaagatagtgttataaaatatttgttattaaaagtgcagtttggggtgacggggagagaaggactgcagtagtttgtttaactggagaaggtcgagcaaaagctctcagaagcccctggtgacgtgtgcccacggcagattgagaactctcattgaaattgtttaccccacrcctctctggccttgctgcttccttgtaaggtctgtctgagaagcaactaactctgtctggtctgaatttagcagagcctgggcccctaaagcaaagatcagggaag

SEQ ID NO: 813590 - DNA, 552 bp, Homo sapiens
ataaaaaagtaagaagttctaaaaaccaatttctaaaacaaggggatccagaattgccacacctccatccaacaggccaagacgtggtcaaccagggcactaaagtccacaatcaaaggtgaaaatatatgggctcgggttcaaaagctggttttcgagtaccttgcctagcttgctctgggacctcgggtaagtcactcagcttctgcctgcctccttgtgttgccattttatacaggatgatgtgtgaggataacgaagaagtattttcaggtcctgggaagcaagtcaccacattataaaaagatggtaaaaatgtggctctaatgaacattcacatcactattgccgtcaccatgaccaagctcccttaagaaggaacctaaataaataagagttattctgagggccatggctcccagggccctgcagcctgagctgggccacatcctytgaagtagctggcgctggtgggaagttcagggtgaggagagcctgagtccccatgcctggaaactggactgtgtcctccctggctcgtttcttacctac

SEQ ID NO: 813591 - DNA, 579 bp, Homo sapiens
aaacaccttaggacaaactattttttcaaataaaattttatgtcagaatagtcttgtgtaagtggttttctattctcccatcttctcattattaygaatatttgctttattgatatatatatctcagttactccctgtgactaaactgctctctctgcttgaaatcagaagacttattttaggtaatttaaaatttatattagcacagtgtctataccaaattggtaatgcagatttatgtaaaaaaagaggaaaagaaacattctaacagaaaaaatggtcaaagaatataaacaagcactttcaatgattaaacagtggctgtaaatatattgctaaatatgtaatcagctttatgcaaattaaaacaatgagatactgtatctagccatcataaaggcaaatattaaataataataatattgaggagttataaaattgtgtgaaaataacaactcttatatactgctggtaaacgaataaattgatgcatttatttttttagaataatttggcagtttctattaagttaaagatgtgcatgctatatgatccagctggagaaacacttgcatatgc

SEQ ID NO: 813592 - DNA, 630 bp, Homo sapiens
gcttgacaaagttgaaaacactcttatctttggaatcttttagaggacactttttggacttagtggaattactctatcagctttccaataagtgaatacttcggttaagctaggagttcacatttttggaaatgctgtgattgatgttcactttaaaattttagttctgaagtcacttaaggtgcagagatgggaactcatttaaaagagagaaaatgtaaaatatattttgaaacatgtatgaatgacaaaaaattcaagctaaatagcttgcagtttctcatgtgacattcctttcataccactccaccaaaaattaaggccatctgtttaggctgaaaaggcaatttcatttctagaatgacaaaccagatagtctctggaaatagtttaagaataactttgtaaaggattttaaaaattggattagtgaacattatgaaactcattctgaaaaggaaactgaggaaagcaaatggtgtgatattgttttcctcagcagcctataattctacattatgatctgcaattagtgcttattcaatattgtcaaaactggtccaattagtaggcttacraataagctttttatggtatatacatagtgccagaggacttaatttgtttcac

SEQ ID NO: 813593 - DNA, 615 bp, Homo sapiens
ggagcaaagtcgcatcctacatggtggcaggcaagagagcgtgtgcaggggagctcccctttataaaaccatcagatcttgtgagacttactcactatcatgagaacagcatgggaaagacatgcctccatgaatcaattacctcccaccacgtccctcccacaacatgtgatctacaatgcaagatgagatttgggtggggacatagccaaaccatataaaatactaactcttttaattcttccaataatcctatgaggtggctactattatcatccccatttaatagagggggacccaggactcataaaggttaatgactcatgcagtgtcacacagttagaaagtggcaagaccaagattcaaacccaagtacacctgcctcccagacatgtgctaaacaatctacacagggctgtgctcagtaaatgtcggctgttataattttacccagtttccctgaataaacaccaggggttgctctatctctccacttttcttccacgggaattatactagggacccctttgcataagtaatcacaggagaattaaaaacagaaaagttggcygggcacggtggctcatgcctgtcatcccagcactttgggaggtt

SEQ ID NO: 813594 - DNA, 609 bp, Homo sapiens
tgcatataaaagttttgttggctggacatgttggctaaaaaacttttgtttacactatagtgtagtttattaagtttgcaatagcattatatttaaaaatgcaatgtacataccttaattataaaatattttattgctgctgggtgtggtggggcatgcctaaagtcccagctactcaggaggctaagacaggaggatcacttgagcccaggaatttgagtccagcctgggcaacatatcaggaagcttgagaagagggagagagacaggggaatggccagtcagtggagcagtcagaacagaaacaacatttattgattaagtttgccatcttacatggtcacaactcatggtgtctcaaaacagttataatagttataccaaagaccactgatcaaagatcaccacaacagatataataataatgaaacatttgcaatattgtgagaatgaccaaaatgtgacacagagacataaagtgagcacatgctgttggaaaaacagtgctgatagacttgctcaatacggggtttacagggttgccacaaacctttaatttgtaaaaaaaaaaaaamaaacaaacagcgaaacacaataaaacaaggtatg

SEQ ID NO: 813595 - DNA, 665 bp, Homo sapiens
atctctgcctgggtgggacccaggggccagattggggtgtctcctttgttctctccctgctggagttagatttatactccaggtgaagagctgggtagtgcttggggtatactcattgcaagctgagtccaatctaagaagtcactttctgttctagcggtacccaaacaggcaaacaacagctggatctgaacgcatgctatcacaaaacgcatcacagagatttggggctggcttcattggaagaggcaggtaggcttttgactgtcagtctacgggaactgaaaaggatccttctgggactttgctaggtaattagcattttagtgtgcgcatgtgatgatattatccgtaatgaatgtatttcaggccaaatggcagttgccctcacatccaacagctcacatctttgaaaccagttgtaattgatctattggtattctataagtttctatttatttaggcagcacccatttatttctgtggtatcatctgctgaacgattttttgggtagatgtgttgggtgtcggcagagtagtgatctagtatcaaaatgggtttcccatttggcaatctctctttttgaaatrgatttgtactgctgttgctgtgcgttaataagcctctgttgggtggttccagaatgtggagattggtgaaaagc

SEQ ID NO: 813596 - DNA, 635 bp, Homo sapiens
cgtggaatgcctacagtgtgggtattctggataaagggatgattcacatgctgggatgtgagggcaaagcaggaaggtgccagatttaatcctgctactcagaatgctgcacaatttaaaacttatgaattatttatttctaggattttttacctaataattttggaccgtggttgacagttggtaaatgaaatcatggaaaatgaaactgtggataaggaggcctatgttagttccatcctgtcttagatttctgtagatgtgtgacaaccaccacaaacaagatacagactgttctatcaccacaaacgtctccctgttgctacctccttatagttgtacccactgcctttcccataccacccctaacccctcataaccagcaacgtttcccatccatataattttgtcatttaaaaaatgttatatgaatgggaccatacaaaatgaccttttagattggcttttttcgcttaacataatgcctctgacatccatcccagtttttaaatgtatcgatagtcagtgccttttcattacyaagtattattgcatggtatggatgtacaagagtatcacagtttatttagctattcccctattgagggacattttggttgtttccagtgtttggc

SEQ ID NO: 813597 - DNA, 552 bp, Homo sapiens
tgatataactatttgcctatgggcaggaaagatctgcccaagtaggtcttgtggattgagtgacagaaggaattagaaaaaataatttaaaaagtaacattactactttttggtattatagtagaagagaagaatgagtgctttttactttatatttttacctgaggaactttaggagtaggagtggttttctaaatatgtataaaactgtctttactgtagggaaagtcaggaggagtttgtaaatatttgtgttgctttctctgttgtttgtctctaaatttgcctagattaacttcacatcggagtaactgccagataggatgcttcttcatctttgttttagaataaggaaatcttttgagtaataataataatagcacaagataaaatttatttttttaatgttttatttttaatgggrtacatagtagatgtatatagttataggttccatgagatattttgatacaggcttacaatgcataataatcacatcagggtgaatgggtatctgtcccctcaagtatttaccttttgtgttacaaataa

SEQ ID NO: 813598 - DNA, 471 bp, Homo sapiens
tttacttggcagacacactgacttgggggttggtctttgtgcctggtttagcatcagtgcaacaccttttgttgatggatggagggaggaagtwtgctaaaacaagacagtgatgcgtgtagaaaagcttgtgtctcattcaaagagtaatgagacatctagaggggaaaggagaggtcagaagcagggtttctgctaaagagaaaaagggctgtatctccagggctgaattcacatcatctttggaacaagtgtcaatgttaggatatatgacacttctttctttgggagctgaataggagcctagacatgctgggtctttaaggacacgtttagaggcttctaggttcaccttcaataccagttccagttgccagttcactattccttggaccttaaggtgaacgccactgaagagtaggcatatttacattggaagactgtatgactctccactctttgccctgaagt

SEQ ID NO: 813599 - DNA, 584 bp, Homo sapiens
gttcaataagctaatggtatagtctgaagactccactcaagattgtattgttgaattcccagttggataaaggagaaagagaaaaaccgagggagggaatttgaatgaccttgcaccaaggtggtagggccctaagatcctctgctgtaggctgtggttgagctccacactgaggctctttactgcactgcattctgacggctgagaatgaaagtgtccttctgaacagatgaacttgaaatcgactcacctcagagccgaaacctctgtgagtctctacacgcatgtgaatgtgagcgcatatctgtgtttatggggtgaatgtatgggctgtttgcctgcgtgcaccaatgactcaatgcttgtcagaaaacacattgtagaaaatggcataaagaaatttaatgagaaaaaaactaatggaggaaaatttaacctttctaagagtcrtgtcaatctataaactattaaatgatcacctttattactgattagtttattcacctcacatcatcttaggaagagctagacaagattcctgaaatctattaattagtttcccctagcaaatattaactcagcaa

SEQ ID NO: 813600 - DNA, 656 bp, Homo sapiens
atatgacaacagaagattgaaattggggtaaccaaatttagaaaagaaatagtaaaaacaaacccmaagtaaataaatcattgcagaaactataagctgacatggcaaatacataaatattggaaatatgtgaggttgacaatttctggcattagaaagcattttaaaatatcaaataattaaacttttcaatctgttaaatgcaaaggcattttaagtttttcttcttacgtgtatttatgaaaaaagtgtatgtttcagccacttttacatttcttcaaattattactttaatgcacactttgaggcttttcttttcaatgttaataagctctttttctcaacctccctcagttaaatgaaggaagagaagagccaagtagtaatcaatcagtgaagacactaaatcatcatatttttaggtcaaagatttctctttttcattcatggcagcttattaatatatttaatttttagttcacctttttagtatagatttaagacataaacaaaatttgtagctcccatcttaacatcaatgtttctaattaggaaaaaaaaaggcacttctaagattttttttaaaaaaaaacatgccttttgtctggagaaacatcatgagtcctggccattacctcccttgaataaaatttatt

SEQ ID NO: 813601 - DNA, 581 bp, Homo sapiens
cattcaaagtggcttctatagctcttttatttgagtcacttgaaagaactaagcatcactacyaattccaagcagccatattttcctaccagtaaaatagaaatgtaaaaatatgtgaaaaataagtatttatgaaacaaagccttcctaattatagttcagttgggctatgttataggcagaataatgtccctcacaaagatgtctgtgtccacatctttattcctgtaacttgtgaataagttaggttatgtggcaaagaggaattgaggtataataaatttaagcctactaatcagctgattttaaaataggaagattatcctgtactatcttgtggattcaatgtaattgtaaaagccataaacattggagagagaggtaacagagttagtgtcaaagtgatgcaatgtgaggaagattcatttggccattgttggctttgaaaatgtaagggggccacaagccaaggaaaacaggcagcaacataagctggaaaaggcaggaaatcaacttgtccctcagagccccagcaaagagcacaggctcgctgatgcctgcattttagcccagtgaaaccc

SEQ ID NO: 813602 - DNA, 511 bp, Homo sapiens
cctcataaaatgagttagggaggattccctctttttctattgattggaatagtttcagaaggawtggtaacagctcctccttgtacctctggtagaattcggctatgaatccatctggtcctggaccttttttggttggtaggctattaattactgcctcaatttcagagcctgttgttggtctatttagggattcaacttcttcctggttcagtcttggatgggtgtatgtgtccaggaatttatccattccttctagattttctagtttattttcattatttcctgtatctattatttatttcattttcttgttcattacttttatttattttattttgtagagatgggggtctcagtattccacctaggctgctctcaaactcctggcctcaagtgatcttcctgctgctacctcccaaaatgctaggattacaagctctacttaattttcttcaagatagaagcatgtccatgcatcaaggatccaatgagcagcatgaagatctct

SEQ ID NO: 813603 - DNA, 511 bp, Homo sapiens
cctcataaaatgagttagggaggattccctctttttctattgattggaatagtttcagaaggaatggtaacagctcctccttgtacctctggtagaattcggctrtgaatccatctggtcctggaccttttttggttggtaggctattaattactgcctcaatttcagagcctgttgttggtctatttagggattcaacttcttcctggttcagtcttggatgggtgtatgtgtccaggaatttatccattccttctagattttctagtttattttcattatttcctgtatctattatttatttcattttcttgttcattacttttatttattttattttgtagagatgggggtctcagtattccacctaggctgctctcaaactcctggcctcaagtgatcttcctgctgctacctcccaaaatgctaggattacaagctctacttaattttcttcaagatagaagcatgtccatgcatcaaggatccaatgagcagcatgaagatctct

SEQ ID NO: 813604 - DNA, 636 bp, Homo sapiens
ctgaagactttagtcatttctcagctcagaaacaatcagtgactcctctttgtctgagatcccctccaatatgtgtttttttagttttatccctctagtttctcaaattctgattggtccgctgatcgctgaaaatagcctggatgtgaaccagactgaatttgaataccaaactccatactcactcacttaggcaaattacttacacactccgtgctccagttgctcatttattgaacggagatgaaaataatagttccagctcctagggctcttgtgaaaataaaatgaatgaactcatgtaaatgcttatagtggtgccaagcatacagtaagcatagcttagatgccagatattactattacttctgctttctctgtggtttgttcctgctgtcattactacctggcaagtctcacagtctctgcatatccaattaccactcctctttaaaaccagggtcagatgttttatatatcatgaaaacttattattagtaaaataaaaggctatgctctcaatgactaaatcatggtttattccaatcataatgcactcttcttagcctgmcctgtatcatagttgcatttgcaagtgtctttatcttgcccatgggcgaatgaaccattaggagc

SEQ ID NO: 813605 - DNA, 616 bp, Homo sapiens
cccctccaatatgtgtttttttagttttatccctctagtttctcaaattctgattggtccgctgatcgctgaaaatagcctggatgtgaaccagactgaatttgaataccaaactccatactcactcacttaggcaaattacttacacactccgtgctccagttgctcatttattgaacggagatgaaaataatagttccagctcctagggctcttgtgaaaataaaatgaatgaactcatgtaaatgcttatagtggtgccaagcatacagtaagcatagcttagatgccagatattactattacttctgctttctctgtggtttgttcctgctgtcattactacctggcaagtctcacagtctctgcatatccaattaccactcctctttaaaaccagggtcagatgttttatatatcatgaaaacttattattagtaaaataaaaggctatgctctcaatgactaaatcatggtttattccaatcataatgcactcttcttagcctgccctgtatcrtagttgcatttgcaagtgtctttatcttgcccatgggcgaatgaaccattaggagcagaaattacattctatacattcttgtgcctctggatatgt

SEQ ID NO: 813606 - DNA, 581 bp, Homo sapiens
gctgggtcctgtattggtcacctattgctttattaagttcccagccagaatggatctcttctgtctttcagtgtgatgtatacccacaaaatcccaaccacgcttttacattagagtctaaattccttagccaattagtgttatgattttatcacagcagttgtttgaagctaaattgcagtagttattatccatgatgggtcctgctccctgaggttagttgctcaggttgaacaaaccatgaaaaaaacctccaagaaaattcatgctagaaaataactacaatgttacaatgttgatgttttatcaaatagagttctagggccagatttagcccaaaatgtccctatagcccaacttagtaatagttaaataaattcacaagaatggcatacatttagaaaagaggacaaagggcttggccatctgttgaaaagacctcatgaaactcttgacagagattgtgcaacaaatctgctrtcaggttcaggcacagagaacatacattggaatcaacaccttagtttttacacatactaaaaatctactgtggtgatatgtttatatctttctgaacactt

SEQ ID NO: 813607 - DNA, 609 bp, Homo sapiens
ctattaataactaatgaactaagtgtattatttttagttctacagtcttaattttacacatatttatacaaaatatttctccatggttgtatcatactaaacattcctacacttccgctaaaaaattatacagttgaccattgaacaatgtggaggttatggctgccaactcctccagccccagccacgcagtcagcaatttttatgtaacttagactcctcaaaagcttgactactgacaacctactgttgaatgaaaacctcacagataacaagcagtaagttaacacatattttgtatgttgtatgatttatattctgtattcttacaataaagctgcagaaaagaaaatgctattaagaaatccatagggaagagaaaatatatttactattcatgaagtggaagtggatcatcataaaggttttcatcctcatcgtcttcatactgagtaggctgagaagggggaagaagaggagggtttggtttttctgtgtctggggtaaccgaggtggcagcaaatctgcagataagtggatttatccacatagtttccacctatgttattcaagrgttagccacattcaggttattgcaattacaacatc

SEQ ID NO: 813608 - DNA, 550 bp, Homo sapiens
caataacaaggggtttaaaaaagatgtaagggaaccaagtccatcttattgcatgggcattttcatgtcttcgtgtgacacctgaggctgcagaggaaagcagtttaratggcagtccgctggcagcaaggcagaccccacggagcggggagttgcctgatagcagcagcactgcaacctgagatccctgtgctgagactcagcaaaggtgagtggcagtagctggcttgagtctgctttgctttgtattcctctgttcttttaattgaactacttccctgaccttttaaagttgttcttgcaataatacatattattcagctttcagatttacagctttcaatcatcctttgagaatgtcaggttagttctagttaattttagctgttttctctaaacaggaggtaagacaaacttctttgaaatcatgtaattatcccatttgcaagaagtccttgcctttattagtaaagccttaatcactgtctctttgtcaatgttttcattttctttggaaaactatgatcaaattcaatcattttgatgtaat

SEQ ID NO: 813609 - DNA, 611 bp, Homo sapiens
tggcacgatctcagcccactgcaacctccgcctcctgagttcaagcgattctcctgtctcagcctcccgagtagctgggattacaggcacccaccactgtgcccggctaattttatttatttattatttatttatttattatttattttttttgtgtgtgagaaggagtctcgctctgtcgcccaagctgaagtgcagtgacacaatctcggctcactacaacctccaacacccaggttcaagtgattctcctgcctcagcctcctaagtagctgggactacaggcgtgtaccaccacccctggctaattttttgtattttagtagagatggggtttcaccatgttggccaggatggtctcgatctcctgacctcgtgatccgcccacctcggcctcccaaagtgctgggattacagacgtgagccaccacacccagcctaatttttgtatttttagtagagacgggggtttcaccatcttggtctggctggtctcaaactcctgacctcgtgatccacccaccttggtctcccaaagtgctgggattacaggtgtgagccactgcgcccrgccagatgaatgtaattgtttaaaaaaaaaagcacaaagc

SEQ ID NO: 813610 - DNA, 331 bp, Homo sapiens
ggttgaaactggttggttggttaaaatttcatgttaaggatggtccatgcaggactcccatataggggaaaagaagtaactaataatcttcattgagcaccaactatatttcaggcactgtattaccctcatccccaacatatagtactgttttatttaatccttgaaacatccataaggtaggtggtttttactcttgaaatccacagatttcaagaagagctaatagaacttcagtgatttgcccagtttcatacagtggttcagagatttagtccyacacctatttgactttaaactgtcaggaccagctgttctctgttgatcatac

SEQ ID NO: 813611 - DNA, 580 bp, Homo sapiens
cttgagataacaaacaaatccagaatttgggaccatttactagtctggttctttcaaaggtcaatgttataaaaaaaaaaagtagaactcttccagactaaagtaagctaaagagatataactatcaaatgcaatgtataaatctggtttgcaaaatcatattatactatatcctataccatatttatttttggaacaactaggaaaattttaatattgactagatttttgatgatattaaaaaatatatgataaaggtattatggattttaggcaaatgtcctttttaaaaaggtgcatagtgaaggaataaggctgactaccttatccttatacaatgactgcaacttcctttaaaatgggtagcaaaatatttagataggtaatatggcagaatatgaacaggtattaaatctaactgatggggtcatggtgttcattgtaccatcctttcaacttttctgtttgaacatttttacaatagaatgaaatagtggaaaacattaattaaaaaaaaaaaaygaaattgctaacctacccaggaacgatttattcttttcccaaacggctacagtttttt

SEQ ID NO: 813612 - DNA, 635 bp, Homo sapiens
tgaaaataaaaaattcattgcactgcttagtaaagcattactagtaactttcattaaaaatggacaaactttgttaaaaatttatgaagccttcagatgatttggttacagatatttgtaatatgtgcatttaaaactatatgttaactgatataatggaatatgatttgaggaaatgactcagcaaatgattctacagacatccttgtgagcattcataatctgaaacaaacagcaaaatgaggtcaccaaatgtaccaacagggggaaaatactttctaatgaaggcctaaagatatctgtgaaaactattctctgaagcgagttgggagatctcattcaaaattattgcaagagggtcaaatgtaagaatcttgggaaatcacatttcagagaatatataaaaatctaaataggctttcacattttccagattttgctcaatcaaaattcaggacagaaagtcctaatatgaaatcttgggtacccccatctgctcctaatgaataagaagtatgttaaagaccaaaaktattggcataataatccattacatatacatcacatgtagtgtaatctttatttttcttatgaaaaaatcatgtttaaaaatggcaaaaaagtacacataggct

SEQ ID NO: 813613 - DNA, 579 bp, Homo sapiens
atagattggatggatggatggatggatggatggattgggatggactgggatggactgggatggatggagtaaatactcatagtagataccttttcacgaatgctcagtaaactgtagctgtggttaaggacttggccttagtcatttgtccgagagcctgtaggctctgtcatggcactaggcagctgcgtaaaaggccaggcctccatcccgacctgtgtattcttgcctgggttgagccagctcggtttgtgtgagtattcttgtacccccttccagaaaggactagctaaaagacacctgctctgagttggccatcagcagggcatcgggggagttgggagccggtaggaactgcagctctgggtgctgtgaagagggccctgagccgcatccaactaaggaagtgaaatgttgctgagctcccaccctcctaggcagaggtctgagccgctgggatgtggacaggtgacctctgaagcgttgttcagctccgccaccatccagtttgagggttgcttggtcccatgttctctccagtcctgtagtgggagagcaragggggtggagcttggatcc

SEQ ID NO: 813614 - DNA, 572 bp, Homo sapiens
tttactcaacaccaccctctcagtggctaccttatccaaaatgtcaatccttgccaccccytaaaatttcatattacctcttcctaaaatctaaatactttagattttctcttcagtatttgtcactacctaatctactttatattttaattatttatctttgttattttttctttcttccactagaatgtaaactccctaaagcaggaaattttgtttgttttgtttattactggattcccaaaacctagaacggtgcctggcacagagtaagtacccagtaaatatttgttgaagaaataaataaatcatatagaggacaaagggattgaagaagagctattattaaaatatcagttgacagaaatagaaattttacatgggagaaccagattcacaaatttgggcagacagtatggagacaatttggagagaagctagaatgtcctgccaaggactcataaataaaaggctcctaggagaatctgagggggtcactttgtctacctctctcatttctaggcaattccacacctaagccatctcagacaaaacaagatattcagctttct

SEQ ID NO: 813615 - DNA, 599 bp, Homo sapiens
tttctaggaagtatttttcgttttttgttttttttttttcagaaaaaaaccacttttgaggcacaattgtcataaaatgtcacttgtagcatgaagcaaatatagaaactctgtccctttgcagataggactgcctgttaagtgatggccggtcagacttacttgatgactcagtacagtgagagacaagcattagagctgttagttgttactaacactaagcagaataacagaaaacaggcaaaatagggtcaagtagaattgtcaatttttgcctttcagagtcattaaagggaagaactggggctgagtcgttagaataggttagttgtttgagttattccatcaatccgaaattagaattaccttcataccttccttgcctttccaaacttctgggccatgtcactgagagtggccaggactcagctgatctgcagcagggaaaccacccccaatctgtggctactcctatacttaggcttaaactggacataaggccatttcatacaatttcagatgtttgtgttttgtctttgcaacatgatatatatggttaaaataatataattartttttaatattgtagcttattgaaa

SEQ ID NO: 813616 - DNA, 584 bp, Homo sapiens
ctacagagataagaaaacggagrttcaaggagcctaggtggcatagccaaagattggtatgttgtaagagtcagagccaggatttgaaactaggatgtttgatccttagtcctaatgttgttgttgttgtatttgttgatttttaactgtattctcatgtttcatgagtccaagatgacagacattttctagacacaaatacagcatagtggcaattaggaaaggagcctcaagatcactgaatctcttctgcctcaccttggctgcctctgacctttctgactttgtgagggttgggagggcacaggatagaatgaacaaagaactggccttatttggacacacctgggtttacatcctagccccaccactccaccattcactcaataaatatctatggagtaccaaccatactctaggccccagagacacagtgatacagaaccgagaaaatattcttcattgtatttctctttctttctgatccccagttctgtcaactctaaaattgaggtgggtataccactgaatatttttggaaggtgaatattaaaagttatctaacatgttatgaaaagaaagat

SEQ ID NO: 813617 - DNA, 547 bp, Homo sapiens
ccagtacacaacatacataaccagagagagttttaacagaggttataatccaagtctaaattgcacccaaaaacaacagatttctaaaattatctttaaatgcccaataaaagaacccgggaaaccactgcttacactgcaatttcgttcacctggctaatttcagtgatactaaaaaccccaagtgatcactcttactcttctcttacacagaacttttgagtataaaccatgtcgatcatttcaaaattacaaccccagttgtttcccttcctcgttggatagaacctcacttggacagcagtagtgttcttatctgcttcctttaatttagtcatttttctctatatcccaaattcaaaaccgttttcttttttaccatgaaatttcaactgtcacagtttgaagcacaaacaaaatacagaactgaaaggcatacagcacaaaattaatcaattcttcttcttgattgcttcactggtgcatttsagacaaaaggcaaactggggatgaaaagtgacattttggagaaacagtcgcttaaatt

SEQ ID NO: 813618 - DNA, 630 bp, Homo sapiens
taaagtacatacccttactgtgtctcactgtacttgtctaaaacatgaggataacactcctagaaagctggaaaggtttaattaartaactcagcattgcagtgctagcaaacacattgacatacatacaagaaaacttgcaataaatgttactcttcattttgaatagcttggtaggattgttagtgttgacttgggtttgggataggcttgaggaaaggtgtgtaaagtcacagagagaatcatggatgcattttcactggataaggaatttttaaaatacttcaatactcactgaccagattcataaggcttatttactattcctctaggagaaaaagaattagagtcactcttgaaaccagagtgtcatttgaactcaacatagaactgatctgctaacaaagtacagaccaaaataagcactgtctgccagacttggcaagacagatactatacttgaaaagcaaacctggcactttctgaaaagatagtgaagaatacactagagcaataaatgacatggagccaatgcaagagatttaggtaacgagtgttcaacaggatctgccagcaggcttctcccccaggtagatgaaacacatggctcttttgggtccctgctcacgt

SEQ ID NO: 813619 - DNA, 519 bp, Homo sapiens
gatatgcaaactctgggtccaaatcaaggctctaaacttcctatctgaataagtactttatttaatctccggtgagtcctgttattctcatgggtaaaatgaaatagtgtaatacctaccttacagcgttctatataaacaaggcactcagcacaatgcccataacataatatacactcaataaatgttaggtaagtagcagtaataataatagtacccactatgcgggtaggaatacagagaaagcagtgattttacgaaatgaagaagacaatctccaaattcactaactacaatgccatctccatcatcttttccaatttttcaccaataaattctgctttatttttatgatctctaaggacttctaaaatcacaaattgactctactaactccagcagctagamcctttcacaagctgcttcctttccctcttgtccatagctccataaggacaacgatttgccctatttttgttcactgctatatcccccatacttataaaagtgcctgccaca

SEQ ID NO: 813620 - DNA, 631 bp, Homo sapiens
aggaagtcaaaatgccctgtaatttayggatttttatgagatttttgttttaatctaaatcaaccttgacaaaatggcaccaagaaacaaggaatttaaaagatccattctgagaagttgtgaagaaacttgaatttaaatcaagaattgaaacatttacatggttaatctgtgttttaatgctttatacctgacacctaaatcacactaaaattgtttgggggataactcaaaaaaaaaaaaaaaacctttcaaatgaaatggttgcagcctcaaggattcagattgtttatatgtaaggaagcaattgtaaatagcatataactaacaattgctcccatcgtggctgaatattttgacagataaattcaatattctagttccaacggcaaattgtcccagcagctaagtttttaattgatttcaaaacatctaaatttgtagactaaatgtgatgactgactatcatacaaaaggcaaataaatactaacaacagacactacaagccaaaaacccagcatatcaagcaacacaaatatataaaataacagaataagccagtcttccattttaaaaaaaaaaaagtctaagaatgaatatagagagaaacgtaaatatttttcccctctg

SEQ ID NO: 813621 - DNA, 626 bp, Homo sapiens
agggacaggaacactcccatggccactgaaaaagacatgtccaagtgaccagctggttgacatcacttttggtccataaaggagccaaagcacagctrtctttctaatgccctacctatttccagaaaaggaaaaaaaaaaaaaatcacaacttttgggtcaagtccaaggtcacaactgaaaaagtaattaccttagctacaaatgagaagttaaaataacagaaaataaaaacatgacctagcataaagagtttgaaatctaaaatagcaaatcaaagcacagccaggaaaataaaccagtgaggtaatgggttctgagcacatctaagcttcatggtatttgtttttaaatcaatagaatacataaagcaatactgtatttcttctgataggtctgacccaaagtgcatgagggaaaaagatacagcatttggagaccactatttaaaatggcctttctgaaaacactcttttcagctcccaggatctgaacattttctcaaataaaactgttattaaactaaaaggtcagtgtttcaggaagggctagtttaagagaagcacaagaaaggccaactttgcctattagcacagtgagtttccaagcaaatctttgggaactgg

SEQ ID NO: 813622 - DNA, 589 bp, Homo sapiens
agaggggtgcaggggcagctctggcttgccaattagcctgatgaacagctattagcttttttaaagatttaaatccatttggtgctctatttagattawagaaagcattttccacagtaagagttaatagaagttagcatctgggatgtttaagtaatgaatttactaattttcttgggcataggacacgtgaagccagaatgtgtcacccgtgggtggccaatttaagatctcatgaatattgagtgtgttgagtgccctgtgggtgttgagtgcatcatggatatttgatgccttatcgtttcttccccccttcctacctgccggtgatactcttgtttcattctttttaaatctctgttcaacgtacgtatattctgtatactctgtgtttactatgcatgtttcaccagctatttgcttctgtaagtagcttctgtcatgttttacatcagaaccgaatattcttaaaccatctggccagcacacagtacatggagacactgggaaaggctgctgcaggtgtttgacccagacttcatcttctgacatattcttgcctctccttccagtcaccactcttctggat

SEQ ID NO: 813623 - DNA, 589 bp, Homo sapiens
agaggggtgcaggggcagctctggcttgccaattagcctgatgaacagctattagcttttttaaagatttaaatccatttggtgctctatttagattaaagaaagcattttccacagtaagagttaatagaagttagcatctgggatgtttaagtaatgaatttactaattttcttgggcataggacacgtgaagccagaatgtgtcacccgtgggtggccaatttaagatctcatgaatattgagtgtgttgagtgccctgtgggtgttgagtgcatcatggatatttgatgccttatcgtttcttccccccttcctacctgccggtgatactcttgtttcattctttttaaatctctgttcaacgtacgtatattctgtatactctgtgtttactatgcatgtttcaccagctatttgcttctgtaagtagcttctgtcatgttttacatcagaaccgaatattcttaaaccatctggccwgcacacagtacatggagacactgggaaaggctgctgcaggtgtttgacccagacttcatcttctgacatattcttgcctctccttccagtcaccactcttctggat

SEQ ID NO: 813624 - DNA, 497 bp, Homo sapiens
tgatgagaaatagaatgcatcgagctgtggggagaaaaatttmtctaattgagtaattcaaacactgcctcagaagggagtatttgttaataaaaagctgggaaaacagttttattatctgcacatttcatacaccttaaatattaatatttaaatcctgattagtgctgggcgtggtggctaaacctctaatccaagctacttgggaggatcacttgagcccaggagctcgaggctgcagtgagctataattacaccactgcatgcctgaaaacaaaaaattcctgactagtttagcagctatcacggtattctaggggcacagaatgttgctctgaacttgaggtcacaatgcaataatgtcactgaaaaaaattacttcttttttccatctgggtgtacacttacatggatatacacttctgatttatgtactttgtgatattatgcttcaatacacatagcaatcagttgggaatttaagtattcataagatc

SEQ ID NO: 813625 - DNA, 522 bp, Homo sapiens
tttcacaacattattttgacacttgactctattccagagttgttgctatacaaggcatgtggcagaacaaaaaaaaagctggtgttgatataagagctttttacccagtattgacagtgagcaactttctttctttttttttttttttcttttttttttttttgagatgggttcgctctgttgcccaggctggtgtgcagtggtgcgatctcagctcactgcaacctccacctcccgggttgaagcgattgtcttgcctcagccttccaagtagctggaattacaggtgcccgccgccacacctggctaatttttgtatttttagtagagacggggcttcaccatgttggccaggctagtctcgaactcttgacctcaagtgatccacctgccttggcctccytaagtgctgggattacaggcatgagccaccacacctgtccgacagtgtagcaactttctaaaactgaaaaatctcaaaggagatcattggaactgacttgttcatttattttttgtttt

SEQ ID NO: 813626 - DNA, 357 bp, Homo sapiens
aacaacggaaatttaatctctcacattcaggaggccagaagtctgaaattcagttgtcagtagaggccgggcacggtggttcatgcctggaatcccagcacattggaaggctgaggcaggtggatcacttgaggtcaggagttcaagacaagcctggccaaactggtgaaaccccatatctactaaaaatacaaaagttagctgggcatggtggcagacacctgtagtcccagctacttgggaggctgaggaaggagaatcgcttgaacccgggaagtggaggttgcaatgagccacaatcatgccactgcactccagcctgggtgacaragcgagaatctgcctcacaaaaaaaaa

SEQ ID NO: 813627 - DNA, 560 bp, Homo sapiens
agtatagaacaggagctggacatacataacttcaaacgagcctcacgccaaccctgcaaggtagggttattactctcctttatagaagaggaaaatgagagccgggcacagtggctcacacctgtaatctcagcactttgggaggctgaggtgggcagactgcatgaggtcagaagtttgagaccagcctggccaacatggtgaaaccccgtctctactaaaaatacaaaaattagccaggcatggtggcgggcgcctgtaatcccagctactcaggaagctgaggcaggagaatcacttgaacctgggaagcggaggttgcagtgagctgagatcacaccattgcactccagcctgggcgacaagagcgagactctgtctcaaaaaaaaaaaaaaaaaaaaaaaagaagaggaaaatgagactgagacccaggaaggagagacatattgctagtgacaaggctgggrtagggtagctctgagcagccaggctgccctgtcaatgcctctctccaggcggatctgggaggctggatttatcttcaaatactttcagcatc

SEQ ID NO: 813628 - DNA, 560 bp, Homo sapiens
agtatagaacaggagctggacatacataacttcaaacgagcctcacgccaaccctgcaaggtagggttattactctcctttatagaagaggaaaatgagagccgggcacagtggctcacacctgtaatctcagcactttgggaggctgaggtgggcagactgcatgaggtcagaagtttgagaccagcctggccaacatggtgaaaccccgtctctactaaaaatacaaaaattagccaggcatggtggcgggcgcctgtaatcccagctactcaggaagctgaggcaggagaatcacttgaacctgggaagcggaggttgcagtgagctgagatcacaccattgcactccagcctgggcgacaagagcgagactctgtctcaaaaaaaaaaaaaaaaaaaaaaaagaagaggaaaatgagactgagacccaggaaggagagacatattgctagtgacaaggctggggtagggtagctctgagcagccaggytgccctgtcaatgcctctctccaggcggatctgggaggctggatttatcttcaaatactttcagcatc

SEQ ID NO: 813629 - DNA, 632 bp, Homo sapiens
cacagggttgtggtgaggagtggaagagctaatacgtgtagagcttttagtaccgcgcctggcgtatagtgcatgctgtgggagcgttagctagcatcaccctgctgtggcccctgaccaggtgttttttttttkttgttgttgttgttccctgctactgacacccttcccaccaccttcacctccttaggcagctctcagagggcccttggcctgatgccaagtccttaatcagggcttttttctgttgaacctcccctgggtttctcctggctgcagcctgtgcacctggtacttccactccaagggattcttatttacctttctcaaacttgtggagaacggctttcctctttcctgttttcctttatctaaaggggccttcagcagatttgcttaggcctttgggtgttatgcctcctctcattcttctatacttttgacttttttccccaagatgcacacatacctttgggatggctagaccatggtaggttcaccttcagttgccaccccatccctgaaaacatgatccccttctgacttttatgcctgtggcttactctggctcactcagctagcataagctttgatggtggatcctctcctgaagtccttgctcttctactcct

SEQ ID NO: 813630 - DNA, 451 bp, Homo sapiens
tcaaggttgcagtaagccataattgcaccgccgtactctagcctcggcaacagagtgagaccctgtctcaaaaaataaaataaaataaaataaaataaaataaaataaaaagagggtccaaatagttttctgtatataaactaggcttctaggcttggtgcggttgggatccattagttaatggcttaatgatgatatctcttgtaagtgatttctgaaaattggaaacaaatggaatgattcaaaactgagaaagagacaactatttatttacatgtacttctcactccgaagcccggacactggtaaagtatttcattgtggggaatgagatgcattttcactttgwactgctcagcagatgcccctatgccttctatcctaactttcccaaggataaaaagtatctaaaaattaatgtcatttcttttctctttttcccatacttttt

SEQ ID NO: 813631 - DNA, 554 bp, Homo sapiens
ttggcacctgcctttaccactgagtatgggctctgggattggacacatctggattcaaaccctaacctcacctttcttggcatcagtttcctcatctgtaaaatgggataatggcagcatcttcatcttaggtttgaagagttaaatgtgtatagaatgcttagcccagagcctggcacactgcaggcgtttgctcactgtttgttatctataattattgtttacctactgtcatgctagtgctaatatatgtttattaaatgagttgggagtgcctgatgatgaccggcttagcaggctctactggcagagtgaccgttcgcgacttcatctccctgggagacggtggagattggctgaaggcgcctcatcccttggcagggtgcccactctgctctctccctcctccttccccatgcaggcctcatagctggaccctccagcatgcaaacmctcactccactctctcatgcaaccaaaaaataaaaaataaacttggctttgaatccaaggccagtgggtgcttttgatctcggttacaaagcaaggcaatt

SEQ ID NO: 813632 - DNA, 600 bp, Homo sapiens
gctatttgtgtacctgtttgtgtttgttttctcacacactaagtaggaactagtgaaacatgctcagttattcctgtgaggttatttatgtatcttttcttttcatgtattaggttcatacaaaagtatttgyggtcgttgccattactttcagatgcaaaaaccacaattacgtttgcacgaacctgatatttgtatcccaaggaatcagacccgaaaatcttgtgttcaggttgtaaatggttcaatgtcttcctgccttttggtacttcccagttttttaaatgaggtatctatttataattacaataattaaaaacctcaagttgacagagtgagactgtaggttgttttaatatccaaaaacaatgtcatcttaatagaattaaggacaaaaactacatagtcatttaacagacacaaaaaaggcatttgattaaaaaactaacacttctttgtgataaaagtcctcaacacactaggagtagaagaggagttcctcaatctgacaaaggacatttacaaaatatgtacagctaacattattctaaatggtaaaacactgaatgctttcttctaagattaggaagaacacaagga

SEQ ID NO: 813633 - DNA, 644 bp, Homo sapiens
aaacctatctccaggagggctcgaatttgtataggtagctgatcaaaatcagtagaaatttaccattcagcctaaggcattagatttgcattgcttctactgtgaccttggaaacagaaaacaggtgaggtgtctttctttctaggtcctcctgtcaatcacgttgagatcaagtcaccccaagggctcccttctgcctcattaccattctaatttgccttattggatccacctagggtagggtctttttttttttttttttactctaataaaccaatattttagattaagggaaaagagaaatggggtaagaccagcttatcttagtgaccaaagaactgaaaaaatgagaacactggaaagccaagtctcactgagtctgtcctgttcagcaggacatctatgtctgaggccttggcacccttccaggaaaaaccagacatggggtgcaaaaaaagagcaacaggcaagaggctctaccaaaataataagcagagagtagtgagtggatccaccttagccagacataytttaaaataagaggaagtgcagagaaaattcctcttccagcctggccaacgtggtgaaaccccatctctactagaaaacaaaataattagccaggcatcatggcacgtgcctgt

SEQ ID NO: 813634 - DNA, 625 bp, Homo sapiens
gatcatctttctaacccagtgattctcgagctcaggtgcatggcagaatgcctggagggtttattaaaaacactgattcctaagctccacctaagaccgattgaatcaggwtcttttagtgtagggtgcaggaatttttttttataacaacttccccaggcgatttttctgccagtctatagaatggcctttggggatctctttatcttttaccttcaagttaaaacacatcactctgaaacttcatgagccagatacgaatctaacctatattcaaagaggtttagaaaaagataccttcaacctctctcagcacaatttttttttctattaagctcccttttcaaaatacttgaactccacctggacctaggcaaaatgttttaaaatggcatcagagtgaatcaaatcacattaacctgagatggtgggcaaggatcatgaaaaaggacagagggaagcctgaatgtgagtttgcctgaagaggaaatgatgattccaataagtgccttttctttccgtttgcattctgtgcgtagctaatccgctcggcataatcctcttaacggcatgtgttccatcagtattttatctgatctacttctctgacaatcctatgtttgct

SEQ ID NO: 813635 - DNA, 547 bp, Homo sapiens
caagagggtgcctatctccagcatggctgtggggtcgccctgctccatctctggatcttcagcctagagtgcagcccagccaaacaagagcgatgacctcactgaccacatgtaattctgcttgagggatttattttcttccatgagctcctgccaagactcttggttaaagctaatggggctcccccagccagtgagtgtctcctagttatatgtgtaaacaacgccaggcaggaaataggtttcctgttcttaatgggcttgttaaacctcttatcgagtggggtttaaatggctttattatgaataataataatagtaaataaacattattattattagtagtagaaaaattatgatgtcagccctgactaccccttctcattttaatcttgccaacgtggaggtctttggcctctaagtgcacaggaatatggtgagtgacactgggacttataactggagaagatggcagaattcatcttcgttgcctgcagctttccaatcctgagccyttttccactttcatcgtgtttccatctccatc

SEQ ID NO: 813636 - DNA, 577 bp, Homo sapiens
gcccctctgttacaggatggtggctcactgcacggaggctggtctactgcctgccactctcaggctgcaggaccactgcccagcaaggcaggccagaagtgccggggagttattcccaggagcaaccctgaaccatgagcgctggagtgggtggatcaataccgcagcttctttggccctggcagggggaatagttcacagaatgttccaggctgtctcccagagatgccctattcggctgagctcagatgctctcagctctacactgcgcattcatggccctgtgttggttgcccactttccagtctctccctcccaactactgtttcccagaatcacctccaaataaaccacttgccccaccttgtcaatggagggtctgcttctgagggacccagcctgaggctgcccgtttcctcctccatgaggtaggggtgataacaacaggacccggctgcagatttgttgtgggttgcagtgaagttgagataacacgaacactattcccacgctgygcaaatgcttaagagcctgtaatcctgccagcagcgctgtgtagttggagatgcgcaaaaac

SEQ ID NO: 813637 - DNA, 638 bp, Homo sapiens
tctcttaaacaaaaaagaagtccatctttgccccagtggtttgagatgcctttatcatacactaagtttcctggagtatttgagcctatttctggactcactattctagtccaytggtctgtctattcatgcacaagccacacactgttttaattacagagagtctttagagtattcttgtagggtcagaccctttgtagctttttctcttcaaagttttcctgctattcttgcatgcttgattttccatgtgaacttgggtcagcatttttagcccaataaagaagcatattgatatttttattgtggatgggtcaaatgtttaaattatcttagggagaactgacatttttatgatgttgagttgtcctattcaaggacgagggatgtcttccatttgttcaaacctacttttgagtcttttaggaggttattttaaagctatcctaaataggctttgcgcatttcttgttaagttgctttttctgtccttttgaattttttttgttgctattgtaactgaggtttttctctaccattagagtctctctctctttctctttctattttttaaaaaagtagagacagagtccccctcgcccgttgcccaggttggtcttgaactcatgggctcaagc

SEQ ID NO: 813638 - DNA, 651 bp, Homo sapiens
taattataattgttatgatgttaatttattatatgccacagaggtatccacatttcctagtcaatgatattaattctttaaccatgactgctctaagtctttctgtcatccatagacaattgttgtcttgcttttattctcttcaaaaggtggtttataatcagctataggactctgatgagtactcttaaatgcagagaaaaagaaaacagcatccaagactcttggaaaactaacacatatatatcaagcaaaacaggaattaattgcatagactgaactaataaaagactgaaataatcttttatgactttttgcttaaaatgttgttgatctttctgttttgtttttcagagtcaagtaacccccccttcttgagctatttacagcttttaacaattgagtaaagtacgctccggtaaggattataaaacaaagttttgtccaaaaacaaaatttggaatatgtttttttctctttacctgatttctgcagaatttggaaactatttgtgagtgttcttaacttacrgcaatatagttatttgcataagtgcagtaagaatctgtttttccttctttcttctttttttttttttgtaacaggacacaattggagaaactggttatttaacaagggtttgactggagg

SEQ ID NO: 813639 - DNA, 502 bp, Homo sapiens
acgatgctagcttgaaatgggtcatggtggcaggatatatactgctagaaattggcagatgttgcagtttgccaatttctagttaaagcatttaaaaattcttacaaaacaaagccttcattagaaatgcggcttgggtgggggctgggcccagtgaaggaggcactttgggtgtggccccaggctcacaagttcccctcttctccagggacccctcgccactgcccacccccaaaacctcagccccttaccccacccttgggctcatctctctacctcattctgggccctattggatggttgacggctccaagggaggccccaaccctagcagggccagcttgagtcctgctctgcagatttgggaagcaggaccrcagccaggagctgatggagccgagtgcattaggaggtgcagccagggatcccaagcacagcgggcgccaaggtgctggggctaccctggcttttccttcctgcaggtttggttggggctctagcc

SEQ ID NO: 813640 - DNA, 493 bp, Homo sapiens
ccaggtgatgtccccctgcctccctcccggcccctgtggaccagccagagggctgggagtgaaagtcacagrgaagactttcagctctgactcagttcccccagcagtttctgcctgaactcccatcccccaactttgtcttagaattcccctagggaggggttgggcccagctctcatggctcctggctggaggaaaaagcggtccccagtcccaggtcagctctccttcccaacccattcaggggaggctagggactgctgtgggatgaggggcttccctgggctctgtgtgctgggcccccaacccggagaggtggagaagggatgggtggatagcctgggtgcccggagagggtacgggatatggggtgggacaggcgggagccccctcctgacctctgtggagtggggcccatataccgggggaggcagccctgtgttgcgtgctcatcaggaggcttgtggagtaagtggggacagaagggtcccct

SEQ ID NO: 813641 - DNA, 335 bp, Homo sapiens
agaggctcaagagagagaagggaaggggagtgagagctcgagtttggagccgctggagaagggggaacagcgggggaaawgcccaacgctcaggagccttggaagctctcgagatggaagagcaggagggagggaaggatgctccacctcctccacatctcttgactcacctgctcctctcccctctccccctgcccctctgactgaggctaccctcatctttccctggaagctccctcctcatctccctgcctccccctttgcctgctccaaacacctctcctggaagcagtccccttatcttcccgaagtgaccatgtgctcactttctcatt

SEQ ID NO: 813642 - DNA, 556 bp, Homo sapiens
cctatgtctgcttcatactacagtggcggagttgagtcatcgtgacagagaccatgtggccccataaagccaaaaatagttactatgtggccttttacagaaaacatttgctgcccctgccttgggtggcggggcatgtggagaggctgccatccttcccaggtcatcccggtggcctcccccttcccctgcctgaagctgctagaagtttcacccctgccctccttcccttgcagtctcagaaactgaccacagttgacatcgtcaccctgagggtgctgtgccgtgagggggtgcgatggagggtgatggccatccaggacttcaagccctttgagaaccgtgagtgaggaagccagggtggggctggggcagggctgggcacctccttccttccacctcctctgggatcttccctgctccagcctytctccccggcagcttccacacccacatctgatcacctcaccgcccgctgttctcgggatgacgtcctggctccttcctctggcattcaaggccgctcaggatccagccctgggcctcctccctggca

SEQ ID NO: 813643 - DNA, 542 bp, Homo sapiens
ggaggatactcctactgaaaggaagggcagaaaagaggaccgtggtccagaagctagggaaaagagtgcgtttgaagaaagtggggtgtagtctaccatgttaaaacctacaggcttgctgggtgctgtggctcacgcctgtaaccccagccctttgggaggccaaggtgggcggatcacctgaggtcaggagttcgagaccagcctggccaacatgacgaaaccctgtctctactaaaaatacaaaaataagctgggcatggtggtgcgcacctatagtcccagctactcggaaggctgaggcaggagaatcacttaaaccggggaggcagaggttgcagtgagccgagatcgcaccactgcactccagcctgggcgacggagcaagactccatctcaaaaacaaacaagcagaaaaacctaccggcagatcaaggaggataaggcctgggaarcatccatggggtggagtgctaggggatgcttggtgagtgtgatgagggcatttgatgggtggagtgggagccaggtctcagggatga

SEQ ID NO: 813644 - DNA, 388 bp, Homo sapiens
cattttcctaatgatgagtgacattgagcatctttccatgtgctgttggctatttgcatattttcttcrgagaaatgtctatcaagtccttgcacatttgttaattggggtttttgttgctgctgagttctttggatagttttggtttttctctattattatgttcttaatttcattgagttatgcttcatctttattatttcttttcttctgcttgcattgggtttcattaccgcttcttttcctagtttcttaaagtgaaaatttagataagttatccaagacttttttcttttctaatataagcacttaatgttataaatttcctctgtgcacgacttcagctacatcacacaattttttttttttttttttgagacagagtttc

SEQ ID NO: 813645 - DNA, 388 bp, Homo sapiens
cattttcctaatgatgagtgacattgagcatctttccatgtgctgttggctatttgcatattttcttcggagaaatgtctatcaagtccttgcacatttgttaattggggtttttgttgctgctgagttctttggatagttttggtttttctctattattatgttcttaatttcattgagttatgcttcatctttattatttcttttcttctgcttgcattgggtttcattaccgcttcttttcctagtttcttaaagtgaaaatttagataagttatccaagacttttttcttttctaatataagcacttaatgttataaatttcctctgtgcacgacttcagctacatcacacaawtttttttttttttttttgagacagagtttc

SEQ ID NO: 813646 - DNA, 668 bp, Homo sapiens
ggagaatggcgtgaacctggcgggcggagcttgcagtgagccgggattgcgccrctgcactccaccctgggcgacggagagagactccgtctcaaaaaaaaaaaaaaaagatatatacacagaaaaacttgtacatagatgttcatagtagtattccaatacacatgcccatcagtagatgaatggataagcaaaacgtggtatattaataaatgaaatattatccagccacaaaaagcaatgaagtactgatacatgatccaatatggatggaccttgaaaactatactaaatgaaagaaaccagccacaaaaggccacatagtacatgattacatttgtataaaatgtccagaattagcaattccataaagacagaaagtagattagtagttgccaagggctgagggaaggaggaatgggagtgactgctgctaatgggtacagggtttctttttggggtgagaaaagtgttctggaattacataatgatgatagttgtataactttgtgaatatactaagacacactgaattgtatcttttaaaaagttaaattttatggtacgtgaatgatacctcattaaaatagttacatgagaaaaaaaggcaaaatacagggtataattcaagaattttaatttttaaatataaagtatttatagccaaa

SEQ ID NO: 813647 - DNA, 478 bp, Homo sapiens
gaaacacaacaaataaaaatgtgaatccttatggaaaaataagggttggcacaaaatggggtgatgatgatgcttcggtcaaccttacctgcacacaatggtctactggaaagggcacagatayggcaactcatcccccaatccagcatgtaggttctctccactctgcctacactatcccatcaagagaacgagctactcacttgaccaggactcatctggagcctgtttcaataggctaccaaggagaacagatgttaaagaagaaaccttcaccaacttcccagtagtcaaatgcataaaatgttcttcttcttggctcctaagtgctcctacagaatttctataccaatgatgaaaatattaaaagtataagatgtcctaatgtgtcttaagaaagatcaatcttaacactgaaaatgttgtgaactcgtaaccaagtttcatttcttttttcctccatggaaatctctcctgg

SEQ ID NO: 813648 - DNA, 478 bp, Homo sapiens
gaaacacaacaaataaaaatgtgaatccttatggaaaaataagggttggcacaaaatggggtgatgatgatgcttcggtcaaccttacctgcacacaatggtctactggaaagggcacagatatggcaactcatcccccaatccagcatgtaggttctctccactctgcctacactatcccatcaagagaacgagctactcacttgaccaggactcatctggagcctgtttcaataggctaccaaggagaacagatgttaaagaagaaaccttcaccaacttcccagtagtcaaatgcataaaatgttcttcttcttggctcctaagtgctcctacagaatttctataccaatgatgaaaatattaaaagtataagatgtcctaatgtgtcttaagaaagatcaatcttaacactgaaaatgktgtgaactcgtaaccaagtttcatttcttttttcctccatggaaatctctcctgg

SEQ ID NO: 813649 - DNA, 643 bp, Homo sapiens
cttcgagaccaacacactccggcgagactgacatgatggctgcctaaaccaaactcactttttctcatcatgctsacatggccccataaagcaacagacaggaaagccagcccaccggccaactggagtcatgggtcagatgggccatgaccttggtttagtagcagattctgtcctgcagttggttatggagccccgcacgaccccagttcttgaacagttctgaaagtagtcaagggctactttccccccatgggtatgtcatgggactcgaacccagtgctctatccttagcctgcatcgtttataaagcattccctcagtcatcgtctcagtcctgaggaaactgacggagatcccagatgcctggctgccctcgcgttggtcacctgcttggcatcttcgatggtttctgctcatttcacttgctatcaatcaggttctgagaagagtttcaagaacatgcaccctgatggccagcccagaccccatggccgtgacatgcccctcactgcctggcccagggtttgttaaagatataagaagctgttggaaccagctgtgaattttaaatacaggtacgaagtgagattaccacaggtagcttcttaatgctttctctaaacccatccttaaaactctt

SEQ ID NO: 813650 - DNA, 627 bp, Homo sapiens
cttggagtgtgagggccatgtttcccaccatgtggaccagagcagaggaagaggctggtctgcagasacagaggaagacgcccagggaggggcagagaccacagccagaagaagcgccctcacaggctttgaatttcaactttcaaccattcctgaggtcccactgcacaggtgacatcaggattcatagttcactctccttttgcttacaaggagagttaatttggagagttaatctgttccatgatttgcagatgccactgactggcaaggatgcttgccaggaattatcttctgcatttttgctctttccctgtttgctagtgaaagactgtaaaaacaattaaaatgataatttaacaacataattaccagttgctgggaatttactatgaactagtgagtgctttttgatcattatctcattcagcactcttaccaagtctatgagaaaaatattgttcctgtgttacagatgagtaaactgaggcataaggaagctatatgacatccaggttcacagggctattaagaggaagacccggctgcatgtggtggcacacacctgtaatcccaagactttgggaggctgagacaggtggatcacctgaggtcaggagtttgaga

SEQ ID NO: 813651 - DNA, 626 bp, Homo sapiens
tgcccctcaggagggtctcaggcgaccttcttggaaggtgtgaccacttgaaaaggacgaggaggccaggcgctgtggctctcgcctgtaattccagcacttagggagccgaggcgggaggatckcttgagtccaggagtttgaggccagcctgggcaagattgggagacactccccaccccgccccatttctacaagtaattaaaaatttagccgggcgtggtggcgggagcaggagccactcaagaggctgaggcaggagtatcacttgagtcctggaggtggagactgcagtgagcggtgatcgcgccactgcattacagcctgggcgacacagcgagacctgtcaatcaatcaatcaatcaatcaatcaagaggaggctggcgggagcatgctcgtgaccaccgggggcgacatagaccctaaccctaagtccaaccccaaggcagaccccaccgtcccgccaggcgcactcctaagagcgcggcttccggagcaaagccgctgacccccgcccccagggtcttggcgccgattggccaacgagagcgcaggcggagccaaatcttaaaggatccgggagctaagccagacccgggtggcggtggcagctgcgaaacccagg

SEQ ID NO: 813652 - DNA, 612 bp, Homo sapiens
ctatgggtccagggtactgccatatgtgcacaggtccccaccaagaggatccccttggcctagaggatggagtgtaaggaacatggctgtgctgyagccaagcaggcatagggcagcaggcataggccaaggtaaacagcctaaatgactcagagggattggggtgcacgcgcacactcccatgtctcatacaatcatagccatgtagacacaacatagagaagctccccacctggctctcagtcactaatgtctgtgtaggtataaatgtaacactgaccctgtgaggggctgctgaataaagccatgtctcatctacctgctgtttcttgagtgttcttccactttcctgcccacatccgcccatacccctcagccctcagctggcgctggaacctggccctgagcatgacagagaggctgaggcaggaggattactttaacccaggagatggagaccagcctgcgcaatatagtgagaccctgcctctataaataataaaaaaaaattagccaggcatggtggcacatacctgtggtcccagctattcaagaggctgaggtagaacaattgcttgagtccaggagtccaaggctgcagtgagccgtgga

SEQ ID NO: 813653 - DNA, 551 bp, Homo sapiens
tttctgacctactttcagaggaaggtcagctaggttttatggcctgcttcagggaagaagtggaaaagaaagtgagagagagagagagagaccttcctgcttttgctgttttctgaaatgccatgtgccatttttcagaatagcatgtcctgaaactcatcaatctcttaacaataaaaagctccttctccagaagcccctagtaaactttttctgctgtcttactaaaccaaccaggcaaggcgggcggtctgacatcatgactagatgaaatcagaggttctccgcatggttcctaaaccagcaacatcaacatcacctgggaacttactaaaaaacattctcaacttcacctcacacctactagagggatggtccagaaaaaaaaataggagtgtgtgtgtgtgtgtgtgtgtgtgtgtgtgtgtgtaacaatcccttcagattattctaatgacataagagtytgagaaggactgggttgaataatcaggacctcccttacagctcagatcaattagcctctcttgaggcacatgggctgcatggag

SEQ ID NO: 813654 - DNA, 633 bp, Homo sapiens
aaatatcggtgctcaaaagtctacaaatgttrtaccactatattataattacctctatttcctttgacatttgagtttccttatttttaaaaatgtggaacaaatctggaaagatagtgatataaaagcttatctgtactgatctacctctttgacaaagataatgagatgcaaggacatcctttatgtaataagaagtctcccttggccatcaaggcttaaattgtcctctcctcctttcccctgtcggaacataaagctgttgcaaacacttgagaggagaagaaaagaaggacatggccctatgtttctgatgggaatacggtagattaatagtgcagcttgcgtgactgtggagcgagggtcccgtctcacatgtgaaactgatctggcaggtgaattagtcatgggtcaaggagatccttgtgtctcaactggcccaattaaggtgtggttgagatgagacagagagagagtgaaggtaaatccatttccgtaaacggccagacctcttaaggattcccattccatgccacttttccaaaacatgatggagtactgcatggctaagactaacctgacctttaaacctatcgaccaagggcagagtgacttcaactccacctctactaa

SEQ ID NO: 813655 - DNA, 589 bp, Homo sapiens
tcacattcttcatagggaatgaatagtgatggttttttctgttattcactaacccctgtttatctgagagataaattaatcagagtaagggatgkcaggacacgaagagtgctctactgttcctttactgattgctagctttgccattaaccacctaatccaaggtacagggagctaggagagggttttactacagcagaagagcagatctagccagaaacagaccatgaaacaaacaagcaaacagaaaagcaaacactccctatggcaagatgaaaaactgaaacatagacaaccccctttactgtctcactccatcagtgtcttattctcaagaattgattagtcagatctctctgggaaagtagctgtagtcaggagtagaggggtagtttaaatcttgtagcccaggaaacctgccttgcctttcctgatgcttgggtcagtcttgaacaggcaaagagcactttgtggagtgaatgatggcaactggaatgaaggagactcatcatctctagccagtgtaattcagctttgcattttcagttttctctgatcctctttttatttgtaagcactggcataataa

SEQ ID NO: 813656 - DNA, 589 bp, Homo sapiens
tcacattcttcatagggaatgaatagtgatggttttttctgttattcactaacccctgtttatctgagagataaattaatcagagtaagggatggcaggacacgaagagtgctctactgttcctttactgattgctagctttgccattaaccacctaatccaaggtacagggagctaggagagggttttactacagcagaagagcagatctagccagaaacagaccatgaaacaaacaagcaaacagaaaagcaaacactccctatggcaagatgaaaaactgaaacatagacaaccccctttactgtctcactccatcagtgtcttattctcaagaattgattagtcagatctctctgggaaagtagctgtagtcaggagtagaggggtagtttaaatcttgtagcccaggaaacctgccttgcctttcctgatgcttgggtcagtcttgaacaggcaaagagcactttgtggagtgaatgatggcaactggaatgaaggagactcatcatctctagccagtgtaattcagctttgcatyttcagttttctctgatcctctttttatttgtaagcactggcataataa

SEQ ID NO: 813657 - DNA, 554 bp, Homo sapiens
tcctaggggtcatttagaaacccaggctcggccgggcgckgtggctcacgcctgtaatcccagcactctgggaggccgaggaggccggatcatgaggtcaggaaatcgagaccatcctggctaacacggtgaaaccccatctgtactgaaaatacaaaaaagtagccgggcgtggtggcaggcacctgtagtcccagctactcgggaggctgaggcaggagaatggcatgaacccaggagggggagcttgcagtgagccgagaccgtgccactgcactccagcctgggcgacagagcgagactccgtctcaaaaaataaaaaagaaagaaaagaaaagaaaagaaatccagcctcctcctgggtgctgcctgatggaacttctgtgatgacggaagtgacctgagcaggtgctgtcccatcccgtggccaccagtccctgtggctactgggcatttgaattgagctagtgcaactgaggaaacaaattttaaattttgtttaatttgaattggttttaataaagtggcacatggggctcgtggctactgtactg

SEQ ID NO: 813658 - DNA, 554 bp, Homo sapiens
tcctaggggtcatttagaaacccaggctcggccgggcgctgtggctcaygcctgtaatcccagcactctgggaggccgaggaggccggatcatgaggtcaggaaatcgagaccatcctggctaacacggtgaaaccccatctgtactgaaaatacaaaaaagtagccgggcgtggtggcaggcacctgtagtcccagctactcgggaggctgaggcaggagaatggcatgaacccaggagggggagcttgcagtgagccgagaccgtgccactgcactccagcctgggcgacagagcgagactccgtctcaaaaaataaaaaagaaagaaaagaaaagaaaagaaatccagcctcctcctgggtgctgcctgatggaacttctgtgatgacggaagtgacctgagcaggtgctgtcccatcccgtggccaccagtccctgtggctactgggcatttgaattgagctagtgcaactgaggaaacaaattttaaattttgtttaatttgaattggttttaataaagtggcacatggggctcgtggctactgtactg

SEQ ID NO: 813659 - DNA, 554 bp, Homo sapiens
tcctaggggtcatttagaaacccaggctcggccgggcgctgtggctcacgcctgtaatcccagcactctgggaggccgaggaggccggatcatgaggtcaggaaatcgagaccatcctggctaacacggtgaaaccccatctgtactgaaaatacaaaaaagtagccgggcgtggtggcaggcacctgtagtcccagctactcgggaggctgaggcaggagaatggcatgaacccaggagggggagcttgcagtgagccgagaccgtgccactgcactccagcctgggcgacagagcgagactccgtctcaaaaaataaaaaagaaagaaaagaaaagaaaagaaatccagcctcctcctgggtgctgcctgatggaacttctgtgatgacggaagtgacctgagcaggtgctgtcccatccygtggccaccagtccctgtggctactgggcatttgaattgagctagtgcaactgaggaaacaaattttaaattttgtttaatttgaattggttttaataaagtggcacatggggctcgtggctactgtactg

SEQ ID NO: 813660 - DNA, 554 bp, Homo sapiens
tcctaggggtcatttagaaacccaggctcggccgggcgctgtggctcacgcctgtaatcccagcactctgggaggccgaggaggccggatcatgaggtcaggaaatcgagaccatcctggctaacacggtgaaaccccatctgtactgaaaatacaaaaaagtagccgggcgtggtggcaggcacctgtagtcccagctactcgggaggctgaggcaggagaatggcatgaacccaggagggggagcttgcagtgagccgagaccgtgccactgcactccagcctgggcgacagagcgagactccgtctcaaaaaataaaaaagaaagaaaagaaaagaaaagaaatccagcctcctcctgggtgctgcctgatggaacttctgtgatgacggaagtgacctgagcaggtgctgtcccatcccgtggccaccagtccctgtggctactgggcatttgaattgagctagtgcaactgaggaaacaaattttaaattttrtttaatttgaattggttttaataaagtggcacatggggctcgtggctactgtactg

SEQ ID NO: 813661 - DNA, 508 bp, Homo sapiens
gtacagaatacgcctcctggggatgaactccacacccgcaaatggtgttttcttctatatgatggttccttgcttcattttgttttgtttttacacacatagtatcagcaactagagcccccaagttattcagcagattagactccaaatgacctgacatttcaaatatttagaatcactgtcaaaaagaagcacctgcagaggactcccagacaatgcagtgtaggcctggctggcaccaaacagtggcccggcaggactcttcgggtggcaagtgtttctcctggtttgttgttagtgttctggctttattttgttatgtgggaatcataactgttttgttgcagatttacctttttttttcttttatggtgttcaggtcttgtgtcttgtagagaaataggaaatagaaaatttycctacatcgatgttagtgttttgtctattttccccatgcttatttctagacattttgtgttttctttttacatttaaatctgcaatccat

SEQ ID NO: 813662 - DNA, 502 bp, Homo sapiens
ttacagaaaaaacactttactattagattctcctgcagacaatactgtagccattattattacggtactagtgaagaattyctggttcccttctaaaccccatctcacccggcttacgctgcttaacaaagctcctcaattttagtaaacacgcaaccctgacgaggagaacagctttgaaaaccaagacgtgacactattattccaaatgtaggacatgaaaaatttacattagtgccaaatctataatagaaccactaaaactagtcatgtatcccgttaactagtaatacaatctgatatataactgagctttgcaacttcgtcgagggcacaatccaacttctacaaatgagacgagcttctaattcaattatagcctctcttttcctccattcaagcattttcattccccttatctctttctaaagcattttccccattttttctgcttgtcattcctcaaagtttttggagaaattacaaaaccttaaatcacact

SEQ ID NO: 813663 - DNA, 557 bp, Homo sapiens
aaaccaatctcaagtaggataaatttagatgcttacacctatctcatcatactcaaatcattgagagmcaaaaagagagagaaataattcatttaaatagaaagacaaaaataattcatcgtgtacaagggaccattaatgtgaactgacttctcatctgaaacaatgagagccaaaaacaggggaatagtccatatgctgaagaaaagaaaaaaatgtcagctgaggattctatactcagcaaaactatctcaaaaatggaggcaagataaagacattcccaagaaacaaacacagaaaagttagtgctagaaacctgccttaccagacattctaaagttcttcatcctgatagaaaatgacaccaaacaataacttaaatccataagaagaaatgaagtgcattgaatatggtaaatatatgagttaacatgaaagattattaatatattttcctcatttctttgtttaaattccttgacaaaatatgtgatttttattctaaaaagaattataacattgtatggagagatgtaatatatgtaacaataacagta

SEQ ID NO: 813664 - DNA, 519 bp, Homo sapiens
tcttaagtcattgcttctaacacagtctattggttagatgtcactaaaatgcaaaaatagatatgaacaacaggaaaagcttatgatgttcttggatagcaagacayatcacacagatgttagttgtctctaaagtaataaatttagcacaagcccaatgaaaatacaataaagcattttactgcagtgagaagaactatttaaagtttacctggaagaataaacaaggaaaaattgccagaacaattctaagggagcaataaagaggaaatggttttgccaagcatcaaatatattataaatctttgataactaaagcagtttggtacaagtgcataattacaggacaggctaatggaaaacaaaagagcatatagaaatttagtgtcaattaatggtaatagctcaattggtagggaaaagatgggctttctaataaatattgttgggataactagagagtcatatggaaataattaaaattggatcaatttctcccatcaatgtgaaaagatgctc

SEQ ID NO: 813665 - DNA, 589 bp, Homo sapiens
gaacaattctaagggagcaataaagaggaaatggttttgccaagcatcaaatatattataaatctttgataactaaagcagtttggtacaagtgcataattacaggacaggctaatggaaaacaaaagagcatatagaaatttagtgtcaattaatggtaatagctcaattggtagggaaaagatgggctttctaataaatattgttgggataactagagagtcatatggaaataattaaaattggatcaatttctcccatcaatgtgaaaagatgctccatcttgctcataataagagaaatgcaaatcaaaactatacttaagtacatttctcacctaagaggttggcaatatccaaaatgttttctctagtggtactctaatacattgctaatatacaccatttttccatagaggggaatttggtaatatctagcaaacctgagaatgcatttaccttttgagcaagaaatcctgcttctaggaatctcccaaagctatactggtaaaaatacaaacarcacaaagctattcattgcagcaccatctgtaatagcaaaagactggaaataattcaaatgcctatca

SEQ ID NO: 813666 - DNA, 598 bp, Homo sapiens
cataacaaaatggtcaattagtgttaytgactgattttgtagaaatcaaaggagaaaaaagggtctgccccctaaaatttcaactaatcttggaaaatccagaaacctatttaagatctttcccacctaatttcatttatccgaatctacagaaggcatgaaacatactgcccagctcccaaggaatatcattaattttaaggtgtttcagagttaacaggggtactacattatatggcttaattcaaactacacttataaggtgatgaggcgtgagcttagctgctgtgaccagaaggaccaaaaacattgttcatccaaaagataagatgaaggccaaaaaagaccatcatcatattgaacacacacacacacacacacacaggcgcgcgcgcgcgcgcaatccaaaatcattatattctggtctaataagaaatgttcagttctgtaacggacttaagatttgggatagagaaaggcaactaaaagttatcagtgcaacctcactgaaggtcaactaaagtaattagggctcttctgtttaaaaagacaaaacttaacggggtacacaagaaaatcctatgaaatcatgaaagtt

SEQ ID NO: 813667 - DNA, 560 bp, Homo sapiens
aaatggtatactgtaagtatcattttacgattttcattttcactcttcatggtgagtgggtgaaatttattcatgttgataactttagctctagtttatttatgtcatctgctatataatattctrcttcataaatgcaccatgacttattattcattcttctgcagacggatatttaaacacctttgacttgtcataattacaagtaatgctgcaatgaacatacttgtacttttctgctgccagaatttgttcagaggacataactagaagtacaatggttgggttatagcatgcctgtatcttcaaatttactagatgttgtaaaattacaccagagtgattgttctaattgccactaccataaacagtgcatggcaggaccagttgcctgcatctatgtcagcacttggttttaccacgctttttaagttttgccaaccctaaaagtatgaaatggcatccagttgtggttttaatttgaatttttcctaatcactcttgaggttgagctgctttttatacgtttatttaactgctagttttcctcttctgtgatt

SEQ ID NO: 813668 - DNA, 525 bp, Homo sapiens
aactttggcttttgttgcagttgcttttggtgtttttgtcgtgaagtctttgcccatgcctatgtcctgaatggtattgcctaggttttcttctagggtttttatgttttttggttttacatttaagtcttaaatccaccttgagctaatttttgaataaggtctaaggaaggagtccggtttcagttttctgcatatggctagccagttttcccagcaccatttatatagggaatcctttccccattgctggtttttgtcaggtttgttgaagatcagatagttgtagatgtgtggacttatttctctgtttaatggaggtctgtgttctgttccgttggtctatatgtctgttttgataccagtaccatgctgttttggttactgtagccctgtagtatagtttgaagtcaggtagcatgatgcctccagctttrttctttttggttaggattgtcttagctatatgggctcttttttagttccatatgaaatttaaagtagttttttctaattctgtgaaga

SEQ ID NO: 813669 - DNA, 636 bp, Homo sapiens
cccctcgtgaatgggattagcatacttattaaagaccctcaggggagctagctacctccttccaccacgcaataacacaatgaaaatgcaccacctatgagaaagcacccatcatcccagacactgaatctgccagcaccttgatcttggacttctctgcttccagaactgtgaaaaataaatttatgttgtttatgagttacccagtttatattatgttgtagtggcccgagtagattaagacagtacccaataactattatcatcaagaataaatatttacatactttaaagtattccaatgtgtgataaaagacactcttcatctatcttctttattgccgaattatttataaatcaattgtaaagtagttaaaataaatcaacaaggtataaataaagcagtaacaaagccattatttgaaatacttaccactcttcaatggcatccagcattacacagttataatcagtactcagtccatacatgaaaactgataagggaacatctacaaaataaaaataaaaacagaaacatgtaragaattatgatcagaagctcccccagcccaataattatctcttcattgtcttctctattcatttttttcctcctggtttctgtctccctttcac

SEQ ID NO: 813670 - DNA, 631 bp, Homo sapiens
gagaccctgtctcaaaataaataaataaataaataaataaataaataaataaataaataaataatttgcttgctgctggagatatacaatggtacagccactgtagacaacagtttgacagttattccaaaaattaaacatagagttaccatatgacccagaaattccactcctcggtatcatatatacccaagagaattgaaaatacatgttcatgtaaaaacttgtacatgaatgctcatagcagcattattcataatagtcaaaaagtggaaacaacccaaatgtccatctgataaatggataaacaaaaagtgctatagccatatgatggaatattattcataaaaaggaataaaaaggaataaaaaggaatgaagtactggtatatcctacagcgtgggttaacctgaaagaagccagacatagaaagccacatattgtatgattccgttgatatgtaatgtccagaatggggaacccctagagacagtggattagtggctgacagaggctgagtgagaggaagaattgggactgattgctaatagatayggcatttctttttgcaaggatgaaaatattctaggtgatatggtgatggttacacaacacagtgaatataataaaa

SEQ ID NO: 813671 - DNA, 612 bp, Homo sapiens
gaagtatgtttggagtcagacacacctgggtgtttagatctaacttctggttctttattaactaatttagggatatggggcamatggcttaacttctttgcaccttgtattacttacctctaaatagagaatgatccctaatgtcactgtgctcatctgagctaaattgataatacatatgtaaaagttatttaatcctttatgggtatgtggtaatcagtagcttcatttcataaactttgttgaatgaattgatttaaaaatcctaataataatgatgggccaggcacagtgactcatgcttgtaatcctagcaatttgggaggccaatgcgggcagatcacttcaggccaggagttccagaccagcctggccaacgtggtgaaaccttgtctctactaaaaaatacaaaaattagccaagcatgatggtgtacacctgtaatcccagctacttgggtggctgaggtacaagaataacttgaacctgggaggtggaagttatagtgagccaagatcccactgctgcactccagcctgggctacacagtgagaccctgtctcaaaacaacaaaccctaagtaataatgatgacaaacatttaaaaaatacc

SEQ ID NO: 813672 - DNA, 623 bp, Homo sapiens
tctccagcttgcagatggcagatcatgagacttatagctcataatttctcataataaatgttttcttttsttttttcttctttctttctttttctttcttccttcctttctttctttctttctgtctttctttctttctttctttctctctctctttctctttgtctctcttttactttctttctattggctttattctgtctggagaaccctgactgatacagaaaaagaaaataaaaattaagacagagataaacaattaaaggtaatagaaaaaacaataaagaaaaatcaacaaaattcaaagttggttcttaaaaaaaatcaacaaaatgtataaatgtctggcaagattgactaagaaaaaagggagatgactcaaatcactaaaattataaatgaaaggaaatattcctatcaattttacagaagtaaaaaatcataaatatgctttgaacaaatatataccaatgaattggaaacctagatgaaattgataaattccagaaactcgtaaactaacaacactgaatatcgaagaaatctgagcagattttaaactagtaaggagattgaatcagtaatcaaaatctcaacaacagaaaaagactaagtcctagaag

SEQ ID NO: 813673 - DNA, 530 bp, Homo sapiens
cggtgaaaccccggctctactaaaaaatagaaamaattagccgggcgtggtggcgtgcgcctgtagtcccagctactcgggaagctgaggcaggacaatggcgtgaacccgggagatagagcttgcagtgagccgagatcgcgccactgcactccagtctgagcaaaagagcaagactccgtctcaaaaaaagaaaaagaaaagtcactcaataaaattgaaccctcttctataataaaaactcttaataaacgaggaacagaagagaaactttttaaactgataaagggtatctaacaaaaacctacaacactctcagagttgatgaaaatttcaaatggacaaccagaatggatgcctactattaacacttctgttcaaccttgtactgaatttctagctaaccatgtaagacaagaaaaggtgaaggtgtaaggcttagaatggaagaaacaaaaccattattgccaaatgcagtgcctcacacctgtaatcccaacactgggatgccaaggtgggcggatcctttg

SEQ ID NO: 813674 - DNA, 486 bp, Homo sapiens
cttcagagcaaaaaagggcagcatacctcgcaggatcaacaagaaggtggggaggggccaggacatgtaccttcaaccagcaggtagagagtaagagagagagaactaggggtctgtgggccaaaacaaaacctttacaggggtccagggcattacctaaagagatttccctcagttctaattgctaggtttaaagcaagcgggtatgagttccaggaggtcatgccgtgactgcaaggtggttactgtggcatatccgcatggtccatgcaggggttgggggtcagtgaccacatcaactaggttatattcagctatctcatatggaggtggttaccagcaggcagttgtataaggcagatatctggaccaaccacactgaggaactgggaagagttagagaactggaaactgtcaagggtgaccaagcsctgtgctggtatgagaatgttaagcttatatccaaaatggatgccaaggaatcat

SEQ ID NO: 813675 - DNA, 631 bp, Homo sapiens
ttcttcctcctcttcctcttccccctctcctctctctttctctccatgtctacagtagagaaaagtgccagataaaatttcaagtgatagaggagaaagtgctgctccaagagatacaagactatccaaaaagaagagaagataactgacaaaggaaaagaaaacttagtcacctcccattctgtcagcaagaaaagtattctgtaaattacctatgttttcaaagagacagaaaagactgcatatagctgatggttgctgttggttgaagagacccagaagggaggagtggagacagcagtgctgtccctgagatatagtcatggcaggggagtagacttgaaacaaactctttcagagtcagctaagctagcactgtggggaagaaggacagtaaggttttgtaaccttggaaaactaaccattgagttaaaagttaaaccttgtctttcaattaaaattttttctctagttctgctgtatttctagcatcctgagagtgctgaggacatttgggggatatcatcctagccacatgaaactaaaatatcatcttygtagattgattggaagttgtactaagaaacattccatagttttataaaactcagatctccctgaatatgagtca

SEQ ID NO: 813676 - DNA, 539 bp, Homo sapiens
tagcagctttgttttgggcagaatgaatagcagaggggcaggaaagacccagaatcttgatgcccagcctccctgcttttactctgctgcttgatactgcctctaatgaaggagccgttcttatagagcagttactttgaggcctgagaaacccagaaaaatttatcatgactgctagacctgggcacaggtggattttagattagacttggcagggacaacaggcatcttggaaactccctaaggaagggtccagatcaacaacactgcaaacaccatattcccttcaggcaggcatccctattttgctgtaccaggccttaatactctctgggttgtagcctccagtggtccatttgacttctgagatgtattaacaagaagactaatattaccaatggtaacygctcacttaacaaaaacaaaacaatataccccaacatttattgttgccttgcaactctgcctttttggcctctctggatatccactgacatcatttaaaatgaaccattttatttctaattgctacatgccag

SEQ ID NO: 813677 - DNA, 665 bp, Homo sapiens
ggtaggtctgtgatatatataaatttttttctgtatggtgtttggtaagaatttaagttcagtattttgcatatgaatatgcaattattccagtagtatttcttwaaaaaaaatccctttcactattgctctgccttgtcatctttgctgaaaaccaactgattgtaaatatattaatttctgtaccttctatttcattgatctaagtgtctatcattatgccaatattacatcctattattatagctttataagttttgaaattagtattgtaataactcttaccttttttttacaagattgtttttgatatgtatttccattttattttttttttatttatttttgagatggggtctcattctgttatccaggctggagttcagtggtgtgatcacagctcactgcagccttgacttcctgggctccagccatcctcccacctcagacccctgaggagctgggaccacaggtgtgagccaccatgcctaatttttgtatttttggtagagatagggttttgccatgttacccaggctggtcttcaactcctgagctcaagcaatccaccccgctcggccttccaaagtgctgggatcacaggcatgagccactgcacccggcctgtatttccattttaaaattgacttctcaattcctataaa

SEQ ID NO: 813678 - DNA, 577 bp, Homo sapiens
tcacattagtaaagacatggaatcaacctaaatgtccattaatgttaaactggataaagaaaatgtcstacatatacaccatggaatactatgcagccataaaaaatgatgagatcatgtcctttgcaggaacgtggatggagctggaggccattctccttagcaaactaacacagaaacagaaaaccaaatactgcatattctcacttataagtgggagatgagtgatgagaacacatggacacatagaggggaacaacacacactagggcctatcagaggatcagggtgggaggagggagaggatcaggaaaaataaataatggatactaggcttaatatcctggtgatgaaataatttgtcatcacactcctgtgattgtaagtttacttatataccaaacctgcacatgtacccctgaacttaaaagttttttgaaataagtaaatattcaaactcataattttctatttatttaataacatttcccttctatttttactcttcagcatattttacctatttgatttgtatggtggaaatactacataataatatgttattgcacgtattttt

SEQ ID NO: 813679 - DNA, 613 bp, Homo sapiens
tggctagcacctggagaggacaggtgaggctctgcaggtaaactgggaaatgaaccattttactggagctcttaaaagatgatgcagaaaatcatgatgcagtatrctaatgagtctggacattggcctatgagagccactaaagctgttaaacagaagagcaataataagatcaaggtcacatcagttgttttcagactttcagtcaatgaattctctattcctacgaatttttttcttagaaactcaaaaatttaacccagatgaaagtaaagcagctctggcacatgtgtgtgcacatataaacacagtcatctgttgcactcttaaaagcatttgaaaaattgagctttggatgccttgcacagaggaccgatcataattatatcctcagcatcttcgtacagtactgtgtgcagagtgggagtcagtgtttgtccactgagtgcaagttcttgtaacttaattgcgacaggatatggaatttccaaacaattagagggaagttttaagtcttaactttaggtcatgaaattcagctaacagatatatcaatccaaatgatggactggtcatgactgctaatagaaggaatttctccttgttattaaaa

SEQ ID NO: 813680 - DNA, 631 bp, Homo sapiens
tatttttgcagagtgcttactaccaagattttgttccagccttttggactatgcttgatatacaaataaaagtaacaagggattaaaacagaattcttctattgggctcagagaggacwcttcaccaactccggaaaaagaatttgaagccagttaatcccactggagctaaaagtcttaaggataataacttttattacatgaactcttctagacaaaaatagaattgtaagttagggggaaatgtgtattctgcatcatccaaaataaaatttgccatccttggatttcttccttgcctaagcccagtctttagaacaagaagtatgatttcacaatgtaggaaattattttaaaatatctttgaaagcccgggtgcagtggcttacacttgtaatcctagcactttgagaggccaaggcaggaggattgcttgagtccaggagttgaagaccagcctgggcaacacagtgagacctcatctctacaaaaaataaagaaaattttaaaagtaacatgcgtggtggcccatgcatgtagccccagctactcaggaggctgagatgggaggattgcttgaacccaggaggtcaaggctgcattgagccaaaatcaaactactgtgctccag

SEQ ID NO: 813681 - DNA, 578 bp, Homo sapiens
ttctcttatatctctataatttcattattctatctttaaaaattgacaataattccctgaatatttaatgccaggccatattcaggcttcctcaactatctccaaaatatcttttagaaatggcttagtttattcaaataagaattcaatcaagaaccatgcatttcacttggtcattaatcctctaaagtctcttttaatctagaatattacttttgaagagacaaagttatctgtcttgtaaaataatccatatgctagatgtgcatgcttgtttccttatagtgccatttaactggttcctccagtatttcctgtaaactagaagctgaatttaaaggcttatttagattccaggataaatatgtttggcaagaatactgtgtagttctgtatctgtgtactttacattgcatcacatcaggaggctcgctgtgttcaattgtctttgtcttttagtgggggttggggagggaggcagcaaagcaaaaataatacctrccaggctggatgaggcaaaatagtctaagacagggtcacagtggaaccaaaagtgtagtagagagatgtgttaacca

SEQ ID NO: 813682 - DNA, 565 bp, Homo sapiens
ttgaattactctaacaagatatttgaactaatgactaccagattcagayatgagactacagaaattaaccctgtagacaagaattttcattttgttcaaaagtagtacttttactcaccttttctgaaaatcttttaccctccccacctctaacctgaagaaagagctatgtggtatatgtttatgattagtccttagtcatgatttttttttttttttttttttgagacgcagtcttgttctgtcacccaggctggagtgcagtggcgtgatctcggctcactgcaagctccgccttccgggttcatgccattctcctgccccagcctcctgagtagctgggactacaggcgcccaccaccatgcccggctaattttttgtatttttagtagagacggggtttcaccgttttagccaggacggtcttgatctcctgactttgtgatctgcccgcctcggcctcccaaagtgctgggattacaggcgtgagccaccgcgcctggccagtcatgatatatttaaactaaccagatcatttaccatgtttgagactttgtggtagct

SEQ ID NO: 813683 - DNA, 584 bp, Homo sapiens
tgatacacccctgtctcccactgtcagcgctcacctgcatgggaagcactcgctgggtcaygagactattttcccatttccttcagcaccagtggctgtggtgacttgaggtcatttagagacctgccagctcagtctcctctgtccttcttgctctcttgctgcctctgggaagggctgagctattcctgacacctggagtaggacaacagcacgaggaatccacgcagagctgaatataagcaagctgggctcctcatgcatgacaaaatgcaagctcatgaaccctctacgtgcctggaaaggccactgtccccaggatgtctccatattctccatttgggggtggggaggcttatgttctcacctctggctcctagtttctgcttccactgagttctttcagtttgagtcactttgccatcccgtgtacactgtcctgggtctgcactcagatgtggaactcagacctttgccttgatttccacagaaaacaaaccaaacacccgtctaagacttctgtttaggcagcagactctgtcaagggctgctcagccaagaggatttacactgcagcagaacaa

SEQ ID NO: 813684 - DNA, 629 bp, Homo sapiens
tgcttcccctcaggtcaggcagtcctggagtgatcgtgggcatctcagggatctggttaaggagaagtggagtcagggatacatctggtgtcgggttacaggggtgtttgcatcacttccatgtacaggtcggtaatggctagccaccctgctatagaaatggctctgacaacccactctgccaactcaccagtgtcctgacatggaggcacactggtgttgtgtatgaatgtggcctgtggcagccaacactagaactatgcaggtaatggagaaaaaacaaggattaaaatggacaaaggcaaaagctagtatatggaaaaattcttccaactcttacaactcagatacaaaagaagcttgattaaggttttcctagatttgatgacaatccttaaaatgtacaggatattaccaataatgagttctgaagctgaaacaactcttaataactatcaatagcttagaaaaacaaatttcagacacattagagcaaagactgagttatcattctattctctccaaagaaaatgataattacaaaattgttgtcacatgaagagaaaaagtgcawgctgcccaaaactacagggaaaaagtattatcaaggtgttttgggcaacaaattc

SEQ ID NO: 813685 - DNA, 608 bp, Homo sapiens
tttcctaatggtgagatcaatttcttttttaggatagtgatttcattaataccttatggaatttggtttagtttgagtcatttttgcagtaaagttctatttttgtaagtaattttgaaagtcctaygaaatgtttgctgcaagttagtcatacagagaattgctttgatatttcaggtattttgatgttatgtccaaaagtgcttttgttgacccaaggctactgtattgtatttttttttttttttttgagatggagtctcactctgtcacctaagttggagtgcagtggcataatctcggctcactggaacctctgcctccccggttcaagtgattctcccacctcagcctcctcagtagctaggagtacaggcatctgccaccatgcacggctaatttttgtatttttagtagagatggggtttcaccatgttggccaggctggtctcaaactcctgacttcaggtgatctgcctgcctcggctttccaaagtattgggattacaggtgtaaaccaccatgcccggcctactgtattgtactttatcccaattctttgatatataaaccctttccctctctttaatcatgattcttttaaaaat

SEQ ID NO: 813686 - DNA, 599 bp, Homo sapiens
ctactaaaattgtgagtcagaagccaaactaattttggctactaaattagttacttccctcgggcctaccaatcttcatatgtataccatggcttattttgacttagctggttaatttatccagatacgtagatggtagcaaattggcattatcaaactctactttttcataccaaagagcaaaataagtgtgcttataaccgtagttcctgtctttataaaaatgtatgaataaatttgagccatgtaaattaaggttacagaacagatagcatttagtgaagaaaagctggtccttagagtatatcattatttaccccatagtacctacctaatgaaatctagttttaatgattctttttaggacaccaaagctcatgaagcctattacaataacgtgtttaattctgagtaattgtttttcctatttaaatgaagaactcagtgactaaaaatttatttcctgcaaattttcttagatgatagaagttatacrtagtaaaaccaacaggaccaactgtgaggctgaaggaatttcagttaagaggttttaatttttatcaatttaaactgtgttttgaggagtggacagaaaggga

SEQ ID NO: 813687 - DNA, 503 bp, Homo sapiens
aactggagcgaggtagtgtctcattgtggttttgattggcatttccctgatgattagtagtgttgagcattttttcatatacctgttggccatggtacgtcgtcttctgagaaatgtctgttgaggtctttttcccttttgaatcaggttttttttttttttttctgctgttaagttcctgatatattctggatattaacgctttgtcagatggatagtttgcaaatattttctcccattctgtaggttgtttcttcactcttaattgcttcctttgctgtgcagaagtttttagtttgatgtcatttcatttgtccatttttgcttttgttaccagtgcttttaaggtcttactgaaaaaaacacttgctcagcccagtgttgtgaggcatttctcctrtgctttcttctagtagtttcatggttttggattttacatttaagtcttgaatccattttgagttaatttttgtatgtggggaaaggtaggggtctggtctcct

SEQ ID NO: 813688 - DNA, 601 bp, Homo sapiens
agttaatatgctggaagaagaggatagcttttagtctatttccagcacacggcctacactcactggtaccccatacaacaggaatgaatgccgacttagcatttttgccttcacagcgctggcaactaaaaggctcacagatactctgatctttaagcagataatcatggaattctcaacatcatatccactaggttaggctgagggttcatctataaaagtatttttccaaaaataatgcttaaaagagacttctagaaacagtgggactgtatcaggatcaacagaagacttcttgacccaaagattcaaatatagaactaggaattgattttcacatgtagtttttaggtaaaggacatctctttcagttgattcctacagccaagactagctttgatcctgggagattcagaaacctcaagatgggtagctggcttgagtaacatcctagataatagtcccagtcaaaaaccccattgaggttgaaggactggaaactgacctgtgtgaaaaagagctatcagtgcaggaaaagactcatgctgattttgaccttcctctgrcccttttccctcaactgcttggtggggagtagcga

SEQ ID NO: 813689 - DNA, 436 bp, Homo sapiens
tgatcactacacattctatgcatgtawtgaaatgtcacatctacttcaataatatgtacaaatattatttatcaaaaagcaggcatgtaggtgagttgattttcttccatgtcttcaaactcctggtaatacttgtccacaaaatttctctataataaccggaacatgtcatccatgataatgtgtactatatatccaaccacaacatcaaattctgtatcagaggcagaagagaaggacagcatgaagctcgattcctccaactgtcctttggctggtggccctccaccctgcccacagcccggccagctcagccccgtctctgtcccatacagagccacagccacagtgagagcctggcagcctgcccggaggaggcttcttggcccagcccggtcaacacccacatgcaccaccaccaactttttgctattgt

SEQ ID NO: 813690 - DNA, 590 bp, Homo sapiens
ccgggatccaggcagcacaggtttgagaatagcttggtgggtgggtgaaggaaggccatggagtcttgtacattgttggtgtgcttaaatatgaaggtgtcagacttctggtgtttaaaataaggtcttgagccttatagatgcatcttgaacagcaacaaaggacagcatgaaacctgaagttaaaagtgttggcccggccaagtggggtgtctcacgcctataatcctagcgctttgggaggccgaggtgggtggatcatctgaggtcaggagttcgagaccagcctggacaacatggtgaaaccccgtctctactaaaaatacaaaacttagctgggcgtggtggcacacacctgtaatcccagctactcgggaggctgaggaaggagaattgcttgaacccgggaggtggagattgaagtgagcagagatcgcaccactgcactccagcctgcgcgaagggagtgagacttcatcttaaaaaaaaaaaaaaaaaaaagtgttggcygggcatggtggctcacacctgtaatcccagcactttgggaggccgaggtagatggctcacctgaggtcagcctggtcaac

SEQ ID NO: 813691 - DNA, 578 bp, Homo sapiens
gtggtagacacctgtagtcccagctactgaggagggtgaggcaggaaagttgcttgagcccaggagtttgaggctgctgtgcactgtgattgtacctgggaatagccactgcactatagcctgggcaacatagtgagaccccatctctttaaaaaaaaaaaaagtatctgtcagaccagggtgcaaaattcagctctaccactgacttagctaagtgaaatttatcaatgaagtcacccatttgagcctcagtttcctcatctgtaaaatcatgttaatgatgacagctagcatccactgagggtcagctgtgtgccagatcttgttttaagtaattcacttttttttttttttttgagacagagttttgctcttgttgcccaggctggagtgcaatggcacaatctcggctcactgcaacctctgcctcccgggttcaagtgattctcctgcctcagcctcctgagtagctgggattacagrcatgcgccaccacacccggctaattctgtatttttagtagagatggggtttctccattttggtcaggctggtctcaaactcccaacctcaggtga

SEQ ID NO: 813692 - DNA, 540 bp, Homo sapiens
gcactcaatcccccgaccttggcctcccaaagctttgggattaccggcatgagccaccacacctggccaaagtatcaaatttttaagtaaaattggcatcagtattgtgtcactgattyttccacttacttcagacttcagtgtagctcagcaaagcacttttattgatcctgtctttatttgattcttttacaactttggccattctaaagccttttgtgaaaatggcctgtggttcagctgggcatggtggcgtgcacctgtaatcccagctactcgggaggctgtggcaggagaatcgcctgaaaccaggaggtggaggctgcagtgggctgagatcgtgccacttttgacactctgtctcaaaaaaaaaaaaaaaaaaaaaaaaggaagcctgtcggcttgactccagtagcctctgatggggtggagtggacaaggggaagtgaaagctcccaggcctcagtcagggcaggtcccaagaagccctgagcatggaggaggggaacaatccagtagaggcagctctgaagttttctc

SEQ ID NO: 813693 - DNA, 513 bp, Homo sapiens
tgtttctctagttccttgaggtgtgaccttagattgtctgtctgtgctctttcayactttttgatgtaggcgtttagggctgtgaactttcctcttagcaccgcctttgctgtatcccagaggttttgataggctgtgccattattgtcattcagttcaagaatgttttaatttccatcttgattttgtttttgacccagtgctcattcaggagcaggttatttaatttccatgtatttgcatggttttgaagtttccctttggagttgatttccagttttattccactgtggtctgagagaatgcttgatataatttcaattttcttaaatttattgaggctcgttttgagagataggactagctggatttcctaggccaactaagaatccctaagcctagatgggaaggtgaccgcttccacctttaaacatgggacttgcaacttagctcacacccgaccaatcaggtagtagagagagctcactaaaatgctaattaggcaaaaacaag

SEQ ID NO: 813694 - DNA, 674 bp, Homo sapiens
aattagggatttcttcttggtttggatccattgttggtgaactagtgtgatttttggggggtgttgaagggccttgttttgtcatattacaaggattggttttctggctccttctcatttggrtaggctctgtcaaagggaaggtctagggctgaaggctgtcgttcagattcttttgtcccacagggtcttcccttgatgtagtactctcccccttttcctatggatgtggcttcctgtgagctgaactgcagtgattgttgtctctcttctgggtctagccacccagcaagtctaccaggctctaggctgctactgggggttgtctgcacagagtcctgtgatgtgaactgtctacgggtctctcagccgtggataccagcgcttgttctggtggaggtggcagaaggtgcaatagactttctgaaggtctgtagctttggtggtttaatgctctatttttgtgccggttggcctcctgccaggaggtggcattttccagaaaacatcagctgtagtaatgtggagagggaccagtagtgggtgggaccctagaactcccaagattatatgccgtttatcttccactaccagggtggatagggaaggaccatcaggtgggggcagggctaggcatacgctcagactgttcaggaggctcagactctccttgg

SEQ ID NO: 813695 - DNA, 484 bp, Homo sapiens
tgatatatatatatatatatcatatatatgtatatatcatatattatcccwttagttctgtccctctagagaaccctgactaatacaattataaaaaccaacaaatgcctacttgacatacccacttgattatataatagatatctcaaacttaacagctctcaaatggaatttcatatttccccctgccccagactgacccacctcagtttttcctatttcagtaaaagtcaccacggttttactcaattgcttgggcccaaaactttggaatcttattgaccactccctttctctccctctccatgcccaatccatcaaagaatacatgtagaattagcaacttttcacctttgtccctaccaggcccaagttgtggattgctttcaccaggacaatgaccatagcttcctgtatgtatcctggcttctccacttactttgtcctgtctatttctctgcacagcagccaaatggatcctttt

SEQ ID NO: 813696 - DNA, 739 bp, Homo sapiens
gttttgtccatttggggagaccttggtttcctgtttgctgttgtttcttgtggatgtatgtctatgtctttacattgaaggattaattatttattccagtcttctctgtctggcttgttttgatttttattggctacaattgcttaaaggttctttattgctatggactgtcttcttttcagctctaggtggcgtctttacgccaggttcacctcagctctagtaaatgatcagagcatgccctttctgagtggcagaggtccctaaggggatatcctggcagtgtaggaaggttggctagaagttcgtccccaggagacctgtggaacaaaccttctgcagtatggtgctgctgaacagtcactctgatttggtgtcttgtttggctgatttacaaagcagttcccagggcaggggatggtagtcttccctccccaccggttctgactgttctcagggatatttctcttttcaggcactcacagtgcttcctgtggctctaaggtagggatgggtctcttgccatggaacccaggatgatgaagttggttatccacctcaacctcattttttccagtgagaaactgagttgggggaaattatttcttgtgcttgataccagtcagaatgaggggagagacgtcacaaatgtggaagtgtgtccagaattggtgggttcttggactcgctkacttcaagaatgaagccgcggatcctcgcagtgagtgttgcagttctt

SEQ ID NO: 813697 - DNA, 472 bp, Homo sapiens
tttaaatggaatattataaaatgttcaaacaacccaagagaaggcagaagagaagaaagactcaaaaacagagggaatgaacagtaaataaattaaatgctagccctaaaccaaaatgtatctatagttacattaaatgtaaatggtctaaacaaaggcttggcaaatttcttctgtaaaaggctaaagagtaaattaggctttgtgagtatacaggcttttacaaccattcaactctgccactgtagcacaaaagcagccattggctataatgcataagtggatgagtgcagctgtgatccaataaaaccttatttacaaaaagaggtaatgggctggatatggcttatagctgtagcttgctgacctctgtctaaacataccaattaaaagacagagatttccagaatatatgaataaccataaactgtawactgtctacaaaaaactcacttcaaacataatgccatag

SEQ ID NO: 813698 - DNA, 550 bp, Homo sapiens
ccaggctctgtgctgcctatttccttctgccagagggggtgatcccccagatgaaggatggagcagggggttcttcctgccttcctaatgtctccaccccgggccatggatggggacaacagaaaggaagggrccttgctaaatataaagctctgtgcaggtggaagaatcatcatgattgcttgtatattgtccttactatgactatggatttctctctttctcccactgcagcaagactcagggcaagtttggcaccacctggttgatccctgaagggtggctgtgcccttgtcccatcacttctctgatcctcagcctgggagcaggaggagggctgcaggctggtgtgatgctgaccagcaaggttcttccttgcagaaggggtaagtggtggccactccagattgtgcaggctggagcctacgcagtactcctcttctcccagggacagaatggagctacctggaggtgactgtaggagatggtgaacacagcatctccctggggggcctgtagttgcgaagtgctcctcctgggctccactcca

SEQ ID NO: 813699 - DNA, 626 bp, Homo sapiens
tgccatcaggggacattggctacagccatcctaggggagacagagtctggggtatgacctgtgtctttcagtagcaacatcaggatcactggttcagatgaccctcatgccagatatcagagggggctacagtgatagaactcttttctgtcccttgggggtcagcaaaaatggcactttctcagagagactttcctgactgcctacataaacagattcatttttttttctccccagattctggcctcttgtttccttcatagaaactttcacattttaaaatttaattaaaaaacatttttttcctatctcccccacctgagtttaagctcttcacttaatttaaggtcctgaataaggcctgtcttttcacctttgtatccctagcacctgaaagtgtttgagacacagtaggcacaactcagtaaatgtatgctgaagagagggaatttgggggtcaggtgctgagatatgggggctcccctatgaagacagtgtcacgggaggataaagttacatgaatcgaacacctattatatgctcgatactttactttcattatatcatgaatttccatatgaatccygaaaggtaagaattatcatccatattttactggaaggaat

SEQ ID NO: 813700 - DNA, 597 bp, Homo sapiens
acactaaaagacactaatctaacctcctctggctggcgtgagcacagaattgaatattagaaacctggacttaaatccagacttcaccatgttttttcagttttctttwtttaactttaaaaaaattgacaaataataattgtacttattcctggggtacataatgatgtttcaatgtaattagcctatccatcatctgatttattgttcctttgtgttgggaacactcattgtcctcctagctatttgaaacttattgttaactacagtcaccctacagcggtatacaacgctggagcttattcttccaatctagcagcagtattgtatcctttaacaaatctctccctattctccccttctccctaccctcagacttgaccattttttggtcctttaatcttaggcaggttattgactattcatgaaactcagttttctgatccataaagtgaacaccaagttgtctttaccagttaggggaactaaggttctacacaaggcacctagaataacctggcacataatagacactcagtacatgcagaattatctctattttcaactttctgagatagccttgtgcattttgctcta

SEQ ID NO: 813701 - DNA, 579 bp, Homo sapiens
ttatagaataatcatagaattaccatcaaaatcaagaaattaacattactacattactaacagccattcaagttttgccaaatatcccagcaatgtcttttatagccaaaggaataaataagagtcacatttggcccacagtttcatattattttaggctgtttcaatttggaatagttcctagtctttccttgaaactttctgaagagtgtaggagagttattttttaaagaaagtccttcaagtttatctgatgtttatttcatgattgaattcaggctatgcctgtttggcaggaatatcacacaaatgactccacattcttcttgcatcttatcagggagtgcatgatttcaatgtgactcatcaataatgatattcactctaatcacttaaggtaatgtttgccaggtttctttactataatgtttttacccttgcgtatttaataaatacaatcattcttcagcaaccttgggtgaytggctccaggaccacctgtgaataccaaaatccactgatactcaattccctaacataaaatagtggagtgtttgctcataagaagcttgtccaacc

SEQ ID NO: 813702 - DNA, 598 bp, Homo sapiens
cttcatgattcatcccatcctagtactattcaacatcacattttttaaacatggacttattttataggtacactcaattgtcacaagraactgtcatcccctagtctattcacagcaacaatcaattctgccaatttggattgaactggtcccaactctctctactatagcatctctatttttagtgttgccctgggtcaaatagattcagaactccaccctatatagaagtcagtgtgctgaaagttttcagagtccctcttatctagttcaggatggcataagagcatggcattgagtgacaatgagccatggccaaggagggagaggctacagatgagagggcttagttctgcctgtaaaagtacccttcttggtgactaatggatcctgagtggatgagacaatcaaggaaaagacaatttctgttctcaatgagcatgcacatgtgtatgtaattaacatacaagacaacaaaatataattctggggaatggtgtatatgacatgtgctttgagatgtccaaggagggggattttcagggataatatgggaaatgattaaatgaacaatccctacctttcctagaccagctca

SEQ ID NO: 813703 - DNA, 633 bp, Homo sapiens
tctgtttggccgccagtctcttgtctctctcttcagcaatggtgaggcggataccctttcctcggggaagagaaatccatcgtttgttgcccttgccaatagtgaaaatgttggaaacttgagtgccaaagctgttgccactggtgtctttcacatgaaccacgtcagaagatcccgggtacctctctctgttggggatcacaccaactcttcccaggtgagcacctccagtcaccatatatggcttgccagtgtcgaacgtgatgaaatcggtcatcttgccagtctccaaatcaatctgaatggtgtcattcaccttgatgaggggtcagggtagcggatggtgcgagcatcatgagtcaccagatgagggattccttttgtgcccacaaagatttttctcactttgcacaacttgtacttggtctcctcaggtgtacagcaaagcaacctttggtgtcacggatcagatggaaattctctcctgtcttgtcaatgctgatgacatccatgaacccagcagggtatgttatatcagttcggaccgtgccatcgatctyaatgaaccgctgcatgcaaatcttcttaagtctgttccttaggaaaatgatgaggggaagacactctctcaac

SEQ ID NO: 813704 - DNA, 560 bp, Homo sapiens
ccagctactcgggaggctgaggcagaagaatggcgtgaacccaggaggcggagcttgcagtgagcctagatggcgccactgcactcyagcctgggggacagagcaagactccgtcttaaaaaaaaaaaaaaacaaaaataaaccttttaaataaagtggttacattctaactttaacttccttagtaccatgctgcaggtttcagcactgttaaggtattgcaagaatgcccaaccctctggtgtctgattgtgtatctagcaacattgcagtatgaagaaaagagatgccccgggtacgaccccatttctattaaaaataaatgtaaacacccaaccctcttggcagcccatgcacttgagaacctgtagaaaatggcagtgtgcaaccagcatggctgcgagctcagcgtcttcactagagagagtggaggtggttaggaaagggcaggcgggaaggggccatgttggccggacaactgcaggtgaagatgggattgtgaagtacagtccaaggcccactcaccaagggctggatccaaatatgtggggttgggattc

SEQ ID NO: 813705 - DNA, 511 bp, Homo sapiens
atgacgacctcaacataatttacatggagaagtttcttaggtggaaaaccgatytgtatggtcctcagaatgtaacctacaggttcttgccctcagaaaaatgcatgcatacttttatgttacaggcttattttccaaatgcggtagagggccatcccttctttggcttcttgccttgtctctgaccccactgactgccccttttctgcctccatagctagtttcttattttcctttggctttttttttcttttcttttcttttcttctttttttttttgagatggaatcttgctcttgtcacctaggctggagtgcagtggtgcgatctcggctcactgcaccctcctcttgggttcaagccagcgaggtagatattatcattttagagacagcaaaacagactcagaggggctaatgtgcccagtgccccaccgcttttaaatggtagagctgggatttgaatctaggcatacaggtaccaggatttctgttcttatctcccccatagc

SEQ ID NO: 813706 - DNA, 439 bp, Homo sapiens
tgatcactacacattctatgcatgtawtgaaatgtcacatctacttcaataatatgtacaaatattatttatcaaaaagcaggcatgtaggtgagttgattttcttccatgtcttcaaactcctggtaatacttgtccacaaaatttctctataataaccggaacatgtcatccatgataatgtgtactatatatccaaccacaacatcaaattctgtatcagaggcagaagagaaggacagcatgaagctcgattcctccaactgtcctttggctggtggccctccaccctgcccacagcccggccagctcagccccgtctctgtcccatacagagccacagccacagtgagagcctggcagcctgcccggaggaggcttcttggcccagcccggtcaacacccacatgcaccaccaccaactttttgctattgtgaa

SEQ ID NO: 813707 - DNA, 615 bp, Homo sapiens
ccataatgaggaaaatgaatcaactaatggcagtcaacccagaaatggcacagatgttagagttagcagacaatacattaaaatgttgttatagccaggtgtggtgrctcatgcctgtaatcccagcactttgggaggccgaggcaggcagatcacctgaggttaggagttcaagaacagcctggtcaacatggtaaaaccctgtctctactaaaaatacaaaaaaattagctgggtggggtggcgcacgcctgtagtcccagctacttgggaggctgcggcacaagaattgctggaacctgggtggcagaggttgcagtaagccgagatcacgccactgcactccagcctaggcaacagggcaagactccgtcataaaataaaataaaataacataaaaataaaatattgttataactgcattccacatgttcaaaaagttaagagagaaagaatagatttaaaagacccgaaatcaaacttctagaaaggagaattatattgtatgggattactgttagatcagaaattacagaagaaaataatagtaaacttgaacatatagcaatagaaattttctaaagtgaaatacaaagagagaagaatttctttaaa

SEQ ID NO: 813708 - DNA, 507 bp, Homo sapiens
tcccaccaggtggctcctcgctgagggtgccaggtgtgctgggactgggtggagggtgagaacccaccagtgctcccctggagtccattagtgcccctcgtgggttggggtctccgcagagcaggtggcctcrgggggtacaaaggcaatggtggggtgatggggccagccaggaaggggcccatccttctccccgggagcacagggacaaccagagaccggcatgtaaccaacaagtcatggggcagggtgtgcctgcggagatgtgtgtgtggtcccaaggcagtcccaagtcaaagcattcgtggaagccccttggggcccccttcaggggttcacttggccgaggagaggcctgggtgtggtgaggatgcattggtggtgtcagagctggtgctgttggggacagcagcaggagcatgtgtttgagctgccctcacctcccccgccgcccccggccccacggcaggcggtggagcaccggatccgtgaggagcagcgggcgat

SEQ ID NO: 813709 - DNA, 577 bp, Homo sapiens
tgatagaagaaagctaaatatcaaatggaaaataacaaagaagatttcagaatttaggataagctaaagtccccataggaaatgctaaaatctgtggattttgacagtycctggttggacagtgtgtagagctaccttctaggaaaaatgtggatctgcatgacctgaaatgtaggttgcttgtttctgacagtcaagccctagtatctggcactgctatctgggaggaatccctttaagggcacgatgcctgataaaagacacacgtgcttgctagttctttggaagcatctgaaagagggatgtccttctctgatcgttcaaaataaactccaaacagcatacctgtacatttgagtgaagtccatttttttctgctccacttaataaaaagactaaaccaacccaagagccttagtttttttcatcctgaacatgtattaaaaagctgttagaagggacatattcaaggagttttttcaagactagtttttggtaacttcacaaatttttataacttccatgaactggtattgggcaaactgacttctggtgaactaatttttaaaatccattt

SEQ ID NO: 813710 - DNA, 560 bp, Homo sapiens
aagtcttctctgatccaaagcccaaaaatcttgagggatggggaaagtggtccgggttgggtcagatactacctgtgccctgtactcagctctttccagggagtagggcratgtaaggatgtggtgcctctcgtcggaccatgcagaagtgtgacaggggagaggaaggtcccagaagaagggattactggacagaccaaacaataaatgcctccacacccaacgtccgcctcctcctcaatttaacatttccgtcattcacactgtcccttgagaatcttctctccctacgaacagctgtagaacaggaggaagcttctttaacttcgtgcttccttgctgaccctgaaggtaaaaatctaggtccttctcattctagggatttttattgctaattactaaaggggtggcaaaataacaatttcagggaagctacaaaagctaaagaattttgttatagtttttactccatgaggatttttgatttctggttttattactgaggtttaacacctgcctttgtaacttctatcttgctagttctttctctgttcaattaa

SEQ ID NO: 813711 - DNA, 480 bp, Homo sapiens
  misc_feature 461: n = A,T,C or G
tgccttctggggtttgatgagaggtaaaagttcatgattattataaagtaaccttatggccgggtgcagtggctcacgcctgtaatcccagcactttgggaggccaaggtgggcggatcacaaggtcaggagattgagaccatcctggctagcacggtgaaaccctgtctctaccaaaaatacaaaaaaattagccagaagtggtggcacacgcctgtggttccagctactcgggaggttgagcagaagaatcacttgaactcaggaggcggaggttgcagtgagccaagatcacgccactgcactccagtctgggtgacagagcgagactctgtctcaaaaacaaacaaacaaaaacaaaaaaaagtaaccttatcacaccatacctaaggtgttatgttgtttgtttttcaattagartttaaatttattttttaaatgtatatttacacagcgtcgcntttgtgcattagaatgttt

SEQ ID NO: 813712 - DNA, 541 bp, Homo sapiens
ctgatttattgataaaatcacataccctatttttgaatattttcataatattagtttgctaggggaatgtcaaatgtttattattytgaattaagaaaagatccctaactaccctataattccactttgaattccacataaaattagaaacaatcatataattttagcctatatcttgaatattttatttcactagcttgaggcttttttttccctgttcttggctttatctttttcatatctttttctctttcacgtctttccacagactttcttctccactcattcctttgtccctcctcgccccccagtgctattctgcttttggaattgcatcaattttgcaatgatttaataatcaaattactatcatcctctaattaggaatctaccagataggcaaaaatacattctggggactgaatgcatctgaatatttatagcaagtatttctattatttcctataaagacatgtctgtagtttcacacaactacaatggaagactgccaactgacttcaaattcaagcttgactgtgga

SEQ ID NO: 813713 - DNA, 630 bp, Homo sapiens
gttttcatttttcacatttagatttctgatcatttagagggtttttttggtatatggtgtgaggtatggatctaattttatcttttaacaaatggctgtctagctgttccaacactattaaaaagtccatctttcccctctgtgattaacatgctgcctttatcatatgtgcttcagtttatttctggactttctggtctgtttcattgctgtgtctgtccatctgtgcatcactaccacatggttttaattatagaggatacaagtacattttaatgtttttcctaattcttttcttttttaaaggtctttctagttattctggcacacatatttttccaaatgaacttcagaatcaagttttacagttccaggcaaaaaaaccagaattcagtgaataaacaatttttaaagacccaaagcacccttgatagatttagtgagttggaacattaaatacattattattattattattttgacacagagtctcgctctatctatgagtgcagtggtgcgatctcagctcactgyaacccccgcctcccggtccaagtgattctcctgcctcagcctcctgagcagttgggattacaggcaactaccaagcccagctaatttttttgttaa

SEQ ID NO: 813714 - DNA, 669 bp, Homo sapiens
ttgaaattggatccctttcttayaccttatacaaaaactaactcaaggtggattaaagacttaaatgtaaaacccaaaaccataaaaaccccagaagaaaatctaggcaataccattcaggatacaggcatgggcaaagacttcatgatgaaatcaccaaaagtaattgcaaaaaaagcaaaaatgacaaattaaactaaagagcttctacacaacaaacgaaattatcatcagagtgaacagacaacttacagaatgggagagaatttttgcaatctatccatctgataaaggactaatatccagaatctaaaaggaaattaagcaaatgtacaagaaaaaaaaaatcaaacaaccccattaaaaagtgggcaaaggatataaacagacacttctcaaaaaaagacatacatgcggccaacatatgaaaaatagctcaacatcactgatcattagagaaatgcaaatcaaaaccacaatgagataacatctcacgtcagtcagaatggcaattagtaaaaagtcaagaaacaacaaatgctggcaaggttgcagagaaacaggaacacttttatactattggtgggaatgtaaattagttcaaccattgtggaagacagtgtggtgattcctcaaagattttgaacccgaaatgccatttgacccagc

SEQ ID NO: 813715 - DNA, 625 bp, Homo sapiens
gacctggacaagtctgtgctggcaaggaaatgtagaatcccaaattccatgcagattgacggtgaatcctgccaggttgccttccaccacagctagctcgtgacttcaccyttcattgggccaggcagaatgaccggagccagcgccactgtgctgcagaagcagcaggcccaaatgctgcaagagttaataaatgtccagtacccacggagaggagaggaaactagggtgcttgatgactaaacacctatcctggatccacttcgcttgtatggtgacagcatgaggtgtgactgagagaagattaatgatcactgggcctgggtacctcccaaaaggagtgctgcaggagtgctgtggagctaattaaccagccggcatgaaaagtgaaaatagacgagggaacagggtgtttttttgtttttttttttttcccctctgtggtggcccagtactgtgcgtagacctacatatactatttttggttttccttcttaagtatgcaaaatgacataatgttgaaagcctctctcagtagccttctccaaggggagcaatactgagacagtggactctggatcccgctgcctgggttcagactcagctctgatatatgccagagtgg

SEQ ID NO: 813716 - DNA, 498 bp, Homo sapiens
acatgtggaactatgagtcaattaaatctcttttctttataaattacccagtcttgggtagtatctttatagcagtgtgaaaacaaaccaatacacttgtaatccccccaaaaaactttcattaaatccacccaagtagaaagtttctatgaagaacctgcaataaaacagaaaataaaaaaggacaaaatttcaatcaataaaactgcaatcaattaattgttaaacttatatagtaattattggatgatgtgcatagtcaaaacttcaatgatatgatatttaaaaaatgctaacaacgtgatgtacagcaaaactgtacttatggtcattttttcctgtcataaattcttgagttatttgaaaaataaaaatcagtgcaaataaattttgtaagcctaaggaaattgtgcaaattctaatgagtgaattagaaaacatttttttaaaagaagagtagaactaatatacaggarctagttctttgaggaaaaataa

SEQ ID NO: 813717 - DNA, 554 bp, Homo sapiens
gtttcttttcttttgctacttttaggatcctttctttatccttgacatttgmgagtctgattactaaatgccttgaggtagtcttgtttgggttaaatatatttggtgttctaagaccttgtacttggttatgatatctttctctaggtttgggaatttctgttagtattcctttgaataaactttctactcctttctgtttctatccctcctctttaagggcaataactcttagatttgcccttctgagactattttctagatcctgtaggtgtgcatcattgttttttggttcttttttcttttgtctcctctcactgtgtattttcaaatagcctgtcttttagctcactaattctttcttctgcatgacctgttccactgttaaagaactctgatgtattctctagtatgcttattatatttttcagctcaagactttctgcttgattcttttaaattatttcaatctctttgttaagtttatttgatagaattctgaatttcttctctgtgttatcttgatttttttttttttttttagtttctcagca

SEQ ID NO: 813718 - DNA, 586 bp, Homo sapiens
aatagagttccaatcaagatgttatgttgagcaagcatgggcaagttttcatttcactccaaatacataaaattagaggataaaatattttaaaccatgtgtaaagtaagkaacagtggttgaaaatcacaactagaaattatcaggtgtgagaaagaaagaaaagactgatgatagtcctgggattagaaacatatcttaatgtttaatgcttctatgggaaagagggctgtggccatacatattacgcacactagaaatgggaaactaatctcccagttaagtaccagattacaaagaagcaagcagtttttgggaatggggaaaaggaaaatctgcatcccctagcctagattaatattagcatatgagtcaggaccccaggttcatgagcaggctatacactctatgccagccatgaggatgtgtcttgctgatatccaactacatggggattaattgacccaagggtcaagtagctgcatcctgaaatccatcaccatgtttgcaccaaggccacacctcttagctgctcttagtcaatgattgactgtgattaagatactgaggcagagctgttactcag

SEQ ID NO: 813719 - DNA, 586 bp, Homo sapiens
aatagagttccaatcaagatgttatgttgagcaagcatgggcaagttttcatttcactccaaatacataaaattagaggataaaatattttaaaccatgtgtaaagtaagtaacagtgsttgaaaatcacaactagaaattatcaggtgtgagaaagaaagaaaagactgatgatagtcctgggattagaaacatatcttaatgtttaatgcttctatgggaaagagggctgtggccatacatattacgcacactagaaatgggaaactaatctcccagttaagtaccagattacaaagaagcaagcagtttttgggaatggggaaaaggaaaatctgcatcccctagcctagattaatattagcatatgagtcaggaccccaggttcatgagcaggctatacactctatgccagccatgaggatgtgtcttgctgatatccaactacatggggattaattgacccaagggtcaagtagctgcatcctgaaatccatcaccatgtttgcaccaaggccacacctcttagctgctcttagtcaatgattgactgtgattaagatactgaggcagagctgttactcag

SEQ ID NO: 813720 - DNA, 620 bp, Homo sapiens
tcctctagcagcagagttcctgtcgctgcacattcttgccagcaytgggtgttgtcgttgttctgagttttagccattctaataggtatgtagtggtatcttgttataatttgcagttccctaatatgtgatgttgggcatcttttcatatgtgtattttccatatatgtatattctttgatgaagtatctgttcagatcctttgcccatttttaaaaatacagttgtttgctttcttatagttgagttttaagaattctttgtatattttatatactagttctttatcaggtatgttttttgcaaacatatttgttcagtctgtgacttatttcttaacagtatattttgcagagcagaagttttagtaaactctaacatcaatttgttctttttagattttactttttatattatatctaaaaagtcactaccaatacactgtcacctcgattttctcctatgttattttctaagaattttaaatttgtgtgctttacatttaggtcttttatccattttgagtcaatttttgtgaaagcagaaagtctgtttctcaatttattttttatatgtggattcactttattatttttcaaaagttaccttaaagcgttaca

SEQ ID NO: 813721 - DNA, 620 bp, Homo sapiens
tcctctagcagcagagttcctgtcgctgcacattcttgccagcattgggtgttgtcgttgttctgagttttagccattctaataggtatgtagtggtatcttgttataatttgcarttccctaatatgtgatgttgggcatcttttcatatgtgtattttccatatatgtatattctttgatgaagtatctgttcagatcctttgcccatttttaaaaatacagttgtttgctttcttatagttgagttttaagaattctttgtatattttatatactagttctttatcaggtatgttttttgcaaacatatttgttcagtctgtgacttatttcttaacagtatattttgcagagcagaagttttagtaaactctaacatcaatttgttctttttagattttactttttatattatatctaaaaagtcactaccaatacactgtcacctcgattttctcctatgttattttctaagaattttaaatttgtgtgctttacatttaggtcttttatccattttgagtcaatttttgtgaaagcagaaagtctgtttctcaatttattttttatatgtggattcactttattatttttcaaaagttaccttaaagcgttaca

SEQ ID NO: 813722 - DNA, 657 bp, Homo sapiens
tgaactctccaatggcgtacatgttaagagtttttaaaggcagggaggttggttatargcaatgcatgaaggctatacattagtttgcctaaaaggcaggccatcttgaagcagggacttacaggccacaggtggatatacaaagattctctgatttgtgattggttaagagagcaaagctttatcgaaaacttggggtcagcagaaaggaatgttgagctctggcctgtgtacatgacttagtccaggcccctcaggaagaaatttagaaaaaagaacagtggccagagttctgaccacagttcccccttatctgaagtctccgtgccagtggacagcgtttttcatttggtgggggtccaggtgtttgaaaaacaactcagggacatatgttaatatattatctttagtttctacgggaaccaaacattttgtgactcaaacttccttggctattgttttaagctatttctaccttcttccttatcaggttgctcattttcttctcagggcgtactgggtgactggaatttccctcgaaggaactcaataagtttcctttatttttatgattgatggggtccacaaggcctttaagaggggtccctactctgcctcattaatctagaaagtaaccaaaaatcaagatttggcaga

SEQ ID NO: 813723 - DNA, 506 bp, Homo sapiens
taattattcaagatatatttgaatatgtaccaaggccaagtcatgtgctaggtgttaccagagttataaaagaaggaatgtatttacacatacatgtgtgtgtatgtgtgtttatatkaacatatatgtggatatacacatatacagatacttaaatatacttacacaaaggaaacaacttacacaatacttaaaggaaatagcttacataaaggaaatcttaaaaatgatatgtatatttgtgagtgaataacaaaaagaatagtatagatcacaaagactatgagaatatagtaaaagggagcatcagagtgtgctaaaatatttggccaacgccttatcaaagagatgggatttaagagtgaacttcaagaggttagcaaacgttccagttacctattgttgcataacaagccactccagaacaatatcaatcatttcttgtactcatgattctgcaatctgggcatggctcaataaagctggtttatcttcagctggggaga

SEQ ID NO: 813724 - DNA, 625 bp, Homo sapiens
aagacatgatgaatatctttttctgattttaaggcctcatcttgggaatgcaaaagaataaccaaacaagatttggttatttgattaaaatagaatcaatactggttacttatttaatcaaggtatcataaaatatttaaaaataaaacacaacataattatctctttgtaaagaacactggctctttcacaactgcagaaagttttttctttaataactaaaacacttcaaagtttactcagagaaaattattttagtgcgatagagaatctttgttacctatactgattatacaaaatgtaaagaatagtaactcagtatctttaagagtttgaaagctaactcataattttaataaagggaaaacaaaattctagttttacatcaatatttggtagtataagttttagacttttcctctcattcttaaaaaaattatcttagactaagcctgtcaaactcagcaaacataattgtcattattcctctgttaaaattatcaaaatttaacatatttcttagtttctcttttgatttagatattataamctgaagtaaattttattccctttccccatatcctttaaaacttagaacaaatatggaagttttgcccttcagtat

SEQ ID NO: 813725 - DNA, 632 bp, Homo sapiens
ggctgcctgcctgttggggtagaggtacagactttccctactgctctcagtgctgcaattgtgtctctcctgtaagaaacttccaaccagcagaaagatctaggactcaaggcctactgttcagaattttttcttccacagtaccctgtggaagtattcccttcatgttggactctccccgttagcctaggaatgggacttcttgagagccaggctgcaatgattgttattgctcttctgtgtctagccacccggtgcagctaccagactccaggctggtcctcgggaatgtctgcaaaggatccagtgatacgacctgtcttcaagtctcccagcagtaggtaccagcacccactctgatggcatcacaggggagtaagatagattgtgagaatccttggttgtagacaggcttagtgagctggctctctcaaatgctggttatactagtagtgaaattgtcacatagacgcaggacctctggttagtcacggtgtttcaggcagtggtgttagctgagatcatgcagccattttctccttcctggtcacartgttattctgtcaagaggtactgtacatgtctgagtttgttgccttcagccaggaggttgcactttccagagaggacca

SEQ ID NO: 813726 - DNA, 529 bp, Homo sapiens
gatagagaaaattgagaacaacaacaacaamaaaaaatacgcagtctctcaggtggtgataaacagtatggaaaaaaataaagcagagtttaaggaatgaggggaaactatcaaaagagatggagaggggatggacagtgaggtaagaagaaaatcaagatgaaatggtgtcccattgtgtggaaaatatttcaagaggagtgacaattgtttcaaatgcttaggagaggtcaggtaagctgaggactgaggactggacattgtgtttgaccatgtggaggtcatggagtggtgatgagaaaagccaaattagtttaagttccagagaggatgagagacaagaaaagggaaaccaaaaatacagaaaactcctctgtagatgttttgctgaaaaggggtgttgaggaatggggtagatattggagtgagatgagggccacaggagagaattttatatgataggaaatatgacagcatgttggtgctgatagggatgccccaggacaatgggtaaactgatgatgtagaa

SEQ ID NO: 813727 - DNA, 604 bp, Homo sapiens
taatcatattagaattacaggattatattatatgattatagttgttatggtgatctgtgatcagtgatctttgatgtaactatcataattgttttagggtgccaggaaccacccccacataagtcagcaagcttaattgataaatgttgtgtgtgtcctgactgctccactgactggctattctcccatctctctccctctcctcaggctttcctattccctaattaataaccttacaatgacctccacgcatccaagggaaaaagctaaaaatgatgaagcttgttgaggaaggcatgtcaaaaactgagacagcctgaaagccaggcctcttgcaccaagcaattagccaagttgtggatgcaaaggaaaagttcttgaaggaaatggaaagtgctactgcagtgcccacacgaatgacaagaaggtgaaacagccttattgctgagatggagaacgtttgagtggtctrgatagaaaaagtcaaacgagccatgacattcccctaagccaaagactaatccagagcaaggtcctaactctcttcaattatatgaagggtgagacatgtgagaaagctgtaggagaaaattatgaaggtagg

SEQ ID NO: 813728 - DNA, 628 bp, Homo sapiens
tattcagtcctgctgtgtagagcattaagacaaagaagggaagagaagaattagaagactaaagggaagaggatgaagcagtttgagtagtagtagttactccaggtaaacaaaaccataaatggaaagagacagcataaatatcaaataatttctccaatttatatacccattatgagatgcctataccacctgtttccattaagaaaattcctaagattttgtattcagtttggtctttccattagtgaatactgaatgcctttcatgtatcttcatttagaagtaatgcacgttcaggaaacatatcttaagaagtgtatcacggccgggcgcggtactcacgcctgtaatcccagcactctgggaggccgaggcaggtgtatcacgaggtcaggagatcaagaccatcctggctaacgcggcaaaaccccgtctctactaaaaatacaaaaattaggcgggcatggtggcgggcacctgtagtccctgctactcgggacgctgaggcaggagaatggcatgaacccgggaggtggagcttgcagygagctgagatcacaccactgcactccaggctgggagacagagtgagattccatctcaaaaaaaaaaaaaaaaaaaagca

SEQ ID NO: 813729 - DNA, 610 bp, Homo sapiens
gtgtccttttttcccaataaaaactctgtctcttggtcacatggacatttccatcctatttctgtttgaggtagaaatctgctcctgtaccttgagtcccacctgcttctgccttttcagttgacttgctccttcacctgccacttgtcttggatcaccagctttagccatggactaagtctttaacatgggtatttaaacatacttaaaacacttccttcaaaaagcaaagcataacagtgctaaagcaaattttcatgggtcctcctctgcctactgccttcctccctctaacagccaaataattttgcatctactctcaattttgcactttcctacaccaaatatactgacatttttagtgctaaatccaggaaattttttcttagtctttgttttactcagattctcttcagtatttgaagagtgtaggccactctctgtgcataaaacagtctattcctccatgggctcctagctaacagcctgcagtttgtcagttttctttggggtttcttgatcctctgcctaccactgaaatggcagtgttctttygtcagcactttctgctgttaccccatattccagaggtatttagccatggctatgc

SEQ ID NO: 813730 - DNA, 601 bp, Homo sapiens
gccttccaagtagctgggacgacaggtgcacaccaccacacctggctaatttttgtactttatgtagagayggggtttcaccatgttgcccagactgagctcctgagctcgagtgatcccccaacctcagcctcccgaagtgctgggattacagctttgaggcactgtgccccacctggtagcctatccttaaggtaaccttctggttataagtgggatgagaccctttcactgggtgcctcattgaatcaacacctgtctactgagtgctggtctaggctctgcagcactctcactgagctaagagccatccaggggagtgaatcaactggatttctgttgaaattccttccatttcttcatgctgtattcttctttgtaatttatatttttctcacccaaccagagaagattttcagagtggaaaattccaatggaatgaaacccttccgcccagatttattcttggaaacagcagaggaaaaagagctagaagtgagtatatcttcccgtattcatttccttggcctgctataaaattaccataaatgtaatggattaaaacaacaaaaatttattcacttacggttctggagactag

SEQ ID NO: 813731 - DNA, 610 bp, Homo sapiens
tttaagatgcagtttcttacaaggtggtaccttcttgaataaatagtgctccatcttcagaaaaacaacgcctgtctcactcctcaggctgccccctccacmtacaaaaacacttaatctcactcgtccaaaaaaacagaaaaggaataaagattttagccagcattccaaacacaaaagctacctccacttttgggaccctccccagcctcccccaggtacctctgaatgagctgtctccctagactagaagtagacaccaaggccacctccatagtttaggcaaagaacacagaaaatcacgagtcaggagcctgtgggtacatctgatcccacagactggaaagatttaagattgaagagtgataactaagcaagtctcaaaaacgaaggctcttgatgatggaaggtagtgtaataagaatcagtacacatatttaggaaggggcatcctcccccaagccccaccctactcttgtacaaggtcagcacagaaaaggggattatgaaataagacaaaattaattctcttattattactttagaattctttcaagtcccttagttacagttcataatcttcacctccttaggaacggaaatcataaat

SEQ ID NO: 813732 - DNA, 624 bp, Homo sapiens
attcacggatagcttgccctcaaattttaacttcactctttcaggctaaacaatgacattttgaaccttccttcaccccaccagattgctagttttagaaataacytttatatgatcttacagctaagtagcccaaaatcctatgtatttttcttcgacttatttgaaattattgaagactttcagaaagttgttaaatgtttcaaaggtctgaaaaggaaaaaactgaaaatcagaaagaatatattctgaatctcaagttaggaaaaataaagaacagtatgttcttctaccatccttaaatacccataacattagtattattttctcatcaagataatagatacagtgttaatatttaatttcaaaattaacactgaaagatcaagctaccaaagacttttatgaaatattatttctgccttttggctggaactgccatcttccagtaattcaccaaaatgattaacacaaaggcaaagagaaaaggcaccaacagatgttctccaggccttttagaacacatggagttgttccttcggccacatacatggaaacctacaagaaaggtgatattgtagccaggtgcggtggctcatgcctgtaatcccagcactttgggag

SEQ ID NO: 813733 - DNA, 513 bp, Homo sapiens
ttttaaggaaagaagcagtggaggatggggagagtaactattgcagtgtccatactaattcctagaytcctttcaagatttaggaccgacagcaatccaatttggctctgagaatactgtttaaatccctcctcagcaattcagtccttttccctcttcctttctttagtcagcaggctcccatggcgaccggttttaaaagaaatcatcctcttcagcagttacctagcaccatggcaactaggacgtcagcaaagcaggatagaccctgcacaaaacagctccaagcaggctccctccctgcctctccagttcagccctgcctgaggcctagggatggggctaatgacatctagacttgtacaccccagaattcctatgtgtttctgtggttttccccataagcatagatatttgggcatgcagtaaactatgttacaggaatctccctcccccccaccaaaaaaaaaaaaaagaccatatttaaagagtgaggatgggtgatgggatggg

SEQ ID NO: 813734 - DNA, 610 bp, Homo sapiens
ccttctctcctctaaattctaacccttccttccctggtttcctcccagccaatgaccttgcttcctccacttcactaggaaaactgaagcagtcagagtagagcaaactcctccatctgtttcatccacctgagcatctgcccccaacagctctaccttcctttctgctacctaaggctggcattaccacttaggccttcactcctttctccaatgggctactcagccattctctcctatatcataaatatgctaatctctgtagaaacattcctatcggcacacagccatgcttcatctcctccattttaataacccaaaaactctctatatcccaacttccttctccagccactaccccattctttcctccccttcacagcaacactctgaagagttccagtttctctcctttcatttgctcctaaacccactccatccctacgtcttaaccctctggtcaaatccactgatggcctacacttggctaaatctaatggtcaattatcagtctttgaataccatgtaacttctgacctgatgccattattttatatgccaattaagctgtcacatgccatsaactgtaaaatgcattctgattttagag

SEQ ID NO: 813735 - DNA, 555 bp, Homo sapiens
aggcagggaggatcccttgaagccaggagttcaagacaggcctggacaataaagcaagaccctgtctctacaaaaaaaawaaaataaaataagttagctgggtgcaggggcatgtgcctgtagtcctagctacttgggaggctgaagtgggaggatcacctgagcccaggagttccaggctacagtgagctatgatcatgctattgcactccagcctgggtgacagagtgagaccttgtctcaaaaaaaagaaaagaaaagaaatttattttgcacagatatttggggctagaagtctgagatcaggagaccagaatggtagattctggtgagggccctctccctggctcgcagacggttaccttctcattggtcctccctcccatgatagaagcgggctacagagcaacctggggtctcttttgtaaagacaccaagctgggtgtggtggttcatgcctataatctcagctctttgggaggccaaggcagatggatcacctcaggtcaggagacaaggtgaaaccccatctctactaaaaatacaaaaattagc

SEQ ID NO: 813736 - DNA, 555 bp, Homo sapiens
cctttctggcactgctagacagagattaarcaataatttagcttgaatttctaagtgtaatagcattaggtaacatagttccatgacctcagaaagctggagaatcacattctgatgtacataaagtacatatatactcattttattaaaatgagattgccaatacattttgttttggatcttggaaacgtcactcctttattcttctattcactcattttcatttaaaaatattttttagtttctattatgtctcagtcactatggtagatgctcaatttcaatagggaataagacaaattagctgtgaagcaatactcaggcaatgaaatatgacaagtactagtgtgtggttaagaccagggtactattagggcctgcagaaatggcacctaacagttttgggggttgttggctggggtgtgagaatgttttttggagaaagtgatttaggaaataacatacagatgccacaaatataatactgataacatttaaaatatattttctattttagtgctgcaatagtattttctacacttacacttctccagg

SEQ ID NO: 813737 - DNA, 626 bp, Homo sapiens
actctgaccgtcaccagtgccttgaaaggaaaagggggtgtcctagtgaatatctgggggcasggctgcagagtgggcctctctgagaaggtgacatccaagctgaggcctacaggatgagaagatgccagctgtgcagatatctgggaacagggccccaggcagaagaaacagcaagggcaaaggccctgaggcagcactacctgaaaaagagcaagagagctcgtggagccggtgcagagtgggaggtgacgggagcttttcttcacccgtccaagctagatgactgtcaacagatgagatggcatctgagctgggcaggagtcagggcccagaagcttctgctgataggatcagacaatcctgctagcccacgcatttgtttgtatccagaaatttgcggaggggctactgaacctctcaggaaaatcagttgaagcctctccctctcaggggcttggaggtcgggcacaaagccagataacagggactccagaaagagctacctcaagggagtagtgggcatctcagaaccagggctgagactgaccaccgttgtgagaactcaccctcactcggccaccctggcagggtccctgtgcctgtgaaaggggctgtgcttgtgc

SEQ ID NO: 813738 - DNA, 583 bp, Homo sapiens
caaaaatctacaaattaaaactgtgaagtgctttttccctcatttatgtgtcaaaattttaaaggttaataatattcaacgttggagaactcatggaatgcaaattcctgcagcagcttygtagggcaatttggcaatcactatcaaactagtaaacgggcaaacccttcaatccagcaagaacacttcagggaatttattctccagaataattttcacaacctaaaaagttttaggtaaaccgggtgtgatggctcatgcctgtaatcccagcactttggtaggtggatcacctgaggtcaggagtttgagaccagcctggccaacatggtgaaaccccgtctcaactaaaatacaaaaattagccaggcatggtggcaggtgcctgtaatcccagctactcgggaggctgaggcacgagaatcacttgaccctgagaggcagaggtttcagtgagcagagatcatgtcactgcactcccgcctgggcgatagagcaagactccatcttaaaaaaaaaaaaaaaaaaaaaagttttaggtacaaagatgtgcattgcagcaccattcataatcatgaaaact

SEQ ID NO: 813739 - DNA, 583 bp, Homo sapiens
caaaaatctacaaattaaaactgtgaagtgctttttccctcatttatgtgtcaaaattttaaaggttaataatattcaacgttggagaactcatggaatgcaaattcctgcagcagctttgtagggcaatttggcaatcactatcaaactagtaaacgggcaaacccttcaatccagcaagaacacttcagggaatttattctccagaataattttcacaacctaaaaagttttaggtaaaccgggtgtgatggctcatgcctgtaatcccagcactttggtaggtggatcacctgaggtcaggagtttgagaccagcctggccaacatggtgaaaccccgtctcaactaaaatacaaaaattagccaggcatggtggcaggtgcctgtaatcccagctactcgggaggctgaggcacgagaatcacttgaccctgagaggcagaggtttcagtgagcagagatcatgtcactgcactcccrcctgggcgatagagcaagactccatcttaaaaaaaaaaaaaaaaaaaaaagttttaggtacaaagatgtgcattgcagcaccattcataatcatgaaaact

SEQ ID NO: 813740 - DNA, 583 bp, Homo sapiens
agtgatttcagtgaacatagttgtmtcaataagtgtaatatttttacaataagtctaataagtttaattttaaaaatatttaaaaatcttttatttttaattttaagcagatttcatagatacatcccaaatgataaatgtacttctccaggcaccttcaaaaattgcatgtttttatttttttcacctttcctaaaactgttttgcgatagaatgggtgtcagctcatcaacaggttcatgttctttgcttttcaaattatctaaacctctggtaggtgctatttctatgcttggtattttgctttaaaaaaatatggagcaaatactacatttgaaaacacaaacaaaacagtctaaaactcttattcactatgctacttaaatacaactcaacaagggatgatatgtgctaagtcatataataactcacttttaaaaactgaattgtagcacagtgctcaagtgttgtaccttttccactctatgtcctaagtgatatcatgttctcatttattgaatgcccctgatattcaagtcacctagctgtaaattggcttccctcccagcctaataacttggag

SEQ ID NO: 813741 - DNA, 507 bp, Homo sapiens
ggctcactgcagccttgacctccctgggctcatgtgattttcccacctcagcatcccaagtagctgggactacaggcacatgccgccatgctggctaagttttgtgtgtacatacatatgtgtgtgtgtgtgtgtgtgtgtgtgtgtatttttattttttggagagacagggtttcaccatgttgcccaggctggtcttgaagtcctgggctcaagccatatgcctgccttggcttcccaaaatgctgggattacaggtttaagccactgagcccggctgactatagacattttttctacatttttatatctgaatgtttcccagtcaacaaatattaattgaatcagggtcttctgcagggcaggctctcttccaggtgtttgatattattgtctttgctatcagaagattrtagtctaaaggaggagatctgaaaaacctgtggattgagagagcatgaagtaagtgctgtgatagaggtaacagcgatgggctctgtgcccctg

SEQ ID NO: 813742 - DNA, 528 bp, Homo sapiens
tggtaaaatggagatggagttcataaagaacaacatggtaagccttggacagacaggcacttgggaaaaaatatgtcaaagccagaaaatggaaacgagaaaaatatttcatggatttcagcagcctcaatactccatgctgccttgccaagtttagggggaaaaataatgcttttggagttaaaaatagaaaaaacactgaatcaaatgtatttttctttttaatcaaaagctctaccagtgaccttgatgctttgacaattttggatcatgcatgcgaaataatcaacaatccattctgtactcagacaacaagtgaaatcacatgttttcagacaaactagcttatgaccgcttcgttagcttcatactaataaagggtttaaaatgtctattgtcttgaaaatagattatatacartccctgcatgtaaaaagtctcatctttgattttgatcactgaataaacaaagatgacaaaactgtagaacgtctttgtctgattttttcttcaaatcaccctttaaag

SEQ ID NO: 813743 - DNA, 558 bp, Homo sapiens
aaatcattgggtagaagttattgtgctgtagcctcaaaacgtccaagattactcagtcaagctccatttttgcccttcagcactgaatttctcttactcctgattctagtgtatttcatgtgtatgttatctatcatctatctatctttctatctatctatatctatctatctatctatctatctatctatctatctatctatccatccatccatccatccatatcatcatctgaaactaactgatcattagagtgaatttagaggacgacgctgggttttatattaggaaaaactgatagcagctgtctttattaaggccaactgaccaagcaaataacatgtcttcagacctggtagagagatatatacttgcatacactttttgattactgacggtatattcaaacaacatcctgtgggtaagttaaaggcacaaaatgaggaaagttaaataaattgctgtctcaaaagagatacagtttgctaattactcaagtgaygtacattgacagcattctataccttgctatctagtgaagtagtcatttaaagttct

SEQ ID NO: 813744 - DNA, 573 bp, Homo sapiens
ggttctctgctcttgaaccctgttttctgttgtttaatatgtttatcaagacaatacgtrcactgctgaacatagacccttatcagtagttctaactgggggcgggttcccctgataggtcccctccctttgtatgggagctctgttttcactctgttaaatcttgcaactgcactctcttctgatctgtgtttcttatggctcaagctgagctttcgctctccgtccatcactgctgttttccaccatcacagacccactgctgacttccatccctctggatctggcagggtgtccactgtgctcctgatccagccaggtgcccattgccatttccgatcgggctaaaggctcaccattgttcctgcacggctaagtgccctttagcctgggtgcatcctaattgagctgaacactagtcactgggttccacggttctcttccatgacccacggcttctaatagagctataacactcaccacatggcccaagattccattccttggaatccgtgaggcgaaaaccccaggtcagagaacacaaggcttgccaccatcttggaagtggcctgc

SEQ ID NO: 813745 - DNA, 504 bp, Homo sapiens
tgcaagtaactcttacctcctcaagggtaattgtaaggattttttttttcctttgagacacgatttcactctgttgcccaggctggggtgcagagtagcatgatcatggctcactgcagccttgagctccccaggctcaagtgatcctcccacctcagcctcttgagtagctgggactacaggcacatgccaccatgcccagcaacatgtattgtactttttgtagaggtgagatttcaccacgtagcccaggctgatctcaaactcctaggcttaaatgatcctccggcctcagcctcccaaagtgtagggattacaggcgtgagccattgtgcctggcctgtaagggttaaatgagatcatatatgcaagagtttgacacagtgcatggcacaartaagtcctcctgttaaactattacaattctaactcatatttctgtaagaactttaatttcatagttttttcttctgcaactctatttcctactgtcactctaagaca

SEQ ID NO: 813746 - DNA, 622 bp, Homo sapiens
gtggctggtgatgcgatcgaggaggcaagcagggctgcatcrtaggaccctagggtatggtgagcagttcattctcggaccacttccagtcagacagtggaaagagaagctgggaaaccagttagaaggtgactggtaggccagggatgaggtgatagggcttgggcaagaatggtagcagtggggagagagaaaggtggatggacttgtgctgaaaagtgcaaactcagcactcagggacaactcagtattctcatctcttttgcagacctctctctgggactcactgagcatgggcagcttccctgtagccacctgtttcatccaccacatggcattctctgagattaagtgagggagaaagcacagcatgattaagagagataaaaggattataacaagaaagttataatcccagattatcaggtcttagaatcaggtattttagggaatcttgtatattccccaagtagtaaaaacaacagctttgatttataaggtgaggctcctttccaggaggtccagagcagaagatactgttgctaggcttggatctatttttacaattggttttaggtattgaccaatatcctgccaacaaaggtggttctaggtgaatcct

SEQ ID NO: 813747 - DNA, 639 bp, Homo sapiens
gtgtgctgcaagactgtatgtgtttctgaatcctctgcttcgagggaaaaatcatattagtagaggataagtttactcagtactggaaaaattgtgtagattttaggaacttgttggagcagaaaggcgattaattgtgagaaatgaaagtcaattttagtggcagcaggtatatcaagtacatcaagtcttagttcaatgtttatagattttgaaaatttataggttcattattcctttcatttgtttcttcttttgtcccatttttgtcaagcatgtatttattttgtttgactccttttttgtctcatggactgagaagaaaatataactaaggttggattatcccacaatttgctctgtgtctaattattctgaggtggattgtaatgaagccagcaagacttatacattggaattttaaatgtatgggattgtaaggagggtagaagctacaaaccaaagataagatatgcctgcagatctgcttcagatttcctgagggcagtagatgaaattatttctaagggcctttttyaccactgctctttaagtatatgagtaataaacaaaaagaacaaagtatgtggttcagaaggaataaaacaaaaaagaaagaaaaggatcaatgaaatagaa

SEQ ID NO: 813748 - DNA, 618 bp, Homo sapiens
tttcacatctagaaaatgccatttcctttttttccccacatttatcagtgctttagccaatgtagtatgtataccagatatttagataacactttgactgctaaagaaccattcacattgtatggtgtttgtctacaacactatatacatcatatctagataatggtagaaaataagagtagtagaattttacttgtatccaactcccgaaccaaagagcccagtattatctctgtaatcttcacaatgatctgctaagaattggcaagagcaggaactaccatccctgttaccactgggaagccaatccccagaaaggtaaagtggggttacactttgagctcaccgaggtagcaagaggattaaaatgcacgttcctttgcaccacaccagaccttcgttttcaagtggattaagttttgtgaatggaatcttggaccaatcatttctaaaatacagtactccctgtctgcttcatctcaacaaatgactttctrgcctagagccaggtggtggttagaataacctggaagtcatagagtagaccctgtaattttgactcaccttcagtgtacgctgtgttatatctgtcagttctcattagtatagtggtgagta

SEQ ID NO: 813749 - DNA, 463 bp, Homo sapiens
gaaagtggtcctgatgcatgcatattaaacatgcatcttacatatgacacatgttcaccttggggtggagacttaatatttaaatattgcaatcaggccctatacatcaaaaggtctattcaggacatgaaggcactcaagtatgcaatctctgtaaacccgctagaaccagtcatggtcggtgggctccttaccaggagaaaattaccgaaatcactcttgtccaatcaaagctgtagttatggctggtggagttcagttagtcagcatctggtggagctgcaagtgttttagtattgtttatttagaggccagtgcttatttagctgctaragaaaaggaaaacttgtggcagttagaacatagtttattcttttaagtgtagggctgcatgatttaacccttgtttggcatggccttaggtcctgtttgtaatttggtatcttgttgccacaaagagtgt

SEQ ID NO: 813750 - DNA, 549 bp, Homo sapiens
catagtcatttattacagttaaaggaaaatgttataaaacatttggatatttctcatatgctccttgcataaagtaarcagatttatatttatttcaatatgatcaaaccctagagcttaaatgctttcttttgtatataatttatactatataaatatttaaatatacaacagtaatagttaatatttaagaatagtaaatatttaaatatacaagagttgtccaaaacaaaaataagagttctggatcttactagctccaatactactttactttgaaatattgaatgagtgatttcatatttctaatattatttatctttaaaattgggaaaaaatatcctactgaatatgattaattgagaaccctaggtacaaagtattccttaaatttgaagtgataactactgaaagtgtatcccagagggaaatggtctaggttggaagatatacatatggtggtcataaagaacattcagcctcattggacttctaaaaatatttttttgctgtgagtgatagcctttttttttttaattaattttttta

SEQ ID NO: 813751 - DNA, 385 bp, Homo sapiens
gggacagtcttggcaggcacgaagactcagtgagatgtctccatggttcagatgtgaactgatcaagcataaaccaggagggatatggaattagaatggaaaagagctgtrtgagagatggaggaaggattagtgagagatgtcagtgagtgactccatacagaaaacagagaaaggaatgaagaacgactccaagattttgaagctcagagaaatgcccaaattaagcaagtccagaaaaggaagctggctgagcaagaaaatggaagcatttagctttcccaatagctttataagattgaggcagagttagaaggcatcgttacccttttagaaaccaggttaagacaaacacatttttctgtaaactctttaatcattgttt

SEQ ID NO: 813752 - DNA, 385 bp, Homo sapiens
gggacagtcttggcaggcacgaagactcagtgagatgtctccatggttcagatgtgaactgatcaagcataaaccaggagggatatggaattagaatggaaaagagctgtatgagagatggaggaaggattagygagagatgtcagtgagtgactccatacagaaaacagagaaaggaatgaagaacgactccaagattttgaagctcagagaaatgcccaaattaagcaagtccagaaaaggaagctggctgagcaagaaaatggaagcatttagctttcccaatagctttataagattgaggcagagttagaaggcatcgttacccttttagaaaccaggttaagacaaacacatttttctgtaaactctttaatcattgttt

SEQ ID NO: 813753 - DNA, 615 bp, Homo sapiens
tcagacaaccatcactaattaatcttggtggtcatttagacctatttgccattacaatctagaccagcccttatacagaaaataaaacaataaaaacaagaaaggcgaataacttatatccatcttcaaacagcgtgtgtgagtcaaaattgagattagaattcaagtgttcctaatcgccagtcttgtgcccttccttatgccaagagaccatcaggccccttgaagtatctggagatccactccacctctccagattaaacagtcctaaataaatgacccatgaaatgttcttgggttcaactttcatctcccaccagcgtgcaggataaatggtgtattagtcggctattgtagtaatgctgcataacaaaccatcccacaaatccagtgactaatagctacaagcatttattctcacattcatgggtctgcaatcaactgcggctcagctgacgtgggcctggcttggctccatgactccacatacgctgcacgtgtgtttattctggagtcctagataaaagggcagtgactacytaagtcatgtctttctcaacatggattaagaaagctcaaaacctgaaccaaaacatgcaagcatgtttaagaact

SEQ ID NO: 813754 - DNA, 624 bp, Homo sapiens
ggcctgaggggagggaatgaggttttaggaaccttaaccgagagaagttaagcagtaagtcattyatttggacaatagatagaccaacatagacagcatgtctagattttctaaacattaattaaaactctccaaaacctagcaaagaaagacacgcagctaaagctgttattttcttacccaagatgcaaaaggaaggaggagtttttgaagaacaatattgacttagcactgaattagatgctttatatttaatatctcacttaatcccacagaagaccttattttctcccacttttcagatatagaaattgaagctaaaaacactgaaacgttctggacaacatcactcaagtaaaacattttcagagctaagatttgaacccaggcctaattctgaaacccatgattttaacccaagagttgtcttgctttactgaggttagtcaatgggatcctacttagagagatgagataaattggtgagggggtagaaaggagtgaagcacctattctctaaaagtttatgctatgactagaatacctaggtcaaatctgtgccaaaaggaaggggtgcagagggagatccagtgaaaggcaggaagactgaattggtataaggat

SEQ ID NO: 813755 - DNA, 580 bp, Homo sapiens
tcaaaagcattgcgatacctttctgactaattatactgcacatcttctggaaatggatattttgtcctctttggtgtctatgtaaatgttataaaagtttratttttttgaaaattgtttttactctttgtatcacttattgtttctaatacggtgattgttcaagcactgtagccctgtatctgaaagtagcacttggtgtagaagacattcttgtttaaaaacattggcagaatttatcgttttgtttgttttttgtttttttcttgtcttttggtacagaactgaaaaaatcacagtagtatgtcaccaatgttatgtaatcagcaatggtatctcttgttacagatttttaaacagaagttattattaaagaaaagatctgcagctttaagtattataacagtgaatttccatagtaagaaaaggcaaaaatatctctttctactgattctggagtttttccataatatttgccttacatgagatagattcatttgcttcagtgcttcttcatatatgccaagaaacatgtgaagtatatacttattccatattaatttacctcctgtcacttaca

SEQ ID NO: 813756 - DNA, 645 bp, Homo sapiens
atttcttggtaagtaggatatctagagctgtgctatttaatataatccctagtcgtatgagtctatttaaatataagtgaatttagagtaaatatgcagttattcattatactagctacattttaagtgtacagtagctgtatgtgggtagcagataccattttgaacaatacagacatagacatttccaatcatcacagatagttttcttggacagtgttgttctagggtattttaaataaaggaatatttgatgtttactatttataatgatgaccgcacagaaaatgatctaagaagcttggtgtttcatagtctctttgcgtcttttcactacccctctcaaatcttgatgagattatttggcatgctctttgacagacaaaggctactttataataactttaatttcaatacaaattaaaaaactaagcaaagtatttactcaatgacttttaggaaactggagttttgaatattgtcttaaagaaatggctaatcaatgagatcaaygctttctctgcagcaccttccaaacctttccttctgagcaccccgccattctactcggcgtgctgcggtgggtcctgtcggcgccctgcatcctccactgcttttccaagtaagtttttatccttcatcagc

SEQ ID NO: 813757 - DNA, 615 bp, Homo sapiens
ggtgtttcgccatgttgaccaggctggtctcgatctcctgaccacaagagatccacccgcttcagcctcccaaattgttgggattacaggcgtgagccaccatgcccgactagttgttggcatctttcttgcttgcttcctccttgcctgattgaccttagtggctttatgataactttctaatcgcaatctgggtcctgaccctctgctccactttccatcccagcactcactcattgaggaaaagcagaggcatctccttccctcttgtgttcgaggggaaccacagcctggcctattggaccaggctcacaattccaggctcctgcgcacatctgtccccccaagttcctgctgctctccttccccaggtcccattcctgtccaccctcccagactcctcacagcctgctaaacgtccatggagttcaaagcatggtgacagcacctgacttactggcgtaggctctattcttcttcctgtctcacctcaggtgtggtattggagagatcttccacctygtgcaaatgctggtcctatctaaagtctcacttggcccctctagtgactcttagcagaaagttgaggtggggagagcatgtaagcaagccctg

SEQ ID NO: 813758 - DNA, 602 bp, Homo sapiens
atagaaatgtttgaatgcatgggtcttatctaacttatctcttctggacccatgtttaaatacagttttatttcatgaagagaaatgaaaacccctacactgatatctgttttctatgggactgattctgaaattcttaactattaagaatattttaatagcagcatgacatttagcagtaatccattaagggcagtacctctaacaaggacgccttccagcttcagcgatgttacttacgtttgatgctacttaaagtaatgaatgacgttttaaggaatccctaaccctactatcagaaaaggtgtttgttaaagagccttctcttgtgtgttacgcatgaactttggtctgtaggtgttaaatggaacctctccatgtgtatatagtatttccttgtataaagcactttactacctaccacttgtgttgtgaacgtttggtgactgctgttgaaagaaggaaaagggtgtgtgagaaagcctactgaagcagcagcactgccactacatgtggacaaaagtgamcatataaaagaagttgtgctatttaactctgaatacttggagaaactaggtgaagatgcaaccagaaaggagaat

SEQ ID NO: 813759 - DNA, 525 bp, Homo sapiens
agttacctagcgtgcagtaaatgccagttgttataattattactattactgcttarggtggaggccatgggagtgtttggagaggagagggtacttgggctgggtcatgaaggatgaattgaggttggctttgcagaacttggcaagagtccagggccaccatgtcgcacagctccaagaggcatcattcccatttctgtctctgtgaatggcacctcctggagttgttcagttcacagctaccacggcaatgtgtagtggctttggagtcaggatgttcccccagcaggaggaaggtgctagaagagttgtcttctcagagagactgctggtttccccctgcctagctgtggctgtagggaacaacatgcttaaggttgccagagagatgggatcacaacagctacagcaaatggacagacagcacctttggataatgcaattttgagagctgcaattcactgtgggaacaagacataccagtcttgtcctcatgacccagccttgggtgacccaaccatccag

SEQ ID NO: 813760 - DNA, 556 bp, Homo sapiens
ttttacatggcaacatagatcttgagaagacaaatccaatgttcaagcacttattcagcctctacttgtatcatgcttgctaatgtcccacaggacaaggcaaatcagatggccaggcccatggtcaatgtgggagagggtataatactggaaggtgttattaattgtggaccaccattaattgagtctaccacagctgacttgatcaggtttttgtgaagatgaagtaaggtaacacatgtaaattgactgccacatggtagattctcaataaatattagctattattattaagacatagcttcaaaatcaattcccaggacctgtagatattagtcttattttactaatatacgtataggagaagaaaatgaacatgctttcttgtttctttattgttttctcccgcagaagtagagctacggttctttttcctttgcactcaattgtactgcctaatagatgttctatgattatataaaatttggtgaataagtaatctactgctcttgttttcgaaaartaaaaattcccttttaatgttctcattaaaatg

SEQ ID NO: 813761 - DNA, 613 bp, Homo sapiens
cctgttactcctacctatgctccctaattcacccagctgctggtcatccacagcccctaactcagtcattcagagtttcaccaaaccagaagtctctttcctcagagcaggtggggctgamtttccattgctctaatgctaaaggaggtttggggtaataccctatctccatgactgggctatagattctagaattgttccatgtaaagaatgaggattggctgggcgtggtggctcatgcctgtaatcccagcactttgggaggccgatgcgggcggatcacttgaggtcaggagttcaagaccagtctggccaacatggtgaaaccccatctccactaaaaatacaaaaattagccaggcatggtggcgcatgcctgtaatcccagctactcgggaggctgaggcaggagaatcccttgaacctgggaagtggaggttgcagtgagcagagatcgcaccattgcactctgcagtccagcctgggtgactgagtgagactccgtctcaaaaaaaaaaaaaaaatgaggatctctgaaaatagtcctttgtcatctttttaagcccaaatagaggaaggtttccagtgagttgggccatgaagatggagcaga

SEQ ID NO: 813762 - DNA, 613 bp, Homo sapiens
cctgttactcctacctatgctccctaattcacccagctgctggtcatccacagcccctaactcagtcattcagagtttcaccaaaccagaagtctctttcctcagagcaggtggggctgactttccattgctctaatgctaaaggaggtttggggtaataccctatctccatgactgggctatagattctagaattgttccatgtaaagaatgaggattggctgggcgtggtggctcatgcctgtaatcccagcactttgggaggccgatgcgggcggatcacttgaggtcaggagttcaagaccagtctggccaacatggtgaaaccccatctccactaaaaatacaaaaattagccaggcatggtggcgcatgcctgtaatcccagctactcgggaggctgaggcaggagaatcccttgaacctgggaagtggaggttgcagtgagcagagatcgcaccattgcactctgcagtccagcctgggtgactgagtgagactccgtctcaaaaaaaaaaaaaraatgaggatctctgaaaatagtcctttgtcatctttttaagcccaaatagaggaaggtttccagtgagttgggccatgaagatggagcaga

SEQ ID NO: 813763 - DNA, 593 bp, Homo sapiens
tagttctttaaccttttttttttaaacttttttttttaaacatggactgcttcacaaatttgtgtgttaacytcacacagggaccatgctaatcttctctgtatcatttcaactttagtatatgtatgactgaagtgagcactcaccttttattctgaaacaatttcatacataagagttgcaaaaacagtacaagagttcccatatacatttcacctagctttatcttatattaccatagtacaattagcaaaactaagaaatgagcactggtacaatactattaactatagactttattgaaattccaccagttttttaattaacgtcttatttctgtttcaggatcatacactgcatttagttgtcgtgtcttcctaagtctaccccaatctatgacagttactctgcttttccttgtctttcatgacctcgatattgttgaaagtattggtcagatattatgtagaatgttcctcaatttgggtttcttggtttctccaataaaatagaatcaagactccttggagaagcggttgattccagagctggggaagggcaaatacaagatcagcctggaacatcttgcaata

SEQ ID NO: 813764 - DNA, 542 bp, Homo sapiens
tgcatgggtgattcagagctgactctggtcttcctcaaagcacagggcatagcttttattttcaggtgtcggcagcttctgttctttgcattctaagagaaagctgctatttgttttccatgctttccttcccactatcaaaaagcagccaaggccaggggaggtggctcatgcctataatcccagcattttgggaggccgcagcaggcgaatcacttgaacccaggagttcaagacccgcctgggcaacatggcgaaactccatctctctacaaaaaaatacaaaaatcagccaggcatggtggtgcatgtctgtgaccccaactaccccagctactcaggaagctgaggtgggaggatcaccagagctcaggaggtctaggctgcagtgagccgtggtcacaccactgcattccagcctgggcaacagagcgagascctgtctcaagaaaaaaaaaaaaaaaaaaaaaaagcagccaaaagatgtggtatctgctattgcatgatccacactccgctttctatgcttttgttttaaaaca

SEQ ID NO: 813765 - DNA, 614 bp, Homo sapiens
ttcaatgttagctattattacatgtcaaagaactggggctagagcctaagactctagtcctaaaactcccgtctttaccccagcaccatgctgtccctcgctctgatgcccactgatggactctctgggaagtatgacatcaatggtggtgatacaggcagagagggcctactgtgcctggtaatcctgtttgcttctcagtctgaacctcagaaagtctgaagcctttgtagtttcctcttctcctcgagctgcatgtgcccctgggcacctgcacacccacactcacagagtagttgctctttaagaaattacccccattttgggaacctctttttatttcagaaccataagcaatgaggcatggcttatgcttattcaggcagacgatcagccagtcgtcctgttcagtcttataatggaccatggctgctgggcctgcagagaagacacacatgccgggccaggggaatttagcatttccatctcttcctccattatttccaacccccaactggaccatcctttcatcctattcttgcctcctgggctggtgcktgaccacgccccaattatttcctctgagccactgttctgcctcttatttcaagctc

SEQ ID NO: 813766 - DNA, 605 bp, Homo sapiens
aagattgatgaaaaaggacaccaaaagcatcaacaatgaagaaaaagattcatcgagtaaactatattaaaattaaaattttctgttcaaaaatcaccaaaaagggaagaaaagggcaagagcagaagatatttccaactcatataaaaattagaagactcttatctaaagtgtataaagaacctatacaaatcacgagaaacagacaacccatcgggggaaaaataggcaatggacttgaacttcacaaaagaagatatccaaatgtccgataaacatatgaaaagatgctctatctcattagtcattaaaataaagctaactaaaactataatgaggtaccattattctcccaccagaatggttaaaattaaagattgacaataccaagtattggccaaggacatggagaaatgaacactcatatactgctactaaggaaaggtttttacacccattctggaaaaccatttggcagtgaacacacgtataccctaggatccagcaattmtactcctagctatgtacccaatagtactgtgtacatttgtgcactcaaaaagtgtgtacaacaatgttcatagcagcattatgcataatatcct

SEQ ID NO: 813767 - DNA, 635 bp, Homo sapiens
tatacttactatttgtgcctttttatctttatggtatactacacttcaataaataagtaaaaaattaaatgcaaagtagaaggaagaaaataagataagagaagaacttaataaattagaaaacaaaygcacaatatagaaaatcaacaggccaaagttggttctttgaagaaaaacccagagaaactaattaaggaaaagagagaatacataagtagataatttagagaacatgaaagtgatcatcactacagattcatcagacacttgagaatcataaagatagtattaataactttatcacaataaatttcaaaacttagataaaatggacacagtacagaaaaatataacttataaaagctgactcaagatgaagtagaaattctgaagaatcctaaaattatgagtaaattatgccaaatactaaagaaagaaataatgccagatattacaagaactctatcagaaaacaggaaaagaagaaattcttcctagctagttttatgggacctgcatcactttgagtccaaaatcaacaaagatatgagaaaggaaaattacaggccaatcttgtttattaatatagatgcaaaatcacagtcaaagtattagcaaaattaatccagtgagaa

SEQ ID NO: 813768 - DNA, 602 bp, Homo sapiens
atagatccagacttatcccagctcctggaagggagcctctaaacctttggaattcctcaagtgatccgagtgtcttagtyattcatggtagacccccaggaccacatctgattgtttatgctaaccatttgactctgggagagttagccttgccagaaagaccaaccatatgattagccaggaacaagacagagtcttgattggagggcaaactgtgtggcacactcaattaaacgaaaaggtggcagattgtaagggggcttttcaggaaactcctccaacagcagagctcaatgggaacaacgtgggattttaaagccagacctgggttcacaactctagttaatgcttcttacgagtggtgtgatcttgggcgggactctggagcttccatcttctcatctgtaaaatggggatggtaatattagggtcactgtgggatcaaatgagatcaggtggggatggctcccagtgcagcctgacacgtggtaggaagttagttctcttggaaactagaataacatgccaccaccacctggtggcaagatttggaattgcaaacaaaagtctccagaagaaagcagttttaagatggcttgcct

SEQ ID NO: 813769 - DNA, 602 bp, Homo sapiens
atagatccagacttatcccagctcctggaagggagcctctaaacctttggaattcctcaagtgatccgagtgtcttagtcattcatggtagacccccaggaccacatctgattgtttatgctaaccatttgactctgggagagttagccttgccagaaagaccaaccatatgattagccaggaacaagacagagtcttgattggagggcaaactgtgtggcacactcaattaaacgaaaaggtggcagattgtaagggggcttttcaggaaactcctccaacagcagagctcaatgggaacaacgtgggattttaaagccagacctgggttcacaactctagttaatgcttcttacgagtggtgtgatcttgggcgggactctggagcttccatcttctcatctgtaaaatggggatggtaatattagggtcactgtgggatcaaatgagatcaggtggggatggctcccagtgcagcctgacacgtggtaggaagttagttctcttggaaactagaataacatgccrccaccacctggtggcaagatttggaattgcaaacaaaagtctccagaagaaagcagttttaagatggcttgcct

SEQ ID NO: 813770 - DNA, 602 bp, Homo sapiens
atagatccagacttatcccagctcctggaagggagcctctaaacctttggaattcctcaagtgatccgagtgtcttagtcattcatggtagacccccaggaccacatctgattgtttatgctaaccatttgactctgggagagttagccttgccagaaagaccaaccatatgattagccaggaacaagacagagtcttgattggagggcaaactgtgtggcacactcaattaaacgaaaaggtggcagattgtaagggggcttttcaggaaactcctccaacagcagagctcaatgggaacaacgtgggattttaaagccagacctgggttcacaactctagttaatgcttcttacgagtggtgtgatcttgggcgggactctggagcttccatcttctcatctgtaaaatggggatggtaatattagggtcactgtgggatcaaatgagatcaggtggggatggctcccagtgcagcctgacacgtggtaggaagttagttctcttggaaactagaataacatgccaccrccacctggtggcaagatttggaattgcaaacaaaagtctccagaagaaagcagttttaagatggcttgcct

SEQ ID NO: 813771 - DNA, 550 bp, Homo sapiens
tttattgcactgtttctggtacagaattaaatagcattatactcaaatatattggcttaattgacaggtagagatttaatcctgttaattacgtagcctgcttgaaagcttctattaaccccttgctgaattggcaggattcagaagaggtatctcagcacctattttgagctcaggtaaagccatcattgtccttcttcaaaaagtttattctcactagcaccaaatcatgagtgaacatgaatacccatgagacaagtgtgtcatctagaactgtctcctgtctgactccatacagcctacctcttgggtaaatggtgtcagaaggtttacagtcagcgtctctcctggtttggggctttttatgttagtatttaatgtgctaacaggtgtgaaagttgttcatttacttattcaacacacttttattgagcacttactatgttcaggaactttgctgggctagaaaaaactaaaatatatgtacggttgagaccttcaaggaacttacaccatataggatactcatkaatgacaataatctatgccg

SEQ ID NO: 813772 - DNA, 648 bp, Homo sapiens
gagggctactagtcagcctgccawaagagccatttacctatttcttcacctgcctagtcaaaggaacactaggcaaacacgcagcccagcgatccaggatataggaatgagaagacacataaatcgtgggatgaagagggagatatagggccaatgttgagttcgactttaataaagattttgaggagcctggatttgaaaggcctaagatgtggaggatgaatatatcatagagtagaaaatgagggttagcctcagtcagacacaccagcagctgctcagagtgagctcttcatctcacaaattgcctcagctctgagccatctaatccacatcagtgactgacagctatgccccaagtaaggttatcatgaaagtaacgcctcagcactgtcttgagacaaacatgagcataagtatcgtaactaattgatagtggaactgcactttccagcagaagacaacaccataaagactaaggtttttttacagacagactgttaaaacaagactagatgaaaacaagcaaaaagtaccatattgtgtgaactacactaacattttgaattcccaactatttacttgatacgggctgataattttattcctaattcaatgtcagatactcaaatgagcagagctcttgaa

SEQ ID NO: 813773 - DNA, 624 bp, Homo sapiens
aaagagatgactgagaaagagaaggctttccagatagtattaaggaccaagttggtgttcaagaccatgaatttgcagtaacscttacctctatcctaatgtgattaagacttgaatcatctccttttctccaaaaatgtgaaagatgtaatgtgatataaaaccattcacctttccattaaacttgtaagctacataaaaaatgtagggaaatagtaataacatatttttatagaacaattcagtgacatattcgacaatgttaaaaattcagtctcttgacaatctagttcacagtttggaagatcatgtttcttctcagaaaaagcctataaatgcttctcttagacaacttatctgattattcctgcttccttagtttcaagtgttcttagagaataagtaggttgcaatatgtacaaaatccactcttctaatcatgagatcccaatgttgctctgcatcgaccttttgatttgaatctatattattgtcttaggaaacagaggacctctttaagcaagtcagacttatcttctttcacttggaaatttttttaagcatcagttcttgggatcctctcttcacaatcaaatttgcctaggtctacattctccatacaag

SEQ ID NO: 813774 - DNA, 624 bp, Homo sapiens
aaagagatgactgagaaagagaaggctttccagatagtattaaggaccaagttggtgttcaagaccatgaatttgcagtaacgcttayctctatcctaatgtgattaagacttgaatcatctccttttctccaaaaatgtgaaagatgtaatgtgatataaaaccattcacctttccattaaacttgtaagctacataaaaaatgtagggaaatagtaataacatatttttatagaacaattcagtgacatattcgacaatgttaaaaattcagtctcttgacaatctagttcacagtttggaagatcatgtttcttctcagaaaaagcctataaatgcttctcttagacaacttatctgattattcctgcttccttagtttcaagtgttcttagagaataagtaggttgcaatatgtacaaaatccactcttctaatcatgagatcccaatgttgctctgcatcgaccttttgatttgaatctatattattgtcttaggaaacagaggacctctttaagcaagtcagacttatcttctttcacttggaaatttttttaagcatcagttcttgggatcctctcttcacaatcaaatttgcctaggtctacattctccatacaag

SEQ ID NO: 813775 - DNA, 536 bp, Homo sapiens
tgaataaaggctaagaaaaatgaagctggatcaccaaccggcaattaagggctgcacagcttgcaattgccttgctcaattaagaggccacctcttatgctagtaataatgataccttctcttttacaaaaaagagaaggggggcatgttgggaaaaagccaagtgttgggagcgaaactgaggcagggcttgcataatgtcctctggaatgtgtctaaacttgctggctccttgcttctagccctcctaggctcctaggctcctattcccattatctcaagtagcagaacatgttccatataaatgctaaaccatcacagctgtaaatcatatgcttaatgcaatgtgtccttttgaccgccacattctcaccacctgtttgttggattgccaataaataccgtgggctcccrgagctcggggccttcccagcctccacaatagtgatggccccctggtgtcccacctttctcttttaaactctctttttctcaatcctttgactctgctggacttcgtcgcccccacgacctgg

SEQ ID NO: 813776 - DNA, 536 bp, Homo sapiens
tgaataaaggctaagaaaaatgaagctggatcaccaaccggcaattaagggctgcacagcttgcaattgccttgctcaattaagaggccacctcttatgctagtaataatgataccttctcttttacaaaaaagagaaggggggcatgttgggaaaaagccaagtgttgggagcgaaactgaggcagggcttgcataatgtcctctggaatgtgtctaaacttgctggctccttgcttctagccctcctaggctcctaggctcctattcccattatctcaagtagcagaacatgttccatataaatgctaaaccatcacagctgtaaatcatatgcttaatgcaatgtgtccttttgaccgccacattctcaccacctgtttgttggattgccaataaataccgtgggctcccagmgctcggggccttcccagcctccacaatagtgatggccccctggtgtcccacctttctcttttaaactctctttttctcaatcctttgactctgctggacttcgtcgcccccacgacctgg

SEQ ID NO: 813777 - DNA, 665 bp, Homo sapiens
ccaatgctgcccaactgccaccagaggtgcccacaaacaccacctcacccctcagtgtccgctggggctgggaaacctcatgcrtcatttatagcccactccccagggagacaaattgctggtaaacctcaaggcagagttaagcaatgaaggtagggaacataggattgcttttgggaggacaacgctaaatggcacaggagggaaaagagaaaccaaaagcctggggggagggcgtgagaacaagagagtgagaatgtgcccgctagttctcagaggctgggagccagataatgagagtgccatccaggcagaggagggatggggtaggggcagggcagagaaaagtctaggcagcgatggcaggggcacgaaatgctacatgtttacatggcagacccccctctgtctcctcagagagagcatcagtaaaacacctattgctcaatcatggaagtgagcaatagaataaagaggcattgagtccaacatccagactgaccaagtgacctgagagcacacacatggtctagccatatctcagtcacatcgccaagggggctggggacctggtttcttcccctgctagctttttccatctctcttctcctctctgtcccatttcccttttttgtcatttccatcctgattgggtcccaaatgga

SEQ ID NO: 813778 - DNA, 665 bp, Homo sapiens
ccaatgctgcccaactgccaccagaggtgcccacaaacaccacctcacccctcagtgtccgctggggctgggaaacctcatgcgtcrtttatagcccactccccagggagacaaattgctggtaaacctcaaggcagagttaagcaatgaaggtagggaacataggattgcttttgggaggacaacgctaaatggcacaggagggaaaagagaaaccaaaagcctggggggagggcgtgagaacaagagagtgagaatgtgcccgctagttctcagaggctgggagccagataatgagagtgccatccaggcagaggagggatggggtaggggcagggcagagaaaagtctaggcagcgatggcaggggcacgaaatgctacatgtttacatggcagacccccctctgtctcctcagagagagcatcagtaaaacacctattgctcaatcatggaagtgagcaatagaataaagaggcattgagtccaacatccagactgaccaagtgacctgagagcacacacatggtctagccatatctcagtcacatcgccaagggggctggggacctggtttcttcccctgctagctttttccatctctcttctcctctctgtcccatttcccttttttgtcatttccatcctgattgggtcccaaatgga

SEQ ID NO: 813779 - DNA, 665 bp, Homo sapiens
ccaatgctgcccaactgccaccagaggtgcccacaaacaccacctcacccctcagtgtccgctggggctgggaaacctcatgcgtcatttatagcccactccccagggagacaaattgctggtaaacctcaaggcagagttaagcaatgaaggtagggaacataggattgcttttgggaggacaacgctaaatggcacaggagggaaaagagaaaccaaaagcctggggggagggcgtgagaacaagagagtgagaatgtgcccgctagttctcagaggctgggagccagataatgagagtgccatccaggcagaggagggatggggtaggggcagggcagagaaaagtctaggcagcgatggcaggggcacgaaatgctacatgtttacatggcagacccccctctgtctcctcagagagagcatcagtaaaacacctattgctcaatcatggaagtgagcaatagaataaagaggcattgagtccaacatccagactgaccaagtgacctgagagcacacacatggtctagccatatctcagtcacatcrccaagggggctggggacctggtttcttcccctgctagctttttccatctctcttctcctctctgtcccatttcccttttttgtcatttccatcctgattgggtcccaaatgga

SEQ ID NO: 813780 - DNA, 633 bp, Homo sapiens
aggctgcaggcccaggtgccttcgtaacgttggcatgttccttaagcacatgctctttatcagaagtttgcaccagggaccatgtggcgatcttayctttttatggcaatgtgtggttccaaagcactttaacatacaatatctcactttagcctcataacaacctgagaggtagaaagagtcattgttatcctcatttcatgattgaaaaaacaaacaaacaaacaaaaagaactaaacaaaaccaagacttcaaaaacttgtggagcagcctaagatgagacatctgggaatgggtagagacgggaccacgcatgctgctaggaactgtggatacagccagaaagaaggcagatccagagcttcggttgagagggtagacagccaacgaagaaaacaaaataatcctattaacattaaaagaagtggcacacatatcaagatgaaaaagaaacgcgtccttctttgaatatttccagaaatatttagccttgtttatcgtaacctaaaagcatatcttaaggtagaagactctaaaagctgaataaatccaaaagataaaaagaatagacttcaaggtaacaattagacttccaaaaccagtcccaggatgcttctaagggccagtacctc

SEQ ID NO: 813781 - DNA, 609 bp, Homo sapiens
atgccaagtaggacagaggtcaaccatatctatttagggcatacctacctaggatacctccccaaagtgctttggcaccacataaatccccaagaaaagacctgccctcccaggaaagtgggaggtaakggaggaattcagttggactgtatagagtttaaatgtaaaatgactgtgcttgcttggaatcgacaatgattaaggtttatgtcagctggtaaaatgtggtcttttagttacagaaaataaagttaatctttttttttttttaagtgcccaagaacatggccggagaaaattgaaccttgctacaaaagaaattgaggcataagtatattatttaaagtaattaaagataaacaagcaaagaagtaaaaatgataatacatcaaatattagaaggaggaaaaggtgggagaagagaggatggttgtataagttaattaaatcctcatctttcatttctgggagacaataggctaaatataaatttgatacattcagaaatctcatacgcacgttatttagtattttgaaagtagcaagtataagaattaaagaactgaaacagttaagatgttgtttcttgggagaggaactggggggaag

SEQ ID NO: 813782 - DNA, 609 bp, Homo sapiens
atgccaagtaggacagaggtcaaccatatctatttagggcatacctacctaggatacctccccaaagtgctttggcaccacataaatccccaagaaaagacctgccctcccaggaaagtgggaggtaagggaggaattcagttggactgtatagagtttaaatgtaaaatgactgtgcttgcttggaatcgacaatgattaaggtttatgtcagctggtaaaatgtggtcttttagttacagaaaataaagttaatctttttttttttttaagtgcccaagaacatggccggagaaaattgaaccttgctacaaaagaaattgaggcataagtatattatttaaagtaattaaagataaacaagcaaagaagtaaaaatgataatacatcaaatattagaaggaggaaaaggtgggagaagagaggatggttgtataagttaattaaatcctcatctttcatttctgggagacaataggctaaatataaatttgatacattcagaaatctcataygcacgttatttagtattttgaaagtagcaagtataagaattaaagaactgaaacagttaagatgttgtttcttgggagaggaactggggggaag

SEQ ID NO: 813783 - DNA, 589 bp, Homo sapiens
ccactgtccctgaaatgtctgatgtcggtgagtgagacgtgacttcagccaaaagctggctttcccctagtgcatccactgagtaaggaatcccacgagctcaaagtactgaactgcatgaatttagatgctaacttcttcaatccatgtatgtcctttctgtaagtgcatatgtttcctaatattactctagtctcattttgtgattattttaaaaaccacatttcctctaaagagggtctgaaaagtggcagggtgggagtgggaggttgaaagagagaccatctcctttctctcccaccctaaatgcccattctctttcttgggctgaaagatagcaaccttctccacttctcttagcctatgtgggtgttagggtccaagtaacaatctcccaaatagaaaataaaagcttacatttacaatccagtctaaaaagtagtgatagttgctttaagtaactagtaactgtatatttrggaaggagatcaaagaactttttttaatccataaacaataggcacgttatgtctagggagtggatcctttactacatggtggaaatgaaaagactttcataacatacata

SEQ ID NO: 813784 - DNA, 643 bp, Homo sapiens
tcaggaagcattgtgacaattaaatcaaccaaacacttaagcagttttacatagagttgtgaaatttcattcattgtgagcctgctaaaaccaagttggcttacctggttgcttacaggttttcattaagacatcaatatttactttctcaaatgccactaaaaccagttcaaagcctaccactgtagctacaatgatgatgttatcacataaaataaaacaatgtgttattgctaacacataagctaaaattaaccacattttgaatataattaatgccttggcaagatcaaattaagaaaccagtcataaagctaggatgggctttatctactctttctatcaaaatcaaactttcatatcaaaatgaagaaaagatacaaattactttaggcaaaacccacaaaagttttgccagtggatcctcagtgcttggggatttaagagccaccattctgcctactattaaataaacccagaagtctataaaaatgtaaggatttatcacaagaacatgggtagcatcaataaaaacagcccctacaaaattattaacatctttgtgtaattactataaacaagtattatgcrtagcactttataaatgacatcattaaaactcataatctcatttaattctcac

SEQ ID NO: 813785 - DNA, 635 bp, Homo sapiens
cgataccaatactgcctcaggtaaatggtataattatggacaytgattttgtgagtgcgttatttttatccatgtgaaaaatgcattcacattcatggaataaacaataatatatatttatgatgttgctcaagtttgggattaattctctcaccttctgtcacaatgtagtccaaagggaccatgattggacataacatcacattgttccattatatctatgccatcaaattaattgtacagatgagcaacaggtaataataaagttggaggctttgtaagacatacgcacatcagaaggtgggagatgaatcctacaaagattcaggggtctgccaccttaggatatttcttattgtcgttcccacagtttggaatatgctgtatgacataccctctaaagtaaaggaaatttttactttgtacttcccacccactaagatggaaacatgacacctcgtaatcttacagtgtatttgttcattcttacaccgctatgaagatactgagatggggtaatttataatggaaagagttttatttgactcacagttccacatggctggggaggtctcaggaaacttataatcacggtggaaggggaagccagcacttcttatatgacggcagacaag

SEQ ID NO: 813786 - DNA, 625 bp, Homo sapiens
aacctactattttatatcttggatcctagaygtactattattttccattgatatatatatatatatatatatatatatgtatctatcatttactagaaatatatattttaatgctataactttctaacatttttatgtttgctaagccaaaattggtatttctcttaggatactttgaacagccattacaaaataccatacatagcatggcttaaacaaaagaaattattttttcacagttctagaggttggtaagtccaagataaagatctggcagtgttcagtttctggtgagggctctcttcctggtttgcaggtagccaccttctcattgtgtcctcatatggcagagagggagagcaagctctctggtgtcttttcttagaaggacatgaataccatcagaccatgtcctcaccttcatttcttcctctaatcctaattacctccaaatacaaacatgagtaatttccaaatgcagtcacactgggagttatggcttcaatgtgtgaactgagaagggggggtataatcattcagtccataacagtattgaacttccatttataaataacataaatttttgttatttgtttattcttacagataaaattcatccatctct

SEQ ID NO: 813787 - DNA, 529 bp, Homo sapiens
cttaaaatatatcctaaattacctggtcctcctcttattttccatttttcctgctattttattggcttcaaagtttctctcacactgaactatattctcctttgtttagcactagatgaaaaagcatactattaaggctttggccttgcattctctttttaatacctctggctctaacgttagggctttagtgctccaacctctgttgtacgcacttgagggaaatatgtctccgtgtctgcacatcatgtggtggtttctcctcctgagaagaggacgctgtcgggtgccacatgcaggaatctcaagtgtttgaggacaggagacgagactcatgtgtggtgccttttagacttccaagtcggtgctcactctcagacatgaagctgccctccttttggtcttctaggtaccatcaactggggataaaacacaartacacagactagaaattccttggaagttgagctttaatttctctctagagttcttttttcacaagccaccctttcagaacttggagccaaat

SEQ ID NO: 813788 - DNA, 525 bp, Homo sapiens
tagcattactgggtttggggtccccctaatgcagatatggctgcagtgaccaaaacttagatcataacacacaagtccattcaaaatcataggaagtcttccctaaaaggrcaggtatgaacaagcccagactgtgaaggctacaattaattctgaattctgtaatgcccagacactgacaaatatccacaagaatcaagaccatccaggaaaacattaccttctcaaatgaactaagtaagtcaccagtgaccaatcccagagagatagaaatatgtgatttttcagacagagaatttaaaagagcttttttgaggaaacacaattcaagataacaaagagaaagaatttaaaatcctatgagataaatttaacaaggagattgaaataattaaaaagaatcaagtataaaatctggagttgaataatgtaattgacatgctgaagaattcatcagcgtctcttaatagaattgatcaaacagcagaaacaattagcttgaaggcaggctatttgaaaatacac

SEQ ID NO: 813789 - DNA, 493 bp, Homo sapiens
aatggtagaaatagaataggatcgatctcaaagtgttatctggccttaaaatatacagaaaatgtaacattcatttgggatgtggaaatcaaaggactgagttagtgtttgaagatcacttttagaatttgacttaaaaaggaagagtggctatatttgccttaaagatgaagtatgaacttaggaaaaaaggaagtcaggtttttgttcatttgtccatttgtttttgagaaggttctggctctgtcacccaggctggagtgtagtggcacaagctcagctcactgcaacctccacccccaacctcagcctcagtggctggactactggtgcatgccacaacaccccgctaatttttgtatcttttgtagatatggggttttgcyatgttgcccaggctggtcttgaactcctgggctcaagcagtatgcttgccccagcctcccaaattgctgggattacaagtatgagccactctgcccagcccagtttt

SEQ ID NO: 813790 - DNA, 606 bp, Homo sapiens
gttgagctttctgagttggagaaagagcagactttcttgaggargtggtttcgaatcagaactagaaagatgagaaagacatcttccttccattttccatggccacctctgcttcagactcaccttttttctgttcatatcctttgcccactttttgatgggtttgtttgtttgtttcttgaaaatttgtttaagttctttgtagattctggatactagccctttgttagatggatagattgcaaaaatttcctcctattctgtaggttgcctgttcactctggtgatagtttcttttgctgtgcagaagctctttagtttaattagatcccatttgtcagttgtggcttttgttgccattgcttttagtgttttagtcatgaagtctttgcacatgcctttgtccggaatggtattacctaggttttcttctaaggtttttgtggttttaggtcttacatttaggcctttaatccatcctgagttaatttttgtataaggtgtaaggaaggggtccagtttcagttttctgcatatggctagccagttttcccaacaccatttattaaatagggaatccttttcccattgcttgtttttgtcagg

SEQ ID NO: 813791 - DNA, 658 bp, Homo sapiens
ggttttaagcctaattgcctgtaatcccagctactcaggaggctgaggtgggaaggtcgcttgagcctgggaggttgaagctgtaytgagctatgatcacaccacggcactccagcctgggtgatggagggaaactctgtcccaaaaagtagtaaaaccaagtgcccggtccctttcttgaggcctaggttacacagaggccttcactatccacccttcccatgttctcccgacctatgctccctttcattctgtataccaactggattttctcaaagcatgaggtcctttttgttgttgttgagatggagtctcactctttcaccaggctggagtgcagtggcacaatctcggctcactgcaacctcagcctcctgggttcaagcaattctcctgcctcagcctctcgagcagctgggattacaggcacccaccaccacgcccagctaattttttgtatttttagtagagacagggttccaccatgttcgtcaggctggtcttgaactcctggtctcaggtgatccgcctgcctcgacactccaaagtgctgggattacaggcgtgagccactgcacccagccatgagctctttattgttaaaggaattatcttagagctagcggcattttctgcagtgacttattctcacatggac

SEQ ID NO: 813792 - DNA, 600 bp, Homo sapiens
taagctcaagtgatccacccccgtcatcctcccacagtgctaggattacaggtgtgagccrctgcacccagccaacagtttttcttttccctagttactctttaatctgtcagtaagtgttttgcttccaccaccgtaccagtttatgaaagtcagagaaaatgaaaataaagaaatgctgcctatttattttaccactgcctattccttttttttttttttttttgcccaggctggagtgcagtggtgcagtgcagtggtgcagtctcggctcactgcgacctccgcctcctgggttcaagcgattctcctgccgcagcctcctgagtagctgggattacaggcgtgcgccaccatgcccggctaatttttgtatttttagtacagacagggtttcaccatgttggccagactggtgtcgaactcctgacctcaagggatctgcccacttggcctcccaaagtgttgggattacaggcgtcagccaccgcacccagctgccactaccaattgttagccatgctgggtagacagctgaaactgtgttaaaatggcattcagggattgcctgtctcgtgtattcttattttctatttacag

SEQ ID NO: 813793 - DNA, 529 bp, Homo sapiens
ctcctgcctcagccaccttagtagctgggattacaggtgcgccccaccatgcctggctaatttttgtatttttagtagagacagggtttcgccatgttgaccaggctggtgtcaaactcctgacctyaagcaatccccccaccttggcctcccaaagtgctgggattataggcgtgagccactgcacctggccccctgctttgtttatatataaccattattgttagtctttggtttacctttccttattttatggaaaagcaaataagtatacgtatttttatttacccgtctttcttatccagatagtagcagaccaagtagctgggattacaggtgtgtgccaccatgtgtactagctcacacctgtagtcccagctactcgggaagctgaggtgggaggatctcttgagcctgggaggtcgaggctgcagtgagctgagattgcaccactgcactccagcctgggcgacaaagtgagactctgtctcataaataatttaatgtaatcccaaatgttggcagactc

SEQ ID NO: 813794 - DNA, 529 bp, Homo sapiens
ctcctgcctcagccaccttagtagctgggattacaggtgcgccccaccatgcctggctaatttttgtatttttagtagagacagggtttcgccatgttgaccaggctggtgtcaaactcctgaccttaagcaatccccccaccttggcctcccaaagtgctgggattataggcgtgagccactgcacctggccccctgctttgtttatatataaccattattgttagtctttggtttacctttccttattttatggaaaagcaaataagtatacgtatttttatttacccgtctttcttatccagatagtagcagaccaagtagctgggattacaggtgtgtgccaccatgtgtactagctcacacctgtagtcccagctactcgggaagctgaggtgggaggatctcttgagcctgggaggtcraggctgcagtgagctgagattgcaccactgcactccagcctgggcgacaaagtgagactctgtctcataaataatttaatgtaatcccaaatgttggcagactc

SEQ ID NO: 813795 - DNA, 599 bp, Homo sapiens
tatagccattggggaaacaccaggaattttaccacattctactcaagatttttgcagtgttcataagacaaagtgaatttatatataaaatawatgctaaaaataaatgagaaagacaacccctaaagaaatataggcaaaggtgataaacatacaaagcaatcttatacactgttcatggctacactcctgtctagtaaataaacaaaaacatagatatatagcaattttggccagacacagtggctcacgcctataatccctgcactttgggaggccagggtgggtggatcacttgaggccaggaattcaagaccagcatggccaacatggggaaaaccctgtctctactaaaaatacaaaaattagccaggtgtggtggtgggtgcctgtaataccagctacttgggaggctgaggcgtgagaatcacttgaactcaggaggcagaggttgcagtgagccgggattgtactgctgcactccagcctgggtgacagagtgaaactccatctcaaaaaaaaaaaaaaaaaaaaaaaaaggcaagcatcaaaagcaatcctgaatactaaaagaaaaatacatacattccatagatccc

SEQ ID NO: 813796 - DNA, 601 bp, Homo sapiens
acaatcctgactaatgcagtgaaaccccgtctccactaaaaatacaaaaaaatagccgagcgcctgtagtcccagctactcgggaggctgaaacaggagaatggcgtgacccggggtggcggagcttgcagtgagccggtatcatgccaccgcactccagcctgggcaacagagcaagactccatctcaaaaaaaaaaaaaaaaaaaaaaagggaaataaatattttctctgcagtctcctgacactaactcctggcctcaaggaagttctccagggcagagggtaacaatatgaaatgtaaacatgggatgtggggggggggggggggttggatacctcatcctgatatcagctctaccttttggctatgtcttggtctaattcaaaaccatgaactctggagcaggggatatctcagtagcctccttaggaacatgctacaagctgagatcaacagagcagggggcattggaggttgcacttcaaagatgaatgggggccaggagcggaggctgatgcrtgtaatcccagcactctgggaggcccaggtaggtggatcacttgaggccaggagttcaaggccaacatggtgaaaccctg

SEQ ID NO: 813797 - DNA, 662 bp, Homo sapiens
ctcgggatccacccacgttggcctctcaaagtgctggtattacagacgtgagccaccgcgcccggcctatttttaaatagagacgaagtttcaccagttgaccaggttggtctccaactcctgacctcaggtcatccacccacctcaccatcccaaagtgctaggtttacagtagtgagccactgtgcctagcctatttcatgttttattttaaattttattgatattaatagagattggggtggttcttactgtgtccggaattcgtgggctcttcgtctgacttgaagaatgaagccacggaccctcacggtgaatatcacagttcttaaaggcggcgtggccggagtttgctccttttgatgttgtgttcggagtttcatccttctggtgggttcgtgatctcgctagctcaaggagggaacctggagatcctcgcgaggagtgttacaagtcttaaggaagcgcgtctggaggcgttcattctttctggagtgttcgcagtctcggtggcttacaggagtgaagctgcagacctttgctgtgaaagcaacctaaacccaaaaagcaacamcaccaccacaaaaacaaaaacaaaacagaacaaacacacccacccccacccccacaaaaaaactccaacacaacggaataaaacccca

SEQ ID NO: 813798 - DNA, 584 bp, Homo sapiens
gaataaaaccccagcacgttgctactactacctcagcagcctgcttttattctcttttcttgccccacccacatcctgctgattggtccattttacagagagccgattggtcttttttacagagagctgattggtccgttttgacagggtgctgattggtgcatttacaatccctgagtgagacaaaagttctttacatccccactggattagctagatacagagtgctgattggtctatttacaaaccctgagctaggtgcagagtgctgattgatgcatttacaaaccttgagctggatacagagtgctgattggtgtattcacaatcccttagctagacataaagattctccaagtccccaccagattagctagatacagactgcccattggtgcatccacaaaccctgagctagacacagggtgctgattggtgtgtttacaaaccttgagctagatacagagtgctgattggtgtatttacaatcctttagctagacataaagtttctccargtccccactagactcaggaacccagctggcttcacccagtggatcccgcactggggccgcaggtgga

SEQ ID NO: 813799 - DNA, 591 bp, Homo sapiens
aacactgaaatgctcaagattcacagagaactgggcagagtacacagaagggtattggctcagtagtgggtagttacatgtagactgatcattgctctggtcccacctaacaacatttaaattaaggtctaaaaggattaaactgtttctaataaatctagctgtgtctcagaaatatgatctaggacctttataggaataaaaataatatccagtgcccaataaggtaatagtctggcaaccaaaaaaaaaaaattcctagatgtgccaagaatctgtaaaacatgattcataataaagagataaaggaatcaatcaaaactgacgcagaactcacaaaaatgtgagaattagtagacaaggacattaaaacagttattacaaataatctgtaagttcaaaaactcaaatatagatatgtaatatataaaaagagcccaacaaacttctagagataaaaactacaatgtgttggatgaaaaatgcactgggtggaatgaacagcaggttagacattgtagaaggaaaaratgagtgagcctagacatagcaatagaaatcatatgaaacaaaaagagggaataaacaatt

SEQ ID NO: 813800 - DNA, 499 bp, Homo sapiens
caagatatgagttcatgcatcataattacaatgtcataatactttgtgtttgtctttatacttacgattaccagtgaggtttgtatcttcagatgatttcctattgtttattaatgtcttttaatttcatattgaaaaactctcttcagcacttcttatagaaccggtctggtgttgatgaaatcccttggattttatttctccttcatgtttgaaggatacttttgctggatatactatctaggattatatatatatatatatattttttttttttttttttttccttcagcactttaaatacattatgtccctctctcctggcctgtcaagtttccactgaaaagtctgctgccagatgtactggagcacaactgcattttctttcatttctttcacttccttcagaacatttctctattctttattattattattattattatactttagtttctgggatgcatgtgcaraacgtgcaggtttgttacataggtaa

SEQ ID NO: 813801 - DNA, 524 bp, Homo sapiens
agggtaaccgcccccatgattaaattacttcccacccatccctcctagacatatggcgattatgggaactacaattcaagaggaaattgagaggggatacagccaaaccatatcaatgtccrtactgcccaaagtgatctacaaattcagtgcaatctctatcaaaatactaatgacattctctataaaaattgaagtaaaatttcaaatctttttggaaccaaaaggctgcaaatagccaaagcaatcctgagaataaagaaaaaaactggaggtatcatactacctgacattaaaatatactacaatgctaagaaattcaaatattcttaccataaagaaatgacaagtgtttgaggtgatagatatgataattatcctgatttgagcattactcaatgtacccatgtatcaaaatatcacattgtatccataaatatgtagttacatgtcaatgaaaaacaaaatacatctttaaaaaagattcacagaaacagataggcaataaacaatatttatatatg

SEQ ID NO: 813802 - DNA, 548 bp, Homo sapiens
atgaaaacactccaaagaaatatctttaatctgatttacatatgaatttattcctgtcttcttatctaacggatttcaattcaaccakatttagtttcagatcccaactatcacttaccagttgtgtgaattagaagtagcctaaattttctcatatgtaatatggtgatattacctagtgcctcataaattcatcaagtttaccttgttggatgctagatattttgtatttttacaaatagtcttgaactttgttctggaatgctgtcaagttacttagaaactggttagtacttccagatttgttaggtgggaaagaagcagtgctcaaactagggctaattacttccccgctactaaagcggggaagtaccccttctttgtcttctaatctacccagtgacctcaaatcttgaaatttttcattctgtctgttagggcagtcctcactttcccagtgtaatctgaacatcttttcgtgttccctctaatcatttcaggtagttcttcctaggcccctaagtaatttcctcacagtcatatgccaa

SEQ ID NO: 813803 - DNA, 581 bp, Homo sapiens
cagcttcgtttctttaattagggagtctgctgtgctttrtttcagttccctgtccttgtgttatgggatagaaatcgtcaaggtagtatgtcaacgtagtcttctctggctgacttcattcgttttcatctcttgatgattattgccctttgttacctaatatgcagtgtcttgtaaaccattgttttctatattttgtccaggtttttggttgtttcaggcaggaggatatacctgatccctttgactccattgtgactggaagtcttttttagcatctgtttttaagtgtcaacagatttcaccagaagatatgcaattgtaataataatagcattatttttaacatttatagttagcccttcctcctatacaaaataaaagttggcagtatgtttgaagaagaccttaattatagttctgcttggaccatgaatttcatgcgaaggcttagacaaatcccttaatttctcaagactttacttttctattccatggaatactttgatctggacaacttttatattatctttcagaaatatattgataatcactaacattttccttttgaaattgagaaa

SEQ ID NO: 813804 - DNA, 595 bp, Homo sapiens
aacaaataagaagaaaatattttattgttttaagatagtccacgtttattctttagtccagaaagtatgaatataccaggagtaattctagagccagaagataattgtgtgtttcttgggactggtttcataatattgccatcacatatctgaaatttagaaaatggtaagtttgtcttcttaacaaactttaagttatgttcccattacagattggcatatgaaccacactagtaacaatggcttctttaaaaatgttttagtaatattcttgttaagacatttatggtctgccagaattaaaaaaagaaaacactcttcaaaatagaagtctcaactatgggaatttcatcttatattgcaaaagcctattaaagggtcaatttatagtttttggcatatataatctacattgacaccatagctctaaaggaactcttacagctttcacttgattttcataaacatttcacatccttaaatccctttttattatcttgagctagcattcaagtattcatgtctttgaatwttgaactccgaaatttcaaaattttgtctgtacttcctaatagtagaagttaaaaggtgcttt

SEQ ID NO: 813805 - DNA, 598 bp, Homo sapiens
cccagtttgtataatcaaatttcacatttccccattttgatcaagatctttctctcaaaatgtcactgattaactattctgaggttaggcgtaattgtccctcactgcagggtctgaacctgtccgagtttcctctgtcctacttttgggggttaggtatgagagtccatgtcagggacctgggccacatttagcaaaagagaggccaaaaggaaaatctttctcattgcagctttgcctggagttcaacattgagtttcactgtattagacccataggtattagcaatcatctcaagacactgggctaacattatcttgttgggagtgctggctttacaaagaatggtcaggcaaaaaaaaaaaaaaaaaaaaaaaaaaaaaaaaaaactttaatatgaaaatgcaaaaagtcattagtgacaatacaataaatccagtttgaatagtcctagattatgaacttaaattttaaggcaaccaactgaacagatcaaaaagttccgatgtatctggtragatttgttggagccagctagcttgggttttcttttatcttgtataattgtgtttctactttcccagaggaattcatacat

SEQ ID NO: 813806 - DNA, 638 bp, Homo sapiens
tgataggacaatgaatggtgtttgaaatcatttacgactaccttgttttattgtcctatggcagaattacaccaagccaagataaacctatgactttttttggacttggccaccttaaaaggagtggaccttaagtgctgatttctaatgttagggatcaaaacctggctgagctgtgtgaataattaaaagattttaatattctgcatatttctaagaaaacattgcattcctgccttccaagaccttgaaacattattatgtttgattcttcctgtgtccaacagatatcataaggctggaacacagggaaaaaaaagaagctctgttcctgcctaaaccatacaagaaatacccagagttatcccactgaaagttagaagtagccctctctctgagcttgaactgatgttcccctaggtaacttgtagattttctttttaatgtttttgtcttacaataaggtccacgggttttcttcagtatgtattattctaatataatgtatgtgtgtgtgtatattaccatgactgaatattctcacatacccaaaggtgcaggaacatgtcatggaaagattactacactatgaggcagggtatatgagtactratgccagtgctatcacttcccagctg

SEQ ID NO: 813807 - DNA, 534 bp, Homo sapiens
catacagccgggtgcccctctgagatgaagcttccagaggaaggatcaggcagcaacgtttgctgttctgcaatatttgctgatctgcagcctctgctggtgatacccaggcaaacagggtctggagtggaccaccagcaaactctaacagacctgcagctgagcgtcctgagtgttagaaggaaaaccaacaaacagaacggaataggagcaacatcaacaaaaaggacatccacaccaaaaccccatctgtaggtcaccatcatcaaagaccaaaggtagataaaaccacaaagatggggaaaaaacagagcagaaaagctgaaaattctaaaaaccagagcacctcttctcctccaaaggatcgcagctcctcaccagcaagagaacaaagctggacaaagaatgactctgacaagttgacagaagtaggcttcaggagatcrgtaataacaaacttctccgagctaaaggaggatattcgaacccattgcgaggaagctaaaaaccttgaaaaaagattagacgaatggc

SEQ ID NO: 813808 - DNA, 528 bp, Homo sapiens
gccaaactttcttctttgatttataagccatgcgtcactagatgactgagataggttctgagaaatgcattgctaggcagtttcatcattgtgtgaacatcataacaygtacttccacaaacctcgatggtttagcctgctacacacctaggctatatggcctagcctatggtacctatgctgttaacccatagagcacgttactatagtgaatactataggcaatttcaacctaatggtaagtatctgtgtttctaaacaaatctaaacatagaaaagatatagtaaacatagactgttataagctcatgggactaatatgcagtctgcagttgactgaaatgttactacatcgtacatgattatatatatacatacacacacacatacacactactataattgtatactctgctttttttaactggcattttaccattaacattttttatttcatgaagcattctgaagatttctattagttgcataatagtgtattatatagattagattaatattatataattt

SEQ ID NO: 813809 - DNA, 552 bp, Homo sapiens
agttgttaatgttttggtctgcggccaaagagctatatgttatctacttattctgggaaatagagaacagttagggtagaaaaaaaaaacaaamaaacaaacaaacaaacaaacaaaaaaaacaccatatggacagaaagaatgggtatcgatgtgttgggacaagaactgagaataaagaaagaatgagtcctgttgtagatactaaaggtttcagatctcattttcaagctgcctcttactacttacaaatatttacataatttggctctttcctttaaaaagtatactaattttgtagatgtcgtcttacacacacattggagtaaactaggtaaataataaaacactgataatttaatagtaaagcatgaagggaacatagatttaatgtcttattaaatatggcagcccattgtgttccatgacctcaacctagagggcatttctttccccaaaaagagtcagagcaggacttgtaacctgaaatgtctgcctgaatagcacagacaaatcatttcactctagggcagccatcaccttttcccaaac

SEQ ID NO: 813810 - DNA, 476 bp, Homo sapiens
gagaacttaagcagttcttttcaggtatagggcacctcctcatgagtcatattctgaacctcacctctgggagcctgctggtactttagtctagttataggtctagaagcaaatgggggtgttggggrtagttcctgaggagaatcaacattatcttgcctggcaactgcctcaggggaggacatcactgttgcctcaggcaatgcagggcttttctcctcagacaaacatggaaaggctgatggcagtgtaggtcagggaggagatgttgccactactggggatggggaagctgtttcttctggcaagaacggctcatcagagtttacaagctcaatgtccccagcttcaacagggtcctcccacatgtccccattccaagttgcagggtcccattcttttccaatcaatgccctcactttaacagtagacacctggcaaggctgtgcatgcacctttcattgcagatcagccac

SEQ ID NO: 813811 - DNA, 476 bp, Homo sapiens
gagaacttaagcagttcttttcaggtatagggcacctcctcatgagtcatattctgaacctcacctctgggagcctgctggtactttagtctagttataggtctagaagcaaatgggggtgttggggatagttcctgaggagaatcaacattatcttgcctggcaactgcctcaggggaggacatcactgttgcctcaggcaatgcagggcttttctcctcagacaaacatggaaaggctgatggcagtgtaggtcagggaggagatgttgccactactggggatggggaagctgtttcttctggcaagaacggctcatcagagtttacaagctcaatgtccccarcttcaacagggtcctcccacatgtccccattccaagttgcagggtcccattcttttccaatcaatgccctcactttaacagtagacacctggcaaggctgtgcatgcacctttcattgcagatcagccac

SEQ ID NO: 813812 - DNA, 560 bp, Homo sapiens
gagaacttaagcagttcttttcaggtatagggcacctcctcatgagtcatattctgaacctcacctctgggagcctgctggtactttagtctagttataggtctagaagcaaatgggggtgttggggatagttcctgaggagaatcaacattatcttgcctggcaactgcctcaggggaggacatcactgttgcctcaggcaatgcagggcttttctcctcagacaaacatggaaaggctgatggcagtgtaggtcagggaggagatgttgccactactggggatggggaagctgtttcttctggcaagaacggctcatcagagtttacaagctcaatgtccccagcttcaacagggtcctcccacatgtccccattccaagttgcagggtcccattcttttccaatcaatgccctcactttaacagtagacacctggcaaggctgtgcatgcacctttcattgcagatcagccacttgcatgatacaagyttgtatctgattttccacaatttcagctctttcttcatgggagataagactctgactcagggcagtctt

SEQ ID NO: 813813 - DNA, 580 bp, Homo sapiens
ctactgatgctaaatctgcagatataagcaaaacctccacaaaagcttaaaacaactatttgaaacaaccacaaaaatatggaaactttgtaaataaaacttwtgtgagataaaaaaaaatacaaaaatctgctccctcaccccagaacccagggaaatgctattcatgaaaaaggaaagaaaatacttcctcactttacccttgtcagggagacaaaattttacctctaccctcctagggttttagacagaacctaataattaaattgacataagtcagattaaccagagaaaagcatagaaatttaatataaattttatgtaatacgggagccctaataaggaaaagaagacccaaaaattgacaaaacctaaaagctaatatattaggttgaaaacagagaggcaattgtggaaaagtaactaaattctgtggggaagctaaaagatgacaagaattattttgacaaggtctgtttgcacaaaattctctgggctatgactccccactgaagaatgtttacctcctcatggtgtaagggaactttcacaagggagtttttaatctcctgttttcaga

SEQ ID NO: 813814 - DNA, 614 bp, Homo sapiens
aatttaatatgatgaaattatagckacatcatcaactcaccttggatttaaagaaaaaaggcatatgcatttaaaacagtgttaggatgttattattattattgctattattactataataattattaaagtctttgcctttgattttcacaaaaatcaaataatcccaccaaaatcagcctgttttgtaaattactcaataaatgcttaattttagagatttctatatagtcattctgcttgtatacctccttcaatgcacttataaagagttttactttaattagaatgtgactatattctctgtctcctgggatctgacaattttagtctcaaaatgatcactgcaatgtgaattgaggtatgtgcatcagcttgctatgccaaacatgacttctgttgtttcatggttgctggctataattgtgttaatttaatttaaatccctaccccaaactctcttcatggcttctcaaacagaatttagttaaatcattcatttaaatatttttataggttttttttttggacaatgcactaagttttcaaaaatgtatctgaataaggagctgtgtgtgtctggtttttatgtgcttatgtaaacatttacagtc

SEQ ID NO: 813815 - DNA, 545 bp, Homo sapiens
ccccatttccacatacggcacaatcaggagctgtgctatgcactctcctggctctgctttccagggaacagaagtagatataacaatttgaatttccccattgtaatctaaatcaatgactcctgtatgtatttgtaccctttttaaacttacactagaccttcctaaagtaatcctattgtccctgctggcaagggtccacagactccttttggaaccttttgtgggggttccccaggcagaaggctcacagcttttctgcagcataaatctactgtggcactactggctgtggcaggggacagacattgtacaggggtgagggaatgacctgagctggaaatgccctggtttagaacggggcctaggaccagcccctcagggcatttccctaaatcggtttcccttctttatcaaacttagagtgacactgactagcccagtgttttccttttttatattttggacatatttctggctcaacagttttcttctttcccctatstggtggcctgacttgctgattttttctacattctttttta

SEQ ID NO: 813816 - DNA, 604 bp, Homo sapiens
ttttgtattttttttggagagatggggttttgccatgttgcccaggctggtctcaaattgtcgggcttgagaagtctgcccatcttaacctctcaaagtgctgggattacaggcatgagtcactgtgcctggcctattgattgatttttgtatgttgaaacttgcttgcattcccgggataaaaccgacttggtcatgatctataaaccttttaatatactgatgaatttggttagctaatatcttgttgaaggtttttgcatcaatattcatcagtaatattgttctgtagtgttttcttgcagtctttggtcttggtaataatgtaatgctggcatcatggctttggaagtgtttcctcttttcagttttttggaaaagtctgaggggggttagtgttaattctttgaaatttgtgacatccaccaatgaaagtatctggtcataagcttttatttgttaggaggtttttcagttattggttcaatttctttactgtttctaaatttgttcactatartttagcataattcagtcttgacaagctgtgtatttctaggaatttatccatttcatctagattatccaatttgttgacatacaa

SEQ ID NO: 813817 - DNA, 625 bp, Homo sapiens
ttctcttttctttgggattctaattaatctagtttttcccctattacctgctttcccacagttgagtttcatagctgtacctggtaataatttcccttatcctgtaaatatcaccrggcttgagattgaattcattttagcattcttttctgactaatcaaggtacattcttgggccagatttgtgaagatgtctcccctttctagtcactaacagtcatgcttatcacttaccttacactggggcttttcctcccaagatgaagaggctgtttcaggcatcgtctttggtgtggccatgtcaagctcagcaacagctcttttaacatgtgtctccttggattctattacctgatttgagattgcttcagtactttcaatatttgcactggctgtggtctgacaacatttacttagtgacaaaaattttttcaggctgctcgtgcttagtgttgacttaggagaaagtttgctttgtattggcttcttgacttctttcacttgatcttcaaatactttgatgccttcttcttttgcaaaagtctgtgttaaaacaacttcatcttcatcagaatctcgttcctcttttatgtaattttccaaatacacttgatcaatatcatgag

SEQ ID NO: 813818 - DNA, 618 bp, Homo sapiens
taatttttgatcttgtttttaaatgtgctttaaagcatggcttagggttgtccttagggctcacctttaaaggaagtgagacaaaatttgtgatcttattgagaaccatttgaattaagtctttcttcacttgcaatggtaaatatggcaaaagagtgttttccatcacagagatattttgactgtcgacataagaataagcctgtgatatcgcatatctaggggaattacttatttttcctgcttgtttagtttctctaaaccttaatggtttcattagtaaggaatcattgtggtcagatatttcaacttctgtcctacttttattattttcatataatgatgtcacaactaccaagtacattttccccaaaacactttcaactatgtcatttgctacactgttaatatgtgattgaaaactgtttttctgtgttgtgtctgatgttttaatcttagaattagatataaagttggcagtttcattaagtggaggcaaatggcctgtgacttccmttactctttgatacaacttattcaaaagttcttccactgcaatgagcagttcacctttttctttgttttttgattctccatttctcataaatatttcttcca

SEQ ID NO: 813819 - DNA, 634 bp, Homo sapiens
cctaagcatgttgcattgagtatgaattgccttgctttaagctagggagtagtaggcaccacccacagcttayttataaccacttgacatagatcactgtgacctatgcttgactattaacaagcacccacttcttatcacctcctcttccacctcaacaaaggaatagtttccacgactgaaacatgactttaagaagggaggtgtcctggataaagccaagacatgaaaatccaatctacccatacccccaggcagacttgccccttgcgagtgataaattctacagttcaaatgagtattcaacactgcaggcacaattacttataattgacttttgttctgtagcagaattctctctgattcctcttctttatttatttcacctatttcttttcatttggcaattataaaggtacccttataatttttataactttatgcacaataatgagccttcagggaaagacaagaactaccgcactcaaaaacatcagaaaagatttgcttatgaatgaagtccatattttttgtgctggttttcctcattagagggagaaccaaaaatataaattctaaccaagtactgagtgctgtggagatcaatgtatttcatttagataactataaatga

SEQ ID NO: 813820 - DNA, 647 bp, Homo sapiens
caccgaaactggcggggctgctttctcaagtttgctgccgctcagttcctggcgagcgaagaggggcgctcccsctccggcttcgcgaagcaacctgagcgccccaccgggagcagctcccgcgccgccgcccggccctagcccctgcccggacgctctcccctccggcctcccgcggacccgaccctgccacagccggggaagtgggggctccacgagaggctctggctgggctcttaccttggccactggccggcgctaggcaggcgacgagagccaggagcagcgtgcacgccactgctgccggcccgcgatccatctccgcgacggtccccggcctcgccgttccttccccgggaggtgggcgcgcgtagcacaccgcaccggcagcgcctctgctagcgaacgctcctttaggtctgcacctccgccagctcctagtggccaaaagcctgcccccacgcccgaggcatcccgttttctacccgcgccagtccccaccctccagacagtgcataaagccctttagacccgaccgccccggaacaagcatgcgggaatccagcgggcaggccccctgccgcccggcccgccccctgcactttgcagcgcggggaggagtgggcactcgaacacacgcgtgctca

SEQ ID NO: 813821 - DNA, 618 bp, Homo sapiens
ccaacctcatggaagtagttcagtattcaataaccagtatggctgcaccaatcctgatgccaaatacttgaaaagaaaacagaaaaggactacygccctcatcaagtaatggataggttccaggtagctagtcaactcgctcatgacagaaccattcttttgccttgtacaccacaccaaaccttctcagagttaaaattccctatttgccaggttttctgtgaggtctgggttgctctttgttatgacagaccatgacgactctccacaagtgcaacctcctagatgtcagagatcagggcacccatcagtgtactgtaatgaaagacaagtagccgccgccccccatcacttaccaacacaggtacggctgtcattgtggttgatgatataacctgggggacaaaaacacgctcctccatacggcgtctcatggcactggtactggcagttcaaggcagagcacagagtcatacctaaacgaagaaaagaactttgttaaatgaatggtgacctctggacaagactgattaatctaatagcttctttttccatgagtagcagctcagtaagcatgaagtagatgtacagaaaaatctgtcacccttcaaagcttac

SEQ ID NO: 813822 - DNA, 594 bp, Homo sapiens
catctgtctttttgctcaacaacttggtagtttaattggaccatataatttgagtgttgatctttgctctgagtstacaatgcaactgggataatggaacaatcgacactatgacagaaaaatgaagatggatgtgaaaaatccagtacaggatacctgcagttacagcattttttgccaaccctctaatgcaaagggtgcagccataccacctccaaatccagtatttttgagaaccactgctccacctagtactcctgctaaaaaccagcccagaaattcccataaaaggatactgggcctccaaatggagatggatttgtctgctgaaacatccacattgtgtggaggactactaggaggcttctactcccacatttttggcatagttcttactgggtgtcattttatttttctttaacttaaaaaaaaacaaaacaaccctacagaagaaggaatagtacaatgaacttgctggatgtatttcaaaactcctttaaaccttttcaaagaagtatgtctaaccatctcaatgcagcctaaaccagaataaaaagagccaagccctaaacacggaatcatcaaaactggtta

SEQ ID NO: 813823 - DNA, 646 bp, Homo sapiens
tttaatgtcgttctctgtattttacagtttttktaaagaccatgatcatttttaatctcctaaattgatgtatgtaggattattcttttcaaaaacattgacttttgatgaagtgagcattattttcttctgtggctctttagcagcatgtttggaaagtaattttgatagagactgagagttgaccaaaatgagagattagaaaaagaaaccattttgaactgctacaaagaaaagtagctttataaataaagcatttttgtacattcatgaaaatctgcttaacatagcttcccggtttcagcttcagcagtctcattgcctgccaagattcagtggatagcaggcaactatctggggtatgaagtcttttagtataaagcattaaagcctaattcctgcaattgactaaaaaatccctctgtctatgcgcatcatcgcccgagagatgcttcttgtactgcagtgccgtttgtcaggccttgttggaccacgtaggatgaaactgaagtagttaagctacctgtggagggatgaaagccttgggctgcatcttgttcctgcctccagcctcagcattagggttctaaagaaaagcctctctttacaatttgttaaatttgtatctatttgctaggaactacac

SEQ ID NO: 813824 - DNA, 575 bp, Homo sapiens
gtgttctccaattccatccatgttatcacaaaagagataagtttcttgtttttcaaggctaaattgtattccattgtgtatatataacacatttyctttttctattcatctgtaacagagtgtagaatggtggtttcagcctggggtatggagggaacggggagaaaatggtcaacttctattatatattgtgtggcatggtgaatatacttagtaatagagtatgatacatttcaaaattgttcagtaaattttatgtgttctcatcacaaaaaatgtaacatatttggggtgatgaatatgttaaccagcttaatttaattattccacattatattcataaatcataacatcactttgtactccataaaattatatcattttaagctgtcaatttacaatgaaaaaaataaaaataaaataggatgacattatctatttggcaggtgtatgagtccttgtagtcttccatttcatagtattagaagaagaaagatactttcccaagttatgacataatgtaatcttttaggacatttctgtagaactgccaccatgacaattatttgttaaat

SEQ ID NO: 813825 - DNA, 620 bp, Homo sapiens
tattccacattatattcataaatcataacatcactttgtactccataaaattatatcattttaagctgtcaatttacaatgaaaaaaataaaaataaaataggatgacattatctatttggcaggtgtatgagtccttgtagtcttccatttcatagtattagaagaagaaagatactttcccaagttatgacataatgtaatcttttaggacatttctgtagaactgccaccatgacaattatttgttaaatgcttgcacaaaaaaaaacaggaaaatagcagaaagacttagtggtccttcttaataggatcagtggtgttcaattttgtgtggtaaggagcagaagagaagtggaaaactattatatggaatcatttggtgtagcttgtgtgcatgaaatgcatcaggttttttttaaggtaatatttgcaagattacattgtattatggcccattttactggtaacacagggttattttgtgcagmgtagctcattgcttcaaaagtaaagggctggttttattcatcactgaagtggtttatctatatctcccctcttattcagtaactctaaaattaagttgcattcatattctgtagttaaatccatactgtg

SEQ ID NO: 813826 - DNA, 646 bp, Homo sapiens
aagacatcttgtgctcatggactggaataattaatattcttaaaatgaccaaactgcctaaatgaatctacagattcaatgcaatccctatcaatgtcattgtttctacagaattagaaaaaacaattataatatttgaagggaaccataaaagagcccaaacagccaatccaatcctgaacaaaaagaagaaacctggagacattacagcacctgacttcaaagtatattacaagcatatagtaaacgaaacaatacggtattggtataaaaacagaaacactacagttcaaccttcaaggcacaagtgatcctcccacctcagcctccaagtagctgggaccaaagggatgtgccaccatgcctggctaatatttttattatttgtagagacaaggtctcactatgttgcccagtctagtctcaacttcctgggctctagcagtcctcctgccttcgcctcccaaaatgctgagattgtagttgtgagtcaccacacctggctgtgattttgatttttttctaaatttgttgagacgtgtgttgtgccttaacatatagtctttcatggaaaattttctacmtgctgatgagaagaatgtgttttctgtagctgtcggatgaaatgttctgtcaatgtctgtta

SEQ ID NO: 813827 - DNA, 538 bp, Homo sapiens
ctgtatatctatcaaagaactatgtagtctgggaaagactggcaccaatttaagtaaggggattaataggccaaaacaaagcaaacactactgaaatggaaatgccaagaggaaaagtgacatgataaagctgacattattgaaatggaaaacagtgtagagtttaatagcatgaatagctgagatattctcttgtcagaaaaaacattgcccttcattgaaatacttcaacttttgtttaattctacatcaaagatgtttctttgaatgtttgacataattagtaatttctcttgttattctttcaaaagaaattgaacaaagattgtgggcacacataatatgagttagaggacaagcacgaattagtttgaagacctagacctttatttactctagtgttgagtctagctataatctagaacatgyagacaatatgatgaccaacaagcattctattacttgactaaaatttgtgggatatgttaagcattactcagaaataatttctatgccagcttttccatttgtctggtgt

SEQ ID NO: 813828 - DNA, 501 bp, Homo sapiens
ttcaagtgtttccctgaattctgtgagctatttttgaaaattagttgaaccttaggagggtgtcatgggaaccatggccagtggtgggaaccatgtacccatatcacatggtgatacaccatgagagatgactgtagtttatacataaactatacatacctgctgtgaaagccctgaagttgatttctgtttatagttaatgcaaaactagctctttattaattccattttgtacatctgcaaaaaggcattttcttgaataatttatctcttggattacctttccagacttcttttaaatatctcacagtaagtaatattgtttttaagcttaaaaactctccatgtgatacaccatgtgacatgggtacatgtcacaacctagcctggtgattggcatctgaagtggggggcagttttgtggaactgaayccttaacatgtgagatctaacactatctccaggcagatgatgtcagaattgaattggaggaatttctta

SEQ ID NO: 813829 - DNA, 615 bp, Homo sapiens
gacattagaatggcctttagagagacttgggcatttaaggaggatcagaaacttaccagatagaatggggatggggaaggcataccaagaacaatatgacatatttaggagaaaactacaattaactcacttgcacctaaaaatgagagatcaatgggggaagtagtagaacatcagattgacgtgaaaatacaggcagacagtgccagataggaaatgacattgcttgttgtttgcctctctgtgtcttaccgaaaacatggccttgctttcatatttaatgtacttagagctgcttagggacaagttcaatctgaatagacagcactgttaattttacattattaccaactaaggtgttcttttataatgttagtctgcatcatttttattctggatatagtatatcttcaaattagataggattatccataaaattatctggagcattgaaccccaattgatgctctctgccattaagtgatttaattaaaaaataaaatggaatcaattgaactcattaaaccattttgaacccyggtgttctagatcaagaaatcttttgaacccctattaaattctcctcactctccttctcaggctcctcttcccttg

SEQ ID NO: 813830 - DNA, 478 bp, Homo sapiens
aatgaaataaaaaatagaaaagaacaragatctaaagtcaatcatgtaagcatccacttcaggaaactagaaaaagaagagaaattaaatccaaagtaagcagaataaaaaaaaatcataaaattagagcagaaatcaatgaaactgaaaacagaaaagtaatgaaaaattgaacaaaatcgaaagctagttctttgaaaagatcagtgaaatatataagcccctatcatgtaagaaaacaaagagagaaacacaaattagtatcagaaatggaagacgggaaatccctacagatcccatagatagtaaaaggctaataaaataatactataaacaactctaagtacataaattggataactgggtaaaataagtcaattatttaaagacacaaacttccagaactcacacaagaagatagacaatttcactaagactacatctattagagttagtgaatgaataatgaataatgttc

SEQ ID NO: 813831 - DNA, 434 bp, Homo sapiens
atataagtggatccatacagttcaaacctatattgttcaagtgtcaaccatayatattccaactttggaagcaatagctctgtattttatgaatgaacttaagaccttggagaacaatggtagtggcccatgactgcatgtacaaggacctggaccagtgccctgcagtgaatgagtatccaggggagaggacaaggctttaacatcagtgtggtttgtctgagaatagcaaaaacagtaaaaggtaactcagccaacacttctctttctgttcctagaattggaaagagggatggatccttttggactgagcaaacccctgagattttctgggcaattaaagtgtgtgtgtgaagaggtcatcagggaaggaaatataacttttgctactaagggaagttggtattcaaactataaattggataaattaaaga

SEQ ID NO: 813832 - DNA, 554 bp, Homo sapiens
  misc_feature 1, 2, 3, 4, 5, 6, 7, 8, 9, 10, 11, 12, 13, 14, 15, 16, 17,18, 19, 20, 21, 22, 23, 24, 25, 26, 27, 28, 29, 30, 31,32, 33, 34, 35, 36: n = A,T,C or G
nnnnnnnnnnnnnnnnnnnnnnnnnnnnnnnnnnnnccccttttctctgtctcctttattagaattagcttccatgaggtcagggaaattattttttttttattactgkgctttcaggacaaaagcagctttaattaatatctctttaacgatgcatgaataatttgaacactcaggctgtgtgtattttttcttccagtaaacaaagattccaaactttccacttaagttctaatccctaaaatttaaattttaattttaagtcagtttgttgatttaatagtaattggttctttccacaaagtttcacagtatttagatgtgtggttattatctgacattttaaaatgatagctatagagagtgcttttcaccagatgaaaggaattcaactaataacaggttctaagatacaataatttcttagaaatgttgctctatgagttttgactaaagccagtgcattctcagtgaacagactcctaagctagattaaactgctcctacactgaaggcatttctgaatcactctaaagggtgaaaatcgtcttaag

SEQ ID NO: 813833 - DNA, 656 bp, Homo sapiens
tgctgggcacaaagtaaaagcccaagagatattagcgtagccaagaacactctaagtgctttatctcatgtatcctcagcaatacagtgagttaggtactattgtcatcctccccatattatcrgtgaggaaaccaggccagcgagagattaagaacttgctcaaggtaacaacaatagcccttggaggggtttagattctaatccatcattctaggtacatatttatcattactgtgtggcacacagaagccacatactcaaatgcctgcaacagcctgttgataagacaaataactgaaataaccagtacaagtcaatagaaaatgggtgctttcactttttacattttttgatactgtgctggtctggcaaagaaatttctgaggccaaatttagtctgcagcttatttgcagtccctgcacatccaagtatttgaaggtaaatttacaccgtggttaggctggcgtttgcatactaatggaatggttggttttcctccatttcttggcccctaagtgtccataagtgtggaaaataaaggaaagaaaatcttagcactgagtaagtgatatggaacattcactttccagggagtacttattgtctcttctttagtaatgagtgggatccttctttattttaatatgcttgat

SEQ ID NO: 813834 - DNA, 669 bp, Homo sapiens
tcctcttctataaaattagggggctgaactacatgatatccatggccctttcagccctaaccatctgtgatgacatttcaactctattataatttagatggtggaataaactgagagcccaagcatcatctctaacattatttcaagtttcattatttgaaactgtgattcgcttcattttgataaatgaggcatgagccaaattaaaaatttggcacctaacagtctggttttttctttgtttgtttgtttttagttgcctctgtctatataaagcttaggtgagtgaagtataggtagatcaaaaggctactaatactaagtaccttgggcagattcaaatttaagtccatagtacgaaaagcacaatgctcatgtaagcacagactttgaggcaaacctgagttcaaggttctgtgtcaccacttataagctccgtgaccttgggcaagtttttaatctcatgccttgtctataaaaggaggataatgacagcacttactgaagagggttttcattagaattaaacagggaagtaaatttaaagtaactgatgaacactcagtaaactatagctatcattattatttaagayaatacttaagaatttaccttctggttaagttaaaacacacagatactcgcacacacacacactaagtccaccat

SEQ ID NO: 813835 - DNA, 632 bp, Homo sapiens
ttaccttcaaaatagtgaattccctatctctgaaagtttaaacatagaagttgaatcatcttccatcacataaccaaaataattactrctgagagcgggagagtgaatgaataaggtctcatgcaattttaagattctacagtgccattaggaatgatacctaatgtttatttgatgcttgtttggtgtttgttaggcacagtgctgatcgccttgcattctattttgttaacccctaaagcaatccttgagataaatattattattacatacagaaaaatgggggctctgacaagttaaagaacttgcctgcatcataagctaggacataactaaggaaggattttaagccatatttatctaactcctgagctttcagtttaaagtgtgtatcactatgatactctgtctcataaaagagtagttttctctgttccagtttaccttctaaatgattggtgttggctgcttgatgattcaagtctctgttaccagaagcaaatcaaaagtaccatttctgatttcatgaatccctttaactaccaaatggtacgtgatgcatggaaagaagcaaataactataatatgattttttggagtgaaaaatacatttttaataaggtgtcattgat

SEQ ID NO: 813836 - DNA, 602 bp, Homo sapiens
cacatgtcaagggagagaccaggtggaggtaactgaatcatgaaggcagtttccttcatgctgttctcatgatagtgagtgagttctcatgagatctgatggttttgtaagggtcgctttcccctttgctaggcacttctctttcctgccaccttgtgaaaaaggtgccttgcttccctttcaccttcccccatgattgtaagtttcctgaggcctccccagccatgtggaactatgagtcaattaaacctctttcctttataaattacccagtctcaggcagttcttcatagctgtatgagaactaatacaacaaattggtactgggagtggggcactgctataatgatacccaaaaatgtggaagcaactttggaactgggtaacaggcagaggttggaacagtttggagggctcaggagaagacagggagatgtgggaaagttttgaacttcccagagacttattgaatggctttgacgaaaatgctgatagtgatatggaygatgaagtccaggctgaggtggtctcagatggagatgaggaacttgttggtgactggaataaaggtgatgcttgcaaatgctttagcaaagagacta

SEQ ID NO: 813837 - DNA, 597 bp, Homo sapiens
ataaatatcaggagttgcaaagcaaaaagctgaaagcattctaaatcatggtggcaacgcaagtaaatatagtcatagtccatataggaaaaattaaagatttacaaaaaacagatatattgtagaagcattgtaggtttgcttttattgagatagggtctcacaatgtcacccaagctggagtgcagtggcacatacacagctcactgcaacctcgaccttccagggtcaagcatttgtcccacctcagcctctcgagtagctgggaccacaagagcacactgtcaccaccatgcctggaaaatttttttaatttgttttggtagagatggggtctcaccatgttgcccaagcttgtcttgaattcatgggcttaagcactcctcccagcttgacctcccaaattgctaagattatacgtgtgagccactctgcccagcccactgtgggcttttttaattacatttttgatgagtacttaaggacaatgakaaaataatggtatattatcagtggaagaaatcattgaacacggtagaaatttcatttgaagagaaaatgtctgcatggacacaaatacattaaaaatactggaaa

SEQ ID NO: 813838 - DNA, 511 bp, Homo sapiens
gttcgtcccataactttttgttcatatagtttttctaactttagttttaatcttaaaaggtttacacaatacgtctttgctatagcacttaaaaaaatcatataaagaaatacatgttaacttccaaggaagaatgccttgagggtaggagatcagaatatagaattccagcagcctgtccatgctcccatagcaatgcttaataatttcccaggcagttcctatcagtagctgtgtggctcctgcaaagcaagactccaggctaaatcactctctcctcatggggcatcaactaataccttccttacttaacagggaaaggcttcctgatgccaggcactacaatctcatagggttacacccttgataagaatgtaacccaggcactgcatttcttcactatttaaatactacaggaaacaatccatccagtgaaatagactacccaraaaaagcatatatgagccattggaatgaattttacttttcccactttgattttttcctaaac

SEQ ID NO: 813839 - DNA, 616 bp, Homo sapiens
ttcttgcaccctctgttgcttcctccattctcctctgtatttctcctcccacttacccttctttattgcctctgtgccttgctcttccagctcctgaattatccttgtaggggccctccccacccccaggtaaatgaagaaggtcaggccagcaggggccaggactttttgcctcatgggttagcatattactcaggaaggtgttcaataaaccacaaaatttattttcaagttctgaatttcaaaacacaatgtaaaataattcttactggcacaaatgtctaagtgtgactatttcaccagaacaggttttgtgtttcatattggcatgattacttttaaatataactttctaaatttgtttgcaaataaaattgtatggtttggcaaaacaaataatatttgatcactaatttaaaagacttttgtgatgcatctggtgatatgatgggggcacattaagccattaaactttgcattgtatttatcagtttgcattgtttgattatatctaatcacaccttagcatatgcaaacagaagttaaagcttgcaattacttagtacaatgattcacaactgaagtgctaaaataamtaagcaatttgaaagataga

SEQ ID NO: 813840 - DNA, 623 bp, Homo sapiens
tatatacaaatgttaaaaagtatgtaaattcatagaagtctartatggtatcagtcataattttggttattatgttaaaatcttatatgctacagaaataaccaaattccttgtcaattgcaaattataataaacttccatcagatttttaactatagatattctaagtctctgtcatccaccattatgatacttttctaaaagcatttgcaatcagattcatggaaaagactaacaaatattcttaaatataggtttaaataactttaaggtcgatggactaaatgaaaatgtttcagagctctaatgaagaaactgatgaattcatgaaactactaatcaagatgaagcagaacaaaattaattacatgaaattaagtaactgataaaggtaatgtttgcatgacttttatttgaaatattgttagttctttaaatgttttgttttccagatttaagaaaattttctcttttaaggaaggctgggcttgttggttcacacttgtaatcccagcacgttggagggctgaggctggcagatcgcttgaggtcaggaattcaaaaccagcctggccaacatggtgaaaccccttctctatcaaaaaatacaaaaattagctggg

SEQ ID NO: 813841 - DNA, 607 bp, Homo sapiens
cttgtgatagtgagttctcacgagatctggttgttgtaagtgtagcacctcccctgtcattctctctcttgtctttaccttctgccatgagcaaaagctttytgaggttaccccagaagcagatcgtggcgccacgcttcctgtacagcctgtagaactatgagccaattaaacatcttttcttataaattacccggtctcaggtatttataacaatgcaaaaacagcctaatacatgaagttttgatatagtctagggatgttcaactcagaacagtattatttggtttctctactgagagtacatttactaaaaaaaaaaaaaaaaaaaaaaagttgccatttcttggctcaggagcagaggtaaatagattctagtgatataccaggtatacaggagaatttagtacatcataaatgtggcatttaaattagtgtagaagagatggattatttaataagtggtattaggcctactggactagccatttgtgaaaaagttagctgaatctccatttcaccccttagcatcaaataagttccaaatgcttcaacagtaaaaatgtaaaataatgaaataataaaaatacttgaagaaaacataata

SEQ ID NO: 813842 - DNA, 687 bp, Homo sapiens
tcctttccttgtttcctgtggccacaaaaaaaccctgggttgttggagccttggctgayaacatggtgctactctgtagctgtggttcattttcaagtatcaccaaaggaaaaacaaaacctgatgacccatccccattcttgtttcttctccacattttgactccattccatagtctatttattttggtttactatcctgactgagcaaaatgtagttgtcttattttgtgtagcatttatagttgttatcagtaggagagtgggactattaggagctcacacaatactagagctggaacttgcactgttttcttttttggtcatatgttccataagatattacattttggattataggaaaggagaaagcattgtgacaaaagaagttgtattcaattatttatcctacacttctagtacatgacgaggttcaaagtacaggggaaggaaagtctgagtttcagtcgaagttgaagttatttagttgtttgtacttggaaaagggattttgcttctgaccacctcaatttacttggggttatattatcagacctactgtggaaaatctttatgaactccagacttttatagaaaatacaggattattacactcacaatcctgaacagttatctcaacagattttacttactatttctgattattatgaagcactgtagcatgaat

SEQ ID NO: 813843 - DNA, 439 bp, Homo sapiens
cacacacacgcacattttaatggaaaaattggcaaagatttgaaactagcagttcaggcagtcaaaaacagatcaacacaaattgatcagtctaaaaagaagctcaagttaaygagtgacaaaatagattcaaactaaaccaacatgcgatgccattttttttcactcatcagtctggcagagattaaagaacaatccagcctagcattggtcaggatatggtgatctaataaccaggtatgctggtctctcacacacagtggttgagagctcacctggaataggctttgtggaggggacctgggctatttgtttcaaagataccaccaaaatgcctccctttaatcttgtaatgaaccatacatgctatattctaagaaaatactcggagaaatgcatcaagacatgctcaaaaactatatttttcataggattgtta

SEQ ID NO: 813844 - DNA, 577 bp, Homo sapiens
ggtgaaacagctaccaccaagggaccagatgactggtacactcctaacagatcttcagagggaaggatagagagtggatagagggaagacatgggagctggactcacaggggaggaatctggaaaccctgcacagggctactgttcactgggacttttttctggcccccagtgactttggaagaataggtgagttgaactagcaaggagcaccctgctgtggccataggcctctggaatcacagcaggaggagacccctcaaccaccacggacattggaattggcaggaagagctacttagagaagtggtaagggcagcaagccagctgatatggagcccagagggtttggtgcaggtgtgtctgtagcagagcatgaccagggacagccatcccactaaactcaacttcctcccattgcaggctttagccctaggggaactgttggatctgaactctatagaaccgttttgcccaccagaaggagccaatctgatctgaccaccccttagtctgctggcctctccaagggccttagccyggtcatgtctgcttacagggcagcctcaggtgccctg

SEQ ID NO: 813845 - DNA, 599 bp, Homo sapiens
atgtcttatattccaaatactcatcagcacttatacactcgatgagccctcagctccatgccttttgggtcttggcttctctcattcatacctttgatcaggcaacactaaygtgtcgagcatttaccaagcaccaagtattgagcaagtttccgaccacgcagatatggaacttaaaaaccccactgtccctcatacaagttaattttccaaaggaggaactctgcatgaaaacagagcattataataatgtagtttaagtactaacagtcagggaaaaaaattaagacaatacaggtgagttcttcacgctttttcctgtgcctgaagtgtctacttcccatgtctaccttcttcctcaacagatgttaatattcttatcatttaagaaccagcccaaatctttcttcattaagtttttctaagttgttttgtttttatttcatactcccttgaccctaaatgccttttattgtgtttgttgcaatccttcattagaccatgaataactataagttagaattgtatcatttccattttggtgccttcacacagttctttacacattgttggtttcttgaatggaaacacttgttctt

SEQ ID NO: 813846 - DNA, 500 bp, Homo sapiens
atactcagttataaaaatgggataaagttggtggctcatgcctgtaatgctaacactttgggaggcccaggcaggcggatcacgaggtcaggagttcaagaccagcctggacaggatggtgtaaccccatctgtaccaaaattacaaaaattagccaggcatggtggcgcgcacctgtactcccagcttctcaggagactgaggcaggagaagtgcttgaacccagaagactgaggttgcaatgagctgagatcacgccactgcactccagcctgggtcacagactgatgagaccctatctcaaaaaaaaaaaaaagtaataaaagaaaaatgcaaaacagtttggaaatatctgatacagggaaacaacagggtgattaaaaatgccaatcagacatctaaattggggcctagattatcagacggagtgactggagtcccarattaatataatcagtgaagaaatattataaaaagaaaaagaattgctttctaaatag

SEQ ID NO: 813847 - DNA, 605 bp, Homo sapiens
gactgctagcatactatatagtatcatgtcttctacactcctaagacgtaatgttttagaaagatcattgaacatttctagctactctcttttttaaccttgctctcttttaaccctatttccttcatcagtactttacagatcatgaactaactgtggaaatctgacttttaaactgacctgcccttcccatcattctcttcagctcacatgtattttcctaactattggaaattaaagtctgatgtatagacatctggtagaatttgcaagtcaaaaggggggaggtagttatttttaaaatataagcgatttcaatatattttgaaatatgcagtttttacatgcacgatttcaatattgaaagtttcagggactccttaagatattctttgttttgaaatatttacatattatctattaccataaaatatgttaatgtgattaagccacaaagccatacaataattacwgtatcaattaacatcttaaagtttgcatgtagaatttatagttaataaagtgctattagtataaagtaaaatgtctgtagctataatcttttaattattttttaaaaattatagtcattttagaaaaggaaa

SEQ ID NO: 813848 - DNA, 505 bp, Homo sapiens
ggagggtgtgtgtgtccagaaatttattcatttcttctagattttctagtttatttgcatagaggtgtttattgcattttctgatggtagtttgtattgatgtgggattagtggtgrtatcccctttatcattttttattgcatgtatttgattcttttctcttttcttctttattagtctggctagcagtcagactattttgttgatcttttttgttgatcttttttgttgatctattttgttgatcttttcaaaaaaccagcttctggattcactgattttttgaagggtttttcatgtctctatctcaacatatgaaaaaaagctcatcatcactggtcattacagaaatgcaaatcaaaaccacaatgagataccatcttatgccagttagaatggcaatcattaaaaagtcaggaaacaacagatgctagagacgatgtggagaaataggaacgcttttacactgttagtgggagggtaaattagttcaaccattgtgga

SEQ ID NO: 813849 - DNA, 526 bp, Homo sapiens
ttgaaaacttcattgcatctgcaaatgtgctgtatcaatgaatatattaaattatttccaaaaatacatccatataaagaatatactatttaagcacatttattgaatatataagagaatatattaatgaagactgtacatatatatattagaataaataacataagcttgtaaacaaagaattgaccattcattgaattggccgtttggcaattgtcttgctttctttaaaggaaatatttccccataatcttattatatacattgaatctggagacatgtttctcaagccattaagcctcaatttttagtaagttgtagaaaaggttatatttgacaaaaaaaatcacaaatccccaccatgaagctatggcatataaatgatagttctgtgacctaggcatgattctaagtactttatacacattagctcacttaattctcataataactctcctaggtttgacattattgttgttattactattattattgttaytactgctgttcacagatgaacgtactg

SEQ ID NO: 813850 - DNA, 620 bp, Homo sapiens
taacttgcaatagataacacctctgaaatcaggaggttaccaaatattaaaaggactttgacttgattaaaaaaaaatgaaaacaatctaggggtgtccctccaatccatggtatacaattcygtggtaataaatcctagtacagtggaggatggatatccctgtatatttctgcacagcactctcccttctgcacatctcatggaaaagacatttgccagtttgataaagaccagtctttcttcagggctcagttccagatttcccaagccataggccaaacagaatctgcttataaaagcctgattctctcaaatgagtttcagtggttgaattgcaggtcctacagagatgactggtaagcagagaacattaatcctttttcccactgtgtgctagttctgggaacccaaataagtgctctcccagtgttgattggacttagagcattttcttctgtgcctgggaagccgtgaccaacctttagtgccagttggcccacagtgagttgagcagcctgtttataatcggagactttggtcagctgattttgaaatctcctcttcaggaactgtggaaattctaaatccctcactgcaatcttaaatacatttagaaac

SEQ ID NO: 813851 - DNA, 600 bp, Homo sapiens
atcttggactgctgtgctagcagtgagcaaggctccatgggcatgggacctgctgagccaggcatgggatataatctcctggtgtgcatttgctaagaccgttggaaaagctcagtagttgggtggcagtgtcccaattttcctggtacatactgtcacagctgcccttggctaggaaagggaaatcccctgaccccttgcacttcctgggtgaggtgatgccctgccctgcttcggcttgccctccatgggctgcacccactgtccaaccagtaccaatgagatgaaccaggtacctcagttggaaatgcagaaatcacccatcttctgtgtcaatcatgctgggagctgcagactggagctgttcctatttggccatcttggaatgaaccccactacctggatggaatttttaagtcagtggggctgatgagatcacctggggagtgtacgaaggcagacaagagcattctgggaagaatttagagttctcagtcatttggttgtggggcagaggaataagaacccacraggttttatctttctttctatctatctacgtgtacatagagagtaacatatatgactatgtaactataa

SEQ ID NO: 813852 - DNA, 588 bp, Homo sapiens
attctcttgcctcagcctcccgagtagctgggattataggcatccaccaccgtgcctgtaatcccaggctaatttttgtatttttagtggagacggggtttcaccakcttgtccaggctggtctcgaactcctgacctcatgatccacccacttcggcctcccaaagtgctgggattacaggcatgagccaccttacccagctgcttgctaaatttttgtcgaatgatcagatgagtccattctcctcaccagagaatgttaccaaccacagcttcccgtccctctatccatgccagcagtgctttattttgggggactgtacctcccagcatgcaatgctggctcctggccccaaccgtgattcttgcctccttcctccactggtgtatttcagaaattgtgctgccaggtgtggaatgtcgaagggggatctgtctctctgtagtctaggcctgagggagcagcccagtgtgtctaacaaccaggagagcacatacagagacttgctgggtgccaggcctgtgctacctgctttagaaatagcaaatacgtgaggcgggaatgattctttgccccttgttacagat

SEQ ID NO: 813853 - DNA, 634 bp, Homo sapiens
cactgagtcattcattcaacaaatgcccattgcgtacctactgtgtgccatagtgtgacgggctcagtatattgcctcattcattacctcacaaggttatctgttaacagccacaagtcagaggcttttgacstacagggtcccgggagagccaaaatagtatttgtttgtttggaataataaaagctgtcttcccaggccacaggaattaaaactaggagtgctaaatcagcaattgtctagccttgcctgagcttctcaaactgtactttagaattgcttgggggaacttgttagaagtacaaaccttggccagaacctcaaagaaccagactcaggcaatccaggatggggtccaccaatccaaggttttaaaaacaagaaccagatggggataggtgatgagttagccactggggattcagaaacccgagagggtggggtggcagtagttgggctttgcaggccagactggtctgggacactttgtgatgaacacaaaccttccctcttccattttgacctttctgccctggtgggctgcttttacgtaagagtattatttcttccttttgtaggcaaagcaaaaagtgtgagaaccagctgctctaaataaaacaattgaaggtggagt

SEQ ID NO: 813854 - DNA, 658 bp, Homo sapiens
cccacaggcgctgactaggagcccacggcattctccctgctctccctatcataggagaaccgcaggcagccaactgtcccttccacgccccaatggaacctctctcctctcctgcccattgtctacsacagatcagagatggctctttctatgcaggggtggggacccagccatctctatcagctctgccggcactgcaggggtgactgactagaggcgggaagccctcctgggcctcaaataactaggcccaagctttgactccctcatggctgctctagggactgcaagggaggacacgggcttggcctttcctaaagggctgctttctttcgaagtcaaggggatgctattttcttctttgtgtttctttggttctgacatcagaattctcctcagtgcagataacattgccctctggaatgggtgagaatcctaacacctgggttttcggttctgcccagcgtggcttaagtctccaccttaagtgaatctcacctgagacagctacagggtttgttttctggggaaaggaattaatgacttgagcagcactcacgggtcttaaacttagcatacagtttcaaataacccatgcccccacttattgaccccttactgttctaagcacttcatactttaaactgacttcatcctc

SEQ ID NO: 813855 - DNA, 658 bp, Homo sapiens
cccacaggcgctgactaggagcccacggcattctccctgctctccctatcataggagaaccgcaggcagccaactgtcccttccacgccccaatggaacctctctcctctcctgcccattgtctacgacagatcagagatggctctttctatgcaggggtggggacccagccatctctatcagctctgccggcactgcaggggtgactgactagaggcgggaagccctcctgggcctcaaataactaggcccaagctttgactccctcatggctgctctagggactgcaagggaggacacgggcttggcctttcctaaagggctgctttctttcgaagtcaaggggatgctattttcttctttgtgtttctttggttctgacatcagaattctcctcagtgcagataacattgccctctggaatgggtgagaatcctaacacctgggttttcggttctgcccagcgtggcttaagtctccaccttaagtgaatctcacctgagacagctacagggtttgttttctggggaraggaattaatgacttgagcagcactcacgggtcttaaacttagcatacagtttcaaataacccatgcccccacttattgaccccttactgttctaagcacttcatactttaaactgacttcatcctc

SEQ ID NO: 813856 - DNA, 545 bp, Homo sapiens
catgcctgtaatcccagcattttgggaggcraaggcgggcagatcacctgaggtcaggagttcgagaccagcctggccaacatggtgaaaccccatctctacttaaaatacaaaaaattagctgagcgtgttggcaggcgcctgtaatcccagctactcaggaggctgaggcaggtgaattgctcaaacctgggaggcggaggctgcagtgagctgatctcagcattgcactccagactgggcaacaagagcgaaactccatctcgaaaaaaagaatcatttgttctaccctgacaccacagcttggatgggtccagcttgctgaggtgggaagtgtctaagccctgggagctgtgtatcatgttagcacttgcttccatctactttgcctgcctattgtctgtgggtcaagaagacaccatgcccagtggaggggctgaagctactagaatgttttatttgttttgggttttttgttgttgttgtttttgtttttaccagattctcaagtgtctttccttctccctctattcaagaaatgaagt

SEQ ID NO: 813857 - DNA, 545 bp, Homo sapiens
catgcctgtaatcccagcattttgggaggcgaaggcgggcagatcacctgaggtcaggagttcgagaccagcctggccaacatggtgaaaccccatctctacttaaaatacaaaaaattagctgagcgtgttggcaggcgcctgtaatcccagctactcaggaggctgaggcaggtgaattgctcaaacctgggaggcggaggctgcagtgagctgatctcagcattgcactccagactgggcaacaagagcgaaactccatctcgaaaaaaagaatcatttgttctaccctgacaccacagcttggatgggtccagcttgctgaggtgggaagtgtctaagccctgggagctgtgtatcatgttagcacttgcttccatctactttgcctgcctattgtctgtgggtcaagaagacaccatgcccagtggagggsctgaagctactagaatgttttatttgttttgggttttttgttgttgttgtttttgtttttaccagattctcaagtgtctttccttctccctctattcaagaaatgaagt

SEQ ID NO: 813858 - DNA, 545 bp, Homo sapiens
catgcctgtaatcccagcattttgggaggcgaaggcgggcagatcacctgaggtcaggagttcgagaccagcctggccaacatggtgaaaccccatctctacttaaaatacaaaaaattagctgagcgtgttggcaggcgcctgtaatcccagctactcaggaggctgaggcaggtgaattgctcaaacctgggaggcggaggctgcagtgagctgatctcagcattgcactccagactgggcaacaagagcgaaactccatctcgaaaaaaagaatcatttgttctaccctgacaccacagcttggatgggtccagcttgctgaggtgggaagtgtctaagccctgggagctgtgtatcatgttagcacttgcttccatctactttgcctgcctattgtctgtgggtcaagaagacaccatgcccagtggaggggctgaagctactagaatgttttatttgttttgggttttttkttgttgttgtttttgtttttaccagattctcaagtgtctttccttctccctctattcaagaaatgaagt

SEQ ID NO: 813859 - DNA, 633 bp, Homo sapiens
aattccagcaaaatgataagctatccattgacctcaattaagaaataaaacttacaggtgatttttttcccttaaatttgttttttttttctagttgaagcaaagaatactcattatttacaaaacctgatatatatagacaagtagaaaaaaaagttttagtcatagagtcactgtatatggtacatattcttatagtgttcccttgcactcattcaacaaatatttatatactgattgattactgaatgacaggcacttaggacacaaatataagtaaaaataaatcatttcagtccttgtggagcttaccgtgtaatataagaaatatgactgtatatctggaaggcctaaagaaaataaaacactgttactgctgagaaattaactttaaaatggctaactttcataaaagaattcatatttatgtgaaataagctaaataggtacacgaaatctgtggaactcttgtaacagacaaacaataacaagttagaaagtataaaaagagatatcagtcaaaatagcatgaatatgtaaagacttatrgaaaatattttaatgagaaaattataatccacatggaaacactgagatatacttaacgcaatgtgcgaaaataaaatcttataa

SEQ ID NO: 813860 - DNA, 625 bp, Homo sapiens
ttctctgcctctctccctcttgactgccaaggtccagggaagttcacatctcagtggtcacgggctggccaagtagatccccaccagttgctggataatgcctgtgaactactggctagcatctattctgaaaacctagcttctggtttgcttgtttattcaccagtatctcacataattttcttatgaccatctggcacctaatatagatcccaaaagagtttaagaggatttaccctttaggcaaaaaatactggcagtgtttataatcccctcaaaaagagaaagggagaaaaaaagaaagaagaaatgtttttaaaggaagagatagcaccatgtaactataaataactttctatatcggactgaaaataaatttttgttttttattttggctcatttggtaagctaacgaactggaagaaaagagctagttttaactaaacaactctaaaagatgtcagaatttgaaaacttagagttatgaatagatttgattcatttagccccaaaactattaaaagtatataaaatattaatagtcaattttccaccaaaaccattgagctayagaattccagatatcgaaattctaaggaaatgttctgttttagaatcaaatcat

SEQ ID NO: 813861 - DNA, 609 bp, Homo sapiens
tctctcataaggggtgaatattcagaatatataaggcatgcaaacaactaaatagcaagaaaacaaataatctgattttaaaatgggcgaaataactgaatcaaaatttctcagaagaagacaacaaatggccagcaggtttatgaaaaaaatgttcactatcacgaatccccagggatatgctaattaataccacaatgagatatcacctcagacctgttagaatggctatatcaaaaagacaaaaagtaataagtgttggcgaggaggtggagaaaagggaatcctttcacgctgttggtgagaatgtaaattaatacagccattatggaaaacaacatggaggttcctcaaaaaattaaaaatagaattatcatatgaaccagcaatcccactactgggtatatatccaaaggaaatgaatcattatatcagagatatctttccttcatgtgtactgcagcactattcacaatagccaagataggagtaaacctcagtgtccatcagagggtgaatagataaaggaaatayggtgtatatacacgatggaatactagtcagtcttcaaaaagaaaaaaaaatctgtcatttgcaacaatatgtatg

SEQ ID NO: 813862 - DNA, 666 bp, Homo sapiens
atatttaatttaaaagacttcatgaawttgtgggaggggtaagggggaaaaaagaaagagaaaggaaggaccccaacaacagtaagactccttaccatctacatctcatctgtgtttctcttattataacccatgaaatatctctacctgcagtgcttattacaaatacaaataccatcctcactcattttcaacagctacctcactaattcttacacacttgacaactttagaactttgtccaattattatttggccaatgcttgaaaatgatttaaaggcataaccccaagtcttagaacagcttagagcaggagtataaatattcagattccaaagacaaggactactacccacatcaacctgcctgtgacacctcacaactaagaaaccagtttttagtagatcaaagatgaaaaggtgaaacgtacagctcacaaatcaaatatctgggcactagagggaataggtgtggttggaaaaataacccttctggaattttctcagcatatttttaaatggcagtaacaacatttcttccactcctaaaattaattttaatagtgaactgaggtaacattttttgtcttagcagatagctcaattccattgacaactgacttgtcatctttattaatttttacaaatgcatgtctcctaatatga

SEQ ID NO: 813863 - DNA, 666 bp, Homo sapiens
atatttaatttaaaagacttcatgaaattgtgggaggggtaagggggaaaaaagaargagaaaggaaggaccccaacaacagtaagactccttaccatctacatctcatctgtgtttctcttattataacccatgaaatatctctacctgcagtgcttattacaaatacaaataccatcctcactcattttcaacagctacctcactaattcttacacacttgacaactttagaactttgtccaattattatttggccaatgcttgaaaatgatttaaaggcataaccccaagtcttagaacagcttagagcaggagtataaatattcagattccaaagacaaggactactacccacatcaacctgcctgtgacacctcacaactaagaaaccagtttttagtagatcaaagatgaaaaggtgaaacgtacagctcacaaatcaaatatctgggcactagagggaataggtgtggttggaaaaataacccttctggaattttctcagcatatttttaaatggcagtaacaacatttcttccactcctaaaattaattttaatagtgaactgaggtaacattttttgtcttagcagatagctcaattccattgacaactgacttgtcatctttattaatttttacaaatgcatgtctcctaatatga

SEQ ID NO: 813864 - DNA, 604 bp, Homo sapiens
ttagtggaagatattaacacatctccctcaattactgatkgaagaaatagcaagaatataggagatttgaacaacagaaaaaataaacatgacttgattggcatatacacaacacttaaatagagaaaaatgtagtaagaatcattttaactgaaaactaaaaataaaagtaaaattatttaatttaattaaccatatttagaaattcctataccaaatattatacttcatggtgaattatgacagctttccactgaaaatggaataaaagaaagtatgcttgtggtcaacatttgtattcaggtcctcagtgcaaaaaaaaaagcaacaacaaaaagccagaagaaatgaaaagtaagaaataaaacttaattgttatgaacagcataattgtatacatagagaaaacaaaatattcagagataaaagtttagaattaatgggtgatttttagcatcctgttaaatatacaaaaaattacaaaaataattttgatattccatttaattccatacatggaacaaatcaccagaaagtataaagtgatactatttatatcagtatttaaaatatcaagtaaccaattgaatgtaaggtgttcaag

SEQ ID NO: 813865 - DNA, 551 bp, Homo sapiens
tccaacaaggaacagtgtggtatgaaggaacgaacaagattttaaatcaaacagacctaggttcaacttctgcctctgtcagaagctattkgtgtgaccatgagcaaatgacctacctgactttgcttcaggtttttttttttttttttcagtaaaatactaccttgaaaaatcttcaaaggattagatataatatagagagttgatcttcattatatgtggattctgtatttgcaaatttgcctactcattcatatgcatttgtaacaccaaaataaatattgtgttcctttcatggtcattcatggatatgtacaaagcagcaaaatttggagtcacctaacatgcatgttcccagctgaggctgaacaaggctgtctgtgctctgccttcttgtttgactttgcctactataagtagtatggtctagtcagtcccacagaaacacacataagacaattttatatatcgatcagtttacaaaaatgttcagaccaaaggcttataggaacctaaccttgtgtgtctagtaggagcagtgcttaagtatt

SEQ ID NO: 813866 - DNA, 653 bp, Homo sapiens
attacatgtaaaatcttacctacaatgaacagttatcaatctcaaaaggagaagaattagaagaatgtaggtgtataatctttacagaaaagttgaggtttttggctaaaatgtattagacaacatataatgggaaaagttttgaggagaaagtaaacctggagttttgtttttttttttttttcagtcattcagcaggtacgtgtaaaatgcctcctaagtgccagaaacacttgtaggttctaagattacatacagcagtgaagatactccttttctccagtgaattttatttcattaggatggaaacattcaacagacaaacaaataaggcaataacaaaattctgataaatgcaataaaatgggaagaggaaggagcaagtttggagtggggaggtacattgcaaacagaatatttgagcagagatctgaaaggcatgagaaactgagtagaaagcttatctgcaggttagcatttcaggcaaagggaagagacgctacaaataagttagctgaaaytttgctggaatgtttgatcaccccgagtgttcttggagtgtgtgatgaaatggagtatgagagagaagggagtgacaacacacgagtattcaggaggtagctggggaggctagaacatggagagtcttataa

SEQ ID NO: 813867 - DNA, 577 bp, Homo sapiens
cctattatgctcttgtttcctactaattccacaaaatgttcaactactcttatgacattaacacttcaagagaaagagckaagctgaagtctttcattcacataaagatgacacaatttaaaaatgctacaaggcaggtatggacaaagtactatgagggtaataaggagggaatgattaacacgctaaaaatatactcttaacctaatgaaatgaaagtactgccttcccaaaccgaagttcaaaacaggtatatttacatttaaaattgtatttaaaataattcaaagcttaccaccagcagcccttttctgaccgtaggtaactttcccatcaaattcatccactggtacctttatatccggctcaacctgagaaatggtacagttcaggtgttcttctatctcagatagtaactaagtaatggagagaaaatttccaaataaaaatttcatttagaaagagttgcattttatcatcattaaataaagctggaaaggccagaatgcttggtataaatggaagtcagatttctgaagagagaaattcacaacttacaattagcaaagtgcagata

SEQ ID NO: 813868 - DNA, 581 bp, Homo sapiens
ggctctacccgtcagcttcaactgcctaaatttgatccagggctggtgatctggagcgggaggacattctctcatgctaggcagggggtgaggagaagcagtagcttcagcagtttgagctcctgggccaggagtggccacttaacaggtgacaatggccaagtccagagtccagtatccaaggctgggcacaccagtggagccagtaaaagcatctagtgttcaatggcagaggcattcatattctccctgtccagtcttgccatttgatatttgtcccaggcctagttcttagccctcctggactccttgagctacccttttaattcacctcctgtattagtctgctctcacactgctaataaagacatacttgagaatgggtaatttataaaggaaagaggtttaattgactgacaattcagcatggttggggaagcctcaggaaagttacaatcatggagtaaggcaaaggaggtgcaaaggcatgtcttacatggyggcaggcaagaaagcgtgtgcagggaaactgccctttataaaaccatcagatctcatgagacttatttactatcatgaaa

SEQ ID NO: 813869 - DNA, 601 bp, Homo sapiens
agaacaggcactcaacacacaggtgtcccatgagtgacttaatagggaaatatctggggacctgggacactgaaataaggcattacaggacttaatctcaaagctttgacctacctgacagtgagacmcggggcctcaggctgtctatcttgagaaacatgaaaattgcacctgtccactgtggcccgagaataataagatgattcaataagacaaaatgtttaaaaaggctttgcaaacttatagcccactgcagagaaaaaaaaaatggtactgttgcaatgatccaaggttctactactcaagttggtgggaggcttagaagccacctccagaacccccaaactatggaggcccagagaggggctctgcctcacccagagtcacgtggctcaccatggccacccttcatctgtgctcatgaggtgctgagctctgcaggcattggtgagttcccaggctactcaggaaagtgaggcagcacatggaccttggccagactgttctcatttcaggaaatgggttcttatccccaggagtggtaagtcttattccaggtgggcacacgctgagcacatccaaccaaaccacacagatcctc

SEQ ID NO: 813870 - DNA, 629 bp, Homo sapiens
acgtctcttcctccactacaggataagcttgagggtagagtctgcaaacgcagtattcacagctgtacctgtggtatctgtgtcggaaaaggctacacaaataaaactgttamataagcacccaaaatgttatcaattgattcgatgcacttttaaaatgtttccatggtgctccaggaccttccaggtgccctgggtactgcctacaaagctaaagaacagggtctccacctacacggagcatccagtgtggtagcaagttagcagcatctgccttatgtcaggccctttagatgtgttaacttgtttaattctcataaaaacccaaggcgatgggcatgaatcatcccaatttatagatgaggaattaagagttagagaggtaaagaaatttgcccaaagccatgtagtcaatcctgtgtgttcttccttctttcccatgttgcctccaaacgcattgtctagtatgttagtttattagggctcccatgaaaatactatagcactggttgaattaaacaaaaacttattttcccagagttttggaggctagaagtccatgtcaaggtgtcaacaggtatggtttcccctgaggcctctccccttggcttgcagacggccgccttctc

SEQ ID NO: 813871 - DNA, 327 bp, Homo sapiens
aagtcctaattatatgatgcctaccagagattcacttcacttttaaggacacacatagatccaaagtaaaggaatggaaaaagacactccatgcaagtggaaaccaaaagagagcagggatagctccacttaaataaaataaaatagaatttgagtcaaaaactgtaaaaagaggcaaagatggtcattatataatgacaaaggggtcaattcaataagaggatataacaattataaatatatatgtgcccaacttcagagcccctacatacataaggcaaatatkaatatatctgaaggaagagttagactgcaatacaatagcag

SEQ ID NO: 813872 - DNA, 596 bp, Homo sapiens
attactatattgtaatctatatttgtattttatgcaaatataagtstatacataacttatatatgtagtatcttgtataatatacacaaaaatagaaaatttaaaggtttgggataataacaacatagataatatcctaaattgtttgtattataaaatctttctttgctctcacttttttttactgcccctggaattattaataatattttgaagtaagcattaagattggataggcttcattagttttaaaattttactacttgacaatacagcaagatatcatagttctaagttcagctttaaaaaatatgtttggtttgaatggctgtcagagttgaaaaggattcctcacaaagaggtgtcgatccaaatggaacagggcactggtggctgtgcttcctaaattatgattctcatttttcaatgccattcaccaattatgcaaaggcttttattgaaatagggctagtaaatttccatcttcctgatgtcaggctgttattcttgcaaactaattggaagatatttcatttttccatttttaagcaaatgcacccaaaatctattgaaactttatttggaagatttttaag

SEQ ID NO: 813873 - DNA, 657 bp, Homo sapiens
aaacttacacacataaacctaaaacttgtatcaaaacctgcctttatattgatatatttaaattctgcaatctatagctttatttccrtttttgcaaattcattaacctttctcttgttcttcatctactcttattaatcatataactccatctctcacaatcttcatttcctttttaaaatgcttaataatacatttcttgctatgaaactaccttgaaaagaaggcagtgtttcatattcaaagattaagaagcaccttataacctttagagacataacagtgcctatagtaatcctcatagtaagtcctgacaaaatattaaagtgctcgatatctttagaaatacccttttggacaaagaccaaggttatcaagaaaaagagggagttgtcataatttgcctccagataattctctacccacagtatgctttatattgttaaacagtaggcagcatccactattttttactgtagtagcagaggaattaaaaccaaataataatatatttactgtaacatattgtgagctattactataatttttcaaaattgttatgagtttgatatctgtcaccctttctttaaaagtatcaggaaataattttatttttaaatcctaagtgtgagatgtaagacagatcttgtagcattt

SEQ ID NO: 813874 - DNA, 630 bp, Homo sapiens
tgacgataatacagtgttgtgacttaaatgccactgaactgtccaccttaatatggttaattttatgtgaatttcttaacctcartaaaaataagcaagtaattcctaggaaaatggatgaggttacataagggctgacttaactctgtgagcacattacgcatagagaaatatttctttcattatcgcacagaagaagcgagtgaaaggtcatacaagatatttcaccaaagaaatagaattccactttgacaagatctcacagcgtcagtgcctcatagggtatttctctttttttaatttttattttaatttttgcaggtacacagtaggtgtatatatttatggactacatgagatacaggcatgcaatgcataataatcacatcatggaaaattgggtattcatcacctcaagcatttatcctttgtgttacagataatccacttctactcttttacttattttaaagtgtacaattaaactatgattgactatagtctccttgttgtgctgtcacatactaggtcttattcattccttctatttttttgtacccattaactatccccacctccccactgcagttcccagcctctggtaaccatccttctactctgtttccatga

SEQ ID NO: 813875 - DNA, 630 bp, Homo sapiens
tgacgataatacagtgttgtgacttaaatgccactgaactgtccaccttaatatggttaattttatgtgaatttcttaacctcagtaaaaataagcaagtaattcctaggaaaatggatgaggttacataagggctgacttaactctgtgagcacattacgcatagagaaatatttctttcattatcgcacagaagaagcgagtgaaaggtcatacaagatatttcaccaaagaaatagaattccactttgacaagatctcacagcgtcagtgcctcatagggtatttctctttttttaatttttattttaatttttgcaggtacacagtaggtgtatatatttatggactacatgagatacaggcatgcaatgcataataatcacatcatggaaaattgggtattcatcacctcaagcatttatcctttgtgttacagataatccacttctactcttttacttattttaaagtgtacaattaaactatgattgactatagtctccttgttgtgctgtcacatactasgtcttattcattccttctatttttttgtacccattaactatccccacctccccactgcagttcccagcctctggtaaccatccttctactctgtttccatga

SEQ ID NO: 813876 - DNA, 482 bp, Homo sapiens
ataatgattgagatgcaggttaacctcacatataagatctaacttaagttagttttttattgtatagatattttgtatgtaaaatatctatataataaatagacacttcagttgcctattcagcagcagtcttgtctatcttcactccttcctttagatgctggttggccatatgattccaggggtgaatctttgttagtaagccaaccatagtaattccattcctcttgcaagtgattgcttaatgaaggcatgtgatagaattctaggtagtgacgagagcaagtctgctgggagactcctggagaagtgtcctgtggagaacttgtgtcccaaagagacatattctcttgtctttggagatggttgtcagaggccatgatgcttggagcttctgcagccattatataactatgcagagagaarataaaagtaactgaggaaaggggtgaggacgggagggggaaagaaaggacttgggt

SEQ ID NO: 813877 - DNA, 629 bp, Homo sapiens
tatacttttctcagatatcaagttctaattcaaataaatacttcaaatatggatcaatcttttctaagatttggaaattacacaaaagatacactttggggttttgggttttgttttttgttttgttttgttttttgtttgtttgttttttagacagagtctccctctgttgcccaggctggaattcagtggcacgatctctgctcactgcagcctccgcctcctgggttccagcaattctcctgcctcagcctcccaggtagctgggattataggcatgcaccaccacacccagctaattttttgcatttttagtagagatggggtttcaccacctagcactgtttgtttctcgaactcctgacctcaggtgatctgcccgcctcggcctcccagagtgctaggattacaggtgtgagccacagtacttggcccactttggggtttttatttttgacagcctacaattaatattcagtaccatgataagatcaccaaaatcaaagaatgtsatcagtcttgtaaaatcaaaacagtaattcctaaaatttcatcatcctgcagtagaatcctgcagggaatcaataacatcagtgtacattaaaaaaattaaaatgcatattaatgta

SEQ ID NO: 813878 - DNA, 458 bp, Homo sapiens
cttttgagttttcttttaattccaaatagaattcatgttactgttagcacaaataatgtgcctaaatacctttgtaactgggttccctaagtttgggtaaggagyggatgaatgagagataatggtacaactatgggagtctttttttcactttttttttcattgggtagtagccatactggtcagaaatatatatttgtgtgtggttggtgacagtgtggctttttataaatgcttataggaagtaaacatcaaaaacaagttgttatttttctttaatctgggctgtacctgcatcttcttattaaagtaggaacactgttggttactttcagatctgttcttacttagtcctcacaaaaccttcatgtagtaggtaacattatcaccaaatttacagatgaatagacttacaaaggttaagtaatttgcctatgtctagtagtgcagataagatc

SEQ ID NO: 813879 - DNA, 513 bp, Homo sapiens
tttacaattgtgaatccttcctctgtccctttgagatgtacacctttctccaacaactcagcagtgaaagccattcctttgaaatgtaatcataaggaatgacagtacctgtctctagtctctgggagaatacaaccctaactttaattaattgattaattgcagctgacttaatgggcatttacactgaccaatcttcctaatttttcacttctctgactctgctcaagctctagcagtccccccaccacctcccaagttgagtttagttcatgctggacattcttccctattgcaatagtatattactgattaaaatctgtccttaccactttaacattcatctctttaacagatcaagaagtaggaaataaaatgacatctaagaataaagccatgaaatccaaatgaccatgttggtgaaccttaaaacaataatattytaaaataagctttccacatgtgtcatccaaggaaacccacctgcattagaatcacccacctagggaattt

SEQ ID NO: 813880 - DNA, 584 bp, Homo sapiens
tatctgcactttgctaattgtaagttgtgaatttctctcttcagaaatctgacttccatttataccaagcattctggcctttccagctttatttaatgatgataaaatgcaactctttctaaatgaaatttttatttggaaattttctctccattacttagttactatctgagatagaagaacacctgaactgtaccatttctcaggttgagccggatataaaggtaccagtggatgaatttgatgggaaagttacctacggtcagaaaagggctgctggtggtaagctttgaattattttaaatacaattttaaatgtaaatatacctgttttgaacttcggtttgggaaggcagtactttcatttcattaggttaagagtatatttttagcgtgttaatcattccctccttattaccctcatagtactttgtccatacctgccttgtagcatttttaaattgtgtcatctttatgtgaatgaaagacttcagcttmgctctttctcttgaagtgttaatgtcataagagtagttgaacattttgtggaattagtaggaaacaagagcataataggtgatttt

SEQ ID NO: 813881 - DNA, 327 bp, Homo sapiens
ctttgctagaggccgtctctctctaaatcctttttcttcttttcttcctccactcttactgcattctttacacatctaagtttaaattccataaagcaaagagtcttgcaattctctgccattgtcacttccataagatgtaaaattgtatattttagcccagcaagtacccagtagtcaagtagatgtgtttaatttttacattaaartgtaaacaataggaaaaagacgatttgacctagtcaaagttgtggttgaaaggctctctatctaccatgcctcttgcatcacagtgacttaaagtgcttttctagatggcctctaggc

SEQ ID NO: 813882 - DNA, 327 bp, Homo sapiens
ctttgctagaggccgtctctctctaaatcctttttcttcttttcttcctccactcttactgcattctttacacatctaagtttaaattccataaagcaaagagtcttgcaattctctgccattgtcacttccataagatgtaaaattgtatattttagcccagcaagtacccagtagtcaagtagatgtgtttaatttttacattaaagtgtaaacaataggraaaagacgatttgacctagtcaaagttgtggttgaaaggctctctatctaccatgcctcttgcatcacagtgacttaaagtgcttttctagatggcctctaggc

SEQ ID NO: 813883 - DNA, 579 bp, Homo sapiens
cgtttgtttatgtagtccctgatttctttcagcagtgttttgtagttttccttgtagaggtctttcatctccatggttaggtatattcctaagtttttttgttttgttttgttttgcagctgttgtaaaatgggttgaattattgatttgattctcagcttggttgctgttgctgtatagcagtactactggtttgtgtacactgatttttgtattctgaagctttactgaattcacttatcagttctagaggctttttggatgagtctttacagttttctaggtatatgatcatatcgtcaggaaacagcgacagtttgatttcctttttaccaattggatgcccttgatttctttctcttgtatgattgtgctggctaggacttccagtactatgttgaatagaagtggtgaaagagggcatccttgttttgttccagttttcagggktaatgctttcaacttttccccactcagtataatgttggctgtgggtttgtcatatatggcttttattaccttaagatatgtcccttctatgccaattttgtaagggttttaatcataaagggatgctgg

SEQ ID NO: 813884 - DNA, 572 bp, Homo sapiens
tctttttggcaccaaagaaccagcatttgtttctaagagagccttattgtcaaaggaaattaagaaaaagcattacacttattcatacatgtgcatatatgtacatatacatattgcagaaaagtatgatagggtgagcaaaaaaaaaaaaaaaaccctcaagcaaaacaatggggtaattcggtgggaaaagtgaaatgaaaatcaaattcaaagaggaaaagaaatgagtaaaatttcccattgttgaagagttttattttaaatgaagatggtggatgttaaatcactaccctatttatattccattgcataaatctcagagtgacttaatattttcatttataaatatcaatattttcaacaagccagacattacaaacttggcaactacttaaacttaggatgaaacaaaaattagataacaatttcattcttttaagagckacaaagaggtctaaaaaaaggtttgacctctgaaaaattaaccttaaaccatctaagtgtccttcctaaaactcaagtcaagcccaggtagcttcagtggcaagcaacgagaccactagttaaaa

SEQ ID NO: 813885 - DNA, 622 bp, Homo sapiens
gttcatggattggaagaattaatattgttaaaaagtccaactacgggccaggtgcggtggctcatgcctataatcccagcactttgggaggccgaggcaggcagatcacgaggtcaggagattgagaccattytggctaactcagtgaaacctcatctctactaaaaaatgcaaaaaattagccgggtgtggtggcaggcacctgtagtcccaggcactcgagaggctgaggcaggagaatggtgtgaacccaggaggcagagcttgcagtgagccgagatcacgccactgcactccagcctgggtgacagagcgagactctgtctcaaaaaaaaaaagaaaaaaaaaaaagtccacactacccaaaatgaccttcagcttcaatgcaatccctattaacatttcaatgacatttttcacagaaatagaaaaagttattttgaaatttatatagaaccacacacacatgaaaaaaaaaaaaaaaccctaagtagcccaggcaatttgagcaaaaagaacaaagctggaggcaacattctacctgacttcaaactatattacaaagctgtagtaattaaaacagcatggtactgacataaaaatagaaacatcatccaatgga

SEQ ID NO: 813886 - DNA, 607 bp, Homo sapiens
agaagcacgcagcaaagaaagtggtcttctctaggtccttaggggtttaagtttcaaaagcttctaagatttcagtggagagttctgccctgggkggttctcagctgaaacaaaagtggcacatgagtgggaaacctgcctgggaagcaggtttctgagtcaagtgagattccccagcaaaaagacagtgacagccactggacacttaactgagaggaacacggggcttcagtggggaaatggaaatcaggaaggcagagtgaccacgggcagggatatgtgaaacatatcagtctctgccagaggaggcagtatggatggacggatacattgtctttcctccatggtagacatatgcctcagttaacatcctgatgggagactatttaaaaatttttattttattgattgattgattgagacagggttgcctatttgaattgtgagctgaagttgctgctttttgcatgccgggctacttttgcttacattttcttccaagtgaacaaagcgagactgtgacttcaagaaaaacaacacagaatttgttgtcatgataaaattggaactttcaagcaaaaattcaaattttggaaaacttggatcc

SEQ ID NO: 813887 - DNA, 607 bp, Homo sapiens
agaagcacgcagcaaagaaagtggtcttctctaggtccttaggggtttaagtttcaaaagcttctaagatttcagtggagagttctgccctgggtggttctcagctgaaacaaaagtggcacatgagtkggaaacctgcctgggaagcaggtttctgagtcaagtgagattccccagcaaaaagacagtgacagccactggacacttaactgagaggaacacggggcttcagtggggaaatggaaatcaggaaggcagagtgaccacgggcagggatatgtgaaacatatcagtctctgccagaggaggcagtatggatggacggatacattgtctttcctccatggtagacatatgcctcagttaacatcctgatgggagactatttaaaaatttttattttattgattgattgattgagacagggttgcctatttgaattgtgagctgaagttgctgctttttgcatgccgggctacttttgcttacattttcttccaagtgaacaaagcgagactgtgacttcaagaaaaacaacacagaatttgttgtcatgataaaattggaactttcaagcaaaaattcaaattttggaaaacttggatcc

SEQ ID NO: 813888 - DNA, 598 bp, Homo sapiens
cactttattctacttattccttctctatgtgcttctgctagctacaattcactaaaagaactgatatggggccgggtgcggtggctcacacctgcaatctaagccctttgggtggccgaggccggcggatcacaaggtcgggagatcaagaccaacctggccaacagggtgaaaccccgtttctactaaaatacgaaaaattagccggacgtggtggcatgcgcctgtagtcccagctactcaggaggctgaggcagggcaatcgcttcaacctgggaggtggaggctgcagtgagctgagatcatgccaccgtactccagcctagtgacagagcgagactccgtctcaaaaaaaaaaaaggaactgacacggtattcacgtgcctggcatactaacatttctattacattaaaaaagtcaccaaattgggcattcctttttgaaaatgctcagttaaaccacgtgttgtttcaactacagttatgcaggctgtagttgttttactggtgttttccagtaggttatactaatagagactgatttgacaacttaattacctttgcatttttccagttaraaatacaaggaggaatcttc

SEQ ID NO: 813889 - DNA, 539 bp, Homo sapiens
gacctcatcttcaggttcaactaatttgctagggcagctcacagaactcagggaaatgtgtttactgatttaaaggatattacaaagaatactgaggaacaccagatggtaggtatggaaagctctggagtcctcaagactggccatttaaagatcgcattctgccactgcaattttaagcacgcaatacccatgacaggccagatgatgtggtggctcacgccagtaatgccagcactgtgggaggctgagatgggtagatcagatcagttaagcccagttcaagaccaggctgggcaacatggcaaaaccccatctctactaaaaaaaacaaaaattaactgggcatcatggcaagcgtctagagtcccagctactctagggcgctgaggcaggaggatcacctgagccttgggaggttgaggstgcagtgggctgtgattgggccactgcactccagcctgggcaagagtgagaccctatatcaaaaaataaaataaataaaaaatacccatgacatctctagaaatttttcctgt

SEQ ID NO: 813890 - DNA, 508 bp, Homo sapiens
gaggtagagtgagataggagtagaaagttcatccaaagggataataaaagagaacttcccaaacctaaagaaggatatcaacattcaagtacaagaaggttttagaacaccaagcagatttaacctaaagaagacctacctcggccaggtgcactggctcacacctgtaatcccagcattttgggaggccgaggcaggcacatcacgaggtcaggcgatcgagaccatcctggctaacacggtgaaaccccatctctactaaaaatacgaaaaattaccgggcgttgtggcaggtgcctgtagtcccagttacttgggaagctgaggcaggagaatggcgtgaacccaggaggtggagcttgcagtgagctgagattgtgccactgcactccagcctgggtgacagagcsagactccgtctcgggaaaaaaaaaaaaaagacctacctcaaggtatttaataatcaaacttccaaaagtcaaggataaagaaaggatcctaaaatcat

SEQ ID NO: 813891 - DNA, 589 bp, Homo sapiens
gtctcaaaataaaataaaataaaataaaataaaataataaaaactatacaattatgtgttaaaccaaatcaaattatagttctgtcagactttttgacatccaagtaactgttgggccgggtgcrgtggctcacgcctataatcccagcactttgggaggccaaggcgggtggattacttgaggtgaggagttagagaccaacctgggcaacatggtgaaaccccgtctctactaaaaatacaaaaattagctggacatggtggcgcacgcctgtaatcccagctacttgggaagctgaggcaggagaatcgcttgaacccgggaggcggaggttgtagtgagccgagatcacgccattgcactccagcctgggcgacagagcgaatctccatctcaaaaataaaaaagaagaagaagaaaaaaagtaactgtgttgctctgtagtgtgtcagtttaaatacagtagtcaagatttttagtcaacttcaagaaaatggacattaagtaagaaaaattaatagataatcctcgaaaacctggatgatttctaacataaggtattaaaacattgatttctaagaatagttt

SEQ ID NO: 813892 - DNA, 578 bp, Homo sapiens
tattggtctctaattatgtcacaactttctcagaagacttcaaacagttgtaatctttgcaaattgtaggcccatttttcaaatggcaaactgaagataaaatacatacatatacaccatggaatactacgcagccataaaaaaggattagttcatgtcctttgcagggacatgaatgaagctggaaactatcattctcagcaaactaacacaagaacagaaaaccaaatactgcgtgttctcactcataaatgagagttgaacaatgagaacacatggacacagggaggggaacatcacacaccagggcctgtcggggggtcggggggctagctgagggacagcattaggagaaatgactaatgtagattatgggttgatgggtgcagcaaaccaccatggcatgtgtatacctatgtaacaaacctgcacattctgcacatagatcccagatcttaaagtataaatatatatrtgtgtgtgtgtgtgtgtgtgtgtgtgtgtgtactgccaaagccaaagctctgagatgccacaagttttatcggttatttgtccatcaaatacctgccaatcca

SEQ ID NO: 813893 - DNA, 486 bp, Homo sapiens
cctcagttcttatagcactccttgctgctcagcctctagagcccagattaaatttcaccccatcacaagaatttttgaccaccatatctaaataagttctctggtattctctgttagactcttgcttgttgcttttacatactgttttgtttgttgaattatttttgttttctgtcattctcttcttttggtgggtgggggtcttttacacaagaatgtcaattagattagggaccacagctattcagtttattatttttatcctcaacaacttgtccagttccatgcatatagtaaaccttaaatgtaaacatctttactgaatgaattagtgactaaagataaactaagaaatgcaatcaattcattatccagaaagrcattcaaggattgatggataaagtagatttagatgccatttttatctgttcagatatatttatatgtcagtcaggataggctaggctatgctacaataacaaacaa

SEQ ID NO: 813894 - DNA, 567 bp, Homo sapiens
tagaaatggaatcaaatgctgtgtggttcttggtgtctggcttcttttactgagtataatatctttgaggttcatccatgttgtagcatgtatcagcacttcattccttttcatggctgaataatattccattgtatggatataccacattgtgtttctccatgtgtcttgttgatgcactcttgagttgttcccacatgttggttattatgaataatgttgctgtaaacagtgtacaagtttttgtgtgcacatatgttttcaattctcttggctatataggactggaattgcgtgtcatatggtcactctatgtttaactttttgagacgctggcagactgttttctaaagtggctgtaccattttacattcttccaagcagtgtttgaggattccaatttctccacattatcaccaacacttcttcttatctatccttttatgatagccatatgagtaggtagagagtggtatttcattgcagctataattcacatttctctgatggctagtgatgcggagcatcatttcacgtgcttttacrctattagtttatcatatttct

SEQ ID NO: 813895 - DNA, 527 bp, Homo sapiens
tgccagggccatgggctgagctgcccgccagtcccgcaccaggcgcctgcactcctcagcccttgggcggtagataggaccgggtaccgcagagcagggcrcggtgcccgttggggaggctcggccgcgtgggagcccaccacgggaggctcaggcatggtgggctgcaggtcccgagccctgccccgggcgggaggccactgaggcctggcgagaattcgagcgcagcacgggtgcgctggcagtgctgggggacctggctcactctctgcagctgctggcctgggtgctaagcccctcactgctgggggctggcggtgctggctggccgctccaagtgtggggccactgagtccgtgcccacccggaactcgtgcagccctggttcccactggcgcctctccctccacacctctctgcaagcaaagggagccaaccagcccagagaggggctcccacagtgtggtggcgggctgaagggctcctcaagcacggccagagtgggcgccaaggctgagaaggccctg

SEQ ID NO: 813896 - DNA, 450 bp, Homo sapiens
tgaggctgcaagcagcttcaaggacaattttcacctgatcttccccattgactttagaacatgcccacgttctctggtcctctgccaccaggtggcccctatagtttccygttgcctttccaggcctgaaagaagctacaaactctatctcttattcttgggtcatgcttcttagtcttgggatgaacacatgatatactacctccagttgatttttaaaaataactcacccagtttgttcatataactcaaaaaatatcttagtcatatttttcatccttctctttcaaaaatatctttgttaaagaaaagaataacttattgttcacatctgtttctggcttcagtgtaagtggtaagtggtaaaagaattaggccaccaacagttagctgttctctctatagatctcttctaagcctggaagtatctgtgtcattttgagtcctagt

SEQ ID NO: 813897 - DNA, 609 bp, Homo sapiens
ccaaaatgtctctctccgacctcaaacttctcccgacctaaatacctaattggtgacttgccatttccattaaatttataataggcatctctaatgtaacgaagccaagaaacttgggttttcctcaccaaatgtcctcttcctaacaatttcctacttcacctcagtaatgcgatcatcatctacccagtggctcaggccagaaaccgagcctgtctcattcccacatcccacttctaatccttgctcaaatccagttctacctctgaaatatacccaaagccaatgatgtcccactgtactcactcctacagccatagcctaaattaaggtaccacgctgtctcctcctgggactacagcaacagcagattgccaggattcgagctccatcaggaaaggatttttgttcactgccgaagcctagaacactgcttgcccctaagaggcaaatatccacttaggttttcctcaccaamtgcttcatgaccaactcgaactgctttcctcacctccactctagcccgttacagtccagtcttcacgacatcccaattatcttctaagtgcaaatcaaaccacagctcgcccctgctcagaatcctcccac

SEQ ID NO: 813898 - DNA, 574 bp, Homo sapiens
gtattttctatgtttgggttcttgcagttggagatgtatgcggttttatrcttttctcaaaaataaattgattccatttgttttttgaaaaatgggttcatgttgtacttagtgtgatgaacatttcatatttcacagtaatatatcctaaatctccctccacgtcagtatatacagatatgcttgagtctttttaacagccatggcaatattccactcaatagaattaggataatttatgaacaattatcctcctgtggtacatgcaggttgtctccattttttgctattacagataatgctgcagtaaacaccctggggtatacgtgtgtgagcatttctagaagagattattagaaattaaattgcagagttaaaaggaatgcactttttcaaatttttatagatattaccaaattcacttccagtagtatgtcgtattgtggcactgtaaccgaatagcctggcatcaaccctccatttaaaggtatttttttttctttcccctttcccctgcagtttcaagcagcctcagaatgctttctttcctgcattctttttcttttcccattct

SEQ ID NO: 813899 - DNA, 620 bp, Homo sapiens
ctggctaaactcttcagaagttactttagctcrtctatcctttcaaaatgtgattcccaggactgagagagctcccaagcgtggtctgatctaggagtagaaatgaagttctctcctcccatgagcctaacacaatacttttgctaatgtagcctcagcagcaggaggtctgcttttcccccactctgcccagaagagggctctttacctgttgtaaattgtctgccataaacataaaataaacactgcagaagcccagctgggtgatgactaataagaagctgacagtgtacctgggaaggaaaggaagaggcagacagagggaggaaacaaaagctaaaattatttcttaagaatgtttactatttgaaacaattatttttgttattatttttaaaaatttccctactttcttttattttgaaaaatttttaagccaaaaagttgaaagaatagtataattaacatccatgtaccctttaactaaatataccagttgttaatttttggccccaaattgcattacatatatatataatatatatgtatatatagacgaatgaatattcgtctatacacacacacacatacacacgcaatttttttcagaatcatttgaa

SEQ ID NO: 813900 - DNA, 631 bp, Homo sapiens
gtggcgagctgcctcctggataccaagatatacagatctgggctttattctgcccaccaaatcctttactgaggtactctcttgccaaagcacacrtaggaacaagaaaagaggtaaaaaggaggaagattagagaccattctcgcccttaaggatgttgaaatctgagaagggaagaagggaggcttttcggcacctattgcagagcctgagctggaacagcaggtgctgccttgctcatctgacacttggaaaggtatcagcagcaaaacaagatggggacattcaaaaactggttcttagaaacaaaaacatactgccatgttgaccatctggttcctggctacagcagacaaaacacttagtgacaacataagaaaatgaaaccacatcaaccattttgtgagaaaaccgcccccaaactcttcccttttacagttcagttctccgggtagaatttggccttcagggctattttctttggaaatcatgattattttccaaagaaaaacatgttcaggttttctaatggtcaaggaagagggctagactaagaactgggcggcccaaattacccctggctccctgtggaccagcccaaccctgctgtgcctcgtgacttggtttctca

SEQ ID NO: 813901 - DNA, 587 bp, Homo sapiens
gtgttggggtggttatgcagcagaagctaactgaaatagggggaggtaactacccttaccttataaagctgctgtgaggtttccatgatgatgtgtgcttaagccgtcacctagcacacagcgagcaaatacagttgttactactaacgtgatcctgtggcacctcctctgtcttattggcttctagccacaccaacctccttccttttccttaaatatgacaaactcttcttctttggggcttttgtacttaattctctgaaagggcccttctttgctgtcttgttctcatgattaaggtctcagctgaaatgtctccttcttggacaagcctctgattatcctgggaaccttcctctcttttcatctccattctcgcttcctctcataatgtgtaatattacattgattgacttccttagtattatctgtctccctttctaggttgggaatttttttaagggcaggaactgggcctgtttttattccctattttatccttgctgcctrtcacagtgctatgtctaacaggcacttagttgatactgattgaataaaaaaaatcagtctcgatttgaggttggtgc

SEQ ID NO: 813902 - DNA, 222 bp, Homo sapiens
aggctagttatttatcctccctatgctttatttttctcatctggaaaatcagatgacrattgtgtggagaagaaatatgaggcgaggcatgatggctcgcgcctgtaatcctagcactttgggaggtcgaggcgggtggatcacctgaggtcaggagtttgagatcagcctgaccgacatggcgaaaacccatctctactgaaaatacaaaatgagccgggt

SEQ ID NO: 813903 - DNA, 574 bp, Homo sapiens
aatactttcatggatgcaaagaacacaacccctgcaaccgctgcatgcgggcatctctgctgcccaagcccggggacaggcgctttcgcaacgctgcagcacggtatsggggaagcgcccttctccctgggccaaggtgaagggcgcgctcggggtctgaacacgtgggtcattcgtgccttcccctttcctcccggaagggtagagacaatgaggcttttgcagacagcaactctcaagtccctgggccccggcccggtcccgcccttagtacggacactcaggcacacttactcttccactagctccggcttccagatgtctctgtcggtggcgcagcccaaaagcgcgcgcagcccaggagcgtctcggagctgcaccaggatggggatcaaactgttgaaataaatcaacctaacgaggccgccaggaaggaccgactacagagattcgtcctgcccagacattttgtactcgcttcttgaccccttcctcaaaatggacggtgtaagggaccagggggaggagaggggagccgagcaggcaggggatcccagcgcccgcactcctgcct

SEQ ID NO: 813904 - DNA, 574 bp, Homo sapiens
aatactttcatggatgcaaagaacacaacccctgcaaccgctgcatgcgggcatctctgctgcccaagcccggggacaggcgctttcgcaacgctgcagcacggtatgggggaagcgcccttctccctgggccaaggtgaagggcgcgctcggggtctgaacacgtgggtcattcgtgccttcccctttcctcccggaagggtagagacaatgaggcttttgcagacagcaactctcaagtccctgggccccggcccggtcccgcccttagtacggacactcaggcacacttactcttccactagctccggcttccagatgtctctgtcggtggcgcagcccaaaagcgcgcgcagcccaggagcgtctcggagctgcaccaggatggggatcaaactgttgaaataaatcaacctaacgaggccgccaggaaggaccgactacagagattcgtcctgcccagacattttgtactcgcttcttgaccccttcctcaaaatggacggtgtaagggaccagggggaggagaggggagccgagcaggcaggggatccsagcgcccgcactcctgcct

SEQ ID NO: 813905 - DNA, 594 bp, Homo sapiens
atgaaagcttcctaagggaaacaatttttttttctttttgagatggagtctcgctctgtggctaggctggagtacagtggcatgatcttggctcactgcaacctctgcctcccaggttcaagcgattctygtgcctcagtctcccaagtagctgggactacaggcgtgcaccaccacatccagctaattttttattttttagtagagacggggtttcaccatgttggccaggatggtctccgtctcttgacctcgagatcagcccgccttggcctcccaaagtgttgggattacaggcgtgagccactgcgcccagccggaaacaatgtttatttgggaatagagcattgcaattgggaatagacatgccgtattaaactatgtgtatattcagggagataaaggaagacagaaatggggaggattgcatattgttttaacagaattttccttggctacaaagatcagtaacaagggtgacattagtcctaggttggaccagcagttgctgggcagcattccttgcagaaatatatatttttttaaggttgtgaagacctttatgtaaggttgtgggttttgtagagtcttttt

SEQ ID NO: 813906 - DNA, 562 bp, Homo sapiens
ttcttcattaacaatagatcttagtgataattcagtatcagtttttagtgaactttgacattcttttaaaattgcatattatttcatcatcggatgtatcatgatgtctttattcattcccctattgaaaaacatttcagttgtttcaaattttagtttattttattttacttttaatttttgagatggagtcttgctgtgtcacccaggctggagtgcagtggcaccattttggctcactgcaacctatgacttcttggttcaagcgattctcctgcctcaccctcccgagtagctgaaattacaggcccatgccaccacacccaggtaatttttgtatttttcgtagagacggggtttcaccttgttggccaggctggtctcgaactcctgacctcaagtgatctacccggcttggcctctcaaggtgtggwgattacaggcttgagccatagcgcctggcctcaattgtatttatgaagagtgccacagtgagtaaacatgtgagcatgagttcatacataggtaagtatatttgtataggagtatatcaattcctcaa

SEQ ID NO: 813907 - DNA, 587 bp, Homo sapiens
tcccatgtgtgggggctttcctcagatggctggtgacccaggggtctgatcccactgaagcactaaggttgacaggaagccttctgtggggccagcgccatcactaactttccctctgcagggtgcctgggggtctggcaggcaggagctgtaggacacttctctgggggcattcaacctccctcagcagggactccccacctcctgcctggccagggaactgactgctgggcccattgctcattcgggatgcccagtttcaggctggtgcctcaccctggcctgtctctagtatcccatgctgaagcttccctgggtcaggtgctcctggaattaaacatgaggtctccttcaattgttggcaagagccatcatctggccaagtgggccctgaagtctctagctgacactccctagaggttttcaaccctccccccttgttcctgtcccccgatcactcccacctcttgcctttcctggtacctgaacagatggtcttscttctcaccaggatgccctgttctggcacagagatttctgaagcttccctcagcaggttgccaccctccctccatgtccatcttcca

SEQ ID NO: 813908 - DNA, 547 bp, Homo sapiens
gaatgccatgggctctccacctgtggctgggtggaggatgctcgcagacaggcctctaataatgaccagtgggtgaagtttactctgaccacaagtaaggatcctggcaaggtctcccargcagaatgccgggctgagcaggccatgtgacgtggaagagaatgaagtagatacccactgtccccaacaaaatgacaatgacttttgtcgctgtattttacatcaacaggatcttatcaaatttacttctctgaatcttgctttcccttaaatacatcgcagaaatgcctccaggccagcaagcagtgctcctacccactcttcttagcagctgataggccaagagtacagatgtgccatattttattcaatcattccctgaaaaatgggcatttgttttatttccagggttttttgttttgccactgcaaacaatgctgcaataaatatccttttctactcaggctatttgtttttttcttctgcatggtagattctcaggagttgcagtgctgggtcaaaggctgtttatgaaaaattacatggt

SEQ ID NO: 813909 - DNA, 497 bp, Homo sapiens
aaatgaaacactagaaaatatctgcttatcagaaagacggcaataaagggagaataaaaggaggaaaaaagatgtgaggcatacagaaaacagyaaaaatgacagatgttaatccaaacacaccaacaatcacatcaaacgtcaatgaatgaaatttaccctttaaaagtgtgtaattcaccatcaccacaacctgagcttagaaaatttttatcatctccaaaataaactctgtactcctagcaatcactttccatttcctgttcacagcatccccagccctcagcaaacactaatctattttctgtctctgtagatttgcttactctgaacatttcatataaatgggatgaagcaagatgtgctcttttgggtctggtttctttcattcatgtgtgtttcagggttcatccatgttgtagtctgtatcagtacttcattcctttctatgacagagtaatataccattgtgggtctatatcgcattctgtttagcc

SEQ ID NO: 813910 - DNA, 515 bp, Homo sapiens
aatacattcaattataaagacaaattttaaatacgggataatatattttttcctccatttctctcaagctgatttttttaattgcataaaacagtatttataaaattttaatactgaaaaaaccacagtaagatttatacattgaaagaagcaatatgtgacattaacagcacaaagggaggagggtatgacattaaatttgaacaagaatatgacaccatatggtaattccaatatacagaaaaaaatgtcagctgaaattgtttatctgttctttaattagtcttctcctcatccatccactcacctgccctatccgtattggccagctgattgtcctggcacaagccaagctcaatcttgcctaagggtacttgcacttcctgttaactctgcctgagkggcaaggaaatctttggatcttcagaatttctcttggatggctcactcatttcattcaagactcttctgaaaagtcacatgctaggtttccaccttaccattctatctaaaat

SEQ ID NO: 813911 - DNA, 585 bp, Homo sapiens
gtgacaatgtgtgtgtacatgtgtatgttcatatatttctggaacagataataactcaaasaacacctgggtttagaacaagttcacatcctgtttgtggctcacatgtaagaaaggctggtttagtcgggaggtggcatttgtaaatgtagtggtatgtcctaaggagctaaatcaaagtccttgtaatatggaaaagggtgtgaaatagttgacatttatgccacaagttgtttctctagctaagtgccttgccagagataaaactactataaatctctgttttgagcatacagtttccttaaatctccagtgagcatctcctgagtatgtggtagatggtgttttatgtataaaactataaactgtataatcttttctatgtgctatcttttaaagtatcttttgtatatttctacacctcatagttcacataaatttccaagtatgtgaattcattcataactctcaattcatttgtccactgtggaaaagttttctttcttattttaaagattagaaatatctagttatttatattactatcattagagacaaaatttgggggaatttaaaaagcagttt

SEQ ID NO: 813912 - DNA, 585 bp, Homo sapiens
gtgacaatgtgtgtgtacatgtgtatgttcatatatttctggaacagataataactcaaagaacacctgggtttaraacaagttcacatcctgtttgtggctcacatgtaagaaaggctggtttagtcgggaggtggcatttgtaaatgtagtggtatgtcctaaggagctaaatcaaagtccttgtaatatggaaaagggtgtgaaatagttgacatttatgccacaagttgtttctctagctaagtgccttgccagagataaaactactataaatctctgttttgagcatacagtttccttaaatctccagtgagcatctcctgagtatgtggtagatggtgttttatgtataaaactataaactgtataatcttttctatgtgctatcttttaaagtatcttttgtatatttctacacctcatagttcacataaatttccaagtatgtgaattcattcataactctcaattcatttgtccactgtggaaaagttttctttcttattttaaagattagaaatatctagttatttatattactatcattagagacaaaatttgggggaatttaaaaagcagttt

SEQ ID NO: 813913 - DNA, 309 bp, Homo sapiens
ttagttgttttaatgaaaggatttgtctgttttctgtcatatttccagaaatgtttaacctgtataattcccacattgtacaattcactctgtataactcctacagtgatacagtgaggatcacaagaaagattttggtaactccaactcaggaagattaaaattaaccatgtaaataatttactatctgtctcataacttacatgacagaagatacattaaaagttcttttgtctcttagcctagtgcacttaaaagtagtactttgaattaaatacaaaaayaaaccgagtacacaatatagtaaaa

SEQ ID NO: 813914 - DNA, 624 bp, Homo sapiens
tttaacctaactatttaagaaaaatctatcgaatacttaccatgttcttgctcctggtaagtaaataaatcatgaacctatagtccctgtctttctaggttatgactcttaggttgctcataatagagcacttaattcactctggcttaaaaataaaagataattaattgttttatatgactgaaaaatgcaaacataggaatgacctcagataagatttgattcagcagctcaataaagtaagctagaatcttacttttctctgctctaactacaatgatgtgggcttctccaccagcctccaagtagcataccgtcagccctgcttgtataggctttcccttgcatagcaaagtctaggtttcatattctgacatcatagtccccatgaaaaaacaaacaatatcctctgctaatagaaagctaagaaagagaaagtacaaagttttctctcctagaaaaccctaacaaatatatacccatgttgcatcagcctatttggatattagtatgtgactgaaacagttactgttgaggttatgggtcatgctgtctggaatgagcctggaattgaggatggctttgactggtcgtttgrtaagtaaaccatatgactgataatga

SEQ ID NO: 813915 - DNA, 533 bp, Homo sapiens
ttataatgtcttaatgagttttcatgaacattaacgtaacctctaaaaccaggacaggatgtccactaccatttattttcatcacaatttccttcacatagaatataaattttctacagatacaataatgtgtccattagtataaaagtggtgattcaagcaaaactgaagatagcttttttcttggtgggggagaaagagtctcgctttgttgcccaggctggagtgcaatggcggattctggctcactgcaaaggcggattttggctcactgcaacctctgcccccttggttcaagcgattctcccatctcagcctctggagtagctggaactacaggccggtgccaccacgcccggctaacttttgtatttttagtagtgacggggttttgccatgttggcctgcctggtctcgtactcctgatcccaaatgatmcacctgcctcggcctccaaaagtgctgggattacaggtgtgaaccactgcacccgacctgaagataaactttaagacaggaagtccaatttagag

SEQ ID NO: 813916 - DNA, 646 bp, Homo sapiens
gccccccaggcggagaaggatatgccggattctgcctggggctgggctctaggagaccccaaatttgacaccacagaaagcaaataaaacacttgaaatacgcatacatttcctgtgtgtccttttgtggggctggagttcagctgggtgcccggggatagaggggaccccgtgtcactgggtttctattctcggtggtgctgggcccagggcagctggtgaccatgtgctgagtgagcgagaggaggggaattctgcctccagtggtctccttcctcaaaatcagaggcctggcccagcgcagtggctcacacccggaatcccagcactttgggaggccgaggtgggtgaatcacctcaggtcaggagttccagaccagcctggccaacatggcgaaaccccgtctctactaaaaatacaaaaattagccaggtgtggtggcacgtgcctgtaatcccagctactcaggaggctgaggcaggagaatcgcttgaacccgggaggcggaggtcacagtgagccaagatcgcaccactgcactccagcctgggcaacagtgtgagactcagtcycaaaaaacaacaacaaaacccgcggacctttgttccaacacacagggaggttgaggaacttgcctgtggtaac

SEQ ID NO: 813917 - DNA, 611 bp, Homo sapiens
ctggtgcttttggtttcttttcttgttgagggggctgaggatgaggctttgtgaaaccaaccaggaagaatgaaacacagagctggtccgacacccagctcgagggaggggggccggaagcttctggaagttggctgcccctaagcaggggccactctagcccacaaggccaagttggcagaggcagacgaggggactctgcggctcaagtcacgggccaggagcccgcagctgccgggctggaaaggtcagagccggctctgcgtctggctgcgccggcaagaagccacaattacgcaggcaaaagagcccggggattagccccagcacctgggaccctgaatggtgagaaggcacctagggggtgttggaacacattctgagttcagagcctggtcagggagaaaaaaccaaacggagatcaggaaggggaaggggccttcgagggctttcccatcccaacttcccaggatgcctgaccccagagctccyggatttgatccacgcctcgtgacacacacaacccctgggaggaaggagcccaggccccttggagagccccagaggcctctaagggccggtgagtctaggacatggggcaggagctgcaa

SEQ ID NO: 813918 - DNA, 604 bp, Homo sapiens
aggctcagaaaggttaatcaccacaaagtcatagagcagtaggccgagcgcagtggctcacacctgtaatcccaggactttgggaggctgaggcaggtggatcacctgaggtcaggagtttgagaccagcctggccaaaattgtgaaatcccatttctactaaaaatacaaaaattagctgagcatggtggtgagtgctgtaattgcagctacttgggaggctgaggcaggagaatcacttgaacctgggaggcggaggttgcagtgagatgagatcgcaccactgcactccagcctgggtgacaagtgaaactccgtctcaaaaaaaagaaaaagaacagaagacaaagctaacacatgctttttaggatatttctgccataatataaatgatggtaaaattatgaacataaagaacaaaagtccacctaaagcaaaacactgatgttttcttactttaaatacacaagactttctttctattctttaaattaaaaaggytatttcctttcatcctgaaaaataatagagaagttttaatatatgcattcttttcttaattgactctgagaaaagatgatagtatcttcactattctcaaaac

SEQ ID NO: 813919 - DNA, 594 bp, Homo sapiens
ccaccccagctctcctcattccctgtctctttccacctgtcaaagctctgtccgtccttcaagcccacctccaatgccacttccttcccagccctgtgctcggttcccatgctctgccagcaacactctcccatcttccccatcctgcctttaccctctcatgtccctctccaaaagcaccaggcaagtgtaggtaaatgcttgctgaaataaagtgtaccctgattgaattgatctgcaaacataggaatgtttcagcccttgagtaagccatctccctgttttgttatctttgaactccacaaggccgtgtttttgaaatttaaatgtctcaaacgttttcttacactctacccaaagacagaagcttcctgttgtccttgctcacttaattctttcaaagaccatcaacctcagtgttgctaatgttcacaactgggtaatgttcacagctcgttcacagtttataaaaccattctctctactttttgtatatccttgaaaaatgtcaataataataagaattttttaakgcacagtatttgagatatttgggaccctcttaggaagtccttgtttggttaggactatttc

SEQ ID NO: 813920 - DNA, 457 bp, Homo sapiens
ctttatgcaggtcagccaatggctgggatggggtagaggaaagcaggttgattaagggaatggaatagatggatggatggatggatrgatagatagatagatagatagatagatagatagatagatggttttgtgtgtgtgtgtgaatgtgggaagagagggaaagaatacagacagatatttccaggagctgctggatagagggaggaggaaaggaatatttaaaagacatgtttaagaaatttagccaagtagtatatgtggcacctctttttcaatcaacgcagaccataaggaacgatctactttgctcttcagtagtcaggactgctcaggcagccagagcacattctaagcacaacacaaaatgcagacaagaatgacaaactcacccctgctgtgggaattgtgatcctgcttctgccactgcacttagtagtaaaactcttcttactga

SEQ ID NO: 813921 - DNA, 521 bp, Homo sapiens
ttgggcccagtgggtcacaagggtccttgaaagtggaagatggaggtagaaaagatcagagtgatgcaacctgagcaggacttcaagagcttttgctgtcttggaagatggaggaaggggaccactagccaaggaatgcagcagactctagaagagggaaaaagcagggaaggggtcctatccagcacctacagaaagatatacagcacaatgccttgattttagcccagtaagatccatggcagacttctgacctacagaactataagataatgatggttgtgtgtttacgccactaaatttatggtaatttgtcacagcagcaaatgcaaaattaatgcacactttttggtgcagttagaaaagttggatctaatcagttgctacaaaactgctaactataartcccataatccttaactgtgaggaaggagctctaggcttcaggtaagttattacaaatgcaagcagagctgtatgacaacaacaacaacaacaaataaatacacagtttcagaagc

SEQ ID NO: 813922 - DNA, 683 bp, Homo sapiens
ccttcgaccctctcccactcctgtatttcccatctctcccggaggcagkgtctggcagagcctgctcagcccctgcagtctcaggctgacacccgcactccattccactccccatacctgggtgggatcctccaccctgactcccttcccaagtctcccaggtctgcctgggctgtccgaggcaggggcagaggctgcattctccacccactgttggtccttggcagctgcctggcagccaggggtccccaccttgccaaacttgacatgctgctggtagaggatgccatccttgataggggtctccagagggtccatggtcacggccaggagcagggccgccgcttcaagacctggggagactgatgacaggctggacgggaactcctcacacttccccttctggccacttcccgtccctccgtccagagacagctgcaggccggggggaggggagcctgtcttcagctcaggggctgggggcagcatgtatttcctccctggggttctggctgcccaaggtgcccacacctacctggagggagcccccggccacctgaaggcagccttctcacgcacctggttcagctgggcacgcgcgtctgatcgcagtctggctccccgagtcatgagttcccgcccctcccccgtcccgccccgggcagctgcgcaccctgggcctg

SEQ ID NO: 813923 - DNA, 683 bp, Homo sapiens
ccttcgaccctctcccactcctgtatttcccatctctcccggaggcagggtctggcagagcctgctcagcccctgcmgtctcaggctgacacccgcactccattccactccccatacctgggtgggatcctccaccctgactcccttcccaagtctcccaggtctgcctgggctgtccgaggcaggggcagaggctgcattctccacccactgttggtccttggcagctgcctggcagccaggggtccccaccttgccaaacttgacatgctgctggtagaggatgccatccttgataggggtctccagagggtccatggtcacggccaggagcagggccgccgcttcaagacctggggagactgatgacaggctggacgggaactcctcacacttccccttctggccacttcccgtccctccgtccagagacagctgcaggccggggggaggggagcctgtcttcagctcaggggctgggggcagcatgtatttcctccctggggttctggctgcccaaggtgcccacacctacctggagggagcccccggccacctgaaggcagccttctcacgcacctggttcagctgggcacgcgcgtctgatcgcagtctggctccccgagtcatgagttcccgcccctcccccgtcccgccccgggcagctgcgcaccctgggcctg

SEQ ID NO: 813924 - DNA, 672 bp, Homo sapiens
cagaagcaaaagatttattttaaaaggcagaaagatagaaaataaattacaaaatagcagttaagttcatccatagcaatggttaaatttcaattatctaaacatttcaattaaaagatagtgatggttagattggatttaatagaagacccagttataagataagctgtgtacaagaaatctggccgggcatggtggctcatgcctgtaatcccagcactttggatgccgaggcgggtgaatcacctgaggccaggagttcgagaccagcctggccaacatggtgaaaccccatctctactaaaaatacaaaaattagccaggcctggtggtgggcatctgtaatcccagctactcaggaggctgaggcaggagaatcgcttgaaccccagagatggaggttgccatgagccgagatggcaccactgcactccagcctgggtgacaagagcaagactccatctcaaaagaaaaaaaaaaagaaatctactttaagtataacaacatatataagttaaaactaagaggataaatgtcatgcaaacagtaggcataaaaagctgcaaggctatattaacatcagaaaaaaatgrcttaaagacaaaaagcattatcagagataaagaggaacattttataataatggacagaaaattcttcagaagaatataa

SEQ ID NO: 813925 - DNA, 596 bp, Homo sapiens
ctagtcagcactgttcttttgcattgaaaccgagcctaagcattgactctttcctttcattttctttagtacacatctcttggttttccccttgtttctccactcaagtttcccacaaatgagatgagagtatagtgctgaagagattcttgttttctcatatttgttctcatcacttgaatacgggcaactgtcagtctcccaaacaaaattgtccatcttacatgccaatattatgtggccaatattagaacactgaaaatatttcaaatcaatgacctcaatgtctaccctatgaaactagaaaaaagggggcaattaaatcaaatgtaagcagaagaaaggccagaatcaaaattaaacccaaaataaatgaaatagaatgcagaaaatcaactgaaaaaaatcaagaaagtcaagtggtctttttgagatcaataaaattatcaacctctagccacactaataaaaaaatagaatatacaaattgccaatattagcaatamgaaaagtgatatcactacagattctacagatattagtaggataacaagaaaatattataaatgacttttttctataaactttctaaaata

SEQ ID NO: 813926 - DNA, 544 bp, Homo sapiens
agtgtcagagtgatgtaatgtgagaaagacacaaccagtggctttgaagacagaagggtcttctctagaccctccagaaagaaatgcagccctactgacatctttattttaccccagtggagcccattttgggctcctgaccttcaaaaccacaagataatacatttttgttgtgggaatttattatagcagccacaagaagtaaatacagtttttggtaccagaagcggggctgctgtaacaaatacctaaaagtgtgaaagtgactttgaaacagcagttgcacagtctagaagaattgtaaggagcatgatagaaaagcctaggtttctttgaacagactattagaaatatggatgttaacaactttactaagactcagaaggaatgaggaacatggtaaagaaaaccaaaatcactttaaaaaacacttcaattgttgtgaaagaactgtttgyagaaatacggatgttgaaggtgctgctggtaagggctcagaagaaaatgaaaaaatgttattcaaaactagaagaaagaggatcct

SEQ ID NO: 813927 - DNA, 551 bp, Homo sapiens
tggaaaagaagtcttaaaacagaggaaatgtgttccttttgttagttattctgatttgctttctccactcacttcaaaaaatagaactccactgccttgtagatgtactcagtgcataggcagaggccgtctcaactgtgagactctgaggctcctgaattttctatcatcttcatagctttcctccaagttggctttcagtgtctctaagaagattattgatcaggccttagtgatcacccttaaaattctagttctaatcctattttgaggctggaggagaccaggcagggaagcactcgttcctggcatctaagaggaagcaataagcaaagtcaactctgccaggaactgtgaaagcccctgacttcagcaaaggcaggtgttcctgtcttagatgcctcagtccaaagaaggataatttcagaagtcactaaaatttacatggtgagataatgagytgctgaccatacttaaggagacagaaatttagatgtactttgaagagacaactgacgtaaaaaggcattggtattttagcataacactct

SEQ ID NO: 813928 - DNA, 551 bp, Homo sapiens
tggaaaagaagtcttaaaacagaggaaatgtgttccttttgttagttattctgatttgctttctccactcacttcaaaaaatagaactccactgccttgtagatgtactcagtgcataggcagaggccgtctcaactgtgagactctgaggctcctgaattttctatcatcttcatagctttcctccaagttggctttcagtgtctctaagaagattattgatcaggccttagtgatcacccttaaaattctagttctaatcctattttgaggctggaggagaccaggcagggaagcactcgttcctggcatctaagaggaagcaataagcaaagtcaactctgccaggaactgtgaaagcccctgacttcagcaaaggcaggtgttcctgtcttagatgcctcagtccaaagaaggataatttcagaagtcactaaaatttacatggtgagataatgagctgctgaccatacttaaggagacagaaatttagatgtactttraagagacaactgacgtaaaaaggcattggtattttagcataacactct

SEQ ID NO: 813929 - DNA, 626 bp, Homo sapiens
gacattttcccaaaggcttcactcaagctggccaggttggtacatagcatgaaaaattaaagtgcatcctaatacagwgagtttttagaaagaagcagtttcgtatgtccttttactcacagaatgtcccactgggagaatgtttgtctcttccagatattctggagccagtgagaaaaatgcaaggcctgacagtgcagacgcctgggccaatgtgttctccctttccctactgagcagtctgcacagagaatcccgctcctgacccacctgtggaagagcagcctaaggtgagacagggcacatgtcctcaccctgacaacgagagagtctgaccttgcctgccctgccctgctctccacaacactagaaacctatggcctgttgcagttagtcatggagaaatgagccagcttcctagacttagtttaggagtttccttatatttccccttctgaaaatctagagacaaaaatgaccactgaagagttatagtgctcaaatgccttttctctcatttcaatcctatcagtgactttttgctttggtgacagaggtaaaaggtgacaacttcaagccttagggcagaactgtagtgttgaaagctgaaggagagagtttgaatc

SEQ ID NO: 813930 - DNA, 626 bp, Homo sapiens
gacattttcccaaaggcttcactcaagctggccaggttggtacatagcatgaaaaattaaagtgcatcctaatacagagagtttttagaaagaagcagtttcgtatgtccttttactcacagaatgtcccactgggagaatgtttgtctcttccagatattctggagccagtgagaaaaatgcaaggcctgacagtgcagacgcctgggccaatgtgttctccctttccctactgagcagtctgcacagagaatcccgctcctgacccacctgtggaagagcagcctaaggtgagacagggcacatgtcctcaccctgacaacgagagagtctgaccttgcctgccctgccctgctctccacaacactagaaacctatggcctgttgcagttagtcatggagaaatgagccagcttcctagacttagtttaggagtttccttatatttccccttctgaaaatctagagacaaaaatgaccactgaagagttatagtgctcaaatgccttttctctcatttcawtcctatcagtgactttttgctttggtgacagaggtaaaaggtgacaacttcaagccttagggcagaactgtagtgttgaaagctgaaggagagagtttgaatc

SEQ ID NO: 813931 - DNA, 626 bp, Homo sapiens
tgcttccacaaccagcaggatgcagaaaatgcttttcaagagttcattgaatcctgaagcacrgatttctatactacagtaatgaaaaaatgtatttctcattggcaaaaatgtgtggattgtaatggttcctattctgattaataaagatgtgtttaagcctcgttataatgatttaaaattcaattacttttgcaccaaactaagacaggaactttgagatctctaatcttattacacttttccgtattattctcttacaatgtttaaaatcaaaacatatttggtcatttgacctagagaaagagaattcatcatgtcttcttgcgaataactccctgagaggacacagcccataccttgtctcctgcagcgccgcatagtgcctggagcatgttaggagcttgttgggtgtgttcaatgagtggagcagacctacatctaggccttccaggtcctatctttcattacccattcatttctctttggagttctcttacctacaactctcaccttacaatttttcaatgtcaagacctatgaaatgttcattattataggcatttgcataatttatctcttattttagcatcttattcagttctttgttcatatttctaaaagta

SEQ ID NO: 813932 - DNA, 626 bp, Homo sapiens
tgcttccacaaccagcaggatgcagaaaatgcttttcaagagttcattgaatcctgaagcacggatttctatactacagkaatgaaaaaatgtatttctcattggcaaaaatgtgtggattgtaatggttcctattctgattaataaagatgtgtttaagcctcgttataatgatttaaaattcaattacttttgcaccaaactaagacaggaactttgagatctctaatcttattacacttttccgtattattctcttacaatgtttaaaatcaaaacatatttggtcatttgacctagagaaagagaattcatcatgtcttcttgcgaataactccctgagaggacacagcccataccttgtctcctgcagcgccgcatagtgcctggagcatgttaggagcttgttgggtgtgttcaatgagtggagcagacctacatctaggccttccaggtcctatctttcattacccattcatttctctttggagttctcttacctacaactctcaccttacaatttttcaatgtcaagacctatgaaatgttcattattataggcatttgcataatttatctcttattttagcatcttattcagttctttgttcatatttctaaaagta

SEQ ID NO: 813933 - DNA, 561 bp, Homo sapiens
caaagagatgactatttgagtacccttggtgatgccacaaaaccctgcctaggctggccaaccccaccacaggtcacagggtgctgagagcagcactgattttgtgcagaaagggctcagctgtcacagtttcaactccacaggtgggtcccagccaaggaagtctgagaaagagcgaggtggcaagaagcccacacttataccctccgggctcaggttagacatttctgggttctatactcagcatcccaaccaccagcacattggagtgacacacacagtaggcgttcaacaatactttagttgtccctggacacatacttctcttcctagaaagggggcaggaatgttaacaacagggaattgactgagtcccaagtataagctgggtgtttgttttatttttccattttcctcactcactactttcataygtagtaaagagagtacactgatgtatgaaggctttcagctgtatgtgcgaggaggtgagcttgtcttgccatcagctgttcaatgtaccaccatggccaagatttaggaggtttttctgaagccctt

SEQ ID NO: 813934 - DNA, 634 bp, Homo sapiens
tcaactaaaatggcccctgggtattgagtctgtaagccattagactttcctgccccacatatggggaccattcctgatcatgacactggtataaaccaacaaccatcacaaattagcttccttgctgaattgctcagattacatccagtttgcattatgaaaatttgcatagcaggaaaaaaaaagcctgaattggctgttagacaggtgaggaaaccaaggaagtaagaggccttcagtgactacagtaaacaactagtgggaacagccccagatcaaggatctctactcttttgactctccagagttcaagttttttgcccccgatttatagtgacatctgtacatcttcatagttgatgatgtcatctctgaactgatgtttgaggcctgtgaagtttggttctgcccttgcccggagtctgtagtcatcatccctggcgcttgctggcctggagcagcagctggcaggaagcattgtccctctccctctctccattgggggtgrcttggagcttttgcactagataacaaagctgcttgggttcttgttgttgagacatgtgagtgtttctgaaagtaccagtagacggagaaagaattcaggctgcctaagaagctgcctggggaaggg

SEQ ID NO: 813935 - DNA, 471 bp, Homo sapiens
tgggtgcagcaaaccaacatggcacatgtatacccatgtaacaaacctgcacgttgtgcacatgtaccctagaacttaaagtataatactaataataaaaaaagtaggccctgacccttcatgccccagctggtccactagagctcttggctaggcccctccgtggcatttattgcagcttggactagaattttatatgtaggtttttgttatgttttattttcataaggcctacctcctccacaagactaagcatcttcagggcagagcacagctgtcttgctcaccactatatatccagtgtccaaacagtttctgacatatagtagctgctctataaatatacatggactatgtgttgtgacactgggtaaatcacttcccttcaccacgcatctgttttcccctctaacaaatgagagggtggacttgatcagtgtkttttgtttgtttgttttttggagacggagt

SEQ ID NO: 813936 - DNA, 572 bp, Homo sapiens
cgaaaaaaaacaacaaaaacagtatgtatgcacatgtgtgtgtgatgcatgcattaatatatatcagggagagagaaagtgagagagcactcacaatrggcagagtcacatggctccatggcaaaaagtggagagaaaatacagaaatatcaaagtagaatgtcctattctctcagctgccaacagtaagtagtgtgagttaaggactatgattccagctttgactctccactgtaagagaaaagcaaggtgcatagtagaatctccatggtgtagatgagacaagggaataccatttttattttatggatgggaaaaatgagggccattatggtatctctgcttcttcccattgtcttgtgacactcacctcgcccagctctgtgccctttattttccattctttgaaggtcacactcgttcctgtcttggggtccttgtacatgttcttccctaggagcagaatgctccttccctcccatgtttaccttgctgagttccactcccgatctcggcccccaagtccctttgtcggggccatctttcctcattactgtcatggcccctgcttt

SEQ ID NO: 813937 - DNA, 603 bp, Homo sapiens
acttgaacctgattccaacacagagtaaatatctcaataacagacaggagggagaagaaaatggctctgatgatcattaaaaaaggggctgggcacggtggctcaygcttgtaatcccagcactttgggaggtcgaggtgggtggatcatgaggtcaggtgttcgagaccagcccggccaacatagtgaaaccccgcctctactaaaaatacaaaaattagctgggcatggtggtgtgtgcctgtaatcccagctactcaggaggctgaggcaggagaatcgcttgaacctgggaggcggaggttgcagtgagccaagattgtgccattgcattccagcccaggccaccgtgcgaggaaaaaaaaggaaatgaaaaggtgtgccaggctgatagtcaaattcatctgatttacatgactttcactttgaacgtgcagactccaatgcatgaagcccaggttgaactgggaaatccaagttgcacttaagatacatgagtaccttaatcccgacacaggctttctgagccaggctctgtttaatcaatgggtgtttggaatgagggctgtggacatcatagcggctcccttttccctagtgtct

SEQ ID NO: 813938 - DNA, 446 bp, Homo sapiens
ttgctggaataacactcaattaaaacaaaatgaagcaaccttaaaacagaaaatacagacaaattctaattctaattatcagtcctcatctgagagtgacctaagtatctctggtcactcactcttccttgagacactttctttaattgggttccaggacacttggggttttcttctcccctctctggccactcccccacagtctcctttgttgtttccttgtctccctccctggtctgtaatattggctgccttaggcaggaatcaatcctcggactctttctatctacactcactcccttggtgaagtcaaccagctttgcagctttaaacattatccatgcattgatgactcccaaatgtacatccgttccctgaactctataaactcatatacccaattgcctactcrtatctctacttggatgcttacaacagctcagatt

SEQ ID NO: 813939 - DNA, 596 bp, Homo sapiens
cagtttataaaatcaaagagagaattctaaaacaagaaacattgttaatgaggcagaagagcctggaggaaacacccagcagaatgcctcctcatcccttgaggacccacttcctggtcctcatcagctcctgatgtttcttctcacctaaaataaaatacagtgtacagtaatcttttaatcaaaacacagcattgcaggtggggactgcaagcctggcgttgtttgttgttgcatttgttgaacagctgatgcaggcattctggtggtgccactgtgctgcttagttaccctgaacatattaatttttcactgtatgaatgtatgtcatattttttgctgttaagttcttatgtgtgaatcagtgtataaaaatgactgcttataagtagcatataaattcagagtcaggaatgatgatgccaaatgaccaaagattgtccccgtaggtggctgagagagtracacctttgctttctgatggttcaatgtacacaaactttgtttcatgcacataattattaaacaatactgtataaaattaccttcaagctatgtgtataaggtatatatgaaacataaatgaatttcatgtt

SEQ ID NO: 813940 - DNA, 525 bp, Homo sapiens
atatcttgcagaaacactacagcatatgccaacacagaaagagggttgggtaggaaagtgtgtgcatgtgaaaaaataaacatcccagtaaagaaatacgcagaaccacgttgatatatatacacaatgtcaggttccttttgactcaacaacaataatctggtcacacagagtgaaactgcaaccctatctggcccttgatgtggaaggtgctgaatcacctgcccaggggaaactgcagacatttagcactttcaaagatgagaatgagctaataaaattagagtctggctcactaagcaaacatcactgtgtgccagcctctctttggagcaaacctgctttctcaaatgcacaccacaatttactctccatgtaccatttcccttatgtcagtgaatgcctttctcatgtctwtgaatgtctttcttgatagcatacgaaaaatgaagagaaggtgagttgagaggggaaggagtggggaataataacatttaactagatttgtcatctactatttctatt

SEQ ID NO: 813941 - DNA, 593 bp, Homo sapiens
attagcacctagtagtataatccaactctaaaactccaaaaccacttcagctctttggaacaatttcataatctcttaattttatgaaataactttcacttttagacaaaactgagaacaasttcaaagcagttgctcttagtaaaagaatgaagatatggagtcaaacactgttttccattggcaaaaggaactcaaagagatattttaagacttactctgtcagaaaaacaattttttttttcttgagtgaaattaggtgccttgatcatagatcccaccactacgttttactgtgtccccatctctccttcatcctgacatatacaccctttctgtttcttaaaatggttttttttctagactggaagaagtattaaaatattggtgacagcctttcttagctgctgagaaaattaatgctttggaagaaggctagacagattcaccactaggctgatatatggcttttctgatatatttagaagtcatatgtgagcatgaagaacttgcaatttgaagttcaattaatgttcaaatatttccttatccatctctttcccttgagttcttactgacaggcccagattaga

SEQ ID NO: 813942 - DNA, 568 bp, Homo sapiens
aaacagagcctcccactgtcgcccaggctggagtgcacctgacggtgaaaccccgtctctactaaaaaaaatacaaaaattagctgggcgtggtggtgggcscctgtagtcccagctacttgggaggctgaggcaggagaatggcacgaacacgggagacgcagtttgcagtgagtcgagatggcgccactgcactccagtcttgggtgacagagcgagactccgtctaaaaaaaaaaaaatccctagccggtcacagtggctcacacctgtaatcctagcactttgggaggtcgaggtaggtagattgtttgcggtcagaagttcgagaccagcctggccaacatgatgaaacctcacctctactaaaaatacaaaattagccaggcgcggtggcgggtgcctgtagtcctggctacttgggaggctgaggcagcagaatcgcttgaacctgggaggtggaggttgcagtgagccaagatcgcattgctgcactccagcctgggcaacagagtgagactccatcaaaaaaaaaaaaaaaaaaaatccccatatctcaagaaactttt

SEQ ID NO: 813943 - DNA, 584 bp, Homo sapiens
aagaataataaaataatcttaaaatgcttttgtcctcccaggaatgaaacagcagccaagcctcagtgtcccacatgtgacttattcattttcagacttcttgggaataaataacattttgtayttctagcattcttcttgctttaacataacctgttcttatttatttctcacaacaaatctgtaaggttggcagataatgtattctactttgtagattgagtaaactgatgtagactacataaataatttggccaagattacacaactagtttgtgaatttaagaccaccctctaggaaattgtgagtttttattataaccacaaaatatcatccctggtaacctgcgtaatttggtaactctgcttctccacaggttgaccttcgtatggagtaattcattaatgtgttcatttactgaatgcagctgttctaaggactatgttggatgacggagatagagagataagtaaggcatacctcctgcccccaataagctctcagcctaatgtgatttcctttcttcatttattaccagaaagagttaaatataaacagctttttgactgtgcatcatttctcc

SEQ ID NO: 813944 - DNA, 556 bp, Homo sapiens
accttagagtgttatgctaaaataccaatgcctttttacgtcagttgtctcttyaaagtacatctaaatttctgtctccttaagtatggtcagcagctcattatctcaccatgtaaattttagtgacttctgaaattatccttctttggactgaggcatctaagacaggaacacctgcctttgctgaagtcaggggctttcacagttcctggcagagttgactttgcttattgcttcctcttagatgccaggaacgagtgcttccctgcctggtctcctccagcctcaaaataggattagaactagaattttaagggtgatcactaaggcctgatcaataatcttcttagagacactgaaagccaacttggaggaaagctatgaagatgatagaaaattcaggagcctcagagtctcacagttgagacggcctctgcctatgcactgagtacatctacaaggcagtggagttctattttttgaagtgagtggagaaagcaaatcagaataactaacaaaaggaacacatttcctctgttttaagacttcttttcca

SEQ ID NO: 813945 - DNA, 556 bp, Homo sapiens
accttagagtgttatgctaaaataccaatgcctttttacgtcagttgtctcttcaaagtacatctaaatttctgtctccttaagtatggtcagcarctcattatctcaccatgtaaattttagtgacttctgaaattatccttctttggactgaggcatctaagacaggaacacctgcctttgctgaagtcaggggctttcacagttcctggcagagttgactttgcttattgcttcctcttagatgccaggaacgagtgcttccctgcctggtctcctccagcctcaaaataggattagaactagaattttaagggtgatcactaaggcctgatcaataatcttcttagagacactgaaagccaacttggaggaaagctatgaagatgatagaaaattcaggagcctcagagtctcacagttgagacggcctctgcctatgcactgagtacatctacaaggcagtggagttctattttttgaagtgagtggagaaagcaaatcagaataactaacaaaaggaacacatttcctctgttttaagacttcttttcca

SEQ ID NO: 813946 - DNA, 582 bp, Homo sapiens
gtttacactgtgcatgtttccaaactcaaagaatttacactcttctggttgcattgctctgtaaagatctgacccactactatgtattaaaaagggatgcatgataatgaattcagccctctctgtaaaatccaaagggtcctattgcagtttcccccatttaatgggtcattaaaatattcttgggaaggacaaagctttagttaactatgagaaaaacaagcagaaccagccctggattctgtcttcaaagattttaccatgttggcaggcctggtagtccagagcccaagaaaatatcccagccacagataccctagatgtagactagcagtgctacaacctcaaggtcagaagtatgtcactagaccagagccaaaaataggtgctatatcattaagagagtaaaaatgcaaaccacagacagggtgacattattcacaataagcatrtaacccacaggggactcctatctgaatatgcaaagaactctcactaatcaataagaaaaaggcaaaagatttaaacaggcacttcacaaaaaaagtatattcaaaaaatcaataaacatttgaaaagatc

SEQ ID NO: 813947 - DNA, 635 bp, Homo sapiens
tggagtggggaagctggtgctgggatccagatggttccagagagccctagctcttcaacccactctcagcagctcccaagcctgcccaaagaracaaactgcctggaggccgggacaaacccaaacccctgcctgccccagctgccttgaactggactccccagggacagggccttcaaaactgcattggtgtccagatgattctcatcatttggcaggttggagaaccgcaaccgccaccagcagaggccccagactgcacgggctccagttcttgagggcctgcaagaaactggagtcagatttcccctctccaggccctgctcttctatctcagggtctctgtgtgtttgctgtgatccaatggctgaggcacaagccaggcagccctggggaccccgggcaggaaagtggaatggtggaggctgggagagggactctgggacatgcccgtctcagtctggaccccaaagccatccctgtggcttgtgaagctcaggtcctgccagtgctgctttggagagaagagcaatttggggggaatattccgagacagtccatttcttctacccagatcctaaactccacaccggagtcctgcaggaagcagactaggagcaaaccagcctccgtgg

SEQ ID NO: 813948 - DNA, 556 bp, Homo sapiens
cagaggttcggaaatggaaatgctttgactccaaggcacaggtaataaagtaactaaccaaggacactaatggaggggaccagtagtaaagatttggtggagatgaaaatacatacayctgttatatgtcaattaaaaaataagattgagaagcagctgcagtccgtggcactcacaaagagaaacaaaaggggcaagtgaatacagcaccatcaactgaaatattcaggtagtcacattgggactgatcagggaaacaactcaactcatgaagaacaacccatgggtgatggcccacctggaagccacatggagccaaggaaacccccaccccagccaagggaagtggtgaatgaatgtgtgaccccaggaaaccatgcttttcccatgaatctttgcaacccatggatcaggagatcccctcatgagcccatgccaccagggtcttggggccaacacacagagctgtgtagagtcttggcagagcagctgcttgggcatacacagagaccgaggagctttacatactctggccccaggatccctaacaaacgtg

SEQ ID NO: 813949 - DNA, 467 bp, Homo sapiens
agtaaagtatatttgctatggttggaatgattgcgtctcctccaaaattcatgttggaacttaagccccaatgtgatartattaagaggtggcgtctttaggagatgattgagttgtgagggaagacccccctcatgagtgagattagtgaccttatgaaaggacttgagggacctacctagcttggttttcttcttttgtttctctgtcctttccaccatgttaggacacagcgtttctcacctctggaggactcagcattcaaggtgccatcttggaagcagagagcagccctcactagactacaaacctgctggcaccttgatcttggacttcccagccaccagaactgtgagaaatacatttgtgttttttacccattacccagtctcagatattttgttattagcagcacaaatggactaagacagtatcttacgtagagtgaggtgcatataccttaagtt

SEQ ID NO: 813950 - DNA, 494 bp, Homo sapiens
ctagatcaggtaacttataaacaggatacatttattactcacaattctggaaactgggaagtccaagaatgaggcamcagcagagtcagtgtccggtgatctatccctctttctacgtgtcctcacttgacagaaggggaaaacaggtttcctcaagcctcttttataaggtcactaatcccattcacaagtgtggaccctatgacctaatcacctcctaaaagttgcacctcttaatactaccacagtggggattaggtttcaacgtgaattttggaaatacataaacattcaaaacatagtattgctgtatcaaacactgcaacaagagaactgcaaagaaatgcaacccttaacccttgggcgttcacaatttaaaacatggacaagataggtcactgagcctaaaataaacattcaatggtgaatagacaggaaagaatttacccatttaggtcatggataagtgcacaaagggcagggagccaggctaa

SEQ ID NO: 813951 - DNA, 496 bp, Homo sapiens
tgctttgtttttgcttagtcaaagagcacaggccatcatttgttgtagtgtcrcccgtaaagcttaataagtttaaagttcagggtgttaatcattacaagcataaagtatgaatatgctttaaaggtttatttaagaaaagaattgggattagatttgcccaccagaatatacatttttcacttgaagtcctgagagagattcagacagaaacagcttttgactcagcagcagttagcaaacaaacatcttgatataatactgatccacactttgcatatacactttcttttctttgtattacatttttagaggtaagtggcagttttcacacacttccaaacgcttcatcagtaatgaaatattggcttgggcagctctggagtcccaggtttcagcttaaactttccagtgggccctgccaggcactaacttcaaaatatctttttttatggtgaatgcctccagaaggtgcaactgtgtggtggtttcattt

SEQ ID NO: 813952 - DNA, 598 bp, Homo sapiens
gcatataggttaattccatgtctttgctatgtgaatagtgctgcagygaacatatgcatacatgtctttataacagaacaatttatattgggttagggttagtaatgggattactgggtcaaatgatatttctgtctttaggactttgaggaattgccacactgtcttccacaatggttgaactaatttacactcccaccaacagtgtaaaagtgttcttttttctccacaacctcaccagcatctgttattttttggctttttattaatagccattctaactggtgtgagatggtatctcattatggcttttgatttgcatttctctaatgatcagtaatgttgaggctttttttcatatgattgttggctgcatgtatgtcttcttttgaaaagtgtctgttcatgttctttgtcaactttttaatgggatcgtttgtttttttgtttcctgtaaatttaagttcctatagatgctggatattagacctttgtcagatgcatagtttgcaaaaaatttctcccattctgtagttgtcttgttactctgaaatataactaaaagtttacttttaatttattttattattattttttt

SEQ ID NO: 813953 - DNA, 604 bp, Homo sapiens
aatactttaagttgaaaagtgagttttgataaatatattccatgccartttaccaactttattcttcttctgtttaatggccaacctcttgagagaatagactccccggtatgcattcagttcctctgatcataaataataatatattaaaaatattattttcccctccctccctcccttcctcccttccttccttccttttttcttgacaagatttctttctggcacccaagttgcagttcagtcatgagatctcaggtcactgcagctgcaacttcctgagctcaccctcctcccacctcagcctcccgagtatctgggactataggcacacaccaccatgcctagctaatttttgtcttttttgtagacacagagttttgccatgttacccaggctggtctcaaactcctgggctcaagtgatctacctgcttcggccccctaaagtgctgggattgcaggcatgagccaccatgcctgcccccaaaatactgttttctattattgatattttttattattttatttttatttccatgattaggacacaaacttcttaatggcaagaacttgtaaaattatttccatgtcctttaatacta

SEQ ID NO: 813954 - DNA, 646 bp, Homo sapiens
tgtaaaatttttcaatcttttctttacaaaaattgtaagtccacatatttattctgcttcggttacatttatggtcttagaaatgctttttgcattgtgaaaagttcctgaaatttgtagttctacttttgagggttaacattttcatttgtagttttaagttgcatttgcaactacaaattctgtggacattgataccaactctgttctttccatgcctttgagctctaggcagatctcactgtcagatgcctggaatttccggagcacagtgttgtgaagggacccttgcatgagagtcagaggactgattctagccccatctctgtcactaaccagctcatatttttggaacttcagtttcatttgctctctatatttggcgggtattaataggtaatccccgaggtcacatccagttaacatttggttttcttgtctaagtattaatcatttataaagcaatcatttggataaacaccaggaaaggaagttttgaggaagagactackgtggacaataaccaagtgtttccagtaactgggacataagataatctgtcttccaaaatatctccagtattccaaaatgaagacctattatgtagcaaattttctttttaccacctcttacagaaattcagaac

SEQ ID NO: 813955 - DNA, 602 bp, Homo sapiens
cagctgttactaccatccatctctagaactttgtcatcaccccaaatgcaaactttgtacctgttgaacagtaattcccgttcctcttgctcctggcaaccactgttctgttttctgtctctacaagtttgactactctattaggtgccttatgtacgtagaatcatataatttttgtccttttctgtctgccttacttcattcagcatagtatcttcaaggctcattcatgttgtagcatgtatcagaatttctttcctttttaaggctacatgatattcccctgtatgtattgaaagtagtgacaaaaaccacaattacttttgcaccaacctaatacataccacagcttatttatccattcatcctttgatggacatttgggtggtttctacgttttggccactgtgaataatgctgctgtgaatatgagtgtgcagatatctgtccaggtcccttctttccatctccagaaatggaactgctggatcacataataattctatgtttaatttttttttaatcwctgtcatttaggtgtatttttttggcagagtaaaacatttaaatattttacatagacataaatatgagcatgataa

SEQ ID NO: 813956 - DNA, 533 bp, Homo sapiens
cacaatagaaaatttaggaaactttggacacacttttagaaatgcaacatgctctggaaagtctcagcaatagaaytgaacaggagaagaaagaaattcagagcttgaagacaaggtctgtgaattaacccattccaacagagacaaaaaaaaaagaataagaaaatatgaacaaagcctccaagaagtctgggattatgttaaatgaccaaacctaagaataatcagtgttcctgaggaagaaaagaattctaaaaacttgggggaataattgaggacaacttccctggccttgctagagacctagacatccaaatacaagcatcacaaagaacacctgggaaattcatcacaaaaagattattgctgtcaatgaaaagagtcaaactctgtaaaatttaaggagatttattctgagccaaatatgaatgaccatggcccataacacagccctcaagaagtcctgagaacatgtccccagggtggtcaggatgcagcttggttttacatattttagagaggcatgagacacc

SEQ ID NO: 813957 - DNA, 622 bp, Homo sapiens
cctgagtatagcagagatggaatgatcckgagtgcattatgccaataaaccactcaattacctctaagctttgtgttatatgagagaatacactttctttatttttaagctgcttgagttgggttttctttacttgctgctgaaagtatcctgacaggtaagtgtgtagtgtgtatgcatgtgggaatgcaaggaggattaaatacagtagaagtcagagtgaaaggaaggaaatagttaaggtcatccctcatgaaatggaagggatatggcagcatacgttaggtggtatgtaagctgagaacaggtggaaaacagcccacatctacctggattttcctctgtacctcctgccatacgtttatttgccctgcatggattgttaaaaagtaaagggaggcacagtaaaattttaaagagtttatttgagcaaacagtgattcatgaatcaagagtagcagtttcaaaccagaagtggttcaggagatccacagagagaatacaagtgggaggcatttataggacaaactcaaaagtaatacaaagaaaatatttgattggttgcagtcatacagttgccttatttggtgtatcccattggaaaatgcctagttacataagt

SEQ ID NO: 813958 - DNA, 601 bp, Homo sapiens
aggtaaacatgtcctgtccagttaaataacccctgacataaatcatatatatggatgtagacagagtgtatatatctatagatacagatacaggtatatatataaatagattgtggataattcaaaggattatcattactatgttctctggcagtaaataaacataccaacattaaaaacacgttttttgagcatttactatgtgataggcattctggattattgcattaattctcacaacaatcctaaggaaacagggactgttgtgggcctccattttacagagaggggaactgaagctccgaaagatgcaggaatctagtgagtagcagaaccaggatatgaactccaagcaactaagtccagctttagcctctccagttttctgcctccgatggtgttattagtggattcactatccttaaagcttgggcaaggccaccaactgcttcttgcctgggaagccgacttgtagggttgccagatttagcaaataaaaatacaggctacctggttaaaattgaatttcagataaaaagcaagtaattttttaaaatataaktatgtcccaatatggaatggaacatacttgtaaaatgat

SEQ ID NO: 813959 - DNA, 627 bp, Homo sapiens
taggcaattaaatattagctgtgaactttagcattcatgagggggaacacagaaaggaatgaacactgatctatgttgcagaattgtttgttttcctcctctcagatactcaagaggctgccagcataggagctctgtctagagagaaaacagtttttacatatttctctttaatggtaatagaagcaaaactactgttgtgaaaagacactgggtttagactacaccatatggccctgagaggtgttcatcactatagcctctaatggctgaactcaaaatagcccatatttctgcattgatggagaattagctactgactgccaggaaacacccattgtagcagctcttcagccttgtaatttaaaataattactaattaaatgaaaataaaatagagtccataataacaataataatcactgtagcattggtcattaccgaagtattgtttgtaggagtgttacctaggggaacatcgcttgcagaagggtggaagaactgtggaaggagctggggtttattattactgctaggtagggaatcaggaccgctccagagtgcttrgcaaccatagtcctaatttgatattccatctatattgccaatctcatgttgtttcaagga

SEQ ID NO: 813960 - DNA, 613 bp, Homo sapiens
ggtgtggttaacatactgccagaatccaaccattcacttaccttcacggccaccctaatccaagccaccatgatctcatacctgaaatagccaacrgtctctgcttccatccttgctccccatccccaccccagtctattctcaacacagcagccagaaagaaccactcataaacataagtcagatcatataactccatgctcaaaaccttacaacagtttcccatcttgctcagaataaaagccaaagtatttacaaaaaataataaggctctatatgatttatgactcccccttcctctctgacctcatctcctatcactatccctctcctttttgtcattgttcctgacaccagatatggttccttggagctgttgcacttactattctatctgcacagaatgctgtttgttcagatgttagcacagcatgcttcctcatttccttcaaatctttactcaaagattatcttttagtgaggccttccctatctaaaactacaagttcctctctcaaacacacatacttcttattctcaatctctgctttattttctcataagcagatgtcactatctaatatactctatattttacttattttgcttattt

SEQ ID NO: 813961 - DNA, 521 bp, Homo sapiens
tgggtagggggatgtatggaaagacaggtgtgggtgagtgatagtgaaaatggaaggggactggatcggcagtctcttgaagtgggagcagtgttgtagtagggttgatagagaggatgaasagaaaggtggtaggcaggagtcaggggaggatcttcagaatagtattattcccagaaagcttgattcagatttctaaatagcttgatctgttggtgattaggttgcataacttggcagttttcaaagtccgggtcttcaaaggttgacatactctagtgtttcttttaaaaaaaaaaaataaataaagctgtgctggtgttcttccctgtcgaatgctgtaatgtgtaggaagtgtgaataggtacagccactttgtataatgcagttttgtactttctaataaaaatgcatatatcttaacatcctggcagttccattactagtcatcaaacctgaaattgtcttagatgtgtacatgaacattaatagcatttttttgttgtaaaaaagtggaagcc

SEQ ID NO: 813962 - DNA, 575 bp, Homo sapiens
aatgaaagggaagatatcattatagaccccacagacattaaaataatcattagggaataataaaaatagctctgtgagcatcagtttgacagtttagattaaatggaccagttcattgaaawcctcaaacaaaacttatccaaaataaaatagataatctgagcagtcttattaaatattaaagaatttgagtttttattttaaaatcacccaaaaataaaatctccagcactaggatgtttcattagtaaattaaagaaaaaattaagttaaagaagtttcattggttaattaaagaagaaataatacaaattttacattagatctttcaaaaaacaaatgtcaaggatacttagatttaccgatactaaaaaccaaactaaggagtacaggaaaaaaattaaaaaaaaaagtatacaccaatatttctcatgaacataaaaacaagtattagcaaattgaattgagaaatatacgaataacagaagagaatcaagtggggcttatctcaggaaataaaggctggttcaatatttgaaaatcaatccatgcaatcaaatacattaaaagtctaa

SEQ ID NO: 813963 - DNA, 650 bp, Homo sapiens
aaataattttggctgtaataacatcctaaaacattttataamttttatttgttaaattatttgactctaagtaatatattatacttcatttatacaagcaatcatcccaaatacttagaaatgcttacaaggaaagaaaatctaaaaaagattttaaattgaatacaattcttatgactaatatattaaagaatcattaaaattgacaaaatatgttttatgagtatttgatttaatattcatccttttttgtgtgtttttcttgtatctttgagccagtttaaacaattttttttttcaggtctcaaacacaattcctacaaagtttctaaaaccctaatctgtctgccagtagtgcctaagcagaaaaatcagccttacacttgactaattcctgcaaaagtcagagttagaactgatcactttcaataatcattctctatatgaaaactgctggtggattatcctgaaaatgtgtagtaaagtaaaataaataaagtaaaataaataactttcatcaagtagagaaatgaataggctcttaatctctttcagaaatattttgacagccataaatacgaggtctataaaatagtaagccctcaaatatttttactcatatgagtttcattagaatggctcagaaatat

SEQ ID NO: 813964 - DNA, 646 bp, Homo sapiens
aatagtaagccctcaaatatttttactcatatgagtttcattagaatggctcagaaatatcatcagttttccccctaaatcaaatacccacacatcttcacctggtggtagaagygattatattaaaatattttaccctgaacttgtatttctttgtgtttaactgtttagaaacttctgacatgctggaatctctctgcaaaagttgtcgtaatcagtttcaaagagatagtttacatacaaaacattctttcccatatcacgaaaagaacttctagtcaccaatattttttaagaaagtgtatgtggggtgcaaatgagaagataaaataatccagagcatgacatattcatattcttattccctaaccattcagttttagcatttggtgtaatttgaagcaacctttcaaattgcattgttgattaggtaattttcctctgcagctatccaatttttctgaagctcttcttgaattgagtgcattaatattaaagtttgcaaaatagcaaccttggaaaaaacgtgcactctgacttttccccttacagaagtgacttcatcagtggctccagctctctgatgcccaatcagctccataatgatggtgataattattatttattgagcacttgcaatacgcca

SEQ ID NO: 813965 - DNA, 608 bp, Homo sapiens
aggggtggattattcatgagttttccaggaaagaagtgggcaattcccagaactgagggttattccccttttttgaccgtatagggtaacttcttgacattgccgtggcatttgtaaagtggcatggcgytgctggaagtgtagcagtaaggatgaccttgaggtcactcttgttgccatcttagttttggtgggttttagccagcttctttactacagcctgttttatcagcaagccctctatgacctgtatcgtgtgctgacctcccatctcatcctgtaactaagaatgccttaacctcctgggaatgcaacccagtaggtctcagccttattttacccagcccctattcaagatggacttgctctgtttcaaacacatctgacacagcctcaggaggttctgagaacatgtgcccaaggtggttaggtcacagcttgaatttatacattttagagagacttaagacataagacattaatacatgtgaggtatacattggttctgtcccataaggagggacagcttgcagtggggtctcacagaacataggtagactcaaagattttcagattggcaattgtttgaaagagataagttattatct

SEQ ID NO: 813966 - DNA, 575 bp, Homo sapiens
ctaaatatttcagtcactctgtgctcagtaccagaccccctactactgttctttctctgtaccccttctcagatgattccatcaattcccgtggccttaattaacttttctttgcaacttacttccagattacacctgtaacctaacttttctggacttctgacaggtattctacagctgattgcttggcatctcctattagaagactcacaagcacctcaaaattactatatccgacacagaactctttaatttttgtgccctatctcctttctctttccttgtcattgacatctaactatggcaccctcattcatctaccaagtttttcaaagcagaaatctaagagtcacctttgatttttctctttccttcatgttcctccaaatttacccacttcaagttttatcgattatccttctaacttatgtcttccttagatcatcttttcttcagctctgcagccattacccaagtccaggccatcattgtctcttgcatgggctatkgcaataaccttcaaactggcctcttccttttgcccttgccctcattcaattcctttttcctatatc

SEQ ID NO: 813967 - DNA, 468 bp, Homo sapiens
aagagactccgtctcaaaaaaaaaaaatagtgtatgagtttctgttttgccacaacctgaattttgccaatttaatttccccttaaatatatatattttatatatatgtttatacgtaygtgtgggtttttgtttttgtttttgttttaatagatgggggtctcactctgttacccaagctggtcttgatctcctggcctcaagcgatcctcccaccttggcttctcgaagtgctgggattacaggcatgagccaatgtgcctggcaataataccaattttttttaacctgcctttttcatcaagttctgttttctactctttatttcaactgtagtgagtgttaggtaaggctgttgattggggttcaaagctgagaacttcaggcctcagttggttctagttccagcattgcttttcacttaacttctctgagtttcatttccttccatgataatgagagaattgg

SEQ ID NO: 813968 - DNA, 684 bp, Homo sapiens
tcctttggggtcagacagacctgtggtcaaggatcccggctaccrtggtcactggttgaatgactctgggcagtttagcttctctgagcctcaggttcctcatctgtagaatggggataataatacctcacaggctgtgaaacatgaacaaactctgcagtagagactggacaagcatcctggcctgcctcatctcccgtcagtgcaaagtttccatgacctcatcagctggcacccaccttacaagtgcgcctgtggaaggcacatggagggcgtccaagaaatgggccttctctggtcaggggagtgccagggagtctttgaaaggctcacaccagcctttcttagacccgcgttatggctgccacgtactaggttcttacccagccctttccacatattagctcctttagtcctcacagtagcctggaggaaactgaggcacaggagcttaagtgacctggtcaaggtcacgcagccaggattttaacacaggcagcctagcaccagggccctggccctctgagctcactgcctgtggctgcttctcccaacatcttggttacacatgtcatgaccagctgtgtctgtgtgccccaggtcacagcctagggcaccctctgccccatactcctggagggagtagagaccgtcccccaccccagcccagccactttccctttg

SEQ ID NO: 813969 - DNA, 455 bp, Homo sapiens
aacctgagttcctgttagacccaacactgcaagctaaagtactctgggatcctaaaaaaacttgaaargcagtctaggccacaaggactttaatttatggaaaagtctagatgctgtgctaggctgggagcccgtggatatggggcacacacggcccagtgagacactagctagggcagccaagggactgcttgtgtcacccctcctccaactccaggcagtgcagctcaaagctccaggaaagtaaagaggacttggtcttgcaacttggacatagtaaaataaatcatggagcagagtcctgatgctctcatttcaggccctagcacccagatatctcaagactcaacctggaacagaagggaactcgctacgttgaagggaaagaagcagttctggcaggatttatcacctgctgactaaagaacccttaggtctagaataaatatcagcag

SEQ ID NO: 813970 - DNA, 593 bp, Homo sapiens
tagcaatgcagccaacatcagagcacagtgtataaagcaaacattaatagacttaaaaggagagatagactgcaacacaataatagtaggggactttaacagcccactctcagtaatggacatattatccagacagaaaatcaacaatgaaccagcagagttaaagtgcacaccaaatctaataggcctctctgacatttatagaaatttcacccaaatttctatacacgcagaatacatgttattttcattaaaacacgggacattctccaaaatagatgatatcttaggtcataaaacaagtctgagaacatttttaaaaaaacagaggtcatatcagtaatcttttctgaacataatgaaatcaaactagaaatcaataacaaaaggaacctcggagaatacatgaatacatggaaattaaacaaaatgcccccaaattacgaatggatcaataaagaaattawgaagaaaatcaaaagtttcttaaaacacatgaaaatggaaatacaaaataccaaaatctgtgagatccagcaaaagcagtcctaagagggaagttcacagtgataaatggctgtatcataaaagca

SEQ ID NO: 813971 - DNA, 690 bp, Homo sapiens
tttcagtgcttctcaaccaggggtgactttgcaccccaagggatgtttggcaatgtctggagacgtgtgtctgtgtgtgtgtgcgtgcgcacatgtgtgggkgtgtgtgtgtgtgtgtgtgtgtgttattacaactagaaggtgctactgacatctactgggtaaaaccagatatcctgcaaagcacagaacagcccacctccccccaaagaattacccagcacaaatgttaatagtacaagtttgagaaatgctgatctacagtgatacagaagcagtatttacagaagccaagaatggcgagacaagaatatgccagaaatttcagagcactctgctgataggacaaaagaatagtttgtaaagacaagcttaaaagaatgaaataatacctaaattcatttttggtccctggtttttctctcaatagcatttcagaagttttgctagaattcttcttaagaaatcatcatctctaagaaaatgagaaaaaataattcaaatttatatgggagatgtatgtgtattttatgcagaggaagtaaaaattatgctttattctattatgaataaaaagacttgtcataaattgagtctgggttcatttctttatgcttaataaagcctgcacacagcatctgaagagaaagtagatagaaaatgtacccattaaaatatttacccttccaa

SEQ ID NO: 813972 - DNA, 528 bp, Homo sapiens
ggagctcgctttctagttgttagatataaacaaatttttaagaatatatgggctgtaataaaaaggtgatgtaagggaaacaattggtgcgtagtcgggggaggcatatgatattatgtagaccagtgtggtaaatgaaggatgatggcaaactcttcgacactccttacactgacaggttgaatctgattcccttccccttgaatctggctgctcctagtgagttttaagttgaccgataggatgcagtgaaagtgatgttctgagacttctgaagctagaacataagaattcttgcaacttctgctaaaggaagttctcctggaatactctccccgggacccctgagagcaccaagctggagatgtcacgtgtagacagacacattggttgtgataggcagcatctaaaatggctcccaatgacccgccctctctgatattcatatactgtgtagcctcttcygcttgagtatgggctggacctagtgattttattctaatgcagagaataccacctatgtattgg

SEQ ID NO: 813973 - DNA, 523 bp, Homo sapiens
gctattgtactccagcctgggtaacaagagcaaaactccatctcaataaataaataaayaaattggatacaagactcagacacttgacaacaaaaaagtatttaattcgctaagggaaacaaaaaattatactcaacattattagtcaccaagactaagcaaaagaaaagcacaagatactacttcaaacactataatagctaaaaatccgaatgttggtgaggatgtggaacaactggcactcttcttcttttgctggtgataatgtaaatgatacaaccattttggtggactgttgacagtttttgatacattaaacataaatctaccttataacccagcacttctgctctgaggtatttactcaagagaaatgaaaacatatggctacacaaagatttacacaagaatgtttacagtagcctgattcacaattgccaaacactagaacaacccaaatgtccacgaacaagataatggagaagctaattgtggtttagccacaatggaatgctattgagca

SEQ ID NO: 813974 - DNA, 629 bp, Homo sapiens
catcttttgccttttgacctttgcccttctggtctrtaatatggataagagcattttgtgatcgtaagatcaaagctacaattccaaagaggactgaatgggaaagaaggagccagctacattagccctggactctctgttatgtgaaaatattatatatatagtctcattaagttaaacactaaaatttgcctaaagctgttgtaactggtatttagatatagatcctggtcctgatcaccccaaagtccataggccaattggccccctttagaggtatctctactgtcctctctgtcactggacctgtcccatgtcaaagactcactctctgcatcaggccccaatgccatcttttcctgtcatgatgcacagcaatccagctcctcatggtcttgaacttccgcattccggagtaggattttggatctcgccatttacatgctgagggaagcagtcatgaaactgggtaagccaatttcactgctgcccctgtggttatatgtacaaagccatttacaaaggccaagaaaagaattagacacatctaaattttggaaaattgcaggcttttttttttgaaacagggtctctgtcacccatattggagtgcagtggtgctcgctgca

SEQ ID NO: 813975 - DNA, 489 bp, Homo sapiens
cctcccccttaccactctcacctccaaaccctcactgtacacacaggcttctgggagtgaccagagaggtgacgaggcctcagtcaagcagagagcagacattctggrgtgggttccccagttgtattggtctgtttccacactgctatacagaactacttgagactgggtaatttatgaagacaagaggtttaactgactcacagttccacaggttgtacaggaatcagactgagaggcctcaggaaacttacagtcatggcagaagcaaaggggaagcaagcaagtctcatcacagtggagcaggagagagcgagagcgagggggaaagtgccacatttttaaaccatcagatctcgtgagaactcacgcactatcgtgagaacagcatggaggactggaaatctgcccccatgatccaatcacctctaccagatgcccccctgacatatggggattacaatttgacatgagatttgggtgaggaac

SEQ ID NO: 813976 - DNA, 525 bp, Homo sapiens
ttcttcttagtgcttgcaaggcaaaagggaaagaggtcatcatcatcacaacagcaaagtygccctgtgggaagcatactactaaacaatacttaaatatgcctcctgtggatatagatgggtgtcattccccagctacctgcaccactccttcagaaatagacatcaaaactgcctcatcgccactttcacattcttctgaaacggaactgacgctttttggctttaaagatcttgagcttgctggaagcaatgatgatacctgggacccaggttcccctgtgaggaaacctgcattggcccctaaggggcccaagctcccccacgctccaccctgggtcaagagtcccccattattaatgcaccagaacagagtggcttcattgcaagaggagctccaggatattacaccagaggaagaactatcctataaaaccaatgggctggcactttccaagcggttcatcactaggcaccaaagcattgatgtaaaagacactgcacatttgctaagagcctttgatc

SEQ ID NO: 813977 - DNA, 640 bp, Homo sapiens
gactggtcctcttttgctttgagtggatcccttccacttcttggtagctagtgctttgattgtgatttgtcttctggatcatactggtaaagccrtgtgcagttctttgaagaaatgcttcagaatcttgatcccacttgtttaaactttccattgaaagctctatttttgtctgcagatgatgtgggcacacattgagtggaaattattcaactttaatttttcattcagaatcatgtaagctgaaccaagtgagatgtcttgtctgtggtattggctatttctgttgttaatcgtcagtcctcttcagttagggcactaacaagattaattttttccttgtcaattgatggggatgatctgctgctgcttctgtgagggcttcatcttcagaatcacctcatcttttcttaaaatgagttatctatttgaaatttcttgtttccttggggtattgtccccataaacttttcgtaaagcatcagtgatttcattattcttccacccaagtttcaccataaatttggtatttgttcttgcttcgattttagcagaattcatgttgatctgataggggcttttcgcaaactgatgtcttacctttgtggtgccttaaacaagattctgttgaaacatgtta

SEQ ID NO: 813978 - DNA, 638 bp, Homo sapiens
ttaaataaatgcagagcccatcaaagtgactactatgaaggtagtcatccaatagtcgtttggatgatccagttttagtgtgtgaaaaaataaaaatcacttttgtttattrcgatgtgacattagtgagaaataaacactctaacactgaggctgggtgtggtggctcacacctgtaatcccgggactttgggaagtcgaggcgggtggatcacctgaggtcagcagtttgagaccagcctggccaacagagtgaaactctgtctctactaaaaatacaaaaattagctggatgtggtggcgggtgcctgtagtcccacctacttgggaggctgaggcaggagaatcacttgaacctgggaggcgaaggttgcagtgagctaagattgtgccactacatttcagcctgggtgacagggtgagactccaaatcaaaaaaaaaaaaaaaaagagtaacactggtttttagccttgggatttagctatttggtgtacaaatgttctgctgaaatcgcagttgctaactttgacaaattttcaagcctttctttttgacttggaggtagttataaagagaggttgcattatcctagcatatttctcaatgcaggctgggttgcatttacttcacagatgtt

SEQ ID NO: 813979 - DNA, 378 bp, Homo sapiens
cgggagatatgttggttttataagaggaaatcccttttgcttgattctcttttctctcttgtgtgcctttcaccttccgccatgattgtgaggcctccccagccacgtggaactgtgagtccattaaacctctttttctttataaattacccactctcggatatgtctttataagcagtgtgaaaacagactaatacagagacccagcgggtggagacctccagctcctcatccctcaagatacaggaagtgagctgttcargccgcctgttccccgacgaggtgcgtggttttggagattaatgttagcggtctttgtgggaggcactaggagggctccctttaagaagcccagagtgcggaaacactgattgtgac

SEQ ID NO: 813980 - DNA, 552 bp, Homo sapiens
tcccagcactttgggaggccaaggaggtaggatcacctgaggtcaggagttcgagaccagcctggccaacatggcgaaaccccatctctactaaaaatataaaaattagccgggcatrgtggcacgcacctgtaatcccagctactcgggagcctgagacaggagaatcgcttgaacccaggagggggaggttgcagtgagccgagattgtgccactgcactccaatctgggcaacaaggcaagactccgtctcaaaaagaaagaaagaaagaaaagcacttctcccaattttccattatatgaccattggtttgtctacttgttttattccctgtctgtcccactgagtcacaagctgcctgagggtggcactaggtctgtgatactcatcctgtatcttgagtgcctggctggtgaatactcaatgcacatttgttgaataactggatacatggccgccaccgactcacctgctccttcctcccaccacttccctatttagtactcacctgtgttcagccctgccctgacaaacacctctgctctctctt

SEQ ID NO: 813981 - DNA, 632 bp, Homo sapiens
ctctttcttatgtaggtccttggggatttgctaatctgggatgcaaattgaacacgcgcagcgtactgctgccctctgccggcggtagctggatgtgcacatgcccacacyggtccatataggagccaagagcccccagcaacttcaacagccaagccctgagatcctcctgcgtgattgaactgtgaatccaggaagtggccattctagaacccctatccttcgtgctacaaatctgaaccaagcttttcacacacagctgctaattaatcccagcgagccttctggtcaactaattatgtgccctggctcattgatgaggaggcatgtgtgaactgagccttctgttatcaatattttttaaccccacatgaataagatacttttcctgttggacaggagtgaaacattccacaaatactagataggtacctactcatgtaaaattgtttcactttaaattccatcatgatcatgagtctttctaaatgcacactcaatgattttcctacttttacagttattgaacatgatgaggttaatgatacttgtaaaatgcctcaaaaactcagcagataggctgtaggccaacggaaacttgatggccagaggtgataggatggctgcaacac

SEQ ID NO: 813982 - DNA, 617 bp, Homo sapiens
tcctatgagatttatgctttaaagaggttatgtttggatgtgtttccaagatttatttcaagatttagagccccctttagcagtttttgtagtggtagcttggcagtggcgaattctctcagcatttgtttgtctgaagaagactgtctttccttcatatatgatgctcagtttcactagatacgaaattcttggctgataattgttttgtttgaggaggctgaagatagggccccagtcccttctagcttgtaggatttctgttgagaaatctgctgttaatctgataggttttcctttataggttacctggtgcttttgttttacagctcttaagattctttctttcgtcttaactttagataacctgatgacagtgtgcctaggctatgatctttttgtaatgaatttcccaggtatttttgtgcttcttgtacttggatgtctaggtctctagcaaggctagggatgttttcctcgattattccccaaaatatgttttccaaacttttagatatctcttcttcctccggaatgccgattattcttaggtttsgttgtttaacataatcccagactcgaaggctttgttcacattttcttattcttttttcttt

SEQ ID NO: 813983 - DNA, 582 bp, Homo sapiens
tagctctctctctatatatataactgtatagtgttttataaatttaaaacatttcatgtgctttaaaaaagatttaaaagctaaacttataatttggaaagrccattattaagtgccagatgcctggtgattgaacccaggattttaatttttcccgattcagatgaggttctctgttcaagctcttgcagtttgcctctctgtcactctcaatattacatgtatatgtaaatatacacacatatatagacacagagatatatatatgcactcacacatacacacatacatattcacacataaatctttaaaagtagtagaatattttaattattgaaaacaatagccttggtatgtttaaatatggcactttagagcaatcttctaatgaaataatttggaacattttctaacaatttttatctgtcaccattttttctaattttagtatattttatacccagatattaattaccaaatgtgatttaaaacccaccctatttctcttcctggggtgatttcatgactctgggacttcaagctcttggatcaaagctttggtacatctcagcagatgtctta

SEQ ID NO: 813984 - DNA, 594 bp, Homo sapiens
gtgctgaatgagtgccatttcttatcctagagtgtgttggatcasttatcaattgctgcgtaacaaaccgtctaaatttgtcgctgtgaaaacaacactaatgtgactgggtgatattttcattagtctcctttatgctcactcacgtggctgtagtcagctggtagcttggttgggactagatggtctaacatgggcttacttgtgtgtctggtgcctcagttgagattggaatgactaaacttctttctctttgtgtctttcccctgggctttttcacatgatggtgggcaaattccattggacaagtgcttataaaggctctgctctgttgtgtttgctgatgttcccttggccaaagcaggtcatgaactaagctcagagtcagtgtgtgagagggctatgaaaggacctgggactgggcacggtggctgatgcctgtgattccagcactttgggaggctgaggtgggaggattgcttgagtccaggaatttgaggccggcttgggcaatacagtgagacaccatctctaaaaaaaataaaaagaaaagcaagaaaggacctggatgccaggatatgtgactcactgatg

SEQ ID NO: 813985 - DNA, 649 bp, Homo sapiens
gaatagttgaattaatcttgatttatcaagtctaaatctgctgatgcaaatatcacatcttaaagcattttctactaatatttwaaaaaaactatttcatatggttactccacactcaaacgatgaccctccttctctctaaactctctggcaatgacattttatcacatttcataaagaaaataacaactattaaaatagatacgattatcttccctctaccaaataaatgaaccccctgcatctaaacccttcttctccttatccctgggtgtaatttaaagggggagggtcttcttcctgcaatgtcagcccctctctgtgtcctctggactctcttacaaattgactattcagaaatctcagtttcatcagaaatattctgtctctctcccaaccttcagcaacctcattattaagttccccaatatcatttttaagatatgttcttgtaattcttataataggaaataaaattaaaacaaaagaaaaacaaaactaatctcttataagaaaatctctttcattagcaccctatcttttgacataattcttcaaccatggtccagatatccaaagagattgaaaaccaaaggcttatgttttctttttatttcatttggctggttgaaaccttacccaattttga

SEQ ID NO: 813986 - DNA, 626 bp, Homo sapiens
tcaggccctagatttaaggctttaatccattttgagctgatttctgtatatggtgtgaggtataggttcartttcattcttttggatgtggatatccagttttaatagcaccatttatggaagaaagtgtgtttttcccattgtgtgtccttgcaaactttgtcaaagatataccataaatgcatagatttcttggctttctattatgttccattgatctgtatgtttctttttatgccagtattttgaagtcaagtagtataatgcctccagctttgttcttttattttttaatttaattttttttttactttaagttctgggatacatgtgcacaatgtgcaggtctgtcacataggtatacatctgccatgatggtttgctgcacctatcaacccgtcacctatgttttaagccccatatgcatcagctatttgtcctgatgctctcccttccctcaccagccacccttctgacaggccctggtgtgtgttgttctccttgtgtccatgtgttctcagcgttcaactcccacttatgagtgagaacatgcagtgtttggttttctgttcctgtgttagtttgctgagtatgatggcttccagcttcattcatgtccctgcaaa

SEQ ID NO: 813987 - DNA, 628 bp, Homo sapiens
ctagagaagctgacacataaaattaaccatcacagactgtgaagggtggcagaatatgtcaccccaaaatatgctagtttggtgtaaagattattttgagctaaaggcccttgaaaaacagcaaatgcaagaagggcattccaatctcctcttttcttcctgcaaacaggagacaaaaactcccatgtgaaagatgcgctccctgtaccagaagagaagaaacattcttgtcaccggagatgaggagttgagactaaaaaaaaacctgtacaaacagaccttgttaaaataactcttatcttccttgagcctccccacacattttagttacttttccacaattgtcactctttattcaatctgctatataagcatttgggtttttaccacttcttagggtctttattttcctatggcagctcccatgtacatgtaaaaagtctgtgtatttttctcctgttaatatattttatgccaatttaattctcaggcccaaccagaggacytaagagcatggaggcaaagttttgcttgctctgtaactgagatgtcaggattatctgataaagcctccttgatcaagaaggtaatcccaagttagaatgaaatctttacagaaaagggggat

SEQ ID NO: 813988 - DNA, 575 bp, Homo sapiens
gtccacagagagaagtactgaatatcataaaaagtattccaatcttctgtattaagtcaaagtaatttctactctcagttcgcgctaggtagaaggaagccagaagtcgttttaatcaattctactacataaataaggtaataaaagaggagtcatatttattggaaacctcaggctaagtgctttacataattattgcatataatcatcacaatgcagggtggtgtgacatcagcattctgatttcacagaggaaaataaatgtgctaaagagtaataaagttatgataaaggccatagcagactgcaggtaaattcgatccttcaaatcaagtatacagagggacattctcattgccaaaaaatttttattatagaactcaactctatgttacaggcacagcatgaacatagtcctcgttacagttgatggccttggaggcacacctggtacaattatgctttaaaagacaatcaaaacatgaatacaatacctgagcacttcataaaacaagttagggaccttaygaaacttatgaataagagaataaaatagaaaaaaattaaaaaaatca

SEQ ID NO: 813989 - DNA, 600 bp, Homo sapiens
cttcttttgagattacttacaaataagcaaaaacatattatcctccaaagatgctaccctggtgctctcctagcagttgaactacactaaacacagttttcccttccttgcctgctgccacrtcagtgtggaaagaagggctgatggtttttccttcttcagcacatgagaggaagactcaagaacagacattcacagcgaatccagtctgttcacacactctgagggtcatgtttttgtgtccccacattttcagggcagaggaaggtggtgggaagcctagcatgacaatcaataccaaaattgcaactccatgataagagatgctgtcaacgtggtaatgacttgtttaaacatttattaaaccacttcacaacaaatagtaacacatgaagtgttatcctcacatttcacagcaacatcacttctaaggagaaaaaaatgctagccaaactgttttaaaatcttcatcaagatattatttagttaatatttaggggtttaatttttcccatttgttcacaaagaaaaaatgtttctataaatgaattttgcaaccaaatgcaagcacggttgtattattattgctaaaaaataaat

SEQ ID NO: 813990 - DNA, 645 bp, Homo sapiens
cattttaagatggaaaacatatggmttctgatatttaaactccattttatatatgaagaaaaagataacaagcatataatgtagcaactacactgataaatttgaaaattcagtggaaaaaattaataagccaataaaaacaagcttttaataattaaagaaaattataatctgctgtaatatttgacaaaaatttctatttcatttatgcaatggaaagtaatctctatggctattgcaacatctaactttctcaatctataatcatggaagtcctatttggaaaaaaagttatttccaccctgaacaaggaccatgacaaggggaaaaagtaattagaagctagtgtaaaagaccagcttttggtaattttgagctaatgagataggtagactatgcaggaaattcaatttggcattcaaagatatatagataaagaatttaaagagaaatcagttttctagcccccaaatagtttctcagataaagaaagtagaaaattttgacccacagcatgttattttcagaccaaatgagatttgtactttttccaaagtgttttgtgcgtgtttaaagttagaaagatgaaaaccccattagcaatagactatttttcatgactcaattaatatctagcatttgcag

SEQ ID NO: 813991 - DNA, 505 bp, Homo sapiens
gtaaaggaaggatcctgacagtgctattacagggagctgagaaacctcagaaaaaaagtcgtcacccaatctaggaaaatgtgagacggtgtcctgagggaggtgctgcagagccagctgggagaaacaygcaacatagttctttgcaatgtagtaaataaggctttataataacactgcctctccatattaagagtgtagcctaataatacataactaactcttatatattcttgctgccaacccctttccttgaaactgtatcaagtctcactcgcagtgagtcagaccaaccactcttggattcctaccttctccctggaattctgattatgatcttcccacaatcatgatgggtaacagaattcaccatacctttaccttggactacaggcatcttcttcagagaattcagtccttggggtctggagaggtttcatttctcccaggccctaccccaaccagtcttggtcagctcgtcccccccagagatgagagccaccag

SEQ ID NO: 813992 - DNA, 631 bp, Homo sapiens
ggggattacatgggatttgaaaatgctttataagttgtaaagtgtggtgtaaacagtaaaggttattattactaagttcagagaagggasacggcaatgtgtcagcaaacaaagcctcctctgaaaaacaacctaatcaagagcctcctgctcaaaaaccaccaatgacttcccagtgcctaaagcggaggttgtcaaactatggctcccaggccaaatccattcagttgcatattttataaataaagttttattggaacacaaccagagccatttgtttacatattgtctatgacttatttcttgccacaatggcagatctgaatggttgcaacagaaactgtgtggccagcaaagatggaaatatttactatctggccctttaaagaaaaaacttgctgactcctggcgtaaaggatagtctgaaccccagttaacacgtaaagcaccctgttatgtaaggcagaatttggatgcatgaaatgaatcagataccttcctctaagtcttcccctaccctgtacaacgttttgtagcaattcttaggaacagattccatatgaggttggcattacaaggtcctttcttagtgctacaatagggatcaggtctttttcctccttggaatctc

SEQ ID NO: 813993 - DNA, 623 bp, Homo sapiens
aacaagcaagataaatatccccacatcagggatcctattatataaatgayggcttatccacacaatagaataggagatagcagatatgtcttgcccaagggacctgcatctccagtctactttccaggaagaacagggtcatctgcttttagatcttaaattataccactcaatctcctttcttggagctctttagacaaaaaagcaggctctaaacaaggtgacttttgaaggccccatttcatatcatgtgtcaaagatattaaaaagaaaaaacctccccaaataaatacaacgtaaatacaactgcaaaactgttgagttgtagttgactagctaatatactgttcattttctaaatacttaagcaattatttcaattttgatacttaatactttaatgtcaattaacaaatatcctgagccaataaagtcataggccctgggttctgtacctacacggtcctaacgtgtaaactttcaaagcttaagtgaaaattgaactacatgaacaaatggccctgcagcaatcgtctcaggtaaggttttcattgcagaaatgggggtacatgagctatttgcaatatttcaaaaagcttaacagaaattgtacactcattcat

SEQ ID NO: 813994 - DNA, 651 bp, Homo sapiens
gtcacagatcaacaggatcccaaggcagaagaatttttcttggtacagaacaaaatgaaaagtctcccatgtctacttctttctacacagacacggcaaccatccgatttctcaatcttttccccacctttccccccattctattccacaaagccgccattgtcatcctggcccgttctcaatgagctgttgggtacacctcccagacggggtggtggccgggcagaggggctcctcacttcccagtaggggcggccgggcagaggcgcccctcacctcccggatggggcggctggccgggcggggggctgacccccccacctccctcccggacggggcggctggccgggcggggggccgacccccccacctccttcccggacggggcggctggccgggcagggggctgaccccccccacctccctcccggacggggtagctgccgggcggagacgctcctcacttcccagacggggcggctgccgggcggagaggctcctcacttctcagacggggtggctgccgggcggagaggctcctcacttctcatacggggcrgccgccgggcggagggtctcctcacttctcagacggggcggccgggcagagacgctcctcacctcccagacggggtggcggccgggcagagg

SEQ ID NO: 813995 - DNA, 582 bp, Homo sapiens
taatcacctgcaatcagacagacctgaaaaaccacacgtaggtttttaaccaggagctggaatcctcaagaactaagtgaaacccaaagcctatcctacctctgaacttacatgaaccaaatatttcttaagccgaagctgttatttgagcctaaatcattttaatttatatgttcctctatccatccagtagctcaaatcagaaaacctaagagtgaatcttgattcctgtttttctcatatatcactatgcccaatacatcagcaattcctaactagtctaccaccaaaacatatctaagatccatccccatttcctccaccttaactttccccaccttagtccaggccacagcacttctcacttagactacttcaactggcttctaactggtctcctgtcttgcacccatgctccattttaatctgtcctccacagagcagcaagagtgatcaggctggggatggtggcttactcctataatccctacatttaaggaagctgaggttgggggatcgctcctggmcaggaaggagttagaaaccagcctgagcaatatagtaagatcccgtatctacaaa

SEQ ID NO: 813996 - DNA, 455 bp, Homo sapiens
gaaaggtggagtcggagacagacgggacaagcagcatattcagggatcaggctggcctcccggaaagcgtgggcatcggaggaccccgcsggggctgcccaggctgagggtcgcggggctggagggcagctgcggcgccgggcgctggcagctggaagggccagcgctgacgtatgtctgccccgcggcccggcgccctattcctgctgtcctgcgcggtgggcgcggacggcggggcccctgcgggcgggcgcgttgacggaggtacccggtcctacccgaccctccgtggagctccgcccggagagggcgcccctcgggtgggcgggggctgctactgcagcgtgtgcgggagtccgggcctctcgggacgctccccgctgagcgcagcttcccaggctggagcgctgcccagcaggccctgcgagaaggcggaagggggtgcctgggaccgt

SEQ ID NO: 813997 - DNA, 635 bp, Homo sapiens
tttataacagtgtaaacatggactaatataataataaataagagtgcttctatctattttttatgttgatgactcgttatgaacaataacctgcattgaaaggagaaaacaacaatctaggaaaggaccttgtattatttgatttagatgaaaaataattatttaaattgtcttttttttttgcaactaccatattcccatgacaattttaggactctcctgatcatggatatgtgaaatacaatctgaaggctgttaggcttacactgattcttttaggaatttcagaaaaaaagaagtaccttacttctttagtaatacctctggttaaataaagtgtatttgcaggagagaaactggaatgtaaactccatgggatgaaactggagtttgtttgtttttttttaaaaaaggggttataatagcaagtgttacaaacatgagtgtgaaaaccatacttccaacccacactttcaatattagcttgaaacaataattcattaaaatggtcctttaaattacccccctcatattatttgcccacaagaaatcagattatgataaatacagagcatatgagtaactgtctcatgtagaaggacactgttgtmttcatacctttcccgatggtttat

SEQ ID NO: 813998 - DNA, 667 bp, Homo sapiens
tgctttctattatttgttaaagggctgattaagtacttcgtataactgaaattaaataataggcaaataagtatttaawctgagatataatggcataactgccaattatcaatgctgtttcctatatcccttaagggaatctactacaggaagattttaatatattgttttaaaagctttggtgtaactggactattgtctttaaagctacacctttaactcctccttatagccaggggatcatagtaataatcatttaaatcatatgttcttggaattggaagggacctagaagttgtctaatccaattttcatttctcatcacagcttgagtaattttaataataggaagtttccaacttccatgttctaaaatctatataaaccacatactatggtggtattttaattagggcaagaaagacaggcaaaacacaggcaaattgggttgtgtcaagaacattcatttaggattttaaagcaccagttacttaaaaatatatgtatttatacaaattcaattactttaccaagcgatgctatgggatagatagtactttaagaaattttattctaaatagattccagtaggaaactaaatgactgaaatgataaaccctactctgtgtaactgctaaactaatttgtagtatatttactgctccat

SEQ ID NO: 813999 - DNA, 307 bp, Homo sapiens
cttgggaggccaaggcaggagaatcacttgaagccaggaggcagaggttgcagtgagctgagatcacgstattgcactccagcttgggcaacaaagtgagattctgtctcaaaaaaataaaaattaattggatgtccacttctggctagaatggagtaacagtgaacttatcttctggctgaaaatggacaaaatgtatgagttgatggttttaggacactgggcatcaaacggtaaaggacagtaattcctgagaaaaaggaaagaaacgaagtgagccctccacttgcatcaactgatgagagtc

SEQ ID NO: 814000 - DNA, 307 bp, Homo sapiens
cttgggaggccaaggcaggagaatcacttgaagccaggaggcagaggttgcagtgagctgagatcacgctattgcactccagcttgggcaacaaagtgagaytctgtctcaaaaaaataaaaattaattggatgtccacttctggctagaatggagtaacagtgaacttatcttctggctgaaaatggacaaaatgtatgagttgatggttttaggacactgggcatcaaacggtaaaggacagtaattcctgagaaaaaggaaagaaacgaagtgagccctccacttgcatcaactgatgagagtc

SEQ ID NO: 814001 - DNA, 536 bp, Homo sapiens
caccccaaaaggcctctgctggcatttgcctgtgatgacaaagacggcaaatatgacagcagccgggaagccggaactgtgaagctgtttgggcttcctaatgattcttgagaggaggttgtagggagaggaggccccggcagaggtcttccttcatgtggttagtttggtctgttctctcggagttggtgggcaccctaaatatttgtaagttggtataaattgtaaacgtctctggtcaggctgcgcatttcgttcttttgctttgtctgtgtattagctctttccattctttgcccccagcatgagttaactcgcgtggactctgcagtgcgagtagtgaccccagcataccttgtcctctggacctcctgtcttctctgcttctgggtgcatggtagactttgtggcatttgatacaacttggacaatacctagtttggagggaggggaatggaagggcatggaagtttttttaaataattaaaaawatatacatataattttgagaattgagcatttaataaactgacttt

SEQ ID NO: 814002 - DNA, 536 bp, Homo sapiens
caccccaaaaggcctctgctggcatttgcctgtgatgacaaagacggcaaatatgacagcagccgggaagccggaactgtgaagctgtttgggcttcctaatgattcttgagaggaggttgtagggagaggaggccccggcagaggtcttccttcatgtggttagtttggtctgttctctcggagttggtgggcaccctaaatatttgtaagttggtataaattgtaaacgtctctggtcaggctgcgcatttcgttcttttgctttgtctgtgtattagctctttccattctttgcccccagcatgagttaactcgcgtggactctgcagtgcgagtagtgaccccagcataccttgtcctctggacctcctgtcttctctgcttctgggtgcatggtagactttgtggcatttgatacaacttggacaatacctagtttggagggaggggaatggaagggcatggaagtttttttaaataattaaaaatatatayatataattttgagaattgagcatttaataaactgacttt

SEQ ID NO: 814003 - DNA, 596 bp, Homo sapiens
cgtcccgagttcagaattttttttttttttgagatgcatatcaaggcacctaaagttcgagaaaagatgttcttcctgtgttaaggaagctgcactggggttaatttaaaaagatgtcagaagtcgcagagaagcggttctcaagcttttatggaacactgtcctgtttgagaatctgctgatattatggaccttcttctttctacaaaaatgtgtaattgtgcataaaatttccaatagtttatagtcacctacttaagacctttgctttagagtagattattactccccgctgtaaggtagggaagaaaaatattccattcctttcctctggttgatatctttttttcttctccttgcacagtccaacagacacactcagcctcccagaaagcagctggccccctggccaagaggccagtttgcagcatcgtgatcattccaccatctttgctgccatttgaatcttgaatcagctttgygtacctgtaataaattccacttagccatggcatgtagttttttaaaaatacattgttgaatttgatttgctaatgttttgctgaagatttttgtatttatgttcttgaaagatg

SEQ ID NO: 814004 - DNA, 502 bp, Homo sapiens
agtaaatccataccctgtgacaccatcttgctagaagtagaagtgttacctttttaatatattatttttccttcaaaacccacattagaaggaactttcctctgtaacaacaaccgacagcttgacaaagtgtgttcccattgtcctgtgattgctctgcttttcaaagtaagcctgcgaggtgggtgtcatgtcattcccattttacagataaggggacagaacctcagagaggtgaagagacttgttcaaggtcacacagtctataacggcagagccaggattgaacccatgtccccattatacttgtagttcccacaggggagacagaaccacatgaagggttggcatcactatatttttttttgggagaggtcaataaaggtgggctcagagagtaatakatcaaggcctacggggctaatgagcccaggagtttgtggagagtcagagatctccatgagttgttttcctaatgcccccttcccacacccaacccctt

SEQ ID NO: 814005 - DNA, 611 bp, Homo sapiens
atttattaagtatctaccgtatgcttggaatgcatttcaygtgcatcaacccacttcatatcacatttaccctgtgaggtaggttctgttactaattccatttacaggcgaggagtctgtgtctcagggatatggtggctagttcaagcccccgctgcattttatttatttgagatgagaaagatgttcatgggggagtcagagcctgcttcaatagaaatcatccagtagtttttattgttttgtttcttcccagggcctgctcttccacttggcaaattcggagctggaaggtggggtgggatggggacttgggaaagaaaacaaggattaaagacacaatggatgcccaagagaaaagaaaacttaattgtacatttttgtaataaccctgtttgataaccattgagagaactccaaatgttttgtccacctaagagcaaccctctgtcttcagggaaacaggagctgcatccccagcactgcctccctgcctgggggcgggcatttgaccctagctgtgccaatcatagcattccacctccacagcaatagtaattggtccaggcatgagcacatgactcaaaccaggccaatcacatccttttctg

SEQ ID NO: 814006 - DNA, 489 bp, Homo sapiens
cggagtagtttgattgaagccttccctcaactcgtcaaagtcattctctgtccagctttgttccattgctggtgaggaactacgttcctttggaggaggagaggcgctctgctttttagagtttccagtttttctgctctgttttttccccatctttgtggttttatctacttttggtctttgatgatggtgatgtacagatgggtttttgctgtggatgtcctttctatttgttagttttccttctaacagacaggatcctcagctgcaggtctgttggagtttgctagaggtccaatccagaccctgtttgcctgggtaacagcagcagtggctgcagaacagcagatttttgtgaactgcgaatgctgctgtctgattgttcctctggaagttttgtctcagagaagtacccggccatgtgaggtgtcagtctgcgcctactgaggggrtgcctcccagttaggctgctcaggggtcaggggtcac

SEQ ID NO: 814007 - DNA, 576 bp, Homo sapiens
tactgcagtcagcctgccccagcttcgccacttaatctctgtaagcttcagtttgctcagctctaaaacggagatgataagtatacttaccttctaggctctttgttaagattgggccagactatatagcaaggatttagcatagtgcctccataaatactagcgattatcccattactcctttgtaatctttggacctttttatccctgccttgtaaatcatagccattgttttgaaacttcattggtttaactcttacatttttaagtttacttttattctactctacatataataaaatgtacccaccagcaatgtgtcagagttttagttgctctatattcttaccaatacatagtatttgcagtcttcttcatttttgccattttagtgggcatatagctgtatctcactgtggttttaatttgcatttccctgacgatcagtcatactgagtatcttttcatgtgcttatttgccattcgtwtgtctatttttgtgaagtgactgctcaaatctgccaatttttaattgattgcctgatttcttattgagttgtaaattctggttcttca

SEQ ID NO: 814008 - DNA, 575 bp, Homo sapiens
tctaactttttcatttttattcattttatgtggtattcgtttatttgattttgtatggtatcaaattagataagacatttaccaaraacagcaaaaccttaaaaatagaaatactgaataaatacctttgaagaggtatggggaaaatactgaagaaaatttagttcttgtcaagtgaggactaaagctaattgtgatcatttaaatatgctgacacgcaaaaaagtattggtagactcttccccattctgatgataatagcagtttaaaacttggttgagtggaatatatatagtaatattaatatgtttcttagaactctaaaattatagttgagaacatgactccacccaaagataaaatgatgcaacaaactcacatacccctttgcaacataatactttgcaatgagaagtttggtaagttatttaacctctccccactcccaccccttgccatttctctttttacgtaattatgaaaactggatagtatatcaattttcaaaagatgaacaaaaacctttttaattattaaattgctgtaagattctaagtaattacagtgagagtagt

SEQ ID NO: 814009 - DNA, 575 bp, Homo sapiens
tctaactttttcatttttattcattttatgtggtattcgtttatttgattttgtatggtatcaaattagataagacatttaccaaaaacagcaaaaccttaaaaatagaaatactgaataaatacctttgaagaggtatggggaaaatactgaagaaaatttagttcttgtcaagtgaggactaaagctaattgtgatcatttaaatatgctgacacgcaaaaaagtattggtagactcttccccattctgatgataatagcagtttaaaacttggttgagtggaatatatatagtaatattaatatgtttcttagaactctaaaattatagttgagaacatgactccacccaaagataaaatgatgcaacaaactcacatacccctttgcaacataatactttgcaatgagaagtttggtaagttatttaacctctccccwctcccaccccttgccatttctctttttacgtaattatgaaaactggatagtatatcaattttcaaaagatgaacaaaaacctttttaattattaaattgctgtaagattctaagtaattacagtgagagtagt

SEQ ID NO: 814010 - DNA, 641 bp, Homo sapiens
tttctttctgtgagtaagtttataaaactgtatttattattttaaatgtctcactatttcagtagctgggaatacaggtgcccaccaccacgcctggccaattattgtatttttggtacagatagggtttcaccatgttgcccaggctagtctcaaactcttggacttaagctatccacctgcctcggcctcccaaaatgctagaattacaggtgtgagcaaccaggaccagcctgaccttgtctgttttaatgccattgatttctaggtatcatgcctggatattgtaatcatttgcctggatattgtaatcattggcacttgaataaatgaatgaatgagacctgcttatcttagtctttccttaagagatttagggaaaggaaaaagttaatggctcatgccttcagtctcgggtactcaggaggccaaagcagacttgagcccaggagttggagaccagactgcacaacatatggagatcctgttcccccaacaaaataaatttgtctgggtgtggtagctcatgccygtgatcccagcactttggaaggccaaggtgggaagatcccttgagcccagggatttgaggagtagcctgggcaacatagtgagaactcaccgtacaaataatttaaaaa

SEQ ID NO: 814011 - DNA, 615 bp, Homo sapiens
catatatagccttgggaagaaacttgacccagccctgcaaagtattgcaacttagctagcactgtaactgagtcttcaaaaggccattccatcattctaccaagccagctgtttcaggatgatggggaatatggtaagcccagtgaattccatgagcatgggaccattgcctcacttcatttgctatgaaatcagttccatggcagtggatacagtatcctgtaagtccagggatgatagttctggcagaagcattgtgtgcagggaaggcaagtctgtatccagagtaaatgtgtattccagtaaggacaaaactctgcccctttcatgatggaagcaatccattgtagtcaacctgctgtcaggtgtctggctgatcattcccaatatggaatggtgccatattggggcctcagtgttgatctctgctcctggcagattgggtgctctgcagtggctgtagccaggttggctttggtgagtggaagtccatatttctgagcctgtgcataacctctattcctgccaccatggctactttatkagcccatttgtgtgatgacagtggtgactggggaaagaggctgacttgtaggcacagaaggagtcatttta

SEQ ID NO: 814012 - DNA, 609 bp, Homo sapiens
aaaatatcatctctcacttatcccttcaatgagtttataatctaggacgagatgacaaatacrttctctcatgtgtaaactccatctgattgatggtagctgtctaaagtgttgtgctgaaagggatgctaaggctctttttaggctctgaaagtattacgaagattcttattgtctaacctggtcttaaaatagggaatagaacacgtatgtgatgcatttgctatctcttggccaggcagacagaggaagtgggactaacaatcaccagcacttgctttgcatcaggtgcttcagacacaattgcttaaatcctcataaatacaaagaggtaaaaattaccatctacattttacagatgaggaaaatccttctctgagaaaataactggttactatttggagaaagagaaaaacaaacaatgactttgcaatggagggaagggaaggcagtgagtgtgtagacgactattcatacatatgaaaagtgtgagtcagctattgccattcaggaagagccaatgtacacagatgtcttcctatcccagttttcaacatttcttatatttaagtttcacaaatattttgcagtctaaattgtctcattctt

SEQ ID NO: 814013 - DNA, 528 bp, Homo sapiens
gagacaggaaacagtttttatttgagggaaaatgatatgaattattttgcttttaaagaacattataaaaaattgagatgaaactttctctaagattataatgacayagatgatatatatcatgctggattacacaataggatatagttcaaattcctaatatctttctttcacaacatcaaagaaattctttgaaaagtataaagccccactatttacagctgtgggtgacaggattgtaatgaagtgataagatactatgtcaaatatagtgatggcctctctgtctggtcctattgagtgagaattttgaccaattcacgcaataattttcctgtttatagagtttcagttgatgttctgacattccatttttcttcatatatatatatatatatatatatatatatatatatatatatacacacacacacatttctttatacatttctttatatatatgtgtgtatatatatatatatatctcttggataaactaaagagtgtcttaaaggttcattttcttgt

SEQ ID NO: 814014 - DNA, 609 bp, Homo sapiens
aacatttttcaccatttttaatcatctgagatacactgtatctgagaaaggcaatttaactgaatacctggaggacaaatggagctgatctgaggagtagaataagagggaaggagtgtgrctcccaccctgagtgcagaggggtgtgtgtgttgtaacctcaagaaggaagattgaagattggttggtcagggtctcactttattagatttcttaggcatttttgagttttgaaagttctaacagatttctttcattgtctttaccattaagttttctttcttatatacctcctttccttacttttgctttcctctatttcaaaataattaatagtactcggacctcctacacaatggttctcaaatagattctacactcagttaagaatacaatatgaaaaggggagagagaggaagagtcaattaaataacaatagcctagaataactgctattttaaggataacagcatgtaattcaaaagcctggaattactcaaaagaggcagcccctgaggaaatatagaccataatccataaaaagtaattaaaaccttcctggtatactccaaagtggtcagaagaattcaattacaaacttcatagtta

SEQ ID NO: 814015 - DNA, 669 bp, Homo sapiens
aggaaaggggtgtttccttataccaggcatttcctttattcttccttccatcagtagagagaagagtcagctttcacctgtataggatctaggaatctctctaggggcattctgattacctcctagtaacataagttggagagggaaggagaatagtctactcaatttggtggtaaagacttccctttttttcccctcaagatggtggattggaggcattgttagcatgcctgtcccacttagaaagacaaaatagtatatagagattcacagtgtgaactttattccaagaagcaacacacaaacttaacaagaaaactgaaagaaaccacagatcctttgaatgaagtgacagactacagcctacaccatgagccacgtggaaaactgcagaagaccacagtgcccaggaaggagaaaccttgtatgtgacctcagctatcaccattgcctgaatcaccctggctagataaccagaaggtcctaagtctgtcacatgaccagttcattactactatagctggaatttgagagccaacactgtaaggttatttataaccaaggaatctcacagagtctatatcactcccctgctgtccctatcagagctggtgctggtacctgctgctaggagacttgaggasagttcacacgtctggatcctttgca

SEQ ID NO: 814016 - DNA, 592 bp, Homo sapiens
ttctgtctcagtgtaagagaagtgagtcatcctgtgtttgttcatcccctcatacaagaggtgtctttggttgatacacagatgacagtttctccagtttcctggtacttggataataaacaaggaaaagatctggagacccaaatagataaactagttgcttccatttcatatagtcattaaaaaaaaatgaagaagtcatggttcctacaatccagaaacttttaatctagactagcaactgggtaaataattaaattaagcatcatatggttggtccaacaaagagatgtgtccaaaatcttgggctttatttaggccactttctttatattgctgtgacttctgttggctacacctgtagggatattcatgaacagaattgttattaaatatatatgtgtgtgtatgtatgtgtatatatatatatatatatatatatatagagagagagagagagagagagagagagagagagagagagatagtctcactctatcacccaarctagagtgcagtagcagaaactcggctcactgcaatctctgtctcctgggttcaagtgattctcctgcctcagtctcccgagtag

SEQ ID NO: 814017 - DNA, 588 bp, Homo sapiens
ccaacttcttaaagccaggacagcaggggctgaggatttttaaagttggcaggggccaaaaatgacaaggctcagcagtcacctggtgagctgccagccctgactggaagcttcaaaaaataaaactttctcaaaggacacaaattaaaagtcatgtttcagcatccattaaaacgaaattataggcttcatcgcatagcaaactactttcattttcattatgcttaaaatatttcattttgtagattgagaatcggttgctaggaaaaccttgtgtggagttgtcagagacagcgatatctacaaggggatattttccaagggagagctctcctttgtttttcctgcaaggatagaggattttgttatttaaaaaaacgcaggatgcaatttggagtcggggtcatggcttgaaaacatctgccatgaccttctccagagaccgagtcctcagggttcatctctcagaggaaagaagttagcaacctgctgagctgagygggctcacaggtgtgttttgttcactctcattttaaaatagatatatatgtgtatattacacatatacacatatatacacacatacat

SEQ ID NO: 814018 - DNA, 650 bp, Homo sapiens
caagcaaccctctcatcttggcctcccaaagtgctgagactacagacatgaaccactgtggcaggccaggtatctgaaattttaaaagaagagtttacttaattcaggaaaagaagtgttgtggtgactaaaactaaagatgattttctccataaggtaattaaatgcctttccagtggacaatgggggaaaacaatgaagttttcaaattttcctttttttcaaagtggaccctccgtcatcgccaccctagcaatctgagtataggccacacatcttggaaagtagatctatctaccaggtctgccctttagaatggccacattctacccaccgtatcttctgtataaacaattgaatgtcataaacaagcactttctctggcctatgcacacatgctttcccagccttaaaataatccatttctgattctcatttagaccaatgataaatacaacatttttcattttagatgtgatcatgcaccatattaacacgattgctcgaggaagatagtctatatctgttgaytgcacaacacttttcaaaatgctcactcatatttcatccttattcaaaggcttgaaggtagagaggggaagctgaccttccttcatttacagtggaaaactaatacagaacaattatgt

SEQ ID NO: 814019 - DNA, 469 bp, Homo sapiens
ccatttgctggttatatttgtaggcagcacactactgaaatgcaaagaggcttttccaaatataaccctatgcaattgctttcttttaccactcaggttaatggaaacttattttgctttctrtggaacttggggttgattttgctttcttttactttgtctttcatgaaggaagccaagaaattttaaatggtgcacattcaagacccaagattaccagtctagcagcagctctgcctgattctctgcgttttacacatttgacaattatctccctttatggattagagaaagcacatccttctcagcaagtggttcagtgaaacttccattagtgaaagaggcactttgtcacagaagcagaagtgttcttgccatagtggaaaggaaaagatgcataacttctcatattaaaacagaggcttgctttaaatggtaaggaaagaagaggatgtagagaaattggaac

SEQ ID NO: 814020 - DNA, 527 bp, Homo sapiens
ggcctcccaaagtgctgggattacagrcatgagccattgcgcccggccgagacaaggtatatttttatttcacatgtagaaagttgggctctgcgtgtatatttaatgttttggtttgttggtgatggtggtagttccttctgaagaggcaaaaggagcaaatgactaaagcaaaagaaactaacaaaaagagaataatggtgatataattttggagataccctaaaaatagttttctgttactgttttaaagtatttctaacaaagaactgtaccttttgtttttcagactgctctggcccatttagagtctcttgcagtggatgttgaggtggccaatccaccagctagtaaggaaagcattgatggtcttccagagacccttgttcttgaagatcacactggtaagggcaaagttgatctcaaatgttgaagaacacattgtacatttaagtatattatcaatatacctagataattaaatacttgattattagaaactttcactagattttttttatagaaac

SEQ ID NO: 814021 - DNA, 609 bp, Homo sapiens
ttaagcatctctctcctctaaagcttatcagcttcttcacattttagtgctctgatttaatttatttgaatttgattgagatgtttcactcctagaaaatcaatacagttgtcttcctgtcactcttcagaaatctgtttttctgtgttcagtatgcatttatttaatcattttttaaaatgaaacaaaaataatttatgattatttcttttatatttaacactaacactctttaaatgaaacaaaaacaaaacaaactgcttgtttttgtttgtttgtttctcaagcagccctataactttttggaagtagttgctttcatttctgttattttcccaatactagattggtcattgttttcaggtagtggcttttggtgaaaatactggcagtatgtatttgtctccttatatctgtgtctctaatttgagtgaggagagggtaaaaccttaaacgtctttaaccttttgaaacttttytacttttcaaaatggattttgaaaaaatccccttgcacatttatgttgacatctaaaatttttcagcataaatctaggtagtattagttattttatcatacttcttcgctagaaaaatgtttaaaatttt

SEQ ID NO: 814022 - DNA, 559 bp, Homo sapiens
tagagttcagtgctatgggtggttcccaatgctggttgcccatctgaattgcctggggagtttataaatgacatatatttagagctcccatcttggatattctgattatgaagtctgatgtggggcccagaaatcttcagttcatagaaattcaagtgattccgaagtacagccagcttcaagaaccattgctctgggccaatttcatcctccaatacagaagaacatctgcgacaccccacggaaacatcagtgccatggagttcccaaggtcattcgtcccactagtgggcaactccaggtacaaattgcatcctattataatgctaaaatcaatccctttgtacctctccactttaatactaactctgtgcccaggaacaatatgggatcagttttttccccctctttttaaaaatcgtttttgttttgcagctggggtgggcaggaggaaaggcccctcagctctttcctcattggcagtgtttytggacattgtccagaatggtaatgagtgtttgaaatatgctctatgaagccatgtttgtggggtaactta

SEQ ID NO: 814023 - DNA, 607 bp, Homo sapiens
taggtggtgttaacttgactttcctaaactcgtaataacttttagatttttttcattccaccacacaacattcaaaatattgaaacatcctaggttaatctaaaaaatgactttacagaagatagttttacacaaaaataagattaatatggaaggccataacgactttctgacattttaggttgcctttctgcaatcactaacttcttttctcttaagaatggtaataactaaattttattatgtacctatcacttgccagagtttattattaataatttataactattaacttacttgatacaaataaatctataaagtagaattcacatttatcatgcatacatataatgccaaggaactgaataacaaatcctttaccaatggctacacatacaaaaattggtaaagggaggacttgatttagagagcttcagaatccacaatacttaataactaacttctgacacatttcaatcccagaaattcttaatagctaaargcatcaccataattagaatagtgaaaagtattaatgtacaagaaataggtttagactttctcactgtgaaagcacaaccccaaattcaaatatcagagagttgaa

SEQ ID NO: 814024 - DNA, 520 bp, Homo sapiens
ccgcctcccgaagtaaacaggacagccctttctgagcaagcatgagcagagggccggggagcccagaagtcgccactgtcctgggcctgctgtttctgcagcagatggcccagtcctgagttcccttctgcgctctacctccctcattcctcctccagctctgctgctggagtggagctgtctcttaggcaaggctcctttgctctcctgcatttttgccactctggtctttaaacatctaaaagcctgtcgtttctggggtggagcccttggtgaggctgccgtgggcctcaacccaccgggcagcctgggagttacgtgctgctgcggacagagcacctgaagatacggccttcagggccatgggaggctcagggccaacacttaccggtgcgggttttgrgactgggtgtcagaggacaggggtgctgctgtgctgaggacgggtggggcagggtgggtggcccgggcgtcaaaaggcatggatggtgctgtgctgaggatggggttcagggtggcg

SEQ ID NO: 814025 - DNA, 616 bp, Homo sapiens
gaggtctctgaaatgcttctgaggctgttttttcattgtcttgtcaattagcaattgactcctttttacctgggcaaatttytgcaacttgcttttaatacctccccctgaaaatggatttttcttatctactgcatggccagattgcaaagttttcaaatgttgaagctctgcttctctttcaaatataagtttcagtttcaagtcatttctttactcaggcatatgagcataggcttttagaagcagttaggtcaaatcttgaatgctttgctgcttagaaatttcttccacaagataccctaaatcacctctctcaagttcaatgttccactgattcttacagcaggagcacaatgccgccagtctctttgttgaagcatatgagagtgacctttactccagttcccaataaggtttttatctccatatgaaacctactcagcctggacttcattgtccatatcactaatctgcattttggtcacaactatttaacaagtttctaggaagttcaaatttttccctaatcttcctgtctcctgagccttccaaaccctcacagctgcagatgattaccagttccaaagctgcttccatattttaaggtatcttc

SEQ ID NO: 814026 - DNA, 616 bp, Homo sapiens
gaggtctctgaaatgcttctgaggctgttttttcattgtcttgtcaattagcaattgactcctttttacctgggcaaatttctgcaacttgcttttaatacctccccctgaaaatggatttttcttatctactgcatggccagattgcaaagttttcaaatgttgaagctctgcttctctttcaaatataagtttcagtttcaagtcatttctttactcaggcatatgagcataggcttttagaagcagttaggtcaaatcttgaatgctttgctgcttagaaatttcttccacaagataccctaaatcacctctctcaagttcaatgttccactgattcttacagcaggagcacaatgccgccagtctctttgttgaagcatatgagagtgacctttactccagttcccaataaggtttttatctccatatgaaacctactcagcctggacttcattgtccatatcactaatctgcattttggtcacaactatttaacaagtytctaggaagttcaaatttttccctaatcttcctgtctcctgagccttccaaaccctcacagctgcagatgattaccagttccaaagctgcttccatattttaaggtatcttc

SEQ ID NO: 814027 - DNA, 602 bp, Homo sapiens
cagagcctgtggagtgggaatgtggggtcagtagcccagacattgctagtccaggtcacctgccgtgagccaccagcaggtcactaccctggctccaggcacagttctcggccttgggctactcgtccaggaagggagaggtgcccatccggctcagtggggggctgggccagccccgggaaagcctgggtcgggagaggggcagggcagtggtggctctctgggcaactggcctgcccatgtcttccaaggtcttcccaggcagccacagggcctgtgttctctcacattgatgaaaatggccagaaagagggtctgggttcaagagggacctcctgacctggggcctgggctgtgtcctgcccatggaagtctcactcctcccttttctgtaccactgaggagtcccaccagggagagggaagaaagcgtggaaggccatgagaaagaacagtggggagcagcccagtgtcatggggacaggcccttgggcatagggccgggcccgggggctagcctgggkagggagcaaccatggtagcgatggctgagttcagcctgcccagagctcagatcattgatcatcaaaagcaatcgcagct

SEQ ID NO: 814028 - DNA, 659 bp, Homo sapiens
ggaggagagaggtgatcggccagagtggatccagtctgcaggacgtggagaaggggctgmccactgcagggctcttattccagggttctggaaataaagtggtgacggggaggatgcgttgtttgtctgcataactgatttcaatttgagccagtgtttacatataggtaggtgtctgtagaatccagatttcacgattgacctgagaaatctgatccagcagctctgggcctctgttcctgccagcactgggcggatgttgctcccttcagctgtgcctgggcacctgggtttgccacagtcctcgccactccttatcaccgacccccactctattctaatagggaaatattcctctgtaccctttctccttcaaaactgggaaaacacaagatggacttacttttcgtgcaaccagcctgcctcattgacttgtcacctgccttgctcctgtaggcgcttgggtttctagcatcctcccggtactccccacaagcccacacactaggatagcggacctccctgcacacccccagcctgcctcagcctggctcctcccgcagctctgtcctacacactagcctcattcctgcctctggtcctgatattggggcatgtctttctggctggactcttgactcctcctcaaagacttggcc

SEQ ID NO: 814029 - DNA, 659 bp, Homo sapiens
ataatattagtatatgtatgtcccaaatattgcatgggacatacttatactaaaatactattatttatctgaaatttaaatttaactgggtgtcatgtttttgtttgctaaayctggcagccccatatggagaggtttttggttttttacattatgtgtacagggagagtctctctgagaagataaaattttgagttaagacttaatgaggacagagaaccagctattgacggatctgactgtagaatttcaggtagaaggaacagcagatacagaggtcctgaggcaggaagcagcttgactgggcatattcaaggacagaacgataccactccaaatagagtagagcaaggtgggtggggttggtaagagatgtagtgaaacaaaaggtcagctaagggagtgggtcctatagccagagtgagagtccatgtttcctctaaatgaaattgggagacattagaggtcttttttaatcgtgagggtaatgtgatgtgatttactaatactaatgccaggtattaataaatagcctcacagggctattttgaagattaagtggaaaaaggacttagctcagtgcctgtatatagttgatattattgttatttggtagacccagtatttcccaagtatatgaatactatgctttggaaaaa

SEQ ID NO: 814030 - DNA, 574 bp, Homo sapiens
atgatcatgctactgtactccagccttggcagcaaagtgaaaccctgtctcaaaaaaaaaaaaaaaaaaaaaagaaaaagaattcttggttccagcactttgagtatgttaccccactgaccttggctaccattgtttctcaggagaagttagtggtaaatcctgctgtggttcccttattcatgtcaaattgtttttttcttgttgtttctaagattttctctgtatcttcagcaggtttactacaatgcatctctgtgtgtatctctttgtgttgatcctacttgttatttgttaagctcttgactatgcagatgaatgcttttcatcaaatttgggatgatttcagccattatttcctagaatttctttctcctctctctttctctctctctctgtctcctcctgattctacagtatgcacgtttgtgtgcttgatcacatsccacaggtctctaaggctctattcatttttcttcttttctctctgttctgctggttgtatcacttctattgatctactgtcacgtttgttattttttcttctgctagtccaaatctactgtttaagccc

SEQ ID NO: 814031 - DNA, 524 bp, Homo sapiens
gtgagagtgccaaggattgaacattcatctttgtcagactttgatgtagaatctcccaaaataatgatgagctaaagcgtctgggagacagcatcagcctgtccaggtgctctcaggtgcaggcatttccaccmcattcattcgttattgacacgttcatgcattttcagtctttttcctacccatgtatattttacataattgaaattatattgtgtgctgggccgggcacggtggctcacgcctgtaatcccagcactttgggaagccaaggcaggtggatcatctgaggtcaggagttcgagaccagcctggccaacatggtgaaaccctgtctctactaaaaatacaagaattagctgggtgtggtggcaggtgcctgtaatcccagctacttgggaggctgaggcaggagaattgcattaatccgggaggcagaggttgcagtgagctgaggttacaccactgcactctagtctgagcaacacagcaagactctgtctcaaatatgtgtatatatatat

SEQ ID NO: 814032 - DNA, 617 bp, Homo sapiens
tgaactttgttactaattattttggttatcctcaggtacaattcatataaaacaggtagggtagtagaagtgcttgatttttttatcaattgcagaataataggtttgttccttagcatctcaaagtgagttgtttgattttgatattattgtggtgggcttttaatgtgttttatatttttcagtcagttgtctttataatttttgtagtgctcaaattgttccattttggctaagtaacttcatattttttgttgtggttttgtttttttcaacccctttggtagttagttagttaattgctttctggtatacaatattccaggcccattttgtacatttcctgcctcagacctgaaatcaaccatatctctatggaagcctgtttccttgaatgggagtagtattttaatcacagtctagggcctagggaccatactttttaagatgataaaattttggctgggtgcagtggctcatgcttgtaatcacagcacttggagaggctgaggcaggaggaccacttgaggccaggagtttgagatcagtctgsgcaacatagcaggaccctttctctgccaaaaaattaacaaaattaacaaaagaagtagttgggc

SEQ ID NO: 814033 - DNA, 284 bp, Homo sapiens
ggaacttgcaaaactggaaatttctctgagtgaatcagtgggtgagtggtgagtgaatgtgaaggcctaggatattactgtccattactgtagactttaaacattgtacacttaggctacactaaatttactttaaaaattttggccagccatgttggctcacgcctgtaaacccagaagaggcaggaagatcscttaagcccaggagttcaagaccaacctgggaaaatggcgagattcccatctctacaaaaatagaaataaaaaattaaaaatgttctttc

SEQ ID NO: 814034 - DNA, 482 bp, Homo sapiens
ttttttattaccccaaaaagaaaccacatatctatcatccatttccctcaatccttccgtcttctacagctgtggaaaaccgctaatctactttactccgtatacatttgcctattccgaacatttcatacagatggatatattccatatgtggtcctttgtaagtggtttcattcacttagcataattttttcaaggttcctcatgttggagtattcatcagtacttatttctttttgtcaataaataatattcaattgtgtgtttccaccattttctttatccattcattagttgatagagatctgtgctgtatccatttttttctattatgaataatgctgctatgaaaatgaaygtatacatttttaagtatttattgttgttatttgcctggggagtggaattgctgggtcaaatgataacttcatggttattattttatgtcactgccagacttttttccaaagtgactactagtt

SEQ ID NO: 814035 - DNA, 285 bp, Homo sapiens
taacagcgctattataagactctcaaagatgcaatttttaatgccatttgtgaagttgaattctccacggtaaaagagtattgcatgggaatgtcgggatagatgctgagaagtccatacactttctacatgcagatatgtctgcagatgtttaagagctccagatggctgagctttttaaggtaacattcyccacgatgtgcccattctgggcaccagaatattggatgaaatggtataatagaatctgtgccttttggccaagatctgcatatcataaaaggt

SEQ ID NO: 814036 - DNA, 534 bp, Homo sapiens
gagtgtgatatcgtgtgtttgtgctgcgctgtgatgggtatgtggttctacgaccttcactgtaattctctgagactccctcctgaacgttgctgagaatgtgacagtggcctgtgtcaccctctggctggtttcatctctgaggctgtgcagcggggcggcactgcatggccttctgtctgtccctgggtgtttttgcctgtgtgacggtgttgcgcggtcagtcaggactgggcgctatggcagctgcccaaaatatctccagctgcctgccgcgggccaggccccatcccagggtggggtgtgggtggagtttggtccatccttgcccttgggaaacccatgtcatggagggatggaaaaggcctgtgaaaacctcctctgtgtctcagacggtgttggacstccaatatccacccaggatcttacccccaaatctaatccctcaacccaaatctgattcatcagcaagtaccctcacagctcctagccccatgggagagaaaaaaagaagagaaaactgtcaaatacatt

SEQ ID NO: 814037 - DNA, 623 bp, Homo sapiens
aagtatttttatatagtttttgacatcatgatgcctgaaaatgtmtgtggatcacattttgaaaatggcttaagtaggtagggtattgcagatgccctgaaaaaattgatagtagagagatttactgggagcttactatatgccaggcaccttgctaagcattttacatcaattaccctttataatctgattaacagccctctaatagagctactataattatctccaatttatgggtgagaacactgaatctccagccaagcaacttgttcaatgtcccacaaataatgccaaagacaagctttgaatttagagatagcctgactccggcgctccatgccttctcccccagcagagcgtagcctcctcccacactcaaccccaaaccttggggcagaatcagcaaagaagggtagtagtgagggacttggggacttttgatgtggtttttgtgattttttattttgtatttggcatgcaagctcttctgtgatttgcaatcattctacagctaattctaggttccttcatcctggatttgttaatttacatccctattcctgtatacccaacatgcttctgttatgtctgctgaaaatgttgctttttcaaaaggagatggg

SEQ ID NO: 814038 - DNA, 496 bp, Homo sapiens
tttgtgactctctgtaacgggttctytgctaaaataaaatcacctacaaatgttttaaaattattggctgtggttaaagttttgttttgaacctgctaggaagtttttattgttgttggtagggcttcctgtttaagaaaagggaaaagtctgggaccctctaccaatatgtttcattttatctggaggcacagccatgaaaatccatatactaaagaggagcgaaaaggcatctttagccatgagaaagaactaattttcagtggggaaaacagagccaggataaaatttagagggaaagaaagcatgtcctaaagcaaaacaccacatgaaaaggtgcatgaaatacacatctagagagctatatttaaagctgggagtttgaagcaaaattgaggaatggctgtccctcagaggtttattaatgatgctgagagctttatctctaggtggcagtttggaagcaccgcctccctgtcagtgactggaaaccatc

SEQ ID NO: 814039 - DNA, 573 bp, Homo sapiens
gtatagaaaaacgtatggaggttactcaaaaaatttaaaaaaaacactaccataggatccagtaattcaactactgagtatgtatccaaaggaaatgaaataagtatttcaaagagatatctgcactcccatgttttattgtatagctatcacaagtcaagatatggaatcaacgtaagtgtctaacaacaaatggagaaagaaaatgtggtatatatacataatggaatattattcagccataacaaatggaatcctgctatttgtgactacatggataaacctggaggacgtcatgttaaatgaaataagccagacacagaaggacaaataccatgtgatctcattcatatgtggaatctttaaaaaaaaaagttgatataatagaagcagagagtagaacagtggttatcagagattggggagaagaaggggttaggaaggtggggagcagttggtcaacgggttcaaagtctcaattagattgraccaatgaattctggtgttctgttgcacactagggtgactgtggttaacaggaaaacattgcatattgcaaaacagctagaagag

SEQ ID NO: 814040 - DNA, 573 bp, Homo sapiens
gtatagaaaaacgtatggaggttactcaaaaaatttaaaaaaaacactaccataggatccagtaattcaactactgagtatgtatccaaaggaaatgaaataagtatttcaaagagatatctgcactcccatgttttattgtatagctatcacaagtcaagatatggaatcaacgtaagtgtctaacaacaaatggagaaagaaaatgtggtatatatacataatggaatattattcagccataacaaatggaatcctgctatttgtgactacatggataaacctggaggacgtcatgttaaatgaaataagccagacacagaaggacaaataccatgtgatctcattcatatgtggaatctttaaaaaaaaaagttgatataatagaagcagagagtagaacagtggttatcagagattggggagaagaaggggttaggaaggtggggagcagttggtcaacgggttcaaagtctcaattagattggaccaatgaattctkgtgttctgttgcacactagggtgactgtggttaacaggaaaacattgcatattgcaaaacagctagaagag

SEQ ID NO: 814041 - DNA, 406 bp, Homo sapiens
gcttccctattattaatatcccccactgcagtggtacmtttgttataatttatgaaccttcattgacacatcgcaatcacccaaagaccatgatttacattagggctcactcttggtgttacctgttttatggatttggacacatgtataataacatatatctaccattatagcatcatgcagaggagtttcactgccttaaatattctcttgttctatatgttgtacgggagttaatataccttttctctttacgttctaggttgatgtttgaggatgttataacaaaagacagattagcaggaagaaagcatgcaaatttagtcacatccaaacatatgtttttctcttgataatctgaacttggaaaataactggcaggaaatttttaccttcttttctcaac

SEQ ID NO: 814042 - DNA, 526 bp, Homo sapiens
ttatgtggaacccatatgtagtgaccctggtctttcctaggctyagcccttccctttctcagtatcaggaagccaaatctcatggagctgtgattttgtgccaagttcatcagggagcactggattaagattctcatgttgacagcaactttgtcttgtgaaggtgcacaaagcctgccttatgcattcccttcacacctgggaagactggagtatatttctatttgtaaacatatatgcctcaatacatgtaacaaacaaacagaaatgtagtttctttgaaaataatctactgttacccttccatttcaatcatatggtgagttttgaatatatttttctttccagagcccatgaaaaggtgtttattctccccttctcttttaaccagctgggtgccaacattttctttccttctcttgatctgacgtaagttcagttttggcttctgtctgctattccagctggtaacctgcaggtagttggatgaaagaagctttttctcaactcaggcaatgcaccaagt

SEQ ID NO: 814043 - DNA, 526 bp, Homo sapiens
ttatgtggaacccatatgtagtgaccctggtctttcctaggctcagcccttccctttctcagtatcaggaagccaaatctcatggagctgtgattttgtgccaagttcatcagggagcactggattaagattctcatgttgacagcaactttgtcttgtgaaggtgcacaaagcctgccttatgcattcccttcacacctgggaagactggagtatatttctatttgtaaacatatatgcctcaatacatgtaacaaacaaacagaaatgtagtttctttgaaaataatctactgttacccttccatttcaatcatatggtgagttttgaatatatttttctttccagagcccatgaaaaggtgtttattctccccttctcttttaaccagctgggtgccaacattttctttccttctcttgatctgacgtaagttcagttttggcttctgtctgctattccagctggtaacctgcaggtagttggawgaaagaagctttttctcaactcaggcaatgcaccaagt

SEQ ID NO: 814044 - DNA, 601 bp, Homo sapiens
tcattgcctcccctcatcacccccataccacgttcacrcccttccagatggctgaacctgctcattttgacttccgggatcattttctcccattggtctggccaagcacaggtggtgctcaggcactcgatgtgtctcagcacacacttttattctgaaaacatgcattcgatgttccatcttctgcagtaattactggtccctgtctacttctctgtatttgtccactttcacactgctttaaagaactgcccaatactgggtaatttataaaggaaagaagtttaattgactcacagttccacatgtctggggaggcctcaggaaacttacgatcatggcggaagaagaaacaggcaccttcttcacaagccagcaggagagagaagagaaagtgaagaggaaagaggcctttatgaaaccatcagatctcctgagaactcactcactgtcatgagaacagcacagaggaaatggccccatgatccaatcacctccctccttcaacacgtggagatcacaggtccctcccttgacacatggagattatgattcaagatgagactatagtggggacactgagccaaaccgtatcactgtc

SEQ ID NO: 814045 - DNA, 601 bp, Homo sapiens
tcattgcctcccctcatcacccccataccacgttcacgcccttccagatggctgaacctgctcattttgacttcckggatcattttctcccattggtctggccaagcacaggtggtgctcaggcactcgatgtgtctcagcacacacttttattctgaaaacatgcattcgatgttccatcttctgcagtaattactggtccctgtctacttctctgtatttgtccactttcacactgctttaaagaactgcccaatactgggtaatttataaaggaaagaagtttaattgactcacagttccacatgtctggggaggcctcaggaaacttacgatcatggcggaagaagaaacaggcaccttcttcacaagccagcaggagagagaagagaaagtgaagaggaaagaggcctttatgaaaccatcagatctcctgagaactcactcactgtcatgagaacagcacagaggaaatggccccatgatccaatcacctccctccttcaacacgtggagatcacaggtccctcccttgacacatggagattatgattcaagatgagactatagtggggacactgagccaaaccgtatcactgtc

SEQ ID NO: 814046 - DNA, 507 bp, Homo sapiens
gtttttgcttagtcaaagagcacaggccatcatttgttgtagtgtcrcccgtaaagcttaataagtttaaagttcagggtgttaatcattacaagcataaagtatgaatatgctttaaaggtttatttaagaaaagaattgggattagatttgcccaccagaatatacatttttcacttgaagtcctgagagagattcagacagaaacagctttgactcagcagcagttagcaaacaaacatcttgatataatactgatccacactttgcatatacactttcttttctttgtattacatttttagaggtaagtggcagtttttcacacacttccaaactgcttccatcagtaatgaaatatttggcttgggcagcctctggagtcccagtgtttcagcttaaactttccagtgggccctgccaggcactaacttcaaaatatctttttttatggtgaatgcctccagaaggtgcaactgtgtggtggtttcattttgcacttcataa

SEQ ID NO: 814047 - DNA, 410 bp, Homo sapiens
agtagttgcaaaaaccacagttactttttcaccagcctaatacatattagtaaattkattttagttgtggcactgcagaggaaaaaacacataatttttacatcttcaaatatcattctccagcaatagaacacattcaggagacttaaagaatcaaaatatttgattttctttttcatcaaacatcaaattggtatgaagaaatggcagttgtattttaacattttcagcataactttaatagcataacttcacctcactgaggagaagaaatacagtctgtttgacatctgaattatacacatattttagcaaatgaaaactttaaaatatttagtttacaaaaataactctaaaatagtggttttggaagtttgttccctgaaacggtaggttctcctatgaccact

SEQ ID NO: 814048 - DNA, 435 bp, Homo sapiens
actgatttgagagctatcctaaaatctagacttttgttttaaaaaatacactataatctaatgtctcaattttttaaattttgagaatggaatactagctwttaaaaccatgaaactattttctatgatagggcggagcaacttttcttcattctgagttaatgcccttttcttattatagtccacacttttacgcttagattattgttaccaaattattttattctaggtatctctcaatacctgtaatttattatcttccacatgttttactaagctgatagactaataaccatttgtgttaagtgctgtttataaaacggtatttgcaacatttattcaaggttgttttaaatttttattctcatttaatgtactttgatatctgtgtgtgtgcatgtgggtttaaggaagtatatattgaggtaatacttt

SEQ ID NO: 814049 - DNA, 614 bp, Homo sapiens
tatgccacattcactctgcctgtgctttataaatggaacaatgaagcctggttgatagcacatttatttacagcatggtttagtgaatattttaagcctgttgttgagacctgctcaggaaaaaaaaaaactcttaaaatattactgctaattgacaaatcacctgatcacccaagacctctgatgcaaatatacaaggagattaatgtatttttcatgcctgctaacacagtattcattctggagcccatgactcaaggagtaattttgacttttaagtcgtgctatgtaaggaatacattttttgaggctatagttggcatagtgattcctctgatgaatgtgagtaaagtaaattgaaaacatcctggaaaggaatcaccattctggatgccattaagacattcctgattcaggggaagaggtcaaaatagcaacattaacaggagtctggaagaagttgattctaaaccttatagatgttcaagacatcagtggaggaagtcactgcagatgtrgtagaaatagcaagagaactagaattagaagtagagcctgaagatgtgactgaattgctacaatcgttgatgaaacttgaatggatgaagagttgc

SEQ ID NO: 814050 - DNA, 590 bp, Homo sapiens
attgtttttctagacaaaatgctgttgcacacttaatagactccagtctagtgtaaacaaaacttttgtatccactgggaaaccaaaagtggtrtggagttgctttattgtaatacttgccttattgtggtggtctacaactaaacctgcactatctcagaggtatgcctgtgctaccacaccttgaactacaggtttacttattatttaattgtaatttttcccactagattataatatcagaagaaaataaactgtttggcatcccggtttaagtaaccagagcttttctggttttaagagacagaaacccaaatcaaactaaatgtaacacaaaggaaaattatttgcaaagccacaggtgtagctcacagaactgaaggaaaagttacagaatatttagctgctctagaaattctgatgacttcagggacttgaatgtcatcagcaccctctgtctctatctttctcacctctcactaacagttttgttctcataaacactttcatgttttggcagctatggtaaacagcagtttagggattgtgtcctttcaacatcaaggctttaactggcctggcctaagaca

SEQ ID NO: 814051 - DNA, 512 bp, Homo sapiens
ttattcaaataagtacataatctcacagctgaatactttccatgaatattctgacacatttatttaaatttttgaaatyttactttatgcatgttataatggaaaatagaggatgaatctctttataattttatctcatttatgttaaatacaaagatattctagatcagaactaacaagatgaaagtaatttattaaaagtatgaaatttcattaaagtagtatttaattttttttatgttggcatgattggtctattaccaacaaccttcaaggagctaactcttttataatctttattcctggtgcttgattttcctctttatatcaatccactatgtgttccacaattctaatctcagatttaaaaaataaacggtcaaagggagtggcaaaatatttgaattgctttcagaggtttgatggtaggacccagaagacatagagattgccagaattaacataacagaggattcaatgtgctcctgtgagaagcattgattggggtggga

SEQ ID NO: 814052 - DNA, 545 bp, Homo sapiens
taagtgacacttaataaatcattgaagagtcgcttaacctgtgaatgagacccgtaaatgaaaccatctcattcaagtcctggctctctgatttaccaatggggtgaccctatggcaagttaattcatcctatgcctcaatttttctcacccataaaaaagctttactgattgtgcctatctcacaatgttgttatgaggattcaatgagttaatgcctgaaaacctgaaattagtgcctggcatctagtaagtacatctagtgtcagcaaagactgtgatgatgatggtgaggatggtggtacatgaatagttttcctggaacaaaaaaggatgaagccttagcaaaatggacacaaatatataattttttttatctccaaaattgggtaagaatggtctgaagaacaggtgatattgtttggatattcgtccccagccaaatttcatgctgaagtgtaatccccaaagctggaggtggggcctggtagaaggtgtttggatcrtgggagtggatccctcatggcttggtgctgtcttcatgat

SEQ ID NO: 814053 - DNA, 613 bp, Homo sapiens
gatgtgtgtgtatatagacgattaggaggagataacaaacaccaagaatgactgatgataacatttaaaacagtagacattctctaggagattgtattttaattaaaaagaagtctttaacttggatcaagaaataattatactaataattagtctgttcaaaacacaacaagaaatactttaagtgtcctcatatcgtggtaggtacttcgcctaaattaagtaacataagctttgtcgctaatcattattcactttaaaacaaaacagatgaagctcaaaaaaattgaatagctcattggggtcacagagataataagtagagaagaagggatttaaagatagattctgttgctgccactgtgtgtgtgtgtctgtgtgcgcgtgtgcgtgtatgtgtgtgtgtgtttacctttgaaacactgcattctacttgatacctggtaaataacatcatgtgaaaaaacaggttttagttgaaaactcaattagcaggagtttacaaatccacacagctaaaaaaccaaatgcatctgttctttktattaattacagtatggtttcagagcaaagagagggctggtctgccctcctattccctgaaatattcaca

SEQ ID NO: 814054 - DNA, 595 bp, Homo sapiens
ggcaaatatatgtgtgctcacatttataaggtaaattatgtgcttakagatataatagcccttgcttttatgcagtttttattccctaaggagttcaacacatttggtattagctttgcaacaatgaaaaacgagtacttattcttaactgaccatactatgcaggaatatttccttatttttgacctccccccaccaaccctcaaaactttatatagaattataaaagctaagatgagaggcagaaaaatgaaagtacttaacacaaagttaatttatttggtcaaaatctttaagatttaaaatcaccaaataaatatcaaaaccttggttgaattctagtcttgtaggtcactgctatctctaataaaatcaaacatcaatgagattttagatatgtttagataaattaaattttcagagggtcagtattttgtatttcaagaaatggatatgagatttttaaaacctctacttcatgatttaatgtttttggctgtcagtttgtatgcactatcctcatgggggtgaacatttcaagttggcattctggcagaaatgaattttatttgtaaatccacctgcacacctctac

SEQ ID NO: 814055 - DNA, 602 bp, Homo sapiens
tttctcatttgcagtgtgcatataagagctatgtttatacacaatctaaccagtacttggtgctgtcatacttgttaatttgtgccaatataatgggcaaaaaaaaagtatattgttttcatctcaatttgcatrtccttccttatagttgaagaacttctttttgccttctttttttctcttctgtatgatatctgttaatcatttacctatttaaaatgttgactttctgggctttttttttttaactgactttgaatttcttttttttttttaatttttttcgagtacctgtggttttcagttaacttttataaatatattccaacactgtggcttttctttcttaaagggatcttttgaggaacagaaggttttgtggctgtacctacttctgtagtgctgtattgttttaatatggttgctgtatattttttgtatggtattgtatcagttttgttagagaatctctttctctgaggtcataaagatatctacctatattttttgtaaagttttatagttttgacttctgacattttagaatttttatctatctaaagttgatgtgtctgtatagtaagaagttttgaataaatttc

SEQ ID NO: 814056 - DNA, 566 bp, Homo sapiens
ttaaatgtcattctatagaatgtcactggaatgcataaacaagttaattagtttagttttctttgtttcttcttttgctaaatccaggcaaacaaaatgggattccaaaaccagaaataaagaaaaaaagccgtttatcccccttaatcccaagattcctgatttggggtctttcagtgtttcgatgcttctggtaacgtgttcattcaaatataaatgcgatccgcatcaaaggcttaacattcagattaaccacttttttgcatctcacctctttttagtttgaacttggaatctcctccatgtacagaccactaatgagaaaatccttgcttatgaattcagttcagaattggagcagttttccccctctctccttttgcataatgtctgctttgaagtcaggcagtccaagaaagtgattgatctcacccacgttcataactttttcaaagtactgccgatatcattaaattttaattaaccctttgagctccttctatgatrtaaagatgagggaacatcaaaggctcatgtgttggaacagcagtggcatcttttgtgct

SEQ ID NO: 814057 - DNA, 544 bp, Homo sapiens
gttaagaatttaaaccaagttttacctgtctccaattccttagttccgtttactaagttctattgaatttcacactatatttggccatctttcttttcctttttttttttttgagatggagtcttgctctgtcaccaggctggagtgcggtggtgcaaccttggccaatcttggctcactgcaatctccgcctcccaggttcaagcgattctcctgcctcagccttccaagtagctgggattacaggtgcacgccaccacactcagctaatttttgtatttttactagagacggggtttcactatgttggccagggtggtcttgatctcctgacctcgtgatgtatccgcctcagcctctcaaagtactgggattacaggcgtgagccatcacgcccagtccatctttcttaatgttatgtaaatgggccaagtttgtttcccctctctctgctttttgatttgtcgttcttcctaccagaaacactccattctctttgccgttagttctttgagccacgacayggatcctaaataatggaaac

SEQ ID NO: 814058 - DNA, 249 bp, Homo sapiens
tataattttttttcattaataaattaccartgattttaatattgtattgtgcacacatgcacataaatattttgctatgtgtgaatatatatttggagaatcttatgtttggggaaagaagggagagagtaagttacatttttttcttttagttttaatttatactcagatggattataaattttttagaatgttacattgttaacagcatgagagttaaaactatagccaggaattgtgacttttcca

SEQ ID NO: 814059 - DNA, 322 bp, Homo sapiens
ataaaaccctgaaatttagcctttacatttattgagataatttttagaaattataagagaaagctataagttataatgaaaccataattactgtagccatataataattagcattcataattataacaaatactataataattatttttttcttactgatcaatcagtgtttgaaatttcctctgtagcaaaaatttgtgttttgatgaaaaagtggtctcttgctgctctgagaatataagggaatacacagtggtgattagttggtaagaagtaaatcccaccctgttttttawgccccaatggaatgttttattagaat

SEQ ID NO: 814060 - DNA, 656 bp, Homo sapiens
ataggttatagtgaaaatcttacacatgcatggagttttaagaagagaacaggctcaagtgttatacttaggaaagcacaaacagtggctttggaccctgggaatacatgaaaaaatcctgaggtagaactataccatatcattaagttagcccacctgccaggtattatgtggtaatgccaaataatggaaacttcaacctccctccatctcctgctttttcattccttacggtttctagtatgctgacaaagaagaatacttgaaggagttttttctcagctatctaatgtagggcttcccaaactgtgctttctagagcatctctggcagttctgcaagatgttaataagcatccgtgaactcctgtgtcaaaaactgaaatatgaaacatttcttaattgcaggccttctcaaaacctttataatataggccagggatttccgagagggggtgtagttagtagctccttcttgtgctttttttgccccccaaaccacagaccccttttcctcatggactacctattratacctcaacgttttttgaaaaatactcatcttttgattagagaaattaatgtcatcttcatagtcatttgggattttaatctttgagggtcttttgtacgtgaaaggcatactcatagttactg

SEQ ID NO: 814061 - DNA, 602 bp, Homo sapiens
atcttgggtttagttaagtgtcttgtatagattgtagtctgatgaacatatgctatgcttggtgtgagatacactggtcacaggatcagcagtgatgtgaaaatacaatagaagttcaaccctsccctatgcccaatataaaaactctgctatggcacccagggaaatctgaacttacacgtaggactatgtaatctagagttttactgttggacttcacaatgcaagtgatttatttctacttgctctcctgtgtgcaactgttgcccataatttgttgagcaaattgaggtaagcttacaaggaagaaacattattgcttattgagagcttatactaaggctgttttaaatgcttgcttatatcaggggtgtacaatatttttctgtaaagagccagatagtcaatattttagaatttgcatgacatacattctctgttgtaactacttaactctaattgtaacaggaaagcagccataaacaatatttaaacaaatgatgtaattgtgctccagtaaaactttgttcaaaaaaacaggcagcaggctactcggactgtgggctgtagttttccaacacctggcatgtactcccttacct

SEQ ID NO: 814062 - DNA, 577 bp, Homo sapiens
gacagtcaatatttttggctttgaggaccatatggtcttcactgtaactatttctgccattatagcacaaaagcagcaacagataatggagaaacaaataggtatgggcagstagactggcttctagaatttgttcgtctctgatagaatctagattctagaccatcggtttttgctgtatgaatattttctaagatattctctttgaaatcaattttaatgagatttcctatgtgtttattttttgataactgacaaaaattcataaatacaggaataattcctagatatacattaaattaattaatagctgtaaaacttttgtaatagttaaaaccttttctatgttaatattagagtatgattaacttacttctaactatgtaatctgcttctcatattaggttcctgttgctagagcaagtattctttggctaattggagaaaactgtgaacgagttcctaaaattgcccctgatgttttgaggaagatggctaaaagcttcactagtgaagatgatctggtaaaactgcagatattaaatctgggagcaaaattgtatttaaccaactccaa

SEQ ID NO: 814063 - DNA, 606 bp, Homo sapiens
gctttatgctctgtgtcctatctatttttctctaattttcacttttcctctgactcttacttttgccttkgtgattttttttctccacctcccctctctttgtttttgtccccttccccaaaactctttctgcctagatatctctctgacatccttcatcccttcgtgccccgcccccgtactacagtccagtgtgtttgtcattgtctcctttctcttccatccctgtttgtttctctctttttgtatttgctgtgtatctctctatatgtgtctccctctctgtctgcctttcctgcttccccatagaccacacttattttctagtaaactaatgtttgcctttcagaatccttaggtcgattcctcaaattcatttctatatgctttgggattatcttcatccctaatcgtgatatgagttatcttattatagcttttgctgattcatctacaagatttgtaaccagataattgcaaataatggagcatatttccattatttagattttgtctttacattttaagtcatctttaaaaggaatcagttaatcctttccaagatgtctgtagatttcttcatacattgagatgctcaaaaactga

SEQ ID NO: 814064 - DNA, 540 bp, Homo sapiens
tgaggaagaaaggatttaattaaacaaattaataacaatttaaaagttaatgaataaaagatgcttttgattttaaactctaatagtatgtcatcttttaaatgtagtgataagtgctataarttaatgtttttcttagctcattttgatttttagttatgaaatattgcaaacctatggaaaagtacataatagcataaatacatatgtgtatatctaccactaggattaagttgatattcacatttgcctttatttatttatttatttaatgtaagatgtatagaactagaacctcaagcttctgttcacacgttcgtttcttccccattggtaaccactgccaccttgttggtgtgtttcattcaatcatccctgttttatatttttattatatgaatatgcatccataagcaatgtatggttgtttttgtgagttttcaaattttacataagtagatattctactttatgtatatgtttgcaactttttttgcttaatatcatgtttttgaaatatggatatgtgtagatataatt

SEQ ID NO: 814065 - DNA, 556 bp, Homo sapiens
aaagcaagtcaaccaacgatttgagttgagtggtcttttacaattttaatactgccactaaaaataaagagaagcctaagatcattttgcacttcctattgtttttaragtatatcctgcactggatatctagagtactgtgttcagaagttttctgaaatcacccttttctctatgtgctatggaatcaatttgatatatatttcagttcttttgattacatttgtgttcaatttcaatgtttccttttttgttttgttttctttcaatttactttttttaaaaaataagtaagttatgtataacatgtataaagtcaaaactctatgacaaggtatgtttaaagaaggcttactccccaacatatcctctccatggcctttcaactaatcctctatggtaaataattgtgttaatttctggttcttttatgtttcatttgcaaaagaaaaaaaggtaaatagacaaatacatttttatttttctttttttcttacaaaaacatctagcatattatattagtgttctagggctgcataacaaagtgccataaact

SEQ ID NO: 814066 - DNA, 613 bp, Homo sapiens
gaattcaccagtataaatggacaaggcaggaataaattgtttttcactgactagtgaaatcacaatgcaagctaagcaatattacatatagggtgatagctcccgccacaattctctctctcaggtaaaaacaaytgaatgtcttctatcaacttttcactatttccatataaaatattctattgtttaaacaatatttctggatatgaaaaagagacagttatttaaataattcccagtcatttagcttctattttacaattccttggtaatgttagagttccctaaccagacactctctaacagactatagttccccaaagatgggccttaaaagatggattctttaacaactgtaacagctgcagcaacaaccgtgaatcttcaagtgtagctgttaagataagatagtttgagggcaggtataataaaaggaaaaagtttaaatatttatttaaaaaataataattcctacttttgattgcctgttatgtgtcaaacattcttattaacactgataatctccttttggtgtaaataaattaactatgagagcgtagttaatacatttttttaagacaatatagctaaaatatagcagaaccaatcatca

SEQ ID NO: 814067 - DNA, 544 bp, Homo sapiens
atgaaaaaataaatgagtatgtattttctaaactaaaaattaggacatatttggacaagtatttggaatgagggtcagcttcagatatatgggacagataacttctaaatatgagaacagttaaatgtcatttcttaataactatttttgttccattggtgaagtgagatggagatgacaaaaacactggtcatctaaggcaagtcctaggtatatacatttcgcttatttttttttcaatagtaatttttttttattatcctcactcactcaggaatcaaccaaaaacatgacattgagccatctttcctagggaaattacaggatttttcaattgggatggctcaatgtagttattgactgtatctcacaggtgggtggaaggatgaagcactcttcaatccagggaagggcttggatagattttttattttattttattttattttatttattyatttatttatttatttatttatttatttatttatttatttatttattttgagatggagtcttgctctgttgcccaggctggcgtgca

SEQ ID NO: 814068 - DNA, 539 bp, Homo sapiens
tagcatccataaatgggttcttgcctactattagcaacacttgatggattaccagaaagagatattgctctaaaagtgaacattttttcacacccagaatggattctggcacctgattaaaaaccacagtgttagagctgaacagctaatcttatgtctgcattacaagcaggaaggaggaaggtagagacaagagcacacaagacatttgtttccccttaaaaagcttcccccagccccatccagtgacctccacttacacctttgtgagaaatgggtaatatgcatcccctagctccaaggaaggctggggaggtgattattttgttctgggaacattgccactctaaacaaaatcaaggatttgttagtaaggaagaagaggagacagatatcgggtagaaagttgttagtttctattaaccttgagtaagtccattcaactttcagagcttcagttttctcttctataaaatgactggtkttgactaaatggtctctaaccccttcctgttcttaaccctaaaatctctgatctg

SEQ ID NO: 814069 - DNA, 611 bp, Homo sapiens
gtgcagttggtttgcaattytattataaatactgcatgtgtatctgggtggtttgcaattttaaatcacgagcttgaaccaagatctgaaggatgtgaaagaaaaccaggtgtatgctgggggtggaggatgatggaggaagattctatgtacaatgaacagcatgtacaaaagccttgagatttaggaagaactattcagagaaaagaaagctgaactgaggtaaagaagtgacaggaagaaacaaagatggtgaaggaaccagaactaattcatgaggaagtaggacaagtggaatgtgacgttttaagaaagaagtggggaggttaatagctcaaatgcttcaataaatataagatgaggaatgagaaaaagatattggatttgaaatacagatcactcatgactttcaaagacaaacttcctaagttgctaaaggcttacacagagaattacagaacaagtcatttgtgaagaaaggtgaatagtacatttggaacacttttccaaagacagtaacaataaaaaagaaaaagagagaacacaatgacttgatgggttgccaaactgcaggactactttttagaaagaggtttcacttgctagtatag

SEQ ID NO: 814070 - DNA, 611 bp, Homo sapiens
gtgcagttggtttgcaattctattataaatactgcatgtgtatctgggtggtttgcaattttaaatcacgagcttgaaccaagatctgaaggatgtgaaagaaaaccaggtgtatgctgggggtggaggatgatggaggaagattctatgtacaatgaacagcatgtacaaaagccttgagatttaggaagaactattcagagaaaagaaagctgaactgaggtaaagaagtgacaggaagaaacaaagatggtgaaggaaccagaactaattcatgaggaagtaggacaagtggaatgtgacgttttaagaaagaagtggggaggttaatagctcaaatgcttcaataaatataagatgaggaatgagaaaaagatattggatttgaaatacagatcactcatgactttcaaagacaaacttcctaagttgctaaaggcttacacagagaattacagaacaagtcatttgtgaagaaaggtgaatagtacatttggaacacttttccaaagacagtaacaataaaaaagaaaaagagagaacacaatgacttgatgggttgccaaaytgcaggactactttttagaaagaggtttcacttgctagtatag

SEQ ID NO: 814071 - DNA, 590 bp, Homo sapiens
ctgattctaggatggcatcatccaggccccccttggcttccctttggagttggtcagtgggcgacactggcaaaagatgggagcgtagacagaaagatatcaggatacctatcaaacctcaatcccttgctgccttgtcatggagtggtccatctctttctggggtctagcaagacctccacccccagacccagacccctgcagcttccaatgtggaaagaggcttcccaaggttcctagaccccgggtgccccactctcccttcctggttcccttaactctgccttcatgtctattaatagtagcttcaggtactctctccagggaaatctttggacatccatctgcttcctgttagaggcttgatcaactgctaggcctggaggactgtcagttgggggactgcctagagtggtggggggtagcttacaggaattaaggcaggggtgagcagggccctgccagctgttgcaaaacaaaaacaaaaacaaaaacaaaaaaacmtgcaaaaacctatcatacctcatgagcctttgaaaggctcagccaggcctggcaccattgcatgtgtatgggagaaaggctgatga

SEQ ID NO: 814072 - DNA, 646 bp, Homo sapiens
ggctggtttattccttgcctggccaagggggtcaggcagggggaccacaggggctcatgggtcttggggcactgccttatcagatgcagaggctgggcctcggtggagggaggggtcctgagcgtggcaggggacaggagctatctgaccataggacacgagttcttttccttggccacctaccccaatcttgttctgccaacagctatgcttcctggggtttcctgagcagatgcaacaaaaacaccccctgctgctcaggttccccatgggggccgccactctccctggcatcccctcttccagaatttgctttagatgaagccacacaaacagtactgtcccctcctgccctgacctgagcaggccctgtgggggctggagggcccatccacggctccttccccaggactgggtgcaggtctcaggagaagctgcagtggaagtggctgctccccactgaatccctgcatctgtgctctttgcctgggtgtgcccggccaggtgtgggaggaggagccttccagggcagtgcgtcctattttgactcgggggtttcaggatgacttcctgcgggcagcctccagggactgtccccttgccaggcaraagcaggatgtgtgggaaggcttgacattttttgtaa

SEQ ID NO: 814073 - DNA, 610 bp, Homo sapiens
gttaacaaattatttaaacatagtatgctccttagagagggaaataactgggagggcctgagggaagaaaggaaaaagtaatcaggaaggcttcatggaggaagtgatattgaactgagattytgaagagtgaataggagtacacaatgccattaaactttaacaaaaattctcagtaacccatggttaaaataaagttaaatccctaaaataaagctaaatcataaaaacatgaaaaagcaagtttatatcagggatttagcttttaggataaacagaggaattcagcatatatttaatccaggttaggatacttccctccactatgcaactggtcttcctgtccagacttctgccctttgagatgccgtaagatctcatagtccccatctgtaacagagataagaaagtgaagtcacattttgtggaaagcttttctaaattaaggggttaagacaaaaaagattttggcttcattcacagttaactagaaacttccattaaccataatgacccattccccaagctggctggctaatggaggtcctgctgcattcgtctttttgttttgcttccttcctttcctttgctcccaggctctctatcaact

SEQ ID NO: 814074 - DNA, 605 bp, Homo sapiens
ctctttaatacatcagtttcacttcttggaatttatcttatggttaaattctgtagcttttgggtttagttcatcrtattctcacttgtgtgaatatacagggttagtttttgcagtactgtaatagtgaagtattagaaacaactcaacttccgtctgtgaaagatgacctatatcagtatgatacaaatgcagcctttaaaacttaaaagaggcagttttttaaaagttactgatattagctgggtgtagtggcacatgctgatagtcctagttatttgggaggctgatagggaaggattgtttgaactcaggagttcaaatccagcctgggtaacatagatctcatctctttaaaatggtactgatattgcctgatttctaagataaagtgttaagtgaaaaaggtgcccgtgatgtataatgctacataaaaatatttcaaaaaagaatatacatatatgctggtatattcataaagtatctgtgaaaggctacacaagaagctaatattaggggctgtattgagggaagacaactgggtgggtaggataatggtgggaaacttaattctatcttcccccccgccaaaatcatcaagcgtc

SEQ ID NO: 814075 - DNA, 684 bp, Homo sapiens
ataaaaggcataagaattagaaaggaagaaatagaactgcctttagctgcagattacatgtctatatagaaaatctgagattattattattattaggattcagtgagtttggtaagactgttggacactggaacaacattaaaaaatcaattttatttctatttgacaaaaaataatcaaagtctgggcacagtggctcgtaagtgtaatcccaacactttggaaagccaaggcaggagaatcacttgagcctaggagttcaagaccagcttgggcaaaattagtagaccccgtctctacaaaaacattaaaaaattagctgggtccatgtggtgtgcacttgtagtcccttctaccttggaggaggtcgaggctatagtcagctgtgattgcaccactgcactccagcctgggcaacagagcaagaaaccatctcttaaaagagagaataattaacaactgaaaatttagaagctactatttataatagcatcaaacatactgcttaaaaataaatcttacataaaaagtatgaaactcttaaaccaaaacaataaaacagagcaatagaaaatctaagtggagaaatatactacattcatagatcagaagactaaatttcaagatgttactcwccttcaaaatgatatatagattcaagaaaatcacaatgaaaattgcaat

SEQ ID NO: 814076 - DNA, 576 bp, Homo sapiens
cttctggttagattaaggttatgaattattagcaagaatactataagaggagaggggagcaagaggtccaaatagaagcctccattaatcatcctcactgcaggaacaccaaattgaaaaactattcacaccaaaaaagcaccttcataagaatcaaaaatcatcttaggcagcagttcagccacagtcaggtagagcatcaagcggtctcctggggtccttgattctaggccttggctcttggaaagtaatgttggacctgccctgggccagaagaaagcccactgccctgaagggagagtcctaggcctggcagcatccaccacaaactgatggaagaaccctcttgggccttaaataaacatcagcagtagcctggcagtactcgccatgagcctggggtggtggtggccatggggagaactccttagcttgtggaaaggggagagaagagtgggaagaacttcctcttctggctccggtgccagctcagccacagtagaayagagcaacagatagattcctaaggttctagactccaggccctggctcctgcttggcatctctagatccacc

SEQ ID NO: 814077 - DNA, 506 bp, Homo sapiens
cgaagacaaatcttttggagagtaaaatacaattgccttctaatcatctctgtcgcccaggatggagtgcaatggtatgatctcagctcactgcagccacgacctcccaggttcaagcaatccttctacctcacccacctaagcagctgggattacaggctcatgccaccatgccccgctaatttttgtagagactgggtttcactacatttcccagactggtctcgaactcctgggctcaagtgatccacctgcctcagcctcccaaaatgctgggattactggcatgagccaccacgccaggcctaatcatctgttttgataaagagattttgtcatagagcaagcggtgtccagctctcctttagccactgtggcttccaggactcccagctctatcccctggactcagggaggtcaccatgctctgtgttgcagcccagaaactccacagacagtgagctkgggtaatatcctacagtccacctcatttgttcccctcgcag

SEQ ID NO: 814078 - DNA, 655 bp, Homo sapiens
agggctgagagatatctgaataggttcaaaggttacccaaagagttttcaacctcaggtatccaccattctgcttctctggagccacactcagaccagaggtgtgggagtgaacattcctcagtctrtactattaaatggaatcaaatatttagatgcagatctaagtatatatacaaaatattttttaggaatattatctgttattatacatatacttaacaagaaaaggtaaatacaaattatgcaaattataaattacccatttttattaatttaagatatgtaaaatgtcactagtattttttatgttgtgtgtaatgtgtgtataaataaaaatgaataactgttttcaaaccatcattcaagatttcaatcccttagcccaatttttctccttaaaaggctcaaacctagtcaactgagaattcttctatgaaggagtgtttcagtaataccttatatgtacatatatatgatgctgatggtgtaatattcatggtaagcataaaattccataataatagacttcaaaagtatttgaataatttttatattgatagacatggaaatggaatagagttaatgctcagccctttattagggaattagaactttgctttaaaaatgttatgaatccaggtagaaaaaaggca

SEQ ID NO: 814079 - DNA, 581 bp, Homo sapiens
atagtttccataaattaattacagagattatgctggaaaaaccatcacatgtaagccattcagttaatttggkttctcttaaactgtatatgttatggaaaccaataagaagtggatgatatgtcttggttaagttatttaaatgctataaattgatgtctataaaataaatttccactgttcaaacaactacactattaataaaaatctccatgctgatcccttatttaagtctcttagttgcaagcagcagaagtccactctggctgattactcagtttattaaaataagcctgtttcaaagaatttctagaaaaaaaaagagacttcatttgaaactgaacttttaaaagcagtgccacgaatcctgccataaaattgatctgatgagaaaatcctttgcctttgccatagaaatttagccattacactgataacttgtattgtaggcattttggcccccaaagcttaactttactacaacttatattaccaaaattaatgtcactgtggcttttgctttaatggtcccaaccacctgtaataatcacttgcacatacttaaacccctgaattcattc

SEQ ID NO: 814080 - DNA, 615 bp, Homo sapiens
actgtgaatatttcagggaataggagggcagaccagccctctctttgctctgaaaccatactgtaattaatamaaagaacagatgcatttggttttttagctgtgtggatttgtaaactcctgctaattgagttttcaactaaaacctgttttttcacatgatgttatttaccaggtatcaagtagaatgcagtgtttcaaaggtaaacacacacacacatacacgcacacgcgcacacagacacacacacacagtggcagcaacagaatctatctttaaatcccttcttctctacttattatctctgtgaccccaatgagctattcaatttttttgagcttcatctgttttgttttaaagtgaataatgattagcgacaaagcttatgttacttaatttaggcgaagtacctaccacgatatgaggacacttaaagtatttcttgttgtgttttgaacagactaattattagtataattatttcttgatccaagttaaagacttctttttaattaaaatacaatctcctagagaatgtctactgttttaaatgttatcatcagtcattcttggtgtttgttatctcctcctaatcgtctatatacacacacatc

SEQ ID NO: 814081 - DNA, 607 bp, Homo sapiens
gctgctacagttcagagctcccgtctgtggccagaggccctgatttcctgtcagggagggggttctcctgaggactggtggggggacacatagccttcaccaccctgcaagggagaagaggcagcattctaaacccatttacaagaaaacttctggtatcacattccagttgctatggcaatgggattccttgtgaatataaaatgaaatatatcatttagggatcattagcatgtacgggaaatcaaccagactcaaaaggattgctgcagctagagtttacagctttgatcccagatctcctgagtcacaagcagggtctcactgaaagtctgggacaaaaggaggtgtgggaaagatgtatctcttcttgtagcaaaattagagtcacatttttcctcagcaccaaatcctaccaagagaatgccaagatattgggtggatttcactgtttaacttcttatagagtttgtgttttcaaagttatcttgtgacatcgcattcctatttgtgtattagttggcacttttaaactcatttttcttggttttgaattcacgctttatctcctaygctgttcacgaagatgagcttccctttcagcaat

SEQ ID NO: 814082 - DNA, 630 bp, Homo sapiens
acacacactcttaactttaagcaatacttaactgatacttccaactcccatctgaaaacaaatgtaccattctagacttcccactttccatatctgtaaaaccctttcctaacagtgaaaaaccttgctcgcattatatactaaatacatttattatttgctactggtttaaaaaaaatggtgtttgaagttaaagaagttcccttctatttggttctcctagtgtaagaattttttcttacactaataaatgaatggatattagatttttaaaatacttttcttatatctattgagatgattatatgacttatccacttaaaattgttctgtggtgaaatacatcaagagacttctagtggcaaacaaatatagtttgagataaatccaaattgttatggtttatcttttattaatagactgctaaatatagtttgctaatttttgcttaggacttttgtatttatgtacaaactggcatttaaaaaaacattcttaccaggytttggtgtcaagtttatgttattctcatcaatatacccactttttctggattctggagtagttcatatgagatgaaaattgttgttgttggaaaatttgttagtacccactggtaaaatatctgga

SEQ ID NO: 814083 - DNA, 632 bp, Homo sapiens
tgactctggaaatttgactttaaaagttacgagacttggtgagactgagtgtggtggctcatgcctgtaatcccaacactttgagaggctgaggcgggagtattgcttgagttcaggagtttgaaaccagcaacatagtgagaccttctctctacaaaaaatattaaaagaaaaaaaaagccaggtgtggtggtgcacgccggtagtcccagctactcaagaggctgaggagggaggatctcttgaaactgggaggttgaggctatagtgagctgtgatcatgccaccacactccaacttgggccacagagagaggccctgtctcaaaaaaaaaaaaaaaaaagacttagaattttgtttttttttttttttttttttttttttttttttttcttggggcaaagaatgagcaagaattccacctggaaaagattgaccagggatcttgactttctgtctaggttgtattttgtgtgactcagtgacatctctgattcttttcctcctcctaggaagaatttatctatctgctatgtgcagaatttattaggctttacatactgggctttgaggctttgaytggactctcacattaaggcatggcaggctgaggggcagcctgagggacataa

SEQ ID NO: 814084 - DNA, 632 bp, Homo sapiens
tagaaataaatttcctcttggtgtactctcaagtagatgttggaaaatgaggctcacagaggttaaagtagttggcccaaggtcatataggttgtaagtgctgggaccaggatttgaatccacagactctggcttggggacctgtgtcactctggcaagcttgtcgtgtgggaattaataagctcatcgatgtaatgcacttagagtggagaccagtgcacagcaagcactcagtctactactgtgatgacagtgacaaagaatactgctagttctataattactataatggtgttaactactgttattaccattaacattttccactctgattcatacctaaccatgtcttttaaaaatttttctaaatttttttaatttttaatttttgtggataactagtaggtatatatatttatggggcatatgagatattttgatacaggcataccatatgtaatcatcacatcagagtaaaatgggtatccattacctcacacattttttgtgtgttacracctaattgtacatttttagttattttaaaatgtataattatattctcattgactacagtcaccttgttgtgctatcacgtactagatcttacttatcctttccattttttatgc

SEQ ID NO: 814085 - DNA, 575 bp, Homo sapiens
catcaccaaagtatgttttcctcaccttttaattatatttatatttaatactttttaaaaagtatgacacatatacaaamcatcttctctggtaaatatccatatctcctagaagaaagctttggctaagtgattcttgcctacttttacaacctaagtaaatttgcattaggcaaatttttccagttcaaaaatgaagactttcaaatcccactgaaatgaataaataagcacaaaatgggtgaagtacatgagagtactgaacagagagaagacagcagagattgtgactagttctagaagatggaagggggatggaattatatcaacagatatacatacatatgtatatatatatatatatatatatatatacacacacacacacacatacatacacaaaagattatctatatggaaagatagagagagacagagtatgagtgtgtgtgtgtgaaatacaatgatccataacagaacagtaattttcttgaggccccaagaaaaatgccttcaataataaagtgacttactgtaacaaacaatataatttagaaattataagacctcaggga

SEQ ID NO: 814086 - DNA, 704 bp, Homo sapiens
gtctctgcttctgccaatttagctacaagtgacctgacattgatctgataatatgacttraaaaataaagagttcgagctggaggtggcaaagatcagctgcctggcatcagaaagaatgtttttttttttttgttttttttgcttcatctaaccattttcctgagaaaatgctttatccttgaatgtcatttttacacaacatgcagctgtagtaattggtcatacagcagcagattgtctccttctagaaaatataataagtatttcccagaaagtgccctggagaaaacattgaaaattgaataaaacccacccagtaatcattctgttccttggaaatatttattaccatgttgattctttctggaacaggataaatattgcctaagagaattaattaaatcttttaaaagtctaatgcaacaagaaatatttatttacctatttattcatgtaacctttaggttttgttaaaatatttgacactagacctgttattaaagaaggttataaaggaacagtggctgaaattgttgtatttggaaaaaacagcaatttcttcctctagagaagttacgatataaagctctttttatacctaagagtatgtgagatttaaatttctctattttcaactttattctttttttccagtaacaatgtaattcacttgattcatggttaatttttattctatcatct

SEQ ID NO: 814087 - DNA, 631 bp, Homo sapiens
tcagctacgtgttgattccatcccaaaacttggtggaataaagcaacaaccattttattgtattcctgattyggtgggtcataaattcagacagggcactgcaaatataggtcatctcttccacatgatgctggcacctcagctggggtgatgcaaacagctggagctgactgggatgagggttttcaggagtccttggttgtccctgtcagttgaattccttggttgttctccatattggtgcaacagacactggcacgtgggctgggagcccggcccagctgggtttctgtgtcacctctgtctttccactcagcctgtccatgtagacattgggcttccttgcagcaagatggtcttggggtaggtgtggtatcaggataactacagtgaacgtttccatttaaaaaggaggaatgaggaatgagtagtacttactagttcatagcagttctgatccagccagtgcaacaattccagttccttgattagggcccagctgtgctccctgggagtggttccctgtggttcttaactccactctccagccaggcggctctgcactctgagactttcttccttttctacagagaatggctcatgtttgtaggtgattaactgtctcagcctg

SEQ ID NO: 814088 - DNA, 575 bp, Homo sapiens
tactcatatttctctgattaaaaataatatatgccaggagatgaaaagttggataatagatacaaagtaaaacaataaataagtaaataaaattttaaaatgtatatatttcaaccatccaaagatagactttgtaaataaagtggcatatgactttgagtctattttttaatgtttatgtttatattttttctccaaatattttttaacattaataggtttgcttttctgtaaaagacaacaaaattcttaatgcagaaaaattcggttgagtgagagaaccaaagatgtaataaaatcatccgtagcctcaccaacagaaatgtactgatcatgttatccatgtattagcagtataacttcaaatcctacatgttgtcattacccataaatagctacaaacctttttaatatgattaagaatatttcaaagcaatatgtaagrgtccgcttaaggaagaacaattagaactattcggcaatgctgtctgggtaagctgtgatatattgtgagttttatttttagcttttgggccctcagcatccccctatacctttctaacaaactatttcct

SEQ ID NO: 814089 - DNA, 639 bp, Homo sapiens
cagactggggaatattgaggctcagacaatgataccccaaaataaaggcctaagaagcggcctcagaagcaaagtctctccctgacgttctcttgctctcctgttttttgtccttcatttttccctgagacaaactatagaaactagaattcctctttcccaaccaaggcaagtcatagaaaccagaacccatttttctcaaagtcatccataatgcttaaacatattactttaactgtcccttctcccaacctttctgtgtaacatctgggcataaagaaattaagactctccttctagaggggtcctatactatacctggaaggaggaatgctgtacagagaggctgagaaaattctgaatagacaggtcttgctgagtttctccacttagtcacaccattagatcatacccttttttttctttcatatttctatggggctgcccattcttcactggacctaagcataaaaatagtttaccttgcatctttatgtcttcattttgaaggctccaatgtcacataaaactataatcaagtacatttattatgcttttctcttgttaacctgtcattgttataygggtgtcggctgtgacctttatgatggggatgaaagggatcctccctttccaccc

SEQ ID NO: 814090 - DNA, 558 bp, Homo sapiens
tgtcattttgttttaaaaataggwattacactattttaaatacagcataagctataatatcaaaattttgaaggaatataacaaaaataactcaagccaatttcctaaattctctgtagtacttcagtatcagtctttcaggtacaatttttcatgggaagaaaatgtctttcattgttccaatgtgcagttatgagcctaaaatcaaataccacaccccaatatgaatttcctttcaaactaacccagagcacttagttttgttgatgtaaacaccataagtgaatatttaataccatagtgttttagttttcttcacttgaaattcacattccatttttttttcttttacactatgtcagaatgtggtgccttcagcaatgacgagaaaaacgtggcaaagagctaaattacattgtctactacttttttttgtctgtctgatcattcaggttaatgaagatccctttgggttatcagaggactcctaacaataatgttcagcaattttttttttttttttttgagacggagtctcattctgtcgcccaggctgga

SEQ ID NO: 814091 - DNA, 608 bp, Homo sapiens
tggtgaaatattgaattccaaatgcattcttgttgattagaaacttgcttttttaaatctgaattttctctgggtatttgaattcatctatagtaaataatctccaactttggatagctcagttatcctaaaatatggagtctagtcactagccaaaattcagcctgaatttacatctcctggcttttttgcatttatttgacagacttatatataatccttagacttctggtaataagtgacactaaagatgactggcatcttattttctttcttttttcttttatttcttttctttttttccgacagagtttcgctcttgtcacccaggctggagtgcaatgatgcaatctcggctcactgcaatcttcaactcccgggttcaagcgattctcccacctcagcctcctgggtagctgcaattacaggtgcttgccaccacgcctggctaatttttgtatttttagtagagacggggtttcaccatgttggccaggctggtctgaaactcctgacctcagatgatccacccgcctyggcctcacaatgtgctgggattacaggagtgagccactgcgcccggcctggcatcttattttcatacttaa

SEQ ID NO: 814092 - DNA, 600 bp, Homo sapiens
actaattcaggccatgagagaaaagagaaagggtcagacatgtctcattatactctcctccctttggagtccaggcacagctgaccagcattaaaatagagatcctaagtcccacagaatagactcttgtrgcaataagataccaactccaacctgactctggtataacatcacatgacagataacaggccctaaaaggaaatcaaagcattttatcccgaaatatatttctttgacatattttgaaacagttctgcacaaaactgtctcttgtgggggaaatctcttttccttactaggtctctccagagagcctgacacctttgacaagaaacattcacatctattctctctgaagccttctacagggcagagaagcttcatctacttaacaagaccattggcttccaccctccctgccacccccaccttatcttaactcaagctgattttaactcttcaggcagagcataaactttccaaccaattgccaatcaggaaacttttaaatctacctacaacctggaagaggcacctccgaccctgtacgaatcccttacccactgcttcgagatgtccctcctttttcctttctggcct

SEQ ID NO: 814093 - DNA, 474 bp, Homo sapiens
agtggtccctgaagaaatgcatttaaatttgcaaagtactttagttgcttttgagacttaaattactgctctgtaaatgtagcatattgcaactgccaatgctgctataaaataatgtattgagaaagattatagacttgtctaagattaccttctttgttgtcatttttgccatccactttctaccaattttcttttttctgtattaagtgaaaaatgtttaaggaatttaccctctttcctcattccagaggcaaattacctaagcagattaaaagactttggctatcatagcaagctattttggaatatcagtgtcattttcaatatattattttccttttgaaaaccatttatacgtaatgaaaagtgaaatgatttataataattagccagtgaactcaatcygggcagtagtaacttaatggctcatatcacattctctatacaaatgtcatccaaatatttggttcc

SEQ ID NO: 814094 - DNA, 582 bp, Homo sapiens
tccctttttcaagaatttttaaataaaatgtaacttttatcaatttgtttagattgtttaaaaggatactttgaaaaaaatcattatttcttgctttagtaactggaggacatctctttatctatatagaatccatgcccaaacttaatattcctctattttcttgattttagaggtgaaaagccaggcatccttcaagctagtggatctttgacaaagatgcattgcaaaacaatcaacaaacaatcagaaaggcatgctatgtgtgagtgatgatccctgcagcatatgccataggcttgttgtagaggagctgctcagtaaatggtggattcaattgaaacaagtcttttttggatgcttaatgggaagttgtagggtgggtatgatggactaaaaattatttctaaagaaggttatatattgtatatattccagaatcttccgtttttatcgtttcttaaattaaaaaataaaaatttaactctgtcccaggttaactcagatgttaacacktatatagaaatttttttcctctttccccgttaggcatctcacagtattttctgcttgtctgtttag

SEQ ID NO: 814095 - DNA, 562 bp, Homo sapiens
agaatgctaaggagaggagccgtcattgcaatgtgaatagaggcaactgggaattgcattaaagggacttcaaggatctcccagcttcattctgcggacagccaatgtagaaccctgcctcagtcccaatctatgtaacattcatctctaaccctttcttggcctcgtggtagctttcctccaatactccaattggggcctttgccatgatgacatcaggatattttttaagttccccttggattgcatcgaggcttctctatgttgcttgagaggggctgcccatcttgcaaactttaaagcacagtgaaaacaaccttccacaagctcccggaaactccctgatgcctttctctgaggtaaaggtctttagatggtacctagttttgtgttagaagctttcacaccaagcagccaaaaaggctccatcctcacctgatttgtggtccccagaaaggagcmtgcattaggccgataagtcatcatccagagaggtgatgacagtcgtctccatgaccattgattaatgaaaacagggctagttggacccagagtagatggt

SEQ ID NO: 814096 - DNA, 586 bp, Homo sapiens
ataggtgaaaaacaaagtattatgaacaaaacctacaataatactggcttttatatttactgatgtatgtagttactatttttatcagtgttctttttttttctcatcatggctttgaattactatcaagtttcctttcatttcagcctgatggattcattttagcagctcttgtagagcagggctactagcaatgagctttctctgcgtttatttatctgaaaatgtcttaatttctcctttattcctgaaggatagtttgtctggtaggaaattcttggttgacagtcttttttttttttttccccaggactttaactgtgttattccactgcctctgggcctctggttccttttcttttcttttcttttcttttctcttttctttttttttgagatggagtctcacactgtcatccaggctggagtgaaatggtgccgtcttggctcactgcaacctctgccttccaggttcaagcaattmtcctgcctcagtctcccaagtagctgggactacaggcacccgccaccacgcctggctagttttttgtatttttagtagagacagggtttcactatgttgacc

SEQ ID NO: 814097 - DNA, 664 bp, Homo sapiens
tttctattatttgttaaagggctgattaagtacttcgtataactgaaattaaataataggcaaataagtatttaawctgagatataatggcataactgccaattatcaatgctgtttcctatatcccttaagggaatctactacaggaagattttaatatattgttttaaaagctttggtgtaactggactattgtctttaaagctacacctttaactcctccttatagccaggggatcatagtaataatcatttaaatcatatgttcttggaattggaagggacctagaagttgtctaatccaattttcatttctcatcacagcttgagtaattttaataataggaagtttccaacttccatgttctaaaatctatataaaccacatactatggtggtattttaattagggcaagaaagacaggcaaaacacaggcaaattgggttgtgtcaagaacattcatttaggattttaaagcaccagttacttaaaaatatatgtatttatacaaattcaattactttaccaagcgatgctatgggatagatagtactttaagaaattttattctaaatagattccagtaggaaactaaatgactgaaatgataaaccctactctgtgtaactgctaaactaatttgtagtatatttactgctccat

SEQ ID NO: 814098 - DNA, 613 bp, Homo sapiens
ttaaacctttcttttgattgtgcagtttggcaacagctctgttgtaaaatcagagaagggatatttgggagtgctttgaggccaatgttgaaaaacaaaatatcttcagatataaactagaaagaagctttctgggaatatgctttgtgattgtgcattcttctcacagagttaaaccgttcttttaattgagcagtttggaaatgctgttgttggagaatctgcctagggatgtatgggagctcattgaggctcctggtgaaaaaggaaataacttcagataaaaactagaaagaagttttctaagaaacagccttgtgatgtgtgcattcaccttacagagttaaaccattcttttcattgagcagtttagaaacaatgttttagtggaatctgcaaagggatattttggagcgccttgaggtgtatggtaaaaaaggaaacaacatctgagaaaaagcagaaagaaactttctgagaaactcccttgtgatgtgtgcatgtttctcacagagttaaacatttcatttcattgagcagtctggaaactctgctttttcagagactagcaagrgatatatggtagcacattgaggtcaatggtgaaaaagga

SEQ ID NO: 814099 - DNA, 515 bp, Homo sapiens
gaaagaagctttctgggcaactgctttatgacgtgagcattcctctcacagtgttaaacgtttcttttgattgagcagttaacccatactctgtrtgtagaatctgagaagggttatttgggagttatttgaggcctatagtgaaaaagggaacatcttcagataaaaagtagaaaggagctttctggacaactgctttctgatgtgtgcattcatcccacagagttaaacctttcttttgatttagcagtttgcacactcggttttttttagattatgtgaagggatatttgggagtgctgtgaggtctatggtgagaaaggaaatatcttcagatgaaaactagaaagaagccttctcatacacagccttctgatatgtaccttcatctcacagagttaaagcattcttttgattaagctatttggaaaaactgttttgttaggatctgtgaagggatatttgggagcacttacaggcctattgtgaaaaagttaaatatcttcagataaaaa

SEQ ID NO: 814100 - DNA, 620 bp, Homo sapiens
aactagaaagaagctttctgggaatctgctttgtgatgtgtacattcatctcacagagttraacctttcttttgattgatcatttcagaaactgcttttgtagaatctgtgaagggatatttgggagcattttgaggcctatgctgaaaaaggaaatatcttcagatgaaaactacaaagaatgtttctgagaaactgctttgcaatgagttcattcgtctcacagagttaaacatttcttttcattaagcagtttggcaacactattttttgtagaatctgcaaggtctatggagaaaaagaaaatatcttgagaaaaaactagaaagaagctttctgagaaactgctctgtgatgagttcattcatcacagagagttaagcctttctcttgattaaacagtttggacacactgtttttgtagaatctgtgaaggattattttgtattgccttgaggcctgcggtgtaaattgaaatatctttagataaaaactagaaagaagctttctcagaaactgcttggttatgtgtgcattcatttaacatagataaactttttttgattgagcagtttggcaacactatttttgtggaatctgcaaagggatatttgggagtg

SEQ ID NO: 814101 - DNA, 591 bp, Homo sapiens
aaactaccaggaaattctctactaagagttttccattcctgaggctttttatagaactagccacaattctatcactgcagtctcattcctgcagaacctggaggggtttgaggaataattttattcagcatccatagagccaagtacaaaagaaccctcttctaacaaggtggcaagctggaaaggcttgaccccaaccatctgtgcacatgtctcaggccattagaatcgctttaggccattcctgccggttgggtctttgggaggcttctatttggcacaacatttcaatacgctatgacatattaagcatgctctagagctgaacatccaatcagaaaggcccgggtggatggcagagggagctcctgagccagtgtccattcttcaccttgagaagaacattaatggatgctgcatttcagagctccccatgtcgaagagctgaaacactattctagttattgtttgtgtcctaatgaaaatgttcctctatttcttygtttccaaaggaagtcacctgcctcactggtattctcagccatataatagagagttttggtagagctatttaaggtgctccagctacaa

SEQ ID NO: 814102 - DNA, 570 bp, Homo sapiens
gctttctggatcccctcgactaagacaaaaagaggttaggaaaaagaaaactttgaaaacatcccctaaatgtttcaaaataacatgaaacacttgatcaaattcctagatgactcggaaagtaaaggaactctaggggatcttattcccaattgttcccacacccatacgccctttacaacaagattgtgtatacttcttccagaaaagttcttcaacacctgcccacatatccacccaacaggtttgattggcatggtgagttcttgcttgggttcctagtccttaacaagcttgcaggcctgggtaatgcttgtcctagtctgccattagtgaaagatgagggtagccttccacttgggaaagccagcaaggacagaactcacagctcactgctggaattctttgttactgtacaataggcttccgagaacctgctacagaatcttctgacatcactctggcagtgagaggaagaggagtgtgtttggaggcataagggaaggagtgargggattgaataataaagtacactaaggagttctatgatataagttgaaatttgtccca

SEQ ID NO: 814103 - DNA, 584 bp, Homo sapiens
ctgcattcttacattcattgcagcactttttacaatagcaaaacatcatcctaagtgtgcatgaatgtgtaattgaataaagaaaatatggtgtgtatataccatagaatactattcagccataaaaaagaatgaaatcttgtctcttttttgtgagacagcatctctctctcacaaagtgcaagaggtgcagtggtgcagtggtgtgatcaaaactcactgcagccccaaactcctggtttcaaatgatcttcccaccttagcctcctaagtagctaactacaggcatgtgccatcatgcctggctaattttctaaaatttttatagagatggggtctggctatgttgcccaggctggtgttgaactcctgacctcaagcagtcctcccaccttggtctcctaatatgcttggattacaggtatgaccacacctggccagaaatcatgcattttacgcamtgtagatggaactggaggccattatgttaagtgaaataactcagaagcagaaagtaaattactgcatgttctcacttataagtgggagctaaataatgcataaacatggacatatagagtgga

SEQ ID NO: 814104 - DNA, 498 bp, Homo sapiens
tatttatatgaagctcaaaaacayttaaaactaaacaatatgttagaagtacacacatatgttgtaaaactacaaagaaaaccttgaaaaaccatttctttcattagtaacttgctcacattttgagatgaatgtttgatacctgcattctgcaacacttgaaaaagttaactatatataatattaaatattcccctgattaaaaaataggtcttattttcgccttagaaaattttttgttataaatatattttaaattgacatctttctcttttttggatcttaacaatctgtagtcatcactgtctagctgagtatctcctgatagaatcttccatgttggaaataggcaaactataattgaagcatttcaagaaaagcaaagtccagaccaggtggttcacacctgtaaattccagaactttgggaggccaaggcaggaggattgcttgagcccaggattctgagaccagcctgggtaacacagcgagaccccat

SEQ ID NO: 814105 - DNA, 552 bp, Homo sapiens
tatgtgagttatatctatttataattatcttattagaaacaaacactgagaaatatatgaaatatttgttaaatcatatgatatgcagcttcttagatagcccartgatccctgcctcctggtcttcatgccctggtgtaatccacttcccttgagtgtggcctggacttattaattcccttgaatacagcagaaatgatggaatgttacttcagatattaggttacaaaaaggctgtggcttctgtcttgctcgctctttctctctctgaatccccatctctctctaaggaaaaccagctaccatgttgagagctgtcctatggaaagatccatgtggcaaggaaccaatgtctctggccaacagcaatgaagacctgggtcctgtcaatagccatatagtgagcttaaaaacagatcctcacccggtgaagccttaagatgactgtcaccccactgacacttaattatagctttgtgagagaccctgagccagagatacccaactaagctgcacctggactcctgacccacagaaacaataagataataa

SEQ ID NO: 814106 - DNA, 554 bp, Homo sapiens
gcttttttttttttaagtacaaaaaatgaagcctagagagcttaaatcactaaaagaaacccaaacctgtaacaacaaaagtcatggttttaattaaatatatatacctgtgaaaatactgaggattcttggacctagatatcagtttatatacttctcttgacgagtaacaaaattgtggagagtagaaataggtactagtgcattcttgtcataatccagttacgagtaatggtggcataacaaaaatgagctctaacaaagcctaattttacagacctgactattcgtttaatacttttaaatatcaaaattataaaaatattgagtgggaaaaagtgttgtcagggtcaacttttgaacgatttgtgactgtggttgagagggccagagaaagggcagcctgtggatggggtctggccagggcagcaggaaaggctggttctggaaatgagscttgtgctcattttctctcttctcttcctcttctcttttgccaaaggcataaatcatctcattggtactaagagaaatgtggataattatttgtaaga

SEQ ID NO: 814107 - DNA, 246 bp, Homo sapiens
aattttttttcattaataaattaccartgattttaatattgtattgtgcacacatgcacataaatattttgctatgtgtgaatatatatttggagaatcttatgtttggggaaagaagggagagagtaagttacatttttttcttttagttttaatttatactcagatggattataaattttttagaatgttacattgttaacagcatgagagttaaaactatagccaggaattgtgacttttcca

SEQ ID NO: 814108 - DNA, 564 bp, Homo sapiens
caatcacttcccaaaggccccatctcccaataccatcaccttggtggttagtgtttcaaaatatgagttttcaggggacacagacattcacaccgtagtatatgctatgcaggttgtatcacaytatcaacggattattacagatctgaaaggttgtcttcctaaattgtcctttgctgtaggatttttatggatcaaatttcatcgtgttttgaagtaagaaaaagcgaaaggaaagtcgtttggcttagatttttgagggatatgagaaaatacctacatcttgatattgagttgtagatttctctgtttagagtaactgtctgtagtaataaggtcaaggacattctgatctttattctctgatacccatctaaatctaaaagattgcattactaattgaaataccaccactcacttgtcagaaacatttatattatgctggttcccttttccttgttccagtgagattccaggtgtatcttccactttttgaagctctccatagctatatttatctcttctggtatcttctacaccacagagaaaatgtaaaaccaaaaa

SEQ ID NO: 814109 - DNA, 649 bp, Homo sapiens
atagtgaaaatcttacacatgcatggagttttaagaagagaacaggctcaagtgttatacttaggaaagcacaaacagtggctttggaccctgggaatacatgaaaaaatcctgaggtagaactataccatatcattaagttagcccacctgccaggtattatgtggtaatgccaaataatggaaacttcaacctccctccatctcctgctttttcattccttacggtttctagtatgctgacaaagaagaatacttgaaggagttttttctcagctatctaatgtagggcttcccaaactgtgctttctagagcatctctggcagttctgcaagatgttaataagcatccgtgaactcctgtgtcaaaaactgaaatatgaaacatttcttaattgcaggccttctcaaaacctttataatataggccagggatttccgagagggggtgtagttagtagctccttcttgtgctttttttgccccccaaaccacagaccccttttcctcatggactacctattratacctcaacgttttttgaaaaatactcatcttttgattagagaaattaatgtcatcttcatagtcatttgggattttaatctttgagggtcttttgtacgtgaaaggcatactcatagttactg

SEQ ID NO: 814110 - DNA, 617 bp, Homo sapiens
ctcacctgcctgccctctgctggattcccaaagcttactgagttattaagcaatctttctaaatgtacttaacaaaattgcaattgtagaataagctaagggaattgtacactgtttcctgtactttgtttaaaagtgctactaaagtaaatgattgatcatagattttactttttaagtactgatagagtttcagtttcagtctcacaatttacaaaaatattaacattaacagcctttccatttcatccagaaaggtaatgtaggtaatgtcacaaccattcaaaatttttcaggctagaaaagctgggtgaggtcggagcagggcaatgaggaaatatccagtttgatcaatttacaaattaaaaaaagagtaacttactctgtttgattaaaattataatcctatgctatcaaaatataattttaaacattatattcagatgatataaatgtacttgataattactatttatatagcactcattatttaccaagcaccttctamgtactttacatgtatcaactcatttaatcaccacagcaacctatgagataagtattattacatgtccatttctcagatggggaaatgaaagcatagagatgaagtgcct

SEQ ID NO: 814111 - DNA, 624 bp, Homo sapiens
tataatagatttgtgtatattttatgatagtaaatgataaaatagagtagtatctacatttataccttcttatttttaaaaatatttcaacactacaccattcatttgaggtgcctttttttttttttttttttttttgagacatagagtctcactttgtcactgaggctggagtgcagtgtgtgatcttggctcactcctccctttgcctcccgggctcaagtagtgatcctcccacctcagcctcccaagtagttgggactacagatgtgactaccatgcctggctaagtttttgtattttttttctagagatggggtttcaccatgttgctcaggctggtcttgaactcctgagctcaagcgatccgcctgcctcagcctcccaaagtgctgggattataggtgtgagccaccatgcccggctatgtccgagtttttaaaaattgtcataagtctccaaaaatttttccaatatatttattgaaaaaaatccatgcataagtggttctctacagttcaaactcatgttgttcaagggtgaactgttaycttctttggaaaggtgtctgttaaggtcatcggcccatattttaatcagattgtattcttatttttgagtttt

SEQ ID NO: 814112 - DNA, 578 bp, Homo sapiens
tattggctgtgggtctgtcataaatagctcttattattttgagatatgttccatcaatacctagtatattgagagtgtttagcmtgaagggttgaattttattgaaggccttttctgcctctattgagataatcatgtggtttttgtcattggttctgtttatgtgatggattatgtttattgatttgcatatgttgaaccaggtttgcatcccagagataaagccgacttgatcatggtagataagctctttgatgtgctgctggatttggcttgccagtattttattgaggatttttgagttgatgttcatcaggtttaatggcctgaaattttctttttttgttgtgtctctgccaggatttggtatcaggatgatgctggcctcataaaatgaattagggaggagtctctctttttctgttgattgaaatagtttcagaaggaatggtaccagctcctctttgtaactctggtagaattcagtcgtgaatccgtctggtccagggctttttttttggttggtaggctaccaattactgccttaatttcagaacctgttattgctctattcaggg

SEQ ID NO: 814113 - DNA, 573 bp, Homo sapiens
tacgtgcatatgttatatgcgtgtgactgaatagtgtatayggtacgtgtgtcttgtctgtgtgtacaactacatgtctatgtgaagaatctgggtggtgtgtgtgtctgtgcccttgtatgtgcatgtgtttgtgtgtgtgtatacaaggtatgtgtgtttacagagtatcttagtgcacatgtgtgtgtagagggccaggcagcaagaaggcctcccagagaggacaatctttggcctggctcttggaggaggaggaacagttcagtaagtggaaaaagaagggagaggccttccaggaagagggacaggcaggcagggtgtgtacaggcagaggtgtgactgagactggcatgtgtggggcatggtggcagggggtgagggggtggcgaggagatgggggcacggatgggagaaggtgaggactcagtttgcgggggcacactaagtgtgcctcactggagccctcagcgcccctttagaatttgaggtgggcttgccagagttttgggaagatggcagcagcagcagggcagcacctctgggaagtcccgggaagaggcctggctaggc

SEQ ID NO: 814114 - DNA, 503 bp, Homo sapiens
attttaaaattggaatttgtctttgtaataaaaaagtaaacaaacaaaaaacatcactataactgcttaaaaaaaaacactttaccttgaataaaatgaaaactagcctgtgttcatttggaaaatttattttgaagtcatctttcatatataaaagcaacagcaaacatattttagtgttagggctcagaaaaaaaaatcctctttagccttctttaaaaaaaaaccaaaaacggctgggcgcagtggctcatgcctgtaatcccagcattttgggaggccgaggcgggcggaccacaaggtcaggagattaagaccatcctggctaacacggtgaaaccccatctctactaaaaatacaaaaaattagctgggtgcggtggtgggcgcctgtactcccagctacttggaaggctgaggcaggagatagcgccactgcagtcctgcctgggcgaaagagcgagactccgtctcaagaaaaaaraaaacaaaaaacaaaaaac

SEQ ID NO: 814115 - DNA, 610 bp, Homo sapiens
gaacagaacaacaacgatgtttggggaacaaaggaagataaccttaaggtctgactgcctgtggggtccagcagaatgaagccatagttttcttcttgcagaaagcgagtaggagaartatcgctgaatttttttcccagcaaggaataaccctggggaaggaatgcatttccaggggtaggtctatggatggccactctgggagtgtctgtcttacgtggttgaagctaagggatgaaataagccctggtctcctgcagtaccttcaggcttactaggattgggaaattccagcctggtgaattctagtcagactggttgtctgctctggaatcctgtttcctgttaagatgtttatcaagacaatacatgcccagtgggacatggaacctcatcagtaattcttatttcaccctgaccttgtgatcttgctctgctcttctgccctcatgatgttttattgccctttgaagcatgtgatctttgtgacttactccctgttcatacccccctccccttttggaatccctaataaaaacttgctggttttgcagcttaagaggcatcatggaacctaccaatagtgatgtcacccctggaggcccagctg

SEQ ID NO: 814116 - DNA, 536 bp, Homo sapiens
gaaaaaaacaaccctcacagaatctctattttatctggagaattagtcattgtgttttgccttttgatgtactgttgcaataaggatccacacatagattctattaagctttgctaatgttctatcaactaggggacctgcagatttaacctatagagagaatgtagctttcactgccaaaatcaagttttccctaaagcacacatcgaacttccatcttccactctagggcatttcctttccagaaaagatcccctaatggatattagactaaaataatagcatagcagctaaatgtattgtttctttacaaatgtttcaatacagagacaaagggagtgtgttaatttccctccttttagtctcacttaaaaattcatatagctgagtacctggcaatcaacacttaatcaaacaaccaacagagaaattawttgtaaaataaatgtgatctaaactgtcactgtaaaaaggctgaagtagaattcattttatgtagacttcaagcaactcaacttaatttctgaagcatgatt

SEQ ID NO: 814117 - DNA, 602 bp, Homo sapiens
acctccagacaaggaaaattgccagaaataaagaggacacttcataatgataaaagggtcaattcatcaggaagacgtatcttaaatgtgtatgtgcctaataaaaaaagtttcaaaatctgtgaagcaaaacaagatattctcaaatcagtaatcacagttgggcatttttaacactactattagtacttgatggactatccacacaaagaatattgataaagagatagaaaatttgaacagtactgtcaacatatctggcctaaataacatttacagaacatttcacccaacactgcaaaatacacgttcttttcaggtttacatgagaaattcaccaatataggcaacaggatagaccaaaagaagtctcaacaaattttttaaaaaaggaaatcttattgagtattctcctgcaatagaattacattagaaatcaatacaatatataaaaatctccaaatattataaaatggaaaaaaaatgttttmtcatctcatctttaaaaatgaatgtcagtgaaagctcttattcaactctatgaatcccaagtgggtaacgaaaaatctccactaaattgttcaagaaaattaactctcaaa

SEQ ID NO: 814118 - DNA, 642 bp, Homo sapiens
ctcagcaaactaacacaggaacagaaaatcaaacaccacatgttctcattataagtgtgaactgaacaatgagaacacayggatacagggaggagaacaacacacattggggcctgtcggggaggcagagggagggagagcatcaggataaatagctaatgcatgcagggcttaatacctaggtgatgggttgataggtgcagcaaaccaccatggcacacgtttatctatgtaacaaacctgcacatcctgcacatgtaccccagaacttaaaataaaataaagaaatctctccttcccaccttttcccccccatcaccccatgcaaacaattggtctactttgtcactgtgagttagttagcattttctaaaattttatataaatggactcatacaccatgcactctttttgactggcttatttcattcagcataatgattttgagattcatccattttgatgagtgtagcattagtttgttcattttcattgctgaatcatattctattgtattgtattctattgggtggacacaccacatttgtgtatccattcacctgctgatggacatttgggttatcctttgggttatcccaaggatgctaagattttccttattttttttagaagttttctgat

SEQ ID NO: 814119 - DNA, 642 bp, Homo sapiens
ctcagcaaactaacacaggaacagaaaatcaaacaccacatgttctcattataagtgtgaactgaacaatgagaacacacggatrcagggaggagaacaacacacattggggcctgtcggggaggcagagggagggagagcatcaggataaatagctaatgcatgcagggcttaatacctaggtgatgggttgataggtgcagcaaaccaccatggcacacgtttatctatgtaacaaacctgcacatcctgcacatgtaccccagaacttaaaataaaataaagaaatctctccttcccaccttttcccccccatcaccccatgcaaacaattggtctactttgtcactgtgagttagttagcattttctaaaattttatataaatggactcatacaccatgcactctttttgactggcttatttcattcagcataatgattttgagattcatccattttgatgagtgtagcattagtttgttcattttcattgctgaatcatattctattgtattgtattctattgggtggacacaccacatttgtgtatccattcacctgctgatggacatttgggttatcctttgggttatcccaaggatgctaagattttccttattttttttagaagttttctgat

SEQ ID NO: 814120 - DNA, 642 bp, Homo sapiens
ctcagcaaactaacacaggaacagaaaatcaaacaccacatgttctcattataagtgtgaactgaacaatgagaacacacggatacagggaggagaacaacacacattggggcctgtyggggaggcagagggagggagagcatcaggataaatagctaatgcatgcagggcttaatacctaggtgatgggttgataggtgcagcaaaccaccatggcacacgtttatctatgtaacaaacctgcacatcctgcacatgtaccccagaacttaaaataaaataaagaaatctctccttcccaccttttcccccccatcaccccatgcaaacaattggtctactttgtcactgtgagttagttagcattttctaaaattttatataaatggactcatacaccatgcactctttttgactggcttatttcattcagcataatgattttgagattcatccattttgatgagtgtagcattagtttgttcattttcattgctgaatcatattctattgtattgtattctattgggtggacacaccacatttgtgtatccattcacctgctgatggacatttgggttatcctttgggttatcccaaggatgctaagattttccttattttttttagaagttttctgat

SEQ ID NO: 814121 - DNA, 435 bp, Homo sapiens
attataatacccctgtggaaataaacaggcaagcaaagtttcttgaggcactccttggagggatgaaaaaggggataaccaasaccataaattataaggtcagggaagtcacataagggaaggagaaaaacccagctatgttttatggcaggttggaagaggccttcagaaaatatacaaatttagacccttcctctcccaagggtattgtgctaatggcacagcattttatcagccagtccactctggacatcaggtgcaagctccaaaaattgcaatatgggaccactaataaccaaaatcagtttcctgatactgcctttatggtatataacaatcgtgacctggaggaggggaaaaaagaacagagtagagaaaaaatgacacaccaaaattatggtagccatcacagccaacgcgctaagtgcccaaaga

SEQ ID NO: 814122 - DNA, 631 bp, Homo sapiens
tagaaaatgtttcatgtgctgaccatactccctgcttcttttctttccacctcatctccttgtgtattttgttttattttttaatctttgtaggtgtatctttgtgggctgtatcaaatccatttgaaatgaggcagggataaattcagaatgaactttcaaaaaagactgaaaatagtgacatgtatctttcctcatgaagcttaatctatatttactccattaaaacaataaacaagctcaaattggaatgagaacttttataacttaccctgaggcttatcctggaaccaactgttttctgtttgtcagagagtttcttccctctttcacaagtaagaacctgattgtatctccctcctattctcttctgcaaattagaacactcatttttcactttattaaccagaaataaaggtggagcaaatactacactacattgagtaaacttgcagaaaccctcaaaaaagtcaattccctacaggcatggggatgtgaaggccrctgatgcccctgagtgggattggggagacaattttctcctgcagtctcaacactaagggaagcattcagaccttaagaggcagggacctaccaaggacagtactggctttactgagagtcttggtct

SEQ ID NO: 814123 - DNA, 615 bp, Homo sapiens
ctatgaaaatttcagaaacctatttctgaagatatattacctaaaatcgcatcatccaagaagcctgttcagactggaatgcagagctgcaaaacattccaagcagtcggatttttagaggatgaagcttccaggtccaaacagagtagcttcttagtacctttgggcctttcacactttttagtcttgcagctacagtgaagaagagcagcatcattaattagctgtgtaaccctgccaccccccaccctgcattccccgcccaggaaccctcataaggcctcagggtcctcaactgtaagataggaagggtgtctgacctctaaggtttctctcaactccaaaattctgtgattctgtataggtgctttgcgcttgattttaagtttctacacaaatattactctaaaaaaagaaagtcaatgtaaaaacatttgggaataaaagaagaaattccagtattccaccaatttaacaaagtaatttttttttgcattgtatcttctgtgtcttaatcctcatgggtgccttgtaaaartagttgcaattgtagtttacacataattttgtctttcacattttatttagttttatatcacaaatattcatatcttt

SEQ ID NO: 814124 - DNA, 572 bp, Homo sapiens
atgggctggtgttgagtgtctgtgtcttttccaggtgcacagtgcaagytgtcaattaatctaccattctgggatctggagaatggtggccctcttctcacagctccattagacagtgtcccagtgggaactgtgtggcagctgcaaccccacatttcccttcctcactgccctagcagaggttctccatgagggcccctcctctgcagcaaacttctgtctggacacccaggcatttccatacatcctctgaaatctaagcagaggttcccaaacctcagttcttgacttctgtgcacctgtaggcccaacaccacatttaagctgtccatgcttggggcttgcaccctcttaagcaatgacctgagctctatgttggcaccttttagccatagctggggtgcaggccaccaagtcttgagacttcacaaagcagtaaggccctaggcctggcccacaaaaccattttaccctcctaggcctccaggcctgtgatgagaggggctgccatgaacacatctgacatgccctggagatgttttccccattgatttggtgattaacatttggct

SEQ ID NO: 814125 - DNA, 567 bp, Homo sapiens
ctggtggaaagaatgggtgattgaggctgtgtttacacggccgtttctttgtttgtttgtttgttttttgtgagacaaggtctcactctgtcatccaggctggagtgcagtgacatgataacagctcactgcagcctcaacctcgtgggctccggatatcctcccacctaggcctcctgagtatatgggattacaggaacacaacactatgccaggctgatttttaaacttcttatagagatggggtcttgcttattgcccagagtgggcttgaattcctggcctcaagcaatcctcccaccttggcctcccaaaatgctgagattacaggtgtgaggcactgcaccccactcacagcactgtcactgactgcatcatcagtagtccgtaaaagagaaggaagggcaaagatgataggtattacaaggggctaaatcctcccaatgcctccctgcctggctccaccatagcttctttcccattcgccacccattcaccattcacgtgtcaaagyggtctttttcttacacaaatctcacaggtctggtcctgctttaaatactttga

SEQ ID NO: 814126 - DNA, 481 bp, Homo sapiens
gatctccagggctgaagtatgggcatctatgaatcaatgcccatcaggtgattgtgatgatcagtcaatattggcagcctctgatttaattaatcatcctgagaataatgttccttatgtgtaagattattagaaagccaagttttctctcagagttttggtgcagatcaaatgatgtcctgtttttacaaagcctgaagcccaggtaaacctaaagcactgttattactgttattactgcagagaacctgtgtgctgtggaaggtccccaggctacagggtgcagagatgtccactgggcacatgctgacagatccttcaaaaaatggtacttaaagaagattagatcaacatttctgagaaaagcatctcttttgccttytcattggttcagtaaacccagttaaaggcaaagtttccagccctcagagcctgccatgggattcctgtatcattagatattgttaacattagcactttt

SEQ ID NO: 814127 - DNA, 625 bp, Homo sapiens
cactgtgttgtttttccagtggtagtgatggattggagcctgttcattcccacattctcacccagtcccctcctgtgtccaagagcacacatctgtgagacacctggttgtagctggagggagtctgagttaggtaaaatcaacttgccaagaaacagagctaagaagacagccagcatttgtggggattgagcttttgaccctggcctcatttgttctgcattctaaccactggccatagaacgttcatgtttttttggagtttgctaatagtagttttaaaattcaactttctatcaggagaatacagcatactttattaacccatgtttctgccctgtacccgtacagtatatctgctgttgaggatcctgcacttggagacaagaagacctgagttccagactctcactaccttggacaagtcacttaacttctctgtggctgcattattttaattgaaaattataaatagtaaacctattcttcctaacttataggattactgggaaaataatacgaaatcatgaatgtgaatgtatttagtgaaatattrcacgcattgtggaaatttgggaagtttgatgttaaccccctctttcccactctggaccctggatataac

SEQ ID NO: 814128 - DNA, 615 bp, Homo sapiens
ccttcaacccttcctgcagaaactataaggtaaatgctatttgtcrgttggaaccacactgccaggaggcatttcataatttactgtgattgtacctgcagcaacctaagaggggtaattcaacaccacctgagttcctctcacttgttcaacttaatgtattgctccacatgagtgatcctaagcaggcttctaagcttcctgtttgttcaggattgattgacacatctttaaagagcctgcctagcaaagttagtttctgtaagacccttttctctattgttcagaagactgacatacttaccacgtacaccatgtggatttcctctattttttttctccctcccaccccactatctaacctctgagcacaaaagcacacttatatggtgagtgatttctattctaaaaggtatctcaaaagcacggcatttgaaaccgtagactttcctacaagaacacaggaatttaattccattgagcactcagctttcttgaccacggccttgcttactttggctttatgcaagggctggaaaaagccctcttaaagagttagtaaatctagctggttttgatgcagctaacagaggtgctgatgaaggagcagggacc

SEQ ID NO: 814129 - DNA, 264 bp, Homo sapiens
ctaaatctttcagtcatgagtactgaaatttcagactctaaagtgtcattcaactttctaccttatcttttttagagattagttataatcaaataaagagggctaaaggcagacttatctccaaatctttgccatatacatatttttcatttacaaatattatatattggcaaaaattcttattatgtcttacacacaaaattgatgagttaataaataagcatagkagaagtgtcatcactaaaagatgtatgttacgtgtgt

SEQ ID NO: 814130 - DNA, 672 bp, Homo sapiens
ttcctcatctggcacttgatggctgggttttcagattaggctgactgttgacatgcccatataaaacattctttcattgagcatattgcatttatacaggaggccaccttstcccaccttctgccatattgtgcccatatttttttatgtcaattgtccaaacattgactctcacattttcccccttttgatttttcattgtgcaccacatttgacactttaactacttttactagttgtccatgccttgtcacaaagactgaaactgacacaggttttgcctaaacagttgccttgaataagtacatttgtcatatggatatccccttcaaatcctttagaacaccttggatacttttctgctaatcttttcttacagttatttgggctccaggactcagctacgtgaagggaactatcattctttgtaacagttatttcataccaacagtaaatttttaaataaaccccagaaagtgttcttgagattagctagttcatggcagcctgtggcttgtgtccctgtctggctcctgagggaatgatccagtttgattgaagaattgctgataattctactaaattgaaagagttccactttgatctaatataatatctaaaatttttacctttagaataaacctcattatactggtgaggagagggatggac

SEQ ID NO: 814131 - DNA, 486 bp, Homo sapiens
cgtttctgctaaaactcaaaaattagccgggtaagatggcatgcgtgcctataatctcagctactggagaggctgaggtgggagaatcgcttgagcctgggaggtggaagttgtagtgagtagagattgcacccctgcactctagtctgggtggtagagcgagacactatctcaaaaaaaaaaattatttttgagtgtaaaataattcaaatgtgcagaaaaatgctaacaaattacagatatcaaaatttattaaccaccattcacatttgaaagatcttaattttcatgtagcctttttaaagaaaataaataagtaaaaattatccctccaccttctaatcctgtctaytctccttttctttctttccacaggtagccactctctaaaagttaatatatatttctcctgtgcattttggaaatcttgtactacatatttatgtatctagacatttgctttttctccaaaacttatgtttttaa

SEQ ID NO: 814132 - DNA, 404 bp, Homo sapiens
ctaccaaattatcttttgggaacgtgatattcctaaagaaataaaatagcatactgtggtcatcataggaaaaatcagaactttgttgacttcttttaccattattttacagagtagscttgtgtttactttgagtaacttgtgggagagtagggctcccaatcttttcagtgattagcacctatcaagttttaatggagcctcagcaaccctctgagttagtgataaactctgtgacttggagaaaatcagtgcttagagggaataagtaagttgacaaatgttacttagcttgtaaggggcattgttggtttaattattaaccaagacctctcaaaaaaactgcacccttgtcacagtgtcatcaagtaggttaaataagatcatgtaggtcaagtccattg

SEQ ID NO: 814133 - DNA, 593 bp, Homo sapiens
caaaatttaagtgattggcaaaggtttgtctaaaaacagcagattatactctggctgacagccttgaagcaccgagtgagaaagtccctggtaagtaaaaaactgatttccaaaagagggggtttttaaccaaatccccccttcagcatctgctctctactgatgcacaatgtcacatcactgatgattatgaaaaaagctttcctttctgtgttatctccaaataaaatcttatcatgatgccaaagatagggaagaggaacctaataggtgtataaagagaaaagactgctttgagaaaaaaagacaaattctgaataaaactagtatttcagggggaaatattaacggcttgaatttaatattaaaaacaaccaaggttttcttatccttcacactattaggttaaatcaatgggatatgagtaaagaaaccaatcttcacagtactttactgtagatatagaaggatagagaataaaaaggatacaatttgtgaagtcagaaatcaggataaacaaagggctctraaatctgctaaaacactctctaggaagttataacctaaaattttctttttttcctctggaaatc

SEQ ID NO: 814134 - DNA, 601 bp, Homo sapiens
ggtttttacttactgaaatttcatagtcacttcaatgcaataatatgtcttcctcctatttacctatttggataaatagaaccaagattcacatgctcattagaataataataatattaaaakttcaaacatctactttgaaagttctagggccttccagatagttaatatgtcactgtcacttcctttgacttcccactgtttttgccttagctctggctgtcatcatctcttacctggaccatttcaacagcctttcactttctccgtcagtctccctagcatctacatcacagtcagggtgatatttctaaaatgcaaatacaattgatctgattctgtcattctcctgcttacaatccttcaataggctgcacaccaccaattcaaactccttggtatggcattcagagtcctctgtgatctatctcctgcccatctgcccagcttccatataaggaacttacataaaccctaatccagagcatacctggagtgttttagtaacagctgggaggccagcgtagctggagtggagtgagcaagagggatactggtagaaggtgagatcagagaggtcatgggaggcaagggacaggat

SEQ ID NO: 814135 - DNA, 541 bp, Homo sapiens
gtctctttcaggagcacccaaaatacaaaaggaagagagcccagtagtagaaaaacctatactccaggagtacacatttgtggtttgccttcacaacatcaattgccatttcctcctacattcagttacttggagactctgtcctcccccactctggtcccatagcccaggctcagtcaagtatttccttgaccacagtgttgattccataatgggtatctgaattaagccaagtcctgtcagagcaatggctgcaagttttgaaagaaaatagtgtagaggttatctgtgaatagaactaaaagaggagaatgtggagatcaaagcctgggaaggagatgtcatattttaaaaaaaagagtcagtcgtatctgcagtaagaatacctctggaattttcagttacgtgactcaagcttaaagcagattttccctcctaccacatgctacataaaagatcctgcctgactccctcccatagtatctgtttatwttcttaagtttttaaatgaaatcacaggaaaaatgaaaacggtctcccc

SEQ ID NO: 814136 - DNA, 541 bp, Homo sapiens
gtctctttcaggagcacccaaaatacaaaaggaagagagcccagtagtagaaaaacctatactccaggagtacacatttgtggtttgccttcacaacatcaattgccatttcctcctacattcagttacttggagactctgtcctcccccactctggtcccatagcccaggctcagtcaagtatttccttgaccacagtgttgattccataatgggtatctgaattaagccaagtcctgtcagagcaatggctgcaagttttgaaagaaaatagtgtagaggttatctgtgaatagaactaaaagaggagaatgtggagatcaaagcctgggaaggagatgtcatattttaaaaaaaagagtcagtcgtatctgcagtaagaatacctctggaattttcagttacgtgactcaagcttaaagcagattttccctcctaccacatgctacataaaagatcctgcctgactccctcccatagtatctgtttattttcttaagtttttaartgaaatcacaggaaaaatgaaaacggtctcccc

SEQ ID NO: 814137 - DNA, 523 bp, Homo sapiens
acacaaactcttttattgtcattccgcttctatttttctagtagagtgaatgtmtcaacgtaattatcatgaacataatggcccgtgattacttttatttgctataaaaatattctgattctaactgccaaactgttccggtcaaaatcaggagtgggaaacctacaagataagtaaagggttaaaccacccacaccatttcaatttttttcaaaatggctgctttgtctgtgtgcatacaccaatagcaaatgtccttctgttattgtacagccaatttgatgtgtcaagtattcatatgctaataacggtacagtttctcactttttcacagataaatggtaaagattgttacagacagtgaaacacaagaataaacagcttttatttcagacgcgataaattactttccattcaaataacatgcgacacacgctgctgaccattttgtttctattcactgttagtttgccttctgggtgtgtttttttagaatagtttgaaaatatttaacagatatgga

SEQ ID NO: 814138 - DNA, 603 bp, Homo sapiens
agtgaggcccaaagatgtggctgaattggtgcaatctcwtgataaaattttagtggataagaagttgcttcttatggatgagcaaagaaagtggtttcttgagatggaatctattcctcatgaagacgtgtgaacaatgttgaaatgacaacaaaggatttagaatattcatacacttaattgataaagcagtgatagggtttgaaaagattgcctccaattttgaaaaaagttctactgttggtcaaatgctatcaaacagcattgcatgctacagagaaatctttcatgaaagaaagagtcaatgaaagaggtaaacttcattgttgttttattttaagaaattgctgcagctaccacagccttcagcaaccaccagccttatcagtcagcagccatcaacaatgaggcaaggttctccaccagcaaaaaagatgacagcttgctaaagacacagatgattgttagcatttttagcagtaaagtgtttttcaaattaaggtatgctcattttttagacataatgctattgcacacttaatggactgcagtataactttcataggcactgggaaaccaaaaagtttgtgtgacttactttat

SEQ ID NO: 814139 - DNA, 631 bp, Homo sapiens
gctgttgattttagttagccattcgtctaatcttttttcaaggtttttagcttctttgtgatgggttcraacatcatcctttcacttggagaagtttgttattactcatcttttgaagcctacttctgtcaactcatcaaagtcattctccgtctaggtttgttctgttgctggtgaggagctgtgttcctttggaggagaagaagcattctgatttttagaattttaagtttttctcctctggtttctccccatctttgtggttttatctacctttggtctttgatgatggtgacctacagatggggtttttgtgtggatgtcctttttgttgatgttgatgctgttcctttctctttgttagttttccttctaacagtgaggaccctcagctgcaggtctgttcgaatttgctggaggtccactccagaccctgttttcctgggtgacatcagcaggggctgcagaacagcaaatgttgctgcctgatccttcctctggaagcttcatctcagaggggcacctggctgtgtgaggtgtcagtcggcccctactaggaggtgtctcccaggtaggctactcgggggtcagggacccacttgaggaggcagtctatccattctcaaatttc

SEQ ID NO: 814140 - DNA, 653 bp, Homo sapiens
cccctcccccagcctcactgcctccttgcagtttgatctcagacygctctgctagcagtgagcaaggctccatgggtatgggaccctctgagccaggcatgggatataatctcctggtgtgccatttgctgagaccattggaaaagcacagtattagggtgggagtgtcccgatttttcaggtaccatctgtcatggcttcccttggctaggaaagggaattccctgactccttgtgcttcctgggtgaggcagtgccccaccttggtttggctcacagtcacgtgggctgcacccactgtccacaagtcccagtgagatgaacccagtacctcagttggaaatgcagaaatcacccgtcttctgcgtcactcacgttgggagctgtacactggaggtcttcctatttggccatcttggagggcagagctccttgctttttttgtatactcactataggtttttgctttgtatttatcatgaggcttacaaaaaaacatcttatagtcataactggttattttaagctgttgacaacttaacttgattgaaaaaacaaagactccacaatactctacacttttatttcactctcccatttaaaagttttgacttcataatttatatatttttacattgaatatctcttaacat

SEQ ID NO: 814141 - DNA, 661 bp, Homo sapiens
aagatgctttttatgatatctgtctttgaaaatctactgaaacataatctatgtttcagtatatatatatatactgaaatatatatagataacatrtagtctatcctggaaaatgtcccatgtgcacttgagaagatgtgtatgctgttattgctgggtacggtgttcaatgtgtgtctattagatctagttggtttattctgttgtttaagtactctactttcttatttatcttttgtctggttgttttagccattattgagaatggggtactgaaatctccaactattattgtagaacagtctatttctcccattggttctgtcagtttttgttgcacatgtatatattttaatggtttgtcattaggtgcataaatgtttataattatatattcttgctgtactgaactttttattaatgcataatgcccttcttcattttttgtaaattttgaaaaatggaagactattttgtctgatattagtatcactaactctgatcttttctggttactatttccatagaatatctgtttccatcctttcactttaaatctatttgtgtcttggatctaaagtaaatctcttgtagacaacatacagttagattatattcttaaatttatcctgcaaatctctgtcttttgactggagagttt

SEQ ID NO: 814142 - DNA, 604 bp, Homo sapiens
ccaacaggccacccaatgggcacttacacatcgtactccaaaagacacaggatgttttgctaataaaaatcagtgggaacagggattcctctgggcaactcccccaacctcatccctttcagggattgagaaatctcccaaccattttcctgatgacagccatggttcattagagatacagcccctcaggggtgccttcctgtttcttataaagaacattttctttagattttttgaagaagcgcatctttcagattcacacaagcaggatgacgctggctgatgatgtaaccctggacgacctgatcatggctaaagatgacctctctggtgctgacatcaaggcaatctgtacagaagctggtctgatggccttaagagaacgtagaatgaaagtaacaaatgaagactacattgacttttctaaaatagaaatcagggaaggttaaacaaccttgtttcctatgatcatccattacagctggcagtaaaataccaaaatcsgcatgagattactgagttactttaccctcaaaaaacagaaagaaaaaaaaagatatacccacacactctcctgttttcagcaggagtgtgggctcaaaga

SEQ ID NO: 814143 - DNA, 546 bp, Homo sapiens
gtcttagttcggagtcacagtcttccctgcttcgtattctcctgctgcagcacygccgacagaattctcacacacacacagttgcctagttatttcaagtgtgatagtaggagaaacttctggagtgtcaggatcatcgactgaggcagatgaagcctcacctggtgctgactgtaggtttcgttgctctgaggtggtcactgcttactcttctgagcccttcctaacctttcagcaatctgttcacgtggttcctattctctcctcagaggctgaggtactttcttcagctactttgtagccattggcagagcacggtcctttcctgtttggatcccagatcgacccctttttggtgtctggttgaaactcttgtctgagctgccaatttcttcagaaattaggagttttgttccgggttctctttccataaattctatttcctctaggtttctttccttttgtgctccaagagacttttaatagtcattcttcaaatttggggacttcggaacagttcatgacaggtattttctttccctcatc

SEQ ID NO: 814144 - DNA, 694 bp, Homo sapiens
gtcacactaactgtccagcagtggatccaaactaagatgaaatccttgaaataccagataaaaaattcaaaaagttcattaatttgttcaaggagatacaaaacaaaggtaaaaaccaacataaagaaattttaaaaattcaggatattaataaaaacttttctaaagagatagattattttaaaggaaactcaatcagaacttctgcaatcaaagacacttttagggaactacaaaattcagtagaaaattttaacaacagactagaccaaatataagagagtttaagagcttgaagacaaaacttttgtattaaccgaatcagaaaaaaaaaatcaaaaatgatcaaattcctcaatgaataggagattatgtaaaacagccaaacccaagaacaaaaggtatttctgggtgagaagaaaaaacaaaattttagaatacctatttgagagaattattggtaaaacttccttggtgttgctaaatatctagatatccaaatacaagaagctcaaaaaacttctgtaagattaattccaaccagtatatcaccaaggcctaartttaatgtgaaggaaagaattctaagagcagtgagacaaaagcatcaggtaacttatgaattaaaacctatcaggttaacagcaaacttctcaacagaaaccttacaagccagaagtgattgggatgctaa

SEQ ID NO: 814145 - DNA, 546 bp, Homo sapiens
tataaatatataaatttccatttttattttagattcagtgggtacatgtgcaggtttgctacaagggtaaactgtatgatgctaagggtttgacttctattgatccgatcatccagacagtgaacgtagtmcccaataggaattcagttcttgtcctcattcctccctccctccttttggattctacagggtgtgttgttcccatctttatgtccatctgtatctaagatttggctcccacttataaatgagaacatgcaatgtttgatttttttttctgtgtcaatttgcttaagatactagcctccagcttcatccatattgctgcaaatgacattatttcattttttacagctgtgtagtatttcctgatgaatatgtaccacatttgtttatttcaatgagttttagggtacaggtagtttttgattacataggtaagttctttagtggtaatttttgaaattttagtgcacatgtcacctgatcagtgtacactctatccaatatgtagtcttttatccatcacctccctgtcaacattcc

SEQ ID NO: 814146 - DNA, 546 bp, Homo sapiens
tataaatatataaatttccatttttattttagattcagtgggtacatgtgcaggtttgctacaagggtaaactgtatgatgctaagggtttgacttctattgatccgatcatccagacagtgaacgtagtaccmaataggaattcagttcttgtcctcattcctccctccctccttttggattctacagggtgtgttgttcccatctttatgtccatctgtatctaagatttggctcccacttataaatgagaacatgcaatgtttgatttttttttctgtgtcaatttgcttaagatactagcctccagcttcatccatattgctgcaaatgacattatttcattttttacagctgtgtagtatttcctgatgaatatgtaccacatttgtttatttcaatgagttttagggtacaggtagtttttgattacataggtaagttctttagtggtaatttttgaaattttagtgcacatgtcacctgatcagtgtacactctatccaatatgtagtcttttatccatcacctccctgtcaacattcc

SEQ ID NO: 814147 - DNA, 583 bp, Homo sapiens
aaacttttgataaaatccaacatccctttatgataaaaccctcaacaaagtagtcattgaaagaacacacctcaaaataataagagccatttatgacaaacacacagccaacattttactgaatgagctcgaaccactcactttgagaactggaaaaagacaaagatgcccactttcaccactcctattcaacatagtactagaagttcttgccagggcagtcaggcaagagaaagaaacaaaagacacccaaataagaaaagaataagtcaaatcgtctatcttcactgatattatcattctgcacttagaaaatcctaaagactcttccaaaaggctcctagaactgataaataactttagtaaagtttcaggatacaaaaatcaatgtacaaagaatttgtatataccaaaaatgtccaggctgagagtcaaatcaagaacacaaccccacttagacaatagccagacmcacacacacaaatgctcaggaatatagctagccaagtagatgaaagatcgctataaggagaaatacagaacactgctgaaagaaatcagagatgacaaaaataaatggaaa

SEQ ID NO: 814148 - DNA, 664 bp, Homo sapiens
atttacagattcaaatgctgtttctatcaaactaccaatgtcattctttacagaattagaaaaagtactattctaaaattcagatagaaccaaaaaagagccccaagaaccaaagcaatcccaagcaaaaagaacaaagcatcacactactcaacttcaaactctactataaagccatcataaccaaagcagcttgatactgctacaaaaacagacgcatagaccaatgtaacagaatagaaaactcagaaataaaaacacacagctagaaaccatctaatattcaaaaaggccaacaaaagcaagcaatgaagaaagggccccctatccaataaatgatgctggataactgactagccatatgcaaaagattgatggtggactcctaccattcaccatgtacaaaaattaactcagaatggattaaagatttaaatgtaagacctcaagttttaaaagtcctggaaaaaaacctaggaaatactcttctttatttgaccttggcagaaaattgtttgactaagtccccaaaagcaattgcaacaaaaccraaaatagacaagtgggacctaattaaactaaagagcttctgcacagcaaaagaaaatataaacagagcgaacagacagcctacacaatgggagaagatatcctcaaattatgc

SEQ ID NO: 814149 - DNA, 527 bp, Homo sapiens
accaaagcaatcccaagcaaaaagaacaaagcatcacactactcaacttcaaactctactataaagccatcataaccaaagcagcttgatactgctacaaaaacagacgcatagaccaatgtaacagaatagaaaactcagaaataaaaacacacagctagaaaccatctaatattcaaaaaggccaacaaaagcaagcaatgaagaaagggccccctatccaataaatgatgctggataactgactagccatatgcaaaagattgatggtggactcctaccattcaccatgtacaaaaattaactcagaatggattaaagatttaaatgtaagacctcaagttttaaaagtcctggaaaaaaacctaggaaatactcttctttatttgaccttggcagaaaattgtttgactaagtccccaaaagcaattgcaacaaaaccaaaaatagacaagtgggacctaattaaactaaagagcttctgcacagcaaaaraaaatataaacagagcgaacagacagcctaca

SEQ ID NO: 814150 - DNA, 503 bp, Homo sapiens
gctgaacgtagactcctccccagggttggctcacttttgttttttttgtttgttcgttttaagacagagtctcgctctgtcacccaggctggagtgcagtggcgcgatctttgctcactgcaacctccgcctcccaggtgcaagcgattctactgcctcagcctcctgagtagctgggattacaggcacgcaccactacgcccggctcatttatatacatattttttagtagagatggggtttcaccatgttggtcaggctggtctcaaattcctgacctcgtgatccgcctgcctcagcctcccaaagcgctggggttacaggcgtgagccactgcgcccagcccccaggttggctcactttatggagagtcgctatctctggaaacagcctggtaatctgctccactcccaggtgacataaatttccagaaaaaytgcaaagtatggtagtactacctcttatccaacagcctgtttcctaaggcaaagccctgggcctga

SEQ ID NO: 814151 - DNA, 585 bp, Homo sapiens
tgccaaaattattcataaaagcaataagcattacgtgcaatggccctgaggatactcgagacccttgagccatgttgggaaaagcagccatacattcacaagttacaaggatacattttcaccattctcagctgtctcccaattgcctgtactcagccccagatgctgatgttctacatggcaacaggaactcaataagcatttgatgaattaattaatccaataaaactttctcaattctcgctcatttaatggagtcaaccaaggtgcctatagaagaatagtgtgcaatgacaaggccctggcaaagaaaggtgtcttgacattgcgaatcctccatgcttacggctgcctacagaccaaggcaggtgatggtgaagagtgaagcaacacaccgtggtgataaacagtaacccacctcagcctctttttaaggaaacaggagtggcggggacctccctstccacagcacaggagaaccagatacggagctcctctccctatctgaaggcagtggcagacgcatagctcagccaactgctgccaggtcagaagagggagccagtagatcaaattctcaaactt

SEQ ID NO: 814152 - DNA, 614 bp, Homo sapiens
ttctgctattgggctatagtagatgggttcgagcatcatttcttcctatagtcttccactttccagccrttttaccctaataatgttattaccttaatgacactaaagattttgccttacacttcatggcttatacagtgtcgttcaaacactctagaaataaagtagggactaacatttatggaacactgatatgagccaagcactgggttaagcattttaactggatcattacatttgaggcatctaacaaccctaagaaataggtagcactgttaaccccaatctcacatctgaggaaactgaggtttagggaggttaaggaattcatgcaaagtcacaagcagtaaatcacagagtagaattctaattcaacgcatgcaagcatttgcccctctgctatcccagaattctgctcttataggctgtttggcagaaattcctcatccaaaaggtactagtgacttttgctagacgaggttcttaccttggtggcatgggctgctattatttaattattactaaagcatctgagaggaagctgaccacaagttaattttaaaatcatgctcttagcagcattagcagagcctcccaaagtagctgccaggtct

SEQ ID NO: 814153 - DNA, 648 bp, Homo sapiens
acaatgcatttaaaacaattattctttatcattaaagttaataatatgcacattaacctcttatgtagtctaaatcaatattgtagtttaaaagatatgacctctggacagctttgtctaaatattgatttcattgtcatttgtataaggtatcaaacaaattacatgctgcactaatatcattaatgctggccccatagagcctctgactttatgggttcttataatacagggcataacattacaaaaatattaaggacttcacaaaatgtaattgccgaaaggatgagatttgagtatggcaggacagagttgttataaacagatgataatttctaaaccctttattttcagtgaatagaaaaaaaaaaaatactgctctttaacatgcatattggttgttgatgtttagtttcaaatggtagattttttttctgcctcagagggtctaatttaccttcttgtgatgtcatagatatctcagaagaaagtaactcaatcttagtccaattaaaatattataattttgcaatatagtagtttttcctraataaatttgattagaaatccctgttacaagttaatagtgaatcagatgagttgaaaaaatatatgccttagagtgaaggggctgaacttttcaaacgg

SEQ ID NO: 814154 - DNA, 530 bp, Homo sapiens
gttaatttttttcaagatatgaaaatcattggtagtagaatgctaccaatgctacttggtaatgctttaacatgtgattcaactggaagtggatgtgacctatttaagagatgttttattatttctgagatttctagcttttaaaagtcacaagtgagaattcgatagatccaaagagtcctttaatatgttcatcttgtggccttttactttgattatttaaaaacttctgatgagaccaactggcagagctagaaaatccaaaagaatactttgctctgagctttagctgggattttcttctctcacattattttggctttttcaggatttcagtttgaagtttaagtagagtcattcttttgaaatcctttattttattttcatgtttgttcaaatatgagtaccttatgcttccttatagttgccagtttagcagaataygactttattatgggggcttacaagaagagccttaattatagtaacaaatcaacattttagtattaccattcaaatgagtgtatgca

SEQ ID NO: 814155 - DNA, 688 bp, Homo sapiens
tctaatttaagagctaattatytttgttttcattcttaaaaacaaatttgttttttccattaaatataaaaatggttccaccttctagcaaccccttcattaaaactatgcaaataattcaaacaaagaaattaccacataattgggccatattacgcataatttattatgccttttcagtctttagataatagtttatttgtataaataatttttatagtacttcggtgttgtgtagggaggatacagtgtccagaatgaaagaagcagtgtgattagttgatgaggtgttgacattgcctttattttattatagctacacaggttgattagcatcataacattagaataaatctgcatacaattaaaataaaacataatgccaaaaaaaaagcacacaaaacttattgacctgattcaataagttctggtatagctgaaattttgctttaaaaaattgtccaccagtgttcttttgcttatttttttcagatgcgttttctttgactgtttttctttacctttctgaaagatatttataactctccagggtgcaccatcctactgagataactgtgttcttagatgcttgaagacaaagatgaacagctcacttgtggtgtgtggttatctcattatctctacccaccctgttgtagggtattgcttgagctacagtgaactgttt

SEQ ID NO: 814156 - DNA, 579 bp, Homo sapiens
tgaatatgcccttaggctcccaatgaaaagggagcttaatgatgtgtcaaaaattgcactacaagggcccacaataaattcagactttgtaagtacaggagccaacagggcagctggaatttaaggtagtgctyacaaccagaccacttgtcatgaagtcattctgaaggggagtagggaagtgtgtgtgtgtgtgtgtgtgtgtgtgtgtgtgtgtgttcagctagcccaaagcaagagaaaggaacctgtgtgaaaatgactgagagaagtcaaaggataagctggaaaccatgagtcaaagaagccaaatacatgttttcaaaacaatttatagagggagatataaatgttcacatcgtcgatcaaagaaatcacagacatattttcccagcaaaaataaccttaggtagaaatgaagctttgaaagcttgggtcttcttggggaaggtgcggtgattacctgggaactttcttttcttacattgaagaaagtacaggtaaaactggataacttttctaacccccttggcaatggaagtagcttctcattgtattttctcttaatctagtttagaa

SEQ ID NO: 814157 - DNA, 596 bp, Homo sapiens
cccttgttaaactgcaattcctgggtctcaaccsaaacctacttagtcagaagccagggaaaatatctggtaatgctgttactggaaaatattaccgatccagaccccaagagagggttcttggatcttgtgcaagaaagaattcagggcaagcccacagagtaaaatgaaagcaagtttattaggaaagtaaaggaaaagaatggctactccatagagcagccttgggggctgctggttgcccatttttatggttacttcttgataatatgctaaacaaagggtggattattcatacctcccctttttagacgttatagggtaacttcctgatgttgccatggcatttgtaaactgttgtggcgctggtgagagtgtagcagtgaggacgattagaggtcattcttgtggccgtcttgggtttgctgttttggctggcttctttactgcaatgttttatcagcaaggtctttatgacctgtattttgtgctgacctcctatctcatcctgtgacttagaatgccttaaccatctgggaatgcagcccagtaggtcttagcctcacttttacctaactcctatttaagatggagtt

SEQ ID NO: 814158 - DNA, 634 bp, Homo sapiens
ggcagaaataaagatgttctttraaaccaatgagaacaaagacacaacataccagtgtgtctgggacacatttaaagcagtgtgtggagggaaatttgttgcactaaatgcccacaagagaaagcaggaaagatctaaaactgacaccctaacatcacaattaaaagtaccagaggagcaagagcaaacacattcaaaagctagcagaaggcaagaaataactaagatcagagcagaactgaaggagatagagacacaaaaaacccttcaaaaaatcaatgaatacaggaggtgggtttctgaaaagatcaacaaaattgatagactagcaagactaataaagaagaaaagagaagaatcaaatagacgcaataaaaaatgataaaggggatatcaccaccaatcccacagaaatacaaactaccaccagagaatactataaactcctctatgcaaatagacttgaaaatctagaagaaatggataaattcctggacacatacaccctcccaagactaaaccaggaggaagttgaatccctgaatagaccaataacaggctctgaaattgaggcaataattaattgcctaccaaccaaaaaagtccaggaccagagagattcacagctgaattc

SEQ ID NO: 814159 - DNA, 541 bp, Homo sapiens
aacctgtctcaggctcaatatctacctttctgaaaaacattttttatgaaaatggctttgtgtccatctcgtatcctgttattttcagctcattgagacatggcattgaatatatctcttacatggcrttgcatatatctctaaaaagagaaacattttttctccacacctaattttcttcacctctatcaattcttccttggctatacctttacttaactcctatgtctgcaaggcttttgaagttcctttgcaaagatccattttaaactttctgtatattgtaatttaagttttctgtttctttctcccatctgctagtcaaattttcttctcagcagaaaacctcaccattgcttcatttccacacatggaaggcattcaagcatagcaactgggagtcacagttgtactgaaatgagaaggaaatgtgcttcccaacacagcgtcagcatctccaaccagaggccatttgtcttttttttttttttttttttttggcttttcagcaaatgactgctaaaggaaagtctctcaaaac

SEQ ID NO: 814160 - DNA, 598 bp, Homo sapiens
aaagtagcttcagagtaatgatagttcatatgttggggacaaatggaaaagagcctaagaaacttggactttatttcctagccaataggaagacatagcatggttttgaacaagaggtgaatggtagtatggatggtgatggaagtcatgaggtctttatcacaataaagatagtgattaaaatggaacaataattagatttacagcagacttttcaatggtatcaactaaagcctgaagacaatggaatgatgtggtaaagtgaagatagactataactagaattatatacccagctaaacattattcataagtaagggttaaacaaaaatatatttggacatacaaaagaagtatttattaccggcagaccttccccaatgggatttctaaaaaaatgcacttcaaaaacatgaaaggaggatttgagatacaagaaaaacttgtgagcagagaaactggaaaacatgtggataaatacaaataaataatgtytgtgttaaaaagtgtctgacttagggagtaaaaaatcaaggtagtttaaaatataaaacattgtacaacattatgatttatgataggaatggatgactgaaaa

SEQ ID NO: 814161 - DNA, 647 bp, Homo sapiens
gtggggctagggtgtttatgagatatctccgtattttgttcagttttgcgtgaacctmaaactgctttttaaaaagttgattattaagacagaaacaaatctcagtactgttgagcccagtttaaaaaggcaaaattgtcatatccagtttaacaataatattcttcccttaccataaatctgactatattctcagcgactggtagtacaatcaaaagagcagtttgatcctccctttctgtcccttctttttgtagctcttgctgtttcaaaatcagggatgaagaagagctgggagatgaagggagggcagatgactgtacgtaacctgatgtgcaattacaattctttcttggcttcttcagtgaagcctgtcctgccacccacaggacaagcttctgtgtgacagacatctgaatgctggtcatctgaatgctggttcccttatggaggaccttcagggagcctgttagggctctctcgctgcatagtgccatgacatggaagatttgctcagattccttctcttttaaaatttcttcagctcccttctgcccctgttaatatacatcatagctttccacacctcatccaggagacagctctcttggagatggcttaatggcaaaatgtctcaagtgcagcta

SEQ ID NO: 814162 - DNA, 725 bp, Homo sapiens
atgatttggggacaaagactgcatgtaagttagaaagaaggatccagaccaatatttttctttagaaaggagaaccagaagagatattggtaaccaaggagtgcttttaataayttgttatacttaaatacataaactattaagccccgggccactcctattatctttcagcgttgcgaggcacaatgctttgattttcaggaaaccaaatttagaagctttgtaaaaattattcactctaaaaattcattctccctccaggagaggggatgtctcatttaattggagctcatacttccacttctgcagtctcatctttttggagtctacaggccttaccaatacaggccttgctatttgaccactgttgctgtgccacccacaatttgctgccaatagcatgcccacgacactgctaacctcttttattcctctgccctccaatgcttttcagttttagaccagtaggaaatacctttctgatgttcatgaccatcatgaagatggggtccctgtgcccgaagcttttgggccaactaacacagtcctttccatttttccacagcatctcccttcctctgtgcaaaatgctcccaggtgagcctctttagatatttgaccctaactgtggattaggctcaagtttttgtccacattgcttgctggcactatatatctcaagaaatgtggctaagtaccttttttagtgtttcccaaatgtttta

SEQ ID NO: 814163 - DNA, 646 bp, Homo sapiens
tcctccttaacgctgacctttccmgatgctccggagtttctttttgactcgaaagactactataattgagggaggtagattatggtgcaggattacttctcgatcaagttcagggaaactggaagttttagaagtccagattctggataactgaggggttacttatgtatttataaatgagggggatttacttggcatttcttaaaatttacttttaagaaataactgcttcttaagatctatgatttgggaataaggaaacagcatatatctcattgagatctcttggttttggggggtcagagaaagttaattcagctaaataatgcctctacatagagaaagatcaagctgataatccccattaatttcctcgacacatttaaaaataaatgcaggctccagacaggacacccaccttagcagataattattttcattcagcagcaaaacattaagcttcaaataactaattgattcaatgaatatttatgaatcttggaggaagtttaaacaggctcaaaacatcctattaaccatttttctgatagcaatgtagatttttttttttaataattccttttcattctttaaggtctctgctaaaattgaccctgcctgggatcctgaaagaatggctctcatt

SEQ ID NO: 814164 - DNA, 475 bp, Homo sapiens
tttctctaagttcttcagtaatatacatgcacacatagcaactctttgtctaacattaatattctttagtttgttaacaaaatgagagaaagataacagatgagcctaggaaaagtatcattaatagtgtgaagttacatgacaataaggcatcaaattcatggttgttcataaaaaggaaaatatttttcttagggattctcaactcacttctcgatggccctttctaatattctcttgacctcctttgagatcctgaccctaactttagagaaaccaccctgcaaagtcactaccaaggttggccagggagaaatgagtgtctctttaaaacacaatagtatttcctcttattaaatacattaggataaagaacaaaattaacataataacattgatacatttgcaaaaacaaccaactrtaaaagaaagtgataaaacaagcagtttgtacattttctttttacaacacttg

SEQ ID NO: 814165 - DNA, 585 bp, Homo sapiens
cttggttttcccggtgaccaacccccatcctgaagctacctagaagctgccagccatcagtcaatccttagcctrcaaaaagacatccctttggagatcccaagggttttaggagctgtacaccaggaaacagtgtcaaagaccaaacatacatttcacaatgtcacagtcttctaaaaactataactagcctagcaaacctatgatttctagatctttgcattttcacttaaaataaagctaaataaaaagcgtccattgaaagactggtaagcaagtagaagtaccagtggcaagctaatgtggaaaaaaaaaatcattcaggcagagtgaaaatgattgtagctcgagaaacgttgctgtaacagatgggaaaacattcacattggggctctgatggagaagagcttgtagcttaatttcaaatatgatagattagcagctggaagccagaaccagccggaggttctgcagaggaactggaggtgaggatactggccacttatcagccagtacagaagtcctattccaaacctttaacaatctacatgccagctgagaaccatcctaaggggtcagatttag

SEQ ID NO: 814166 - DNA, 589 bp, Homo sapiens
tgctgggtcaaaatctaatggtgacaatgaacttaaaaaacaatcccattatccccagcattttgggaggccgaggagggcagatcatctgaggtcaggagttygagaccagcctggccaatttggtgaaaacttgtctctactaaaaaatacaaaaaaacaaaaacaaacaaacaaaaaacaaacacgcaaacaaaaaaacagaaaacaaacaacaaaaattagccaggcgtggtggtggcacacatctgtagtcccagctactcgagaggctgaggtaggagaattgcttgaacccagaaggcagaggttgcagtgagccaaggtcacaccactgcactccagcctgggtgacagagcgagactcctcaaaaaacaccaaaaagcaaaaaacaaagagctacaataacaaaaccccaatcccactatctctctgaaatgccacgttgcaaatcaaatgtattcctttgccatccaagaaggccattcttgcctggtgaaattcctctggagggccccacatatgttgcaaaagacagatctggggacaaaaggagccaccttgaaaatcccagctcatcctgttaga

SEQ ID NO: 814167 - DNA, 481 bp, Homo sapiens
gcatgccaccacgtttggctgatttaaaaaaattcttttttgcagacagggtctcactgtgttrttcgctatgttgttcagttgagctcctgggcttaaaaggtgctcctgccttagcctcccaaagtgttgagattataggcatgagcccccacgtccagccctcaggatatattttggaggtgagtagatggtacctgcggatggatttgatgcctggagttaagggaagcgagaagccaggattgacaactcaatttctggcttgggtatcagggtgaatttggaagcctgtaatgggatgggggaggatgggagctatgtgctatagcaccagagagggaaattgagcatcccatgtcaggctgtgggataagcaggtgcacgtctccaaagatgtcacctgggatattagctttaggttttgacttcctgatctgcttcctactttcccaggtagaaacactccttctgctttcag

SEQ ID NO: 814168 - DNA, 629 bp, Homo sapiens
acttgcctcaagatccttaattacatttgcagacaccttccccccacccaaataagataatgtccaggttctgataattagggcctagacataaattcttgggggaccactattaaacctactgcagtttgtcctctggcttcccgatattcacgtaacatctcacatgcaaaatacatagagctccttccaacatccctcaaagcctcagctcatagcatcagccccatctaaatgtcatccactcaaagttacaagtctcatcttctaaattatcttaatcaggtatgggtgagactctgggtatgaatgagtctagggaaaaattctcttgttatttcttttactatattttttgagttgttttcttagtgattgtcctgggaattaaaattaatatcttaactaaaaatagtctagtttgcattattaccaacttaatttcaatagtacacaaaactttgctttagtatatcttcattttctccccacttctttgtgtgattattatcagattacatgtttacatactgtaatcatctatagttttrtaataattgctttatacagctgtcctgtaaatcagatagaagaacaaattataaaaatatatttgtactgtcctgtat

SEQ ID NO: 814169 - DNA, 515 bp, Homo sapiens
agaccatccatctggctcctctacttgggtacatctgaccctgtgtcctggagggcaccaattctgacaccttcagggtcaaggggcctccctgtttggtgctgccccacccccaaccctgtcmgctctagaatcctctcttccacagtgctgatcacactgggtcccgctgttcccacgtctgcctccctaccagactgagctccaagctgccaggggcctcgtctccatctgggtcccagttcccaccatagagctgggcatggaggacagctcagggaagcttcttgggaaatgaattctgggagttccctctgccaaggacccactgtgttaagagctttaaggtgagtttaaccctagccaagaagttccctggatgcctccctagcccaagggggagctggccagggtgtcctgatccaggtgcaggcagagtgcctcagggtcctgcacatccacctggcacgcgctctcttgcatacctgcccagggctgggctttggtatgacatg

SEQ ID NO: 814170 - DNA, 592 bp, Homo sapiens
tcattgatcttctctattattttcatattttcagtttcrttgatttttactcttatcatttcctcccttctacttgctttgggcttattttgctttttctatttgagcatgttttggtattcaattttaatttacctattgtgtttggttgtatatctttgtatagtgtttactggttgctccagggattataataaacctatgtaactcttcagagtctttttcaaatcaatattttaccacttcaagttgaatgttgagaccctgccatcatataggtccctctgtcctcccctgaatgttgttgtcttttatacacctacatacatggaaaactacatcagacagcattatcattcctctttaaaatacgcaagagcctaatctgttatattttttcaggtatttctgttgctcttcctttattcctgatgttcaaaatttctttctagcatcattttccccctgtctgaagaacttccttcagcaaccatcttagggtagatctgctggccacacattctataagttttgcttcatctgagaatgtctttatttctccttaattcttgaagtgtatttttgctggaga

SEQ ID NO: 814171 - DNA, 538 bp, Homo sapiens
agctctctctctctcggctgctgccatgtgagacgtgcctttcatcttctgccatgatgtgaggcctccccagccaygtggaactgtaagtccaataaacctctttcttttgtaagttgcccagtctcgggtatgtctttatcagcattgtgaaaacggactaatacaaatgcctctctcacagctctgtgggccagaagtctgaaatgaatctcactgagccaagatcaagggtggacagggctgtgctccctccagaggctccaggggagaatctgtttctggcccatccccgctcctgggggctgccagcctcccttggcttgtggctgcatcatgccaatctctgcccccggatcatgtcgccccctcctcttctgacgtgtccctgtgcttccctcttgcaaggatgccttgattacatttaggactcacccgagtaatccaggacaggcttctcatctcaagagccttactgcaagcacatctgcaaagccctttcttcccatagaaggtacccgtctcaggttgcagggat

SEQ ID NO: 814172 - DNA, 611 bp, Homo sapiens
ctcaagttctgcctcccgccagtcctgtctgcaggcaggatccagtcctcacgcacccatgctgggcacggccctgcttccacaccgtgctcaggaggagagcgtccactcccaggagaggmcttgccaggcacctctccttagggacacctgcagttaggggtctggcgccagcttgtgtgtgagagattaactccccctggtaccgtcaggccccgagtgagggagccgcagcccagagaggcctctttctgtccagtttgcatcgccacatttgggtttctgtcccgcctggcctgggccccacctgcctgcggagctgccgaggccctcgtctagtgccctcccagaggggccttcagtcctggttcttatattacagaggcagccagaggcttccctgactctgtggctggcgcagccttgacaagtcatctggaattggctcacggcctcctcgcgtctcccggtgtctgatgtggcaatgaagctctatttcagggcctgcgggaggacccagcgtggctcagggtttgtcctcaagggagggcgtggatcagagcctgtagtgcggacctgggtgggggagggagaactggaccctgcactcc

SEQ ID NO: 814173 - DNA, 488 bp, Homo sapiens
atctgcaaaaagaaaaatatctagaactatctagcttcaggtgtggctggatccaggtgcccaaataaattttcagttgttttttttcccacatccccaacccttggctttgctctcctctrtgtcgatttcactctcaggcctgctcttctctgaggcagaaaaatggatgcaggcagctgctgcattacctcctcacagggcaacaacccgggggaaacagcttttcctttccaacaattccagcaatagttcctggatttaacttcatggaataccttgtggcaagtcctcatccctgagctatgttcatgtagtcagatgacaacgtattctacctggcctaggctgggtcatgtgccctccttgcccactggtgacgcagggatgagagctggttcctgagtgacacaggggctgtgctatcagaaggagaagggtgggccagaaacagtggctcatgcctgtaatcccagcactttgggagg

SEQ ID NO: 814174 - DNA, 488 bp, Homo sapiens
atctgcaaaaagaaaaatatctagaactatctagcttcaggtgtggctggatccaggtgcccaaataaattttcagttgttttttttcccacatccccaacccttggctttgctctcctctatgtcgatttcactctcaggcctgctcttctctgaggcagaaaaatggatgcaggcagctgctgcattacctcctcacagggcaacaacccgggggaaacagcttttcctttccaacaattccagcaatagttcctggatttaacttcatggaataccttgtggcaagtcctcatccctgagctatgttcatgtagtcagatgacaacgtattctacctggcctaggctgggtcatgtgccctccttgcccactggtgacgcagggatgagagctggttcctgagtgacacaggggctgtgctatcagaaggagaagggtgggccagraacagtggctcatgcctgtaatcccagcactttgggagg

SEQ ID NO: 814175 - DNA, 597 bp, Homo sapiens
ggcaggcttgtacctgctgataggccaccctcctgacaggtgccaggatccatgctgccgaaggtggggtggggggcctagctgacctcggtgctgraggaggggagtctgggctctgcacagccacctgccaggccatccaggagctgcctcaccccaggtcatctcaccccgacacagcaacgagagactttgcagatcttcagtggataaggggctgcttgcaggcaataggagtgggtaaggagatgactgtaagataacacctacccaggagactgcctgttctctctttcccttatcatttaaagagagatggatctaatgtagaacttttggtggatgggccacagatgttgagaaagtggcctgtctggaaactggtctggacaggtcacacgggagatcccggtttgtgttccggccctgggaggagctggctgtgtggatctcgggtgactccctcttcccgctttctcagcctcaatgtcttaatttgcaaattgagagattcattcacaaaaagtgttactccagacccttccggtacacaaaaccttggttctgtgttatggtagtccatcataagactttatt

SEQ ID NO: 814176 - DNA, 473 bp, Homo sapiens
ttctatttatgtacacagaaatgggaaaaggaaaaaaagtgtttattgaataaacaatcatagttgtagaaagtgagagataaggcataacacactacgttttttgtggaaagccagcaaaaggacagggaataagggaagatccttaaggatgttggggaaatgagatctgtacttcaattgtctgatttagaaaattaaccaataaatacttagggattgtttttatgattgaaagaggcctctagtcacacatgctttgtatttaattccagctgtatttaccttaagtaacttaagcactaagcgttagtcaactcatctgtaaaatggaaatagtaactccccacagagtatcactctgataaaatgaggtaacaatcagaaatgtytggtaaggcacctaatctgggtacgtcttactgcagagcataagctcttcactagtggactgctctctcagagtaattgtc

SEQ ID NO: 814177 - DNA, 559 bp, Homo sapiens
aaatgccagaaaaggcaagaaaacagatttacctctagaayctctgtaggagacagcctacaaaaatgactccttgattttagctgagtgagaccggttttggacttctgacttccagaaaggtaaggtaataatttgtgttgtattaagccatattgtgtgataatttgttacagcagcactagaaaattattacaaccagtaaggactgtatattagtaaaaaggaaactaggcagattgagttcaatgtaaccagatcacagaggctacaattagtaagttaattatcacaaggttatttcaatttaaagatattattctctcaacttctgaccttttccttttttccccttgtttttccttccttcttccctccctccctctttccttccttctttctctttatttttctttctttcttttctatttttcttccttcctttactccctttctctcctttccccctttctctttccccttcccctttcccgtttacggatttacccgagctacctagaatagggtctggcataaagtaggggtttgagaaatattg

SEQ ID NO: 814178 - DNA, 612 bp, Homo sapiens
aaaggggaactcagtcaacccacagaccaaatctgagaggaatttcatttagatttaagatcaattrtcctagattttaaaaccattagtccacctctttgaacagtgcttatagaaagaggaaaaagaagtcaccttcggtaccaaaatcttggaggcagcccctttcggcagagtttcccaaaccagtatatccaggagcttaattatgaagagttgtttcttctagaaaagctcacatagccaaaatttgggcccttatgcaaaatatatctccttttagagaatcagaaaaaaaattaccagtattaaagtttctggatgttcttacagagtaaaaaatgtatttagttgtgtttaacttagaatttctaaatgtgtttaatcacacaactccttattttttctgcaaaatacaacctgttaacatcctacaacaccagttccaaggggcatacttgggaatgctacctggtgcgtagctgcatagatgctgctttctaaatgccagaatgttgtttctctttttctctctcttttttaatgtcaagtttgagagcaaatttttaagaaataactaggtatctgagctgggagccactatggtagaaa

SEQ ID NO: 814179 - DNA, 612 bp, Homo sapiens
aaaggggaactcagtcaacccacagaccaaatctgagaggaatttcatttagatttaagatcaattgtcctagattttaaaaccattagtccacctctttgaacagtgcttatagaaagaggaaaaagaagtcaccttcggtaccaaaatcttggaggcagcccctttcggcagagtttcccaaaccagtatatccaggagcttaattatgaagagttgtttcttctagaaaagctcacatagccaaaatttgggcccttatgcaaaatatatctccttttagagaatcagaaaaaaaattaccagtattaaagtttctggatgttcttacagagtaaaaaatgtatttagttgtgtttaacttagaatttctaaatgtgtttaatcacacaactccttattttttctgcaaaatacaacctgttaacatcctacaacaccagttccaaggggcatacttgggaatgctacctggtgcgtagctgcataratgctgctttctaaatgccagaatgttgtttctctttttctctctcttttttaatgtcaagtttgagagcaaatttttaagaaataactaggtatctgagctgggagccactatggtagaaa

SEQ ID NO: 814180 - DNA, 535 bp, Homo sapiens
ctccatccatggaaagttgcttatgtaatacaagatgacagaagtcatacccttaaacaatatgtaaatctgactaactgggcaagtggtataataaagtaggaatagctagaaaataaagtttcttaaatgccaggggtcaggttgacatgaacccctgggctccattaatgcatcgtttctgcaagagattgcctctcatacttggcttgctggcctgtcaaaatgatctttttcactgtgagctgccttatattcactaaataaagctcatgggactcattaatccactcaaatttttgatgagtgcccactctggccagcactatattaggccatggagatacagtatgaaaaacagacctggtatccggaaccctcctgtgactgttggggatggggtcctgaggcctgkgtctgcaaagcctcttttgatggaggaggagctgagtgtatgagtctacagcccagcagcccaaaatgaggacgtggaagccaatgaactacctaccctatagttatctgctggagtgcc

SEQ ID NO: 814181 - DNA, 601 bp, Homo sapiens
aatttactaatctttgtctatatggtttgtgggttttgtgtgtcttaagaacttctctaattctaggttataaagacagtctatrttgtcttctaagagttttataaatttaccttgcacatttaaccactagaatggatgtcatatgtggcataaggtatagacccagtttttggtttttatcctgtgggtatccagttatcccagcgtcatttattgaaaagtccctgcaacttaatagctactgtcataaactaattatccatatgctataggctgaatgatgtcttccaaaaattcatgtgttgaggccttaagtcccagtatggtggtgtttcaagataggacatttagggggcaattagaattatatgaggttataaggatagggctttataagaagaggaagagagagattgctgtctctctgccatgtgaggatacaatgagaaggcactcatctgcaagccaggaaaaggcccttaccagaaaccaacttagtcacatcttgattttggatttccagtttctagaactgtgagaagtaaatgttatgtaagccccccagtctataatattttgttatggcatcacaagcaga

SEQ ID NO: 814182 - DNA, 529 bp, Homo sapiens
agtttgcaatcaggtttttcaggattagtgtatgtggaatagtaatcatgaagagagatggaattcaagttgggayaaatggcaaatgcaaaagcccagaggaggaatgagcaagttgttttgtttagaaggttgacttggagtgtggctgtctctcaataggctgatattaagaaataaggctgataaattggagtcgcatcagtgaacttcttgaaaactaggtagagagttgcggtttgagatgcaaataggaaactacaacataatctttaggaggaaaacttgaggagggcagcttgcaaatgaagagaacatgggtttgactcaacaagtaaggtaaaactaggttttgcaagtttcaccaccatccaagctctccccttcatttgggctgataaagattacgataagtctggggacatccctgaacccttgtgaatttcaatgaccaaagcacagactgtcttacacatgagctgtcagtcagggtgcatagcacttttagggcacttgagtgttgtaatgt

SEQ ID NO: 814183 - DNA, 529 bp, Homo sapiens
agtttgcaatcaggtttttcaggattagtgtatgtggaatagtaatcatgaagagagatggaattcaagttgggataaatggcaaatgcaaaagcccagaggaggaatgagcaagttgttttgtttagaaggttgacttggagtgtggctgtctctcaataggctgatattaagaaataaggctgataaattggagtcgcatcagtgaacttcttgaaaactaggtagagagttgcggtttgagatgcaaataggaaactacaacataatctttaggaggaaaacttgaggagggcagcttgcaaatgaagagaacatgggtttgactcaacaagtaaggtaaaactaggttttgcaagtttcaccaccatccaagctctccccttcatttgggctgataaagattacgataagtctggggacatccctgaacccttgtgaatttcartgaccaaagcacagactgtcttacacatgagctgtcagtcagggtgcatagcacttttagggcacttgagtgttgtaatgt

SEQ ID NO: 814184 - DNA, 529 bp, Homo sapiens
agtttgcaatcaggtttttcaggattagtgtatgtggaatagtaatcatgaagagagatggaattcaagttgggataaatggcaaatgcaaaagcccagaggaggaatgagcaagttgttttgtttagaaggttgacttggagtgtggctgtctctcaataggctgatattaagaaataaggctgataaattggagtcgcatcagtgaacttcttgaaaactaggtagagagttgcggtttgagatgcaaataggaaactacaacataatctttaggaggaaaacttgaggagggcagcttgcaaatgaagagaacatgggtttgactcaacaagtaaggtaaaactaggttttgcaagtttcaccaccatccaagctctccccttcatttgggctgataaagattacgataagtctggggacatccctgaacccttgtgaatttcaatgaccaaagcacagactgtcttacacatgagctgtcagtcagggtgcayagcacttttagggcacttgagtgttgtaatgt

SEQ ID NO: 814185 - DNA, 586 bp, Homo sapiens
attttttagagatgttccctttacaaacatttcccacttaatactttgtaagtatttaatacgattgctgtctaacatagcagtttgcacctaggctttggtccaagctgcttcttggaaatcatatttttcagtagctaccaggctgaggtgtagtcagtaactgaggtatagtcaggtttcagcaaggtctatttggtattgtacccactagactatataaaccaaaatttctgctacaataaagagttaaatagtactccataagacgtgttgcacgaggcatatggagatttcaagtgtgcatcgcagtgtgagcattaacttaaatgtgtcattttatagttctctagtgcagaactatttggtgtacgattgtatgtaacatgcaaatcccatcagttcacactactattatttgtaggattattttaacaaaataatagttccatttcctgtttggtataaaactaaggctttatttttaaaagtggaggaagatgttaatacamatttctctgtggtttattttccaaaattgatactttctcatatgtagcatgttgttgttgttgttgtttccaaa

SEQ ID NO: 814186 - DNA, 584 bp, Homo sapiens
gcgacgggcagcgcccagcgcggctttctcagagcgaccccctccggcgcgctgcggcccttgtcccgtcccggccgcctggcgctcgccagctgtcagcctcctggtgggtgtggacagggtgcccacctccctgccgcgcggtcagccaccgacgtggctttgcccgggcggttcctccgcccgtcggtgggctgcatgctttcctggctgcgcgggcgaggccctggagacttcccggggcccggccctcgccgatcgggcagccgcagcccagccgcgccgcggagccctgcgcccagtccccaagagcccaccccgcgcggctgccttcctgccgcccgcggctgcagttagcccgggaggaggaagacggcgtggaactcgttcttctcgcccccctccgccgactcccatcctttccaggtggacttctttctgttctttggacagatgggctaccgtttttcactgtggtcctctcatagcacaggaactttggcttcctgcgtttgataactgcacgttctgtacagtctctcttctgyatgtttcgatacgtgacagactgcccagtgtgactt

SEQ ID NO: 814187 - DNA, 524 bp, Homo sapiens
gtgctcagggtctaagacaggcacacaagaaacatcactactactgcatggccttctttagcagcatgtggaaatgttgcaaaccatgggaaggcttggattaaccccataaagggacaaagcaaggaaagaactggctgggattcccaacaatcttggagttcaaaggacccatggtagggctgttctggagtgttggatgggatgataattattaatagttccatctggttcctataaaaacaatcacttcaaaaacattgattattaaaagcctcatagaaaatttatttttaccacttctcggcctgggtaagatcaagtgtggtatctgtttatatcagtttaatatctgatacatcctctatcggaggataatatattgaatggatttttggagctagkagatggactagtaacttgccccactccacccattgacctggtattacagtacctccaggaatggtgcatcccctttggggtatagaatggttgcaacaaaaagtagatcaaggctgggt

SEQ ID NO: 814188 - DNA, 569 bp, Homo sapiens
ctccactttagttttgatcctgkccccctaccccacctgaggtagctttattgatcattctctcttttcctcatgacttgcctgttccactaactcattcttccacagtaaatatttagtaaacaatcaatttttgttccacaccacattttctccaccttttttttctgggaaaatctctgcatttcttagaaaatgccacctgtaatgaccaagtggctgtgtcctctgccatggtcttatataatcctgtatgctagtcacagttaattttccagggaaacattccagggaataaagtgaaggtgagacccccaaggtcctgagtattcattcacaggtgacatatcttcagaaaaatatcaaagctcttcccctgagagaatcagatgagctggttttttgttctaaacagaggagagaagaaaaccaaaaacagagaagagaatcaagaggagaaacaagatgaagaccagctagcacgaggtgaaaagtgtgggccaaactccaaggttgtggaggaggggaggagaagaagaggataaagcaaggagagagatgggtgaaga

SEQ ID NO: 814189 - DNA, 560 bp, Homo sapiens
ccacaaaaactgtgagataataaattggtattgttttaacaaattaacaagcaaaacaaaaaaaacaactccatcaaaaagtgggcaaaggacatgagcaggcaattctcaaaagatgacatacagccaacaagtatataaaaaaaagctcaacatcactaatcattagagaaatgcaaatcagaaccacagtgacatactatctcacacagccagactgtctattattaaaaagtcaacaaataatggatgctggagaggctggggagaaaagagtacgcttatatactcctggtgggaatataaattatttcagctactgtggaaagcagcctggcgatctctcaaagaacgtaaaacaactaccatttgacctagcaactccattactgggtatatacccaaagggaaataaatcattccaccaaaaagatgcacacttatatgttcatcgtggcactactcacaatacaaagacgtggaatcaacctmaatgcccatcaatggtggactggataaagaaaatgtggtgtgtatatgccatggaatactacgcacct

SEQ ID NO: 814190 - DNA, 508 bp, Homo sapiens
ggacacacttttagaaatgcaacatgctctggaaagtctcagcaatagaaytgaacaggagaagaaagaaattcagagcttgaagacaaggtctgtgaattaacccattccaacagagacaaaaaaaaaagaataagaaaatatgaacaaagcctccaagaagtctgggattatgttaaatgaccaaacctaagaataatcagtgttcctgaggaagaaaagaattctaaaaacttgggggaataattgaggacaacttccctggccttgctagagacctagacatccaaatacaagcatcacaaagaacacctgggaaattcatcacaaaaagattattgctgtcaatgaaaagagtcaaactctgtaaaatttaaggagatttattctgagccaaatatgaatgaccatggcccataacacagccctcaagaagtcctgagaacatgtccccagggtggtcaggatgcagcttggttttacatattttagagaggcatgagacacc

SEQ ID NO: 814191 - DNA, 621 bp, Homo sapiens
ctgagtatagcagagatggaatgatcckgagtgcattatgccaataaaccactcaattacctctaagctttgtgttatatgagagaatacactttctttatttttaagctgcttgagttgggttttctttacttgctgctgaaagtatcctgacaggtaagtgtgtagtgtgtatgcatgtgggaatgcaaggaggattaaatacagtagaagtcagagtgaaaggaaggaaatagttaaggtcatccctcatgaaatggaagggatatggcagcatacgttaggtggtatgtaagctgagaacaggtggaaaacagcccacatctacctggattttcctctgtacctcctgccatacgtttatttggccctgcatggattgttaaaaagtaaagggaggcacagtaaaattttaaagagtttatttgagcaaacagtgattcatgaatcaagagtagcagtttcaaaccagaagtggttcaggagatccacagagagaatacaagtgggaggcatttataggacaaactcaaaagtaatacaaagaaaatatttgattggttgcagtcatacagttgccttatttggtgtatcccattggaaaatgcctagttacataag

SEQ ID NO: 814192 - DNA, 621 bp, Homo sapiens
ctgagtatagcagagatggaatgatcctgagtgcattatgccaataaaccactcaattacctctaagctttgtgttatatgagagaatacactttctttatttttaagctgcttgagttgggttttctttacttgctgctgaaagtatcctgacaggtaagtgtgtagtgtgtatgcatgtgggaatgcaaggaggattaaatacagtagaagtcagagtgaaaggaaggaaatagttaaggtcatccctcatgaaatggaagggatatggcagcatacgttaggtggtatgtaagctgagaacaggtggaaaacagcccacatctacctggattttcctctgtacctcctgccatacgtttatttggccctgcatggattgttaaaaagtaaagggaggcacagtaaaattttaaagagtttatttgagcaaacagtgattcatgaatcaagagtagcagtttcaaaccagaagtggttcaggagatccacagagagaatacaagtgggaggcatttataggacaaactcaaaagtaatrcaaagaaaatatttgattggttgcagtcatacagttgccttatttggtgtatcccattggaaaatgcctagttacataag

SEQ ID NO: 814193 - DNA, 516 bp, Homo sapiens
cacaacggcacagccactgtggaaaacaaaagtttggcattttcttataaacttgcaaatatactttaaatataattcagcaatccactgctgggcatttaccctagagaaataaaaacttacattgacacaaaaacgttgacataaatatttacagcatctctatttataatagtctgagagtgaaaacagtgggtaaatggttaagctggtgtatccatagaatgggatactactcgcaataaaaggaaatgacctattgctacatccaacaactcggatgaatcttaaaggcagtgtgctgagtgaaggaagcagtcttgaaagattgcatactgtatcattccatttgtaggaggagcctcaaaaggacaaaactataggaacaatgaagagatcaatagttgccaggggttacaactggggggaggatttgaccacaaggagacagtccaaagaaatttattgagttgatgaaattgctgttttmtgattgtagtgatgtttatatgaaag

SEQ ID NO: 814194 - DNA, 622 bp, Homo sapiens
tcaagatcccaaacctcaaactctgcaaacgcccgatttaggttctttgaaagctcattaagcttttcaacattgtgcttcatttcttctgtagtcatcacttcgcgcttcctaaaactttccagttctctgtggtagccctcaagtctcaactcaaattctgagcatctgaaaataaagacagcctggttacctttggactttgcattttgtgcactttcaaaacatcagcactgcttgcccatatttaagcctgcagacaatttgatcagttacctgcagatttcctcccccaatactcccaactccatctttctctctctctctcaagataaatgaagatgaaaaaataagttaaactacctataagaccacctcccagaaatcgagctgttgtgagcctgttggtggttaaacatttccagatattttcctgtacaggtaaatacgtataagatatatgtacacgtatacatactgtttattcattcagccattagacatttattattgagtgcctaatatattctataactgccctaggcatcaggaatayatttgcgaagtatgctattaagttctctaccttcatggagcttctattttaactgagggagaccta

SEQ ID NO: 814195 - DNA, 555 bp, Homo sapiens
gccctaaataaccagcagtgatatcctggtagtatgctgtgggccttgtgttctgaaatgtgctgactacaggtgtgagacagtacattcccagctgtagtggcaacaacgagagactccttctgcttgagaaaagcagggtgaagagtaaaatggactttgtcctgcctctatccccctcgacaatggggaacagagcaccaaccagcctcttggagtcaccaatttcaggctgtggcacttggacagcatttctaggcccgcccagagcccactgccttgaagagtgagtcccaggtctggcagcattcaccacaagctgcctgaagagcccttaggctttagaggaacgttggtggtggcatggcagtaccctccatgacctggtggtggaggtaaccaagagagaggctcctctgcctgtgaaaagaagacagaagagcggaaagaagcttatattgtggactgagtgccagcttaactacggtagaatagaacattaggcaaattgctamggtttttgactgtaaacgctggctctcagacagcatctct

SEQ ID NO: 814196 - DNA, 554 bp, Homo sapiens
agtggtagtggccacacttgtgttagcatcaccaccaccaccccccgccccacccattccaggcagctcaggagggagaaagagagagagagagaaagagagagagaaagagagagagaaaatgagagagagagaatgagaattcttctggatcttatgcaataccacctagattatatctctacaagtctgcaaaaaacacagaaatattgagcttggagcccaagttccttagaaaaaaagccatctcaagaatgggcacaaataacaccagactgtgaagactacagtaaatacctaactcttcaatgcccagacaccaaaatacatctgtagatcagtagcatccaggaaaatatgaccttaccaaacaaactaaataaggcaccaagaaccaatcctgaagaaagagagatgtgtgacctttcagttagagaattcacaatagctgttttgagaaaactccaagaaattcaagataacacagagaagaaattcataattctgtragataaatttaacaaagagattaaaataatttaaaagaatatgaa

SEQ ID NO: 814197 - DNA, 576 bp, Homo sapiens
aatctgttattttgggactgtaaattagtaaggtctctgtggaaaacagtatgcagatttcaaagaactaaaaatgcaactaccatttgagcyagcagccccactactgggcatctatcaaaggaaaataaattatataaaaaagatacctgcacttttatgtttatcacagcactattcacaatagccaaatcatgaaatcaacccaagtgtccatcaacagaagattggacaaagaaaatgtggtatatatgcagccagaaaagaagaatggaatgtcttttacagcaacatggatggagctggaggctattatccacatgaaacaactcagaaacatgaaatcaaataccacatattctccttataagtgggaactaaacaatgggtaatcatgaacatatagatgaaaataatagacactggggacttcaaaaatgaggatggaggtatgggttgaaaaattacctattgggtacacttttcactgtttgggtgaagggcacactagaagcctaaacctcaccattatgcaacatatttatgtaacaaacctgcacatgtactccatgaatt

SEQ ID NO: 814198 - DNA, 619 bp, Homo sapiens
tggtagttgagctccttttgcctccagacatcctgttgcctccccctcccctgccattggcaagcctaatgtttctgggacttgtgcataataaatgtmttctgtttcatgcgtcttggtttcacttccttattgtgtctcacctgacacacacctgaatgtaacttccacctggtcagagctctcctagagagtggctgtcttggccaatagccactccaacagagggatctcaagaccaaatagaaataaaccataacaaaaatcataacagaggtaaagatgttgggtctgtgatgtctactagacatctaaaaataggtcacaaatacaatattcttttactttaaaattttttttcttttgttctacacaaatacaaagagaagacaagaagaaatacaatattagatatatgaccatggagtttggaagacaagcctgagatggagatatacacataattttttggcttgtagtggtgtacttgcagccacaaccttggatgagatcaccagtagaatatgtgtagattgagaaatagatcaatttggagagaattggtatttatgcatggcgtctactatttctactaaaaatacaaaaattagccatatgc

SEQ ID NO: 814199 - DNA, 501 bp, Homo sapiens
attagacagtaacacgaggccatagaaagaaacaaagatgtctggtaatgataactacacaagcaaatataggagccagtgttgctgtgcgtttggcttgtaaattcactttttcttacataatttaagagatgagtacataaaaattataagtgtatattactggacacacaatatataaggaggtaatctgtgacaagataaagggggaggagctgtataggattagatactttatatgccacttaagttaacttgcaataatttcaaactacattgttataggatgttaaatataattcccatggaaaccacaaggaagtatctttaaaaatatacataaggtcataaagagggaatcaaaaacatttattatgaaatatcagttaaacacaaaaaaggcagtartggaggaaaagaataaaaaaggcataagatatacagaaaacaaataaaatggttgaagttctaccttatcagtaattacttaaaatgtaaatg

SEQ ID NO: 814200 - DNA, 619 bp, Homo sapiens
agtcatccatattttttgcatggctyactttttttttaatcactaagtagtatcccactgaatggacggaccactgtttctttatcctttcgcttattgaagaacatcttagttgtttatgattttgggtgatcatgaatacatctaccctaaatattcacatgcagacgtttgtgcagacgtatgttttgaaatcagttgggtaaatgctgagcagcctgtgttagtccattcttgtgttgctgtaaagaaatacctgaggctgggtaatgtataaagaaagaggtttaattggctcgtggttctgcaggctctaggagaagcatggtgctggtatctgctcctggtgagggcctcgggaagcttacaatcatggtggaagcaaagggggagctggtgtgtcacatggtaagagcagtagcaagacagagagggaggagatgccacattcttttaaacaaccagatctcacatgaactcagagtgagaactcactcattactgcaagcatggcaccaagccattcatgatggatctgtccccatgacccaaacacctcccatcaggccccacctctaacattgaggattatatttgaacatgagacttggaggggata

SEQ ID NO: 814201 - DNA, 591 bp, Homo sapiens
tcgccctgttgcctaggctggagtgcaatggcacaatctcaggtcactgcaatgtctgcacyccccccccccaatggttcaagtgatttccggctaatttctgtattttcagtagagacggaatttcaccatgttgaccaggctggtctcgaactcctgacctcaagtgatccgcccaccttggccacccaaagtgctaggattacaggtgtgagccattgctcctggccacctttgtcatttaatctttactctattaaaggttagtaaagattatctagtaaagagatacaggaaagcccgagaggctgccttttagatggtcagatggtcagaagttctgccctcatgttggcactggcagctctgtgcctgcacctccctcttctggacacaccaacatctcttcgaagtcagggactacatccaaccctctcccggcagcatccttccagcgtctagaatgtggaaggcactgcacatagatgctgtgagtgcattggtagagaagagggagtgggagacggaaattgctgagaaaatggcaatgcaggtttatttcactctccggatactgtcacaaaaatctgg

SEQ ID NO: 814202 - DNA, 591 bp, Homo sapiens
tcgccctgttgcctaggctggagtgcaatggcacaatctcaggtcactgcaatgtctgcacccccyccccccaatggttcaagtgatttccggctaatttctgtattttcagtagagacggaatttcaccatgttgaccaggctggtctcgaactcctgacctcaagtgatccgcccaccttggccacccaaagtgctaggattacaggtgtgagccattgctcctggccacctttgtcatttaatctttactctattaaaggttagtaaagattatctagtaaagagatacaggaaagcccgagaggctgccttttagatggtcagatggtcagaagttctgccctcatgttggcactggcagctctgtgcctgcacctccctcttctggacacaccaacatctcttcgaagtcagggactacatccaaccctctcccggcagcatccttccagcgtctagaatgtggaaggcactgcacatagatgctgtgagtgcattggtagagaagagggagtgggagacggaaattgctgagaaaatggcaatgcaggtttatttcactctccggatactgtcacaaaaatctgg

SEQ ID NO: 814203 - DNA, 517 bp, Homo sapiens
caaaataatcctgattactttcttccatcctttgcaccatcactgtcatttatttcacttatacttaagtgtacataagcatatatatatataaacatacataatcgcatacactgttgctattattattgtgaacaaaatgttatgctagatccactaaaaataagaaaaataaaagtttttcgccttcactggttccttcttcagtgctgcacttttctttatgtagatacaagtttctgacccctgtcattttccttccttctaaagaactttccttaaacatttcaggatagatctgctggctacaaatcctcaatttttgtttgtctgagaatgtctttatttctccttcagttttgaaggattattttgcaaggtacagaattctaggttggagaggtttgttgttttttttttttttttcctctcaaaactttagatattttactmcactcttttcttgcttttgtggtttctgagaagtcagatgtaatttttatctttgagcttgtgt

SEQ ID NO: 814204 - DNA, 565 bp, Homo sapiens
caaaataatcctgattactttcttccatcctttgcaccatcactgtcatttatttcacttatacttaagtgtacataagcatatatatatataaacatacataatcgcatacactgttgctattattattgtgaacaaaatgttatgctagatccactaaaaataagaaaaataaaagtttttcgccttcactggttccttcttcagtgctgcacttttctttatgtagatacaagtttctgacccctgtcattttccttccttctaaagaactttccttaaacatttcaggatagatctgctggctacaaatcctcaatttttgtttgtctgagaatgtctttatttctccttcagttttgaaggattattttgcaaggtacagaattctaggttggagaggtttgttgttttttttttttttttcctctcaaaactttagatattttactacactcttttcttgcttttgtggtttctgagaagtcaratgtaatttttatctttgagcttgtgtggataaggtgtttcttccctctggcttacttcagtattttttttttct

SEQ ID NO: 814205 - DNA, 574 bp, Homo sapiens
tcaaagatagtgctgtaacctcacctcacagggagaaaaggagataactccaggaatttcatgcccatgccagagggagctgcagggaccagcaatcactggtaatgtccaggtggacatctggagccacctctccctcttgcttggtccaggccagcatcaacactgaagcaggtaggggttccaggagcattgtgtcctggcagtggcagcacacagtgtctggcagctgacaacgtggaactttacagggtagattgtccagcatgatcaggaagccagccaggcggccagcttgagggaaggcaggcctcctccaagctggggaagagatcagcacagctgaactgcatttccaagtgagactcatccccagctgggttactgagatattggaggaaacgttgaggccaaatcccagtcataaagactgcacaaatgccatggggaggtaggcagaaagttgcaaacaagtgggtttgtatttcagataaccatcttggggctgcaattctaaagttagatatwatcacacaggtgagaatagggctgctggtgcatggcaagcgccctc

SEQ ID NO: 814206 - DNA, 461 bp, Homo sapiens
tgagttttatttcattgtggtcagaaaatatcatctataccattttgactatcttagaaattctcctgttatatttctttaagtgttccctgagtgcttgagtaaaaggtgcatttcctgtcctcaggatataaagttgtatgcatgtatatgtaaaattttataccattagatcagaggtgggaaaactatagcctatggaccaaatctggcccactgcccattttagtaaataatgtttagtttgattacagctatgaccatttgtttctatagtgtctgtggctgcttttacactacagttgagtcgtacagcagagaccatatggwctgcaaagcctaaaatatttattatttgattgacccttatatcagatcctatgtcaattgattatattaatcacattttctatgtcctattttattttattttattttattttattttgagatagagtctc

SEQ ID NO: 814207 - DNA, 619 bp, Homo sapiens
aagatgtccacgggagactttacaagcttggatgtattcttgaaactttaaaatcagacacacacacacccacggctgtgtacatcctagaaaagatcgaagaagatcctcatttatcaatactggctgaccttgaggctttgtgtgaatagaaggtaaaaattaagtaataattttaaacccacggaacactgaaggaatcatcccaaaacacacagagtaaaaactgaaacaattactagcttaaggtatttataggaaatctcttcccaaatattagctgttcactaagctatagagctgagactttagcatcagccatacaccatgaagaatacaaacttttacggaatttttccatgaaagtcactaaaacaaaaaaatagaaacaaaacaaatgccaggaggtaggggtaggtaggggagtaatctaatccctagagttgctattccacattttaaaaacatggatagtatttaattaaaatttacaagacaggctaaaaaaaaaaaaaagggaaattataactctaatacaggaataaaatgagtcaatactaactgttccttacaagcccagatgayggacttactagacaaagactttaaatcaccaatt

SEQ ID NO: 814208 - DNA, 522 bp, Homo sapiens
gaagaggcaattgccttacaaataattaatttttaatcattaaatatttccagtaagggcatattcttgacacccttacgggaggaggtgataatacacagttttaagaaccttaactttatggtcaaattgcctgatgtaatgtttcacaaaacaaaatgtgtgggctttcagtatcagaattcacctgtagcacttataaaacttatttaaattatttcagagccctgttttacagccactgaatctatatttctggaagtgaatgtttggactcaccatttttaccaaaatccccaggtaattctcatacacattatgtttgagaataaccaatccgagttcaaacaataagtaggttcccattttgtttggaaatattttacaattacatgtttctttagcagcaaaaaggtaagatcatttaattaaattacttaggstgatttgatgacttacataatgcagtaaacagtagctataatagcatttttatagactgttattgtagtgagatgttga

SEQ ID NO: 814209 - DNA, 627 bp, Homo sapiens
cccaaattctaattcctaaacatactttatttaaacagctctcactaaaaayccatggtagcaattagacattaaagaatctcattaacagttttaaaaacaaactcaggtacattattatatgtcagcatttttgcttatcttgggtaaataatagggaatgtgttagctgggtcttatggtaagtttatatttaactttataagaagctaccaaactgtttaccaaaatgaccatactatttgcattcccatttgcaatacatgtgagttccacgtgtttgtcaacactactttagctgcctcccataaattctaatgtatgttttaatttcattaaattaaaaatatattctatttttgtgccaggcatggtggcctctgcctgtaattccagcactttgggaggccgaggtgggcagattgcccgagctcaggagttcaagagcagcctggccaacacggtaaaacccaatatccaataaaaacaaaaattatttgtgtgtggtggggcgtgcctgtagtcctggctactctggaggctgaggtagattgattggttgagcctgggagccagaggctgcagtaagctaagactgccccactgcactccaacccggatgataga

SEQ ID NO: 814210 - DNA, 517 bp, Homo sapiens
tgctgggattatgaacatgaacaatatggtctctcttttaaggaatttacaataaactttgcagggagagtgtattagtttcctattactgtgtaaaaaaaaactacaaatttagcaaattgaaacacttatttgtgagcacacagttttgtagattagaaatctggacaaggtttaattgggttctctgcttaggatgtcacaatgctaatatcaaggtgttggccaggctagtctcttatctggcggctctagggagaaatctgcttagaagattgttcaagttgttagcagaagtgcattccttaaggctataggattgagatccttattttcttgctggctgtcagcctgggataatttcttctactggggatttctcatctctagtgtctgttctcaggctctggaaattaggtgattctttaacccttytctgctaaattctgttcacccagatggcagaccgaactcaaaaaaatacaagcatctctccccacaattacatttctcaaat

SEQ ID NO: 814211 - DNA, 551 bp, Homo sapiens
aattccaaatgttcatgcaaatggatcctaggacaatggctcccttttactgtggacccttagatggcctctgagagagatctgactgccattttcccaaaacaatgccccctgtcagcatgaagcagttaagagcagtcatagcccctatccaaacagcagttagatatacctcttcagagcagggatagaaagtgacaggagacagacgaattcctaggaagacaaggacaagtgcctgatgaaacccagccttcaagccaaagacagctagaagcctgaattgtgagctgttggttctggatagagtccacatcagagtaagaacttccttgatgctttttaaccaatcaagttatggtttttccaagaccacccatggaccaataagcacacactcctccattctgggcccacaaaaaccccagactcagacacagagacaactacctctcttaggtcccactccacygacagctttccttctgtcactcaatagaattgttctttgccctactcactctttggtgtctgtgtacctcaatcctctt

SEQ ID NO: 814212 - DNA, 622 bp, Homo sapiens
ggaagataaaaatgaataaaaataagaaacataacattgttcagagaaaagaagatgaaaattctttacgtgaaaagatgttcaatctaactcataataagaaaaatgcaaaytaaagctaggcatggtggttcatgcctgtaatcccaacactttgggaggccgaggcgagtggatcatctgaggtcaggagttcgagaccagcctggacaacatggtgaaatcccatctctactaaaaatacaaaaaaattagccaggcatagtggtgggcgcctgtaagcccagtttactcaggaggctgaggcaggataattgcttgagcctgggaggcggaggttgcagtgagccaagatcacgccaccgcactccagcctaggtgacagaatgacactcggtctcaaaaaaataaagaaagaaaaatgcaaattaaagctacatcaaaatacttttttcagattagatcaaaaatgttggtaacattttgttagtgaaggtgtgggaaagcagacactctcatacattactaattgctatgaaatgtttattgagcaatacagcttctatggagggcaacttgacaatacttaccaaatttaaataactcagtaattctagttgca

SEQ ID NO: 814213 - DNA, 622 bp, Homo sapiens
ggaagataaaaatgaataaaaataagaaacataacattgttcagagaaaagaagatgaaaattctttacgtgaaaagatgttcaatctaactcataataagaaaaatgcaaattaaagctaggcatggtggttcatgcctgtaatcccaacactttgggaggccgaggcgagtggatcatctgaggtcaggagttcgagaccagcctggacaacatggtgaaatcccatctctactaaaaatacaaaaaaattagccaggcatagtggtgggcgcctgtaagcccagtttactcaggaggctgaggcaggataattgcttgagcctgggaggcggaggttgcagtgagccaagatcacgccaccgcactccagcctaggtgacagaatgacactcggtctcaaaaaaataaagaaagaaaaatgcaaattaaagctacatcaaaatacttttttcagattagatcaaaaatgttggtaacattttgttagtgaagrtgtgggaaagcagacactctcatacattactaattgctatgaaatgtttattgagcaatacagcttctatggagggcaacttgacaatacttaccaaatttaaataactcagtaattctagttgca

SEQ ID NO: 814214 - DNA, 558 bp, Homo sapiens
ctggcccgcaagctccttttcacaaatgtcccgatgatgacatgtcatgagcagaagaccaggcaatttcaggccataggagagaaaggatgcagaggasaggacgagacttgtaatgccaaaaggggcccagaggccgcgcatcccacctatcgaagcctgggccgcggcgatgccgccaggtctccaggatgaaccgaagggaggccgatggtggagaatagagcacgcaaggtccctcaccttcactacagctgtcccccggctgccctgccggccactgtctactcccgctccgagcttgtttacaaccagggtagccatcctcgcaggggaagcgccacagaaacagccttcagagtcctcaactgagaggcggggttgagccacctacccagaggcctctgcgcacgccaccggcgcacaggcgcagtaggacactgggcgccgcttagccgactcttactcctcctccccgcaatcgtcgggtggttagttgcacagcctcgcgcatgggcacttttgttatttttcattatgtagtctgcagctgctgga

SEQ ID NO: 814215 - DNA, 551 bp, Homo sapiens
ttgagttatcctggcataaacattcttatatagattttggggtgaaagtaacttttcatttctctaaaataaacatgtagaaatgggattgttgagtcagatggtaattacatgtttaactttttaagaaacagactgccttagattctttagtgttgctgtaatagcatatcatagactgggtaattttaaagagggtaaatttatttcttatagtactggagactggaaagtccaagatcaaatggcacacatctggataaggccttcttactgcaccatttcatggatgggagcagaaaggcaagaaaacatagaagtggggtcacttttttgtctggtagctttacttttaaatttttgaagaacctccatctgtttgtattagttcattttgtgttgctgtaaaggaatacctgaggctaggaaatgtataaagaaaagaatttkatttggctcatagttctgcatgtgctgtacaatcatggcaccagtatctgcttggcttctggtgaggcctcaggaagcttttactcatagcagaagggaag

SEQ ID NO: 814216 - DNA, 592 bp, Homo sapiens
agaagggagcaagcaagagagagaaagtgccaagctcttttaaacaaccagctctcgcacgagctaacagagtaaggacttacttattcctgtgaagacaacaccaagtcattcgtgaaggatccatgtctatgacccaaacatctcgcattaggcctacctgcaacattggaggtcacatttcaacagaatatcagtgttttcacaatgcctatattactgctgagttttaggagttctttctgtatatctttctggatacaagtttttcattgatgttatgcttgataaagcaaacaaggtctgagggcaaagactagagtaaatacctaatgccttgatgcacagacattgatgaatgttcacaagcatcaagaatatgaaaggcattatgacttcatgaaacaaactaaataaggtgccagtgactaactttaaatagagggatatgtgtgacctctcagacagataattcaaaattactgctttgaggaactcaaccractttaggaaaatacagagaaggaattcaaaattttatcagagaaacttgacaaagaggttgaaaaaaatcaaatggaagtcctggagc

SEQ ID NO: 814217 - DNA, 587 bp, Homo sapiens
gtgcatataagagctatgtttatacacaatctaaccagtacttggtgctgtcatacttgttaatttgtgccaatataatgggcaaaaaaaaagtatattgttttcatctcaatttgcatrtccttccttatagttgaagaacttctttttgccttctttttttctcttctgtatgatatctgttaatcatttacctatttaaaatgttgactttctgggctttttttttttaactgactttgaatttcttttttttttttaatttttttcgagtacctgtggttttcagttaacttttataaatatattccaacactgtggcttttctttcttaaagggatcttttgaggaacagaaggttttgtggctgtacctacttctgtagtgctgtattgttttaatatggttgctgtatattttttgtatggtattgtatcagttttgttagagaatctctttctctgaggtcataaagatatctacctatattttttgtaaagttttatagttttgacttctgacattttagaatttttatctatctaaagttgatgtgtctgtatagtaagaagttttgaataaatttc

SEQ ID NO: 814218 - DNA, 629 bp, Homo sapiens
tcccctacatcctcttcacatctttgtcaagtgttccttttcaaaactctcctcaaaccacccaaattcagtgcgctacctatttcctgccaggattctaatgctacaacatccagtttatttgtttatgtaggtatatgtattctggaaaattacatgatgtcatgaaaagttgcatgagctatttcagagacttgaaatttattcttattcaacagatggggaatcaaaccgatcatgcattataatacagccaaatatatattattgttgctatatagccaaaagtcatataagtgtttgaaagtaatagactaatgatgcaataagatgaatatgccattcaaattcatggatggttttaaaaattagtgacagataggtatattattatttcttccattttacgataagtgaagtcagagaagtaacttggccatggtcatatgataaatagccaagctgggatttgaccccaaggagtttggctccaaagcctgggctcttaactccacccactgtttctctgggcagtacctggaaatagytggacttcaggcaggttggtcaggtatggcacaaatattggaaacctcagatctgaaattttaaaaccaacatggtgccat

SEQ ID NO: 814219 - DNA, 613 bp, Homo sapiens
gtgcaatcaaatgagaattcaggattatgaaactcactcaaaactgcacaactacatggaatctgaacaacctgctcatgaaggattactggctaaataacaaaattaaggcagaaagaaataagttttttgaaaccaatgagaacaaagacacaacacaccagaatctctgggacacagctaaagcagtgtttagaggaaaatttatagcactaaatgcccacaagagaaagcaaaaagatctaaaatttacaccctaacatcacaattaaaagaactagagaagcaagaggaaacaaattcaaaagctagcagaagataagaaataacaaagatcagagcagaactgaaggagatagagacatgaaaaacccttcaaaaaatcaacaaatccaggagctatttttttaaagatcaacaaaatagatagacagctagacagattaataaagaagaaaagagagaggagtcaaatcgatgcaataaaaaatgatgaaggrgatatcaccactgatcccacagaaatacaaactaccatcagagaatactgtaaacagctctacacaaataagctggaaaacctagaagaaatggataaattcctggatccata

SEQ ID NO: 814220 - DNA, 632 bp, Homo sapiens
atgccagccagagtcagccttaaatatacagagctttaaaggaagtgcggtgaggcaagagagaaggaatctggaaacagatcggcagacstacccacctggcccaggtcacttggctctcaggctcctctatgtatctgactcagctaatggaggtttttaactttatccaaactcagaccccacccagatcaccttcaattagaatttatagttggtcactttcatagctcccacaggtgactgtaatgtgcattcaggggtcagaaccactgaattgaagagaccgagagagaatgggagagtcaggattatggatagacagcctgtgtatgaaaaacctcaaatgcgaaggctgccttgacacaagacactgctctgtgccccaactttgcagtggacagctatctcaaagatctggtccaggcttcccatccacctgctcaactattacatgcagggatagctcaggggctcttttttctccccgcactctacctctatcattatttggtttgcagaacaaactgtctttccttttcaaaatggaaacttggttggataactggtctctgagccagccaggcaggagacagcctccacactaacaagggagtttccaagcccattaa

SEQ ID NO: 814221 - DNA, 618 bp, Homo sapiens
taaattgcccagtcttgggtgtgtctttrtcagcagcatgaaaacgaactaacacagtaatcattcaaaggcttgaatagttctgtacctgtggtgctggttggcaacaaaagtgcacataacatattctcatgcacgtcctcccgagaaatatatcgcacaaaaacaagcattgttgccttgttgtcaacattcgtagactcgtcaacctggattgcatgccacagtgactcattaatcttctctaacaattgtgcctcaatatcctcaactatttcattcatctagttatggggctagccaaaagaggaacatatgccaccttttgaactgcagcatctcctaaaagttcatgactaacatccttaatggtgggcaggatcaactcttcaccaatagtaaagggcctcttagtgttagtgatgtggttagccactaagaatgatgctctcggtgcagacacatttgatgaagtggtggccatcaataattgcttttgttcttcctgttcatgtttttttaatttgaaaaactccaaaggcttgtcttttagtgcagggtgtttggtctccacatggtgaagcagttttgaagatttcatggctccattgaatagct

SEQ ID NO: 814222 - DNA, 632 bp, Homo sapiens
tgtctcttttttacttgtttggagagtggcctttttattacttgggaattggttgattccactttcaccatgctctatcattctcttctcttcttctcagggagatcacaaaggctcatttatggataaaaagaaaagagggagtgagggaaaggcttagtttgaaaatagcctcaatcatttgtagtataggggctaaggagagaaagggcaggtttcagaatgtctggggcatatgagtgggttctttagcaatcaagacttgcaaggagtctgtgacaccaaactggactgccatttgtctaagaaggctgagatctacttcctaaagcaccctccttttgtcctcaggctggaaagattgctgaaaagtgagcaggcccctagctgaacctctaaggaacctcagtccccctcccaaagacataatattccatgcctgaaacttctccaagtatatagacagtgactttttataaatgttcattcccttttagaaaacacaatatattcctcttatttctattaagtgttggtaaaatgcttctaattgaaaatccttttcctccctgccagtttctcatacttyactcactattatttctggattatattctgtgtacaaaaatcac

SEQ ID NO: 814223 - DNA, 452 bp, Homo sapiens
gatcatagaaagttggagtagatggaaatttaaagagtatcaaaaattgaatattttctaacttctgagataaatggccttaaccttgtgagagaaggtgcatcttaaaaagttccctcagagggctgggtgtggtggcttacgcctgtaatcccagcactttgggaggctgaggtgggcggatcacaaggttaggagatgaagaccatcctggctaacacggtggaacaccatctctactaaaaatacaaaaaattagccgggcatgttggcaggcacctgtagtcccagctactcgggaggctgaggcaggagaatggcatgaacctgggaggcrtaggttgcggtgagccaagatcgtgccactgcactccagcctgggggacagagtgagactccgtctcaaaaaaaaaaaaaaaagttccctcattatgtttctgatggtttggatg

SEQ ID NO: 814224 - DNA, 540 bp, Homo sapiens
ggtaaaatctcagcactctgttgaatgctttgagcagctcctattcccactagggatgtggaggttcatctgaggggccaagatggaggccaatccttactagatattactgacacatcagctcctgtrtctacaagctcataaaatttttttcctttaatttgcactacacaggtgggtctattagaggctatgggttgtgataaatagatttctcatgcagttgtgctctcaaatcctttatttcctcatttctcctttcatggagaagggtgtaatttgcaggggataggcaataattgcactatatatgcacctggttcaaaaacccaaagatcttgtgacattaaaactactttaatttctccttcataatcagagtcagctactctggggactacattgatgccttgcaagttaaggcagctttgcctaaaattagtcccatgtatcctgctggtatatgtccccaaatgccaggggggactttggtaggtttgtctcctccaattagtgtaattctttctctggcggagagat

SEQ ID NO: 814225 - DNA, 595 bp, Homo sapiens
acctttcttctggatcctaatctctacctgtcttcttagaggtctcattccatctattctgtatcatcagtcttaatgctctctgtcagcctctttatgtgtctccttactctcaatattcatacatgcttaagatttacttctttatattaacacgaaataagtaacatgtaacatgggagtctaatatccatcctttatacattttcagataaatatattaaaatagatatttagactatgactcccagtttaactttttcactttcagttcagaatacccattgcaatctgacattttgccctgataagtcttgcaaaaattacttaataatagaactctgtgctcactttaccactcactaacatttatcccaatatacttcttcgctctagaaatagtccatgttcactgtagattgcaacacacttcctcaaattttccacctgctatgctggccattattcaattttcttttcactttcttcttattttacagctcttawatgctgtcagggatcaattccagggcttcctcccttttctacccattgccctaggggagttttctcaactgctttatttccaatatac

SEQ ID NO: 814226 - DNA, 586 bp, Homo sapiens
gcaccttgctggcctctgaggctctgggcatgggtgagaaggactcagggctgggaaggcaggggattgtcagtgcctcagtttccccccaaagtgtcctcccgctggcatggggtaaagagcctgtgtagagccccacgtgcccctggggctggttccaggtgcccagagcaacgtttttccatcccacactttattcctattaataatacaaccatccgtggaaccatatcagtgatgccatttattgagtgcctactatgtgccaggtaccattctaaccccttcacagatgctaactcaggtaatccttaaaattatcctcattttacagatgggaacactgaggcacagataaaccattgaccctggtagggatattttaaagagcgggtgagggccgggcgtggtggctcacacctgtaatcccagcactttgggaggctgaggcgggcggaycacttgaggtcaggagttcaagactagcctgaaaaacatggcaaaaccccatctctactaaaaatacaaaaattagccggaggtagtggtgcgtgtttgtagtcccagctacttgggaggctgaggc

SEQ ID NO: 814227 - DNA, 267 bp, Homo sapiens
acagctgtcccacccacccctgtccttcctcctcctctcttggccaggaggagcactcattctgaaccaggcccttttagtcattcagttcctgacccagagcagctgagaagtcagaggcraggagagagctccaagaagcaaagtcactcactcaggatctcccagtgctgggtggtggaggcaggattcgaacctaggctgctctgtcttccaagtttttgtttcttattttattttatattttattgttattattattatttt

SEQ ID NO: 814228 - DNA, 497 bp, Homo sapiens
catgtgggtgagcgtgtatgcacgcaggtaggtgtgtgcatgtacagatgtgggagtacatgccagtgagtgtgtgcacatacaggtgtgggtgcacacttgagtgggtgtgtgtacacgtggacaggtgtgtacacatgcggatgggtgtgcacgtgtggggtgtgcatgcgcaggtgtgggtgcacatttgagtgggcgtgtgcacacagggacacatgtgtacacatgcaggtaggtgtgcacatgtgggtggactgtacgcacacaggtgtggtgtgtgtacacagtgtgtgtgcacgtgctgcctcaccttggtgctgccattgctgtaggtctggatcatgttctccgccccctgcttcaccttcagctcaatggccaactgcttctccaggccygccacgcggctcaggttggtggccgagcaggtggggccacccgcaccaggggactgggggccatctggaggcgacaggtgggagagagtcaccacg

SEQ ID NO: 814229 - DNA, 537 bp, Homo sapiens
aggggactgggggccatctggaggcgacaggtgggagagagtcaccacgcatcctcacctcggcytgcctgggaggcttcatcctcagcccagcctgggcattgcccctggggcatggaggagggggagctgggggccagcagacaggcaggcagggggacaccagggcccagcagtctacccacccaccctcccagggaaacccctcggggctggggcagaacccaggatgaatgagtgcaggcgagcacccaggtgtgttagtgtgtccttggtgctgggtccactgcatttgagaggcccatgagtaactacgtacatggcttgtgtgagcctatgggtgtgggagtggtgccatctgtgagctgcagggtgttggcatggctgagtgtgtgtttccctaggtgttagtgtaactctgtgagacgccatgtgttagaatgactgtctgagattgtgggtgttgggagatgctctgcgtacatctctgactgttgctacaactgtgagttcagatctccaggttggtatgactga

SEQ ID NO: 814230 - DNA, 414 bp, Homo sapiens
ctaaaaaaagaaagaaagaaagaaagaaaagaaagaaaagaaagaaaagaaagaaaagaaagaaagaaagaaagaaagaaagaaagaaagaaagaaagaaagaaagaaagaaagwaattagaacccatataggctaaagtaggactgtaaaacggtgcaaccactatgtaaaacagtctggctgttcctcaaaatgctaaacatagaatgaccctatgatccgacaataccacttctaggtattttcccaagagaactgaaaacatatattcacgctaaaactttaatacaaattttcacagtagcactgcctgtaacagccacaaagtggaagaaacaaaatgtccgtcaagtgatgaaaagacaaacaaaaagtggcatcagtacaaagcaatattcagcagtaaaatggaa

SEQ ID NO: 814231 - DNA, 644 bp, Homo sapiens
tatttaataacatcctggctataaaagctcactagtttgcaagtgtccctttttgttgactaattataatgatgatgttgattattgaaaaagtggtcttttggtattatagtcataattgtcttgatagaagtgtgtctcaattggcttatgtaaaattccagctctgtgaaatagcacaattctcataaatgatgattgactgggtagaaaatgtatctataaacttagagcttccttagcactcaatttgggatggtagtgcagtgagagcctatgttataattctaatgagacttcaagttacttataagttttactaccgtatctgattgacactacttgtgctaaattccatcagtgtctaaacaaatgaagaatatacataacactcaaaaatcaaaatctaaaaattacaggatcataaggcaggaagctttgaatatgacaaagcatagtgatatcaatttgcaccatatagtggggcccaagtgccatgcatatatagtacatatggtaaatgacataaaggcagatgtagaggaaaaatggatctaagaacagtaatactgtctctcttcttgatctactkgaccaaacaggtatcaggtaattaaagaagagagaaattttcattgttcagg

SEQ ID NO: 814232 - DNA, 623 bp, Homo sapiens
cccggagttagggaaatgcatagtaaggttcccagaagacccagcatggacatatatcatcaactaytgcaggatttggccagcagcccgcaatgcagtggggctctctctttgtttccaggcagatcggcaggtcgagaaataatagacacaaacaagatagtgaaagctgggtccaggggggtcactgccttctggtcctgcggtgccaacaatgcactgtatataccagcatttattattaagtttagtgagggcaggagtaggttagtgagggatttagggtcatttgattatgaggtgagatggtcacatggggatgaagtaattttttaacataacatctgtatgcagaagtacagtatacagggataagaatttacaatattgtgtgtgcatcagtaatttctaacagagccttaaaacagaaacacagtctttccataacctatgattagcaaggtatttatcagcagtaacagttgcagcaaaagctggttacaaacaatccatagaaacaggacgtgaagctagacaactggttagaccagaaattctcagaagggagtatgccttaaccctaaagaggcccagaagagccatggcaagatgagggcatttat

SEQ ID NO: 814233 - DNA, 563 bp, Homo sapiens
gtggaagctgcagtgagccatagttgtgccactgcactccaacctgggmaacagagtgagaccttgtctcaagaaaaaaaaaaaaagtgtcatatttctcctcatgaacccagaacctagcacagtgccaagtacatggtaaggtgttagtgaacatttgtcaaacatataaatgtgacttgaacagccccagacctcattttctctgatttgcctttatcaacagagctacataatagaaacacctggcaagttctggggctcgctcatcaccattgaattgaaagccagatgagtttctataggtggtagcaaaatactaggatccccttctgtcttcctgaccaatgctgcttccataatgccagtgatgctgactagattagggtccccaaggcatatggatttttctctagaaaaaatatcatcctcattctcaacactgtgcccagtgctatgcaaatattcttcccaagatgtatttgttggttactgcgtatgatttagtccactatctcatgccaagagttctctctggaaaccaggcagagccaatatagagt

SEQ ID NO: 814234 - DNA, 494 bp, Homo sapiens
tttgggtgcatgttctcaatatagctacattatttcctgtaagatcaatgtttcctgtatttgggggacagagaatttaaaattttaaattcttaattgccaagacagaaacttgctgcttgaaattcaagacgagaactcctcctcagctattcagtaccatggaacttaaaatattcagcgatatcaccaaaaagctgtccaaaagctgtctgtctcccttgaaagctcagagttaggatcaatctcttcatacccaacacaaagtggtttgcattgaatttaagaacagaggaagagaaatcttcatttgcccactaatttattcattcaagaaatgatttctattatgtgaaagcactgagctttggcaataatgaagagatgaacaggacataaatgtcgcctgcytgtgtggagcagacagtgtaagtgtaataaacgtactgtcagaagaaataaaaacagctatgggaacacacagcaaataattc

SEQ ID NO: 814235 - DNA, 559 bp, Homo sapiens
taaactgatatttttctttctatttctactataacaatttctagtcttccctggctctctaggcagtataaagagaagtttaaaatatttatgtattarttcattagatatatcaataataaaaccattacatgttaacatgaataactttttttttttacaaagactatttttcaaaacaaaaaaatagaagattgggattgttttataattttactttactgtctggtttataaaagacagctaggttctcatatctgcttctgcattcaatcttttgtgatattacatgtgctgtagcctctggaaaactcccctgtacacttatgagagactaaaaataaaaaaggcaaatgacatcttagtattattataaaaatagttttcaccttgcagatccctgaaagagtctcaggtcgccagacgacattctgagagttactgctctaaactttgtcatacctttgaaaataattaaacatatcaaatcttcttatttcaatgtgtcttatgtttcctgccgtggccctgaatgataaacccatcctgtctggatact

SEQ ID NO: 814236 - DNA, 588 bp, Homo sapiens
aaagatttcttgagcaataccccacaagcacaggcaagcaaaacaaaaatggacaaatgagatcacatcaagttaaaaagcttttggatggcaaatgataatttaacaaagtaaacagacaacctacagaatgggagaaaatacttgcaaattctccatcttacataagattaataaccagaatacatagagttcaaacaactctataggcaaaaaatctaataatccatttaaaaatggacaaaacagttgaatagatatgtctcagaagaagtcacacaaaagtcaaatgggcatatgaaaaggtgctcaacatcactgatcagagaaatgcaaatcaaaactacaataagatattatttgcaccccagttaaaatagcttatatccaaaaaacaggcaataacaaatgttggcgaggatggggagaaaagggaacccttgtgcactctttgtggaaaagtaaattagtacaatcactatggagaatagtttggaagtgcctcaaataactaaaaattgagmtaccatatgatgcagcaatcccactgttgggtatatactcaaaagaaaaaaaatcaatgtatca

SEQ ID NO: 814237 - DNA, 551 bp, Homo sapiens
atgctgtctgagagccagcgtttacagtcaaaaaccktagcaatttgcctaatgttctattctaccgtagttaagctggcactcagtccacaatataagcttctttccgctcttctgtcttcttttcacaggcagaggagcctctctcttggttacctccaccaccaggtcatggagggtactgccatgccaccaccaacgttcctctaaagcctaagggctcttcaggcagcttgtggtgaatgctgccagacctgggactcactcttcaaggcagtgggctctgggcgggcctagaaatgctgtccaagtgccacagcctgaaattggtgactccaagaggctggttggtgctctgttccccattgtcgagggggatagaggcaggacaaagtccattttactcttcaccctgcttttctcaagcagaaggagtctctcgttgttgccactacagctgggaatgtactgtctcacacctgtagtcagcacatttcagaacacaaggcccacagcatactaccaggatatcactgctggttatttagggc

SEQ ID NO: 814238 - DNA, 549 bp, Homo sapiens
cggaatgcagagctgctgaagtgggccccgcgatagtttgggttcctggaataaggagtggagggaaggccttatgtgttggcagatgctgcgggaggagccggctcaagcccacatgccggtgtgaatccaccaatttagttttagttttaggtgattttttaaaattcttgataccatgtagataaaacaacaagttgtttagctttttctctttgtaaccatttgcttcagaattaggtaagactcagaatccaaaacccagtacccaagcagagaaacagctgattactagcatggagattttggacagggacacacactttgcagggaacctggaaaccagtcactaatgacagaagcaccatctgcattcacctccccactgatcacctcccgctggatgtcccacagaaacctggacctcaatatgtcaaatattgaacttatgacattctctggggtcccctctcttagtggctaacaccaccattgttygtgttgagaatcatgcatctccttcaacactgccccttcctcacctccaca

SEQ ID NO: 814239 - DNA, 549 bp, Homo sapiens
cggaatgcagagctgctgaagtgggccccgcgatagtttgggttcctggaataaggagtggagggaaggccttatgtgttggcagatgctgcgggaggagccggctcaagcccacatgccggtgtgaatccaccaatttagttttagttttaggtgattttttaaaattcttgataccatgtagataaaacaacaagttgtttagctttttctctttgtaaccatttgcttcagaattaggtaagactcagaatccaaaacccagtacccaagcagagaaacagctgattactagcatggagattttggacagggacacacactttgcagggaacctggaaaccagtcactaatgacagaagcaccatctgcattcacctccccactgatcacctcccgctggatgtcccacagaaacctggacctcaatatgtcaaatattgaacttatgacattctctggggtcccctctcttagtggctaacaccaccattgtttgtgttgagaatcatgcatctccttcracactgccccttcctcacctccaca

SEQ ID NO: 814240 - DNA, 535 bp, Homo sapiens
cttctcaaggaagctgtcactcatctgatcacagccattcacaycatatgcatggacacagtgaccatgggcatggtcacagccacggatctgcgggtggaggcatgaatgctaacatgaggggtgagtccttgcaaaatattatcctacttttcaactgtgttctaaatcaaccctctgtgtttatttgtattaagttttgggcttctggtatgatatgatttttaaaaagcaatctgtgactaaaagaaaggtctgaagctatcactatagaaaatattcttacctgaatacacataaaattaaatattattcagcctttaaaaagagggacattctggctgggagcatggtggttcacgcctgttaatcccagcaatttgggaggctgaggcgggagtaccacctgaggacaggagttcaagaccagcctggccaatatggtgaaaccctgtgcctactaaaaatacaaaaattagccggacatggtggcaggtgcttgtaatcccagctactcaggaggccgaggcagaag

SEQ ID NO: 814241 - DNA, 674 bp, Homo sapiens
ttggcggcaaagagtataaagtggactctgagccataaagtggactctgagccaattcgacttaacactgccacaaactttctcattctgccagtgtggtatgatgtgaactacakggaattttgaaatcacagagacccaaattccaattctgtctcttaccctcattaactagagaacatgggtgacctattttaacctcatagagtggagtttcgatttccagatctataaaatggggattatgatacacacctcttgcggtggttttaacttgggttgatttgatcagataatgtatgtacaaatttttgcaaacaataaagactataaaatgatagttagtttggtataattataaggaaaatcaccctcttatgagagtacatctatctagcacattgctttctggaaatggctagttctatatttactcactccaaaaaagggaaattgattcttgggtctttgttgcaatgttacgcccctacaaatgtatagggccaaaacctccctgcgtgacttgtatggtgatagccatttctatatggtaagtacacatatagcatcctattttggggactagtttttgccactctagataatacctgtctattatatgacctgtctgtcacctgtgtctacggtcctctttgtataaattgcacgggtgt

SEQ ID NO: 814242 - DNA, 623 bp, Homo sapiens
acagattaagtctgatatttgttgattttctgtctggataatctgtacaatgctgaaagygtggtgttgaagtctccaactattattatatttgggtctatttgactctctagctcttataatatttgctttttatgtctgggtgctccagtgttggatgcttatatatttgtaattgttatatgctcctgcttaattgaccctttgtcattatataatgaccttctttatctctttttatagtttttgtctggaaatctattttgtctgatataaatatagctactcctgcttttttggtttccatttgcatggaatacctttttctatccctttattttcagtctatgtgtgtctttcttaggtgaagtatgtttcttgtagacccacaaatcattgagtcttgtttttttatccattcagccactctctgtctcttgattggagagtttagtccacttacattcaatgttattattgatgagtaaagatttactcctgccatttgttatttgttttctagttgttttgtggtcttctctcccttctttctttccttgttgtcctctttttagtgaaggtgattttttctggtgatgtatcttaattttttctttttactt

SEQ ID NO: 814243 - DNA, 570 bp, Homo sapiens
gaacaaggtcactttaacaattaatggtacacacatgaaaaatcttttacgatgcataaatattttgttgccatgttgcccaggctggtcttgaattcccagcctggagcaatcctcccaccttggtgtctcaaagtgctgggattacaagtgtgagccactgtgcctggcccattcagaattgttttaaagactttctatatatctattatgtatctaaattcaaatttgctcttttgttaatatgatgaattactttacattgattgttttaatttaacacatactacatttattatttaggggttttgtttggtcttgaataacagaaaactcccaagatatgctccacaaatcaacaaggtgctgatttttctcctaggagagtccagaaataggtagggcaaggatggtgtagctactgaacaatacagtargggaataaggtacttatttgttcatttttcctgaaatagtgtatgacttggagaaacagggccttgagaagtattatgggaacaacatgctcaccataaaaattagacttttgataaatgtcaagaaaatgga

SEQ ID NO: 814244 - DNA, 572 bp, Homo sapiens
atgaaggtcttgagagatgcatgccagctgaataagagagtaaactagaaaaaagagtatactggaccttggaaaagtagactcatacaggaaagtattgaagggaaaaagtcccagggtaacagtctatagattaaccagtctaaatgaaacaggaaactcacgatgaaagagctcctgaaaataaatgtcattgacagagtatcttaaaaattggaatatttttaaggagaaaatacattcaaatgaaagatatggaaaaaaacaatagaggtacatagaaaataatgcaagtatgaaataacaattacgaactctaggaaccatacttttcaagtatggaaatgtaattctagtacagtatacaaatgcatattctgaagcatgtaacaatatagataataaccactaatttaactaagaaactgtgacatctatattggagaataggagaaaaagaatttgcaatgtttgyatatgtttgttagtttggaaataaagctaaaatgcttttctattatagaaagaaatggttcaaatacaaaacaatatcaagatatagtattataaac

SEQ ID NO: 814245 - DNA, 597 bp, Homo sapiens
cctccgccaaacccaacgattcggacctcactctgtacctggtggtggcggtggccgcggtctcctgcgtcttcctggccttcgtcatcgtgctgctggcgctcagactgcrgcgctggcacaagtcacgcctgctgcaggcttcgggaggtggcttagcgagcatgcccggctcgcactttgtgggcgtggaaggggttcgggctttcctgcagacctattcccacgaggtctcactcactgcagactcgcgtaagagtcatctgattttcccccagcccaactatgccgacacgcttatcaaccaggagagctatgagaaaagcgagcctcttctgatactcaggatttacttgaaacgaaaggagaacccaggcaacttcaggtgagtttctttccgcctaagcgggaagagtaatctgatcttcccgcaacccaactaatcagacaggctcatcagctagatcggctgttatagaagcgaacctcttttggtacaggaagattcgtgattttgtaaagtggaagactcccttgttcaggtgagggtatcgtttttttttttttttttttttgagacggagtctcgctctgtcg

SEQ ID NO: 814246 - DNA, 579 bp, Homo sapiens
aggtaactgttgttgagtctcacacagatactgccttctgattatacatgaatttttgtttacacatacacgcctatatatacaaggttactttaatgcaacatggacyatgccatttatattggtctgtgacttgttttcatctccaaatgatatagcatgctcatttttgcctgtaggtgcaccatcttttaaacacctgtacagtgttccacgctatggtatttgggtttatttaaccagacctcgatgggaaatatttgaattgttttcagttcttttgctactacattcaatgctgcagtaagggttcttaaaaacatatgtctatgaatttgtgctattaattctgtgggataggtttcttaaagagaaactactagatcagagggtacacacacttacaattttaatagatattaccaaattaccttccaaaggcaggtaatttctgttctcaaaaacagcatacatgagtgcctccccccacattctcagtgaaattgcttttttttttttctttttaaaagtcagtgcctcatccagtgattctgggtctttgctgcatattagaattag

SEQ ID NO: 814247 - DNA, 618 bp, Homo sapiens
tttcttccatgagatattttatgaaaaatagaaatgctgggggagataccttcctttttcctctgggttcacttagctgtgatgatgtaagcctggagtcaactttggctaagtctgcctgaccacccccmacccccgcaatgtgaagaggacattagtctactgtaggagaaaattaggtcaactgccgagagagaaaccctgccatgggatggaagggggctgtgagaaacagaaagagagacgtccatctgatatggtttggctgtgtccccacccaaatcttgatttgaattgtatctcctagaattcccatgtgttgggagggacccagggggaggtaattgaatcctgggggccgatctttcccgtgctattctagtgatagtgaataagtatcacgagatctgatgggtttatcaggagtttccgcttttgcttcttcctcattttctcttgatgccgtcaagtaagaagtgcctttgcctcccgccatgattctgaggcctccccagacatgtggaactgtaagtaagtccaattaaacttctttttcttcccagtctgggtatgtctttatcagcagccgtgaaaacagactagtacaccatttaatga

SEQ ID NO: 814248 - DNA, 618 bp, Homo sapiens
tttcttccatgagatattttatgaaaaatagaaatgctgggggagataccttcctttttcctctgggttcacttagctgtgatgatgtaagcctggagtcaactttggctaagtctgcctgaccaccccccacccccgcaatgtgaagaggacattagtctactgtaggagaaaattaggtcaactgccgagagagaaaccctgccatgggatggaagggggctgtgagaaacagaaagagagacgtccatctgatatggtttggctgtgtccccacccaaatcttgatttgaattgtatctcctagaattcccatgtgttgggagggacccagggggaggtaattgaatcctgggggccgatctttcccgtgctattctagtgatagtgaataagtatcacgagatctgatgggtttatcaggagtttccgcttttgcttcttcctcattttctcttgatgccgtcaagtaagaagtgcctttgcctcccgccatgattctgaggcctccccagacatgtggaactgtragtaagtccaattaaacttctttttcttcccagtctgggtatgtctttatcagcagccgtgaaaacagactagtacaccatttaatga

SEQ ID NO: 814249 - DNA, 637 bp, Homo sapiens
taaatgttagcacaaaatgctgytttttccagaaagatgatttgaagatggcttgttctgcatcaaagagacttcgctcagttttctcaaactgtggtcatgttagaatcacccacatacattttaatgtagttatgttgggggggggagagagcatattaagtgtatttgtgtttatgtatatgtcttgggggtggtgtattaatttttctcaaattatctatgccatgtgccaatgtcccacaccatgtattttatgattcaacaggtctgcaataaacccaacagctacttcatttttttaagtcccatagttgattttaataaacaacatatattgaggaccaaaacgttattttataagaataaattagaagttcccctgcacctcttgttttacgacagtggttctcaacttttaatatgaataagaatggctgagatcttcctaaaatgtggattatatttcagcaggtttgaaatgggaccggagatgctgtatttctggagctggactcaacccttctgagctcccttgattttaatgtttttctttgcatcacaaatggcaagattccactgatgagattcacctcctcaagataattctcactagaagttaaatttgccacctcta

SEQ ID NO: 814250 - DNA, 532 bp, Homo sapiens
tttctactgggctattctctatgctaaaatgttagttctaggactctccttcaatatctaggtragcatccacttctatcctagttaaaaaaaaagtgtggaagtttctgtgaaaacgcaatctagagacaagtaggcacatactgaatacatagattctaaaacccttgaagacaatgacctggtttgcctgtcttgcctggcacttagtagatattttataatcactattattacatgtttgcatgcatgtagacataaatgtatagatgtaaatattgacatataattttaatcaaccagtcaattcagtaatctcaaatagtaaagctttgcatgtcataattaaatgacaatgccctgcctgtagtatccataaagtaacacaaattaagtatgaactaaagtaaccaaaataattcttttgattaaacaaagaagattgagtgaagtattacttactctaaaattcattctgttctaaagtcaaggtggtttacataactacccaccattgctgaaaagaaaggaa

SEQ ID NO: 814251 - DNA, 618 bp, Homo sapiens
gcatagcacacagggtcagatagagggaggcaaaaggacagaacaggtgtggtatcggtagatgaataatrtccacgactgtgaagagcttagcttttctcttgcatggtgagtttaggggtactgattacggtataaaataactagcaaaataaatataagtgggtgatgcaaggaccaataatggctgtgtcatagaacaagtattgtagttaatctacttctgtgcatctgaggttcttgaagaaaacaaacaccactttttataaagagaaagtatgtatttcaaaaagtagaacaattttaaaaagctttaaagagagcatctgtgaaatcattctctgtaccaccagtgctgtacaaagtatggaaatcactgccccgtcatatgacagtgagtaagagactgcttcttctctctagaaatttatggctgctaggggaggcacaaacgtgggtaattataatagaatccacgaagtgataggataatcataaagaagtaagaacgcagggcagggggcatgaaaccagcctgggcatggcggaagtcatcctaagaggatgtaaaatctaaccttgcccttcaaacagacagatattttaggcagggaagct

SEQ ID NO: 814252 - DNA, 547 bp, Homo sapiens
tatctagaagagaggacttgaaatattcccaatgcaaagaaatggtaactacttgaggtgatggatagtgctaaataccctgatttgatcattacacactatatgcccataacaaaatatcacatgtagcccataaacatgtacaaataccatgtatcaattttaaaagtatagatgctcacttagaaaaaatagattcatttgagatcagcccatctgaaacactgagttgggtgtgatgagccagtttcctatcacatttctctatttaaaccacaggaaaactttatcccttgtttgacatacatttattaagtctgccttgattcgtttctcattatcctgtaataaatacagtgtagttccaatgcaatcataaagctaaatgcaaataaagacatcaccttatccattgctttgaaacattatccattgctttgtaacaccacaatactcagggtcttaagacagcaataayctcagtcaggcctctgctaactgtctcctatgttttggctctgtgtctccacccaaatctcatgttgaa

SEQ ID NO: 814253 - DNA, 666 bp, Homo sapiens
agcactttctgagtacatagaatattatgtgatacatggtaagtgctgtcatgtatggtatggtaggtagcttgatgatgatgatggtgggggtggtggttatgaaaaacattatctcctaatttcctacacataaaaacaaaggaaacttttaaaaacataaattatgtgtggtcatatttggtctccaaaaattcccattcatttcacttaaaacaaattttaaattctctcctctgcttctcaatatcctacatgatctagttcctgaatgcctttttagttcaccttgaaccatgtgtccccttcttactttactccaggctctcaacttctgttagtttgtagaacccatcaaattctttgataccttgtccctacccactgctttccttatctggctctttttctttctttaggtcttggttcaaagtcaactccttggaggtgctttccccaccctacctaaaatgtccttcacctccaatgctgactgctgcagcatctagttgttgttgatattgttacaatgacttaccacaaacttgcttccrttggttctttgcttactgggtttttgttttgttttgtttgctgaacccaactagaatataagctgcatgaggaaagggatcacatctatcttgtccaccattgactcaccag

SEQ ID NO: 814254 - DNA, 522 bp, Homo sapiens
atgagctgattaagcttattttctttataaattacacagtctcaggaatgtctttctagcagtgtgagaactggctaatccagaaaattggtcrcagagaagtagcgcattgctgtaaagatacctgaaaatgtggatgtgactttggaactgggtaatgggcagaggttggaagtttggaggtctcagaagacaggaaaatgaggggaagtttgaaacttcctagagacttgttgaatggttgtgaccaaaatgctgataatgatatggacagtgaagtccaggctgagaaggtctcagatgaagatgacgaatgtattgggaactggagtaaaggtcactcttactacgaagaggctggtggcattgtgcccctgctctagaaatctgtggaacttctaacttgagagagataatttacggtatctggtggaagaaatttctaagcaacaaagcattaaagatagagccagctgcttcaaacagcatatactcatatgcgttcacaaagagatggtctga

SEQ ID NO: 814255 - DNA, 618 bp, Homo sapiens
gtgcagttggtttgcaattytattataaatactgcatgtgtatctgggtggtttgcaattttaaatcacgagcttgaaccaagatctgaaggatgtgaaagaaaaccaggtgtatgctgggggtggaggatgatggaggaagattctatgtacaatgaacagcatgtacaaaagccttgagatttaggaagaactattcagagaaaagaaagctgaactgaggtaaagaagtgacaggaagaaacaaagatggtgaaggaaccagaactaattcatgaggaagtaggacaagtggaatgtgacgttttaagaaagaagtggggaggttaatagctcaaatgcttcaataaatataagatgaggaatgagaaaaagatattggatttgaaatacagatcactcatgactttcaaagacaaacttcctaagttgctaaaggcttacacagagaattacagaacaagtcatttgtgaagaaaggtgaatagtacatttggaacacttttccaaagacagtaacaataaaaaagaaaaagagagaacacaatgacttgatgggttgccaaactgcaggactactttttagaaagaggtttcacttgctagtatagatggtga

SEQ ID NO: 814256 - DNA, 618 bp, Homo sapiens
gtgcagttggtttgcaattctattataaatactgcatgtgtatctgggtggtttgcaattttaaatcacgagcttgaaccaagatctgaaggatgtgaaagaaaaccaggtgtatgctgggggtggaggatgatggaggaagattctatgtacaatgaacagcatgtacaaaagccttgagatttaggaagaactattcagagaaaagaaagctgaactgaggtaaagaagtgacaggaagaaacaaagatggtgaaggaaccagaactaattcatgaggaagtaggacaagtggaatgtgacgttttaagaaagaagtggggaggttaatagctcaaatgcttcaataaatataagatgaggaatgagaaaaagatattggatttgaaatacagatcactcatgactttcaaagacaaacttcctaagttgctaaaggcttacacagagaattacagaacaagtcatttgtgaagaaaggtgaatagtacatttggaacacttttccaaagacagtaacaataaaaaagaaaaagagagaacacaatgacttgatgggttgccaaaytgcaggactactttttagaaagaggtttcacttgctagtatagatggtga

SEQ ID NO: 814257 - DNA, 620 bp, Homo sapiens
ttggacttttcagcctccagaactgtgagagaatacattttcttctttataaattacctagtcttaggtagtctgttatagcagcacaaaatggactatgccaccaacctagacctcctctccgagttctagacccatattgctaatgccatctgtacatcttcacctcagggaattacaatgaccctcatattcaacatgtctaatatagaatgaaacatcttatctcaccctttcctctcccagtctctcatttgcttcatctcctctatttcctctcaaaagtggtcactgccatttacccagggaacatggctggaaacctggaagccatcctggactccttcctcacccttccccaatatctaaccatcaccaaccaatggcgattctatagatcttaacctgttaagtctctcacgcggacgactgaaatcttttcttactggttttcaagactgaagttagttcctatacccatgcctaytattcaccctgtatacttcaggcaaagagacattctagagtgtaaatctgatgatagcatgcccttctgaaaaccttcatagctccccattctatactcaacggtaggaccaaactctcatcagggttttggc

SEQ ID NO: 814258 - DNA, 561 bp, Homo sapiens
gaaagttagttcccttttcttcatatcccttttcctctcacacatgccaaggcccttcccttttcatctcaccccaccccatttaacattatcaggtataaaccaawtgtcacctttctgaaaatgtcccaagtctaccaaagcagaaaaaaactcttcttctactgggagttaatatctttttgagaagaatttcatcacagcatgtatcactttttattgtaattattggctgatgtgcctctgtctttaagggaatgtgagtttcttaaggaaggaaccatgcctcagttaactctgtcggcaccgcctgccaaggaaaagctaggggctctgcttctttattgctgtttcctggttccttatgattgggctcagagaaagagcagaaatgcaaacaggaaagtcaagagcctcaagagtaaaaatcagcgtaggagaataagtaggtaaataaattatgatatattaattctatgaaatcttagactatgcagctattaaacacaatgaggtcaatatggaagaactgatgtaaacatttatcttacatattattaa

SEQ ID NO: 814259 - DNA, 615 bp, Homo sapiens
ctttgtaagctcagtctcttttytaaataaagaataaaaaatgtttttcaaatataatggcttgaagtgtcaccaaattactagctttcaaagtgcccctacatactataagggtagtattgcttgaaaaataatttagatgatagatagacaaacagacagtgagaataaagtagcaggttttcaagagccaatctgcagtaattcatgtaggctcacagcaatttagggccactctgttcatgccatttggattaatggcatttttctcaggcaacattaattcacaggatacttctttctgatacttacatttcttttcttatgtgggtgggatcttgtttcttttcttcttatctattattgccactggcctttactgataagaatacagtaggttgtatttaccttcctagcaatctactggttgaatttccatggagccccactaacgacctgcagggaggaaactgtactgacaacaactgccactatggggcagcagggagctatatccctgcatatctcagagtatcattgatttcacagtcctaggaggaaacacacattcgataactagttatagttttttcccccccaatacttttatatggt

SEQ ID NO: 814260 - DNA, 544 bp, Homo sapiens; identical to SEQ ID NO: 810114

SEQ ID NO: 814261 - DNA, 544 bp, Homo sapiens; identical to SEQ ID NO: 810115

SEQ ID NO: 814262 - DNA, 560 bp, Homo sapiens
aacacgttgcataattaaacttaaatattttaatggtatctcatttggtatatccttggaggataattggaactcaataaagaatattccctctagtgtgttttgtttttacataacaaaggcagccttaatgagcctttatctcattacaatgtaatactaatagtgatttaaatataaaaatgaaagggaaaatttatcataaattttattctcttttaggcaaataatactgcttaactcattcatttttctgattttaaagtcagcatttgattaagataaagcttactgataaaagatgttgacctttttgatagcaagcacatttttggcattttgtgaaaagatgagacaattgcaaagttttaggaacaaggaaaataggccattttaacatattaatttggctaaatcagaatgaaacaattaatagtattgttttaatatcttaaaataactctgtagccttgagttcaagagaaatacggcatgttagtgctaygttattatttatggagaaaggactttcacctttgtgtttttttcttaaccttgtt

SEQ ID NO: 814263 - DNA, 616 bp, Homo sapiens
atcctatgagggaggtcctattgtactaaatttatagaagggatgattaagggcctgaatcratgagccactttttcaagttcatcactagttcaaggtctaattagagctggatcttgcagtctgacttcagagctgatgctcttgactagcacgctaaactgcaagtagaaggcatggtagggcacagagcacatttgaggggatgaaacaaagtcatatatggctgtgacctcaacattggaagacatttggcactgattattctcattcaccatcagtattctgcatccacagatgcacttcactataacaaaatttgcatataaaacttgcatgtacaagatagatattttgagggattattaagaatgttattaaaaatcattgctatgggattcctttactttagagtgtgcaataaaaaagcacaataggggcttcagaggtggacagatctggtttcaaatccttactttaccacttaatgtctttggaaccttgggcagcttctgagactcagtgttcttatctgtgaaatggggataataatacctagttcacagagttccaaaatatccctgcaaatagaggatacttaataaaaactagctac

SEQ ID NO: 814264 - DNA, 594 bp, Homo sapiens
tcggactacttgtcccaggcacggattctctgcagagggcmtagaagtcagggcattggtggtctaggtggccagcaggaccatgagcagttcccaggtaggctgctttgaaatacttgtgctctgaagactgtaagaatttattcactcatccatctgcctaccctcccctccatccacccatctattttacaaacaggtgcctttcctgtaccaggctctctgacaggcttacacctaagccgtgaggatataatgatgacaaaagcaggcttggtcccttccttcaagaaacctaaagtcaaaactaaaactagatgacgcaaactgatagactgtgggccaaatcctgaccccagaccaatttggatcaccctacatgtgcctaaaaattaattaaatgtcaacattcaaaaagcaggagatttcacctgaaaatctggatttctgccttccttgaaaacaaggaggtctggcagagctgagcctgcaaccctgcactgcagtgatggctgaagctgagtgctttagatggggcaggcaatctccagtttgccccagtcactaccactcccaatagtctgtctctcttgg

SEQ ID NO: 814265 - DNA, 648 bp, Homo sapiens
atgaggtcccagttgccacacattttccatggtggcatctaggggcagagaggaggatgagaagggaactggatcagagttggtgctgctggggactccctctgtccacccagccagggaccaggggacccggagctgagtacagtccaatagctttctctgtttcctaggctgagcatctcttttcttaaccaccttggttccccctggccaaccagccagaagcctgcgagtgtcacccagtgtccactgtgagctgtgaccacagcagaggctggcttgctgatttacacacacacctcatgcagccaagtagcaaacaactgcttgaaagaatctagccattctctaaacattttaattgctttaccatcttaaataagaattactaccaccccactactaccagcaggtaccactggctatgtaccaggaattgtgttaagtgctttacacccagtattgctctgaatttccatcataacctcttgtctgctgctcctatgcagtacatttcacccatgraaaaaaatgaaggtaaagcctatattctgaatcatgatgcaccactgcccctattgagatgacatgcagagccaggatccgtattatagagtcaaacacacacacacatatgctcaagagcaa

SEQ ID NO: 814266 - DNA, 513 bp, Homo sapiens
acatgaacaacagtagggtagaattcttcaaagcagatatttgggaagtaactacttatcttttggcatcgcttcctttgaaatggcttaaagaggcacttaacacatgaaaaggrcaataatggataaaaaccagtacacttagtcaggcactcgacattgacccaaagtctctgcctctgttttctctgtcttaacttgcctgaccccacggagaaggaagggtggaaggttataggaaagtgtgagaggttagatggcgctgaaactagtatctggagcagattaaaaaggcgaatggaaattgaggttcatttgtgtgctctgctagcaatgagtgtagtaaattgctaacacacatttaattggctgaaggctgtaaaagaaaattgtcagacatcaaattgctgtacaccaaggtttatttatatggtacatttaacttttcaaagtactttaatgtgaattatataatgtctccccctttaaactctggggggctgattgtagatg

SEQ ID NO: 814267 - DNA, 486 bp, Homo sapiens
  misc_feature 419, 420, 423, 426, 428, 432, 444, 458: n = A,T,C or G
aacccattcagagcctgaacagaaaagmcaaaaaaaaaaaaaaaagtggaagaagggaggagtcagcttctgtctgtcttattgtttgaactgggtcattgatcttctccggcccttagaggttcctttctcaggccttcagatgaagactagaatctacaccatcaactatccccagacctcaggccctcaaaatcaaccagtgaccttcctgggtcttcagctggcagatggcagatcataagacttctcagccttgatcactgtgggagccaatactttacaataaatctatttatatatgcatcctattggttctgttttttggagaaaccttactaatacactgcaattattacaaataattaccacatttactcattaaacatctctatgatgaattactagtactgtagcanncanganangagnttaaaaaggggncgtgtgtgccttanaaagtttcttgcgtatctaagtaacttt

SEQ ID NO: 814268 - DNA, 616 bp, Homo sapiens
catggaaatgaatgtttttcctcakaaaaacctgcagcatacaggccatgccatcttcaaccctgcaatgagaaaattaatgtaaataccataacatcacccagactgggtaagcagacaaaaaaaaaagatgcttttgaaaaacatagaaatgcttatggcttcttgtattttgtatattactttaaaccttgatagttgtaaatctatactgattattttggtttgcactaaattggatccatttaaatatgatttcgtccaaatggtcaggtgggtaaaaaagtcctaaaaacttaaactgctttgattcccaaagttgtccaatcagagccaggtccaggaaataatgccacaccaccccaggtctttttgtaaccaaaatttagactcggatcaatctcatggcagaactatcaattaagttaatatctgtggaaagatgagattgtagtgtaagccttagatttctccatggttgatagccttccttgtgatctgggtataaattattctttggagggacacagactaaaaaatgtctttcaagaagaatgggtgcatggatctacaccattaaacaagaagttctattttctttttaagttttgagaat

SEQ ID NO: 814269 - DNA, 532 bp, Homo sapiens
ggagttgcatgcatgctcactttaaggtgctcttctcttactagtctaatattcctaggaggtcatatacsagttaaactccaccatttttcctcttaatgcttatgcttgagcccacttgcccaattcctgagatcttattggaaagttgctgatcaccagtttcaggttttttctatctatagagaaactgccttccccaggggctggttgcaactaattattattttagagagacagttaacaacctcctgaccatcacctgatggtcgcctgacattcctggttgcgggggagggagagtcccacttctgccctgtcatgtctgcctgactatctagcataacactaccacccattcatggcctaaatttgtgtttcaggtttacttctagaatgctcttggctgaggggaggggtccattcaattagttgggggacttagaattttattgttggtttacatggtgaaattatctcatgtgtacccaagtacagagaagattgtactttccttaggtagatttaattg

SEQ ID NO: 814270 - DNA, 459 bp, Homo sapiens
cccactcaccactcctcaacatagcccctggaagtcctggccagagcaatcaggcaagakaaagaaataaaacatccaaattttaaaaggggaagtcaaattatctgtgtttgctgataataagtttgtatacctagaaaactctaaagactccttcaaaagactcctagacttgataaatggcatcagtgaagtttcaggatacaaaatcaatgtagaagcatgtctatacacaaatagcattcaaactgagaatgaaatcaagaagacggtcccatttacaataaccacacacacaaaagaattacttaggaatacgtttaactaagaaggtgcaagacctctacaaggagagctgcaaaacactgatgaaagaaataagtgacacaaacaaaaggaagaacatcccatgctcatatattataagaatcaatatcattaaaatgaccatactaccca

SEQ ID NO: 814271 - DNA, 564 bp, Homo sapiens
catacagaactccaaaatagcctgaatagctgaagcaatcctaagtaaagaacaaagctggagccatcacattacctgactttatgctacaaggctatagtaacgaaaatagcatggtactggtacaaatatagatacacagatcaagggaacagacaaaagaactcagaaacaaaaccacatacctatagccaactgatcttcaacagagtcaacaaaaaaatgcaatgaggaaaggacaaccctattcaataaatgatgctggaaaaattggatagccatatgcagaacaatgaaactggacccctatctctcaccatatacaaaaatttactcaaggtggattaaagacttgaacataagacctgaaagttaaaatcctagaagaaaaccaaagaaaatgcttttggactttggcatatgcaaggaatgtatgagtaagaccttaaaaacaaatgcaacaaaaacaaaaaggcacaaatgggacttaagtaaatgaaagagcttctgcacagcaaaagaaataatcarcagagtatacagaaaactaactgaatgggagaa

SEQ ID NO: 814272 - DNA, 601 bp, Homo sapiens
ttttattttaaccaatgtatttttaaagctctttgaatactgtgagatttttcgttttctttagyctgacaatctctcttttaaccaatgtccttagtccacttaaacataatataattttggccatactgaatttgttttctatttgttccatctcttcttaattcctttgtgtctttttctctggcttctgttggactgagtacactttttactattccagtgtcttctttacttgcttattagctataattcttgctttatatttttaatggattgtctagcatttacagtatgtatttttaacttattacagcctccttacaaattatttataccactttatatataatgtaagctccttaaaacagtatactcctctttttccttcctttttgctattatgcatcttactttcacatttcctattatcagtttaattctacatatattttaaacaccaaaatacattgtaatcattttgcctcagttaattatactaaaaataatatcgatacttttttatacatttaccactatcagcttccttccttccttcacatagacaccactttccatcttgaaccattttatttcagcc

SEQ ID NO: 814273 - DNA, 623 bp, Homo sapiens
cagcccttaaggctgcacatgatcctttccccactacagaatgtggtgtggcgtgtatatgtgcaccagtgagtatgtggggggagagggggtacacccatttgtggtggggggggtataatgtggtgtgtkcatgtgcggtgtctgtgcatgacctctcaaaggtaggaaaagtggcatcgtcgtcatactccttgttggattggtaaggaattgttcagttgacagagattttgatataacttgttccatttatttcctcgctacgccgttcaagtagataaaacgttctcgaccaaatgaattgccagtgctctggctctctagaagaattactcatgacctaaccacgctggaggctgacagctaactaatgatctttccctcttttcaaaagactttgcccatatgggaacaaagactgtcatgatcccccagccaggcagggctggccctgggcttggaggaggcgatgaagtaagacacaggcagctatgggaagaagtcaaccacttccacgaggccaattgtgggtgtctcaggaaacagacaagttgcgagtctatgtttttgccagatcctctgcccctttagagacgtgctcgcatgtcacatgcgtgagg

SEQ ID NO: 814274 - DNA, 502 bp, Homo sapiens
tgaagttagacctgaatatgccagcctttttcccactggagaagctcaaaatcttcccaaccattcccctagatgccagatgaagtattcctgaacacatatcattacttaaaacttgggttagaaacattctgttattgagatttatatattgtcatttatgtatgctcttatagagatataattaaaatattacagagacacattgttctaatacacacaagatactggtgagttactagatcataagggctatcacatattatgcttaccatgtgctaagcactgttttaagtgagttttacacatactaatttacttgggcctatcaacaaatataacaaagaccagagctaataaacaaaaaaaaggatgggcagatggatggatggatgaatggatggatgggkaggtaagtagcgggtaataatagactagatcgatagataaaaattaaaagttgaggtcaggagcactggctcatgcctgtaatcccagcact

SEQ ID NO: 814275 - DNA, 487 bp, Homo sapiens
tatgttgcctatttaaaataattcattattaaaattatacttataaagttgtttttaatttcaactaaattaaatgaacaaagagtactgtgtatgattagtattayggctacacaccagttttaacttgagatccgactttaacctttgcaaactgctgtgaaatgttggatattttatgaaaaaaataggaatatttgcctcttttttttttacatctgttgtcgtaggaaccaagtctgtctctacaatcatacacattataccaaagccatcctgaaggagtgagtcttttaacagtccccctgttaaagactttctcattctcattacccccactcaccctagtcttaccttctacatcactttaaaacttttctaattagaaattagaggaatattttctaatcgaaaatgaactgcacttctttgcccatctgtctctctccttgtatctgcaaaccatttaaaggtcatcaccttgagc

SEQ ID NO: 814276 - DNA, 487 bp, Homo sapiens
tatgttgcctatttaaaataattcattattaaaattatacttataaagttgtttttaatttcaactaaattaaatgaacaaagagtactgtgtatgattagtattatggctacacaccagktttaacttgagatccgactttaacctttgcaaactgctgtgaaatgttggatattttatgaaaaaaataggaatatttgcctcttttttttttacatctgttgtcgtaggaaccaagtctgtctctacaatcatacacattataccaaagccatcctgaaggagtgagtcttttaacagtccccctgttaaagactttctcattctcattacccccactcaccctagtcttaccttctacatcactttaaaacttttctaattagaaattagaggaatattttctaatcgaaaatgaactgcacttctttgcccatctgtctctctccttgtatctgcaaaccatttaaaggtcatcaccttgagc

SEQ ID NO: 814277 - DNA, 503 bp, Homo sapiens
ctctttcaagggtaaatcatctcccagagtttgagaggcacagagatgtactgcaaaatccatgaccatcatcttcttaccttttggaaagatttagttttgagaaatagaggatatcggatcaatttgrtaattaagaaagtcgactgagctgtgtaatgcagttttttgttccaaacaagtaggacccaaagtaatgtaatatgattttcatgtcaccagtataaactaatacaaaggcaattttaaaagagaagtccccaaattgtcttgatcagtggtggttatattggcataaaagtactgcctctgaagatgactcctttagtggtgataattttttggatatgttttattaggtttgtggaaaagctcagtatgaccacagcataagctatacctcatatgtacctcaaattcgaacatatagacaactgcatggcttcccttgttgaccattctaagggtttgaaggtaatacaggtggcagaataagattttat

SEQ ID NO: 814278 - DNA, 613 bp, Homo sapiens
agatgagggagagaaaggatttaggttatagggaatatgttcatacttttatatgtatagctcttcttaaattaatccatacaataagtactcattgagccctcccaaaaagaccactagtaaacttaaactaattctctctgaagcatttttgagatcctgtactttttccaaaaataatttttaaatcctgcctttttcaactcttccccataaataatttattgatgactaaaaaaattatattcagaaataacacacatatttattgttcatactcttgtttctctatcctgggcagtgtcaatctttcttttacttatatcctctatcctgaactgataatgttacttagcatatgtcatgtgtaactgaagagaaggcaaaagcttaaaagttattttgtctaggaaggtgttctcagtgagtttgtttaataggataaatgcaaatttttatctgtagcatgaccccaattttaatctcatgcatttatatatatataattgtggctgggatgaattggtacataaagttcttagtaatggttgttttagggtgtggrattgtaggtgattttagttttcttttttctatttctctgtattttccc

SEQ ID NO: 814279 - DNA, 626 bp, Homo sapiens
ccaggaatctacattttaatattttttcaggtgatttggatgcacatggtccatagatcacacttttataaacacaggattawacctgaactccgtacacatttttcatccttatttctccttatttactgatgttaatccagtgcctggcacatggtttactattagtacaatggctaaatttgatcatcacataagaaatagtaaaacaaaaaaaaagacaggaatattgaaaatagtgatattttacatattcatgttgctcaaaaatttcagaatgctttggaaccaaagaagcaaacttaatagtatttttccatacaatgactcaacagattctctaagggtcaaacttttgattcagtgggtttccccctaaagtcaggattcattttccatgcatggtcaaacacaacacactgtatattgatttttgattcacatatttaccaggggaaactgtgcccacaggtctgacatgtttctttctaaagagggtgtctttatctagaactttaatgcttgggttctggcagggcttctcctactgctcttccagccctcctctctgtgacactatctctgggtgtcaggggcttaagtttgagaaaaacagcatttgtgaa

SEQ ID NO: 814280 - DNA, 510 bp, Homo sapiens
ggtcagaggttacccagaaattgatggaagtcatgaagcttcttttgagaagasaatgtatacgtacctatatatatgtatagtctccaaacattgttatgacagtgaatcgagctatcctaagaatatctgggggaaaaaaattgttttaagtccaggtttccaaacctcatcatagctctccagggaaattttatagataagaagcactgatctccaaggtgaaacctaactcctcaagaaggtggggctgggtggtagatcacccctgtaatcccagcactttgagaggctgaggcgggaggatcgcttgagtccgggagttggagaccaggctgggcaatatagggagaccgtgtctcttcaaaaagtgaaaaaattagcagagtgtggtaatgcgtgcctatagtcccagctacccagtaggctgcagtgagctatgattgagccactgcactccaacataggtgacagagtaagggatggttaaatttaagggaccacaaagta

SEQ ID NO: 814281 - DNA, 362 bp, Homo sapiens
tgggagtcattaatgtatagatgacatttaaattcaaaggactaaatgaactcacctagggagactgaacagataaagagaagagatagagacctccaacaytcagaggccagtcaaacagaggaaagtaggcaaaggagaatgagaaagaataggcagagaggtaggaggaaaatcaggaaagtgtttctaataggaagaagtggtcaagagaatggaataccactgaggtctggtaagatggaaacaaagagatgaccaccggattttaacagggaccttggcaggtataacctcacgggtgtggtggaaacaacgggctgagcagaggatggcaggtaaagaagacatctctttgaaca

SEQ ID NO: 814282 - DNA, 601 bp, Homo sapiens
actgtactcaaactattccaaaaaatataggaggaaggaatatctctaaactcattctatgaggccagtattactctcacagmaaaatcagacaaagacatattaaaaacaaaaaactacaggccaatatttctgatgtatattgatgcaaaaatcctcaacaatatctagcaaaccaatgtcaatgatacattagaaagattattcatcatgacgaagagaaatttatcccagggatgcaaagatgcttccatgtatgcaaatcaatcaatgtgacacactatatcaacacaataaaggacaaaaacgatacaattatttcaattggtgagatgattgataaaaatcaacatccttttatgataaaattcaacatcccttcatgataaaaacccttgaaaaaactgggtatagaaggaacatacctcaacataataaaagccatatatttcagacttgcagctagtatcacactgaatggggaaaaatggaaacagcctttcctctaaaatctgggacatgacaaggatgcccactttcaccactgttattcaacatagtactggaagtcttagctagagcaatcagacaagagaaagaa

SEQ ID NO: 814283 - DNA, 594 bp, Homo sapiens
gctgagcaatttatactctagagcattttttaaaacaatagagtaattagttgataattactggaggctaatgggctggcatgtaacacagaatgaggcacacagtttaacagagagagtagagaaaaagacaaagagagccttgccaaattcactgtcatcccagggtgacggtgtgaatgcccaaggctgtaccctctgaagagtggcatcaaaagcttcacagagtggaacaaatataatttactaaaatatcctagccaagtcacaaaataagcaaacaatatcaaaaacaagctcagaagagggaggaagcaaatctgtacccagaattgctacaatatattccctaaaataaccaatttccaacaaaaaattttaagacatctaaagaagcgagaaagtgtgactcatatacaggagggggaaaaaagctgcaaaaactgcctggaaagaggagcagatgtcagatttattaaagactttgaaatagccattacaartacgtccagagaactaaatgaaaccatgtttaaagaggtaaaggaagatatgaacagaatgtctcaaatggagaatgtcagtaaagagaaa

SEQ ID NO: 814284 - DNA, 594 bp, Homo sapiens
gtcagcttgtgaaaagttgttaaacaacatgctaaatgtgacatgtcaaccctcactctaaactttgcctgttcagagcatcagatgaagacttcattgggttttatagtggctttctgattttcggtagtccattgaagaaggtagttaagtttgaaagttgttgtgtactgttaatgactgtctgcccatgttctgcctgaaataccacgactgtttctggaaagtatctttaataaagctggatacagtttggcttggaaaaaaaaaaaagagtggttgatttgcacagtgggattgcggggacttttttttttcttcttcatacttgtttgtattttccaaatcttccctaaggtcatttattacttttagaatttaaaaattattttataaaaatatgtaaagctctggttttttaatgactatgtaatgactatgtctactcaaaagtatcttcaaaatgacctatttaaaaatctatcccctcaaaayatcctgataaatcctttcatctttttttggactaaaaatacagtgtaataactgaagaacaggttaaaaaatgttaactaaactgtaatttagaattga

SEQ ID NO: 814285 - DNA, 622 bp, Homo sapiens
ctacagatggttatttctatggtattatttatattacgctaagttacattatgaattaaatcaacttttgaaaggaggaacagaaacctaaagaatatttatcaagttgtgttcaggggaagraattaagaattaaaatacagatggtaatagtttactgtgtatgatgtgtacagggcaccatggcaagtagtttacatatattctcatttaatcaacacaaagaaacaggtattatcattacttgacacataagaaaaccaaggctcagaaagtcagagctggaagtcaaatgtcattctatctgatccaagtctgtgctgttagctatcacacttcattgttttgtatgtatgtttcaagttttaaatatcattgtaaaatataatcttaatatttcatgaacagttgactgcctctgtgagagagtgtgcgtgtgcatgtgtgtgtatagtgtgtaatgtagctgcaaatagacatttattaaacttgttttgctttttggaatctacttatttaaaatactccatatatttgagaagcaattgaaaatgcatccatgtatgttatttgagcgttactagaaatttatttatacaaatccatattaatgtgctaataa

SEQ ID NO: 814286 - DNA, 622 bp, Homo sapiens
ctacagatggttatttctatggtattatttatattacgctaagttacattatgaattaaatcaacttttgaaaggaggaacagaaacctaaagaatatttatcaagttgtgttcaggggaaggaattaagaattaaaatacagatggtaatagtttactgtgtatgatgtgtacagggcaccatggcaagtagtttacatatattctcatttaatcaacacaaagaaacaggtattatcattacttgacacataagaaaaccaaggctcagaaagtcagagctggaagtcaaatgtcattctatctgatccaagtctgtgctgttagctatcacacttcattgttttgtatgtatgtttcaagttttaaatatcattgtaaaatataatcttaatatttcatgaacagttgactgcctctgtgagagagtgtgcgtgtgcatgtgtgtgtatagtgtgtaatgtagctgcaaatagacatttattaaacttgttttgctytttggaatctacttatttaaaatactccatatatttgagaagcaattgaaaatgcatccatgtatgttatttgagcgttactagaaatttatttatacaaatccatattaatgtgctaataa

SEQ ID NO: 814287 - DNA, 606 bp, Homo sapiens
tgggcttagaatgttgagtgcagggcagacttcagcagacagtccaagtcagaagaaagctgaatttaagacctgctttagaataaatatttgtgattcctcaagcagttcttgtctcttaatgtatggcattttcaaaatgcttacagtctgtaccctgattgatgtttatgtttaaagaagtatagaaattgccatcagtacctgttgatcccaccagaatattaagctaaacagagaaaatgtatgtgttcacagttacaggcacaatttatagttcttggaatacaagttgatatctacacaaaatagatgtataaagagaggaatgctttttgattattgagagtgctttgcttgtgccatgtttttacctgaaactaaagagacatcagtgtgtaattttcctacaactctacaagcctaagtataatctgaggtaatgtatgcacaaagagaccaaaaacctatcttctaaaaactgggcctggtgaaataatactatcagggaccttatcctagaacttataatttttgtggtagctgacagacttggagtctaggcttataragtgttgttttggtgacaacaaaaatgttggaaga

SEQ ID NO: 814288 - DNA, 411 bp, Homo sapiens
gtcaatgagacaaattctgcccatcatttttgtcattaagtctttctgcaaattgaacttttgcattgtttcattagagcctgctaaattatagtgtagcatttaaaagawaggctctgaagtacaaaagatgttggttccaaattccaactacttcttaacagctctatgactttgggagagatctttaacttcacttttcttattgttaataagaggagcgtggccagatttagcagataaatatgcaaccttaaatacgaggctaggcacagttgaatgatgcgtgaaaagcatcagtagaatgccaggtacctggtaactactaataaacattggctattaccatcattactatgttatttgaacacctttctcactgtctaagccaggtcttctcttaagttttcc

SEQ ID NO: 814289 - DNA, 446 bp, Homo sapiens
atttttcttcattcttaaagtattcaactgtcattgtcaatgagacaaattctgcccatcatttttgtcattaagtctttctgcaaattgaacttttgcattgtttcattagagcctgctaaattatagtgtagcatttaaaagataggctctgaagtacaaaagatgttggttccaaattccaactacttcttaacagctctatgactttgggagagatctttaacttcacttttcttattgttaataagaggagcgtggccagatttagcagataaatatgcaaccttaaatacgaggctaggcacagttgaatgatgcgtgaaaagcatcagtagaatgccaggtacctggtaactactaataaacattggctattaccatcattactatgttatttgaacaccyttctcactgtctaagccaggtcttctcttaagttttcc

SEQ ID NO: 814290 - DNA, 517 bp, Homo sapiens
aaggggattggcaaagacattcatctctttgttcagaaatcattatatcgaccttgacttactggcatgtagcaggctcrggctggcctgcgcagcagcagagtcccaccctccatccagccaggcccccctggccagctcattctccttcactgattaaagtaaggagagcaagtccctcagtcacaggatccccaagatgaaaggcatttaaaaatagtttggaacacacacaaaaatcttcctttaccattaataaggatttctcttgtttatttttttcgatgacagctttttagaaagagcctattgttttggtttgtgagagacagaaacttgttagtttttcttcttttaagttaaaaaagactaacgggagctattagcagttggagtgaaactcattcttcattgccaaaatataaatgttatatcatgtgaaaatataaatgtcaaaggatttatggtagggtggccctttaaacaccccaaatccaatacaaagcaatctactatt

SEQ ID NO: 814291 - DNA, 263 bp, Homo sapiens
aagtttgggtccaaaatatataacatattcaaaaataaattaaaaacaggtatttcaatgtacagttcattggtgatgaatgaaatgcataatgtatgtggaaatcattgattgaattagcacttagaggagagatggagatggagttaaattttagttacttaggggaaaatccttttacttaaaagscttgggaatacaaaataaatagcagcataaataattttacaaagcatcaataataaatgcactgaataaaagga

SEQ ID NO: 814292 - DNA, 263 bp, Homo sapiens
aagtttgggtccaaaatatataacatattcaaaaataaattaaaaacaggtatttcaatgtacagttcattggtgatgaatgaaatgcataatgtatgtggaaatcattgattgaattagcacttagaggagagatggagatggagttaaattttagttacttaggggaaaatccttttacttaaaagccttgggaatacaaaataaatagcagcataaataattttamaaagcatcaataataaatgcactgaataaaagga

SEQ ID NO: 814293 - DNA, 575 bp, Homo sapiens
ccaaaccaaatccatctggccgtggggctcaggtgaggccttctctttaagagcagtgggagttctacagtgcaacgtatttgctttttagtgttaatacctgtgattacttagtctgtgaagggtttactgattttgactttctacttcctaaatttccacccaaattcctatttgcttttcaataatatttttaaatatgagatttttatatacacatattaaagcaatataccagatttatctttccatttcagcaacggtataccagagctgtaatcctgactgctttattatttagatcgtgaactgcggaaatcaagtactgtatcattttgttactttgatatccttaatctctaattctaacaaggaagccttggctcaggacacccagatcaatccatatagaaaaaaatatttatgcagccatatgaagaagatacttgaaaaataagggttaggagrgaaaactagcccttgctagagaaaatgtaatagaaagcataaatccacataaagtataagtataaagtataaagctatacttcaagcattttgacaacagtacaggg

SEQ ID NO: 814294 - DNA, 601 bp, Homo sapiens
ttttcaactctgtattttttttctacrtgtaaaataaagatattctacatacattttctaaaagaaaaaaaaagtaaaacaagtgggaaaaaaggtccatgatattgcatccagatctgtgaaaaacttttcctttttctctattcacgttttgtgtattctgaaggtttgatgccagaatttcatcattaccctggagactgactgcaggcaacttacaacatttttttttttttttgaatcttgtgttgcatttttctgaaaaccctcctagtaccttgctcaatttgtataattacataccgcaccccacccccccgccggccccgccacacacacacatgagtggcaaaaaagccacagtgcatagatcccagggacttcagctgtgggttccctttgtgttcctaactcagctgggcttatagtacattttaagtcttggtgactcatagtctgtttgttgtgttgcctcatttaaattgtggcatcataaatcatttcattttttaatcatttgagtagcaaataccccaaagcattgaagttaaacaatgttaatggaggtttactttggatcccattgttttaatatgacaaa

SEQ ID NO: 814295 - DNA, 614 bp, Homo sapiens
aaaagaaatttgccactagatttagtcacaaggcaggctggcagatgcgaattaataaatccacatcttttcacagcagccattacctgatcttccacagtaatctcggtgcctagtgtattgtcggtattccatttctctgtaaacgtcaggccgtactcagtccatctgtacttggtttccagactgcccgtcactttggtggtctcagtgttggctgagcctgagcttgtaaattccttcaaaggagagagaagagtcacagcctgcaccatagcactcacttggcttcacttcactcctaaacactatacttgcctttctgcaagaggcaagaccctgaatgtgggggggccaaggctaactctacaattcaaatagatatttaaagtacagatgggagtaaaggagcctgctatgtaaagaaatcttatggggaatttgttgtcagcagacagcttccttcctccctgtaactcttcagtctggacaggaaagcatctcccttccatcctggctccagggcagtacagagaaaaagcactgagctaawgctgacacagcggtaattcaaacccaaaacttctttcttccaacaattactgcacacataa

SEQ ID NO: 814296 - DNA, 623 bp, Homo sapiens
gtacttctgtgtttcttggagagctgctccttgaagatactgctgcatgtgggtctctgtgggactgtcagttaagagcctccacyggcctcacccacccccagagggaatacatgtcctcggctgagcccattgggctttctctcctggtattttttagtagctgatatttatgaagtgcttgctaggtgctggccccctttctaaggatcttcatgtactgagcatccaaccctcccattgccagttaaggaagtgggctttatttttagctctattctgtcaacgaggacaccccagtacagaggttaagtgacttgtccaagtgacagagcctgtaactgtccaagctgggactttgagtcatgagtgcagtactataaggatgaaggattgttgaaggtaatcaatgggttggcagtgccccagggactgtcccttccttcttgcttcctggtgctatgtgctatctggaggcctggtggtggagctttttcatcctttctatgagttactccatacgtttccaaaaattttattttttggtttgtcaccaagagtccgtgtctgctacttagatctgtaagagctttggctgatgcctgagccgaccaacaagtatg

SEQ ID NO: 814297 - DNA, 440 bp, Homo sapiens
atggagaatggggtatccatcttctcaagcatttatcctttgagttacaaacaatccaattaccctctttcagttatttttaaaagcacaattaaattattattaattacagttatcctgttgtgtgatcaaatagtaggtcttattaattctttctagttattttttgttcccattaactatacctacttccccgccactttccactaacattctcagcctctggtaattagccttctattgtctttgtccatgagttcaattgttttgatttttaaattccacaaataagtgagaacatgcgatgtttgtctttctgtgcctggctaacttcacttaacataatggtctccagttccatccaygttgctgcaaattactaaatctcagccctttttatggctgaactccattgtgtacttcattgtgtatatgtacca

SEQ ID NO: 814298 - DNA, 649 bp, Homo sapiens
gaattctagttcgttttcaactattaggcagtgtgtatcagctttttgaccttaaggaattaatatatataatgattacactgaaattaaaaatattttgaaatacctaaaaggaaaaaaaataaaagtaaaaataaatagaattttaaacccaggaaagtttgctctgaaatattttaagagttacatcttattttccattttttaaagaacagtggttcctgaaacagagaaataaaaagatgccataaacccctatgaatattaaaaggtcaaacttgattgtatgaagttatttttagccatggtttgaaatatctttagcaatcaagaagacaggagatttatgcttctacttttatctcagatgatacaaaaccaacaactggcattaagtttttgttattaattacagtgtaatgtgtatttataaagttcttctctaagaattatccataatgaaaataatttccagatcccaataaaaaagtagaacatgaaaaattatagaagaaaaggttctataatctgtttagcttgttatyataaattgactttcctgttttaataccaaagcagagaatttctttacaaagtttaggcagattatggattctttaactatgtaattaaaccaatttcatagtct

SEQ ID NO: 814299 - DNA, 527 bp, Homo sapiens
tattttacagatgaggaaaccaatgaacaaaaaagatcttcactttctcaaggtcacacaactggttggggcagaggtaagattcaaaccaggccctgatmtttctgtgtgatctgcgacaagatttttccctccaaatccttggtttcctgttatgctaggtgatctctgaggattcttcaagcctcacaattctcaagtccatgtcctccctcatgtgcgccatggaaagcctgtgtatcttcattggcctgggggagaaaaacaaggctgctgatgcctggctcagggatgaattatgcaatttacagtcaccaacactagattacaaaatatatgccctgaagtccatgttcactaacatatttcttttttcagtaaatattgtagatatgtagtatgtttaagcactaaagattcactgttataaagagaccagcttaccattcattaagtaaatgaataaatagataattgcaaagtaagacagtagaatgaaggaaatgtacaagggggtagggacaagt

SEQ ID NO: 814300 - DNA, 489 bp, Homo sapiens
aggtaaagaaactccttccaaggatccaactgtatcgagtgagtgtatagcctcatctgaatacaaggaaaaatgttttctgccacagaacattaatccaggtatccaaatgccaaagacaagccctattcttccatgttgagtattgcgataacctctttatctttcccatctaaagagcccctccctctttccctcttgatgaaaagattttgactatgctatttgcttgctcacaaatcttctgttgcactccactgcctacaaaattaattttaactttctcaagctgtcactcaaagctcttcacaatctggcacttattaggagctccatacttatttgctttgttgaagaaagtatatcataaattasatttgaaggtgttgagagatggggtaattaaaaatatttatattcaacatggtacctcaaagagttgttcatacgttgttgctgctcagaaaatctttgatgaataaatacatg

SEQ ID NO: 814301 - DNA, 634 bp, Homo sapiens
tatgctgttgattttagttagtcgttcgtctaactcttttttcaaggtttttagcttctttgtgatggrttcgaacatcatcctttcacttggagaagtttgttattactcatcttttgaagcctacttctgtcaactcatcaaagtcattctccgtctaggtttgttctgttgctggtgaggagctgtgttcctttggaggagaagaagcattctgatttttagaattttaagtttttctcctctggtttctccccatctttgtggttttatctacctttggtctttgatgatggtgacctacagatggggtttttgtgtggatgtcctttttgttgatgttgatgctgttcctttctctttgttagttttccttctaacagtgaggaccctcagctgcaggtctgttcgaatttgctggaggtccactccagaccctgttttcctgggtgacatcagcaggggctgcagaacagcaaatgttgctgcctgatccttcctctggaagcttcatctcagaggggcacctggctgtgtgaggtgtcagtcggcccctactaggaggtgtctcccaggtaggctactcgggggtcagggacccacttgaggaggcagtctatccattctcaaattt

SEQ ID NO: 814302 - DNA, 634 bp, Homo sapiens
tatgctgttgattttagttagtcgttcgtctaactcttttttcaaggtttttagcttctttgtgatggattcraacatcatcctttcacttggagaagtttgttattactcatcttttgaagcctacttctgtcaactcatcaaagtcattctccgtctaggtttgttctgttgctggtgaggagctgtgttcctttggaggagaagaagcattctgatttttagaattttaagtttttctcctctggtttctccccatctttgtggttttatctacctttggtctttgatgatggtgacctacagatggggtttttgtgtggatgtcctttttgttgatgttgatgctgttcctttctctttgttagttttccttctaacagtgaggaccctcagctgcaggtctgttcgaatttgctggaggtccactccagaccctgttttcctgggtgacatcagcaggggctgcagaacagcaaatgttgctgcctgatccttcctctggaagcttcatctcagaggggcacctggctgtgtgaggtgtcagtcggcccctactaggaggtgtctcccaggtaggctactcgggggtcagggacccacttgaggaggcagtctatccattctcaaattt

SEQ ID NO: 814303 - DNA, 506 bp, Homo sapiens
ctgactccaaagcccaagatcttaactacaatatcaaactgcctgcctccaaatgacaccaaatgaatgggggaaagttaatagtgtaagctagagaagaactaaaagagacaaattacacatctttgggtgagcctctgaagtgctcagaaagactcacaaaaatgttcttagaattctgtctagaaaatttcttccattcctgcatcctcagagagaatcatcttgaaaatgcagttagtccctaagaatccttgtgggaggcaaatgaatctagaaatgacagcaagcttaccccttccccagatgaaccaaacccctcggatttagcagtacctgaagggagcccacccctgctccctccacctgcctgatctcagcaggctgtcaccagcaagatcctcattcatcgcaccatgagggaaataatggagagtccccaagtgtgggggagaaaaccaaaaagtaatgtaaaaagawaaggagtaagaagagaacaaagcctt

SEQ ID NO: 814304 - DNA, 665 bp, Homo sapiens
tatataactatatatgtatattatataatagatactgaatcttgtcaaatgacttttctgtatctattgaaatgattatatgctttttcatctttaatctgaccatatgataaattgaatttattgatttttcaaatgttgaataagattcgcatttcagatataaaccctacttagttgatttgctagtacttttggggggatttttatttttatgtttctgagggatattaatttgtaattgtcttgtcatttctcattctgattttggcctcagggtaatgttggcctcccaaaatgattgggccaataagctcaatgaagtatgatcaatatcattagccattagggaaaagcacatcaaaagcaaaattatataccactccatacctactatgatgactagaataaaaaggatgcaataacaagggtaggttataatatggagaaactggaattctcttaaattgctagtgggaatgtgaaatagtgtagatgctttgaagagtctggaagtttctcacaagtttaaaacgagttmtcatatgacccagcaattccattcctatgtgtatacccatgaaaaatgaaaatatatgttcattcatacacttatccaggaatgttcacagtagcattattcataatagccaaatagtagtaga

SEQ ID NO: 814305 - DNA, 578 bp, Homo sapiens
caaccctagttatagagcccagaatcttcacgcctgtatccagaagctgcttccacgcgcaggcccagctccatccagggctaggggcagaatacacatcctaatggaaggatcatagtctcagcccagaagacaggagccctttcccattcctgcctgtcttttagctatcacatgaattatgggagtctgagttcactaaactaaaatacgaatataataattcttgtcctgccagcgtctcaggatggttgtgagaataaaaatgagacgatggattgtagattttgtaaaccgtgaaaagtcatagatattagtcattgctggggcagacttcatggcctaaatatacccttacttacctccttgagtgatctataaacccaggacactttctagctcttctataaaatatgaaggtggagaagtggtatgtggacaagactcartgatactcacgtaattgattaggtgaggaactgctgtgtgtcagttgctattccaggccttaagatacaatgttgaatgggggagagaagcagagctgatattcaaccagtagaaactagtggacgtac

SEQ ID NO: 814306 - DNA, 421 bp, Homo sapiens
ttggaagacataagaatacacaacacaaattccagtggctatcagaacaatgatggcaatggatgctatttagcctctggaaaattcaactgtatgcttataaaatgatgacagtagaaaaggcaaataatgtttgttaatattttaaaataattttgatctggtgatctccaagcgttcccaaagcacactgaaaaatactgctctatgcatcgtctggaaagaaatgttcgaatgaacggaaataaactttactcaacctatataatatcttcgttgtaaaaataacatttaatttacagaaatacgttttatttatttgttttttgttatactttaagttctggggtacatgtgcaraacatgcaggtttgttacacaggtatacatgtgccatggtggtttgctgcacccatcaaca

SEQ ID NO: 814307 - DNA, 665 bp, Homo sapiens
taaccccacatttctcctccacactgccctagtaaaggttttccatgagggctctgcttctgcagcagacttctgcttggactttcaggcttttccttccatacatcctctgaaatctagtcagaggctccaagccccaattcttgccctctgtgcacttgcaggcttaacaccacaaggaaggcaccaaggcttatggtgtgcaccctctagagcagtggcctgagacatatccgggacccaattagctacaactggagctgaagtggctgggacttttcctaatcttcctgtattcttttgagccctccaaactgttccagcctctgcctgttacccagttccaaattgcttccacattttcaggtatctttatagcaatgtctcacttctctggttccaattttgtgttttagttcattctcacattgctatgctataaagaactacctgaaattgggtaatttatgaaaaaaaagtttaattgggtcatggttctgcaggctgcataggaagaggaagcatgggtgggtagtctcaggaaacttacaatcatggcataaggcaaaggggaagctagcacatcctaaatggctggagcaggaggaagagagagggaaggggacgtgatacacarttttagagaaccagatcttgtgaaaact

SEQ ID NO: 814308 - DNA, 656 bp, Homo sapiens
taaatatttctaaaatggcttcagggccttatcactgttgtcttgactattagcacctggctcccctttgccatgctaatctccctagcaagtggttgctccaagcacccttgtatttctctctcaaaaatgctcttcctttgtctaccacatggtcaggctgcaaattttccaaatttttatgctctgcttcctttttaattaaaaagcccacctttaggtaattcccttgctgtcatatctgatcataagctattaaaagcagtcatgtcaggtcttgaaagctatgctgctgcgaaatatcttctggcagataccctacatcatcactcttaagttcagccttccacaaagccctagggcatgggcataatgcagacaagtcttgttagagcataacaagggtgacttttgctccagttcccgataacttcctcacttttatatgagaccttgtcagcatggccttcaccgtctacatttttatcagcattttaatcataaccacttaaccaatatataataaattttaaacttttcctcatcttcctgtcttcctctgaaccctctaaattctccctctgctcattacccmcagttccaaagccacttccacattttcaggtatttttataacaacaatcaactccttggtg

SEQ ID NO: 814309 - DNA, 389 bp, Homo sapiens
gcgtaggtgggaggatcctttcagcccaggagttcaaaaccagcctggacaacatacagagactgtgtcgctacaaaaaacaaaaattaakaaaaaaaaatagctgggcagggtagcatgggcctatagtcccagctacttaggaggctgaggtgggagtgtcacttgagcctgggaggtcaaagctgaaatgagctgtgatcatgaaactgcattccagcctgggcaacagagcaagaccctgtctttaaaaaaaaaaaaaaaaagtagagcaggcctggcgtggtggcttatgcctgtaatcccagtactttgggaggccgaggtgggaggattgcttgagctcaggagtatgagcctggccagcctgggccatagagcaagacccc

SEQ ID NO: 814310 - DNA, 634 bp, Homo sapiens
gactttctacctgtgaagacgagctatcagtttatgtgaccagggtgaaattcaacagaactgttttagggtaaaaatcttgaggctcacaaggaatttccttgtgggcaaattgtgagggagatatgtagcttttttttttttttaatctttgtagctatcttatttagggataaaatgggaggcagatttgtctgacatagttcccagcttaacttttcccttggcttagcgattttggggacagacccaagatttattttcctttcacataagaaaaaaaagcaggccaggcacagtgcctcatccctgtaatcccagcactttgggaggccaaggcaggtggatcacctgaggtcaggagttcaagaccagcctggccaatatggtgaaaccccatctctactaaaaatacaaaaattactcaggctgtggtggtgcatgcctataatcccagctatttgggagactgaggcaggagaattgcttgaacacaggaggcagagattgcagtgagtcaagatcatgccactgcactccagcactccagcctamgtgacagagcaagatcctgttaaaaaaaaaaaaaaaaaaaaagattcctggactgctagaatctgcatttaataaatac

SEQ ID NO: 814311 - DNA, 655 bp, Homo sapiens
cccatttgtaataggaatgtctgtccaatgcccgtcccctggtgtatcttgaaaatcgataacttgtttaatctgacatgcttacagcaagaagaaattcrcctcaaggtgaatcatgccatgagtcttacccacatctgatttagatgaaactttaaactttggacttttgagttgctactgaaatgagttaagacttttgagacaattgggatggaataactgtattttgtattgtgagaaggacataaatttgaggagtcaaggtcagaatgctatggcttaaatatggtcctccaaagttcatatgtcagttaatcctcaatccaacttaatcctcaatccaacttaatcctcaatgcaacagtgttgggaggtgaagcccaccaagatggttgggtcatgagagaactctccagaatcgattaatgtcataatagtggaagtggattagttattttcagtgtgtgctataaagtgagtccagcctctggtgctttactttctgtctcgtgtgcttgcctctgcttttgacctctcaccatagatgacccctgccagatgcaacagccatgctgttgaacttcccagcctccagaactgtgagaaataaatttcttttctttataaattacccagtctcaggtattttatt

SEQ ID NO: 814312 - DNA, 489 bp, Homo sapiens
caaagaaccaggtgccacggctcatgtgtgattactaaccaagcagctctcaactctgcccactgactactctgatgcgtatctgtatcaagccagattttatcagtttgtggttgtatagcaatagcagtccaagtaacgtggcttcctctactggagccatccatataccaagcattgtccagatgggtaacaattttttcttactatatcaggcattagagtaggaggagctaaaggggagtcctttgtttgctcaaatgtaacagggcctaatgcagaatgagagtctgagcttaaggaactcgttgccaaaactcttcactgttgcaaataggcatgccatttattcaagattggtgtttgggctacagtggaggttaattgtttaaacagtccttctgtctatcccttgattggtagacctgttctcacaatcacaggaaakgtctttgtcaatggctccacttgctgtaaagcactatatac

SEQ ID NO: 814313 - DNA, 586 bp, Homo sapiens
tgaggggggaggagcaggaagggaggttggacaggaaggtggggccccgtgcctctgtctcctagcaatgtcaggcctgaccttgggagggcagatactgagccctgtcctgcagcagcatccacccctcatctgtcccaccccagctctacagcgtgcaagacagacagagtgtgtgcgatacatttcaaaggggcattctacatctatcatgtggatgtcataattcagtacgatgcacaaacagtaccacaacgacttgacagtctggctggggcaatgagaattagataagcaaaagcaatatccaatttatcacatggacttggagctgagatgaaaacacatatgactgatgatgttcacggagtgacaggatcacacggatatacccagggtcacgtacagtttccatgcctggggctataagagctacaatggcatctctttttctcccacccagtaaagcacagggtacagcagatgtgtgagtgtcatgatataaagacgtactagacacaaagatgtgtgccttctgyaatgtccttaactgtctcctctccccaacgatacccccccacccgaa

SEQ ID NO: 814314 - DNA, 632 bp, Homo sapiens
gattatgtccctggtctaatctccctgcaatgggcatctgttgtttttgcctgtccagtgcaccttctccctattggggactgtcctyccaactgctccacctggggcctgtgacccaggatggccagctggagcacccaacctcctgggctctggagctggtgtagggcagggtaatggggtatatatttaatggtcgccacacatgctggtgcttgatgtgatggccacacactttctctggggggaagaacaaagtggacaacacactgcagctgccagtgatcacctctgcaccacacagtaagggagggcctgtccgtgaatgcagcgagcacccagcagggcagtcccaagagagggaaagagacacctgtttgagcacctggaagcaggcctgttgaagacagcccctcacccccgcccccgccatggcttttctcggctacggctagtttaagatgattttgtcacttttatatttatttcttttcgagacagggtctccctctgtcacacaggctagagaacagtatcacaatcactgcttactgaagccttgacctcatgggcttaagtgaccctcctgcctcagcctcccaagtagctggggccacaggtgtgtgccacca

SEQ ID NO: 814315 - DNA, 624 bp, Homo sapiens
ggtatagcagtacgatgggaaaattggctccagaggcagacagacagacctgcatttgtacctagtaacctgggcaaattacttagcctcttggagcattggtgtccccatttggaaaacatggataataatttttaccatatatagttgtagggggttaaattggatcagagggtaatgtgcttagtactgggctgggcacttggtgacgatgatggttataattgcatggcaggcttgaggaagagagcatgagagacccactcacccctgctgacaatcctggcaaactgtgcagaagtgggcaaggtggagaccagcctggtgggccatgagctgaggttgttacaagctgggagggatggtgctactggctggggatatctgacacttggtactaagtggggctgggaagctggaccctctgcattgggcttttaagggagatggcgatcctgagttgtgtgcgtgttgggagtggtcactgggtagccactgggaccagccagggttgttcatacttactcaaatgggtcgctggggtcagctttctgcagttctggagggatcgggatccrcttgtagtacatctcccagtcaaaggctccccgcatggcatcccct

SEQ ID NO: 814316 - DNA, 587 bp, Homo sapiens
gagaccattctggctaacacggtgaaacygcgtctccactaaaaatacaaaaaattcgccaggtgtggtggcgggcatctgtagtcccagctactcaggaggctgaagcaggaaaatggcatgaacccgggaggcagagcttgcagtgagccgagatcatgccactgcactccagcctgggcgacagagagagactctgtctcaaaaaaaaataaatgaataaaataaaatggcagcttgaatctgctgaaaccaaagttaaatattacagcagcagagaatgtagtaccacacacaaaaaatagattactattgagaagaaacatgagtaacattctttatctaaaaaaaaaaaaaaaaaaaaaatttcaaacaagatgcattctaagaacatgtttgacatactcccagaatctctagccaagacaattggtttcagatttccaggacaaggctacattatgaagactgtaacaggtagcttttttgatgtacaaattttaattaattattataatgtatatggaatactagggcaacatggcccaatcaaaaaaagtataaaatttttggaaaacaaccataaa

SEQ ID NO: 814317 - DNA, 573 bp, Homo sapiens
ggccagatactcttcctaatgcatggggtaaaaacactaggtctttagcctcaaagactatgtagtagaatgcrgttagatgtcacagtgttgtagtagaatgcagttagataagtttctctgaaaacaaacaagcaaacaaacaaaccactccagttagtcccctgctgaaaaacttttactggcatgaaaaataaaatccaactcctgtacctagattaaatgtcctttaaaattcagccctgagtgccttttagttctaatatgcctactttccaattcctggaccctccaagcatattcttcaaagtgcctttccttatgccatttcctaaaccttcaaaactgccaaaacccttccacagatccacatcccaataaactttctgcagatctaaaccccaacctgtccatagatctaaaccccaaaattcaaagccctgtttaacttctactttctccatgaagcattcctagtcagtacacccgctctaaaatcctatagcatggattgcttatactattccttcagaagttaaaaatgtgacacctcgtatcttctcataacctcca

SEQ ID NO: 814318 - DNA, 550 bp, Homo sapiens
tacccaacatataaagagatcctattcttaggagctcctattcatataatagttatataaagactaataatccaatagaaacttgggcaaagggcatatacagatatttcacacaaaagggaataccaacagctcttgaacatatgaaaagatgttcaacttcacatcttaaaaaacaccaattaaaactttggtgagacactgttttttacctttagattgggaaagtttggtgacacactcttctaaggctctgggaaaacaggcactttcatataatgctgctgggaatgtaaactgatgcaacttttgtggactatctgtagaaatttcatatccacatgctcttaacccagcaagttcacttctaggcttttatcttactgatatattcatttatacatgtgcaaaatttcacacatacatggttgcttgttacaggggcgctgtagtatcragagactggaaacaatataaagggccatccatcaatgggtactggttaaaataagttatgatacattgaaacaactgagtactaggcagtcag

SEQ ID NO: 814319 - DNA, 493 bp, Homo sapiens
aaactttgctaagccactaactaagacacaattaagaagactcctagttgacattggctttttcaggcagtgggcrcccaacagtgtgtagaagtcaagggaaagcttcccctctgccttctacattttcactgaaaattaacttacaataagcagattaataggagaaaaaggcatgcaaaacttactaacatgcatatggatacaggagccatatacaaagtatgagactagaagaggagccagatggtcgaggcttatatagatttatggcagcagatactattttgtaaatgagactattttgtagatgagaccaagagttgcaagttatgggagggtgaggggcagaatggcacagaaacaaagcttgtctcattacacagataaagtcttccacataatctgtgggccctgccctcagatgaacagacgaaaagcctgtctgggtgtggtgattccttgtagcttctcctctctaggtggctaattt

SEQ ID NO: 814320 - DNA, 663 bp, Homo sapiens
tcctttttttattaggcatttttaaattaaaaatgtactttagattttatctaattcttcagcaacaatcaatgaaatcacaatttcaaaaatattgaactaaattgtatttctataaaatatagtactaactcataaaacatgatgatagattttgtgggccaggatactacttagaaatattacagttatattcataagattagtctgtttatatctatgtgttattgtcaatttttgatattatgctacattcataaagtaaatggggagcgttcttgttttttccatgacctgtgttagtaaacttggattcaagtttcatatctgccactaattatctatgtaacccagtaagagaagtgagttcacagttaagaattcaataaagaatggatggaagtagggaggcagagaactccatgtcaagatctctaataaccctttttaaattatccttttgcatataggaagatcatagttcctattatatcctattctatcacacaaaatcatacacccaatggaagcaaatgttccttcaagttaactcaagttctatttgtaaatactatctacaacctcagagataagcctcctagctgtgaggggtacacagcaccctaaaacagaagccaaaargatccagaggtgtggatatat

SEQ ID NO: 814321 - DNA, 522 bp, Homo sapiens
ggtctcattttttaccagatcctggatcccaaagaaagagaagtgctatggaataagacaatgcagtgattttgccatgcatttgattgcaaagcaatacaaagccaatcagcccattctgtaattagcccatctttcatgagagtcttacctctcagtagcgggtagggacattttcatttcttttaggtagccaaaggcatgcttctctaatccaaacatgcaaagagctatctccccataacttccattagccagccccagaagtacatttcctatctagttattacaaccaaagctctctcatagtgtgaagtaatttctgctaaccccaaaagtcaaaaccattagataaggcaatgcaaaatacaacagagctttagattttgagaaggatttatctgctttcaattccagggtttcatgaggaaaacagaggtttttcccaaaacagggtctgtggtgcctcctctgtttttcccagggagtcccataaarcttgaatatccacttttaaaaagc

SEQ ID NO: 814322 - DNA, 621 bp, Homo sapiens
aggtgctctggcatctctgctgagaactcagcagataaccagtgaccatcagtcatgtgagaggatcatctgggacgtgcagcccagccaagcctgcagatgactccaggctcagccaacatctsactgcaacaaataagagacccccggcaagaaccactcagctaatcccttcttgaattcctgatctatgaaatcatgagcaaaataacatagtcatcctaagacactgtgtcacacagagatagcaactggagtagtcagcctttgaagaaaaccaaactaacgtgactcatacgcagtcacggactaggtccttttctttgcttatgaaaatattaagcttcgtgaaaggtgctcccaaggcctttgccatgcacgctatttagaaggcaaaccccaagtagaaagttttaagtatgtacccctccacacgcaatataaaacaaaatagaaattaaaagaaaataaaaatatctagaagtgtgcaagaccagtgatggtcaggttccctttcttggacatacacactcccgcttggaggccttaatggagggtgtgcctcttgtttcagatatagaaacaggtcactttgacctacaatatacaaccccaatgttt

SEQ ID NO: 814323 - DNA, 625 bp, Homo sapiens
ttctttcccagattccatgttatttctgccacaaccagttgctttctctccacatcctgggtgggaccaggaccgtcctcccgggcctctgagtggcatgtctggtatctgactccaggaagrgggcacctcatgctgatggtgtgtgtcctgggccccatggcagaatagaggattctctgccatagcgctgacattcagtggagagacagcatgtgcttggcagggcttttgtggtgtgttttatgaatccccgtctatgctgcttctctttgcctactcgccggttgcatctcatgccgcttccccttgctcccccatccccagccgatctgactttctgagctttggccatactcagctcgtccccacctcagggcctttgaacatcttgtttcttcttcctagtttgttgtgaattgctccctctccccatcgctttggcttctctcaacttaagagtcacctgctcagagagggtttccatggtctcctgtgtaaggcagccccctgtgtttcttacacagatcctaaaacatctgagcatgttttccttaattgttcacttgctgtttgtctagtcactcgtctgtgagctccatgagcgcaggagcaatatctgcct

SEQ ID NO: 814324 - DNA, 625 bp, Homo sapiens
ttctttcccagattccatgttatttctgccacaaccagttgctttctctccacatcctgggtgggaccaggaccgtcctcccgggcctctgagtggcatgtctggtatctgactccaggaagagggcacctcatgctgatggtgtgtgtcctgggccccatggcagaatagaggattctctgccatagcgctgacattcagtggagagacagcatgtgcttggcagggcttttgtggtgtgttttatgaatccccgtctatgctgcttctctttgcctactcgccggttgcatctcatgccgcttccccttgctcccccatccccagccgatctgactttctgagctttggccatactcagctcgtccccacctcagggcctttgaacatcttgtttcttcttcctagtttgttgtgaattgctccctctccccatcgctttggcttctctcaacttaagagtcacctgctcagagagggtttccatggtctcctgtgtaaggcagccccctgtgtttcttacayagatcctaaaacatctgagcatgttttccttaattgttcacttgctgtttgtctagtcactcgtctgtgagctccatgagcgcaggagcaatatctgcct

SEQ ID NO: 814325 - DNA, 509 bp, Homo sapiens
gagtttggcaataacatatgacaaagcaaagttaaaaaaaaaaaaagagagaraaagagagagaaatcatccagcacacattcactatttgtctaaaacaagttttctatatccttttagtacagaatcaatacagagtcatatgaaatctctagcagcaaatatcatgctgggtttcaagcaaatactgcatcatgagatctgaactgataatgtcagactcatccttcctggggaaaaaaaaaatgaaaagttcccaaaagttgtatccatcagctgagttaagaattggcctttgccttctttcttcttcattcctccgcctcaattcattccttttaggaatatgtgggtcataaaatttgtgttaataacttcaagctgaaagaaactgatctgtgattcagacctatattataattacggtagtttaaggcataaataaatcccaatctacatgatgaaagtgcatatattcattctttctagagctaaggaataggaatgca

SEQ ID NO: 814326 - DNA, 509 bp, Homo sapiens
gagtttggcaataacatatgacaaagcaaagttaaaaaaaaaaaaagagagagaragagagagaaatcatccagcacacattcactatttgtctaaaacaagttttctatatccttttagtacagaatcaatacagagtcatatgaaatctctagcagcaaatatcatgctgggtttcaagcaaatactgcatcatgagatctgaactgataatgtcagactcatccttcctggggaaaaaaaaaatgaaaagttcccaaaagttgtatccatcagctgagttaagaattggcctttgccttctttcttcttcattcctccgcctcaattcattccttttaggaatatgtgggtcataaaatttgtgttaataacttcaagctgaaagaaactgatctgtgattcagacctatattataattacggtagtttaaggcataaataaatcccaatctacatgatgaaagtgcatatattcattctttctagagctaaggaataggaatgca

SEQ ID NO: 814327 - DNA, 575 bp, Homo sapiens
gatcctagagttcaataggacagggagggtaacttctacactctaaactctaagactcagtttccttctctgtataatatggtcagtctgcctcccctggtgctggtgtctctcccctgtccccaggactcttaygggtcacacaaaactagatgctagattccgactggttataaatccagtttcccatgttatacattcccttcttcggagctttttgtttgttttttgctttccttctttctgcctttactcccaaggtgcacctcaggtggccttttcacgtatctcctggggccttccaactctgcccaactctggctgtctccatggtggggggcagaggttggcagaggtggagatactcctgccaggactgggtggtcttgctctctcatcccccatctcttctactccctgtgcaggaaaacaccggaagacaggccgggacgtggcagttaaggtcattgacaaactgcgcttccctaccaagcaggagagccagctccggaatgaagtggccattctgcaggtaaccaccaggccgccttccctttctgcttcttcctttcatg

SEQ ID NO: 814328 - DNA, 362 bp, Homo sapiens
taatcctagaatttatatggaaatgtaaatgatccagaacagtcacaaaaatcttcaaaaagaataacaaagctggaggacttacacgtttcaattcctaaattttctacaaagatacagtaatgcagacacacataaggatagacatatagatcaatggaacagaactgagagtccagaactcatacatttacagtctattgctttttgacaacggaatcaaaatcatccaacggagagagaacagtcttttcraaaaatggcactagggaagaccaggtgctgtggctcacacctgtaagtaatccagcactttgggaggccgaggcaggcagctcacctgaggtcaggagttggagacc

SEQ ID NO: 814329 - DNA, 555 bp, Homo sapiens
aggattcttctagctgctctgtggggaacagattagaagctggaggacccatagtccagcgcagagaagttgttggcatgatctgagtggaggtggaaagctattaagaaatcatggccttaaggatwaagagtagggaatggagaggccaggtaagggggcatcccaaaatctgtgtggcaagatgcatagacaaagagggcatgtcaaaggcctatgcaatggcctccctggcagacggtgtgctagttgggtagtgatgatattagtgttgctcgtcaaagggctaagactttgagtgatggaccccaggtaggctggggttttctccctggttctacactccctgagccacaagctttctgagtgagcatggcagaagtaagagcaggagaagcttgctccggggactgctgtttctcttttctgcatctgtcttctccatggattcctcttttccagcataaccccagacacctagtggctttggactctggcacacctggcataaaaatactttcagaaaaagggtctgagagaagaatgaacaagaca

SEQ ID NO: 814330 - DNA, 698 bp, Homo sapiens
agaactagggactgcacacaggtttgggaggtctccagttgaaaccatgcaggcacttagaaagaaaatagctccaatgtgtctgagcaagtggttggagtgcctacggagaggtgaggttgaacatctgagcaggtgcacataagctgtagaacttctaaaactataccgatctcacctgtagcttcatagccacctcagactcgagtaccatgtcatagttacgtagtacaacataatcctagagttcccctagaacttggaggtaactgaccataacaggatttgcaactgacaggcttggctggtaccctaatatgcctccagtgttctgtcctgtacacctatactgacttctatttcccttctgctgtgcctctagaactccagtcagcttctccagctaccctcttcaactgtcaagattacttgagtcactaaaacctaagcatatcgcttgtgaaactcttcacaaggctgttatttgttagagctgggagaggagcttagtagtcttagactctccaaaaattgttctgaagtttactcaacctagttttaaacactatgagctttcttactgaggcttttgctactaagaactatttctactgttggtcaacatagtaaaatrgcctggagatgagatgaagatcaaggcaccttaaaaggatcctctgccctgagatcctgctatc

SEQ ID NO: 814331 - DNA, 549 bp, Homo sapiens
cacagaaggaaatctcagaatctgcccctacacccaaatgaactcctcctgcagattttccagtaagaagctcttgttgggaaatttcaaactggtcttaaatggacagcgactatcatggaaccagrgtgaaccaacacacttgaaaggaggcagagctgagtagatgcaaaccacaaagtgaggcccgcctgacagccagttccccaatccacccttcttatccctcaaaacagacaagcaagcaaaactattcatttgaaccttattgatttaaaaataatgtaatctaaaatacattaataaaaacctatcattctctcacagaatacataatctatgatttatagcttggaaactaaatactaaactcacaattagaaagtacacgtaaagggtttctttaagttagacacttaatacggtttctttcaacaaactatgcaatctcatgacatggatttggaatgtaagaaatataaaaaggtgtttaaaaatgaacagaatattcctgatcatttctctgagaattaaaaatatacgttctcc

SEQ ID NO: 814332 - DNA, 618 bp, Homo sapiens
ggcagaggagcggggcaaggcagaaacattgagtccatcacaccacatgaggacaagaaggtctggaaaatttaaatgacttgccctagatcacgttattaaattcaagttgattagtcaaatatttttcctttttgccaatctgatatagaattgaacatgaggcagagagaaaagttactttatgtctgcatacagttgctaataaagccttttctttttttcttttttctttttttttttgaaatgggtctctctgtcacccaggctggagtgtagtggtatgatcttgactcactgcaacctccgccttctgggttcaagtgattctcctgcctcagcctcctgagtagctgggactacaggcgtgtgccaccacgcctagctaatttttgtatttttagtagggacagggtttcgtcatgttggccaggctggtctcaaactcctggcctcagatgatcctcacacctcagcctcccaaagtgctgggattacaggcgtgagccactgtgcctggccaattgctaataaagtattttctaatcacaacctatgtaactcacttcatgatgtayctgcaagtggactaaggacccactgaatattcttgtcgag

SEQ ID NO: 814333 - DNA, 617 bp, Homo sapiens
aaccacaagctgagaactaaatgaggaaggtaggtctattaccacttgtgtcccagaagacccagaacagagagggcaggtgacatgtcaagaccacacagcaagtcagaggcccagctgggaagggaatccaaggctctttctaacagaccatctctcccttcccctcagattccatctgggtgggagctggagataagaagggacaaccaccacatagcccactgcttcctcctggtcaaccatgccagcctgcccctctccttgaatactgaagcatttgagttattgccctgtgctgtttgcctctatgccatttcgaccctatattcaaggctataaaaaggcagcaatgctgtccaatccacagcatcctaagtgcttctcacattcagatactcacaattccagggcagctagggctaccctaccattcattcattcaatcaagcaagcaagcaacatttactgagagtctactaagtagatgcttaggaccagggaccactaagaactcagaatctggtagagatacatgacagcttcaactacaagacagtgtggcrgatacgatgctaagggcagcatgggacccaggaaatatttcctttcgaagt

SEQ ID NO: 814334 - DNA, 646 bp, Homo sapiens
aaaatagctgaatcaataaataaatgggggagaagggacagctcttccttacaaaagaattctgattaataagtgtaggaagaatgaggaaaatatgaaatcaccattccattactacagtaataactrctgcaggtggagatccaccaatggtcactaaaatcagtgagtgaaagtttaagaaaaaatagagtatttgcatagtctctaagtttctcctcaaaaataaacacttattaattacaaagggaaaattggtcacttgattgcagaaacttgaaagacagcacttggccaagtgatgaaggttaacagtagtaaaacactgacatcatgtacccctggtctgctggactgagaaatattctgcacactctgatgtacacagaacgtcacctccgtgagattcttgccaaaacacgtaacctcaatctcctcatgagatccaatcacttgtgaggcctcaatcgtgacagcaaataagtctatactgaaaaacattctacaaataactggccagtacaactcaaaagtttcaaggtcatgaaaagcaaggaacagctaggaactgtcacagactagaggaaaatgagggagaagagacaactgaatgcaatgtgggatcccagactccatgctggcacac

SEQ ID NO: 814335 - DNA, 558 bp, Homo sapiens
catgatattgactaaaattgttctaggcaattgtggcagtttttggtaaaaagtaaataaatgagcagggtccatggtcccagcttctctcctcagcctaagaagacatttttaattctctctatccagctcccaaatacctgcatgaggaggtagttgtatcttcagaggttttcacagtcattcagcaccttaaggtgaatgaaaccatttcatacccacaacttgcccatttcccaagagaccgtcacgcagaggataaggtgtgggttctggcctctgggcttaaatcacagccctgccacttacaactctgtgccttggtttctttatcaatgacatgaaggctgtaactgtgcccaattcagagggtggtgacaatcaaatgccacaaggcttggcctcagtgaaaggtagcgatgatcattatgatcatsaattctatgaggcagcagggattgcttctctcctttttccaggaggaccccaaggcctggagctggggagcagcttgccctagacatcagactgtcttctgaggagctgggcctggaaggc

SEQ ID NO: 814336 - DNA, 558 bp, Homo sapiens
catgatattgactaaaattgttctaggcaattgtggcagtttttggtaaaaagtaaataaatgagcagggtccatggtcccagcttctctcctcagcctaagaagacatttttaattctctctatccagctcccaaatacctgcatgaggaggtagttgtatcttcagaggttttcacagtcattcagcaccttaaggtgaatgaaaccatttcatacccacaacttgcccatttcccaagagaccgtcacgcagaggataaggtgtgggttctggcctctgggcttaaatcacagccctgccacttacaactctgtgccttggtttctttatcaatgacatgaaggctgtaactgtgcccaattcagagggtggtgacaatcaaatgccacaaggcttggcctcagtgaaaggtagcgatgatcattatgatcatcaatyctatgaggcagcagggattgcttctctcctttttccaggaggaccccaaggcctggagctggggagcagcttgccctagacatcagactgtcttctgaggagctgggcctggaaggc

SEQ ID NO: 814337 - DNA, 672 bp, Homo sapiens
tgatgatgtggcctgacctcagaaaggaaacctggttggtcaccagggggaatttccccgggtgaggtctcacgtctatgcaaatattgcactgcaattaacctggaccctgggatgggagagagaaaagaggagaggacactgggaaagacagaagggcaggtaataggacctgaacattcccaggtaccaggcactgtgctaggctcctcatgaaattaatctcattttgcctctaaagtatcctccaatgtaggaaaattgagtctgaggcccagtgagagggtgcgttgcccaagcaaaatcagcacattcctaccccaacgggataccaggcctcagggagaagtgatgatggtgacgatagatttggcgctgcggctgctgacaaaggtgacagtaatgaggcttgagtccgggactctagcaaggtttcattttaggtttccatctcactcaaccaggggagttttatcctgggaacggccaaaggcagcaggaaggtagtgaccctgactcaccttgggcaaatcccagcactctggtttttcaaagccctgtgggggcaagggatgtggtagctggcacagttaaccccttcaccaccagtttctagaatgctcctggaaaagtgaacrgaatgggatccatacttttgaaggagaatcaatt

SEQ ID NO: 814338 - DNA, 622 bp, Homo sapiens
atttttaagtattaattcctcacagaaattgctttctaaagttttaagsgtgcaaaaaacattaaaaatctttcagtaagctaaaactttaattaggcccttatataattcttgctaaagagagagaatggaactgagactgtgaaatgaaatgacaatgataatatttcctttgaaatttttaaggccaagttgcattaatgcaactttgaaattgttccaatcacacaaggtatttaattaaagcaaatgaaaggctcttcaattcccataaagatttacatggtaggaaaaatgtttctgttttagcaggtctataacatcatttttaaaaattacaaaaattattgtatctacttttaaagctggacagcaatagttatagagagaatcatttaattttagagtcaagcagaccaaattcccatctggctccaccagcgtgttccctttagaaagtaacatttaacgcagtttcattgcccttgtttgtaaaaaaggggatcatatttgcctccacagtgccgctgaggggtttaaacaaggtgctgaatctagaacacttacagagagcctgtaataagtactcagtgcttaaatgttacctaaaaacaaaggaaga

SEQ ID NO: 814339 - DNA, 301 bp, Homo sapiens
tttaatgaaaggatttgtctgttttctgtcatatttccagaaatgtttaacctgtataattcccacattgtacaattcactctgtataactcctacagtgatacagtgaggatcacaagaaagattttggtaactccaactcaggaagattaaaattaaccatgtaaataatttactatctgtctcataacttacatgacagaagatacattaaaagttcttttgtctcttagcctagtgcacttaaaagtagtactttgaattaaatacaaaaayaaaccgagtacacaatatagtaaaa

SEQ ID NO: 814340 - DNA, 563 bp, Homo sapiens
aaatgaaaatctaaacagacctatattgaataaggagagaaatcagtaaacaaattgtcttccttcaaataaaagcccaaaacctgatgctttcactggtgaattctactgracatttaaagaagaattaacgcctattctactcaaattcttccaaaaagttgaagaacaggagctacatttaagacctgaaactacaaaactcgtaaaagaaaacatagggaaaaagctccttaacattggtcagtgcattttggatatgacaacaaaatcacagacaaaaaatgcaaaagtagacaaaagggactatattgagcttaaatgtttctacacggtaaaggaaacaacagagtgaaaagaaaatctatggagcaggagaaaacattttcaaaccatatatctgataagaagttaatatgcgaaatatataagtaactcatatgattcaatagcatcccccacaaaaaaaaaaatctgattaaaaaatgggctaaaggacttcgatagatttttttttcccaaagaagacatacaaatagccaacaggaatatgaaaaggttca

SEQ ID NO: 814341 - DNA, 336 bp, Homo sapiens
aattaacttagccgagactacacagctagctaatagcaaagccaggattccagccaraactatctgattccaaaatgaattcccttcaccatcacactggaaggagaagaaaaggggaagaaaggaaaggcttgggggagaaggaaagaacattctgaagaagtggacagttgtgattgtgtatcgtcttgattttgtttaagtcactttgggcagtagtcaaagtatgcgacgataaaggtaataaaggttttcttactttataaacatattaggcctttaaagctgtaagacttttgagatttatcttataaagaataaaaatgacctcaataa

SEQ ID NO: 814342 - DNA, 562 bp, Homo sapiens
aatagcatggagatggagtatctgccctattttcaataggatggatcatagtggcctctttaagagttgacatttgagtagaaacctgaatagtgaaaatgggtcatgcaaaaatctggcagaacagtagatgcaaaggccccgaagtgggatgtgcttggagcgtcggaggagctgaaagaagttcagtgtggtggaaaggtatgactgagggaaggctccgtatatgatgaggtcagagagacaggcagcagtctgatcccacgggcccttggaggcccatgggatcagtgcaagaattaggattttcttgtaagtacaaagagaagccattgatttggactttgagaaacatgctgtagctgctgtgtgctggaaagctctcctctttagagaagcattttccatgtctttctacaccagcccatctccaaggcactagactggagttgttcctagggtcaggagtttgtgaaaagcacaaatyatgttttaaatgttgactcttcctcattcctgatggttgtcactcttcagcaagcatttcttgctaaatgattat

SEQ ID NO: 814343 - DNA, 628 bp, Homo sapiens
atacttactatgggtcaagcactcactatgtaagctttatcttatgtaatcctccaaactttcagtagatgttggtaataccatttktacttgatagataagaaaaccaacgaacagagaggggatataggttgcctagatcagcttgacttcagaatgctttcatttaatttagaaaaaaaggaggctatcatttttgcaaccatggtatgatcttattatcattaaaattaagccatacctcaaaagtcaatgaagaaaggaaaagtgtgtgatcgtccacctcaccacctctccccctgctgaattaaccttgaatattaggaaacatcattgacatctcttgtgcctatatagaagaggaggaatggatgatggacggatggacagatggataaattaacagatgaatgaatgaatagatggatgtatggacatatggataaagctagctagatgatatacacagatagaccaattggtaaagttacacagttacatagacagaaccagccctcttaatgactattctctatggctgaggacacccctcctgttttctgcattacttgggatttgaaggctaagaagggttctgtatgaggtaccaataccgcatactgggaaa

SEQ ID NO: 814344 - DNA, 628 bp, Homo sapiens
atacttactatgggtcaagcactcactatgtaagctttatcttatgtaatcctccaaactttcagtagatgttggtaataccatttttacttgatagataagaaaaccaacgaacagagaggggatataggttgcctagatcagcttgacttcagaatgctttcatttaatttagaaaaaaaggaggctatcatttttgcaaccatggtatgatcttattatcattaaaattaagccatacctcaaaagtcaatgaagaaaggaaaagtgtgtgatcgtccacctcaccacctctccccctgctgaattaaccttgaatattaggaaacatcattgacatctcttgtgcctatatagaagaggaggaatggatgatggacggatggacagatggataaattaacagatgaatgaatgaatagatggatgtatggacatatggataaagctagctagatgatatacacagatagaccaattggtaaagttacacagttacatagacagaaccagccctcttaatgactattctctatggckgaggacacccctcctgttttctgcattacttgggatttgaaggctaagaagggttctgtatgaggtaccaataccgcatactgggaaa

SEQ ID NO: 814345 - DNA, 604 bp, Homo sapiens
attggttaaaaactaaggatgctgctaaaatatcctacaatacataggatagcccccacaaagaaaatgatccagccccaagtgtcactagcactgatgttgagaagctctgatccataaaggggaagatacattatgatactaaatgataagtgcaaaatgcatgctataggtaaggtttgcactaggcttttaataagcaggaacaatctatgagggtagaaatattcagggaaaatttcatagagcatgtaggatttgagaaactacaagattgatagagattgagctaagaatgggaaaggacatcttagatcaataatagaaaatacattttattttataatttgattaatttaattgattggtagtgactgtctgggaagttgtgttggaaataattctaaggccaagtcctagctcagcaggaaagagtgtggcaatcaattagtgatgtctgccatgggcaagggcagggagtggtagtatatatactgagaaattgctgcttcatatttatatgttggaacaggatgaggaaagtggcagaggtggaaatgaacaargtgcctgggtacagcagaagttcatgggtaactacgag

SEQ ID NO: 814346 - DNA, 544 bp, Homo sapiens
acaacacaggcttgaactgtgttggttcacttatacatgaatttttttcaacccctgccgcccctgggaaagcaaaaccaacccctcctctttctctctttttcttccccagtctactcaatgtgaagacaataggatgaagatctttatgatgacccacttgcacttaatgaatagtaaatatgttttctcctctttatgatcttcttaacattttcttttctctatcttactgtgttgtaacaatacagtatataatacatataaaagaatatgtattgactatcaataaggcttccagtcaacagtaggctataagtagttaagttttgggagagtcaaaagttgcatgtggatttttcactgcacagagggtcagcatccctaactcccaaattgttcaaggatcaactgtattttaaattctcccttctaaaacaattgttttcatcaaagttgcaacaaagaaatagaatgactagttaagaaagaggtaaaaattartaagaaaagaggaaagaagcaaaatatagacaaaaagaat

SEQ ID NO: 814347 - DNA, 538 bp, Homo sapiens
tagaaatatattatactaaagctaaggatgataaaataatgtagtgatgaaaaagtcacagaaatagtcwaataggtcaatgaaacaaaacaatgagtagaaaatggacatacacacacacatatatatggaaatttaatatatgacaatggtattttaaaccggggcaacaagatggattattcaataaatgatattaggaaaattggttaaccatttcaaaaaaataaagtttgagccctacctttcccatatgccaaaatattccaaacattaaaaatataaaagctataaatataatcaatggaaataaagattaaaaatgtatctttatggttttgaggtcactgaagtatttctaagtctgatagagaaagaagaaaccctaaaagagaagaccaacagcttttactacacaaaaacttaaaatttcttcactgcaaaatatatcatgaataatattaaaagataaccagaaaactgggtaaaactattcacaatatatatgacaaagatttgctatctttaatatagaaaa

SEQ ID NO: 814348 - DNA, 577 bp, Homo sapiens
  misc_feature 577: n = A,T,C or G
ttcccagcagtggccaggggctgagcggctaagtggcctcttaggattggagmaaagagattggagttcagggtccaccaaggacaagggtcctgggaaacaccccagtcacacttcaacataaaagttgaaattaagaaagaaaatactaaaagaagaaaaagtatcccagatggaaatgtggagaagcagaaatgaatgaaataacaaaaagaattgggtaactctaaatggaaatcgactatgtagagcaacaataaagtttcccagggaataaaatatagagagatataatagttaaaagcatgataacaggagtatgtaagttaagagagcagtaaatggaactaaagtgtttcaaggtatttcattgcccaggaagtggtacaagtactttataagtcaagaatgcaaattgccaaccatagaaggaattccgaaagaatgcacaacaaacaagctaacagagcagggaaattgaattctaaaacatacttaatccaaaagtaggcaaaagaagaaaaaaaaagaaacagaacagaggagtcaaagagagaaaacagtccacttgcatacn

SEQ ID NO: 814349 - DNA, 577 bp, Homo sapiens
  misc_feature 577: n = A,T,C or G
ttcccagcagtggccaggggctgagcggctaagtggcctcttaggattggagcaaagagattggagttcagggtccaccaaggacaagggtcctgggaaacaccccagtcacacttcaacataaaagttgaaattaagaaagaaaatactaaaagaagaaaaagtatcccagatggaaatgtggagaagcagaaatgaatgaaataacaaaaagaattgggtaactctaaatggaaatcgactatgtagagcaacaataaagtttcccagggaataaaatatagagagatataatagttaaaagcatgataacaggagtatgtaagttaagagagcagtaaatggaactaaagtgtttcaaggtatttcattgcccaggaagtggtacaagtactttataagtcaagaatgcaaattgccaaccatagaaggaattccgaaagaatgcacaacaaacaagctaacagagcagggaaattgaattytaaaacatacttaatccaaaagtaggcaaaagaagaaaaaaaaagaaacagaacagaggagtcaaagagagaaaacagtccacttgcatacn

SEQ ID NO: 814350 - DNA, 620 bp, Homo sapiens
gggatagaatagggctcatgatataagtggtgggcttggtgcttactgtgtgtcactgtgctgaggactttcctgtgaacctatctcctcctcaccctcccaaatgaagtgtgtcccactgtcctggtaccatacacatccatccgtccttgctctgcccactgtgtccagggttcttgcttcactcaggggagaaaccccccatccttttgatggcctgagaggccctgcaaagtctggtcccctacctttctgcactctttcctcctctctccccctcacttatgctgtccccctacactggcctcctctctctctccttccttctcttcattcattcttcctgtctctctgtttctttcatataacatgtttttatcatccagatgcatcagcttctccaaccaaagttttcgtttacctatatttttctcttactttctattctccaccaaccctttttagggaaacagtaggttgtttgctcacttcgttcacrttaagtgggctattttcccttttgcccagggttctcttatatctaggataaaatcacgttaggttaaatatattgtacttttgccatgctaagtttttcttttttcttattctcacactaa

SEQ ID NO: 814351 - DNA, 618 bp, Homo sapiens
tcatcactcagatagcggccaggcaaaggcaagttgcagcatttctctgtgcctcagtttcttatgtgtaaaatggatatgataacggtccgtactgatagagttattgtgaacattctagaaaatgatacacgtagttcaagctattgctataatttagcttctagaacttaaaaagctgtgaaatggagccggagtgaccaactgtcccagtctgctggagccgaaagccctgcatgccggaatttccatgctaaaaccaagacagtccctggcaaaccaagacagatggtcacccataacaaagctgttggtttttttgtttgtttttattttgttttgtttttgagacggagtctcactctgttgcccatgctggaatgtggtgttatgatctcggctcactgcaacctccatctcccgggttcaagcgattctcccgcctcagcctcctgagtaacgaagctgtttttaaaagtccatgctcctctccaaagggcaggacaatggcyattcatgctctcactatcgagattttcccagaattccttgggcctcgagccctttgtcctgctctccctgctccacccttgcttagccaaagggaaaccagacatt

SEQ ID NO: 814352 - DNA, 618 bp, Homo sapiens
tcatcactcagatagcggccaggcaaaggcaagttgcagcatttctctgtgcctcagtttcttatgtgtaaaatggatatgataacggtccgtactgatagagttattgtgaacattctagaaaatgatacacgtagttcaagctattgctataatttagcttctagaacttaaaaagctgtgaaatggagccggagtgaccaactgtcccagtctgctggagccgaaagccctgcatgccggaatttccatgctaaaaccaagacagtccctggcaaaccaagacagatggtcacccataacaaagctgttggtttttttgtttgtttttattttgttttgtttttgagacggagtctcactctgttgcccatgctggaatgtggtgttatgatctcggctcactgcaacctccatctcccgggttcaagcgattctcccgcctcagcctcctgagtaacgaagctgtttttaaaagtccatgctcctctccaaagggcaggacaatggccattcatgctctcactatygagattttcccagaattccttgggcctcgagccctttgtcctgctctccctgctccacccttgcttagccaaagggaaaccagacatt

SEQ ID NO: 814353 - DNA, 576 bp, Homo sapiens
ggacaacaagttaagacaatctttttgttctatagttattatgaaggcctaggaattccaaaaggaacatgtttgtataataacactcagtacaaagtctgtgatccaggaagtgaccagcccgatgtgtgctatgacccctctgaacctcccatttccacagtttttgaaataagattaaggactgaacactggcagggactcataaatgatacaagtaaagtattagccagaacagaagaaaaaggggtgcccaaatgcataatcttaagatttgacgctgtgctgtcattaatagcaataagttaggagcaggatgtggctcttttaattaggaaaaaactacatgaccgaaaataagtacatctgtcatgaatcaggattgtgtggaaaagaatgtgggtactggtcttgtgtcatttaggctacttgggaaaaaaaaaatgaaaaagatcctgtttkgctccaaaaagggaaaggaagcctgtcctgcatgagtggaagctgcaaccctttaaaattagtaatcacaagcccctcagacccaaaatagaaaaaaggaaaatacttatctct

SEQ ID NO: 814354 - DNA, 609 bp, Homo sapiens
tctcacccctttctgtatccatacccttggcaatatgactttgcagttgctcctatcaaacagtcatatctatttccccattcctttgaatctgagcgggctgagtgacttgctttggttaataggatatggcagaagtgacacagtaccagttccaagtgcaggcctcaaggagtctttagcactttcccttgctcttagaaccttgactctgtcatatgaacaatcctgggctagcctcctggaggatgagaggccacatagagcagagacaagttagcttagttgtcctaggcaaagccttaagagttatgcaagcccagccaataccactcatgctgttcttgaaaagaaaaaagaaaaaaaaaatgaaagcccagccaagattagcaaatccatctagctgaccctcaactgagcggatgatgagtgaagcccaccaagcccaaatgagcagaacttactagccaaagacycataagcaataataaatggttgttgttttaagccactaagtttcagagtagtttgtaattcagctataactaactggcacgttattacgtaaataatactcgtagtgagactgcagttacttgcagcccaaag

SEQ ID NO: 814355 - DNA, 609 bp, Homo sapiens
tctcacccctttctgtatccatacccttggcaatatgactttgcagttgctcctatcaaacagtcatatctatttccccattcctttgaatctgagcgggctgagtgacttgctttggttaataggatatggcagaagtgacacagtaccagttccaagtgcaggcctcaaggagtctttagcactttcccttgctcttagaaccttgactctgtcatatgaacaatcctgggctagcctcctggaggatgagaggccacatagagcagagacaagttagcttagttgtcctaggcaaagccttaagagttatgcaagcccagccaataccactcatgctgttcttgaaaagaaaaaagaaaaaaaaaatgaaagcccagccaagattagcaaatccatctagctgaccctcaactgagcggatgatgagtgaagcccaccaagcccaaatgagcagaacttactagccaaagactcataagcaataataaatggttgttgttttaagccactaagtttcagagtagtttgtaattcagctatarctaactggcacgttattacgtaaataatactcgtagtgagactgcagttacttgcagcccaaag

SEQ ID NO: 814356 - DNA, 572 bp, Homo sapiens
gcacttcaattctggtaataacaggttgtttcctctggagwaacaacttactagtcaatctcgttttcagtattgttaatgtaggtattttcatatcacaaaggtattacctcttatggctatcaaactgagaagtgtgatgatggctttttcctagaaagtgaaagttacattatttcatctctatttcccccgtttaatctgccttttgcatatggtattttgaaaattccatcaaataattttatagaaattcccctcagtgttgcaacagatactatttcaaaaccaaggatctaattaaatggtcctagtgatttgtaatttctcactggggaaattaatgtccctgtaacatggcacatttaaatgattttgtagatactgctataaagacatagcacataagcaaagcttgtcatttactctgcaatctaacctaaggatacaaactctgagaaaaaaagtcctaagtccactgcctaatttttcaaaagagatgcacagacagccccttaaatgaacttcagctttggatattgtctaacttgtcaatcagaaaaacagttctg

SEQ ID NO: 814357 - DNA, 522 bp, Homo sapiens
aggggattggcaaagacattcatctctttgttcagaaatcattatatcgaccttgacttactggcatgtagcaggctcrggctggcctgcgcagcagcagagtcccaccctccatccagccaggcccccctggccagctcattctccttcactgattaaagtaaggagagcaagtccctcagtcacaggatccccaagatgaaaggcatttaaaaatagtttggaacacacacaaaaatcttcctttaccattaataaggatttctcttgtttatttttttcgatgacagctttttagaaagagcctattgttttggtttgtgagagacagaaacttgttagtttttcttcttttaagttaaaaaagactaacgggagctattagcagttggagtgaaactcattcttcattgccaaaatcataaatgttatatcatgtgaaaatataaatgtcaaaggatttatggtagggtggccctttaaacaccccaaatccaatacaaagcaatctactattgtaat

SEQ ID NO: 814358 - DNA, 442 bp, Homo sapiens
tatccatctatctttactaataatyacacatttttactttacaagaaaaatatacatatcaatggcactacattttatcataaaatatgtactaaaatagcacaaatggaaaaagtgttttaaagtagttagtaagagacctattattatacctattaagatgtaatgcaaagaactacattagtctatttatagacatattatagtgcctctttgtcccaaattgatttcctgtatctccaacagtgcctgtcttgaataatatcttgatttatccactcaggtatttaatgggcacccaaagcatacccagtctaaaacactcctgattccccaggcttctgtacccactgtcttctctgccccattgtcttctctacccctgtctacccagcagatcacattaaaaaactgggggtcatccttcagtcttgtatttttt

SEQ ID NO: 814359 - DNA, 534 bp, Homo sapiens
tttttccttttttctcactctacttgagttaacaagggaattaacatgatcagtgcataaataccacagcaaaatctatgagaggctgaaatcaaagttgagtcattcaaatgcttgcccccatccccaaagaaagagaggtaataattaaatatcttagataacagtatgtaacagaataccccctgacttgtttaaaaaatgaagcttctttaagttttaattccagaaaccatgatttgatgaataagaaatgggacaaacccaggtgattcagatgcaagcgactcaccagcatgtaaattttgaaaaagtcttgtctagggactcaggtattaacttgattctcatttgatgtggtctcatgactaagtagaagattggtaattatagtttataattgctagattatattagaaaggaagtagtggagkgatagcagactggattaagtaccaaggatcaatagagttcttttatgactgtggaatgtcttctaaaataattttgacaagaatctaaatctatttctcc

SEQ ID NO: 814360 - DNA, 540 bp, Homo sapiens
tgaagaattttctgtccattattataaaatgttcctctttatctctgataatgctttttgtctttaagycatttttttctgatgttaatatagccttgcagctttttatgcctactgtttgcatgacatttatcctcttagttttaacttatatatgttgttatacttaaagtagatttctttttttttttcttttgagatggagtcttgctcttgtcacccaggctggagtgcagtggtgccatctcggctcatggcaacctccatctctggggttcaagcgattctcctgcctcagcctcctgagtagctgggattacagatgcccaccaccaggcctggctaatttttgtatttttagtagagatggggtttcaccatgttggccaggctggtctcgaactcctggcctcaggtgattcacccgcctcggcatccaaagtgctgggattacaggcatgagccaccatgcccggccagatttcttgtacacagcttatcttataactgggtcttctattaaatccaatctaaccatca

SEQ ID NO: 814361 - DNA, 576 bp, Homo sapiens
ctagaaggccctagtgtgtgttgttcccctcaatgtgaccatgtgttctcattatttagctaccacttataaatgagaasatgtagcatttgattttctgttcttgcattagtttgctaaggataatggcctccagctccatccatgtccctgcaaaggatgtaacgtttttcttttttatagctgcatagtattccagagtatatatgtaccacttttttaaaaaatttagggccaggcgcggtggctcaagcctgtaatcccagcactttgggaggccgagatgggcagatcacgaggtcaggagatcgagaccatcctggctaacacggtgaaaccccgtctctactaaaaatacaaaaaaattagttgggcatagtggcgggcgcctgtagtcctagctactcaggaggctgaggcaggagaatggcatgaacctgggaggcggagcttgcagtgagccgagatcacgccactgcactccagcctgagcacagagcgagactccatctcaaaaaaaaaaaaatttagtctatcactgatgggcatttagttgatttcatgtctttgctattt

SEQ ID NO: 814362 - DNA, 594 bp, Homo sapiens
ttttagaaagtttatagaaaaaagtcatttataatattttcttgttatcctactaatatctgtagaatctgtagtgatatcacttttcktattgctaatattggcaatttgtatattctatttttttattagtgtggctagaggttgataattttattgatctcaaaaagaccacttgactttcttgatttttttcagttgattttctgcattctatttcatttattttgggtttaattttgattctggcctttcttctgcttacatttgatttaattgcccccttttttctagtttcatagggtagacattgaggtcattgatttgaaatattttcagtgttctaatattggccacataatattggcatgtaagatggacaattttgtttgggagactgacagttgcccgtattcaagtgatgagaacaaatatgagaaaacaagaatctcttcagcactatactctcatctcatttgtgggaaacttgagtggagaaacaaggggaaaacccagagatgtgtactaaagaaaatgaaaggaaagagtccaatgcttaggctcggtttcaatgcaaaagaacagtgctgacta

SEQ ID NO: 814363 - DNA, 594 bp, Homo sapiens
ttttagaaagtttatagaaaaaagtcatttataatattttcttgttatcctactaatatctgtagaatctgtagtgatatcacttttcttattgctaatattggcaatttgtatattctatttttttattagtgtggctagaggttgataattttattgatctcaaaaagaccacttgactttcttgatttttttcagttgattttctgcattctatttcatttattttgggtttaattttgattctggcctttcttctgcttacatttgatttaattgcccccttttttctagtttcatagggtagacattgaggtcattgatttgaaatattttcagtgttctaatattggccacataatattggcatgtaagatggacaattttgtttgggagactgacagttgcccgtattcaagtgatgagaacaaatatgagaaaacaagaatctcttcagcactatactctcatctcatttgtgggaaacttgagtggagaaacaaggggaaaaccmagagatgtgtactaaagaaaatgaaaggaaagagtccaatgcttaggctcggtttcaatgcaaaagaacagtgctgacta

SEQ ID NO: 814364 - DNA, 622 bp, Homo sapiens
agcagtcagcattttggatggatccaaggcctttagattctgccaaaaatcctgtggattgcaattcacaggtagtagagctatgatagctcctgcaaacaattgaggaacccaaaaatgagttcagtgtgcttgggacaataggacactccagcctaccaaccccagtgcccatcatcacttgattttcaggattctcagtcttaatgctatctccacccacctacttctcctaagcaccttatttactcctgtagttatccacagggagtttctaaaagtgaagaagtttttacttcttcatcatcaaaataagtgaggaggagaaaggatacatcctgtaagctttctgtcaagatagtcttattctgaagttaagaccctcctccttttattttcttccttctgttttgattttaaattatccttgcttttataatacaatgaagccagttctttttgcttggttttatacattaatgtcctaatttagaaataaatgttgcttaccctatgttggtctccccgtatttgtattcctcttttaactctttcagtcattctaattayatcaagaagaaagtcttggtttgtgctagactgtctttaacacttctctaac

SEQ ID NO: 814365 - DNA, 597 bp, Homo sapiens
tctctgagtttcattccccatttgcaraatggacatatgagcttttgcttcacagaggtttttttttgtgtgtgtgtgtgaacttccaaatgaactgatatgagaggaaatgctctagaaactataaagttctctgcagctccaaaaggaagcatcattgctgtcattcagtgatgactccctttcttgggactctagggttcttctaattccctagctggtcctttgttatctccccagagaatgctagaaatgtctccctgggaaaagacatcattcataaagcctaaaattccttccaaaataccaaaggcgttatgaggacatggttttacccccgtgacttctgccttaagagggcgctcagcctccccagtaacccaagtgggtgtgtcttcgaaatgtcaagcagggtttctgggaagcagaattggagatgtagctgagaggtgcctattgaagtcagtcccaggtccaaacacttattaatgtggtcacttgagcaaattactcagccttgcctctgtctcactttcctcatcaggaaagttggaataataatgcctatgtcataggttataatgaaaattaaatggg

SEQ ID NO: 814366 - DNA, 621 bp, Homo sapiens
ggaccaaaaagaacagaggctgctgratttccattttttaggaagttggaaagacaatcccagaggagtaaaaaagcccaaagatatctatgcttgaaataagcagagatttaaatacctgttctcaggaataataggttcaatactggatggaaaacatttacaatgggataataatagagctagaaacagatagaggaaaatacatcagacatgaacatatcacccatagaaaaagataataacctttagtggggaggagaacattaactggtaagatgctccccaccccaaaacactttgttaatattttacttcaatttcaagataaagacaaacatcatatcttctgcctcctgaaaaaagaaataaacaataataaaacatattttaacggccagtgaccattatactttccactttgtaattctattaccttcatttttctggtccctgctctctctttaggttggcatattgatttgaaattcaatgaaaatctcattaaaaatatttttggaggcaatccagagagcaagaagaagagaatgacctgtgtggtagtctagaatgctatgctgattcacactcactctttctgaacaaagccttccctgatct

SEQ ID NO: 814367 - DNA, 571 bp, Homo sapiens
ctttagattgctgcattctgggactccaactgacagaggctccaccatctggaaggttgctggttatgatggtagggagaattgaggatttgagcaccaataattaaaaacttaaatagagataagaaacacgcatcacttttggtcacatatcattggccaaagcaactctcacggtcatgattccaaaggataaccatttaggagagccaggtaattgtaaacggaataatgcctaccacaatttccttatgaggtagagtactcaacatgtatttcctgattgtagtggaatcctttattttattgactaacagtcccgttacatccttctttattgcacccaattattggtgggggataatttcctctcactcattttgtatgatcttataggatggatcctaaagtattactattacttcagcacagcaagtagccaggcacagaacctaagctgagtccatcagaggatctccacaggactcaaggtttgaggcttgacataaaagcagatgtaaagatggargatcattcattctgacgatgctaactgacccaatcattgttg

SEQ ID NO: 814368 - DNA, 533 bp, Homo sapiens
taattactagctgaccacaaagctacctgatcagagacttcagtggccacacgcgaatacaaacattataaaattacttaataaaaatcacaaaacaactaagcagtagcagcagcaacaacaataagcccttggaggagggatgaggggagttgaaacactaatatttaaaatgtccagtttttaacaaaagattatcaaagaaagaggaacatacaatctaaatacagggaaaaaaggtcaacagaaacaatccccgtgaaagtccagatagtgaatttaatacacgaaaactttaaataagctattataaatatatgcaaagaactaaagaaaaccttatataagtaaataaggtattgcaatgttatttcaccaaatgaagaatattaaaacgaactaaaagggctgggtgcggtggctcatrcctgtaatcctagtactttgggaggctgaggtgggcagatcacctgaggtcaggagttccagaccagcctggccaacattgtgaaatctcatctctagtaaaaata

SEQ ID NO: 814369 - DNA, 599 bp, Homo sapiens
atacaatgtgtaacaatcacatcagggtaaatgggctatcacctcaagcatttatcctttgcattacaaacactccaattatacacttttagttattttaaaatgtgtaattaaattattattgactataatcaccctgctgtgctatcaagtactggatcttattcatgctttctatttttttttgtactcattaaccatccccactttcccctcacacccctactacccttctcagcctctgatatccatcattctagtctctatctccatgagttcaattgttttaattttagctcccacagataagtaagaacatgtaaagtttatccatccatgcctggtttatttcacttaacaaaacatgaaaatgcatacaattactgattcataatttgggagtaattttttttctatgagattgtacttccacacatactgtatattatactggattttcattttagaataaaacagagcattctacttgttgaaaggaaacattgatgaaacaaatacctggtgagctagcacaacttaactarctactggcctgcaggaaggaagctatgagaatcatgaatcttctctactcaagg

SEQ ID NO: 814370 - DNA, 585 bp, Homo sapiens
tcacagttgtaccccttggtacaggtttatgttggggttgtggcattgcagccctttgtatgggtgtagtggaataatgatgcggtctcagaagtgtgaggctatattggcccccaggaagratgcgctttagcagtggctctactctcaaaatagcactatgccgtaacagtttgggtcctggggagtgggatagacccagtgtgagttctttctctggcacaattctgctgcatggattctgggcatctccctttactgggcttaggacccatgaggactgtttggctcttctgcaactaagactgcaggtgtctgtggtagtaatggggattgctggggacctcccacttacctttgcagccattctgagtttccatgccttagggggtttatatgacttccttgatgcactccgttattctctattatacactccacttgaagtgtaattatttgtttattgttttgacccctctctgcagaagaaatgagcattgggcacttgtagtcagctatcttgatgatgtctagcttattttctgctttcttgttttattattttctgtgtctgatggaatatat

SEQ ID NO: 814371 - DNA, 518 bp, Homo sapiens
aaactggatccttatctctcaccttatacaaaaatcaactcaaggtcaatgaaggacttaaatctatgacctgaaactatacaaattctaaaaactaacataaggaaaacccttctaggcattggcttaggtaaggatttcatgatcaagaacccaaaagcaaatgcaataaaaacaaagataaatatctgggacctaattaaactaaagagcttttgcacagcaaaaggaacagtcagtggagtaaacagacaacccacagagtgggaaaaaatcttcacaatctatacatccaacaaaggactaatattcagaatctacaatgaactcaagcaaattagcaagaaaaaacaaaacaatcacatcaaaaagtgggctaaggacatgaatagacaatkctcaaaagaggatatataaatggccaagaaacacatgaaaaaatgctcaacatcactaatgatcagggaaatgcaaatcaaaatcacaatgcaataccaccttactcccgcaagaatggc

SEQ ID NO: 814372 - DNA, 664 bp, Homo sapiens
ggcctgacctcagaaaggaaacctggttggtcaccagggggaatttccccgggtgaggtctcacgtctatgcaaatattgcactgcaattaacctggaccctgggatgggagagagaaaagaggagaggacactgggaaagacagaagggcaggtaataggacctgaacattcccagggtaccaggcactgtgctaggctcctcatgaaattaatctcattttgcctctaaagtatcctccaatgtaggaaaattgagtctgaggcccagtgagagggtgcgttgcccaagcaaaatcagcacattcctaccccaacgggataccaggcctcagggagaagtgatgatggtgacgatagatttggcgctgcggctgctgacaaaggtgacagtaatgaggcttgagtccgggactctagcaaggtttcattttaggtttccatctcactcaaccaggggagttttatcctgggaacggccaaaggcagcaggaaggtagtgaccctgactcaccttgggcaaatcccagcactctggtttttcaaagccctgtgggggcaagggatgtggtagctggcacagttaaccccttcaccaccagtttctagaatgctcctggaaaagtgaacrgaatgggatccatacttttgaaggagaatcaatt

SEQ ID NO: 814373 - DNA, 639 bp, Homo sapiens
gtgtgccagcatggagtctgggatcccacattgcattcagttgtctcttctccctcattttcctctagtctgtgacagttcctagctgttccttgcttttcatgaccttgaaacttttgagttgtactggccagttatttgtagaatgtttttcagtatagacttatttgctgtcacgattgaggcctcacaagtgattggatctcatgaggagattgaggttacgtgttttggcaagaatctcacggaggtgacgttctgtgtacatcagagtgtgcagaatatttctcagtccagcagaccaggggtacatgatgtcagtgttttactactgttaaccttcatcacttggccaagtgctgtctttcaagtttctgcaatcaagtgaccaattttccctttgtaattaataagtgtttatttttgaggagaaacttagagactatgcaaatactctattttttcttaaactttcactcactgattttagtgaccattggtggatctccacctgcagyagttattactgtagtaatggaatggtgatttcatattttcctcattcttcctacacttattaatcagaattcttttgtaaggaagagctgtcccttctcccccatttatttattgattcag

SEQ ID NO: 814374 - DNA, 492 bp, Homo sapiens
tagtccccactactcagaaggctgaggtgggaggatcacttgagcgtgggagattgaggttgcagtgagccaagatcctgccactgcactccaccctggcaacagggtgagaccttgtctcttaaaaaaacaaaacaaaagggcagtggctcacactataatcccagcactttgggaggccaaggtggctggatcacctgaagtcaggagttcgagaccagcctggccaacatggtgaaaccctgtctatactaaaaatacaaaaaattagctgggtgtggtggcacgcacctgtaatcccagctactcaggaggctgagacaagagaatcgcttgaacccgggaggcagaggttgcagtgagctgagatcacgccactgtgctccagcctgggcaacaagggygaaactccatctccaaaaaaaggctaggcacggtggctcacgcctttaatcccagcactttgggaggcccaggcagacggatcacgag

SEQ ID NO: 814375 - DNA, 615 bp, Homo sapiens
taaaatgactccttctgtgcctacaagtcagcctctttccccagtcaccactgtcatcacacaaatgggctmataaagtagccatggtggcaggaatagaggttatgcacaggctcagaaatatggacttccactcaccaaagccaacctggctacagccactgcagagcacccaatctgccaggagcagagatcaacactgaggccccaatatggcaccattccatattgggaatgatcagccagacacctgacagcaggttgactacaatggattgcttccatcatgaaaggggcagagttttgtccttactggaatacacatttactctggatacagacttgccttccctgcacacaatgcttctgccagaactatcatccctggacttacaggatactgtatccactgccatggaactgatttcatagcaaatgaagtgaggcaatggtcccatgctcatggaattcactgggcttaccatattccccatcatcctgaaacagctggcttggtagaatgatggaatggccttttgaagactcagttacagtgctagctaagttgcaatactttgcagggctgggtcaagtttcttcccaaggctatatatg

SEQ ID NO: 814376 - DNA, 644 bp, Homo sapiens
tacataccactatgcccagctaattttttaaattatttgtacggtgagttctcactatgttgcccaggctactcctcaaatccctgggctcaagggatcttcccaccttggccttccaaagtgctgggatcacrggcatgagctaccacacccagacaaatttattttgttgggggaacaggatctccatatgttgtgcagtctggtctccaactcctgggctcaagtctgctttggcctcctgagtacccgagactgaaggcatgagccattaactttttcctttccctaaatctcttaaggaaagactaagataagcaggtctcattcattcatttattcaagtgccaatgattacaatatccaggcaaatgattacaatatccaggcatgatacctagaaatcaatggcattaaaacagacaaggtcaggctggtcctggttgctcacacctgtaattctagcattttgggaggccgaggcaggtggatagcttaagtccaagagtttgagactagcctgggcaacatggtgaaaccctatctgtaccaaaaatacaataattggccaggcgtggtggtgggcacctgtattcccagctactgaaatagtgagacatttaaaataataaatacagttttat

SEQ ID NO: 814377 - DNA, 564 bp, Homo sapiens
tgtaattacttagaatcttacagcaatttaataattaaaaaggtttttgttcatcttttgaaaattgatatactatccagttttcataattacgtaaaaagagaaatggcaaggggtgggagwggggagaggttaaataacttaccaaacttctcattgcaaagtattatgttgcaaaggggtatgtgagtttgttgcatcattttatctttgggtggagtcatgttctcaactataattttagagttctaagaaacatattaatattactatatatattccactcaaccaagttttaaactgctattatcatcagaatggggaagagtctaccaatacttttttgcgtgtcagcatatttaaatgatcacaattagctttagtcctcacttgacaagaactaaattttcttcagtattttccccatacctcttcaaaggtatttattcagtatttctatttttaaggttttgctgtttttggtaaatgtcttatctaatttgataccatacaaaatcaaataaacgaataccacataaaatgaataaaaatgaaaaagttaga

SEQ ID NO: 814378 - DNA, 564 bp, Homo sapiens
tgtaattacttagaatcttacagcaatttaataattaaaaaggtttttgttcatcttttgaaaattgatatactatccagttttcataattacgtaaaaagagaaatggcaaggggtgggagtggggagaggttaaataacttaccaaacttctcattgcaaagtattatgttgcaaaggggtatgtgagtttgttgcatcattttatctttgggtggagtcatgttctcaactataattttagagttctaagaaacatattaatattactatatatattccactcaaccaagttttaaactgctattatcatcagaatggggaagagtctaccaatacttttttgcgtgtcagcatatttaaatgatcacaattagctttagtcctcacttgacaagaactaaattttcttcagtattttccccatacctcttcaaaggtatttattcagtatttctatttttaaggttttgctgttyttggtaaatgtcttatctaatttgataccatacaaaatcaaataaacgaataccacataaaatgaataaaaatgaaaaagttaga

SEQ ID NO: 814379 - DNA, 617 bp, Homo sapiens
accaaatcctgcccctgtatcaaaaacaaattccttaagcatcaatttattcacctawaagtgggtcaaatggaacagatggtaaatagtacagcaatttattaaaacagctttcaaacataaatatagaataatttttaaatccatagtttaattttgctttgggacaacttctaagcaataaaaaggtataatcactgctatttctcaaagtatgaacatcacaatgattagtcttttgcatctaaatactgcccccaatcaaattataatatacaatttattctcaaatgcttacagccagaaagaaccacatttttgcttctctggacagtccacatttttcatagagtgatgtgactggaaattccccatccttctaagttgttacaagagctgccactaacactttacacagaatttcagttttgttttagatattttctatctaatagaaaatatactgcaattgaccattattaaaaaataaatacatgacaattacctgcaaaaagatcttctctgtcatcatctaatacaacttctgtgggttttgggccattggagtttgcactaatatcttctgcaggaagactagctggttctggagatgatgg

SEQ ID NO: 814380 - DNA, 617 bp, Homo sapiens
accaaatcctgcccctgtatcaaaaacaaattccttaagcatcaatttattcacctaaaagtgggtcaaatggaacagatggtaaatagtacagcaatttattaaaacagctttcaaacataaatatagaataatttttaaatccatagtttaattttgctttgggacaacttctaagcaataaaaaggtataatcactgctatttctcaaagtatgaacatcacaatgattagtcttttgcatctaaatactgcccccaatcaaattataatatacaatttattctcaaatgcttacagccagaaagaaccacatttttgcttctctggacagtccacatttttcatagagtgatgtgactggaaattccccatccttctaagttgttacaagagctgccactaacactttacacagaatttcagttttgttttagatattttctatctaatagaaaatatactgcaattgaccattattaaaaaataaatacatgacaaytacctgcaaaaagatcttctctgtcatcatctaatacaacttctgtgggttttgggccattggagtttgcactaatatcttctgcaggaagactagctggttctggagatgatgg

SEQ ID NO: 814381 - DNA, 631 bp, Homo sapiens
tcattcattaaacctcagggagttttcctggagtatattatttaaggggaaagaggtaagwaaacataataatagttaattgatttcttattcaataaacagaaaatgattctaggaaataaaattaaggttcactgttcatcaggtagactgccatacttcaaattactcaaatgccaaatataacttctgatgtctccctgattaattatagattttgattctaagatactatacgtacttggatattcagctagggtttttcgtttttgttttagaatttgtttctaatcaaatcatttgaaaatttaagtaggaaaataataatggttcagaaatgtacttaaaaaattaaaactcacttatgtaaccttcatactattgtttttaatctccaggcaagtaacactaaatagactttgctgtaattgctcaactgttagactctgcaaatatgatcatatggaaatctctagaacggcagaagtttttcaaggtaaattcactgattagaacctatccataaattatttacactgtggcaattcattaatttgaataatgtgcttgcttttttccccttaagatctgaaatttctatttgaaaataaagtggttttttcaaatacaa

SEQ ID NO: 814382 - DNA, 542 bp, Homo sapiens
actatagaaacaatgggggaaatgggagagcatatgcaaaaaatactgtttagtgttttccataatcatatcagcggtagcattagtattgctattctgatattgttgtgtgtataacatgggtaagacaagaatctaattctactacctcctgtatccttgaaaaccagggctcttgctataaagaaaggagctacagaaatataatagagaaaaaattcaacagtctttaatttatatatttatgaactcacagggtattttctctttaaatgtaaataaaatacaactataaacatatttataatctcctccccctgtccaatctcaaggcaagaaacaagcccagtagcaaagagcattcctaatgcccaatttgtggtcttaaaataccatttccctctaaaagaaaccaagcagtttyttagagaaatgatgaattccaggtctggtgtagggaatgtgccagatggatctggaatatcttaatgcagcagagagcaaggcagtcatcaaagactactgaggtcatgtcacaagga

SEQ ID NO: 814383 - DNA, 545 bp, Homo sapiens
tgggggagagggagagagagtgataaaacagatgtggagaatgataacagccaatgtggataaaggatatacaggatcctctgtaccagccttgcatctttcctattagtttgaaattattttacaataaaaagttttttaaaaaatgaataaaaatgaataaatgaggaaagggatgccaggaggaggaggacccctcaggtataaaggcaggagggcaggaaagggcttggtccctttggggaacttgcaggtaggctgtgtggttggagggtggccctggggctggggagggaagagcaggggatggagctggagcccccactatggactctctggagggagtgcagtattgaactgttcagtcaacgttcatctacactttcccctctctttttcccttggtgatttttgaccaaaagtctgattgcatgaagccagtgtgtctcaggtcttccatctgatttctcttttgtcttaacaatagagaaaatctcatccrtgtatgcaggttactccttctgctgtgaaactgtgactttcct

SEQ ID NO: 814384 - DNA, 579 bp, Homo sapiens
tgaggggggaggagcaggaagggaggttggacaggaaggtggggccccgtgcctctgtctcctagcaatgtcaggcctgaccttgggagggcagatactgagccctgtcctgcagcagcatccacccctcatctgtcccaccccagctctacagcgtgcaagacagacagagtgtgtgcgatacatttcaaaggggcattctacatctatcatgtggatgtcataattcagtacgatgcacaaacagtaccacaacgacttgacagtctggctggggcaatgagaattagataagcaaaagcaatatccaatttatcacatggacttggagctgagatgaaaacacatatgactgatgatgttcacggagtgacaggatcacacggatatacccagggtcacgtacagtttccatgcctggggctataagagctacaatggcatctctttttctcccacccagtaaagcacagggtacagcagatgtgtgagtgtcatgatataaagacgtactagacacaaagatgtgtgccttctgyaatgtccttaactgtctcctctccccaacgataccccccc

SEQ ID NO: 814385 - DNA, 509 bp, Homo sapiens
aatggccgttttttggtctcttcttatagtcttaaaatctattttagctgataaaagtatagctactcctgctctcttttggtttccattggcatggaatatctttttccattcctttattttcagtttatgtgtgtctttataggtgaaatatgttttttgtaggcaaaagatgattgggttgtcgttgtctttttttaatccagtcatccactctgtcttttgattggagagtttagtccatttacattgaatgtcattattgataagactgattcctgccatgttgttatttattctctggttgttttgtggtcttttcctttattttttctttcttgtcttcctttatctctggtgatattatttagtttcttgcyttttattttttctgtattcgttgtatgttagtttcaggttaccaagatgtttgcaaatactgtcttacaactcagtattttaagttgataacaatgctgtttgcataaacaaacaagcaaaaagaaaac

SEQ ID NO: 814386 - DNA, 639 bp, Homo sapiens
ttttttttttctgtttgtggattcctaggaagtctctgtttttgtatctttttatagttatcccccttaccttgacttagcctgagtgactctgtktttttttccaaaaacctaattcagaccaagtgaaaattcctgctctagacctcagtcattttctcccaaatagaagatctctttagctagggaggctaggttggcattattcttaatggctatgtcatgaatcttaagtttcatgttaatagggaatttataaaactccaaagaatgtttcaagatctacaagtaaaaaagtgcaaatgatatgcagagactgaatataaaagagagaggaatgtgtatgtgagagggaggggtagctgagtagaggagaagagaaaaattgtgaaatagatttcctctgttcatttctcttcctaccctctccaggcacacatcttgcacccatttctttctttctttcttttttttattatacttgaagttctagggtacatgtgcacaacgtgcaggtttgttacatatgtatacttgtgccatgtttgtgtgctgcacccattaactcgtcatttacattaggtatatctcctaatgctatccctcgcccatccccccaccccacaacagtccccggag

SEQ ID NO: 814387 - DNA, 573 bp, Homo sapiens
tattgtcttctctggcctcagcactgctgaaggtactgggatacagtgccacatgagtcagaggaggttcctgcttccaaggaggctgagcctcagcttttggggtacatggtgtaacagacctgggatgaagggattggatatggcaaagaggaatgttccaggaaacaaacatcaaaattgttttaaggggaatgttggctgtagaacctatacctcttaaaatgtcagagatcccatagaacaaatattagtttttctatcatgcttctacctatagtttttcactacagcattgaaatatgcagagctcctatttaagtcaaaagctattgtataatcttttctgaatgaaggcagtaattactccttataatatggtttattataagaaactgataaaatgttagatctcaaaacaatatgcacaataaaatcctgatacaacatagttmatctatactttgggggtttctttcaattatcattataaaaaggtttcactctaacaagaagagcagattaatttgtaaaagaattagatatgctggtttagttcaataaagaaaaaca

SEQ ID NO: 814388 - DNA, 624 bp, Homo sapiens; identical to SEQ ID NO: 814315

SEQ ID NO: 814389 - DNA, 582 bp, Homo sapiens
acttatgtaatgcatcttttactttttccaaactaaatctaaatactttaacggcattttgtcaacagtcctttgagtatgtgaaagtggtttcagtgcgaaatctgatgtttcctcaaatgttctcttttagcagatccataaaataatgttaatcttttttattctaaaaattgacataattctaggcacagttataactatgtctcctagtaacaaatttaaactatgtgccatatgtggtagaaaaaatacccctggattttcagctaaaagttaatgccatttccacgggcttgccctgacagtcttttaaataaattcctcaagttgaaagttgatttttttttttccagttctcctttatatgattgtctttgtcttttctcttacccaagtgcctccacagctcaaactgctccacagttccagggagcgctcatacctgatattagtggtggcacaatccacaaacctttcctgtkcttagatgcagtagcattttgtctcaaggatgcacacaagagattaaaaagattccacgggggcctgaatggtgtgtcgcagagcagatgtttagga

SEQ ID NO: 814390 - DNA, 607 bp, Homo sapiens
gtttttatagttttgggttttacatttaagtctttaatccatctcgagttaatttttgtgtatggtgtgagcaagggggtccagcttcagtcttctgcatacggctagccagttatcccagtactgtttattgacaagggagtcttttccccattgcttgttttttgtcagctttgttgaagatcagatggttgtagatgtgtggtcctatttctgggctgtctattctgctcccttggtctatgtgtctgttttttgcaccagtaccatgctgttttggttactgtagcattgtagtataatttgaagtcaggtaacgtgatgcctccagttttgttctttttgcttagggatgccttagctgttcaggctctttttttggttccatatgaattttaagatagttttttccagttctgtgaaatgtcattggtagtgtgataggaatagcattgaatctgtaaattgctttgggcagtgtagtcattttaatggtattgatttttcgtattcatgaacatggratgttttcccatttgtttttgtcttctctgagttctttgagcagtgttttataattctcattgtaaagctttttcatcttcct

SEQ ID NO: 814391 - DNA, 607 bp, Homo sapiens
gtttttatagttttgggttttacatttaagtctttaatccatctcgagttaatttttgtgtatggtgtgagcaagggggtccagcttcagtcttctgcatacggctagccagttatcccagtactgtttattgacaagggagtcttttccccattgcttgttttttgtcagctttgttgaagatcagatggttgtagatgtgtggtcctatttctgggctgtctattctgctcccttggtctatgtgtctgttttttgcaccagtaccatgctgttttggttactgtagcattgtagtataatttgaagtcaggtaacgtgatgcctccagttttgttctttttgcttagggatgccttagctgttcaggctctttttttggttccatatgaattttaagatagttttttccagttctgtgaaatgtcattggtagtgtgataggaatagcattgaatctgtaaattgctttgggcagtgtagtcattttaatggtattgatttttcgtattcatgaacatgggatgttttcccatttgtttttgtcttctctgakttctttgagcagtgttttataattctcattgtaaagctttttcatcttcct

SEQ ID NO: 814392 - DNA, 629 bp, Homo sapiens
taaagtagaaatattttagctgatatctcaaaaatgtccactatctgttaaaacagagtgaaccatgctagacttttgtttagtggkgtgtgtgtgtgtgtgtgtgtgtgtgtgtataaaggtagacaccagtgaaaagttagggggtaattatgtaacaatttaggggcaggagtgacgaatagttggcataatgccattatcccagtgggcgtttctgatgcccaagggcagacattgctaatcgatcatgtcactcatttttatgatcatatcactcctttcacgcagggctccaggcagccactaaaaaagccatgatgaaatctatttgtctctcctagtctgaagcataaaaccgataaccctagtcttatcagcaacattctctaacccttgggatatttggagggtgttctcatttgaatattcactcattcaacacatatttttaagtccctacacacacacacacagtcctagccaaccatagttgtaggtaatggtgataagtagaggatgaaacaaacaaaactctcatggaattttcatcctagtggggcagaggaagaaggagaataaaatgacatacaaagtacagacatactttaccttattgtgctttatgt

SEQ ID NO: 814393 - DNA, 629 bp, Homo sapiens
taaagtagaaatattttagctgatatctcaaaaatgtccactatctgttaaaacagagtgaaccatgctagacttttgtttagtggtgtgtgtgtgtgtgtgtgtgtgtgtgtgtataaaggtagacaccagtgaaaagttagggggtaattatgtaacaatttaggggcaggagtgacgaatagttggcataatgccattatcccagtgggcgtttctgatgcccaagggcagacattgctaatcgatcatgtcactcatttttatgatcatatcactcctttcacgcagggctccaggcagccactaaaaaagccatgatgaaatctatttgtctctcctagtctgaagcataaaaccgataaccctagtcttatcagcaacattctctaacccttgggatatttggagggtgttctcatttgaatattcactcattcaacacatatttttaagtccctacacacacacacacagtcctagccaaccatagttgtaggtaatgstgataagtagaggatgaaacaaacaaaactctcatggaattttcatcctagtggggcagaggaagaaggagaataaaatgacatacaaagtacagacatactttaccttattgtgctttatgt

SEQ ID NO: 814394 - DNA, 497 bp, Homo sapiens
ttctgcatcacccatcaccccaaaataaaaacagctactacagcacagccctttggttacgcaggaggctgggacctgatcctggcataaaaagcggatgcgggcgaccgaggaccacacacgtgggggcgttcgcgggcgctgaaaccagctacgaggcccacgcccccgccggggacagctggtgaccatcacctttggacaggggcattccccagccggccccggaacttgcgaaagacgcgcagcccttcggactcagccactcgcgcagggcccgggtcccgggcggctcggggcacctgaggagcgcggcgaaggcggggacagggacggggacggggacgactcgggaacagggaagcgcgcggcctcccgcaggacccacctggatctgcarcggcacgaggcgcaccttgcagcgctcgctcaccgcgaagcccttgggcaagtccacgtactggccccactcctcggcgaacagctgcaccacgaat

SEQ ID NO: 814395 - DNA, 565 bp, Homo sapiens
ccttagaggcttctgttctgcacttatccccacccctctcctacatacacaatatatctctctctctactggatctttctcattgggcatgatattatttttaagtgaggagatgataatataactcgttttctacaaatatcatcccatttttcttctctccatagaaaaacattttgaaaaagtctactcaacttctatttacttataaactcacctcagtatggcctctccctcctctgtgcactaaaactgttcttgtcaaggtcaccaataatctccacattacccaatacatgacccatgtgtctggctaaggaccatgtctatgcactcaattactacacttttcaaatatattcaacacatctctgatcactctctactttatgaaatcctgttattacatcatattccccttttctcctcactcttgtcctcctctaggcttttttctttctttctttctttcttttttttttttttttttttttttttttttttttttttttttttttttttttgctkactgcagcctcaaactctgaggctcaagcattcctcc

SEQ ID NO: 814396 - DNA, 573 bp, Homo sapiens
atgaaatcatgtctttgcaaggacatggatggagccagaagccattatcctcagcaaactaatgcaggaatagaaaaccaaacaccacatgttctcacttayaagtgagagctgaatgatgagaacacagggacacagggaggggaacaacacatactggggcctgtcaggggagtggaaggaggaagaatagctaatgcatgctgggcttaatacctaggtgatgggtcgatgggtacagcagaccaccatggcacatatttacctatgcaacaaacctgtacatcctgtacctgtaccccagaacttaaaatttaaaaaatcaaataaaaaaagctagattgaaaataaatacacatacatacctttctagtagttaaaattaataggctttgccattctggaatttaaaatatctgacattctaaaatttgtgagtataaacttgtcagtatctttctggagacaaaaatatgattagttgacatttttaaaacttaagatagatagtttggaagaataaaaattattaaacaaaaagatgattcattgacatgatttttaaaacttagg

SEQ ID NO: 814397 - DNA, 596 bp, Homo sapiens
taaaactgtcttatgattttaaaataagcttctctgtcataaaaaccgtaatcagacacagaagaatgccagaaggcagaggtaaactgagttcaccttccaatgttccatcaacacatcttgaaaattcttcatcattctcactggtgagtaattcctgtctaacatccagaatgctagtcttaggggccaggaaggaagaatataactttctaaatcctgccccttggtataacttattctcagtgttgatttcattatgatttctttttataattctgttgactaaataagaacttgatgaatcattgcataattaattaaccgtgaaacagcagggtgcattttctggactttctcaagcaggcaggaaacgtttttattccatttgtttgatagtagaaaggtgtctcaatagggagagtttttcttgctatatcttttcatagaagaactatatagggagaaataaattatatcacaaatacctcagtttttattagtaayctttaaaatttttacagacaattgaccaaagaagaggtataatctttaaatgttcctttatgtgtttccaaggtttggattaactaaat

SEQ ID NO: 814398 - DNA, 513 bp, Homo sapiens
ttgtcaaagtcaccttgtaagagagtaatgtagatgtcgttcctgacatcccctgaggcagagggagagagagacaagagttagtgtggattacagcaggagagacgctgactaactagaggggatggagggtgagaagaagctctcccacctggattggtattaattaaaatcagaattgcttagagaaagcatttttccctcatcagggaggctggagaagtaggtaacacggggatgaagggatgctaggaaatcagttgcaaaaagggaagtagggacactcaaaattggccatgtttttctcgacattaaaagtcatttaattttcatcctctagtgacaccttctgggaaggcaaaggaaagctccaattgaattgatcctgtcccwtgaaaacaaccaaacatatacatctgccgatatttcactgtgtaggagcagaatagagcaactttccatgtgtcctagggacacagggttaggagggagctgcagaggatcttcaggaag

SEQ ID NO: 814399 - DNA, 547 bp, Homo sapiens
atgcatagaagtttttggatatacagacatcatttttagtkgttaccttcagggacagaaatggagagaggcagtaaaaaaggaaggagttgactctttagaaggaaaatgaattagacaagctgaattggcccctatgtccccaggggaaggtcagagcagctgtgtctcacctggcatgatgatctctgggaatcccagcttcctggccaccacggtggtcctgtccaccaggtgtggatagtccttgcgaatctgaatgatgtcacccaccagcatcttcatggtcacccagaggcctgcaaaggaacagctcaccgtgaagagcccacttttgcaagtgacccctcagtcggccctcccgccacctctcccctctgtctttctggagatcactgggaacagagtcatacagccacagatgcagccacccagcccacagggcctctggaacaggcgatctctgggtctgaatcccgctaatgatttctagcggtgtcagcctctggcaaattatcccacttctctaagcccaaagtgaggatga

SEQ ID NO: 814400 - DNA, 547 bp, Homo sapiens
atgcatagaagtttttggatatacagacatcatttttagttgttacyttcagggacagaaatggagagaggcagtaaaaaaggaaggagttgactctttagaaggaaaatgaattagacaagctgaattggcccctatgtccccaggggaaggtcagagcagctgtgtctcacctggcatgatgatctctgggaatcccagcttcctggccaccacggtggtcctgtccaccaggtgtggatagtccttgcgaatctgaatgatgtcacccaccagcatcttcatggtcacccagaggcctgcaaaggaacagctcaccgtgaagagcccacttttgcaagtgacccctcagtcggccctcccgccacctctcccctctgtctttctggagatcactgggaacagagtcatacagccacagatgcagccacccagcccacagggcctctggaacaggcgatctctgggtctgaatcccgctaatgatttctagcggtgtcagcctctggcaaattatcccacttctctaagcccaaagtgaggatga

SEQ ID NO: 814401 - DNA, 669 bp, Homo sapiens
ttttagttgttaccttcagggacagaaatggagagaggcagtaaaaaaggaaggagttgactctttagaaggaaaatgaattagacaagctgaattggcccctatgtccccaggggaaggtcagagcagctgtgtctcacctggcatgatgatctctgggaatcccagcttcctggccaccacggtggtcctgtccaccaggtgtggatagtccttgcgaatctgaatgatgtcacccaccagcatcttcatggtcacccagaggcctgcaaaggaacagctcaccgtgaagagcccacttttgcaagtgacccctcagtcggccctcccgccacctctcccctctgtctttctggagatcactgggaacagagtcatacagccacagatgcagccacccagcccacagggcctctggaacaggcgatctctgggtctgaatcccgctaatgatttctagcggtgtcagcctctggcaaattatcccacttctctaagcccaaagtgaggatgacaacacctatctctcaggcctggattaagaawgaaatcaaacaaggtaacttattaaagtgcccccggaacaccggagatattcaggatgtatcaattcctctctgcttttgggcaccaggacatgcctccaattttcttcagaaaatgtgactt

SEQ ID NO: 814402 - DNA, 646 bp, Homo sapiens
caattttgtcactttctgtttgggagaaggttgtgaccaatggctgtgcttgcgtgcygttgttaccacccctgggggacctagggacatgcaggtggagagaaggcttgtacttaacatggtgttattaccaggctgagagatttaggacactcatttaacctacttccgatggactagggagcatagtcatgctggttcactttcagcttagttgtcattttatacctgcatttgcaaaactctcccttaaatcccaatgtgagacttaatgtctcttcccccatcctaaagtagccaacccacacaccatcaactaactcaaatgcacaattacaaaaatgtttcctcaaaagggaagagaagtaaaaattggttggatttgaatgctatgaagttaaggagaaaatgaaccaattatttgaggtgggacaacccactgataataacattataagtaactcttaatcagagctcattgtacaccaggcttggtgctaagtgttttgcaggcattgtctcatttaattcttataataactctatggagtatgcagtttgattatccccacttttttccgataaagaaaccgagggttttcagtagggtaggtaacttgtccagagtcgcgcagctagtaaatga

SEQ ID NO: 814403 - DNA, 557 bp, Homo sapiens
aggaagacagaacagcgatgtgagatgggaggagagggagcgaaaatggaagagagatggatggagtgagactgacagcaagacagagaggaagagaaagggaaaggagagagcgatgggagaaggaggaggaagaaagatggggagggggctctcagggtgcaggcgcagagacgcccctcttgagttcaggagcaaacccttgagttttctaaaaatagctcagtctttcccctagcagggttggcagcagggaccaagagaggcacgcttgcccttttatggtaagaaaaagtccagatcctcagagggggagctaggctggagcctgtaattctggatgaagtccagcctcagggtctggggtgggacagggctgaatgaggggggaagacttagtgggatttcctggcctgagtggccctacccttggggaagatarggctgaggtaggtgttggcatgggcctcccaggaaagcactggggtcctggtagatccttagtgttatggcagaaagtctagagacatttggtccacgctgtgtctctgttttat

SEQ ID NO: 814404 - DNA, 623 bp, Homo sapiens
tatgtttagttttgtaagaaactgtcaaactgtcttccaaagtggctgcaccattttgcattcttaacagcagcaaatgcttacattatccatttgttcttgcattgttgcatactttttccattaaaagcgttagcatattaattaggttttttaaaatttcctggtctgataattccaacattccttacatatttgactctggctctggtccttcaaactgtatttttccttttcaaatgccttgtaattttttactgaaaggtgggcatgatgtactgggtgaagaaaatgtaataaataaacctttagtaaagtagtagtaaggtgtagggggaggggaagcattctatagtcctggtgtttattagtctccatcttttggtaagcctgtacccttgagctgtgaacttcacaggtgctgtttagtatacccatccctcttaggtgagacaggatggctacagggggctggagttggatattttcctttccccacatcagtttagctgtgataaaaccccagcaggttaggstctgataagatagtttgtcctgtaggcaggacttgtaaagcagaacagaatgctctggaatatttcaaaatggccattttttctcct

SEQ ID NO: 814405 - DNA, 628 bp, Homo sapiens
tgtctcttttttacttgtttggagagtggcctttttattacttgggaattggttgattccactttcaccatgctctatcattctcttctcttcttctcagggagatcacaaaggctcatttatggataaaaagaaaagagggagtgagggaaaggcttagtttgaaaatagcctcaatcatttgtagtataggggctaaggagagaaagggcaggtttcagaatgtctggggcatatgagtgggttctttagcaatcaagacttgcaaggagtctgtgacaccaaactggactgccatttgtctaagaaggctgagatctacttcctaaagcaccctccttttgtcctcaggctggaaagattgctgaaaagtgagcaggcccctagctgaacctctaaggaacctcagtccccctcccaaagacataatattccatgcctgaaacttctccaagtatatagacagtgactttttataaatgttcattcccttttagaaaacacaatatattcctcttatttctattaagtgttggtaaaatgcttctaattgaaaatccttttcctccctgccagtttctcatacttyactcactattatttctggattatattctgtgtacaaaaa

SEQ ID NO: 814406 - DNA, 599 bp, Homo sapiens
gtttacactgataatctctgatgctaactaaacactgtaacgtttattctagtgttccctgttccatgttcataattccattctccaacagtgaaaaacctgactttcatgactctcagtctatttacttattayttattaaatcagtttaccctgcatgtagtcaaatacctggacgagtcagcccaaaggtgaaccctcagacactggcagccctcccccaccggcccccacttctttcaggcatgcaaaacaagagctccaaaaagaagggaaaggaataaggaaggaaggccagttagatagctcagccctgggcatggatgctgtccatttgagatggcagcccagggccaggacccggacatccataagcgcaggtcaaaatctcacatccccacaaaggagatggagagctagaataagaactgcataattttaatgtatacaaattgatcaaaattttcctttatggtttctggttttttacatcttgtttaagtaagctctatgccggagaacattaagatagtctcaaatattgtattctaaatgttatatattgttaccttttatgttaggtcttttaatgttcctgg

SEQ ID NO: 814407 - DNA, 575 bp, Homo sapiens
tatatatttatctgagacaggtgcctcacattctctacacactaggttttatcattttaattgcctggccaatgttgaagcaccatctcaggcgctgctaaattgcaggtgtttgtctttatttttcacccttcatattatacctcttattttatttttgttatcttaattttctaaagacttctttgtggttttatggctggctgccagcgttctgggaagtgtgtgtttttagatctttgttttttaaagatccacacacacaaaaaaatgctcacagtaagaaaaaccatctccagagttggcattgttttacttttcaagaacaagtttgagttgaaagaagcagcattatttatttctcatgggcatgtcctttggctcactctctgggaaaatcctcatccttgcagatcaaaaaagagaactgcctcccagtgaattagaatacaatctgcatttgcccacaatatcacacagtgatttcagaaatttggcttgtacacatctggggaatgatggcagaatgcccctagttaaaacrgctttcagaacctacgtgggtgattttgatt

SEQ ID NO: 814408 - DNA, 544 bp, Homo sapiens
  misc_feature 47: n = A,T,C or G
aactgatattcatgccagtggggaaagagacactacagattgctagngcatgtattttacaattttccatwttataattgagtattatttgtgaaggactatgactatgatccaaacatccccgttttctagggactggatccagtactttttactaggatcttcctcctgaaggcaacttcagtatgattaaatcttattaaatttgagattcaggatacatgggaggaagaaaaagcatggtgagttttatgactcagtagtctaatttgatgaatccagtaaagcttcaaactgaaagggagaaagcacatcagtgctctggatactaaatacccatgggaaggactttgtgtaccaaagacaacagtggacaaagactccacaacatgaggaagcctggctaagaagacaaaccttactagttacccaagtattttatagaactaggatttttttttttttttctgagacagtgtttcactcctgttgtccaggctggagtgcaatggtgcgatctcggctcaccgcaacctccgccaac

SEQ ID NO: 814409 - DNA, 499 bp, Homo sapiens
atcatgctatttgttgcctgtayaccttggctttttgttctttgttttagttttttttttaattgtatttttgttttataggtcctgtgaaattcatgctttaaagaggttctgttttgatgtgtttccaggatttgtttcaatatttagagctcctgttagcagttcttgtagtggtggcttggtaatggtgaattctttcagcatttgtttttctgaagaaaactatctttcattcatatatgaagcttagtttcagtggatacaaaattcttggctaacaattgttttgcttgaggtggctgaagatagggccccaatcccttctagcctgtagggtttctgctgagaaatcttctgttaatctgataggttttcctttacagtttacctggtgcttttgtcacagctcttaagattctttttttcatcttaactgtagataacctgatgacaatgtgcctaggcgatatctttttgcgatgaatttcccaggtgt

SEQ ID NO: 814410 - DNA, 499 bp, Homo sapiens
atcatgctatttgttgcctgtataccttggctttttgttctttgttttagttttttttttaattgtatttttgtttyataggtcctgtgaaattcatgctttaaagaggttctgttttgatgtgtttccaggatttgtttcaatatttagagctcctgttagcagttcttgtagtggtggcttggtaatggtgaattctttcagcatttgtttttctgaagaaaactatctttcattcatatatgaagcttagtttcagtggatacaaaattcttggctaacaattgttttgcttgaggtggctgaagatagggccccaatcccttctagcctgtagggtttctgctgagaaatcttctgttaatctgataggttttcctttacagtttacctggtgcttttgtcacagctcttaagattctttttttcatcttaactgtagataacctgatgacaatgtgcctaggcgatatctttttgcgatgaatttcccaggtgt

SEQ ID NO: 814411 - DNA, 608 bp, Homo sapiens
ctagaaaaattctcattataaaacttayttcatgttttcctgaatccaagaatgaaatatatttaattataaagttaaagcttccctgtgctttagagagataagccttcctttcttttaatactccaattgggactacttctttcttgcgtcagctaaaattcaagaactgttgatttctctgccatcaggtggccagttgaaaatgatcctctgaacccaaacacaatttaatattactcattgctatcagaataattcagtcaccagcacattctctgcctcatatcatcatttttgttgttgttgttgttgttttgttttgttttgttttggacagggtctcgttctattgcccaggctggaatgtgcagtggtgtgatctcggctcactacagccttcgcttctggggctcaactgatcctcccaccttggcctccagagtagctgggatttcaggcacgcaccaccatacccagctaatttctgtattttttgtagagatggggcgtcgccatgttgcccaagctggatattatcactgttttcctcaattttcatcacatactatcatatctctctccatcccctccatcccttctaggga

SEQ ID NO: 814412 - DNA, 444 bp, Homo sapiens
ggtctcaagctcccgacctcaggtgatacatctgcctaggcctcccaaagttctggggttacaagcatgagccaccatgcccagcctggtttgtttttgtataagggtatctctgctgttcaagaaattsacagtgctttacagttaacatagaaaaacacatcatagatgtctaatttttcacatttctctgttttccaatttatccactccaaaattaactactcttttcagtgcaccatgttccacaatgatgacaagaagatatactaaaaagttctattctcttaaaattagttcttcttccatgcccactacaaacctaattgttttgcccataagcacttcactagcagctttataagatgatatctttctttagaaacactggagtacaataaataagttacattgccaacaagactcaaagatgaaagcttcagt

SEQ ID NO: 814413 - DNA, 443 bp, Homo sapiens
tccaggtcacactctgtcaacagctgtcagcaatcttttataaatataaattgtaacactacttctgcccaagatagagaaagagagaatgaatttaccctgttgtgtgaaacaaacaaaaaaagacaacatttatgaaacagtaattttgaagacactcaacatcaggcaatgggaacagcgatccctgagagatgtcaaacaaataaggtaagtcctgtaattttccccacttttctatcttgagatggtttccaggcagcggctcagggaaggggaactcaggcagagcccaatggactcctgagttgagacasagtctcagtgtctggggagaccaaggccaccaaagtccacagcactgcagaggagagagctgcacagactagcctaggttgatgcacagagtcccccttgtgtattcagcagagtagtgattggca

SEQ ID NO: 814414 - DNA, 564 bp, Homo sapiens
gggagaaagatagtctccctggcatcatttgagccactaaatctaggtatgaccgcatccttctccaaccctgttcttcccagctggattttcaagtttctagagmcattcattctcttctcacttaagccagtataactcaggcttctgtcacttacacagaaagaatcctgacaaacacagatagaatgtctaacaaaaacagaaaacgtactccattagaatatgaaccatatctgtcttgttgttgctatatctccagtgtgagaaataaaaatgaaatcccaagccccccagctggctgaatggaccccttcttggccaaaggaaccccagagtaaccttgaacactgagttattggccatgatgggatgggaagtcagacacgcctcatcatatcttctctcttgctaagcagcattaggctttcttctctaagggctcaacagaaaccaaccctgtcaacagactccaacaccactaatatcaacctaccacctgactcttgtccctcccttttgtagtttcaacaaaataatacacagcatttctttctggtaaga

SEQ ID NO: 814415 - DNA, 599 bp, Homo sapiens
ctgtaatcctagcactttgggaggttgaggygggtggatcacatgaggccaggatttcgagaccagcctggccaacatggtgatacccagtctctactaaaaatacaaaaattagccatgcacagtggtgggaacctggaatcccagctacttgggaggctgaggcaggagaattgcttgaacctggggtggaggcttcagtgagccgggatcatgccactgcactgcagcatgggcgacgagcgagactcagtctaagcaaaaacaaaacacaaaaaacccaacattagccaggtgtgatggctcatgcctgtgggtcccagctacttgggaggcttagtggggaggattgcttgaacctgggacatcgaggctgcagtgagacatgatttgccgctgtactccagcctgggcaacagagtgagacccagtcacaaaaagaaaaaaaataaataaataaaaggaggcaaccaggtaggtatctcccatggcatggtgaggtaggggtgagctatggtctcaatgtctgtgtcccccaaattgatatgttgaagcttaatcctcaacgttgacagtgttaaaagatgtgaggcatttgg

SEQ ID NO: 814416 - DNA, 619 bp, Homo sapiens
gtctcctacgccgtggctctcagctgtcaatgtgcactctgccgccgcagcaccactgactgcgggggtcccaaggaccaccccttgacctgtgatgacccccgcttccaggactcctcttcctcaaaggcccctccccccagccttccaagtccatcccgactcccggggccctcggacaccccgatcctcccacaataaaggcttctcaatccgcactctggaggtgtctttctgtgggctcagggcaaccacacacacacaggatgggtccagcttccaaaccattttatacagagtcacagtacagaactctggtagaaaacagggtggacggctgggcgtggtggctcacgcctgtaatcccaccactttgggaggccgaggcaggcggatcatgaggtcaggagatcgagaccatcctggctaacacggtgaaaccccgtctctactaaaaatacgaaaagttatccgggcttggtggygggcgcttgcaggagaatgcagtgaacctgggagcgggaggttgcagtgagcagagatcgcgccactgcactccagcctgcacgacagagcgagactccatctcaaaaaaaaaaaaaaaagaaagaaagaaaga

SEQ ID NO: 814417 - DNA, 638 bp, Homo sapiens
gggaaaacaagttggaaagggtgaagactggaggaaaacttggactcaaggcaggaggcttgtacgggtgggagagaatgctagctcaatacagagaagggccagaaataagaygcagaaatgggtgtatttcagtcatatttagaaggaaaaaatatggtaagacttgctgatggcagaaatcaaatatgaccatggctatttctttttaccttcacttagtttgaaaaatgagaagactcattttgagggagaagctcatggatattatattactcatgttgtatttgcattggagagctgcaaactgagaagtcaagaggcaattggatatacaaggagctcaaaaaatgagttctgggttacagatatgaatttgagaatcattagcaaatggatgttgattggggctttgtgtgtagttcagattgctaagcaagagaataaagagaaggaagagacaagggcctagaactgtgacctaattaattacaacatttatttgatttgtttcttattttgccattatatcataatggcaatactggagtttgtattaaattgctcccatcggatcatttcttaaaacctggaggcttctgaaacaagccatacatctccaagttactgtacaacct

SEQ ID NO: 814418 - DNA, 589 bp, Homo sapiens
catttggagaaactcaaaaacttccaagcagaattttttaaaaaagattctgaaatctaacayaaataaaaaatatttagggcaaccataagaaaaaacatccactgttttcaaagaagaaataagctttataggttacttttcaggagaaactatcaagctagatggcaatggaatgactacttacaagtgctaaggggaaccatctgccaacttagtgtcctataccaagcaaaaaatattcttcaatattatgggaaaatgcaaaaattttcacacaaacaaaaataagaatttgtcaccaacagaagaatgttcaaaaaaacactaaagttatttatactgccgtacggaacatgatcgcagatggaaacatgccaattcaagaaataaagaacattgaaaagggtattacatggttaactataaattattattgagatttgaaaacaataataagtttctgtgtatttaaaatacgtgtagaactaaaattcatgacaaaatagcacaaaaggaagtggggatgtgaagacagtaaagtaacataaggttctaaaagtacagagagttataagtgtaccatttt

SEQ ID NO: 814419 - DNA, 626 bp, Homo sapiens
gcagctccttgaacttcatgtattaccaatctgtccctttgttcctgcagccccttttcttctctctgttgcttctgcarttcctcatgtacagttccttgtgttaaacctcttcttgaaatatcttgaaaggcttctgttttccttgttggaaactcactgattcagcattatcagtgagtgtccccggaaacaaatacatctggaattggttatgtaatctgctcgggcctaaatacagttgtaatcccactgtcaacagaaaatggaaaactagtacatgtcatgcagtggcaagagagtaactaaaattattccctgacattgcctgagatgatgtacctattaatgtctaagcttgaggttgccaagtgactgtttcatggtgaacacgtttacaaggactgaggggtgataagtagcttctgactacaacagagaacttactgacagaaagggacagtctctgggctttacattctcaccataaaatatggatggagaggttctgtgatggccccgatagagtatctcatgaggttatagaactgtgccactgaaagtcagacctcagatttgatcccatgagttgttgcaacatcagttgccttcatagcttcagcatg

SEQ ID NO: 814420 - DNA, 539 bp, Homo sapiens
aaaacaaaaagacaaagaagggcattacataatggtaaaggaatcaatgcaacaatagggatcartgtaacaagaagagctaactattgtaagtatatatgcacccagtacaagagcacccagattcataaagcaagttcttaaagacctacaaagaaactgagactcccacacaataatagtgggagactttaacaccccactgtcaatattagactgatcaacgagacagaaaattaacaaggatgttcaggacttgaactcagctctggaccaagcagacctaatagacatctgcagaactctccaccccaaataaacagaatatacattcttctcagcaacacatcacacttattctaaaattgaccacataattggaagtaaaacactcctcagcaaatgcaaaagaatggaaatcataacaaacagtctctcagaccaaagtgcaatcaaattagaattcaggattaagaaactcactcaaactacacaactacttagaaactgaacaacctgctccggaatgactactgggt

SEQ ID NO: 814421 - DNA, 614 bp, Homo sapiens
agccattctaagaggcaggtagtgatgtatcattattgttttaatttgaagttccccartgacatatgttgagcattttttcaaatgcttatttgccatctgtgtatctttttcggtgaagtgtctgtttgggttttttgtcctttttaagttggcttttttttcttattgttgagttttgacggtttttgttgttgttgttttgttttgttttggataccagttctttgtcagatttaaaaaaaatacttcttacagtttgtggcttcttcttataatagtgtctttcacagagcagagtttttaattttaatgcagtccaacttaacaatttttctttcctgtatagtatttggtgctgtatctaaaaactcatcacctaaccaaaggtcatttagattatctccagtgtaattttctgtctgctttatagttttgcattttatgcttatgactatgatccattatgaattaattttatgaaaactgtaaggtctttgtctagattcatgcttttacatgtggatgtccagtcgttgcagcaccatttgctgaaaatactttcttttctcaattgaattacctttgctccgttgtcaaagatcagtttatac

SEQ ID NO: 814422 - DNA, 587 bp, Homo sapiens
cagttttatttataatcaccaaaactggaagcaacccaaaagactgggagaatgaattaataagctatgatatagccatwcaatggaatactactcagcaacagaaaggaatgaactattgatacacacagctcggatgaatctcagaggcattaggctaagtgaaagaaaccagtctcaaaggttatatattgtataattccatttatgtaacattcttgaaaagacacaggtatattgacagaaaacaggagcttggctgccatggatctgctcagggttaagggtggagaaagagttgactgcaagagaacagcagggagtttcatggggtaatggaactgttctgtgtcctgattgtgatggtattttaagaatttatgtctgtgttaaatgtcatggaactgtgcaccaaaaaggtcaattttactgtatgactttaaaaaataaaactttaaacaagattacataaaataatgcatgtttaatagagtccctggcagacagtaaattttatctatgagttctttccaagactgtggtatagagtatatctccatgcatctaatttaatagagccaactggt

SEQ ID NO: 814423 - DNA, 701 bp, Homo sapiens
ggctactgtgtgtgtttctgtcttcgtttttaacaataaaaaaagaagttcaaaaagtaaaaaaataaaaagtaaatttttaaaatagaaaaagtttatagaaggataaagaaatatttttgtacagctgtataatgtatttgtttttaagctgtgttattataaaagagtcaaagagttttaaaaaggaaaaactttgtcaaataaaaaagttacagtaagctaaagttcatttattattgaagaacaattttttaaatttagtgtagcctaagtgtacggtgcttttaaagtctacagtagtgtacagtaatgtcctaggccttcaccttcactcaccgttcactcactgactcacccagagcaacttccagtcctgtcagctctattcatggtaactgccctatcctggtgcaccattatcttttatactgtatctttattttaccttttctatgtttagatacacaaatacttaccattgtgtcaccattgcctacagtattcaatacagtaacatgctgtacagatttgtagcctaggagcaataggctatcccttacagcctaggtgtgcagtgggctacaccatctaggtttgtgttaatacactctgtgatgattacatgawgattaaattgcctaataaggcatttctcagaatgtatttccattgttaagcaatgcatgactgtgtgtaca

SEQ ID NO: 814424 - DNA, 638 bp, Homo sapiens
cctagaatttatgcaatcctagaggctggattttattagcttgcctgccattcaacaccgtgtacttccattgggccaagttcrtactagatgatgttaggggcaactgaattccctaactgcctaggatgaccttataatttatcattcaaaccaggacacttttgagcagcaaaaagggtagtgttaataatgatgctgaaacagtagcctaggacttctctggaaaacccaagttgtattgtgcccctacttccaacctatgtgtgggtactgtgtgccatataccactccctgaaccaatcagcagtggccagtagcatgctgattgcaactgagaaggttatcagcagctgaaaatacttatggaggaagaaacatgtctgggaaattcgctatcaagggagaaacctgcacaccaaccctaagacctcccacatccaatcagttgtcaagtcttgctgattctatcttctaaagatctcaggtcatctattcatgttcctctatccccagtatcttcactttggttgctgccaccatcatccttccctctgagtattgcaatagcctcctaaatgtttccctgttccagtcttgccctcctctaatcaatgatctagatagaagacagcaat

SEQ ID NO: 814425 - DNA, 511 bp, Homo sapiens
agttatcttcacttctatgcttattgcagcactatgmataatagccaagacttagaagcaaactaagtgtccattaacagacaaatggataaagaaaatgtggtacatacacacaatagagagctattcagccataaaagagaatgagatcctgtcatttccaacaacatggacggaaccagaggtcattatgttaagtgaaacaagccagatacagaaagacaaacatcacatgttctcacttatctgtgggagctaagaatgaaaacaattgaactcatggagatagaggtagaaggatggttaccagaggctgggaagggtagtcagtggggatagttaatgggtacaaaaaaatagaaagaataaataagccctagtgtttgctagcacaacagcgactatagtaaaataataataataattgttcatttttaaataactaaaagaatagaattggattacttgcaacacaaaggataaatgtttgaggtgatggataccccattta

SEQ ID NO: 814426 - DNA, 511 bp, Homo sapiens
agttatcttcacttctatgcttattgcagcactatgcataatagccaagacttagaagcaaactaagtgtccattaacagacraatggataaagaaaatgtggtacatacacacaatagagagctattcagccataaaagagaatgagatcctgtcatttccaacaacatggacggaaccagaggtcattatgttaagtgaaacaagccagatacagaaagacaaacatcacatgttctcacttatctgtgggagctaagaatgaaaacaattgaactcatggagatagaggtagaaggatggttaccagaggctgggaagggtagtcagtggggatagttaatgggtacaaaaaaatagaaagaataaataagccctagtgtttgctagcacaacagcgactatagtaaaataataataataattgttcatttttaaataactaaaagaatagaattggattacttgcaacacaaaggataaatgtttgaggtgatggataccccattta

SEQ ID NO: 814427 - DNA, 625 bp, Homo sapiens
tttattttatctgttaattacaaacgatcccagagcctttaatatgggaattcactttgyaatgtgcaagagggaaagcctcgaaagcatttcccatgtttatttgaccaggatattttccaggtggggcccctattggggaagtgtttgaggaacaccagtctgtacaacactttgacatttacaaagttttttccatgcatgttctcatttgcctctcccagtgatattatgaaggagctgaggaatagatgaagctcctcactctccttttggggatgaggaatcagattctcaaagagtgtaacttgcccacagtccctctgctaaggaataacggggccagttgagattcagactcatagctatatgccctttccatggccccactgcctcatgatgggatcaaagccacgtggctggaaaatggcaagatcagaattccaacctggttttctgaacccagctcctgtacactgtctgctataccaagcttctttgtgagtgtgtgtgggcgagaaagagaaagttgtatagtaagccatcaattaattgacttgtttcctttgtcaactagcaattctgatgttatcatgcagaaaatttgaaaccctttatgagttgt

SEQ ID NO: 814428 - DNA, 606 bp, Homo sapiens
aaaatttccaatgaatgggtgctatcattactcccaatttattgacaaggaaactgaggcccacaataaacaggtaactcacctggggtcacactgcttgtaggtatttgcagagctaggattttaatgcagaattaccagattctgaagctctgtatatcccactgcctctccttggttcacagtacatacttttctcacactccaggttgacttcttgtccagtggtttgtcttctcgcctagaatataagctccatatctatgagtaaaagctatgccagagacgaggagcttaccacctcacaggcagctcctttcccttagattgcctctaattgttatctacaaagacctcacagagtagcagctctgaaatctggatgtgtttgagaagaagaactacttagttataatcttggatgtgccgtgtatctgctgtccatctaccttccttgtccagtgctgccctgtccactgtcttactaagtgaatatgcagtaaagaccatgcaggttgtggtggcttgtttaggggccaccagttctgcccatcccaatatgcacatccmtttgcaatgtaccttttttgctcctttcatccagag

SEQ ID NO: 814429 - DNA, 625 bp, Homo sapiens
actcaatttattgactatttataaaggtagagaaaaacaagggatagtttgaactacatgttggaaagaacaaatacactgctgaatattaatacaatatggacaggtgtcccttcacctatatgcatttttatctgagaaatatttccccatattgaatagaaaatggagaaatctataactggtacctttgtgatgaagagagaacaatcatgttaggattagagattactctgctgataattttttttttttatttcaaaggcaattagctaagaagctaaatattggttaaagaaaaaaatgagattctgagtaagttatttatctgtgacccacttttctcattcttaaaatgggattaataataatagcaataacccttcaggtatttggatgattaaatgagttactgaatataaaatgcttagtacagtagtctggcacaaagttgcccattctataatgggaaaagtgatatcctgactgataaattctaatgttaaatttaattcattccagttggktgcagtggctcatgcctgtaatcccagcactttgggaggccgaagtgggcggatcatgaggtcaggcgatcgagaccatcctggctaacacagtgaaa

SEQ ID NO: 814430 - DNA, 477 bp, Homo sapiens
ctttatgaagccggatcctcctstgttggctgcatatgtatttaggataactatcctaaataccgacagttaggtcttcttgttaaattgaaccattaccattatgtaatgcttttctttgcctttttttatcttggtggtttaaattctttttacctgaagttagtacctctacttttttctgttttctgttgcttggtgcatttttctccatccctttattttgagcctataggtgtcattgcatatgagatggctcttgaagacagcatacaattgggtcttgcttctttatccagtttgcctcagtgcccattaagtggggcatttagcctgtttacattcaagattaatatttatatgtgataatttgatcttgtcattgtattgttagctggttgttttatggacatgattgtacagttgctttataatgttagagtactatctacttaagtgtgtttttgtggtgacaga

SEQ ID NO: 814431 - DNA, 518 bp, Homo sapiens
caaaaaaatcaattccatgttatgcatttggaccttgggaaatatattactctactgcaatggtgattttgatttggttaaaaataagacttttagaagtggacatttgccagactgagayacaaaattacacaatcttacagctggcagggagtacagacctcatttaacccagttgttcattttgcaaataaagaaactaggactcagaacagaacaagcattcccatgttgatcattttctattgagattaggagtaaaagtcaggccagctaatttttggttggtaagagcacagatgttagaagcaaacaagcctgtgtcccaatcctggctctatcactactacctgcatgactgtagcagacatatttgttggctaacttaaacctattgttaatccctacatccctttcctgcctcctctatgaagccagagaaagccaaatacaattgagccttaatacaggtttaccctgcgcagagccacttagacatagatttttttcaataaaag

SEQ ID NO: 814432 - DNA, 634 bp, Homo sapiens
gtctattcttaacaatcaaaacatgaattttctataaaagaattttcaatgtgggacacaaaaaagtctggttttaggtgaccttaaaagaaacatgtatgttttagaagtttgctttgggttargtttctgttgtatgaggccatgtagctaagcaaggcatttcagagcacaaaagattctgtgtgggttgtgtacagagacctaatttaccatataatagttcttttctctactcggtgccttgtagcgattgctttcttttcttagtacatcctcatttacagagaaatagccaacagacttttagatttatgccattatttgcttcttcaccttgaactccaagtaaattctgctacacttttgtaatatcagtgccaaatgatggccttatgccagatacaaacacttcccagtttctctcagtcagttctctcgatttcagggaatcacagattcctgctagagggcttaaatgtggtgcttacatggccccctaaccattcctttgcctaagtgctttctaactcagaagtgcaatttgggaacggaggcaattaccacatcaagaaaccaaaaacctccccttacataggggaacagtgaagctagggatcaaggattctgggta

SEQ ID NO: 814433 - DNA, 645 bp, Homo sapiens
ggaaggaatattttcattaataaatggtgctgggaaaactggacatccaaaagcaaaagaatgaaataagacccttatctcacaccatttacaaagatcaactcaaaatgaattaaatacaaatgtaatacctgaagctgtaaaactactaagtgaaaacataggaagaaagctctataacaccggtctgggaaataattttttggatatgacctcaaaggtacagctaacaaaagcaaaaatagataactgaaattatatcaaactagaaagcttctgcacagccaaggagacaatcagcagaataaaacagacaacctacagaatgggagaaaatatgtttaaaccatacatctgataaggggttaatatgcaaaatatataaggaactcaaacacatcaatagtaaaaaactaagtaactcaattaaaacatgggcaaagcatacggcttaaagcatctatagagtcaacactattcctatcaaactactaacatcatttttcacagaattacaagaaactattctaaaattcatatgcattcaaaaaagagcctgaatagccaaagcaaaaaagaataaagccggaggcatcacattactggacttcaaaataygctacaaggatacagtaaccaaaacag

SEQ ID NO: 814434 - DNA, 615 bp, Homo sapiens
gtttaaaaacattactgattggtagttgaataatctttttaaaaaatgatctgccaggcctactgtaaagagatgatgcatggtaaaaggaaaatggcagctctatgttaytaccagtagtgaaggtgaatgatggattgttacatacagagtaagacttaaatgttgtgaagtttcctacagtttgacaaccaaaacatctaaaaaattcaaataaattttaaggtaatcttgatcttggttgtgagttgcaccagagaggacagtttatttttagttaacttgtacttaacctgcacaataagagtggtgactgactcaaatgtaggtagtactttattgtattccaatttaaaaaaacaaaattaagtctatattttaaaaactctgacaatagcaagatatttaatgaactctacttcatatctagttcattttttttttctggtttgaaaaaaagatcagctttccctgaataaacaaaaatgaatgtaaataaacatgaaaatacaaaaccataatttccaaaaacgaaatgaatgggccaacagtaaaatgcacaatgagccacaactgccctggtatttaagaaaataaaggtcaactgtgggtcat

SEQ ID NO: 814435 - DNA, 600 bp, Homo sapiens
agtttggcagacttaattgtcatttatgtctcggttcaaacatcaactttcagaaaggctgtacctgatttctgtatgtaaaagatcaactcctcctcyagcccctctctattcattcccttgttgtggtcttagtgttttacaagcattagcaatatctaaacttattttttctaacatatcagtatctgaacttacagcttttatcttttgtgtttgtttgttttagttcactgtttttctctcctctattaaaatgtaagctccgtgaaggtaaggactatttctcttctgtttattaaaatgtttctggccagatgtggtggtgcacgcctgtaatcccagctgctcagggggctgaggcaggagaatctcttgaacccaggaggtagaggcttcagtgagccgagatcaccccactgcactccagcctgggtgacagagcaagactccgtcttaaaaataataccaataataaaaaaagtctccgagtcctagaacagtgtgagcacctagtacacgagctctcaaaaatatttactgaatgacgaaattagtgaatggatgataaggccaatctcatctttctcaaatattaac

SEQ ID NO: 814436 - DNA, 635 bp, Homo sapiens
tctcaccccttcttatacagccgcactgattttctgtataaaggcggtagcaaccacagttctcactcgttgactgtcaacaatcaagccagagcttttgckagcgggaatatcagaggaatgaaagtgaatgtggaaatgatgccctgttctcgtttttataatgacaccgcctgctcttagatcctcaaccactactcattcctgtctgcttttcctgagaaataggtcctaagggcagatttataacaatactagattgtcttctctttcttttctatcacagacttaagagctatgttgttctgaagtaacatgctaaatatcaaactatataaaataaaagagagtcacaaaaatagaactcaggagactgggaaagtcacaaattatgcacaaagccccctttttaatatgccagatgataagaacaaattaaattacaatctgccttggaaaaatgacagctaatttattcatttattcattcattcaatgtgtttttattaagggtctcttattgggtagtcattgggttaagaggtagagttggaactgtcccaacgagtcccagccctcagggagttgatagtctataaaagaatttgagaataaatagagaaattacaatggca

SEQ ID NO: 814437 - DNA, 584 bp, Homo sapiens
catcctctagaaggccctagtgtgtgttgttcccctcaatgtgaccatgtgttctcattatttagctaccacttataaatgagaasatgtagcatttgattttctgttcttgcattagtttgctaaggataatggcctccagctccatccatgtccctgcaaaggatgtaacgtttttcttttttatagctgcatagtattccagagtatatatgtaccacttttttaaaaaatttagggccaggcgcggtggctcaagcctgtaatcccagcactttgggaggccgagatgggcagatcacgaggtcaggagatcgagaccatcctggctaacacggtgaaaccccgtctctactaaaaatacaaaaaaattagttgggcatagtggcgggcgcctgtagtcctagctactcaggaggctgaggcaggagaatggcatgaacctgggaggcggagcttgcagtgagccgagatcacgccactgcactccagcctgagcaacagagcgagactccatctcaaaaaaaaaaaaaatttagtctatcactgatgggcatttaggttgatttcatgtctttgctatt

SEQ ID NO: 814438 - DNA, 563 bp, Homo sapiens
gggtaaccctgggctccatctggatcctggaactccctttgctttccctttcctccctcccttccgtctgtcttgctcygagcgccactctgattgcagtggtgcaatcatagctactgtaacctctaactcctgggctcaagtgatcctgcggcctcagcctccggagtagccgagactacaggcgcgtgccaccacgcccagctaattaaaatttttttcgtagagacagggtctctgtgctatgttgcccaggcttgtcttgaattcctggcctcaagtgatcttcccgccttggcctcccaaagtgctgggattacaggtgtgacccacctcgcccggcatgacttccttttctatttccagcccaggcctcccaagttcaagacccttgtatcaggccccctaatgaggcccaggtctgcccagtcagtgtattccctgtccctgaccacagtgatagtgacacaaacagggccaatgaggacccttgggaggagaagctcctttttccccaggattgcccgtgagaaggaggctgggagcctgcagcctcggcaatg

SEQ ID NO: 814439 - DNA, 581 bp, Homo sapiens
ccaaacagtgacattcaaaacaccgatgtctgcaaagcctccatgtccccctcaacytgattaagacatatgttttcaatagattgtatgtatatgtttattactcatataccaaaatttgtaatatgtttacattgccttgatcaaatgtatacaaataatggttacaatgatattcaatccagaggaaaattattagcactcagatcctaatggtcccggaggtaaaaaggaaactagaatttcaacttatatacatttttttcttgcatagaattaggataacaatgtgattataaaagacttactagcacaaaattatattagaacaaataaatttgatttcaaagaggaaaaaggaaaaatgtaaaattttatgactcataaagaagagtttgttcttgtattttttaaaatagctgatggtgagtatcaaattactatggtatttagattccattggaaacatttaaaagagtaatgtaacagttttatttataaaatgtcaatatttacaatacagtgggaattgcatcgttcatattatttaaatttatgttaattttagatgtcaaccaaaa

SEQ ID NO: 814440 - DNA, 535 bp, Homo sapiens
ctcattcttcaagttgtgtcttaagtcttaccttctcagaggccttttctgacccctccacctaaagtaagctaccccattatttattatctcctacaatgtagtgagttgaatggtgctgccaaaagatatctctacttgctggaacctatgaatgtgaccttattggagagaaagggtctttgtagattcaattcaattaaggatcttgagataagatcatcctggattatttgagtgggctttaaatgcaatgacacatgttcttacaagagacaaacagaagagaaacacctggggagaggagaaggctgtgtggcattggaggcagaggatagagtggtgcagccataagcctgggagtgcctgcagccacctggagctttggagggagcatggcgctactgacacctatattttagatttctggcctcyggaacagtgagaggatacatttctgttgtgttaagccacccaatttgtggtaatgtgtgagaacagcaacagcaaattaacacacacagcactttgtttt

SEQ ID NO: 814441 - DNA, 679 bp, Homo sapiens
ctctgcctggttgaagattctctctttctgccaagagaaacccaggtgggtgagtggaaatcgcaagagagatacagcagttcattctgaggagccactttgtgattgcaggcccaaaactctcctcccctaccsaaagactcagatatagtgggcagaaacaacaaggaggatccagctatagcaagcctcctgatctgggaagcctgggcagtaaacaagttaaaaaagaaaggaagaaagaaagaaaagaaaagaaaggcaactaacaacaaccaaaaaatggccaggtgtggtggctcacgcctgtcatcccagcattttgggaggctgaggtaggtggatcacctgaggttgagagttcaagaccagactgaccaacatggataaactccgtctctactaaaaatacaaaactagctgggcatggtggttggcaccgtaatcccagctactcaggaggctgaggcaggagaatcgcttgaacccgggagatggaggttgtggttagccaatatcgcaccattgcactccagcctgggcaacaagagcaaaactacttctcaaaaaaaaaaaaaaaaaggcaacaactataaaaagcaataaaattatgaaatgcgtgaagaaaatgattagacattttaccgaagaggacacacaaatggcaaataagtacatc

SEQ ID NO: 814442 - DNA, 620 bp, Homo sapiens
aacactctgcaggatattatccaggagaatttccccaatctagcaaggcaagccaacatttagattcaggaaatacagagaacgcaacaaagatactcctcgagaagagcaactaactccaagacacataattgtcagattcaccaaagttgaaatgaaggaacaaatgttaagggcagcccgagagaaagggcgggttacccacaaagggaagcccatcagactaatagctgatctcttggcagaagctctacaagccagaagagagtgggggccaatattcaacattcttaaagaaaagaattttcaacccagaatttcatatccagccaaactaagcttcataagtgaaggagaaataaaatactttacagacacgcaaacgctgagagattttgtcaccaccaggcctgccctaaaacactccggaaggaaacactaaacatggaaaggaacaaacagtaccggccactgcaaaaacatgccaaattgtaaaaaccatcaaggctaggaagaaactgcatcaactaaygagcaaaatcaccagctaacatcataatgacaggaccaaatacacacataacaatattaaccttaaatggaaatgggctaaatgctcc

SEQ ID NO: 814443 - DNA, 613 bp, Homo sapiens
gtcctggcattagatagcggtgatgattgcacaattttgttaacagaccagaaactactgaaatttatattttaaaaacatgaattttgactctctctctctctctgagggtacaaaaagccatgaattttatgctttgtaaattatttcccattaataataataataataataagacccattcaggatcatgcattatcatgttcttcagtcttcttcaaggcataacattgaaacagtgctttcttggttttggaagttatagaccagtgattttgtagaatgtttctgaatttgagtttgtctgatatctcataatgattatattcaggttgtgcatttttgttagagaaatcgaaacgttattctgtgttctgcatattgtatcttttcagccagtatatatgatgttgatttgcctatcattaatgatgtcaactttgatcacttgagtaagggcagtgtctgaatgatttttctactataaagttactcttctttcataattaataaactttatgacgagattctttgagattatgtaaatatctcattttatgttgcaaamccatactattgagctcaataggccatgttttaatgggataaacta

SEQ ID NO: 814444 - DNA, 559 bp, Homo sapiens
ttttacacatgtggaaggtagatctcagagaggatcagggatctgtcctaagcaacatagtagtaggtggcarattttgttgttgttgttgttgttggcaactgtagtaatacagcaagggaagaaacatgggaagataaattatgtatgtatgaactccatcctccagtgatgcttatttctgctattcttagccccttgatccttagtcaataacagacaaagtagaatttaggccaaaagtcatcaaattaagacaaatatgaacactttacaatgctaaagcctccaattacaataaatacagccaattttatgatgcagaactatcaaggagaagtgttcagaaacaaaataataatagaaaactttaacacatcactcttagtattagacattcgcttgtcaaaggggataaaatgtcgctaagtatataaaagtttaaataacataacctatcaccaacaatgttgatggctgttgtgagaccctggttcttgtcttcatagtttaaatgaattgaaacaagagacacacagcaaatgaggtgcagcatagg

SEQ ID NO: 814445 - DNA, 559 bp, Homo sapiens
tcagtctcaaggggcatacttagctagtgatcatcaactgcattgccatttctaaaggaagggcaacatttgcgcttctcactatgccaaacattaggaaataacttagttaccaggaatgaagatttcaagaaaatattctttatttatgccctttggctttgactgtgcaaaatggcattttcaaagagccattctatggctttacaataagaccactggcagttcctctggccctttgtgttcatgggcaggaaggcactctgtgacactaatgaacgtagcacctacagcctgaaaaggttggattacagagagcttacttacatttatttccctgtaaatcaataaaacagccagaatctgttcagatgagctgctgtggggataggaattatgatgttgcctagggaacagagtacagcartgtttaaaagcttgggttctggacccagtaaatgcccttgccaatcacaattccataatttcctatttgtgttgaacaacatagtctgtcttcactgaatctcatttttcacaagtgagaaaaaagaggact

SEQ ID NO: 814446 - DNA, 598 bp, Homo sapiens
aactcctactacgttcattactatattaggtgttagatataccctagtaaatgttataaacactrtcttcaaggaagtttccaagctggtgacattaaaaggtctgtattcataaggttgttttgggatttaaataagattatgatgtaaagcatttagtaagaacctggtatcagatattcttcaatgaatgttagtaaactcaggaggcatgcgagaactatcttaaaaataccaaaagtgttctcaactagactttttctctgtggccccaagagctacatttaggacacatgagggggtaaataatacatggtcaatttaacttgatgaccttttggtagtaaaattcctcattaattactgcctccagaaatgatgagctcctgctcactccagggatccatgaaggtacatgaatatctgttaagaatcccatggagacaattcctgcattgagtgtgaggattgtagccatcagtattttgtactttttaacagtaatactaatacttgttgaatgctaattatgtaccataaatattctaagcactttcattcatgaagttgtttaatgcttacacaaattctatgaagt

SEQ ID NO: 814447 - DNA, 541 bp, Homo sapiens
caagaaggaactgtgcgagggcactctgatgggtggtcagagcagggtggagagagggacagcatttctggagcaacttctactgtcagcacckaagaacagcacctaatttactaacacaaccaccctctgatatacaaatagaaataaactcccctttttccagacagggagagctcaataaggtaaaaccaccagcccgaggtcgcactgccagtaattaatgggttcagaacttaataatgataatgataatgaccatagcaacgtttattcggtgctcataatgagccagacaccactctgaatgcctaatataaattatctaatttaattctcaccaagaaaaaaaatcctatttcatttgatgtcccactttatccacaaggaaaccgactcagaagtgatggagacaggtttcaggtcagctggtccaatcccaaagcccattctacacgcgcccctactctggctacctcccactccaacagaggcgttttgtctccgacacctcccccctgctgttcacacaaagggagga

SEQ ID NO: 814448 - DNA, 576 bp, Homo sapiens
ctctggacaaaaacagtctataacttcaattctttaaacttttttgagattgactttatggcccaggaaatggtcacttttggtaaatattctatgtgcacttgaaaaaatttatagtaytttatgattgctgagtacagagctccatacgtctcaatgagacaagtttgttaattatgttgctcagatcttctatacccctattgatttttttgtctgtttatcagctgctgaaagaggtatttttaaattactccaattatgactgtgaatttattatttttccttttaattctatcagtctttgctttatttgtattttgaagctacattattagtacatattaatttagaattgttttatcttcctagcagatgggcccttttacataagaattctctatctctagcaaagttacttgccttaacatctactttagctgatgtaaacatagctgtgccagtgtttcttgatttgtgtttgcatggtatatccttttccatcattttacttttattttctgtgcccttatgcttacaagcagcatttaatcagggtttggtttatatctgatg

SEQ ID NO: 814449 - DNA, 632 bp, Homo sapiens
ctctcaagagctccaccactactaacatggtataaaccagcatcatctcttctgtagacaactgcaatagctaactagctgtccagcccttgcctccctgcagtgttttcaataggtatcrggcaaagttattcctttaaaacataaatcaaatcatattagtcttctcagaaccttcattcagaatattaggcaaagtctttaaaattgtctacaaaaccctttataacatggcctcccattagcttcctgacttcctcttctacagctgaggtagctctatttcaacaacactaaacgctttgctatgttttctctctggaatatgttctcctcagatatacctacagaatcaatacccttaggtcttgatgtaaatgtcaccttctgagagagttattctctgtatatgtcacttaaaattgtatcccctcccctccccatctcagaatttactgtaccatttttttctgccttatttcctccttggcattattttttcatttattcatattatttattgtatctgcttttccaatatactatgaacttcatgtagtgagcgctatctgttttgtttatggctattaacctagcatacgtaaataatgcctggaggccgggcgcggtgg

SEQ ID NO: 814450 - DNA, 557 bp, Homo sapiens
atggataccacctccattctcagggatcctattatgcctcctgatttatttttctcctagcatttatcattatttaacgtaccatatgttttgctaagctacttattaatttgtctgttttcctacactaaaacgtaattttcagggcaggaatttcatctattttgtttacttaaaaataaccccagcatctcaaacagggtctgacatctaagagatgctcaataaatattcattacatgaactatatacaccgactatatacaagatacagaccaccctcttttgcataatgattactagaaaatttatttcagcttcctatgtggtgtatcatggcttgttgagatgttaaatggaacaatagtagttttccagttgatttattttttgtttatgaaattttaaaatgctcctttaacatgataaattgcctcttgcagacatccatcatcattaatatgttgagtgtgtgtgtgtgtgtgygtgtgtgtgagagagaggctcatgtcctgattcataaaaatctgtttctgtgtttttaacaaaagctatta

SEQ ID NO: 814451 - DNA, 513 bp, Homo sapiens
tgaaaaacaaatttggctgtcatatctgtgacatctaaatttgcttataagtttttttggcttttaaacagaaggaatctcaaaagaatgataaagatttgaagatattagagaaagaggtaagcagtgctttaaacttagtgaaaagtacacatgatagaaagagagttacacagatttaagagataaggattctgttgcagtgtgaggagtcctgcagtgaggcaaacatgccatccagaacagtgcctacaggaaaacagttcttacagtatttcacagatctatccgggctatgttaatgtggtatgctggcaacgccgagattaaagatagcccacttaatgaaaaactgataactgaaaaatcattatgtcagttgattacaattatatatgtggatcaaatatttatatctatccatcgttcacagtcttcctgtatgctaacttatgttaacacaacatagctagaggatttcktagtgagcatgcaatcctagctggttagact

SEQ ID NO: 814452 - DNA, 560 bp, Homo sapiens
cagcatttgcttggcttctggtgaggactcaggaagcttacaatcatggcggaaggttaacrgggagcaggcatgtcacacggcaagagagagaaagcaagagagattccaagctcttttaaacaaccagctctcacatgaactcagagtgagaactcaattattaccatggggagggcaccaagccgttcatgagggatccacccacttgagccaaacacctcccaccaggcctacctccaacatcggaggtcacatttcaagagtaatttggagcagatgaagcatccaaactatatcattttgaccctgggtctccaaatctcatgttcttttcacattgcaaaattcattaatctcttcccaatagtcaccaaaagtcacaacttattccagcatcactcaaaaatccaaagtctgaaagcaagttccttctacctattaacttgtaaaattaaaacaagttatttactcccaagatacaatggcagtacagacattgggtaaacatttccattccaaaagggataaatcagctaaaagataggggcaataggccc

SEQ ID NO: 814453 - DNA, 618 bp, Homo sapiens
taccttcccattctcaatctccctcctcacaaaaataaagtaataaccctaaagcaytgacaatataatatagattttattcaaggttttgatgccatcaagaagatagctacatcttagcctttgcagaaaaactgaagccaaatccctcattggacatctcagctctttcaagatttccttctggcccttgtctccagttttctatttctccttctcctcacagatcttatttcctggctcttccagatgtgctggccccagctcccttctccttcctagacaaataaatgcccctttccttctgtggaataattctcagagctccattccagactgagacctgccattgtctctaaccttgcgagagccctccgccttgcccccatttgttctcctcatctgcagcatcaaagtggtcagataagatgacttccgggttccatcatgcttggaagtgctgtcctatctctgctgtttcagtctcctactcattagggagcctttccaatgtccttctttgtgttggagggctggtgtggacacactggcaagggatgaggtctgcttaatagatgtgattatgtgagtaaggagagtgcactaataagtactcat

SEQ ID NO: 814454 - DNA, 626 bp, Homo sapiens
gacagatttttttttgtaaaaaagaaaagcattgcaaatttaataaacattttctatgacatgagagccttcagaaatgaacaaccaaagaaatggggaaaaccgtatttttatgtgtaggtttgatgaagagtaggacaatcatgtagaagtatgactggacaaaggggggtgtgagctaatggtaatgaactgggagaaacttagcaagacctgttttttctgattcttcttggcatctctttgtcttcattcctttcctctgggtatagagtaggacgaaacctattacgtgagtgtctctgaggaaagaacggtgggagaagatcagagggtgacttttctaggttttataatcagcttcaggggagaatgacgggagcaagtcagagagtccttcttgcttctgctgttttctcaaatgtcaaggagccatattttggggtagcatgtcctgaagcccgacagtcacatttacatagccacaaatatacatatatatttttgtattgtatgttttatatgtatatagtatacatatatatttgttgtattatatgatatrtgtgtatatatgtgtatacacatgtacattagataaatatatatacatacatggatcctta

SEQ ID NO: 814455 - DNA, 437 bp, Homo sapiens
acaaagcaacctgcagtgagaagccttggaacagtatttttctgtagcggatttgaagttggcattaagaagaaggtrccaggtggcagatgaggtgctagacatcaccactcccatcttcctggaaatattcagggcacagtgggccttccagggctacacaacaagtctcatggcccactggctttcctatctcttctcctggtgtttactacatttggtgggttcttcagcacctgattttcctattgatcacaggtaataaaatcacaatgtctattaaagggccctctgttctggttaacaggagtctccagcccatttttaaattcagcaaggtccccatgtttcccctgccctgtagccaggctggtggtggcccaggatatagagatgaatgggattagaggtggcctcatcctccgtgggcgcctcct

SEQ ID NO: 814456 - DNA, 502 bp, Homo sapiens
ctaccatttattgagttcttacactgttcyaggcagcagcgaatcttatgagactgatatactgttatttccattttaaagacgagagaaacaggctttagagaagtaaggtatttgcctaaaatcacatagccgagaagtgacagtgttcatcttcaaacccaggtttatctgactcaagagcccacactgttaaccactatgctttctcactgccctgtgctatgtgtaaggccctgaatctgccagcaatttgcccagcattctggaggatgccccaagggaggcatgcccaactcacagattcaggctaaatctctccagcctcaagggcctctctgggtcctccccgctcaagtctacctgcgtcttttatgcattcatagagaagggcattgctccagcttggagtaccacccatagtcctcttcatttttcatgacagaaaaaagttggcaggaccctccttcccttcaccaactcctcctgatacgcaatgttc

SEQ ID NO: 814457 - DNA, 599 bp, Homo sapiens
tgggacctccttcgatatggctcctgtgtcattttcacatactccatcattttttagtacttccttagtttctggcaccacaaaacgttcaggctcatcttatatatttcctggaattgattatttctctaaagaacactttacttatttgctcaatcctaatacatacataaagtagtctcagagttgctaacccatgcctctgtctgtggaaacaaatttaccaactagagtatatatttttgtacagttctttatgtctttagctttatattgtacggtcaaaatactgttttccaaacttagttggttcttccccaactctttaagtatggttatgatattcatttgtagtacagttagatccacttgttaccctttgcattctaactgggctcctcccatatcctgtagattttaattatttggacagggtagggggcactttgtggttcattccctggttctaagagtcagagatayacaagaagtttatctagtccatgtcaccccacaaccactaccccattccacttcttctttccatctcattctcaaactctgaataaccaaatctcactgcacctatttttgtaaac

SEQ ID NO: 814458 - DNA, 612 bp, Homo sapiens
aggatcccgggtatctccctccttacaaccaccgccacctcctagtgccttagaagccactgacagcccccagggcaggtgagccctgcatctggaataaggtaagacacccccygcccccaaacaggtagccactctccaaactgggaagttggtctggggacaggtgctggcagaaggactccagctgtcacctgtggggcaggggaagctcagccctctctgcagagaaagcttgtcatacaccaggacaatggagtgtgtttgtggggtgggcatggtggtatgaagccagcagccggcagccagcagcaccgtacgtgggtcccagctcttccacttaaccaaggtcagggacattgagccaaacattttgcctcaccgagtctcaggttccttatctgtcaaatgggaatatgaacctcaggctgacccaccccacaggtgtgttacccagagataacgaaggtaaatgtatccacataagcattaaaaagctataggaatgtatttactacaactgcagctgctgttaactacaaggcaaatacaagtcttcactggtacgtgtcagacacgtgcagagaactttacgcctggatctcatctaac

SEQ ID NO: 814459 - DNA, 505 bp, Homo sapiens
tgaaaagtccattttaatcacttaagatttaatcacgtgatctcattttcatcacagtgactctagaagatgcaatgatggcaaggggcttgggttctggtgccacagcagaactggggcaaaaccccccgcaacctgcaccttgggcctcccgggatcaatggctaggcctcaccacagcacagggtcctaaagggtcttggggtcacttgctgagatgatttttttttttaactttttgttgtcaacttatttacttctctgccaatattcaaataggtaagcattcataaaacagcaaaaaaaaaaaaaaaaaaaaaaaaaaaaaattcctctagaacggccaaagaatctgttctactttactttttaraaacctggaaaccaggagctctggcatttgtggaatagcagcattgaaaatatctacgataggctgggctcagtggctcatgcctgtaatcccagcactttgggagaccgaggtgggcggatcacctgaggt

SEQ ID NO: 814460 - DNA, 658 bp, Homo sapiens
aagagcttcctgtccaccaaagtgtccagcatgtgactcaccaccccccaccattcatagatgaygggacaagggctgaccatctggtgaaagctggtccaatcagatactctctcctgagcaacaaagctgaagattctacttcaacctgggatgtctctttatactagcatgatggaaactcagaacccgaggatagagaatgaacaagtaggctttttctggattccatgagtaaggagtatgttggttttgcctgctcagtagccattcttccttttggtaaccacactccaattctgttaagggatcactcccttcttctcaggccatttgttttgtgtggggctggccccaaccccaacatccatgtgagcacatgacctcggcttggctaatgaaaatgctgcttttctctggcaacagtaattggttggggggtgggcacatgacccaagtcaggttcatgagactcaactcctggacttggctgaagctactgggaaacaaagctcatctttcttctgtggtgctaagctggtgggatttgagccaggagttgctggggaccctcttgccaccacccagcctgagaatgaaattgacccaaaagaaagcagagccatgaaaaggggctggatccctgagctgaagccat

SEQ ID NO: 814461 - DNA, 658 bp, Homo sapiens
aagagcttcctgtccaccaaagtgtccagcatgtgactcaccaccccccaccattcatagatgacgggacaagggctgaccatctggygaaagctggtccaatcagatactctctcctgagcaacaaagctgaagattctacttcaacctgggatgtctctttatactagcatgatggaaactcagaacccgaggatagagaatgaacaagtaggctttttctggattccatgagtaaggagtatgttggttttgcctgctcagtagccattcttccttttggtaaccacactccaattctgttaagggatcactcccttcttctcaggccatttgttttgtgtggggctggccccaaccccaacatccatgtgagcacatgacctcggcttggctaatgaaaatgctgcttttctctggcaacagtaattggttggggggtgggcacatgacccaagtcaggttcatgagactcaactcctggacttggctgaagctactgggaaacaaagctcatctttcttctgtggtgctaagctggtgggatttgagccaggagttgctggggaccctcttgccaccacccagcctgagaatgaaattgacccaaaagaaagcagagccatgaaaaggggctggatccctgagctgaagccat

SEQ ID NO: 814462 - DNA, 634 bp, Homo sapiens
cccgccccacccaaagctgtgtcagtcaatgcccttcctctgtgctcctgcagctgcctgtgaactctcctccccacacacatytacatcacagcacagttcagatacagctggttcacttgtctcaatccctgttgcaacgctgtctcagcactgctgcatcccgagcacctagaagaacagctgtcctagaggaagtactcagttaatatgtgttaaatgactgaatgggtaaatgctccccaactaccagccccagacctggataccctgtgtagtggacaattgtggtctctgtctttccagcctgaagagacttcccctacttctctttctgtccaagggtttgggtgaggctaatgccacgctctggaccatgtggctcaggtcattccagtctcccccagggtctaaatcattggttcaggtttggtcacatacttaagctaagccaatgaaagtcataaccaggattttagctggaaatatgggaaagaaaccctatctctctgctggtattgctacaattttaagatggaagtctggcactccagcctgggtgacagagcagagactctgtaaaaaaaaaaaaaaaaaaaaaaaaaggaaggctggtctgtgcattgtgataatc

SEQ ID NO: 814463 - DNA, 466 bp, Homo sapiens
attacatggtagaagtaggtgtggccagccccaagccctagtcatctcatgagcataaactaacagacgtggtcttaggggctcaccataaataacaaagacattcctatcactcaggaaattcaaaatgtttagaggttgcttcccaagagctgggacaaaggccagacctctttttggaggccacattccttactacacagtcctcctttctatgtacttcagtggcagttctgtcataaattaagtttccctatgtatatgtttgtctattctgggctctcctttctaatctgtccgtccgtttgtctatttaaaccatactgcctaaagactgctttctagtaatgtctgatatttggtaagtcacatgcctctactatggtcctgttctctagaaaggtcttagctgttcctaggttttggcttcatayacattttagaattggcttatcaatttctgtag

SEQ ID NO: 814464 - DNA, 614 bp, Homo sapiens
ccaggctggtctcgaattcctgacctcaagtgatctgcccgccttggcctcccaaagtgctgggattacaggtgtgagccaccgcgcccgrcccatattgcccattgtattacagcggaagaaactgaggtatggacaggtaacatgtccatggtcacttggctggtgaggggcagagaggagatttgaaaccaaatctgactcactagtgtggccgtaaccatggtaactatgtctctctaccatgtggtctcctctttattaaaggaagggcaagttctgggagttttgggagttttgggcttgagtggggaagggtagccaagtaaagcaggtgagagaaggtctgctttaaggactgctgtttgatttttattgttgttgttcagtgttcaatgggattgagttgactcttttttcccttcttgttccccaaagcatgagactgttccggtccttttcccttttaacttctcagctagagtttgttagggcgggtatgggcacctggcagagtctgagacctcagcttccagtaggcacacgttctgacccaatacacctaccctggtcccctaacctgcttctggtcccctaacctgcttctgggccca

SEQ ID NO: 814465 - DNA, 535 bp, Homo sapiens
gggacgcctgcggggtgacctgcctgtgggatgtgtgggtgtgtgttggagagaggggaagggaaaagggtgcatgaacctgccatgagattggatgttttgaatttggggccagagggaagtgaggtgcccgtmagtcatcacagggtgctgggaaggcttctacatcgcaaccacacacatatctcagggcagccccactttcaatccacccaaccagctccacagggaatgggttctgtgttctgcaagaagggagattgtaggacatgatgtgagagtttcaagatctactaggaaaaataaaacagtttcctccttttttcatttttaatttttctatttgtcttatttaccgatttattttattgagacagcgtctcactccgatggtccacactggagtgcagtggcgtgattttagctgactgcgggctccacctctgagtcgcaggtgatcctcccacctgagcctcctgagtaggtgagaccacaggcatgcaccaccatgacccactaatgtttagtattttta

SEQ ID NO: 814466 - DNA, 540 bp, Homo sapiens
ccctggagctgccccaggtaaggtcacaccacctaggtgggcgtgggtgagacaggtctgcctgagctccaggccctaggggacttgcaggaaatcaccgtcccaaggggcgtcaatacaggtgccaattctgggtgtccctgcggggtttcatttatgcctggggaagttactggcagctccccgccttgctctctccctgtttgagccaccctcagaggacaatgactgacccacggcttttctcccccagggcccacagcttccccagaggaagatgatcatcgcggtcttggaaccaggaatggtcctgcacctgcgcctggggcaggagttcctggggctggacccacagggagccctgcgactcagcctcctcaatgtgcagctcctggtggtccctgagcaactcttgatgtccctgaaggatctcttgtaccctgcccatgcccgctggctcctgctcacwagtacagagactgtctgggagattgacattgaaaatggatctgtgagagcccagagagcagagaatgtgtg

SEQ ID NO: 814467 - DNA, 504 bp, Homo sapiens
ctaaggctcatgggccatggaccctcaggcaccagacgggaatcagagacgctctattcagaatgaagcacacctgctttttcatggtgtctccctgcacacatgtctcggcatctcggaggagagagatgctgcgcatgctggagaggtggagaaatgctccgtcctctcacctgaacctttgctctgcctcagatgctcttgatttgtatcaaagagcaaccttgagattggggcacaaaatatttgcaaatctcatatacgtgcaaggactgctcatactcagaatacacagagttgtcaaaactccaatgggacaaacaaatgattctgttcaaaacccagccagagacttgagcagacatttcctcaaaggggatgtaaagaaccacttcaaaaagcgttcactgtccctcccctggggaaatgcacgtcaaatacaccttcaacmacaaccaagaagctctcccagaagccaccgtgacaatcactcaccatcccaag

SEQ ID NO: 814468 - DNA, 534 bp, Homo sapiens
atacgtgcaaggactgctcatactcagaatacacagagttgtcaaaactccaatgggacaaacaaatgattctgttcaaaacccagccagagacttgagcagacatttcctcaaaggggatgtaaagaaccacttcaaaaagcgttcactgtccctcccctggggaaatgcacgtcaaatacaccttcaaccacaaccaagaagctctcccagaagccaccgtgacaatcactcaccatcccaagggctgcggagcatgtggagaagctggaacactctgacagtgctgcttggaatccaactgggacaacccccagggagaaagagtttcattgattcataatcaatgcaataggcacttagcattggaaccatctttcccaccctgagatagttgttctaaaggaattagaactcacgtggacaaggctgaggrcagaggcttctagcacctgtcctcacaatcgccaaaagatggaagggccttcaatgtcgttccacagtgtctagagagaggaactgtgacccattctt

SEQ ID NO: 814469 - DNA, 603 bp, Homo sapiens
aagatggaagggccttcaatgtcgttccacagtgtctagagagaggaactgtgacccattctttcaatgggatgcagttcagcaatgaataggctgggattgttgttggtaaattcagttctaagaatgagtagtgaagaacttgtcgaaacacttgaaggtatgtttggactcttacgctatgtgagacttctcctgagattgtaactctcatgaaattgacatgcacatcaagcatgtgtgatcgacgttcagtttccaactgacgtttgctgtaaaacacatactagattttgcatctgagaatgaagtattgtagcatgtatcttagtcatcactgtgacatcaattgtattggtgttgattatatctgtattccttgggttaaataaaaatgttaaaatgagtttcgtctatttgcgtttcttttctttaatgtgtttgctcaaaaatctccatttctgggccgtgcatggtggctcatgcctgtaatccgascacttcgggaggctcaggcgggtgcatcacgagggcaggagatcgagaccgtcctggctaacacggtgaaagcccgtccctacaaaaaaaaaaaaataaatgcaa

SEQ ID NO: 814470 - DNA, 603 bp, Homo sapiens
aagatggaagggccttcaatgtcgttccacagtgtctagagagaggaactgtgacccattctttcaatgggatgcagttcagcaatgaataggctgggattgttgttggtaaattcagttctaagaatgagtagtgaagaacttgtcgaaacacttgaaggtatgtttggactcttacgctatgtgagacttctcctgagattgtaactctcatgaaattgacatgcacatcaagcatgtgtgatcgacgttcagtttccaactgacgtttgctgtaaaacacatactagattttgcatctgagaatgaagtattgtagcatgtatcttagtcatcactgtgacatcaattgtattggtgttgattatatctgtattccttgggttaaataaaaatgttaaaatgagtttcgtctatttgcgtttcttttctttaatgtgtttgctcaaaaatctccatttctgggccgtgcatggtggctcatgcctgtaatccgagcacttcsggaggctcaggcgggtgcatcacgagggcaggagatcgagaccgtcctggctaacacggtgaaagcccgtccctacaaaaaaaaaaaaataaatgcaa

SEQ ID NO: 814471 - DNA, 512 bp, Homo sapiens
tctaataatgattgctggcagtaaggatgctcacaagttacaagggtaatgataatggaatcaccacgatcttggcgatgcagcatctcaacctcctgccttcttcaattgttatcatagagatgaagagcacatgaaactcttacacattttctttcaagatttcgcctagaagtgatacatctagaatccttgattttagaatgactgtttttaaaatcgaggagatgagtacaacacggtcttctgtgtccccagagtgagatgagaaatgtataagtgactcaggcagttattcaattattcttctattcaccaatttttcttttacacacaggaaggaaggacagaaggaagaggggaaggggaagggaagaaggcagkaaggaaggaaagagggaagggagggaggaaggatggaaagagggagggagggagtgaggggggggaaggaggggggttaggatcgagggagggagaaagcaaaaaatgtctgaaagaacgaaagaaag

SEQ ID NO: 814472 - DNA, 634 bp, Homo sapiens
gctcttccggcttgtctcgaactcctgggttcaagcgagcctcctgcctctgcctcccaaagcactgggattacaggcatgagccaacactcccacaccaagatattcatacagtaaatatgaactcctatatcagattccatatctaataatgattgctggcagtaaggatgctcacaagttacaagggtaatgataatggaatcaccacgatcttggcgatgcagcatctcaacctcctgccttcttcaattgttatcatagagatgaagagcacatgaaactcttacacattttctttcaagatttcgcctagaagtgatacatctagaatccttgattttagaatgactgtttttaaaatcgaggagatgagtacaacacggtcttctgtgtccccagagtgagatgagaaatgtataagtgactcaggcagttattcaattattcttctattcaccaatttttcttttacacacaggaaggaaggacagaaggaagaggggaaggggaagggaagaaggcaggaaggaaggaaagagggaagggagggaggaaggatggaaagagggagggagggagtgaggggggggawggaggggggttaggatcgagggagggagaaagcaaaaaa

SEQ ID NO: 814473 - DNA, 645 bp, Homo sapiens
ttcgggtgatacaccagaagctactgtctggaagtctactgtctgcagacttcactatggaatatatgcatgtaacaaaaactgcatttgcactccttaaattcatttwaaaaaaaagaatggggccagatatggtggctcacgcctgtaatcccagcactttgggaggctgaggagggtggatcacctgaagtcaggagttcaagaccagcctgatcaacatggagacaccccatctctactaaaaatacaaaacaattagccaggcatggtggtgcctgcctgtaatcccagctactggggaggctgaggcaggataatcacttgaacccgggaggcagaggttgcagtgagccaagatcgtgccattgcactctagcctgggcaacgagagcgaaacttcatctcaaaaaaaaaaaaaggaaagataaaaagatttaaaaaaatatgtagcccaccccaacccaagagggacctcccagtcagaactctaagttcttggtggtgcgctgtgggtgggggagtttctcaccttagtgcgatgaccctgcagcctgtgtaccgtgcacccaggctgctcctctggaacaaaggactgagctgcagagggagaagggagcttgggttggtcagaggcaggcaggc

SEQ ID NO: 814474 - DNA, 645 bp, Homo sapiens
ttcgggtgatacaccagaagctactgtctggaagtctactgtctgcagacttcactatggaatatatgcatgtaacaaaaactgcatttgcactccttaaattcatttaaaaaaaaagaatggggccagatrtggtggctcacgcctgtaatcccagcactttgggaggctgaggagggtggatcacctgaagtcaggagttcaagaccagcctgatcaacatggagacaccccatctctactaaaaatacaaaacaattagccaggcatggtggtgcctgcctgtaatcccagctactggggaggctgaggcaggataatcacttgaacccgggaggcagaggttgcagtgagccaagatcgtgccattgcactctagcctgggcaacgagagcgaaacttcatctcaaaaaaaaaaaaaggaaagataaaaagatttaaaaaaatatgtagcccaccccaacccaagagggacctcccagtcagaactctaagttcttggtggtgcgctgtgggtgggggagtttctcaccttagtgcgatgaccctgcagcctgtgtaccgtgcacccaggctgctcctctggaacaaaggactgagctgcagagggagaagggagcttgggttggtcagaggcaggcaggc

SEQ ID NO: 814475 - DNA, 565 bp, Homo sapiens
gtcataggagaggagagcttatcctctggtaaggtagaagaaatcagggaaggtgtggtcattgcaggtgaggrcagaaaggaagagggggagctggttttatccacagagggaggacttgtccatgatacatcctgtggaattctgctcataagagtggtcacatccaattgtgaaaatccatgagtcatagctgagtggatccctgcctggggggttgtatttgatgggtccatggtaaaagtatcctgtgatgtagccccatgaggacctgtttgggtggtgatggttatttctgcagattctgtcattattggggaggtagacagcctggtgttggtttctgtggagatgtctagtgacactgtggactgatcagggccagggaaggatgtactgctagaggaagtgacatctgtcctggatacctcggtagtggcaccagtgagctctttgtaaggaacagtgcttgtctctgtggacgaggtgatctcctgggagatgctggtctccctcagtttaggagtcagggaggaagttgtctcagtctcagttcttgtagtct

SEQ ID NO: 814476 - DNA, 538 bp, Homo sapiens
ttgaaagaatgggtcacagttcctctctctagacactgtggaacgacattgaaggcccttccatcttttggcgattgtgaggacaggtgctagaagcctctgycctcagccttgtccacgtgagttctaattcctttagaacaactatctcagggtgggaaagatggttccaatgctaagtgcctattgcattgattatgaatcaatgaaactctttctccctgggggttgtcccagttggattccaagcagcactgtcagagtgttccagcttctccacatgctccgcagcccttgggatggtgagtgattgtcacggtggcttctgggagagcttcttggttgttgttgaaggtgtatttgacgtgcatttccccaggggagggacagtgaacgctttttgaagtggttctttacatcccctttgaggaaatgtctgctcaagtctctggctgggttttgaacagaatcatttgtttgtcccattggagttttgacaactctgtgtattctgagtatgagcagtccttgcacgtat

SEQ ID NO: 814477 - DNA, 549 bp, Homo sapiens
acacacattctctgctctctgggctctcacagatccattttcaatgtcaatctcccagacagtctctgtactwgtgagcaggagccagcgggcatgggcagggtacaagagatccttcagggacatcaagagttgctcagggaccaccaggagctgcacattgaggaggctgagtcgcaggctccctgtgggtccagccccaggaactcctgcccccaggcgcaggtgcaggaccattcctggttccaagaccgcgatgatcatcttcctctggggaagctgtgggccctgggggagaaaagccgtgggtcagtcattgtcctctgagggtggctcaaacagggagagagcaagcggggagctgccagtaacttccccaggcataaatgaaaccccgcagggacacccagaattggcacctgtattgacgccccttgggacggtgatttcctgcaagtcccctagggcctggagctcaggcagacctgtctcacccacgcccacctaggtggtgtgaccttacctggggcagctccaggggcagctgtg

SEQ ID NO: 814478 - DNA, 589 bp, Homo sapiens
tcaggcagacctgtctcacccacgcccacctaggtggtgtgaccttacctggggcagctccaggggcagctgtgcagggtggtggggagctggctgtaccggagctggttctgcacctgtggagagagcagagtgtgcaggtgaaagcccttgtcatgcaggatgcccttgagggttcaaggtgcctccgtgagaaagaccaaatacagaagaagccaggtacaggacacccagccacggagctgcaggaggaagctcccgacactctggacagcacagctgctcgcctcatgacgtgacgggacactggcttggtagcaggggactcaggatgaaaaagagaagatgcctcacctggatgaggacccagctcctccactttctggcgttttggggcatttgatggcgtgccgctggagctgtaggacagagagacacagtcagatttcgggcagttccctaacgtccaattccctgaatccccacaaattcactccacttccctgcytttcattcaaggccacagactcgtcatccacttcctgtgagacctgctcccaatctgtcctaactcccagctgttcttgtt

SEQ ID NO: 814479 - DNA, 585 bp, Homo sapiens
gtggtcgctcttggattcggtgcaggaatcactggggcttcttgggcgccgggaacctttcatggtgaaaatttccagggttctccaagtcagccactgccagtgtttgtctgtctcctgcaaagatttcttcttggctcccgaatcctttagttcctttgagagagtggtgtcagccccaaagctgctcccgaaggcttgggttgtgtagcgacggggctgtggccagcggcaggtggatgaggctctgacaactgagctcttgggggaatcttgtacactgtcagcagggggtggagccaggggatttgtcagcaggaactgatgtgattggctgttcctggtatgacaacgggaggggccctcatggaggattggggcgtaactcaatccatagatgaccgatcaacagaacctgcctaatcccatcaagagccaacctgtttcctgtcccctcccatcctctagctcttgcctaataatgatagacactttctgtcatacccaattcatccatcgctgaaatagtttttcatgtgtgccttttataytttcatgtaataaaaatatgttaattttcacggt

SEQ ID NO: 814480 - DNA, 585 bp, Homo sapiens
gtggtcgctcttggattcggtgcaggaatcactggggcttcttgggcgccgggaacctttcatggtgaaaatttccagggttctccaagtcagccactgccagtgtttgtctgtctcctgcaaagatttcttcttggctcccgaatcctttagttcctttgagagagtggtgtcagccccaaagctgctcccgaaggcttgggttgtgtagcgacggggctgtggccagcggcaggtggatgaggctctgacaactgagctcttgggggaatcttgtacactgtcagcagggggtggagccaggggatttgtcagcaggaactgatgtgattggctgttcctggtatgacaacgggaggggccctcatggaggattggggcgtaactcaatccatagatgaccgatcaacagaacctgcctaatcccatcaagagccaacctgtttcctgtcccctcccatcctctagctcttgcctaataatgatagacactttctgtcatacccaattcatccatcgctgaaatagtttttcatgtgtgccttttatattttcatgyaataaaaatatgttaattttcacggt

SEQ ID NO: 814481 - DNA, 597 bp, Homo sapiens
ctttgacctcctgggctcaagggatcctcccacctcagctctgcaagtagctgagactacaggcgcatgccaccatgcccggctaatttttaaatgttttttttaagatggggtctcactgtgttgcccaggctggtctcaaactggcctcaagtggtcctcctgcctcagcctcccaaagtgctgggattacaggtgtgcgccaccgtgcctggccaacaacagagctctgtttcctcacagctttggaggctggaagcccgagatcaagatgtcagcagggttggttctcctgaggcctctctccttggcttgcatttggccgtcttctccctgtgtcctcacatggtcgtccctctgtgtgtgtctgtgtcctgatctcctcttcttataaggacaccagtcacattggatgagggcctgcccactctagtgacctcattttacctctttaaagaccccatctccaaatacagccacattcagcamtgggggggttaggactcccacatacgagttttggggatacacaattcagtaataacacagagggcaataacacagccacacaacagcacacctcaggaagagccacgg

SEQ ID NO: 814482 - DNA, 589 bp, Homo sapiens
gtaaccaggaaggaattcctacagcccagaagtggttggaccaggaatgtgcccaaccccagagtccacccacttccaaggcctatcgagcaggtctcacatgcacggtcaggcactcatggaggctgcccaggacatgggagccaggggagactcctcgtgcagcctgggggaaaccagggcagactccctggaggaagcaacaatatacagggttccatctgtacaggtaaaaccttcctcacgcagcctgggggaaaccagggcagactccctggaggaagcaacaatatacagggttccatctgtacaggtaaaaccttcctgacgcagcctgggggaaaccagggcagactccctggaggaagcaacaatatacagggttccatctgtacaggtaaaaccttcctgacgcagcctgggggaaaccagggcagactccctggaggaagcaacaatatacagggttccatctgtacaggtaaaaccttcctcacgcagcctgggggaaaccagggcagactccctggaggaagcaacaatatacagggttcyatctgtacaggtaaaaccttcctccattttaagt

SEQ ID NO: 814483 - DNA, 629 bp, Homo sapiens
attattgcgggagacctcattcattttcccaactgcagccacaatcacctcaaaaatgccaccaccacagycctgttttctccttcaaaaggccaccaactccaggggaaagccgagctgcttccatgacataagaaggcccccacgcccgatctggccctgcagagccagccttggtcctgacaaacctggctgtggcatcgctttggcaagaccaaccctgccagctcccggcaagccctcctgtccacagcaccctctctgccctcctgctgatccacatcctgccctgcagggctcagcagggaagccagggccaggggaagtacctgctgtgcctccgcacccacccccaacctcactatgtggggtcatttccatctgccaggcgtgaccaccctggaggcctctcagtattgcttccctcccatctggctcaaaataagcggtcgttccaagacccaggcagccctccaaggcctgccactcagccctggccccaccacctcgctcactcacctgctcactgccacctcttgaccttgaccaccctgaacgaacagtacacccaggaatgcggcccctgccccgactcaatacggcatgcaggtcctctaacagctgcacgg

SEQ ID NO: 814484 - DNA, 572 bp, Homo sapiens
tgtggaggggatcctacgaggaggtatcatttgggggccctggcagccgtttaggggatcgccacgaatgaaagcgctttggcagccatcctagctgggggcgttcatgggggagctatctgcagtgatcctaccggggagcagtgattgggggtcccttggcaagggcccggcgggagctgcactgacttgctaggggttgggggacgttctggggaccacagcgggccagggcggggccccccgcccccgctgcacccgggcccccgggccacgcaccccgtcactcaccggcgccggggtctccgccgggaggaggccgaggaggcggaggaggcgccgccgctccggggagacccgagggcccgaccggaagtgccgccccctcccccctccccggcagccccgcaccgcccgcctgcccgcccgcccggaagcggaagtcgcgcccgttcccgaggcgccggcgtggagratcggaaagaggaggcggtggcggggaccaggaggggggaaatgcgcttgcgcactgactcggggacgcgagcagtgaaagcccgggccgattccgg

SEQ ID NO: 814485 - DNA, 623 bp, Homo sapiens
agaccttcagatttagatcccctgttaggaacctgctgggttaaggatttttgataggaaggctacaggttgtcagtggcctcagtgcttttgggctatgcccttgtttacactgacaacaaggtggtattggagtgttacagggttacagagaagaccttcaattatcaattgtaggttttatttttcatttttatttttttggagatggagtcttgccctgtcacccaggctggagtgcagtggcatgatctaggctcaccgcaacctctgcttcccgggttcaagcaattctcctgcctcagcctctggagtagctggaattacaggcgcccgccaccacacctggctaatttttgtatttttagtagagacggggtttcaccatgttggccaagttggtctcaaactcctgacctcatgatctgcccgccttggcctcccaaagtgctgggattacaggcatgaattatatattttaaatttacctggcttttaaaggaatagggtgcactgttttttctttactacttctatctctttctctctgactcctttgwctcttcctctctttccttctgtctttgactttgcctctttctctctgctggtctttccctgcc

SEQ ID NO: 814486 - DNA, 552 bp, Homo sapiens
tggtccataggtgggcctggagaaagcaccatgagttctcagtctgggccgtggactccacttgggactgacagcccrgcccccaggctttaggctgtccctgtcttgaaggtggggcttcactgggcacctgcacctttccacccagaagcgtgtctgccttctgccaccatcaacatgctggccagtgcatccaggctgtttgtgccaaggggcatctgcaggcctgcactgagctgccctcagcccctaccttgactactctcccatgctcatcagcgcccaaaatcttggaggggtctgaggcatcaggaggctggtgtgtcagtgtcacaccaagcatgtgcacacatggctgggttgcaacagtacccgggcttggcctcagctttgctctgaaattgaagtcggtgccaggagtggggaggagcgggagcaggcacttacgagcctgcggcggcagggatgcttcctgggcccctgagagtgcagagattcctggatccagagctgcggctgggcggctgcagctgcgcctgggagtgcagggct

SEQ ID NO: 814487 - DNA, 516 bp, Homo sapiens
gccaaggattgaacattcatctttgtcagactttgatgtagaatctcccaaaataatgatgagctaaagcgtctgggagacagcatcagcctgtccaggtgctctcaggtgcaggcatttccaccmcattcattcgttattgacacgttcatgcattttcagtctttttcctacccatgtatattttacataattgaaattatattgtgtgctgggccgggcacggtggctcacgcctgtaatcccagcactttgggaagccaaggcaggtggatcatctgaggtcaggagttcgagaccagcctggccaacatggtgaaaccctgtctctactaaaaatacaagaattagctgggtgtggtggcaggtgcctgtaatcccagctacttgggaggctgaggcaggagaattgcattaatccgggaggcagaggttgcagtgagctgaggttacaccactgcactctagtctgagcaacacagcaagactctgtctcaaatatgtgtatatatatat

SEQ ID NO: 814488 - DNA, 281 bp, Homo sapiens
aggtatcttgcagccatagctactaggccaacaaagaggaaacattttagtatcaaaatgagcaaaacaggagagtatttgtgccccagcaaacccacawtggggtgaaggccgtagggtctggttaagtgctgcatcgggggccaggctgagagtgggatgtggttgccccggctgctggtgcagtgatggctttcttgtttccaggatgtctttattcaagggaacaggattaaattaggagctggttttgcctgtcttctctcagtgcccattctctt

SEQ ID NO: 814489 - DNA, 544 bp, Homo sapiens
tacccctggggaaagctgggagagggtttggggatttctctgcacttggagggagagtccccatgaagagtgaactcamctgagtaaaagcaacagcagaacatgcgtgcagcttccctggggggttttaggtacctggaaggagacccttgagcatctgttcataagctcctgccacgggactcaggggcccagatagcagccaaaacgctaatcatgggacacatctctgctcgcttacctgccacgcagggagctggcacccgccctaggctaatgagtcccaccatatcttggggaatacctattcacagacatgcagtacagtaattatctggctgagaaatcgagaactttcctgagggaaaaaggaagaatttgctggccaggagcagtggctcacgtctgtaatcccagcactgtgggaggctgaggcaggaggatagcttgagcctgggaggccgagaccagtctgggcaacacagaaaggctgagtctctacaaaaagaaacaaattagccaggtgtggtggtgcatgcctgtg

SEQ ID NO: 814490 - DNA, 544 bp, Homo sapiens
tacccctggggaaagctgggagagggtttggggatttctctgcacttggagggagagtccccatgaagagtgaactcacctgagtaaaagcaacagcagaacatgcgtgcagcttccctggggggytttaggtacctggaaggagacccttgagcatctgttcataagctcctgccacgggactcaggggcccagatagcagccaaaacgctaatcatgggacacatctctgctcgcttacctgccacgcagggagctggcacccgccctaggctaatgagtcccaccatatcttggggaatacctattcacagacatgcagtacagtaattatctggctgagaaatcgagaactttcctgagggaaaaaggaagaatttgctggccaggagcagtggctcacgtctgtaatcccagcactgtgggaggctgaggcaggaggatagcttgagcctgggaggccgagaccagtctgggcaacacagaaaggctgagtctctacaaaaagaaacaaattagccaggtgtggtggtgcatgcctgtg

SEQ ID NO: 814491 - DNA, 640 bp, Homo sapiens
taaaaaatcagttttatgcaaagttcaggatacagatatcttccctgtctataatttgtaatagtaattttaaatcatctttctttagcaccctagagagcaggtatctcctgataattttttttttagaactttctgggtaataaatgtcatcttgtttaactaagcatttccttgatcctgttttgcacagaggtaatggagaatacagatggaacctcaacattacatgttttccatctttacaaatgactccagctttcccccaatagaaatcttgagtatccacaccttttcatgttcaagagccacaaagggaacatttttaatagtgcagattataaatttgtggtaggaattctgcatggcatataaaaagccacaatgtaaagaatgtagaaagggctctggtatatagaaaaaaaatacttttcagacacccttgactatcataagaatttttacaagtagttaaactctttagggaggggtaatacaatagagaagtaatgatttgcatggcattctaggaggcaaagtggacacagctcttgatctgagacatgttttgctttaaaaaaagaagccatttttttcctctttytcctccttttctgggaatcctttccagatgagattc

SEQ ID NO: 814492 - DNA, 619 bp, Homo sapiens
agtaaacatgttcccactgtggcgaatgagtaggtgaaagtgaacaggttcccattgcrgtgattgtgtggctaatagttaatagattctcactgtgatgagtaagtatgtgacagtgaacagcatgccactgtgataaatgagcacatgacagtgaccaggttcccactgtgatgaatgagtgtgtgaaagtcagcaggttcccattgtggtgaatgagtgggagagagtgaagaggtttgtactgtggtgaatgcgtggctgacagtgagctgattttcatcgtggtgagtgaattgatgacagtcaacaggtccacactgtgttgagtgagtagctgacaatggacaggttctcagtgtgatgaaagagtgagtgacagtgaaaacgttcccacagtgatgagtgagtgggtgacactgaacaggttcccactgtgatgaatgagtaggtgacagtgcacaggctcttactgtgatgagtgggtggatgaaagtgaagaagttcccattgtgatgagtgaggggtgacagtgaacaggttcccactgtgatgagtgagtgggtgacagtgtagagattcccactgtggttaattagtgggagaaagttaacaggtt

SEQ ID NO: 814493 - DNA, 489 bp, Homo sapiens
gtgagaaatgagtgggtgacagtgaacaggttcccactgtgatgagtgagttgctgactgtaagcaggttcttaatgtggtgactgagaggctgacagtgaacaggtttstactgtggcaaatgagtgggtgtcagtaaactggttcccaacttggtgaatgactggctgacagtgaacatgttcccactgtgaaaacgagtggctgaaggtgaacaggttcctcctgtaaagaataagtgggtaacagtgagcaggttaccactgtggtgaatgtgtggattatagtgaagaggtttccactttaaagacagagcgggtgacagtgaataggttcctcctgtaatgaatgagtgggtgacagtgaacaggcttccactgtgatgaatgcgtgggtgacagtgaacagggtcccactgtgttgaatgagtggctgacactgaactggttcccactgtggtgaatgagtggctcacagttaacaggatcc

SEQ ID NO: 814494 - DNA, 634 bp, Homo sapiens
acagtgaacagatttccactgtggtgagtgattgagtgacagtgaacaggtttctactgtggtaaatgagtgcatgagagtgatcaggtttctcctgtaatgaaagagtgggtgacagtgaacatgtacccattgtgatgaatgggtggctaacagtgaacatgttcacattgtgatgagtgagtgggtgacgggacaagtttctactccggtgaatgtgtgtgtgatagtgaacagtgataaattagtgcgtgacagtgagcaggttcccactgtggttaatggttgggtgagagtgaacaggtttccactgtgatgattgagtgggtgacagtaaacaggttcccactgtgatgactgagtgggtgacagtgaaccgcttcctaatgtggtgagtgacagggtgacagggaacaggtttccactatggtaaatgagtggctgacagtgaacaggtttccactgtggtgaatgagtgggtgagagttaacaggtttctactgtcgtgaaccagtggtggatggtgatcacgttcctcctgtaatgaatgagtgaatgacagtgaacagttacctactgtgatkaatcagtgtctgacagtgaacaggatcccacagtgataaataagtgggtg

SEQ ID NO: 814495 - DNA, 496 bp, Homo sapiens
ggagagtcaggagggacagaggtacttttctgaagtacagagctttctgaagtacaagtctttgacttggcaagtccccacagggtataacaaggcatgcattaaatgcaatagtttgaggtgaaattgacttggctacattaataactagatggtcagcaatagagcgaggaaagaagaaagagtaatagaatagatgagagagttaaatttttcttagctttagtttggtagggttttcctcttggactatggcccatgactctggagggggtggcgctttcttgactcagttgtgatgagtccatccttttttcgctgcatgaacagcagtctcagtggttagcagcacaaggtagggtccttcytaggctggctcaagtttcctttcttttcaccctttgatgagaacgtgatcttcaggctggtgctggtttactggaaattctaggggtggtacatgtgctaaaagacttttagttttgatggaaaggaa

SEQ ID NO: 814496 - DNA, 490 bp, Homo sapiens
tcagcagtgtgttttctttgtagcgatattttacctccttcgtttaatgtattcctaagtatgttattttttgtttttggctattgtaaatagaattctgttcttttattttttacctctgaactttttattggcctcctgctccccaaagggtaccctgcttctgctggcttaatgtctgagaactttggtgttgttggtctcagacaccattttgccatccaccatctggcgggttgtggtcttttggatggtttgcttggagttgctgctgtccaggacatcaccaagattgaagtcctcgccatcttccagcaggcggtggtaggtggcgatctcagcctcctgcttgactttgatgttcagcggggccttgtactcctgggcctggyactgcccctctgccagggtctgtaccagctctgactccaggtgcagcaggatcctgttgatctgctccatctgcagggcttaacatgcctccacctcc

SEQ ID NO: 814497 - DNA, 606 bp, Homo sapiens
atactttgttgaacctaagcttaaaaatggacaattgcccctgtatctttgggtcttcattccgcaggctcccatgtcacataaagcgatgatcaaatagctgtatatgccttttcccctactcatctgcctcttgtcagtgattttcagcaaaccttcagagggcaaaggggaagttttcctttggccgctacatcgtgttaggaaaactaggtaacctcatataaaaaacaaacaaaaaaaactaaagttggatctctgcctccttctttagctcaaaataaattctaaatgaaccaaaggttaaaatgtaaaatagggaccataaaagcactaaaataaaacatgggtggatgtctttgtagtcatgagagggagaggcttgacatgaatactagacacttctcataaacagaaggattgatcatctgaaccagagaaaatacagaatgctaaatgacgagttgatgggtgcagcacaccaacatggcacatgtatacatatgtaacaaacctgcacgttgtgcacatgtaccctaaaacttaaagtataataataawaaataaataaataaataaataaataaaaagaaaatacagaacacg

SEQ ID NO: 814498 - DNA, 423 bp, Homo sapiens
ccggactgtacagaggattagtttgtctgaccacccaactgacactcatggggcactgagccaagtcctgggaataactgatgaacaagaagacatggtccctgccctcatggggcttaaaatccagtgggaaagagagagaacaagggcaagtgtggtaagttctacagagaagttcagggtattgtggggcatgtgaaacaggcttctgactccctttagaatggagtccaaaattctcagccgtctttatgatctttctcaatcttgaagcacgcacctcctgccacccgagccccagccacactggccttcccagctcttccttcagtgtgccctggctgagatcatctgttccctaggtrgtagggtctcctcctcacggcccaactgaaatcctgttcacattctgaagtgctttca

SEQ ID NO: 814499 - DNA, 593 bp, Homo sapiens
ggtccagcaatcctacttctggatatttatccaaaataatcaaaattaggatctcgaagggatatttgcrctcctgtgttcattgcaggcttattcacaacagccaatatatggaaacaacctaaacattcatcagtggatgaatggataaagcaaatgtgttctacacatacaatgaaatagtattcagctttatgaagaaaggaaatcctggccacgtgcagaggctcacacctgtaatcccagcactttgggaggccgaggcaggcagatcacttgaggccaggagtttgacaccagcctggccaacatggtgaaaccccatctctactaaaaatacaaaaattagccgggcatggtggtgcgtgcctgtagtcctggctacttgggaggctgagactggagaattgcttgaacctaggaggcagaggttgcagtgagctgagatcatgccactgcactccagcctgggtaaaagagtgaaactctgtctcaaaaaacaaaagggggagtggggggaagaaaggaaaagaaagaaagaaatacctgacactgggtaatttataaagatagaggtttagttggctcacagt

SEQ ID NO: 814500 - DNA, 461 bp, Homo sapiens
attaaatgaccacttagggtccgaagaaaggtaaaaaccatgtcatactttgtaggtatccactgatggagccccagatggtttgagcagtagagtcattacgattatgtagccaggtagcctcttggtgaatctttacttttattttcttttggagacagggtctcactctgtcatccaggtaggagtgcagtggtgccatcatggcttactgcagcctcaaccttctgggctcaggcaatcctcccacctcagcctcctgagtagctgggaataaaggcacatgccaccaaggccacctaatttttttttctttttttgtaattttgtagagatggggtttagccatgttgcccaggctggtctcaaactcttaggctcaaacgayccacccaccttggcctcccaaagtgctgggattacaggcatgaaccattgtgcctggtcttggtaaatctttt

SEQ ID NO: 814501 - DNA, 536 bp, Homo sapiens
taaaaaaatggcagtgttagcatgatccagggtggaggttttggccctctgacatcaaaaggtgaagcagaggacacaaaaacccacatctttcggagactggccagaaccactccctgttctgtggtctcatcaggaaggaatgctggttgaccatttcaaagtggccaaagagaggggcagcagtcaggcagttgggttggatgacagcagcagtagtcttttgaaagggctggttgctgtttagcccttagggaagaacgcctacaggcagttagtgagcaagggttttgagaaggcatctgacctcccatcctgacgtggccaagaactcagttttcaaggtcactctggggtccccttggttcaggtggctggggagcttagaattttatttttagtctatagtagacttttgccgatacatttaaacttggggttaccatgaargaattttcaacgactttctaaatgagtctttttagatgtccttaggtctctaatcttcagtcattctgtaaagaccttgagttagt

SEQ ID NO: 814502 - DNA, 459 bp, Homo sapiens
ggacttcctggccaaagtggcagcgaaggccccgttggccctgcaggcaagaaggggtcccsggtaagtgacttgcccatcccattcctagggcctcctcagggtctggccctgccacatcccaggacatggctcctgcaggacattcctgccctgacatccccctttccattccccacaacagggagaacgtggcccccctggccccactggcaaagatgggatcccagggcccctggggcctctgggaccccctggagctgctgggccttctggcgaggaaggggacaaggtgaggggttcacagagaggaagggtccaggggaggatgggggtgaatggaagctgggtccttcatcccatttcctctgcagggggatgtgggtgcccccggacacaaggggagtaaaggcgataaaggagacgcggtgagtgaaggtccccagtggggcagggtgg

SEQ ID NO: 814503 - DNA, 807 bp, Homo sapiens
ctcccctatttccctccattctctaaacctttggggccgcttggggatccccttcatttttctcttcattagggcccttgtctctcttcctccctccctyccttccttcctccctccctccctccctccttccttccttctctctctctctctttttctttttcttttttgataaggtgttgctctgttctgcagtctggggtgcagtggtgcaatcatggctcactgcagccttgaactcctgagcttaagcgatcctcccacttcagcttcctgagtaactgggactacaggcacacactaggatgcttggctgatttttttatttaatttaatttttttttggcgggggggagacggagtctcactctgtcgttcaggctggagtgcagcctctgcctcctgagatcaagtgaatctcctgcctcagcctcctgagtagctgggactacaggtgcacaccaccacacccagctaatttttgtatttttactagagacggagtttcaccatgttggccattctggtctccaactcctgacctcaagtgatccatcagcctcagcctcccaaagtgctgggattacaggcatgaaccaccacatctggccaaagttttgttgttgttttttgtttgtttgtttgtttacttatttatttattttttttagacagagtcttgctcttgttgcccaggctggagtgcaatggcgcaatctcagctcattgcaacctctgcctcctgggctcaagcaattctcctgcttcagcaccccgagtagctgggactacaggtgtgtgccacca

SEQ ID NO: 814504 - DNA, 578 bp, Homo sapiens
ctgaagcacagtccatacatagcgccactgactccctatcaaatgtgaaacattttaagtgacgtttctccacatggaaaagcctggtggagagagaaagggacagggcatgttatcacacaaaccaagcatttttcaggagggtgtgcagtgtgggatgtgctacaaactgagggctcattgcggacgtgcaacagaaggagggatgcttctggtgaatttttaacagaacaagcagtttataaaagggcccgtaaaatattgaccctgttggggggggaagcctgttatatatgcatgataaaacagagaaaaataaaaatagtcaacgtttacctggcattttcgatggaacagactctggtttatttcactgaagcatcatcaaaaatccaatgaattacatttctttccttaggtagttaatacctgaggagttaaatagcattgcacgccagtgaggattccatccgtgtatgtgttggtgtggcytcacgtgtgtgtgtgcaacagatcagcgtgcactcagttcaacagaagaaatacgtcttctatggagctggatgcagtggctcacg

SEQ ID NO: 814505 - DNA, 578 bp, Homo sapiens
ctgaagcacagtccatacatagcgccactgactccctatcaaatgtgaaacattttaagtgacgtttctccacatggaaaagcctggtggagagagaaagggacagggcatgttatcacacaaaccaagcatttttcaggagggtgtgcagtgtgggatgtgctacaaactgagggctcattgcggacgtgcaacagaaggagggatgcttctggtgaatttttaacagaacaagcagtttataaaagggcccgtaaaatattgaccctgttggggggggaagcctgttatatatgcatgataaaacagagaaaaataaaaatagtcaacgtttacctggcattttcgatggaacagactctggtttatttcactgaagcatcatcaaaaatccaatgaattacatttctttccttaggtagttaatacctgaggagttaaatagcattgcacgccagtgaggattccatccgtgtatgtgttggtgtggcttcrcgtgtgtgtgtgcaacagatcagcgtgcactcagttcaacagaagaaatacgtcttctatggagctggatgcagtggctcacg

SEQ ID NO: 814506 - DNA, 490 bp, Homo sapiens
taattataaaccctgaacacatcactagaatcccaaatgaagttttatgatattgcttgaattcatgtacagaaaattcagctccatacagcaattagagctgaaaatatccaagccaaatcaatatatttcctcaaaatctagtaaatattcaaaaaatgactagcttctattacatctcaagaactaaaacacacttttgacatgtaagtacttgccacacattgtcaaaacgaaccttatcccatatgagctcagctccatcccccttttctgctaaatgaactctcaaagtctcgatgctctttgaaaaaagacgtgcatagctctttacatctagaacctgctggtctttcaggcctaactggggttcattctgttgatctgatgcattcgtttcttctcctaaagaaaaaaawatatatattagaaatttcactaattaacatcattcctctactgtgctctgtttaacaagttcaatccccga

SEQ ID NO: 814507 - DNA, 521 bp, Homo sapiens
tgtggtgaaactgaagggtaactcttgtggctgcttcccaatccagtcacctctcaacctcagcagcacacatcctcacctttgggaaagcaactgatccatggcaatgccttctctctgctgatagtccctcaraaggctgtgggcatgatccaggttgacaaagtccctgtaatcatcctcatctgcaacacagatgtagtagggcaggaagagcggcagcccaggaggcacaggatgggcagcacccaggacagcatcctgcaggcggaggtcttggagccgagcagtccagtctacgtctttggcactgctggcatcattcccaaaatccaaggtaaactgtggtgaaggcccctcctcagtatcacttccccagtcatcagcaccttcacaccagtcctcagctgcaaggctgtttccctgtttctggaaaaatactcagtgaatgaggtccgagcacatttgggaggtttattctaatccttcggctccagccacccaccgccgcgccttccaga

SEQ ID NO: 814508 - DNA, 588 bp, Homo sapiens
tttatctcaatagtatattataaatatctttstgggtccagcaaatatagacctagaaaccaatctttatggcttcacattccattttattcaggtaatgactttttttctgagttaagagagattaagacatttttgaaaaactaagttttcgaaagatttcttagcatgtttgtgcatttaggtccagaatacaaaaatatacatgagacgaaaagctgtgggatgattactccccgaagtccagcttaggtttaggaactcacagggtgcgattgcttcccctttcctcctcagacccgatactgagcagagtaagaattccaccaccctctgttcagtgggattttctagttaaccttctcatttgtctatcccctgccactgactggtggcctttcatctgtcctcccacctcaatgtgccccagggtttgtcttctcctttgccctaaaattgtatatgatttcctaaaactgagctctaggctgccaaagtttgctcgacttcacctgacctaacatgaaagcgactcccctgggtgcatgcgtgccttctgaaactcagtgacttccttattgttttttc

SEQ ID NO: 814509 - DNA, 609 bp, Homo sapiens
aaaagtggtttttcaacagcattctgtgttcatatgtgaattttttttaaacctgactttatactacatagaaacacttactcaaagtaggtcatagccccacttgtgcatggtacaataagactttgagagaaaaatgcacaggaagttattcttatgactttgggcttggaaacaattattttcttttgagacgtggtctcaccctgtcactcaggttacagtgcagtgacgtgatgacagctcactgcagcaaccttggacctttgggctcaagagatcctcctgcatcagcctgatgagtaagccgtgactacaggcatccaccaccatacctagataatttttttgttttgtttttagagacgggagtctcactatgttgcccaggctggtctccaactcctggcctcaaacaatcctcctgcctcagcctcccaaactgctgggatcacaggcatgagccaccaagcctggcaatgattccctaaacacacacaaaaagcagctgaacacgaaaagacacattcagttttgataaagaatctctcttaattcaaagatgatattaaraatgtggaaaaccaaaccacatagaagatatttgca

SEQ ID NO: 814510 - DNA, 532 bp, Homo sapiens
taagggaaatagattgtaacagtaacttttaactttcattttagatgctgcaactaaaaagaaaaacggactttcactggctgactgattgtctggaaaccgttttgggatttctttcctaagcttcttaattagaatctttacattatagagaaaatgattttgagagttgagtgtggtctgtggagtgtcctattagtaacgacttctgagtaggtttaactcacctcttttattgaaatgtgaaaaggtgtgacatttataatagaaaactctttgaaagtcgcaccgttcattttagaggaattttaaatgtcaccccaaattttacgattttaattaattttaattaatttccaaattttaaccaataggcataatattcaagatcttatctaaaaattattacatggcaatattttgtccttgttaattaaaaaataacactgaaaacacagtcgtcttcctttamggtaaaaacctgtccaatagtaacaatctcaatgatggcagaatgaaatcagaatctgat

SEQ ID NO: 814511 - DNA, 641 bp, Homo sapiens
caccttctgaaaactgtctgttataccctttgcccactttttaatgaggttatctttttcttgtaaatttaagttccttatagatgcgggtattagacgtttgtcagatgcattgtttgcaaaggttttctcccrttctgcaggttgactgtttgctctgatagtttcttttgctgtacagaagcacttctgtttaattacttcccatttgtcattttttgcttttgttgcaattgttcttggtatcttcatgatgaaatctttgcccattcctatgtccagaatggtattgcctagtttttgttttgttttgtttgtttttgtttttataacggaatcttgctctgttccccagtacagtggcatgatctcggctcactgcaacctccgcctcccaggttcaagtgcttctcctgcctcagcctcccaagtagttgagactacaggcacccgccaccacgcccagctaatttttgtgtttttagtagaggcagggtttcactatgttggccaggctggtcttgaactcctgaccttgtgatctgcccatctgagtctcccaaagtgctgggattacaggcatgagtcactgtgcccagcgcctccaagtttttaatagttttgcacttcattttgtctgt

SEQ ID NO: 814512 - DNA, 574 bp, Homo sapiens
gtcatgttgttttctttggggcttatgtttatatttctgttcaataaatattttgaaaattcagattcatttgccaatcttttctattttctgcaagattagtktactatgtgttatggaagttatgaacgaaataataatttgaatgtgacccaacacagtaactgaatttcaaatgataaggacctatgaatacggcaaaattatatatgttcatgtattcagtttaacccaataactgaacactgacattcatttcaagtgcacactgagtgtttgccacgaatatgtgtggtcttagagagaactcgttagctttaaaattgaaatacaatacaccctctcctatgacggcaacagagtcaaattggaaatcaataacaggaagaaatccataaattctccacatatatgcaaattaaataaccacttctaaataaaatgatcaaatatgaaattacaatggaaattacagctatcctgagttgaatgaaaagcacacatttacaaaatttctagatgcggttgaagctcagtgagaaactcataataggaagaaaatatcgtaatcaat

SEQ ID NO: 814513 - DNA, 574 bp, Homo sapiens
gtcatgttgttttctttggggcttatgtttatatttctgttcaataaatattttgaaaattcagattcatttgccaatcttttctattttctgcaagattagtttactrtgtgttatggaagttatgaacgaaataataatttgaatgtgacccaacacagtaactgaatttcaaatgataaggacctatgaatacggcaaaattatatatgttcatgtattcagtttaacccaataactgaacactgacattcatttcaagtgcacactgagtgtttgccacgaatatgtgtggtcttagagagaactcgttagctttaaaattgaaatacaatacaccctctcctatgacggcaacagagtcaaattggaaatcaataacaggaagaaatccataaattctccacatatatgcaaattaaataaccacttctaaataaaatgatcaaatatgaaattacaatggaaattacagctatcctgagttgaatgaaaagcacacatttacaaaatttctagatgcggttgaagctcagtgagaaactcataataggaagaaaatatcgtaatcaat

SEQ ID NO: 814514 - DNA, 638 bp, Homo sapiens
ctaattttctttttttaaaggacaggatccaagaaacaatttgcttggccgtacttttggcaactgttttggcactggatgccctggtcaaacatatgatcccatcatcatgtttattatacacaactgagccattacctaaatattgtccccataaggtaaaaaaaaagtctggaaatctcttgcctgactgataccgaaaatataaatcaaaacaacacattgccacgtatactgaggccgcaataccagcctctgcaaggccactccacattccctttggagtaacaggcattactgatagtaaccaagacacacatttcacttcttaaaatacagaacgctaggctcttgaaaaaggcattcaatagacgttttgtgtccctaacaggttccaaatagacattttaactgagggatgtaatgaagtcctcaaacaactccttttcaaattgcagtccaacaaataaacccctacataagtttatattttgccccaaatcttaaccaatcttaasaaatttttaattttgcccccatctctcagggattagaatccagattgagtgtatatgctttctttggactcattaagcagagattgtcccacaggccagccagctgatcatctgataacg

SEQ ID NO: 814515 - DNA, 553 bp, Homo sapiens
ttgggcaaaacctgaatataaatgtcccccatactgtggtaaccttgatgaataccaaaggacatcattggctaacaaatgctagattaaccaagtaccaaagcttgctatgtgaaaatccccacataaccactgaaatctgtaacaccctaagtcccgccaccctgcttccagtatcagagagcccagtcaagcgtaactgtgtagaggtgttggactcagtttattctagcagacctgacctttgagaccagccatgggcatcagtagactgggatttatacatggatgggagcagcttcatcaacccacaaggagaaagatgtgcaggatatgcggtggtaactttggatgctgtcattgaagccaaaccgttgccacagggtgtttcagcccagaaggctgagctcattctttaactcgggctctagaactcagtgaaggtaagactgtaaacatctacactgactctcgatatgcmtttctaaccctccaagtgcatggagtgtggagcattatataaggaaaagggcctgttaaactctgggggaaa

SEQ ID NO: 814516 - DNA, 511 bp, Homo sapiens
ggaaaaagacaatcccagtatttgttttacaggtcattatcaagatctgcaatcaggcaggggctaccatatctgggcctctgstgaaggtgaagcattcactctgagaggcagtgtggatagctctgggagatctgcttttcaacagtgacttgaaagaatcagagacaaggtcaagagtgaaggacagggtgctgtgagatccctgggagcagcactgacttgttcctgttcagcctttattgatcatcagctgcaagagggctggaggaggaaagatggaaaggaattgggactaaactatacaggagcatacaatggactaggactgaagccaaacagactgagacctatatggatacccatgatcaggtgcgggggcctgaattccaagtagaacagcctattaggaccactcattgatggagaggggtgagggtgggtcctgtcctatcacagattccaactcagatgactggagtgtgcaggaaggaaacagaaatgattgggg

SEQ ID NO: 814517 - DNA, 615 bp, Homo sapiens
tctggagagaagccgtatgaatgtaaggaatgtgggaaagcattctcttggctcacttgctttctacgacatgaaagaattcacatgagagagaaatcctatgaatgtcaacaatgtggtaaagccttcactcattcccgttttcttcaaggacatgaaaaaactcatactggagagaacccgtatgaatgtaaggaatgtgggaaagcatttgcttctctcagttccttgcatagacataaaaagactcactggaaaaaaactcacactggagagaacccatatgaatgtaaggaatgtgggaaagcatttgcttctctcagttccttgcatagacataaaaagactcactagcattctctctagaatgtatggaatgtgggaaagcatttattaattgtatttcatttcagatacttgtacgaaacacattggagatagaccctgtgaatgtaagcacttggtaaagccttaagtagtttcagtttctttccagtacagtcatcccttgatacctgctgggtattggttccagcactcygtgagccatgtccagtcccttttataaaatgacatgtttgtatgtaacttacccacatcctcttgtatagtctc

SEQ ID NO: 814518 - DNA, 420 bp, Homo sapiens
tccatgtcaaaaagaaaaaaaacgaagtagaaggggctattcctaattttatcacaagagctatggtaactgttaggaatgctgcttgggttagtatttttgtggttttcattgtccagagtacattatattgataataacagctatgattagaattgtagatgtggttgcttgtgaaaggaagtattggttcaatctaaatacacagataggtcctggccaagacatgcactcaggagagctttcaggagggattcaatcccaaactcctgctcccaaatgccaaggaactatccaatactgccaactcaagtcagcggaatgtagaacccagtgcccggcagggctctaccatgcaacacagagcagcacactcagagcaccagctccyccagccagcagcgctcagccccacatgcc

SEQ ID NO: 814519 - DNA, 562 bp, Homo sapiens
tttcccccagagtttaacaggcccttttccttatataatgctccacactccatgcacttggagggttagaaakgcatatcgagagtcagtgtagatgtttacagtcttaccttcactgagttctagagcccgagttaaagaatgagctcagccttctgggctgaaacaccctgtggcaacggtttggcttcaatgacagcatccaaagttaccaccgcatatcctgcacatctttctccttgtgggttgatgaagctgctcccatccatgtataaatcccagtctactgatgcccatggctggtctcaaaggtcaggtctgctagaataaactgagtccaacacctctacacagttacgcttgactgggctctctgatactggaagcagggtggcgggacttagggtgttacagatttcagtggttatgtggggattttcacatagcaagctttggtacttggttaatctagcatttgttagccaatgatgtcctttggtattcatcaaggttaccacagtatgggggacatttatattcaggttttgcccaagggttagtt

SEQ ID NO: 814520 - DNA, 630 bp, Homo sapiens
agatgatcagctggctggcctgtgggacaatctctgcttaatgagtccaaagaaagcatatacactcaatctggattctaatccctgagagatgggggcaaaattaaaaatttsttaagattggttaagatttggggcaaaatataaacttatgtaggggtttatttgttggactgcaatttgaaaaggagttgtttgaggacttcattacatccctcagttaaaatgtctatttggaacctgttagggacacaaaacgtctattgaatgcctttttcaagagcctagcgttctgtattttaagaagtgaaatgtgtgtcttggttactatcagtaatgcctgttactccaaagggaatgtggagtggccttgcagaggctggtattgcggcctcagtatacgtggcaatgtgttgttttgatttatattttcggtatcagtcaggcaagagatttccagactttttttttaccttatggggacaatatttaggtaatggctcagttgtgtataataaacatgatgatgggatcatatgtttgaccaggcatccagtgccaaaacagttgccaaaagtacggccaagcaaattgtttcttggatcctgtcctttaaaaaaagaaaattag

SEQ ID NO: 814521 - DNA, 571 bp, Homo sapiens
atatatatattttttaaaaagaggatccagcctctttttccggctggaaccatggagggtgtagaagagaagaagaaggaagttcccgctgtgccagaaacccctaagaaaaagcraaggaatttcacagagctgaagaccaagcgcctgagaaagaagtttgcccaaaagatgcttcgaaaggcaaggaggaagcttatctatgaaaaattgaagcactatcacaaggaatataggcagaggtacagaactgaaattcgaatggaaaagatgtcaagaaaagctggcaacttctatgaacctgcagaatccagactggcgtttgtcatcaggatcagaggtatcgatggtgtgagcccaaaggtccgaaatgtgttgcagcttctttgcctttgtcaaatcttcaatggaacctttgtgaaggccaattaacatgctgaggattgtagagccatacattgcatgcgggtacctaaatctgaagtcagtaaataaactaatctacaagcgtggttatggcaaaatcaataagaaacgaattgctttgacagataacgctttgcacgatctc

SEQ ID NO: 814522 - DNA, 558 bp, Homo sapiens
caattgcaagattcaacatcaatgtagacaattcagtgtgtttctrcacactgacaacaatctatctgaaaaaataatcaataaagcaatcccatttaaaatagaataaaaaatgctcaggaattaatttatccaaggaagtaaaagatccgtttacaaaaaaaaaattgatcaaagaaattgtagaagacacaaatgaatgaaaagatatcccatgttcatggattgaaggaattaatattgttaaaatgtccatgctacacaaagtgatccacagattctatgcaaatccctatcaaaatttcaggggtatttttcatagaaatagaaacaaaattctaaaatttaaccacaaaagactttgaataataaacacaattcagcaagaaaaacaaagctgaaggcatcagttctggatttcaaactatattacaaatctatagtaatcaagacagtatgttactggaatgacagcagacacacagaccaatggaacagaataaaaagtccagaagtaaactcacacatgtacagtcaatgaatttcagacaaaagtgc

SEQ ID NO: 814523 - DNA, 471 bp, Homo sapiens
tcctttacttattggttcctttcttttcaagtccataatttgaattaacctttagataacttctgaattygataataatttttttctcaataagaacatctcttctttggcatattttatatgcagaattatatattaactagaattcttatccttagtaacctcaaattttagtgaaaacctaggaagaaagaaatcctgagctacctatcagatattagcattttataatgagaactcttccataatttttagaaacatatttccccatatcataacccttccttaattagaaatgacccagacatctaataagcataattttaaatattattcttaaacataattttaagattttaagttacacaataagttcacctgcagcacttaacccatttacactttatttttagcagtttatatagattatttacacattattttcttgttaacccttttataacttgtgaa

SEQ ID NO: 814524 - DNA, 627 bp, Homo sapiens
aggttgttgaagtttccagctattattgtattggggtctatctctcactttagctctaatagtatttgcttgttatatttgggtgctccagtgttgggtgcatatatattaacaatggccatattctcttgctgaattgatccctttatcattgtataatgaccttctttgtctcttcttatagtttttgtcttgaaacttattttgtctaagtatagctactcctgctcttctttggtctccattggcatggaatatctttttccatcccttcattttcagtctgtgtgtatctttataagtgaagtgtgtttcttgtgggcaacagatcattgggtcttgtttctttttttaattcattcagtgaccctatatcttttgattggagactttagtccatttacatttaatgttattattcataagtaaagacttacttctggcattttagtttgctttctggtcttcctttccttctttcctatcttgtttttagtgaaggtgattttctctggtggtttaatttaatttattgctttttatatgttttgtatccattgtatgttttttgatttgaggttgccatgaggcttkcaaatactatcttataaccattattttaagctg

SEQ ID NO: 814525 - DNA, 622 bp, Homo sapiens
ttcatctgggtcctcacctgcatctttacctgcatgcttttctaggtattttcttgkgttcttgcccacattctcacctacattctcacctgcagatttacctatcttcttactgtaactgcccaatgggttcaccttgcccgctgcctagacagaaccgatttatcagacgggggatgcagtggagaaagagtaattcgtgcagaacaagctgtgcaggagaccagagttttattattattcaaatcagtctcctcgagcatttggggatcagcggttttaaagatagtttggtgggccagacgcagtggctcatgcctgtaatcccaacactttgggaggccgaggcaggtggatcacctgaggtcagcagttcgagaccagcctggccaacatgatgaaaccccgtctctactaaaaatacaaaaattagccaggcgtggtgatgcacacctgtagtcccagctacttgagaggctgaggcaggagaatcgcttgaacccgggaggtggaggttgcagtgagccgagattgcgccactgcactccagcctgggtgacagagcgagacttcatctcaaaataataataataataatagtttggcaggtagaggtttggga

SEQ ID NO: 814526 - DNA, 611 bp, Homo sapiens
gacggagtctcgctctgttgcccaggctggagtgcactggcgggatctcggctcactgcaagctctgcctcccaggttcacgccattctcctgcctcagccttccgagtagctgggactacaggcgcccgccaccacacccggctaattttttttgtatttttagtagagacggggtttcaccgtgttaaccaggatggtctcgatctcctgatctcctgatccacccgcctcggcctcccaaagtgctgggattacaggcttgagccactgcgcccggcctttttttttttttttttttttttgttgagacggagctttgctctttcacccaggttggagtgaagtggcatgatctcggctcactgcaacctccaccccctgggttcaagcaattctcctgcctcagcctcccaagtagctgggattataggagcccgccaccatgcccggctaattcttgtatttttagtagagacgaggttttgccatgttggccaggctggtctcraactcctgactgacctcaggtgatccacctgcctcggcctcccaaagtgctgggattacaggcatcagccaccgtgcccggcctacacatttccttaaaga

SEQ ID NO: 814527 - DNA, 541 bp, Homo sapiens
ggggaagggcattccagacagagtggagcatgtgcaaaggccctgagatggatacaaatttagggtgctggtggcagagcgaggaggctgacgtggttgggacagggcgagagaaaggaggtgatggtggagttatgggaccctgctagggtacaagaatagaatgggcacgccagaaagaatgtcttatgtttcctgtgagaagcaatgaggagccatggagggtctatgagcaggggagggatcagattgatttatgcctttaagaagtcccctgtgggctgggcaaggtggctcaggcctataatcccagcactctgggaggctgaggtaggaggatcgcttgagcttaggagtttgagaccagcctgggcaacatggtgaaaccccatctctacccaaaatacaaaagttagccggcgtgatgatgcatacttgtagtcctagctatgsgggaggttgaggtgggaggattgcctgaccccaggagtttgaggctgcagtgagctataatcacaccactccagcctgggcaacagag

SEQ ID NO: 814528 - DNA, 495 bp, Homo sapiens
gggccaggcccgaggctgaatcaactcagggaccctgacattgttctagtctgggtgagcaagtaggaggtcttgggtgactcacagaagtcccgggattggaggctcaaygataatgggtccaattaaactaactaactttctttctttttgagacagggtcttactctgtcgcccaggctggagtgcagtggcgccatctcagctcactgcaacctccgcctcccaggttcaagcgattctcctgtctcagcctcccaagtagctgggattacaggtgcccgccaccacacctggctaatttttgtatttttaatagagacagggtttcaccactttggccaggctggtctcaaactcctgacctcaagtgatctgcccgcctcggtcccccaaagtgctgggattacaggcgtgagccaccacttctagcctaaactaactttcaagattaggtaaactgaggcacagagaggggcagccttgcccaaggtc

SEQ ID NO: 814529 - DNA, 542 bp, Homo sapiens
gccctttccctcccccaatctccttgaccacaggtgaaaggggcgtttgtaggactaaggaggcctggccttcttgtgaatctgcctacctctgtgaggagtggttgcagggccagctaggagggcagctgggacagctgggtatgcaggagacagcgcctgtgcccacggtgtctgcaccaatcctctcaggcactgtcaactgtgagcattcctgaccatcagcccgcatgtcagagatggtgtgagagggaccgcatggccgtctccaggcatctctgtgttttcctgatggtcaggctgagtacatggctgtctttgtgctgcctgaatattgtttatttcagcaaatatttactgagcacctaccatgttccaggccctgggaagacagcaatgaatgagccaagtctctgccttgcagaggctgaggaactgagggaagttgtggtgtagagagacaaaaaaaaaaaaaaaaaaaaaaaatcaagacacattaaaaacaatgtaraatagtataatacgtaggggtgggtacgatg

SEQ ID NO: 814530 - DNA, 358 bp, Homo sapiens
tgaaactctgtccccatgaaacactcactccctatccctctccccagcccctggcaccctccatcttgctttctgcctctatggatctgaygactctagggacctcctaggagtggaatcacacagtgtttgtccttttgtatctgcttatttcactgagcataatatccccaaggttcatccctgctgtagcctgagtcagaactgttttcctttccatggctgtatcacattcccttgtgtggatgaaccacgttgtgtttattccttcatccatcgatggacacttgggttgcttccagcttttgttttgtttttttgtttgtttgtttgtttttgttagttcacgtcttttgtg

SEQ ID NO: 814531 - DNA, 455 bp, Homo sapiens
taaaaaaactcttttttcttttttattaaaaaaaaaattatagggctgggtgtggtggctcacgcctgtaatcccagcagtttgggaggccgaggcgggtggatcacgaggtcacgagttcaagaccagcctggccaggatggtgaaaccgtctctactaaaaatacagaaattagccgggtgcggtggcgggcgcctgtaatcccagctacacaggaggctgaggcaggagaatcgcttgaacccaggaagtggaggttgcagtgagtcaagaccatgccattgcactctagcctgggcaacagagcgagactccatctcaaaaaaaaaaaaaaaaaagtataaaatagagatggggtcttgctatgttgcccaagctggtcttgaatccctgggctcaaacatcctcccrcctcagcctccccaagtgctaagattacaggtgtgagccacca

SEQ ID NO: 814532 - DNA, 531 bp, Homo sapiens
caaagtgctgggattacaggcatgagccaccgcrcctggcctctactcttttcttatcagcccatgataaagtagtattatttgatggtgaattggaatcacaaatgcaaacaggggcataaaaatcctttccagtgctcagttatgagatggtcacccagatgatctataacatgctgatattaaattttttaagatttctttaaaaatataaatgtagattttaaacattcttatggagaactcattgttatcagagatgatatccttggaaatccaaaggatcatgacatccagtttgagaaacagtggtttagagcaattacatcattcttagaatcaatgtgtggcctcctaagatgaacccttcaaagggtattacaattactcacttatataaattcctagatatatatttggtgtaaaatttccatatgcattctgattgttcttatccccttgctatttgcatactgtcatttctttaaaaataccttacagcctcttgataattgctattaagtaggtgaa

SEQ ID NO: 814533 - DNA, 613 bp, Homo sapiens
agcgtgattacattagaatgctstacttggatacactgatttgtctttgagagtgctttgtgccacataaatctcatagaaatatctttaacttgctgccccagaaggccactgcttccctcctcagcaaacagaagcaacatcagggagtcatttgtcaaagtttcaaagggaatggttcatttatgaactgacattggatggtcttccgttccaacattcatgggattttaaaacaaagatgcattttatgattaacctccacaagcaaagagttatatttgtctcttttgacttacttcagcaacctgatttaaaaaaatctccttcaaggagaatcatatttattatacctcaaaaattcagtttatatgcatcattgttcagagcaatttctttctccctacattgaatggccaagtgatcatttgttttggagattcattcatgctttagaagacctggccacccatggaaaagaacatttttgagagcatttcccccctgcttctttcttaggacagggaaaataggtcttaaaagaattataagtgaatttagaaaatattgcttaaaagtttctcacttattctgggacatataccttcagttt

SEQ ID NO: 814534 - DNA, 534 bp, Homo sapiens
ggctaagaaaaatgaagctggatcaccaaccggcaattaagggctgcacagcttgcaattgccttgctcaattaagaggccacctcttatgctagtaataatgataccttctcttttacaaaaaagagaaggggggcatgttgggaaaaagccaagtgttgggagcgaaactgaggcagggcttgcataatgtcctctggaatgtgtctaaacttgctggctccttgcttctagccctcctaggctcctaggctcctattcccattatctcaagtagcagaacatgttccatataaatgctaaaccatcacagctgtaaatcatatgcttaatgcaatgtgtccttttgaccgccacattctcaccacctgtttgttggattgccaataaataccgtgggctcccrgagctcggggccttcccagcctccacaatagtgatggccccctggtgtcccacctttctcttttaaactctctttttctcaatcctttgactctgctggacttcgtcgcccccacgacctggtgttgg

SEQ ID NO: 814535 - DNA, 534 bp, Homo sapiens
ggctaagaaaaatgaagctggatcaccaaccggcaattaagggctgcacagcttgcaattgccttgctcaattaagaggccacctcttatgctagtaataatgataccttctcttttacaaaaaagagaaggggggcatgttgggaaaaagccaagtgttgggagcgaaactgaggcagggcttgcataatgtcctctggaatgtgtctaaacttgctggctccttgcttctagccctcctaggctcctaggctcctattcccattatctcaagtagcagaacatgttccatataaatgctaaaccatcacagctgtaaatcatatgcttaatgcaatgtgtccttttgaccgccacattctcaccacctgtttgttggattgccaataaataccgtgggctcccagmgctcggggccttcccagcctccacaatagtgatggccccctggtgtcccacctttctcttttaaactctctttttctcaatcctttgactctgctggacttcgtcgcccccacgacctggtgttgg

SEQ ID NO: 814536 - DNA, 667 bp, Homo sapiens
tgccaatgctgcccaactgccaccagaggtgcccacaaacaccacctcacccctcagtgtccgctggggctgggaaacctcatgcrtcatttatagcccactccccagggagacaaattgctggtaaacctcaaggcagagttaagcaatgaaggtagggaacataggattgcttttgggaggacaacgctaaatggcacaggagggaaaagagaaaccaaaagcctggggggagggcgtgagaacaagagagtgagaatgtgcccgctagttctcagaggctgggagccagataatgagagtgccatccaggcagaggagggatggggtaggggcagggcagagaaaagtctaggcagcgatggcaggggcacgaaatgctacatgtttacatggcagacccccctctgtctcctcagagagagcatcagtaaaacacctattgctcaatcatggaagtgagcaatagaataaagaggcattgagtccaacatccagactgaccaagtgacctgagagcacacacatggtctagccatatctcagtcacatcgccaagggggctggggacctggtttcttcccctgctagctttttccatctctcttctcctctctgtcccatttcccttttttgtcatttccatcctgattgggtcccaaatgga

SEQ ID NO: 814537 - DNA, 667 bp, Homo sapiens
tgccaatgctgcccaactgccaccagaggtgcccacaaacaccacctcacccctcagtgtccgctggggctgggaaacctcatgcgtcrtttatagcccactccccagggagacaaattgctggtaaacctcaaggcagagttaagcaatgaaggtagggaacataggattgcttttgggaggacaacgctaaatggcacaggagggaaaagagaaaccaaaagcctggggggagggcgtgagaacaagagagtgagaatgtgcccgctagttctcagaggctgggagccagataatgagagtgccatccaggcagaggagggatggggtaggggcagggcagagaaaagtctaggcagcgatggcaggggcacgaaatgctacatgtttacatggcagacccccctctgtctcctcagagagagcatcagtaaaacacctattgctcaatcatggaagtgagcaatagaataaagaggcattgagtccaacatccagactgaccaagtgacctgagagcacacacatggtctagccatatctcagtcacatcgccaagggggctggggacctggtttcttcccctgctagctttttccatctctcttctcctctctgtcccatttcccttttttgtcatttccatcctgattgggtcccaaatgga

SEQ ID NO: 814538 - DNA, 667 bp, Homo sapiens
tgccaatgctgcccaactgccaccagaggtgcccacaaacaccacctcacccctcagtgtccgctggggctgggaaacctcatgcgtcatttatagcccactccccagggagacaaattgctggtaaacctcaaggcagagttaagcaatgaaggtagggaacataggattgcttttgggaggacaacgctaaatggcacaggagggaaaagagaaaccaaaagcctggggggagggcgtgagaacaagagagtgagaatgtgcccgctagttctcagaggctgggagccagataatgagagtgccatccaggcagaggagggatggggtaggggcagggcagagaaaagtctaggcagcgatggcaggggcacgaaatgctacatgtttacatggcagacccccctctgtctcctcagagagagcatcagtaaaacacctattgctcaatcatggaagtgagcaatagaataaagaggcattgagtccaacatccagactgaccaagtgacctgagagcacacacatggtctagccatatctcagtcacatcrccaagggggctggggacctggtttcttcccctgctagctttttccatctctcttctcctctctgtcccatttcccttttttgtcatttccatcctgattgggtcccaaatgga

SEQ ID NO: 814539 - DNA, 584 bp, Homo sapiens
aattactaatgataattctttttgtctatattttgcttctttcctcttttcttaytaatttttacctctttcttaactagtcattctatttctttgttgcaactttgatgaaaacaattgttttagaagggagaatttaaaatacagttgatccttgaacaatttgggagttagggatgctgaccctctgtgcagtgaaaaatccacatgcaacttttgactctcccaaaacttaactacttatagcctactgttgactggaagccttattgatagtcaatacatattcttttatatgtattatatactgtattgttacaacacagtaagatagagaaaagaaaatgttaagaagatcataaagaggagaaaacatatttactattcattaagtgcaagtgggtcatcataaagatcttcatcctattgtcttcacattgagtagactggggaagaaaaagagagaaagaggaggggttggttttgctttcccaggggcggcaggggttgaaaaaaattcatgtataagtgaaccaacacagttcaagcctgtgttgttcaaaagtgaactgtgttttcttttg

SEQ ID NO: 814540 - DNA, 503 bp, Homo sapiens
cttcagtagccgattcgatcaactggaagaaagggtatcagtgattgaagatcaratgaatgaaatgaagcaagaagagaagtttagagaaaaaagaataaaaagaaacgaacaaagcctccaagaaacatgggactgtgtgaaaagaccaaatctacgtctaattggtgtacctgaaagtgactggcagaatggaaccaagttggaaaacactcttcaggatattattcaggagaacttcctcaacctagcaaggcaggccaacattcaaattcaggaatacagagaatgccacaaagatactcctcgagaagagcaactccaagacacataattgtcagattcaccaaaattgaaatgaaggaaaaaatgttaagggcagccagagagaaaggtcaggttaccgacaaagggaagcccatcagattaacagctgatctctcagcagaaactctacaagccaggagtgggggccaatatcaacattcttaaagaaaagaatt

SEQ ID NO: 814541 - DNA, 481 bp, Homo sapiens
atgattttaggatcctttctttatccttgacttttggaagtttgattattaaataccttgaggtaggtcttttttttttttttcccgagacggagtctsgctctgtcacccaggctggagtgcagtggcacaatctcagctcactgcaagctccacctcctgggttcacgccattctcctgcctcagcttcccaagtaactgggactacaggcacctgccacaacgcccggtaatttttcgtatttttagtagagatggggtttcaccgtgttagccaggatggtctcgatcgcctgacctcgtgatgtgcctgcctcggcctcccaaaatgctgggattacaggtgtgagccagtgcacctggccgaggtaggtcttctttaggttaaatctgcttggtgttctaaaaccttcttgtacttgaatgttgatatccttctttaggtttgggaagttctcttttattatccctttggatgaa

SEQ ID NO: 814542 - DNA, 622 bp, Homo sapiens
aaaaattgcttgaaccccggagtcagaggctgcagtgagctcagattttgccaytgcactccagcctgagtaacaagagtgaaactccatctaaaaaaaacaaaattacccagactcaggtattcctttataccaccataaaatggactaagatggttgatttcagacgatacagcacttaaaaaaaatccctttaaatctcttaccatatttcagctggagaaaacagaaaatatttctgacatttgttttatttttttcttttaaatcaaaagtatctacagaaccaaagccaataagccttttatgacttacccaaacatctatgagacacactcaaagaagtgcaaaataagaggtcctcacaagatccatagccaccacgaaagacaattaaaagaaactctttgagggctaacaataattagtatgctagctgcaaatagagttcaacacacattcctgtcaaccatattctttttatgggcgccccaacttttcagttgactgcttgtccaaacaaatccagtaacctgcatgccccctacaggcagcaagctaagccaagttctcagaacaccaaatgagacaaagaggaaaatggtaagtgtccatgagagca

SEQ ID NO: 814543 - DNA, 611 bp, Homo sapiens
atcatttaagatttttgagaagggaatatgggctgtgcctcaggaataatggtgtcttttatttatatggcactacattaaaaagcacctctaagtatttatgttctcatcacaaaactcttcgaaacatgtagagaagaaattataatcaaaataattcacctacaatctagctgttatttggtggcataatgcagactcagagccaagccttctatcaaatttctgtgggctctctactaaaacgcacgtaagctcattggtggtgtttcagaatgaaggtgaagacaccagttgggtggggatcagggaggactcagaattaatcccattgaaagataatgacagtgggtgcaagatgagttatgccctatttatacaggaggcaacatatctagttggaagatgttaaaccacatttctcactgaaaaaaaatataaaacttttacattttgttccatatgtattgccctcagcaaatcattctgtaatttttcactttataaaagaagaactcatggttctcttagtaactgaattaccattatagaaaattaaatggaaaatgtatatgttstttctaaaacaaaataaaatcttaacatttttc

SEQ ID NO: 814544 - DNA, 615 bp, Homo sapiens
caaaattaaacaaacttacaaaaaaacgttctcaagacagacacctaggaatcacctatwtaacatgggatacaatcaaaaggctgtcctcaggaataaagcaaaagatgagttttcaggcctacaatgtaagatgacaccatcctggctaacacgtgaaaccccatctctactgaaaatacaaaaaattagccgcatgtggtggcaggcgcctgtagtcccagctgtttgggaggctgaggcaggagaatggcgtgaacccgccactgcactccagcctgggcaacagagtgagactccatctcaaaaaataaataaataaaaaataataaaaacatttgagtaagactaagtctgagcaaaagaagtagaaagagattttttaaaatataggcaaggacccatttataccacagaattaagaaattcaaaggaatctctgattataaatccctggttgaatattgcttgtattgttaaagactgcaatgatctagaagtatttcgcttctcagaaaatattccatttagttggtaccaaataaaagccaaatgaaaaaaaaatcaataatgacaaagagatatagaagtctagcatacagtaattaaaataat

SEQ ID NO: 814545 - DNA, 615 bp, Homo sapiens
caaaattaaacaaacttacaaaaaaacgttctcaagacagacacctaggaatcacctatttaacatgggatacaatcaaaaggctgtcctcaggaataaagcaaaagatgagttttcagrcctacaatgtaagatgacaccatcctggctaacacgtgaaaccccatctctactgaaaatacaaaaaattagccgcatgtggtggcaggcgcctgtagtcccagctgtttgggaggctgaggcaggagaatggcgtgaacccgccactgcactccagcctgggcaacagagtgagactccatctcaaaaaataaataaataaaaaataataaaaacatttgagtaagactaagtctgagcaaaagaagtagaaagagattttttaaaatataggcaaggacccatttataccacagaattaagaaattcaaaggaatctctgattataaatccctggttgaatattgcttgtattgttaaagactgcaatgatctagaagtatttcgcttctcagaaaatattccatttagttggtaccaaataaaagccaaatgaaaaaaaaatcaataatgacaaagagatatagaagtctagcatacagtaattaaaataat

SEQ ID NO: 814546 - DNA, 615 bp, Homo sapiens
caaaattaaacaaacttacaaaaaaacgttctcaagacagacacctaggaatcacctatttaacatgggatacaatcaaaaggctgtcctcaggaataaagcaaaagatgagttttcaggcctacaatgtaagatgacaccatcctggctaacacgtgaaaccccatctctactgaaaatacaaaaaattagccgcatgtggtggcaggcgcctgtagtcccagctgtttgggaggctgaggcaggagaatggcgtgaacccgccactgcactccagcctgggcaacagagtgagactccatctcaaaaaataaataaataaaaaataataaaaacatttgagtaagactaagtctgagcaaaagaagtagaaagagattttttaaaatataggcaaggacccatttataccacagaattaagaaattcaaaggaatctctgattataaatccctggttgaatattgcttgtattgttaaagactgcaatgatctagaagtatttcgcttctyagaaaatattccatttagttggtaccaaataaaagccaaatgaaaaaaaaatcaataatgacaaagagatatagaagtctagcatacagtaattaaaataat

SEQ ID NO: 814547 - DNA, 623 bp, Homo sapiens
agtggctacctttgttgaaaatatgggaaaaatgaaaagacagatgaggcctacgaatcttcatattttagagtaaaaataagggaaacagaaagaaaaatatgtaagcaaatgtggtatgtttaaaggttaggatttcacacaatgcatttatttttctcactagttatgtttgacaatggggcttaatttaccaaggaagaaataaccatgacgtctttctactgtctagagaacaaatcaaagaattgtatttcatgagcagtgccttccaattaaaaaagaagaataaaggaaagagaaaagctcatatattctgttgagtgtgtagcaaatacatagtaccactgtggctatttaaacaattgaggctaatggaactaaggagaacttctaatgcaactgaaattgatgcaatggtacactttaatttttaagtgtttctcttaaatattctatgcaatagggattgagtgctcatttgattaacttattgcagggatggttgcgcaagaattaaatgtgctttggctggacattgacaatgaaatgaatctgaatatacttaaatgtgatatatactgttgctttgggtcaaaagytttttcatgagaaaatatcac

SEQ ID NO: 814548 - DNA, 661 bp, Homo sapiens
tgccatggcaggaagtgatctcagagtggccagaggtsggatccctgcagggtctctgaccggaggtggcactgtggggctgaggaaaagttccttcatctagtcatgatcagaacagcttgcaggaacacctcctgctcacgaggcacttctgacctgctatctggatgattctgctgtttgtgggagtggggggcacagaaggcagccacagtggagagcacctgcttcgtctttcctccttcagtccccaccccttatatgggagaagtgcaccctgggaaaggaaggggcggggcagggacaccgctgaggggcttctttactgagcctcagtttctggtcaagctcctggctacagaattcagatcaccaggcaacaacagggacaggcaggataggaacccagagcctccaaatccaagacctcatgggacctggtccattcctttctaaatataaaattgaagtaattactgatcaaacgtgccactgagatgaataatgaaaagctaataattgttttccttccctttttaagaaacacaccacactcagacacccatttacagatattttcagttaaaatgtcacataatatttgttatatcagcaggagaatggaaattgagttggcagtgaagcattgcagtgacaactg

SEQ ID NO: 814549 - DNA, 559 bp, Homo sapiens
gttgagaaggcctataagcaacactttataacaatgagtgcaactagccctctggtgttggtttttaaatactattatccactaaaaggaaccaatggtcttggaaaaaatggctaattccaggactgggacaagcaaagtacaagataagcctcagacaccttgtgccagaatataatgaagttttcaaagcatgatagggacatattaaaaggatatagtagtcaaagctaaaggtgctatcactggccaaatctggaacaaattgggcattaaaataaataatgatagtattggactataccacattgaataaaataacaatctatggatccatacaagtataaatacatatatacattagcaaatggggtaaagaaaaaagtctgccttttagtagattgtcaactagtaaatgtagaagaaatgatggaattagaaaattgttatttggtaactagtatagtaataattggtttaggcaaaattcatcaatgaatgcttaaagaagtgtgtgaaaatytgaagaggaacaggctatttacttagtctcagagca

SEQ ID NO: 814550 - DNA, 561 bp, Homo sapiens
agtctcagagcaccccacaaaacaytggttaattttacaacagaaaatctagcagatagtatctttaaccaagtgaaagaaagttaacatcaccagcaatagaacaaatcatcatcatgtgtatcctgtcacttctgtggtatttctggaaaaaattcattatgctaatctaatcctgaggaaacatcagacaaacccaaatttagggacattctacaaagtaacgggcttggataattcaaaaatatcaaggccttgaagggcaagggaagactgaagaactgtctcaagttgaaataaattaaaagaaatgatgactagatgcaacacaagattctagtttggattctcaacctgtaaagaatattgttgtaaaaatgggtagaattttaatgggatctctgaattatatggtggtataaaatcagtgttgttctcctgattttgatgggtatactgtggcttcatcagaggatgtcttttgtttaataaatacatactgaagtgtttaggggtaatggatcatttctctgctacccaatctcaagtggttaaggggaa

SEQ ID NO: 814551 - DNA, 650 bp, Homo sapiens
gtctgacctcccttcctgtcatgatgggtgattcagttttcctggtttctcttgggtccccttggcccagagggggtccgtttagtcagttgttgggggaggggaaggcagagcttaggattttatttttggtttacataacctagagccgcaacagaaaattcatataataaatgagataacctgactgtcactaaaactttactacatctccagatatattatcctggtcccaaagatggggatatgacactaaaaactgccaatgcagagagcagtgtactacttatcgtgtgtgtgtgtgtgtgtgtgtgtgtgtgtgtgtatgcagaggaaggcagcacaataatgataacaatcactgagatccattttaaaaggcacagccacagtctcaggtgaggtgcattaagatgcagattactctctacagggggtacagtgctactagctatagctgaaaccaagttcttattatctcattacacctttgtttcttactgccttggttgcaggamctctagctaaacacattggggcatctgttattaccccatggaaagttagaatgctgtgggaacctagggtgtgcttgagaaggtcatacttttttaaaagctgctgctgctgccaatgtccaaaactttacc

SEQ ID NO: 814552 - DNA, 423 bp, Homo sapiens
ggatcctggcactcaaatgttgtagtcaacagaccatgctattctattttcttatctctgtttycccaacttatttctttgtccttgagctagctctctgtatgtggcataggagatggctacaggtaatcataagcttgcatcctcatggctcatgacttaggagagggattctattttccccagggtccacataggacatctaaagaaaggattcttatctgactccgtttagtcatgtatccaccatgtgtgcactctgtccagggagatatcatagagtgactgctggagttcactcttgtgctcacccttttggctgcatgtgaagcctcattgtccccagccatctcccactgcatgaaatgtggagagagaattccctcatagcaggtactaatgacagaagaaaggggttaggag

SEQ ID NO: 814553 - DNA, 654 bp, Homo sapiens
tcaccttctttgtctttttttttttaactgttagagtcttttttgcattttcttttagctcatcagctatcattagtgttagtgtattttatgtgtggcccaagacaattatttttctttcaatgttgcccagggaaaccaaaagattgacactcctgatttcatccgttcacattcaaggttaatgttgatatgtgaggttttgtccctgtcataatgttaattgttacctagtggctttgtagtgtcaattgtgtaattgttttataagacctgtgaattattttgtacattcatttgtttttacaatagtgagcattgaccttttgtttccaagttttgaactccttaaaacatttcttgtaggactggtctagtggtgatgaattagtttagcatttgcttgtctgggaaatattttatttctctttcttttataaagcttaaatttaggaggatacaaaatttgtggttgacagtttttgtctttaggaagtctgaaaataggaccccaatctatagtggcttgtaaaggttctgctgagaagtttactgttaatctgaagggatttcctttataggtgattagatgcttttttcttgatgattttagaagttttyccttcatattgactttagaggccctgatgacta

SEQ ID NO: 814554 - DNA, 571 bp, Homo sapiens
agcttttcctcagaagctttgcttctctggaaaaataaagagaaaaattcttgccccttactctggaaaaaggtgctgtaaaaactaaagatattatagtgtaatcctcagaacactaatcctagaggtcagaragcagaaacctgaatcacaggttctgctggcttgctcaaatgccatgtttagcatccaaattctctataattgataggtcagtagtagcttaaagattataagcttttgtaaatgggtgactagctcctgaagaaagccacaaatttcacctgataatacccaagtaaaatagttactgtgagttttagaaatgttgccagaaataaattgaagagttttatgtcttgaaatttggtgctgttaatttcttttcagctgtcactgctaaatcccctgttaactgaaacaccttccaaagttctctttaggttaactcggtattctaggcaatctataactggcatcttcttgctcctgaatcacatttcagagcagacttcacacaaaaaagatgatgatgttaggtgatcttcagttaatagtccctttaaattta

SEQ ID NO: 814555 - DNA, 577 bp, Homo sapiens
tttgtgtgcttgttataatgactagaacttccagtaatacgytgaataatagtgctgaaaacagatttccttgccttgttcctgatcttagagtgaaagcatttagcctttcaccattatgtattacatagatattgtttcttttttttgtgtatgtaatttcttattatgagattaaggaagttcccttctattcctagtgtattgaaagtttttataatgaatgggtgttgaattttgtcaaatgctttttctgtcaattggtataatcatatgacttttttgtttagtttgttaatattatggatgataatgatagatttttgaatatcaaactgtccttatatacctagaataaattccacttggtcatggtatactaatatttttatacactgatggattcaatttgctaacattttattgaggatttctgccctgcttttaagtcacttttgtttacctctttttctgtgtagcttaaagtttggcaaatgcctgaaagaggaattcttcatgcagagctcaggttagattagttatctgcttgtaactatcatcactttatctgaagaat

SEQ ID NO: 814556 - DNA, 598 bp, Homo sapiens
ttttattaatttcttcattaattctcttgttgtggtcagagaatatattctatatgtcaatcttttaaatttattaaaatgtgtttatagccaaactataagtgttctaycttgctgaatgtttcataagcatacaagttgaatgtgtatttggctcctattgggtctagtgttttataaataccaaataggtcaaattggcttatagcttttttaaaaaaagtgttcttatgtctttattgattttatctgtacttgttctatcaattaactagaattaaaatttccaaaattgtttagatgctgtctttgttttcacaggatgtgaagaaattgtataattgatttctgctcacattcatggcaaaatttaggttacatgctcatatagaagctaggagatacagcccttagttgggagccatgtgcttagataaaaaacaaaatattctattacttaaaggaagaagagaatgatagaaactggcagaaaatttacaatatctgccacaataattaaatagtaacctacttgggacagactataaattatgtaggagttcagaggaggcatcttcagtgtaggatgaagtttttg

SEQ ID NO: 814557 - DNA, 562 bp, Homo sapiens
ctgcatgtcaagcttgattccttaaagggaaacacaccctttcagttaaagccttggcaaaataaccggtttttccaattgtgttctgttgacaaaraaaaatggattcttgctgcactgatgcgaacaactatattgccgtaagttaagagtacttacagatagtctccaaattttagaggaaccaggcagagaaaaatgaacatgctccaaattttgttcacagtagtataccttacttgattattaaaggccataaatagtttaaaataagtttcctttcccagtccatgcaccaaaatgatacagctctgatgagtggaggaacaacagggttcctggtcctcatgctggtttagataaaatgacacagacacatgtggagtggttttaaggagtggagagtttaataagcaagaaggaagggagaagagagaaggaagacgctcccccttgcagagacggagcgggggttccaaagctgaaagaggaggtcccccacattaacaatttttaaaataccgtacaactgcagaaaatgaggactgcctgtacatactgt

SEQ ID NO: 814558 - DNA, 581 bp, Homo sapiens
tcaacacaaaaagttgaaaactgtgcgatgaacgcatatatacctatacatccaaacattcctccattcgtctattaatctgcttgccttatcagatagrtctcatatctattcttctgttcatccttctcttaacccatttttttttgaggtgttacgaagatcagaacaaaagtacaacctcagatatagcaacaggcaaaaaaaccaacaaattttgaaaatttgtatttagttcttctgtatccctttgggataacattttcataaaatgaaatgcacaaaacttcagtgtacttattgtttcattttaaataaacattgcaataaaaataaattagctcataaacaccacaaaataaactttccaagtgttctgaagatgaaatcaatgacctgaatccagtgggagatagtgcaaaggaactcagaaaacactaagcattttcatttgtaaagaagggaaaaatctggcaaatcaagaggttttcagtgatatagggcagagcatctcattttaacaggctgagtttgaatgagtttaccactatgattggtagaatcactgattatcctttcag

SEQ ID NO: 814559 - DNA, 581 bp, Homo sapiens
tcaacacaaaaagttgaaaactgtgcgatgaacgcatatatacctatacatccaaacattcctccattcgtctattaatctgcttgccttatcagatagatctcatatcyattcttctgttcatccttctcttaacccatttttttttgaggtgttacgaagatcagaacaaaagtacaacctcagatatagcaacaggcaaaaaaaccaacaaattttgaaaatttgtatttagttcttctgtatccctttgggataacattttcataaaatgaaatgcacaaaacttcagtgtacttattgtttcattttaaataaacattgcaataaaaataaattagctcataaacaccacaaaataaactttccaagtgttctgaagatgaaatcaatgacctgaatccagtgggagatagtgcaaaggaactcagaaaacactaagcattttcatttgtaaagaagggaaaaatctggcaaatcaagaggttttcagtgatatagggcagagcatctcattttaacaggctgagtttgaatgagtttaccactatgattggtagaatcactgattatcctttcag

SEQ ID NO: 814560 - DNA, 592 bp, Homo sapiens
ggtaaaaagacaaattttatatttatttgttagtctccttagcctattaaggtagacttactacaaggttcttcagtattatgggacttttgttctgtatttacaggtgagggacttgtgcattgcttatatgctggtgacattaacttatctctatattggagtcctggtttttgcttcatttccttcaccaccattatccaaagattgtattgagcaggtaaggcaccgtgtaccctctctgtgtgattgtgtacactttcatgtatttatagtaggtagggtgatacagtggcaagatataacatcagataggcctgggttttaataccatctctgctatctactccaagtatgggaatttaggcaccttcccttttctttctgagctttatttttcttttccattaaatagtataataagtacccccatttgatttttagatggactctgagataatgtactacatgccaggcaccttgtgrtactcaaataaatgtctactattatgtacatatatttctctttttgtggggaactggtacaagtagttctcatgtagttataaaaccacagagaatacattgaagg

SEQ ID NO: 814561 - DNA, 592 bp, Homo sapiens
ggtaaaaagacaaattttatatttatttgttagtctccttagcctattaaggtagacttactacaaggttcttcagtattatgggacttttgttctgtatttacaggtgagggacttgtgcattgcttatatgctggtgacattaacttatctctatattggagtcctggtttttgcttcatttccttcaccaccattatccaaagattgtattgagcaggtaaggcaccgtgtaccctctctgtgtgattgtgtacactttcatgtatttatagtaggtagggtgatacagtggcaagatataacatcagataggcctgggttttaataccatctctgctatctactccaagtatgggaatttaggcaccttcccttttctttctgagctttatttttcttttccattaaatagtataataagtacccccatttgatttttagatggactctgagataatgtactacatgccaggcaccttgtggtactcaaataaatgtctactatyatgtacatatatttctctttttgtggggaactggtacaagtagttctcatgtagttataaaaccacagagaatacattgaagg

SEQ ID NO: 814562 - DNA, 571 bp, Homo sapiens
ttgacacctagagctttagggagataagataacttgccctaagtaacacrtgtactccttaattcctccattcagtaatgtttatagtgcaccttctatgagccaggtcttgtttcagacacttgggatacatcagtgaacaaagcagataaaacgactgcctttgagaccattatccctaatattttattacaaaaaatttcacacatacagcagagttaaaccaatttcatagggaacacgtgttcagttactacctaggttctaccagtcactggggcacattgataccagtgggggaaggcacacagtaaaccggaaacaaaacaagtaaattacatggcattgtagaaggtggcaactgctatgagaaatacagagaaggtaacggggtgtagggcgtgcagttcggggtggtggtggtggccaggcttggcctcattgagatggcgacagttatgcaaagacttgaaggacatgagggagcagtgtcgatattggagggcaaagcagttctaggtggaggcaacagccagtgcaaaggtcctgaggtgggaatctctgttccagg

SEQ ID NO: 814563 - DNA, 605 bp, Homo sapiens
tgttaggttcaatgcttgaggctgtgccaagttgatttccctgtgagagcagacgcctgatagwagggcacagtgccagtcccgttgataatgaaatctttgcatccccgttgacacttctataaaggacagaagaggaactgcaagttcccattctgatcttttatttctgttttgtcaccctcaagaagatctgtcagaaagcttttgggatctggactcagatggacctgaatttgaagcccactgcgaattttactgcagtgggattttggtgagagctgctcaaacctgaacttgaggccaggcctggtggttcatgcctgtaatctcagcactttgggaggccgagacaggaggatcatttgaactcaggagttcaaggctaggctgggcaacatagggagatcctgtctgtaataaagaataaaaaattaaaaccctgaatttgagaggagcacgtggtgacagtgctcagatttgggttattcatgcccaatattgtggctctttctgtttttgttttcaaattttgttttatatttgtctttacagaacattaacattgttccaaactaataactaaataaaaaagccatcctcag

SEQ ID NO: 814564 - DNA, 618 bp, Homo sapiens
atgtgactctgtagatccctaccttcagcgtgtctgagaaaagacacttgttcaacacgtgaattcttgggaccccttccagggggttaaatccgggaatctcaatttaatttcctggagggagtcccgagaatytgcatgtggaatgaacctgaactcattaattccctggcaggggtctgcaaggatctgaatgtctccaacggggtccgggaatctgattttttgaggcatctgtgacgattctgatacagaaagtcccagactcacctgagtccttcatctgcgttatttaacttgaatttagaatgtctgtagaggtaatggtgagctactgaagcctcatctgcaggggtgacacagggttagggttatagatgacagctgctgtggatcagggctcttcgtcttggtttgtacaatggtatcactcgaggagtcttgagccagacctttgtcaggctctccctcagatcaattgcgtctgaatctctgggggtggggccctggaaacagtattttatttttgctgattcttacaggtactcatatattcacacactggcacttacttattcagtagccttttgtgccatgctcaaagcactgggaatatag

SEQ ID NO: 814565 - DNA, 600 bp, Homo sapiens
attatttcatcatccaggtgttaaacctagtacccattagttatttttcctgagtcttcctcctcccaccctccaccctttgataggccccagtgtgtgttgttcccctctatgtattctcatcgtttagctcccgcttctaagtgagaacatgcagtatttggttttctgttcctgtgttagtttgctaaggacagtggtctccagctccatctatgtccccacaaaggatgtgagctcgttctttcttaatggctgcacagtattccatggtgtatatataacactttttttttttaatccagtctatcattggtaggcatttaggttgggtctttatatcttgtctcatatatatttttcatttttctcactttgtctgttaattgcactttccaattttgttatgttatgtgcatttttggaagctgcctcaagaacatcctggaacgaataaaaatgcttgtgtagcaggacattytggctgactgatctggaggtcgagatgctttgactgtggacaatacttccctctcctctgcctgcttgcatgctctgaggcttttatttttaatggaaacagggagataaagggaatgg

SEQ ID NO: 814566 - DNA, 600 bp, Homo sapiens
attatttcatcatccaggtgttaaacctagtacccattagttatttttcctgagtcttcctcctcccaccctccaccctttgataggccccagtgtgtgttgttcccctctatgtattctcatcgtttagctcccgcttctaagtgagaacatgcagtatttggttttctgttcctgtgttagtttgctaaggacagtggtctccagctccatctatgtccccacaaaggatgtgagctcgttctttcttaatggctgcacagtattccatggtgtatatataacactttttttttttaatccagtctatcattggtaggcatttaggttgggtctttatatcttgtctcatatatatttttcatttttctcactttgtctgttaattgcactttccaattttgttatgttatgtgcatttttggaagctgcctcaagaacatcctggaacgaataaaaatgcttgtgtagcaggacattctggctgactgatctggaggtcgagatgctttgactgtggacartacttccctctcctctgcctgcttgcatgctctgaggcttttatttttaatggaaacagggagataaagggaatgg

SEQ ID NO: 814567 - DNA, 429 bp, Homo sapiens
gggttatctggttatctcatttaatcatcacaaccacgggaggggaagctcctggggttaagtgtctcgcccaaggttgcagctggtggggaatagtctggttgcaaacccagagaccacacttttaactgctatggaatgttgtctcccgtggctgtttctgaggagacagaaaaacatgccaattagggccaaaaaaacgggaggtggcctcaagggcagtgcattacattaagagtgtttgcaaaggcgtgggtgtttctccacccgcgagtcgctgctgacttcccgacacctacaygcagggtcaccctgcagcttctgagcacctggccggctccccccagcaatgtgtgtttgatgttatcagtgggtttgaggcatggctgaggccccaggaatctttctctttcatggagaagccaagct

SEQ ID NO: 814568 - DNA, 516 bp, Homo sapiens
agttttcaaacatctgggtggtcacaaaggaccaaaaagcaatgacatggaactcaatttaatctcactttttccctgtgaagtcatcacggtaatatttaagctctcagtcaagtgcttcctgtatagttagcatgcttggttgtgggcctttcagaagcccgttggaacagtgctgacaatttttttctgtggttgttatgacaaaaagggggaaaaataagaaacattgtttgacaagagttggccacacagcccattaattatagattgtactgggggtaacacacgccttttttaatgcaaatgtcactgggtgatgcgaccattttcacatcttatcaatatttcaattagataagattttaataaaatagtaagaacagacagaactagtaaaaagggaatgttgactggaaaagttgaaatcttcaggtaaagcagaattgggttgaagtcatctgtgggttgtgaggagtcmcaatattacaggggcaacgaagattcagaaattgt

SEQ ID NO: 814569 - DNA, 582 bp, Homo sapiens
agtagttaccttctctgcccctctccctcctcccaccttccagtgtctgttgtttccttctttatggtcataagttctcatcatttagctcccacttataagtaacaatatgcagtatttggttttctgttcctgtatgagtttgctgaggataacagcctccagctccatccatgttcccacagaagacatgatcttgttctttcttatggctgcatggtattccatggtgtatatgtaccacactttctttatccaatctgtcattaatgggtatttaggttgattctatgtctttgctattgttagcagtgctgcaataaacattcttgggcgtgtgtctttgtggcagagtgatttatatggaaatttatgaaatagcaataataattcattatcaagtctctacagcaacaactggggtcatgggagatgcaggaaaatgactaacatgtctattagcacaaatatatctctttaaaaagtgcattaacataattcgtgcaagttcttgttgcaccttgcacatgttgttcatgctccatcrttacccacacaatcatgtatgtgctattgttgctg

SEQ ID NO: 814570 - DNA, 603 bp, Homo sapiens
tttcttccgtacattcttgaaatactgtataaacatgcatgcacctctctctmtatatatctatatacatgcatatatatatacacacatctatgtttaagcaaacgagagcataccaaccatagtgtcctttgcctaacttttagaaattaacagtatattggagattatccatatcatcctttttaatgattgcttagcattccataattaatttaaccagaccctattattggcctttttctattacaaataaggctaaaattattatcttgttgtatatttctcacattgagtatctctataggataaattcctagaactgggattgctgaattaaagtgtatgtgcattttgatggatgtgcaaagttgttccccttagaggttatgccaaatttcatttctttgatgaatgtataagagggcttgtttctttacactctccccaaagcattgggttatcactggtatattattgatgtttctgtttgaatttctctttttgagtgagattgagcatctgttcatatacttaatggccacttgtatttcctcttctgtaaacaattatgttcctatactttacccatttaaaaattgg

SEQ ID NO: 814571 - DNA, 611 bp, Homo sapiens
tccaatataatccagctctaacttttccatgtctgccctgytgctgcctaatgatcggtctgagagtgggcttctagtaaattgtcagtatctaaaaggacacaagatggcactgaagagtcataagatttaccttaaacctgcttcaacctccttcagaaaatttttgagtagtgttattccaacagccctccagggctttgtatacctctgcacctatcagctgggtgctgatttttccatagcttctgttatctatcagcaggaatgtttttaccaacatctgggaaagggcacttggtaaatttcaaatgagctgccagagattgttaagaagttacaaaatgcagcaacagtttcacactttcacctatgtgccactgtacctgggcagaagcagccttagtatgctgctctgtacacagtcttatcactctattgtttgcattcacattccactggctgagcttgccagtcagttgccatgacaacctccccactaggccagccagagattgctctggtccattcaggggacgttgatttaggatgtgttgggctgaacatagaaaggcttttctaatccattctgaattttacaccctataaat

SEQ ID NO: 814572 - DNA, 481 bp, Homo sapiens
aaagcttgtaagtaggactgcacagacttggttttggttcagcatttggcaataatcagtctttctgcttcagccttcagagagcccacttcatcattctttctggcatccctgtgatcatatgattacatatctaatcagtgtaacaacatcagctacttaaagaaggcatgtcattaaagatattgttaatatctctacattgcctttcaaacatatgtaagcattctaacttggagtgaaatcttcttaggtgctttatatgttgaaattctaccagtcagctgaggaagaaatgtatacggcttatccccaaaataagatattccaacaaataatgtttatgagagctgttaatttatgttaaaaaaaaagctattaataaaatgtttaagtaattaaatttgggagcttgawtggcagtaggaatattaagaggattagctagataactaatgtagaaaataatataattgtattg

SEQ ID NO: 814573 - DNA, 539 bp, Homo sapiens
ttgttggctgaactataaaattggaactataggaattatagaaatgaactataattcaatgggaactaggattcaagatgagatatgggtgggtacacagccaaatcatatcagtrattctgttggaaaccttgtggctggctaacatcacatcaagcttaattcagcttgcaccatcatttactgctttttattgtatttttaatgttctctgtcctaaagtgaattctgaaccacaagataggaagatatatgacttgtctttaaattcaccacagtgccctgtacactgttctatatatattgctacagtgcctagtatgtgtctctgaaaatagtagatgcaaggtaaatatttattactaaaaagatgtgcaagcatattttacgtttgtcgagtttttaaactaggggactttactcttcagtttgtctgaatagtatacagctattgccctggaatgatgattaaatagtgcctccttttacttttgcaatattattgcttggattataaattatctggttatcttctggct

SEQ ID NO: 814574 - DNA, 556 bp, Homo sapiens
tttgtacagaggagaactatagtacacacacagataagagccggcagcgtgtagaagaatgtcacactaaccaggattgaattcacttctgtatatgtccattgacaaatgtcattgtttagacaygaggaaacaaaaatagcttttaccacattgccccaggcaccgcagtctcggaattcctgtcaaccctcaactctgccagtgggctgcgtggttcctgaggcagcgtgtggctgaaactcaagctaggatgcctgccacctgacctccaggcttccctctctcgccccttctcatttaacaaatgtttgctaagcacctcccacgtacctggctgaaactcaagctaggatgcctgccacctgacctccaggcttccctctctcgccccttctcatttaacaaatgtttgctaagcacctcccacgtaccaggcattgtgctggggaccaaggcaaatatgtttacagccacagatacgatctgtgccctgtgtagcttacagttcaaaagggacatataatgatagacatgctgtgagaaatgagggaga

SEQ ID NO: 814575 - DNA, 587 bp, Homo sapiens
gaatgccagtgacatcatggaatgaccagagtcctgctttttattaaaggacacagggagggttgtgctacatacacataggacaactctttctcgttttgcttatttccaatcatatctagctytaatttctttgaaacattttttaaaagttcaagtgccattgaatagaaatgatgtggatttttttaaagtaaatattaacttatcaaattcaaatgagaacttaaaaagggaaactgtagtaaggttatgctagacactaaatttttgctatcatggttccttcaaggattagtcaagattaattaagggaatcacaaaggattgcatttaaggacatatttggaagtatttattgtatagtaagaatgaggaacaatattctgttctttagtactttcacacttttgcaaacttaactggaagaaacccaaaacctaaaacccaaatggtatcgcaggcagtgtttatcctcctctgcttcccctatggttgataaaagttgactgatggaatttgaaaggaagccaggagtctttttttaagtgtgtgatgtctgtgaagctgcagtaattttgggtgct

SEQ ID NO: 814576 - DNA, 559 bp, Homo sapiens
tgttgtccagcctggagtgcagtggcaacatctcagctcactgcaacctccacctcccgggytcaagcgattctcctgcctcagcctcccaagtagctgagactacaggctcccgccatcatgcccggctaattttttttatttttagtagagatggtgtttcaccatgccggccaggctggtcttgaacctctgacctcaagtgagctgcccgcctcagtctcccaaagtgttgggattacaggtgtgagccaccacgcccagccatgattgtttttaagttctctacagactatgaattcctactcccattgctgcatcagggtagactgctttcaaaccctgtccctccccaggtatgcctctagtttggaagaaatgaaggaaatagaaaaggcacccattttgcaaaccctaatcaaatgaatgactgattcaggaaacattatcgatgcatgaaactgttgggtcaggggctgatggggaacttgaccatggaacgataaggctgtcatccaccacctgaccccactggccaatctcagcatcatgagagtgg

SEQ ID NO: 814577 - DNA, 596 bp, Homo sapiens
ttttggtgcggaatgccagtgacatcatggaatgaccagagtcctgctttttattaaaggacacagggagggttgtgctacatacacataggacaactctttctcgttttgcttatttccaatcatatctagctytaatttctttgaaacattttttaaaagttcaagtgccattgaatagaaatgatgtggatttttttaaagtaaatattaacttatcaaattcaaatgagaacttaaaaagggaaactgtagtaaggttatgctagacactaaatttttgctatcatggttccttcaaggattagtcaagattaattaagggaatcacaaaggattgcatttaaggacatatttggaagtatttattgtatagtaagaatgaggaacaatattctgttctttagtactttcacacttttgcaaacttaactggaagaaacccaaaacctaaaacccaaatggtatcgcaggcagtgtttatcctcctctgcttcccctatggttgataaaagttgactgatggaatttgaaaggaagccaggagtctttttttaagtgtgtgatgtctgtgaagctgcagtaattttgggtgc

SEQ ID NO: 814578 - DNA, 562 bp, Homo sapiens
ctgtgaccagcagaaacagacctgaagtggggagggtgctaggtgaagcagagttcctcccgtctgaggccaggtcacatgctgggtcctgttctgagattcctgcaagaggccatcttgcctttttccttgcgttactgtaggttggtatctccatcttaaaaccagggcacctaaataaagtagatgctttttttttgagatggagtctcgctgtgtcgcctaggctggagtgcagtggcacgatctctgctcactgcaagctccgcctccagggttcacgccattctcctgcctcagcctcccaagtagctgggactacaggtgcccgccatgacgcccggctaatttttttttttttttttttttttgtatttttagtagagacggggtttcaccgtgttagccagggtggtctcaatctcctgacctcgtgatccgcctgtctcagcctcccaaaaagtgctgggattacaggcatgggccgccacgcctggccaagtagatgctttttattgagctctgtgaggtaggatccsagatcatccaagtaggaggggga

SEQ ID NO: 814579 - DNA, 577 bp, Homo sapiens
atgagccaggacatggctacgtgaacagcaccacagccaaacctgatgggcatttggccgcagctgcagggaggacacgaggccctgcattgcctcaggcctgcttgtgattccaagtggtgaagccccatcactggtaaagaggagtgggacgggctcagccgctctcacctgctcagccagaggcaggcccttggcttgggggaaattcctgggcggggaggaaactgaccaacagctgagttacgcacacacagcggttcctgtttgagctgcctgacttgggttttaaatatagcctattaaggcaattagcgaattggttccaaagtttatctcctctgattcccaaagataaaagaaggcataatttattttatctttaggtaaaaagtgtagacgatttgggaccatctggttttaaaaaaataatctgacctagacacaaatgaacaaaacaaaaacggttttggagagaaattggtgtkcctgaccctccccttttttgtgtggcgtatctaagcttcattgcaaaaaaaaaaaaaaaggtgtttaataattacccttattgacctct

SEQ ID NO: 814580 - DNA, 389 bp, Homo sapiens
taaattcctagaaatagcagtaatgatgacaggacatataatctatgaacacagcttaaatagtgctttgaggaagctccattacattaaatatatcaataaaaatgaaaacaaattaaatagacaactccaaaagcaagataaagaacaacagaaaaccaaaagaaaacagaaggaactaataagcagaaaaaaacttaaggtgttagaaaaaacagaaatgaatgaatgagtgaataataatcagtctttttgaaagttttcctcctttttcaatgctctggaataaattaagcaayactggaattgtctgatttttagaatttccctgtgattctaatgcaactaagatcagttttagtaaattacattttcctagaaaattgttc

SEQ ID NO: 814581 - DNA, 632 bp, Homo sapiens
ggaaatcaacccttaccttaaacacagatattattagaggatattattgaagcctgkggtacactcagtgtaaccacagcaatgacaaacctcaaaccctgtccagctattgaatagaccagcataaccccccatgttaaaaacctagcagaagaaaagacatactcatgtttaagtgtaaaaacttcttaaccttcatatctactgtactatccaagatgtacagccttcaatgaagattatgaggcatataaaaaggcaagaagaaaaagaaaaaacatacttcaaagagacaaagcaataatcataactgacttagttatgacataggtattgcaacaacccaacaggaatttaagataactatgacttatatgaaatggacctgatgggtaattggagcagagatggaagaaaagtatttaaataaatgatggctgagaattttccaagttagtgacacgaaaccataggtccaagaagctcagagataaataccaaaacaaaattttaaaacacatctacacatattatatttaaactgctggaaactaaaaataaaaggaaaatcttgaagataacaagaaaaaaattgtctattgaggaacaagaataagaattacatatagcag

SEQ ID NO: 814582 - DNA, 662 bp, Homo sapiens
ctttctcttttgtttacttttggtttctttttatattttaagattttatcaaatattaagtaacccttctctgttttaaattcacatttatcaatagctaacagcattgcatatatcaccaattggcaaccttaattttaaaattagcaggtaggtgctgatatgctagggtctgcacttaccagttccagaatgcagagggctttatcttccatcattgtcactcatactagcaatccttttttttctaggtgtttgtttaacctttcaaattaaaaaactctccctttacccacactcactaagcctagtggacatccattctagatgtaaaatagggaagaggtgagatatggagggggtgagtaaagtggtaaatgtcttaggttttgctaggcatgtaataatctctgccacaattacccagttctgcccttgtcatgcctaagcatacataaacaatatgtaaatgaatgaggcattaggcagctgaatggatttggcctgtgggtcataaattgccaactcatgactctgaagaaatgatacatttatgaggatctctggatactttagwttattctgacttgtcattactatttatttaaaaaatgtaagaattggagataagtaaattatagacatgattctactacatatca

SEQ ID NO: 814583 - DNA, 591 bp, Homo sapiens
gctgttaacatggttgaaatgacaacaaaggacttagagtacattatataaacttagttgataaagcagtggcagagtttgacagtatcgactctaattttgaaagaagttctgctgtgggtaaaatgctaccaaataggactgcatgctacagaaaaattttttgtgaaagggagaatcagtcgatgcagcaaacttcattgttgttgttttttttttggagacaaagtcttatcctgtcacccagggtgccagggtggagttcggtggcatggtcatggctcactgcagccttaacctcctgggctcaggtgatcctcctgcctctgtctcctgagtaggtgggactacagatgtgtaccaccacgcctggatagtttttaaaaattttttgtagagatgagatttcgctggtctcaaactcctgggctcaagccctctacctgccttagcctcacaaagygctaggattacaggcgtgagccaacatgcctgaccgctgttgtcttattttaaaaaattgtcacagccaccagccttcagtaaccaccaccctgatcagtcaacagccatcaacattgaggaaaaact

SEQ ID NO: 814584 - DNA, 512 bp, Homo sapiens
ccaaaacactcaggtagtctttgtattgtttatccgtgttctcytgtatctaattgagattctttaggttcattattttgaattattcttcaggcaatttcacaaatttcgttttcattggaatctgttactggagaattattgtgttccttctgaggtgtcatatttccttgccttttcatgtttcctgtattcttacattgatatctatgtatgtggtgtagcagttgcttcttccaattttttggattggttttcataggggaagactttttgctgttgatgtatctatggtgttggttgggtaagtcactttagctttgactgggtgcatgcagcagtgtagtctctatatgatttctttaaccataaacatcatgagtggtatctgtaaattcctcagcatcttaggctgcagttgttagcagaggctacaatgaggctttgctggggataggggtgccatgtgagccagtccttgggtcccagtggtggcagcggcaggctgggtg

SEQ ID NO: 814585 - DNA, 512 bp, Homo sapiens
ccaaaacactcaggtagtctttgtattgtttatccgtgttctcctgtatctaaytgagattctttaggttcattattttgaattattcttcaggcaatttcacaaatttcgttttcattggaatctgttactggagaattattgtgttccttctgaggtgtcatatttccttgccttttcatgtttcctgtattcttacattgatatctatgtatgtggtgtagcagttgcttcttccaattttttggattggttttcataggggaagactttttgctgttgatgtatctatggtgttggttgggtaagtcactttagctttgactgggtgcatgcagcagtgtagtctctatatgatttctttaaccataaacatcatgagtggtatctgtaaattcctcagcatcttaggctgcagttgttagcagaggctacaatgaggctttgctggggataggggtgccatgtgagccagtccttgggtcccagtggtggcagcggcaggctgggtg

SEQ ID NO: 814586 - DNA, 624 bp, Homo sapiens
catgcagcagtgtagtctctatatgatttctttaaccataaacatcatgagtggtatctgtaaattcctcagcrtcttaggctgcagttgttagcagaggctacaatgaggctttgctggggataggggtgccatgtgagccagtccttgggtcccagtggtggcagcggcaggctgggtgtacctgtgcctcggcccctgggggggatacacagatgccagtagtggtgaacaaagtgaggtgaaccccagatcttcagagagcacgctttggtgctggtggcagttgttctgggcctgttttttgagatagagttttaccttttagcccaggctggagtgcaatggcacgatctcagcttactgcagcctctgactcctggattcaagggattctcctgcttcagcctcccaagtggctgggattacaagtatgcaccaccacacctggctaattttgaatttttagtagagatggggtttcaccatgttggtcaggctggtctcgaactcgtgacttcaggtgatccacccaccttggcctcccaaagtgctaggattacagccatgagccaccatgcccagcctgttctaggcctgttgttaggtctcctgatggtacat

SEQ ID NO: 814587 - DNA, 618 bp, Homo sapiens
aaacccagtcaggagtaaattcatgtggacatgcaaaatagataaacatgcagcattcacaggagcacrtgaggagaggccagctgtgcatgcgtgcctgcatgtcaggacacacatgccatggggatacagatgtgagaggggctcagacatgaggaggctcaggacctgctatatcagaaaactgcaggttaacttgaaagcagaactttctgccaagagacggggaggtggaacctggaaaatgggaagcagagctccctcctgactcctcctctaccctccagaacttcctacagctgcagacttccaggagtaaccgcttctcctggatgggactttcagacctaaatcaggaaggcacgtggcaatgggtggacggctcacctctgtcacccaggtagattctgggagaaagggacactgtatccagtcgggctgggttcctgcaactctgacttgagctttccctgggggtcccccccaacctccctgaccccataggactaagagtctggggttttactgagttgaggaaggtggtcttcatacccacctccagacaggatgaaaggtgccaagaattccaccagcagagctgcaggaggagcttgccct

SEQ ID NO: 814588 - DNA, 618 bp, Homo sapiens
aaacccagtcaggagtaaattcatgtggacatgcaaaatagataaacatgcagcattcacaggagcacatgaggagaggccagctgtgcatgcgtgcctgcatgtcaggacacacatgccatggggatacagatgtgagaggggctcagacatgaggaggctcaggacctgctatatcagaaaactgcaggttaacttgaaagcagaactttctgccaagagacggggaggtggaacctggaaaatgggaagcagagctccctcctgactcctcctctaccctccagaacttcctacagctgcagacttccaggagtaaccgcttctcctggatgggactttcagacctaaatcaggaaggcacgtggcaatgggtggacggctcacctctgtcacccaggtagattctgggagaaagggacactgtatccagtcgggctgggttcctgcaactctgacttgagctttccctgggggtcccccccaacctccctgaccccataggactaagagtctggggttttactgagttgaggaaggtggtcttcayacccacctccagacaggatgaaaggtgccaagaattccaccagcagagctgcaggaggagcttgccct

SEQ ID NO: 814589 - DNA, 540 bp, Homo sapiens
gcatcacagggagacggttaggcctctggataactgcaggcargcctgactgatgtcagaccctccacaagaggtggtggagtagagtcttctctaaactcccctggggaaagggagactccctttcccggtctgctcagtagcaggtgctttttccttggcactgacgctaccagtagaccacagtctgcttggcaacggggcatcttcccagatgctggcattactgctagaccaaggagccctctggtagccctgtctgggcataacagaaggctcatgctcttgtcttctggtcacttctcaccatgtcccttcagctcctatctctgtatggcctggtttttcctaggttatgattgtagagtgaagattattataatattggaataaagagtaattactacaaactaatgattagtgatacttatatacatatctatgatctgtatctagtataactcttgatattttatatattttattacactgaaacagctcgtgccctcggtctcttgccttggcacctgggtggcttgc

SEQ ID NO: 814590 - DNA, 571 bp, Homo sapiens
ccctaccttgtgatccttcatctctctgtacatctatctagcctttctctacatttctccggttgcttttctcctcctgctttcttakgtttttttttttttttttcacttctgccatctcttggcatatccctcaccaatcctctattttgccatctgttatgggcctttcttattcttcttttctctgcctcaggttttctactgctctctgtctcctgattcctttggcccacacaatcgcaacacggtttggagtaagacgcctgcatcccggaggagcgcattttccacgccctggagctccgcaggcaagaataccccgtgccgcaggacaggcccctgggacctccccagtgcaggttcaatgaaagcggtgactgcggaggggagacctggggagcagcaggccccggcatgaggaggaaggtgcggggcggggggggggggcgcgacggcgccttaggaccaggatggggtctgcaggatcccaggacctggcagaggactcggcctccccgggactggggctgcggcgcggcgctcccggggctgaggagggggaggctgg

SEQ ID NO: 814591 - DNA, 571 bp, Homo sapiens
ccctaccttgtgatccttcatctctctgtacatctatctagcctttctctacatttctccggttgcttttctcctcctgctttcttagstttttttttttttttttcacttctgccatctcttggcatatccctcaccaatcctctattttgccatctgttatgggcctttcttattcttcttttctctgcctcaggttttctactgctctctgtctcctgattcctttggcccacacaatcgcaacacggtttggagtaagacgcctgcatcccggaggagcgcattttccacgccctggagctccgcaggcaagaataccccgtgccgcaggacaggcccctgggacctccccagtgcaggttcaatgaaagcggtgactgcggaggggagacctggggagcagcaggccccggcatgaggaggaaggtgcggggcggggggggggggcgcgacggcgccttaggaccaggatggggtctgcaggatcccaggacctggcagaggactcggcctccccgggactggggctgcggcgcggcgctcccggggctgaggagggggaggctgg

SEQ ID NO: 814592 - DNA, 577 bp, Homo sapiens
cctgaatagagcaataacaggttctgaaattaaggcagtaattggtagcctaccaaccaaaaaaaaagccctggaccagacggattcacgactgaattctaccagagttacaaagaggagctggtaccattccttctgaaactatttcaatcaacagaaaaagagagactcctccctaattcattttatgaggccagcatcatcctgataccaaatcctggcagagacacaacaaaaaaagaaaatttcaggccattaaacctgatgaacatcaactcaaaaatcctcaataaaatactggcaagccaaatccagcagcacatcaaagagcttatctaccatgatcaagtcggctttatctctgggatgcaaacctggttcaacatatgcaaatcaataaacataatccatcacataaacagaaccaatgacaaaaaccacatgattatctcaatagaggcagaaaaggccttcaataaaattcaacccttcakgctaaacactctcaatatactaggtattgatggaacatatctcaaaataataagagctatttatgacagacccacagccaata

SEQ ID NO: 814593 - DNA, 615 bp, Homo sapiens
ggcacttcatctctatgctttcatttccccatctgagaaatggacatgtaataatacttatctcataggttgctgtggtgattaaatgagttgatacatgtaaagtacktagaaggtgcttggtaaataatgagtgctatataaatagtaattatcaagtacatttatatcatctgaatataatgtttaaaattatattttgatagcataggattataattttaatcaaacagagtaagttactctttttttaatttgtaaattgatcaaactggatatttcctcattgccctgctccgacctcacccagcttttctagcctgaaaaattttgaatggttgtgacattacctacattacctttctggatgaaatggaaaggctgttaatgttaatatttttgtaaattgtgagactgaaactgaaactctatcagtacttaaaaagtaaaatctatgatcaatcatttactttagtagcacttttaaacaaagtacaggaaacagtgtacaattcccttagcttattctacaattgcaattttgttaagtacatttagaaagattgcttaataactcagtaagctttgggaatccagcagagggcaggcaggtga

SEQ ID NO: 814594 - DNA, 614 bp, Homo sapiens
tgcgtagacatacaaagattactttttatagaagcttgatcctttatgaaatctggtttgtgtgatcaatgaaagtactgataatattctcaacagacacttggcctagtgcttcttagttattaagaagacagttccatgagagtctttgctatagctgttggagtagatctttcttttgctcctcagagtgttccttgggttgtaggatcagcttcttgcttatgtagggacaggaactttagtcagagggtcagggagttatatttccggacaggatgctcaggggcccagctccaacttacatacagcctgcatttagttgctttttgacagcaactgaacaggatagaattttgtttgtgtgtgtgtgtgtgtgtgtgtgtgtgtgtgtgtgtgtgttttaacttacatacactgtggccattcagcccatcattgcaagggctttttccattcctacaagttagaaaggggaatcacagttacccaaatggaaaacttctagcttgagtgaataaaggaagatgtaaccaagtggatttgattaaggatgaacccctatttttgcagctccactggcrgggatatggaataaaacctgtttcttcatg

SEQ ID NO: 814595 - DNA, 602 bp, Homo sapiens
aaacaaattgcttctacaggcagccaatatttcttgagtacctattttgtggtggagacagtgctagacacactgcctgggagatactcatgctttgacctctggcttccaacagtggcatagtggctggcctttgctttactgacttgggtagatagataattctcagataagtactaatgcctctgaaaatatcttctttctttcacactcagttattccaagaaggcaaagagggaggcagttagttgttatgaattcagggcaattataaccctgatttacttaagagtacatggaatgaaacaaataaagcattaaccaacattttctttgaaatgaggttgggtaagattagcttagaggagggcatcattacggggagaagagccattcatcactgtctgcaataatccatgttgaatatcttaatgtttaattatttttaatcttttggaaataaagaactgccctagggtgttttccttactctttccctcctacagagmagcctgctttgggagctgaagattttctatgtattctttgaaatggatccaaattcattacagatacactgtgaagtggacatagacgatgaa

SEQ ID NO: 814596 - DNA, 648 bp, Homo sapiens
taacatttctataacttgggctgcccagggcttgcttggcataaacccacctggaagctcacgggtagaggggttcacagtaagaaaatgtaactgctgggtacccagagccctttcatgtstgagaaagttctgcttgcagggtggcaaggatcaggatcagcatgtgctttctatccactggtaaaacgtggattggagaaatactgccttttccttcagaatgctttggtgtctggacacatgacaagcctcagaagctttgatcttactttaaactggtctcccatcttatttttatttgaacagagtttgtggcagtcagaggatacataagggtggcgtcctttgacctccctgatgtttgggaggtaaaccacctccatccctcagaccaggaatgtagtcatgtgaattgatatctgcagagtgcctgacacagctggagggctaggccaagccagctacaaaagaacttgaggtgtgggaaagtttcttagggcatagtaatagctgtatggcaaagccgaggataaagttgctactgtctgcttgttcattcacaagtacttattgagcttctgctatatattgggtgataggctgggcctgcaaatagcataaaactattaactatagagtaaaaca

SEQ ID NO: 814597 - DNA, 659 bp, Homo sapiens
catgtaggtgacattcattttkttccaaaataaaggatacaatgtcaaaatcaaatatctaaatagaatgaacataaatcttacatttgctcaaaggtgtgcttgattgattattcctgaaagctagcatttcttgtgaagggggctttggataactccctagagggagaaaaagagaggaaacactgtaagactatacagacagaatagaaaaggttgactttttcacaatatttccaaaggtcaatgaaggcaaggggcactgttaggacataagcattactcactattctccatgctcgtcagggctctctccttgccattttggcacatttaggaatcttgtacaatttgcatgtttgtttccaatcaggcaaatttaataaagtcccattttcaccatatctctttgagttttaaacatataatattgggataaagcctttgtcttgctggttatccttttctctacccagctctgtcttctggatgaagaaggaagagctctcaaacccagaaagcatatcaacgtacgttcttctccactgtgaaacactgagctgagcactctataatacagccacgggacttgcacactgcaagacagtgttatttgcctggttcttttcatcataggtttgatttagcaggcaaattta

SEQ ID NO: 814598 - DNA, 545 bp, Homo sapiens
tttgtagatgtaccatggagaaaatggatactgcaggtaaaacaaaaawgtcagcattcctcccatacatttttaacgaggctacagccactaacacagctgctggagggaaatttggcaacatttaactaagtaacaaatgtgcatacattttcaggtagcaattgcacttttatgaatgtatcctacagatatactggcatataccaaatggtttacccaaagtagttcatgaagcattgtttataataaccaaaaagtatgagtaaaaataggaatctggtgagataattcatggtatttcataaaactgagtatcatgtagcccaaaaaagaatgtagaaattctttatatattaatatgtatagcctccaagatatgtcattaagtagaaaaaagacaaaacacaaaaaaatataaagtatgcacatcatgctatcatttatgtgaggaaaataagaagagggagaggatttcatatatatctaaaatatgtctgaaagggaacaaaaagaactggtaatatctatcacctctgaggaga

SEQ ID NO: 814599 - DNA, 540 bp, Homo sapiens
caatgtatcataactagctggtatacttaatttttttgaaaactcttattttagagaaggaggcagggtcttgctctgttgcccaggctggagtgcagtggcacaataatagctcatgctaacttcaractcctgagttcaagtgatccttccccgtcagcctcctgagtagctaggactacaggcacacaccaccacactcagctgattaaaaaaaattttttttatagagatggggtcttattatgttgcccaggctagtcttgaatgcttggcttcaaatgatcctcttgcctcgatctcccaaatcactgggattgcaggcatgaaccactatgtctggcctgtttgaagattcttaactgtttaagctgccgagaagtcagagaaactttaagctaaactgtgggaactttgtgaggacaaatagaggaagaacacaaaaggaggatggaagtagaagaaccagagacttgggaagtaatgaagtaatatagtctcatagaaaaaaagacattcaagaagagtgaatggtgtcat

SEQ ID NO: 814600 - DNA, 537 bp, Homo sapiens
tattgttaactgcagtcaccctactctgctatccaacattagggcttatttattctgtctaactctatgtttgtacccattaactgacctcaatctttgtccctaccgcttgctcccaaccattctccacccctcattctactgtctacttccacaagatgaactttttttttttgctcccacttatgagtcagaacatgcaatatttttctttatgtgcctggtttatttcacttaatataatttataagctgttggtaggaatataaatttgtaccgccactacagaaaacagcatggacatttctcaaaaaactgaaaatagaactaccatatgatccagcaatcccactactgggtatttatttatccaaaggaaaggaaatcaaaggaaaatatatcaaagggatacctscatcccaatgtttgttacagcactgttcacaatagcaaagatatggaattaacctaagtgtccatcaacgaatgaatggataaataaaatgtgatatataatgtgtatacatagtatatata

SEQ ID NO: 814601 - DNA, 649 bp, Homo sapiens
cacattttcaggttatctttatagcaggaccccattatcccggtaccaattttctgtattagcctctttccacactgctgtaaaaaattacccaagactggrtaatttataaaggaaagaggtttaattgactcaaagttccacatggctggggtgggctcaggaaacttacaaacatggcagaagtttaaggggaagcaagcacattgtacatggtggcaggagagagggagaacaaagggggaagtgccacacttttgaaccatcagatctcatgagaactcactcactatcatgagaacagcatgaaggaaaccacccccatgatccaatcacctcccaccaggtccctccctaacatgtggtgattacaattcaagatgagattttggtggaggacacagggccaaaccatatcaaatatctacatttttaaaaggtctaagaaatagaaagtatagttaaatttataattagtcacattagttcttcatgtattaaagtcagagaacatctcaagcatgaaagaattgaagggacgcagcactcaggagcctttctctaaaatatttcttaagtgatcaaattagacaatgaagataaatgaaaaataaattaatttataatagacaatctttgctaaaagatc

SEQ ID NO: 814602 - DNA, 598 bp, Homo sapiens
ggggttcactttgcacatcacaggatccaaactgaagaagatkaagggaaggcttttataggcacccactttcctcccttctttctgattacaaatataattttgatcccttactctcctgagtacattctagctcctaccaatttctcatttctgctcaaaacctttgatgaaaaataggaaagagttccttagaatatatgagaccatagtctagaaatacccttttacatgggtatagcatatgcatgggctattctgctttgagcataggaagggtaccacctgtgactgtcagtgtggacatgtctcatagtgtggaggtccagccacagctggaagatcccatagcttcccaccattctgctctcatttcacatgcagcatgtactgatttcctgctacttagaagagactgttgccgtcactcattattgcccactgtttggtactataaattaccgaaacttgaatttcagaaaaatcctcctaaaagtcctgcaaatttttttcaaaagttttccattgagtatccaggaactgagtggtttcctgttctgctaaatatcttcctcccttcctgattttccaaacgctt

SEQ ID NO: 814603 - DNA, 599 bp, Homo sapiens
aaatcaaaaaataacaaatgctgatgaggctgcagataaaagggaatacttattacactgttggtgggaatgtaaattagttcagcaaatgagaaaagcattttgaagttttctgaaagaacttaaaacagaaataccatttgaaccagcaatcccattacttggtatatacccaaaagaaaacaaatcattgtaccaaattgacacatgtaataacatgttcatcacagcactattcacaatagcaaagacatagaatcaacctaggtgcccaataatggtagattggataaagaaaatgtggtgtatatatacaccatggaatactatgtaaccataaaaaagaataaaatcatatcctttgcagcagcatggatggagctggaggccattatcctaagcgaattaatgcaaggacaggaaaccaaatacaacatattctcacttatatgtgggagctaaacactgggtrctcagttacataaagatggaaacaatagaaactgggggctactagatgagggagggacttactatgctcagtacctgcatgacaggatcattcaaactccaaacctcagcatcacggtatagtatac

SEQ ID NO: 814604 - DNA, 505 bp, Homo sapiens
ttgtggtcccttaaatttaaccatcccttactctgtcacctatgttggagtgcagtggctcaatcatagctcactgcagcctactgggtagctgggactataggcacgcattaccacactctgctaattttttcactttttgaagagacacggtctccctatattgcccagcctggtctccaactcccggactcaagcgatcctcccgcctcagcctctcaaagtgctgggattacaggggtgatctaccacccagccccaccttcttgaggagttaggtttcaccttggagatcagtgcttcttatctataaaatttccctggagagctatgatgaggttggaaacctggacttaaaacaatttttttcccccagatattcttaggatagctcgattcactgtcataacaatgtttggagactatacatatatataggtacgtatacattstcttctcaaaagaagcttcatgacttccatcaatttctgggtaacctctgacc

SEQ ID NO: 814605 - DNA, 563 bp, Homo sapiens
gagaacactaagcatacctgggcaaacrgccattcgcacatcagaaaatattagaaacttattgtgaggaacagagggggaacaaaaaagaaaaaggaaaaaaagcaggtctgtccttgcatatatacaatgtctgtggaagtctcacttttaatgccaactattatgaaactacttctactctgatcaaattatatactaggtgccaaataaatggtgttaaattgaaaacaaaataatgagttgattaaccattattttctttcaagccagaatacaagctacagcattacatttaagcataaatgtgaatttatattttatagttttcaactatctaaatttcctttttaacttaaatactattattgttgttgacagattaggctactattaccatgattttttttaaagtacttccacctaattttaatggaccaattattaagacttatcttccaatctggtaaagagatatgtaacggtaaaaaaaaaaattaaatagcatttcaacagtgatagagataattagagaaactattctgaaagtgctggctgttccc

SEQ ID NO: 814606 - DNA, 503 bp, Homo sapiens; identical to SEQ ID NO: 814277

SEQ ID NO: 814607 - DNA, 589 bp, Homo sapiens
agcacccaaaattactgcagcttcacagacatcacacacttaaaaaaagactcctggcttcctttcaaattccatcagtcaacttttatcaaccataggggaagcagaggaggataaacactgcctgcgataccatttgggttttaggttttgggtttcttccagttaagtttgcaaaagtgtgaaagtactaaagaacagaatattgttcctcattcttactatacaataaatacttccaaatatgtccttaaatgcaatcctttgtgattcccttaattaatcttgactaatccttgaaggaaccatgatagcaaaaatttagtgtctagcataaccttactacagtttccctttttaagttctcatttgaatttgataagttaatatttactttaaaaaaatccacatcatttctattcaatggcacttgaacttttaaaaaatgtttcaaagaaattaragctagatatgattggaaataagcaaaacgagaaagagttgtcctatgtgtatgtagcacaaccctccctgtgtcctttaataaaaagcaggactctggtcattccatgatgtcactggcattccg

SEQ ID NO: 814608 - DNA, 604 bp, Homo sapiens
gctgttatgatggatgagggcctgtccctgcagtacgatatggagggtagttggggatgggagcaaggagaggagcccaagtctaatccatcccctttttgagagataaagaatctgataaccacaacrttaagccacttgtccttgctacacagctaggtagtagcatatgtgaaactagaacggatatttaagagcttgacttaacgtttgtggccagctaaagtatgagcacagttcacagcggcacgggggagatgactcaagtagttcaatggaaagaaggacaagtgggtaatattaaaggtgaataacaaggtattttttacttagattttaacacagccaaattcacctgctctttatggttgagactacataatacctaactagaagaggaaatttcatctgtcaactagttactttgttactttgtttaaggaatcaggtgatttttcttcttttcttctccttttgtaccttatattatttcaaaggccttaattggcctgttgcttttaataacatagtcaatattttaagtaaaaattgaaaatcttcgtatattggctgataagcattatgtaaaatttgaagttgaaag

SEQ ID NO: 814609 - DNA, 583 bp, Homo sapiens
tggctgataagcattatgtaaaatttgaagttgaaagtaattcattctttagccctttaatgtaaaagcaatctcttaaaaataaactttcagcataagaagcttgaatcttcagtgttggagcatttgagaaaatagagtaaatctagttttatataactaccctaatactcttagaataccaagtgtttcacagtaacaagtttgagataggatccaatatgaatatattatccccacagccagcctgttcctttagtcaatttcagaacacatattaaagaaagcaatatctatgcccaatccttgtttcaaagtatattcatatgttcagatttggggggaaagcatccagcaagaagtattttttaaagcaaataaactccccaaaggataattgctcttctagaggcatcagtgtgtattttaatgtttatctttgcagtagggtacatttctattttstttcagcaattttactcctagcaccaggatggctataggaggacttcttccagagatgtgatgaatgactttcaaacagttatatttgagaccatattttccttcagagagaatataa

SEQ ID NO: 814610 - DNA, 627 bp, Homo sapiens
gtattgctctattgtttatctgcagtgattcaacaagtgtgggattaagggagtaggattggatttacctayagtaggtacatttggatgtgtagcacctactagaatgatggtttgctgccagaggctattacagtacctgcaaaatcttggatttctatatgtacagcctgtgtgattgtgcatgtgtgtgtgtgtatgcatgtttgcactatttttggacatgatctcattattccttttctgctactataaatttcactccatatgacacctatctgcctgccacacttttcccccgtgaaaccaaactaaatcggcctgttaatcagttctttatggaagtcatccaccttgtctcatggttttcatgacacttatttttacaacataaatcacaatgttctgtaatttttacattaataagtatcagtaaacatctatttgcaaggatcaaacaaagcaacattggagagtttccaagggttcagtgtattgtaatcacaaatgtcaacagtaacagcagtttgcacattaagtttattataaaacttacacttatgtttaattatataaaatgggtacatttaagagtgagagtcattatttcactagaacaccattttt

SEQ ID NO: 814611 - DNA, 615 bp, Homo sapiens
tcccaataccgtgagaattaaatttctgttctttgtaaattrcccagtctcaggtatcttgttgtagcagtacaaacataccaggaaacttactgaacaatttttgctatatcagattagtaagaattagtcacaatttcacatctaccgacagagagacagggatgtatattctattaacttggagcattactacattctgaagtacagggttattgttactaagatggaaggggtgaaaggacattagtgtagggagacaaagatctctgccaagatctttagtgcagatacatcacatttaaatttctaagtatttttcaaattactattgtttgtttttattgttgctatctttttttaataaacattttactgtgggattattttccaaaaccattaggcttcacttcttaataaatgattcattttagaaagaaatcatctaggttctagtctctgctctgtcataaatgctttgtataatcttggcaaattgttttatagcactggatttcaatttctttaatatgaaatataaatgtttttaaaatttaaccataacataattttaccatctatttttcacttatctatgtatgatgcatgtaaaat

SEQ ID NO: 814612 - DNA, 536 bp, Homo sapiens
agtaacatagatttccttgtgcatggaaataaccttttacatacaatcctaaaggcacaawcctaaaggcacaatccatgaaataattgataaaccgaacctcgtaaaaatgaaaaacttctgctctgcaaaacacatatcgagaaaataagaagacaaaccatagactagaagacatttgtagaagttatatctgataaagaaatgctatccaaaatataccaagaactcttaaaactcaacaatacaaaaaactctgatttttaaaaatgggccaaagacctgaacacacatttcaccaaaaaatatatacatatgccaaataagtatttaaaaaggtgctctacagcatatgtcattggggaaatacaaattaaaacaacaatgagctacacaccttttgaaatggcccaaatccagaacattgacaacatcaaatgctggcaaggttgtgaagcaacaggaactctcatttattgctggtgggaataaaaaatggaacagctactttggaatagagtgtgtatatttcttac

SEQ ID NO: 814613 - DNA, 578 bp, Homo sapiens
gagtgttgagacgtgttgatgagtgttcacaggatgtagctcatgataacagaagaagagacaatcatggtgaagtgtagagttcactgccaacaggttttcccttttstgaatgtgttacatcatgaaacaagtgaatttaaacagcaagtacctggtcaaatttggtgaaaattatgatgtttttaaagtaacactctagggacaggactcagactgaaacatcaatttcaggtaaaattaggtcagatttctggggcaggccttctcaaataattaataatgttttatctgagttatttaaattccagaatgataatgatgaaaaaaatcaaagatttaatttttaataattttgtgtaaattatacttttaaaaacccaaaatatgattgaaagagaatcacacacatttggcttgatattattataaaataccatacaaaggcaacaaattagggcaattataattttaaaataagaagtttagcaaatatcagatggacgaaggcttcttttttgccttttttctttcttaagaacattttcaggttcatagcaaattaagtaaaagtagag

SEQ ID NO: 814614 - DNA, 664 bp, Homo sapiens
aaatatataaatacctaaatatagttaaaaagtaaataattgaatgcaattaccagagtaattaacctcttaaawactgagataggagaaagaaggagagaaacttaccaggaaaaaatctattcctgttcctccacctgtaaatacactctaagaaaatgaattgactttagagttattttaattttaacttaattttattgtgtctacttgtgtttgcaaacatttttgagaatctttccataactattgctttcattcaaattcactcatttcacatcagtaaaattagtgtgaaaactggaagtataggttctgattgaatcagcatatagcaagatagcactaattgatttgacttgtgattcaagtcagaacattttttttggtaacgttgtattattatgcatgtagacatagccttagtattaactgacattatctgtcaaggtccaccacacttacacaatacagtctgatcataaaagagcaagtgagtttttgatagatgaaacacctaaatatattcatgtattttaaaaccaaactctctagataggtcattaaaaacatacttcaaaatggaaactgacaagccaacggaggtaagtgtggctccattgttacagctccctatagctcccataccattaaaaatgggatt

SEQ ID NO: 814615 - DNA, 634 bp, Homo sapiens
gtcaagtgtaaaagcatctgtctctgaagatgcttttctgtgctaagtttttgacttttttttttttttgctttaagttttcttttcttaaattcttatcgaattagttttggatatttgtatgtttttctttagaaaattgtattttcttgaggtaattaaatatattagcataaatttttctcagaaaaatcttaccttataacatattttataattgttaaaaatattctttttcattttcaaaataatttgatcagttttttctgtataattaatgtctcatattgatcatatccattgttttgttttatacttatttctgcttaaagcatcattatttccttctgacttatttagattttgtttatttttcttcctatttattaagtccttaataaaatatttcatttatttcaaaaatagtgaaaataacatttactctgcgtatagctttggttgcatctcatatatctgacgcaagtgttatctcttactcattctgctcatgtaaactcaactattttcttgaataatagttayttgcaaaaggtgcatagaaaaattgtggatgtgacaatctttcagaaatagaagaagaaatacagacctactgaaatatagtatcttaatt

SEQ ID NO: 814616 - DNA, 515 bp, Homo sapiens
atgagacttgtacaattaagcagctagtttagaagacatagaactcaaatccaaacctagttttagatcctctaccttgctatactattcttacygtgagcacttagaaggcatgtattgtgctttgatcagtcctcttcctagcccctgccttacttagtcagtactaggcagcacaagtataaaggagaaattaaattacctgctaatgttaccaccccatataaccaaccactattaaaatattaatatatttctttccagtctttttgcatatatatataaaataaatgtgtataaataatattttacaaaattttggccatattgctcatagttttatttttttaaatacagtgtgaacattttcacacacaatagacagtattttttggaaacacagtttttgggccgggtgtggtggctcatgcctgtaatccctaataatttgggaggctaaggtgggcagattgcttgagctcaggagctcaagaccagcctgggaaacatgatga

SEQ ID NO: 814617 - DNA, 504 bp, Homo sapiens
ttgtcttcaacatttgcttaaatgattagcctgaggtgacagaagtcagtagtagaacttaagacagaagtggagattcagaatgagagttgccagaaaagccaaccatcagttaaattacttacagtgctagtgactagtaaatgactggaatctcaaggaggtggtagtggaggagggtagtttctaaccagtcggaatcctagtttaacagaaaagaaattgaatgggatggtgtaaattatcttttagtatttattaaccagggtcactatatatggctgtgcagttgaatatcacagaagccctgctatgaagtctagagcactctgaaaaagattctgatcaggtacttaccaggtggataacatttatggaatacttatatagggacagatgaccacctacagaccttatgccttaaaaactgagtcttctctccrgcagaaatgatcattagcccttccctgcaaaatgtgtaatccagcatcctaggctattcct

SEQ ID NO: 814618 - DNA, 504 bp, Homo sapiens
ttgtcttcaacatttgcttaaatgattagcctgaggtgacagaagtcagtagtagaacttaagacagaagtggagattcagaatgagagttgccagaaaagccaaccatcagttaaattacttacagtgctagtgactagtaaatgactggaatctcaaggaggtggtagtggaggagggtagtttctaaccagtcggaatcctagtttaacagaaaagaaattgaatgggatggtgtaaattatcttttagtatttattaaccagggtcactatatatggctgtgcagttgaatatcacagaagccctgctatgaagtctagagcactctgaaaaagattctgatcaggtacttaccaggtggataacatttatggaatacttatatagggacagatgaccacctacagaccttatgccttaaaaactgagtcttctctccagcagaaatgatcattagcccttccctgcaaaatgtgtartccagcatcctaggctattcct

SEQ ID NO: 814619 - DNA, 580 bp, Homo sapiens
ataccctctgccccaacacatgcatagcctccccattatcaacgtcccccaccagagtggtccatttgttccattgatgaacctacattgacacccagagtccatagtttacattagggttcacccttggtgttgtatattctataggtttggagaaatgtataatggcatgtatccaccatcatattatcatatagagtagttttactgccttcaaaatcctctgctctgactgttcaaccactgatcttttcaccatctccatagttttgcctcttccagaatgtgatatagctaaaatcatacagtatgtagtctgtccagattggctcctttcggtaatatgcatttaagtttcctccatgcctcaccacagcttgatagctcatttctttttagcactgaataatactccattgtctggatgtaccacagtttatccattcacgtactgaaagacatcttggttgcttccaagttttggcagttatgtataaaagctgctataawcatctgtgtacaggtgtttgtgtagtcatttcagctccttttggtaaataccaaggagcacaattgctgg

SEQ ID NO: 814620 - DNA, 582 bp, Homo sapiens
tggctccgtgtcctcacccaaatctcatctcgaattgtaatccccacatgtcaagggagggacatgattggattattggggcagtttccctcatgctgttctcatgatagtgattaatcatgacatctgatggttttaaagtgtggcacctctcctttgctctctctttctctcctgccgtcctgtaaacaaggtgcttgcttccccttcgccttcccccatgattgtctaactttcctgaagcctccccagccatgcaaacctgtaaattaagcccctttcctttataaattacccagtctcaggtagtatctgtaaagcagtgtgaaaatggactaatataccagtcattttggcacaacacttcagaaactctaaaatacttaaatatttcagtaactatgaacaaactttttcataaaataaatatgaaaatacttttaagtgwtcaagtaaatatgatttaggacatgactccactctgattttgctatgtagcttcattatccgccatgagttaaacatgtatttattaagctctttctatctagatgcaaagaatttagtgacacaaagatgaac

SEQ ID NO: 814621 - DNA, 559 bp, Homo sapiens
aatccaggctagatttagtttccctgaaagccacccacaacttcaaacgctgttttytaaatgcatgtgctcagagttttgttaatccaaatattaggcatgattttaaaaattgtagagaaactagctagtcaaatggaggatcttggaactgtaggatttacaactcaaatggatcttggaggtaatctagctcaaactccaaactgtgcagatgaaaatatgtaaggcccagagcagtcttataattgcctggtaactttcctttcatggcacagaagaacttactacaccttttggtgccatcacaggactttatgaatgaatggcttttgcacaaaagcgaggacaatgtcagaatcagttcacttcataggcttcatcacttggtaagaagagaaagccaacaagttctggggagtcaagtgctccttcactgaataagtgataagtattaataaattgcttttgcaaggcatgaccccagagctgacaataagcttttcctataggctccatgcagaaggctggagtatgtccaataaccaaaccaaaccaa

SEQ ID NO: 814622 - DNA, 634 bp, Homo sapiens
ggatatactttctgagatctggggaaatgcccatttatcacactccctgcttaaatctcactcagctcttcttagtttccaaaaggagcatggcttccttcttttcttgattttcatgacactatatgctcctgattttcctcctacttctgcatctacttctgattccttctatggaatccattttcctgcccatcccttaaatgcttctgattttttctcttttcttcctcctcctcaaaatctaagtgatcttatccacgttcacagctccaactattctctgtttgtgatgacttctgagcagctctctgtcctgcatataagacctgtacttacctgccacttgagatctcaactcatgtgttccaaagtcacctcaaaatcaacatatatcagactgaacttatcatgcttgctggaaaggcttcgctcctgtctttccaagatgagtgaatgatgtccacgtgccagaatacttctagaaatctaggcataattcatggyccctttcttcctctccttctacatccagtttcatatcagatgtcattttagatgacatctagatttcaggtgtctttcatatatatatacactgctgctactgcaattcaagcaaccactatctctg

SEQ ID NO: 814623 - DNA, 476 bp, Homo sapiens
gcttgcctcctgcagtgttctaaggaaatttttcataaatcatgctttgccactgattccttacccaaacctttttggagttacctttgcttcaagggaagaacaagaatggcactttcaatatttgyagtcatttgaataaaatccactcaaatgttaaagtgacagtgcttatctttgtcaatttccacacattatttgcctcttgctctgattttattctggctacagagcctgcttcaacactctggaaatctcattgctcttgaattttaccatgttcttgctaccaagaagtaaaatgacctgataaattgatccatattataatttaatttgggtattattatttctgaaactagaatttttacattttgtaaactctcattttaagggagatcctttggcgaagagacttctacattcagagtctcatggtgagcttttagtcgctgggagttctctaagcaagacgt

SEQ ID NO: 814624 - DNA, 468 bp, Homo sapiens
gtcacaatagctctatggagcagataatataattatcccattttacagacaagaaaactgaggcacagagtgattgagtaacttatctaaggtcacacagataaacaataacaggctgggatcggtggctcacacctataatcccagcactttgggattttaattacaaaaaattagctgggtgtgatggtgcacgcctgtaatcccagctactagagaggctgaggcaggaggattgcttgaacccgagggtggagtttgcaatgagccgagatcacgccactgcactccagcctgggcgacagagtgagaccccgtctcaaaaaaaaaaaaaaaaaaaagataaacaataacaatactttactgttatcatacrctttctacaggcactgaaattggtgctttccaattatgatgtcctttgttctcataaaccctatcaccagaggaaatttgggcttagagaga

SEQ ID NO: 814625 - DNA, 596 bp, Homo sapiens
ctgaaacagttttctttgcttgtttattttttcattatatatataatgaaaaatatttttatatattcaatatatataaaatgaaaaagttatatatatatataaatttttcataaagaccaagtctcactgtgtttcccagggtcttgaactctcctgggctcctgcctcaccctcccaaagtgctgagattacaggcatgagccacctctcccagtcttttttttttttgagacggagtctcgttctctagccaggctggagtgcagtggtgtgatctcggctcactgcaactctgcctcccgggttcaagtgattctcctgcctcaccctcccgagtagctgggaccacaggcgtgcgccaccatgccgggctaattttttgtattttagtagagacggggtttcaccacattggccaggatggcctcaatctcctgaccttgtgattcgcccaccccggcctcccaaagtgctgggtttacaggtgtgagccactgtgcccasccagtcttttcattatattctgtgtctaaatttatttaactaataaagagcattcaggagttcaacactagcctgggcaatatggccaa

SEQ ID NO: 814626 - DNA, 623 bp, Homo sapiens
gaaccttcaaccggtgggatctgacattatctccaggtagacagcgttggaactgaattacaggacacccagctagtgtyggctgcttggtgtgggggggaaacctcacatgtttgttcgtagaaggcttcatctgtgttgatgatttttgtggtgtgagagtagaggaaaaatgccatcagggagagttttctctacaccctatagctcctagatgctttttatttaagacattcaaaccttgtgaaaaacaaacaaacacaaaaatctttttatttaagacggtcaaaccttgttcaaaacagcacagacattaactcggaatttaggatttattattgattaattgacattatcttcagtctgttcatattattaagtgatataagtcaggtacacacacacatgtatggggagtgtgtgggagtgtctgcatgaagtatactgtcagaaaatatactcatttcaaagaaacactgatttaggccctggcaaataaggaaacatttctatttcttctagaaataacacattcatttgccaacatctgatctatccatatgacctcttaatacacacatgaaataataaagtgtatttttcattcatttaataagcatgtg

SEQ ID NO: 814627 - DNA, 360 bp, Homo sapiens
cctatgtaacttttctctttcaagattgttttacctttcttagggcctacatcattccatataaaatttaggataaacttgtcaatgtctacaaaatcatcttgctgaattttgatagaaataccattataccaatacatcaaaatttcggatgaattgacttctttactatgtttacgctttcaactcatgaatattgaatatctctccatttagctaggtctttgaattttttcatcagcatttgtaattttcagcatactgggttatattgtcttaaaatttatatttggagtatataaagtatataattttyttggggcaatgtaaattataaataattgtgattttgattttgga

SEQ ID NO: 814628 - DNA, 586 bp, Homo sapiens
tctttcccgtaaagtactgaaaagtatgtrgtaagctggtattgtgcgtttactattcagcaagatgcaaaaaatataaaaatattattttacatattttaaaaattttacttagaattactctacaatgtaaaggattaaacctctgattgttcatattactttttcagggacacaaaggatacagccaggattaggaatcaagtagctcagtttctatctagtctgcagctttatgtatggtacacacctttgccttgaaatcagttgataaaattttctttagagacaggaaatatattcaataaatagataatatgatatgcagtttactgtcagaaagagtgataatagacttcaattctataaataagccctcccaaaattttataacatggactaataacttcacaaagagttgccagtagttattctaattttggacattggaaaatctaggttagagttaaaactagttcctttactgctacacttgacaaaactctgtactaatctacattcccaggaacaatataaaagaatttcacttactccacattcaggccaatacatggtattgtctatt

SEQ ID NO: 814629 - DNA, 541 bp, Homo sapiens
agttcggagtcacagtcttccctgcttcgtattctcctgctgcagcacygccgacagaattctcacacacacacagttgcctagttatttcaagtgtgatagtaggagaaacttctggagtgtcaggatcatcgactgaggcagatgaagcctcacctggtgctgactgtaggtttcgttgctctgaggtggtcactgcttactcttctgagcccttcctaacctttcagcaatctgttcacgtggttcctattctctcctcagaggctgaggtactttcttcagctactttgtagccattggcagagcacggtcctttcctgtttggatcccagatcgacccctttttggtgtctggttgaaactcttgtctgagctgccaatttcttcagaaattaggagttttgttccgggttctctttccataaattctatttcctctaggtttctttccttttgtgctccaagagacttttaatagtcattcttcaaatttggggacttcggaacagttcatgacaggtattttctttccctcatc

SEQ ID NO: 814630 - DNA, 576 bp, Homo sapiens
ttgaagcaggcctatctttgggcctcctaaaagcttacttggatgstgaaagtggcagcagcactcaggaaggtgagatagtccttgaggccctaggtggtgtgcgtggtatcagcaatggcagtagcagtggtgagccaactgtcaggcccccaggcagcatgtaggagaacaagcaatggtgttggtgggttgggtaggccagttcccaggccctcaggtttcacatgggggcgggtattgatggtggtggtagtggcaggctgatgggcccatcctcaggcccttgggagaagtgcacaggtgttggtggtggcagtcaaagaggttgatcctcaggcctacagaaagcactcaggcactggtagcaggcttgctgggtctgttgttaggcctcctggtggtacgcatgcataccaaaaatggcaggtagggtaggttgatcctcaggtcaccaagcaacttgctcaggcactgactgaggtgttgctgggcaggatgaacctgtcttcaatcccagggatggtgtacctgtaggctatttccttgacccactgaaggtgcatggaggtacat

SEQ ID NO: 814631 - DNA, 563 bp, Homo sapiens
acaaatttcaacttatatcatagaactccttagtgtactttattattcaatcccytcactccttcccttatgcctccaaacacactcctcttcctctcactgccagagtgatgtcagaagattctgtagcaggttctcggaagcctattgtacagtaacaaagaattccagcagtgagctgtgagttctgtccttgctggctttcccaagtggaaggctaccctcatctttcactaatggcagactaggacaagcattacccaggcctgcaagcttgttaaggactaggaacccaagcaagaactcaccatgccaatcaaacctgttgggtggatatgtgggcaggtgttgaagaacttttctggaagaagtatacacaatcttgttgtaaagggcgtatgggtgtgggaacaattgggaataagatcccctagagttcctttactttccgagtcatctaggaatttgatcaagtgtttcatgttcttttgaaacatttaggggatgttttcaaagttttctttttcctaacctctttttgtcttagtcgaggggatccagaa

SEQ ID NO: 814632 - DNA, 556 bp, Homo sapiens
aatagcaaagacatggaatcaacctaggtgcccattaatggtatattggatttaaaacatgtggtgcatatacaccatggaacactacacagctataaaaaagaacaaaatcatgtcttttgtaacaacgcagatgcatgtgggggccattatcctaagtgaattactgcagaaacagataaccagtttccacatgttttcacttataagtgggaactaaacattgagcacgcagggactaaagatgggaatgatagacactggagactaatagagagggaagagaggaaggtgagtaggggttgaaaaactaccacagtaccctacctattgggtactatgctcactacctgggtgacagaatcaatcataccccaaacctcagcgtcatgcaatatgctacacatgtaccaaacctgcacatgtacccctgaatctaaaataaaatctgattttttwaaaaaagaatagactaaaagagagaaaattatctttataggataacaactttatcttttacatatcctttttacaatatgctataaaataaaaactc

SEQ ID NO: 814633 - DNA, 668 bp, Homo sapiens
attgtgcccttaatacagttacagttttagtcatgacrcacacttacacatggaatcaatttcaatatcaactatccttatttggatagtacatgtgtgctcatgctgtacaagtttttattctcccctcagaagaaaagtgcagataagattatcatctcataatctcaacataagcagtacagaggagaaatgaccaattccatataattataaattataagtgattcatagtacaggtgtaccttggagatactgtagatttggttccagaccaccacaataaagtgaataaagtgagccacacttttttttttggttttgtagtgcatataaaaattatacttacactattgtctaataaatgtgtaataagactatgtctaaaaattcacatatcttaattaaaaatactttatttccaaaaaatgctaacaattatataagccttcagtaagttgtcatctttttgcaggtatagggacttgccacgatattgatggctgctgatggatcagggtgatggtagctaaaagtttgggtggttgtggcaatttcttaaaataagacaacagtgaacttcactgcatctattgatccttcctttcatgaaagattttttgtagcatgtgatgctatctgatagcagcatttcacctactgtttca

SEQ ID NO: 814634 - DNA, 668 bp, Homo sapiens
attgtgcccttaatacagttacagttttagtcatgacgcacacttacacatggaatcaatttcaatatcaactatccttatttggatagtacatgtgtgctcatgytgtacaagtttttattctcccctcagaagaaaagtgcagataagattatcatctcataatctcaacataagcagtacagaggagaaatgaccaattccatataattataaattataagtgattcatagtacaggtgtaccttggagatactgtagatttggttccagaccaccacaataaagtgaataaagtgagccacacttttttttttggttttgtagtgcatataaaaattatacttacactattgtctaataaatgtgtaataagactatgtctaaaaattcacatatcttaattaaaaatactttatttccaaaaaatgctaacaattatataagccttcagtaagttgtcatctttttgcaggtatagggacttgccacgatattgatggctgctgatggatcagggtgatggtagctaaaagtttgggtggttgtggcaatttcttaaaataagacaacagtgaacttcactgcatctattgatccttcctttcatgaaagattttttgtagcatgtgatgctatctgatagcagcatttcacctactgtttca

SEQ ID NO: 814635 - DNA, 610 bp, Homo sapiens
ggtacatatgcagaatgtgcacgtttgttacataggttaaacatgtgcagtggtgatttgctgcacctatcaacycatcacctaggtattaagcccagcatgtttaaaagtcataaattttgaaaggttactagatataagatctatcaagataccaagatccactgtatttctgcctattggctacaactaattatgaaactaagttaaagacatgataccgttcacaataattaaaatgtcatacatgagagtatgtttaaataaaaatatataaaatctatacatggaaaactataaaacttaaaacagaaatgaaagaataacaaaataaataagagatatatcattttcgtagattagatgactcaatattataaaggtaaacaattttcccaaatttatcaatattttcaatgttatcctaacaaatatcagagttatgggtggttttttttttttttaattgacgcactgattcaaaaattcacagggaagggcaaagggccaagaatagccaagacattctggaagaacaaagctgaaagttgtttggcagataatttctgcaataaagctactgtaaataacaaaatattgtttggcccaa

SEQ ID NO: 814636 - DNA, 610 bp, Homo sapiens
ggtacatatgcagaatgtgcacgtttgttacataggttaaacatgtgcagtggtgatttgctgcacctatcaactcatcacctaggtattaagcccagcatgtttaaaagtcataaattttgaaaggttactagatataagatctatcaagataccaagatccactgtatttctgcctattggctacaactaattatgaaactaagttaaagacatgataccgttcacaataattaaaatgtcatacatgagagtatgtttaaataaaaatatataaaatctatacatggaaaactataaaacttaaaacagaaatgaaagaataacaaaataaataagagatatatcattttcgtagattagatgactcaatattataaaggtaaacaattttcccaaatttatcaatattttcaatgttatcctaacaaatatcagagttatgggtggttttttttttttttaattgacgcactgattcaaaaattcacagggaagggcaaagggccaagaatagccaagacattctggaaraacaaagctgaaagttgtttggcagataatttctgcaataaagctactgtaaataacaaaatattgtttggcccaa

SEQ ID NO: 814637 - DNA, 643 bp, Homo sapiens
tgaacccagaaggtcaaggctgcagtgagccaagatcatgccactgcactccagcctgggcaacagagtgagaccctatctccaaaartaataataacaattaattaagtaggagaaaaaagatgaagttacagtaataagtgtagcttggatcatattaatctttctaccaataccattgtaaaacatgatttttatactttttaatgaagtgatgtttgcaaaggcaacatatgtagggttcacaaaaataataatgaaacctgataggagcttgagacttggcctcaatggtcctgctctatcacagccccataaccaccatgagaatatgcctaggctagcctgatgagagagtacccagagaagagctgagtcatcttagttgagaccccagacattttggctaaaaccagccaaaatctgcaaagccaacccacagcttccttcagacacctaagtgaatctaactgagatcacaaggatcagcctgctgacttggttcatgagcaatagtaatacatactcattgttttaagctgctgagtttcagaatggtttgttatgcagcagtgataaactgatacaattagtgaactgaaagaagattcctgtaacgaaaccaagagacataacgtgaaat

SEQ ID NO: 814638 - DNA, 635 bp, Homo sapiens
caagcagtcaattagaaattaccaggcatgccaagaaatgacaaaaaacaaaaaagaaaaaggatcacaggtgktttaaatattggtgttactaaaaacagtcttttaaaataatcatgatcaatatgttcatggatatatacaacaaaaatgaaaatttaatcagagaactgaaatctgtttcctcagaaaaagaattgtatattcccaaattgataaatgcaataattaaaattaacatccagttgtattcagatttatttgtcttaaaaatgttttatattttggaggttttaaaaaataattttaaatgtgatttaaataaagtcatatattttgctcggttgatatatctaccaagtgtctcttaaactacaggtttaaaactgcctcaccacaaaacagtaagtatgtgaggtgatgcttgtgttaattagcttgattgagccattccacaaaacatcatgttgtacaacatcaatatatacaatttttacttgttaattaaaaaactataattaaaaaatagaagaatgtggatttcaacctatagttttcttttcatttctttgctttttctttacagagtttccttataaagccaggttatttgtcctgtactttctacactttga

SEQ ID NO: 814639 - DNA, 646 bp, Homo sapiens
ttttggtctttattctttatcccaagcccagtggatgtgttaaaatccaattgaaactttgaatggattcctcaggagaagatggcaattaagcacagagcattacttagacaagagatgatggtamcttgggctaaaatggtgattgcatcaatcttataaatgaaacagatttttttggaggtgataccaacaatgcttttagtatggatatggggatgatgtaagggaaaggaacattgcctaagttttattcctgtgcaactgaatgaatagaaggtggtaccattcatcacagtaagaacaatggaaaagtaccagtctaagggaagatcatggattcagtcctgatcatgttcaagtgagaaattttatttcaagtagttaaatgtataagtctgggctaaatattatatttacataataatagtaactgaagctttgaacttggttgagattaagaataaagtatgacatgagaaaaagatagactctaagagaagaatgtcaacatgtaatttctgggtagaaggagaagagcctgcaaaagatacagaacaaaatggccattgaggtaggtgaaaagcctagtgagttttaaaatgtatccgttgtatatagcattattgagcttattactgactat

SEQ ID NO: 814640 - DNA, 582 bp, Homo sapiens
gttggtttacttctcagtttagctcacaagtcatctctttttcactctcctgtcttcctgcaaatggttgagaaattatctgactcattgacaccatccttgagccaggggtttccttcagtgtcagtcacttctgaatcaagtacatttagctgccatcttgctatttttctaaattactgtcttcagcaaatgcttagataaaacactctttttattattctcatggaattcagcaaacagtgtctatgggacttctgtttttctgaagtgctctgttgccaggatacccagggtgaagatgtcaaagaagacacattgaaaggacaagctatagtgaatatccccgaatcagccccttgcatactaatcattcagatttaccctatgctgtttctgtttgctataggaaagatactagagtccataatttctaaataacaaactgtccggggaacagaaaacatgtattattaaggagggcaatgcatgtttaacttcattttttttccttttttttttcctctcttttaaaaygtggcactaagaccattagagacaaattctggcttttcattaata

SEQ ID NO: 814641 - DNA, 634 bp, Homo sapiens
taaatgttagcacaaaatgctgytttttccagaaagatgatttgaagatggcttgttctgcatcaaagagacttcgctcagttttctcaaactgtggtcatgttagaatcacccacatacattttaatgtagttatgttgggggggggagagagcatattaagtgtatttgtgtttatgtatatgtcttgggggtggtgtattaatttttctcaaattatctatgccatgtgccaatgtcccacaccatgtattttatgattcaacaggtctgcaataaacccaacagctacttcatttttttaagtcccatagttgattttaataaacaacatatattgaggaccaaaacgttattttataagaataaattagaagttcccctgcacctcttgttttacgacagtggttctcaacttttaatatgaataagaatggctgagatcttcctaaaatgtggattatatttcagcaggtttgaaatgggaccggagatgctgtatttctggagctggactcaacccttctgagctcccttgattttaatgtttttctttgcatcacaaatggcaagattccactgatgagattcacctcctcaagataattctcactagaagttaaatttgccacct

SEQ ID NO: 814642 - DNA, 631 bp, Homo sapiens
ctttaagagctgtaacactcaccgcgaaggtctgcarcttcactcctaaagccagggagaccacgaacccaccagaaggaagaaactccggacacatctgaacatctgaaggaacaaactccggacacaccatctttaagaattgtaacactcacactcaccaccagggtccctggcttcattcttgaagtcagggagacaagaacccaccaattcaggacacagtgatacaagttagtagtgatacatgatagtagtgatacatgttacaatgtggaagaacttcaaagatatgctcatgaaataagccagacataaaagattacatattgtatcactcaattgatatgaagtttctagaaaaggcccatgcatagagactgaaaacacatgagtgtttgccttaaggctgggcattgagtggttgccttagggctgaggttgacagaaagaaacaaaaaaaattttttgagctggtggaaatgttttaaatgtttagttatggttgtgtaagtctatgagcctcctaaaaataactgaaatatttacttaaaatagttaaattttatgatagtaaataaaactgttaaaatatgtaggaaagtataaataaacctgtcacctcaataaa

SEQ ID NO: 814643 - DNA, 646 bp, Homo sapiens
cagtgaaagaataagcttcaagttattcagcatagatagaacaggttataagtattatcaagcarcagccttctcaaagggatttttatgtgagatagttatgattggatctcttaacaacagtttaaggctttttcgccttagtgtgttatgatctaatttttatccaaaagtggtgggtctctcttgtatgaatagtagggataacatcaaactttattccctggtcccttatgcttctcttccaaaatcttctgttaactacataagaatgttgggggtgggttgaagaaatgaaatgttagaaacataatatgtgtaaattgtttcatgtatgttgattgctacctttcttgcagtttacccaattcgatagcaacagttatttgggcacacatccttaacagaaaaaaagcaaaaacaaaagaatacaaaacaaaaaaagtacacaaattttaagtgtggaagaagttaggactatcttgcatttgtaataaatatctatttaggaccatatgatatacaagtagtttttattataaatagttttatttgattctaacaaaaatcctaatctttaggaccatatggtatacaagtcgtttttattataaatatttttatttgattctaacaaaaaccctgg

SEQ ID NO: 814644 - DNA, 588 bp, Homo sapiens
tgcatcataaagctacaaaaattcggccgggcgtggtggcccacacctgtaatatcccagcactttgcaaggccgaggcaggcggatcatctgaggtccggagttcgagaccagcctaaccaacatggagaaaccctgtctctactaaaattacaaaattagctgggcgtggtggcggctgcctgtaatcccagctactcgggaggctgaggcaggagaatcacttgaatctgggaggtggaggttgcagtgagctgagatcacgctattgcactccagcctgggcaataggagagaaactccatctcaaaaaaaaaaaaaagaataaagaaaactacaaaaattcaaacagtatgatgatactggccccagaacaaataggtgaatcaacataaaagaaaaggaagttttaggaatatatccaaacaaatatgaagatttactgtcttactgataaaagcagaatttcctatcagtggaaataagatgaattattcagtaaayggtaaaagtcatatgaggaaaattaacttggccctattccttacaccaaatcaaattcgcaacaaatcagtaatattaacatta

SEQ ID NO: 814645 - DNA, 612 bp, Homo sapiens
tagcatataattgtgtctcgtggttttttgttttggttttaatttttatttttttgagacagagtcttgctctttcgccaggctggaatgcagtggtgtgatctcagctcactgcaacctctgcctcctgggttcaagcgattctcctgcctcagcctcctgagtagctgggactacaggcatgtgccaccaatgcccagctaatttttgtgtttttaatggagatggggtttcaccatgttggccaggatggtctcaatcttctgaccttgtgttccgtctgcatcagcctcccaaagtggtgggattacaggcatgagccatgatgccctgcctgtcttgtgtttttatttagccagttactctataaactgtacttggttctaatgatgagatcatgggttgaatttagggtgttcttaatactgaataatttacattttaaatccaaggataggttgtttctggctaaaaccattatatttatgagtctggcctagagatcaaatggagaaaacaaataataaatcccaaagaattgttattatattyttctatggcacactgccctcagaagaatcttttgtcttttctactgacaatacaaaaaaa

SEQ ID NO: 814646 - DNA, 672 bp, Homo sapiens
tctagacccttactgtttaagagcagacacataaaaaaaaacattaaaatatcttttacagagttgtaataatgttaggagagtgactgttaaggaaagtgccagcaaatgtatagtatgccttaagagtaattgtattttaaactagaacaagagaagaagagagattttgtgagtgtcttcttcaggttgcattcggtttttgataatatgcaaacaaaatcttcagagtatttttgtgaaaaccctaacgtattgctctaggatttgaattcatggcacccaagaatctaataatttctaagacccccttctaagaaaccaacttttcacttcttgcttatactctcaaatctcttatcagtaaaaaatactctctccctcccctcccagcttccattgcaaagcttgacttccctcttagctcaagtgtcaacagaccgtcttttatgaaagccgtcttttttcttgctaagcctgtggttatatgtcagtttccagaattttcattaccaacataactcctccctccaaagttctatttttaagtgtcctgttaattttggcttgttctccattagatgaccctgtctttkgacttttctgttctatgaatagaggcaagagcaaaaagatgttgaagagtatgctaattaatacttgctctaaagt

SEQ ID NO: 814647 - DNA, 591 bp, Homo sapiens
cataatttaatttgctacatccttttgttcttggccattgtaaaatagttttgatcctatcatttatattaggttttatgataggtggtaattcacaaatcacccarcatggcattgatctcctcttgctgatggtgggactgtgcctaaagctcccttccctgctctgctggtgcagaacaacatcaggaagtccaagtagtcaaaaccaaagccaaacattgaacatttgcaaccccaatttcaatcataaaattaaccaactctaatggcaaatcagtcttttgttcatcgtagcacaaatgctctagaccacaatttttatttcattaaaaagaaaactggtctcctttggctctctaagatttcaaaataacgattctttgtaattccctagcaattgtagaaaatattcattttacattatttcccgacaatttagaacatttgaggttacattgaaatatttcttatataagagcaaatgaagaggatggatctcatataatcatggccaaataagtatattcttcttggtcatatatttttataaatcattgaggagcagggaatgttgtatgtgcataaatg

SEQ ID NO: 814648 - DNA, 556 bp, Homo sapiens
taaggagatgagctactcacagtgaaacagacaacactgtggwttcggggtaagcagggtgggactgcatgggactgacagcaagaactgacagtgttatctccagtgttccctgcctgtagagccctggctcctggttccacctagactttctgacttgatttgtctggggtgggcccctgccattgtaatttgtaaatgctgcctgggtgattcaaacagcgcagactcagaaccactgctatagaagattttcaaagggaggagagctgaaatgagttggcagcctgttgcctctgagcactgggttcccattttacagaagttattatatttagtatcttgacatctatagggaggtgtgttcatctccatttttattaatggaggaggacagaagcacaggtgatgtaggtgaccttcccaccactgtgtagtgcagaggccacgagaccctggatttggcctggactttccaggtacgaaagtgactgttcttccttccctgatcttatattgagtaaacaggaagagttggggaatgatctatggatga

SEQ ID NO: 814649 - DNA, 629 bp, Homo sapiens
atgcaaggaaaatccctctctgtatttggaggcagataattgtgttggctctttaattttcttggccaaagtwgattgtctcactgagccatgagagtacaagtaggtaacacttccattctcactaaactacctgcagatgcagtctatgttgaagtttaatcaagtggagagatagaatttaccagatgtattcacagatggtgtgtgggggcccttctacctctgcttcatgaaattctattaaccttctctgagtagtataccttttttggatttatgcatatctgttttgttattgtttttatttattatttttttgatatggagtctcgctgtgtcacccaggctggagtgcagtggtgccatctcggctcactgcaatctccatctcccaggttcaaatgattctcctgtctcagcctccgagtaactgggattacagtcacctgtcactatacccagctaattttttgtatttttaggagagatggggttttaccacgttggccaggctagtctcgaatccctcacctcaggtgatttgcccacctcggcctcccacagtgctgggattataggcttgagccaccactcccgaccatgcatatctattttgagtacagaaa

SEQ ID NO: 814650 - DNA, 595 bp, Homo sapiens
ttgaggtcagaataaccatgatagtatatttatttaaaaaaaactcacaaaagtaacagttcactttctttcatgtacataggtacaataccatcaaataaagtccagtgacatatgaaaaaggcagtacattatggtcaagtggtgattattccagaaaagctagaatgttttgtatttcatagtcagtgtatttcatcacagtagcaagaggagggggagagagagaaaaagagagagggatcaagatcacatcatcgtctcagtatatatgaaaacatcattttaaataatttagcaaccgcacatgattaaagcctcttaaaaatctaggacagaaaggctcttccttaaatgtatgagaaatagctcaaaattctggagtaaacaccaggctaaatagtggattattaagtttggctcctaaaattggaaatagttagaggataacaataatggctacttctcttcaacattgtgctggatgtcagtgccagtacaataaggcaaggaaaaaaatgtgtgtgtgtgtgtatatatatrtgtgtgtgtgtgtatgtgtgtgtgtgtgtgtatgatgtttccaaataaataa

SEQ ID NO: 814651 - DNA, 520 bp, Homo sapiens
tgtaacttatcttcttctttgggttcagatgtattgagatacatctcaataaatgtatacaatatgtatgcaatacgaattgtatacattgttgtataatatgatgattcaatatatgtatgctttgcaaaatgattactagaatctaggtaattaacatattcctcaacttacatagttactctttttatgtgcatgctgagaacatgtagaaaatggcctttactgtttttgtgttcataccaacattctgatcatgatcacttaagtaatctccaagaagtttcagacattccctgtagcattcctcttgtttggagtccttaccagaatcacccttaatactccattaatggcaaaacaggctttttctagcctgcttctcctccaaagtcttccwgcctctagccattaaagttctcaggatgcttccatattttccaatgtttgttatagcatcaccccatttctctggtactggttttctgtattagtctattttgttctataacaatatagc

SEQ ID NO: 814652 - DNA, 530 bp, Homo sapiens
caacactcatgttttttcaagttctagattaaatagtttttgctctttcaaacatgctttgtgtaacacggcatctatgccctttgccattatcctgaatatattcttggatctgctttaaaattctggacagtgacatttttcagtgagtctggagtatctcagagtgtgatctggaggcaaaatcattgtatagccactttctaaatgtttactagagcactaggtgtctgcacctcctctgtaggtcactgatcagcttcatggtgtatagttcaggcaaattctggcaactcctaaggaactggttgccatgtatatttaaaaactgcagtgtttagtaatttaagaagtgatttgggaaagaaattgggaaaatgttaaaagtagtgaggggatacttgarttaatcaataaaatacatattgaatggtcaagttgagaattggtcattacagagctttttaatttttttgaaaatatttgaaataatattttctttcttttttttttttttttttttgagacag

SEQ ID NO: 814653 - DNA, 608 bp, Homo sapiens
aatgtatgctttattgtaatcctttttctagtctatcttcttttctaaactgtaaacaatcgcagcratttagttcagctaaaaaatgagctatacagtttcacatttgaacttattaagttttcaatgggccagtgaaaaacgtcccccctattttttttttaactgcttcccctatttaaatgctcagcataagaaccctggtcctatacaatttatccaaagcttgggcagcccgagagcccttttatccctcactagtgaatcagttctattgtaggagagagacattctttcctccccttttcgcttaaaaaacataacaaacctgaatagactccaggctagagtagtggagagagtgatttttattagatctaacatagttattggcaaatgcctaaagacaatatttaaaaagagagctagagaaagaaaaggctttcactttatgccttaaaggacagattggttacaatttaacatctaagaggaaaaatttatagaattaaatggcctaacattcctctttcttcaacatacatatgagaaatctaagctaagaggacatctggaatggaacgttattcagcaatcagaaagcaaaa

SEQ ID NO: 814654 - DNA, 608 bp, Homo sapiens
aatgtatgctttattgtaatcctttttctagtctatcttcttttctaaactgtaaacaatcgcagcaatttagttcagctaaaaaatgagctatacagtttcacatttgaacttattaagttttcaatgggccagtgaaaaacgtcccccctattttttttttaactgcttcccctatttaaatgctcagcataagaaccctggtcctatacaatttatccaaagcttgggcagcccgagagcccttttatccctcactagtgaatcagttctattgtaggagagagacattctttcctccccttttcgcttaaaaaacataacaaacctgaatagactccaggctagagtagtggagagagtgatttttattagatctaacatagttattggcaaatgcctaaagacaatatttaaaaagagagctagagaaagaaaaggctttcactttatgccttaaaggacagattggttacaatttaacatctaagaggaaaaatttatagaattaaatggcctaacrttcctctttcttcaacatacatatgagaaatctaagctaagaggacatctggaatggaacgttattcagcaatcagaaagcaaaa

SEQ ID NO: 814655 - DNA, 599 bp, Homo sapiens
tcttttgttctccagtcatttggaatggttttctatcataatgctattgagaaggtaaggccagtgaagacaccacatarcaatgcagttaggtatgtcaagtgggatcccctgcattgcttgtccgttccttgcatcgtcagcgtagcaagtatttttctacttcatgtcctcccagtgactcaaaagctttaccacttacacattccacaaggtgtctgttctgtgtttcattgcttttgaaacaaacacaagcgagttgacatgttatacaaaccttgagttcttttccttgcagattctttttttctattctcatattcaactccacaagatgcttattcacagtaagtcattgctaggataatggtcttaatagtttaaaaatttccaaataggattcattttaggtattgacagtggtactcagtggtactcactgtcaatacctaaaagaaaggaagaaagcaatgttctgtgaagaacttgagctaaacttctgaagttaagggttttgcttgtggtcatctgtggtacatgattacttgagatgagatgccacgatggtggtggaggtaaagaagtaccagcaggaagaa

SEQ ID NO: 814656 - DNA, 521 bp, Homo sapiens
ttgggcccagtgggtcacaagggtccttgaaagtggaagatggaggtagaaaagatcagagtgatgcaacctgagcaggacttcaagagcttttgctgtcttggaagatggaggaaggggaccactagccagggaatgcagcagactctagaagagggaaaaagcagggaaggggtcctatccagcacctacagaaagatatacagcacaatgccttgattttagcccagtaagatccatggcagacttctgacctacagaactataagataatgattttgtgtgtttacgccactaaatttatggtaatttgtcacagcagcaaatgcaaaattaatgcacactttttggtgcagttagaaaagttggatctaatcagttgctacaaaactgctaactataartcccataatccttaactgtgaggaaggagctctaggcttcaggtaagttattacaaatgcaagcagagctgtatgacaacaacaacaacaacaaataaatacacagtttcagaagca

SEQ ID NO: 814657 - DNA, 564 bp, Homo sapiens
tctataactcatctctctactgaacactcatacttgccttatccaatcagtttacaaatcttgtcgatatttcctctaaaatgctcctgaatctatacaccatttcattcagattgctaccactcttctgtcctgttcagatcctacccatttttcttcttcctccagcctgtcatcagcattttacctctatatcagtgatgatttacctctatatcagtgatgattcattatgggaagagatcagtggctgcttctggtcccttccctttggcagtgactgtggagaaaatctgtatattagatagatccaatactttagtcccttctgatctgaacatgtgcctcagcgtctatagtcataatatacttcagtcaaccaaaaaaaaaacctgttaaataaaaatacaaaggtatttttaagctcctggtacaggagtttggtgcataataagcctattcgaggaggaaatgggctagtatctttccctttagtgcaactaacattttacctgaaaccaaggaagggatagctgtaaarctacaagactatactggtgtcaa

SEQ ID NO: 814658 - DNA, 629 bp, Homo sapiens
taagacttcacaggagagaaggggcccatgagagcagtgcctgaatatttgctctgratgggtgaaaatgtgcagcataaataagggggctataggctgcaatttttacagattctactcactaaatgccctacgaaatttctttcaagcctttgaaatcctgtctctaacagtattccctccaagttcagctgtatgcggtcaccctgagattccttcctacttgattatttctcacagacttaaccaagaaaatatcgttctggaagattgctaggcaggcttttccattgcattgcaggacaactcagataatgcaggtccagtcctctgagtcatccagtgtgggctggaggtttggaacctggaaatgtctgatctaggcaagtaataagctgacgtcaaaagacttggtgcacaggtctattgaagcacctaagaggaaagacacttcttcaaacctcaaatgctctttacatccagcaaatctggactggaagtcgttcaataagatgacttcccatgaaatgtctggtacttcatgtttcccgtcaggtcataaatgccacgagaacagcttttcctcctccatttaaatttgtccagtgccagttttggtcttgtcccaa

SEQ ID NO: 814659 - DNA, 615 bp, Homo sapiens
gtgggcacctgtagtcccagctactcgggaggcctaggcaggagaatggcatgaacccgggaggtggagcttgcagtaagccgagatcatgccactgcactccagcctgggcgacggagtgagagtctgtctcaaaaaaaaaaaaaaaaaaggaatatgcgaatatattatatatatatatgaataatgaaaacgatagttattacatcatacatgctatgtgttggcatgttctaagtactttacctgtattaatgcacttaatacttgcagcaattctatgcaataggaactattattaaccttactttatggttgagtaaactgcagcatagagaagtgaaatgatttgcccagagatacacagtaaagaaaaagaccaagatctgatccaaacagcctgcctccaaaagaccacttctcagtcagtatgcttacttctgatgtgttcctaacatggaattctattcagccatgaaatatgatgtcagaaaaggatccagaagagcatattttaaagtatttattatcattctcttggcgtgtgaaattgtgagtattcttcatttctcacttatrttttctattaattgtttgacatgtatacaatatttt

SEQ ID NO: 814660 - DNA, 537 bp, Homo sapiens
ttacatactgaaaactatctttgcaatattggagcaggtaaaatttctaagataggacatgaaagcacaaaccattaaaaaattaataaattgaatttcatcaaaattaaaaggcacttcaaaaaatgaagacgcaagcagaaactaggagaaaatatccataaaatatatctgacaaagacttatatccagaatatataaagaactcataactcaaaaaaaggaaaaaaaaattttaaatgggtaaaatatttgtgtagacacttcactacaaaaaaatccatatggataaaattaaaaagactgacaataccaagtattgacaaggatgtagagcagctggaactcttctatattactgatagaaatataaaataatacatccattttgggaaatattttcatactttcttttttttccagcttgttgaggtataactcacaaataaaatattaagtttaaggtgtacaatctgatgattcaayatacataaacattgtgaaatgaataccacaatcaagctaatttacatatcc

SEQ ID NO: 814661 - DNA, 626 bp, Homo sapiens
aaagatattcaccataacttgctcacatttcacaaaatataaagacacacacaaacacacactcgtatttgtaaatgttcctgatgaacagattttatgtayactcattttctctttagtgtcaaggaaacaaaagaagcagacaggtatatcaagatatcaaagagaaacacgtcaaactacaagacaatgctaaatgtttcagatcatatagcggtaacaggttactcctggcaatagaaataaaagcacacactaagctattcccccactcacccaccccatctctataaacaggtaggctaaattacccagaaagagttgtaaaagcagcattagcagtatccaggaaaccacagcttcacacctagctaatcccacacaatccttcagttgtttttcttttttttttcccagttgtttcaagtaataatgccctaaaaaaacagtgtgatcacaaattagggaaatatatgtgaaacaggatcattcagtgaaagaaactgtcacctaaagagctacacaccaaatgcttcccccaagttcccctaaatcatagaaattctgcaggtgggagtgcctccgttatcatgttatgcacacctacctttaactaagccctttaa

SEQ ID NO: 814662 - DNA, 626 bp, Homo sapiens
aaagatattcaccataacttgctcacatttcacaaaatataaagacacacacaaacacacactcgtatttgtaaatgttcctgatgaacagattttatgtatactcattttctctttagtgtcaaggaawcaaaagaagcagacaggtatatcaagatatcaaagagaaacacgtcaaactacaagacaatgctaaatgtttcagatcatatagcggtaacaggttactcctggcaatagaaataaaagcacacactaagctattcccccactcacccaccccatctctataaacaggtaggctaaattacccagaaagagttgtaaaagcagcattagcagtatccaggaaaccacagcttcacacctagctaatcccacacaatccttcagttgtttttcttttttttttcccagttgtttcaagtaataatgccctaaaaaaacagtgtgatcacaaattagggaaatatatgtgaaacaggatcattcagtgaaagaaactgtcacctaaagagctacacaccaaatgcttcccccaagttcccctaaatcatagaaattctgcaggtgggagtgcctccgttatcatgttatgcacacctacctttaactaagccctttaa

SEQ ID NO: 814663 - DNA, 530 bp, Homo sapiens
actttcattttgccatattctgcaaataagatttatcatgctagagttatgagttgattttgtgatgtctgtgtctcaataaattattcctggctttctacttaggtgcagtatgtgtggtttattacggagagtagagctgagcagaattccagtacatatgttcatgtgggggccatacacatggctagtcagtgtatacaagggtttttttgtacccagtccctaatgtcttggcattacttttattatgtctgcagtgctcatgtagatgaaatgccacaacacattcttttactattgtagcctcaaccggcttttttttttttttttttaagaaagagcaattaccatcataaaaattccttactggggaaccttccatattgcgttatcattccatgagtctaataatagtgaaatataaagaaamaattttaaactaaaatactaaaatatctaaaaaagactttgaggtctatagctagctctataatgagaaacactaaaagtcaagaggaatagaaaca

SEQ ID NO: 814664 - DNA, 398 bp, Homo sapiens
gagccagtccgagtcccaaaacttaagaatttggagtctgatgttcaagggcaggaagcatccagcatgggrgaaagatgtaggctgggaggctaggccagtctagccttttcaggcttttctgcatgctttatattctagctgcactggcagctgattagatggtgcctgcttagattgagggtgagtctgcctttcccagcccagtgactcaaatgttaatctcttttggcaacaccctcacagacaggatcaatatgttgcatccttcaatccaatcaagttgatactcagtattaaccatcacaagatctgaaccaaggcaaaaatagttggggtgggaagcagaggagaagaccagtacaataaatgtacagaagtaatccaccaaattaggc

SEQ ID NO: 814665 - DNA, 581 bp, Homo sapiens
taaactaacccttgggaaaaacctgaatataaaggctccccatgctgtggtaactttgatgaataccaaaggacatcattggctaacaaatgctagattaaccaagtaccaaagcttgctatgtgaaaatccccgcataaccaatgaagtctgcaacaccctaaaccccgccaccttgctcctggtatcagagagcccagttgaacgtaactgtgtagaggtattggactcagtagaggtattggactcagtttattctagtggggccaacctccaagaccatccttgaacatcagtagactaggagctgtatgtggatgtgagcagctttgccaacccctgcaaagtgactctgaaagagacaacaagccctgctccagtcacacccagaagctgactggtccacgctcagccaaagcatgagaaaactcatcacaggattcattttataaaatttgracttgtacagtaaggacttcaactgaccttcctcagactgaggacagttcccagtgtatacgtcaagtcactgaggtaggacaaaaagttgctacagtcctattactttatggttattataa

SEQ ID NO: 814666 - DNA, 592 bp, Homo sapiens
ccattctgtaggttgtctgtttactctgttggtagttacttttgttgtatagaagctctttagtttgattaagtcccacttgtcaattttcatttttgttgcaaytgcttttgagaatttagtcataaatttcttcccacagctgatacccagaatggtgtttcccaggttttcttctaggattcttatagtttgaggtcttacatttaaatctttaatccattctgaattaatttttgtacatggtgaaaggtaggggacaagtttcattcttctgcatataaagctagccagctatcccagcagcatttattaaatagggagttctttccctgttgcttatttttgatgaaagatcagatggctgtaggtttgcattttttttttttaatttctgtgttttctaatctgttccattggtctatgtgtctttttttgtaccactaccatgctgttttggttattgtagctttatagtatagtttgaacttgcgtaacatcaagccactggctttgttctctttacttaggactgctttggctatttgggcgactttttggttgcatatgaattttattatagttttttccc

SEQ ID NO: 814667 - DNA, 611 bp, Homo sapiens
ttgggtttagttgtaaagttaggtttttgatttgagatctttcttgtttttaatgtaagtatttatagctataagtttccttcttagcattgctttcccttcatcccttaagtttttggaatggtgtcttttttwaaatttatatctaagtattttcaaatgttcctgtgatttcctctttgttccattggttgttcaataatgcattttttggttcccacaaatttttaattttccagttttacttctttatcaatttctaatgtcatctcctagtgtcagagaaaatactttttctttttttcagactgagtctcactctgttgcccaggctgaagtgcagtggcacaatcttggctcactgcaacctctgcctagtgggttcaagcgattctcctgcctcagcctcccaagtagctgggactacaggcacgtgccaccatgcccggctatttttttgtatttttagtacagatggagtttcaccatgttagccaggatggttttgatctcctgaccctgtggtctgcctgcctcggcctcccaaagtgctgggattacaagtgtgagccaccatgcccggccagaaaatactttttatgatagttatc

SEQ ID NO: 814668 - DNA, 538 bp, Homo sapiens
tgcctgggtaattataaacaggtttctcagcaacatgaatgctcttagagcattacagttcccacacagttattctctgttgtgtggaaccatccctttcagcacaggcagactagcatctctggcccttggctcacaaagactccccataatttccaaaatgccttccagaagacagtgaaaaccatcttccccacacaccttgaaaaccattattctagaacctagatggattttatcttcctttttctcaaaccaggcttgcagctagcagccaaaatagaaacacctgaaactcatttaacacaaatgtctttgactgacaactttatctctttcttccagggataatttacctcttgctagaataagtgcctaatataaggtagaaaattatagaattmtaaaatttagcagcaattttgataagaagaattttgcctgcagaaccttccaagtcgcctcttgccatttgttctacctacaaagcacatgtgaggcccagaaggtggtttttcatgcctttaataaccatctg

SEQ ID NO: 814669 - DNA, 317 bp, Homo sapiens
aacaatctaaagccagaacagcccatctaagattcttccaatccccaacccacagaaactttgtgaggttgcaaagggaacaaaggagaaaggaagggacagagagaaagaaaaaaagaaagtagtaacacaaaagaaagaatacaaaaacactgtctgtccacatgtcgatctcattagatttatagattgcatctcmttgatcataagacaggacactaaattagtgcttaataactattattaaatacatttttaactctcctcttctgcctagatcttttccctcatatttattcctgcactgcatacctgtc

SEQ ID NO: 814670 - DNA, 317 bp, Homo sapiens
aacaatctaaagccagaacagcccatctaagattcttccaatccccaacccacagaaactttgtgaggttgcaaagggaacaaaggagaaaggaagggacagagagaaagaaaaaaagaaagtagtaacacaaaagaaagaatacaaaaacactgtctgtccacatgtcgatctcattagatttatagattgcatctccttgatcataagacaggacactaaattagtgcttaataaytattattaaatacatttttaactctcctcttctgcctagatcttttccctcatatttattcctgcactgcatacctgtc

SEQ ID NO: 814671 - DNA, 546 bp, Homo sapiens
gaaaataagaattaatttgtacaagttaggtaaggcacttttttttttttctttttttgaracagagtctcactctgtcacccaggctggagtgcagtggtgctatcttggctcactgcaacctccgcctcccggatacaagcaattctcctgcctcagcctcccgagtagctgggactacaggcacgtgccaccacacccggctaattttttgtatttttagtagagatggggtttcaccgtgttagccagcatggtctccatctcctgacctcgtgatccacccacctcagcctcccaaagtgctgggattacaggtgtaagacatcacacccatccggtaaggcaccatatttgctgaagtaaaaaattgtaactcactatggtatatttaattatcaaatttttccttcatcatttttttatatgtaaggtattcttggttacctggtagatgcatttaaattaaaatgaattaagaatactaatttcaaagaatgttttgtctttctaagaagtcatttcttacatgaattttatgattaa

SEQ ID NO: 814672 - DNA, 583 bp, Homo sapiens
gttgaacatccagtctcaaggagtgaacatggctttcctgaaccaagaatcaaacctccaaagaccaaggaccccaatccaatgaaccataaggttgarccaatctcgaccctgcccaggagccctttcctggttggcatcagttcttctaggccaggttgtcatttctgcaggaaaggcaggagggaatccagctttgcatcctgtagggacaagatgacccttttggccacacatggtatccacctcgaccatgcaagaatctgccagctgtgaatatgtcctctaaagatatttggcatcatgctcttctgagttacttcaggataaaccagggcttatcatttatcggtgtcttagatcagatcattctttattggaggctctcctgtgcattgtaggatatttagtgccatccttgtcctctacccactaaatgccagtagaacctctccctcccacttgtaacaaaatgtcccaaatattgccatatatcttccagatgggagagaactgccctggttggaaaccacttcgataagctcatcctcttctgatgaagctggtctgcctagtgaccaga

SEQ ID NO: 814673 - DNA, 644 bp, Homo sapiens
gggattacaggcgtgagccatcgcgcctggcctgtgaggggtttttctttctttctttcttttttttttttttttattgagatggagtctcactctgtcgcctaggctggagtgcagtggtgcracctcagcttacttactgcaacctccgccctccaagttcaagcgattctcctgcctcagcctcccaagtagctgggattacaggtgcctgccaccacacccggctaattttttttgtattttttttttttttttttagcagagatggggttttaccatgttggccaggttggtcttgaactcctgacctcgtgatccacccgccttggcctcccaaagtgctgggattacaggcgtgagccatcatgcccggcctgtgaagggtttttctaaggttcaccagccctgacatcattgcagttccctttttccagaaatgcagtgcccttgaatactttccccgcccattgaaggcaaacagggttttttctggcattctgcacacctgttttgctgccctgccttccgcctgtgactgattgcttttgatctgctgaaagagaaacccccggcctctctcaggtgtttggtttcctctgtccgtcttagagtcacctctgctgacatttatttgctgttta

SEQ ID NO: 814674 - DNA, 644 bp, Homo sapiens
gggattacaggcgtgagccatcgcgcctggcctgtgaggggtttttctttctttctttcttttttttttttttttattgagatggagtctcactctgtcgcctaggctggagtgcagtggtgcaacctcagcttacttactgcaacctccgccctccaagttcaagcgattctcctgcctcagcctcccaagtagctgggattacaggtgcctgccaccacacccggctaattttttttgtattttttttttttttttttagcagagatggggttttaccatgttggccaggttggtcttgaactcctgacctcgtgatccacccgccttggcctcccaaagtgctgggattacaggcgtgagccatcatgcccggcctgtgaagggtttttctaaggttcaccagccctgacatcattgcagttccctttttccagaaatgcagtgcccttgaatactttccccgcccattgaaggcaaacagggttttttctggcattctgcacacctgttttgctgccctgccttccgcctgtgactgattgcttttgatctgctgaaagagaaacccccggcctctctcaggtgtttggtttcctctgtccktcttagagtcacctctgctgacatttatttgctgttta

SEQ ID NO: 814675 - DNA, 509 bp, Homo sapiens
cttgttgccaagttctccctgactgcagcatggctcatcagcttagctctgcttgatgaacaggtgtttccagtagtctttggaattgacaatcggcrttcctgaaacagctcccgatatgattctgtagaaacattgatttctttcaaaaccactgagctgggtgatctctaaagccccactaccttcagcattctacttgaattccaatcccgatttccttccagttcatcttctgggttgcctggctccctagacacagtctctctttctctgatagtttaaggtcaaatatgaagggaatgcattggtgcaagagccagctgttcctcccctgcctgatcatctcattcagccccaaaaaagtgagattctgcattacccagaactttccccacttatgatactaaattctgttgccatcccagagcatagaaactctctgaagtctttaaagctctgtgtgataagcttgccaaactaaggaagggaggaaagaggggctgaga

SEQ ID NO: 814676 - DNA, 348 bp, Homo sapiens
aggaatgggcagttttaaaccccgcgcagagtcagacagaagctagttactatgggagcatcctagcggagcatcttacagtggggttcagtgtgcacctggcatgcttccttgatgaagtggtcccagarcaaagctataaaggagcaactagaaagaagcggtagccagaacaaagtcagagttgagagggtgtgtgtggggtgcagggaggcaggggaagacaactggcagctcagtgtttcttgagcaaagacagagtggtaggggtggtgagacatgaaggcgcagagggagataaggctgctgcatcccactgtaatggacttagcgttttatccatccagc

SEQ ID NO: 814677 - DNA, 625 bp, Homo sapiens
cgaatttacaagtcactttgctactgttgatgacaaaggagtgcttccgtgctgtgcgtgttattgtggttatctaccattctttaccaaactagcccaaaccttagcygctttaacaacaccaagttacttgcccagagcttctgggtctagaatgcaagcagggcatgtctgggtggttcttttactccatatggcaataactgaggcaatttactgtaggggcagggctcataggaaggtttcggagggcttcactcacacgtctgtcacctcagtgcttctctatgtggcccctctctccacctggctaacgcgggctttcccacagcatgtttgtcagcagagtagccaaagtccttatatggaggctggctgccaagaagaagcattcggtcatatgaagggaatctacagctgttgatctcttaagccttgccttaagatgctagaaagcttcagagcatcacttcagctgcattttacgtctcaacatatcactggcaagtccagagacaaggcgagggagaaaaatggacatccctttttaatggatgaaatggcaaggatacgtggctaactttaatccatcatatgtattgctgacctaagtgtgtctaggtta

SEQ ID NO: 814678 - DNA, 608 bp, Homo sapiens
tttggcacactacctggaagaagttacaagctagatgcttccccaccaaaggggatttctcagttagcttctccttttaggctccacctaccaccatctttttctatctttcctccagccctttattcttcatcctacctttgtttatctggcctcacatgcttgtttcaatgacaccgtctaataattccctaactgttgaggcatgtctacttttcttcattcccaagtgttgaccccttgaagggaagcaactggtcttcgatctttctgccccacttctcttgcagtatcatctggaaatgccttatgaattgtactgaaagacctccacctggtggtctattcttaagggcagaaagataagaccagttgctcgggtgccctcagccactcatctgagctaagagccagagaccatgaacattttcaggctggtaggcctcataagaacctgtcctcttctttcaaggagttagggtgtctgctttaggcctgcaaacctcttagagttctgtatcagtggtctccagggtagsggtatgtacaacacagatgacccccacaaagatattgggaagcaaacttagaatgtttttttacggcta

SEQ ID NO: 814679 - DNA, 473 bp, Homo sapiens
taaataataactttaaccattatataaaaataatgtactatctgasctttaatcaagtggtacttaattgtttttcttttggattttttttatatttttctggtgagcacagattaaatggaataagtgttcctttgatagacatctagggatggatggattcttttagtctgccattaaaactgaaaaattaggatttcagatgacattttcaatgataattaaatttcatagtttctgcctttgacatgtttatgtatattttttacatataattaaaaatgggagagggtgagttatttggagggaagattggtagctatatttactgaatgtaaataaaatagatgtaaaattaaataatgtaaacacaaataacataaatctaaacttaaactgatgatgacagcattttcaagagctctaaacaattctgcatgtaatactttatttctgggtaggaatcacacaca

SEQ ID NO: 814680 - DNA, 546 bp, Homo sapiens
ctcccaaagtgctgggattacaggcatgagccactgaacctggcctatcattgcttttcgtgaaagtttttcttatgtctgtacatacctgataggtaagataaagtatgagatacagtatgaaaattttgaagacatagaatgttgtttagaaagaaacttaaaatttgacaaaaagtaaatgtattttcagtaccctatctgtaggcctctttagatacctaaaattacattgttagtttctcaacgggtatgatttatgcatttatcctttacacagtgactttaagggatgtagtctctgggtcaaattattattatgagtgaactggaggtttctgggttttctgcataccaccaaagtagcttgagtctttgatcatgctaaaaaccaactgtcctaaatctgtcagtgtacccctgccaaactcacagtgaaaagsgtccccttgatagctcaaattccaattcaaaatttggattctaaatggaacccaaaattaaaacatttaacaggagatgataaatggttaatataaaaatatg

SEQ ID NO: 814681 - DNA, 585 bp, Homo sapiens
ttgctttttggcctgccaccccgcacccccaatcctgtacccataaaaaccccaggctccactggcagagcagcagaccaacagagtggcaggaaaggagagaagagaagaagcaccttgacatcagcgagaagcagcttgacttcagagcaatggcttgatggcaggacctcagaaaagagttcagcaggggatggccaaactccagaggaagaccaccttcccactccatcccctttccagctccccttcctgctgagagccactttcatcagcaataaaatatttcacatttactatcttcaattttttcgtgtgatctgattcttcctggacgctgaacaagagctctgatacagaggctgtcacactgagctattaaatatttcagctggctgtccacggatagcaaagctaaaagagcactgtaacacatggcccccggggctccaggggtcacaggcacccccgacactgygggggctacacggagttctgcccctgctggagcccagaagcacttgtcgcagcccctgcgcccgttcacctgcatgctccccctcccacaaggggttgagagctgag

SEQ ID NO: 814682 - DNA, 609 bp, Homo sapiens
gtatttccttcttcaagtatagactcttctgtaatatctgcctgtttttatttgccctcagatatttttctatttttctgaagttttaaattattatctgcagaaaagttgggtaggtaggggtttattactataaaagggagtataacttttattcttttgcttcttggacaaataactattcaaatattttctaagacttagtcaattttgctctttagcaaatagtttctgtctcagttttctatttattttctcatggttctatgggtcagcagttggggatgggattgatgggcagctcttctgctggtcttgtttattgttacctaggtggttgcattcttccagtggcttgactgggattatatggtcgaagacattctcactcactggcaatcgatgcaagaagttggctgggcctctcttctcatgtcgtctctcattctcaagaaggctatcccagactttttcacataaatrtctcagggttctaggagggtaagagtggatgctacataggctcttgaagcctgcaattaaaacatacagtgtcatttccaccacaaagcaggtcataaggctatccagatataagagaatgaagat

SEQ ID NO: 814683 - DNA, 657 bp, Homo sapiens
gagcttccctgtccaccaaagtgtccagcatgtgactcaccaccccccaccattcatagatgaygggacaagggctgaccatctggtgaaagctggtccaatcagatactctctcctgagcaacaaagctgaagattctacttcaacctgggatgtctctttatactagcatgatggaaactcagaacccgaggatagagaatgaacaagtaggctttttctggattccatgagtaaggagtatgttggttttgcctgctcagtagccattcttccttttggtaaccacactccaattctgttaagggatcactcccttcttctcaggccatttgttttgtgtggggctggccccaaccccaacatccatgtgagcacatgacctcggcttggctaatgaaaatgctgcttttctctggcaacagtaattggttggggggtgggcacatgacccaagtcaggttcatgagactcaactcctggacttggctgaagctactgggaaacaaagctcatctttcttctgtggtgctaagctggtgggatttgagccaggagttgctggggaccctcttgccaccacccagcctgagaatgaaattgacccaaaagaaagcagagccatgaaaaggggctggatccctgagctgaagccat

SEQ ID NO: 814684 - DNA, 657 bp, Homo sapiens
gagcttccctgtccaccaaagtgtccagcatgtgactcaccaccccccaccattcatagatgacgggacaagggctgaccatctggygaaagctggtccaatcagatactctctcctgagcaacaaagctgaagattctacttcaacctgggatgtctctttatactagcatgatggaaactcagaacccgaggatagagaatgaacaagtaggctttttctggattccatgagtaaggagtatgttggttttgcctgctcagtagccattcttccttttggtaaccacactccaattctgttaagggatcactcccttcttctcaggccatttgttttgtgtggggctggccccaaccccaacatccatgtgagcacatgacctcggcttggctaatgaaaatgctgcttttctctggcaacagtaattggttggggggtgggcacatgacccaagtcaggttcatgagactcaactcctggacttggctgaagctactgggaaacaaagctcatctttcttctgtggtgctaagctggtgggatttgagccaggagttgctggggaccctcttgccaccacccagcctgagaatgaaattgacccaaaagaaagcagagccatgaaaaggggctggatccctgagctgaagccat

SEQ ID NO: 814685 - DNA, 634 bp, Homo sapiens; identical to SEQ ID NO: 814462

SEQ ID NO: 814686 - DNA, 517 bp, Homo sapiens
tagaaaattgcctgtctgttggcaggttttgtgcacctggttttttttccctatagtctcatacctgagaaacrtggagaaatgttctttttctaaattgaaaaactcagctgtagtctaaatgaaatgggataaattatctttttcacaattatccattaaagagagaatcagaattaatattaatcacagatgtttcatcaagttttattatcaaccagattgactgccaaagtgctttctggaagacattttctctctctcccccacctgctactgagaacaaactattatgggtccttagataaagattaatggttttggcaattcatttgaggaaatctgtattttaccgtacattccaagtcagttcaaggcaccactgggaagcatggtttgtcacttcactaataaaattacaccacggagacacaagatagaataattctttctaccatcagaaacaggttaatcaataagtcgcccaaagttagtatcacccaatctatatttttaa

SEQ ID NO: 814687 - DNA, 616 bp, Homo sapiens
aaacacactgaagcaacactgtttattttcccccagcccatgtgcagggtgtcatctgggtggatggctcccagacacactgaccctttacctctaccaccatgtgtctctatgcccgagggcttcatctgaccacaggagcaggctcagcctgcacatgggggtaatgtggatgtgctgggagttcccactcctagaagtgacccttggctgttgagggacagggcttgttgggtgagtccctggcttcctcactcctgagtggggcagttctggggtgttctatagtattatatctcagggattactcctttggattgcccagcctggagtgcaatggtgtgatcatagctcactgcggccctgacctcctgggttcaagcgatcttcctgcccagaggggaaggtttaaccgcacccttccttcccatttctcttctccaggtgctcactgggtctctggagattatctcctgaatatttacactcaattcctcgactcaaamcctgctctggggagaatccagctccagatgtaaggattctataatttcttccagctttgaaagaatcccttctttcttccaactacctccttttctctgctccttggctt

SEQ ID NO: 814688 - DNA, 629 bp, Homo sapiens
caggagggattttctaggggcatgggggagagcttcgtggaggagggggtatttgtggtgaccacaaatggaaaatggagctggagttagggaaaagggggtcttggcaagacaacagcatgagcaaaggtatggagaggcaagagagagagagcaaggatgtctttaggtctagaatgtgggtagcggggaagtagaggaggctcccaggccagggtcaggagcttgaatttgagcatgcggtctttcatcactagatagctgttcaccagcaaagacccttgcaccctcctctgtgccaggccagcaccaggacacagaaaaaaacaacaacacaggaacctagccctaagccctgatccctaggaggccctcaggctggtggagacagagcaagataaagacactctagctccatggagtcatggctggaccagagagaggaacaggggggaacgttggggacagagaggggtgccagggtgttgtctggggggagatgcaggaaagctgcctggaggaggggacatttttactgggttttgaaggataaataggagytcttccaagtaaaaaaaaagaataagcctgtaaacattaccccatgataggtcacaactggattcatg

SEQ ID NO: 814689 - DNA, 573 bp, Homo sapiens
tgctcttttttggtcctatgaggcgcaaatattttttcctcaagtttccacgtgtcttttgagtttgcttttggtggtttttgccattcagtttttttccaatgtcaaatttataagtttttatataatgccttttggattgcaggtcatgattagaaaggaaaattttgaggtgggcacactgtattactctgaacagccttagcaaacttcaaaaaggaatggagccaagaactgcacgggagcccaaggcagggaagtaggtaacttagctgagtaaggacctcacaatatagctctactatagtcactttgacatggattttgagtaccgttatatcagccagggttcttattccaaacgatagaaactgactagttaacttaagcagaaaaggaaagatatcagctagctcagtgaatctaagcaaagcctgcataataagggtcagaaaatagaaatgacccagggaacccatatccaagatcctgcacaagcccaaacctggttagggctgctactgccagtgacatcagtgccyctggaaactggatcctgacagcagaatgaat

SEQ ID NO: 814690 - DNA, 474 bp, Homo sapiens
ctacacacatataaatcccaatattttaactagtttgcaatctrgtcaatacatcttctacttattttttctatttcttttatatgcctcaattattttatatgcccttctgaactctgtacacagtagacacacagataaattcttaactgaccactgactagccaatatagagtcatgcaaatatttggttcagataataagttatcaaatacttggttcctctatttatttgatatggggtgacccacccccaatatttcaacataggttctttctattttccctaagtgtcagctggctgagaaataaagagaaagagtacaaagagaggaattttacagctgggcctccaggggtgacatcacatatcagtaggatggtgatgcccacctgagccgcaaaaccagcaggtttttactaaggactttaaaaggggagggggtatacgaatagggagtaggtcacaaagat

SEQ ID NO: 814691 - DNA, 633 bp, Homo sapiens
ggcatttaccagtctttctgttctcattagcctgcctcttgtcgtcagtctggttcgcaggctttacattaggaaaacaggaatacaaayggccttcctctcaggcaataagaaaatgaatataacataacaattgtcattcagcacacaaaagcaaaagagcgttaggactggagtgacttaatatgctgtcacttccctcttgctaacagaatcagaggctcttttgaaaatggaatagaataatgatagatttagtgagtgtcttcccttattactgacttcagcatattaataaattttatttcccactgaatgtgcacatgctcttgacaaaagagtaatgctaatttgaaaaataaatttaggaataacagattatagcaacaaatagaaaataaaaaagtaaaatctcattttatgcttatgtcttttaaatccccttttcctaataaaaagtactcttgttttaactatgggctatttcctggaaatttattttgtcagacaaatagttgctttgagtggaagctattagcatgctttctcatttgttctatggcaaattttaagtttgctgttactgtttttctttgtgtgcttactgtgtggcaggaaaacaaagtttttaat

SEQ ID NO: 814692 - DNA, 591 bp, Homo sapiens
gcttgcagtgagagcaagatttcatctcaaaaaaaaaaaaaaagaagaagaaaatacaactgaactgtactttaaacagtaaktgactttgcattcacaggcagtttccaagaagcagaaaatactacacatttatctgtttgcctgggttttatcatgtggtaaatgcaagataaataacagctgtcacagatgagcaggactaatgctaaaaaactagtgccatgtatgatagtgcgtgtgtgcatgctcactactagacaagttggtaaaattgcaagttaacatattaggttgaagcacatgttattaccaatattactggtcacaaagaagtagagtgtttggctgtttcatttggttgaagcttaggtctttcagaaccaaaaagggtctcataaataattcaatccatgggttttttaactgggtcgagtatgggtccacttcaaggagatgaggagccctcatctatgtattcattcagttgatagttttccagagcttatgatgttccaagtaatgctctagtagctggggatatagacaggaaaacacagagtcctttgccctcattcatatttcatttca

SEQ ID NO: 814693 - DNA, 591 bp, Homo sapiens
gcttgcagtgagagcaagatttcatctcaaaaaaaaaaaaaaagaagaagaaaatacaactgaactgtactttaaacagtaatkgactttgcattcacaggcagtttccaagaagcagaaaatactacacatttatctgtttgcctgggttttatcatgtggtaaatgcaagataaataacagctgtcacagatgagcaggactaatgctaaaaaactagtgccatgtatgatagtgcgtgtgtgcatgctcactactagacaagttggtaaaattgcaagttaacatattaggttgaagcacatgttattaccaatattactggtcacaaagaagtagagtgtttggctgtttcatttggttgaagcttaggtctttcagaaccaaaaagggtctcataaataattcaatccatgggttttttaactgggtcgagtatgggtccacttcaaggagatgaggagccctcatctatgtattcattcagttgatagttttccagagcttatgatgttccaagtaatgctctagtagctggggatatagacaggaaaacacagagtcctttgccctcattcatatttcatttca

SEQ ID NO: 814694 - DNA, 514 bp, Homo sapiens
ccaaaagaaaatcatgtgtgaatccagcatatctcttgatcttctgagaaaatagagcactggcccaagtttaccaagaagctagaaaacccggcttaatagcaccttccacaaaatggatttggggattttatgtgtccacacacttgctctgatccaacagcatgacatcatttctagaaatatctatccaagaccacatagtctttaaagaggttaaaatatcaaatcctgcatagaggaattccaggccatagaccaggtcatgacattctttgagtttggggtcatgtcctgtggatcataattcaaaaggtcactcagagtaataaatttggcggacataggcaaaataaaaaaggatctggaaaattttgctgtatgagtaatggtcataggaaccaggaatgtttcatcagaggaagagaactgtaggttgtcttcaaatatcccacaaacatgataaagacggtgcagccatattactmtgggccctgcaagtcagaactaagcc

SEQ ID NO: 814695 - DNA, 429 bp, Homo sapiens
agttaatctttaccccttcccaaaactcctaaaggctatcagtggttctcaacagtaacctttaatagagagagtagagacagagtaggacaaagcagaatttcatggaaaatgctcccctgtgtggcactcctttgagaaccctgggatcaaaacatatgtgagagattgtggtccatacggtgatcagtcagagattcctaggtatcaaatgtttatgtccatgctgtagtttgaaagttcacaagggaaggaagagtaaactgtaccagaagctcattcctgagggtctcagagattaatgagccaggggcattattgtctacaggctctccaatctagagaaytcttgtgcagcaccaaataacagaaattgctagcaatgagaagcatatcaagggctagagaattgtgttggcaccagagata

SEQ ID NO: 814696 - DNA, 593 bp, Homo sapiens
ctgttaggctgggtgctatcmgggacatatcaaaagcctcttttatcagtgttatttctactttgaacacattcctttaatttaagtcagtatggctggtttgtattaaaatattggaaaggttcttaggtttcagactgatagtaaatccataaaaaaacaaatggcttttccatttccgggaaatctaattaaatgttgtgaaaacaaatgtgctctggtgtggcatataatggaataatatcgaagaataaatcttgggtttctgttgtttggtaagctctttgaactctggagaatgtgagaaaaataccttcccaagctagggatctgggaacagggagataaggaatgacaaatactctctcaaaactactccagattctccacaccatagaaacctaaatcaaattaacggaagacctctaacatagctctcctgccgggtggcaaattttgtatccaagaggttttctccttatagtccctaccagaatcctcaagtgaaaaaaaaaaaagaaagaaaaaagaaaatgtgtctcagcccctcccccactaccaccacctcacactcaatccaacttggtaatggt

SEQ ID NO: 814697 - DNA, 600 bp, Homo sapiens
agggatagcattaggagatatacctaatgttaaatgatgagttaatggttgcagcacaccaacatggcacatgtatacatatgtaagaaacctgcacgttgtgcacrtgtaccctaaaacttaaagtataataataaaaaaagaaaacttctaataacccattcacccttttgttttttggtgtgtgtaaaggagacttctgaagcactcagtgtagggagggtagatattagaaagattcaggcaattagatttcctaaatgtgggtatctgaggaggatatccatgaattcctctaggtgtttcctcttccagctggagtagaaactgaaataatttgtgatgggagatttgccctatgaatgccctatgattcatgggcatctggttttccttttcctcttgaggaaagactacatacttctcattcaccttgcagataggaaatgctaatttctaattctatccagtgaaatgtgagtaaaagtcatgcatgtcattcctagtctgaggcatagaatggtccttctggattctccagactctttcttcttcctgtgggatagaggaggccttgtgttgagatggcaagctactaga

SEQ ID NO: 814698 - DNA, 331 bp, Homo sapiens
gatacacgctgtcatagctttgtcctgcaaactggcaaacgtggcccacaggaattgacattgaacatctaagacagttgtcccacagagttaaacaatgaccaggagagaagaaaattcatttatctggccactgcaaggtcttccttatgatccaatcatgataggtatttatctatttatttatgtctaactaatgcttgcagctcaaactgctttatcctttgataacaggaggctgcctttaaattcattgagagatttttycactttccttcatgagtcatccatgcctcccggccagtcataacagaagctactgactgtagta

SEQ ID NO: 814699 - DNA, 634 bp, Homo sapiens
aatgtatgctttattgtaatcctttttctagtctatcttcttttctaaactgtaaacaatcgcagcratttagttcagctaaaaaatgagctatacagtttcacatttgaacttattaagttttcaatgggccagtgaaaaacgtcccccctattttttttttaactgcttcccctatttaaatgctcagcataagaaccctggtcctatacaatttatccaaagcttgggcagcccgagagcccttttatccctcactagtgaatcagttctattgtaggagagagacattctttcctccccttttcgcttaaaaaacataacaaacctgaatagactccaggctagagtagtggagagagtgatttttattagatctaacatagttattggcaaatgcctaaagacaatatttaaaaagagagctagagaaagaaaaggctttcactttatgccttaaaggacagattggttacaatttaacatctaagaggaaaaatttatagaattaaatggcctaacattcctctttcttcaacatacatatgagaaatctaagctaagaggacatctggaatggaacgttattcagcaatcagaaagcaaaaattcaaaccattgatgttttgatgga

SEQ ID NO: 814700 - DNA, 634 bp, Homo sapiens
aatgtatgctttattgtaatcctttttctagtctatcttcttttctaaactgtaaacaatcgcagcaatttagttcagctaaaaaatgagctatacagtttcacatttgaacttattaagttttcaatgggccagtgaaaaacgtcccccctattttttttttaactgcttcccctatttaaatgctcagcataagaaccctggtcctatacaatttatccaaagcttgggcagcccgagagcccttttatccctcactagtgaatcagttctattgtaggagagagacattctttcctccccttttcgcttaaaaaacataacaaacctgaatagactccaggctagagtagtggagagagtgatttttattagatctaacatagttattggcaaatgcctaaagacaatatttaaaaagagagctagagaaagaaaaggctttcactttatgccttaaaggacagattggttacaatttaacatctaagaggaaaaatttatagaattaaatggcctaacrttcctctttcttcaacatacatatgagaaatctaagctaagaggacatctggaatggaacgttattcagcaatcagaaagcaaaaattcaaaccattgatgttttgatgga

SEQ ID NO: 814701 - DNA, 519 bp, Homo sapiens
gggcccagtgggtcacaagggtccttgaaagtggaagatggaggtagaaaagatcagagtgatgcaacctgagcaggacttcaagagcttttgctgtcttggaagatggaggaaggggaccactagccagggaatgcagcagactctagaagagggaaaaagcagggaaggggtcctatccagcacctacagaaagatatacagcacaatgccttgattttagcccagtaagatccatggcagacttctgacctacagaactataagataatgattttgtgtgtttacgccactaaatttatggtaatttgtcacagcagcaaatgcaaaattaatgcacactttttggtgcagttagaaaagttggatctaatcagttgctacaaaactgctaactataartcccataatccttaactgtgaggaaggagctctaggcttcaggtaagttattacaaatgcaagcagagctgtatgacaacaacaacaacaacaaataaatacacagtttcagaagca

SEQ ID NO: 814702 - DNA, 623 bp, Homo sapiens
cttcctcttaggactttaggtctgcctacatgttgaagaagtttgagttttaggctttgggagcatttccttaaaaaccattgtcatgggggaggaaaaaaaaagggtagtgttaattctgtcwtcacacactcagagatcatttggttgggctacattttatgagctatattccataaagatgctgcaaagttcaggtatctggtttaggaaagaaaaaaaaatcccttctttaacccaagaaatgtaatgcaaacaacttgggcctgtgtcacttagtcttctaagaagacttcaaggctgttataaagacccagtggtgggagaaacctgatccggtatagcggggccagaagaagctgcgggaccatgccgcggggacaaggcaaggagtttcgccaggatgttgatctcctggttatttacacttccgcctcagtatgatctgaattattaatgagaaagattaagatacagattccttccttcaagtgccttagtagtcacagacaggaggttaattataagactaaaagcaatcttgggttgttagaagaacttaaaggaaaacacctttcaacttcttgttatcaatcaatcatttttgtctttagaaatcaaga

SEQ ID NO: 814703 - DNA, 640 bp, Homo sapiens
tttttgttagaatcaaataaaaatatttataataaaaacgacttgtataccatatggtcctaaagattaggatttttgttagaatcaaataaaactatttataataaaaactacttgtatatcatatggtcctaaatagatatttattacaaatgcaagatagtcctaacttcttccacacttaaaatttgtgtactttttttgttttgtattcttttgtttttgctttttttctgttaaggatgtgtgcccaaataactgttgctatcgaattgggtaaactgcaagaaaggtagcaatcaacatacatgaaacaatttacacatattatgtttctaacatttcatttcttcaacccacccccaacattcttatgtagttaacagaagattttggaagagaagcataagggaccagggaataaagtttgatgttatccctactattcatacaagagagacccaccacttttggataaaaattagatcataacacactaaggcgaaaaagccttaaactgttgttaagagatccaatcataactatctcacataaaaatccctttgagaaggctgytgcttgataatacttataacctgttctatctatgctgaataacttgaagcttattctttcactg

SEQ ID NO: 814704 - DNA, 642 bp, Homo sapiens
ggtttttgttagaatcaaataaaaatatttataataaaaacgacttgtataccatatggtcctaaagattaggatttttgttagaatcaaataaaactatttataataaaaactacttgtatatcatatggtcctaaatagatatttattacaaatgcaagatagtcctaacttcttccacacttaaaatttgtgtactttttttgttttgtattcttttgtttttgctttttttctgttaaggatgtgtgcccaaataactgttgctatcgaattgggtaaactgcaagaaaggtagcaatcaacatacatgaaacaatttacacatattatgtttctaacatttcatttcttcaacccacccccaacattcttatgtagttaacagaagattttggaagagaagcataagggaccagggaataaagtttgatgttatccctactattcatacaagagagacccaccacttttggataaaaattagatcataacacactaaggcgaaaaagccttaaactgttgttaagagatccaatcataactatctcacataaaaatccctttgagaaggctgytgcttgataatacttataacctgttctatctatgctgaataacttgaagcttattctttcactg

SEQ ID NO: 814705 - DNA, 602 bp, Homo sapiens
ttgaagcacaataaaatgaagtgcaataaaacgtggtatgcctttatcttttccattattagagagagttattgtcagggccataatgaaaacatttgccttcttgargcaggaaactggaaattttaatctgaatgatattaacataattgaggcttatcaatgcatcaaaatatgaaggagctcttctgtttgtttccttttgactaatgtctctgatcctggaaatttaagatgaagaatttgctttctcattcccctctcttataaatttctaggatatcaagaaaatatccaaaggtaatatttttgcccaagttattgacttgtccatttgctgctgtttgagtttatcaggagaagatgaatacatgtctattagatgtctatatttctaatttcatcatttggctatgcatggatatttgttcccatgaacattatttttgtatagatcaccatcagtcaagtagaccctgccagcctggtaagatgataactttgaagctttagtcataccttgtcctttcacctatgcctgatgttgtcatttcacactttgaccatagcttgcctgcaagtgcaacatgtaatatctctgt

SEQ ID NO: 814706 - DNA, 607 bp, Homo sapiens
aagaagacatacaaatggccaaaagttatatgaagaaatgctcaacttaattaatcaccaggaaaataaaattaaaaccacaatgatacattgcctcacacctgttgggatkgctattatcaaaaagacaaaagataagttttggcaaggatatggagcaaagggaaaccttgtatagtgttggtgagaatctaaattagtacagacatcattgaaaacagtatggcggttcctcgaaaaataaaaaattgtagaggaatagtttttgatttcccccaatatgttgacttatttcaggggtctggcctatcagtttttggtcaaagactgcccctcatgtttgaattagtagatggttctatttgtcttacctggattgttatggctccatctgtactttcctgggatttttagccttgatccttgatttattattaaatctggctttcatacatcagactggaaaacaaagacctcaacattttctaataatattttaatggaaaaataatatacatactcattttgaccacttaaatcacataaagttacacaaaaaaacagtatcactccctcttttcttctttcatacgacttccctccctac

SEQ ID NO: 814707 - DNA, 654 bp, Homo sapiens
taaaaaccacaggatgagtccaggacacactggacccaytgtaagttggacctgagctaaaacttcattaattacctgacctccataagcacctactttaactggaggaccacaatgacttttagggtctcctggaatgaatgtcagctcagagccagtgtccagtactccccaaaatgttggatcatttccctttccccagtgtgcaattactctggtaaaaggctgggaggtctacttggggaagaatgggaaaaagattaacaacataaattgttggtagtgtagtggggttcttcctcaaggggacccagcctccccttcattcaaagggttctaggcctataaactggctcaagtctagaaattaattgaggggccatgattctttgtttttataattcaaattagtctttcatccatttgacctgtaaatttcctgcttatacaacttaggtagggatgcagcaggctccctatcaatttcacttctaggaacactgtaattaattagctaatgccaaagcgctacatgagtcagactattctgattgccactttgcctctggtgtccattatgatagctatgtctacctttcctttgacgattgagtgccaccacttggtccctgacatctcaggatccagttatcc

SEQ ID NO: 814708 - DNA, 442 bp, Homo sapiens
agggctcttcaattagcaaatgatgaatgctctcagacctaggtccttcccttcaaggcagccagttcccttctggcctaggttgtgctaaaaatgcctggaatggggcctgatgactttgactgstgccatatcatgctgtggctgagctggtatccaaaattcaaaacaaattcctccccactgttccctctcctctacttaagtggaaggaagaagtctgttttgaagttgtgagctgtgcagcctggggttgggggaggggtgatgtcagcactcctttagcttccccagctggcatcctagcaggttgcatcttcccacaactccagtccactgtctcttgtcccagttcaacactaggagtcacctaagagttgcagtctttatggcctagactgcttttcatgtccacttagacacacagaacactgtagccctc

SEQ ID NO: 814709 - DNA, 451 bp, Homo sapiens
cctggaataggaagaagtcattcaggctgagcatagtggctcacacctgtaatcccagcactttgggaggccaagatgggcggatcacgagttcaggagttggagaccagccgggccaacatggtgaaaccccatctctactaaaaatacaaaaattagccaggcatggtgggcacacgcctataatcctatctactcaggaagctgaggcaggagaattgcttgaacccaggaggcagaggttgcagtgagctgagattgcaccactgaactccactccagccagggcgacagagcgagactccgtctcagaaaaaaaaattaaaaataaagtagaaagaagtcaytcatggaaaaactagtgaaatccaaataaaatttggaatttagtcaatagtaatgtgccaaaatcaatttcttagttttggcaaatttttattgtattataaga

SEQ ID NO: 814710 - DNA, 382 bp, Homo sapiens
tgctctgtcggctgggttggagtgcaacaatgtgagtacagctcaccacagcatcgacctcccagtctcaagtgatcctcttccctcagcctcttgagtagctaggactgcaggtgcatgccaccatgctttttcttatttttgtaaagacggagtcttgccattctgctcaggctggtcttgaactagtaggttcaagtaatcctcccaccttggcctcccaaagtgctgggattacaggtgtgagccactgygtccagcctatatgtatttagatatataccatctatatataaaccaatcaagattggtttacatataaagaatggcttataataacagcagttactgattttatggaccttaaaagtcactgatggaa

SEQ ID NO: 814711 - DNA, 590 bp, Homo sapiens
ggagccttcccagattagaggggtttgaagtgtgttgatgtcttgaggctttcttgccgctgacctagctacctgactggctaatctatttccttyggctacctcatctgttcccttctgatgtcccctacaatgcatttctgtgatttctcgtggaaggaaaactgaggaaagtaaccttttaatttcctggtgatgttttataggagatccattggtggtaagaaaatgcctttccttccaaatggctgcatgagcatggagaactaggaaagcatactgggagtcagtgtaaatattagctacctttcctttgcttaattcaattgctcttgtaagagctattagctcagctaattgagcgcttgtgcctggaggaagagacacacttttaatgacgtcatttagagtgactactgcgtatcctgccttgtggatccatgctctacaagagagctcccatctgtgaagagggtccagtctggattctctaggggagtttccttgaaatcctccctggctgcataggtctgtactatgacttgttcacaattatgctcaggttccctagtttcttcagggaggaaggt

SEQ ID NO: 814712 - DNA, 634 bp, Homo sapiens
tagatattgtataaaatagacaaagtattaaaaacaaaataaaatatcagccataacctccaagtcagagatgaataaaattaacattttggtgactgttttactagtgtttattttccacgattatatgtgtcacaaaatgttacaagtataccatgtacagtcatgcaccgcattaatgatgtttgggtcaacgactgcatatgcaacggtggtcctataaggttataataccgtatttttactgtaccttttctatgtttagatacacaaatacttaccattgtgttacaactgcctccattattcagtacagtaacatgccgtacaggtttgtaacctaggagcaataggctatacaatacagctaggtgtgtagtaggctatactatctaggtttgtgtacacactgtgatgtttgcataacaaaatcacctaacctcacatttctcagaacatatccccatagttaagcagttatatgactttatagtattttgcaatctgcttcttaaaaatttgaattttattttagtgaatatatttctacagcrtcacttttagtgattatacactattctgatttattaaattaatatatttaatcaattgtttatacatgtaatttgtagtt

SEQ ID NO: 814713 - DNA, 349 bp, Homo sapiens
tgttcaaagagatgtcttctttacctgccatcctctgctcagcccgttgtttccaccacacccgtgaggttatacctgccaaggtccctgttaaaatccggtggtcatctctttgtttccatcttaccagacctcagtggtattccattctcttgaccacttcttcctattagaaacactttcctgattttcctcctacctctctgcctattctttctyattctcctttgcctactttcctctgtttgactggcctctgaatgttggaggtctctatctcttctctttatctgttcagtctccctaggtgagttcatttagtcctttgaatttaaatgtcatctataca

SEQ ID NO: 814714 - DNA, 349 bp, Homo sapiens
tgttcaaagagatgtcttctttacctgccatcctctgctcagcccgttgtttccaccacacccgtgaggttatacctgccaaggtccctgttaaaatccggtggtcatctctttgtttccatcttaccagacctcagtggtattccattctcttgaccacttcttcctattagaaacactttcctgattttcctcctacctctctgcctattctttctcattctcctttgcctactttcctctgtttgactggcctctgartgttggaggtctctatctcttctctttatctgttcagtctccctaggtgagttcatttagtcctttgaatttaaatgtcatctataca

SEQ ID NO: 814715 - DNA, 589 bp, Homo sapiens
aacagatcaatggacagagaaaatgtgttacatatacagaatggagtactatttagccataaaagagaatgagattctctcatttgcaacaacatggatgtaattgtaggtcattatgttcagtgaaataagccaggcacagaaagacaaactttgcatgttctcacttatttgtgagaactaaaaatacaaacaattgaactcatggagatagtagaatgacggttaccagagaccgggaagggaagtggagaggttagagggggagttgggatggttaatgggcataaaaaatggaaaggataagtaagatctagtacgtgatagcacaacaaggtgactgtagtcaatgagaatataattatacattttaaaataactaaaaatgtacaattaggttgtaacacacaaaaaatgtgtgaggtaatggatacccattttactctgatgtgatgattacatatggtatgcctgtatcaaaatatctcatatgccccataaatatatatacctactagttatccacaaaaaytaaaaattaaaaaaatttagaaaaatttttaaaagacatggttaggtatgaatcaga

SEQ ID NO: 814716 - DNA, 730 bp, Homo sapiens
tctatatttacatccttttccatttaaccaaaaaagttaatataattattggctaaaatatatctggcactgttaggggttacagaaaatatatatgatgtggttctcattattacttttttttctttttttttttaacagggtctggctctctcacccaggctagagggcagtggtgcaatcttggctcactgcagccttgacctcctaggctcaagcaatcctcctgcctcagcctccttagtagctataactataggtgtgtgctactatgtccagctaactttttgtatttttttgtagagactgggtttcgccatgttgcccaggctggtctagaaactcctgggctcaagtgatcctgccacctcagcctcccaaagtgttgggattgcaggcatacgctaccacacccagcctatgggatggttcttgacatcagggtgttttcagcctagttaggaaagatgaacaaactttgactaattagccaatacttcagtgcttaaactatccaataagtgtaggtgtaagtatgagggaacaaaatacatgggaggttatttcaaaaggatgaagcagctccttgttgttctacattcctgcatctccccaccacctaggattgagtccagtgtgtatcttaatcaagaaaagtggttgtaagagatagaaatcccttaggctcacagaagtgaagggaartttatcctaaggatccggggtcatc

SEQ ID NO: 814717 - DNA, 269 bp, Homo sapiens
tagacttcactgatctctttaactcatctataaactagagatattatcttcctcataggttcattgtgaggataaccagataaaggtcctttcttctcttgcatacttttaagtgtagctctccttctcacagcctccccaaaccgtaggtgatttgtccagatgtccatcactggtccaagtatatttgtgaagtaaaagatggctaggccattctagacattacaagatgctaagaaaggmaggccaggagaaaaaacatatatgta

SEQ ID NO: 814718 - DNA, 561 bp, Homo sapiens
ggatcccatatggttcggcccagamtgcccttccccgactctgccggcttggcaaacttccacttgttttcaaaactcttcttagactgagactggcagaagccacctctgaaccttcctatccactgcccataattactcctccttctgtcctacttcacatcatggtgcatgtccacgactgtgtgtcatacggtacagtgacagctcctcacttcagttcccttcactgacctgagcaccgggtaccttgcttatcaattactgtatgcttatcaaacctatcctaaagcatttcaagatcaggagtgcgctttccacctacactcctccaaaagtcacactgtgaccatgtttcaaagggggaattcaaatgctgcccactcaagcctctaacacaaactgacaattcctctctatcccctggactcccatgcactgtcttattcgcagtactaagttaaatctaccttttatttcagtcctctgtgcacacattctacctctctcaaggaactgagtgggccttccatgagggcaagtacctactgctctacacat

SEQ ID NO: 814719 - DNA, 493 bp, Homo sapiens
ggatcactctacaaaatacctaaccagtactccttaaaactttcaaggtcatcaaaaataaggaaaattcaaaaaactcacagctaaaaggagcctaaggagacctgatgaccaaatgtagtggtatcttgtgtgagagcctgaaacagacacagacgttaggtaaaaattaaggaaatgtaaaaaggatggactttagttaataatgtatcaataatttgttcactaattgtgacaaatacaccatactaatgtaatacataattaattggggaagctgagtatggagtatacaggaactctctggaccatctttgaaaattttctgtaaatataaaactattttaaaaggaagtattttaaaaaatagaacttataatgagatgtcactacatacawtcctatcagatggactaaaataaaaagttatgactataccaagtgctagtgagcacgcaaatctattagaatattcaaacactgttgatgggaa

SEQ ID NO: 814720 - DNA, 613 bp, Homo sapiens
gtggagggagaggcgcgagcgggaactggggctgcggggcggtgcttgcgggccagctggagttctgggtgggcgtgggcttgggcttggcgggccccgcactcggagcagccggccagcctggcccyggacaatgagggacttagcacccgggccagtggctgcggagggtgtactgggtcccccggcagtgccagcccaccggcgctgcgctcgatttctcaccgagccttagctgccttcccgcagggcagggctcgggacctgcagcctgctatgcctgagcctcccacccactccatgggctcctgtgcggcccgagcctccccaacgagcaccaccccctgctccacggcgcccagtcccatcgaccacccaagggctgaggagtgcgagcacacggcgcgtgactggcaggcagctccacctgcagccctggtgcgggatccactgggtgaagccagctgggctcctgagtctggtggggaggtggagagtccttatgtctagctcagggattgtaaatacgccaatcagcaccctgtgtttagctcaaggtttgtgagtgcaccaatctacactctgtatctagctctctggtggggccttggag

SEQ ID NO: 814721 - DNA, 613 bp, Homo sapiens
gtggagggagaggcgcgagcgggaactggggctgcggggcggtgcttgcgggccagctggagttctgggtgggcgtgggcttgggcttggcgggccccgcactcggagcagccggccagcctggccccggacaatgagggacttagcacccgggccagtggctgcggagggtgtactgggtcccccggcagtgccagcccaccggcgctgcgctcgatttctcaccgagccttagctgccttcccgcagggcagggctcgggacctgcagcctgctatgcctgagcctcccacccactccatgggctcctgtgcggcccgagcctccccaacgagcaccaccccctgctccacggcgcccagtcccatcgaccacccaagggctgaggagtgcgagcacacggcgcgtgactggcaggcagctccacctgcagccctggtgcgggatccactgggtgaagccagctgggctcctgagtctggtggggaggtggagagtccttatgtctagctcagggattgtaaatacrccaatcagcaccctgtgtttagctcaaggtttgtgagtgcaccaatctacactctgtatctagctctctggtggggccttggag

SEQ ID NO: 814722 - DNA, 623 bp, Homo sapiens
tgctattaacaccaagaggacctacattaataactttctaaaagaacagcttattatcaaccattcaaaaggcctgggtgctaccaacactacctgtgggcaagcagtatttcagatgtgagtttagcaaaaattagagccagaaagtagtcttgaaataacagaaaatgtatgcctttgttctttagttctaagttaaaggacatggtacactataaatgccataaaagtaagaaacatttctaaacttttatctgagacatatagtgcaatccactatcaaaaaatgtgttagatgcacatttatttctcaagtcagtttaaccataaacaatggtttataagaaaactgaacaagttaagtctactttccttctcagtaagcagcacagcactggggtattctgctgcagaaagatcatttgaaaaacctgctttatgattaagggacttctcaacatcatcacttaatcacttggccaatatcccatatagaggcatattttcttaaagggccacttgcaaaccaatgatrtattagagagtatttaaatatatttgaaaataaattatcttgcaagtggagagaggaataattattttctatggtaattttctgacaa

SEQ ID NO: 814723 - DNA, 632 bp, Homo sapiens
gcaggctgagacagttaatcacctacaaacatgagccattctctgtagaaaaggaagaaagtctcagagtgcagagccgcctggctggagagtggagttaagaaccacagggaaccactcccagggagcacagctgggccctaatcaaggaactggaattgttgcactggctggatcagaactgctatgaactagtaagtactactcattcctcattcctcctttttaaatggaaacgttcactgtagttatcctgataccacacctaccccaagaccatcttgctgcaaggaagcccaatgtctacatggacaggctgagtggaaagacagaggtgacacagaaacccagctgggccgggctcccagcccacgtgccagtgtctgttgcaccaatatggagaacaaccaaggaattcaactgacagggacaaccaaggactcctgaaaaccctcatcccagtcagctccagctgtttgcatcaccccagctgaggtgccagcatcatgtggaagagatgacctatatttgcagtgccctgtctgaatttatgacccaccraatcaggaatacaataaaatggttgttgctttattccaccaagttttgggatggaatcaacacatagctga

SEQ ID NO: 814724 - DNA, 652 bp, Homo sapiens
acaatgcatttaaaacaattattctttatcattaaagttaataatatgcacattaacctcttatgtagtctaaatcaatattgtagtttaaaagatatgacctctggacagctttgtctaaatattgatttcattgtcatttgtataaggtatcaaacaaattacatgctgcactaatatcattaatgctggccccatagagcctctgactttatgggttcttataatacagggcataacattacaaaaatattaaggacttcacaaaatgtaattgccgaaaggatgagatttgagtatggcaggacagagttgttataaacagatgataatttctaaaccctttattttcagtgaatagaaaaaaaaaaaatactgctctttaacatgcatattggttgttgatgtttagtttcaaatggtagattttttttctgcctcagagggtctaatttaccttcttgtgatgtcatagatatctcagaagaaagtaactcaatcttagtccaattaaaatattataattttgcaatatagtagtttttcctraataaatttgattagaaatccctgttacaagttaatagtgaatcagatgagttgaaaaaatatatgccttagagtgaaggggctgaacttttcaaacggctct

SEQ ID NO: 814725 - DNA, 533 bp, Homo sapiens
gttaatttttttcaagatatgaaaatcattggtagtagaatgctaccaatgctacttggtaatgctttaacatgtgattcaactggaagtggatgtgacctatttaagagatgttttattatttctgagatttctagcttttaaaagtcacaagtgagaattcgatagatccaaagagtcctttaatatgttcatcttgtggccttttactttgattatttaaaaacttctgatgagaccaactggcagagctagaaaatccaaaagaatactttgctctgagctttagctgggattttcttctctcacattattttggctttttcaggatttcagtttgaagtttaagtagagtcattcttttgaaatcctttattttattttcatgtttgttcaaatatgagtaccttatgcttccttatagttgccagtttagcagaataygactttattatgggggcttacaagaagagccttaattatagtaacaaatcaacattttagtattaccattcaaatgagtgtatgcacat

SEQ ID NO: 814726 - DNA, 540 bp, Homo sapiens
taaaattcccattcatgagtatgatgtatcatctaggagcccagatttgcaggccagtactacctgaaactsaggactgagatttttaactattaatacttaattatactacttcactgcttatattaacatgtggccttgagcatgtttcttaacctctctctgagtgtgttttcttccctggaaaatgttctaggtgatttacatatatttttaatcttcacagcaactcagtaaaattgctgttattacactcactctacagatgaggaaactgaagcttaggttaacctgtgtaggtttaccaagctaattatactctgcagatacccatatcttttatgactccaaagcccaagcccaagcccttcatactagcccacactttctacaaaaacgtttatatcatagcatactacctgcatgcagatatccctttatcagagcaaggggaaaggtggtggcaaaagggcaatactgagatgggggactatcatgaacaagccaaatacggttgctctttcaaaccatggtattcct

SEQ ID NO: 814727 - DNA, 553 bp, Homo sapiens
atgcaattaattttttgttcatgacaccctgaaggtgtttctgtgtcagattcactcagagacctcatgatgaggaaggaacatggtggcgaatcttaccctggtgatgccaaacacagcagtgactcataaccattccagcactgcctatgaaatggatcaattaaaggacggtgacacacaaagatggctacttccagagggagaccttggaaattcttttatgttaacagtgtaccccacacaagaataggagaaccacattctgtcagtacactggggaagttttttcaaaatatctctggactgtgtagatttctggtaatagaaaatatgatctgccacttcaatctactgaatactgtccgtttttttctatataatggcttttaggaactgttgtgaggcatcctaagtattatctagccakccatccatccatccatccatccatccatccatccatgtatctatctaatctatgtgattatatgtgtagagcttattcatacatatatatatacacacacatacatacacacatagttatatg

SEQ ID NO: 814728 - DNA, 594 bp, Homo sapiens
aaaggatatttagcaaagcagttctaattaactttcagctatttccatttgctttatatattacatattatatatataatatattttaagtcagtaatgcataatgaagacagaygcagtagctcatgcctgtaatctcagcagtttgggaggccacagcacgaggatcacttaagcccaatagtttgagaccaacctgggtgacacagtgaggcccccatctctaaaaaaaaaaaaaaaaagaatgcataataacattttatatgctagtgattacaattttaggcatcaactataccattaatatttattgagtacctactatttgccataaatcagacaaatacctggaaatacaatggttaaaaaggaaggcatgcttttttaattcatataatcattgtaaaatgagtcagttatggaatggtttattgtttattacaaataattaatagggaggagagagggagcatgatgacaggttgatcaacaggtataaagttattatcattagataagaggaatacattctgatgtattgcacaatagggtgactatggttaacagcaaaatattgtatattacaaaatagct

SEQ ID NO: 814729 - DNA, 594 bp, Homo sapiens
aaaggatatttagcaaagcagttctaattaactttcagctatttccatttgctttatatattacatattatatatataatatattttaagtcagtaatgcataatgaagacagacgcagtagctcatgcctgtaatctcagcagtttgggaggccacagcacgaggatcacttaagcccaatagtttgagaccaacctgggtgacacagtgaggcccccatctctaaaaaaaaaaaaaaaaagaatgcataataacattttatatgctagtgattacaattttaggcatcaactataccattaatatttattgagtacctactatttgccataaatcagacaaatacctggaaatacaatggttaaaaaggaaggcatgcttttttaattcatataatcattgtaaaatgagtcagttatggaatggtttattgtttattacaaataattaatagggaggagagagggagcatgatgacargttgatcaacaggtataaagttattatcattagataagaggaatacattctgatgtattgcacaatagggtgactatggttaacagcaaaatattgtatattacaaaatagct

SEQ ID NO: 814730 - DNA, 680 bp, Homo sapiens
agcacccagagagaagagagaagaagtggtggaaggatccatttttctaccctggctcagaaaattcagactaaggaatgttctgctttaaaatctgatgwgtttaaataatctttcatacttatttataaatatttatacggactttttcatatggaaaatatcatctacttggttaaaaaaaatgtaatggcattctaattcctgtctttttcatttcactagtaatgaaatttgaagttataaaaggcaatgcctctccatgaagcccttccactgctcagagacatccacttttcgtggtttctctgctattattttgtgataaaattctagtgactcaaaggtagtcacccaacacctctcctacacattcagaaagcaatatctccagtattaatagcattaacctcactgagctatagtattactccatatgacctcagaatttatgaccttaacttgcactatattattttacactttttaatatgatgatctatgtcttttacatatgtggtttcatttacgcccatccacgctgctagtgaccagtctttgtggacagaggtcatgacatccataacatgagcatctcccacaaacacctagaaatattgtgttttgcccaaagtgggagaaaaataagtggttactgtttatatgttcgctttctgctt

SEQ ID NO: 814731 - DNA, 614 bp, Homo sapiens
gtttcaaaacattactgattggtagttgaataatctttttaaaaaatgatctgccaggcctactgtaaagagatgatgcatggtaaaaggaaaatggcagctctatgttaytaccagtagtgaaggtgaatgatggattgttacatacagagtaagacttaaatgttgtgaagtttcctacagtttgacaaccaaaacatctaaaaaattcaaataaattttaaggtaatcttgatcttggttgtgagttgcaccagagaggacagtttatttttagttaacttgtacttaacctgcacaataagagtggtgactgactcaaatgtaggtagtactttattgtattccaatttaaaaaaacaaaattaagtctatattttaaaaactctgacaatagcaagatatttaatgaactctacttcatatctagttcattttttttttctggtttgaaaaaaagatcagctttccctgaataaacaaaaatgaatgtaaataaacatgaaaatacaaaaccataatttccaaaaacgaaatgaatgggccaacagtaaaatgcacaatgagccacaactgccctggtatttaagaaaataaaggtcaactgtgggtca

SEQ ID NO: 814732 - DNA, 560 bp, Homo sapiens
ctgactccaggcagagatagtgtctttcttgcatatctscctatttgtggtatcaattttcttcttcttgaaatgcattcctaaaaataatttttttcagtgagtgtctgctgaaggtaaacttccacaattctcatgtgtctgaaaatatctctatttcattcttattttttgatgatcatttagctagctatgaaatcctaggttaactgttattttatttcaatcactagaaggtacaatttgtcttttgaattctcttgttgctgctgtattctgttatccatataattgttatcaattttttttcttgtaatttgtcttttctctttggttccttcttgtctttagcattcttcagtttcattaagctgataagcaacttcagcaaagtctcaggatacaaaatcaatgtgcaaaaatcacaagcattcttatacaccaataacagacaaacagccaaatcatgagtgaactcccattcacaattgcttcaaagagaataaaatacctaggaatccaacttacaagggatgtgaaggacctcttcaagaactaca

SEQ ID NO: 814733 - DNA, 579 bp, Homo sapiens
aggttgaagcaggcctatctttgggcctccaaaaagcttacttggatgstgaaagtggcagcagcactcaggaaggtgagatagtccttgaggccctaggtggtgtgcgtggtatcagcaatggcagtagcagtggtgagccaactgtcaggcccccaggcagcatgtaggagaacaagcaatggtgttggtgggttgggtaggccagttcccaggccctcaggtttcacatgggggcgggtattgatggtggtggtagtggcaggctgatgggcccatcctcaggcccttgggagaagtgcacaggtgttggtggtggcagtcaaagaggttgatcctcaggcctacagaaagcactcaggcactggtagcaggcttgctgggtctgttgttaggcctcctggtggtacgcatgcataccaaaaatggcaggtagggtaggttgatcctcaggtcaccaagcaacttgctcaggcactgactgaggtgttgctgggcaggatgaacctgtcttcaatcccagggatggtgtacctgtaggctatttccttgacccactgaaggtgcatggaggtacat

SEQ ID NO: 814734 - DNA, 510 bp, Homo sapiens
tattgttaatcttataatattgtttaatatatgacakggtaagtttcctttcattagtaccaatttttggtgtctttgatagtcataaaaaaagtattattccaaaaaattgcagaacgtgctcttggcagaatggaactttgtttgacagttgcaggaaaaacctgtatttccaaacaaagaatgactgcaagatttctctgtatatttggccccaaagaaaatattttatgtttcacccacaaatttatgagtgacttcacttcagctttctcacttaggcgttatgtgtggtgagaagagctctggaaaaaaagtcagaaatcctcaacttgaaaccaactttaattctttgcaggtgtctaacctgagactggttgcttattgtcttagagtttttgtttccttaagggtaaaatatgagtataatttctattctacctttcacacagggctgctgtaaagaatgagataatatatttgaaatctcttttaaaactacttagcatt

SEQ ID NO: 814735 - DNA, 523 bp, Homo sapiens
aaatctaatgaaaataaaattagcaacagattctgttgtttaattatctgtatcagctagcatatacaaatgttaaaayttttcaactgaattgctgcatttataaaaatgtatgcacaacatcatattttaaaaggaaactatcatccaacacataacttggcaattttttgttagttaactgttctactcaaattcgatatattgatttaaatatttaaatactttatttaaatctgcattcaaagtatgacattaggaaggtgttgaaataaaaatacaaaacaaaatttataaattataatatttaatgccatatgtttaaaaatgttgaaagaatgtaatgtctaaatttaaagtctaagctaacaaatctaggagaccctacaaatgggaaatattgattaacaattaggtaacattttgagtacttaaaaaaataatttaataataaaatctaatttataaacgcaatttaaatctttgaaaattaagtaaaaaagttatacaatatgaagagatg

SEQ ID NO: 814736 - DNA, 570 bp, Homo sapiens
tgtaggtacaattattgtgccctytaaccactatagatgcacaataaactcagagtaataaattaacattcaagacaaatcattaaattcatgttcacaattccccccataaagaaagactgtaagcatctctttaaaggtatgtgacagtaaggttattttggcttaagaccaattttcagtgcacagatcaagaatgttacttattcttttatttgtttgtgttttaattgtggtgaaatatacatagaattaatcatgttagccattttcactgttcagttcaatagtgttaagtatatttgcactgttgtacaatgagtctccagaaccttttcatcttgcaaaactaaaattttctatccattaaacaactccttgtttctcccttccccagcccttggcagccaccttctaccttctatttttatgacttcacatactctagatatctcatagaagtgaagtcatacagtatttgtccttctgtgactggcttgtttcacttagcataatgtccttgaagttcatccatgtagtaacttcctttttaaggctgaatagtattct

SEQ ID NO: 814737 - DNA, 504 bp, Homo sapiens
tgctaagtgaaataactgagacacaaaagaacaaatattgtrtgattccacttatatggggtacctagaacagccaaatttatcaagaaagtaaaatagtgtttaccaagggttgctgcaaggaggatgaaaagcaattgtctaacagctacagagtttcagtctgggatgatttaaaaaattgtggaaataaatagtggtggccaggcatggtggctcatgcctgtaatcctagaactttgggaggccgaggtgggtggatcatttgaggtcaggagttcgagaccagcctagccaacatggtgaaatcccatctctactaaaaatataaaaattagccgggcatggtggcaggcgcctggaattccagctactagggaggctgagacaggagaatcccttgaattcaggaggcagaggttgcaataagccaagatccaaccattgcactccagcctgggtgacagagtgagactccatttcaaaaaaaaaaaaaaaaaaata

SEQ ID NO: 814738 - DNA, 612 bp, Homo sapiens
agtagctgggagtacaggcgtgcaccaccacacccggctaatttgtatatatttttagtagagacaggatttcaccatgttggtcaggctggtcttgaactcctgacctcaaatgatccacccacctcggcctcccaaagtgctgggattacaggcatgagccactgcgccccgtctccttcccattttttgaaagcaccatgctccttcctgcatctgggcctttgcacattctgttccttttgctgggggctcatagctttgccttaattaactcttactctcccttcagatatcaactcaaatgtcacttcatcagggaaccttttccatacccttgaaaaacaaattttctctaagaagggtgttcccatcagtaacctagagttttcctcacagcactcaagtatatttatttatattgttcttttgtttgatcatgatctgcctttcatcactagcatgttttctccatgaggtyggtaatcatagagtctgttttctttactattatattcctagtgttgaacccagtacctggaatataaaagatactcaacaaatatttcaaaatgtagaaatgaacctttagaaaatccttgtttaagttaa

SEQ ID NO: 814739 - DNA, 444 bp, Homo sapiens
gagtggtcaagctcagcagatcctacctgtacagaacccagcaagctgagatctactggcttgaaattctcgctgccagcacagcagtctgaagttgacttggggtgctggagcttggtcgggggaggggtgtccgccattgctgaggcttgagtaggcggttttcccctcacagtgtaaacaaagccgcgtggaagtttgaactgggtggagcctaccacaactcagcaaagctgctgtagccagactgcctctctagattcctcctctctgggcagggcatctctaaaagaaagtcagcagccccagtcaggggcttatagataaaactcccatctccctgggacagagcacctgggggacagggcgcctgtggatgcagcttcagcggacttaaactttccygcctgctggctctgaagagagcaggggatctcccagcat

SEQ ID NO: 814740 - DNA, 444 bp, Homo sapiens
gagtggtcaagctcagcagatcctacctgtacagaacccagcaagctgagatctactggcttgaaattctcgctgccagcacagcagtctgaagttgacttggggtgctggagcttggtcgggggaggggtgtccgccattgctgaggcttgagtaggcggttttcccctcacagtgtaaacaaagccgcgtggaagtttgaactgggtggagcctaccacaactcagcaaagctgctgtagccagactgcctctctagattcctcctctctgggcagggcatctctaaaagaaagtcagcagccccagtcaggggcttatagataaaactcccatctccctgggacagagcacctgggggacagggcgcctgtggatgcagcttcagcggacttaaactttcctrcctgctggctctgaagagagcaggggatctcccagcat

SEQ ID NO: 814741 - DNA, 623 bp, Homo sapiens
aggtttatttggctcacagttctgcaggctgtacaagaagcatggcaccagtatctgctctgcctcttgtgaggtttcagaaggctttaactcatggtggaaagcaaagggggagcaagtgtatcatacggtgagatggaagagagagaggggaggtccaagactctttttaacaaccagatctcatgtgaactcattaccacagggaggtcaccaagccattcattaggaatctgcccccataacttaagtacctgccagtaggtcccacctccaacactggggatcacatttcaacatgagattaggaggggacacatatctaaattatataagtgcctgttactgtgtatgattggagaagacagggactaatgccataagccaccaggattgatggataccttctgttctgttctgttcacagtgctaataactacattgtctgcagaaaggtgtccatgagaaatgtgacctgagatctgaggtgaratcagctcaaagttcctgtaaatgcatccataggcacttgaatcacaaggaattacatgggggattcaggcatggagtctcagcaacagagtccagcagggaggataggaatgtgggtccagacagggcag

SEQ ID NO: 814742 - DNA, 588 bp, Homo sapiens
cccaggcaaggaggcctttttgggaaagggctgttatcaattttgtttcagagtcaaaccatgaacggagttccttcccaaagtttgttcagcctatgcccaggaatgaacaaggacagcttaaaggttataagcaaaatggagttggttaggtctgatttctttcactgttagaatttccttagttataattttgcaaaggcagtttcatggctaaataaactgaatgctttttacaaacggcagtggttttcctgtccagcccgctgttcctggactgccctgtctgtaactctctaataaactctatgtctctgtctcctttgcacgttttaggtctcttcttcagtttcttggacacagtgttggagtcaacagggatgtgtcacaacagggacttcacccaatgcagattcctttcgagaaactgggcctccagcttgttctaccagtcatgtgctggtcctcccaggggcctgctctgtgccccsaacccagctctagcctcaaactccacttgggcctaactgtctagagtgctaggatacccttcaatcctcagcaactgggtcaacagggaggagaagg

SEQ ID NO: 814743 - DNA, 608 bp, Homo sapiens
  misc_feature 332, 333, 339: n = A,T,C or G
ccacaaaacaagtagaaactttggatccagtacttatcagaccaggccgcattgacaagaagatcgagttccacctgcctgatgaaaagactaagaagcacatctttcagattcacacaagcaggatgacactggccaatgatgtaaccctggacgacttgatcatggctaaagatgacttctctggtgctgacatcaaggcaatctgtacagaagctggtctgatggccttaagagaacatagaatgaaagcaacaaatgaagacttcaaaaaatctatagaaagtgttctttataagaaacacgaaggcatccctgaggggctttatctnnctaaangggttgaaacccacctgctgccatcaggaagatggttgggagatttcccaacccctgtaataggggatgtacggtatgggggagttgccgcagaggaatccctgttcccattgatttttattagccaagcatcctgtgtgtattttggagtacgatgtgtragtgcccaatgggtggccttcatctgtcggtcactgtgcagcactctgcttccaaataaagcatgctctttcacaaaaaaaaaaaaaaaaaaaaaaaagatggttgat

SEQ ID NO: 814744 - DNA, 627 bp, Homo sapiens
cctttagtgatttaaatgccataggcaagcttgaaggtattgctaactaccttctcaaggaggagattaattcctagcctgaagtatctagttttccttggcwatgctaaatatagttgtgttccctttcccagacacattgggcatttcagataaatggcatgttgccaattcatcctaagtagcctggtagctggcagaatacatgctcagccagtgtccgcctgctgggacaccagccgggagtgctgatgaagtgtcagatgtatacttcatatacattaatctgaagaggggaaaactcattttcccatttgcttcttccatctttctgtccctccccacacacatgggtagtttatcacagaagtcatagtcgtcaaaagccaggggatttatacagatgctgctttctggcaagaaagatggaaatttcaggaggcaaaagcaggaccagtggcaacttatttctttgtaggaaaataagggtgtaagccttgatgatggaagtttaaaatggctacgtggccatcatcagaaatattcactccatttgtacttgggagtaatagatagatggcagaagcaccatgaacattagtttctggtatttttctccaattttct

SEQ ID NO: 814745 - DNA, 585 bp, Homo sapiens
ctaatatttaaaagtaacatgtttccatggaaaacaactgtttcttttgtgctctcatagtctggggtcatcttatcctcttaaatgttacagcgtttaactataagagttaaaaactagtgctaagtaatgggccaataatattcctaaagtgctgggatgtactgccataaaacaaacaagaacctaggtatgtaatattccaggattctaattccccaactctaactccaaaccatcagaccctggcctccagctcatatatctttgactgctggacacatctgactgcagaacatcctggaccaaaccttggctactgcttcttaggatgttccagcttcaacttttgatttaccacaccctgggttctggctctgctcatatttggcatctcctcatgccttcttgacaatatttgcatatatattgtcattatttcaatttcaggwccgacgcagttcatgttcctgaaggcttacccaggcagatggtataaatccagatctccttcccacctgacttccctccactcctcagcatggctcctttattccagcctcagggcctctctcacacatgatc

SEQ ID NO: 814746 - DNA, 560 bp, Homo sapiens
catctcatccatagatcattccccaactcttcctgtttactcaatataagatcagggaaggaagaacagtcactttcgtacctggaaagtccaggccaaatccagggtctcgtggcctctgcactacacagtggtgggaaggtcacctacatcacctgtgcttctgtcctcctccattaataaaaatggagatgaacacacctccctatagatgtcaagatactaaatataataacttctgtaaaatgggaacccagtgctcagaggcaacaggctgccaactcatttcagctctcctccctttgaaaatcttctatagcagtggttctgagtctgcgctgtttgaatcacccaggcagcatttacaaattacaatggcaggggcccaccccagacaaatcaagtcagaaagtctaggtggaaccaggagccagggctctacaggcagggaacactggagataacactgtcagttcttgctgtcagtcccatgcagtcccaccctgcttaccccgaawccacagtgttgtctgtttcactgtgagtagctcatctcctta

SEQ ID NO: 814747 - DNA, 617 bp, Homo sapiens
ataatgaaataatgctgaaaacatctcaaattgtgggtgagaaattagacatccaggtacaggaagctcagggattcccaaayagattcaacccagaagggtcctcttcaaggtgtattatattcaaactggcaaaaatcaaagacaaagataattctaaaaataacaaaagaagagcgtcaagtcacatatggaggaattcccattagaaagatttctcagcagaaaccttacaggtcaggagacaattggatgatatatttaagaatgctcaaaggcaggggtctgggggtgggagggacacagctgtctgtcaagaatactatatccagcaaagctattcttcagaaataaaggtgaaataaagtatttcccaggcaagcaaaaattgagggagtgcatcatcactagaccggccctacaaaaaatgcttaaaggagttctacatctggaagcaaaaggacaataattaccaccctgaacacaagtgaaagcataaaactcaatggcagagaagatacttaagaaaaagaaaggaatcaaatgttatcactacaggaaactgccaaactactaagatgaacgagagaggaagaaatgaacaaaggatatataaa

SEQ ID NO: 814748 - DNA, 590 bp, Homo sapiens
tgatttgtagttgctgctaatatatctgtgattcttttacattaatgctgagtgttctaaagcagtgtttagttaagctccatcacatttttttctttttttgttttttttagacagakagtcttgctctgtcacccaggctggagtgcagtggcacagtcttggctcacggcaacatctgcctcctgaattcaaatgattcttgtctcagcctctggagtagctgggactacaggcgcatgccaccatgaccagctaatttttgtatttttagtagacgtggggtttcgccctgttggccaggttggtctcaaacttctgacctcaagtgatctgcctggctcggccacccaaagtgctgggattacaggtgtgagccaccgcgcccggccaagctccattacatttgttcaacatttgttgaatgcttcctctggcagatcttcttggcaaaatacctgttctaaaggagagattgcaaaagaaaacagtgaacaaatagtcaattaggtaatgggagattaaaaaaaattgctatggaattgaaaagaaggtgagcttttcaattttatttgattagaatccagaag

SEQ ID NO: 814749 - DNA, 553 bp, Homo sapiens
atgagtgagttctaatttggggttataagagaaatgagacttttctaatgcctaaaattgycatatagctatgaaattttagattgttgtcaagggagtggggaaggtagatcctacaaaatataccggaagatagcaatgggataaaaataaggccctttatagattgaatcctatcagccccacctcttccagttactttactatctttgtattcttgctttacttatacagagaaaataaacataattttagtacaattctcccttccaaacctatgaaaaaacttattccttacctcgtgaaatttattaactagggtttgggttgaggattggcaacaatgtctataattgaagtcactcgtggaatatttaaaattaacaatgctcaagctccatccaggacaaatgaaattaacttgttaaaagtttcccaggtgattctaaagttaagttaggattgcaaactgctgaatataaactatcgcattgaagaagatgcagtgcaggaggcagacatgactcactttctgttgtcagtgatttaatga

SEQ ID NO: 814750 - DNA, 648 bp, Homo sapiens
taagaaatggagcggtgtgagcagatttgtaagttaaccggacaaccaggtggaaatgaattgaatgaggagacattarcatctgagaactctggctggagtggtgaatgatgaggacctgctcatcattcaccagtatgaatgatggtagaaagacattttataatctattaaaggcatagtacaggagattccttatttaggaaagaaatcttttgttaagatctcaagaaaatactgaatttatgattcctagatctgtcatttaagatagataggactttactgtctctccctatttggttgactagctataattgtaactaggattatattacaatgaaatctgattagtcacattttttttaaatgtccacattagcttcaacaaaataggaagtaccagagtagcttttcctgttcattgtttctctcttatatgtgcttcctttcctttctctttctctggttgtctatacagtatgaagataatttttatttacatgagtaatatattattatttataaattagaaactatttttttagaaagagaaaaaaagttaaaccactagatttctactcctagacactaattgtcattaacattttagtgcacgtctctgtctacttttcttccatggaatat

SEQ ID NO: 814751 - DNA, 558 bp, Homo sapiens
ttgtatttttagtagagatagggtttcaccttgttggtcagactggtcttgaactcctgacctcaagtgatccacccrcttcagcctcccaaagtgctgggattacaggtgtgagccaccactccccaccaatttagggtatctggcagaagaatttttaagcatcaaagcattcaagaggtaacctggctgattctgaaagcattcagtcgtgtgtgttcacaaagagtttatctgaaactgaaacttatgtttaaaagggaagcagagcataaatgtttggaaaatttgcagcatgaccatatggtagaaaagaaaaacccatttttctgggaagaaattcaagcccggctgccagaaatttgcataagcaaggaggagctgaatgttaatagccaagacaatgggaaaaaatgtctccagggcatgtcagagaccttcataacagcccctcccatcacatgcctggaagcttaggagggaaaaatggtttcttgggccagagcttggtcccgctgctctgtgcagactcaggacttggtgccctgtgtcctagct

SEQ ID NO: 814752 - DNA, 626 bp, Homo sapiens
ttatggacattattaacatgtagaatctatcaaatcttatacttctatcaggwaatgtatgtctattttgcttgtttgaaaccgaggcacttatttataatatgaaactatttcttcatatgtttaatttataaaagatgccacttaaacatataactctaataccaaggccacagtaaaatattagtatagccagtaacaattttaatgcatgtctttcctagacctaggatcttcctcaagagtgaaaattggaagtaaataaatctggattgctttgaatgggagtcacatgctcagaatggctaagtttttaagaaaggctgaaccacttaccaggctattaaaagttaaagatattacctcatttccattctccaacgctcctcttcttctcgtcttcgccagtactcctccttctgcatttgcttcctcattttctcttcttgaatctttcttgctcgaatactaggctttacttctacttgcaaatctggatttacttttttctattaatataaataagacatttaaaaaacagcagccccaaaacaatctacatgtatttttaatcatacaattacacttattctttaatcacggaggcttttagttgcaagtttccc

SEQ ID NO: 814753 - DNA, 511 bp, Homo sapiens
catgtaggaaataattctgcagcttttatcctctcagtttacatgtaattatcagccttatttgcatttactaaatatagtttttcttttctgatgaaaaatcctgggggagtcttagaatgtttaattttctcagatgtgactaattaaagaattttcattgatgtttctctttgtgtgtttttttctttttgctgttttcacagtgttttttttttaatattacagcatttattagttggcttttacatataatatacaaatgtataaagaagactttgaagaactgttaatctccttatgcagggacattttttaaaataatgtatgtggttgggaactgtaaaaattcagaaatacatattattcaaaaataatacaaaaaaaataggagattcagtaacrcagaaagctacaaaataaccaaaagccttcttatttaaaggcagattatcttaacaatctgctgtgatttcttctaggagaaaaaaattatacctatatacagtat

SEQ ID NO: 814754 - DNA, 486 bp, Homo sapiens
caagatcaagaagccagcagggttggtgtcctctgtggcctccctccttggtttgcagaaggccaccgtcttgctgcctctttatatgattattcctccgcrcacatgtaccctggtgtctctctgggtttcctaatctcttcttatgaaaatactagttggattgcattaagggccaccataatggcctcattttaccttaattacctctttaaaggccctatctctaaatacagttgcattttgaagtattggggtttaaggcttcaacatataaatttgggaaaaggacacaattcacccataacatggacttcttggcacatattaaaaataaacggggctgggcatggcggttcacgtccgtaatcctagcactttgggaggctgaggcgggcagatctcttgagcccaggtgttcaaaaccagcctgggcaacatgacaaaaccccatctctacaaaaaatagccaggcctgatggtgca

SEQ ID NO: 814755 - DNA, 546 bp, Homo sapiens
gatgagggaaagaaaatacctgtcatgaactgttccgaagtccccaaatttgaagaatgactattaaaagtctcttggagcacaaaaggaaagaaacctagaggaaatagaatttatggaaagagaacccggaacaaaactcctaatttctgaagaaattggcagctcagacaagagtttcaaccagacaccaaaaaggggtcgatctgggatccaaacaggaaaggaccgtgctctgccaatggctacaaagtagctgaagaaagtacctcagcctctgaggagagaataggaaccacgtgaacagattgctgaaaggttaggaagggctcagaagagtaagcagtgaccacctcagagcaacgaaacctacagtcagcaccaggtgaggcttcatctgcctcagtcgatgatcctgacactccagaagtttctcctactatcacacttgaaataactaggcaactgtgtgtgtgtgagaattctgtcggcrgtgctgcagcaggagaatacgaagcagggaagactgtgactccgaactaagac

SEQ ID NO: 814756 - DNA, 421 bp, Homo sapiens
gaaactccaaaaaattatttcacttaaaaatatgttcctagaagtgttttaaatctttttctcatgtaaactaagattaggcaatttgggtgattaaaaaaaaaaaaaaaaccttcccagatttgttggaaagcaccaatgtgtttaaataactcatcaattttcctgaagcaaaacaaacaaaacaacaacaaaactataaaatactttagagtcttttttttttttgagacggagtctcactctgtcatccaggctggagtgcaatggcgcgatcctggctcactgcaagctccgcctcccgggttcatgccattctcctkcctcagcctccagagtagctgggactacaggtgcccaccaccacacccggataattttttgtatttttagtagagacggggtttcaccatgttagcca

SEQ ID NO: 814757 - DNA, 421 bp, Homo sapiens
gaaactccaaaaaattatttcacttaaaaatatgttcctagaagtgttttaaatctttttctcatgtaaactaagattaggcaatttgggtgattaaaaaaaaaaaaaaaaccttcccagatttgttggaaagcaccaatgtgtttaaataactcatcaattttcctgaagcaaaacaaacaaaacaacaacaaaactataaaatactttagagtcttttttttttttgagacggagtctcactctgtcatccaggctggagtgcaatggcgcgatcctggctcactgcaagctccgcctcccgggttcatgccattctcctgcctcagcctccmgagtagctgggactacaggtgcccaccaccacacccggataattttttgtatttttagtagagacggggtttcaccatgttagcca

SEQ ID NO: 814758 - DNA, 421 bp, Homo sapiens
gaaactccaaaaaattatttcacttaaaaatatgttcctagaagtgttttaaatctttttctcatgtaaactaagattaggcaatttgggtgattaaaaaaaaaaaaaaaaccttcccagatttgttggaaagcaccaatgtgtttaaataactcatcaattttcctgaagcaaaacaaacaaaacaacaacaaaactataaaatactttagagtcttttttttttttgagacggagtctcactctgtcatccaggctggagtgcaatggcgcgatcctggctcactgcaagctccgcctcccgggttcatgccattctcctgcctcagcctccagagtasctgggactacaggtgcccaccaccacacccggataattttttgtatttttagtagagacggggtttcaccatgttagcca

SEQ ID NO: 814759 - DNA, 483 bp, Homo sapiens
aaagtgctgggattacaggcgtgagccaccttgcctggcctgaggtatccttatatcccaagaaagagccaccttgcctggcctgaaggaagtatccttatatcccaagaaagctgtactcaagagtataatattgtaacaatcctaatatttggaatgtaggataagaacatgagagtggacagcttagtgaaaataaatttaaaaatttcaaataaaacaattagatttaaaaaatccatttataaatatcttagtataagaaacaaacaggttgatcacaaactgtcagaaaaatttctatattaagaagcaatgtatcgcaaatatcaaactaggaatattaattgttgaaataattcttagtttcttaaaacctagacttaagagttctaaattttctattgtgtccttcattcacaaattaaaatcccccaaattaacwacaaaatcaactgaaaataattcaaaagaaatcaccgt

SEQ ID NO: 814760 - DNA, 604 bp, Homo sapiens
tcagaaaaatttctatattaagaagcaatgtatcgcaaatatcaaactaggaatattaattgttgaaataattcttagtttcttaaaacctagacttaagagttctaaattttctattgtgtccttcattcacaaattaaaatcccccaaattaactacaaaatcaactgaaaataattcaaaagaaatcaccgtgcaagaattatgaaaatctgaatacaaatcagtgagtttttactacacaataacactattaacctgtcagaatttggagctgaaactttacagatggtctggttgtctaaaccttgttatttcccaattccaagtgcagtgattttattaattgcaccatggcttctaaaacactaatcactgaatagggtacagcgctttcatttagaggccaatcagttgcgcaataaatatttaattgacttctatgtgtccacaatgtttcagggagggaatacccaaataatgctatgagaaacaactctcactacaacgtaagctccttgagggcagtgatttttgtctgttttgttcacytttctctcctgagcctgtaaattgcatggcagagatggcgctccataaatat

SEQ ID NO: 814761 - DNA, 456 bp, Homo sapiens
gacacgggaagaagacggccatctatwagccaagaataggcctcaaagatacctttccctcacagccctcagaaggaaccagcactgctgacaccttgattctagacttccagcctccagaactgtgagacaatcaatctcttgtttatgccccgatctgtggtactttcttaacagcagccccagccaaccaatgcagcgagcttcatagtaatgacaatttcacaagcaccattatattttctaacttctaaacactgtaaaaatattgacatgaaattattttctaaagaggaaacagtgaaataaaagtaaatgattatttaacttacagccaatagttccctatattttggaggaattgtgacttctcttttacccaattcctctatgtaggtggaactcattggatcctggaacaaaatcatacacatagggatattatataattaatta

SEQ ID NO: 814762 - DNA, 465 bp, Homo sapiens
ctctcgttgtctctccgttccttgcctgcctttttaacttttcttttttttttttccaatttgagacagagtctcgctctgtcacccaggttggagagcagtggcacgatctcagctcactacaacctctgcctcccaggttaaagcaattctcctccctcagccgcccgagtagatgggattacaggtatgcaccactacaccaagctaatttttgtattttttagcagagacggggtttcactatgttggccaggctggtctcaaactcctgacctccgatgatccacatttctcggcctcccaaagtgctgggattacaggcatgagccaccacctctggtctcttgcctgcttttgacatccattgcacactgttgtcatcacagcaagactctccrtgctgggaacacggacaggtccagccactgggtcaaggtgtgggaggtggggccagtaggctcc

SEQ ID NO: 814763 - DNA, 621 bp, Homo sapiens
caaaatttattttatttatttacttgttttgagatggagttccattcctgttgcccaggctagagtgcaatggcacagtcttggctcactgcaacctccgcctcctgggttcaagtgattctcctgcctcagcctcctgagtagctgggattagaggcgcccgccaccacgcctggctaatttttgtatttttagtagagacgggtttcaccatgttggccaggctggtctcgaactcctgacctcaggtgaaccacctgccttggcctcccaaagtgctgagattacaggtgtgagccacggtgcccggcctcgaccccaatatttagtgaaaagaatggtactattttatgttttgcaagttttcttaatgtctggcttaatacaagacagttggagtttcctgtttctgcagtttcacaactgcttcagtgagttgtgacatcacacatcatgtagtctttgcaaaactccactatacattcatgagaaaatgagactgagagggacaaatgacatcttagtattattatgagaatggcttaaagagaaggctcgttccccactgttgggwctctcacttcagtcaaactaataactgaacattcatcatctatatgg

SEQ ID NO: 814764 - DNA, 520 bp, Homo sapiens
tctgatacagacacttcagccactattagatcagctgggttattagggccaagtggtagcactgcttgctctgcagtctggaccatctgaaaagccttttaatactctgggccctactccaagttggtagccatacaggtagctcagtaaatgggtccaagcagcacatccaaatgtggtatgtctccaaaagccaaaagagatctgccaagcttgtgcctctttcacagtggaaggtgcaggaactagttttttttttttttttttttggcgggtgggggagtctcgctctgtcaccaggctggagtgcagtggtgcaatctcggtttactgcaattcttctgcctcagactcccaagtagctgggactacacgtgcgcaccaccatgcccagctaatttttgtatttttagtagagacggggtttcaccctagtctttcactttggatggggtatcccaaaatgctccaggccactggycctctatcagctttactgaggtgatgggtccttatgttc

SEQ ID NO: 814765 - DNA, 326 bp, Homo sapiens
agtggagttgtgagaagggggctactgccctccagactccagaatggtagatccacatgacagcttgcaccctgcacctgaaaaagctgcaggcaacatcagcctgtgaaagmagctacaggggttgtaacctgagaaccacagaggcagagccacccaaggccatgggggcccaccccttggatcagtgcgccctggatgtgagacatggagtcaaaggagattttggagttttaagatttaatgactgcctggccaggttttggacttgcatagggcctgtggcccctttgttttggccaatttctcccatttggaatgtgaac

SEQ ID NO: 814766 - DNA, 618 bp, Homo sapiens
tcaaagttatcttgccaagataatatataaacatcctataaacaaccattcacgaaaaatgtacaccatgaactcagctacaagtatkttgagtatagagaagaactacgctaaatatggagacattctggcctttattttgagtagcctctagcatctggtaaagtcaaaagcattatgagttttccttcattgtacagtctcttttttgtattgaaaaaaattgcatttgaatttgagaactagaatgatcattacaacttcaatggtctaatcttggtcttatgtagcataaatatacatttattttggaaacagtgccacatacatccttaatgtgtacaacttcctctagcagtaagacttaagaacaatgattattttcaactctttttacaaaatgtttatgatccatttttttaaaaaaggtaactttattttagattttgtaatgtaataagtttttgtttccaaatttcattgtaaataaatgaaaaggaactcttcaaaattttcttttttaagagatatgaataaaaatgttaaaatgttagaaactacttaagggcatatgaaaaactgtatgatgctagaaatatttgtaatatttctgccact

SEQ ID NO: 814767 - DNA, 515 bp, Homo sapiens
gggcatatgaaaaactgtatgatgctagaaatatttgtaatatttstgccactgacaaatagagctttcagaaaaggttcacattacaaagttgaacaaaaatctcaggttctaaaaaataagtaacaaaagataattggttaattttcttctaattttgtatatgacacagctaacttaatgattataggttctaaataaattgattatacatgaacttgaagagatttcttttcttaaatcctatccctggcttatgtaaagccaactgagaccacagagcatataaaatcaagtgctgcttcacaaatgaaataaagtgttccttgattcattactaatgcgactatccacatacatggaaaaccacaactcagatattccccttttatttttctctagaaacatgaataaattgcttttggcacacttaattggtgtttggggcatacttttcacaattgaagtccttagtaaattactcaggagagagactctcctctttcagtacatta

SEQ ID NO: 814768 - DNA, 521 bp, Homo sapiens
acaatgactagcactcaactttggtcattctgctgtgttcattaggtgccaatgtgaagtctggattttaattggcatgttattgggtatcaagaaaattaatgcacaaaaccacttattatcatttgttatgaaatcccaattatctttacaaagtgtttaaagtttgaacatagaaaataatctctctgcttaattgttaactcagaagactacattagtgagatgtaagaattattaaatattccatttccgctttggctacaattatgaagaagttgaaggtacttcttttagaccaccagtaaataatcctccttcaaaaaataaaaataaaagaaaaaggaaaatcattcaggaagaaatgacctgtctaaaaaaacctaaggaagaataataatataagaaaggaaatttaaaaacattccacaagaagaaaaattattgtttatactyctacttatggttatatcttatattctctattcaagtgacctgtcttttaaaaaggcagtgctgtc

SEQ ID NO: 814769 - DNA, 634 bp, Homo sapiens
gcaagcggatccctaaagcccaggagtgagctatgatcacgcccactgcattctagcctgagcgacagagaccccgtctctaaacaaacaaaacaaaacaaaaaacaaaagggatagtgcacacctgtgcttattacagcactattcaccatagcaaatatatggaatcaatctaagtgtctatcagtggatgaatggataaagaaaatgtggtatatatacataatgaaactctagtcggccataaaagagaaataaaatccttccattcgtggtaacatggatgcaactggaggttattatattaaatgaaacaagccaggcacagaaagacaaatactgcgtgttctcactcatgtgggagctgggaaagttgatcttatggaggtagagagtacaatgatagatactagaggccgggaagggtgtgttgggacgggtgaagggtaggaagagagggtggtgaatgggtacagacatacaattagctggaaggaatgcctaatgttcaatagcacagtagggtgactatagttaataataattcatcgtatatttcaaaatarccaaaagagaagatttgaaatgttcccaatacaaagaaataaacattcaaggtgatggatagcctaca

SEQ ID NO: 814770 - DNA, 567 bp, Homo sapiens
agctatttagcatggtaggtcttctgaggccttatataccagtgaatatatttattgtgccatcaaattttaattawttttgctgaatataaaattctagattcaaatttttcttcaacattttaaaattattactctacgctgtcttgccatcactgttgagaagtcagctgttgccctaattcttatattttttgaggcggtctgcactttccttctggaaaggtgtagtatgttcttgtgtgtttctgtgttcttaaatttttctacttaaatgaatagtgtgttcagctgtagcttttcctttatctttcctgctttacactctttgagatattttcaatcaatcttctattctcttagcattcctttaatatattacatatctaatttcccccaaatgttttctaagagttcctcagttatattcattctgctatttattatatcctttgcattctttatttttactattatatttgtcattccccatgcttccttttggctctttcttacaaatacatatttctgctttactttaccaatcttcactttcatatcttccag

SEQ ID NO: 814771 - DNA, 635 bp, Homo sapiens
actttcaaaggtttgtacaagttgttggaagacattyaaatagaatttattcatacaaagatagcttaaatgatcacttactttctttaaaattaattacctcaaccattaaaacagaataaattatttcataatattaacagtctccaagtagagcttaaggatcttagtgcctggccaaaatagtagcacagtagaaagaaatttggggatggaaataccagtaaatttctcctctcagttaactattctgaaaatcactgataccaaggttaacactgcagtaattaagtaccaatatttgtcccatttctaatttaaatctctatcctggttattggcattctctcataaactcatttattgttcaacagttaaaagaggaggcatgaattagaacttgcagaggaagaacatgaaaactccatattgcttgacatgtttcagtttcacaacctgattagcagaacttatagaatcaattcgaggtttaaattcctcccatattatgattaatgctaaatgtaaatttcaagttaacataactaaatttaattctacatcaataaagaaatacgctctaattgaaatgacgatatgagattattcagtgtttagtaatagaatggtgaaat

SEQ ID NO: 814772 - DNA, 631 bp, Homo sapiens
tacttttagaaatatgaacaaagaactgaataagatgctaaaataagagataaattatgcaaatgcctataataatgaacatttcataggtcttgacattgaaaaattgtaaggtgagagttgtaggtaagagaactccaaagagaaatgaatgggtaatgaaagataggacctggaaggcctagatgtaggtctgctccactcattgaacacacccaacaagctcctaacatgctccaggcactatgcggcgctgcaggagacaaggtatgggctgtgtcctctcagggagttattcgcaagaagacatgatgaattctctttctctaggtcaaatgaccaaatatgttttgattttaaacattgtaagagaataatacggaaaagtgtaataagattagagatctcaaagttcctgtcttagtttggtgcaaaagtaattgaattttaaatcattataacgaggcttaaacacatctttattaatcagaataggaaccattacaatccacacatttttgccaatgagaaatacattttttcattmctgtagtatagaaatccgtgcttcaggattcaatgaactcttgaaaagcattttctgcatcctgctggttgtggaagcattttc

SEQ ID NO: 814773 - DNA, 631 bp, Homo sapiens
tacttttagaaatatgaacaaagaactgaataagatgctaaaataagagataaattatgcaaatgcctataataatgaacatttcataggtcttgacattgaaaaattgtaaggtgagagttgtaggtaagagaactccaaagagaaatgaatgggtaatgaaagataggacctggaaggcctagatgtaggtctgctccactcattgaacacacccaacaagctcctaacatgctccaggcactatgcggcgctgcaggagacaaggtatgggctgtgtcctctcagggagttattcgcaagaagacatgatgaattctctttctctaggtcaaatgaccaaatatgttttgattttaaacattgtaagagaataatacggaaaagtgtaataagattagagatctcaaagttcctgtcttagtttggtgcaaaagtaattgaattttaaatcattataacgaggcttaaacacatctttattaatcagaataggaaccattacaatccacacatttttgccaatgagaaatacattttttcattactgtagtatagaaatcygtgcttcaggattcaatgaactcttgaaaagcattttctgcatcctgctggttgtggaagcattttc

SEQ ID NO: 814774 - DNA, 636 bp, Homo sapiens
ggggttgctatcagtggcaagggtgtgtttagctttatagaaaactatgaaactgttttccagtggctttaccagttttcctttctaccaggaatgtgtgagagttctaattccttaccagcattggtattgttggcatttttaattttagcaatttcaaaaggtgtgtagtaatgtttaattgtatttgaatttatctaatggccaatgatgttgaacatcttttcatgtatttatttgccatccttaaaacctctttggtaaaatgcctgttcaagtcctttgccccttttttaattggattgtatgttttcttatcaatgagtcttgatagttcttcatatattttgggcacgtagcctttgtcagatagatgatttgcgaatatattcttcaagtctgtagcttatttcttcattctcttggcagcatattaagcagagaaaagatttttgatgtaatgaggtccaatttgtcaattttttgtctttacagatgcaccttggtgtcagtcctaagaactcttcayctaaccttatgttataatatttttctctaagaaaataattttaaagaaagaaaatgctgtatacataaggacatttcttgcaatactattagtgaatggtgaaaact

SEQ ID NO: 814775 - DNA, 636 bp, Homo sapiens
ggggttgctatcagtggcaagggtgtgtttagctttatagaaaactatgaaactgttttccagtggctttaccagttttcctttctaccaggaatgtgtgagagttctaattccttaccagcattggtattgttggcatttttaattttagcaatttcaaaaggtgtgtagtaatgtttaattgtatttgaatttatctaatggccaatgatgttgaacatcttttcatgtatttatttgccatccttaaaacctctttggtaaaatgcctgttcaagtcctttgccccttttttaattggattgtatgttttcttatcaatgagtcttgatagttcttcatatattttgggcacgtagcctttgtcagatagatgatttgcgaatatattcttcaagtctgtagcttatttcttcattctcttggcagcatattaagcagagaaaagatttttgatgtaatgaggtccaatttgtcaattttttgtctttacagatgcaccttggtgtcagtcctaagaactcttcacctaaccttatgttataatatttttctctaagaaaataattttaaagaaagaaaatgctgtatrcataaggacatttcttgcaatactattagtgaatggtgaaaact

SEQ ID NO: 814776 - DNA, 607 bp, Homo sapiens
agtggcgcctctcatcaggggctccttgccagtcgcgccctcccttccctagcacaccaggtgttggaaacgggagcccctccggcgagcccccrtgtcctgtcctgggcagcagggccgcgagcaagcgccctcgggggtgctaggactagcgtggggagggcggggaaggcccagaggacgcggcacatacctgggccggggccgtcagctcggccgccgccatctgactctgtgagcggagcggggccagagaggatgtccttattccgggccgggcctgggtaccctgggcgccgccgagcctcagccacgcctctgtgcagcggggaagactcctctcgcgccttctcagtcagtcacggatgatgctgacccagcgctccggggctttctaccaagtaatcagtccagacaaatgccaaaacgaccgccacaaggaggacaacggaagtcccgccgcgaccgcgcgtgcgcttacggaaacaccacctttcggaggcctcattggctgaaggtcgccgtcgcccaacgcaggccattctgggtaatgttcccacaggcgcacggcgggagagtgagggtcgcctccacctccttccggaag

SEQ ID NO: 814777 - DNA, 577 bp, Homo sapiens
cacttgaacccgggagacggaggttgcagtgagccaagatcatgccactacrctccagcctgggcgacagagcaagactctgtctcaaaaaaaagtaataatgaacatataataatgagtccaacccaggatatattcatctttagaccaaggcaatggtaaaattgaattaagaatttttttttccacggaggaaggaacgcacaaaagccacagtgtggcccctgctccagggattccgtctgagcaaacacttcctccttggccttcccatcacactccaagtggagtaaaatcctggcgggacctacacaggtcagtccctgaacacctagacatcctgatccctcagtcacaaacctagcatggacttaagacccctcatcctggccaggcatggtagcttatgcctgtgatcccaacacttaccccaaagtggacagatcgcttgagcccagaagtttgagaccagcctgggcatcatggtgaaaatacaaaaattagctgggcgtggtggtgcatgcttgtagtcccagctactcgggaggctgaaggatcgcttgagcccaggaggttg

SEQ ID NO: 814778 - DNA, 598 bp, Homo sapiens
attcaaattttagtaaacatttagtwttggcaacatattatgtgctaaatactagtttttaaaatgagaattattatgttttcttaaaaacatcttttgaatatttttaggatgtaattttcatgaggggcaaaaatgggtggtatagcatggtaattgttatcctccacaggttcagcaaaatctataaagatcctaatctatcctagtacataactatggatcaagtatttgtaatttttttctaaaccaaaactgcatgttatttaacccatacttggaataacagattctattttgttaaactgtaagctaaagtattatttgtttcaatagtaaacaaaaggattattttatgttatagaaattttatctttttttagatgtcaaacatcacattgataaaattatactgaaatttggataacatattttgtttgctgtattatataaccacaaagatttaaaaacttgatcaaatctaagtttaagataatgtaatacggattaagtatgcactttagagatagtataggttttgaatattgctctcaccctttactagctgtgattttgagcaactactcacacataatct

SEQ ID NO: 814779 - DNA, 487 bp, Homo sapiens
cccagggtgactgggatcgccagctgagccgcagcccaaggtccagcacagctgccgctccaaactggggagggggctacgcaagattggggcggggakctccaggcagcgggagggcacaggagtaaggaggcgaacaggatgccactgcgcatgcggcaaagtaatgcggccggtccggggtacacggagaccgcgcgtgcgcggggcgatgcactcagtcgccactagagggcgatgtaatatgtcatcctgcccccggtggggtgggcggggagatgatcagggaccccaaaaccaccccagtctttcattgcgcgcctacatgtgcctacgacctcacttctgcttctctacgactcaccaccctcacagctggagcaaattcagaaacatccttggtacctgtgagtatggggtaactggactcttgggtccctggcggaaataggggaggggccaaagcagtagaagcggctgggagggg

SEQ ID NO: 814780 - DNA, 487 bp, Homo sapiens
cccagggtgactgggatcgccagctgagccgcagcccaaggtccagcacagctgccgctccaaactggggagggggctacgcaagattggggcggggagctccaggcagcgggagggcrcaggagtaaggaggcgaacaggatgccactgcgcatgcggcaaagtaatgcggccggtccggggtacacggagaccgcgcgtgcgcggggcgatgcactcagtcgccactagagggcgatgtaatatgtcatcctgcccccggtggggtgggcggggagatgatcagggaccccaaaaccaccccagtctttcattgcgcgcctacatgtgcctacgacctcacttctgcttctctacgactcaccaccctcacagctggagcaaattcagaaacatccttggtacctgtgagtatggggtaactggactcttgggtccctggcggaaataggggaggggccaaagcagtagaagcggctgggagggg

SEQ ID NO: 814781 - DNA, 520 bp, Homo sapiens
caatatcagaaactcctgataagagcctatgttcagtggtgcacgtattgtcttgataaacatcttaacagaaaacagggtttgagagcagataactggtctgaccaaaaatttaccaggctggagtttcccaatcctagtaagcctgagggtactgcaggagaccagggcgtatctcagtacttatctcaaacacataggacagaaattcccagagcggccatttatagacctccccccaggaatgcaattcttttcccagagtattaatgtcaatattccttgctaagagaagaatttagggacatcttccctacttgcacatccatttataggctctctgcaagaagaaaaatgtggctctttttgcccgaccccgcaggcagtcagaccttatggttgtcttcccttgttccctaaaatcgctgctattctgttctttttcaaggtgcactgatttcgtattgttcaaacacgcatgttttacaatcaatttktacagttaacacaattatcacaa

SEQ ID NO: 814782 - DNA, 583 bp, Homo sapiens
taaagggacaaccaggcatctgtccaacaggcaaaatacttaaggtttagattgaaagggtctcacgcatctaattctaatagcccagagccagaccccagcaaatcctgagtcaggaagcctttgactgcagatgttgagtggcaagaggtacagttttggcattaggcacatttagatttgaaatctgacttcctggcgtaatcacattgggcaaggtttcctatctgtaagagggggaaatatgtcccgcagggaagccgtcagggttggatgaggaatcccaaacgaaagcatggggctgaagctggtatgaatttatttacaggctctttactgctctggaccctttccctcctcctcgttcacaaagtcagcacttttctcaagcccacctaaacaccagcgtatacacatgcacgcgcacacacacacacacacacacacacacacacacacwctctctctctctctctctctctctctccagtcgggtgctgagcctctaaactattggccctcagcttcattccgtccagatgatgtttatcggcagaatccactgatttagaacttttttttt

SEQ ID NO: 814783 - DNA, 668 bp, Homo sapiens
gtcacttgctactgtgagatctcaraacacatggatcaggacagagggcagggctgtttccccaaggaaatccaaatgctttacaggaaggggagtggatgctggcccggcccaggcgaggatgaggagtaactgagctgcagaccattgtttagccctccttccacctgggagactggctgctggttctcattgcttctgtgggtctccaggtttctatcattacacagattagcacacggttccatgatcatggacccgttcagtacacaatgaaatcatttgcaaagcaccttggggtctgttagagaagggaatggatgtctgaggtatgctaagcctaatctccatcttctcaaagctccactgccactgtcccgtaagggtgggcagattcctccccattctataaaataacagctaccatttcctgagggcatactgagtgctgacaggcacatcaacatcagaccatcaccttcttatacctcaaaatagtctgcagggtgactcagaagctcctggctggtaagtggcagatccagagatgaaacccagatctaactggacccaagacagaaatttctagaacagaagccacaaacgtgttagctaagtctggttatgtcaagtggaatatttctggctttgggggatcccagctcttt

SEQ ID NO: 814784 - DNA, 632 bp, Homo sapiens
agtttaagagagaaattatctgtatttttacagacagcagtatgttattctgaaagacaaaaagcggatacactatacttcttctatcttcaaagtamgtcctgaagaaattagagaaacactatggtcactgtatgtagtaatgtgttacaaagaaaaatgagatcctttttatgcaagttagccaaacactcttttttattttccttaatctgcgttcatttgtcctgcttttctcccttttcttccctccttcctctgacatttcagccagtcctactagcctctagctgctacgacagttacacagataagtacaataggcttccaatatacaaataatactgtaattgaaagaaaaaaatatacaatggaacctccctccatagaattacagataagagaaatgaatcacgatggtggccagtgctgttgatccaaacacagacacagatttggatcctgcttccactactgtgccttataccatatgtggaagacaaggtcatttaattcctctgtatgcccatcaatcagacctgcaaaatcaaggctttgagtatttaagtgtaaggttttcctaagggttaaatgagataagtaaacccaagttatacactgtagacttaaca

SEQ ID NO: 814785 - DNA, 437 bp, Homo sapiens
ccaggtcctgggcagatgtcggcctgctgtcacttctctggactctaaggcttttttgcctgtgtggcatgtgagaaaaataggggagtgattaggaaggctcatgcagaatccaggtaaaaaactrtttcaggtatggaagggtggaggggaggaaggtcatctggagtattttttttgagacaaggtcacccaggctggagtgcaatcgtgtgaccatggctcactgcagcctcgacctcccaggctcaagcaatcctcctacctcagcctcctgagtagttgcaatcagaggcatgtgccaccacacccagctatttttttaaaaaattttttagagaacagggtctcactatgctgcccaggctggtctcaaactcctgggcccaagtgatcctgctctcttggctcccaaagtgctgggattacaggtgtga

SEQ ID NO: 814786 - DNA, 522 bp, Homo sapiens
aggggagcagagatgggtccctgctggaaacttccctatgtctccagagcgcctgcaaaaatctccagaaatcrccagcccctcgtgagtttggagtggaggcttttaatcaagtccaagggatcagctcagcccgacacacatgcacacagacacacgtgtgcgcgcacacacacacggctgaaacaccatgcttaagaacatttctcccatgtgttttactttttgagccttagcccggggatttgagaataacagctattcctgagagtacttcccgagcacatcctgggagctcaggtcacgcacttcacccgtattaattcgtttaatcctcctgacagtcccttgaaggtgagactgttactatcagaaatggaaattgagacacagcgaggtgaagtaagtcaaggattcctacagaaaagtgtaaaatatgctcatttcatccagcaattataaagtaacactctcacacacagttattccttttttttaacagctttattgagatataattca

SEQ ID NO: 814787 - DNA, 644 bp, Homo sapiens
aactccctaaaaagattttgagcaaaatccttaaaaaattcgagacttaccactagtactcacatcccaaagggtgaatccggctragcaggaatatttaagaccttgctcaggatttgaacttgagcctcagactctaccaaagctctgacatgtccacaaagaggctactggaaggcttcaggcctggaagggaagtttctgatgagattctcatcttaggatggatttcctagaaaaagaactgaaaatatggatctgtgtgaacacaattattcagaaatgactaatagaagagtgagaaagtggggcagagaggaaaatggcacccaaggatgcagcatcaagaacaggccccagggggtgctggcttggccccaagagggagctctggaaggtttagagagctagcctgatcagaggcaagggggccgggcgccgtggctcacactcgtaatcccagcacttgaggaggctgaggtgggaggatcacttgaggacaggagtttgagaccagcctgagcaacatggcaagaccctgtctctacaaaaaaaataaaaaacaattagccaggctttgggacatgcacctgtagttggagaggctgaagtggggggattacttcagcccaggaggtcaagac

SEQ ID NO: 814788 - DNA, 593 bp, Homo sapiens
acatatctattgagagagacagaaagagagagatgtgttcatacaggagtcaatattaatatgtacctttccaaactctgtttgctgagaggttgcagaagcagtgacaccccaatattaatgggcacacctagctctcatatcatggtttctaagtactattcttcaacaaaaaaagcaagactacttgtaataatagacaattctagcactggagtggaaaatccaagttaaggtagagtattgttaagctaaaaagtttaaagtgctttatgaacaacagaagcagccatgtcagagaaagtcaacctgaaagacttcccaggagcccaagctggaaaaatgtgaaaaacacaataaacattattagcattggattaacacccagagaattaaaaaaaaatccatgaatccataaagatagagaaaaatacaaataagaaaaaaagaaggccagtcgccgtggttcatgcctgtaatctcagcactttgggaggctaaggagggtggatcacctgaggttgggakttcaagaccagcctgaccaacttgaataaaccccgtctctaccaaaaatgcaaaattagccgggc

SEQ ID NO: 814789 - DNA, 570 bp, Homo sapiens
aaactccagcctggacaacaagaatgaaattccatctcaaaaagagaaagagagaaagagaaagagaaagaaagaaagaaagaaagaaagaaagaaagaaagaaagaaagaaagaaagaargcagtagaaaaaagaaaaaaattttctttagaaaattccaagtatactaatcaatgtagaagataatgcaaaatagaaaatcaccactaagacaccacagtaataattactgtagacaagatgtacttaaaaatgcaaacattgtggataaaatttaaaggagaaacagtgtttctgttagccccaaagtatctgcctcaaatatttataaatagccccaaagtaatagccccaaagtatctacctccaaatatttataaatactatttcctctcaatttctttataagacttatgactaaggaaaaattataacacagtattgtgagatatatgtgtagatgtaaaatatatgaatagcacaaacaatagaaggaagtaattgtaactcttcaacagcaaggttttcatattttacatttattaaaatagtacagtataaactctagg

SEQ ID NO: 814790 - DNA, 629 bp, Homo sapiens
cttctccagccaagcctgcctgggtcagattttcagcttcatcatcaacctgccctgagacctctaaacctctatacctcactaactgagcctcttggtttttttttcgtttttttttgttttttktttttgtttttgttttttgagacagactctctctgtcacccaggctggagtgcagtggctcgattttggctcacagcaaactccacaattctcgtgcctcagcctcccgagtagctgggactacaggtgcctgccaccacacccggctaacttttatgtttttagtagagatggggttttcccatgttggccaggctggtcttgaactcctgccctcatgtgatccacctgcctcggcctcccaaggcgtgagccactgcgcccggcctcagttcccttatgtataaaatggacataaacaaccagctcagagaatgaaagtgaggatcaaaggatgcaagatgtgccaagtgcctggtccagcccctgcccaaacaggcagagtgtgataaagtgtccagggaggggaagcccgccccctgccacgcagcccccttctgggctaagcagcctcgcacagactgtccctcaggcgctgatactggccccatgccctgggccac

SEQ ID NO: 814791 - DNA, 547 bp, Homo sapiens
tgtgcttgttggccatttgtatatcttcctaggagaaatctctactttagtcctttgtccatttattaattgggattttggatttttgtggttgttgatttgtaagagttcttcatatattctggaaattaatcccttatcagatatatgatttgcaaatatatttcccatttcataggttgccttttcactttctcgataatgttctttaatatataaaagtttttaattttcgaggccctgcacggtggttcctgtaatcccagcactttgggaggccgaggcaggtagattacaaggtcaggagatcaagaccatcctggctaacacagtgaaaccccgtctctactaaaaatacaaaaaaaattatccaggcgtggtggtgggcgcctgtagtcccagctactcaagaggctgaggcaggagaatggcatgaacccaggaggcatagcttgcagtgagctgagatcgcaccactgcrctccagccagggtgacagagcgagactctgtcaaaaaaaaaaaaaaaaagtttttaattttcatga

SEQ ID NO: 814792 - DNA, 568 bp, Homo sapiens
actccttaacagtgacatcatccgggcacgcctgggggcctccgcactggataggtgtgtgttgcagaagggagtggggagggtggtgggtggggctggagcctcaaattctttcagacctgagytcaagttctcggcttccaaccacggagcctgcgtcttacccataggtcaatggggagattcgcagtggtgtgaatctgcccaccggagcacggacttccatggtggggctttgggtgtctaagttcctcccagcaacggagctatgtggtctcggggagcacactgaccccaggccaaccccaggatgacgctgcccccttcccaccctagcatccaagagttccggctgtcagggtggctggcccagcaggaggatgcacaccgtatcgtactctaccagacggacgcctcgctgacgccctggaccgtgcgctgcctgcgacaggccgactgcatcctcattgtgggcctgggggaccaggagcctaccctcggccaggtcggaagcccgtgccccctgatctcacccacctcggcccccgtcctttgccctcccgtgcct

SEQ ID NO: 814793 - DNA, 595 bp, Homo sapiens
gtggcctgtagtcccagttactccggagcctgaggcaaaagaatggcttgaaaccggaaagcggaagttgcagtgaatmgagatcactctactgcactccagcctgggcaagagcaaaactccaactcaaacaaacaaacaaacaaaaaaaagcagccagacatagtgatacacacctgcagtcccagctacttgggaggccgaggccggcagatcacttaagatcaagagttcgaggccatcctggccaacatggtgaaaccttgcctctactaaaaatacaaaaattatggccaggcacggtggctcatgcctgtaatcccagcactttgggaggcccaggcaggtggatcacttgtggtcaggagttcaagaccagcctggccaacacaatgaaaccctgtctgtactaaaaatacaaaaattagtggggtgtggtggtgggcaccagtaatcccagctactcgggaggctgaggcaggagaatgcttgaatcccagacgcagaggttgcagagagccaagatcgcaccactgcactccagtctaggtgacagagcacgactctgcctcaaaaacacacattttttaataaa

SEQ ID NO: 814794 - DNA, 657 bp, Homo sapiens
ggcctcccaaaagtgctgggattacaggcgtgagccactgcacccggccataattgtacattttaaaataagtaaaagtgtacaattggattgtttgtaatacaaaggataaatgctagaggtgatggataccacatgtatctcgatgtgagtattatgtattgtatttgtgtatcaaaatatgccatatatgccataagtatatacactcatgtacccacagaaattaagaaaaacaaattaaatgattaagaataaaaatttaacctacaggaacaatattctttaacttatttgcagtttaaagccactggcaaaagagatgactaaagatgttagtccattatgttaccaaatagtatattgttaacattttttacctatatttttgggcaaagtggaaaaggttaatctttgtggtaaaataacacttcattgaatgcacaatagtatttaacatgttaaaaatgttgaaacgattaacttcacacataatctaaaatttttaaaatgtactgcattttatcatataaaagtacaattagtacaatatatgaataatatactactagttttctcrtaatgcaaagaatatcactcttaacacctacctcgtgcatcactcaatagtgtaagttaaccacaaagaatctctcc

SEQ ID NO: 814795 - DNA, 386 bp, Homo sapiens
aagactctgtttcaaaaaaaaaaaaaaaaaaaaaaacacgtattctgcatctttcctgagtcttcctccaaaaggagtcctggtgtcaccccggctccacttcctacagctctgagaccttagattaaggcttccctgccctgggcctcagtcttctcacctgtaaaatgtaggtaataaccacttcttccctaacaagtgacagtcaaaggagggagagactcggaactatgcctaatctatagtcaccctaagtcagcgtggatattgtcaccatttttaaaaaattgtttgtttgctttagagacagggtcttgccstgttgcctagaatagacaacagaagtataattatagctcactgcagcctggaactcctggattcaa

SEQ ID NO: 814796 - DNA, 593 bp, Homo sapiens
atctcagcactgacatggttcctcatttagcttatttgttgaactcaggaaagtcacatagctctcctgaccttctgtttcatctttaaaatgaaggtaatartggccaccttgcacacctgtgctaaagggtaaatgaaataagctatgtgaaagaaatgagggcatatatgtcatagaaatgattgcaacatattaggtatgggtatgaataaacattccgccttctttcattttgtttttattatccatgcttgtcagagaattttcaggtaattcacatctattataaaatatcttggtaatctgggacaaataataaaataaaaaagtaacagagttggattaaaccaaagatttttccagtgctaaaatttatatgaatttaagtgcatccttgcattttattttcagtatattctaccttagagacaaagaagtggatagcttggggaaggaggagaagagagtttcacaaaacatgtaatgcagtttaaaatctcattgtttccttggtttagattttgtgaacaatttggcatgaggagagaaaggaacctgaagtttttagcaaggaaggtaagtttcagtga

SEQ ID NO: 814797 - DNA, 509 bp, Homo sapiens
cccttcattctgtctctgggagacacactgcccaacttgtcctcactcctcaaggtcatctggtcaccctctctgagctttcctcaagtgtcaacacttgctaccattgccctttatttccagagccatctggtgaccctctctgagcttcccaggctgcctgaaccgggacctctgcatatggccattctgccccgaactctcctagccaactggtctcattgcttcccaccccacctgcacccctatctatctgcatcccctctcaactgtccatggtctgcctctcaccagggagctgcatgcgcactgtccctgcaagacccttgcaattacagaaaacacgcagcgtgacttcatagagagtcaaatttgctttaatttgggggaaatgcaatgccactaattttaaattaagacatatatatacatatgtcttaattttatatatatatayacacacacacacacacacacacacacacccctacccacacacgtatatatag

SEQ ID NO: 814798 - DNA, 620 bp, Homo sapiens
atagtgcagtggcgctatcacagctcactgcagcctcaaacttctggactcaagcaatcctcctgcctcagcctacagagtagctgggactacagctgtgtaccaccacacccagctaattttttttttattttttatagggacaggatctcaccatattgcccaggtgagtctcaaactcttggtctcaagcaatcctttcaccttggcctcccaaagtgctgggattacaggtgtgcaccattgcacctggctgataccgtaatcttaatgtcacaatgccttacccattgaggttctcatacccaatattagtaaactattgacttcatcaaatcagcaacttgtaaataccctgcagtcgtagatttagctaaatctcttatgttcaatgcctatttttacagtctcttagctgcactttgtcttcaccttcagagggatacaatatacctttgctggagcactcaacagccttgccattgcacacaatctttgtgggcgagatcttaaccacattcaatgtgatrgggcttgctagaaagctgctgcattccatccctaaccaggacattcttgaaaaaggagaggatccaaaggttaacacaattggcggaact

SEQ ID NO: 814799 - DNA, 616 bp, Homo sapiens
cttactgttacataagggaaggagtgctctaccaagggaagctcccacattgtcttctcccatcagcccttaaacagayccattaccccgataaaaaccaaatggcctgtaatgccctactgcacaatgcaccatgcctctaagcctttgcccgtgctgtcacctctgcctgtccccacttcctcctgatggcattcttggcttgcctaggtcctagggatcccccaagactcagcacgggaagtaccccttctaggaaggctactctaatacctcccaccttgtgctctcaacacatgaactcctgaactaaatgtctttccttatgggctcccaaaatgctttcctttctctctcattgaatgagatattgtgactgtttctttcccctcatggcttgtaaaggacagggaccattttatattatattaacactaggaatcatatagcccttgtgcactgcacactgtataatagatgctcaataaacatgatgaacgaatgaatgaatgaatggggaatgaatgagtaaatgaatggggaatgcttattaagcacatgaagagtagatgtggtaagttgtaaagtgctgccccactgccaaggatagccacag

SEQ ID NO: 814800 - DNA, 614 bp, Homo sapiens
cacaaccaggcagatgaagtctggagaaaatcaatgtaatttttgtgtgtactgaaacccatttctttctcctggaagaagatcccccatgaggccagctgggggggaccagaaacccatttatgtggcaaagttatgggaggaggttgtccctgatcaacctctggtggctgaactgcccaggaccaacagggtaggttgctatcatgtagctagagtcgattaagtggccaagggtccaagagacaggtgagaccatgaggaggcacattcgatgtgatgtgaccacagaaccctgggtagtctcaagggtagaagccctgatgatgggctgtgcagatgagaatggaaacaggatgattccttgaaaatttgttcaaggagttgctgtggttctggcttccccctccccatacaatcaggcatctaggtggcagctctttccccagcctggcagaacatacaatcaggcatctaggtggtagctctttccccagcctggcagaagactcaggtattgttgctctctagggacagggaactagagaagctccacackcacagtcaacagagacaatttggggctgcgatgaggtaaggtactaaaaatagga

SEQ ID NO: 814801 - DNA, 612 bp, Homo sapiens
ggactcacgcttctgattttaaaacttactacaaatctacaataatcaagatagtatataccggcctaataataggtaaatcaatagaataaaactgagggtcaagaaataaactytcgggccaggcgcagtggctcacgcctgtaatcccagcactttgggaggccgaagtgggtggatcacctgagatcaggagttcgagaccagccttatcaacatggagaaaccccgtctctactaaagatacaaaattagctgggcatggtggcgtgtgcctgtaatcccagctatttgggaggctgagacaggagaatcgcttgaacctgtgaggcggagatttcagtgagccgagatcacgccactgcactccagcctgggcatacagagcaagactccgtctcaaaaaaaaaaaaaaaaaaaaaaaaaagaaataaactctcctgtttatgttcaattggtttttaacaagaatgccaaaacaatggagaaagaatgaggctggaacaacttgatagccacatgaaaaccccttcttgacacatgtacaaaattaacttcagccgggctcggtggctcacacctgtaatcccggcatttgggagactgagatgg

SEQ ID NO: 814802 - DNA, 612 bp, Homo sapiens
ggactcacgcttctgattttaaaacttactacaaatctacaataatcaagatagtatataccggcctaataataggtaaatcaatagaataaaactgagggtcaagaaataaactctcgggccaggcgcagtggctcacgcctgtaatcccagcactttgggaggccgaagtgggtggatcacctgagatcaggagttcgagaccagccttatcaacatggagaaaccccgtctctactaaagatacaaaattagctgggcatggtggcgtgtgcctgtaatcccagctatttgggaggctgagacaggagaatcgcttgaacctgtgaggcggagatttcagtgagccgagatcacgccactgcactccagcctgggcatacagagcaagactccgtctcaaaaaaaaaaaaaaaaaaaaaaaaaagaaataaactctcctgtttatgttcaattggtttttaacaagaatgccaaaacaatggagaaagaatgaggctggaacaacttgatagccacatgaaaaccccttcttgacacaygtacaaaattaacttcagccgggctcggtggctcacacctgtaatcccggcatttgggagactgagatgg

SEQ ID NO: 814803 - DNA, 469 bp, Homo sapiens
cctgggcatagcctggctcttgtttgaaatgtgtggtacttctmtgtgacaagatatagaataagtcattggaagaaaaactgtcctattactatattttatataaaagtgtatcttgtgttataatgggcctggtatacagagggtgcttagcaaatcttccgcagagctgaaactgagctgaagctacggcccccttctctgcttgctctcctttattctctagagtgctgcttcccaatgcgtggtccatggaccaagcagcttcagcatcacctgagcacttgtcagaaatgcagcacctaggcgctgcaccagacctgttgaataggaatctacattttcacaagattccaggtgatttgcatacacagtggcatttgagaagcattaatccaggggcttctttgcagtcagtgatggtgatttgccaatcattagcatttcagaaaccccaggccgaaaccat

SEQ ID NO: 814804 - DNA, 624 bp, Homo sapiens
aaaattgtttgccattagtaagttcaaattcgaaggctaggattcctttttgaagtgcctgggaaaaaaattcagctgcagagaaaaggcaccatttgttrtacattctataatgaaaactattcattttggcaaatgaaaaactaagatagaaatgaaactgaatgaatcattctagaaatagagaaatataagattatagaaaaatcatagataaaacaggaaaaataagagtataaacaaattggaaaaatagataaatataaacaatagatttaacaattttaatgattttaaaagcatgagttaagagattatatatcaaatgaaagaactggttaaataagagctaaatgctgatctgatataatctttgttatttatttatttatttatttatttttgatacagagtctcactctgttgccaggctggagtgcagtggcatgatctcagctcactgcaacctctgcctcctgggtttaagtgattgtcctgcctcagcctcctgagtagctgggactacaggcgcgtgccaccacacccagctaatttttgtatttttagtagagacagggtttcaccatgttggccagggtggcctcgatcccttgacctcatgat

SEQ ID NO: 814805 - DNA, 612 bp, Homo sapiens
aatcataatatgggcaaaatattttgatattctaatcaattaagttgcatgaaactgaggccgtaccaaacttgctcaaataaattgggagtttattgaaaggtgcatcagacatccaaggctaagacatggattcaaaagagacctggtaaattgggcaccgaccctcctccttctctcctttcctctcttgcgatcatgcctcatggatggtctcttacttctgctcttttctgtacataggcttcatcctctggcttatctctcttattaggattttacctggtgcaagcttgacatcttaatgccacaatactctcctgctccaggcccaaccttcctcattcactctctgaactatttaagtcagactctgaaggacaaagaagccgattggctcagttcagcccatgggctgggtcaggtgatcactcagaaccaatcagctgtggccaagaagaaaatcatgtgattaaaatatggctgcctaagcctaccaagaattctggatgaaggtcaattacaaagaaggggtgtgcamcaggagacaacaatagacaagcttaattcccacaggttaacaatgcagggagcaaatcaattcacttgggt

SEQ ID NO: 814806 - DNA, 615 bp, Homo sapiens
cagggatccttttatttttagagatagagtctccctgtgtcacccaggctggagtgcagtggtgcaatcatagctcactgctgccttgaaatcctgggctcaagggatcttcccatctcagcctcccaaaatgctgagattataggcatgtgctcccatgcccagccaggaggacctttaaaaattctaagtacaaccatgttgttccacggctcagaaccttccaggggctcccatcctgctaggctggaagctgaagtcctgacaatggctgtcaaacccttcctgatctggccccagctcctctgtgacttcatctcctaccaaaccccctcactcgctccaccacagctgcaccgcccctttgctcttcctggacactgctgcaggttcccatctcagggctttggatgagctgttcccactgtctggaaggtatttggaggaagagcctttcagactttgtcacctctgtcaagtggatgctcaaatgtccctttctaaatgagyccccccgtgactacctgacaagcccaattccctcaccctacctcgctttttccttttctccacagtgcctggaatcttctttttttttttttttttgagatgaag

SEQ ID NO: 814807 - DNA, 602 bp, Homo sapiens
aaaaacacccagttccaaggtaatgaaatttattttaaatcaataataccctccctgcttaacaagtatatcctcagytcagagtttagagcactgtccagggtttggaaatacgaagaagtccccaaccagcgactccaaccctccatcccttacagcagctaagccaggtggggaaggtggaataggtggctcactcaccttgaagtggaaggagtttgccggggacccgctggagctataccgctcactttttgttaggttgctgtagtacttattaaccttggaattgacattctggttcgagcttgggtcatccgtgatggggcagatgaagtaaccttcctcatcgtcgctgtccccatcagaatcaccatcatggccagctcggggggactggccgccatcaacgccttccaggcggaagatgagatcttcgtctgccatgttcctggggtgcccgttttacccaagcagtatccggcacagccagagttactggacaaatgcagaggcgaaggtcctacaaggaaagcaagggccagagagtgggtgctggggcccagggctgcgaattcgcccgaccctcaccccaaatgctg

SEQ ID NO: 814808 - DNA, 548 bp, Homo sapiens
tccaaggctctttgaaaaaatcagcagaaagcaaagttggggtcaaagccctgctgaacaataaagtttatgaactgtaactttgttgtaattcacgcccagggtcctgctgagasgcaccgtttcaggggccttgactgagacatagctgctttgcaaatgctagttcctgccctgaaacttccatttcatacaagagggaccccagaggagactgtcctggatcaggaatcagcaaactaggacctatgggccaaacccagccctcagcctattttcttaaataaagctttattggaaaacagccacacccattcatgtatgtattgcctgtggctgctttcatgacaatggcagaatcctagaccccgtgggaggacagccaagaagcatcagagcagcctttgggcagccttggtgtgggtgaggctgagcgcttgctctttgtcaagcattcagcgtacttgatctcatttcaagcactctttccccaaatatttatagagcaccagctgtgagccaaacacacttctagaggctgaagataa

SEQ ID NO: 814809 - DNA, 587 bp, Homo sapiens; identical to SEQ ID NO: 809935

SEQ ID NO: 814810 - DNA, 541 bp, Homo sapiens
aggcggggaggctcaggcatggcgggctgcaggtcccragccctgcccgcaggaaggcagctaaggcctggcgagaagttgaacacagcagctgctggcccaggtgctaagcccctcactgcccggggtccgcggggctggccggccactccgagtgcggggccgccgagcccacgcccacccggaactcgcgctggcctgcaagcaccacgtgcagcgctggttgcagcccgcacctctccctctacacctccccgcaagctgagggagccggctcccgcctcggccagcccagggaggggctcccacagtgcagcagcaaactgaaggtctcctcaagtgctgccaaagtgggagcccaggcagaggaggggccgagagagagcgagggctgtgagggctgccagcaggctgtcacctctcaaaggtaagtttaagaatattttaaactaaatgaaaatgaaaatacaacttatcaaaattcataggacataataaacgcaacacttagacgggaatttatagcattgaatgcatatat

SEQ ID NO: 814811 - DNA, 634 bp, Homo sapiens
ctcttaacatgcagttactctcgaaagggggtaatgccttcatgcsttggtcacttgtgagctcagaatgagaccttacaagaggagaactgccataggagttaagaataaaaacattgcttttttcaaaatgtgttagggacttggattgtatcaatgtcaatatccttgttgtaatattgtactatagttttacaagatgttaaccatgtaggaaattgagtaaaaggcacacaggatctctctgtattacttcttacaattgcatgtgatctacaattatctaaaaataaaaagtttaatttaaaatgtgttataaatcagttctttccatttgagggctatttgccatccctttaaggattgtgtttttaacacaaatttagagaggttatttaaggccagtttctccctggcactttccagtaatttggctagctgttatttggtgggcgatatagttcctatggagtagccacctagattttcttcggttcaagagatgaaggagacataccttagaatatggttctgtcacttcaactgtcacgtcccagaagacttcttcaacaactgcataatttggatagctgtttaatttgagctgatctttaaaatgtgcccactatagcac

SEQ ID NO: 814812 - DNA, 664 bp, Homo sapiens
tgtgatgtgagataaggatccaattgtattcttctgcatgttgatatactgttttcccagcaccatttgttgaagagactatctttttcccattgtatgttcttggtactcttgtctaagatcagttgaccatacatgcatggatttatttgtcccctctagtctgttccactgatctgtctgtttgtacgctaataccatactgttttgattactgtagctttgaaaatgaaaaagtaggattcctcctgctttgcttgtcttactcaaaattgctttggctattcatgatcttttgttgttccatttgaattttaggatttttctgtttttctgaagaatgccattgggattttgacagggattacactgaatctgtagatctctttgggtagtatggacattttaacaatattaagtcttccactccatgacataggatgtctttccacttatctgtgtctttaaatttccttcatcaatgttatataattttcattgtacaagacttttacctctttggttaagtttattcatagatacttaatttttttgttgttgctattataaatgagacttgttttctaaattrgttcttttggatagtttgttgtttgtgtatagaaacatcactgattgttatacattgattttgtatgctgta

SEQ ID NO: 814813 - DNA, 539 bp, Homo sapiens
aataaaataggatacctcttaattatattcttttatgaaattttatatcttcaattttctaaacagatacattcgctgtaatataaaatagatacctgggcttttttctcaaattaacttataggataacccactattcagaataaaactgaaaagtcagttttgccagtaatttgcttatcctttttgccaatcatccacacattttggaatatgtatataaataattttgttattgttgttgtttctagttacccacttaattctactttacttttcagctctgagtttggtacctgacacaggctctcctgaactatgtctcactcaatggtttttggttttcgcaggtgccttaagaacctacatctaaaggccttattagcctcaattctatttgtagattaaaaaaaattaaggataaygcttaggggtagggagagattgaataagcagtgaatagatactacttaaaatactcctttttacttttagcaaaaatgcctccatacactatatgctgtatctgaattttcaat

SEQ ID NO: 814814 - DNA, 575 bp, Homo sapiens
ccggcctggagtttctactgtgcaccaggcactacctttacatgtattgttttatttaatcctcagtcagccgtgtttggtaggtgcagttagtatatttccattttcatctgcgcaaacagattcaggaactttgtaatttacataaggtcacattcatcctaattcacaaaatcaagatttcacacctattcctttttctttccagtgcctgtgctttttctctcataccaaggagaagtaataagcctaacgttttaaacctcacaaaagtacatacagaaaagtaaatagcctaattttgcaactaatacaaatggcgctgtacttctttggtgatggtagatttataatttttgaagtatggtagattcaaatgaaccactgaaaaggcatttagtttcttgtcccaaataaaaaaaaaaaaaaggaaaaagaaactgaatttgatatgtgtatgtgggttaatgactagacgcacatcaaccratagtgggattatgagattgtgatctttattttttgtttccaatattttttatgcattttatagttagaaaaaaattgaagataag

SEQ ID NO: 814815 - DNA, 570 bp, Homo sapiens
gtctgtatgtgttacagaagcattcatgtcagaggtggcatgatgttcagacaggggaaaggtagagttgtcagtcaaaatgtgtatgttgggacagaggaagtatgtaggtttttagacaaagcaacagccaggcacagaaacctaagtaatttttctttgctaaaattctgtatactagttctgtgtattactaagacactgctcattacctagttcccttatttcttctaaagagcaccatggcatttctccaggccctcagtgtgctctgtaacaatttatatcagacctctggccacttgaggtaggcacatgagtcggttatggccaatgagacataagccaagaagtctggagaaaacttcttatgtcctgataccagtatcatcctttcagtatcttcttccttcttgtttcttcctggaataagggtctgggatacagcagccatctcrtgaccatgaggtgaaatgcataagggcataggcctcctaagagggagtggaatgtctgaaagaaagatcctgtaccaccatccccagccaccatcccagccctggtctgctg

SEQ ID NO: 814816 - DNA, 573 bp, Homo sapiens
atcagccattatcaaacatcaaaatgtaagaagaaagggccttctcctgtggtagtgattccctccacaggtataacttatttctcaagtaagttacagttcccattatttcaaaagctattgtgacaacttcmaaatccccttccttaaattaatttaaattaatatataaacacaattgatgtcgagatctttaaaaactgttttattgactttactgaggcacactttccataccataaagttcacccattgtaaatatagaattcaataactttttgtaaattttcagagttgtgcaggcatcatcacaatcccattttagagcattgccctaactcccttatgttctgttctcctgcgtatcggaggctctaggtcctagacttcaaaatctctcaccaatatagccattctagcttgagttactgatctctccagtgtttatgctcacttgtagtgactccccatccccacccctagtcctagggaacaactgacctgctttctgtctctgtaaatttgcctgttctggactttttatatagttgcaatcatacaatgtatagtctt

SEQ ID NO: 814817 - DNA, 583 bp, Homo sapiens
ggagggaatattttcaaatttatgttatcaggctagcatttccctaataccaaatctagacaggggcactgcaaaaaaaattataggccaatatccctgatgagcatagatgcaaaatatcytaatcaaaatagtagcaaaccatattcaacagcatattaaaaggatcacagtccatgatcaagtggaatctattccttgatctattcctgggatacaaggatggttcaacctacatatgtaaaaactcccaataatttaggtatagaaggagtgaacaccaacatactaaaggctatatgtgacaaggccacagccaacatcatagtcaacagtgaaaacctgaaaacttctctaagatcaggaacaagataaagatctgaaaaagaaattaagaaaacaatcccatttatgatagcatcaaaaagaataaaataataaatttaacaagtgaaaaatctatgcactggaaactataaaacattgatgcaggaagttgaaaaagacacaaataaatggaaagatattctgtgttcatggatttgaagaattgatattgtcaaaatgcccatgctacctgaag

SEQ ID NO: 814818 - DNA, 493 bp, Homo sapiens
ataaccacagatacaagaaggtggctaggcgcattgaaccttgcctataatcccagcactttgaaaggccaagacaggcggttgcttgagcccaagattttgagaacagccagagcaacatgatgagatcttgtctctataaaaaatattttaaaaattagccaggtgtggctgggcatggtggctcacgcctgtaataccagcactttgagaggccaaggcaggcagatcacctgaggtcaggagcttgagaccgacctgtccaacatggaagaaaccccatctctactaaaaatacaaaattagccgggcgtggtggtgcatgcctgtaatcccagctactcgggagactgaagcaggagaatcgcttgaacccrggaggcagaagttgcagtgagccaagatcgtgccattgcactccagcctaggcaacaagagcaaaacctctatcaaaaaaaaaaaaaaaaattagccaggtgtggtggcataagtt

SEQ ID NO: 814819 - DNA, 490 bp, Homo sapiens
ctggttcctaagattgatttcaacattgggctaaaatgtgaagtgactgtctttgttcttacagcattgattctcagttgattggacatacagatcacttaggytggaatacagattctgattcagttctgggaaggggccagagagtttccacctccagtgggcttccagaagatcctgctgcgggtgttccttggaccatgctttgaatggcaaggagctcagaaatgttccactatggcggcttggcttgcatatatagcagaggaaccattttatttatatttacaaagtggttttgactaagttcattcaaagatattgagggccagctgtgtgccaggactcatgctagctgttgagagatacagagatggatacaaaaggaagacattagcttacatcttcattgaacgctttgcagcccttatgtccaacttgctggctccttctctgctgctgtcttcttccctaggctgttgtgacactg

SEQ ID NO: 814820 - DNA, 678 bp, Homo sapiens
aatatccttttagaaacaaacaattacaaattagctgggcatggtggcgcacgcctgtagtcccagcaacttgggaggctgaggcaggagaattgcttgaacccaggaggcagagattgcagttagccgaaatagcaccactgcactccagcccggtgacagagcgagactccatcttaaaaaaaaagaaaagaaaagaaagaaaaagaaaaacagctacagatattcattcctttttaatttcttgataaataatagaccagtaagaatcacataagaagcagtctacatttttcaaagagtttttacagatcccatttgatcttcaaaagggcctccattaggaaaaactaaattcaagtttaaaactatccattttatttctcccataaaaatatattcagcccctggagataatctccaaattcctcagattttaaaagttaatttttcttatcttgacccaaaatctgtagaaacaaggatttttcaccaacagtgagctcccttttcataaaatccttatctaccaagatttacctctgcaaacctctacagtccctggttgtgagcccctgatggaagaagctagcataaagaagttcacaactastggggagggaacgacctgacaagttgcaagcaagaaaggagtgaaaaactgagttaattgtacaa

SEQ ID NO: 814821 - DNA, 519 bp, Homo sapiens
cacacaccagctgcaaatcttggatccaccccgttatctcccagctgtgtgagcctgggaaagtctatgcctcttccagcctctaaactgcctcatctgcacaatgggtttcacacataatataaatactttactgttaaatgctaagcacagtacctagtacaaagacaaataggaatatccaaccccccacctgcaggtgacaataataggacattttgcaaacgccccaaagaagaacttcagaactttacgttcctttgtgagcatgcgcttattgacttgagcaagtggcttatatagttcttgctggtttgcagacttgtttatatcatcctttatttattgaaaatccaatactatacagaaaaacaatttgtaaagcaaagaaatgaggaacaaatctaatggctgatttaggatgcgytcttcccggtaatctacaactattaataatattaatagcttttatctttttgtttagctacagatcgttcagaacaatggagataagccctg

SEQ ID NO: 814822 - DNA, 561 bp, Homo sapiens
acataccaactcaagaagtgggaaacgggtcagttcatgtggaatatctttaaaatacaccaggcggcatctgcatgctttgggcagtacaaggctgaggccgtaatgttttgtaaagctgtacaataaatcccagttgactgcatgagatctctcgagaggcaagactgaccccaggctggctactagtgctgccactgtgctgggtgaataagttctcatttaacctgccagtgacagtcctggttaggaatgagtgagaaaaatgcccaaagattacaattaacatggtcctagacaggcacatgcagacagattctacaagggtaactacattgagcggcagtcctgtcggtaaagatgtggggcaaccaggcaacttcatagattaatgagggatgggggataggaaatggcttaacatatttgggggcagttgggacatagctatcaaatttgaagtggacatgctctttgacccagccacaaccagaaatttatcctacaaatagacttgcaaatatgtgggagkaatattcagtacggcattatctacgacag

SEQ ID NO: 814823 - DNA, 485 bp, Homo sapiens
aaaaatcatgttaaaaagccatcagaaatctgagaatcctggacctcaaactctgtaattggaaatcactgacacttaactttttaaataatagcacatttttctaaaaatggttaactaaaagtgcaatgagaattccctatgcctgctcatggttaaataggaaaactcattaacctaacatatttccatgacattacatccctatgcctgctcatggttaaacaggaaaactcattaacctaacatatttctatgacattacattctagaattgaagggcttttttcccctccacttttcagattcctgtaatgtaccttttctcccacattattttttaacttttttaacttaaaaaataattgtggcgttttatctatgagtagcctttattttttatatttttttctttataaggacattaraattattcatcagtgaaatgctctatacagaggttgcttacaacgtttgtactttta

SEQ ID NO: 814824 - DNA, 596 bp, Homo sapiens
ggaacacgaggtcaattcaggaaatgtgtttgtctcagagcaccagtacgatttcctctcatgttgaagtgtttttttccactctgatttatgcttctcttcatagttgattttttttgaatagattcattctctgcattttaaatggtgtgacttaaaactcaaagaaacttatcctttaagttgttttgcacttgtaactactggcaagtacttatctttctatcatttttttattagtttgcataatttgatggtgtattttacaaataataatttcttaagagtataatagttcacttagtgaatactcttaactgtgtaatacatttacatttaaatccaatagtttaattgaaataggacctatttggaataggaacaattgatcacagacacatggaaaatatttcataggggcagtaaaatacagatatgaaatttattttaataatacataatgtttatttaaaatayatgtgtactctcagagttgactcaggtgcatattaaaggaaaaaaacccacgcccttttctcatttgtctctccttgtgttttctaaataaaaatctaatgataagttccagagaagca

SEQ ID NO: 814825 - DNA, 580 bp, Homo sapiens
tcttatcactactgaactatacttaaaaatgattatgatggtaaatttaatgttgtattttttttaamtacaataaaaatgaaggtaaaagcacaatgtctaaaaagtatccatttcatttggaagatataaagacaaatcaaacaatgtaaaagaaatgaaatgattacccagatttgaaatgaaaagattcctataatagaaatgtagggtaaaataactgttagatgaataaatgaaacaaaaacattgtatgttaatttctttctagtctttcaatgtaatatagttccactcttgccttctggcccttttctagtctaaactatagtttaggatcctccatggaccactgtggtgggatatacagttctctggcaagttgtaacaagaaaataattcaaagcctgattttaagaatttcaacattttgatctgatttacatggcttttgccaggcagggtgtaacctatagtatggacgtgggagaccttaaacaccagggtcttttcttaattggtggaaaacataaccaaaatacagacacagggagaagtgattaaaggaatctgaatcagc

SEQ ID NO: 814826 - DNA, 656 bp, Homo sapiens
taaataaacgaaaggtcagcatcattgagtcatttaatcaaaacaacagtggaagcttgtatcaaggccgctctggtttttttgttttgttttgttttgttttkttttttttttgagtcagagtcttgttctgtcgcccaggctggagtgcagtggctcgatctcagctcactgcaagctccgcctcctgggttcatgccattctcctgcctcagcctcccacgtagctgggactacaggcgcctgccgccatgcctggctaattttttgtatttttagtagagacggggtttcaccatgttagccaggatggtctcgatctcctgacctcgtgatctgcccgcttcggcctccaaaagggctgggataacaggcgtgggccaccgcgcccggctgaggcctctctgtttaccatatctcaagcactcactgtttcatttgtctaggcaactctctacccctctgcagccatcaggcagagacaggttttgcagtgacttgaaatgctcaggtcttctattgagggccagcccccaattccttctattactgtagcccattgatatggaaaaatccgccagtattggtcactataataatttatacattgtcccaaagaagttattattgttataaaatgtttatttttcattttt

SEQ ID NO: 814827 - DNA, 611 bp, Homo sapiens
caacagtactgcataatgtctatgagctcagtaggggcagccatagtctcatgcctagcacagtaacagaaacaaaccaagtccacatagaagcctttggaattacaagaagatattcccaataaaaactttgtttgatggggatctcacaggtgtcgcactcctggcctcaagtgaatctctcatctaggcccccaaagtgttgggattataggcacaagccacagcaccctcccttcttctaatatttgtaattcatattggcatattaaggactctgggattttaaatgaaatagaaaacactttttcattcagtatctttgtgagtaaaaataaaattcttaccaatacaaatattgaatgaaaaagttctaggttctattgtcagttatatcacttattagctatgataatttaggcaacttatttatttatttagagacaagagtcttgctctgtcactcaggctggattgcagkggtgcaatcttggctcactgcaacctccgcctcccaggttcaagcaattctcctccttcagcctcctgagtagctgggattacaggtgcccagcaccacgcccagctaattttttgtatttttggtagag

SEQ ID NO: 814828 - DNA, 621 bp, Homo sapiens
tttattcatctccatacaaaatgagagaatattattggaacatgtttatttaataagtagaatgtgtgcttcgacacaacctgggcctaagttaaaaatatagctttactggctgggygcggtggctcacgcctgtaatcccagcactatgggaggccaagacgggcagatcatgaggtcaggagattgagactatcctggctaacatggtgtaaccccatctttactaaaaatacaaaaaaattagccgggcgtggtggctggcgcctgtagtcccagctactcggtaggccgaggcaggagaatggcgtgaacccgggaggcagagcttgcagtgagccgagatcgcgccactgcactccagcctgggtgacagagcaagaccccacctcaaaaaaaaaataattatacacacacacacacacacacacacacacacacacacacacacacacacacatataacaaatatgtatagctttactgcttaatagtcatgtatcatttttgagcctcagtatagagtcatctgttacaatgggaatggtactcttcaaatggttatttggagaaatattttcagtatattgaagcccctcggtcacattgagtgtgtatgct

SEQ ID NO: 814829 - DNA, 425 bp, Homo sapiens
ccatcctggctaacatggtgaaaccccgtctctactaaaaatacaaaaaattatccgggtgtggtggtgggcacctgtagtcccagstactctggaggctgaggcaggagaatggcatgaacccgggaggcggagcttgcagtgagccaggatcgcgccattgcactccagcctggatgacagagtgagactccgtctcaaaaaaaaaaaagactctaaagtattttatagttttgttgttgttttgtttgttttgcttcaggaaaattgatgagttatttaaacacattggtgctttccaacaaatctgggaaggttttttttttttttttaatcacccaaattgcctaatcttagtttacatgagaaaaagatttaaaacacttctaggaacatatttttaagtgaaataattttttggagtt

SEQ ID NO: 814830 - DNA, 425 bp, Homo sapiens
ccatcctggctaacatggtgaaaccccgtctctactaaaaatacaaaaaattatccgggtgtggtggtgggcacctgtagtcccagctactckggaggctgaggcaggagaatggcatgaacccgggaggcggagcttgcagtgagccaggatcgcgccattgcactccagcctggatgacagagtgagactccgtctcaaaaaaaaaaaagactctaaagtattttatagttttgttgttgttttgtttgttttgcttcaggaaaattgatgagttatttaaacacattggtgctttccaacaaatctgggaaggttttttttttttttttaatcacccaaattgcctaatcttagtttacatgagaaaaagatttaaaacacttctaggaacatatttttaagtgaaataattttttggagtt

SEQ ID NO: 814831 - DNA, 425 bp, Homo sapiens
ccatcctggctaacatggtgaaaccccgtctctactaaaaatacaaaaaattatccgggtgtggtggtgggcacctgtagtcccagctactctggaggctgaggmaggagaatggcatgaacccgggaggcggagcttgcagtgagccaggatcgcgccattgcactccagcctggatgacagagtgagactccgtctcaaaaaaaaaaaagactctaaagtattttatagttttgttgttgttttgtttgttttgcttcaggaaaattgatgagttatttaaacacattggtgctttccaacaaatctgggaaggttttttttttttttttaatcacccaaattgcctaatcttagtttacatgagaaaaagatttaaaacacttctaggaacatatttttaagtgaaataattttttggagtt

SEQ ID NO: 814832 - DNA, 556 bp, Homo sapiens
gggatcctgacgttattgttctatgcagaaaggaaaaaaacaaatctcgtaggagcaaatgcattgagaatgggtgactttttttttttttttaatgtttagaatattatgttcacttacaactgcttctgtgggcccaggagcctaactcatgtttgtggaactaatttaaatttgctacagagtttccatagctcctgcaccaaagggaaaacagagcccttcctgctccctcccccaccattgaagaagccacatgtataattatctgctgctgtaaaacaaatttttttcttaaatttagctgcttaagacaacaataaacatttagtatcttacacagtttctgaaggttgggaactcaggagcagctcaactgggtggctgtggtctctcatgaggctgtaatacaagatggcagttgggccgcagtctcatctgaaggcttgaccgrgactggcagctctgcttccaaggtggctccctcacatggctgtgggcaaaaggcctcagtttcttgctacaggggcctttccatagtgctgggcgtttaaag

SEQ ID NO: 814833 - DNA, 618 bp, Homo sapiens
gggattctcccctggagcctccagaggaactagccctgcccacaccttgattctagcccagtgagacgcaggtcggacttctagcttccaaaacttgtgttgttttcagccactaaatttgcagtactttgttaccacagccatgggaagcatgcactgttaacaggctttctctaagcagatactaactcacttgattctcgcagcagccctgcgcaggggtaccagtgctattcttattttatggatgaagaaacggaggcatggagagcttaagttgctggccaggttccaccgctaatgagggcagagctggggccataagccaggtggtgggctctggagtccatgctggtgccaaccgtacgacgatggccgccaggggctctgcagggattgaatgaggtcacagggggaggcatgtgccacgtggcaaaccatgtggcctgtaggattgacttcatcctgcttaaaaggccaccgactttcctcttccggagtgataccgcacggctttccatcgctgtccttggctcgggggacattggtaagcagatgacttactggkcagtcacgctgtcgcagaaacgacgtgggcttgggaccggtgacagaagg

SEQ ID NO: 814834 - DNA, 605 bp, Homo sapiens
ttcataaatatttatggagcgccatctctgccatgcaatttacaggctcaggagagaaargtgaacaaaacagacaaaaatcactgccctcaaggagcttacgttgtagtgagagttgtttctcatagcattatttgggtattccctccctgaaacatgtggacacatagaagtcaattaaatatttattgcgcaactgattggcctctaaatgaaagcgctgtaccctattcagtgattagtgttttagaagccaggtgcaattaataaaatcactgcacttggaattgggaaataacaaggtttagacaaccagaccatctgtaaagtttcagctccaaattctgacaggttaatagtgttatgtgtagtaaaaactcactgatttgtattcagattttcataattcttgcacggtgatttcttttgaattattttcagttgatttgtagttatttgggggattttaatttgtgaatgaaggacacaatagaaaatttagaactcttaagtctaggttttaagaaactaagaattatttcaacaattaatattcctagtttgatatttgcgatacattgcttcttaatatagaaatttttctg

SEQ ID NO: 814835 - DNA, 571 bp, Homo sapiens
ctgttctacatattttcatggatccctgttctstgccagcactgcccttgtttcagtgatatatcagggctcccagccctcatctttgttatgcaatttggtatttctttgagctcagcctgggttcattcctcctcatcttgccccacatcatgaacccactagctgaccttgcagatcctccctgaatgcaaactgaatttaatattggcccaaaccagacataagcagcaaagtcaaggaggggcagcaaggaccagcccagcccaggttccccaaagccacctgagtgtgacctgagtctccaagggaagctgagcccagggcatggtggttggttagtcccagagagtcttgccactccagggtcctctttttataaaaattcctagaatgatccttaactcaagattttcttaagaggaataattgaggatatctgagcgcacactctgaaaaagacatatccattactcattgtcagtgagttctgatgtcaactttttgcttccctgctgagtacctggaaatagggtttaacaagcacggggcatagaagtctgggcactgt

SEQ ID NO: 814836 - DNA, 373 bp, Homo sapiens
tataaagaaatgcctgggctgggtgtggtggttcacacctgtaatcccagcactttgggaggccgagggcggcagatcacttgaggtcaggagttggagaccagcctgcccaacatggcgaaaccccatctctactacaaatacaaaaaattagccaggcatggtgatgggtgcctgtaatcccagctacctgggaggccgaggcaggagaatcgcttgaacttgggagatggaggttgcaatgagccgagattgcaccattgaactccagcctgggygacaagagcaaaactcggtctcaaaaaaaaaattaataataataatgcctgaggctgggtaacttataaagaaaagaggtttaattggaaactta

SEQ ID NO: 814837 - DNA, 554 bp, Homo sapiens
ggatcctgacgttattgttctatgcagaaaggaaaaaaacaaatctcgtaggagcaaatgcattgagaatgggtgactttttttttttttttaatgtttagaatattatgttcacttacaaactgcttctgtgggcccaggagcctaactcatgtttgtggaactaatttaaatttgctacagagtttccatagctcctgcaccaaagggaaaacagagcccttcctgctccctcccccaccattgaagaagccacatgtataattatctgctgctgtaaaacaaatttttttcttaaatttagctgcttaagacaacaataaacatttagtatcttacacagtttctgaaggttgggaactcaggagcagctcaactgggtggctgtggtctctcatgaggctgtaatacaagatggcagttgggccgcagtctcatctgaaggcttgaccgrgactggcagctctgcttccaaggtggctccctcacatggctgtgggcaaaaggcctcagtttcttgctacaggggcctttccatagtgctgggcgtttaa

SEQ ID NO: 814838 - DNA, 616 bp, Homo sapiens
ccttctgtcaccggtcccaagcccacgtcgtttctgcgacagcgtgactgmccagtaagtcatctgcttaccaatgtcccccgagccaaggacagcgatggaaagccgtgcggtatcactccggaagaggaaagtcggtggccttttaagcaggatgaagtcaatcctacaggccacatggtttgccacgtggcacatgcctccccctgtgacctcattcaatccctgcagagcccctggcggccatcgtcgtacggttggcaccagcatggactccagagcccaccacctggcttatggccccagctctgccctcattagcggtggaacctggccagcaacttaagctctccatgcctccgtttcttcatccataaaataagaatagcactggtacccctgcgcagggctgctgcgagaatcaagtgagttagtatctgcttagagaaagcctgttaacagtgcatggcttcccatggctgtggtaacaaagtactgcaaatttagtggctgaaaacaacacaagttttggaagctagaagtccgacctgcgtctcactgggctagaatcaaggtgtgggcagggctagttcctctggaggctccaggggagaat

SEQ ID NO: 814839 - DNA, 595 bp, Homo sapiens
caacgatgctaacgatgcccaagaggaatccagaattagcacttctagggatcakattaaggcagagggtaacagggaaagccaacattttctaaggatcaaccccagtctggcccacttggagccagccagagaagagaaaagatcccagggaaaagaggatgctctcccgcactgaccggaatgacccgggggctgttggagatgaggtctcgagacgtgacatgtcgcgtctggtcttcattgcaccgcacatcgagggtgaactccaccgagcactcggggcagaactcctcacatgtgcagtcctaaggcaggaagggaagcaggaatgagtcaaagggagatggcaactcctgccttggctccttgtcttggcttcctgcatctaatgcccagttccttaagtttcttcacctgtaaaaaggggttcatcagtatccaggttcttgtgggctgtgacaatctggtataccattctcatggactgcccaagtttagagacaacttatacatacactggcacgcacatttctttcccactcccaccagctgccaggccacctctggggacatattgctaacatctccctct

SEQ ID NO: 814840 - DNA, 576 bp, Homo sapiens
caggctcaggctgcgtgactttcgtaccccgagccctctctgaggctctgccaactccatgaaatgggggtgacaggccctgccccgctgcatctgcccctcacagacagcggagcagggccgaagctagccaggcggctcgcccgagcccgcgccgatgcccttcacctcaccttgctcgtgggccgccccaacggcctcttccccccaccgtcgaacccagctgaagccggcctcgcgccccctccgcgctccccgactctccccggcttggcagccccctcaccgggcaggcatcgcagctgcaggagcctccagcccgcccggacaagcgcaccagataccgccgccgccgccattttggaagcgggcacgtcgcccacggcgacgcgaccggtagctacgggaccacggccctaaggagggcggaagtcgtcgctccgtggagcctcctcctctcgcgagaggcgcraggcgtggagtcgacggctggagagaagccgggagcgagcccaggcggcaggtgagagtggtgggggccagctgagcgccagagctccctcaactgtcccctcc

SEQ ID NO: 814841 - DNA, 429 bp, Homo sapiens
caggtgagtctcggcagacatcggggatggaacctaggctgacttattcattgtggctttgctggtgcagcagtttaggaatttcagttatttgaagtggcaaggataaagaaagatgtaattttcctaaatatatagctggaggccttttaattattttactgctaaggaggtcataagcactggttctcaagctttggagtgccgaagaatcacctggctgcttgttagaagtagagattcctagtgttaagccccagggataatttaatcaaccccctcattttatagacaggccaggggaggcagagggccaagccatgtgcccaaggkcaccagctggtcagcagcgccgggattaggatctgggcatctgatgtgggtgtctttcactaattgccttgcctctcaattcgcttgtgtcagttg

SEQ ID NO: 814842 - DNA, 629 bp, Homo sapiens
aaaaataataagaagaaagaaaaaagaaaaggctgtttcatttacactgaaaatctgttgtttagtgtagccaccttcatcaattatcttagctggatcttctaaataacttactgcagcttccgcatcagaacttgctgcttcatcttgtacttccatgttatggaaacagctgctttctttcttttttttttttttttttttgagacagagtcttgatctgttgcccaggctgtaatgcagtggcgtgatcttgactcactgcaacctccgcctcccaggtttaagcagttctcctgcctcagcctcccaagtgctgggactacagtcgtgtgccaccatgcctggctaatttttgtatttttagtagagatgggcttttgccatgttggcgaggctggtcttgaacttctggcctcatgtgatccacccgccttggcctcccaaagtgctgggattacaggtgtgagccacctcgaccagcctggaaacagcttctttcttttttaaaattattttatttatttttaatttttaatttttttgaaacgaagtctcaycctgtcacccaggatggagtgtagtggcatgatctcagttcagtgcaacctccacctcccgagttcaag

SEQ ID NO: 814843 - DNA, 647 bp, Homo sapiens
tgtcctgtgaggttccacataaaaatacagtttcattgtctcttattaagtatccagagggtttggattaaataaaaaatgacccttctaaattttttttgaaagctttcacactaacaactcttccctcarttcggcagcatgcatatatgtgggcgaccccatcagagaatccattacatagcaccatcaaggatctgaataacccccttaaaagaaggggagttcttgtttcctgttttctcagcccctgtcacatagcataacccatgctgagttatgtgcacatatttactatgcacatatttattagccaaatcaataaaataatgactgaatgagtcaatggatgaatgaacacacccatctaattgctcctaaggtttgcaataggctcagagaggatgtaagtaaaaaatttccagacaccttaacacctcagaggcaagaggaatttcacgttcattctcttacggtgctgggaagctctccacaatatactaacaatacatgtccatgtcaagggaaagagaacccagggcctccccagacaatgtgtttcatgtttgggcaattgtaactgtgttagagtctttccttctattattaagcctgagtctgtctcatgctacaattagaagaagtgc

SEQ ID NO: 814844 - DNA, 566 bp, Homo sapiens
gctggtggggggggcagcgtgaattcccaggcagctccaggtccccactctggctgcctgagggcagccctctgctgggggagacgcaggtgtgggctgttggaagcaaaagcacaaatgcacagaagcaggtgctcgggaaatggtgaccctggtgaggggccgggccagggaactgacaactaatgctaaggtgtggcactgaagggagctggtcaaagccctggcctccctttggatttcagttcccactggtttcctgccctttcttccctcccttcattccttcaaagtcagtcagagcccagctgagcacctcttactcctcctgctgcggatgacggggtcacctctcacggtcttgccaagaagacccttctctaaaaccttatttccacatctgagtctcacatctttgacttgtcccttctccctcggtgtccatgggccacctgttctgccagcctagggaggkaagctcagcatagaggctcccaggaagaaaggtgctggggtttggcgggagggaggttgtaggtggatccccgttacagtatcatgcgttt

SEQ ID NO: 814845 - DNA, 590 bp, Homo sapiens
actgagggtggcctggtactcaggaagaagcctcttgtgtagctgcatgtaaacagcttccaccagtgtgctttacagatcagacccyaagcaagcctccttccttcctgtccaggagggcctctcattaacaaattctagagtctaagcttaaagtcagtgcctgaccatcaggaaggctgaagccctcgtgccccagcagcattcctgtggtcgctggtggaattgtttattccattttggatatgaaaagagaaagctttatgtgcctcattttccaggaatgtctcatttagattagctgtttgttgttggtccagccacctccaccccaccccccaaaaaactacaaattacatagatatgtgaataaaacagccaaaatttgaccgttggcatggatgctgagcaccatcactcactttgcttaaggatagggtatcttttaaaatctcgtattggcttcagctcagttccctgaaaatatagaggagctacagaaccccctagggctctaggagtgggactaagcaggaaactggggaaaggactttgaagggatccctttttttctcttggatcaagacatc

SEQ ID NO: 814846 - DNA, 529 bp, Homo sapiens
tgggtggatggatgaatgaataaatggatggataaatagatggatgtgtgagtgggtggatgaatgaataaattgctggataaatagatggatgagtagatggatgggcaaatggatggatagatagaggaatagatggatggataaatggatgtgtggataggtggatggatgtgtggggatgggtggatgggtggatgagtggatggatgggtaagtggatggatagatggatggatgggtagagagatgaataaatgattttgaatagttgccacgtttctctagtttcaggcatcaacaaattaagttgagtagttgaggtagttcatctctccctctggcttcatggcactatgttctctgccctgaaaggccaacagggcagtagaaaagtctggaaggagagatgatcctgccttattcttgcctagggcatgrcactagagcctcctttcagtcatttcagttcttcttaattaactttttaattgaggtgacgttcaagggaatattagtcctcatgata

SEQ ID NO: 814847 - DNA, 372 bp, Homo sapiens
accaaaatcttagttgaaatctttggatggtgggatgatggacaatttttattytcttcttttcgatcatccatattgaaaaaaaaatatctctaatgagcagttaaaggaaagataagaaaggttgtgagtttcttttaaagtctaaaaatgttctacagtcaacattttgggataaggaaatcatatggcctctagagcacacctgagtcattttctttctcatactgtgggaggcagctgtggataatgttagtcctgatttccaattgcgatggcatttcaggtcctgatgaaagataccatgaccttcttggggtgccttgatcactctggggtgcctgccccaccacaaaatattaagcttaatcc

SEQ ID NO: 814848 - DNA, 591 bp, Homo sapiens
atggctcattttaatggtgttgatggtgtttttaaaaacattctgcagagaaaagagaataatgtatttagttatcaagtcacaaggatggaggtattcccaaattatttgcacagacttctgcagataccaataaaatatttatttatttgtcatcatcagacacttatttactgtgtgattggggctaaagtagaaacaggactgagggaaaatggtgctggctggaattaaccaagatacttgatcgcacactgtcagactcattgattctcctctaaagcatagtattaaaccacacaaaagtgggcctgctccaaaggcactcttcactctgccttgtaagacaattacgttttaaatttctcatctcctcttggacgctaaactctgtgagcgtgaagttcacgcctcatttatttttgtgtccaacacagccctgtatcggtgagtagcacatagtagctgtctcagatcctttccagaatgcggcasggtatacctgaataagcaattaggtacacaaacaggcaaacgaacgggagataagagcctggtaaaagtttgtgaaatgaccaagatgacatcttt

SEQ ID NO: 814849 - DNA, 608 bp, Homo sapiens
tggtttgaagctgacagcaaaggatcccaccacctggtctttgctgcatccctcccggattccagctgatggatcatgaagccaacrtcaattgtttgtatttaacttgttttactttgacccctgcctccctaagagccggggacagctccctctaggttggtggctcctaacattggtcacctgtgaaaatcatctgaaaagcttttcaaatacaaatgcctattccccagcccagatcaattaaataatcctggggtggtacccaggcatcaataattttttcaaagctccctgggtgactgtactgtgtagctaaggctaagaagcactgttctaaggcacgagttctaaacttcagtgagcatcagaatcacacattgcatggcctcaccccgagtttccgattcaggcagtctgagtgtagagcctgagaattacgtttcaaacctgtttccaggtgatattggaacagggacctacatttgagcacttgagaacctctgccttcagtaactaaagcaggatttggaaaacaatctgatagaggagttaaagaccacatcccatccccagctctgcagctgccatccagagaaactcacctg

SEQ ID NO: 814850 - DNA, 348 bp, Homo sapiens
ctcttggtttttcaaacatctcaaacaataaaaaataaaaataaaaaatgaaactatagaaattactgtcaaaattgttgtgtgccttttaagaaaacctcccaacgcagcataatagcaaagaggccgggcatggtggcttacctgaggtcaggagttcaagaccagcctggccaacaacatggtgaaacaccatctctactaaaaatacaaaaattagctgggtgtggtggcggkcacctgtaatcacggctacttgggaggctgaggcaggagaattgcttgaacctgggaggcagaggttgcagtgagcaaaactccgtctcaaaaaaaaaaaaagcatagaat

SEQ ID NO: 814851 - DNA, 555 bp, Homo sapiens
ttgacagacttttcctttatgttttctgcatttggtgtcatgcttagaaaacccttctccatccctagtttctaaaattgttcacccatgttttcagtgtccttatggtttatttttacataaaattwtaaaaaaactagaattaattttggggtatggtatgggctaagattctaacaaatttttcccagatgggtatcatgttgtctcaacataatgatgattgattaaaaatgccatatactacattgacttttatagatctatgtcaatttctggaaattttattctgttccatcaatgtgtatgcctttgctacacatcactacagtgttttattacgtctttataatatagtttcctatctattttaatgaatctctcttcttcttaaaactttggtcaaacttgtgttttcctttttctaaatgagattcttaaccaagggtgagcataaaaacaatctgtggaggactttaattaacctgcccagggctcacatcccagaaaattctgattcattgggtctggtgtgggagctgggcatctttcaaa

SEQ ID NO: 814852 - DNA, 647 bp, Homo sapiens
gaagatccaaactcatttttgtaacttcaaattggagactgaactagagatttttatggaactgagacaggtcaggacttgatggtggtttaggagattaagtcattgtccccgtaaatcatatctgacttctagtttcacagtgtggcaagaccatccttctgcactctaaatttctttcttgccgggcagtcatttgttgctggacacttaggaaggaacatacattttccttttacctctctgtgtgctgcccgaacatccccaagtccctgcgctggggactgcctgtgtggtggctctgtttgtcactgtgaggacccaacatgtggtctctgaaaagctggcttttatttaatcaaagggcctctggcactaagatgtccaaattattttatttgattttttcagagccaataaatcagagtctgagatatatcttgcagccatctccttacctgtatccctaccgccttgatagaggccattgtgttgccttcctggattattttcacagcctccagactgaactctaygcttctgctcttacgggtcctcaccacagcctccccaccgcccccatcatcacacagcagccaaagtggtcttggaaacatgaagatcagattacattaaaactttttaat

SEQ ID NO: 814853 - DNA, 598 bp, Homo sapiens
gaaatagggctttatagacagggagtcacactctctgtctctctctcttttttttttttttttttttttttttgagacagagtcttgctctgtcacccagcctggagygcaatggtgcgatctcagctcactgcaacctcctccacctcccaggttcaagcgaatcctcctacctcagcctcctaagtatctgggattacaggtgcccacccctactcctggctaatttttgtatttttagtagggacaggttttcaccatgtttgtcaggctggtctcgaactcttgacctcaagtgatcggcccgctttggcctcccaaagtgctgggattacaggcatgagccactgtgcccagcctatctcttaatctccattactttctagggcaaatgatacaaacttggtcttctcttcagggctcatgcagttatttccctaatcaacttatcccataaatcacatgacctatttcagagaccaaataattacaaataaaagattccccccaaaccatagattcttgttggcaatgagcatcagttgagctcagattcggtaaaaagtaaaaatgaaaaaagatccatagctatagattt

SEQ ID NO: 814854 - DNA, 611 bp, Homo sapiens
ttctgtaattgtatgtatataccacaacttgtttattyatccattaattattcagtctttttttgttaaatatctaaacattctaaaaccagtgtattcatttatgcagtgaacatttgtggagcatattatgtatcaagcagtgtgttggatcccaaggatgtaaaaatgaccgtcatttataataataatgtgatacatgctgtggtggagatgtaaacagtgtttatatgacttgaagaagtggttaattctttttggcatggagattgaattcattttgcaagcagatttttgctgatggcaaagagaagagtgtctagatatattttgtccactgtagctgtagatcagtatatctgaaatggtgtaagctatttgaggacagtgctctttattgttttctactgtaagtcactaacaattttggctgttttatttctagactgtttagtcttttgttaaatattgccaaggaggggctggtcactgttctcgtaaactagttccttagtctgtcttaagaatagactgaaatgcagatgataagtagtctagaggaaaagagaggctttagagattggtttcggctatacctatcacaagatttc

SEQ ID NO: 814855 - DNA, 599 bp, Homo sapiens
ttgctaccagggtgggaagggaaagaccatcacgttggggttgggctasgtgtgcctgagctcaggctctccttgggcgggtcttgctgcagctgctgtgggggatgggagtgagaatccgaggtcaatggagttgtgtacctacgaggattatggctgcctctgctgagtcacgccggtttatcagggaagtgggggaaagccagcagtcacaggactcacccagctcccatgcaaacagaagggctggtctcactcccatcatgcccccgcccccaacagcctggagtctgtttccaggaggcgggtgagacaggcttgaaagcttgccccaggctccctgcttcccagtggcgaaagaaaggggcttgtttcttctccaacccgtggagtctgcacattggatttgtgcccgcccccaagtactgcccatgaggcttcttgccccattcaaaatgttacaaagttcagctggcaatttccttctccctgtggagttttaccccctgctcctctggccgccctcctgatggattcctgtggtgccaggaaggaatggcctgcttggggacccagtgagctcccagggcctttctgct

SEQ ID NO: 814856 - DNA, 580 bp, Homo sapiens
atccagacgaaaacatataagttgaagagtgggagatgggttcggaaaagatgagaaaatatgggatatcttgaaagacaagtaaggaatcagtgctttatccttttatttcagttagaatacttgaacccaatcatctacatttccagcccaacaaagagatgccctatgagtacttaacaccatttttcctgtgatttcagaagactccactgcagtgatacctaaaaagagttgcagacaagtggagagtaatgtggagcctcattagatggctatgcccataagccaactgagaatactgtggggccagacatggtggctcacgcctgtaatcccagcactttggtaggacaaggcaggcagattgcttgagctcaggagttcaagaccagccttggcaacatagcaaaatcccatctctacaaaaacaaaaaattaacggagtgtgggggtgcattcctgtagttccagctacttgggaggctgaggcaggaggatcacttgagccttgaaggtccagccatgttcgtgcctctgcaygccaacctgggtgataatataagaccctgtgtcaaaa

SEQ ID NO: 814857 - DNA, 404 bp, Homo sapiens
tgaaaaattatcaaaataatgcagattcccattcagtaagtcttgggtyggaattgagtacccgaatttttaacaaggtctcacataatgccattgctgctggtctgatgactagctgtagaatgggcaaggtgtagattgaacagtcccagccccttctgccctctccttaaatgtagtttaagaagacgtaattaaagctgctctgccctcttgcttgaatgacccataggctagttgttttgcatctcagttttcttctctgaaagagaaagcaggaaggaattttactggttctgggaaacaagtaacatatccagtggaaagtatccaaaggaataatatactttgaataaagtagtgggatcctttcaggatgaagtcatttatcacaagactaaaca

SEQ ID NO: 814858 - DNA, 618 bp, Homo sapiens
gaaaacagtatggagattactcaaaaaattaaaaatagaattacaatataattcagcaatctcacatatcagtattatccaaaagtattcaaagcaggatttcaaagagatatttacacactcaggtttactgcatcactattcactatcaccaagagatagaagcatctcaaatatccattgacaaatgaatggattttttcaaaatgtggtagatatggttatccctcagtattcaaagataccaaaatctgagaatgtttaagtccctgttgtaaaatggtgcagtatttgcatataatgtatgcacatcctcccatgtactttaaatcatctctagattatgaaacctactaatgcaatgtaaatgctatgtaaatagttgttctactgaattgtttagggaataatgacaagaaagaaagtcactatacacaactttttcctgaatatttttgacccaagtttggttaaatccatgaatgtggaaaccacggatacagagaaccagctgtaacacaatggaacattatycaggcataaaaaaagaagataatattgtcatatgcttcaacatggatgaatctggcagatattaggctaagtgaaataaatcag

SEQ ID NO: 814859 - DNA, 639 bp, Homo sapiens
ttctgcttgctatgttgtcatggtctatagaaggcagcacttccctttttcctctaacaccacactaggatgtcacgctggggtggccccaggggctcactatttgacctgactttctttggtttctcttctaygactaatcctacacttttatgttcccttgatctaaaatctttaaaatgttgtaatttctaccatataacacctaatctctggcaaattttaaggttgtcaactgtattccccaatgtgtatatatttgttgagcaaaactaatcttctctcttataagaagaaatcttgctcaatctctagatcattgtgcctatatttctagtgcctttactagctgaaatgccctttcttctttccaacaattcaaatgccacccaacttttaagatccagctgagatttcacctcctccttacagactgttccagccctcattcgtttgcctgtctgctaaattcttagcagtgcacttataatctgttccacataatagtaccctcttttattgtttttattagttcaataatgataatgtgcttaagaacaaaaattgtgtctattctttttttaatgtgatagcacctagcatatgttgatcttataatagtgattaataagcagttaa

SEQ ID NO: 814860 - DNA, 613 bp, Homo sapiens
cctgaaaagaccagttgggtgaaatttaatgtggactcaaatggttactacatcgttcactatgagggtcatggatgggaccaactcattacacagctgaatcagaaccacacacttctcagacctaaggacagagtaggtctgattcatgatgtgtttcagctagttgggtaaggcaacatttcctctgacttcatgcaaaataactgattcgtaaccagatatgctagacttcaatattgaatgttcaacattggtcattgatttaatatggatttgaatggaattcaaacagtgatcactaggccaaagactacccactaataacgtattttgacccacacagtgtttataattgtaatccaatattttaaaatgtggagaactttacctaaaaatcctgacctctggaatctcttaaaaatgatatttggcaactgtgggtctttatcctgtgggccacaggatagctataaaggagagtgcagtgggccaaactctctttaggccaggcctactttctcccaagcaccaaagtcccaaatggcctstttcattcacttagtgtggactctctaagtatttgagctttcgaccccacatttaaaatgta

SEQ ID NO: 814861 - DNA, 523 bp, Homo sapiens
caggaaaccagagactttgccaccaaatctcagattattagaaactaggtgtcagggtttatcaagaaggccaggaaggccttttgggttaagccttacattcatgaagaacctcragggtagatttttgagagcattccaaatgaatggtctctggtcaaatgaatgaatggtcaaatgaataaatctgccctcacagagatacaaaaggaaaaggaatataattcataccatttggtttaagccttacattcatgaagaacctcaagggtagatttttgagatcattccaaatgaagtcgaatctgccctcacagagacacaagaaaggaatataattcatacactattgcatttttaataaatcttttgaaatttgcagaattagattgtattgtgtattttcggttaaatgataattgaatgtaaatatttagatgcagcaccatattttataacccagctttagcatttcttcatattttaaggaaaccccccacctccttcttttaagggcgcttct

SEQ ID NO: 814862 - DNA, 671 bp, Homo sapiens
atggagcagtaaatatactacaaattagtttagcagttacacagagtagggtttatcatttcagtcatttagtttcctactggaatctatttagaataaaatttcttaaagtactatctatcccatagcatcgcttggtaaagtaattgaatttgtataaatacatatatttttaagtaactggtgctttaaaatcctaaatgaatgttcttgacacaacccaatttgcctgtgttttgcctgtctttcttgccctaattaaaataccaccatagtatgtggtttatatagattttagaacatggaagttggaaacttcctattattaaaattactcaagctgtgatgagaaatgaaaattggattagacaacttctaggtcccttccaattccaagaacatatgatttaaatgattattactatgatcccctggctataaggaggagttaaaggtgtagctttaaagacaatagtccagttacaccaaagcttttaaaacaatatattaaaatcttcctgtagtagattcccttaagggatataggaarcagcattgataattggcagttatgccattatatctcagattaaatacttatttgcctattatttaatttcagttatacgaagtacttaatcagccctttaacaaataatagaaagcataat

SEQ ID NO: 814863 - DNA, 671 bp, Homo sapiens
atggagcagtaaatatactacaaattagtttagcagttacacagagtagggtttatcatttcagtcatttagtttcctactggaatctatttagaataaaatttcttaaagtactatctatcccatagcatcgcttggtaaagtaattgaatttgtataaatacatatatttttaagtaactggtgctttaaaatcctaaatgaatgttcttgacacaacccaatttgcctgtgttttgcctgtctttcttgccctaattaaaataccaccatagtatgtggtttatatagattttagaacatggaagttggaaacttcctattattaaaattactcaagctgtgatgagaaatgaaaattggattagacaacttctaggtcccttccaattccaagaacatatgatttaaatgattattactatgatcccctggctataaggaggagttaaaggtgtagctttaaagacaatagtccagttacaccaaagcttttaaaacaatatattaaaatcttcctgtagtagattcccttaagggatataggaagcagcattgataattggcagttatgccattatatctcagwttaaatacttatttgcctattatttaatttcagttatacgaagtacttaatcagccctttaacaaataatagaaagcataat

SEQ ID NO: 814864 - DNA, 620 bp, Homo sapiens
agattattttgtcacccaggtaataagcatastatgtggcagatggttttttaatcctcatcctcctcccactctctcaagtacatcccagtgtctgttgttccctactctgtgtccatgtgaactcaatgtttagcttccacttacaagtgagaacatgcagtatttggttttctgttcctgcattagttcacttaggatactggcctctagctctatacacgttgctgcaaagaccatgatctcattctattttatggctgcatagtattctatggtgtctgtgtaccacattttctttatccagtctatcgttgatgggaatctaggttgattccatgtctttgctattgattccagcagtgttttgtaattttcatagtagagaccttttatctctctgattagttgtactggaaggtgttttattctttttgtgactattatgaatggggttgcattctttgggatttggctctcaggttggattttgttggtgtatagaaatgctactgatttctgtacattgattttgtaccctaaaactttgctgaagttgttgattacatctaggggcttttgggcaaagagtatgaggttttctaggtatagaattatat

SEQ ID NO: 814865 - DNA, 575 bp, Homo sapiens
gcttctcattatgcaccgttgttgtttctataaagttgctttaaacatcaaatgagcggatactgaaccattgaccctggggtaaacaaagggttaggtttgtgcaagcctctggtcatattttcatcaacttgtcagtccataactttgttttatgtgtgtttctttgtttttgtttggtttcttttttgtgaccaggtctcactctgttgctcaggctggagtgtactggtgtgaccatagctcgctgcagcctcaaactcctgggctcaaatgatcatcctgcctcagccttccaagtagctgggatttcaggtgcacacctccatgcccagccaatttttaaattttttgtagagatgggggtcttgctatgttccccagctggtctcaaactcctggcctcaagtgatccccctgcctcagcctcccaaaatactgggattacaggacttagccatcacactggccatgtgtttytgtttaaaggcatattatttaatatataccattgattcacttaacattgaacccactaacatgggtaatagtgctataatttcatgccgaaacaa

SEQ ID NO: 814866 - DNA, 508 bp, Homo sapiens
caacaacaacaaaaattatattgtttgtctctatgaacaaattatattgtttgtgggtgccttgaggggaggagtttctcattcaccaatatatcccaagcaaccagcacagtggctggtatgtaagaagtgctcaataggccgggtgcggtggcttatgtctgtaatcccagcactttggtgggtggatcgcctgaggttacgagttcgagaccagcctgaccgatatggtgaatcccatctctactaaaaatacaaaaattagccgggtgtgggggtgtgcccctgtagtcccggctactcaggaggctgaggcaggagaatcgcttgaactcggaaggcggaggctgcagtgagccgagatcgtgccactgcactctagcctgggcaacaggagagaaaactctgtgtcaaacaaaaaaaaaaagtgcccaataaatacttgttgaataaatgaatgaatggatgagtggatagatggagcarcatcttcttagttattttgtcc

SEQ ID NO: 814867 - DNA, 682 bp, Homo sapiens
agatgggcttggcggcaaagagtataaagtggactctgagccataaagtggactctgagccaattcgacttaacactgccacaaactttctcattctgccagtgtggtatgatgtgaactacakggaattttgaaatcacagagacccaaattccaattctgtctcttaccctcattaactagagaacatgggtgacctattttaacctcatagagtggagtttcgatttccagatctataaaatggggattatgatacacacctcttgcggtggttttaacttgggttgatttgatcagataatgtatgtacaaatttttgcaaacaataaagactataaaatgatagttagtttggtataattataaggaaaatcaccctcttatgagagtacatctatctagcacattgctttctggaaatggctagttctatatttactcactccaaaaaagggaaattgattcttgggtctttgttgcaatgttacgcccctacaaatgtaagggccaaaacctccctgcgtgacttgatggtgaagccatttcaaatggaagaacacaaagcatcctattttggggacagtttttgccactcagaaaacctgtcattaatgacctgtctgtcacctgtgtctacggtcctctttgataaattgcacgggtgttgaaaccacaggcg

SEQ ID NO: 814868 - DNA, 543 bp, Homo sapiens
aggtgaggaaggggcagtgtygaaggagatgcatgattctcaacacaaacaatggtggtgttagccactaagagaggggaccccagagaatgtcataagttcaatatttgacatattgaggtccaggtttctgtgggacatccagcgggaggtgatcagtggggaggtgaatgcagatggtgcttctgtcattagtgactggtttccaggttccctgcaaagtgtgtgtccctgtccaaaatctccatgctagtaatcagctgtttctctgcttgggtactgggttttggattctgagtcttacctaattctgaagcaaatggttacaaagagaaaaagctaaacaacttgttgttttatctacatggtatcaagaattttaaaaaatcacctaaaactaaaactaaattgtggattcacaccggcatgtgggcttgagccggctcctcccgcagcatctgccaacacataaggccttccctccactccttattccaggaacccaaactatcgcggggcccacttcagcagctctgcattccg

SEQ ID NO: 814869 - DNA, 543 bp, Homo sapiens
aggtgaggaaggggcagtgttgaaggagatgcatgattctcaacacraacaatggtggtgttagccactaagagaggggaccccagagaatgtcataagttcaatatttgacatattgaggtccaggtttctgtgggacatccagcgggaggtgatcagtggggaggtgaatgcagatggtgcttctgtcattagtgactggtttccaggttccctgcaaagtgtgtgtccctgtccaaaatctccatgctagtaatcagctgtttctctgcttgggtactgggttttggattctgagtcttacctaattctgaagcaaatggttacaaagagaaaaagctaaacaacttgttgttttatctacatggtatcaagaattttaaaaaatcacctaaaactaaaactaaattgtggattcacaccggcatgtgggcttgagccggctcctcccgcagcatctgccaacacataaggccttccctccactccttattccaggaacccaaactatcgcggggcccacttcagcagctctgcattccg

SEQ ID NO: 814870 - DNA, 591 bp, Homo sapiens
ccagtttcaacagttaccaacacatagccaatcttgtttcattaatccccctgcacccactctgtttgctggtaatttaaagtaaatcccacacatctatcattttccctgtaaatacttcaaggcatctttaactagtaaggatttttttaaaacataatcacaatgccattactatgcttaacaaaatgacagcaatttcttaacatcatctgaaacccaatcatactcaaatttctccaactgtctcaaagatgtcttttttcagttggttcgttcccatcagaatccacacaagattcacacattgcatttggttatgttcttaaatctcttaatctaaagcatacattgaatccctctccctcttcttttttatgctacttatttgctaagacaattgagtcatttgtcctatagaatatcacacacgttttggatttctgtggtaacgtgtttctctagccttcagaaagtgaaagttaattctagaagtttgattagtttcaaaaataatatggtagtcatttcatttaaaaaaataagaggaggcatgcaatmtgtagcagtctttgaatgatttaataattt

SEQ ID NO: 814871 - DNA, 594 bp, Homo sapiens
aatactaatggattactaaatcagtctaaaattgatctggaagtttggtacccagagaatatttggcaaaactttcccatattggacaggccacactactgttgggtctgggtaccggtcattttcaaggatgcagaaaaattaaatctgtctaatggttatcatttagaaaatacaagattaaggtccataaagcataggtgaaagaagcaattgcttttttaatgagacagcctcagatagtaagcaagagctatctttgaatattggaagtgaacgaggcttacctttattggacttaaatgatagaactggagccacaggaagaaagcttctggaggatagaaatcagcttagcaaaggaaaactttctaagcggtaataaggaaagggatgtcttaggagagagtgaatttcatatcatttgagtttatgagaagagcagcgttttttattttttttggagtgatgcatatattgcataaagaatsctttctatttctgggcattaattagaatgctaaagtaaattctacagaagagaagaagagtgacaaagtccatggttgatgtaggactcaaatttataagcta

SEQ ID NO: 814872 - DNA, 619 bp, Homo sapiens
atgagatatctcaacatatgcctcacaatttgcattaaaaactaaaaaacagatagagtgaacatgctttataaactctgacgtataccccatatgtaatattttccttccctcagtgggatggaattcttatttggcaggtctaatcttcactccctagattactctgtttcgatgcctttctcttgccctatgataaagtaaaaattatttactgcagtctcatgcctgactaattctcaacctcttttcttgtggtgtttacatctctccttctgtatcattctgtagcttacatttgtccctcaaatgcttcacctgtacttcattcagaacagtttttgagcttatattacattttgggttttctgctgggatggggacacagtggtgaaatgattactccatatcttgaataattatggtgctcatatagtagggcagtaactaacattaaattgcccagaccaggaagttagtaaaacaatatacaataggatgtgtgaactgtggcaagagggagagagtacagagaacaatccatytcatggagactagtacagttaagctaatcagtgctctagaaggatatggctgcagtgtttccccttcatcttcg

SEQ ID NO: 814873 - DNA, 598 bp, Homo sapiens
gatcatatttgataacatatttgagagtcccaggccagcattttgattcccgtgtgacaaataaaggtaaacacatttttcttctcaactytccctctctgtgtagatagaaacatataggttacttttttttttctagcacgtgtacatgcctcaggcctaaaaagaatttatctcaatgaaaaaagctcttttacttttcttccatttcagaaactattaccaggatacaattatgagccattcttttcattaaaataccgaactttgccaatctgttttgatttttaattgtatcttttacaacgtgatgccaaagtgctttcttctctagcatcggccaagaaaggaatgtagagacaggtacataaaagggtagcctgactgtcttgtccatttgggaattgtgtcttgccatctgcttttagatgtattctgttttctgttaaaaatccaagtaccctctagccatagattccacacagagcttctaataaggtgaactttgctttaggatttctctgttgtggatgaagtattcccttcctgctgaggtcacccttcttgatccaggtgctgattttttgtgctgctcttg

SEQ ID NO: 814874 - DNA, 530 bp, Homo sapiens
tctccctttgtcacccaggttggagtgcagtggcatgattttggctcactgcaacctgtacctcctgggttcaagtgattctctyctgcctcagcctcccaagtagctgggattacaggtgtgcaccaccacacctggctaatttttgtatttttagtagagatagggtttcgccatgttggccaggctgatttcaagtgatctacccatctcgacctcccaaagtgcttgggattacgggcttcggccaccatgcccagcacctgttctattgttttctctacagcgtttactaccttattgtatgtttttggctaaagggccttggagtcaaccccaggagaacagtgctgatgaatcaggagtggcgctcccataacttcatgcgtcttcaaagctggctagtactgcacctcattctcgtgatttcatgcccacagttacctccagggtgttggctgagcagagcaagtgacatgagggtagttggtgacaaagtcagaagtagctgaggcctcactgtagagagc

SEQ ID NO: 814875 - DNA, 567 bp, Homo sapiens
accttactgaattctcctgatgatgctataaattaggtatttttattatcmccattttgaacatggagaagctaagctttctggaggtgaaataacttttcttggtagaatcaagacttgactctagaacctgagctattaatcactggttgtctatcatctgggctaagttacaggggagactcagcccgtgggggccaaccctacaggggcttggaaggctgacagcataaaagcagccagttttatgccttggacatgaagcagccagtgtctgtgcctttcccgtgggggctggaaagaggactgttgaggacaaataaaagaactcctgcctgaccccgtggaaaacaatgttttcctaagcatacagtggtttgtgattgaacagcaggtgatgctgctccctggtgtcacagtaagagcagagttaggcatggctagggctgtgtggcatcccaggaggagcactagattagcagttccaagatcatctccctactctaattcttagatgccttccacggctctggccaaagtgatcaatgtggaggaggccttgtcatc

SEQ ID NO: 814876 - DNA, 630 bp, Homo sapiens
tccctacaaggtccaatgcaaatgtcaccacctctgcaagtaccccygtgactcctccagagaaggtcagttgctgccccttcttgggtcctaccctctttttttccccccattactagggtgttcttaggtgagtaattatgaattaacgagggcattgttttcttctgtcttcctctagactgtgagctccaaagacatcatcattgtggtcagtatctgtcattcctgcctgccttgcctccaggtctgcttccttctgtaatggcacctgtggtctccagtcctcaccatggcccccagtgatgcttggctcctggtctccacacccttgtgttgttccctcccacactgaccagggctgagttgtgtgactaacaggacattacagaagtgaggcaatgcagcagggtgtgtgacttcccaggggacagcaacaagggccctctagcttctgccctgttcccttttgggctggttgctcaggcgaagccaaccgccatgttgtcaggacactcaagtagccccatgaagaggcccatgtggagaggtgttgaaaccttcagccaacagccagcaccagctggccagctgtgagactaagccaccttggaaacggatcctccagcc

SEQ ID NO: 814877 - DNA, 510 bp, Homo sapiens
cttagtgcatccctttagaaagtaagcaatcagaaaacaagcctcggctgtgtgatcattgtgcttccgtaagactggtccttgacatccgagtcagaaccagcataggagaaactggtttttctcctgaccaaaagaagagtccttagaaagggcttcttaggaaggaaggcttaggagtaaaaaaaaaaaaaaaaaaagtgggaggggtccagggtcctcagagggacattagaaagcacaaagtgtaaaggggctggttgagaacacacacacatgccccacgcccatggcacgacttggttttgtggggacttggcttccttgtgtgcagagtgggggactgattggggcagtgagagagggaaatgctatcaacatatggaggcaaggaaggagacctttgtrtgcttacaaccacagaccccaaaaggggacctgaaacctttcagagctggtaggtgcctcaacatcagcaagtccaggaccttattcatttgaataaaagaa

SEQ ID NO: 814878 - DNA, 533 bp, Homo sapiens
aaaagctgctaataccaaatccacatctgctcatggcaaacctaaacatctaatgatctctgggcctccaagagctaggccacaccccagagatactcyggtacagaatctcggctgggcagccactactccagtctgtcttgtgagcaggttttactccctgactccgtatactaaaatagcagggattttccttccatgtacttttaaatttccatatcctaccctgaggttctaaagtagtctcttgaaggtaagtaggtctctccactgaaagtcattgccactggggctcagagagaggccctgggggctgccggacccaccctcccctaccccacgccagcccaccctagggttgcagtcaccactaaggaatacaacacccctccaaggagcgggcaggccagagaagtatgagcccatgtagcttgcctaaagtcacacagctactaagcaggacactcgggatccagcaagcgatgtttagaccgacctacagtgagacccaagccagaatccaaggaaacagc

SEQ ID NO: 814879 - DNA, 604 bp, Homo sapiens
attcacatttgtcctttcttgttttactttactatgtgtctgtgtgtgtattgtgtagtcatcagtgctgtttgggatgcaaatgacagaactcaaaccagctcaaacaaaaacagggtttggctcaaaggccctgtggtgactggcggaggctgaaagcaggactgtgttgatctcaagaacaagagttaggcgcgcagaccctgttggaagtctctctatctcctgcccttgctcctctctctctgatgatcagacttttctacttcttagttgatgcagcagaaaacacccgctgccaacaacccgcagttcagctcccaacctctcaacacagattggagtgaagaaccccgattgtcctccctggggtgctgcacacccctgaactatcccctgaggttgggaggtggggctcctggccgatgtgggctcttccagtaattgcacgtaaaatggagctaagagctggggactccctgaagaggggagaggagtttctcggctgccgtgtgcacagccgcctgcagcgggaccctcgtgctgctgtctggcgcctctgctccttgtaggtggatccsagctctccccacctcacacagcc

SEQ ID NO: 814880 - DNA, 494 bp, Homo sapiens
ggaacccagccaggagtcctcaggctgtcagggcaggcagttctccttcaaggaggccgatcagagctcttacttcgttaagaagacagtagggccrgggtaatgtcctcgttgtattctcagagctgattttcttttctgttttctatgagactttaaaagccatcagctaataaaactgtctttcgggtgctcagtgtgccacaaagtgttgccaagtgcagcacatcctcatatcccctccacagttcagggtgcagacatccttctccccagttacagattcagaagccacccatgagccccatcgcagatccaggcctcccaaggaagcctcattcgcacagaaagctctaaagctaagatcatctcagacagctgtgattaaacactcatttcacagacgaggaaaccgaggccctgagtaggaaaggggcttgcccagagtcacagggggaaatgatgacagagaagagcatggatgcccagcccag

SEQ ID NO: 814881 - DNA, 578 bp, Homo sapiens
agtgagccaaaattgtgacattgcactccagcctgggggacaagagtgaaacaccatctcaaaaaaaaaataaaaataaataaataaataaataaataaataaatargatgtaaatacccagttgaaattaaacttttaaaataacacatttcccagcacttttgtcattgtaaaattaaagggaattaaacacctcaaagtatatcaacagatgaagaatgactgtgtcactaattactatatattgataaagaaaatgattgagattctatatattctaacataaatgcactgcaaagcatattgataaatggggggaaaaggaaagtcacaaaataatacacaatgtacaacttcattaatgtaaaaaaaaagtaaatccagacacaggaagctatacatttcatacattttaatatgcaaatatacatacataattgctgttaaaggtggctatccctagagagtagaagacttggagggtttaggtgagactttcatatcttttgctgcatattacgcagtttgtgattaaacaaacaaaacagggttagaccttacttcaagattttacatt

SEQ ID NO: 814882 - DNA, 609 bp, Homo sapiens
atcaaaagcacaagcaacaaaagcaaaaactgacaaatgggattacattaaactataaaggttctatacaataaaggaaacaacccaaattaaaaggcaacctatggaatggcagaaaatattttcaaattatatatctgataagaggtaacaaccacaatatacaagaaactcatacaactgaatatcaaacaaacaaaacccaaattattcaaataaaaacgggcaaagaacctgaatagatattttcccaaagaagatacactaatgtccaacaggtatatgaaaagctgcttaactcactaatcatcacggaaatacaagtcaaagccacaatgaatatcacctcacacttgttaggatggctattattaaaaaagtaataaatttaacaagtgtttagcaaggatgttgaagaaagggaatgattatacaccaatagtgtaaatgtaaattgatagagccatatggaaaactgtttaaagttcctcaaaaaattaaaaatagaactttcatgtgrtgtaggaatatgacttctgggtgtatatccaagtaaactgaaataaatatattgaagatatattggaactcccttatttatttaaacat

SEQ ID NO: 814883 - DNA, 438 bp, Homo sapiens
aggaaaccacattgcctaaggttaggatcctcaacgatatctacttttgttcttctgggtaccrtgcgtattaatggaaaatgtgaaataaaagaatgggtaattaaataagattttagggatctttagataaaaaatctaatgttgagatcccttattagaggtaaaggggatattttcactatttcaacaagtattaaaagagcttgaactttggctcagatcatgaatgcagtggttaaaatgtaaaatgcctgttcctttggctggagtatgtcacctcaccatggacacactggttatctcttgctgaatcagctctgacaagcactgatgaatgtctttgattaataaaacattgggaatcaaattaaatattactgaatacatgtagtgtctttggtagacaagatctttcaatatacacaggcttttcat

SEQ ID NO: 814884 - DNA, 438 bp, Homo sapiens
aggaaaccacattgcctaaggttaggatcctcaacgatatctacttttgttcttctgggtaccatgcgtattaatggaaaatgtgaaataaaagaatgggtaattaaataagattttagggatctttagakaaaaaatctaatgttgagatcccttattagaggtaaaggggatattttcactatttcaacaagtattaaaagagcttgaactttggctcagatcatgaatgcagtggttaaaatgtaaaatgcctgttcctttggctggagtatgtcacctcaccatggacacactggttatctcttgctgaatcagctctgacaagcactgatgaatgtctttgattaataaaacattgggaatcaaattaaatattactgaatacatgtagtgtctttggtagacaagatctttcaatatacacaggcttttcat

SEQ ID NO: 814885 - DNA, 640 bp, Homo sapiens
gttactctttcagccatcaatcataaactattaagaaagaagacaacaaaataatctgttatagcatatgaaaaatccaagtaagttcttcccctactgattttctcctgagaggaacaaytttgaggaaaaaaaaaaagaaaatcacttctatgatatttactaaaaatgctttctcaaccttttagaacctgaatcttttagaaaagtttaggacactggcaaggccagaaactaacctattcctctacgctttgcccctctatggtgtaaaagtgacagcagtgtttgtatactgtatatatttcatttagagtttattagtctttccttgctcccaaaaatactaaacataaaactttgcatgagctcaatcagttggacaccttgatctgcacttactgcaatcactgttaatacagaatgcagacaataggtccaattaaacttggatatctaactggtacaagtcattacttacaaaggatctcaatctgaaacttcatgaaattcaaaacctagcatactaaaatgactacggctccataaggagtaccttctaatattcagagttcgcttattcataaagctaagtacttcgaacataagggaaaattaaatctatggaatttcaagaaaa

SEQ ID NO: 814886 - DNA, 640 bp, Homo sapiens
tttccccaaaacgatcaaactaaagttaaagcctgaggtacatgccacatgagaggtaagtttctaaagctcatacctcaaaaatcgcatactgtrtaacatggagcctttgtgatgttttgcatcaagtcaatctgtaagacagtagttacaatattagtgaagacagtgggttaaaacatttgttgttcaaacatggagcaaatatcattcatgagttaggtgcctttagttgaactatggtcccattagggttcatacattaaagcaaaaattgaggtggaaagccactccgtgccttacaggataaagaggcttaatgtggcaaccaaaaaatttttagtacataagagaatttaaatgttaactataacatacaaatcacatgcaaatatagttaccacttattttagttacctcttctcaatatacagaaaaatgccacaaatctaggaggccactggtttcaaatgaccggaatccttagacctcacaccaacaatccaccatgtggtggggatggtatcgcctgactaaatgtagtcttgcagtccattcttgtaagtattagagagaaaaagagagagagcgtcatctctgcaaagtgtgaagtcagggacttccctactaggaagcattt

SEQ ID NO: 814887 - DNA, 577 bp, Homo sapiens
agttggggtgagacataagacacatactcaagatcccaagatctcaaatatcaatgagttaatttagtttggggacacatataatcaattcccaaggaaaacatggctccaaggctcctaacaaatgggaatgatgccaagataccaacatccagcagtcctacaagtggcatctacaaccatttgcagctgcatggcccatgctgactggagcaaaggctgccagaagcccagtgcgggaaccacactctgccacacagtctgctgtggggtcctgggcagatcacttctccccggcctcggggttcctgatcagcagaacacttgcagctcttgtcaggctgcatgggggagcctcacccactgaacacggctcactcccccagggctgagctctggggagaggctgtcagggccattcaccttcttccaccagataaactgaacttcccctaaagctctgyagctgggggagcctcagccatcacagagcactcagggactgcctccgaaagctgccaattctctccatgtgaccaagtggagtgaccaaggacaaccgaaaggagaacagaga

SEQ ID NO: 814888 - DNA, 460 bp, Homo sapiens
agattcctttgagctcaggagtttgagaccagcttgggcaacatggtgaaaccctgtctctaaaaaaaatacaaaaattagctggcatggtggytcacacctgtagtcccagctacttggcagactgagcctggagaattgcttgagccagggaagcagaggttgcagtgagcagagattgtgccactggcatatgccagcctgggccacagagtgagaccctgtctcaaaaaaaaaaaaaaaagtggaaaaaaaaagagacactgtgaaacccagctgtgacattggtagacttaataattaccccatatttgaactatcaccccagatgaagacaccctcaggaaaatgttgaactggggaaaataagctgtggtttagacaacttaggacaactgacacaggatttttctcactttgcctataggggcctctgtggccagcagtgtccccacctggg

SEQ ID NO: 814889 - DNA, 655 bp, Homo sapiens
aagcgctggctggttcctggctggaggttgggctggatcctcattcatgaccgaagagacatttttggcaatgaggtgataatatggwgaaagagtatgtgtaatttagggtatatatttatttcatgagcacagtggggacaagggaggcttttttcttttctttctccttgtcagtcaagcagcatgtgtgtggcagagctgggctacgaacccagagggtctgatctaagaatgccactagacaccatcactttccaagattaaaaacctgatagaaaggtcagaacaagaaactctaagacagagatgcttaagaaaagctaaacaacatgtttcttgtgggtgtcttttagatccgagatgggctggtgaagctgagtcagcgcattttgggaccctgtaccattgtccagggagctctgaaaagcatcctatgtcgcaccccgggagagttttaccacaacactctgagcttcctcaaggtaagggcagctcctgccctccactttgggagtttgggagtcagagaatgccgcccgtggaattaggaataattggttctcctttctggagccatgttccaatattaggagacggcatcggtgtaagcatccacacacacgtttctcacttccggccattctctctgccc

SEQ ID NO: 814890 - DNA, 456 bp, Homo sapiens
ttgtcacttgccaagtgaggcaaattgcagatttctgagcctcatgtccatatcaataaataatagctacctcattgcaaatggtgagtgagacagtgtctatggcgcacttagcatactatctgccccataaaagtcactcaataattatcagtacttctttccttcattagccggtctgtctcactcaacatcttgcttgtacagaacacagtggaaagcctacgtttacaaggtttgcactccccaacatctgggttgtgttgtcaaacgtcgctgaagttgtccaaaaccttgccactggattttgtttactctagagctgagtgtttaaatcccttaaattggtaacgtcagtttgacgtccatgttaatcttccacgagatttcaggatctggaattgrgaggtggctttctctaccacatccccaggtttggagccaaatgtggtcatt

SEQ ID NO: 814891 - DNA, 602 bp, Homo sapiens
cctgaggtcaggcgttcaagaccagcctggccaatgtggtgaaaccccatctctactaaaaatacaaaaattagctgggggtcatggcaggtgcctgtaatcccagctactcaggaggctgaggcgggagaatgacttgaacctgagaagtggagtttgcattgagcagagatcaggccactgcactccagcctgggcaacagagtgagactgtctcaaaaaacaaaaaaacaaaaaacaaagatacacttctggaaatgctcttgacctgccttattcgacgtttcatctgttagaaggttgagacagccaacagagaaactgctaaatctggtcttaatcctaataaatccagaggaactcgtggtgaaatcaattgatggggtccatttcaataggaattttatttagttttactgttatcaaagttacttacatacacagtttttagatttatatagtccttccagcttgttgcaaaaatatatataatttctcccccaaaatcccctatctagctcctactcccttatggataaactcttttagtgctttaaactgattccttakaactttacctccatatctctcaataaaatgct

SEQ ID NO: 814892 - DNA, 536 bp, Homo sapiens
ggcagtcatcgtacatgcctgagattctactcgggcacttaaaactttggatttgcagccagttaagaatttggatcctgttggcgtctatacagatgcactgagaatctgatcagatgaatacactcgggaccttacatttcaagttcctgccagcttaaaactataaaaacttgagacaacctcataatgcctctgtctagggatgccagatgaaatataagatgccagttcagtttgaatttcagataaatggatacattttttttagcataaggatgtcctaaatgatttttagttttagtgtaagtgcgtgccagatgatctggggtttctttggaattcagattgaactgggtgtcctgtatttttatttgctaaatcccacagccctactctggttagatttkggtcccatactgactaagttataacctctctgagcctcagtttccttctctccgagtgagatttgtagtaataactgattgcttcattatgaatattaaataactgaatgtgaagtgcttcataca

SEQ ID NO: 814893 - DNA, 524 bp, Homo sapiens
atagcaaaatttacatcataacgtatggagagaaaaagtctggtgtgctggagggaaattaaaacagatttaattgccaattaaacataaaattatagaaattataaaggccttttaaatatatacacacacacaaagatcctatagcttttacttcagaaatttagccatgaaagctgggcgcggtggctcacgcctgtaatcccagcaccttgggaggccgaggcgggcagatcacctgaggtcaggagttggagaccagcctgacgaacatggagaaaccccatctctactaaaaatacaaaaaattagccaggcgtggtggtgcatgcctgtaatcccagctactcgggaggctgaggcaagagaatcacttgaaccagggaagcggagactgtggtgacccaagatcacgccattgcactccagcctgggcaacaagagtgaaactctgcctcaaaaaaaaaagaaraaaaaaagagaaagaaaagaaaaaaagaaatttagccatgaaataaatacaa

SEQ ID NO: 814894 - DNA, 599 bp, Homo sapiens
ttaactcaaaatggaccatagacctaaatgtaagagctgaaactggctgggtgcrgtggctcatgcctgtaatcccagcactttgggagaccaaggcaggcagatcacttgaggccaggagttcaacaccagcctggccaacatggtgaaacccctgtctctactaaaaacacaaaaattagctgggcttggtagcatgcacctatagtcccagctactcaggaggctgaggcaggagaattgcttgaacccaggaggtggaggttgcagtgagccaagattgcacaactgcactccagcctgggcaacagagcaagcctctgcctccaaaataaataaataaataaaaataagtcaatcaaatttaaaactggacaaaggatttaaatagacatttctccaaagaagatacacaagtggccagtgagcatgaaagatactcaacatcattaatcataaggaaatgcaaatccaaaccacaatgagataccaccccacatccagtaggacagctaagataaaaaataaaacagcaagtgttggctgggtggggtggctcacacctgtaatcacggcacttgggaacactgagatgggtg

SEQ ID NO: 814895 - DNA, 579 bp, Homo sapiens
accctgtctctactaaaaatacaaaaattagctgggtgtggtggcatgcacctgtagtcccagctactcaggaggctgaagcacgagaatctcttgaacccaggaggcagaggtcgcagtgagctgagatcacgccactgcactccagcctggcgacagagcgagaccccatctcaaaaaaaaaaaaaaaaagcaagtgttgaagtgttgctgagggtgtggagaaattggaaccctcatacactgctggtggaattgcaaaatggtgcagccactttgaaaatcaatttggggagatgaggtggcagcagaaaagaataaaaaaaaaaaagaaaaaaaagaaaaacaatttgacagtttctcagaatgtaaacatagagttgccatatgacccagaaaccctacttctgagcctgtagttaggagaattaaaaacacatgttcacacaaaaacctatcaatgaatattcatagcagtgttattcataatagccaaatagtagaaacaattcaaatgcccttcaacygatgaatggctaaaactaaatctggtatatccatataatgggatattactca

SEQ ID NO: 814896 - DNA, 545 bp, Homo sapiens
taacactgttctccaaaacacaccattttcacttccatcgaaggtacctaagtgagagaggctttgaatcctatacaatgatgccactctccaaattaaccactcttacaataagctctactgttttctatgcttctccattcatcttgtaagcacaactttgtgacctccacaatgtaagtattttattttaaaagtcatctttaaaaggcttgtttacaacatcatctaaacttgcagttttgaggtcagagccccagtaataattattaaattgtgttacatttccttgtattttttttgtttgttttttcactgattctgccactgacctctttaagcaatccaaactagtattgattgaggtcctctcaggctaatgtgcagtactttgttcaagatacagtcattgaraaagtgctttgtaatgtgagatcttttatttacactgaaaaatatgaatattttccagttgggttgatgtgtactggcggaaaagccttaacttcctatgtagacatttatggttcattgtataaatgtca

SEQ ID NO: 814897 - DNA, 635 bp, Homo sapiens
atagcaaaaccttcccccacaccactcctactcatatatatatataaaactgtatataactataaataaygcatatataaaactatatatataactatatatataacatatatatataactttttactagtgcatattcttatgcttcgatgaaaagaacccaattctagcttgcataaaaaaagaataaataactttatgagctcatgtaattgaaaagtccagatgtgagtatgatttcagacttggctggatctaggggctcttccatgtatttaagatatggcttttattcatcatttttacactctgttcttctccatatttttgttttcagtataaaaatattttctacatatttttgtctccccaccacctagtagctgtagatatacatcctctgatttttaagtttagcagaaaattatatcttcctctaaaattaagaaaaaaaaggtagagtttatccttggagactcaatggctcagaatggctcagtctgggctatctcactgtccctaaataaaactctgatgcctggttggccaagcctggtggcatactcaactcctgacactaaacttggagtcagcttcaccaaacccagaaagactaaagatgtctccagattcag

SEQ ID NO: 814898 - DNA, 278 bp, Homo sapiens
gccccactgttttgtgggttgcagtcataacctaaaaagasagactgggggctacatgagccattcacatttttcctaaaggaaaatgtgccttgttgataagattgaactaacatttgctcaccatttaaggtatacctagccctctattaatgttttacactgacatgaactcatttaatgctcataatgaccacagcagttgggattattatctccattttataaatgagaccctcaagattcagggaagttctgaatttgtgcatttattttat

SEQ ID NO: 814899 - DNA, 554 bp, Homo sapiens
acacgtaatgaatattgactctgttatgaagtagtgaggatgccacsgatttctgaatggtttagcacaagtcacatgcctacagtttgaaatcttttgaagcgtattcaaaatagcttcattatgtttattttaatgcctgtggcagacagttggtgctttccagctatctgcatgctctgtgatatttctgcagcacctttgcagtgaattgaagccatgtgaccaattccagtcaatggatagggagagagaaagtgacatgtatcacctctgggctgaaacaggtaaaagccaggtccttttccatctctctgcccccgacacaataacagccaaggccatactccagataactcagcttcaagaggaaggaggacttcctaagtcatgtcagcttttgtgtggatgtgatatgtcaagccactgagatttaggggtttatttgttaccacagcagagcttaactttatcctgactaatagaaatatcattaatgtaaaaagcatgatgaccatgagtatggcgatgacatgaggtccaacgtatatcca

SEQ ID NO: 814900 - DNA, 554 bp, Homo sapiens
acattgtagaacacaagatttcagtgactaatctccactcttgaaagagtgctaatgttgttacaattactatgagctttgttttattcagtcagaaaaaaaaacctatcagagaaaaattgttttaagcattctgagtcagaattttgtttctttttataaagtgatgttactgatttttttctacataattctactctttaaaaaaagtaaggagagattattttgaaataaattatttgtgaatattttttcttagaaccgaatttaagaagaaagatttccaagataatgctgcttaaagtaagcaagttataggaaaaacaaattgctagcattggtatttgttgcaatttggatctaatgcatcaggtaataagagtgtatgatgttaattgctgaattattccagaccttcgaaaggcaaatcttagtgcttctatgaattatgytggattcagttggaaaaaagccctaaatggaatgatctagagaagctatggaatcatttctacgttgctcatctcactttgtcatgaaatgatctttttaat

SEQ ID NO: 814901 - DNA, 463 bp, Homo sapiens
aatgaccacatttggctccaaacctggggatgtggtagagaaagccacctcycaattccagatcctgaaatctcgtggaagattaacatggacgtcaaactgacgttaccaatttaagggatttaaacactcagctctagagtaaacaaaatccagtggcaaggttttggacaacttcagcgacgtttgacaacacaacccagatgttggggagtgcaaaccttgtaaacgtaggctttccactgtgttctgtacaagcaagatgttgagtgagacagaccggctaatgaaggaaagaagtactgataattattgagtgacttttatggggcagatagtatgctaagtgcgccatagacactgtctcactcaccatttgcaatgaggtagctattatttattgatatggacatgaggctcagaaatctgcaatttgcctcacttggcaagtgacaacatcagt

SEQ ID NO: 814902 - DNA, 553 bp, Homo sapiens
atggatgaaacactcagtaatttgaagataccttttatacgtttagttttttaaaagagtagataaccaaaatatatcaaacaagaaacagaaacaaatacacctttcaaaatgccctaattttaagtcttagctccagtgaaaaatatctaacattttaatcatgtatcagtacttcaaaagttactgtttaagaggaggggcccactaactactggtctatatgtttagtgtatgaaattacatccaaagaatgctttaggcaagaactccttcaaaagacatttttcagtaagaggcatccttcagtagagatgatggcaatcatttcccataagaaaagttaccaattccccagatttcttaaactgaagggatacttttgaaaatcacagctctttaaacaaaaaactagaatttttacaatttgcctgtgagaaagatttgagcttcttgttagggaatttgtaagaatatttggctgcattacaactctacytataagtttctgcccgtgtatatgtcactatagttttgataagttaattaccaa

SEQ ID NO: 814903 - DNA, 504 bp, Homo sapiens
tcccagacttcaaagagttgacaaagtggaactgtgagatggccaggcagccaagttcagaaggaagggcatcccgaggccctggcatggcagccaagttcagaacgaagggcatcctgaggccccagcttggctgcccacgcaaacctcatgtccagattcctgtcgttacccagctgtatacgtgggacaaaattcatcaagctgtacacctaagatggttttattatatgtcaattacatcccaaaaagttgattttaaaaagatgggccttgaggacagagagagtggggaggagatcccaagttccctccaaagtcagtgaccttcctggagccatcggccgcccattcctcgggcctggcttgcttctctggaggacacaggcatgcgtgcttgctctgtaaggacacagtggggattcggtgagatgatttacaggacagcctgagcrtggagccagcatgtgccctccgtgacaggagccactgataccacaggga

SEQ ID NO: 814904 - DNA, 540 bp, Homo sapiens
tgccagctgccttgaagaagagggaggggcagaaggaggcttagggtcctcaggcrgcccttctgagaaaggaagagggaagggaggtgtaggcgaaggaggtgggcccgtctggaggaaggtaacttctcctcctttagctgggggtggggcagaacatgggattgtcctcagacccaggccctgctcttctctgaaaacactgccagtgtcccctgcatactggctcctgcccaggtctcactcatgggaagcactgggtcaacaggaggtagggtggcacatggaagagcagctacctacacctcctcgttccctctgagtctcctctgtgcttccagctccctggggataacctccctgtcctgcctttgctgggcagcccacctggctctgggccagaggaatagcctgccttggacttgctgctcttgccagtatcttgactgcctcacaggtccctccatggcccctagctcttccatccccagtgcaaccaaatccctgtattcaatccctctggtggcagtgcctagagtg

SEQ ID NO: 814905 - DNA, 574 bp, Homo sapiens
tcaaaaccacaatgagacaccacctcatgccagtcagaatggccacagatgctggcaaggctgtggagagataggaacacttttacactgttggtgggaaggtaaattaattcaaccattatggaagacagtgtgctgatttctagaggacctagaaccagaaataccatttgacctagcaatcccattactgggtatatacccaaaggattataaatcattctactctaaagacacgtgcacatgtaggttcactgtagcactattcacaataacaatgacatggaatcaacccaaatgctcatcaacgataggctggataaagaaaatgtggtacatatacactatggaatactatgcagccataaaaaggaatgagagcatgtcctttgcagggacatggatggagctggaaaacattatcctcagcaaacgaacgcaggaacagaaaacctagcactgcatgttctcactcrtaagtgggagctgaacaatgagaacatatggacacagggaggggaacaacacatactggggcctgtcagggcaggggcagtgggagggagaacatcag

SEQ ID NO: 814906 - DNA, 574 bp, Homo sapiens
tcaaaaccacaatgagacaccacctcatgccagtcagaatggccacagatgctggcaaggctgtggagagataggaacacttttacactgttggtgggaaggtaaattaattcaaccattatggaagacagtgtgctgatttctagaggacctagaaccagaaataccatttgacctagcaatcccattactgggtatatacccaaaggattataaatcattctactctaaagacacgtgcacatgtaggttcactgtagcactattcacaataacaatgacatggaatcaacccaaatgctcatcaacgataggctggataaagaaaatgtggtacatatacactatggaatactatgcagccataaaaaggaatgagagcatgtcctttgcagggacatggatggagctggaaaacattatcctcagcaaacgaacgcaggaacagaaaacctagcactgcatgttctcactcgwaagtgggagctgaacaatgagaacatatggacacagggaggggaacaacacatactggggcctgtcagggcaggggcagtgggagggagaacatcag

SEQ ID NO: 814907 - DNA, 623 bp, Homo sapiens
ctagggagctgccaggtgaggtattaaatttagtaaaatccagctgggcgaggtggctcatgcctgtgatcccagcactttgggaggccaaggcgggtggatcccctgacrtcaggagttcaagaccagcctgtccaacatggtgaaaccccgactctactaaaaatacaaaaattagccaggcgtggtggtgggtgcctgtagtcccagctactcaggaggctaaggcaggagaattgcttgaactcaggaggcagaggttgcagtgagccgagatcacgccactgcactccagcctggacaacagagctagactccatctcctaaaaaataaataaaaataaaaaaataaaaaataaaattagtagaagccagggcaaagcctgaatagatgatttacataaaagagacgacattaagtcataaacttttccaatagctccagacatgcctttatgaacctttctcactgttcttctggccctgtctgcctccctcagaacttcttggtgttgtgttagtgtgttgtttaatcactggaataagagcttctagagagcaggactaatgtttcattttcctattccttttcaatgattagcacagtgccttgtcatgtcata

SEQ ID NO: 814908 - DNA, 585 bp, Homo sapiens
ttaatcttattaacacatagttgtattcacatattttatttttcctaggcttttttaaaattgaaatgagtaatacccctatttttgtagatgattcttggagcaggagccaatttacttgctcacaaatttgagggtaagaaattgagggaaggcacagtgaggatgggtttgtctctgtttcacaaggcagcaattggggtaactcgaattgctggggccagttcagatgcatctgcagtgatcatgcgtctgggtcttgtgatttacattgtctgtatctcttggatcttgtccagtagcctcttcatatggttaatttgggcttctcgggcatgatagtctcagggtacttaaaaatctggctttcctcaagagacaaaaatcagaaacttctaagtcttaaaccttagggatggaacttacatttccacctccctctattggttacagcagttctcatgcttagcccagaatcaacgggagaggactacacaaggacatgaatacaggaagaaatcatttattakagtccaccaatgtaacagactactaaagtttacattattaatacgaaactaataa

SEQ ID NO: 814909 - DNA, 516 bp, Homo sapiens
aataaagacagtgtaatagaagctgtaagagagatgaggttcatcagaagcatattaatgtattataaaataaggtaatacctgaagacsaaaaaatatataaactctaattaatgtacagtgtaatattttacaaactcttctatttaataggaccatatttacctgagatgattacctgatgcattatactcaatataaatatagaaaatgattttgtttttaaaataagaaatttgtcttctctgcatatatatgtgtaatttatgtttatattaaggttgcatcactgtataatgttttgaaataaaactttaacatattctgtgaaaatacatatttaaagtgaagaaaagaattaatttgcatgcaaatgggactaaaacatgatatatgagaggactgcaaccctgcctttaagatttgcttgtgacatttgtgttttaacaggcaattaaaatttaatttgtcctatgatgaaaagcaaatccttttatcctatttcagcagtctgaa

SEQ ID NO: 814910 - DNA, 627 bp, Homo sapiens
ttatatttcaggcaatagtaacaaattaaagtaataacggaggagaaagcaaatagtgtccaggaaatgtcaatgctgagagattgtaactacacagtcacattctggtttagggtttccaygtgtttgactggaaatggggattcagtatttctgggaaagagattgagaaatgcacttttgagtgtccagtattttcaaattaagtatcattatttccatcttagactgtgatttgcactggaggattcctttttgctgtctcaatttggattatatgtcactgtgtggtttatgactcagacacagtcatccgtaacattactgacctagcaacaagggaatctcaaaaactgtgctggacacaggcctgttggcatggttgtgagtccatattaacattgcctgccttacagtccgcatgcaagctggtctgcagtaccaaatatttctttttttacatctgtgtgagttgtggacctgtttttcctgcctttaactaccttgtatctcataatacaatgacttaaagataattactttcttgtgattttaaataaaaagctcattaccaaaaattaaagccacccagaaaaacataaaagaagaaagcaaaaatgtataaat

SEQ ID NO: 814911 - DNA, 621 bp, Homo sapiens
tatatatacatatgcataaatatgtttggtctgtgatttttgagtaggtatatggttttcaaccatcactgtctgcacatgaaataacacagaacttaagcattatacaaccctaattgtgaattgggaaaggaggggaatttttttttctttttcaaaatactctccttatgtctctgagtttctgaaaatcttaagtaattttcccccctttggcatcttgtcatatcttgaaggtcaggctgacagcaatgaacaagctcaatttctttctgatttcccaaggatactcactgatacacttttttctgtagtgtgattaggtccctcacattaataacagaatacagatcatctgcaattctgaatattagtctatctttaaaaaatgagggattcatttaactagtattgaagaactaatttaaaattcactagcaattcatttttcccaggttataggatagattaagaagcactgaatttaaaataagcctgaatcctyaatgcataggggaacatattaagaaactatctataggtagcttaacataaaaagagaaatttttaaattataattaagtagatattatttcttgagattctatcaactgacttaat

SEQ ID NO: 814912 - DNA, 602 bp, Homo sapiens
agcattctgccttcctgcagaagcgcctcctgccagcggagggctgctttgtcttttagtttgcttgcttggcagcttgccactggcaagataaggtggctagtaatttagtggcatcaggagaaacgaattcaggtgaaaggtagctggcatcttttctagagttgtgctccagtgatttaaaaattattttctccagtggaaaaaatgcagtcaccttatttaataagcatgtttaaacctcagtcgtaatcctgttatttatgttcagaaagaaagagaaaatgctcaccattctttagtttccagaatctcagctttggaagtagcacacatcccaaccatgactgagtcaataagcccccgatgacatagtgttggcagtgggcagtgtgtgtggtgtgggtgtgtgtgggtactcatggagagtagagagtagagacagttcttaatttggtgtgttttcttttttgagagggagtctcgctctctcgcccaggctggactgcaggggcgtgatctcggctcactgcaagctccgcctccygggttcacaccattctcctgcctcagcctcccgagtagctgggactacaggcgtc

SEQ ID NO: 814913 - DNA, 532 bp, Homo sapiens
cccatagtgtattttgtgcctcctccttttggagagtggggtagcaaaagggcggtatgtagaggagggggccagggctaaaccctgagttttacaacttgatcagcaatgagacaaaggaagcaggaaragggttgtctgcaggaacagacagcccttgtctgctattgtcgtcactggcttggaaaagatgtggcagcagctttatgaagtttccatagacagccagggatggtgatatgctgaatgacagaagcaggatctcaaagatttgagtggacaggaatgatgagttgaatctaacacaataatatttaataatagtaaatgtaagatctggcccttgggtgcaaaatattaaccaaccaatggaatcttggcttagctggatttatatccagcaaatatttactgagcatctgttctttgccaggcattgaggttgtagcagttaacaaaccaggcaggattcttgttttgtggggatgatactcacctgggcagagagaagcaaaagcaaataaacaaaaat

SEQ ID NO: 814914 - DNA, 597 bp, Homo sapiens
gtgcgggaggtagatgttgcattgacgtggtcagggtccttgtatgccagcctgagaggttgggacttggttctctgcccaccacagaggkttggtataatagcccattcagcatacttgaaactctgagactgacttttacagccagaagcatattggaaagcaccccaattgtcattgtcttagatgactcacttctattgtagtaaagcaatagaacagatattaggaatgaaaatccataaacatcaagaagaatgcgtatccatcacccataaagctgatttataaagaaaaatttgccaagaaaacttgattgcttttattgatagaatggctaaattagaagatgaaaggatcacagtagaagtcatagatcttatttcagtaatgcagctgatatattatctcacaaaattttgcttgacaaattaattcaaattggtttggcagaggagatgtcggcacagattgagagctggacaaaggctcacaaagccaggataatgacaaacagccatggctggagctgctgtgagctgcctgatgtgctactagagggatgatctgtctctggcttcactgaatcccttaatt

SEQ ID NO: 814915 - DNA, 618 bp, Homo sapiens
cctcattgtcttcttctggggctcagtgctgggacatcttcttccctgtcctcattcactccctagatgacctcatctagtctctctatgatgatatctttgaagtgactcctcccaaggttctgaagtacaaattgttttctaaaaactgtattatgtattatccttccctctgttccttctcctccttcctccctttctcttcccttcatttctttctttagaaagacagggtcttactttgttgcccaggctggagtacagttgcctgatcacagctcactgcagccttgacctcctgggctcaagcgatcctcacgcctcagcccccgcccctaagtagctgagaacacaggcatatatcaccacacccagctgacttttaaatttttgtggagacagggtctcactatgttgcccaggctggtcttaaactcctgggctcaagtaatcctcccaccttggcctcccaaagtgctggggattacaggcctgagccaccgtgctaacctgaagcacaaactcttacatccacctgcccayggggagctccacctggctcaggtctaaaaccacacccctcatctttcccccaaaccttttctcaaggtcttccct

SEQ ID NO: 814916 - DNA, 299 bp, Homo sapiens
aatctgtagagaggttgaaagaatagcacaaacatctaaagaaacttctcctggattcacctatggttaacattttgccatatttgtatcaatcaatcaatgtgtttgtctttttgtaaaatcatttgacaggaagttgcagatggcaagtcacttcatcccttatcargggtataagggattcttacatccccgtctaagaaaagaacattttcttacatgaccacattatcattgtcacaaccaagaaaatccacatggattcaatcatatcatttaatttatagtctatattcaaa

SEQ ID NO: 814917 - DNA, 253 bp, Homo sapiens
ctacttaatccccaagacaggcctgggctgctctgactctctgaccatcaagttaattttatgttgtactttcaagtctgaaaagtattattaagcattagaacactattatatgtgtctccaaggctgaagagggccactctatcttctaaagatgaagtatgacgtgtccaccaggctgcttaaccctaaayctgaaaatgactcagttcaccatgtgttgagtacaaccctcaagttaccaccatggccc

SEQ ID NO: 814918 - DNA, 621 bp, Homo sapiens
gtgggtagagatgggttttcaaccatgttgcccaagctggtctcaaactcctgagctcaagcaatcctcctgccttggcctcccaaagtgctgggattacaggcataagccacctcgccggrcctattatcactttcttttaatccttcacacgctgtgagctctgggtgcctatgccatttcacaagtgaggaaactgaggctcagcatcagtgaaggggctacttgtcaataacacacagctggcagtgtttctccaggcatgggatgagtgccctggagggtctctgggtgggggttttaggtgaaacatggacatttttataaaacatcgaggcccctcctcctctgtgaaaccatgatttcatattttcatcctcttgtagtctttctgcttaagtcaaaaagaaagtctcatattggtgctattgtgtcataaacacctctccaatgcttgctaatactcccccttctccttctccttttttttttttttttttttttcccgacagagtctcactctgtcacccaggctggagtgcaatggcacgatcgtggctcactgcaacctctccctcccaggttcaagcaattctcccgccacaacctcccgaatacctg

SEQ ID NO: 814919 - DNA, 534 bp, Homo sapiens
ctttgaaaacagttgaagcatgctgggttaggcttaggtttattgttattgatgacccctggatggagcgagaaggtcacgtgtaacgtaagctcactgtgtgttttgtatttttcttttttyttttggagacggagttttgctcttgtcacccaggctggagtgcaatggcgcgatctcggctcactgcaacctccatctcccaggttcaagcgattctcctgcctcagcctcccaagtagctgggattacagacgcccaccaccacacccagctaattttagtatttttagtagagacggggtttcaccacattgctctggctggtctcaaactcctgacctcaggtgatccacccacctcggtctcccaaagtgctgggattacaggtgtgagccaccatgcctggcctgttttgtatttttcaaatcttgccccaccactgtatttgtcctggaggcaaaatctacagcaaagagcacccagagtaacaatggcccaaccataaaaactttgggatgaaaggttcaccac

SEQ ID NO: 814920 - DNA, 619 bp, Homo sapiens
tctctccttctccattctccaataggaataaaatctacttgcctttacccaacctctcccgmaattgaatgttctttctttgcaacagatactgagtagggaaagaactcagtttatcaatgacattttcccttcctctttctcctttttggccatccttcctccttccctttcctttttttcctcttcctcattctttttagattccatggtggctatgtcacttctgtttgtatttgtcccttccagattttttaaaacagattttttcctaatcttaaattctggagaggctcattaatacacactgacttgtgacacctgagaaacattctaatttatgttagcgatgagcagggatttcaagggaagagagtgtaactgcccaatgggttcaccttgcctgctgcctagatagagctaatttatgaagatgggggaattgcaacagagaaagagtaattcacgcacagccggctgtgtgggagaccatagttttattattactcaaatctgtctccctgagctttggagatcaaaatttttaaggataatttggtagaggggcagggcaccagtgagctaggagtgctgattggtcaggtcagagatggaatca

SEQ ID NO: 814921 - DNA, 583 bp, Homo sapiens
tttaaaaaaaaataggttgtagaattgaaacacaaaatttcttgtaatcttataaagggcaaatcaatatcttaagaaaatgttgctttaacrtaggggaatgttctttagaaagggtattataaataattccctgttaattagagctaaattaatcacatacaaaattccttttttaaactccccttcatgaactttatcacaacttacaaagaccatctgtgacatgcttggactttctgacttgccctatgctacctctttcttaaataaccagccattttactttaggacaagaatttaccatacaagattgtttctcagataaaagtactcattttctttacaatcttccttaccaaaaagacatcttcatatccctatctttcttcacatctctctcccctacttactggtaactatctaccttgtttcataaataacattttcaaatccataattcaaatcaactcttagataagttttgaattagacaaaattattctttttctcaataagaacacatcttctttgacatattttacataaatctgggaagcaagaaaccctgaactccctaatg

SEQ ID NO: 814922 - DNA, 536 bp, Homo sapiens
aggttgcgtatagaggctgaagaaccatcgcgtcattcctgttttggaggtcacagactgctggctcctttctctgctgttccaacttccatgtcattataatcagtataatcagcgagtgctcctttacagaaaaagctaaccagcatttttaccagtacccatcaatatactttaaaagatgctaattatttttctattctctttataaagataaatattagtaatttttatttttgtcttattttggagtcaaacgaatgcagaggtcacaagcaaatgtgatcccagaacagttttgatctccaacatgcttaaagttttctgcccaggcacggtggctcacacctgtaatcccagcactttgggaggccaaagcaggaggatcacgcgaggccaggagtttgggaccagcctgggcaacatagggagaccgcctatctctrtagaataatcatcatcatcatcattagtaaaaaagttttaaaattacttgtcaacacttaaaaaccagaagatttctatttttaaaaata

SEQ ID NO: 814923 - DNA, 457 bp, Homo sapiens
gttgtcacttgccaagtgaggcaaattgcagatttctgagcctcatgtccatatcaataaataatagctacctcattgcaaatggtgagtgagacagtgtctatggcgcacttagcatactatctgccccataaaagtcactcaataattatcagtacttctttccttcattagccggtctgtctcactcaacatcttgcttgtacagaacacagtggaaagcctacgtttacaaggtttgcactccccaacatctgggttgtgttgtcaaacgtcgctgaagttgtccaaaaccttgccactggattttgtttactctagagctgagtgtttaaatcccttaaattggtaacgtcagtttgacgtccatgttaatcttccacgagatttcaggatctggaattgrgaggtggctttctctaccacatccccaggtttggagccaaatgtggtcatt

SEQ ID NO: 814924 - DNA, 647 bp, Homo sapiens
attggttatagccacagctcatgggttgagttttrttcactgttgtgttttctacagccaaggtacagcaggttcatctggaatatgttttgttttgttttttaaataaggggtcattagtctgatgggctgatttgaacgatgaattccatgtcaaacaaaactcattgtctaccttctgaatcccaggccctcgactgagacacagaactgagggtctttcttttcatagtgattgcatccctgcggttcttccctcttccagacctccaacctttacctcctcctccttttctccctcatttgtactggatgccagtctctgtccagctctctctggagataaagactcgctttagcatacagcacactttccttaatgcaaccgagttcactctcatcattttaatagtggacctaaggtatgttgccatgtgaacaaaccatcacgtcgccatagcaaccagccagattgcagcacaccagtctgaggactggacctttctctctgtctctctcctctctcttcttcttcgcctgggctctttctttagttaatttgctgaagtgctcacaataggaagattcagtctgctttttcaagcggggtttcgtttaaacctataaattgttgtataaacagaaag

SEQ ID NO: 814925 - DNA, 670 bp, Homo sapiens
tgtgtcctaatgtatgaaaaaaaaaaagataaaaaagatattcagctcagcaagatgatctcagtgaggcyactcagaggaaagaaagcagtttctctctctctcttgctgacagtgcagaaactttaattcctgtaagttaaagggatatagaatgtatctgcactgctttttccaccagttacatcctaagcctaaaaaagtaggcctgctccctctctgttctgcccctggacacatatctcatgtgaaccctgcactgggatgaacagcccaattttgctgaactctaaactgagttccaagagtttcctcctaaattacaagtggagtcacgctttttccagaactgcccatctgaatcagagcctacgtggtacattttccaaaagctggggccagaacacctgggcattattcccggactgaatttccttctaggtgattacggtaggtctgtggtttctgatgtcagaaggagatgggggcaggacttacctccttcaggctctgtcagaaggtgggacacagacgctgcacagctctggcctgggggtgcacaggtccctcccggctcagcctgctcagctttgggtgatgttcccacagtggccaggaccgtgcggcctccacggccagcacaaatagcgccatcatcaacgaccggctc

SEQ ID NO: 814926 - DNA, 670 bp, Homo sapiens
tgtgtcctaatgtatgaaaaaaaaaaagataaaaaagatattcagctcagcaagatgatctcagtgaggctactcagaggaaagaaagcagtttctctctctctcttgctgacagtgcagaaactttaattcctgtaagttaaagggatatagaatgtatctgcactgctttttccaccagttacatcctaagcctaaaaaagtaggcctgctccctctctgttctgcccctggacacatatctcatgtgaaccctgcactgggatgaacagcccaattttgctgaactctaaactgagttccaagagtttcctcctaaattacaagtggagtcacgctttttccagaactgcccatctgaatcagagcctacgtggtacattttccaaaagctggggccagaacacctgggcattattcccggactgaatttccttctaggtgattacggtaggtctgtggtttctgatgtcagaaggagatgggggcaggacttacctccttcaggctctgtcagaaggtgggacacagacgctgcacagctctggcctgggggtgcacaggtccctcccggctcagcctgctcagctttgggtgatgttcccacagyggccaggaccgtgcggcctccacggccagcacaaatagcgccatcatcaacgaccggctc

SEQ ID NO: 814927 - DNA, 649 bp, Homo sapiens
ctttgccactaggcttggggtgatttaccatctaaattccatcacaagtggctctggctttgtagaacacagtacacaggaggggcacccgaaagcaaagacgaccttctctactccaaaaatcaatcgtccacctttggcaaattctccttctcagattcatgcttggtgctcatgggtactcactctactttcctcccttgctggacaattaagcagtaacaatatcttgttggtcccacacacaccacacctttggtctcttggagaattttcagccgtaccaatggcaacctctgagtgacatcttaatatgatcagatgtgatgacagtttagtaacaggttctcatttttggctcaccagcttttcggcctacatatcatcagaataagactgaggcacattagtgaaatctcaatagtaaacaagcaggtactgccaataaaagagaaagcattcttaaactgattaaaaaaaaaaaaatttaaagagcactttaatcaccatcacatgactttcattcataccaccttttggggcatcagttcataatgcagaaaagatgaargagccatctaaaggaaataatgttaacaactccgttataaaatatctgaagcaataccttgccagttgtcatcaatgc

SEQ ID NO: 814928 - DNA, 630 bp, Homo sapiens
atgggcccgatggccgcagctgggatccaccggacactgcagtcccccaggcttcgggtctttgcctccttagtcacctgtgaagcacctcctatgcgccagctctgcccrtctagggagaagcagcacagcccggccacccgaggcctcctgtgcgcttccccatctgaggtccgtgatcagaactgcgggcttctccgcagaggtcggggcagtgacaggacagccgcgggcttctcctcagaggtcggggcagtgacaggacagcctcagcctctttagacgctgccttcagggagcagtgaaagagggagggagagacagagagcacccgggcgggtctcccagccacgccaggcaggtgggcaggatttatgtgccaggtactgtgctggctatcaccggggcctggtggtctcttggagtcacaagcagccgcctgagatgaggtttatgattttgagttagaataggactgaagcttattcccagggggctggccgggccggctctccctgcccgccggcatctccactgcctctgctgtcctgaagctcttatgagggttcacattactaggacgccaatgtgggttctcctctgggctctggcccccaaggcaccccaacc

SEQ ID NO: 814929 - DNA, 630 bp, Homo sapiens
atgggcccgatggccgcagctgggatccaccggacactgcagtcccccaggcttcgggtctttgcctccttagtcacctgtgaagcacctcctatgcgccagctctgcccgtcyagggagaagcagcacagcccggccacccgaggcctcctgtgcgcttccccatctgaggtccgtgatcagaactgcgggcttctccgcagaggtcggggcagtgacaggacagccgcgggcttctcctcagaggtcggggcagtgacaggacagcctcagcctctttagacgctgccttcagggagcagtgaaagagggagggagagacagagagcacccgggcgggtctcccagccacgccaggcaggtgggcaggatttatgtgccaggtactgtgctggctatcaccggggcctggtggtctcttggagtcacaagcagccgcctgagatgaggtttatgattttgagttagaataggactgaagcttattcccagggggctggccgggccggctctccctgcccgccggcatctccactgcctctgctgtcctgaagctcttatgagggttcacattactaggacgccaatgtgggttctcctctgggctctggcccccaaggcaccccaacc

SEQ ID NO: 814930 - DNA, 630 bp, Homo sapiens
atgggcccgatggccgcagctgggatccaccggacactgcagtcccccaggcttcgggtctttgcctccttagtcacctgtgaagcacctcctatgcgccagctctgcccgtctagggagaagcagcayagcccggccacccgaggcctcctgtgcgcttccccatctgaggtccgtgatcagaactgcgggcttctccgcagaggtcggggcagtgacaggacagccgcgggcttctcctcagaggtcggggcagtgacaggacagcctcagcctctttagacgctgccttcagggagcagtgaaagagggagggagagacagagagcacccgggcgggtctcccagccacgccaggcaggtgggcaggatttatgtgccaggtactgtgctggctatcaccggggcctggtggtctcttggagtcacaagcagccgcctgagatgaggtttatgattttgagttagaataggactgaagcttattcccagggggctggccgggccggctctccctgcccgccggcatctccactgcctctgctgtcctgaagctcttatgagggttcacattactaggacgccaatgtgggttctcctctgggctctggcccccaaggcaccccaacc

SEQ ID NO: 814931 - DNA, 476 bp, Homo sapiens
agagtgaagagacaccccacagaatgggaggaaatattttcacactactcrtctgacaagggattcataaccagaacatataatgagctgaaacaactctataggaaagaatctaatcatctgattaaaaatgggcaaaagatctgaatagaagtttctcaaaggagacacacaaatggccaacaggcatctgaagaggagctcaacatcactgatcgtcagagaaatgcaactcaaagctaccatgagacatcacctcaccccggttaaaatggcctttatccaaaagacagacaatcacaaatgctcgcgaggatgtgggaaaagggaaccctcgtaccccgttggtgggaatgtaaattaatacagccgctatggagaacagtttggcggttcctcaaaaagctaaaaattgagctaccataggatccagcaatcccactgcttggtatagacccaaaagaaaggaatccatc

SEQ ID NO: 814932 - DNA, 504 bp, Homo sapiens
cacaggctgggacaggcctgcaagaatggccaggaggggcctcccagggtcgaggcatctgagcagcaccctgcaggacgggcaggcccctcatgccccgggcaccygcacagggcctgcgatctcatgcattcgaatggtgccgaatgggccagggtgtcctgggggatcctgtcgggcgccctcctcagctcttccactttccacagtaagtacttcgatagtatggctcatggtcaccccaagtccccgagaaggaaagagagtgacgccatggagatgggaggtcggccctgcaaagggcaccatagtcctgggcactacttctcctggggaatgggggcttgggcaccttcttctcctccttcctccctccctccatcctccctctctcccttctttctccctccctccctcctccctctgacttacacccccaaattgccagtatcgccccctccccagttgcaacaaccccaaacattcagatattgatttgtgttt

SEQ ID NO: 814933 - DNA, 517 bp, Homo sapiens
aagccctcaatgcggtttcaggctccaggcaaggctcagctgacagtagctgaaaacagcaatttcagccgcagagttgcccgycctgtgcaccacagaacgaacaagggtttccagctttgctcagatttgtggggaccactgggtttggactttaggaaaagctcatttgcctttaggcagaagtgaccggagctggggtcacctgaggtctgggcaggaacctctcgatggctgatgcaggacctggggaggggccatctgtgtggggcagctctggactcagacccgtggatacctgtgaaacctgtcaggctgagccaccatccagcaagtgaagagaccgcaactgggccactgtggagtcacttggccaccacccccgggtcctcatagccctcatgtgtgtcccaaccgcgagcaggtggccgacagtgcaccctgacaaggcacgtgtgtaccatcggggacacctgcttctttaaagtgaccggatggtgcccaggaccacaagaac

SEQ ID NO: 814934 - DNA, 517 bp, Homo sapiens
aagccctcaatgcggtttcaggctccaggcaaggctcagctgacagtagctgaaaacagcaatttcagccgcagagttgcccgccctgtgcaccacagaacgaacaagggtttccagctttgctcagatttgtggggaccactgggtttggactttaggaaaagctcatttgcctttaggcagaagtgaccggagctggggtcacctgaggtctgggcaggaacctctcgatggctgatgcaggacctggggaggggccatctgtgtggggcagctctggactcagacccgtggatacctgtgaaacctgtcaggctgagccaccatccagcaagtgaagagaccgcaactgggccactgtggagtcacttggccaccacccccgggtyctcatagccctcatgtgtgtcccaaccgcgagcaggtggccgacagtgcaccctgacaaggcacgtgtgtaccatcggggacacctgcttctttaaagtgaccggatggtgcccaggaccacaagaac

SEQ ID NO: 814935 - DNA, 517 bp, Homo sapiens
aagccctcaatgcggtttcaggctccaggcaaggctcagctgacagtagctgaaaacagcaatttcagccgcagagttgcccgccctgtgcaccacagaacgaacaagggtttccagctttgctcagatttgtggggaccactgggtttggactttaggaaaagctcatttgcctttaggcagaagtgaccggagctggggtcacctgaggtctgggcaggaacctctcgatggctgatgcaggacctggggaggggccatctgtgtggggcagctctggactcagacccgtggatacctgtgaaacctgtcaggctgagccaccatccagcaagtgaagagaccgcaactgggccactgtggagtcacttggccaccacccccgggtcctcayagccctcatgtgtgtcccaaccgcgagcaggtggccgacagtgcaccctgacaaggcacgtgtgtaccatcggggacacctgcttctttaaagtgaccggatggtgcccaggaccacaagaac

SEQ ID NO: 814936 - DNA, 622 bp, Homo sapiens
caggctggagtgcagaggtgcaatctgagcccatttcaacctccgtctcctgggttcaaccaattattctgcctcagcctgctgagtagctgggatgacaggcacgtgctaccacaccagttttcactgctatgtcatattccactatatgaatttattcatttcccttttcctcttcaaaggaattttaattgtttctttttttttctattgtgaaatttcttatacctatgggtgagactttctgtagcctatgtacctaggagtacatcctagagtacgcaagtgttcaaatttgcaagagaatgtaaattgacttctaggtggatatactattttacatctccatgaaagatgcatgaaaatctctagccctaatattagaaacaaggcaaggatggcagtcttatcacttatattcaacattagcaatgctagccagtgatgtaaggcaaacaaaaaaaagaaagccataaaaagaagaaatgaaggaggaaaactttctacttgcagagaccatgatcgtttacatagaaaatctcaaccaatttgcaaaacaaccagaactaataagtaaatttagcaagtccataggatccraggtcaaaatacaaaaatcagt

SEQ ID NO: 814937 - DNA, 426 bp, Homo sapiens
ctgcaggcggaggttgcagtgagccaagatcacgccattgcactccagcctgggtgacagagcgagactggaaaaaaaaaaaaaaaaaaaaaaaaagctcagtttacacttttttgtaagaatgaagaaaacacagtgtagcttagaagaaaaaaaatccctagccttaaagtttctagttcctgctgtcactattttatgacctgaccttgggcaaacccttggttgtagaatcttgtcttaactctttcccgctccagtcacagctattcagtggctccccacagcccttagatagaattcartctccttatcataccctcaaagaccctggccctgctagtttcttatttcctaccattcttccgtgtcaccatatcttctaggctcacccatttactgactgttcctcaaaggcaatgctat

SEQ ID NO: 814938 - DNA, 578 bp, Homo sapiens
aagaccccccgcatgtatttgctgtttatcctgatgctctccctccccacctgaaccttctgacaggccccagtatgtgwtgtcccccacccacatgtccacatgtttacagatagactctgtacctctgtaaatagtctatctgataggccaggtgcggtggctcacgcctgtaatcccagcactttgggaggccgaggtgggcagatcacgaggtcaggagattgagaccatcctggctaacacagtgaaactccgtctctactaaaaatacaaaaaattagccaggcatggtggcggccacctgtactcccagctactcgggaggctgaggcaagagaatggcatgaacccgggagggggagcttgcaatgagccgagatcacgccactgcactccagcctgggcgacagagtgagactctgtctcaaaaaaaaaaaaaaaaaaaaaaaagatagagtttttacagaggcaaagaataatatcaaataatatcacattcagaggtactgggggccaaggctttaacataggagttgggggaacacaccattcaattcctaattattctaagaatg

SEQ ID NO: 814939 - DNA, 614 bp, Homo sapiens
tataaagattataaaattaggataatgttatatataccttgtggatatacaccttgtggtgtgtgtatgtatatatatatatatatatacatacacacacaccttgtggagtgcagtgtagaagtaaacgagacaaggcttgcgaaaactcagaacattatgcatagtgcatggtacatctcctgaaatgtacattcccatcagagaagatgctgtggctgcctgcttcttatctcccagatcagatttagtctaccttctttttcttggacacatggtcactcaactcagaactagatttaccagccttcctggaagccacatttggccatgagactgatatcgcaccagtgaaataatagcaaaagtgatgtgtcctatttctgctttacctgacttgctttaaaaaaagaaatccttgttctaggtctcctctcttccctcttcccccaggccagaattacacagtgacagcaaccaactataacaatgcagatgaggacaagatggtaagagtcatagtgcaacaaggttggaggaacctggstcctggagtgaccactcggagtagagctgcccaccaacctggattactctccttgggtcatgatatg

SEQ ID NO: 814940 - DNA, 594 bp, Homo sapiens
gctacgactaatgactcagttactaattcccttgaggatgaacaaccagccagttacctggctttatttagtatctattcctaaagccacctgtttaattaaggacttcttgtgcactttggactacaaasatgtgcaggtgttataactaggaagccttccaatcccctaggcatcttaagtgtctctgcaaaaccaagcataaagttagtgcccatttaatactcactgattgactgatttgataaccaactgatttaataaaagcaataaacaaagaagagtacctattgaaaaagaaaacagccctgagtcctaaagttaaaagaagcaagatatattcagttagctcattttataaaggcagaagagaggagggaaggagggaaaggggggaaaggaagggaaggagagaaagtgggaaggaaggaagaaaattgccttgtatacatccagcataccaaacactagggataagcattttcatttgggttatttcatataatagctactgtaaaactagaagtaagtcctgttattagtatcatttaacaaatgaggagagaatccgagagagaaagctattcactcagc

SEQ ID NO: 814941 - DNA, 613 bp, Homo sapiens
tgatatgttgaccaggctggtcttgaacttctggcctcaagtgatcctcctcccttggcctcccaagaaaataaaaacttttaaagagagacaaggatatgatcaggaacctatatcttaaaaaaaaaaataagatgattattcaaccatttaaactagtaaggtgatttttttcttgtggcagaggctaggcagctgtgcctccaaaattcatttgaaaactttttggttcagtgattattcagcaaaccagatgatctatgatatggcaggtcaaggagaacagaaagaggtgaaatgccatagtttcaatgcagttcagtcctgcagacccactctggaccaggatgggggaagagccttgcaggtgtcttcttaaacctgactcaatttactgtgtattctgtgcaaacttcagagggagaacactgtgcttttcttcccttttatccaggttctcatagtcgttttattatctcctgctcataatatgtagagacaaatgccttgggaagggtagtaacaaggctgtaaatccagtggaggaaaggactsttcactgttttgaacagtgaacaatatgcctactgccattactggcagataaaataca

SEQ ID NO: 814942 - DNA, 578 bp, Homo sapiens
gatcagagaacaacagtactaatgataatagctaacatttgttgaatgctaactgtgtgccaacactgtgtttagtccacacatgaaaagatgttcaacttgattggtcaccagggaaatgygaattgcaaccacaatatgatagctctacagatgcactagaatggctaaaatgaaaacatcagaaaaatactaagtgttggtaaagatgtggagcaactgaattctcatacactgctagtttggatttaaatgggaacaaccactttggaaaacttgctggcagtatccactaaagctgatacctctgatccagaaattgtaaatgtatgttcaccaaaagatgagtacaagaattttcatagcaccactctatttgtaatagctccaaactggagacagtcccaatcttcatcaacagtagaatggataaataaatcatagtctatttgtaacatgaactattacatagcaatgagaatgaatgaactctaactacacgtgacactatggatgagtctcactccttatagtaaccctatgaagcagttcctatgattactcccattttactgata

SEQ ID NO: 814943 - DNA, 525 bp, Homo sapiens
tcattttcacaatgttgattcttcccattcgtgagcatagsatgtgtatccatttgtttgtgtcatctattatttatttcagcagtgctttttagttttccgcgtagaggtctttcccctacttggttaagtatattcatatgtattttattttattttatttttttgcagctgttgtaaaagagattgagctcttgatttgattctcagcatggttgttgttggtgtagagcagtgctactgatttgtgtacattaattttgtaacctcagactttactgaattcgttcatcagatctaggagccttttggatgagtctttagggtttcctaggtatataatcatataactggcaaacagtgacagtttgacttcttttccaatttggatgccctttatttttttctcttgctggttgctctggctaggacttccagtattatgtcaaataaaagtggtgaaagtgggcatccttgtcttgttctagttctcacagggaaggctttcaacttttctgcattcag

SEQ ID NO: 814944 - DNA, 571 bp, Homo sapiens
tggctcttggcagtgagagagaatgtatgctggggagctgcattatccagatgtccttagtttttacctagtgttcctttttcattctaggatctcatccaggataccatagttcattagtcctcacgtctccttagggtcttcttggctgtgaccgtttctcggactttccttgtctttgatgaccttgacagttttaaggagtgccgatcagctattttgtagaatatctcttagtgagatgttaggaagaaataatgatagggcttggagttgtgttgggtgatttgggggaggattcaaggaagtggttctttgctccagattggatgcttccaggaagcaggggtcattctgtatctgggtatctgtattagtttccaactgctgccattatgaaacatcataaacctagtagcttagaacagcaaaaaattatctyacagttctggaggaagtccaaaatcagattcattgggttaaaatgaaggtgccagcaggtctggttcttctcccctggaggctccaggggagaacctgtcttcttgccattcccagctctggatgccac

SEQ ID NO: 814945 - DNA, 644 bp, Homo sapiens
acctcctgggctcaggtgatccacctcagcctcccttgtagctgagattacaggtgcacaccaccatgccaggttaattttttgtttttcagtagagacggggtttcactatgttgcctaggctggtctcaaactcctggactcaagcagtctgcccgccttggcctcccagaatgctgggattacaggcataagccaccacacccagcccgtgctttctttctttttttttttttttttttttgtgagacggagtctcgctctgtcacccaggctggagtgcagtggtgcaatctcggttcactgcaagttccacctcctgggttcatgccatcctcctgcctcagcctccctagagctgggactacaggcacccgccaccacacctggctaatttttttgtatttttagtagataccgggtttcaccatgttagccaggatggtcttgatctcctgaccttgtgatctcctgcctcagcctcctaaagtgctggaattacaggcgtgagccaccgcgcctggtgcccatgctttcattattttttaaaaatgctatttatttttaaacatcttgtgtctgcaatraaatgataaactcttcaagggagggccatatattgcattcttcttccacgtatcagt

SEQ ID NO: 814946 - DNA, 626 bp, Homo sapiens
cattttgagaggatcaagtatacttgaaaaacccaaataagaggaaatttgggtacctttgagaggaaagaaagcccttctttacctcaattaaccaggaaattcaggcaaaaccaccagtattccgccagaatgacaaaagtaattgaagttacatatatatgttacaagaaaatagatgcttctttgaggatgaaatttaagaagtaccttaaagatgattcaaagatgtatagcttcaggcacaacatcagaatttgatttcataagggacaacctgagtgtgaagaactcactatagtaatgtttcaaaagtgaaagtttggggaaatccaagccatcccactccgcttaactcccatttcccagagctcagtcccctgccatggaagggaggtctgcaaggcactggttggactcagttctactcttagccgagctagctcaggacccggtcgattgcagtttttgcaaagacaaacctgatggctatattgtaaccaatgtatctctktattctgtcttattcctgttggtactcatatttgcagccagggataaaggtccttaaatactttttgtagcatttcactgttttgcgagatcagaataatagcatagagggc

SEQ ID NO: 814947 - DNA, 590 bp, Homo sapiens
gtattccactttatctcaactcttggcctattatttctttggcattaaatttctttggcatttctgtatttttttccccatgtcaacaaaatgcttctttcattcctcacaatatatcttcaaataataattcttcatgtaaaatgtgagagccttaaagtaatgtgctatcatgtataacttcagtcatttgtgttattgctgccacacattttatttctacaaatattataaaccccacaatacatcggttttgcatttagataagtcaattatattcttaaatgagaaaatatactttactatttatccacaatagtaaaagtcttttagattttggaagcaacacataccacatttcagtgtgtgactttgactcatttacagaattacctgtagatttcaagtgagaagaacaaaagaaagtgagttcagactgcaggttaagctaatccaccacttggggcttatgatccagcagacccatagattgtcaaactgtccatggcaaatarggatgctctacagagcatctggcaagcaacaataggacaaaaaaaaaacactacacagatgtgtaagattttgaa

SEQ ID NO: 814948 - DNA, 593 bp, Homo sapiens
tccactcacttcacgtcaagcgattcccatcattgtttcactgatggagaaaccaaggcccagggcacttggggcaaggcgttcagggggctttcggtccggaagcagcgtcggggcgggaattcgaaccctgggttcccacactggcccgtggcagggcccccaagccttttcccaaactgatcacagaaagtgacgacccgttcgcccggcggaccgggggcgtcgggcaggtcctggtccaagtgagtgcccgcccctgccctgggctggcagagttcttcccccagctgcaggtagacgtgggaacccggcagggtacggagctgctggcgcggcacgctgattagaagcggcgactgcccgtcaagcattcgcgcctctcccctcccttgactttcttggcagggttaagggataagagaaagtggagttgcctcagttctgggagagcccgtttgtgggtccggcacaggtatccatcgggactkacgctgcaaaagtcctcttgtgaaacaaggaataggctcgagtcttcgattgggtcgagggagacgtcaatcaatggatgggcgtgtgcaaacgcaacacaa

SEQ ID NO: 814949 - DNA, 549 bp, Homo sapiens
tatatatatgtgtatatatatatatatatacacacactaatcagccgggcrcggtggtgtgggcctgtaatcgcagctactcaggaagctgaggcaggagaatcacttgaacccgagaggcggaggttgcagtgagccgagatcatgtcactgcactccagcctgggtgacagagtgagactccgtctcaaaagaaaaaaaattctcccttggccgggcttggtggcttatgcctgtaatcccagcactttggaaggccgaggcgggtgggtcacctgaggtcaggagtttgagaccagcctggccagcatggcgaaacctcgtctctactaaaaatacaaaaattgtccgggtgtggtggcgggcgcctgtagtcccagctactggggaggctgaggcaggggaattgcttgaacccgggaggcagaggttatcgtgagctgacattgcgccactgcactccagcgcggaagacagagtgagcaaaaaaaaaaaaaaaaaaagaaaaaacaaaaagaaaaaaatctcccaaggcagtcatgcatttgt

SEQ ID NO: 814950 - DNA, 622 bp, Homo sapiens
tccttggcattgctgttgtgggtagtatagtgactatctctgaggaacagcacccaatttctctttaaagaattaccctcccccattgtgtatagtcttcttgaaattgtaaatcaggtcctgccctccsttagctgagacataacaaaactctctccttgattttgaaaacttgagtaaagtgtccaaagagcagagaaatcaattggtgctcaccattcttgctgtgtcattaagttccttggaatgccctggtttctgttcttttaacttagccttgttatcaagccttctcaacacctatgaactacccagtatccttctaaatcaccattttgtttaacaagtcttttcaatatctggtacctacaaacagacaaatgaacaaaaactaatacttaatataccaccttcattgtctcattgcataaaagagttccttcctgtgctcaccccagattctcctccagtttctgcactaggaaggtatgcatagccattgcagtatttaaaaaaaaaaaaagaaaagaaaaaaatgcaagccacacatgtaattttatattttctagcagccacattttaaaaagtaaacagaaacagatgaaattagttttaaggctat

SEQ ID NO: 814951 - DNA, 489 bp, Homo sapiens
ggggtttcactatattggccaggctgatctcgaactcctgcccttgtgatccacccacctcggcctctcaaagtgctgggmttacaggtgctagccaccacacccggcctcttctcgatagatcttatttggctgacaacgaaagctgttgtgctggtagcatcatccctttgcatgcaaaagataaactgaaatctaaagtagccatatccttccggccaggtttttcaagtggttactctgttctgatcattgtcatgacaggaatagtgaaaataacaataaatcatttttctttaacgatccatttactgtatgctgggcactgcacaaaatggtttacatggtttatcttgtagcgttccatttaagtctgctaagagtagatgctatcattctctccattttacagataagaaaattgaggcttagagaaattgagtaatttttgccaatcctgagacttgaatctccgctctgtcttctgca

SEQ ID NO: 814952 - DNA, 548 bp, Homo sapiens
gactgaaacagggtatccagttaggaagctaycacagtgatccaacccccagcttctgttgaggttgaagaacatgcatgcccaacctaaatatatgttcaaaggtggttattactgtttgaggtgatgaaagagttttggagatagaagtgatggttgttcaacatcatgagtgtaattaatgccacggaattgtatccttaaaaatgcttaaaatgcgctgggtgcggtggctcacgcctgtaatcccagcactttgggaggctgagatgggcggatcacttgaggtcaggagttcgagaccagcctggccagcatggtgaaaccccgtttctactagaaatacaaaaattgggcgggcattgtggtgggtgtctgtaatcccagctatttggaaggctgaagcaggagaattgcttgagcctaggagtggaggttgcagtgagccaagattgtgccactgcacttcagcttgggcaacagagtaagactctgtctcacaataaataaataaataaataaataaataaataaataaataagagttg

SEQ ID NO: 814953 - DNA, 565 bp, Homo sapiens
agaatggagtggcatctccccacctgctctggagtcatgtgtttgcttctggaagggaggcaagaggcattcaacctcctgttaatttggttgctccttcagatacgctcttcatggtacagccctgagctgcatcatttaaagaccaattgttaaggaccaatctgagggcctgtgcattagttaaaactccttatctggtcatagagggtggtgtggtttggacgcgttccccttgtctgtgcaattcccaacagaggcaagtgcgcatttgagacaggttgagggttcaagctgtccaatccctgctcatctgcagcacaccaaggaatgtggactaatgaaaaataaactgcatgcatgcaatgcccatcacactgcctgcattttctaatcttcacaataactctgtgttgagaaatattcctgtctgtaatcccggcactttgggaggctgaagcgggcagatcacctgaggtcaggagtttgagaccagcctggscaacatggtgaactccccccaaccaacgacccttcccatatctactaaaaatacaaaaattag

SEQ ID NO: 814954 - DNA, 474 bp, Homo sapiens
aatctgtgtctgtgtttggatcaacagccctggccaccatcttgattcatttctcttatctgtaattctatggagggaggttccattgtatatttttttctttcaattacagtattatttgtatattggaagcctattgtactttatctgtgtaactgtcgtagcagctagaggctagtaggactggctgaaatgtcagaggaaggagggaagaaaagggagaaaagcaggacaaatgaacgcagattaaggaaaataaaaaagagtgtttggctaacttgcataaaaaggatctcatttttctttgtaacacattactacatacagtgaccatagtgtttctctaatttcttcaggacktactttgaagatgaagaagtatgtgtatccgctttttgtctttcagaataacatactgctgtctgtaaaaatacagataatttctctcttaaattccataagctggagacactg

SEQ ID NO: 814955 - DNA, 534 bp, Homo sapiens
ctgaggcaggagaatcacttgaacccgggaggtggaggttgcagcgagtcaaggtcacgccagtgtactccagcctsggtgacagagcgagactccgtctcaaaaaaaaaaaaaaaaaaaaaaagaaaaagaaaaaggtgtttggaagccatgtcccatgaattccaaatacaattgaggactctataaaggactataaaaaaagttgtaataaattatgcagacccctcagcagttgactcacctctctggtgctccaggtatttctcagcgtgttcggggtctccctgtgttacctggacagctcctgccatcattagcacacagccaagattcctcgaccacccatgactctggatttatcatcctcaagaattgggggctgtggaaaagatgccaaatttgttcttttcagatttaggttcttctgtgataaaaatagacttggtaaagaagcagatatttctttaatacgtgtatatattagactgtgaatttattcatcttccttattcatcatataagtaaattata

SEQ ID NO: 814956 - DNA, 582 bp, Homo sapiens
aagaaaatcccataatctcagtgtcttaataaattaaaataacttatttataacaaaatgtctaatgcaaatagggctccttcatcttgtagttactctagaacatggggtctctatggtcacctatggcatgggaaaagggattgaggtgacattcagctctttgctcagcccaagaatgaaactcatcacatctgttttcagtccagtgaccaatactagtcatgtggccccagcataactacaggagaggctggagaatatatgggaacctcctcacattcaccaaatggaatctttggtgaattctaaagattcccggcatgtcccactatctccttttggggctgagaaaatgaaagaaaaaactgacaggccaatgtactgactgctctctcacctgggtctgatcccatctgaagctactttgggtggttatcacaatgtagtttatcatagtgctgtggaatatgaactatgaccatagccagccctatattytagaaccagcatctccatttgtagctatgggtgcttggacaaacacttcaatgttctccatctcagtttcctcatctgaaa

SEQ ID NO: 814957 - DNA, 574 bp, Homo sapiens
ctcgaactcccgacctcgtgatccgcccgcctcagcctcccaaagtgctgggattacaggcatgagccaccgtgccagccacacatttaaaataatgataatagtaagccccaattatactataaaggaacaactaatttagaataggaggtctaggtcaatatgcaaatgcaaatactctggcgcaacccccctggaaaacataatgaagtggtcccgccagagtatcctcacacagggtcaccaccaacacattgcatcagctgccatgcagacgaacacaggtctgttttgcattgtcacccaagtgacattcagtattgccattggttaggcaattttccagaattggtgagattctgaaccaaacaaaaaacaagatcacctcttttgacacagggtctgcattgtggtgatgtgtggaatatgttcatctgtacraaaatatttggggtttgagtgtaaaatcgagttgggttctagactcagataaacaagattttttttctcccccacccaaagactgtttatcagggtcattcgaaatgtatgtggggcaactctatgtagtcag

SEQ ID NO: 814958 - DNA, 598 bp, Homo sapiens
cttcttccaaacccctgttaatgttgatattttggcctcttatcatgaaccaagaatgttcttaatggcatctagaacagtaaattctttcccgaaggttttcastttactttgcccagatccatcaaagaaatcatatgccagctatggcctacaaaatgtatttcgtatctcataagctatagttttacaaaatgtcttttgaaagtcaaaattactccttgatccatgagttgaaaaatagatgttgtgttaccatacacaaaaacattactcttggacatttccgtcagagctcttgggtcactaggtatattgtcaatgagcagtaacattttgaaatgaacctttttttcctgagcagtaagtctgagcagtgggctcaaaatattcagtaaactatggtgttaacagatgtgctgtcatccagattttgttattccatttatagagcaagattaaatttcagaatggccaataagcatttgcttcaattttaccccctaaccagagagtctgcctattctttgaagttttgaagccaggcattgacttaatctctagctatgaaagtcctacacggcatcttctttcaatt

SEQ ID NO: 814959 - DNA, 580 bp, Homo sapiens
ttcaggacccgacgcgcatgaggtgtgctgtgaatgtgagygcccatcccttccctggagcggcacccgcttccctcatcttgccaagtgccactgtgcaccagccccgtggccagcagcagggacaagacagtgaacaggggaatggacacagtctcgctcacaagtagtgtatggcccctgccttcctacccacctgcctaggaagcctcacacacactcttgcgtgctggatacctgtgtttgtgttggagacccctgggatctttggaaaatgaatgagccagctccagggtccctgggagagtgtcaggactagctggcaagaggactccagattgggaagaggatactgggcatgggtgaggctgcagaaagtggctggggtgccaggctgtggccactgggctgcagcattcccggaactgccggctggcgttgctcccaaacatattctgcattcgttcactccgagtcttcactgtgccagacacggttccaggccctgggtggtccggccaggaacagaagagacaagtaaccacgaggaagaaagcagggacacgtgggggttgctaag

SEQ ID NO: 814960 - DNA, 534 bp, Homo sapiens
aggttgcgtatagaggctgaagaaccatcgcgtcattcctgttttggaggtcacagactgctggctcctttctctgctgttccaacttccatgtcattataatcagtataatcagcgagtgctcctttacagaaaaagctaaccagcatttttaccagtacccatcaatatactttaaaagatgctaattatttttctattctctttataaagataaatattagtaatttttatttttgtcttactttggagtcaaacgaatgcagaggtcacaagcaaatgtgatcccagaacagttttgatctccaacatgcttaaagttttctgcccaggcacggtggctcacacctgtaatcccagcactttgggaggccaaagcaggaggatcacgcgaggccaggagtttgggaccagcctgggcaacatagggagaccgcctatctctrtagaataatcatcatcatcatcattagtaaaaaaagttttaaaattacttgtcaacacttaaaaaccagaagatttctatttttaaaa

SEQ ID NO: 814961 - DNA, 592 bp, Homo sapiens
tatcctggaactataacaaatgaagaaggagttttttttttttgtttgtttgttttttttttttttaagtaagatatatctcctactctggctaagctcacacattagtgtggaggaaaagtgatgttttcaaaatcacctttatgcagtgagattcgcaatcactatgagaatagcatcgtgagcttgaataagagcccgagaagaagcaaacagcgatttgaatgatttggccactgataatgatggtgtatctgtatttctaataacatggaaggatatccttgcacattatggatatggaaataattcagatgatacaacaggtgagtaaatggagtctcagcggaacttggcaatatggcagagctgagatggatcagagctgggattcgagtccgggtctttctaaattcttgaccacctatgtcttctaccttgcctattctgagctccctcagaatgcaaaccatgtgctagcctgtaataccatagtaggccagttcctccagttcccatttakcaggaccttgagacaaatccaaattgtcattcaaggatcaaaggactcacactggtgccccccccaaaa

SEQ ID NO: 814962 - DNA, 592 bp, Homo sapiens
tatcctggaactataacaaatgaagaaggagttttttttttttgtttgtttgttttttttttttttaagtaagatatatctcctactctggctaagctcacacattagtgtggaggaaaagtgatgttttcaaaatcacctttatgcagtgagattcgcaatcactatgagaatagcatcgtgagcttgaataagagcccgagaagaagcaaacagcgatttgaatgatttggccactgataatgatggtgtatctgtatttctaataacatggaaggatatccttgcacattatggatatggaaataattcagatgatacaacaggtgagtaaatggagtctcagcggaacttggcaatatggcagagctgagatggatcagagctgggattcgagtccgggtctttctaaattcttgaccacctatgtcttctaccttgcctattctgagctccctcagaatgcaaaccatgtgctagcctgtaataccatagtaggccagttcctccagttcccatttatcaggaccttgagacaaatccaaattgtcattcaaggatcaaaggactcamactggtgccccccccaaaa

SEQ ID NO: 814963 - DNA, 634 bp, Homo sapiens
gattgctcacaaattatacaaatcacattgattactgacaaatcataatgtttacagagcactatttggctttggctccaaagcatgagtaggtatttaattaacaactgtcagatataatttacaccattacaatgaccagaaaatggctgattgctgattttacatactagaacaaatactctgcaactagccttggtaaaggcaaaataactagggactcaacgatagacaataaaatcaaatttcagtaccgtgtttaaccggaagattcttgaaggccatgatacctctgcctccgattagaaatggaaatccttttgctcataggtccgagaaactctgtaactagttttgtttcccttttttgccttgactaccaggaaactccaagccaaatctttagccccagtacataacctttttggatactgtggtgtgcaaatgtgtattttattctatttcgcctgctttttacttttacatgtgttttactacttcattgtatattaaggatctagcctggatgtcagcaaactacagtccacaggacaaatccagcccaccagcctgtttatgtacagcccacctgttctggataatctgtamtttgttatgcaaataatgggggtgg

SEQ ID NO: 814964 - DNA, 622 bp, Homo sapiens
agctctgttcgtattgctgctacttgcctaaaagctcccttcccgctgtccatccagttagcttggcctttttcaaaactgcttagttatcaaaacctagagaaagccttctcatgcctcctagtctgattttttatcccttcatctatgattccatgccctccagacaagtctctggggttgtagctgttaactgcaagcaacttcagggcaaggtccaccttcgtcagctctgtatcctggcttccagcatcctacctgtctgtatcagatgcttagtaaaatgttgattaagtggctgaggcttgatttctgagattcttaaaacctctgacaagtgccacgtatgtcttgtagggtagataacatccttctcgatgtcttctctctttcctcacatattttattgttgtaaccactgagcagtattcttattgcagtaatatgtttaaatcctaaggggaaattgctgtgctaaacgtaattttattagagtagttcagtcgtgctaccagaagagggtgccataacataatgtttaatttcatgctgttttagrtgagggcacgcagtgagcagttacaaagatgctgcaaatgcatgtaaatgctgcctaacatgt

SEQ ID NO: 814965 - DNA, 621 bp, Homo sapiens
ttgatacttctttcttgataaggcacttttaccaggtgtgtgttggaattggtggctcaggataggtcttaaattttaaatacaaatatctttgggggaagtgcaatttattttcagaaggaaagttgtctcaggttagaataagtaaatatttaaagaacctctcctaggctgcagtctaaaataggtagtttgtttctttgtttagcatatccaaatttagatttttcaaagatttaagtgtttattgaaagtgttttttgttttgtttttgatagtgcttatatcctgtgaatagaaaaagtgtgagagatgaatgagtgagttgtacgtgtgtgtgtgatgctatttgacctgataaatgtatttgtgtttactttttgaattgtagttctaaactacatatattactgtctcctggtgcttcagataaattcttgagcctgttgaccttcagtttatactactgtgtcgaactcatattgagtgtaaatattgaaatatttgtagtttatagtaagttttacttggtgttcgcgtttctcttcttcagcaggattaaaaacagtgtttaccamctcgtagttggtatactgtcaggatttggcctaagaaatttct

SEQ ID NO: 814966 - DNA, 539 bp, Homo sapiens
tcttccttccatccaagtcgctgctctgccaagaccatggcccagctcttaccttctgtccaaatccttagtgtccaaagtccatttcctaccccctgagagcagccaccattccactcaaaccacgtttcctgggtggtcctgaagggatgaggattccaaaggctcaacgggaagcaaggtggggacggcccaaggcagctgccgcctccggctatctggggccgggtagagggagttttgctcacttgtcccctctcgagacctggcacaagtggttggtcactgtggggagagacggtgcccagctgcgtcccccactccccgttcctgactcgcaggcccaacatggtcaggagaccccgtgccgcctgcttatcctcttgtctgcccaccctccccagggtctggcccagccttgccaaggaccagcaatgaggggacgcccaggcaccctagccccggccgcccaggcaccccagacacccaggcaccccagccccrgctgcccaggaatcccagtcccggacacccaggca

SEQ ID NO: 814967 - DNA, 539 bp, Homo sapiens
tcttccttccatccaagtcgctgctctgccaagaccatggcccagctcttaccttctgtccaaatccttagtgtccaaagtccatttcctaccccctgagagcagccaccattccactcaaaccacgtttcctgggtggtcctgaagggatgaggattccaaaggctcaacgggaagcaaggtggggacggcccaaggcagctgccgcctccggctatctggggccgggtagagggagttttgctcacttgtcccctctcgagacctggcacaagtggttggtcactgtggggagagacggtgcccagctgcgtcccccactccccgttcctgactcgcaggcccaacatggtcaggagaccccgtgccgcctgcttatcctcttgtctgcccaccctccccagggtctggcccagccttgccaaggaccagcaatgaggggacgcccaggcaccctagccccggccgcccaggcaccccagacacccaggcaccccagccccagctgcccaggaaycccagtcccggacacccaggca

SEQ ID NO: 814968 - DNA, 446 bp, Homo sapiens
aggaggggaatgacagccaatgaactcagtgattctggctgtaatacggatccttctcctagttcrtcctcccacccccaccgctttttgttaacagaatgagagggaaattagataatcaagttgtcacttattgacaaaaaccccttaagacagacttaattcagtaactctgaataaataaataaaagccaattaccatatccactgcaaatcaataaaaatacaactgcactattatcttcttagagacatatctgaaggcgcttttgccacccccacaggtgccatacttcttactagacagatctttgtagtatcagaaacattttgaccctgacttccaaagtcgtggtgaacaaggatgtgtggtacaggctggtagtgggctgactctgcttttagataatgttctgaaagtgataaagaatagtttttcaggggat

SEQ ID NO: 814969 - DNA, 511 bp, Homo sapiens
atactggatacagtcgttggtaaggtaccagtagaaatgtctccagacaaaccgttccttcatgtagccttaagacttgagagactgcatggccttcatgatgtgaaggttgggcacattcttgtcttctgccaggtctgggtacttaggaaggtggacatccttcttggccaccatgactccctccttaaaaaggagttcatagatggcaatcccgttcttcttaggcatcagcatcttggtggctgcagggcccaggtccggggctggagagacctgcaacttaacagagatcgcatcttccaagtcaggacatttgaaggaagagatgctaatccatcccgtagaagacaatattgtgtctctggtaaatgttggatgtgcttttgattactcagaaaaatttttatataacctattttccacatcycccaaactagatcatagcagtggggcttaaagggtatgcaaacttcaaactttttagattaaacttaactcttcggtagga

SEQ ID NO: 814970 - DNA, 645 bp, Homo sapiens
taaaatactcctttgtattttatatttcgttctctctcttctsttcctctaaatcaccactgtgttcttggattctaaaaacccctctaaatttctgaaattaattgtcacaattatgcttaacaattcttcatagcgatttggttccatgaatctcaaagacctaacatcataaccttgtttttacggcattcctattctgtcatcttttctttctgcatagagaaactaaacctaggaaaaagctgggcatactggctcatgcctgcagtcccagcactttgggcaggtgaggcaggaagatcacttgagaccagaagttgagatcagcctaggcaacatagcgagacccggtctgtacaataaaattttaaaaaattaaccagctatcatggcacatacctttagtctcagctactagggaggctgaggcaggaggatcagttaagcccaagaggtggacgctgtattgagccataatggtgccactgcccttcagcctggcaacagaacaagactctatctcaaaactaaatgaatgaatgaatgcaaaaataagacgcatttatagtcagttgcaaatcaagatagcaaaagagatgaaaagcaagcactggtgtccagatttgcacttttgtgtctcca

SEQ ID NO: 814971 - DNA, 525 bp, Homo sapiens
ttgtattttccctctatattgtggtactatacaattgtaagtagatttttttttttgagatggagtcttgctctgtcgcccacgctggagtgcagtggtgccaccttggctctctgcaacctctgcctccygggttcaagcagttctcctgcctcagcctcccaagtaactgggattacaggcacatgccaccaggactggctaatttttgtatttttagtagagacagggttttgccatgttggccaggctggtctcaaatcctgacctcatgtgatccacccacctcaacctcccaaagtgctgggattacaggcatgagtcaccgtgcccggccataagtagtttttttttaaaaaacacattggagagatacatatatatatacccgcatatgtttgttttgccccattttgtgtcccattaaatacataccagtttgattggcccaggggaaatttagttgagtatgtacatattcactagaataatttcactctttgcattaggctggtttccatataa

SEQ ID NO: 814972 - DNA, 511 bp, Homo sapiens
atactggatacagtcgttggtaaggtaccagtagaaatgtctccagacaaaccgttccttcatgtagccttaagacttgagagactgcatggccttcatgatgtraaggttgggcacattcttgtcttctgccaggtctgggtacttaggaaggtggacatccttcttggccaccatgactccctccttaaaaaggagttcatagatggcaatcccgttcttcttaggcatcagcatcttggtggctgcagggcccaggtccggggctggagagacctgcaacttaacagagatcgcatcttccaagtcaggacatttgaaggaagagatgctaatccatcccgtagaagacaatattgtgtctctggtaaatgttggatgtgcttttgattactcagaaaaatttttatataacctattttccacatcccccaaactagatcatagcagtggggcttaaagggtatgcaaacttcaaactttttagattaaacttaactcttcggtagga

SEQ ID NO: 814973 - DNA, 587 bp, Homo sapiens
cgagaaggctggcttcccgcagcgaagctttggaagagaaccggcgtcccatgacggttcgtccctttggggtctggcggccggcctccgcagctgggctttctgtgtgcgcactggacaccttgaaaaaccatctgtaagacgggcagcataatccactcctcatcaccttgtggaggagggatggagacccagcttgctgagggcctgagcctggggcctgatgccttctgaaaaacccatcacacggtagctggtgttcccgtatctccaacaggaaaggggcagctcgaaaatctaatgcaccccccacacacattttatccctgccacgcctggccataagccaacatgaggacttactttggacataggaggaggcttttagaagcctgacaagtctttttcttcccccgcttcaacttttattttaagttccaggctacatgtgcaggatgtgcaggtttgttacataggtaaacgtgygccatggtggtttgctgctcctgtcaacccatcacctaggtattaagcccctcatgcattagctatttatcctgatgctctcgctcccctcacactcctga

SEQ ID NO: 814974 - DNA, 544 bp, Homo sapiens
tgccagctgccttgaagaagagggaggggcagaaggaggcttagggtcctcaggcrgcccttctgagaaaggaagagggaagggaggtgtaggcgaaggaggtgggcccgtctggaggaaggtaacttctcctcctttagctgggggtggggcagaacatgggattgtcctcagacccaggccctgctcttctctgaaaacactgccagtgtcccctgcatactggctcctgcccaggtctcactcatgggaagcactgggtcaacaggaggtagggtggcacatggaagagcagctacctacacctcctcgttccctctgagtctcctctgtgcttccagctccctggggataacctccctgtcctgcctttgctgggcagcccacctggctctgggccagaggaatagcctgccttggacttgctgctcttgccagtatcttgactgcctcacaggtccctccatggcccctagctcttccatccccagtgcaaccaaatccctgtattcaatccctctggtggcagtgcctagagtggatt

SEQ ID NO: 814975 - DNA, 629 bp, Homo sapiens
agcttgccctttccactaggtagaggatcctgggtgttttcacaaaggaagacagagagtggcgtaaagcggygacttctcaactttcctgatgtcaccccggtaaggagtcattttatctggttatctggggtggcagagaacactaactggctttcgttctcctttggttgcatttagcaacagaacctcctaggttttagagggtctggaaggtgggagaccaccttccccagccttcacctcttgccagtaggtatggacgtgagaccgccttctggccaatagggtgcaaaaagaagtgtgtgcaccacagatctggtcacgtcctttgaaaagaacagaacttgccttccacttcctctccatctccctcctgtgggcagccccgagggtggagtcagctcctgccatgcaggtgagggtcatactcaggggaagagggacagataggagggatctggtgcctagattagcccatggaacagagccatctgttagccctgcccacctgtccccctctggactggcacaggagagagaataaaaatcccatctggttcagccaccatatttttgctctttttattacaatatcatagcatatgcctggactactgtgtgcaaga

SEQ ID NO: 814976 - DNA, 508 bp, Homo sapiens
cttctcccagacttcaaagagttgacaaagtggaactgtgagatggccaggcagccaagttcagaaggaagggcatcccgaggccctggcatggcagccaagttcagaacgaagggcatcctgaggccccagcttggctgcccacgcaaacctcatgtccagattcctgtcgttacccagctgtatacgtgggacaaaattcatcaagctgtacacctaagatggttttattatatgtcaattacatcccaaaaagttgattttaaaaagatgggccttgaggacagagagagtggggaggagatcccaagttccctccaaagtcagtgaccttcctggagccatcggccgcccattcctcgggcctggcttgcttctctggaggacacaggcatgcgtgcttgctctgtaaggacacagtggggattcggtgagatgatttacaggacagcctgagcrtggagccagcatgtgccctccgtgacaggagccactgataccacaggga

SEQ ID NO: 814977 - DNA, 611 bp, Homo sapiens
gaccttgtctcgaaaaaaaataaaaaaaaaamaacaagcaaagattccatgtcacaccgattaggacggctgttctgaaagaggcagggaataacacatgttggcaaggacgcagagaggacagaatccttgtgcacagttggcgggaaaggaaaatagtgcagccacagtgaaaaacactctgaggttcctcaaaaaattagacagttgccatatgacccagcaattccactcttaggtatatacctacaggagctaaaagcagagtcttgggattttttttttctttttctttttcttttttttttttttttgcaatggagtctcactctgttgaccaggctggagtgcagcagcatgatctcagctcactgcaacctctgccacctgagttcaactgatcctcctgcctcagcctcctgagtagctgggactgcaggtgtgtaccaccaggcctggctgattttttgtatttttagtagagacggggtttcaccatgttggccaggatggtctcgaacgcctgacctcaaatgatccacctgcctcaccctcccaaagtgctgggattacaagtgtgaaccactgcacctggacttggagagattttt

SEQ ID NO: 814978 - DNA, 531 bp, Homo sapiens
agtgccagatgtgtgactgaagccatcttagattctccagaccagcccatccaccagccgaacagcaccaagtgacctcagctaatgaaacaaaagaatcgcccaagtgagcactgctccaactccrgacccacgaatccaggaaagacaataagatggtcattgttttaagctcctaaattgtgggtaattggttgcatagctacagataactggggcaaccattgccaaatatttgaaggtaactgttcacttccagattgaacctgcctacctctctcagctgatgctcacatgatagggttttgggccttaggacccctgtgatcagctgtcttctggacaatgggagcccaacaatgaacacagccttcagggcagaggggggttctgcccaactatgccagttaggactctatctggaataatttaagcaaaaaaggaaatgattggctcataatggcttcaggcatggctggatccaggtgttccaagatattgtcaggctccatttcctttgtgattatttta

SEQ ID NO: 814979 - DNA, 631 bp, Homo sapiens
gagactagtgccctcgagcttttctgatacagactcctaaataccacataactaaattttgcaaaatcccaccattctgatctctaagactctcttttactggtttctttctgtcsacttacaacgttcacaagctattgctcctttatcctcttattccttaattaagaatatcttatttttttctgtttgagtcttgcccaatcctggaaaaccagcagcaaataaatatcctaagaatgtcaaaaccataaaggatacaggtaatctttagatagtgctttttgctttatttttgtctttattttcctaactcttaacactgttacttcttaaaaattttatttttgagacagagtcttgttctcgttgcccctgggtggaatgcagtggcgtgatcatagctcactgtagcctcaagctcctgggctcaagggatcctcctgcctcagtctcccaagcagctgggactacagacgtgtgccatcaccttctggctaattttttaatattttttgtagagatggagtcttgttatgttgcccaggcgggtctcaaactcctggcctcaagtgatcctcccaccttggcctcccaaagcactgggattacaggcatgagccactgcacc

SEQ ID NO: 814980 - DNA, 586 bp, Homo sapiens
tggattactaaatcagtctaaaattgatctggaagtttggtacccagagaatatttggcaaaactttcccatattggacaggccacactactgttgggtctgggtaccggtcattttcaaggatgcagaaaaattaaatctgtctaatggttatcatttagaaaatacaagattaaggtccataaagcataggtgaaagaagcaattgcttttttaatgagacagcctcagatagtaagcaagagctatctttgaatattggaagtgaacgaggcttacctttattggacttaaatgatagaactggagccacaggaagaaagcttctggaggatagaaatcagcttagcaaaggaaaactttctaagcggtaataaggaaagggatgtcttaggagagagtgaatttcatatcatttgagtttatgagaagagcagcgttttttattttttttggagtgatgcatatattgcataaagaatsctttctatttctgggcattaattagaatgctaaagtaaattctacagaagagaagaagagtgacaaagtccatggttgatgtaggactcaaatttataagcta

SEQ ID NO: 814981 - DNA, 534 bp, Homo sapiens
ataaaagtccacatagatgtttctggaagaattattctgagactattttagactctagatgatcctcatcttttatttctargtatcttttgtacaaccagtcatacatggtttgtggtcctaatagccataatataacctgcttgattatgatgcatgcaagcatctcaatagttgcatataaataatttatgaaaaaacagagcctccctccaacggaaatttttaatttccctttcagcctcttacacgtcactgcccacagataatttttgttcttcccagaaaccatatgcatgttcatcatgtagccatgtccctgggtaaatatcaaatattcagtatgatggacaaaggtttataaacatattgattgtgtcttctgtctcaatctatagcgtatttaacagtatatacagactttcagaacttttttttgaagacacatctcccaaagaaaataattccctgcagaaaactgaggtttgctccctacaccccctcgaaaagagaaataaattattgccaaggaca

SEQ ID NO: 814982 - DNA, 620 bp, Homo sapiens
gatgagatatctcaacatatgcctcacaatttgcattaaaaactaaaaaacagatagagtgaacatgctttataaactctgacgtataccccatatgtaatattttccttccctcagtgggatggaattcttatttggcaggtctaatcttcactccctagattactctgtttcgatgcctttctcttgccctatgataaagtaaaaattatttactgcagtctcatgcctgactaattctcaacctcttttcttgtggtgtttacatctctccttctgtatcattctgtagcttacatttgtccctcaaatgcttcacctgtacttcattcagaacagtttttgagcttatattacattttgggttttctgctgggatggggacacagtggtgaaatgattactccatatcttgaataattatggtgctcatatagtagggcagtaactaacattaaattgcccagaccaggaagttagtaaaacaatatacaataggatgtgtgaactgtggcaagagggagagagtacagagaacaatccatytcatggagactagtacagttaagctaatcagtgctctagaaggatatggctgcagtgtttccccttcatcttcg

SEQ ID NO: 814983 - DNA, 556 bp, Homo sapiens
gggaagtgtgaagtattattccacggcacatatcaaagcaaatgctgcaacatgggtctgattgaagttcacgaattctagaacccggttagatgaaaaattatgccattgtttaccatgttgacttgaagtcttgggcctttttcttcccagaggaatgtttacttttatgtttttttcccactctaccttgaatgcagaagttgacactaagtggagataaaaggcagctctataaaaaaacactagggccatttctgccaccttgctgggaagaacaattcagtgaaggtagacccaatcagggtgatgagaccaggggaatcactaccactctttccatttccatagcaagacgcagtggaagaatcaatgtggtattcttcctcgaaaatcccttttgttgttccttgctgggggtcatcaggaactgctgagacagaggctgaaatgagcagacctgagtggaggagtcygcagcacacacagcagcaaaaggggaattaattcaagatcaagcctcaagctgacaccagctaggaagacaccagggcaa

SEQ ID NO: 814984 - DNA, 554 bp, Homo sapiens
atggatgaaacactcagtaatttgaagataccttttatacgtttagttttttaaaagagtagataaccaaaatatatcaaacaagaaacagaaacaaatacacctttcaaaatgccctaattttaagtcttagctccagtgaaaaatatctaacattttaatcatgtatcagtacttcaaaagttactgtttaagaggaggggcccactaactactggtctatatgtttagtgtatgaaattacatccaaagaatgctttaggcaagaactccttcaaaagacatttttcagtaagaggcatccttcagtagagatgatggcaatcatttcccataagaaaagttaccaattccccagatttcttaaactgaagggatacttttgaaaatcacagctctttaaacaaaaaactagaatttttacaatttgcctgtgagaaagatttgagcttcttgttagggaatttgtaagaatatttggctgcattacaactctacytataagtttctgcccgtgtatatgtcactatagttttgataagttaattaccaaa

SEQ ID NO: 814985 - DNA, 628 bp, Homo sapiens
cattatggagataaagagacagggatacaggaaaggtcctatcactcagccagtatgatgggactacagggcagatttttgtagttgccacaaagcatgctgtgctgttgggtaaaactgaagagaatgacagagtcaatgaagagcaaatataatcgccaacataaaccaaccaggcagaggaggctgtaaaagagcactggcggaggagttcagaaatcttagtgtaaatttcatctccaacacttactagaagggctaagttttaaaaaaaatctctgagccccagttgcattgtttatataattgggcatgataaagtgtgctttatctgaaactgcagtgatcaaatgagataataaaggtggtatgattttattttgaaataagaggttgactctattataaacactcattaaacaagaacagcccccaaacacagtttttaaaaacgcttacccacaatctacccactctaaaacaaccaatattttttcttctagctttttaacatatgtgatttgggattagaatttttgaaaaaaaaaattttttttgtattttcatgttgwcatcaagggtgcatatagttttatatcttactttgtatttaattttatcacataag

SEQ ID NO: 814986 - DNA, 559 bp, Homo sapiens
cacccaatagacataagcactttgagggtaaggttgatttttgtttggttccagctgaggaagcagccactgtgagcactttgagtaaagtcaaatcctttagtcttttttcactgttcttttcatcctctgattatcaaagagatattctccactggtactaccacagctttaacacctttctgatacagaataacctcccttttcatgaagaatgaaaatgcctaaggttcagggagccttagataagcaaccattatttcgatggttacttcgtattggtggtacttgtttcttgactgtttgtttccttttataaaagtgatataaactttcttcttaaaatacatttattttatttttaaaaattaagtctgcttaaaaaaacaggtaaatgatggtacaaatagtacttagacatggccaaaaatatcataaaggtggtactcaaatgagtgatgttgggaaaatgctgagttaataagtactgaactgattaaagcaggagttcwgtttacaaatggaaatcagaaattatatgtactgcgctaaagcattc

SEQ ID NO: 814987 - DNA, 637 bp, Homo sapiens
agtgacatctctttaagattttttctctgctaaattatactgcatcatcatggcacacactatgtgaattcacacagtccaactggagttagcaatatctcctggctgtgattggctttctatatgtttgaaatatggttctgtgaaaagacccagaatcaggaggtctgaagtctgatccttcctctgccacttacttggctgtgtgatcttagacttgcttctcacctctccaatatccttatcatgagccttaaataagataaagcagaggtgtttaggaaagctcccaagcactcaacaaatgctacagaattttactattattaacacactttattaattttaactctaaactgaagtacaatgctgtcaaaccaagacctcttcattcagtcttattttttactttatcccgaagaagttaattctttctttctatttggcacctttttgacaagaggcttcaacactcttatctgggaattattgtctttttattttcccctcctgatgccagagttgctgttracaatatgtattcaggcaaggcagggactcactgcatttcacaatcagatgccatgcacactacttccgtcaaaacaattagtgttcatttcggctttactccatg

SEQ ID NO: 814988 - DNA, 571 bp, Homo sapiens
tgtcctcaatttgtgttgagattgcatattgactctaaaatgtctgcaatcactattacttgtaattaacattctaagaaattgaatcaaaagcaaaaaaaaaattggttaaatttttcatgacatatttttgttcgaagttcctaactgcatatgacattgacccttttttctggagctgaagacaattctataaagcctgttactgagccaattcccatgtgaatttcacagattgcttcattgaactgagaacatgatcagaacgtccaggaacttcagatcattagtcatttcataggggaaaacagatggcttccctagaagaagaaattttcacttccctcagaatttggacaccattacagaagtaggcctaattgttcggagaaaatgtgtgagtaactttcaactggaatctgtacctcacctttctctcaggatatgtgtatgcatatataaattatactccatcaacagaagggactctcaaagacagaacgattasaatcgcccaagtctatgaacatggaaatgtacctcgcaagaatgcaatggtctgcagaatgag

SEQ ID NO: 814989 - DNA, 544 bp, Homo sapiens
catggtggggaactgccagagtaatttaaaaatatattagtgacatcatataattcttctgcacatctcagaacagaatcaagactcccatccatagcytacagggtcccgcctgttctagtgaagggtgggcattctgacctcatctccataggcttgcttcacagccccagtcacattactttcctgatctttccattaacatgccaaacacaatcccatctcagagtgtctttaagctttttttttcttcttcttcctggaacactcctctccagatatctgtaaggggcataccctacttcattcaggtctctgctcagatgtcacctgatcatagagaacttcaggactaacttattgaaaagaacacccatcactttttatacgtttactatgctttatttttctttatatcatttacttattttctagtgttttgtcgaatttctttccacacaaaaaaattaaaatgtatgagtgtggaacatgtttcttgttttctgctacattttgcttattgaatgaatagaatttatgtgtg

SEQ ID NO: 814990 - DNA, 489 bp, Homo sapiens
tctatcacctcccaccaggtccttccctgggaattacaattcaagatgagatttttgctggggacacagagccaaactatatcacccttatagctcattttatcaaaacaaacaaacaaacaaamaaaaaaaaaaggcaagacaatctcttgccaaatcattgttccagatttgagtatgtggcttaggtagaagtaggaggatgtataacttctctttgggagtaataatgcaaactcctcttgggaaacaaaccttcttaggtaacgtaatggttcttctggctatgtagaataatttctgaagaacaatttaagtaaaatacataaatgttaatggtttccttaatgaaggcaacttgctccaggactcttttctggtttaagtcatgtgccagtctgagaccactcactgcctctagggtgatgaagccatctaacctgccaggtcataagcaaggtggcagggcctcatctctcatagccccca

SEQ ID NO: 814991 - DNA, 631 bp, Homo sapiens
ctagataagattaaatccctttttgagctggatgcagtggcacaagcctgtagtcccagttacttgggaggcttaggcaggaggatcacttgagcccagagtttgagccttcagtgagctaygactgggacactgcactccagcttgggagacagagcaagacttcatctctaaaaaatcaaaataaaaagattaaattatttttacatgtttctatagcaccatatatcttctatttcaatgcacatttgtaattacttatttagtagatgtcttctcaatttccctctttgcccaaaggtagaagaaggcaaggaccttgtctattacactcaatatttagttcttacacattatagtacatggcctggcatacaataaggcatgtaagatgtgctcaaatatatatgttgaattggattcaattgacaacctctcagttaaatagtacagaacagtaagtaaacaaaacataatcctaaaagcaagatactagttgtgcagccttgaaataatctgttgcaacctttgaaccagtttctaaatcatcctaatggagtattgttcctgaaattgataatgctttgtcaagaatggatattgcttattgacttaattggctttaataatg

SEQ ID NO: 814992 - DNA, 576 bp, Homo sapiens
tcgccttctccagctacaacaagttcaccaacaactgctacaggtgagcccctagcagggccaggcaggggcctcatcaatactagggagaggtcgctgacttccagaaatagkgtgtccctggatgagaacagggcggatccactgaacccgcaaacctgtgagctgcgtggcctttcagacagaagcgacagcgaggcagctcccaacacgattttgatttcaactttaaagaaggcactgaagccagtgggtgtgtcgcctcctgggagggacctgcctaggtttgacctgcggccagattccccactgagggccccaagtgggcaaggccagcccctccctccacaaggacacaccctcttccctcacaccagccccggggggtctctgtcctccctcgctcagggtccagcttcacaaccccctgagtgtgtccccccatcccatatgcaccccgtgttacttactggcaggcacctgaagccccgtgccggaccccaaatccttctaaaaacagaaacagaattttatccgggatctgcttgctttgacctttatggacttgtgcttact

SEQ ID NO: 814993 - DNA, 581 bp, Homo sapiens
cccacatacctctcctgcagcagcgctgaacaccgtctccggacgtctggagctatcaccatgggcaacactttcgtggtctttatttttagctyctcctttagaaactcactttttggggtggttttgtgtccagaagttggtgggttcttagtctcgtcttcaagaatgaagccgcagaccctcgcggtacatgttacggttacctaaaaacggtgtgtctggagtttgttccttctggtgcgttcgtggtctacactgatttcaggagtgaaactgcaaacctccgcggtgagtgtcacagctcctaaaaatgcagcacgtccagagttctttgcccctcccagtggatttacagtctcgctggcttcgggagtgaagctgtagacctttaccgtgagcgttgcagctcacaaacgcagcacagacacaaacactgagcagcagtaagatttactacgaaaaccaaacaaggaaagctcccagaggacaaaagcagaccctaacaggttgccaccgctggctcccgcagcctgcttttattcccttatctgaccccacccacatcctgctgactggtc

SEQ ID NO: 814994 - DNA, 581 bp, Homo sapiens
cccacatacctctcctgcagcagcgctgaacaccgtctccggacgtctggagctatcaccatgggcaacactttcgtggtctttatttttagcttctcctttagaaactcactttttggggtggttttgtgtccagaagttggtgggttcttagtctcgtcttcaagaatgaagccgcagaccctcgcggtacatgttacggttacctaaaaacggtgtgtctggagtttgttccttctggtgcgttcgtggtctacactgatttcaggagtgaaactgcaaacctccgcggtgagtgtcacagctcctaaaaatgcagcacgtccagagttctttgcccctcccagtggatttacagtctcgctggcttcgggagtgaagctgtagacctttaccgtgagcgttgcagctcacaaacgcagcacagacacaaacactgagcagcagtaagatttactacgaaaaccaaacaaggaaagctcccasaggacaaaagcagaccctaacaggttgccaccgctggctcccgcagcctgcttttattcccttatctgaccccacccacatcctgctgactggtc

SEQ ID NO: 814995 - DNA, 389 bp, Homo sapiens
cctggtttccaaagtgatagaggtcagatgtgcctggccacacgcaatcctgggcttcatttatatgcaacaaacccattatctgctcccaacaaatagggaaggaggctaagacgtaggcggatgaagggaaagtgcctccaagacctgcaagttaggatagagctggcagccaggggttagggaagtggaaggaggccctgcgggttctggaagaggactgtgtgcagctacagcagcgggctttgcagtgggactgcctggcttcagaccttggctyttcagcttgctgtgcaaccttgggatagttactcaacctctctcgacctcagttctcttccctgtcaaccgaagaccaaaatagaacctacattatagggctattatga

SEQ ID NO: 814996 - DNA, 646 bp, Homo sapiens
ggatgtgagggagggtcaccagccctggggactggtgtcgggaagaggtagcttgcatctgtgactgccagacccctccaaatgtgaggtcacatgggcccatgrgtgtgaggagaggagccgggtggtgaaggtgtcggcaggcatggtgctgtgggacaggaactgtcacctctgctccgacatgagatcacaggtctatctatcctgttcaagttgggttttaaaataaaattgctccttgttctgactgcagctgtcatttcttttgttatttctgaggccgtttgttagtaagaggaataatttagagcttggaggtggacttcgtcttggctagttgctaggcacccactttctcaaggcacggggccctagatgcaaaaaggatccccagcagtaagacctggggctgtctcacttggtggcagcatgtgcctcccctcccacccttcattctcccaggcgtatagacagcagagtgccagtgtggcatttccacagacgaaccaactgctgtaagcctctgaaacaggaatgttacatatatggctctcatgccacctggccctattcacctgtccatggcagacgtggccaatcaatcacagactttctcatcgaactcagatgcattctcagaatc

SEQ ID NO: 814997 - DNA, 653 bp, Homo sapiens
taaactgtccaaagctcagcaaatacctttccctatatagctgagtattctttcccatgttgctccattttcctcccttttgacagataagaaaaggtaagcmtgactttatgaacctttttctgagttgtcactctctaaacaactttcctatttctgaactgcccagcagaatttggagtgagcaaattagagatattgagaatggtgtactctctgtccacagctaccttttatgagtacgagaacaggaaaagggcaagagagtgcccagggcagcagagaattcagggctagagaaattctgtttctgttggccaaggtgaataggacacaagaaagtctaactacaattaagaaacctagtcgggaaaggtagggatagtcatggaagaagtgagtttcctctagaaatttttccccctttgggactcataaaatagggtttctaatagatggagttttgcctgaataagaaatcgagcagtgcactgggtggtctctgtcattacagcaccggttctatgcatgtgtgaataagggcttatccaaatcaatcctgcatgaaagaatataccttagtaggaatttaaaggaggaccttaaattcattagtattccgagaactgtgagtgaaactgtttagccctgaa

SEQ ID NO: 814998 - DNA, 601 bp, Homo sapiens
tgtgaccttagcatggctatgatatcactaggagataggagtttctcagttccattggaatcgtatyggaccaccatggtatatataagcaatccatccttgaccgaaacgtcatcctgtggtgcgtgactgtaataggatatattgcctcaccacagtatttgtagtatagaaggacttggagaaagatcacttacacttaaattattaaggtttaaatttgaagctttagtggcaaagatatcagttggcaagggggaattcataaaacacatagaatatactgctttcttttcagcctgtgaaaataaattaatgagtttgaatattggaagaaatagaaaatgaatttgatcttataaagcatccacagtatgtatgtatgtatgtatatctgtgtgtgtgtgtatatatataactggaacagtgagaatcactatttttgaattctgaaaatattaagaaggtaataaccccctcaaatacagaaaaagcgctagtaaaatggtgagtgatcctattaaggtaataatgcaaatgagacaacagccaactactaatgaaatgacccatcacagacacatatgtgttaaattaattg

SEQ ID NO: 814999 - DNA, 646 bp, Homo sapiens
aggaagtggattacaaattagggaacacattaatattgcagatgaaggggagagatttctattaaacagcatcaatttatacccctagagactacaggacatgtgaaaactactttaactcagatggctaggtattttgttttctttctttcataaaagaaccattaccgctgagagatggtctgggccccatatcattctctctagtacaaaaacaacgagtaaataagaaacaaatttgctgatttcaatcaagtccatttggttgtcatattcatttcctttttaaatactccattctccctgtgtaacaggaaaattgtttttccaataaggcaaatgggttatgatttgctccctgaaaataaacatgttataaaatccactctaaatctctattttatcatgtgttatttgtgttccatttgtaacaggctatatgctgtcatttggggtttactttatccagcgctgtaagggtctgacagagatgaacagcatttcctcttaaagttgcaaagcctgctctactgtatttacattcaakatccttaagttttctaagtttttgagttaggaagttttaccttatccaacttagacacctccaaagagaaaaccataacatacaaagaagaacaaaacc

SEQ ID NO: 815000 - DNA, 620 bp, Homo sapiens
gtgtgagccaccgcacctggccttgttttacagcatttaaaatgatgaaacagtgtgagctgtttaatctgagttgaaacaaatgtgaaagctcatcaagtctgaaaggaacatacaaaccaaaagagccaaasagaatggtggcagatcccccaaatcaagatcctcaccgtggggtctgtgaactgcccgacgccatgagtaaactgcctgggtctgggcacacaagttttagtccacagtccacagctgtcatcagattctcaaatgtagctgtagccccccaaacttccctaatctcgtattaatatagtcaagattaacagagtactattgcctctattaatatctcttcaaatcaccagaattaaaagtattgatgaagataaaaggagttgaaagtgctccctgttcactctgccctttcaagattctgaggcttcatttttactaaatgtcttaatttgctaattggatacattgagcttgcttttctagtaattggcttattttcacaggtaacgaaaatgggcggggttaccaggagaatggcaaaaaaaagccaaggtgattgtccacgtgcatcttcctttcctcactagggtcttgctgatgttctg

SEQ ID NO: 815001 - DNA, 495 bp, Homo sapiens
caataatcaactgtgtaaaaagaaaatacaactcaagagtttaatgaaaaccaattatgcaaaaagctggatgtagcactgagaaaaatttgcacagacagctctggtagagaagaaaaagtcaaatatcaaaggcaactagaaatctttggagggcaaccatctgtctcactcaagttttccccagaatcaagcacggagtctagtaaaatcatactcaggaagaattttccactaaatggatttccatgatatctgttccatgaggtaactattttaaaaatttttgtcacttgagtacaaatggaggtagggagatgtgtgtgagaaaaaaatgtttttaatggaaaacctgctgcctttttytttattgcttaagatatttgaaaattcatgagctcataaagggatgcacacttaacaatcttttacctccagctcttcctgcaaccttcactagatatagcacagtatagaattttacttataaagtac

SEQ ID NO: 815002 - DNA, 590 bp, Homo sapiens
tatggtttggatataaatagcacatgtggctgtggaaaggactctgttgagtgtgggattgcctatgcaattcctgcccttgtctctctgaggaatcatggacttgaagtactttctgcttctgctttatattgtttttattcaaggttcagatggtattgcaaggaattggcattgggtattgaaggacctttctgtgaggatgagttctctggataagaatgatttttctagctacagtcttgaaggaaaattggagtcagataatccaaaaacttcatgtccagcctggaagatcctttagaaaaaattgtttttttctactgacaggagttatcagcacctggttgtgacatatttgacaagactgaacatcagtgctttaaggaaatgactcttgcatgtataggcccacagcatggtattttcttaaagaattaatttttcaggacatgccactataataatttttagcagtgctttagctaaaggtgacttttgcctttccattgtcaatgtcaccatgtcgtattgtcacttacttgggttttctctccytcctttgctttttatttgtctagtgtagggac

SEQ ID NO: 815003 - DNA, 598 bp, Homo sapiens
gggaaggggaaaggatgagtcttagtggggattttaacaccatcagaagcaaaattgggatggcatcgcagggtgccacaaatgagacctcacccaagtcactaatttatgtagctactgttgcttgtgggatcatctctaggcttcagaataccatgcagttagttttctcggaataagtaaaacaatgagctatacatagtagaaatataatacacataacaattacaattaaaaaaaaaaaagaatttctatgcctgaatgaaaaaaatatctattccattggaaagtcaactaaaaacatcatgaagaaaattaaaatccagtcctttcttagagacttgttgtagcaggaaataattcaagatttagatcaaattgtaggaaaataataaaaactagaaaacaatggtcagggctgaatttaaaaacaggtgtgctataattttcttctgaaccataatttctctctcttcagttcactatttctacccaagataaatkttatcaggaccaacatacttgtaaaataagctttagtattatatttggcctaattatttgcattaagtgcaacaaaaataatgaatggccatgt

SEQ ID NO: 815004 - DNA, 468 bp, Homo sapiens
tgctagtattgaatactgtacaggaaatgaaaaacagatggttgcatgggtgcccaaagtatactttstactgaacgtgtattacttttacatcattataaagttgaaaaattgtaagtgaaccatcataagttgtgggctgtgttcattttgacaataaattatgttctgattgtacagaagcgtttatcaatcataagagattttcttcactggagacatgtgtaataacattcattttcctgtgggacttacaaattgtttcagtagtttatagccataagctctacaagtagtttatagctattaatgctttaaacgttatccagaatatgcctctatgttcagaaatcatggcttttaaagacttcaatcaaaaaaggttaacaaagttctaaaatccaaaaataggcttattttaaaattagtttaagaagaaacattttcctctaccctaaaacttgcatt

SEQ ID NO: 815005 - DNA, 598 bp, Homo sapiens
tcaaaaattacttgaatgtattaccaaaaatgaacatttactatagaccagtaatattctctttccaataactgattataaggctctttgaattcatctgagataaacaaagacccaatgtatcsatatatacataggggaattagaatacaactgtaacagtggatgaagcaaggcctggcacggtggctcatgcctgtaattccagcactttggcaggtcaaggcaggcagatcacttgaggccaggagttcgagactagcctggccaacatggtgaaaccccattttatctaaaaacacaaaaattagccagatgtggtggcacacacctgtaatcccaggtactcgggaggctgaggcaggagaatcgcttgaacccaggaggcaggggttgcagtgagctgcgatcatgccactgcactccagcctggacaacaaagtgaaactctctgaaaaaaaataacagttgatgatgcaagagaaaacatataaggacaattattacacaaagtaggtgacatatgaattcaaaaatgagaatttatgggtcaaggagatttattgcctagcttaataactgtaatgtccataatact

SEQ ID NO: 815006 - DNA, 525 bp, Homo sapiens
taggaatatgtatatatgtatatatcctatatataggaatatatgtgaatatatatacatatatasgtgtgtatatatgtataattcctatacatatgtgtataaattaatatataggtgtgtgtataaatatatagacaggaatatatatataaagtgtatatacactttatatataattatacatatatatacacacctatatatgtatatacactatatatatataaagtgtatacatatatactttttctttagccacagaaaaggtatttttcctatggctaatactttacccatgctttttctatggctaaagttttatcactccccacaaattcaactgtaattgaatttaatataaattaaatgccttttgtattattagttaacaaaagtacagaattcatgacctttcctcaattttgctacctacttttatctccctcacactagactctatataattgctaaagatatctgaagtgggggaaaaatacaccaggggatgcaaaaatcattttc

SEQ ID NO: 815007 - DNA, 585 bp, Homo sapiens
atgtatctatagatatatatagagagagagagagtttagtgatatatatatatcactaaactgtatataattctatgtagttatttaattttgggttaaaaaattgaaacaaygttctaagctaaaatgttagtttctgttgcttcttaaaagctaatccaataacggcactaaattgtaaaaataaaggtttataggataatgaatgggctaaaaatagtaccattttgtgaaattcttaaatattcttcgtgagtaaatatggaattgcatattttgattaatatagacttctattacgggcaagatttacttatttgttgcgtagaacacaatgaacttggtttaaaggagaaaggtagactttctgtttctgtttcttagttgagctgttttctatttctgtgcttttaaaataaagcttctaaaacatagagatctgcatattaatagttttcccaatttcacagtgccctcaaaagccccacaacaatttctacattttaataaccagagccatacacctttacttccagccattatgttaagaaacatctctgttaaatgtgaggcattgtataggct

SEQ ID NO: 815008 - DNA, 561 bp, Homo sapiens
tgagaaaaggaataaaaaggtagataatgaaacctggaaatgtaaagaaatatttatttaattttaaatgaacacagaaagagctcttaaagtaatgaatataaaatgatctgaacaagaatggaatcttttgcctccagtgttaatggtaaagataaaatttaaagaacaaatatgatttagctctaagtccttcatttatctttctgtaaactatatgcctttttaagtattgtttaaaactgcatctttgaagatttggattgtttattaccattgctaacataagaatccagtgaaggcatagagggactcatgctgtgaattttcatcaggtatatgatggaaaagacagttcctcacgtccactgggcacgttcactaaaaatgaacttctggggctgatcctaaacagcacatccaatcacctrtggctagagttcaacaccaatggatctgacaccgaccaaggttttcaactcacctataccagtaagtaacatacgacttaatcacgttcttttttcattttgtcaggacatatctgatacttggcttata

SEQ ID NO: 815009 - DNA, 457 bp, Homo sapiens
ccgccgtgcccagctggctcctcagttttagatttgaattttataattaattatagttagcctttttatttcaaaataacccagttttccccagtggtaacattttgtagaactatrgtgtaatgccacaaccaatacaacatcagccaacattgacactgatacaactcatgatctttaggtacaacccaagatcatcacctcatgatgttcagatttcttcagttttacttgtgtttgtgtgtgtgtgtgtgtgtttgtgtgtgtgtgtgtgtgtgtgtgtgtgtgtttgtgtgtattcagttctttgcagttttattgggtaagggctcatgtatccaactctatagtcaaaatacagaacaggtccatcatcacaagaattcctcatgttgcccttttatagccacacccacttccttcctgcaactgctggacccctgacaacaactaatcc

SEQ ID NO: 815010 - DNA, 655 bp, Homo sapiens
ttagagtggtatttgataggtttagcaaatgtttgatgagcaaggatttattctttctttcgtaagaaaatcgccaattgtttttacactttctcaacttgttaatcctacctaatgcagaccatttcataaggaaattacttgactaatgatagaatgataagacgacgggaaaatgcataccattttcgctctcacaggaattttctaaagacaaatacacattttgagatgctgaaaagctctgttccatcctttctatgaccttggtgatgctaagagagactctgaacccatttacaaataacagagatttgggagcactgggcaaatatgaatattttttaccatgacttcatgagctattgcaactgcctttggaaatggtgcactttgaaaaacacacgcactggcctaacacaatggatgttttgttgtaaaattatgaattacaggaaaaatggaatatatcatacacacacaaaggcatttaacacagaaaacctgttagagcagtcattaaaatctgcctggtgatccacagcacagaaacttacattagaactatttgtggttctagggtcagtctggataatatatttatgaattctctgatgcagatgtatatttawtcctttgtataaaaataatctta

SEQ ID NO: 815011 - DNA, 344 bp, Homo sapiens
gataagctgaggttcagagtgttaaaattcagggaacattcgggtaatagcaaaatacaccaaatgataaaggatttagaaatgtaacaaaaataagactcgaacaatggtgtaaggccaggataaaaagaaamgccattgtgcaacagagagaatgttaaacatggatatgagcaggaaggtgcctgatggcatttgtattaggatgatttttttttctagtggcaatatgaagaatgaattggagttaggaaagtctattaggtgctatggggagtgcacagtgtaaaacacaggccctgttcttaaaaagcttacaatccagttggaaagtaaaatattaa

SEQ ID NO: 815012 - DNA, 614 bp, Homo sapiens
agaaagtttatattgccaaggttaaggacacactcataacacaccctcaggaggtcctgacgacatgtgyccaaggtggtcaggggtacagcttgctttatacattttatggagacgtaatacatcaaccattacatgcaaaatttacattggttcaatctggaagggtgggctactccaaggcaaaattggggacttccaggtcatacataggctttaaatttttctgacacgtagccaggcacggtatctcacgactgtaatcccagcactttgggaggccgaggcagatggatcacaagatcaggagttcggaccatcctggccaatatggtgaaaccctgtttttactaaaaatacaaaaattatccaggcgtggtggtgggcacctgtagtcccagctacttgggaggctgaggcaggagaatcacttgaacccgggaggcagaggttgtagtgagccaagatcactgcattccagcctgggcaaaaaagcaagactccgtctcagaaaaaaaaaaaaaaaaaattctgactggcaactggctgaaagagttattatcagccgaaaggaatgtctgggttatgataaggggttgtgaagacctaggttt

SEQ ID NO: 815013 - DNA, 456 bp, Homo sapiens
aatcaccactaaagaacttatctatgtaaaccaaacacacctgtttcccacaaacctattgaaattaaataaataagtacataaattggggggagaaaaaatgaaattacaattagttaaatatatatatatatgtatgtatttatgtcattgatgtattatctattacttaaaaaaaatcagttactgaggaaaagtatcctagatccataaaattgttttctgcttgaagggtcctatgggaagagttgtgtcggtaacagcagtcttctaattacacttggcttttcacatcttcaaaatattacaaaggtgaatttcacattcacacaaagtttacattgataaatagcatattatacttcaaagtgaatttataattcataaatatatgtgagacttgtccaytttggatatccatttagatcagttaaattacttgcaatttaaatttag

SEQ ID NO: 815014 - DNA, 611 bp, Homo sapiens
tatgattttatttgaaatgtttgtaataatacataaattatgctaaaggtatttcaaataatcttctgaaagtattgctttataaaaataggatgcatcattcaagtatctagattttgcagtgtttttgcaatctctcaaacaaaaaatagaatcaattttcatgtctttttaaaaaattgtcttctttctgtaaaaattatctaatgtgtcaagaaaaataccctcttgtctagaatccttgtcatgattctctgcactatattgcctgtatagatgctgcttgacattgtaaataacttttacaatactatcataagtaaacaaaacaagatacatgaatttattcttgctggatgacccacttttattacataaatgacatacactctaattttatagtaaaagtcagaaaacatttacattataaaaacttgtattacagacaaccttataaaatatcatttaagaaatataaattatagcaacaccctactatacagttcacrtccagaaataagaaaagacctacatcataagctattccttaagttagagtaatactgcattagcaaaaaaaaagaaaataaataaacataatttaaaggcag

SEQ ID NO: 815015 - DNA, 611 bp, Homo sapiens
tatgattttatttgaaatgtttgtaataatacataaattatgctaaaggtatttcaaataatcttctgaaagtattgctttataaaaataggatgcatcattcaagtatctagattttgcagtgtttttgcaatctctcaaacaaaaaatagaatcaattttcatgtctttttaaaaaattgtcttctttctgtaaaaattatctaatgtgtcaagaaaaataccctcttgtctagaatccttgtcatgattctctgcactatattgcctgtatagatgctgcttgacattgtaaataacttttacaatactatcataagtaaacaaaacaagatacatgaatttattcttgctggatgacccacttttattacataaatgacatacactctaattttatagtaaaagtcagaaaacatttacattataaaaacttgtattacagacaaccttataaaatatcatttaagaaatataaattatagcaacaccctactatacagttcacgtccagaaataagaaaagacctacatcataakctattccttaagttagagtaatactgcattagcaaaaaaaaagaaaataaataaacataatttaaaggcag

SEQ ID NO: 815016 - DNA, 623 bp, Homo sapiens
gtgtaccaagagcagcagtcacatctatacctgtcatctggtcatggagtccactgcaaaatggaaggcaatattgaataaatacttaaagaaaaataagtttaaacatattatagaccaaagaaaaagtactaactcttctaaaattatatccttgggctatattatgaaaacatatatagttatgaaaacactctcacattcatgataaagtgacaaaatttcatgtacttcatcttatttcataatatctcaaaattttgttttcctactggatcttgtgctaaaaataaactcagaatttgaatctataaaacaaaattgattcctattagaagtgacagtccttagagaataaatgacagtttcatatcttgcctttcaagttttgtgcatgacaaaatgaaagccatgaataataaaatattatctcataagctgcagaaaaatttttatttcaatgtcttataaatatatctaatacaaataaaataatttcaggtatttgcattaaagcagtctaagacattccacagggaaacaatgatcayattcagtgctaaatgaaccctgagcctatttaaggtgctggtgaaaggaaagagttcagtcatcacagaact

SEQ ID NO: 815017 - DNA, 284 bp, Homo sapiens
actttcatttcaagataaaatttggcccattttattccttacaatttcatagtaatccttttccctccccaagatcatgtctgctgtctaaggccagtcacttctcttagcatttgatataatgacctaacttgtctaccgttccaaccttcctcatataaatacaatcmtgctgtttccctgaataatacctttaatggctcctccaatgaacaatagtaaattccgaacctgatagaacactgtataaaactctccgttttttgtctcctaattcttatagt

SEQ ID NO: 815018 - DNA, 559 bp, Homo sapiens
ctgggctctgattcagtaggttagggtgaatttacccataaatttacacttcygacacacttctgatgatactgatgctgcttgcccatggaccacatatcgagtagtgctaggctaagatatggcagatagaaagagcctatgactctgtcccagaaagattgggctgctataacaaattaccatagattgggttgcttaaaccagaaacatttatttctcatgattctaaagacagacttcagagatccggatgccagaataattagtttctcggtgagggccctcttcctaattatttcctcacagggcctttccttggtgtgtgtacacacacacctacagatctcatgtgtttcttcctcaaacacctcatactcctggactgaagtgatcctcctcctccacctcctccttccccttcctttttgagacagggtctctcgctcccatcgcacaggctggagtgcagtggcataatcacggctcactgaagtcctgacttcctgagctcaggtgattctccagcctcaggctcccaagtagctgggaccaagag

SEQ ID NO: 815019 - DNA, 611 bp, Homo sapiens
taaactaaacttagcctagaagtggagagaagaaaataaagataaggcaagtgataccataagatacaggtgtgggtctatccacagcagttgtctcagtgccaaaaattactccctcaagacttagttgaattataagctgatttatattcctgaatcatttaattttgctacaaaatgtcttccactattccatcaccccaagctcctgttcagcagttttttctccttttcaaagtagggcaggagtttagagagaaaagccttctttctgagactttgaaatgatgaagtccaggcatctactccaggaatatgtactcacataataaatacaaagtataagcctatatgatacagtgttatagactcaataataacagtgagaattggctttaaaatgctggagtattaggaagtcaaaacataagacatgcaaaacaaacaaagaatatactttttgaggaaataatgagcttaartggagtttcattgaaatatcaaactgtgtccagagttggtccctgccagtgggtttgtggtctcgctgacttcaagaatgaagccacagaccttcacggtgagcgttacagctctgaaagatgacacag

SEQ ID NO: 815020 - DNA, 609 bp, Homo sapiens
ccttccataggtatttctaatgggaagttcccccggaagcaattttggcctcagcatctgtccaacagtttccttctgctttttctccttcaactttttgatggctttggcactgtaaaattgccacctccttgggattttgcactgtgtgcaataactccatgatatccttgtggtatttaatgggggttcccctttctgtaaaggaactccctttctttccatatcacagcatggacatgtaggattagataagcatgcttgctacctgtatacacatttattcttttttcccttcccggttctaaggcttgggtaagcgccactagttctgctatctgggtgctggtccctgcgggaagtggcctactttcaagtagttacatcactaactatggcataacctgctcttcatatcccattctccacaaataaacttccactggtatataggttaaggtcaggattagctaaggggacttctaagagatcctctcgggtggcataagtctgggccacaatttgttggcagtcatgctctattggttccacatcctctgggagaaaagtarcagggttgagggtcacacatgtgcatatttgaagcac

SEQ ID NO: 815021 - DNA, 543 bp, Homo sapiens
ttctgtcctctctgaactaccaaggtttgtttgtctgaggccatgactaaagctgtggcctttctcttagctgtggcctttctcttatctcgctattcctttctggtctgttcctcttggtccctattatagaatgccgaggttgccaggtttaataatgcctccaaattttgttcagggcccagggctagcttttggagctttctcctgatatctgtggctcattgggtaataaacatcttttaggatcaattgaccctcgagggagttaggtgacaagggagtatattttcttaaagcctcccatagccactcgcagaaggcggtaggattttcttcctttccctaagttatggtggacatcattgaataattcatggggtttttcctaattctccttagtccttctgtaacacaggtcaacagatgtttgcaaatccagtccccatgatttgagtcgaggtcccagtsgggatccatactggggatggcttgctgactggtatggaatttgtccctttctttggctgtcattctatcatt

SEQ ID NO: 815022 - DNA, 562 bp, Homo sapiens
aagaaaaattaaaatgcccaaacaactggaaatattaacactaccctctcaaaaatggataggactcataaaaatcaatgcagacatgatatttttgaacagctataaatcttaattgacattgatagaacactacatctaacagttgaagaatatatattattttcgagtgtgcattaaacattcaccaaaatagacaaaatgctttgtcataaaacataagatcaaagaatcaaaataatacagagtatattctctgagcacaacaacattgatttagaaatcagtagaaaagacatatactctgagtatctgtaataatccatggctcaatgaagaaatctaaagaaaaattagaagatctttttagtgttctgctaaaatggtgtttagagtaaaatttttagatttaagtgcctgtagtagaaaggaaaatgcctgggtagaaaagcagtgatctaaatatccaccataagaaggtagaaatgtgtgaatttttttaagcaggtagaaaaataataataaacaataagatctcatcawactgtaccccataacatgc

SEQ ID NO: 815023 - DNA, 574 bp, Homo sapiens
agtaatatttgatataggtgtaacagtaaatggaagagtctcttttgtatcytccctgcagtcatagttttgcctagaaggcaaagatgtattatgtctaaccctgcctagctcagtaatctcttaaagaatgaatttaggccaagattgaagatagggctggaatggtcttccctccagaccactttggcctccaactccttttggtttattttctaacgaactctgaaaagttgctaccatcttgttgagggctgctctcaagttgcctccaggacatcaggaaataaataattaaggggcagtcccctgagctactgctgctgtggtgtagcggtgggacatgccggtgacgttgcaatgactgatggcagaaattgatgtgccagacagaccctaatcaaatcctgacaccctcccaagcccaggaagagatgataaccttttctatttcagcaaaaaggtaggccaagaggcagaagagaagtcttcaggatagagaatgacagagcagtgcagcagccaggtaaccgaggaaaagggcagcctgcatgctacagcgcatatcacccaa

SEQ ID NO: 815024 - DNA, 526 bp, Homo sapiens
ttcaggatagagaatgacagagcagtgcagcagccaggtaaccgaggaaaagggcagcctgcatgctacagcgcatatcacccaaagcaaaggctctaccagartcactggacagcatatgtatttaagctttgcacaatcatgtagccagagatagagaataatctgataatcgtaacgagaattctaattataagatgttatcatttcatcccagactgcatcaggcaagggtgagctcgatgggaaaagagacccttgaaacatgaggggagagaactttgtaaacgaccagaacagacgcctctcccttatcatactggataaattatcactcatttcaccgtgagaaagaagtagaaattgatttgagagactcctcaatatccttcataatcccggcagtaatttcttttgctcattactattaatatatattgttttctccttccctagtggagattcaggtcatttgcaataaaccctgcagttatcttcaacatgttcccaaagaaagaaactccag

SEQ ID NO: 815025 - DNA, 572 bp, Homo sapiens
aagggtcgtcatactgttcacaaaaatggtccattggtctggtgagggaggagatcagaaggtctctatttgccaaaatctgtttccagtggtagaactggacccactttgcaaccagtgagaagactgggtctggacaggagcaagcaaaggacagaaatagaaatattagatgtagcaggccttggcctcaagagggctgagatgctaggggagaaagtagaagaaggggatgacagaagagaggtccagagggtaaaataagtaaaaaagcaggggaaggtagcaaagcagacttacaagagcaattggaatggaataagcatttgcccaaaaagtcaaggtcaaagaaggtgtgcagcaaattagtggatggtgctgatactaagagagatctagggagtgaaagcaagagcatgaacaagcctcaaacagcagctctggctcaagagcagcttatacccaggagctcgctgggacagcctgtgtkacagagccagctagagaaggtttctcagcctccttttagaatagctgtgaagactgattttaccagcggaagtggatacttc

SEQ ID NO: 815026 - DNA, 601 bp, Homo sapiens
tgattgagacaatctgtgcagcataagagaacttgttgagagatgactctaaaaagatcctcttccaataaatgtttaacttcttagtaccttttcatgacagcaggatcatgaatttaacgtccccagargatgagatgatgtcttctcacttggcatgaccatcttaaagtaatgcttataccttggaaccagaggtccttgagaacttcaggggccccaaaactataaatattacccgaaaggatacttcaggttcaagtaccattcccaagttctggccctctctgataagctcaggataattgaatttagtaaagatgatcattgagaggactggaatccctcagccttcttcacgtggccaagaagacctcaagtctaaaatcaaattttcaggaggctgagaacatcagaaaactattagttctctaacccacttcttctcttatcatctttttgcctctgtctggaaatgaaatcagcatggtttccatccagagatttagagtagtctgggtataataccaggcccaatgggcccaagagaaaaccggagtcatcttcgggtatcccatttccctcgtagctttatttgtca

SEQ ID NO: 815027 - DNA, 616 bp, Homo sapiens
tctattcaaatcctttgcccattttaatgtctggttatctagtattgagctgtaagcattaacactctagatataagtcccttatcaaatatatgatttgaatattttcttctccctttctgtcagtcttttttactttcttgtattctctgaacaagaagggaagttttaaatgttagagaagtcccgtttatctatttgtttccttttgtttgtgcttttggtgtcatatctaagaatccattgccaaatctaaggtcacaaagattcacccctatgttttcacctacgagttttatagttttgctcttatcattaggtcttcaattcattttgagttaatttttgtatatcgtttaaagtggtaatccaacttcattcttttgcatgtggctatccagttacaccagcacgatttgttgaatagaccattctttctccttttaatgaacttggcacttttgttgaaaaccaatttaccrtagacatgtaggtttatttctggattctcatttctgttccattgatcaatatgcctatctttgtcccagaaccacactgtcctgattactgttactttgtagtaagttttgtaattggaaagtgtgagtcctct

SEQ ID NO: 815028 - DNA, 685 bp, Homo sapiens
ccttcaataagtggagtatatgacccctccctttgaaacttgggagactttttgactgtttcaactaatacactggtgataaatgctactttcaaggctagattataaatagtgattgagcttctgccagccaccatgtcaattattttagatcacattcatcatgtgaagagcgcactttattttcactggaatagacactaattctgtatgtggaattgctttttcacaattcttccaatatcaccatccttgcatttacaacatgctttattctccttcgcaatgtctcacatggcatcacttctgacaaagcaactcactttgtagaaaatgttgcagtgggttcaggtttatgacattcattggtcttaccatgttccttattaccctgatgtatctggcctgtgggaagagcaaattagtcttttgaagactcagttatggagccagttggttggccacaccttgtgggtggggtgtatattcttcaggatgcagtatatactctgaatgagtgactatgggtactgtttctcccgtattcaggacttatgaatctgagaatcaaggactggaaatgatagtggccartctccctataaccccaccgatgtgtagttgcttcctctgtctgtaacactagcttctgctggtatagaggtcttagattacaaagggagaa

SEQ ID NO: 815029 - DNA, 575 bp, Homo sapiens
gagtaccttgtccccctggcctctagactctgatttagttgagtatgataaaaataatccaatttgcatgatcaactttcacataatatatttttaacagcacactattccattaggcattttagctagctttttaaaagtagaagctgagttaattcctgcaatattggtttaagtattaccaaagtgttctacagtgtttgtaccaaattaaatacagaataaccaatttaaaatcttagtcaactttataggtgaaaagtctttcattgttttttttccctacttttttttccaatatgtggagttgtttcattgccagcgttttgaatagaaacactttcattgaggaattatgttttaaggctacctaagatttgtttcaattagggatggccagataggcagacatggaaattactatcttgaaggaggagttttactgtactcacagattcctggaaacaggaggcatgacacaccatgcagggccacatgaggcagccccasggtcagtcaggaggcagagggaggtggtaaaatgtgggcaagagcccctattgtggtttccatga

SEQ ID NO: 815030 - DNA, 628 bp, Homo sapiens
ctgagaaatagggatgctatcaccttctatgttcagatttcagagatggttcccagattcttgaggatgacattttctgaattataaaactagcaaaatatttacatacatttcaaagggacagagaaaaatttacatttgttaagtattctaaagtaaatgttctaagaaaagagagtttggcagcctattgtcaggaagaaacctgtgtaatgtaggcaagcttaggctttttgggtcaattacattcaaaaattgcctaggaaatgtaaaatgaacaaacctaccaaaaaacaaaacaaacaaacacataaattccaggtcctactgtggaccgattaaatctgaaaattagaatctctagtgacctgggcatcaatattttgaaaagctactcaggtgactggaatatggactgagcatcatatgtctatatgcctgtcccataacattatactccaacacctctcccctaactgagccataatggtctttagccccatgatcggcttattgrctaggattattttagatgtatttttagatgtagtgacggtttgtaggggcaaaggggaagttttatctctgaaggcctctgaaaatcaactgacgaaaggcagattaatac

SEQ ID NO: 815031 - DNA, 589 bp, Homo sapiens
tattcggtaagcatcattcaaatattttatctagatctccctttgttgaagaaggaatacttattaatctggagaagttgtggtagttgttgtttttcaaatcttaattaagcaytattgcctttttgtccttaaaagcatatggggagacagttaaatgagttttcaatgaaaagtgagctgatggctcttgtttagtacaaggaaaaccgatgagctgttggaagagttagaagccattaccagagataaggctctaaattaaagctgaactataaacttcaaaattgagtaaggaaaaaaaggatgggagaaccattacctatctaattatgatgcaattcagtggcaagtatgtaaagtttatttcaagtactctaactataccagcagaagttgtcattgcacataattgtttcattagttatgacttgtaaacacatggaaacatgattcaactgccccttttgcagtcaaagaaaagtgtggcttccctgatgaagtgttgattccatattgaggtttgaactgacaaacccagcttatactgtactttgaaatgctccaagcccagatttttattttttta

SEQ ID NO: 815032 - DNA, 613 bp, Homo sapiens; identical to SEQ ID NO: 813679

SEQ ID NO: 815033 - DNA, 553 bp, Homo sapiens
tcctgataggaaccttgtactatctggccacataaaccaaaagacttcaccaatcctctgttcaagtktctgccatttttccaggagccagaagcttcctttcccaggaaatggcaaagtatatgccggtgagccctggtctatataaagatgccacacttttcctcctctgacaaatacccgacctttgtgtggagctctgagcagccagacaactctcagcctgttattggtgtccctggattcctctcagtagaaatgtaaccaaaatacaggtttagtcacttgccacctgcttagtccaatgaacaagagcggagtctggtataaggaatgtgattttgtattccaaagctagcttagggaagtacaggctgcctgccttatgggtaccactttgcttttggagcagaaagcagaaacttttaaaaggggacttggcatgaatggcatgcaagggagggcgtgagcaggtgggggtctgcatgactcgatttgtgccttatctaccaggtggtcgagctggcaccatcccgggcagaactaggttgta

SEQ ID NO: 815034 - DNA, 550 bp, Homo sapiens
tcatttctggtcaccagtcatcgcttcagagttggtcttaataatcaccctcaccttcccagggttactcttttcaatacagcgcccaataatatcccgctcttacacatgctgatcctatgccaccaagataactatatcccaacccagccaggggctagacaatacagtatggaatcccttgaaaatgaaagtgcttgtgctagacgtgaagcattaatcaggtgaagatccaggatttgtgatgctcttgatgacagaatcattctgattccttctcatggcttacaggagggaaggacaaagtgagtcaccagtcccaacagtagatactttttgatgatggtttgtacttcatcttccagggaccaaaagatcagttttaatattccagtttaattttgaaggcagaagcaaaaaattcttctgagaatcctaagtgcaaagaaccaactgactctgtttctgtgytacttgattttcttgctgccttagcagcccctttagcatcttcctctgcttaggccatttgttagaaaggtagagtgag

SEQ ID NO: 815035 - DNA, 571 bp, Homo sapiens
gcactcgggggaatgggtttgaccagggctggttccaacccagcattacactgtctgtgggatcacatctctttccaacatccagttctgactcccattcccctctgtttagctgcttcttcacacaggatgcttctcagaaacttcacttccaaattatggggtgggattcaagctggaattcttcatctatgatgaaattttaaaatggtattcaaagctttgtgcaaaatagcattttatggtacgtaaacctctaatttttatcagactctcaaagggatctgctagagaccacgggcctctaaagctctttaagttctaatgttctgtgaccctgtgattgcataatatgattttgtggcaaatttgcccaaagcagaagcattcagtcactctcccaaactgctctattacattcctaagtgagtacaagagtgtatgcaagcattttagccttattcgcacagaagatattatattaagagaataaycaaggattcagcatcaaaagctttatcagcaagatattagtactctacctagaagactattctaacctcaagtacta

SEQ ID NO: 815036 - DNA, 574 bp, Homo sapiens
acaatgttgaagagattgagtgacatgccccaaataaagcagtgtccccttatttaacaacttataaaatatcttacagccctrtggttctccctgatcttctgccacttataccttatgtaatggaatgggaaggtatcactgccaggaaatcaagaattaggatccggagtttctgtgctctgttcgctactacacgtgatctaccacaattgggaatctaactcattctgttctgctaaattgttgccagtgctcacaaacgcacattgtagtggacagtataataatattattgttaactgatgttattaatgaccacaaaatgacaaaattaaggacacacaaaaaaatcacctggagtatactcttggtgaagcaataacacagggtacaaaagaatacagaatacacagatctgggtctctgggataaagactagatcctaaaaattgtaactgatcagaaaaatacagagctgtatggtcccaagtgggaaatatttcatacaatggtgatctgacaagcttcaaatttttttcatgtgtaatgatgtgattgttaaacactagat

SEQ ID NO: 815037 - DNA, 584 bp, Homo sapiens
gaagccctcctggcttcacacctaaccaggatccacatgcctcttccactgagctgggctctcccagcttcctgactcaggcactacctcgtctccgggccgcaggggtttgggcatcattctgyctgcctcttcttcctcctccttcctggggctaaggtacatcatctgggcaggtagctgtcttgggaagatgacatctttctagccagacacctggtggtggcaactctgcaatagtttagagggttgcagtggtgtttcaatgcgcccacacttgtctcagggctattctcttaaaatcagtaactgggacattattttttctgaaatccaccgcaccctcacctacttcctacgccaagacaatagcccatttagatttttcttggatgaagagacattcacacacacacacacacacacacacacacacacacacacaaacaaaaaacacacttttttttttttttttgagacggagtctggctctttcgcccaggccggactgcagtggcgctctctcggctcactgcaagctccgcctccggggttcacgccattctcctgcctcagcctcctga

SEQ ID NO: 815038 - DNA, 584 bp, Homo sapiens
gaagccctcctggcttcacacctaaccaggatccacatgcctcttccactgagctgggctctcccagcttcctgactcaggcactacctcgtctccgggccgcaggggtttgggcatcattctgtctgcctcttcttcctcctccttcctggggctaaggtacatcatctgggcaggtagctgtcttgggaagatgacatctttctagccagacacctggtggtggcaactctgcaatagtttagagggttgcagtggtgtttcaatgcgcccacacttgtctcagggctattctcttaaaatcagtaactgggacattattttttctgaaatccaccgcaccctcacctacttcctacgccaagacaatagcccatttagatttttcttggatgaagagacattcacacacacacacacacacacacacacacacacacacacaaacaaaaaacacacttttttttttttttttgagacggagtctsgctctttcgcccaggccggactgcagtggcgctctctcggctcactgcaagctccgcctccggggttcacgccattctcctgcctcagcctcctga

SEQ ID NO: 815039 - DNA, 632 bp, Homo sapiens
gattcaccgctgcctttttgccgatggatgtccttaggtgccaaactcctcagggattctatagaacaagttagcttgcttctgggtgtsttgttagcaagctgttggagaatggagaagtgttgtattgttatttgtacttttctgtatatattaagcaatttggaaactctccaggtgattctgatgtacatcccagcttggtttctgcggtgctgtgtaaatgatcatctgaaaatgcagatgaggctatatcacacctcagctccaaagccttccatggctcccatctcctgtagactcaatttcaaattccttattgtgatattccagatgctggcctcactttctagccttgccttccactactcaccattctgtgctttttacagatgcttttggttctgtatttaactcttttccctcactctccgacatttgctcatcaaaatattgtttttcctcaagatctattttaagttctacctccttcataaaactcctctcttttcaaaagctttcttttctgtgctgcctacagaatttcttttatgtttcttttatgatacttagaatattatggtataggtcattgttattcacttttatgcttatctcattatcccctatca

SEQ ID NO: 815040 - DNA, 498 bp, Homo sapiens
aggtgttcctgtttgtgactttctttggatttagagattaccctgcttggggataagggaatgaatgacagtgaggtccttgagtaggwcacagagtgtccccgtgacctttccagacttttccctgggaatcctggcaatcctggaggggaaagattaaggggaggtgtcttagctcagccttccataacaaagcaccacagatgatgtggcttaaacaagagaaatttgttttctcacacttctggaggctggaagttcaaaatcaaggtgtcagcaaggttgggtctttctgaggcctgtctgcatagcctgtggatggtcttctccctgtgtcttcctattttcttccatctgtatgtacgtgtcccgatttcttcttataaggtcaccagtcacctattggattggattagggcctacccatatgacctcattttaaattaattacctcttaagactctccagatacatcacattctgaggtactagggatta

SEQ ID NO: 815041 - DNA, 533 bp, Homo sapiens
tagggaaatgagaaaagggacgcttaggctcctgaagaaagacttgaaaagttaaatatgtttcgtctggaaaaaaaagactgagaggtgatctcatttcagtgtttggatacctgcarcagatattccaggcccaaggatgtgacctgtcctactcactcagaagcaataggaaactgcagaaggaaagggttacattagaaagatttcccctcaaagataattacatgtttattccagttttagtctaagtgacaggattacagttccttccccatctgtaatccagggagaataatgcttgctgcctaagttttaatggatataacatctgtaaaatactttgagctcttcagatgaaagatgtcacgtgagtgcaaggaattattgttattatttttgtctcctgccttccctattggtataagtttctttgtgacatttacaggaccctccagtcagccagctgctctgtaacatatcatctcagtgatattttaaatccttcacgtggttctgattgtacccagaac

SEQ ID NO: 815042 - DNA, 634 bp, Homo sapiens
tataaaaatgtaaaacaatggtcatcttcccactatttttttttattttagaaaatttagttattttcacaaaaaaaaatgttacgtgtgttaacatgtgttatgtgttgaatcatgtgctcccaaaagatgttgaagtactaagcaccagtacctatgaagatgatcttatttgaaagtaggttctttacaaatgattaagtgaagatgaagtcattagcatgggtcctgattcaatatgattcctgtctttgtaaaaaggagaaatttggacacagacacagacatgggggaatgccatctacaagccaagaaacacctaagactgccagaagctgagagagagaactggaacagattctccctcatgggcctcaggaaggtcctccctcaggccctcttgccggcactttgaattcaaacctgtcgccttcagaactgggagacaataaatgtcttgtttaagccagacagtgtgtgatactttgttacagcaaccccagaaaacaaataaaacgygtaattcgtttattatttttaatcaatgtattaaaatatatttaatttatccactttaatttctaatatgacaaatactaacagatttaaggcacataaagaaaagctctttggg

SEQ ID NO: 815043 - DNA, 576 bp, Homo sapiens
gtaagaacgaatgcccagaaagagaaaaggaaagaggcaacaatcagggaaaaaacggctggccagaacccaccgccactggtcaaggggttcagaagtcagacatggatttaattggactggcaggaatcaatgattattatgaggactgagatagaccaggctccatttcattaggcccggaggagcctatggtctcaatggaggtagggggccagaaaatggactttatggttgatactggtgcagagcactcagtagtaactcaagcaattggttcactgtctaaaaattatttcaatataattggagctacaggaataatagaaagaggccttacttcaaatctaaaagatgtgtgattggaggacagcaagtccaacatgattttttatatttgccaaattgtctggtcctctgttaggaagataattgctccagaaattgcaagcacaaatctcctttacttgagaaggggaaatgactctaaacctaggtcaaagaagmcatgataatgacccttaccatccccacaacagaggaatggagactctatgagaggtgcaaaatttgtaa

SEQ ID NO: 815044 - DNA, 642 bp, Homo sapiens
taacattgcatttttgttatttattaaaattcatattatattggctgggtgcggtggctcacgcctataatcccagcactttrggaggctgaggcaggctgatcacgaggtcaacagatcgagaccaacctggccaacatggtgaaaccctgtctctactaaaaatacacacattagctgggcctggtggtgtgcgcctgtagtcccacctactcgggaggttgaggcaggagaatcgcttgaacctgggaggcagaggttgtagtgagccaagatcgtgccactgcactccagcctggcaacacagcaagactctgtctcaaaaaaaattcatattatgatattttgatcaataaaattgttttaatgaataatatagaaattgttttttaacacttagagctaatgatcacaggaggttttcagttaatttcaatacctacacagttttattacagtgactataataagcatgaagacatattagaataaaattccatgggggaagtgggatggaaatgcagatccaaagagaaataagaacaatataaaagttctgatggccaaagaagacctggttggcataatttttaaacaagtgatggtggctaacacattgttatagtatgtatgtttcactgg

SEQ ID NO: 815045 - DNA, 580 bp, Homo sapiens
tgttatttattaaaattcatattatattggctgggtgcggtggctcacgcctataatcccagcactttgggaggctgaggcaggctgatcacgaggtcaacagatcgagaccaacctggccaacatggtgaaaccctgtctctactaaaaatacacacattagctgggcctggtggtgtgcgcctgtagtcccacctactcgggaggttgaggcaggagaatcgcttgaacctgggaggcagaggttgtagtgagccaagatcgtgccactgcactccagcctggcaacacagcaagactctgtctcaaaaaaaattcatattatgatattttgatcaataaaattgttttaatgaataatatagaaattgttttttaacacttagagctaatgatcacaggaggttttcagttaatttcaatacctacacagttttattacagtgactataataagcatgaagacatattagaataaaattccatgggggaagtgggatggaaatgcagatcyaaagagaaataagaacaatataaaagttctgatggccaaagaagacctggttggcataatttttaa

SEQ ID NO: 815046 - DNA, 536 bp, Homo sapiens
ccatttttctggttcaggatttgcttgttatgaatatggagtaacccttgaacatcagtaaacttcacgagtattyctgctgtcctgacccatatttccagtgacaacctgacatatgtagacactatgcaaagcccacctccattagaagtttataacactgtgttttcatgtgactgttttcttattcctgcagcacatatttcccgggataataaaataaccacttcttgcatccccctcgtttgaagttctgagacagctactctttggttctgatgatctcagcattgccccagctccaacaaaatctgttttcttgatggcaagccctgccattcacttttgaagatattactgagaggtggatgttgggcagtgttggaactgggctgttggattttgcaacgattcttggacaataagaaatgacatgctggttaactccaagaatttttttctacatttcgtgtcaagaaggctactggtgtcatctcaagacctcttcctcactattacctcagtatacagaaagg

SEQ ID NO: 815047 - DNA, 617 bp, Homo sapiens
aaaaaggaggacttcctgcgataaaggggtttacacagcatgtggacacattaccaatttgtctctggtcagaggtgactacagygaaagataggcctgagaagaggtgagaaggagcaattatggatggtgtatataagggaactttgatcaacatcaacaatgctcatggttctaccttcacaatccaggaataatcctcctcggctgctaggccttggaacatatagcaccacatgtggggtgtggtaaagagcctgcagtgaacgtcctccttaacacatccaagaagaaagagtccctcctctccatctatcttgtcattctgtctcttctctttccaataattgttacagacaccaaaagcccaattccaagagtcccccacatgaacctcccaataatatttgccagatgtgaaagtctgagcgctctactcaggaaaacattcagatgttgccatgatgcggggaccatcttgagggtcacatccaacattcatgcttcttaagtctccatacaggaagatatgactattggctctttcaggatgcggagtaatatcaactgcaaatttttttaaaaaaagtatggacacgtgtaaataataaaagtta

SEQ ID NO: 815048 - DNA, 617 bp, Homo sapiens
aaaaaggaggacttcctgcgataaaggggtttacacagcatgtggacacattaccaatttgtctctggtcagaggtgactacagtgaaagataggcctgagaagaggtgagaaggagcaattatggatggtgtatataagggaactttgatcaacatcaacaatgctcatggttctaccttcacaatccaggaataatcctcctcggctgctaggccttggaacatatagcaccacatgtggggtgtggtaaagagcctgcagtgaacgtcctccttaacacatccaagaagaaagagtccctcctctccatctatcttgtcattctgtctcttctctttccaataattgttacagacaccaaaagcccaattccaagagtcccccacatgaacctcccaataatatttgccagatgtgaaagtctgagcgctctactcaggaaaacattcagatgttgccatgatgcggggaccatcttgagggtcacatccaacattcatgcttcttaagtctccatacaggaagatatgactattggctctttcaggatgcrgagtaatatcaactgcaaatttttttaaaaaaagtatggacacgtgtaaataataaaagtta

SEQ ID NO: 815049 - DNA, 533 bp, Homo sapiens
agggggaagcgtattacagaagtgagaaacaaagacagttatttaattgagacttgcattacattattttttactttttaaggaaatatgttttatgacttgagtttatctatctagtgaccttacagctgcacagctagagaaacagggtctttacaatgcctgggaaagggagagataaggctcagtagccacagaaaaacaggcagttaattttaaaggactccagccctttctcttgtttagggggaattggcttttcttatatacaactgagtttttgcttatacagtctttaatttttttaaatttctgttccattaggcttatgttgtttgccaaatttgagaagtttcatttcttcaagtactttttcaatcctgccttacttctcctcttcttctggaactctgataaaartgaatgctacatatttcggtatagtctcacaggtttctgaggctttgttcactttttaagtctattttctctctgttcaaattaagtaatctttattaatctatcttctagct

SEQ ID NO: 815050 - DNA, 533 bp, Homo sapiens
attcatccattgatggacacttaggttgattctatatctttacttctgtgaataatactgcaatgaacatgggaatgcagatatttcttcaacatactgatttcattttctttgtatatatatccagtagtggatcatattgtagttctatttttaattttttgagggacctccatacaattttccacaatggttgtattaacttgcattcccatcaaccctgtgtgagaattcccttttctcaacatccttgccaaaacttatcttttatctagtctagccatcctaacaggtgtgagctgatatctcactgtggttttgatttgcatttcccggatgattagtgatgttgagcactttttcatacacctcttagccattctgtgtctttttttgagaaatgtctatttagctcctttgtccatttttwaattgggttatttgttttcttgctattgagttgtttgagttccatacatatttgggatactaactccttatcagatatatggtgtgcaggtattttctcctgt

SEQ ID NO: 815051 - DNA, 533 bp, Homo sapiens
attcatccattgatggacacttaggttgattctatatctttacttctgtgaataatactgcaatgaacatgggaatgcagatatttcttcaacatactgatttcattttctttgtatatatatccagtagtggatcatattgtagttctatttttaattttttgagggacctccatacaattttccacaatggttgtattaacttgcattcccatcaaccctgtgtgagaattcccttttctcaacatccttgccaaaacttatcttttatctagtctagccatcctaacaggtgtgagctgatatctcactgtggttttgatttgcatttcccggatgattagtgatgttgagcactttttcatacacctcttagccattctgtgtctttttttgagaaatgtctatttagctcctttgtccattttttaattgggttatttgttttcttgctattgagttgtttgagttccatacatatttkggatactaactccttatcagatatatggtgtgcaggtattttctcctgt

SEQ ID NO: 815052 - DNA, 572 bp, Homo sapiens
ctaggagtggaattgctgagtcataccataaatttatgtttaactttggaaagtggctgcaccattttacaatcccaccagcagtatataaggactccagtttctatatccttgccaatacttggtattctktatttttgattacagctattaggttggtgcaaaagcactttttttttttttttgcagctttcaatggcaaaaaacgcaattactcttgcccaacctatattttagtgggttgcagtggtatttcattcctgaatgactgataatgagcatcttttcatacacttatcatccatttacatatactctaaggaacctcatataaaaggaattatacaaaatttgtcctatgactaagttagcataatgtcttcaagcttcatccatgttacaacatgcatcaaaattttctcctttttaaggctaaataatgttccattgtatatgctacattttgtttatcctttcaactatcaatggacactgaggatgtttccaccttttggttactatgaatgatgctgttgtgaacatgggtgtgcaaatacctgttcaagtccctg

SEQ ID NO: 815053 - DNA, 565 bp, Homo sapiens
acctcccctcaggggctttcagtatcccgtggcattcagctggataatcagggtgccagggacaccgccggggccaggtcctccatggccacgtcaatagatgggaccaaaagaattctctggctcctccagaccaaacagccaaggctgcaggcagagagaattgattgtgaggatgtggcttgcagcatggatggtggttgagagcccagattctgcagcagactgcttgggtaaattcaaactccacttcccactaaccccatgaacttctgctagaaaaagggtgtctctaagcctcagtttccacatctgtaacttggaggtaatagtgccatcctcacagacatgctttgaggattaaataatgtatgtaaagtcttaacccagtgcctggcacgtagtaggctcgaataatattagctgttgttatgaccactactgtaaatcctaaagattcttggaggagaaatcgggtytggagcaccttagcctcaggaccaccactgcttttaaagcaaggttgtccaaaataatctcccaagtctgactgaatggctcacaa

SEQ ID NO: 815054 - DNA, 565 bp, Homo sapiens
acctcccctcaggggctttcagtatcccgtggcattcagctggataatcagggtgccagggacaccgccggggccaggtcctccatggccacgtcaatagatgggaccaaaagaattctctggctcctccagaccaaacagccaaggctgcaggcagagagaattgattgtgaggatgtggcttgcagcatggatggtggttgagagcccagattctgcagcagactgcttgggtaaattcaaactccacttcccactaaccccatgaacttctgctagaaaaagggtgtctctaagcctcagtttccacatctgtaacttggaggtaatagtgccatcctcacagacatgctttgaggattaaataatgtatgtaaagtcttaacccagtgcctggcacgtagtaggctcgaataatattagctgttgttatgaccactactgtaaatcctaaagattcttggaggagaaatcgggtctggagcmccttagcctcaggaccaccactgcttttaaagcaaggttgtccaaaataatctcccaagtctgactgaatggctcacaa

SEQ ID NO: 815055 - DNA, 578 bp, Homo sapiens
ggcagttacaggagttgaagtaatttacgtggtcataagggagtaaaattctgccctggaatgtgcatgtgtattcaagcctccccctctgtggtttgccacaggaaagcatggcaggtctgaggtctttggaagccttgctcatgattgcaaacgagaccaggccagggtctgtgagagcttagccatgcacccaacctcattgtgatgtcctgacatcttctagattgcaaacatcaacgtgttcctttgcatgagaccactggggtgggagggttactcttagctctgagatacccagtgagaagcgtgagggcaccttccccactcagtagtgcatctgaggttggtaggtccccaggctagcccaccacactgactgacatgatcttgtctgatggagacccaggggtttccatcccacatccgagcatgttgttattcatgccccagcctttgcacagggccrtgctgtttgcacaccaagccctccgcagtgtgggggtggtagtggagggctcagttaatagctgctgctttgatatcaggctgtgaaggacactcttggggctctggag

SEQ ID NO: 815056 - DNA, 560 bp, Homo sapiens
ttagagctgtcactgttaaatttaatttccttgaagtgttagctgatggagtgtatagttttacttctttagggaagtatttatattttaatagttttaaacactgaaaaatgtcatgacttaaagaaatgaagtggcaatgatgaatttttagctctgtgtcaggtggatccaggggttgttttttgtgaaacaacctgcttgtctggccaggcgttattttagtataaatcataagttggagcaattggaacagttatactgtttcataaactgtaatgtattatacaaaatttgtaactgaagttacataatcgaatttactgaggtacatcaatttgtagtttaaaaaaataaggtatttcacattcattatttaatctcctcagcaatgctaagagttgttataagttttattctcatttttccaattaggaaacaaattcagagatattaacaaaattaacatgctggtgagaccycttaagtaagcatcagaggcaggatcagaacacaggcttccctgtgaatacaaattgctttccattcctccagccaag

SEQ ID NO: 815057 - DNA, 461 bp, Homo sapiens
ccgcataaaacaagaagttaatagatgttcattatatttattattgttgctattactctctagtttcccttyttcctcccaatccacagatgttagcattaactacgtttctctccttggtctttgtggccaagactgctagccagtcctcaaaataattatttctccttttcctggacacatagttagactttatttccccagtctctcttgcaattaggtgtggccaaattctgaacagtgaaacagagcagaaattccagacttgttccattaaatcctcccacatacattcctccatgattttttgtcttactggtcaattgggaagtcaggcttttggaatcctcttggtgagatgtcagagtgatcctcagcatgggtcactgaatagctatgtgagaaagggcctgactacccagccaaccacctggaatagtcttggtctatgacataggtga

SEQ ID NO: 815058 - DNA, 522 bp, Homo sapiens
gactaatggctggatagtgtttacagcatggttatgctggacaaagggatgattcgtgtcctgggtgagatggagcagatgggtgtgagattttatgctattcagaatggtgcacaacttaaaatttataaataagccagatgcggtggctcacgcctgtaatcccagcattttgggaggccgaagcaggcagatcacctgaggttaggagtttgagaccagcctggccaacatggcgaaaccctgtctctacaaaaatacaaaaaaattagctgggcgtggtggcatgccctgtaatcccagctaatcgggaggctgaggcaggagcatcgcttgaacctgggaggcagaagttgcagtgagccaagattgcgccactgcactccagcctgggcgacagagcragactccatctcgaaaaataaataaaaataaaatagcatttataaatagtttatttctggggtttcccatttaatacacttactattttgagaccacagttgactgtcagtgactaat

SEQ ID NO: 815059 - DNA, 568 bp, Homo sapiens
aaaaatcaggaaatgtaagtggatcctggcatgtttttcctacatatctggtgcaataatatggtacatgagtcacagaaacacttgttcccatccccgccctccaaatgagcctaatgtaaaaatctatttactaaggatattttgcacaaggcatcctatgtgcttaattttctttaaaaaaggcattaataaaatcatagtagcttctaataagatttttaattccttaagggtaggaaccatggctaatctttaatgagtccaatttaatgggagcatttagttcccttctggtagaaacaaccaacagaatattcctagccctacaagatacatgtaggttgtatcactgaaagctccaggatgaaagggaaagtagactatgttcgctaccagtgactggcactggtcaatatacctgtatatgcttaaagactgctttccagagttactaacaacagatactgayagcaatggtatcaatgaatggaacaggagtttcagaaacaagatgctattttattacaaagtgaactcccatttgcaattacatgaacaatatgaa

SEQ ID NO: 815060 - DNA, 466 bp, Homo sapiens
gggtggagaaggctttgaagtcggtagtgacgccrtggagggtgaaggcttcggagaactgaagaggtgaacacagggccagcagataagcaacctaaacaaccaagagtgcactcccaggcacagaatgaagaatttctgacaatgagtttttgcctggcttttgcttagtctagtttttagagctatgaaggatgatgttcctgaacttggctaagccagaaatggaagaggctattagcttagcagtagtctatgaactttcccccagagctggagctctggatctcttgcctcagttagggcttccctgtagctttctctctgtctttctgtattgaataaatcaatctagggcctacaagagtcctgggagatgcattttatgcgaatgtccatttttcttctgagagtattcaaagccttcactggagcctgtgggatccctccttgaaaagttaaacct

SEQ ID NO: 815061 - DNA, 513 bp, Homo sapiens
agcgacttcaggaaagaaatcctggctccatcacagttcattttcataagtgcatgccctttaagtctggctttctggaatgacccaagcagcaagctgctgagcccttctcctagccattgattgcctggcccttttaaagcttggaatccagtaaggttggtgtagatgaaacatattcaattagcatatcgtgttgttgagggtgtgggtaataagcactccaacatgggcacttacaactcctgtggggggtggcaatttggtgtgccatcaaaatgatgacagcacaaccttttgacatagcaatttttgtcctaggtgtttatcctacagatgtagtcctgcatttgcaaaatggcatttgtatgaggatgttcaatgcagcactgccaaagtttgaaaatgacttggtggrcataaatggggagctggttaaactgattataataagaggggcagtgacatattatgcagctatagaacagatcaagggctttctgtatgtacaaa

SEQ ID NO: 815062 - DNA, 606 bp, Homo sapiens
cttacaatggttcaatttacaattttccaacttcagaatgggtttatccgggtattaagtgcacttttgacttaacaatattttcatcatacgatgagcttattggaacgtgaccccatcttaagtcgaggagcatctgtataagttttgcatatgtctccctgggttcaagtccatctgttatgacaccattatatattttgtttaacacatgtttaactagtgtcgattacaggaagggcataatcctggatacttgggatgcggtgttgaaggaaacagccatgacctctagccagcttagagtccgaggtggaaacataataactaagcacataacaaaaaatgacagcaatacagtgtgcttattacacaccaagtattttctaaaagctttacctctagaaattcacttaatcctcacaaatgccctgacagaagggagtaccactgttagccccattttacagagaagaaactaatacataagcaaaataattttttaaaaattattattttttttaagttccggggtacawgtgcaggatgtgcaggtttgttacataaggtaaatgtgtgccatggtggtttgctgcacctgtcaac

SEQ ID NO: 815063 - DNA, 495 bp, Homo sapiens
atctggagccaaggagtccaaaacagctcaccagctctaagtgcacacatatcagggctgggagccggaaccgcctgggcatgcgttcctgcgcgcttactcctgaggccagggaaaaaggtttgcctgcgatcctgaccaaggccacgcattaaaagactgcgtggaatccttaaagcctctaagaatctaacgtcctaagaaagaccaccccagaagtagatgtgatgtacctaagccctggcattcgggctctgcgcctcaccagcgtctttacgcacaggcgcaattgcgccgggcactagggcgcaaacccggatcctgcgcgctggcttctgttacctcccggcttcgacttcggctgctgcrcactcgtcaaagtaatgaatggagagagaaaagaagagggggggagggagggggcattgtgaagggggtggaatattttggaaataataccctgagagaaggaaatatggacaacagtttatcagc

SEQ ID NO: 815064 - DNA, 492 bp, Homo sapiens
tcccatggagggggacatggctgaaggagagccagcacagggccctctaaaacactgagtccaaatcaagggcccttgtgtccaagtctaaagttggctcttgctggggcaaggtccttgaaggagcaagaggtatagcagcaagagaaaccaaagtaaggaccagttcaaaagttaagtgaccaagttctcgtccccattctacctctaaatgttaagatgactttaaccccaccaggcctcagtttctccttctgtaaaataaggtgattagcagttcaatacaatgatatctaaggtgtatctcaagtctaagctcctatgattctacaaatccatgctcaaggagaaaagctgtagctcacagccctaaagatgcctgagaacaaaataagaaataaatggagcaaactgagccacaaaygcctacaactaatgggccgggcagtgtatgtgcatcactcatgcagaagaaaactataccagtgggaa

SEQ ID NO: 815065 - DNA, 568 bp, Homo sapiens
aaccatgaggaaaaaggtgaccttgtcaaagtcccaagaaaaaaaaatggctcacaagtcaaactccattacagtgaaatttcaaggatacccaattcttttctagtacaaaaatgtaggcccattacatatttctttaatttttaaaaaatgggggctgagcttcgaactctttattacaccagagttttggagatttgtggtgggggttattttggggagggtgttttgttctgaagtgatatttgctttactgaaatttcactagcagtaacaaaagctgtgttttaaagaggcttattaccaaaaaaaaaaaaaattaaataaataaatatatgtacaccttgcttggtagtatccagatgaaccttttttttttgtaaatgaagtatgtgaaatagattaagcaataaaggcattgagagatgatatttaaaggaaacctattataaatccattggtagggtatattcaatattttgtaaaaggagtcaccctgsgagaaggaggaataaataggtggaccacagatgatttttagggcagtggaactctgacacggatacta

SEQ ID NO: 815066 - DNA, 573 bp, Homo sapiens
aggggatccacatttagttcttggcctgaagagaagtctgggacatcaggaagagtgcctgagaatttaaagataaaaagaggaaaaaatgctcaaccccaagtctctggagtaggccaacgcatctaagccacatgccgtaaagtcctgcgagcctatggaaatgtttcaggtaccacgtgcaaggttgcagctgtacaagggaaatctgggtgttccacactgggttctatctactttatgttgcttaacaagtacctcctatctgttttacataatagatttccatgaaaaattccatttgaagaaagtattcaatcaaaaagcctctaaaagtttacttgactagacaataagggcgataagaatgcagcatctcagaaaccagactgtagtctgttctggtgagcatcatgttttgcccccaaggatggttgatggcacttaggcttctgtgctgttatggcaggttaaaaaactgagatagcccwtaaagaggtggctgtctggaaaagtgatgggcaaaaagacaggcaagggcacctgagatctgtacaacactctacagtgtag

SEQ ID NO: 815067 - DNA, 508 bp, Homo sapiens
aatatacatttctcattaaaatctaaattcaytagttgtttttaagtttttgcctacattgttagactaaacatgcttgttcccgtgaaccaaccaggaatctccagctgcagctcagatagaacaagagggatgggtaatgtaaaaaatctggatcaatattctagttctgagcaattatcttgcaaatcctgccaggtaattggaataaacagggtgcccatcacccagaggtttctttttcggaaagtaagaccaagggaagtaatcaaagctaagcacaatacacctaaattctagcaagcataactatagacaccggttatctgggtatgtcacaacttatctttttctctcccttattagaagaggactcaattccacagcttcaccttagcattcagctataaggagtccatgcaacctccctgacacacatttttttgtcccaacctcaattccaagctttgccttgaagccctagggagaaaactggatctgagggatc

SEQ ID NO: 815068 - DNA, 486 bp, Homo sapiens
aaattcactagttgtttttaagtttttgcctacattgttagactaaacatgcttgttcccgtgaaccaaccaggaatctccagctgcagctcagatagaacaagagggatgggtaatgtaaaaaatctggatcaatattctagttctgagcaattatcttgcaaatcctgccaggtaattggaataaacagggtgcccatcacccagaggtttctttttcggaaagtaagaccaagggaagtaatcaaagctaagcacaatacacctaaattctagcaagcataactatagacaccggttatctgggtatgtcacaacttatctttttctctcccttattagaagaggactcaattccacagcttcaccttagcattcagctataaggagtccatgcaaccyccctgacacacatttttttgtcccaacctcaattccaagctttgccttgaagccctagggagaaaactggatctgagggatcca

SEQ ID NO: 815069 - DNA, 647 bp, Homo sapiens
ccttaggtggatcctccaaactgggaaaagttaatttcccaaaccttaaactggttggcttaggatcgggctcaggggaaggaaacccagaagcctgacatgcyggcaaaacggtaaatttttttttttttttttttttttaaccagtcgaggttttggcctccctctctccatgcaaagtgatataaggcctctggattttttagctatccttacctctcctcttgtttcattttgatacatgttttctaatgacccagtttgtctcttctcgccttcaggccatcaaactccaaaaggtcatgcaaccagagcctcaaaaaattgccctttctgctagggacccttagataggcctctgagggagctctgactgccattttccccaaaacagcgccgcctgtcagcagaaagcagttaagactggtctttgtttttatccttacccttattccaattggcagttacatgtacttctttaaagcgattaatgagactgccaagtaaaaagggctccctggagaatcttcagccagcctgagcactgggagaatggggtgaagacttgggaattcacaccatttgctggggagaggagcctggcctctcttgttcttgggtggtaacctgggatttggccagtgagg

SEQ ID NO: 815070 - DNA, 647 bp, Homo sapiens
ccttaggtggatcctccaaactgggaaaagttaatttcccaaaccttaaactggttggcttaggatcgggctcaggggaaggaaacccagaagcctgacatgctggcaaaacggtaawtttttttttttttttttttttttaaccagtcgaggttttggcctccctctctccatgcaaagtgatataaggcctctggattttttagctatccttacctctcctcttgtttcattttgatacatgttttctaatgacccagtttgtctcttctcgccttcaggccatcaaactccaaaaggtcatgcaaccagagcctcaaaaaattgccctttctgctagggacccttagataggcctctgagggagctctgactgccattttccccaaaacagcgccgcctgtcagcagaaagcagttaagactggtctttgtttttatccttacccttattccaattggcagttacatgtacttctttaaagcgattaatgagactgccaagtaaaaagggctccctggagaatcttcagccagcctgagcactgggagaatggggtgaagacttgggaattcacaccatttgctggggagaggagcctggcctctcttgttcttgggtggtaacctgggatttggccagtgagg

SEQ ID NO: 815071 - DNA, 624 bp, Homo sapiens
agattctggatattaatcctttttcagatgtatagattgtgaaggttttctcccactctgtgcgttgtctgttaattctgctcactgttccttttgtcatgcaaaagctctttagtttaattagatcccagttatttatctttgtttttattgcatttgattttgggttcttggtcatgaaatccttgcctaagctaatgtctagaagggtttttccaatgttatcttccagaatttttgtagtttcaggtcttaagtttaagtccttaatccatcttgcattgatttttgtataaggtaagagatgaggatccagtttcattctcccacatgtgactagccaattatcccggcaccatttgttgaaaagggtatcttttcccgactttatgtttttgtttgttttgtcaaagatcagttggttgtaagtatttgggtttatttctgggttttctattctgttccattggtctttgtgcctatttttataccaatatcatgttgttttggtgactatgamcttatagtatagtttgaaatcaggttgtgcgatgcctccagatttgttctttttgcttagccttgctttgactatgtgggatcttttttggttccatatgaatt

SEQ ID NO: 815072 - DNA, 618 bp, Homo sapiens
gttagtacattctctgatgtttgcacaatgacaaatcacctaatgatgmatttctcaaaatgtatccctattgttatgtgatgcatgactgtatatacacatatacaatatatattcacttataaacaagtatgttcttttatatataccatgttttctatttttcattcttttcagattcagttaagatctatacaatgcaaagtgttaatattgttatatttttcctaaacacatctccttactaggatcccatgtgtgctttgaggaaacttgtagttaatgagattatgtaatgccaaagcatgtaaaattagtctaagggagaccaagatgctgtatcaatcagggtcttagttgcaagctgcagaaactgacttaggcaaatttaagcagagaaggaatttattgaaagtattttgggcagcttacaacctctctgggagcgcccagggactgtgttcaaaaactagaaggaaggctagtatagggcctcacattgcagagctgactgaagacctgctgttgctgcacacatgagcactgcaatttgtgccatccatgtcagtgttactgtcactgggcagtggacactgctactgcctctgtccttttata

SEQ ID NO: 815073 - DNA, 557 bp, Homo sapiens
acagttggctatgcagcagtaggcccttttggtgtattgtatagaaaatgagccatttcattgtttgggaaacttgtgtttcctccccttccccccatttttagtatctgttaaaagaagaaagcttttggctacttaaaaaaacttggttatgtttagtttggtgccttttgatctggtcatgacaatgggagcaatactcttatgcttgctacttgtttcatttaaactgaaaagtccggaaaaaatatattagtacgcaggagtgctaacttgcaaatgagtttttcttgactgctaataactcaagcaaaaagataattatgtgttataaactgtgcatgcggaaagtgaaatgaaattcatccgcttcatattttttaggaaaattgataaggcatcgctgttaatatttttcacattaccttttggatttcttaattcagatattttctctccacaattttgagagaaaattaagaggggttgctgyccaaaactggggagtcttggaatcaagttgtgattgtatgtttatataaaaactcagtgtgacc

SEQ ID NO: 815074 - DNA, 613 bp, Homo sapiens
acttaaggaatattgttatctgccccctttaattccatttattggaagcaaattgagcatagtagaaatttcatacttttgtccaagttaattaaaaaatctttaattataatttaaaatattgattaatattcttcatttaaaatatctacatatttttgaatcatgtctgtttacaaactgtaataccataataaggagggaacagatgaaaagaacccttaagggttcagctgtttctcagtgtaggtaaacaacaacaataccacccttaacttttagttatgtctggtatgcataagaagtattttgagatttctaaataaacatttttttctctgaaacaaattgttgtattagataatcactacttgtattaaattgctgctttcctttggtactggaaaatgacaggtaagtttctgtaatgacttcagatgtaaaagacttatgatatttaaggttatttatagactgtcttgaaaagcctgaagggatcatataatttactcccttaactaaaatttgaaaaaaggaaagaaytcagtgaaatggaagagaatttctaatttgactacttttagacaagtattgaatacttacttctgataac

SEQ ID NO: 815075 - DNA, 461 bp, Homo sapiens
tacattcctgctgttgaactgttttgacatcctggaaaagggtgagtcacaaaagaggaaggaactacacttatgatccattgtaaacacttttgggtgtggtgrtgtgtttgtgtgtatcctagaacaaattatctcatttaatgcatggaggctatcaggtaggtttttgttgttcattctaacctgtaaggtgaaatttcttgtggttgcttctaactgctagtattgaagatactcctgaaagaggaccaaaagtagtgaaggaatacttttgcattgtgaggatgaaaccctattctgtagtcatttttgcatgaactgacttattaaaactaacgttttaatcacatagtatactattgcttttcattgttcatgagtaataacattgattcagttaaatagcaataattagaaaaaaatgattaaaataacattttcattgaaattgtgaatac

SEQ ID NO: 815076 - DNA, 606 bp, Homo sapiens
tattttggttgggtgcacttccctttagcacaatccactggaacagcataatatatgacatcaatacataaccctaaatctaggttattcaggattccagaacactgcagaaggactttagcagaacagcaagggttgcttccaggcatcccagcaaggacagtgcctccaccataatataaactggtaaatatatgcttccatgtcacaactacagccttccagtaactatcagacagggagtgtttagaaaagaacaaatatacatctcccaagaaaaaaactaatatttagaaaacatctttccagaaaggaatgatccatggagatgcaattctacccaccaaaccaaacaaaacaaaacaaaaacaaaaaacctatcttttacacaatatgtgtaaagagtaagacctttcaattttacttttgatggacaaaaatgcctatcaaatgatttcccacaaaccaaatagcagttaccccaaaggttaattcagatctctcyttctggagaaactgaaacgagccttaaaatgtgaatcttcctttttgatcttgcagtaatcaaggtttaaaaagtattagggttcagattcatccagaata

SEQ ID NO: 815077 - DNA, 606 bp, Homo sapiens
tattttggttgggtgcacttccctttagcacaatccactggaacagcataatatatgacatcaatacataaccctaaatctaggttattcaggattccagaacactgcagaaggactttagcagaacagcaagggttgcttccaggcatcccagcaaggacagtgcctccaccataatataaactggtaaatatatgcttccatgtcacaactacagccttccagtaactatcagacagggagtgtttagaaaagaacaaatatacatctcccaagaaaaaaactaatatttagaaaacatctttccagaaaggaatgatccatggagatgcaattctacccaccaaaccaaacaaaacaaaacaaaaacaaaaaacctatcttttacacaatatgtgtaaagagtaagacctttcaattttacttttgatggacaaaaatgcctatcaaatgatttcccacaaaccaaatagcagttaccccaaaggttaattcagatctctccttctggagaractgaaacgagccttaaaatgtgaatcttcctttttgatcttgcagtaatcaaggtttaaaaagtattagggttcagattcatccagaata

SEQ ID NO: 815078 - DNA, 523 bp, Homo sapiens
tctacaccttagaagaattcaggatcctcacatcctcctaatctggtggcctttcattagctttaggtttagttttggggaagggctattatcatttaaactataaatgtctcccaaagttagcttggcctatgcctagaaatgactcagggctctttgaaggttaaaggcaagatagaagttggttagatcacatctccttcactgtcatagttttctcactgttaaaatttttgcaaaggcaatttcaggattagagtcccccagcgacacctctctgtcacttgcagagggtcccaggtcctgcagagtcacgaaaaccagtctgtgacatgacatgtccctttgctcaagggagggctgcttggagctgcacacttgctaagttaaagagcaagggtgtccagggaaagtgatgaggctgcagccccagctcacctacccttcctgggcttcatgtccacctcagaaaggcccagccttaagttcatcagcaayagttgcatggcttgaaagcacacag

SEQ ID NO: 815079 - DNA, 561 bp, Homo sapiens
attgtgcaggaggaaggtgctgtgctaagatgtcacttttctgtgtgtagcttttctttccttttttttttttttttggagggggagttttgcccttgttgcccaggctggagtgcaatggcacgatctcggctcactgcaacctctgcctcccgagttcaagcgattctcctgccttggcctcctgagtagctgggattacaggtgctcaccaccacacctggcatatatatatatatatacagaatatatatatatatatatacagaatatatatatattctgtatttttagtagatacggggtttcaccatgttggccaggctggtttcgaactcctgacctcaggtgatccacctgcctcagcctcccaaaatgcagggattgcagggattacagggatgagctactgctcctggctgcttttcaaygaaccattcatggctcccttctctatacctccagcactcctccatacccccactaatccattaatcatgttgcactgtagttatctgttttcatgttggtctccccctctagactaagcctttgatgaac

SEQ ID NO: 815080 - DNA, 523 bp, Homo sapiens
agcaatgccctggtatattaatagacttatgaatgctaatattttcaagggcattatttgaagacatattttttcagattactataatttgggagtatgacattttggctaggaagaaaaccttcttgatcagaatattagtggccgaaggacaagggctttgtcttattagccacagtatcctccatatctggatgacatctggcttatagtaggtgctcagtaagtaacagctggagggaaggagtgaaggaaggagagaaagaaagaaatagaaaaagaaagaaagaaggagagagagaaagaaagaagaaagagaaagaaagaaagaaaaagcagggaaggaaggaagaggacctttcaaaaaaccagctactctttaagggactcataaacaaaacaggtgagcgtttgaaaatggtacctgctatgagagaaagtaagtacgaayaattacctgaagaaaatttacaaagaactcaaacaactcaacaagaaaaaaaccattataaaattggacaaa

SEQ ID NO: 815081 - DNA, 600 bp, Homo sapiens
aaggcagccatgagcaaggatgctgggtgagccagggtggggtatgtgctgcaagaaaaaaaaggctcactcagaaggacagcacaacagagtggtggtgcgtgcctgtaatcccagctactcgggaggctgaggcaggagaattgcttgaacctgggaggtggaggttgcagtgagctgagatcatgccactgcactccagcctagatgacagagcgagactctgtctcaaaaaacaaaaacaaaaaacaatgaacaatagataatggtctaaatagcagcaataaggtttgctaagcaaattatgctacatccataggatagaattatctgcaggcattaaaaaagacagcaacgtttatctattgacatggacagttcatccaagtacattataaagtaaaaaagtaaattataaatatataatatatattatataagtataatacattaagttaaaaagttgatctaaatacattaartaaaaagtatatttttctaaaataaaacaatgttaattaacatttgtattgaaagatgtctgaaacaattcatataaaaatgtgctcttttctagaataatgtgtatcactaatgaaa

SEQ ID NO: 815082 - DNA, 503 bp, Homo sapiens
gactgaagtttctatgtttgcaagctaatcctcagcagtttctttgtaagtatccagcagttaagtgggaaaagtccgttgatagtactagggaggagagaggaaagtraccttttgttttcttgagatagacatactagtttagtactttatcatgtattcacctgcgtaaatgtattcctgtgcttcagagtgagggaaggatgcatatttgcatagtttttgtgactgcagtactgttcctctgttctggtgtgtgtgtgtgtgtattttttttttagtaaaaagaaaacagaactttgttttaatgcagtaagcaaatataggagaataagataccacaaagcttggtggtgggtgcctgagtgtccatgttgctattactacattgttttgtccccttgatatagtttataatcaaaagatggtggaaaggtgcttctgtctacaaaatttgtctaaccatgcccttctttaactgaagagagaatggcttcattagc

SEQ ID NO: 815083 - DNA, 573 bp, Homo sapiens
tctcacaggtgaggggctctgaagcttgaactttgttagaytcatgactattctgcccctgggcacaggcagtcatctggcaaaacactgcctagataccttttgttcccttctctgttctgccaccctgatgcctcttctaggctaaggacagagacattgggcttcctccttgggaattctcagctctgtgggatgctttaatctgggtcctgagcccaggctcttctggttccctggcacttccctgctgcacatgcacagcaacctggtacttaacaagaaaggaaaatcatcatcctaactgctgtagcctttcaacttcagtcatgcaccacctaatgatgtttcagtcaagcatggatcgtgtaaatgatggtggccctgtaagatggtaatggagcatatatagacatctgatatgtggcacttgacattggcattgcagatcgagtaggggaaatgactgatattcagtaattgtgctgggatacttggctttccatatgaaaaaacataagtaacaatatgtataccatctaggtttgtgtaagtacattctatgttgtttgc

SEQ ID NO: 815084 - DNA, 552 bp, Homo sapiens
ggatttttagcagagacagggtttcaccatgttggccaggctggtctcaaacccctaagctcaagtgatctacctgcctcggcctcccaaagtgctgggattacaggtgtgagmcaccatgcccggcccatgcattattattaatgttgaagtagataatttaacaaacatcaatgaagtataagatttttcactcatagttgcaaaatatcatgccaattgccttctatgagctgtcataagccacagcctagagattcaattccatttcaagattcaaccaaagccaactcatcaacaagaacatgtaaaagacagaaaaacccactaccggcaggctgaaacagatgctgtgacgtggccctggcctgtcatggcgtgtcacagcatggcacaggcctatatcatgttccctagattgctgactaccaactagttacagctgactccaatcaggtcgggatttgaccatctctgcactgaacctgcaattgcaacttttaaaattgaaacgctgcttctcacctctcctccctagactctatttcacag

SEQ ID NO: 815085 - DNA, 487 bp, Homo sapiens
tcaccgttacggcctacagccccctgggctctccggatagaccttggtgaggcttccaagtggtgggtctttctcttgataatcttaaaaacattattttataattggtaaatgtcggtatgggtccataagttactggaaagaaaaatgtgtgtaaggtaacacgtttggtacacacaaatgggatggcagtgggaaaaaatgggaattaaacaacaacaacaacaacaagggcgacatgcttgaccctctgggaatatttccagttcagccacccaagggtgaaccaggcttgcaaaatgctgaggcttcagagcccggggaaaggacccaagcttccaggtcctcctgcctgtctcccagatggagaggctctgatgatcagtcttgagaccctcattggagtggtgtccttctgtacacggtagccatggtgattattcacatcagcatctttctgcccstagggccaaacctgaggaccctt

SEQ ID NO: 815086 - DNA, 607 bp, Homo sapiens
tctgcccctagggccaaacctgaggacccttccctgctggaggatcccaagattaaggagattgctgcaaagcacaaaaaaaccacagcccaggtaccatatttttatttttcttgttatccaacmactcatgcttccagtctcatgtttcatttctcgtgttgtcctcaactgactccttaaaggggaagaacacaggagctgaagccctctaaagtatttcctttgaagtctgttggaacctctaggaaacacaagagctgtcactgaagcaaagatagcttctgtctcacagcttcctgtcaagccctacagcccagtggcaaagcatggctttggagtctagggatatgggtgcagatgccaactctacctctgatcagccttatgacccccaagctactttcttcattcctaaaaaaggaagatcacagggttgtctctaaggtgaagggagagaaagaggtgggggtctggcacaagtctaatagctgtgaagggctcagtaattattagcgattgtacctgaagccacagtgagctgcagagatgttttattcttcctttccataaaaggaggggtccttgtagctgagtggaaacatga

SEQ ID NO: 815087 - DNA, 520 bp, Homo sapiens
cgcccccatccttcagcccctccctggcctgaaggtggggcctcaccagggacctgcccccttttgcccaggaacctgtctccctcctgctgccgttcatggcacccaggctgtaggtrccaaggggccccctgcaggccagcactgagctgctctcagccccatttcggcttccctcttatcctcatcagtgctcaaagtccagaagggggctgaggtgtcaggggcctgacatgtcaacagtgccctgagtgtgtgcacacctggctgggctgtgacagtgcccaggctcaccccactttgcttcaagatgggagcaggtgccaatagcaggaagaagccaggccatgggagcaggtatttccaagccttcctgggcctccaagagggcagggatgcctgggtccacagctgtggtttgggcggctgcagctgcacccaggagggaggtgcttctgcctgctctgaggagtgggaggcccaggtctgcagtcatagtttgggaggctgcagctgtgcc

SEQ ID NO: 815088 - DNA, 589 bp, Homo sapiens
ttaagccgttttgtagcgtagtgaaagaccacagcagctgccactgaatagctttaagttccaacctcactaacctcttccgttttctagcyctctgaccttggacaggtttcttctctcgatctcagggttttcgtttttaaatgatgacgataatatccacataagccatgtttctaaactgcctactaattcctgatgcacaccagtaacttgacacctgttaattccttcttctgttttgtatgttgtacatttaaattgcccttgatattgagggattagagtacaatgcaagtgtgaaaaagaagcaatctggagtttcttgcatgcataagttgcataggcaccggcagtaattgcagggccgtgaaacaggataaccatcacagctcataaatggtggtacattttaatcagattttagatgttatgaaggctccaagtaattacagttatttttgccttaaaattgaactgccgttattaaaatgcttttattaaatctttttttcctttggtagttatgaaagattgtagaatttctgagtcaaataaccgagcactagatgttgcatacataaaagtt

SEQ ID NO: 815089 - DNA, 589 bp, Homo sapiens
ttaagccgttttgtagcgtagtgaaagaccacagcagctgccactgaatagctttaagttccaacctcactaacctcttccgttttctagctctctgaccttggacaggtttcttctctcgatctcagggttttcgtttttaaatgatgacgataatatccacataagccatgtttctaaactgcctactaattcctgatgcacaccagtaacttgacacctgttaattccttcttctgttttgtatgttgtacatttaaattgcccttgatattgagggattagagtacaatgcaagtgtgaaaaagaagcaatctggagtttcttgcatgcataagttgcataggcaccggcagtaattgcagggccgtgaaacaggataaccatcacagctcataaatggtggtacattttaatcagattttagatgttatgaaggctccaagtaattacagttatttttgccttaaaattgaactgccgttattaaaatgcttttattaaatctttttttcctttggtagttatgaaagattgtagaatttctgagtcaaataaccgagcactaratgttgcatacataaaagtt

SEQ ID NO: 815090 - DNA, 484 bp, Homo sapiens
cttcagcccgctgatgcactgtgggagccgctttctgggctggccaaggccagagccagctccctcagcttttggggaggtgtggatggagaggcgtcggtgggaaccggggctgcacaccgtgcttgcgggccagcgcgagttctgggtgggcgtgggctccgcggaccccacacttggagcggccggccggccccaccggccccaggcagtgaggggcttagcacctaggccagcagctgctgtgctcaatttctcgccgggccttagctgccttccctcagggcagggctcgggacctgcagcccgccatgcctgagcctcccccgacctccgtgggctcttgtgcggcggagcctccccaatgagcgcagccccctgctccatggcrcctagtcccatcgaccacccaagggctcaggagtgcgggcgcacggtgcgggactggcaggcagctccacctgtggccctggtgcaggatcca

SEQ ID NO: 815091 - DNA, 540 bp, Homo sapiens
  misc_feature 1, 2, 3, 4, 5, 6, 7, 8, 9, 10, 11, 12, 13, 14, 15, 16, 17,18, 19, 20, 21, 22: n = A,T,C or G
nnnnnnnnnnnnnnnnnnnnnnttttgcagacaaatgtactgatggttaaggtgcaatatattaatattcaatagatatatttataaatgtggtagctacaatacacatytgaatttaaagtatttaaaaatttgtagtgtagttgatttttttctcctttcagagtttcttagctgtttctactgcatcattcaccataacatggaaaacactgacaaaaattaaagaaaatataaacactaagatggtattatggcatctgtgaaaactctaatctcctctctaccctctctcaaaaacatgcctgacttcccccaaaatttttgtataagttatattgtgattagacaggataattaaattgtgctgcaattatttgtctttagcatattgtggtccattttgggggtgcatgggaggtcagcaggagaaaatcacagcaggggagttaagtatttaaaattttgagaacagttctcttccccaaaaaatcatgcatagcaaagactttcagagatatacatatgaatccatgtaaa

SEQ ID NO: 815092 - DNA, 672 bp, Homo sapiens
tgatccacaaaggaaaaaataattgaaaacaaagtcttcctctgaaaagggaaaactagcattaaagaagaaaccagaactgtaggattccagctaactgaagtagctgcacagatcccatttctttcatccagttccactgttcaaaggtgtgtgtgttgggtgggaagacagagaaagaaagagatagagagacgactgtcaatccgcaattaaatgagccttctgtcatagatactaatgaggagaggtatgcagtgatacgttattgttactgctaccacagagttaacaatctatttgggaaatgtatttctatacaaataatacaatctggatcagactctgaaggagacttcatgaggttttttgggagactagaaaaagaaatggtcctgtcatttcttctagcatctgacctagtgtcatcagagaaggatttaaggagaagctaagatatgagctggacccctaagaaaaatagaacttgaaggcagtccaggttggggtggacaaataatgagaagaaggatgagattcaagaggtagygaatatgtcagtttgactggatagagttatctggatgccagaagagggataaaaaatgaaatagctaagttgcgactgggtcatgataagtctgatcaatctgtagaaagatgatattctga

SEQ ID NO: 815093 - DNA, 304 bp, Homo sapiens
ccaacttaatgtttcaacatttgaaagaatgctacattaatttcaacatgaatttatgttcatgagagttggacaaagaagcaaaaatgtgatcccaagttgactgtttgacaccaarcctttgtgtttggcttcctgtctgcatttgggcagagatgaatttggggtgactgccagaaattgcagccagccgtcatgctaaatgtattccccccactggacaggagccatctgtaaataatgtactttatagtagcaacaaatgaggtcttcctattgtaatttaggattcttgagttcttga

SEQ ID NO: 815094 - DNA, 530 bp, Homo sapiens
agaattgggggagagaaaaagtaatgaccctagatttttttaaaaaattgtacacaattaagctaaatcccatctaaggagatatcttcccctcaaatggacctcaaattaacatcctcctccttaggctatattcaatcaagaagacccacacttacaagtctgtgaattaaaatacaaaaaaactattcttctagtatttatcaccaaaataatatgatctggggcaagagagatattttagaagcacaatctggtctgattaagtaataatatttactgactacaagcaaagattctttcagtgtaatacatcacacactgatatatctcactgtctaacttttcagagaatgatgatatatacaaaatatatgtatttattgcctgcctttcctgagaaatacatatacagtgcatatttgcggcattcagttaatcacattgattgcttatayttagacattgtttcatgccacacgttctaactttttcctaaatttacagagcactgtttgaaaaaaagaaaa

SEQ ID NO: 815095 - DNA, 648 bp, Homo sapiens
gtaattttaaatatatttacagtgtggagtttcagatacatttattcattccagtggcagtgaaaattggtgtaatttctttggagaargcttcagcaatatcttttaaaagtgattagaagatgcatacttctttggaccctacattttcattgctaggaatttaccattcatgcacagtggacaagtaaaagagtctttatagacttgctttggttttccagtttctctagaaccatgcagggtgcacatagtctcatttctctctttcggaatgtgtcagtcacatgctcctttatttttccaattacttagcagtaacttttttttttgtgatagcaattgtcttactgagtacttctgggctgtgtgtattttgcttatattaactcagttaatcctcacaccagtgaaaattgtattttactttattgtgcagagcagtactagtttctttcatttgcagttctttccttctaccttataaatggtatgattcgtgaattgctggcatttaaaattatgcccaatcttgacccatagaccatataatacgtactccctaacacccagtgatacatttacttttgaaagactttgctttagtccttagccaaggcctattcttgtccacagtctgaggaggca

SEQ ID NO: 815096 - DNA, 544 bp, Homo sapiens
gctactcaacctggcatatatggacarattttttacgatctcatggtgataatctctcagggactttattccctgacttctaggtgacacactaagatcatcaaaaattcataaactctaataagtaattatgctgaggtcaggtgacttgttgggacccatgacagtcagaggatgtggctgggtatccatattcctgcttcagttcatggtagtcaagaagtttcctactttcagagaccattggagaggaacaatcagagggtgaccctgcctaaatcacccagcactctcatctctaccccagaaaaatatgaattccacaattctgaagttaaaagaactctgaaaagtaagaagttctcaccaaccatttggcaatgaaatctgacctggcttcaattcctttgaggcagaactggactggactgaaatgaagttacctcttaattgatatcacttgatactaatactcatacttcattgaagaaatgttaatatgtttgactgtggcactggtgtaggtcctcctgcctgtgctgtg

SEQ ID NO: 815097 - DNA, 544 bp, Homo sapiens
gctactcaacctggcatatatggacagattttttacgatctcatggtgataatctctcakggactttattccctgacttctaggtgacacactaagatcatcaaaaattcataaactctaataagtaattatgctgaggtcaggtgacttgttgggacccatgacagtcagaggatgtggctgggtatccatattcctgcttcagttcatggtagtcaagaagtttcctactttcagagaccattggagaggaacaatcagagggtgaccctgcctaaatcacccagcactctcatctctaccccagaaaaatatgaattccacaattctgaagttaaaagaactctgaaaagtaagaagttctcaccaaccatttggcaatgaaatctgacctggcttcaattcctttgaggcagaactggactggactgaaatgaagttacctcttaattgatatcacttgatactaatactcatacttcattgaagaaatgttaatatgtttgactgtggcactggtgtaggtcctcctgcctgtgctgtg

SEQ ID NO: 815098 - DNA, 534 bp, Homo sapiens
gggttgcatgtgcaggtttgttatataggtaracttgtgtcacaggggtttgattgcagattattttgtcacccagttattcaggctagtgtccattagttatgctgtttaatatacattcctgatttctcattttgggcatttttcacatgaccaaccatcacatcctgacaattttaattctatttctagaatctttctctttgcctgtattcctgctgtcaataatttagacaatgattgacttcaatatgtgggtaatcagggcaggctaataatttgggcgacttcagaccaatattatctaattaataggatgatcattgtgtaaaacaaacaaaaacccacggagacagggactcccggtagctgtaggattagtctctcctctgttgtctagagtaatttagctctaccctaaatttgtgttcccatctagtaaaatgaaagccctgctcctgactgaacctccgcttatatagtaagtatgaccccttgagatgtgagcggtcttcctttttactccagttgttt

SEQ ID NO: 815099 - DNA, 470 bp, Homo sapiens
tgaaaactgtaaaaatcagcgtgcctttcctcctccagaggaatgcagctcctcgccagcaagggaacaaagctggatggagaatgactttgatgagttgagagaagaaggcttcagacgatcaaacttttcccagctaaaggaggaagttcaaacccatgacaaacaagctaaaaatctggaaaaaagattagacgaatggctaactagaataaccagtgtagagaagtccttacatgacctaatggagctgaaaaccatggcacgagatctacgtgacaaatgcataagcttcagtagctgatttgatcaactggaagaaagggtgtcagcgatggaagatcaaatgaatgaaatgaagcaagaagagaagtttagagaaaaaagagtaaaaasaaatgaacaaaagcctccaagaaatatgggactatgtgaaaagaccaaatctacgtcttactggtgtacctgaa

SEQ ID NO: 815100 - DNA, 518 bp, Homo sapiens
taaattaggatggttgtagaaatgtaaaggaagaaggaagcattacaaggaagactctgggtgtgaaagaaaatactaataatgtaacacagttaataaaagcaaagccttttytattttacagagttggattaaattctagttattactaccatctaatcatgtaacaacaaacttttatttatcaccgccatgatgattaattttatatgccagcttggctgggccacaaattgcccagacatttggccaattattctgagtatgtctgtgagggtgtttctggatgagattaatatttgaatcggtagactgcatagagccgattgacctctctgatgtaggtgtgcctcatctgatcagttaaagacctgaatttaaaaaaaaaaaaaaaaaagcctgagtaagtgataactcctcctgcctggctgtcttgagttgggatattgattttttccagccttcagacctgaactgaaacattggctcttgagtcctaagcctgccagctttgggac

SEQ ID NO: 815101 - DNA, 617 bp, Homo sapiens
aggttggggagatggtataaattccttagctagcaaatatcatggcaaaatatttttaagaacattaatctagtgactttgccagagatacatgggaagggagagtcagggatagactggaagaagaaatatcaatttatagatcacttcaatagtctgggcatgcaataaagacatcctaaattaggatggttgtagaaatgtaaaggaagaaggaagcattacaaggaagactctgggtgtgaaagaaaatactaataatgtaacacagttaataaaagcaaagccttttctattttacagagttggattaaattctagttattactaccatctaatcatgtaacaacaaacttttatttatcaccgccatgatgattaattttatatgccagcttggctgggccacaaattgcccagacatttggccaattattctgagtatgtctgtgagggtgtttctggatgagattaatatttgaatcggtagactgcrtagagccgattgacctctctgatgtaggtgtgcctcatctgatcagttaaagacctgaatttaaaaaaaaaaaaaaaaaagcctgagtaagtgataactcctcctgcctggctgtcttgag

SEQ ID NO: 815102 - DNA, 629 bp, Homo sapiens
ctgaaacagcatttgataaaattcaacatcccttaatgataaaagccctcaacaaactgagtatgaaggttcatacctcaaaataataaaggccatatatgaaaaacgaagagctaacatcatactgaatggggaaaaattgaatgcctttcctctaaatgctgaaataaaacaaggatgcccactttcaccacttttattgaatataacaattgaagtcctgggcagagcagttagtcaagagaaagagattaaaggcatccaaattggaaaggaaaaagtcatactagccttgtttgctgacaacatgatcttatacccagaaaaacctaaagactccacaaaaacactattagaacggatcaacaaattcagcagacttgcaggatacaaattcagtagacttgcaggatacaaaatcatcatagaaaaatcggtagcatttatgtacactgacagtaaacaatctgaaaaagaaatcaagaaagcaatttataatatctacaaagaatataaaatacctataaatcaatttaaccraagacgggaaagagctattcgaggaaatctataaaacactgattaaagaaattgaagtggacacacacacataatggaaaggtattcca

SEQ ID NO: 815103 - DNA, 657 bp, Homo sapiens
tagtcccagctgctcgggaggatgaggcaggaaaatggcatgaacctgggaggcagagcttgcagtgagctgagatcgcgccactgcactccagcctgggcgacrgagcaagcctccatctcaaaaaaaaaaaaataaaataaatagctgggtgtggtggtgcatgcctgtaatcccagctactagggaggatgaggcagaagaatcacttgaacccgggaggcagaagttgcagtgagctgagatcatgccattgtactccagcctggtgacagagcaagactctgtctcaaaaataataaataaataaaaagcatctggtgaggtaggagtgggactgagtaggatgagtagccctcactcagttacttatcttttatgattttcagcttaagatcttctatttctccactttgatattcaggacgttcctctgggctgtcaggggttgctccctcaggcattcaggctttgacttgagtgtgatgtattcagaagttgacacctgtaacttttgctgccaagggggttgaaagagaacagtgtagggcccttcgcagcttggcttagggaaggagagagaggtgagagttttcactagtaccaaatttcctgggttaaataaaggtggttctatttcctggggctgggcttctg

SEQ ID NO: 815104 - DNA, 657 bp, Homo sapiens
tagtcccagctgctcgggaggatgaggcaggaaaatggcatgaacctgggaggcagagcttgcagtgagctgagatcgcgccactgcactccagcctgggcgacagagcaagcctccatctcaaaaaaaaaaaaataaaataaatagctgggtgtggtggtgcatgcctgtaatcccagctactagggaggatgaggcagaagaatcacttgaacccgggaggcagaagttgcagtgagctgagatcatgccattgtactccagcctggtgacagagcaagactctgtctcaaaaataataaataaataaaaagcatctggtgaggtaggagtgggactgagtaggatgagtagccctcactcagttacttatcttttatgattttcagcttaagatcttctatttctccactttgatattcaggacgttcctctgggctgtcaggggttgctccctcaggcattcaggctttgacttgagtgtgatgtattcagaagttgacacctgtaacttttgctgccaagggggttgaaagagaacagtgtagggcccttcgcagcttggcttagggaaggagagagargtgagagttttcactagtaccaaatttcctgggttaaataaaggtggttctatttcctggggctgggcttctg

SEQ ID NO: 815105 - DNA, 579 bp, Homo sapiens
tctgggaatgtcttaatttctccttcacttttgaaggacagttttgtcaaatatagtattctcagttggcaggctttactctttcagtactttcaatgtatcatcccaccaccttctggcctgcagggtttctgctgaaatatccactgataatcttctagaggctcccttgcacatgagaagtcacttttctcttgctgcttttaagattctctctatacttactaccactaaattctacacttaaaaatggtataatctgttatgtatattttgccacaataaaaacattggaaagaggtaccatagaagagtatattacatgcaccataggctggaaaacattttcagagattaggctattctcagtaactcacatatctagttctggtaaacactgattgatttaaacaaatatcaatgaacaaagtattacatgcaccgcgtgcagctaaacagtgtttcgctgacataacactagtacctagatctgataaactatctaaacaggcatcactgaaactatrctacagaaaacacagaatgctaaccacagtatttccaagagtctacgctaca

SEQ ID NO: 815106 - DNA, 632 bp, Homo sapiens
tctgagaatgaccctaccttgtgctgctaaccaccgagactgctgttcgcacagtgaaaaggggatggactcatcacacccgggtcaagaaagcactgtccccctccagagtcatgggccatagtcccaggggaaaaccctaccaaactaaagctaaggaaaatttaactctttcatctatgctattactctttcttctatcctcgctctattgctgaccatctagttattaacataaccaagtcaattttgcctcaaactattacatttaatgcttgccttgttataccctgtggggacttgccaagtcagactgctctctacttcagaaaagtacgtttgtccctcctgactctcctcagactgggcattagtgaattgggaccatttaatctgaggagacttcaataaaaaccccagtgtcaaccaggattcttgctccctgatgtagagcttttatgccatagttggtccaatgttctttggaccactaaagagcaagaatggactgccacaactggtttttgtaatttcctaaaaccatacattcattttactagagggacagccccccrccaccaactgtcagctaaaccggtgcaatcctatacaggttattatctcgaaccctc

SEQ ID NO: 815107 - DNA, 457 bp, Homo sapiens
ataattacacctaacataataaaactatcctttgtacatcaggaaacgcaccaatccccaacccaaatactattacataaagttaataatacttaaatgctgaggtgaagtcaataaatyttatgtcacatgatagaggggaaaggaaataaaatgaagatgttttcttagtacaggtgtatacatgcacaaacatgtttttaatgaaagaaggaggaaatacttatgacaattacagtcctcatttctgcagctggtcatgtggtcatagctggtattgatgactaccttcttcaactacccattctgtattccctttgccttcagcaagcacctcagcaggttttttttttttttttttttttttttcctggtggaatgacccaagccttcattcctgaagggtctgggtcatttgtagtcccacctgggttggggtgttgcagtttcccattga

SEQ ID NO: 815108 - DNA, 304 bp, Homo sapiens
tcagctagaactttgatccattgcttgtgggagcgtgaatttttcaaccattttggaaaatggttttgtaatatataatatgcctgaacatgtccccactttgttgagcatacatccaccaaaagactcatacacgaatgtgcacatcagctttattcataaaaagcaaacattaggaagaatataaatgcctttcaccataattgtggcatatgtatataatggaatgctactcaacaccaaaaaggaataaatyactaacacccactacttggatacatctcagcaatattatgttaatgga

SEQ ID NO: 815109 - DNA, 557 bp, Homo sapiens
ccatctctactaaaaggcctcattgcctggggtaaatgcccaggttttggtctcatggccaaggaaatcaaagactcagacgcacacacgcatagtgaaattggagcaaaagtttaataggcaaaagaaaagaacagctctctgtcacagagaggggtcccaaatgggttgctgagtggtagtaaaaatgtcagggtttatataaatgggctagtgaggagggtgtgtcttatctccgtggggcctgaagaactggttaggaccgggtgtgccgtatgttgagggcagagcctctagtagtccccaccccttgtgcaggccgactcttagtttgtgctgctctgcgctgcttatctgagcatgctaaaagggagggagagtttctgtgcctgttccaggcactttcttgcagctgcaggtgtccctgactcgccccataccccgmcccccaccccatctcaccccactccctccctccactcccgcgcttccagctcagcttccctatctttgtgtgcttaaagaaagggagatgaatgtgcttattatggcacact

SEQ ID NO: 815110 - DNA, 636 bp, Homo sapiens
gctctgtgcccaagttgcttgtctgtgtttttcagcctgatcttccaggctgctctttgttagaagagaggtgatttctttgaactgcgtgaggttagaatgggagcaatttctgagctgctttttgttagaaagaaagttttctgccagggactctctttaccctaactacctaaatgatttctttctatctcctgtaacactaccttggtacgtatttcagtgattgtcatcatcacccatcctgttaggcaaaccagaaaactcaaagccatccttgttgctcctctacatccctcactctatatccaatttatcatcagattctttatttttcttttctcaactctctaatatattatatccatgctttgccatttctactgctggaactaaccctagtcaaatcacattcctcctttgttgggagtattacaataatattctctacaaggtatacccactcaggaaacagagtgatctaattaaaatataactatttttatgtcagatcttttastgacttcccattgttgttgagatgaggacaataattattaacaaggtgaacagggactgggatgttctggcccctgccattgcttactgaatcttgcaacaaacccccttgtctct

SEQ ID NO: 815111 - DNA, 619 bp, Homo sapiens
aggtgggaggatcatttgagcctgggaggcagaggttgaagcctgggtgatagagtgagaactcgtctcaaaaaagaaagaaggaaggaaggaaggaaggaaggaaggaaggaaggaaggaasgaacgaaaggaaaaaaaggaagaattaaaacaaaagaacttaaaaattttttaatcaaaagactaaaccaaaaaaacatgtatattcaaaatctttcaggttcctaattccaaaagtcaatgaacatctttctctcctcatgccccctgtgctctttatggcttccaaccccgctaactactcctgccctggctttccctaccctactgttagttttttatctatgtttctggccaattcccccttctcaataacttccactagatcttccttctataccagttccaaaaaatggcactgagtttcattctcgaccatcttcttacttattcaacacaaccttccaggataaatcaataaaatccagttatctatggagcacctgctctatgcaaggcactgtgtgaaatgctcatccatactcacggcttcaaccatctcttacatcctaataactcccaaacatttctcgaccttgaatgaccaggtcatatac

SEQ ID NO: 815112 - DNA, 619 bp, Homo sapiens
aggtgggaggatcatttgagcctgggaggcagaggttgaagcctgggtgatagagtgagaactcgtctcaaaaaagaaagaaggaaggaaggaaggaaggaaggaaggaaggaaggaaggaacgaacgaarggaaaaaaaggaagaattaaaacaaaagaacttaaaaattttttaatcaaaagactaaaccaaaaaaacatgtatattcaaaatctttcaggttcctaattccaaaagtcaatgaacatctttctctcctcatgccccctgtgctctttatggcttccaaccccgctaactactcctgccctggctttccctaccctactgttagttttttatctatgtttctggccaattcccccttctcaataacttccactagatcttccttctataccagttccaaaaaatggcactgagtttcattctcgaccatcttcttacttattcaacacaaccttccaggataaatcaataaaatccagttatctatggagcacctgctctatgcaaggcactgtgtgaaatgctcatccatactcacggcttcaaccatctcttacatcctaataactcccaaacatttctcgaccttgaatgaccaggtcatatac

SEQ ID NO: 815113 - DNA, 609 bp, Homo sapiens
aatctctgagcctcagatttctcatttgtaacatgatcaggataatgttaataccacatttggaaaataatgataatgtctgttaacatgccttttaaaagattctagtaccttttataagtgatartttgttattcttgctataatttcttgggaatatgtccattttaacttatctaattagaaatggtgataattgggttacgaagtctacagctatctttctgtctcttgaattttggtttttagacatgtgaaaaatgatgctatgtaattagattcttcaaacattgtctaatttcttagttaaggtgctgtgggacacacaggtatgagtaaagtccctgtactcctgagctttatagcagagtgagcagatgatagatagatagatacatgcatacatacatgcatacatgcatgcatacatacatacatacacacatacatagaaacatagatagatatagatggttggatgatagattaggtagatagatagatagatagatagatagatagatagatagatagatagtatggatgcagagatagagacagagacagagggatggatgcatagaagagagatagttagatgagatagaa

SEQ ID NO: 815114 - DNA, 542 bp, Homo sapiens
acccaggctggagtatggaagcacaaccatagmtcactgcagctacggtctcactttctagaaacaatttaccaatctgagctcccaccagcaaagaaggaaagtgtttaagagtgtcacattgtttccttgacagctttgagtatttctacttttacaaatctttgctgatgtttttattttacttatttatttatttttattttgagacagattctcactctatcgcctaggctggagtgccgtggcatgacagcatgaccatagctcactgtagccttgacctcctaggctcaagagatcctctcatctcagccaatttgcttttattttttctataaatgtatctcattatgtcataactcacttttatagcagggaaaaagttaatacaagataagatttagatatcctctctccagcaagacccagaactttgattaactctgcctggagaatagaaggtttatgaagatgctaagctatcccaataagacgttgtgtaccaaatgcaattttaggttctgtagatgaagttccag

SEQ ID NO: 815115 - DNA, 613 bp, Homo sapiens
taaatttttaagcaagaaagtaacgttatttgatttatggtaactgctcataactctaacctccctaagcttcagtttcttcatctgcaaaattcctgtaatcatagtagcaattcaatagttttgttgagaagactgaatttgtttgacaacaactcaataggttgagttgtgttaactactattattacgaagtgatgagtgcagtagaagatataaatgaatgtaagacatgtccatgtactcaacagttttgctattcaacagcattaatttagtctttctgcatttttgctgctttttaaaatgcaatgtaaatttcccatgcaagaatacgttctaaataatttatgtagatactctgccctcaaagaggtggagcataatttcccactgcttaagtgtggactgtgcccagtgacttccttccaaagggtacaatatggtaaggtgtaaccaagcaccacctgcaacccaaaaatctatagaaaagtaaaattaaaaaaaaatccttaacggaaaaaaagraagataattttgcggtagagaaacctgacaaacactacctgagccaggcgactaagattaacatcaacaataagtcatatggata

SEQ ID NO: 815116 - DNA, 613 bp, Homo sapiens
taaatttttaagcaagaaagtaacgttatttgatttatggtaactgctcataactctaacctccctaagcttcagtttcttcatctgcaaaattcctgtaatcatagtagcaattcaatagttttgttgagaagactgaatttgtttgacaacaactcaataggttgagttgtgttaactactattattacgaagtgatgagtgcagtagaagatataaatgaatgtaagacatgtccatgtactcaacagttttgctattcaacagcattaatttagtctttctgcatttttgctgctttttaaaatgcaatgtaaatttcccatgcaagaatacgttctaaataatttatgtagatactctgccctcaaagaggtggagcataatttcccactgcttaagtgtggactgtgcccagtgacttccttccaaagggtacaatatggtaaggtgtaaccaagcaccacctgcaacccaaaaatctatagaaaagtaaaattaaaaaaaaatccttaacggaaaaaaaggaagataattttgcrgtagagaaacctgacaaacactacctgagccaggcgactaagattaacatcaacaataagtcatatggata

SEQ ID NO: 815117 - DNA, 581 bp, Homo sapiens
cagaagcacaggtcacagcctgggccttgtgattggcatctgaagccgggttggggcggggtggggacagccctatgggactgagcccttctcccatgggatctgatgctgtctccaggtagatagaatggaactgaattgtaggacatccatttggtgtccactggataattgcttggtgtgtaggagaaaaccccacacacctggtcacagaagtgttctgtgttgtgagaggataggagcaaacagtgcgcattcctcagaggctgctgcaacaaagtccccctaagtgggtacacttaaacaacagacacttatcttctcacagttctggaggcttagaagcccactgtcaaggtgacagaaaattgtttctggtggggctcctttcctggcctgtgatgcccccttctcaccactatgtcctcccatggcctttcctctgggttcctgcagtgagagagagtgctctgcgtctcttcctttctcacaaggactgcagygctattgaatcagggcccccccttgatgacctcattaaccttaattgcctccctaaaggccctactgccaaatacaca

SEQ ID NO: 815118 - DNA, 596 bp, Homo sapiens
tttgttttaataataatctgataccagtttcctttttctattgtagattgaatgctattttctgtgtcttccttaatgtttttttcattcaacatctttttgtaaagaggaaaattgttttgtaatatagtcaccctcttttttttttttcttaataatatactgggccaggtgcggtagctcatgcctgcaatcctagccttttgggcggctgaggcgagtggatcacttgaggtcaggagctcaagaccagcctggccaatatggtgaaaccccatctttactaaaaatacaatacttagccaggtgtggtggtgtgcgccagtaatcccagctacttgggaggctgaggcacaagaatcacttgaacccaggaggcagaggttgcagtgagccaagatggtgccactgcactctagcctgggcaacagagtgagattctgtctcaaaaacacaacaaawaaagaatatactggtttctgaactttaaggcaaaccaatttgtgatcatttgatttactctatatattttattcactttactagaatatagtaaattaaattctagagccttcttgaaaacagaggttatgctt

SEQ ID NO: 815119 - DNA, 529 bp, Homo sapiens
tagggaaatgagaaaagggacgcttaggctcctgaagaaagacttgaaaagttaaatatgtttcgtctggaaaaaaaagactgagaggtgatctcatttcagtgtttggatacctgcarcagatattccaggcccaaggatgtgacctgtcctactcactcagaagcaataggaaactgcagaaggaaagggttacattagaaagatttcccctcaaagataattacatgtttattccagttttagtctaagtgacaggattacagttccttccccatctgtaatccagggagaataatgcttgctgcctaagttttaatggatataacatctgtaaaatactttgagctcttcagatgaaagatgtcacgtgagtgcaaggaattattgttattatttttgtctcctgccttccctattggtataagtttctttgtgacatttacaggaccctccagtcagccagctgctctgtaacatatcatctcagtgatattttaaatccttcacgtggttctgattgtaccca

SEQ ID NO: 815120 - DNA, 626 bp, Homo sapiens
tgtaaaacaatggtcatcttcccactatttttttttattttagaaaatttagttattttcacaaaaaaaaatgttacgtgtgttaacatgtgttatgtgttgaatcatgtgctcccaaaagatgttgaagtactaagcaccagtacctatgaagatgatcttatttgaaagtaggttctttacaaatgattaagtgaagatgaagtcattagcatgggtcctgattcaatatgattcctgtctttgtaaaaaggagaaatttggacacagacacagacatgggggaatgccatctacaagccaagaaacacctaagactgccagaagctgagagagagaactggaacagattctccctcatgggcctcaggaaggtcctccctcaggccctcttgccggcactttgaattcaaacctgtcgccttcagaactgggagacaataaatgtcttgtttaagccagacagtgtgtgatactttgttacagcaaccccagaaaacaaataaaacgygtaattcgtttattatttttaatcaatgtattaaaatatatttaatttatccactttaatttctaatatgacaaatactaacagatttaaggcacataaagaaaagctctttggg

SEQ ID NO: 815121 - DNA, 535 bp, Homo sapiens
acaaatgtagtcacttaaaataacacacatttattgtctcactgtttctgtggggcagcagttgggcacagcttagcagcaccctctgtgastcttacaaggctgcagtctcatctgaggctctactggggaaggattcgcttccaagcttacatggttgttggcagcattcagttccttgcaacctgctcactgaggtcaccagtttttgctggccgttagctggaggctacctgcagttccttgtcacatgagcctctcctacattgccacttatttcatcaaagctagcaagggagggcatctccctgcagggcaggcattatagacttacataacgtaattacatatatgtaatcaaaagactgccttttctctgtggtgtattctgttggttagaagcaaggcacagcttccgtccacacccaaaagaaaggggttacacaaaggcaggtgtgaacatcagcaggtgggaatcatggggccattgtagagttgtctaccatggtttgcttattggtcttttaatcatact

SEQ ID NO: 815122 - DNA, 429 bp, Homo sapiens
cacagtccacctctcctgttgtttctaaaactttaaacctttaaagctcaaatcatcagtttgagttttgagcctctgcacaaattagactcttaagatctcatttctcttttcascacatcttgttagcgagattcttacattcaaaaagagctatacggtttactgtgttagtgtgtaactgacagacacctaagaacaatttaaaatctgctgctcatctaagggcagttccctttctgctctcttcagacatgctcgggggacatcaacacatttctcagctgcacccttatgcccctgcctggccccttcctacatctagatccttggcttctgtcttattcccgaatgctcaggagaggtgtttattatgttttcattgtttcagaccctctccagtggagagccgcctggtaccttgacctc

SEQ ID NO: 815123 - DNA, 599 bp, Homo sapiens
ctagaggccggcaaagactaaagactccaagcacagccattgagggatggaccaagaaagagacagaggaaagatgtaagacttggaaactggatgtagaacgggagagaaagcaaggaatcttacaaggctctacaggaatagggcaagggactgcacagctaaacaggaaagatttttcttttctttttacattagatattattttcatacgtttggacacaaccaggctacttgtgatttttgaggcaacttctctacttattttatccacacgagttgtctttttctatttattctttagaaagatttctttgtggccctcaataatgctgaaaagatttctaattccaattctggtgcatggcacacataaggaagttaacttgtaacatcagcattatcaaactaaaaatatggaattaagaaaaaaaagtcatcaaaattagtttaccaaagttctctattagttgtcccaccagaaccaccactagcaaattttccaggattgtgctatagagaaaggtggcaaataacaaggagcactytctacacacagaaggtggtgattctggagcccctccaaaaggtggctgctc

SEQ ID NO: 815124 - DNA, 627 bp, Homo sapiens
aaccacttcatcttcattaactcatgctgactcctttgctgaggcttataaatcatctctttgaggatttgttctgaaagataacccagatctgatgcccacctacctagcattcacaggattcacctctgtttttagaagaagacatttacccattttcaggattccctaattctcaagattcttcatgatgattgacaggagttctgttttatcctaaagttcttttagtgtctgagaaacgtaactcatctaggttgtgagacttacacacagcttcagtagccagtgcttacttatagattcctcacctaccttattttttaaaaaccagtgttaatgttgcccttctctatgtgacaattgttcatctggagagaaaataggaattaaagcggttagggagttctcctttcctcctgttatctgttaacattgtgagtgtctaggactaccaggctcctttgaccttgggaatatttctgtgtcacacataaaaatgcgccctgtatggctcatcacatcagtcctgacccaattacactggtattgtttgtagygtgcagtcatgaatgcttgcactccacagcctaacctgtttccagcctgaccttaatacttactttc

SEQ ID NO: 815125 - DNA, 664 bp, Homo sapiens
tccatttgtttagttgtttttatttagactggggtttttgttttgtgtgtgtgggtggtgttgtttttggattttttttcatactgtgttccattttgttggtttgtttggttttggttttggccccacccmcacaggggcatgtttgcatcattgccatgcagttcctttgcatcttgcttgacctacacaccctgattcagggcaagttcattcttaacccttttttcaccatgtctgagcctgttcatttcctccacaaggcatagtttgagggctgtgagttctgtgtctgtccccttgtctgtagcctgagggccttggtggagtgaggtgggaagggagagctgcactgaggctgtgagcagtttttattaccaacctctcagagagaaaagccacactcctgcctccaggacacacgctgttttgtggaagagacccaataaacaggtaactataggtgctgccataagaagaggggacactattaggttgcagggaccagatttgcttgcttccttaaagtcatggtggtggcagtttaatggaaggatgccagtgtgtgggaaccagggttaagccagaccaaaagtccagggcagtacttgcagaccacggcaaagaacttggcctttattctgtgagtgggatccaaccgtgt

SEQ ID NO: 815126 - DNA, 596 bp, Homo sapiens
tgggctgagaagaacacagcatcatttctgttgtgccaagaatgcatggcttgtatctggttgtgaggaaacatcagatggacacaggctctacagaaggaaaggyctgtactgtttcagactttcaaagatttgagaaacagagaaagactgaggaattcctccagactggatgagactgatgagagatgacaactaaatgcaacatgtgttggtagataggatcctggacctggaagtgaaaaagagacattgttgggatatttcagaaattcgcataggatctgtggactgggtctgtgctgtatcattgttgattttttgacaaggagtgctgtatggtgactatataggagaagggtccttgtctttgggaggcatgcactggagtatttagagatgatgggaacatgtgaacaaaaatgtatatctgtttctatcttctgtctctacaaaaatggggaaaatatagcaaaatataaaatgtcaccatctagaggatttgtgtggaggaggtgtaagaatttgtactgttcttacaacttttctttaggtttgaaatgacttcaaaattaataaagaatggtgaagtaaac

SEQ ID NO: 815127 - DNA, 596 bp, Homo sapiens
tgggctgagaagaacacagcatcatttctgttgtgccaagaatgcatggcttgtatctggttgtgaggaaacatcagatggacacaggctctacagaaggaaaggtctrtactgtttcagactttcaaagatttgagaaacagagaaagactgaggaattcctccagactggatgagactgatgagagatgacaactaaatgcaacatgtgttggtagataggatcctggacctggaagtgaaaaagagacattgttgggatatttcagaaattcgcataggatctgtggactgggtctgtgctgtatcattgttgattttttgacaaggagtgctgtatggtgactatataggagaagggtccttgtctttgggaggcatgcactggagtatttagagatgatgggaacatgtgaacaaaaatgtatatctgtttctatcttctgtctctacaaaaatggggaaaatatagcaaaatataaaatgtcaccatctagaggatttgtgtggaggaggtgtaagaatttgtactgttcttacaacttttctttaggtttgaaatgacttcaaaattaataaagaatggtgaagtaaac

SEQ ID NO: 815128 - DNA, 636 bp, Homo sapiens
tgaacatccactcttgggtattctataaatggaataatctaagggaattagaatagatgttcattttcaaatgtttcctccagtggagtccctttagttaaatttagtccccagatatgaactgggtaaaagtggagttcctttggttttcggggacagggtttgggacaacacaaccacagactccaggcctctgagggaggtctggaaagcactgggatagttgactggaaggcagtttctagatctaatattttaaaaatttaccatcttatattattctcctcagttttgtgtctgtgactggactttcctgggagccagtgacagctgcgtgggcagagacattcttttacatttaagttgtgtgcctgcacacagtaggaacacaatagcagatttatacccagttgaatttcagtctctatccctactcaaatcaagcatttgcagcagcttgtctgggagagagagccaatagccaccagtctagatgtgatgtctactctgcatgctcttggagccaaacatgagccttgctgtctctccttctttgccrtctgcaaaagcaaactctctgcccaacaggatgaaatgagaatcaaatccttatttggaagtcccctctgtagggct

SEQ ID NO: 815129 - DNA, 524 bp, Homo sapiens
gaggctatgcaaataggaagtgaagaatgaggcagagttataaacagctagtgtagaaagtgtgctccaacacacacacagagcctctcagygaagtctgggagacgtattgattcaaaacatttaaggaaatccctgttcaatcaaggcttcagtgactacactgattagttcaggagagtcactaaaccacaagcaggagtagcatcagcagcaaccacaaatattagcaaaaacacaccctggggaaagatttccatagtttccacattatatgaattgaaatgtttaattttaaacaacagcaaagattaagagatatgcaaaagtatgggaaagcatgacttctacaaagaggggaacaaagcagtcaatagaaactgtccatatggaagcttacactttcaacttactaaacacagactttaaaatctgctgcttaaaatatgttcaaataactaaaggaagtagtgtctagaaaaccaaaagtgagtatgagaacattgtctgattaattaaagaat

SEQ ID NO: 815130 - DNA, 551 bp, Homo sapiens
accttgttggccaggctggtctcgaactcctgacttcaagtgatccacttgcctcagcctcccaaagtgctgggattacaggcrcgagccaccatgcctcgtaaaacaatcttgaaaaagaacaaagttgaaggcgtcatacatcctgattttaaaccttaatacaaatctaccataaacaaaagtttgtgttgttgtcatatggataggcatataaatcaacagaatgcagttgatatttcataaatacacccttatatttatcatcacttgactttaactatgatgggaaaactattcaaggggaagtacagacttctcagtaaaaggtactgtgccaactaatagtcacatgcaaaataatcaatctagacccatacttcacaacattcgttaagagaaaaaaatctcaaaacaaattaaagacataaaggtaagatataaatctataaaatttgtataagaaaaaataggtctaagtatttgtgaccttaattaggcaacgatttcgtggatataaaaccaaaagcagagcaacaaaaaaatacata

SEQ ID NO: 815131 - DNA, 559 bp, Homo sapiens
attagaataaaataaaaatttaaagggggtgatattttatttgggtatgaatgattakctttttttgagtagaatatttagatcataatcccaaatgccataatctcgaatatggaaatccgaaaaggtcaatatccctaaagtctaaaatctctaaaatctaaaatccataatgtctaaaatcctaaatcacagttctgaaagattacaatcctgaatgctgaaatcctgaaggccaaattctggggaagacattagtgcactgtcagttatacacaggatagttgcatcatgttaggtggatttactaccttcttaatgtcttcatttggaaatgaagtatggcttaaacagatgtgtatggctacaaagttgacaagaggtagatttgtggacttaatattaggtgtcaatgtgactggattaagaaatacctagaaacttggtaaagcattattttgggtgtgtctctgaggatgtttccagaggagattagtgtgtgaatatgagtggactatgcgttaaagatctgccctaaatgttgggggatagcatggaa

SEQ ID NO: 815132 - DNA, 617 bp, Homo sapiens
tgaacaagaaaacattagatttgaactgtcatttagaacaaatggacctaacaggcatattcaaaaacttcttttcacagcagcagaatacacattctttttaagcactcagagaaaatcctccaggatagatcatatgttaggccagaaaacaagtcttaacaaatttaagaagattaacatcataccaagtaccttttccaacaatggtaaaaaactagaaatcaataataagaacaacataggaaaattcacaaatatgtggaaattaaacaacatatttctaaacagccaaggtcaaagaagaaatcaaaaaggaaatttaaaaatatattgagaccaatgaaaatggaaacataccatgcaaaaacttatgcgatacagcataaagagtactaaaaaggacatttctaacaaaaaatgattacagaagaaaaacatttcaaacaccttaactttatacctcaaaaactagaaaaagaaaaacaaacaccraagttagtaaaagaaagaaaataacagaaatcagagcagacgtgaattagagactagaaaaatagtagaaaaaaactgaagtgttttttgaagacttcaataatgacaaaatttaaactaga

SEQ ID NO: 815133 - DNA, 540 bp, Homo sapiens
aggtgctcagaatcactggacrgtttctttcaaaattgtagaagaaccaataatattatgctccaacatattactttcatagaaattactcaagatggcagacaacaaaacaaagaaaaattatcaatattcaaaggagtagtattaaacttaattgaactcagtatcattattattaacatgttaaaaagtataagatgtttattaatttttattgcttttaaaatcaagaagtggctaccataattttctcacaagcaatgctaagatacctagaagtaatatgtatcatactaatagtatattacactattgcatgatgatgcaaaaacgtgcttacttaagaaaaagttaaatcacttcggtgtgttgcactaattacttataaagttttccagaatgaacatatttaattatcattctattgataattgaaaaatactatacttacaaaatgtaactgttctttaatagctaataataactaaagattatggttgtccaatactgaggatcacagtaaaaaataaaatcatatta

SEQ ID NO: 815134 - DNA, 630 bp, Homo sapiens
tcctagagaaggaaacatgctttctgcaraaactgttacctgtgactgccttttgctctttttgagatatatttcacaccataaaatgcacccatttgtggttcttggtatatttcagagttgtgtatcactccatcaatcccatacccattagcagtcactgcccccgcagcgtgtggccacctctaactgactttgtctctatggatttgcctgttttgggcatttcatataatgggaatcatacactatgcagcctttggtatagggcttcttgcacttaccataatttttccaaggtccatcctctacatatttgtgcatttttatggctcgatattctcttgtatggctatacgacatttcatgcattcacttgttgatggacatctgggttgtttccacctttgggctactaataatgctgctatgcctgtacaactttttgtatgattatgtgttttcaattctcctgcctatagacttaggagtggaattgtaataactttctgaagagcttccagactgttttcaacagcaaccacacatgaaggttccattttctgcacatccttgccaacacgtattttcctactttttgattctagccatcttaacaggtatgacatg

SEQ ID NO: 815135 - DNA, 548 bp, Homo sapiens
aatggatggaaaaataactagaaggatacacctaaaccgtatcattgctacatgagaatacaraagagcccccatttttaaaatcgcttgtctgtttttcactaagcccgtattactttcataatttaaaagtatgaataaaaatgaggtacaagaatgctgaaatacaaacaggtcctgaaaatttttctgaggcaattagtccaatagatataaaaatatacataaggaaaaactgaaaaaagatgtattctgaatattcagaaaaatgtaggtgggaaaaggaaagtagaagagaaattagaattatatgctggcaggaatttctccacacatgtatcaatcatcaatagaaagaaattggttcaattctgctattaatgattaggattgggttttttaaaaaaattcaactgtatgtttcccataggaacacctataaaacaaagtaacacaggaaggttaaaaataaatgagtggtaagtctacagggattacgctaagaaaaaaaagccacttgaaagctgttttactacatgattccactg

SEQ ID NO: 815136 - DNA, 757 bp, Homo sapiens
ggaacagtcccctattagctctgttctctgttaactcgaggagttaataggtattagtaggtagaacaaggctgttgcagacaggaggagctattgaagacgtcgcatcagaatgagcaggccgtgttctgcaacagcaaatctagtttgacttgaccttttttcatggaacagaggagaggaaagagctggcagaagggagtgtgcagggcacagagtgtatagggcctactatagcagtcaggagtggggacttggggggactggggttagagacgggccttgctgacatgaggtagctcttgtggcttggcctcatgggcagagtagaggaagaagagccagaaactaggtgtggcattgctcttgggaagggtaagaaaggcaggtggtatgtggcaggctttgcagggacagagctggttttagttttcagcagttgagattgcaagatagccgtctgtcccaggcagacaggttccagcgccagggcgggtcggcaggttggaggagaagctgacagttgaagatctagcatcactgatggagaggtgtctggcatgactcggtgaggaagctcatgtcattagagaaaagatagcactgggcttccagggcgtggaggagggtttcagggagggaccttacggatgtaagtgttgccaagaggtgaagggaaatgacsgttaagaggaagccattggattttcagtgagggaggagggtcctggatccttaggagactccgcctgttggg

SEQ ID NO: 815137 - DNA, 528 bp, Homo sapiens
aaatcctgatttaaaggccccgtttataatgtagatgaagcttgtttaccaaataaaagagcagaatgctgtggtggattggctgcttcagatctcatcaaatggaagagtcctgtgtttattcctttgcatggcatcatgcaaaggccctgcctctgcgtggagcccatgcgtctttgttttgattcattccttcttctggtcaaccagggagaggaggaagagggagttgttccttgcctagaggaaaatggcagagcagcagcagatccaggtagtggttcaatacccagatcttctagcgtaagaatcatgcgtgttcagggtcacgatcaaatcaatccagaaaatgtatattgtaggagaggaagaaatcacttcatccctacccttcacagttcttgggacagactgcagcaacraaagacagattaacacaaacagaagttgaatagtaggtatatcttgtgttgtatccatgggagatacccagagaaatgagtcagtgtccaagaggtggcttagatt

SEQ ID NO: 815138 - DNA, 515 bp, Homo sapiens
agtcaatcctcagagccatgaaaataaaataataaattattttaagccacctggttggggagagtttgttatgcagygataaataactggtgcaccttccacagtcactttatttaaacatacactttatgtaaatgtgcctagcagagtgtatgctttggaaaaataatttttgttaaatcattgaaaatgttagttggtcaaaatagttctgaaacttatctgctctgaattctgacccatatctacaacgtattccgtctcagacacaaagggaccaccagctacatttattttttaaaccaagtgttttccacaatgtgatcacatttaatgcagctttgattcaagaaaccaccagttccaccaacaatttgtcactgcccactttatccccaccatacctcttccaaacttccatccatcgttcttctgttgccaggagttgaggacaggcttccattgttttacgttttagtggataccattcattatctctgattgcaggttatgta

SEQ ID NO: 815139 - DNA, 630 bp, Homo sapiens
aagagtgtccgtcttgggtattaacctccaacattgaaatgaaaacaattttgagaagcttaaaaaaaaaaaaaaaagacagcccacattgcggcctgcttcagatctctggtgctttagctttctgtgggaagctacagtttcctgtcatttgcttgctgggtctagcatttgttctctgccatgtgcatctaggatttcttactagctatccagagttatgctgccttgaaagaagaggacatgtggttgttcttctaggcaaggccctcacaatttgtgaatccagtgtaatggttaaaaagtgctgagcagtaaccgggagacttaggtaagaacctaagccagagctcatgttttcatttctcactcactgcgtgactcgggggaaattactttccttctctgagactcaattctctcattataaatgagatcctttcagtgctatccaaagggactttctgccatgatggaaatattctcatatctgtgccttcccatgcagtggcctctagacagtggcttttgagtcttagaaaagtggctagtatgtctgaagactttcaacttcwtttaatttcagttaattttgatttattcttaaatagccacatgtagctaggggct

SEQ ID NO: 815140 - DNA, 547 bp, Homo sapiens
acataattctctaaatggagtgttttcagtrtgtaagcttatactgagaaagtgctctgaatgtctgcagggaggagtagacatggtcccagccctcaacatgtttactgatgtgtcacggaaaatgacataggtacacacgtaattaaagcgccgcaaaggagataaaggagggggagtaacatcctttgggggaatcagaaaaggcttcgggagcttggggaaaatttggaatggaccttgaagaacagtaagatttcattagatggagattaagtttgggagaggaggaaggatgtgacagtttgagggacagaggaaagaaaaggaactatccaagtgttcagtgtggttagggaactgggttgaggaattgactaaataggacgggaaagtgagttggagttagaatgtatcagaccatggctgaccattaagaagattttgcagttgttgatacaatagcgatatatatgtatatatgtatgcgtgtgtgtgtgtgtgtgtgtatgtgtgtgagagagagagagagagatgtggtttaaat

SEQ ID NO: 815141 - DNA, 370 bp, Homo sapiens
tcatgttctattttaatattttggggaactgtcatactgttttctacagtggctgtaccattttacatttctatcagcattgcctcagggtttcaatttctccatattctcgccaatgagggcctacactcttaatcattgtaccatattgctgatccaaggtagatgagtgagaagagtcataaaaaacatggttgtatattcccaagaactgtttttgttaaatgttacagtcttgacacacatcctttcaccactctaggagaaaaaaatactgctaaaaaatagactattctttgtgttgtaraaaactgatgaatttttatttcctttcagtttttctagatgacattcaatcccctccctgctt

SEQ ID NO: 815142 - DNA, 498 bp, Homo sapiens
gaaaaggacattgcaagtcattactgaatgtgaagagagtgaatggtagtttattttttggggaggtggtcaaggtgttgcatttsgactgcccaatttagctaatgtagctgcagcagtaataactaaagtggcagtgcagaatattaaggaaagtaatgtgggaagcaatttgaatatgtcatgatgactactctgtgtttgcatacaggatgacgagtaatgtgcaatgcgtgagttctttttcattgagtttaaaggagttttaacctccaaactgatactagtgatagaaatttcaagaaaggaataaacctttgggtgagaaatttcaggctggttagcactgtacctgccttcaagtttgcttggagccctaggctacctcttccttctccacgtataacagttctggttcctctcttagggttactttcatttctttaggtactttttttttctctcacttgcttagatttgccatttatttatttattt

SEQ ID NO: 815143 - DNA, 695 bp, Homo sapiens
tatccttttctttctgggatccctgggctcttcatacccatcccttggctgagcagctctccatgctggagtactctaaataaagactttgctacaaggcycataatgttccttatctctcttctcatggaaatttgtcaggtgactctcttaggtccttgttctttgctgggtttaataccataaaccactgtgatttagggtgttaatggttatcagtcatcaaatgccttgtttcatcatcctttgcatttgaagaatacttttcaatgttttgctgcaaaggaaggtgtggtggatgtggcagtgcattgccctggttctctattccacatggaagaattcattctccagctgctcagtgttggctgctgatggctcacagctgcatccctctccaagaaccacaagggctgccttgcccaagtttgtgtccttttcctgggggccaagcacgttcaatgactagtgaaataggagtacaaaggctataaagaccagcgccccttgctgtacgtggggaatctctgaaaggcaccccctttgcagttgcagagttccctgtgagtttggctaaagtttctgtgatgagtgcattgcagttcaacttctctctctgcccaactggattcccccattccttatgaagttgtgttgctgatccaccaatcccactctcaacatacacaacaaaa

SEQ ID NO: 815144 - DNA, 455 bp, Homo sapiens
ttacatgggtggcagcaggcaaagagagaatgagcatgtgcagggggactcctctttttaaaaccatcagatctcatgagatttattcactatcatgaaaacagcatgggaaagacttgcccccatgattcagttacctcccaccaggtccctcccacaacacatgggaattcaggatgagatttggttggggacacagccaaaccatatcacatggtggttgtggtggagataacagtatatatttagaagatgtcttctgacataacataatctgaagggatctagatcatctaaacatttttaaaatcaccatattagtttactacattgaaraaaacatgttagttgcaccggataagcaaaaagaagcaagtatattggagggtttggtaagacacatgcttcagagggtggaaggtaaaactctatagagattcatagatctgtcacaa

SEQ ID NO: 815145 - DNA, 647 bp, Homo sapiens
cttacatagaaaggaagcattctccttaattctaaaattattcagatgctatgatgtattaactgctttttctttgtaccgagaagaaaagtgaaggatacataatatttaaaaccatgcaatttgctaagcaaagagtcttattgacttgccagtaaggctgaagagaaggcctaaaataagagtaaatttgactgtgccttgtctttttatcataagttacagatcttctctaatgtttttctgacaataaatgttaagcgataaggaccgttttgttgtcagattgctttactcaagagctagtcttgacccatgtgaaatgtaaacctttagcctaaggcttatgctacctctaaaagcttgtaaaacatattttaaaggattgcaaacggcataaaatacctttattgtaggtactgtgttaaaaaaaatccttcattttcacataaaatgtaaatggcctcattattgtttaccactcttttttttatgttttttttcccccaacaacatatatactctatccaaagtgttgatggrgtaaagcagttcattctggttttttttcctaatgaagctactggtattagaataaaagtgctccaggtagtttctgatcaaagctttatttctttgttgtacat

SEQ ID NO: 815146 - DNA, 585 bp, Homo sapiens
aaatgaaaaacataaagtataagagcaaacaaataaccaaaccaaacacacacacacacttgaaaattatagyggccaggcacagtggctcatgtatgtaatcccagcactttgggaggtcgaggtgggtggatcacttgaggtcaggagttcaagaccatcttggccaacatggcgaaaccccgtctctactaaaaatacaaaaattagccaggcatggttgggtgcacctgtagtcccagctactccaggggctgaggcaggagaacttcttgaacccgggaggcggaagttgcagtgaacaaagattgcgccactgcactctagcctaggtgacagagtgagactctgtctcaaaaacaacaacaacagcaaaaaaaaaaaaaaaaaaaacaaaaaaacaaaaaacaaaaaaacagaaaagaaaagaaaattatagcaacattgactatctttggaaggaaacacaataaattgataacagtggttatatctgaaggggaaatttgaggattaggggacagggataggaaaaaatacctgtttttcactgaaaaactattttgtaactttagccatttgtat

SEQ ID NO: 815147 - DNA, 510 bp, Homo sapiens
ccattctaattgaggtgtggtgtgtttccattctccttcattgtgctgggcctcgctgccctgtgacctggaccttccttcctttgccwaccgggctcagccgtgtgctcggatgacctgtgcactgtccttgtgggcacaggatcgtggcctaccacaagacaaattcgaagctgcacttactactttgttgtgcagttggtagttgtagatattcccaaaggagacccagtctctacagcttgggagatcaatgtttttgtgtctccatctctatccttttctctgtgcttcatctgtggatcacaaaaaccgctactccgaattaatccactattccaatgtttctcaaatttaagagtcacctgaaggcaagagacagtgttggtcaaaatgtagttcctagctgggcacatgcacacctgtaatcccagctactcgggaggctgaggccagaggatctcttgagcctaggaaaggagtttgagacccctgactttaaaagaaaaa

SEQ ID NO: 815148 - DNA, 627 bp, Homo sapiens
tacacccagctaacttttgtatttttagtagagccaggctggtcttgaactcctgaccttgtgatccgctcacctcmgcctcccaaagtgctgggattacaggcgtgagccaccacgcctggcctgtttttattttatttattgttttttagaaacagggttttgccatgttgcccaaactggtctcttatgcctgtgcttaagcagtcggcctgccttggcctcccaaaatgctgggattacaggcatcagccaccactcctgtcccattttttgtattttaagtgctgggattgggggtgggtagggagaaaacgatagatataaacatttgtgagacatgtcccttcccttaaggaattttgtggttgtgaaagaaaaaaatattggaaccccaaagtatgccagaaggaaagttcagcttgggaactgaatcacacaaatactgcttttccttttgttcccaaacagacagctgtaatttcacaatcccatgtcatagccttatctcctctactcctgcttttcacttttactttatcttatgtaaaatgtagatttactgaggctcataagaacctcacaagaatgtaaccatctaggctgggcgtgatggctcacgccagc

SEQ ID NO: 815149 - DNA, 591 bp, Homo sapiens
tcccatgagttctttcctaaataaaatccattaatttctaacgcttggggaagttttaaagttgtggtgaatgaactcacacggaaggttcaaattagaatgtgtgtctagcagtggtcatttacaggtagtgagattggttggtttttcattgttttatcagtgttccttcatttaattgttcaaccgttaaagtttatgggaggccattgttttggaccagtctcctgtactaggtcccagcagacctgggtgtgtgtgtgtgtgtgtgtgtgtgtgtgtgtgtgtttgttgctctgtcacccaggctggagtgcagtggggtgatctcggctcactgcaacctccgtctcctgggttcaaggaattcatgtgcctcagcctcgtaagtagctgggactacaggcgcaggccaccacgcctggcaaattttttgtatttttagtagagatgaggtttcaccatgttggccaggctgatcccgaactcctgacctaaagtgatccacccgcctcrgcctcccaaagtgctgggattacaagtatgagccaccgcgtctggcatgttgtttcatttttaagagacagggtc

SEQ ID NO: 815150 - DNA, 519 bp, Homo sapiens
atgttctgcttagctaagaattgaacaaaaacagcctttgttaatatctcttgcaaatgtatccattgattttcttgctttagattctgctttacacagactgcttttttttttctctttttctcaagyttgatgcctccctgaactaaccttcatctgaaatgaaaaaaaagactttgaaggtggagacatggatattgaatagtgaatatgtgccagggacagggccatgtccagacagcattatatttagtcatggttggtgtaaagctgatgaaatgcaacagagacagggatctttatctgtttaagtcatcagtatagtccaagcccctagaacagtgttttgcacatagcaagtactcagtatatagttgctgaaataattgagttgataaatcgatagtgttttgccttggaaattatgactcgtctattttctgagtagttctcattctggtcttgaattagattttaggcagcaaagaaggacgacagagggaggaaactgtaggcaat

SEQ ID NO: 815151 - DNA, 519 bp, Homo sapiens
atgttctgcttagctaagaattgaacaaaaacagcctttgttaatatctcttgcaaatgtatccattgattttcttgctttagattctgctttacacagactgcttttttttttctctttttctcaagtttgatgcctccctgaactaaccttcatctgaaatgaaaaaaaagactttgaaggtggagacatggatattgaatagtgaatatgtgccagggacagggccatgtccagacagcattatatttagtcatggttggtgtaaagctgatgaaatgcaacagagacagggatctttatctgtttaagtcatcagtatagtccaagcccctagaacagtgttttgcacatagcaagtactcagtatatagttgctgaaataattgagttgatraatcgatagtgttttgccttggaaattatgactcgtctattttctgagtagttctcattctggtcttgaattagattttaggcagcaaagaaggacgacagagggaggaaactgtaggcaat

SEQ ID NO: 815152 - DNA, 522 bp, Homo sapiens
aaaatattcctcccctcccccatcccttccctgcccccactggcttttcacgggcgtggccccttatttaaacctagggccgggcgcagtggcgyaggcctgtaatcccagcactttgagaggccgaggcaggaggatctcttgaacccaggagttcgagaccagcctgggcaacatagtgagaccctgtctctaaaaacaaaacaaaaaacttctcagcctaaattctcacaagaccttcatcttatcaacctgtttatttccttttcagtgttcgccaggatgcgaaagcactgtctatgattgcccctgtgctctttgcctctaccctcttacacgtaaaaccatcacacctggagggaaaaggttcctcgaagtgaagtcagctccggaagtgggggggcaggggcgatgcagtctgggagttgtagtcaaagctgctccgaagccacgcagccgaagaggcggtcgttctatgcaacattcctgtgaaaattacccagctgtgactgtcgaagggaa

SEQ ID NO: 815153 - DNA, 603 bp, Homo sapiens
atatttttccctattctctagattgtctgttcactctgttgacaacttctttggcagtgcagaagcttcttagtttaattaaatcttatttgtctgtttttggttttgttgcacttgcttttgaagtcttagtcataaattcttcacctacaccaattttcaagagagatttcccaggttttatcctaggatttttatagctttaggtaataatttgagattttaatccattttagtttatttctttatagggtgagagatatgggtccagtttcattcttctgcatatgccaatccaattccagcaacatttgttgaaaagggtgtcctttccacagtgtatgcttttgctggctttttaaaaaatcatttgattatagatatgtggctttatttctgggttctctaatctgttcctttaatctatttctatgctagtactatgctgttttggttatgatagtcctgtagcataatttaacgtcagataatgtgacctccaactttgttcattttgcataggattgctttgactwgttgggctctttttttgttccatatgaaatttaggactgtttttttttattttctaattccacgaaa

SEQ ID NO: 815154 - DNA, 636 bp, Homo sapiens
atactaatttttataatgtggcattccccatataatgcccaaatctgacaaagcagtgtcaattgtacggtatttaaaaatatttctgtccctttatgtgtgtgtttgcaggtatatatgtattccacatcagttgattaaaatttctgtctacttaacagtcaaactatatggcagaattattactgttgatgttattatggttcacaccctcccttttataatagtttaggactttatactccaagataattggtgcttaggcctcctcatctctggagttatggcctcctgcatacctttctttcttttttcttttttttttttttgagatggagttttgctcttgttgcccaggctagagtgcaatggcgtgatctcggcttatttcaacctctgcctcccaggttcaagcacttcaacctctgcctcccgggttcaagtgaatctcctgccacagcatcctgagtagctagaactacaggcacctgccaccacgctcagctaattttttgtatttttagtagagacacagtttcaccatattggcctggctggtcttgaactcctracctcaggtgttatgcccaccttggcctcccaaagtgctggaattacaggcatgagccactgcac

SEQ ID NO: 815155 - DNA, 577 bp, Homo sapiens
gctcctgactggttctctggatccacctgggaccaaggggaaaycactgccctgaagggaaggacacaagcctggctggctgccacctgatgactgcagtctcagggccttgagcaaacataggcactagctaggcagtggttatcacaggtcttgggcaagacccagcgcagtcccagtaatcccagtaatgatggccacaagggtccttgtgtcacccctccccccagctccaggaagctcagcagagacagaaagactccaattgtttgggagaaaataagggaagagaaagagtccctgcctggtaatccacagaactcttccagatcttatccaagacctccaagatggtacctgtaaaagtctgcaaaagtcacagtgttacttttaggtaatgcagatgtggctgcagtgaccaaaaacttagattacaacatctaagtcccttcaaatacctggaaagccttctgaagaagggcaagtacaaacaagcagactgcaaagactacaataaatacctaagccatcaatgcccagacaatgacaaacatccacgagcataaagaaggtccag

SEQ ID NO: 815156 - DNA, 508 bp, Homo sapiens
cagagaatacagtgtgagaggtcccacagcagaaaactttggtttaaggraagtctgagtagagaacctgtacattccaaaaccaaagtgcttacggttgaagaaaagtcacagaaaattatttatgctcagattttattgaaagggagtatttactatacagctaaatcaatagtactatcctttgtttatatcctgtctaccttttcagatattgtttacaaaaaataagagtcaatactgctttcaggtagacccccatctaactctaaaaactatttcttttaagtatttttaagtcctttccaactgcttgctttcatgcacatactctttcagttcctatagtcaaaaagttctcaggaaaagtgagtgtaaatagggataaggaatcatatgtacatggaatctgaataaggaggataatatatcctaaagataaagcacaatacagttagtattggttctttttttggcgggggagctcactaagtttgaaaacatttat

SEQ ID NO: 815157 - DNA, 482 bp, Homo sapiens
cagttgtaccacactgctctttcagtgatctcacttctcctctagtggcagatgtgatccaatccctgcaggcagaaattcttgtgaagrtggtgcagtgggatggcagtgactgctgcctcagctcacaatgtcaacaagcttgtacttcccatgccgggcacattgcggtggtcttccagaatctccctgcaaccagcaaaaagagaagttctcccaaatgcctgattcctggccgacattaaccccaactgcagaggatggtcaggcagggcacaggttgttctctttatctcgctgatttctgctcacaacctaatagaaaactatggccactcaggtagtgggctgatgcaacagatctctgaactggattaaaatctataccttcaaggagagactgaaagataagttagtgtaaattcacttaatgctgactgtagactctgccatgaagaaactttcaagcatctatataaatg

SEQ ID NO: 815158 - DNA, 571 bp, Homo sapiens
taaatcttaaaaaggagaaatatacatcagatatggttgagagactgcaaaaaaataaaacagactaaagaagtaaatagtgatgtgggaaggctgctattttatatgtgatggccaaggaaagtctccctgataaggtgtcatcttagcagagacctgaaagaagtgagggggcaaatcagagggacatgtggaggagatattccaagttgaagaaacaataagtgctacagctctttaatcatattcaaggacagcaaggaggccagtatggctgcagcagaagcactgagggggaggatggtaggagataaagtcagagtggtgggcagagagagtgaggatgcagagtgtgcaaagccttccagaccatggctttgcctccaaatgagatgagattccactgaagggctctgaatggagaagtatctgtaatatattctgagttacattttacaagaatcactccggctgccacatggaggtcagactgtaggagtacaagggtagtggcagagaccatttaggacagwactgcaacactccaggctacagtagtggtttggatcag

SEQ ID NO: 815159 - DNA, 571 bp, Homo sapiens
taaatcttaaaaaggagaaatatacatcagatatggttgagagactgcaaaaaaataaaacagactaaagaagtaaatagtgatgtgggaaggctgctattttatatgtgatggccaaggaaagtctccctgataaggtgtcatcttagcagagacctgaaagaagtgagggggcaaatcagagggacatgtggaggagatattccaagttgaagaaacaataagtgctacagctctttaatcatattcaaggacagcaaggaggccagtatggctgcagcagaagcactgagggggaggatggtaggagataaagtcagagtggtgggcagagagagtgaggatgcagagtgtgcaaagccttccagaccatggctttgcctccaaatgagatgagattccactgaagggctctgaatggagaagtatctgtaatatattctgagttacattttacaagaatcactccggctgccacatggaggtcagactgtaggagtacaagggtagtggcagagaccatttaggacagtwctgcaacactccaggctacagtagtggtttggatcag

SEQ ID NO: 815160 - DNA, 639 bp, Homo sapiens
agtgagctccttgtcagtggatgtrttcaagcagaagctaagtaaccacttgctagagatattttaaagagttaagacggagagttgtcttaattgatgtgatatccacttgaacccagggtgtctgtgatattagttattattagtctcctcagggaggttcttgatgcattgtaacctggggctcaggagttgagcaaggatgaataaattgaactttaaaggctaagtttgaaatattttttcttatcttctgaagtcagaaagatttcaatgtttatattattatgactgtaaaagcaaggtttattgttaagataaataataaattatgattgcttgagtttttatacagttctttgttttccctgaagtcaatagttgccttgtttattaatttttcttatttttaaatacatataactaatttgtttccagatgttctgttttataaaatactctgcattattattttatacacaaccaaatgcactaaatcatccatcaagtgcatgtagcaattggtacccaactgttagttatatatccaacatccattgtccttttttcttttactaatgggagccgcatacaagcttaaggtaacaatatgtccagctttagaaatcatttcctagc

SEQ ID NO: 815161 - DNA, 536 bp, Homo sapiens
tgaagtccttaactttaagggaaacctgctcactccattctccctggagctccatgttgataaattacccgaaggaattttatgaatctacatcttttatgtctgcagacatgaccyttcatctgatgaatattgaaacagaattctccagtacaatagaggacttgtggacattagtaggagcttgctctgaaccaacactggtttcatccaggacttgaacctgggcattattttctatctgctcagtatattgacctgtcagcaccttacttattttttaagcacatgctcaatggccacccactccaagaggtttgaatgatttaatacatgaaaaacatttaaccacacctagcttatatatagtaagaactcaataaatattagctattaataattttaaaatggcttccgagtcttctaaacaaagactgaaatatgagctcggcttaacctgttaggtgtattaaaggcataacgacattatttttcatttgccatagtcacctgaagctgttgtttcagagacaatg

SEQ ID NO: 815162 - DNA, 513 bp, Homo sapiens
aacacagctagtaagtggtagatgtagagtgagacgccagtccttctggtttttaagtctgtgcttttaactaccatatagtggtaaggtggataggcggcttakcagtgtgcttggtaaggaacagattttcaaaacgtggatgcggtgcctgtgattttcttatgattctaagttaggcttgggctgcttctgtcttccttaggatcacgtctataatacttaaagaactgtagaaacaaaatgtaacatgggggaatcatattgtcaccttttgtcaaattttattcaaatattggaaaacatttaaggagatttacaaagatctagaaataaagagtaaaactatggctttttgtttgtttgtttgtttttatttttttttgagacagagtctcactctgtcgcccaggctggagtgcagtggcgtgatctcggctcactgcaagctccgcctcccaggttcacgccattctcctgcctcagcctcccaagtagctgggactacaggcg

SEQ ID NO: 815163 - DNA, 562 bp, Homo sapiens
attttaatcttttttatttatgcttctcaactgtctgtgttttgggacatagcaaattcaaatgaatactattttgaaatttttataacaattccttagactttctaaaaccaatccttaaattaactgcctgttattttgcatatacgagtcttccgatgtctcaagggatggcccccgacatcctttttttgactcctttccagtcacatcccaccattccaaactatatccttctcttaaccacatctgttccttgcctcatgttttctcttactttttctttttactattaaaccctattttctttctttttttgaattctattttattttaaattgacacataataattgtacatatttatgagctacaaagtgatgcttggatacctgtatacagcgtgtaatgatcaaatcagggtaattaacaaatccataacctcaaacatttatcatttttytgtggtaagaacattgtctgttttacctgttttgagatatacaatgcattattgttaactagttaccctactgtgcaatagaatactagaacttattgtt

SEQ ID NO: 815164 - DNA, 673 bp, Homo sapiens
tgcatggtgacaaatgcctgtagttccagctacttgggaggctgaggtgggaagatggcttgagcccwggaggtggaggttgccgtgagccaagacagcatcagtgcactccaccatggtcgacggagctagaccatatctcaaaaaaataaaaaagtacttgcggctttcatttggtagagcagagaatttggatgattccttgtgaaaggatttatcatcaatcaactatattaaactaaaaaagaactttcatagtcttttgtagtaatcatcatagagaagatatatgaatataaaaattagaattatcagtattttgaagtttttaatttcacatcacaatttggatttttaacaattgcactacattaagttatccacttgttatctgtttgtttttgttttgccttgtacttagtgaaatttgtattcaacttaaaattgaaggcctgctgtgtaaatgaggctttgacctctggtcagttcagaactcttaatagtcataattcagaaacaagaggttttttttgatgggggatttcagtgtggactaattaactatggatcttcaaattccttcccctttaactctgtatgctattgtgttaggccttggataaataaatcccctgatgtcgccttattccttaaaacaaacacacacaactga

SEQ ID NO: 815165 - DNA, 631 bp, Homo sapiens
atgatagtgaatttcaaaaattcaaaaaaaatacatgtgtaaaaaattaatatatcagtagaagttaaggaattttatagacagcataaaataaaatttttcataaaaatgaaattctcaggtgggttgatcattgctttatatattttgaagctatactattagatggatatgttaatattcatttttaatgaatacaattattttctgattgctctgtgaactaacatacaacatctcttttgtcacataagatatttgctgaattaaatctttattttgtcagagatcaatattgcgacttcagattgttagagtaggtcttatttcttacttcattcaattgattttatttccttattcttattctccactggatagataagattttcttccaccactgtcatataacacaatctttgtatctgctatggaccaaattttattccccccccccaaatttatatgtgacgctctaaccctgtatttggataacagggtcttcaggaccataattgtacactgtgactgtatttggagatagggtctttagrggataattaaggttaaatgaagtcataagggagggtccctaattgataggattggtggcttataaggagaggaagat

SEQ ID NO: 815166 - DNA, 575 bp, Homo sapiens
acagcaggtgtgtatgctgacatgcgttactgaaagaaagagaaaacttgatgcaagataggagasttgtcgcagtgaaacccttgagtagaaatcagggaatgggctctggagcacaaggggaggaaccagcttcagggaggagccaggcagctcattcacccaacaggagggagagtcaaggggcaccaaagctaggagtggagacatgcaggtgtttgcacagtttctcatctgattactcctttacagatttctctgaaataagaagctgaggttgggtatggtggctcatgtctgtaatcctagcactttgggaagccaaggctggaggactgctcgagccgagcggttcaagactagcctgggcaacatgacaagactctgtctccacaaagtattttttaaaaaattagcagagtgcggtggcacatgcctgtagccccagctacacggaaggctgagacaggaggatcccttgagcccagaggtcaagactgcagtgatctgtaatcgcactactacactccagccagagtgacagtgagcgtctcaaaaaaaaaaaaaaaaaaaaa

SEQ ID NO: 815167 - DNA, 575 bp, Homo sapiens
acagcaggtgtgtatgctgacatgcgttactgaaagaaagagaaaacttgatgcaagataggagagttgtcgcagtgaaacccttgartagaaatcagggaatgggctctggagcacaaggggaggaaccagcttcagggaggagccaggcagctcattcacccaacaggagggagagtcaaggggcaccaaagctaggagtggagacatgcaggtgtttgcacagtttctcatctgattactcctttacagatttctctgaaataagaagctgaggttgggtatggtggctcatgtctgtaatcctagcactttgggaagccaaggctggaggactgctcgagccgagcggttcaagactagcctgggcaacatgacaagactctgtctccacaaagtattttttaaaaaattagcagagtgcggtggcacatgcctgtagccccagctacacggaaggctgagacaggaggatcccttgagcccagaggtcaagactgcagtgatctgtaatcgcactactacactccagccagagtgacagtgagcgtctcaaaaaaaaaaaaaaaaaaaaa

SEQ ID NO: 815168 - DNA, 575 bp, Homo sapiens
acagcaggtgtgtatgctgacatgcgttactgaaagaaagagaaaacttgatgcaagataggagagttgtcgcagtgaaacccttgagtagaaatcagggaatgggctctggagcacaaggggaggaaccagcttcagggaggagccaggcagctcattcacccaacaggagggagagtcaaggggcaccaaagctaggagtggagacatgcaggtgtttgcacagtttctcatctgattactcctttacagatttctctgaaataagaagctgaggttgggtatggtggctcatgtctgtaatcctagcactttgggaagccaaggctggaggactgctcgagccgagcggttcaagactagcctgggcaacatgacaagactctgtctccacaaagtattttttaaaaaattagcagagtgcggtggcacatgcctgtagccccagctacacggaaggctgagayaggaggatcccttgagcccagaggtcaagactgcagtgatctgtaatcgcactactacactccagccagagtgacagtgagcgtctcaaaaaaaaaaaaaaaaaaaaa

SEQ ID NO: 815169 - DNA, 633 bp, Homo sapiens
gtgagagcatctgtgcccttcatagccctgcctccccatacacacccatctccatggggtccgcactcctgatgtgttccctccctgagagccgggatgcgyagcttttagatccgcttagttacagacattgcacttggtgggcccccactgctaacacacaagaatacacgcacttgcccctctccgagcacacacacccttcccgcccattctgatgggagacggaaaatcaccaagccttggaaagtaggttacagggactgacttccccacccaatgccaagcagcaatgggtgaatggccagtatggagggcagaggagcccctgctagaaggggctcctggaacaattgcagatgttcccccttcccccatccccacagcaacatgtctccccctctttttccccaaggagagggtttggccaagccaggagagagctcttggtgggagaggaggtgttgaaggagggcatggatattttttcttgctagtaggacccagagtccatcaaaaattagtcagtgagcctgggaggctgaggctgcagtgagctgtggtcatatcactgcaccccaacctgggtgacagagtgagaccctgtctcaaaaaaaaaaaaaaaaaaaaaaa

SEQ ID NO: 815170 - DNA, 598 bp, Homo sapiens
ctaataacaaactctgattaagtgctgtaaaaggaagttatacagtgctttgcaatcatgtaacagaaaagactgtcccagtttaggatgatggagataaggaactgatggggacaggaggcagagaaattctaggcagaaaagggcaggtccctggtgaaaaccccaccctcaagccaaaaacctggaactgcggcccaaagtgagaacttctatcccgttttcctgcttgaatgttgccttttcctaaactacccatggccccaccccaccccatcctgtgcctataaaaaccccagactcagtcggagaggagcggagactgtggctggatgttggagagaaacggcttgacttcagagggacaaactgatggcataacttcagagaagaatccagccagagactggacttcaggggaagattacctacccccacccccagtccccttttcagctccccttccckctggcagccattttcatcagcaataaaatcccctgcatttactatccttcaatgcattcgtgcgacctcatttttcctggaagctggacaagagctcaggagccacaagtgtggatacaaaaggctgtca

SEQ ID NO: 815171 - DNA, 605 bp, Homo sapiens
tcttctcctgccctcagacactggtactcctggttctcaggccttcagactcagactgaaacttataatgctggcctcctaccccaacctcacatccaggcctttggactcagcctgaaccaccagctttcctggttctccagcttgcaggtagcagatcatgggactttggcctccataattgtgtgagccaattcctgaaataaatctcctcttcatatatctctatatatcctattggctctgcttctctgagaaccctgactaacgcacatgtgcaggaagcctgtctgcaagtaggaagcacaggcactggcagagtaatgaagagatggtcctgtcctccaaccagaagagagccccctgcacttggcccaatgccttagagggtctgctctagcttctcagggaggagtctgcagggccaaggggatgtgctcccctgaggtctgtgtccctctcccctttgagtcccygaaattctgtgcccaaatggccctgggcctcttccagaggctgcttgtgtgtcttctctaggtccatcctgctgagggcaggcaatgatgcaggtgcgcacaccccaaggatggccatgggccagctgt

SEQ ID NO: 815172 - DNA, 594 bp, Homo sapiens
tttttgttgttgttgttgttgttttgagacagttttactctgttgcccaggctgcagtgcagtggcacaattttggctcactgcaacctctgcctcccakcttcaagcagttctcctacttcagcctcctgagtagctgggattacaggtgcaagccaccacgcccagctaatttttgtattttcaccatgttggccaggctggtctcaaactcctgacctcaagcgaactgtctgccttggcctcccaaagtgctaggattacaggtatgagccaccttgcctggccaccaggcattttcatggaagctgaacttggaagagaagttatcatccgcagggcttgctctaaggaaggagaactggcctggcacctctcacctcctccaagagaactggacctttaaccagcccagtgaacccacctaggagaaaaacgggccagccagtcttggatatggccagtcaatgcagtacgagggaaaatcctcctctaatcctccacacccctccccacacccctggagagaaagagactgcaggagctttgagttcccgcgagaggtcaacgtgggagacaaaacaacttcatttg

SEQ ID NO: 815173 - DNA, 600 bp, Homo sapiens
tgaataactggtgagctgcttcctcaattggaatacagaaaagatcatctttaaggtccaacactgaaaaccatctgtagtttccaactatagcagttagtaaagtagaaaggttacaaacagttgggtgaatatcctggtctatctcattagttgctcttaagttctggacaaatcagtttgcatcacagtgtggcctttttacaggcagaatgggggtattatatgggaacctgcaaggatgaattagcccattccttaaaaatttttgcaaaattggttgtgtttcttttaaggccttcttttttagtgggttttgtttttctggggcaccttagcccctttatttaattctagatgcactggctgtacatttttagcttttcccagagttctatctgccacaactactcatttttttttgtagatttgtggagggaaaagattttcttcctttttttagagggtaagcaacatctataacsaaagtgcttgctctgggggaacctgcaagcatcactgctgttcctcaggaaagaaggctacttgagcatttaatttacatagtaggcctcatccaagcagagggatggggcattc

SEQ ID NO: 815174 - DNA, 539 bp, Homo sapiens
ggacctgatgcccgcccaaggcctgcagccactagccrttgttctaaagctggatgccgatctggtcagcttagcaggagttgaggaatataaggactgagacagactgggctccatctctctaggcctccaggagcccctggtctctatgaaagtgggaggccaaaagatggactttattgtgcccctgttagggagagacttgcttcagaaactacaagcacaaatttctttcaggccagaaggaaacatgactctggatctaagctgaccaaaagctatgatgttaactcttaccctccacgagactgaggaatggaggctatatgtaaaagaggtgtacaggctgtctgaatttatggacagaatatttgacaaactagtcactgaaatacctgaggtgtgggcagaagacagtcctccaggattggtcataaaccgggcaccagtggtagtagagttagttccaggtacaactccagtgcgtattccccagtaccaggtgtctacagaggcagtgcgaggaatgaccaagcaca

SEQ ID NO: 815175 - DNA, 539 bp, Homo sapiens
ggacctgatgcccgcccaaggcctgcagccactagccattgttctaaagctggatgccgatctggtcagcttagcaggagttgaggaatataaggactgagacagactgggctccatctctctaggcctccaggagcccctggtctctatgaaagtgggaggccaaaagatggactttattgtgcccctgttagggagagacttgcttcagaaactacaagcacaaatttctttcaggccagaaggaaacatgactctggatctaagctgaccaaaagctatgatgttaactcttaccctccacgagactgaggaatggaggctatatgtaaaagaggtgtacaggctgtctgaatttatggacagaatatttgacaaactagtcactgaaatacctgaggtgtgggcagaagacagtcctccaggattggtcataaaccgggcaccagtggtagtmgagttagttccaggtacaactccagtgcgtattccccagtaccaggtgtctacagaggcagtgcgaggaatgaccaagcaca

SEQ ID NO: 815176 - DNA, 539 bp, Homo sapiens
ggacctgatgcccgcccaaggcctgcagccactagccattgttctaaagctggatgccgatctggtcagcttagcaggagttgaggaatataaggactgagacagactgggctccatctctctaggcctccaggagcccctggtctctatgaaagtgggaggccaaaagatggactttattgtgcccctgttagggagagacttgcttcagaaactacaagcacaaatttctttcaggccagaaggaaacatgactctggatctaagctgaccaaaagctatgatgttaactcttaccctccacgagactgaggaatggaggctatatgtaaaagaggtgtacaggctgtctgaatttatggacagaatatttgacaaactagtcactgaaatacctgaggtgtgggcagaagacagtcctccaggattggtcataaaccgggcaccagtggtagtaragttagttccaggtacaactccagtgcgtattccccagtaccaggtgtctacagaggcagtgcgaggaatgaccaagcaca

SEQ ID NO: 815177 - DNA, 539 bp, Homo sapiens
ggacctgatgcccgcccaaggcctgcagccactagccattgttctaaagctggatgccgatctggtcagcttagcaggagttgaggaatataaggactgagacagactgggctccatctctctaggcctccaggagcccctggtctctatgaaagtgggaggccaaaagatggactttattgtgcccctgttagggagagacttgcttcagaaactacaagcacaaatttctttcaggccagaaggaaacatgactctggatctaagctgaccaaaagctatgatgttaactcttaccctccacgagactgaggaatggaggctatatgtaaaagaggtgtacaggctgtctgaatttatggacagaatatttgacaaactagtcactgaaatacctgaggtgtgggcagaagacagtcctccaggattggtcataaaccgggcaccagtggtagtagagttagttccaggtrcaactccagtgcgtattccccagtaccaggtgtctacagaggcagtgcgaggaatgaccaagcaca

SEQ ID NO: 815178 - DNA, 661 bp, Homo sapiens
tgaaacaggcttcctccttcaggagagatcatgcggactaaactgtagcaattccagtgcacctggcagtgatccttttctttgcawagtactgtctctttggttccagtaagttggaccaccacatgacatcattttccctggaacctggtcactgactaacacagacaattgggactccagagcctcaagagccaggagagggcacagtacatacagagggagtcaaatgggatctcattttgagtcctgccttccgcacactcagaacggcagccccaaggcccggagtgtccaggggcttctggcctgaggtgaatctgccaggcccaagaaggcacaaaggtaggagcacagagagccccattcccacaggcgggcggcccagcagcaccagtggaagctcagctgtcctccagctgctctcggcagacagttcagtgcacagtttatgccctagctgaaaaagatctcccggacgtatttcagcacatcctcttcctcctcctcctcagggctcctgctacaggcagagctggaaccccccggcctctgggaagggctgaggcctggagccagtgcctgtttcccactgtcctcttcctcactgctgctcccagaacttgtgtgaggcgacacggagcagggaggggagtgctct

SEQ ID NO: 815179 - DNA, 617 bp, Homo sapiens
cactgactgccaacagtttggtttttagcacagattaaataaaaaccgagatctcttcaacataagctgcttttcacaaagccrcaagtgtggagtggcttgtttcgttctcaggggtcatgcaagtctcatttaacctgtcggcctagttgtgtattaataagaaggcatttggtgcctaggttgcttcttctggtttaagtaggtgttaacatctggcaacatgtgtattttgtaggcctcaaagtacaaaaggatctgacttactcttcttataaggaacatactccactttttgttataaagctctctattataaggctgtcttgttacgcatccctgtcagaggaggaaaagcacaattgggaaatgccatcaggcagttctggggaatggtgttttgcagctctgcctctgtgacagtgggggactaagtctagttcaagaggaggcatgggtttgtgtgccaataagttctttgttgttgggggaggattggtttaaaaggtcttatttggaaggagtttaaaattgtaatctcttctgtctttccttttggttttgctttctaaatttgtttgacgaccttattctttccacacaaactcaccattttc

SEQ ID NO: 815180 - DNA, 643 bp, Homo sapiens
tatctttaagaatgaatctataaacataaaagttccatcattgacccttttctctaatttctttttgacttatgaacagataactatactccatacraaaatgaactctgaagacatagcatgatggcatatttaccaaaataccatgttgtagtcatatcaaacttagaataaacttctatctatcattaatatgattaattactaggtaatactattctgtgtaattattaagcacagaaaataaatcaacttatgtaaatttttgaagttaatatgtctttcctactaaagacatcttttattaataaaaatcgatttcctttgttactacttacattatccttaaattgtaccaatcagctttttttgttgtttacatatatctacattatcttcaaattgtaccaatcacctttttttttgtttacatatatccactaactaatagttcaaaagctattttttaattttaaattttgattcacctcatgttgtccacttcagcctgggactaaaactccttttgttctttcctcctcctcttctctatcttttcctcttgccaatttttttgagacttttatcagctattccctgtctggaagattatatgccagatgtcttacatgccaagactgtg

SEQ ID NO: 815181 - DNA, 611 bp, Homo sapiens
gattcaatgcaatctctatcaaaatatcaatgacactcttcacagaatagaaaacaatactggctgggtgtggtggctcacacctctagtcccagcactttgggactgggcaacatggcaaaaacccatcactataaaaaaatacaaaataaaaaatagctgggtgtggtggcaaatgcctgtagtcccagctactcagaaggctgagctgagaggattgcttgagtctagggtgtgggggttgcgtgagttgagatcatgccactgtactccagcctgagcaacagagcaagaccctgtctcaaaaaaaacaaaacaaaacaaaaaaacccacaatcttaaaatttttgtgaaaccacaaaagatccagaacagctaaagttatcctgagcaaaacacacacaaaaaaaggagaaagaatcacattacctgacttcaaattatactatagagctagagtaatccaaacagcatgatacttgcttaaaaacagacacatagaccaatgggacagaaaagagaacccgaagcaaatccgtacacatagtgaacgtatgtttgacaatgttgccaagawcatacactggagactagatagtctcttcaataaa

SEQ ID NO: 815182 - DNA, 644 bp, Homo sapiens
aggacagagagacagaaaagtaacaagagttccccttcygcttggggctatggctcctttaataggaaagtcccctcagttttaggcttctgtcatagaattgtttgggggcttatatgtaagaaaacacaggaaaaagaagaaaaaatggaaaattttctccatttcatctgcacgtaagaagacccttctccttattcttgagcctggactagaaggcttttcctgaagctctctgtgtctgctctgatgccactgaagaatttcagtctgaattgagttcagtcgggggtaatggaggaaaatcatggtaaacttaccacccatccagtgagctcttcttacctatccatctgctactatttttaatagacaatttttttagaacagttctacatttacagaaaaactgatcagagagtacagggagtttctatgtcctccttttatctcacatgcagtttctcatattattaactttttacattagtatggtacattggtgacaattaatgaacttatatccctatattaactaaagtccatagtttattcaggctttcttagtttttgccaaatgttctttttctctcccaggatttccataatgttctctttgggaagggagccattatatgtagccc

SEQ ID NO: 815183 - DNA, 645 bp, Homo sapiens
ttctggccttgagtgtatgtacccaaaggttgatctcagatattccatgactaataataccactcacaggcctttagtggattaagctattgtttgcctaacactccaggatagamagagatatgtaaagtgttaagtggcagcctcatggctccaagtttcctgtggttactgcccagccttcaggattaatttggggcctatgtttttagagagtcaattgtcctgtgcaatccttattcataacttcctgctacatctggtgagacaccaggacactcattctttgtctgctaggcccgaaagagggaaaaaaagggggtggagaattgcagaggaaggaagggaattagcgatgtcttatcttcagagagttaggctagccttcctctgcataggataagaatggcaagatttatcctcattggcatcctgcatgtccagcctgggatggcacagtgcaagaaggatatgacacatgtaaggatgagacattcccatctgttacgagtggtgcactagcacctgggcaagtaaaattataataccaagattttttttttagaacttgttctaaaaggccctgtgctcatgcctttcaatgcaatagtttatttaaactaaaaggctctacactcatgactt

SEQ ID NO: 815184 - DNA, 510 bp, Homo sapiens
aaggggagggggccggggcttctgagggccagtggagccggggcgagggcataggcacctgctggagctcggtccatatataccacttccgcttaatgatggagcactgcttcgtattctcaactttatggcttggtgggttagaaagcacccaacacatgacatgcagctcaaggcacatggtgatgggtggcccatgagtaactttgtctctactaaggcccggcagaaatctaaaagctgtttctctaaaggagagtagttatcagcagagaaccacagattttcccccaaatcctttgagtcttcactatgatttaccctagagagatctgccaaacactccacgcagaatccctatttgccactgacccttcaagtagcgtcagttcttatgggttctatgtcccaaatgagaagcctgyacatcagcctggacctattgcagaactctctctcttgtggatcccactcagcactggaagctttgtggctcactaggtagatggg

SEQ ID NO: 815185 - DNA, 631 bp, Homo sapiens
aaatggtcgaggttgggtctggatcctattkggtctctgtgatcatccagtcctgctggaaactccctatgcggcttctgtggcaatcaatcctctctctcaggggttctccgacgcctccaaccttgggttccatgggtgggtcttcttcagcttctcgtctgccctaaaactcctgacagttcacagagtcacagcccaagccttcctcttttctttctctagatcttcctgggcccgttaattcgtggtttccattgccccactgagcagaaactcccccacacccaggagtctcctcagccacaccttcccactgactaccttgacctgtggaaacctcagacttggtatatgccaggtgtagctcattgttctttgtatgtgtgtatattttattatttctcatccactaagtcctgtgccactgctatatttcctctcttggtgttcatggtgtccccagccactgggccagacttgactccttcctctcctttgccctgtacttcggggtgccaagttccattaaacccaccttggagacgtctgttgaatccagcctttcctcctcattttcactgctgtggtttatttcaggccaccattctttcctgtctggggtatggct

SEQ ID NO: 815186 - DNA, 590 bp, Homo sapiens
aacgttgaactcctaggttcaagggatcctcccatcccagcctcccaagtagctgggactataggcgtgagccactgtgcccagtcctatctacatttttagctccagttcctagcccagtacctggcacacagatgatatccactatctgtgctggcgtggatgaagaagagaacagatgaatgggaaaacttgaggacaagatggttttgaaggcagataggcactgatgaaggacaaggcatttctccattgatactgaattaaggatgacacagcgggtacagagacagacacacaagaatgtaaagaaaaaggggccaagagatttaactagcttacctcaatgaaccatgataagggaaagaagaagtaaaaacaatagccagatagaaatattcttgataaacagcatgataaataaaggaactggcatagttccttctttgttccagattaattgcttattcttgtggtaaaasattaaaaataattctctgagagacaaaagtagctctaaagtctgttaaataaacaagactacttagaactcagtttcttacctatgttttataaggttcaaaagagct

SEQ ID NO: 815187 - DNA, 614 bp, Homo sapiens
cgccaactgatttttccactatatatatatccacatgaacctcaggttccaaaaaatctcagcaggcccatttcttccattctcacagcatccctatttacatggaagagtgagaacatactaagggatcataacaattcccgagtggctcctatgagcaaggtactgtttccattcatccttaggctggcatgtgaggcaagtgttactaaaggtgaagctcaccaaggttaagtggtttgcgcaaagtgacagagctgaggagtggcaaagctgggtctgtagtgcaacctgtctgattctggcagctttctcacaacattcagaaagaaatgtcgaagaaagaaaaagtgggcgtcagctcaaacatcccaagcctgccctgtttgtcctgttttgttttgctttgttcgaaagatgagatccggccgggtgcggtggctcacacctgtagtcccagtactttgggaggccgaggcaggcagatcacctgaggtcaagagttcgagaccagcctgactaacatggcaaaacccyatctctactaaaaatacaaaaattagctgggtgtggcggtgcgtgcctgtaatcccagctactcgggaggctgaggc

SEQ ID NO: 815188 - DNA, 555 bp, Homo sapiens
ggttttcatgtaacgggtggtacttcatactgaagtgacccacttcaaagctgccctttgttctatgtcttgatgtatgaattttgagatggccaccttgagttgcagakggaaatgtactggaaattattatttaaatgatgcccactcaccacaattatgtatgtgtgtgttttcttgaattttgtctttatctcttttttttttgtaggctcttcaggtttcttttgatatctgtggaggcgaatctggaacaaaatggaaaactctcagtagcagccggttcttgcttacaaacacttacatgttgaagggcttttcccacttgaaggacgtcatagtcaatgtgactattgtatatggtacccgtgaccatccagacgccttctccccggcaaaacacagactcagttggctcctggggagcgagggcccctttaacgccaaaatccatggctggatgggggaggggagagcccggacgtgagggaagcgccagaccctctagccaggtgggtcagaggtgcagggaagccaatctgctctcctcctgcc

SEQ ID NO: 815189 - DNA, 633 bp, Homo sapiens
gttttcaaagagccctaggtaccsagctggccacagtggcaggggtgcgcagcaccttctgccggatctgggccttccttggctttccctcccagcccccctatgctttttcttcgcgtcccctctttcattgggatcccccaagatctctgccaccgcccccaccttccacccagctcaggccacttggcagtgctgcctctttggcctgcaaatgctgtgctcacccaaaccctcacttacaatgaccttcattttagcccctgaatgcagccctcagagggccaagctgggggctaaacatacacagaagctgggtggggggaagggggcggtgaaatggaggtggctggggaggagagccttgaccattttgatcgctaaggtcactttggggctttggtggggaggagcagaagctcacagcctgaccagctgggacctcccggagccagctagccccaccgagctgggacagttgctccagagtgtagagttggcctttcccttgtttggagaggggtttggcatctggggcttcaggagcccagggaaggttagggtgctgtgtacccaagccccagcctgaaagtgcctggcttctggggcctgctggctcttctgggcgcttct

SEQ ID NO: 815190 - DNA, 568 bp, Homo sapiens
tacctacagttttatttttattttgccataaaataaatgcttattaatttccataccacgtatggagagagctgccacatgtgaatttcttttagcaataattgccgtgcctgggactccttaagttatatataccgcgggaatagtttccaaataagaacccagagagagggagagattcacagacaatagcttaaaaagtctagaaattatagaccgattgaggtcagcaagaaacaaattattcaatatatcccctgagggctagagccagactttcccctatgattccaaaattacttcgcagtttcattagggtgaaaggcagtgcagtctcatgagttcagaaagtaaaggttgttccttaaaatttagatagacttgacaaccacttaggatggcattttggcattctgtccctgctcatcaaagaagttgctcaaatttgtgggatagaggaatgagagcaagaagtattttaattgcaataccttrtgttgtatatatgtaatacctctatgaaaattcaggaaatcagtactgctaataaacctgatgtacaggcaga

SEQ ID NO: 815191 - DNA, 611 bp, Homo sapiens
ttttttagagaagtcatctccctctgttgcccaggctggagtacagtggcatgaccacggctcattgcagcctcaacctcctagaytcaaataatccctctgcctcagcctcctgagtagctgggactacaggtgcacaccaccacacctggataatttttaaattttttgtagagatgggattttgccatattgcccaggctggtctcaaactcctgccctcaaccaattcttctaccttggcctctcaaagtgctgggattataggtatgagccacagtgcccagctaattaattttttttttttttagagatagggtctctctatgttgcccaggttgatctctgtttcctaaacgaatgaatgaatcaggcctgagtaatatgctataaagcaaggtggccctcgccacttcactactggtttacgctggaaggagccaggcaaggctgctatcctgggcaatgcctatgggcagggaactcacctccaggcccacctcctcaggccccacaggcgtccgcatcctgctttatagcaaggacttgagcaccggcagctcagaaggacaggctgcaggagtcccccagcacctggaagcagacccact

SEQ ID NO: 815192 - DNA, 545 bp, Homo sapiens
gcttatgataatggcctccagctgcatccatgttgcagygaaggacaagatttattcttttttatggctgcatagtatcccatgacatgtatgtaccacatttgctttaaaaatatttttttcacttgcccattagggtgtcataaaaggtggctatatatgtatggatctaattctgacttctgttcattttgcctcattggtcgatatatctgatttctttctgatgtcaaaagcacagtattttaaacattaggattttgtataatacttctaatgtctggtaagtttagctttccagctttctttttcttattcaaatttgtcttaacttgtattggctctgtacaatttcagtaattaaaaaatcagcttgtccaattttcttaaaaagataaacacctgttttggataatgtgctatatttatctcatagattattttgagctgactttcattattaaactgttcaagcctatgaacctggtctaagctttcatttaggactttattagtgaatgtcaataaaatgttgtactttccag

SEQ ID NO: 815193 - DNA, 433 bp, Homo sapiens
atgaaggataactgataataattgtcaaggccaggcatggtggctcattcytgtaatccatgcactttggtaggccaaggaaggtggatagcttgagttcaggagtttgagagcagcctgggcaacatggtgaaatctcgtctctgcaagaagtgcaaaaattagctgggtttgtggcgtgcatctgtagtcccaggtactagggaggctgaggtgggaggatctcttgagtctcggaggtggaggttgcagtgagctatgtcagcccactgcactccagtggcggcaacagagtgagactgtcaaaataataatttttgagaagccagaaccctcagtgctagacaggtactaattgctgaacttgtatataaaacttagaaaagaataaagtaatgagtcaaagaaataggatttgctcatctggatttat

SEQ ID NO: 815194 - DNA, 540 bp, Homo sapiens
aaatgaaacttcagcaattaacaagggatttcaaataaagaacattttatcacaaaaaggatgaaagaatgtaatctaaaatcaaaataatttattttgtatatatttacctttaaataaaatatacttcaatttaaacttttcctaactttcaaaacacgtcattgaactctacgatactatacaacagagtataatatacagcattatactctgcaatatgaataaatctcacaaacaatgctgagttgaaagaagccagacacaagatgacccaaactgtgtggttcaatttctaaaaataagataaagaggtgaagctaatttctgctcatagaagtcagggtagtgggatgttgtcaagtagtagatgggagggtgtgtggaaggaagggtgggggcatttctasggtgctagtaattttgtgtgtgtgttacagatgatactacacacatcttttcattttctgtaaattaagcaagttgtacactattttaggtatacattttgctatactgttctttgattaggattttaaa

SEQ ID NO: 815195 - DNA, 595 bp, Homo sapiens
gaagggatgggaatgggaaacaagtaaaagtaagagattaaattgaagagacccaacaatgaatggccttggctaccatgttgagttctttggaactgatcttgtgggcaatgaggagtcactgaagggagacaaggagcgtgacatgatcagatctgtggttcagaaagatgacattgagaaagcctgtctcattcacagctgtgcctagaagagtgtctggcatatagcaaatgttcaagaaatattgttggaataaatagcttaagcacagattgctatgagaacaacagaacagtcaactgactcctaatttctgctttattgtttttcttgaccaagaaaccaacctagaaccaatctggaagtcagggtcatcagaaactctgtctttctcccccaggatgaaaagtaacgctgagagtatgttgaaaagcgcttttagattgcggattcaaagcagtgcaagtgacaagaatattatctktcattttcctcattctctctgctttcaaaggcctctgtcctgctttataccacatccatcagacaccctcattttcatatcttcgcctttgtaatagcaagtggctga

SEQ ID NO: 815196 - DNA, 606 bp, Homo sapiens
acccgctgacaggccctggtgtgtgatgttcccctccctgtgtccatgtgttctcattgttcaactcccacttatgagtgagaacattcagtgtttgattttctgttcttgtgacagtttgctgagaatgatggtttccagcttcatccatgtcctgcaaaggacatgaactcatccttttttatggctgcatagtattccatggtgtatatatgccacattttctttgtccagtctagaactagaaataccatttgacccagcaatcccattactgggtatatacccaaaggattataaatcatacgtcttttatactgtaattttattacagtataaaattccttttatttattccttttatactgtaattttattacagtataaaaattccttttctatgtttagatatacaaatacttcccttttgtgttacaattgcctatagtattcagtacagtaacatgctgtacaggtttgtagcctaggagcaataggctatactctacagcctaggtgtgtagtaggctgtccmgtctaggtttgtgtcagcgtactctgtgatgtttgcacaatgtcacaactgcctagatacatttttcagaa

SEQ ID NO: 815197 - DNA, 555 bp, Homo sapiens
ttttcttttctatcacattgtcaggctgcaacttttttggacctttgtgttctattttccttttaaaactgaatgcttttaatgacaccsaagttacctcttgaatcctttgctgcttagaaatttcttccaccagttaccctaaatcatctccctcaagttcaaagttcaacaaatctctagggcatggaacaaaatgctgccagtctatttgctaaaacatagctagagtcatctttactccagttcccaaaaagttcttcattccatctgagaccatctcagcctgaatttcattgtcagcattttggtgaaagccattcaacaggtctctaggaagttccaaactttcccatgtttttctgtcttttcctgagccctccaaactgttccaacttctgcctgttacccagttccaaagttgcttccacattttcaggtatctttacagcagtgcctcactcccagtactaatttactgtattagtccattttcatgctgctgataaagatgtaccagagactggataatttataaagaaaaatatgtttcat

SEQ ID NO: 815198 - DNA, 484 bp, Homo sapiens
aaaaaaaaaaaaaaaaaaaaaaaaaacaacaacagaacaatagcactttcactcatttgcaattttagcagagttttcatgggtgaatatcaacatctgttgctccatttcctgaaaagtcctgtgggttggaatgccagtgctgtcccaattcactttgtcttttgctttagtaatagcaaaaatcaatgtaattaccatcactattcacagttttttttaataaatagtgggaccctcatttaagtcgataaaattgttctgtctcattctttgcctttgttcaggatcacatatgaaattcttttctgcaagatggttttctacctccattgaccttgaaatgaaaaattctttcaaaataaatattttacaaaattatttctaagtcgaaaaagacttagtgtcttggtgtacaagagtggggtaataccagcatgtttctcagtggggagtgrggtaaaagaggaggacaaaaaggtta

SEQ ID NO: 815199 - DNA, 655 bp, Homo sapiens
atgatattagttgcatgttgaaaaacatgtttgcatatatgtgttttttatcatttaacaagaacaaagagacaataacaaacacccagaggaaaaaagtcataaaaacattatcaaagagttcaaatataaagcaaactaaaatgtggtataacttagagcaattaaaaaatctaagagaaattatttgacctggaagataggaatattgcatgtcctttgcattggggtcatggcctttaaatatttcagaaaaaaagatgcaatcttagcacactacttagctctgcagcatatattattaacatgccatgctaatgaaatttcatgttcttgattttcaactcagcatttcctcattttctcttctcccttctgcacagtttctattcattatattatttgttacggttgtaaaattttaatctatttggcagcaatattaaaagttctacacgttgtcactttctttatttttttttttttgatggagtttcactgttgttgcccaggctggagggcagtggcgcaaacttggctcactgcaacctacrccacctgggttcaagtgattctcctgcctaagcctcccgagtagctgggattacaggcgcccaccaccacgcccggctaatttttgtatttttagtagaga

SEQ ID NO: 815200 - DNA, 492 bp, Homo sapiens
ggtggaaaagataaatgagatcaaacagaaaaaaaaatgagaaactggaaagatgcaaaacaattatcctcatgaatcttcacaacgatgaaccgcaaatacaggtgaggtagggaatcccaacccattaatttacagaagagctctagaaaaaaataaagcacacgatgccaggctgcatttatttttgtcctctatttaaaaaaaaaaactaattagtctgaaaaatagcctgtaaagagcttggtatgaacactgtttctactaattgcttggataggatggcccgtatgtgtcagtggtctgcaaccacgactgcctcaaataagcaggggcagagtctgctaaaagttcgagagtatttctgccattctgaaaactgcctggatgaagggtaacttaraaaatgcaaaatgcaatggatttcacaggtaagtgatccttggtaagttcactatgcctacttaccgtggtcaaggatatatttcacaa

SEQ ID NO: 815201 - DNA, 654 bp, Homo sapiens
ctcggcagaagaagaccaaggtgggatccttccgaatcaatccygatgggactcaggagaggagaaaggtagtggaaaagatattatgtgccagtgtataattgcggatatgggcaattaccaaccatttatccaaacagcagttggtcttaatcttctaacctttctcttgttcagggtatcagctctaaattgcttctgagtcctgggggacccaaagtaatctttaagcttgaaattgaagtatctctctcagcacctaaattttgtgtctcgtcaagtcgaaagacatttcggcactgttcttcatcagaataaaaatagcgcgtctgtggttcttggtgaggccagcagggggcccagaagaggctaaaggggcggcctagagacactcaaagcagaatagtcctctcctgggtaccacactccctcccccactgcaagatgtgcagatttctagttgggggtgcaggttgtaagacgcactttctggaatagaccggacagttggctatggagaaggaagaaacgttcttgcacaacctagagaggggctccccctgaggatcagaggcagtgagtggggcgctggaagggtggagtctaagacaccaggcgggacccattaggggacaccttcccctctgagccctc

SEQ ID NO: 815202 - DNA, 641 bp, Homo sapiens
cacagggatcattaaatgaaagacctactgattttttgttttttgttttttkttttttaagacggcgtttcactctgtctcccaggctggagtgcagtggcacaatctcggctcactgcaacctccacctctgtggatcaagcaattctcctgcttcagccctccaagtagctgggactataggcgcgggccactacgcctggctaatttttgtatttttagtagagacagggtttcaccatgttaaccaggctggtctcaaactcctgacctcaagtgatccacctgcctcagcctcccaaagtgctgggtttataggcacgagctacaacgcctggccaagaactgcttattttaaacagctgctctgtttacagaacatccatatggcttctacagttattactagtattccatttagaatgtaatcatgtgttaaagatataaggctacattattcaattacattccattataattataaataacagttcctatcaatttagttaaataaagaacatttataatgaggtaatattgagtacctgaaattttcttcatcttcattatcactctgcaaaagatcatcatttagctcttcatctgacaaatccgactgattctaattaaaataagaaata

SEQ ID NO: 815203 - DNA, 578 bp, Homo sapiens
gtcagctatgactgactcactgtagtctagcctgggcaaaagagcaagcccctgtctctaaaactgaaaaagctatttacagatataatcaagttcggatgagatcacactggatattaaagagggcactaaattcaatgacgactgatgtctacataaggagagggagatttggggacaaacagacacatacagaggagaaaggtcatgtgaagccaaagacttgagttatgctgccataagccaaggaatgcaggaagccaacaaaagctggaagaggcaaaggattctcccctagaggcttcacagggagtgtggccctgctggtacattaatatggacttccggtctcctgacctgtgaataaatttctgttgttttaatatatccagtgtgtggtgtacttggatgtatagattcctatcttttagctatatatttgtatatgaatttggcaattttcagccattatttcctcarattttttttctgtcaatttcttgctctcgtgggtctcctatgtgtatataagtacacttggtggtgtcccgtaggtcctttagactctgttcattttt

SEQ ID NO: 815204 - DNA, 494 bp, Homo sapiens
ttctgtaaagcatcactcgctgtttccaggggtcccagctacagagtaagtggaaagattggttgcttgttaggcagtcatacaaaacatctgcaaaacccctcatttgtgtaccgtgggaatgtgatttagacatttcggtctagaattatactctagaggtccgttgtggaatgtgcattaactaaattacagaactatgctagatccttctttaatttccttctgtgtcctatacttcttttattgacgacatcattcttcacattccctaggactttttgttcccttttacttttcctctcattctcatgtttgaatggtggcatctaaccagatgccaaggcgtgtgggtcccatcaccgtaatgtcattaatctctcttcccatcccttcattccagggctatggcctgattgagccccttgcaatcttctacataggccagstagtgtacagtcacatggggagtctgtttccttctccctgtctct

SEQ ID NO: 815205 - DNA, 472 bp, Homo sapiens
tctgtttggaatagaagttccccctagaaatgaaggggaactcactacttccaattttaaagcattccagcggttaaaacgttattctcttatccctttccattgaacccagctctgccctctaaaatgacccacgataattccattgtcttttccacattatttttcagcaatctgagttcagatataatgtgtatttagtcttctcttctataaacttctggatgtttaagcacaatgcctcacattattttgagttagctcaacttcgggttgctcttctttgggaatgctctaatttgtcagttttcctcttaaaggaaatgtagtcctccacatgaagtctgatcaagaaagagaagcatctctcttactttggcattgaaagtttgttaaactaagtgtgtgtgtatgtgcacgtgatagatctgtgtgacagtggttagtcagtgratcctttgatttcacactt

SEQ ID NO: 815206 - DNA, 579 bp, Homo sapiens
ttttttttttaattggactacaagaagcctcaaatgaaaaccctgaccagtcaccttcatcataggctgctgtttacagcctgasttgggaacatccactccatgttgtcactgcccttccatcagctgtaggtagggtatgggcactacagtataagattatattaattatgccaacaccttggaagagataatacaagctgttgtacacggctaccaaggcaactccacattttgataacatgggcttattttggattctctttaattttaaaaagtgtgcttggaccacccaggtcagaactatcaaaacatcaattcataaatctacttattctaagttattccattttcaactgctgtggcactaattttatctataggtaacaatcttactagaagttaaattattttatgtaaatccctggtttatctgttacttaactaaaaattataataatttgccaagcaaatgaaacacatctgctgaagttcttttgtcagattttcttaattataagaatgtttttggaaacatgtctacaaaattaataaagaattatgtatcttcatgatttt

SEQ ID NO: 815207 - DNA, 602 bp, Homo sapiens
agtgtaaaatctagatctagatttactgttttataaacttaatgtccccacttcactgatacataagagctacatttatttacctgcrattcaaggcctcagtgctttaacctttgtcttcctgctttatgatgttgtagtactccttttacagaaatacctatattaaatagagatggacaatctagattttaccccaacaaataagttcatttaggcactgattaatcacatgtaaagtgaggcatgttaaattttctcctccaacacagtaaaattaaatatatcaatttcttcactgtcagaataacgtaatagacatggaggaggactaagattgagtaaattcgttccagtgctgtctttttactgtgtgtgtaattttggatgagttgcttgtgtgttctcaggatctattaactacatttatcaacagggtaataatagcccctgttcccctataggctaatggcaactttcaaatcttttgaaaaagtcaaaagcctttgcatttggtcctgacccattattactctgtgaattaatcctaaaagtcagtactcaataatgtggctttttaatcatgagcaacagtggctgcc

SEQ ID NO: 815208 - DNA, 537 bp, Homo sapiens
ataaggagcttacgcaattcaacagtcgaaaaacaaccccattaaaaagtggccaaaagaaatggacatttctcaaaataagacatacaaagggccaagaaacatataaaaaaagtttatatcaataaccataagaaaaatgcaaataaaattacaacaaggtaatatctcacatcagtcaaaattgctattactaaaaagtcaaaaaacaacagatgatggggaagatgaggagaaaaggaacatatatacagtgttggtgggaatgtaaattaattcagccactgtggaaagtggtttggagatttctcaaataactaaaaacagaactaccatttgacccagcaaacctgttattggatatatatacaaaagaaaatgaatcattttaccaaaaggacacatgtactcatcacagcwgtattcacaatagcaaagacatggactcaacctaggtgcccatcaatagtggattggataaggaaaatgtggtatatatacaccgtggaacaccatgcagctgtaaaaaagaattaa

SEQ ID NO: 815209 - DNA, 620 bp, Homo sapiens
attaccaatgagttgcatattttcagatgattccttcgtgttcattatcatctttttctttcagatgggagaattccctttagcattttttgtaggacaggtgtgttgatgaaatgcgccagctkttgtttgtctgagaaggtctttgtttctcctttatgctaaaaggatattttcaccagacatactattttagagtaaatttttttttctcactttaaatatctcatgctactctctcctggcctgtaaattttccactaaaaaatctgctgccaggtgtatctgggctccattgtatgctaactgtttcttttttctcactgcttttaggatcctgtctttttccttgacctttgggagtttattaaattccttgaagtagtcctatttgggttaaatctgcttggtgttctacagccttcttgtatttggatattggtatctttctctatgtttggaaagttatctagtactatccctttgaacaaactttctacccctatctcttactctaactcctcattgaagtcaataactcttagttttgcccttagaggctattttctaaaactcgtgagcatgctttattattttttattcttcttttcttttttgtc

SEQ ID NO: 815210 - DNA, 483 bp, Homo sapiens
ttaaaaaagatagaaaaaccaaaacctgagagaacatgtgatgtctccaagcagtggacataaagtaacacatatggcrgactatgaaagacaaaacaatgaaaagcaaagaaacgtcaatagctataacaataccaagtgctgcaaagtcaataagaagaaagcctaaagaaatggaaagattatcaaccatatggcttgaaactcaaacaaccaaagaatcagaaacaagctctttacaaccaaagagaaagcactaattatatatgaggattttaaatggtaagcaccaaattctcctagaatgcctctttttagtgctattagggtctaagagtagtagtttcaaatacgagttcaatttccaaacccttcagctactgagcaaaactgtgagaacagatgagaaagttgcacaagaattaccagtgatgatgcagaaattgattacaggaagactatatattggaatttttgtttttc

SEQ ID NO: 815211 - DNA, 629 bp, Homo sapiens
attgcatttcacattgtattaatatgtataaaagacaragggtcaataaatatttagcagatgaatcagagttggcatctcaagaatataagggtgatttagaaattatcttaaataatctagaagaagcgctgtgtgggttctgtagagaaaacaaaggagaggaaattgtttaccatccactcctcacttggcgtattcagggaatatctagtagctttttgatgaggcatagagacagaagagcatggggagctgcttaagaggagtcctaaaaatgtgtccaggacagcttgctggagtatttatgacaaacttaagaatgttctcctcattttgtgggccagtagtgttcaaaatctttttcatgacacttatttgtaaaagtttaagaatttaaccccaattatttacatttatatctctatctttaaaaatatagataacaagttataaacatgtgtgtatatatataatactgtatatgtaatactgtcaaattgtctaatgctgctaataaacatatttttcatctttaaacattaacaggcaaaaagatttttgattaaatatacaaacagatgccccttgacttatgatggggtcctggtcccaataaacccattgtt

SEQ ID NO: 815212 - DNA, 623 bp, Homo sapiens
gatgccatctaggactttcatagcctagagaggagaagtcarttcctggtttcacagcttcagaggacaggctgttcttgtcagaagctaatgcagtgggtgactttaagttgaagccaatgctcttgtatcattctgaaaatgctggggcccttaagaattatgctaaagctgttctacgtgttctagaaatgaaacaacaaagcctggatgacagcatgtattagtcagggttccctagagggacagaattaataggatatatatatatatatatatgggagtttattaagtattaacttaaacaatcacaaggtcccacaataggctgtctgcaagcttaaggagcaaggagagccagtttgagtctcaaaactgaagaacttggagtccaatgtttgaaggcaggaagcatccagcacaggagaaggatgtaggctggaggctaatccagtctctccttttcacgtttttctgcctgctttatattccctgagagctgattagattatgcccactcagattaagggtggatctgccttccccagcccactgactccaatgttaatctcctttggcagcgccctcacagacatacccaggatcaatacttttcatccttc

SEQ ID NO: 815213 - DNA, 568 bp, Homo sapiens
ctccttccttggtctgtgcacagagtcatcgctgcagtatgtgaagatcctttaagctaggttgctggccagttttttattttttatttttttctgcgttgctgagagctcgggttattcctcgcactgggtgggtcttgatttctcacccctgaggccaccacaagggggcagggcaagcctcctcacgagagagaaccagagaccatcccgggaggggaatgcaatcatgggcgagcccccaaattgttacatataaagtttcgatgctacaaaaggaataccactcaaatataaaatttttttttaattctcagcaaggcaagttacttctatagaagagtgtgcccttaaagatggtgcaatggtgaacacacacttggacaagggaggggaaggggttcttatccctgacgcacatggcccctgctgctrtgtcattcccctgttggcaagggttagacgcacaggctaaactaattctgattggctaatttaaagagaatgatggggtgagtgctttggcaggagtcagggcagagcaggtagcaggtaattggaatgagtt

SEQ ID NO: 815214 - DNA, 627 bp, Homo sapiens
aagtagacctagagcatccatccacagtgagagtgggggaattggaactcctttgtaatgttgaatggtatgtaaaccagtgcaagagtgaaagagcataatttgcctgtgtgtgttaaaatagaaattatacatacacttatagccagcaataacacacttaggaaactttggaaataataccaaaagtgcagaaaggcatattgagaagcagtgtttattacagcatttttttgaaacagtgaaaatgtaaaaacaatctcgatgctcatcagtagatgatagttaaataaattatgatatatccataagtacaaaatagtactattttgatgttaaaagaatgaggtaaagaatgaggtaattctatagatattcacctggaaaaagaaggttgccaagcagaatataggaattgttccctgttgggtttttaaaaagctctatctgtatgataaaacttaatttgttaaaaaacaaaactctgtatgtgtgttttaaacttttctttttggaataattatagactcacagaaagtttttaaactgtcttttaayttttttacttttaattgacacaaaaattgtacatatttatgggatacatgtgatatttcaatacatgca

SEQ ID NO: 815215 - DNA, 576 bp, Homo sapiens
agatggggtttcaccatgttggccaggctggtctcactcaaactcctcacctcacgtgatccgcccrccttggcctcccaaagtgttgggattataggtgtgagccagagcgcccagcctatctctattatttttgctgttgagttgtttgagttccctctatatccaggatattaatcctttgttggatagataatttgcaaatattttctcctactttgtatgttgtctcttcactctgttgattggctcctttgctgcgcagaagttttaaaaattttatataatcccatttgtctgtttttgtttttgttgcctgtgctttcgaggtcttatccataaaaatctttgcccagactaacatcctaacacatttctcctgttttcttctagtagtttcattgtttctcgtctttaatttaactctttactctatcttgaattggtttttgtatatggtgagagatagtggtctagttttattcttccaagtattcttcaattgtcccagcaccatttattgaaaagactgtcctttccctaatatatgttcttggcacttttgttgaaaatcag

SEQ ID NO: 815216 - DNA, 638 bp, Homo sapiens
gttaaagtttgagaatcactgctctaacgcactcacaacatttttgcttctcatcctcagacctctgatctctgcttcttaatgactttggtacttgagggatggatgcttccaacaggggatacaaaatkgtttcaatgaagtggaagcagagacttatattgtctcctggtggcttcacgatactcacgccagtaggaaatagatgataaaggggcttatgggctttgaggtgctaactgatcctaattatcaaggggaaccaggactgctgctacacaatgaggcagaaagaagagcagatggaagtcaaacagccttgggggggcctcctagtactgtcttgttcaggggtaaaagtcaatgggttgcttggcgtggtggctcacacctgtaatcccagcactttagcaggccaaggtgtgtggattgcctgaggtcaggagttcaagaccagcctggccaacatggtgaaacccccatctctacaaaaatgcaaaaattagccaggcatggtgctgcatgcctgtaattcctgctactggggaggctgaggcaggagaatcacttgaacccaggaggcagaggttgcagtgagccgagatcgtgccactgcactccagcctgggtgatagagc

SEQ ID NO: 815217 - DNA, 585 bp, Homo sapiens
cctgcctcagtctcctgagtagctgggattacaggcgtgcaccaccacgcccagctratttttgtatttttagtggagacggggattcactatgttggccaggctggtatacactcttctgaaaaagggaagtttacagggagaaaaaccagataagtcgttgccagggttagatggggaggtgggaggttgactccaagaatgtgaaggaattttggggagggatggagctgctgcatacctgactgtagtgctgtttacacaactgtataagtttgcccaaactcagaattaaaacccacactaaaaagagtgaattttaccaatttcaccactatacacctgacctttaaaaaaaccaaagcattcagaggaattcacactcacaagtgaggtgtgtcgtggctctccaaaagtggatcaagttgacctgagcatcagcctccaagctctgagacaatcagtaccttcctgatgtcagaaggtccatgtgtggcaaaacaagccttcccaaaaccataatccatctccaagacccactgatcctctagccctgaaaggactgtctcagatacgctgtgggcc

SEQ ID NO: 815218 - DNA, 565 bp, Homo sapiens
ttgaacccaggaggtggaggttgccatgagccaagattgcaagcattgtactgcagcctgggtgagaaagtgagactccatctcaaaaaaaaaaaaagaaaaaaaaaagaaggaaaaaaagaaggtctttattaatctataagatacacttttattgacaggcctacatctacatatttatgtgttgtgtacacaatgtttcactattaaaaagtacataaaagagctctaactagttggcttaaaaaataaataaaagtgcttaaatcagatactactaaagagaaaaaactagtcaaatgctttttcaagctcatgtgacttaaaatctttaataaataagctggctttaaaattattactaaaataacattagaaatgtcttaagaatttgccagcatacatttttgtttgcattcattaatcaagaaattttacacttatcccttccamatgctataaggtgtcaaaactgggcacagggtttacaaaactataaatctagcccaaagcagaatgatctttgcttgtgtaatctttaacaaataggacattgatattagtt

SEQ ID NO: 815219 - DNA, 478 bp, Homo sapiens
cctcaagaagcaaggagcagtcctccgctgacagccagcaaggaaatggggactttgatgctaaaactgcaagaagctraattctagcaataacaggaatgatcttgtaaagggactccaagctccagatgacaatgcagctggctgacactttgatttcagcctgagcagagaacctagccacaccctgctaaacttctaatcttcagcactgtgacctaatattatgggtgttgttttaagcggctgagtttgtgttgatttgttatacagcaatagaaaaccaatacagccagaatggtgccaatggagattataaagaagaggatagatggattttggcaataatttagtaagtaaaattcatgtgagatagtgatttgatataagagataaagaagaagtgttgaagatgactcctaaatgtctggtttatatgactagatggacgatggttccatttactgagatgatagaa

SEQ ID NO: 815220 - DNA, 683 bp, Homo sapiens
ttggcaatctctcttctccctccttaatgagcatagtgcaccatgagaaccatactagacttggcacctagagaaccaacttacccgcagccatctttggtgttggggatgcttataycctactaattcctcctctaatagtaattttataacaagcctctttatgtatcagaacctttcttcaatcagattgtcccagaataagaaaaatgtcttattatgaaaaattacaaacatatacacaaatagggagaatagtttaataaaactcaatacatccattgctagcttcaacaatgaaccattcacagctaatattgtttcatctatacctcactcatttttcctcacccctgactctttcaaaacatatttgagacaccagatcatttcattcataaatatttcagttatgaatgtctaaaaaatatatattttaaaaagaataccattatcacacatataaaataaacaataattccctgctattaccaaatttctagtcagtctctgttaagttgttatcaaatgtctatctatattttgtttgtacaatgaggttccaaataaggaacatacattgaatttggaatatatctcttaggtctgtccctcttcatatctttttttatccttgctatttatttgttgaagaaactagattatttttcttttaatattta

SEQ ID NO: 815221 - DNA, 620 bp, Homo sapiens
tctgtgctagacatagaagaaagtaggtttatgcactatctcatttactawgtggaaaaatacctatgaagtttctataattatgcctaatctgtagataaggaagctgatgttcagaaaagaggcgcaatttgcccagagtcacataattaataggtggcagaaccacggtttgaacctgagaagttagtcattatgctatattaagtttttaggtctgtattttagttaaaattaaaattggtcattgtttttcaagatttggaaaatatcattacaaatatttctgagaaaaggactttcagatttcacaaactgtaagtttagtctgaaccaaagccacaaggtgactatttgaaaactcaaataaattggggctgcacaatgtcaaactcaaggaaaacaacaattccacttgtctcaagacctcattcagggttgtagtgattttttaaaagagactttaaagaggcatgtgtccagaagaagaaactaataagatttatgaagcatctgaaaaacattgtcaaattaattcacattaatgggagtactctgtgataggtgttacagtataataatgaacaaaaccaaacttatgtcaaggagcctagaatttc

SEQ ID NO: 815222 - DNA, 569 bp, Homo sapiens
tttaacaaataatttgcctttaaatataatgttctatggtgcggttatgtatgtaataatttgttgataattttttattcatatatactaggatcatccattataatctaattgaaaaacactgttacagagyaaatgacaattacgtttgatccttttgtttaaccagttagtataagcatagcttatactggatatagttcacatggaatgattgataggtgaggtgagattattttatatcaaatcttgtaaccaatcttgtaactccacaggccaattttctattacaggcttgggtagacgctcctgcaatttttttctgagaagaaaatgatcctgttaatgtagtctttttgttcttgcctttagacaatcatctaacagttttttatactcatatagctctttgtatttttcaaagtcctttctcttgaattccgtgatatggatcccatttctggtttccatctccttaccaccatatataaagataaatgccaactgcccaacgacgtgagggaaaagtggggataattctttggaatgttaagcattattccttcagg

SEQ ID NO: 815223 - DNA, 620 bp, Homo sapiens
tttggtcttcttcaatgtagtgttagctattctgagtcttttgtctatgtatacagaattttaaatcagttttgaaataactgatttaaaaaacagttatgaaataactgttgggatttttgactggggttgcattgactctgtagataaacttgggaaaaactgatatcttgacactgctgagtcttcttatccataaatacaaaacgtctctccatctgtttagttttaaaatttctttcattagacttttgtagttttccaaatatagattttatacgtattttattaggcttatgtaaatggcattgtgtttttaatttcaaattccacttgctcgttgctggtatataggaaaatgatcagcttctgtacatcaaccttgtatcctgcaacctggctataattgtgtattagtccagatttttgtgcgtgaattcttttgtatttttctatgtagacaattttgccactgcaaacaaagagggttttatttttttcttcccattcaatgtatcttttgttttctcttcttgwcttattacattggctaggacttccagtacaatgttgaaaattggtggtgagacggggcatccttgccttgttcctgaccatag

SEQ ID NO: 815224 - DNA, 617 bp, Homo sapiens
gtgcagaatgaaatgtttgggttcattatctggcctcctgcagcctgctttctggagcagatcccgcatacattttcttccaagcagccatcrtcttcactgactgtcttccagggataagcaaagaaactttgcatggcaagtttcaggaaacaaaattctgttttttgctgtaagtaccccactatgtatacatagttctcttacacactgcccaatgaaaaatgggtaaaaggaacagttaaaattcctgggggaaataaaaggaggattgcgttctgaaagaggtcgtttttagatagcaatggtgaaaaagatggaatgctaagttccaaaatatgaagctactgagtaaatagtcaccaagaaaaaaattggtgcttatctgatctagctatcacctgaatctaatacaacagagtcctcggaacagtgactcaagtagtctccacctggttcctcatcactctgtctgtacaaactgccaaagcaagtcaccatctgccctttaactgcccagagaggctggtcatgctctctcaccttgcctcactccttatagaagcataaagcgctatgacacatgggagaagaaatggctctcaaccccttagctc

SEQ ID NO: 815225 - DNA, 617 bp, Homo sapiens
gtgcagaatgaaatgtttgggttcattatctggcctcctgcagcctgctttctggagcagatcccgcatacattttcttccaagcagccatcatcttcactgactgtcttccagggataagcaaagaaactktgcatggcaagtttcaggaaacaaaattctgttttttgctgtaagtaccccactatgtatacatagttctcttacacactgcccaatgaaaaatgggtaaaaggaacagttaaaattcctgggggaaataaaaggaggattgcgttctgaaagaggtcgtttttagatagcaatggtgaaaaagatggaatgctaagttccaaaatatgaagctactgagtaaatagtcaccaagaaaaaaattggtgcttatctgatctagctatcacctgaatctaatacaacagagtcctcggaacagtgactcaagtagtctccacctggttcctcatcactctgtctgtacaaactgccaaagcaagtcaccatctgccctttaactgcccagagaggctggtcatgctctctcaccttgcctcactccttatagaagcataaagcgctatgacacatgggagaagaaatggctctcaaccccttagctc

SEQ ID NO: 815226 - DNA, 623 bp, Homo sapiens
atacattaagggagcacctaataaattaaagacctcttatattttaggtcattgttctagaataaacttttatctaaagctgtgaagagacagtactaaataaatatagtttcatttgacttcattaaatatagttgtttctaatatcattttctcatttattaataagctttagtaatttaaaattctcttaattgctcttctctgtaataatatttcaactgacctggactgtgaaatcatatattaattatatgctttacattgaacattttaacacttattttcaatttctacttgatgaaaatgttatgtttttcatatagcatgtgcttgaaaagtaagttttttgcactgcaatttattgaaatacaataatccaatgataacaatgacatataattcaatacatgtacatacaataatacagtgccatatttgtaatttgttttgattgattaaattgattttacactaattgttttggatttggccttggcactttgataacacatacatttgtagcttggtgcattttctatyaggcgaaatgaggagggagagccagtgtgtctatggtgctaagaaaggaggatgtttacttggtcggtgtaatgttggat

SEQ ID NO: 815227 - DNA, 599 bp, Homo sapiens
atcctttggttttacattcacgggaaataaaacccctacattaagctcatgattcttgggatgggggttaattggatgagactaaacaaattctatataattttggaaggtgctaaaagttaaaatataaataatgtatcttatgctgtctacaattataactcttctcacaaatattgctgctgcaaactttttttcatcaaatggatactgccttgtgatgctgtgtcaacaactgggattttgtatgaaattcacattgaagttgaacttgcacctacagagacctgtcaatctctccacacttcatttcttgccattatattctgcccacattgtttttatttatttatttatttatttatttatttatttatttatttaagttgaggcagggttttctctgttgcccaggctatagtgcagcggtaggatcacagctcattgcagcctcaaccttctgggctcaaacaatcttccyacctcagcatctcaagtagctggtaccaaaagcatgtgccactatgctggctaattttaaaaaaattgtagagacagggtctcactatcattcccaggctagtcttgaactctagggc

SEQ ID NO: 815228 - DNA, 618 bp, Homo sapiens
tgagccaggggcggtggctcatgcctgtaatcccagcactttgggaggctgaggcaggcagatcacgaggtcaggagatcaagaccatcctgggtaacatgtgaaaccccgtctttactaaaaatacaaaaaaattagccgggcgtggtgctgcacacctgtagttccagctactcaggaggctgaggcaggagaatcgcttgaatccaggaggcggaggttgcagtgagcctagatcgtgccactgcactccagcctggtgacagagcgagactctgtctaaaaaaaaataaaaaataaaaagtaaaaataaataaataaaattataattggattttccagcctgaacaagcttttcagtttccttgtcctatatttgaaacaaccaatgatagatttaagcagagcagttagcttatttatctggtgagtgtattttccagatatcactttcctgcctgcaagcttaaatgcaaatacaatgtgttcttctaaccattaaaaaaaaaattgtgagcagagctgtattcatcaggcaatatgaccatttttgttttaaaattttgttaaggtgtactgacactcatctgggcaayatgaaatcatttgtagaagatg

SEQ ID NO: 815229 - DNA, 434 bp, Homo sapiens
tccattattttccccctcaccaaacaccagctgtttattcagctagagaaaaggaaaagcagagagagaaggataaaacyaagtagccatctctgaaatgaccaaggaaaaccttgataaatacctatgccatcggcatcccagagtaaatgcttcttcctcctggtggtggtgacctggcttagaaatgctcagctcacgattgcttggatgggttgagaaatagttcacaaaactgtgcatcctctacttaatttgttatttagaggctactggagaattatttttgactctctgctctttgcttcattccctgattttagaacctagccttcagtatgatatgacacagctgtattttctccataaaacagtaactagatactaaggaaagcaagcatgcagagctcaggaaagaatgccttcatattaaa

SEQ ID NO: 815230 - DNA, 434 bp, Homo sapiens
tccattattttccccctcaccaaacaccagctgtttattcagctagagaaaaggaaaagcagagagagaaggataaaaccaagtagccatctctgaaatgaccaaggaaaaccttgataaatacctatgccatcggcatcccagagtaaatgcttcttcctcctggtggtggtgacctggcttagaaatgctcagctcacgattgcttggatgggttgagaaatagttcacaaaactgtgcatcctctacttaatttgttatttagaggctactggagaattatttttgactctctgctctttgcttcattccctgattttagaacctagccttcagtatgatatgacacagctgtattttctccataaaacagtaactagatactaaggaaagcaagcawgcagagctcaggaaagaatgccttcatattaaa

SEQ ID NO: 815231 - DNA, 524 bp, Homo sapiens
tagaaatgctactaatttttgtattttgattttgtatcctgcaactttactaaatttgtttattagttctaatagttttggggtggattgtttagggttttttaaatatatataagatcatgtcatckgcaaaaagcgacaatttcacttcttcctttccaattgggatgcctttcatttcttcctgttgcctaattgcactggctaggacatccagtactaagctgaatagaactggcaagagtgggcatctctattttgttcctgatcttagataaaaaactttcagcttttactcattgagtatgatgttacctatgaatttgtcatatatgacctttactgtgtagaggtacattccttctatatataatctgttgagcctttattgtgaaaggatgttgaatcttgtcaaatgctttctctacatccattcagatgattatgtcttttgtctttcattctgttaatgtggtgtatcacatttgtaagtctgcatatgttgaaccatacttgaatctcga

SEQ ID NO: 815232 - DNA, 524 bp, Homo sapiens
tagaaatgctactaatttttgtattttgattttgtatcctgcaactttactaaatttgtttattagttctaatagttttggggtggattgtttagggttttttaaatatatataagatcatgtcatcggcaaaaagcgacaatttcacttcttcctttccaattgggatgcctttcatttcttcctgttgcctaattgcactggctaggacatccagtactaagctgaatagaactggcaagagtgggcatctctattttgttcctgatcttagataaaaaactttcagcttttactcattgagtatgatgttacctatgaatttgtcatatatgacctttactgtgtagaggtacattccttctatatataatctgttgagcctttattgtgaaaggatgttgaatcttgtcaaatgctttctckacatccattcagatgattatgtcttttgtctttcattctgttaatgtggtgtatcacatttgtaagtctgcatatgttgaaccatacttgaatctcga

SEQ ID NO: 815233 - DNA, 583 bp, Homo sapiens
cattccattctcatgggcaacctcagcaggctgcacctagatgcttcttaagcagtttctgggttgcaaaggctatatcattgggctgaggggctgggcctctccttcttggtgacagagacgtgagcttgtacaacacaaatgaccctgacacctgtgcccacaaaattccattcctcttgctctcagctctaggtatttatacagccaatctaaagtcattggaattagaagagacactagcgatctgttatttgcagttgagggaaatgctttctggagagcacgtgttttggcccagtgcataggtaatctgtagcacagttttgatcagaattcagacttcccaaactcccagttcagaacatttgaaactgcatcaatctcatcctcatggtcaaactgctgtgtctaaagaacttcactttggtgctgcatgtgaggatgagcccctcaatatcacgaggtatctgtaaagactgaatccaggcyggggacagccccaggtagtgctgatgagagctgacacccaaaatgcaatctggggagtcaacaagagaagaaaagtctccatgaaaccaac

SEQ ID NO: 815234 - DNA, 591 bp, Homo sapiens
catggacttagttctgagaatcatggcttataaaagtcagtaattatacaatcacaaaactattgctttctactgaattgcctgcttgttttaatttagttctaaagctcatataaatggtaaataattaaaattaagaccaatagaaaaagataacctatgtattccatatttctatccaaaattttattttcattgtcatattgttttaaaggtccagttgtactcttttgaatgttttggttttcctatattgatctttgagaacagttgagttcattaaaataattttaagtgaaaatagtcaaccagttcaacattcttgaataaataatattgttatatgtgaaaatgtctgtttcttttcagaatttggttgtaagactgtctaagaatagagcaaccatactacaaaaaaggagttaaattgctatgaatgtgtgtctgtgcatttttttcatttttttctttctttctttttttttttttttttggagtcatacaagataatttccagtgcrtttgatgcaggttgttctagttttaaatccatggtaaagggtaaattatagctttaaggattttcattgt

SEQ ID NO: 815235 - DNA, 529 bp, Homo sapiens
gtcggtttgtcacagatggctcttaatattttgatatgttcttttgacctctagttttttcagggtttttatcatgaagggatgctgaattttatggaaagcttttttatatctatttagatgattgtatggtgttcattttaaattctgtttatgtgatgaatcacattcattgatttgtgtatgcttttttttttttttttttttttttggaaacaggagtttcgctcttgttgcccaggctggagtgcaatggcgtgatctcagctcaccgccacctctgcctcccaggttcaagcgattctcctgcttctccctctctagtagctggaattacaggcatgcaccaccatgctgggctaattttgtatttttagtagagacagggtttctccatgttggtcaggctggtctcaaactcctgacctcaggtgatctgcccgccttggcctctcgaagtgctgggattacaggcgtgagccaccgtgyctggcaatttgtgtatgctgaaccatctctgcattccagg

SEQ ID NO: 815236 - DNA, 580 bp, Homo sapiens
aggatttcgatcaccaaaataaaacatggttgagcagctggtgcarataactcaggatcctgtggtcattacagtcaagctgagtgctcaccacacactgacaagtaaatggtgtaacattcaaagaaattattctcattgctgcccagttagagtccaattccctttccttttggaggatatatcctgggctgggatgccttctcaacaggcaagacacaaagatgtagcctgtaaaatctgatgtgcctacatgctggcacccaccatggttcatcaactaactaactaaactccctttgtaattcagcacctcttcctgagattttagtcttcatacagaaatctgtttcatcttcatgcttagctaattttgagatgggggaaaataaaaacaaacagacaaaaaaaccctaaatataagtcttatcaagtaagtcacttaagatgtaatgtggtaggtttcaaaaagtagaaaaatactctgatgtctgtttcatgagcacttgaagctggttgcagactggatgtgccaaggtgaaaatagccagcaggaattctgagttggatactgttgttg

SEQ ID NO: 815237 - DNA, 605 bp, Homo sapiens
catcagcaattcaagattgtctgtcctaccctcttcagtgtctctttcagtaatatgaagttaaaaccagatattgtkatcactcatctgattttaggttcttatgaaggtgcttttttgtgtggatagtttttcagtttggtgttcctatagggaggactatcagtggaagcttctgtttggtcatattgctctgcctgtaactcgagattctcctattggctgatttttaatttagtatttttatacaggtattccgaagtgaggttgattgcagttttatttttctgtgctacttttatcatgtttttgtaggaatattttgttattttactctaagtgatttgaagtttttttcttcatgacctggaaaccataaatagcattggaattatctttttctttcttcatgacctggaaaacataaatagcattggaattatctattctttgaaggtctggaagaatttattgttaaaaccatctgagcctgtggctttttgagggctagctctttttttttattattctgaatttcttccattatatgtctacttaagttttctatttcttttgggttcaattttttttatttgtatttatct

SEQ ID NO: 815238 - DNA, 605 bp, Homo sapiens
catcagcaattcaagattgtctgtcctaccctcttcagtgtctctttcagtaatatgaagttaaaaccagatattgttatcactcatctgaytttaggttcttatgaaggtgcttttttgtgtggatagtttttcagtttggtgttcctatagggaggactatcagtggaagcttctgtttggtcatattgctctgcctgtaactcgagattctcctattggctgatttttaatttagtatttttatacaggtattccgaagtgaggttgattgcagttttatttttctgtgctacttttatcatgtttttgtaggaatattttgttattttactctaagtgatttgaagtttttttcttcatgacctggaaaccataaatagcattggaattatctttttctttcttcatgacctggaaaacataaatagcattggaattatctattctttgaaggtctggaagaatttattgttaaaaccatctgagcctgtggctttttgagggctagctctttttttttattattctgaatttcttccattatatgtctacttaagttttctatttcttttgggttcaattttttttatttgtatttatct

SEQ ID NO: 815239 - DNA, 601 bp, Homo sapiens
agtgtggtcagggaagatttttcaaatttcattttcttggaatgtattgaggctttactttgtggcttaatgtattccttatttttaaaattaaaatatcycattagtgcttgaaaataagttttatgttaaatatgcacttattgatgtgcatctaataggttaatctttttattgtatcatatatttcttattgtcaccttgttctgtcatagctgacaatgtcttttactattattgtgttttgtctatttcttctataagtttatgcttttatgaattttgacatattgtttttgatactgaaggatttatgacttttataagcttattattgatttaaagtctgcccattctaacagtatatagaatagtatctggtgcctagtaattgctcaattactattgttgaatgtaaaataaccctttatgttctttgatagtttttaactttactcttttctgatattaatattatgattctttttggttttgttatcatttacctggtttatctttgacttcttttttttacttttaaagtttctgagttatagactcttgaacagtttgttttagatgtggatatctatagatctgt

SEQ ID NO: 815240 - DNA, 608 bp, Homo sapiens
tagggaaaaaaaaaaatcctaatgatttaaatagagtgataaatgctccagagttgtagtttggcaactacagctagtgagccaaatatgacctacctcctattttcatatggcctatgagctaggaatggtttttacatttttaaatgattggaaaaaaaaaacccaaaatattctgtgacgtgaaaattatatgaaattcaaatttcagcatctataaataaagttttattggaatgcagccacattcattcatttatgtgtttactatggctgcttttgtactattgcagcagaactgagtagttgtgacagagaccatatggcccacaaagcctaaagtacttatttggcctttgtggaaaaagtctgccgattgctggtctagcatcatactttgctcacttttgaattctgatactctttccttataggtgtttcagctcaactcaccagtacacgtctgcggagaaacacatctgttggcaccccrttctggatggcccctgaggtaagctggaaatacctagttctttctttgcacttgttgaatgccttggtactatgcctttttatgggtaagtcatatgctttgcagaatttttagg

SEQ ID NO: 815241 - DNA, 631 bp, Homo sapiens
ccctatgatagatttaacctggaaaagatccagtggacgyttatttctcctctgtttatgcaagtacatcagttgcactggatcacccttattccccaccctggcatctcgatggcagcagcagacttcgttgtacagaattttaaatgtgccaccaattatgtgctgtctttcaggttgtgctaatagcataaaatgtacgatgctgaatgtgtttctctaatctattcatgtataatggtagctcccggctcttagcatctggcctgctaactgcatagtaaataatagtaaacatgctgcaagtcttaatgaactacttgtctaaaattatttctgtaaaatcagaatactattgttgctatcaataaaaacagccattgtggacgggtgcctgggccccactctggcccaattaaataagaattgctgagggtgaagccaggccttgtgattgtgaaagcttctgtggtgattccaatgtacagtcagggttgagaatcactgggctcatcagttcctccttgagaggaggcctaagcaggattgacaaaagttttaagctatggaaccaaaataaggtcataaggggaagatgtgacattttaaaagagttataaaatatatttac

SEQ ID NO: 815242 - DNA, 625 bp, Homo sapiens
gcagattgagagataatttgtaccttccatatgtctctttcaaaggaaggctctgggcaggctgggagccatttaactgccttaacaatacaartgttgacctttccttatctgcacaatcacacagctatcacagcctttaaaaatttctcctgattgcaatttgcatttctgattaggtctatttatatgcagatgaggctctctgatgttcatcatcataattttatcattttatacctaatccagatgtgaacaaccaccaaccactattccaaaaatgattcccacccaagccagagttagtctttttgcctttttcgaatcacaaaaacaggtcacagcgattagaggagcagacgaagcacctggctttttaaattaatagtctggtgaacattcaaaaggatataagaatgcaggagctaaaagctgcattgtgtatagtaataagtcagaaaatgggaaatggtgtctggaatgatttgtgtgtgtgctttgatttttttttacaaatggtttacccctcaccatttatttaatgtggcaacataatttcctgaatatcaggattaaggtgtagcttctctttagcaaaataatatgtacttttgataagagatca

SEQ ID NO: 815243 - DNA, 547 bp, Homo sapiens
agcaaggagctgaaggatactgtggggtggacctagacctcaattctagctagttcagatgatttctggttaaaaaaaaaaaaaaagtgtgtgtgtgtgtgtgtgtgtgtgtgkgcggcgggggacttggttttccaggcagtgtacctcctgtgtcccaagttagaggcagtgattgagttgtggctttttcctgcctactctgtagataatttggttcaacgaatcaaatgattgacacttatgttagaaattcccagtggattttgtcacatggttttctcttcactgtcttgtactactggagttttgtgggtatttttacatgaagttgggaatgaataaatcagggactgcgatctgtagttatatttagcacatttaatgaacatccatatcacataattttgggatcagtattagactcacttttaacgacacacatggagtgtctccatgtatgacttaggggtcgacatagaccaaagtgaacttacgtttctttctataacatttcctaggccttgtcctgggatgtaggaagttc

SEQ ID NO: 815244 - DNA, 530 bp, Homo sapiens
gatctgattgccatcaaggccaatagtaatacctttagctaaggcaatccaatctatttagttaactttcccaatttcagttttaagatgccatttttccttttaacctttccagaagaccaagggtaatagggacaatgataatgccattgtgttcataacaccttatttgctttataacttttctagcaaaatgggtacctctattgctggagatttctccaggaatataaaggaaacatgtttctgatcatcttttagctactgttataatattggccttcctgtatagaaagcttctatgtgaccagagaacatagaccattgcaagaatatattcatatcccatggaaggtgacaaatggataaaattcctttataaatgttcaaatggcccatcaggtagcagaaatttaccatctgaatgtttttttgtcttcttgggattatggatttgacagaccaaacattggttataaaccattttagcaatttttgaacagtcrccacaccaataattttccataatt

SEQ ID NO: 815245 - DNA, 564 bp, Homo sapiens
taaacactgctctgtgaagtaaacatgtgctgagaactgagatctaaarccgtttaagacttctgctgttcctgcctatagcaaggagcacattttcttcactgcttgaagtggagaaaatggctattcccagccattcctgaagctcccatggggactgaaatccagtaatgctgctaaatgaatgaaagaaattagggtacctgggttcccagatgtcctcaaatggggtttaggtcaggaagaagttgccacagaactcaggacctactttgctactggtggtgacgtgcgtaaatgtgaccacttctttttactccacagaaatttttaagtgtccaaactgatagattgctcaccagcaaacactgaaatctcttgctctagtcatagggcgaggctttggaaaaattaagaacagaactcagagctcctcatatttcctagtgatttccagtggactttacatcctgccctcaaagattttctttgaagagttatgatttcataatctgacccaccaaaggctgtgaacaagatcatgtaatgatgcttcatatccaa

SEQ ID NO: 815246 - DNA, 615 bp, Homo sapiens
ctgtgttacaaattacccccaaacatagcagtttaaaacaaacattatctcacagcttcagtgggttaggaatctatatgttctggctataacttcctgttcttcacaaacctacagttaargtattggccagggctggagtcatctcaatgttcaactgggattgggaatctgctcccaagctcactcacatggctgttggtaggctcaggtcctcactggctgggaacattggtcccttgatttatgggcctctctatagagtattacaatatggcagcttatcttctgcagaatgaggggtggtggcgggggtggagggagagagagagagacagagagagagagagactaagacagaagccatgatctttttttaattatctaatcttggaagtgattttgcttctgcctatttctatttgctagaagctagtcactaaatccagcccacactcaacggggatgggatcatacaggcagtaagtaccagaaggcagggatccctggaggccaccttagtggttgcctgaaacatcccgagaggaagtcagggagagagaataccatctgctaggagtgagcagagttcacatgagttgagaggggccatag

SEQ ID NO: 815247 - DNA, 525 bp, Homo sapiens
tttttttttttttttgacagagtctgcctctgtcgcccaggctggagtgcagtggcgcactctcggctcactrcagcctccccctcctgggttcaagtgattgttctgcctcagcctcccaaatagcagggattacaggcacccacgaccatacccggataatttttgtatttttagtatagacggagtttcaccatgttggccaggctggtctcgaactcctgacctcaagtgatccgcccaccttggcctcccaaagagctgggattacaggcatgaaccacagcgcccagcccccagaagagtttttaaaaggtgttaaaggaggtttatgcacgtaacagacctttctcaggtggtcccctaaaaaaaatcctgccaactagggaggggaagtccaacctgctatttgaaagccttcacggtttgccaaatgtacatttcttgagaattatcttctttcccagggatattgtacctagaggacaggttggttagggaactatggacgaccagaagagatgt

SEQ ID NO: 815248 - DNA, 499 bp, Homo sapiens
taggttgcattggtttgatttgcatttgggatgagccagagagtcaggacatgttccttcttgtaacaccatgtctgctttctcactagagctttgaaaaagtcygcttatcaatgtttgagaaggctttttatcagcctttggcatgttacttacattctctttgcctcaatttccttaacttcaagaattatgattaaactaatgcttacctcaaaagatttcatttagaaatcatttatgtaaaacattttagcacgtatatattcaataactgttagctattactcttactattattatcatccccaccctacagataaggagcccaggcacaaaaaagttaagtaatttacctagagtcacagatggaaggcactttccatacaatacatgcagaagaatgcttagtgtagggtgtcactaaacacataccaaataaacacatagcagagtaaactcattacatctgaaaattgccattatgctacaataaagg

SEQ ID NO: 815249 - DNA, 640 bp, Homo sapiens
tgaaaaacatagcaacaaaagtgaagaatgcatttgataggctcatcaatatggttggtacacctgaggacagaattattatacttgaaaacgggtaaattgagagctgaggtagaatagtgtatttgcaatcttctgggaagtagtcttaaatatgtgtacttgtaatcccagatggagaaacagagaacaggaccaaagaaatatttaaggaaataatggcaaataattctctgaaattaatgacaaagaaattaaggaggatttaatgagaaaaaaatcaatgagagacaccaaaacaaattgaagaagctcagagaacgatacacacataaacacatgtataaaaaggaacccatattcaaattgctaaacaccgaagttaaaaagaaaatttggaagacatcccaagaaaaagacatattatgtacagtggacttgttatcagaaacaaggcaagtcagaagacaaaagggtgacatcttgaaagtgatgaaagaaaacaactctcaactccgaattttataaccactgaaagttatcatgatgaaggagaaatgaagatgttgtttgacatataaaartggggagaatttattgtcagcagagcttctatataagaaatattaaaggaggttct

SEQ ID NO: 815250 - DNA, 573 bp, Homo sapiens
atgtaataccagagttaaacttggttattgatatggtttggttctgtgtccccaccgaaatctcacatcaaattgtaattgccacatgtcaggggagggacctggttggcagttattggatcatgggtgcagatttcccccttgctgttctcatgatrgtgagtgagttctcatgacatctggcttttaaaatttgtagcactcccaccttcacttgccctctctcctgctcttctgtggaaagatgtaccttgtttccccttcaccttctgccatgattataagtttcctgaggcctcctagtcatgcttcctgtcaagcctgtggaactgtgtgtcaattaaccctcttttcttcataaattacccagtctcagttagttctttacagcagtgtgaaaacagactagtatagctatacagaaagaagtgaagggcgctgaaaataaaatgaatgaaggtaaaaataaaacatgtttctcatatttttagttgctctagaagataactgaccacttattaaaaagtaatagcaatgcgatatttatttatcttacatgtaaaaataaaatat

SEQ ID NO: 815251 - DNA, 609 bp, Homo sapiens
aaacctgacaaaaacaagcaatgggaaaaggattccctatttaataaatggtgttgggaaaactggctagccatatgcagaaaactgaaactggaccccttccttacaccttatacaaaaattaactcaggatggattaaaggcctaaatgtaagacctaaaaccacaaaaaccttagaagaaaacctaggtaataccattccggacaaaggcatgtgcaaagacttcatgactaaaacactaaaagcaatggcaacaaaagccacaactgacaaatgggatctaattaaactaaagagcttctgcacagcaaaagaaactatcaccagagtgaacaggcaacctacagaataggaggaaatttttgcaatctatccatctaacaaagggctagtatccagaatctacaaagaacttaaacaaattttcaagaaacaaacaaacaaacccatcaaaaagtgggcaaaggatatgaacagaaaaaaggtgagtctgaagcagaggtggccatggaaaatggaaggaagatgtctttctcatctttctagttctgattcgaaaccacytcctcaagaaagtctgctctttctccaactcagaaagctcaac

SEQ ID NO: 815252 - DNA, 525 bp, Homo sapiens; identical to SEQ ID NO: 813788

SEQ ID NO: 815253 - DNA, 557 bp, Homo sapiens
atagcacctcctttaatcgggacactttctgtctattaatgaaagccaagataagtggcatattttaacctaagtaawgtggagctttcaagtcttttcaatggaaagactgttaagcctcctaccctccctatatcttagagcagaggtccccaacctccagtccatggacccataccagtccttggcctgttaggaactgagccacacagcaggaggtgaacggcgggcaagtgagcattactgcctgagctccacctcctgtcagatcagcagcagcgttagattctcacaggagcacaaaccctattgtaaactgcacatgcttgggatctaggttgcacacttcttatgagacctctaatgcctgattatctgaagtggaacagtttcagcctgaaaccatcccctgttcctaccctcctgtccatgaaaaaattgtcttccatgaaactggccccagcgccaaaaagattgaggactgctatcttagaggaacaattgtactatataagttaaaattgattgttgttcaatttagtcttagctcacaacca

SEQ ID NO: 815254 - DNA, 557 bp, Homo sapiens
atagcacctcctttaatcgggacactttctgtctattaatgaaagccaagataagtggcatattttaacctaagtaaaktggagctttcaagtcttttcaatggaaagactgttaagcctcctaccctccctatatcttagagcagaggtccccaacctccagtccatggacccataccagtccttggcctgttaggaactgagccacacagcaggaggtgaacggcgggcaagtgagcattactgcctgagctccacctcctgtcagatcagcagcagcgttagattctcacaggagcacaaaccctattgtaaactgcacatgcttgggatctaggttgcacacttcttatgagacctctaatgcctgattatctgaagtggaacagtttcagcctgaaaccatcccctgttcctaccctcctgtccatgaaaaaattgtcttccatgaaactggccccagcgccaaaaagattgaggactgctatcttagaggaacaattgtactatataagttaaaattgattgttgttcaatttagtcttagctcacaacca

SEQ ID NO: 815255 - DNA, 634 bp, Homo sapiens
aaatactgttttatgaatgtgcaaactgttgataactgttgcattggcaagacctcattcaatcctcatgaccatcatatgataaaggtatctttattttaagataaggagaccagagatgattgagaccactcgtcttccccaggacctcatagcaagtaagtggtggaaatgagatttagtccaaatgtggcaactgagacttttcacgtagccatttacctcccacagaaggtgctaaaggtaatcaggacagaggacatgatgagttgaccagaggagcagccagagcgctgtgagaatttgcaggaagcagtgagaaatacagacaagggcagtctgttgcagcagtcttgcatgcggtctgccctctggtagcaggtcttctttgttctgttttcactaggtgtctgacaatctgtctataggctgcttcatccagcagcccatctccctttcttttggccctgcctgttaggttctggagttccggtgacataaagacttcagacagatctcagggaacatattttattgcctcaaaaattttctaaggctcccaaatccctgcarctatgtttagtgtgagggaaagataaagccagttttggccagtagaggccactagtgagca

SEQ ID NO: 815256 - DNA, 608 bp, Homo sapiens
tgaaaaaaaatcatatatatggagaaaaagaaagatgtttccagtttcaaaaaaaaaaaatcagttcctcacaaaagagcaagtcagatatttcttaggcatgtaccaycaggattaagtggttgattataatgaattttcactttgtacaactttgcataagcctgagtattttaaaggaaaatggaaaaatgaatgcaattttcagccctttgtttggtgcttggatataaatttcccctatcgtaatctctattatatctttgacattcttgtttgtaaccgatataacctactgagaaaaaaaagaacaaaccttcaactctgcagagtataaccacttcaacatttaaaaaatgaattgtgagaatattttcttctcttctacttactcattttgaatgaaacattgttcttgcctttttaattgttgaaaatattctgcttataatctttttcttattctctcaaaatagaaataccattgaaataatacagcttacactagcgttcagtttgaaatgataattggtaatattaacacatttgtttacagattcattgagatatgatgaacaataaaccactcatatttaaagtatacagtt

SEQ ID NO: 815257 - DNA, 399 bp, Homo sapiens
attacgcatagctggggaggcctcagtaaacttatgatcatggaggaaggggaaacagacatatccttcttcacatggcagcaggagagagaattgcagagtgaaggggggaaaacaccttataaaaccatcagatctcataagaactcactatcacaagaacagcatggggtaatcacctccatgatctaatcaacttgcatgaggtccctcccccaataccggtggattacaattcaagatgagatttggtgtaggacataaagccagaccatcttagatagatagacagayagatagatagatagatagatagatagatagatagatagatagatagatagatagaatagatagatagacacagagacatacacatgtacatatagcaattcatga

SEQ ID NO: 815258 - DNA, 605 bp, Homo sapiens
gaaccagttacagatatttgccattctgtaactctcagtgtttctgtggtaggactgaggagcctcagtctctgaatgcttccatggaatggacactgggttgatctgtgccattctgcctaaatctcctgagatattggtactacaaatttatctaaattgtgtcggtgccttcgagtgggagaatgtcctatgttccaatttttggcataggcctaataaatgctttcctttttcctcccagttcagatttctaatggttttccctcagtctcaatcttctactgtcatgtttcttaagccacacttctgctttagaaggatttacaatatattattttattttcttgtaagtgtattttcaaataatataaaaagtaacatgaattcactataactaaagaatgcaacaatatataaagaaaaattgataattatttcccactaccttcttcattacttctcatttcccagtttgatcccatataaacatgttaacattttggtgtgtatctaaccacagccttatccatcctcttacaatwtggtcatttccctatgtttacaaaattgcttaaaacaatcataacgtctgaatctataac

SEQ ID NO: 815259 - DNA, 613 bp, Homo sapiens
aaagataataaaacagtaatgagaaggcaaatgctatatttagcaatgctatcccacaaagattacatttgttaatattctcaggaaataacacttcttagtaggtctccttttcacttaacagctcttatcactgaccattaaaccaatctgcaatttctcgtgtaatggattatggagctacatttttaaagatagcactctatggtaagattgcataaacaataattttgaggtaagaagtgtatttgattgcaatcatttgggtcatcactatataatttaccgtgtgacctttgtaaagtcattcgaaccctcaaaattttacttttaaaatgatatcagttcttgtcttaacaactccacaaatttagttcaaattttaatataatctgagtgagtgtcatatagatcattcatccatacacaacaaaattgatgatggggataaaatataattctttttgagagactctaaagagacctttgaagatagttgagatgyctccacaccctgatggcagattctttgaagctttcttatattttcagaaactgtatgttttgcacattttttccacagtaacactaggcaggaatttttttttttaac

SEQ ID NO: 815260 - DNA, 451 bp, Homo sapiens
caaacataaggcctggcatggtggctctagcctgtaatccagcactttgggaggcccagggaggcggatcctttgaggtcaggagttcgacaccagcctgaacaacatggtaatgccctgtctctactaraaatacaaaaaattagctgggtgtggtggcatgtgcctgtaatcccagctgctagggaggctgaggcaggagaatcgcttgaatctggacagagtgagattctgtctcaaacaaaaagttcaaacatcattagccatttagccatcagagaaatacaaatcaaaactacaatgagataccatctcacacccaccattagttattataaaaaaggtggataagtgtagtgaacatgtgaaggaactggcatcctcatatattgctggcaggaatgtacgacggtacagcaactttggaaaacagtttagcagtttctcaaaa

SEQ ID NO: 815261 - DNA, 442 bp, Homo sapiens
aagctatcttctcttcactttttcccacaatgttgcattaacagtatcatatgtcacccatctgatttgttgtgtccaggtatggacycgaccacaagagtggtcccgaatggaacttatacagctcattaccagggtcggttcaaatagggtggtgtttgagacaatttttattcaactactggatcatataaaagagaaaaagacacagtataaattgaatataagctaatgttttagtctatagagacatgcccactgtttggtgggaaacaactgaatgagtagatatagcccatggagaataaagtataggagtttatcaagtactgtaccatgagcagataaacaaattgtgactaggcaatgtctgcatcccttggaacgaaatatactttccataatttatgtaatctgtaatcaggcattctattcagttttg

SEQ ID NO: 815262 - DNA, 450 bp, Homo sapiens
tatgatcaataaggttttattaggctctctgggttccaaatttcttacttgcaaaagaagatactgatcaagactgtctcgtccaacacataggtttctccagaagataaaactgtattgcatatttatgtatgatgtcatagtttttatattcctttctggagtttagaagctaaattttatcagttttattagcacgacaagacaaaagtaacagaatcactgaaaatgggtatttcttcagtgaagactattctttcatttctgccataggagagaaaaataatgtttcattttaatataaggtgaataagactgggctaaattaccacacccctctctaagtatttgatcagatagctagataaaaattcartaaaggtattgctacggatttcatgtttgtttacttccaaaactcttatttagacttagacccaaggtgatagt

SEQ ID NO: 815263 - DNA, 648 bp, Homo sapiens
cagagttctgcatatgcatgcacaacaycagcctatctgcaagaatttgtcactttagtggaaacagccagaaatcatttaaaaaactgtgacaaaaaattccatcgccttagaaattgtccatttatgtataatttagaaactacagtttttccgaattatctggaaaggattggtttcaggacctccatggatacaaatatctacagatgctcaagtccgtcatataaaatggcatagtatttgcatataaccgcatccattctccctatatacattaaatcatctctagattatttataatacctaatacaatgtaaatgctatgtaaatagtgttatgctgtattattcatggaataatagccagaaaaaaatcctgaatattttcggtatagacacaaccatccattttttttctgaatgtttttgacccttggttgtttgcagaacacacagatatgaaggagcagctgtattttttttctatattcctcaaagctgagctatcattttcacgaataaaatcttatttcatagatttactgggcatataatatagtgacctagcaaaaataaagaatcttaatcacggtgaaagtttcatctatttgggaattgagtaccacaccactaaatatgtaaccct

SEQ ID NO: 815264 - DNA, 555 bp, Homo sapiens
ttactttgtcttccaacttacgggcacttagaatcagaataatgttttggcaaagaagccccatatctaaaatattttctaaactcctaataactacaatgtcagcaacaacaaaaacaaaatggtcttggtttttacattttgaaaaagtttatggaataggaaagtaagtcaggttcaagcaataggaaagtaaatgtaattaatgtgttcaggttttgacagaagatattactgacttaagtttccttcttaattttactttgacatgttattccataagcacattgatggggggcattaatgaaataaactacctactccatcagtattcagcacaagaaccgagttcagggagttgagaaatcctgatcattggtaagaagcttggtatagtggcaggagcatagactaaggatttagaaaatttgggttcaggtccagaactttcttctctccagctcaaagtccttgggctggktatctcattgttttgggccagtatattctcatttatcaaatggtggggcagtaatagatactctcctaagttca

SEQ ID NO: 815265 - DNA, 618 bp, Homo sapiens
gtttgtgtcttccacccataaatgtaatgcctttttcatcttaactaagtatttattatgcactgtggccataacttttgcaatctgagatgtggcagcaaactagtacaaatttctttttccttttttgcaattttacagatagaagataggtttttacatagagcttagtaatctcagcatatgatttttttctttctcttctctttggcatatggaaattgtcagcttcactattattgcactttggggccccgattaagtaaaattagggtgacttaaacacaaacactgcaatattattgaagtggccttgttgtctggggtgatacccaagattggttgtctcatggccatggaaaactaggacgtggacacacaaagaatgaggttgagagcggaagtttaataggcaaaaaaagagaaaagctttctctgttgcagagaaaggggtcctgaatgggtttctagttccatggtgaaatgcagggggttttatagattagcttgaggaggtgttgtctgatttacatagggtgcaaaagattggttggaccaggtgtkccatttgcataaggcatgaaaaactggttaggactatgtgtgtcatttgcatag

SEQ ID NO: 815266 - DNA, 545 bp, Homo sapiens
tagattttttgcgcttttcttatttatcttagggaattgttaatatagttaccatttgtctactatatattctgaaatattttctccccactttattatttgttcagtagcattgtgttatttttaccatacacaaattttatattcaaatctatctctttttttttggtagagtaccatggtgacttaactgttgtaactttacaacataatgttttgttatctggcttggcaagcccctcaccaaaacttcctaacaggtctcccggtctccagttccacccttctccaatccattttccatgctgtgatcagagatacttttattgaaagaaaatcttaccatgtgtgaaattccttggggtgaagtttgaaccctttaatttatcataacgatgtccacctaccactwtggtctcttctctgcctcctttcctataatttattcctgattctcttcctttttgctgatgactcttcctcctgtctagaaacctctcctttgctttcccatcagtcatctcttacacccctaaaaactcaga

SEQ ID NO: 815267 - DNA, 510 bp, Homo sapiens
agtatgttaagtgagataagacagcacagaaagacaaacatcacatattttcacttacgtgtgggacctaaaaataaaaataattgaactcatggagttagagaatacaagaatggttaccagagggtgggaagggtagtgaggtgcggtggggaggtgggtatggttaatgggtacaaaaaaaatagttagaatgaataagacctaatatttgatagaacaacatagggactataatcaaaacaatttaattgtacatttaaaaataactaagagtattattggattgtttgaaacacaaaggataaatacttaagggatggataccccattttccatgatgtgtaatacattgcatgcctgtatcaaaacatctcatgtagcacataaatatatacacctgccacatatccaccaaaattttttaaaaaataaaaattttaaaaagataactgtgaaataatgcatatgttaataagcttgatttagtyactccacaatgtatacatg

SEQ ID NO: 815268 - DNA, 575 bp, Homo sapiens
gaacatactgtgggactgtcagagaccagtttaataaagcaactctgacaccagaaaactggtaaacaagcaagcaaaaaaaaccaggaacaggtcgggtgcggtagctcacacctgtaatccaagtactttgggaggctgaggcaggcggattacgaggtcaggagttcgagaccagactggccgatatggtgaaaccccgtctctactaaaaaaaacatacaaattagctgggcgtggtggcatgtgcctgtagtcccagctactcaggaggctgagacaggagaatcacttgaacccgggaggcagaggttgcagtgagccaaaatcgcgccactgcactccagcctgagtgacagagcaagactccatctcaaaaaaaacagaaagaaaaagaagaacaagggtagattaataagttggctaagaattcattatccttccatatgttgagtactagagatcaaagggaactcatgaatcatgtcatgcaccttcatgccttcatttcacagatgagaacacygaggataagcgactcaaaacaatttcaccatagcaggtcacaaattagt

SEQ ID NO: 815269 - DNA, 620 bp, Homo sapiens
cccaggggtagaggtgaatgttgccttaacactgagaagaacagatgaaaaaagaaaaggagagaactcctccctgaaaagttgtgccccascaagaattacagagctggtttggatagtcagggaacatgaaaccatgaagttggataatgtggttctgactggtagaggaaaatcctcactgaaagaaggtaaccttcatcctaggcctcgaagaattcctttacataatattttagggacactaatcagtgtacagtaaaacacacatgtgcacatgcacatacacacacacaaacagaaaagatctcatgagaaaaaatatacacacgaaatttagcagatacatgaattatcagacagagcctatttacaatttaaaacatcaaaatactctaacaagtgaccacatttgaaaagaaccaatggtattgtatagaaataaatataaaaaatgaaaaaattaaaaatcagtggacaggctgggcttggtggtatgtgcctgtaatctcagctatttgggaggctgaggtgggaggattgcctgagccctagagcttgagtccagtctgggcaacgtagtgagactctgtctcctaaaaaaaaatcagtggataaat

SEQ ID NO: 815270 - DNA, 461 bp, Homo sapiens
cagttgtgtttttcatgaacaacaacaaaaaataattgcaattttggcttacacatgtgtctcagtaagtttggttggtatgaatcatcccccaggattcaaattagttctggagactggcaacaytgagcttttgtctctacaaagtgaggactagactctagaatacagagtgcaatcttctctttcatcctgttataaataaaaataataggatgccatcattttattatttttactttttattttcataggtttttggagaacaggtggtgtctcgttacatgaatacgttctttagtggtgatttctgagattatggagcacccatcacccgagcagtatacactctacccaatgtatagtcttttattcctcactcccctctcacgctctccccggagtccccaaagtccactctatcattactatgtctttgcatccttataacatagctccca

SEQ ID NO: 815271 - DNA, 624 bp, Homo sapiens
ctgagagaagaaggggtactggatcctgaattacaaytgaagctcattctttcacaaacagcaacaagataaatgagggtcaaataatctagcactgtgtgaaatttcaaaactcaacacttccacccagagttaaagatggtcaaatagagaaaacagaagagtgaaccaaagttcaattggaagtagaaccactaagataaagatagatagatatctcatagttatatgtatgtgtgtatatctataaaatagctataaatacatataaatataatatatggttatatctatatgatatatagttataagttagttatcaatagatatatagatccattatatatagatataactataattatagatataaccatatagttatataactacatatagatataactagttatatagatatacatagatatatagataactatatagttatataactatatggataactatatatatataaaaccattacatataactatatagttaatatcaacttaatacatagatcttgaagccagttactggccaaagcattagataaaccatcttcgtttatagacaacaaccatataatccttggtttctactgattctccctatggc

SEQ ID NO: 815272 - DNA, 649 bp, Homo sapiens
aaaggccatgtggacctcaccacgtgatttctgtttagaaactttcaatggtgccccattccaaacccttaagtatggcctctgtgcgtcctggtgtagcccccaagctacatttctgatccattctcaactcctagtactgtgctacacccatctacacctcactcctcaaagactcgaagtaaactcatgctcttggcctgattcaaataattcccttaggccactctggaccccaaaccgtctcctccacatctcggcctgctgaaaccggacttaccgtttcttcagtataatactgcagccactaaccagtaggaattaagcatggtcctaccttcaaggaggttagactcttgtggaagaaaaggataagtttagttaactattgtgtaactataaaagacatggtgatgatatgtgataggtgtttccaaaaaatcacttcactgtagtaacaatacagtgggaaatgagttgtcggactttgcaaggaatgtttcaagaataaaagcatttaaactgatccttgccagttaaatagggtccaaccaatcacaacagacactaataccagctgattgttacctttccatctcttgctgtacctcrttaacaatagaatctcaaaaaatgcctgctgaataaa

SEQ ID NO: 815273 - DNA, 582 bp, Homo sapiens
aaattattcatttgagcatgaacaggtgaatatgaacacattgtaatgatgacttcatatatggccaaatattagtacagagcaaataattctgtccatggaatcaaatataagtacattagattagaaatatttaggcagtgcaatagtagatattgaccctactaaatccttcagctctgatagaactggtggaagcctgagtacttcatatatatagaaccagtgaaaaagttctccacaaggaacagaattacaatctgactaacgatagccttttgaacattatcactaatgtatgtctgtacttttttccttgaagtttgagcattccaatcactactgttaggggaaagttgggatcaagttagggaagattcagagagacagaggtaaaaaagggtctaggcttaacacgaaagcaaaagatgaactccagggcacaggagaraacacatttatccaaggacacagctgatcataacatctactttctgatgaagagtaaaatccaaaagaaataatcttcaagcaaagaacactgcttcaaggagagaatattctccagaataagccccagag

SEQ ID NO: 815274 - DNA, 570 bp, Homo sapiens
cctggaatcaattgtccacacataccaaggggcaactctagtcagattccaactttatcttcaagacagaacctttagactttctcagtgtgctgactgtggtctatgatagaawgagaggaattaaagatggtgtcaggttgtttcttcctttttctttcccgagcaacttgtagaacagagttgccattttttaagatggggaaggttacagtttggatagagtgggcaccaggagtttggtttctgttaagtttgaaatttctattacatattctggtggaaatgaaaaataaataccaattccaaactagagatatacattttggagatatcagtatattggtgaatttcttgagactacctagagttagtgtcggtagagaaaagttttcagatttgattcctagtacatgttaaggtttagaggctgaagacattggttagaatgagtaaaggagcatcatgtaagagtggccaaggaggtaggaagaaaaccaggagggaatgaggttttgaaagccaagtaaagagagagtctcaaagtgggaatgaccaatctgtgagatc

SEQ ID NO: 815275 - DNA, 556 bp, Homo sapiens
attgtttcatatttctaatggattaatcctttttctttactctctttatctctagcattattctctgtttgcaagtctctttkgtatgttattagtgtagccatcacagctatcttttgattgttgctgcatcatatacttttttgtatctttttactttccctgtatttgcatctttgaatcctaaatgtgactcttgtagataatatatagtagaatatttttttttaaatctagtctgtcaatctttgcattttaattaaatgttttaatcttttcacatttgaaattattattcatatatttgtatttataactgtcattttaattttgttttctatgtgttttacatctattgtttatctgttcttcatttactgctttcttttgcattaagtaaatattttccagtgtaacattttaattcctttaattatttttttcactacataaaaaaaaattgtcttagggcttaccatagccatcataacttactaaaatttacttcagattttgaatgacttctttccagtgagatataggaatgttactccta

SEQ ID NO: 815276 - DNA, 616 bp, Homo sapiens
tagagaaatgttgatgccttcttcgggaagtgagaacaggagtattcaacctacttgtggttgtctttgagtttaaatagagttctccttcaagtagccttcctccccacattaccctgtgtttgacactcttgagaacagtgtaatcaatttatgtcactgctacgtgtgactttggtatcagtgtactttttaagacgctaaactgaggtttatggtgaaatatccaaacagtcccaggctgctatattaagtaagcatctctgccaagaacacagagaaatgcaatggaagagccggcaataatacacctgtcctgaggcaatcagtcttgagtcgtattctatatttttgtatctccaaagcagctcatgaatttgacatgtaatgaatgctattgtgagggtatgcttgaaaatttggagaacctgcttataaaatagtaaacaatgtggagcataagaataaataaacacaacactgttttgtatgtgtttgtgtgtgtgtggccatgtgtacattgattggggagactgcagataaaattaaatatttgagaattttgktttttcccagattatcactcattaaaatgtttccatatacatagcaaaaa

SEQ ID NO: 815277 - DNA, 581 bp, Homo sapiens
tgtattattttgcattgctgctagcaatgtctgagtttcaggtgctctacattgtcactagtacttggaattttcagttgtttgtgtgtatgtgtatagttttttgtttgtttttgttcatttgttttkttttggacattctaataacagcgatatgctattccatgtttttaatttgcatttccctagttacatgatgttgaacattttttcatgtttttatttgcttttcataaaacctgtttggtaaagtaacttaaaatatcttacctaattatatatttttaagttactttttgtcttttttatacattgtacatataagtcatttatgagatacatgtttgcaaatatctttttcatatctgtagattgctgtttcattttcttaacagtatattttgaagagcaaaatatcttaattttgattaagcccaactttttatgttttatggttcatactttagtatcccatctaggaaatatttgtctaatctaattttcttctttttttttctagaagtattattcattagctcttacatttaagtttgttaattatttttattcaaaatttataa

SEQ ID NO: 815278 - DNA, 314 bp, Homo sapiens
ctcacttcaatcttttcttctacaacttccttatttctctcagccttcacagaattgaggagggtagggttgctttggattaggctttggcttaagggaatattatagctggtttgatcttctatccagaccaygcaaactttctccataccagcaacaatcctgttttgctctcatattattcctgtgttcactggggtagcatttttaattcctttcaggaactcctttgcattcacaacttgcctaattgtttagtgcaagaggcctcacttttggcctatctccacttttgacaggccttctcaccaagc

SEQ ID NO: 815279 - DNA, 453 bp, Homo sapiens
gagatcttgccactgcactccaacctggtgacagagcgagactccatctgtaaaaaaaaaaaaaaagttacaaagttatcccttgttgaattataaaataatttaaaatatttcaatttatctattttttcttacttgtgtttttcatgtcatatttaagaaaccatgcctaatccaaggttatgtagatatatggtcatgttttctaactaaataggttttagttttatttcttgaatttaattctttgattttcttgagttaattttctatgtgttgttaacttagtaagttcaacatcattcttttttacatagatatccagttttccagcgccatttgttggaaagaacatttttttccattgaatcgccttggaacctttgtcaaaaatcaattgaccatagakatatggatttatttctgggctttcaattctctttcgttgataca

SEQ ID NO: 815280 - DNA, 594 bp, Homo sapiens
ggctcacttggccctgggcctgcagctggagtcaccttgtccactcatctccccttgactaatattggctggcaaccagctgagtctgaggatgggctgggaacaccccagcccacctatattatatcttgtacccacatacgttggttcctgagctcttgtcctgtgtccaagaagatggaggatacactgacagttgaagggttaggatgggtggagaagaattttattgagtgatggaacagctctcagcagagaggggaagcagcagggggtggtgccccacccctgcagttgggtggttttgttttctcattgtagctgggtctggagcttttcataaactctgaatggcaagtgtgtgctaattggtttgtgagtatgcaaaaaaggttaaagtgaagacatcactcaaaggagggcaagacagtatagaaaaccaattaggaaagagtaggtttatrtaaaataggtgaagggtggggatcaatcagagcacagtatgccaatgggaagacaggttctcaacatggtctgaggatttagcttggctttcaggctttaaactgtcttcagcttggaagtggagattca

SEQ ID NO: 815281 - DNA, 517 bp, Homo sapiens
ttctaaactacctattttaagcagtttgttagccaatacrtgtttaccaagtattgcacaatttcattttcaagctttaaatggattttaaagataaactgacacataacccaatccatgtcctttttcctacaaacaaattgtcttatttaatcactctgttacagagatggagaaattgaaggcctgtgcagttgacttgcgcagggtcatgtggcaaagctgagacatgtttttttccactgcatcaccctggaatttcttaaacactccaaccagacttacacctttcctctaaagaaagcaagagagagttcagagtccttatttttaaacctgcattaaatggaaacctttggaagagcaggtggtggtaatgctatgaatctggctcagcaagggaacactgaggtcatgatatttttcacatttagtaacttcaaaaatatagagatgacgtaaacttcctaagacttgttgccagcctagcgatactggtaactctgggcaggagggc

SEQ ID NO: 815282 - DNA, 545 bp, Homo sapiens
aggaggctgaggtaggagaatcacttgaacctgggasgcagaggttgcggtgagccgagatcacgccattgcattccagcctgggcaacaagagcgaaactccgcctcaaaaagaaagaaagaaagaaagaaattaaaaaatctgctccagaatgatccttgggtcaacaatgaaatcaagatggaaatttaaacattctttaaactgaacagtaatagtgacataacctatcaaaacctctgggctacagcaaaggtggtgctaagaggaaagttcatagcattaaatgcctacatcaaaaagtctgaaacagcaaaaatagacaatctaaggtcacacctcaaggagctgagaaacaagaacaaaccaagcccaaacccagcagaagaaaagcgataaccaagatcacagcagaactaaatgaaattgaaacaaaaaaaatacacaagataactggaacaaaaagctggttctttgaaaagataaacaaaattgatagaccattagcaacattaaccaagaaaaaaagggagaagatccaaaa

SEQ ID NO: 815283 - DNA, 577 bp, Homo sapiens
aatgaatagttctgaaagtaaaggtgcagactgaaaacttgtgcagtccaacctcaactttgctgtaaacaaattttttctttgtctttaaacatctttatcccatcaaatctttaatcattcaattaaaacataaccgaacaccaattatgcacaaagtcctgtgccaggcatttagggggcaccaatgcaaatcagatacatcattacagttatgtttgagggagccaggtgctaaacttcataaaggcattctgtctggggttgagattaaaatgtaaatatatttcaggactacggaggtaaggctagacaaccctccttcaccgtatctattgcattctccagttttcggggaggttgagaggcttcctggggagaaagttgaaaactgcaagtggcgttcggaaatacataaacttgtgggaactccgaagtggagcagggagatccaacagattcaaactgtaaagtgtcccatttcaggacctctgaaaaaaaatcatcctaaagaatccagactcctccacrgggttaatacacagaagggagcactggtttcaagatgcagaaatgg

SEQ ID NO: 815284 - DNA, 582 bp, Homo sapiens
gctgagttggtcatgatccctttggcctttttggctcccaacaraaagatttttgattttgactactaaggggctttatttacataacaagaccacctttttgctagccaggccaaactgaaagagcaatggctatacttctgaaataatagcaatttgtcctagctgaaatagggtaaagagatttaaaaagattttttaaaggagctcaatggttaaaagtcagcttaattaaaagctaacatccaagatgtgtgtgtgtatgtgtgcatatgtgtgtgtttgtatttaaaaggctttcatgtttttgcttttgcttttctcctaggactttgtctctttttttgagcaaaagtttatttcttctttgttgactaaattatgtctctcctttctcttgtaccctctgctgcatgtgggacctaaaatagtttataatagccttgggttccttaaagaaaatgaagaagatgatagactccctttgggggagaaacctgtttttccttatggcaccccaagaatgtgaacagtcaagtttctctcagctcttaaactgcttacttttgtattgtgttacct

SEQ ID NO: 815285 - DNA, 491 bp, Homo sapiens
aatgaaagaataacataaataaaaaacataataatgcagaactggattaaccttttctctccaataacagattacacctaaaatccattcagtagctttagtcctttaactaccctttttgaggaaagcaatgagatgcaaaacacctagacagcttgtctaccaagctggcacaccatgaaaaccatcatcccagcagctcagctccttggtaaaaatgagagatgatgaactgtaattttcaaccagaatacaattaatttggctagtttaatatcttaacacctattgtgttcattggaaaatagcaaaatgtaaacattaacccatcttgaatacagctctgtaaataatatgtttatatatgtatgtatggggaaggactagagaacagaaaaataaacacagttgatctgttgggatgatagacataaatcatagatgatctgctatttttayattatattaatattatttatattcataccatt

SEQ ID NO: 815286 - DNA, 595 bp, Homo sapiens
tttccttcagttcaatagcaaatgctgtttaaaagcaaatacacagcatttatagaatgtttttgcctcttcattatattttactacataaaaatctaaaacacacaaaaaagtaaaacacaaaaacagtctaaagtgtgacactgatttcagtacaatacatctagagggaataatttttctctaaattcccaggtggctaaaaagagggctctgtggatagatgtggaaagggtgagacagatgcttctctgagcctcgggtttctcatcttaaaatagagataattacagtacctacctcacaaggttgtggggatttgttgggaggatctaagtaaagcccttaagacactgcctgggtataaagcagctatgtagcttctagtgtcttaacattgctaagaaaagaaacacacttgccccctttttgcagaagtaagctcctttagtgattttcatctcattttcttctatacttttttttkatatttgttgtgagcacgatcttctcttttttaataaattcatatttttcaattatttttattattaaggtaagaagtgtgcttttgttggtggaggaagaaggaagc

SEQ ID NO: 815287 - DNA, 526 bp, Homo sapiens
gaataaaacaaatgcaaatttaatgacatggaaagaygaatatatttgtaaattttaacacaatgtaaagatgaatatgttattatatgtaaaatatctaaatattataaatgaaacagctgcaaaaagaatggaaataagtaagtatataaaacatatcagggcagtcatgtcttaggaactgaagaccagagccaaaggtttttaacatatacttgcttactattgttaacaaggtatttgctgaatttaattcaataaattctgtgacaactgcagaaaaaagaacctattgaaatgaccaaagacacatgtgcaagtgtgatatggcagattaatcaatgagaataatttcaggatgaacccaggtcttcatccttacttctcagtccttcttgcaagtttgttgatgatgaagagaaggatttcacgattccactctgacaacctcccaagcacagtcactgtatttcttctcctccaggtagattccctggattcccatgcattccctgaaagtacgtcc

SEQ ID NO: 815288 - DNA, 624 bp, Homo sapiens
gcaaatattttctgtcattctatggcctgacttttcttaatggttttttaattttaaaaataagtcttaatattcatgcaatctaattaacaatcttttctttgtggttaggactttgagwcataagaaatttttctctacactgaagtcatgatggcatgcttctatattattttctaaaagatttaaagttttgccttctccatttagacttataattcactggaatttttttgtgtgtatggtatgacatatgggttcccttttattttttacatataaatatatttccctgtttttctaaaaaagaaaaagatcatcattttcccattgtaaaatgccatatttttttcataggtcacttacatatatcaatgggtctgtttctgagctctactctattttatcagcctcactgtctatccccacacatctcatgctttgctctaaatcttgatatttagtggaacattctttcccattttgttctacaagaatatttttgttattgtcttttgggcttctatatacattttagaatgaggttggcaagttaacaaacagcttttttggggtgaacatattgactacaaatttatgtggaaagaaagtataccttcacaa

SEQ ID NO: 815289 - DNA, 617 bp, Homo sapiens
ccattcataggtgagcttctgccaagattactactaatcctcaggagaaggggtagaggagaaactccataaaggcaactggaagtggagtattaggaagcacctcawgaacacaatagcaggaagtagctagagaacaaagagaagaaaccagaaaaaaaaaatccctttttatttttctgtttccattcctttggctccatttccacagctatggcctttattttcaccctccacagccatgagagcctctgggcaggagttctcctcgcctctccctgttccaatcacctctaacatttctgcctattgttctgcccagggaaaaaactccagtctcttctctgtcaaagacctcttgaattaagtccaaatgctacactctggcattcaagactccgtaatacagctcaacctgacttttccaccctcagcctccttgattcctaaaatgaagcctgtccacaattgaagctccttgtctttgctcctgcaaacttgttcattctcctggctgtgtttgtgctggtctctgtctatctagagctgtggatatcatggtatctattgtctatcatgctagccatgaaccacatgtggctggtgagcattttata

SEQ ID NO: 815290 - DNA, 617 bp, Homo sapiens
ccattcataggtgagcttctgccaagattactactaatcctcaggagaaggggtagaggagaaactccataaaggcaactggaagtggagtattaggaagcacctcaagaacacaatagcaggaagtagctagagaacaaagagaagaaaccagaaaaaaaaaatccctttttatttttctgtttccattcctttggctccatttccacagctatggcctttattttcaccctccacagccatgagagcctctgggcaggagttctcctcgcctctccctgttccaatcacctctaacatttctgcctattgttctgcccagggaaaaaactccagtctcttctctgtcaaagacctcttgaattaagtccaaatgctacactctggcattcaagactccgtaatacagctcaacctgacttttccaccctcagcctccttgattcctaaaatgaagcctgtccacaattgaagctccttgtctttgcycctgcaaacttgttcattctcctggctgtgtttgtgctggtctctgtctatctagagctgtggatatcatggtatctattgtctatcatgctagccatgaaccacatgtggctggtgagcattttata

SEQ ID NO: 815291 - DNA, 569 bp, Homo sapiens
aactcaaaggatcatgctgttagaaagtaatttgtgtctcagaacaaacctcaagaatatttataggracacaaaatatccagctcccaacaaggtaaaactcacaatatatgttagccaatcaaaaattaccaggcatgcaaagaagcaggaaaataagatccataatagggaataaaattaatctaaatcaaaccagaataaacacaaatgttaaaaattagcagacaagtatattaaagtggttattataactatgatcaacatattctaaaggtcaagaaaggaacatgaatgatattttttaaactcaaatctaacttctagagatgaagacgataatgtgtgagatgagaaatacattgatattaagggcagatgagactttgcagaagaaagaaatcagtgaacttcaaaacagcaaaagaaactctccaaaatgaaataaagaaagaaaagaatttttattgtgaacagagcatcagtgagttgtgggacaacctgaaatagccatgtaattcaattagggatcctcacctgtgaaatgaagtggacacaatcagaattca

SEQ ID NO: 815292 - DNA, 584 bp, Homo sapiens
gcggattacatttgttgtgcaccgtatttctattattattattgcattgtaatatgtaacaaaatagttatacaactccataatgtagactcagtgggagccctgagcttgttttcctgcaactagacggtcccatctgagggtgatgggagacagtgacaccaaagtgtgctgcttatgtccagtctacttcgtaatctcattttgattgctgtcactgcagaaaaccctgtaacattctcaaaattctattctctctagggtaaaattaaactgcgggacatagcgcagaagacttgtcacaatttaggaccaacctaccaagacttcttgatctctttccacttcttgcccctcactgtgtttgatttctgccttccagtctgaacttctcactatattccagaaaaggcctgttaaagagatctggtagtcaaaagcaacctcttttttgcttgtgctctctgttatacataagaaaccagtcctgctgcagytccatatttgcattactaatttaatcagttagcgggacacatgctctttataacccaaaaaattgaagcatgaaatttgggagtcat

SEQ ID NO: 815293 - DNA, 609 bp, Homo sapiens
ttcagcttttctctgtccttgcaaaggacataatcttgttcctttttatggctgcatagtattccatggtgtatatgtaccacattttctttatccagtctaccattgatgggcatttgggttgattccatgtctttgctattgtgaatagttctgcagtgaagatacgcatccatgtatctttataatagaatgatttatatttctttgggtatatgcccaggaatgagattgctgggtcaaatggtatttctggttctaggtctctgaggaatcgccacactgtcttccacaattgttgaactaatttacattcccaccaacagtgtaaaagactgttcctgtttctccacagcctcaccagcatctattgtttattgactttttaataatcgccattctgactggcatgagatagtatctcattgtgattttgattttgatttctctaatgatcagtgatgttgagcttttttccawgtgttttttggccacatacatgtcttctttttggaagggtctgttcatgtcctttgcccactttttgatgggttcttttttttcttgtaaatttatttaagttccttgtagatgctagatgttagacct

SEQ ID NO: 815294 - DNA, 549 bp, Homo sapiens
ctaaggctaaagcagcaaaggaaggaaaggttcattcatacccttctgcaccccctccttattattttgaagaaaaagaacctccagatctttcttttctggaagwcactgggtgaaaagtagttgccccagtgactgtgtgagcagagcctcaagtgaccactcttagttctattcaggcgggaattcagcaagctagacaagagggtgatttagaggcttggcagttccctgtgagaatacaacccccagatcaacaaggaaatatagctacatttgagcccttttccttttaaattactcaaaggatttaaacaagctataaatcagtatggaccaggttctccttttgtaatgggactattaaagaatgttgctgtttctagtcggatgattcctactggctgggatgcttttactcaagcttgtctaactcctgctcagttcttatgatttaaaacttggtgggtagatgaagcttccattcaggctgctcacaatgcccaggtccaacctcaaattaatataactgcagaccaacttttgggg

SEQ ID NO: 815295 - DNA, 549 bp, Homo sapiens
ctaaggctaaagcagcaaaggaaggaaaggttcattcatacccttctgcaccccctccttattattttgaagaaaaagaacctccagatctttcttttctggaagtcactgggtgaaaagtagttgccccagtgactgtgtgagcagagcctcaagtgaccactcttagttctattcaggcgggaattcagcaagctagacaagagggtgatttagaggcttggcagttccctgtgagaatacaacccccagatcaacaaggaaatatagctacatttgagcccttttccttttaaattactcaaaggatttaaacaagctataaatcagtatggaccaggttctccttttgtaatgggactattaaagaatgttgctgtttctagtcggatgattcctactggctgggatgcttttactcaagcttgtctaactccygctcagttcttatgatttaaaacttggtgggtagatgaagcttccattcaggctgctcacaatgcccaggtccaacctcaaattaatataactgcagaccaacttttgggg

SEQ ID NO: 815296 - DNA, 569 bp, Homo sapiens
tgcataactgtccatgaaggatgatcccatagaacagcttagaggagtgcgcattagagcttgggaaaataatcacttcatgtggagaacaatacccttcctttagtgctataaaacastgaccaaaagaaccatacattgattttatagctcggttacaggagtctcttaaaaagatgattgcagatttggctgctcaggagatagtgttgcagttattagctttcaacaatgctaatctgattaccaggctgctctgcaatctatcagagggaaagcacatttagttgattatatcaaggcctgtgatggtatcacaggtaacctgcataaagctactttgttggcataggcaatggcagggctgagagtagataaaggaaatactccatttcctggagcttgttttaactgtgggaagcatggtcatactaaaaaagaatgtagaaaaaatcagcgagtcaggctgccagataggagaaaaaagaaaactgctgagcctgaaatatgtacaaaatgtaaaaaaggaaaacattgggctaatcagtattactctaagtttgatagat

SEQ ID NO: 815297 - DNA, 561 bp, Homo sapiens
agtatagatggggtttcacaatattggccaggctggtctcaaactctcgacctcagattatccacccgcctcggcctcccaaagtgttgggattagaggtgtgagccacctcacccagccaaaagattatttttaagagctctttccagaattattgtttaatttcatgactttctttatggacaattctaaagttaatttaaccttttcttgttgacttggagtcattatgagcataagtattatactgtatattattagagttgatgtttacttttagtttttttctgcttcatccctcaaaatgagagtatcattcttctgcatttcaaattccacctcttctcttagtttctttaacattaaccaacctttcttcccaccccttaaattactgcctctcatctgctgttgtcaaggaaacaagataaccaagattttaaaagagctagttaaaatatgagtcaaaaaaggaactgagtataaattttaggattgaagtasaaaacattaaagcagaggcttattgagagttatttcagacatacaaaagactttttc

SEQ ID NO: 815298 - DNA, 383 bp, Homo sapiens
tatctttttaaaattttaatgtctggctttagtcattttgagttcattcagcacctgcagcaagrgaacaacacaaaaggcaaatatgtttctaacctcaaagacacaaagtatatttttatattaacctgtacaagaaaatacaacttatacaaatgttcttaaacggataaataattttaattctgagcttatttaaaataaaactaacattttaatagtaacaattcaagttctacataatttttagaaatatatctaaagctgttataagttatagattgcaataaatcaccaatatggaaatattttaatcaatacttcacacattccctaccctcatcttccatgacatgcagcataatctggcaacctatgcaagc

SEQ ID NO: 815299 - DNA, 621 bp, Homo sapiens
gcattgggagcataagggcacatcattcttgtctttgaagagttcacagggcactgtaggacaagttaaatatgattttacaaagcaatartagagcgttgctgaataagaagacaaaaaaagtcagttaacccattagaagagatgatggaagggtgggcaaggaaggatttccagatgggtgatgcctgggctgatctttgaaggatgagcaggagaaagccagatagatgagtggggaaggcaaccatggtaatggcagcagcctatgcaaagacatgaaaatatggagcacttggcagagtgatgagaggacagagctatggtcaatatcatgggctttgaaatcagaaatcagacagactttttatttgaatgccatttcttccatttactagttacatattaatgcagatttacttgatctctctaggccacagggtcctcatttgtgaagagaaaatagtattaatttgttattgacagagttactttgggatgaaataaaacaatgcatgtaaagtatctgatacaaagtaaactttcaaaacatgtcaactgctgctgctgttgctgttactgttttgggacttcagctagatagaaaagatctgagagagg

SEQ ID NO: 815300 - DNA, 487 bp, Homo sapiens
ttctgaacagggaattagcacaaaattttttaaaacagtaaatattgatatctacatgaaagctgatgtattttgggaattttttaaatcttttttttttttattttgtaggttgtttttgttttagcctgttgagagagtctgcaaataaatttaatgagtagtctaaaaactaacttttttttgattgctatatcctagctcttttatctttggctctcttctccttattaggatgtgaagtaattctcaggagaggaaatgcatctagtttttacttgatatcaaggactctaaatcactggcttcagttttatgtaaactggaaatgtaaggaagttggtattttggatggtattttggctggattctacttgatgagtgtttgacccaaggtgctccttatayctggaaaacatttgggattgctgatagtttgggaaactaaatttgtggttctatttcttcaagacacagatagtgtcgt

SEQ ID NO: 815301 - DNA, 562 bp, Homo sapiens
cttctcattttcatattgcactcaccatcttatttactcttttctttatttttagaataatgaacaccttttcccctttgctttcttggttaaataatattcctccatgtgtctacatgttccaaatctatatgggttcttcaatgctgttctcttcccctgctggctgtcttgaccattatacatcctcttaatttttttcttcgccaataactttttttcaataacccagttaaaatttaaattatgacattttagcctaaatgcaaaatacttaagctttgatgaaaaatttaaaaagcataaatcatctcttgactcatgagagtactatagtacttacagatattttaatgctggcaatttaaagagatacggatcttcaacagttgtcagaggattgtgattgagaattctgaaaaatggaatrgaattaaaataacctgcattttcaatgtgtaaaactgcatgaaaagtttacattcattttttgatatggaacttgtaggtaaaaaagaaaaaaatgtttcctgtctttacctaagaaatcaccattagactc

SEQ ID NO: 815302 - DNA, 606 bp, Homo sapiens
agtttacattcattttttgatatggaacttgtaggtaaaaaagaaaaaaatgtttcctgtctttacctaagaaatcaccattagactccgtaaagcactattcctatgggaactaccraggtctctagaagataaaggatagaacgcggggaagaactacaaggaaaaaaaaagtggatagcaaagaaaaaatatgccacagaacttttcaggtcaaaaaccctaaaagtgactatgttggtaggaagccctgactgtggaggaaacagtatttctagcatcctccataattcaagttgctcatcataattcaacttgttcatctattttttttttttttttttttttgagatggagtctcgctcttgttgcccaggctggagtgcaatggctcgatcttggctcactgcaacctccgcctcccaggttcaagtgattctcctgttctgcctcagccttccgagtagctgggattacaggcacccaccaccacgcccagctaatttttgtatttttagtagagtcggggttttaccatgttggtcaggctggttttgaactcttgacctcaggtgatctacctgcctcagcctcccaaactgatag

SEQ ID NO: 815303 - DNA, 685 bp, Homo sapiens
gttttcttctaaaacagatatgttgtcaccgaaggtcattacaagaagatgaagaaggattctcaaggtaaatattagtctggtgattttttttttcttctcttttgagayggagtttccctcttgttgccaggctggagtgcaatgacacgatctcggctcacggcaacctccacttcccaggttcaagcgattctcctgcctcagcctcccgagtagctgggattacaggcatgcaccactagtctcgcgacgttttaattagaattttagaattagaggagggcttagaactctgccctcatttttcagtgaggaaactgcccaagacaggacaaatacttaccctaatgcttagcctggctccagtgaaattagctccccagccaaagctgagctggatggaactaacaaggacacacctgctgtccccagccctttcgggaggtggggagggataggaaggagaaaggttttggtgcctattgctgctgatggtgggcatcaggccaggccaggggccttcttggaggctctgggaaaggggaagggaaggccaccgggtgtgagagggcacttgtctccttcaaggctgatggaaggtaggatatgtgagtccttcctcttaagtggcaggaaacagtattttctcttttatttctttttttttcccctggatcctaga

SEQ ID NO: 815304 - DNA, 577 bp, Homo sapiens
ggtatgtggtctgtggtggtggttctccctgtgattatggactgagatactcatttagtcctaataagaccagagaagtacattgtsagatacgtgggaaacggctgcatcactcactgtcttgtgcatgtgtctccccaggggcattttcagatttctgccatggaggggatgctcttcgcgaagggagagtcaggtacattggaggattcattgctgtggccagggaaagcagaggacatgcaaaattaatatttccctttctatcttctaggatggactttcctcatttggacagccgctctggtttaaagatctgtacaaacctctcagtgccacaagaataaataatcatgcatggaagctgcacaagaagtcatctaatgaggacaagatcctcaacagggaccctgggtaaatgatggggccctcacagttcccatctaaaatgaggagggggtgagaagcttaattgctcctttcaagaatgaaaaccttggcattgttattcttatcccagggacagcgaagccccaacggaggaggaggagagtgaagccctgccataggaggagaa

SEQ ID NO: 815305 - DNA, 641 bp, Homo sapiens
agaggtgctgtccatcaggtgcagaactgaaagatggcctgtgctgtgtgagccctgcccatctccagatagatggctcatgtagtgagctacaggcactcatggactgattatttcctcaataagacktagaaatatacccgcaatgtctatcgacctaaactctgcaaacaaaaatcaaaatgagggatggtgaagtgaccacaccaagcttgtagctgcaacaaggctgatacagtgtataacctggacccgtgattcttaaacccagaaaggtcacctcacagtacacagggggacaggctctggggtcaggctgcctgggctcaaattctgaaccattctctacccagctctatgactcggggcaagtcaattatgttctctgggcttctgttttctcacatatgaaatgagccaccattctccacccataagattgctgcagttatacagcttagggcagttcttggcatgaagtgctgttcaagcagtggtcgccattttcattggtatcaagccaatttatcaacttcaccaaaaaagaggaaaaccaaggcgtaggtggctcttttagatgggcgctcatgcattttaaaatcccaatttggtttttctttatattttagtctacactattt

SEQ ID NO: 815306 - DNA, 641 bp, Homo sapiens
agaggtgctgtccatcaggtgcagaactgaaagatggcctgtgctgtgtgagccctgcccatctccagatagatggctcatgtagtgagctacaggcactcatggactgattatttcctcaataagacttagaaatatacccgcaatgtctatcgacctaaactctgcaaacaaaaatcaaaatgagggatggtgaagtgaccacaccaagcttgtagctgcaacaaggctgatacagtgtataacctggacccgtgattcttaaacccagaaaggtcacctcacagtacacagggggacaggctctggggtcaggctgcctgggctcaaattctgaaccattctctacccagctctatgactcggggcaagtcaattatgttctctgggcttctgttttctcacatatgaaatgagccaccattctccacccataagattgctgcagttatacagcttagggcagttcttggcatgaagtgctgttcaagcagtggtcgccattttcatyggtatcaagccaatttatcaacttcaccaaaaaagaggaaaaccaaggcgtaggtggctcttttagatgggcgctcatgcattttaaaatcccaatttggtttttctttatattttagtctacactattt

SEQ ID NO: 815307 - DNA, 596 bp, Homo sapiens
tgtttttttttcagttctgtcagttttttcctcatgtagtttggtgctctgtccttaagtgtgtacacattaagaattgtcaagtctcctggactttttatcattatgcaatgccsttctctatccctaataacctttccttgctttaaattcagctctgtctgaaattaatatagctttttctgttttcctttgactactgttaacatgttatgtttttctccttcaatttacatttaatgtatatgcatctttatatttaaagtggttttctttgtttgacaacatatagttggtcttctaatacactctgacaatctctgttttttaattgatgtatttataccattgatactcaaagtgactattgatatagttgaattaacatttactgtatctgttactctttccatttgttacccttgtttttgttcctatttttgtcttctgctatttttctacattttatggctttcattttgtatttttatttttctccttatttattatatcaattacttcttttttaaaaagaaaaacttttttagtggtggccctagaattgtcaatatacatttacaactaatttaatccaa

SEQ ID NO: 815308 - DNA, 590 bp, Homo sapiens
ttagtttctagagtcctcttgctgttttctgcacatggatccctacatatcaragaaagcaaaagtaccttaaatctttctcatgcttggaatattcttgacttccctttttactgcgtctctctgatcctagttatttgccattaaaggctcaagtaactcaaatgagcccaccccaggttactttccctattgcaaagttggtaaccttatgttaccaactgtttccccacatgaggttgggatctgcaataaaactataaagacttttgtcttcagtaaaagtgtatggtagaaaacaaatgctatgagagtataacttggacttgggaagggaacagaagtcttccctggggaagttttactgcagacatgaagcacatgcatgtttggggtttgaactatttaagctattgaatataacaaattttctagccctctgaattattagaactattaaatactataaatttactagcccaatgagtctcaatgattttaagtttgctatattaaaaattcactacaagtgtggtcaagaaaccttaatctgaatacttaacataaaaataaggctcacactgataata

SEQ ID NO: 815309 - DNA, 590 bp, Homo sapiens
ttagtttctagagtcctcttgctgttttctgcacatggatccctacatatcagaraaagcaaaagtaccttaaatctttctcatgcttggaatattcttgacttccctttttactgcgtctctctgatcctagttatttgccattaaaggctcaagtaactcaaatgagcccaccccaggttactttccctattgcaaagttggtaaccttatgttaccaactgtttccccacatgaggttgggatctgcaataaaactataaagacttttgtcttcagtaaaagtgtatggtagaaaacaaatgctatgagagtataacttggacttgggaagggaacagaagtcttccctggggaagttttactgcagacatgaagcacatgcatgtttggggtttgaactatttaagctattgaatataacaaattttctagccctctgaattattagaactattaaatactataaatttactagcccaatgagtctcaatgattttaagtttgctatattaaaaattcactacaagtgtggtcaagaaaccttaatctgaatacttaacataaaaataaggctcacactgataata

SEQ ID NO: 815310 - DNA, 647 bp, Homo sapiens
acagggatccaacaggagggtggccagaggagcagggagtaaaactccacagggaaaaggaattatctmgcggaactttgtaacaatttgaacagggtgagaaacctcctggccagaactcaagggagggcacaaatcctgcgtacagacttcacaggcagggtaagaactaaagcccttttctctcgcagctggaaggcagatatcctcaggtatgttttcaagcccaccttgccctcagcctggaaacagactccacgctgttggtgggggcacagtgagagtgagactggcccttcagtttgcatgggagctgggtgaggcctgtgactgccagctttcccccacttccctgacaacctgcatgactcagcagaggcagccataatcctaataataggtaacacaactctagtgacctgggaatctcatcccatcccccacagcagccccagcaagacgcgcccacggagagtctgagctcaggcaggcctagccccgcccccacctgatgatccttcccaatccactctggtagtggaagacaaagggcatacaaccttgggagttctagggcctcacccaccaccagtctctctccaccctactacagctgatgctctctggaaagtgccacctcctggcag

SEQ ID NO: 815311 - DNA, 643 bp, Homo sapiens
aaattgctggttttgtttaatatgtaatgaaacttggttccctctaaatttattgktatcatttttacaaattttcttgaacatatgctgtaggcaaacactgtaagcccatttaaaaaatatcccaagttggtaggtggggaaaaaggaaggtcactgatgcttacatacagtgaacttcaatgtggagtgatatgtggggccatttcattaggaaatagccaatgttagtacctttaggtctttttcttggggctagccagaccttcaaaaagactctttcaaccttctgtcatctaagcccacttgcccagtgttctgggagctgaatgggggaagaaggctggaggtggcagtgttgaacatgtacggacattaagtaacctttctgataacacccctgttttcagactgtaaactctcacctgtgtctggttttctagcccagctaccttgttttaccttttccagaggagaatcctgtagtgttctgatcatgaggaggggatctgtcatgttgattgcttttttaataggctttcctctaagtcatctgtttttagccacaccttcacctccacgtccataagtacttggtgctgccaactcctgagccttttgaaggttctgcagtgtagcatgg

SEQ ID NO: 815312 - DNA, 634 bp, Homo sapiens
ctaaggcagcaggattgcttgagcccaggagtttgaggctgcaatgagccatgatggtgccactgcactccagtctgtgcaacatagtgaggctcyatctctaaaaacaaacaaaaaacaaaaaaatttaataataacataaacataggagaaatcacaatcttgaggtgcgcaaaaattaggataccagaagcactaagaaaaaatgatgaaaaacaaaaaagaaaatatttaataaatcagatttcacaaagacatggaatgccctatggggacttaaaatgatgctctacatccttgttcttcagagaaatatcacacgagacattacacagtagaatagctaaaaattactaagactgacaataccaagtactagcaaggatgtggaattccttggtgactcctagtgctaaacttgcctcagagccaatggacaggtggttggggggcaactggtgcagctaagggagtgcttacaccacctctcccccaacccaaggctgcacaatgtgcagctccaaaagagaccctgtccttctgcttgaggagaggagagagaagagtaaatacaggactccatcttgcatcttgaataccagctcagccatagctggtaaccactaaagagccc

SEQ ID NO: 815313 - DNA, 494 bp, Homo sapiens
aaaaaaataaaataaaataaatacataaagcttaaaatgcataaatttttaggcctataagcttgctatagtgggccagaaatttgaagctgtcttctactagccaaactcaaataacaaaayttgagtcataatgtccaaaatattacaatatcttacctctgccaaagagatgaaactattcagcaatgccaactatgtgatattcattttgtaacttatgaaaacattctataaaattattcatccaatattaacttgaataagtgcaaaaaaggacagatatccttacatcacgtaaacctgttagtattcacctgtgagaactgttcaattctctcattcacatcaggtagcatccatgtatcctcaccccgaagtcgcttaagttctttacgcctttcttctttttcaaaattggctttagcctacaaccaaagaaaaaaaaaagacaaactggcaattgacccaactgggtttcacaaaaaaaggaa

SEQ ID NO: 815314 - DNA, 538 bp, Homo sapiens
attttccctttagagtctcctctccctcttctctgctggctccttctcatttgcatttaaacttgtttaaaactcttccaacttaaataaaaacaaaaaccctcactgaattctctgttgctctccaactgcaacttttctctttcattgccacacttcttacatattgaatagattgtcagataattcagaagcttactttctccattctttgtatgttacctctatgtatctgaagtttagtgagaaatacaatgtttcgcgatcttttgtgacaggctaaatatactgagattggtgttaacttttgtttggattggtaagagcttacagtaagtctggaattgataccaatagagacaggaggaggaaatgtcaaactgagtctattcaagtgtgacttgaatgtgtttccraaaaaggaaaatctcatttcagatacagcagtagcaatgactgaggctgcgagacatgctggcagagtccttacaagccgcaggggacctacaaagtgtgcagtccgagtgatagaaatgta

SEQ ID NO: 815315 - DNA, 516 bp, Homo sapiens
aactgtcacatttacctttcaccttctgccatgattgtaagtttcctgaggcctcccagccatgcttcctgtacagcctggagaactgagtcaattaaaagtcttttcttcataaattacccagcctyaaatagttcttcatagcactgtgagaatggactactacaatctgcttccaactgcacacaggccattcctcactttctggagcagccacatctccttttgcatagatgatcttttaccaaccaatggttatcttggagaggttatactttgagggatgaaagtgagtggctggtttggctaaagggaaagcatatttttgtggtatcactgggttcaaaaccctttagtaagcaaaatcctaatgtctgtgagttgggcttctagttaagtgtagtctgtgcaacaagtttcttagtttctgcttttatcacttactatgtgatcctagtgagttctttaacttcctattactcattggtaagttgagtacataacagttcctacctc

SEQ ID NO: 815316 - DNA, 437 bp, Homo sapiens
caggaaactgacatcaaaagctgatgtcctcgaacaccatgcgaacacagtggaagggaccttcggcctcctcatccatcccctatcccctgcccgccatctgggtggctgagccacctcctggtggagggcctggcactgcattcccacagagcccactgaaagccttcctccaccccgtgtccccctttccctagaagactgtgactaaagccttcctacagcttttctcccatggcctaaaacacttgcttctagaacctttctccacaggttcagtttctcaacttcagcatacccaccatgaagatgagggcagaaagatccatttctkcccccttttccccaggcctctcctcactttccacagggaaggcctatgttctgcatcacatagaacaaaaaaaaaatcacttctctttggatcaaacaggtga

SEQ ID NO: 815317 - DNA, 437 bp, Homo sapiens
caggaaactgacatcaaaagctgatgtcctcgaacaccatgcgaacacagtggaagggaccttcggcctcctcatccatcccctatcccctgcccgccatctgggtggctgagccacctcctggtggagggcctggcactgcattcccacagagcccactgaaagccttcctccaccccgtgtccccctttccctagaagactgtgactaaagccttcctacagcttttctcccatggcctaaaacacttgcttctagaacctttctccacaggttcagtttctcaacttcagcatacccaccatgaagatgagggcagaaagatccatttcttcccccttttccccagrcctctcctcactttccacagggaaggcctatgttctgcatcacatagaacaaaaaaaaaatcacttctctttggatcaaacaggtga

SEQ ID NO: 815318 - DNA, 437 bp, Homo sapiens
caggaaactgacatcaaaagctgatgtcctcgaacaccatgcgaacacagtggaagggaccttcggcctcctcatccatcccctatcccctgcccgccatctgggtggctgagccacctcctggtggagggcctggcactgcattcccacagagcccactgaaagccttcctccaccccgtgtccccctttccctagaagactgtgactaaagccttcctacagcttttctcccatggcctaaaacacttgcttctagaacctttctccacaggttcagtttctcaacttcagcatacccaccatgaagatgagggcagaaagatccatttcttcccccttttccccaggcctctcctcactttccacagggaargcctatgttctgcatcacatagaacaaaaaaaaaatcacttctctttggatcaaacaggtga

SEQ ID NO: 815319 - DNA, 610 bp, Homo sapiens
ccccattagaactaacatttataaagcacaaactgccaggaactgttctaaccactttacaaatactgactcatatcattggcacagtaatatcttcattttcttttctttcttttttttcttttttttttttcagatggagtctcactctgttgcccaggctggagtgtagtggcacgatctcagctcactgcaacctgcgcctcccaggttcgagtgatcctcctgccccagcctcctgagtagctgggattataggcgtgcaccaccatgcccggctaatttttgtatttgtggtagagacagggtttcaccatgtttgccaggctggtctccagctcccaacctcaggtgatccacccgcctcggcctcccaaagtgctgggattacaggcgtgaaccacagcgcccagcctagtatcttcattttcagacgggagaacagttgtccgcagacacagagccaatgagcccagcagctgggctcttacccactcctgcaccygtttgcacgaagaggataattacagctcccagctcaaggggaggctgtgagaatcaggtgagagaatgtgtgcgacagtctggtaagtggcaggtgcccagtgca

SEQ ID NO: 815320 - DNA, 596 bp, Homo sapiens
tctgcagcttctttgccaatatagtaatgcttttagtagagtactagatagtatcagttttggattcttattgttatcacctatgtacaatggaaagggattttaagcacaaacctgctgctcatctaacgttggtacataatctcaaatcaaaagttatctgtgactattatatagggatcacaaaagtgtcacatattagaatgctgacctttcatatggattattgtgagtcatcagagtttattataacttattgttcatattcatttctaagttaatttaagtaatcatttattaagacagaattttgtataaactatttattgtgctctctgtggaactgaagtttgatttatttttgtactacacggcatgggtttgttgacactttaattttgctataaatgtgtggaatcacaagttgctgtgatacttcatttttaaattgtgaactttgtacaaattttgtcatgctgsatgttaacacatcttactctaaataaacaaggtgttgccacatttgtagcacgaaggatctctaacccgggtctgcgtcttcacttgagtctgggaaatgctgtctggggtcccgt

SEQ ID NO: 815321 - DNA, 577 bp, Homo sapiens
tggttgatacaccttgcagacagctttgaatccttccctaaggtcagttttggatgtaatctgggagtattcatcgttttacgccatctgccatggatttctacattgcttaattgactgtaaaatgagttattcttgtgaagtgggactttgttggaaaacattcaaacaatacggaagtgcaaaagataaattattagagatgatattagagatagagcaatcatttccttctgctggcctctcttcagccctttcctgtctcactggcaatctgtcgagaatctgcacgcacagcagtgcaactgcgttacatggatttactttttttgtggctgttacttttataaaaatggaatcataccagacaatactattctgtaagttatgtttttcatccagtgataataaccactatcatcatacacagctataccagatggcattttttaagcatttgcaaatattagtttagggtgaggattgagaggaatcgttgtaagtcggcctggtgtccacgagctgcagtgtgkcctcatccgtgccccgtgtgcattgcagctggcggtgtggttga

SEQ ID NO: 815322 - DNA, 538 bp, Homo sapiens
tcctttttccataatggtttttaatagctcaactctgtctacttgggtaacttatgttagctacaacttyaagataaaaatcacattattgcagaatcttactgctgaaagagagattggaaatcatcgaaaccgaccctttcctttcaccaaaagtaactgaggccccaaaatcttaagtgaccctccagaacaggtgatggcagagccagtgccttctaactgatgttcagtccagtctccaaatttcccctttgtataagaataccagttgtatttgattagggcccaccctgatgacctcatttgtaaatacttatctccaagtaaagtcacattctgactttaaaaccacatcctgggggttaggatttcagcatatgaatttggaagtgggggacagagttcagctcataatacttcactctctccccaccagaatacatgtccttcacccaatgaaaatattccatcccaacaaccccaaacgtctttcagacatcaactctcaagtccaaaatctcatcttaaatatcat

SEQ ID NO: 815323 - DNA, 650 bp, Homo sapiens
gtcttcagaatgccttacaaacatgctaatttggaattcatgtattagcttccttcccttttggtcacattcattcttctaaatcaaacagctttcaaatgtaagctcaacatcataaattatggaaatctattctttaaccattcttcccaaccaaggttccttgagagaattaagtcccatagaaaatgatttcagtcactattttctcaattctcccaaggaaagtacttagccagtactgttctagatgcggaggagatagattaatgtattacatacagtggatgtcttagggcatgaggacttaaccctctagaaaattttgagaagggctgctaggtatttcaaagagcacagaaatgccatcacaaattaatgtgagcagtactgcaaggccctccttgtccccaagtattactagcctgaccaccactacaacaactactagaagtaaaaagaaggtttaaacaaagaatcactttcatgggctgagtgctgacaactgaggaagcaatagagaagcwgactagcaaagactgaatttgaacccagagcctgtctgattctaaactgctaggagatagaaaaaagaattgattttcccaagaaagatggcaaggagtggtagggctagggagctgatagaa

SEQ ID NO: 815324 - DNA, 620 bp, Homo sapiens
aaaagtgtcccaaacttaaaatatttgaaaaccataacagtgttagaagacatacagtaaatgctgaatttttaaggcwtgaaatccactacatggaaggatactttattttgttaaattcaatcactatacattgattatcttctagggcacagcatcagggttttgcagaaaatagttttgaggctcaaccatgttccttatttgttagtgaaaggcagtatctacctatgtatcagccaaaaaccttgagtttttatctcattcttctccttcaggttttaagatctaagcacctcagcaacagaatctctagatctgagtcaatgagagttcctccagattgtcaattaaaccataaactataaagaagaaggagtgacagggaacttttctgatttgacattacagttaggaaacaacattccagaaccatgaaatgttggatttgaataagagaaagcatctgggatccttatgcccagtgaagtttagaaattcacaaacagcaagtcacaaatagaaggggatctgagatcagacctctggtgtcctctttagatgttagtcctctccttataactgcttgttaaggatgggctagaccatctgaaatgaca

SEQ ID NO: 815325 - DNA, 640 bp, Homo sapiens
cattatctaagctgtgcactccatgaatgactatcatggctgctcacaaagtgtttagacagctgtggggccgtgactgaaaagcacgytctcagggcttgtgacttagcagaggactcactctcctccctgaaagctcttggctgtctgctggcttgccgcttcctgaagtttggggtcctctctgaatgtcacacagcatccctctcctccactatttggataatttagtaaattctcaatggagcaaacatggctccctttaaacacctaccctttgccctcaataaaacagtttaagagaacagaaatttctcagcagacacttgtagttaaacaaagcatttcacaaacttctggaataaggatatttatttatttttcattattcgtgaaacagctttaatctgaaggctgatgtttggaggagaaagctcagttgcaacctggcatagctcacgctgcatggaagctgaagatgtcacccacgataaacatgaactgctgtgacaatgggaagcggaaggtgaagaattgcctctccaagcagggtgggggtctgaatgcgtgagaaagggaaagatgcatttgattgtgtttacaagattcattcacagcacagcaggcagtattcacacta

SEQ ID NO: 815326 - DNA, 521 bp, Homo sapiens
aaagccatgtttacatacaaattaattttaacaaaataaatgatcttgaagtattttacrctattttgaaaatatggaaacacatttaattttcaaggtattctaggaacacatttttctataatctggaatgttcacataacctaattatttctttttaggtaacatttaatatagctagctattcataacttcgagaaatgtttttctttcctccaactttccatataccttgatcaaatagttctagttaatatttctagtacatgtaaataattatattcttgagtgctttaaaattagactaatttctacaccattaaggagcaaaaatatttctagtttttgatgcattataagtgggagatattaatttccgatgaaattatgcataagcaggggaaaagctttctactgagataatatttaaacataaaatgttaagcatctcaggatttacaaatgattaaaagcaaataagaaaatgcaatcatattgtatttggattgtggaaccctctc

SEQ ID NO: 815327 - DNA, 643 bp, Homo sapiens
tcttcatcagccctgtatcataggaatgaggacaattagcttcaggtggctaatatctgctgagtcctccttatgtcctatatacttttaaagcctcctacacatattaactcmtttaatccttatagtagctactagtatttttcttattttatagataggtaaatggaggccccgagtctgtgaataactacctaggttcaatagctaggcagtgccaaagttgaaaatcaaactcagactctctggtcccaaacccaaacataaccactgtgcaccctgtctctgagtctgatcaaactaaacccaatctcaaggtagggagccagattcctgtacaaagccatgcactgccctaaacctaactatgttccagaatctttacatttccctttcattcaagcactattcattttctttccgagatcttaattaggctcctgattttgccttttgctccctgttcaacactgtctgtatcatgtaatttcactgcagttaacttcctcagtgtctgagttgtctgtctcctccatttctctcatctataacatcaatgttcattattgacctcacagagtgattgtgaagatcaaatgagagcgtgtgcataaaactacttgggaggcttactgtgttttta

SEQ ID NO: 815328 - DNA, 591 bp, Homo sapiens
tgagattagtgcccttataaaagagaccccaagagctgcctagccccttctgccatctgaggttacagtgagtaaatagccactgatgaaccaggaagtgggccctcatcacacagctaatgtgcgggtgccttgctcttggacttcccagcctccagaactgtaagaaataaattcctattatttataagctatccagtttatggtactttgttagagcagcctgaactaagacagtcacagtactagcttatcaatcactattacaattcatgggaatttcaagatcttacaatggacatattagccaaattatcttatccctgtgtcaagtaacaggacttggtaaaataattatttctaatctataagaatgtaaaaagcatgtaaacatgtgcaatcatgtgtaacaggcccttgcatgagctgatattgttgctagtcccatcacatcatcttccacrtcaatccatgcagcaaaaacctcaacactatgaaaactggtaacagtcctaactgccagttttactgtgtgtctccattacccctgaagtgaatattgctttaatttcaaagatattgaactcttaa

SEQ ID NO: 815329 - DNA, 629 bp, Homo sapiens
actgtgtttgtgtaggttagatttggctgcaaagaasagaaaaactcaaagaaacagaagctcaagacaaggtaggcattcatttgttttgtaaaaagcctggagacagtgatccagggcaggtatcatagtaccatgatgtcatcagggacctgggttcttcctgtcagaggcgtgtgaaccagagtaactccatcttaaataggagctgggtaaaatgaggctgaaacctactgggctgcactctcagacggttaaggcattctaagtcacaggatgagataggaggtcagcacaaaatacaggtcataaagacgttgctgataaaacagtttgcagtaaaggagctggccaaaacccaccaaagccaaaatggtgatgagagtgacctctgggcatcctcactgctacactcccaccagcaccatgacagtttacaaatgccatggcaacatcaggaagttaccctatatggtctaaaaagggaaccacgaataatccaccccttgtttagcctatcaccaaaaagtaaccataaaaatgggcaagcagcagcccttggggctgctctgtctatggagtagccattcttttattcccttacattcttaataaacttgctttcactt

SEQ ID NO: 815330 - DNA, 612 bp, Homo sapiens
gaaattaaaattatatttacccttaaaatagttcccaaggcaagtttgcttatgatgtactttgaaattgtatacaaattaagtgagcctatattttagataatcttttctttcarttgtatacattgaacagtaaagtatcttgcaaatcatgaatatcaaattagatatcacaagggagcagacccatttacatagtccagtgattgtatttaataaatgattaagaagtacttgattgtaatgaaaaataaaaggtatctttgaaaatgttcagaaatatcagtacaacatattgataaaacaataacttgtagagcttttttgttttcaatgcacttttccatatattaatacttttgagcctttcagtgattcagaaagctaggacaaatatacttatccccaacacacaaactaaagaagcaaggtagctcagacctgttgaccaacttgctcaaggcatgccgttttcaagttactcaatctaagtgtagacttgagatatatgtgaatttttaaataaaccaaatgcaaagaatttgtttcctcaaaaataccccaaacaaaaacacgccatattaacagtaattattatcacattataatttt

SEQ ID NO: 815331 - DNA, 673 bp, Homo sapiens
tgtagaagaaaaagaaaggggctgtgagagtaatcagagsagaaaaagagcacttcaagaatcttataacagaaaagaacatagcacattggaggaactgaagggggaccaggggctgaaagaaggaggcaatggaaaccatgtttctaaaagaagccagagtgatttgtagggtacagattctgcagggtcttatagagtaaattaagtatttagtttatatcttcagagcaatgggaaggaattgaagtgttttaattagtgggttgataggataatacatgtactcagttaatatttgtggaaaaaataatgtaataaagaaagaaagaaaataaaaacataagaatagcaatgttaattgagaatagaaaagttcagcaataaaatggtatctctatgtaagtattagttataccctacttaattatatcttatagatggacatttaccaacagtgtgtaaagttgaaatttgccatttctctagaattttgaatatgtcactctctgtgtaacactggggcaccaaggtatccagcatcaataaaagtagtcatttgtgtcagttcttgaaaattttgctgaaaaagaatgcctggacagacaaatatgtggataatatataggcatggcatacttttggaatttctaagcatttttctctacatatt

SEQ ID NO: 815332 - DNA, 651 bp, Homo sapiens
cgttttcttttgtgttagggatttggttggatgatgargacgggtgggaagttagagggaaacataatacagttttagtgcatctttccaattctcatgtcttacttttatgtctcttattcaaatgaagttagaagactataaagttaaagagatagagaaatatttagaaataaatatttaaccattgtcttaaaagaacaagagtaggagggaaggaagtagaaagaaacaggtgacagagactttatacttcactatgcattagtcacaccctttatactgggtccaatgggtacaatccaaagtagagaaaaatgctctagtgttgggattaatagtttacgttaaggttaccacaattgtttatgacaatctaagttaaaaaaatctcttttatatattctttgcagctgatattatattaaacattaacacacttctttttactgggtaagaaattttgatagcatgagattttgattttttaaatatttattgtagtcacaaattattaaattacgaacaaaaattatttatctgtttacacaattgaggcattatagatggagttatcaaacaagtatctccccaaagcaaaaccacttatagtaacaaaaggatgatttttatttcaagggacttaaataa

SEQ ID NO: 815333 - DNA, 306 bp, Homo sapiens
ttcccttgcttaattcaagtgatttgtaagagctrgtagttcagctaattgagcacttgtgtctgagatgaaatgttatttagagtgactactgcttatcctgccttatgtacttcttgctttactggctgtttgttagctaagagctccccctagagggcagtgatcctgccacatatgtggagtgtaaacagttaaattatttccttgggttaatttggaggcttttctgactcatgacaatggcttggaagcatgtgtaaacaatagttcttcctaactgcaactaaggttgagaaaaatatt

SEQ ID NO: 815334 - DNA, 352 bp, Homo sapiens
caaacaataggcactttctaaattattttcagaaacatgttgaaaatatgagcaaggtaagtttcctcctttaccaaataatacaaaagcaatattcaatgcccccaytgttatcttaaaacaggaatggcaatttttttatgtaaagattcagacagtaaatatttcaggctttacaggccatgtggtctgtcacaactacttaactctgcccttgtagcataaaagcatccatagacaatacatgaatgaacatgattatgttgcattaaaactttatttatggacactgaaaattggatttcatgtagtttttacaactcacaaaatattattctttttttggattttt

SEQ ID NO: 815335 - DNA, 477 bp, Homo sapiens
tttccaaaagaagaatcccactcaggcataggaacaccccaaaaactaaacaaaactgacaaaaaaattgaacactgcctagagcaaaagtgccaaataggttttaccttcggagtcaattccaatcagcgttagtaatggctgcctagggcactataccaagaaagattttgaggatatttttagagaggatttcatagtattggaagggaaggggagcagcattagtgtcttgtatttgccatcctagtctagaaaaaagataaacaaagggccattttatttattaaaaagatatttccaccattttttaaggtagataggattaaggatggttttctagatctaaactagagtggtatttttcataagtagaaagaaaatggcttacrgggaatgctgtgacaattttcccacccctcctcaagctgattctgcaatcagtctctatcccatcaagtctctaaaaaaactcaa

SEQ ID NO: 815336 - DNA, 716 bp, Homo sapiens
tgtcaatttaggtgattctaaagctttagctttttaaaagctaaaataataaaagacaattgtgcttatattgtttctaatgacaattttcccaggtggttttctacacagttttytgtaaagaccaagacagtagttgaaaaccaaaaataaattctttttcttcaatccatgctttattacggttacagtagaggaggtggttaaaagtacaggctctgagctcagctgcctaaagttatattccagttctcttctctttaataagagaatatttttctaaaatatgtggacaatggcctgactttattgtgtagtttgatttgtaaacaataaatattcttacagaggacaagagactgtgctaatatctatagacaaaggtggtagtggtgattgagaaagtcacatatataaataaatatactatacaacactgatcctactctacaggaacttagaagcttttggtaattttatccccatcacaaaccattgagaatccaacatgctatagattgtactatgagttaagaaataaactcttcgggttgaactattgaggtttgggggttgtctgctatagcaattgtagatatttaccttcactaataaagttggattctgaaatttccagtaggactaagaatatgaggtttgaaactgctgtaaattccagttttgttggaggatcccaaggaatcctgcctccaggg

SEQ ID NO: 815337 - DNA, 566 bp, Homo sapiens
taattttaacttgaaaagttgtgggactgggcgcaakggctcatacctgtaagcccaacactttgggaggcctaggtgggcagattgcttgagcctaggagttggagaacagactgggcaacatgatgaaattctgcctctacaaaaaatacaaaaattagccaggcatggtggcgtgtgcctatagtcccagctacgtgggaggctgaggtgggaggattgcttgtacccaggacattgaggctgcagtgagtcatgatcccaccactgtactccagcctgggtaacagaacaagaccctgtctcaaaaaaaaaaaaaaaaaaaaaaatattttggcatttccctctttactctggtttgaaatgcccatatggctctgatatggcctccactatacagacaaggtcaatgctttaggaaatgacagcataaacaaaacaatatgtatatgccaaagcttcctctgaatcatgtataggacaaaaaaacaaagatttaagggattaggaatactggagtagatttagactgggaacctatacacccacccttgaattatattccc

SEQ ID NO: 815338 - DNA, 589 bp, Homo sapiens
tcacttccctgctgggctatggcttggcactggctgggatcctttacctaaggcacagccatcacctggtcctgctaactgcttcccccaatccctgacccttcctgctgtcattgtctttcgggtgcttcattatccctcatggatttcctttcccctgcccacatttttgcaattgtctcttcagcaaatgttctccaataattccttttgagcatgccatttgtttcctgatagaacccagacaaatagagtagtacctttagaaatggcctcaggaaacagactcttaaaatagtattgggatggtattgtgtggtaggcagaataatggccttcaaaagatgcctgtgtcctaatccctggagcctgtgaatagattatgtcacatgacaaaggggaattaagtttgcagatagcattaaggttgctaatcagctgacctaaatatagagattatcttggttaaccaggttttgattacccaatgcaatcaaaagrgtccttaaaagtggaagaggcaggcaggagagtcagtgtcagagtgacgtgatgtaggaaagactgaacagccattactgactttgaa

SEQ ID NO: 815339 - DNA, 493 bp, Homo sapiens
gtgaggcatatgtcccaaagctgaccctagagcagccgcccttctcagggagatgaagatctgtgcctcctggtctcagcttgactctgagtttatcctgtagccttaagcaagctgtcaaacctctgtgtatacctccgcttcctctattgaaaaataacagttctggattttgttaatagtcctggaggagagttattaacatgaggtgtgatacacagaaataaatattaattaaagctgacaatgatgatggttttgcaaacataaaagtgctgtaggaaaaatcttgtctgattctactgaatgatttccataaagctaggctgggctcccagataatattatggaaggattacacaaaaygactgacattttcaatttattcttttagctcatactgctttatatttaggcagctgtctaaggagacaccatcaaaatgccattagtcaccatggggaaaaagtgttcataagtgaaggcatgccat

SEQ ID NO: 815340 - DNA, 493 bp, Homo sapiens
gtgaggcatatgtcccaaagctgaccctagagcagccgcccttctcagggagatgaagatctgtgcctcctggtctcagcttgactctgagtttatcctgtagccttaagcaagctgtcaaacctctgtgtatacctccgcttcctctattgaaaaataacagttctggattttgttaatagtcctggaggagagttattaacatgaggtgtgatacacagaaataaatattaattaaagctgacaatgatgatggttttgcaaacataaaagtgctgtaggaaaaatcttgtctgattctactgaatgatttccataaagctaggctgggctcccagataatattatggaaggattacacaaaacgactgayattttcaatttattcttttagctcatactgctttatatttaggcagctgtctaaggagacaccatcaaaatgccattagtcaccatggggaaaaagtgttcataagtgaaggcatgccat

SEQ ID NO: 815341 - DNA, 400 bp, Homo sapiens
acattcacaatcccctatttataaaggataattgagtcccatgcatggtgagactgtgactcattagaactccttaattaaagaggaaagcctccctggtgattttatttccttgggtttgtttttggttgttattgctaagtatgagaaagacagcaatgccctgcttggagagaggatcattcttctgagcaggacacgaagctggaaaatgaattcactaatgaattcagagcacagccagggctgaattgcaactccttgctatcccactagcaatcgtcccwaagcacaattaccctgaatcattacactggatggcaactcaggctgagtgagatggttggaaaggaaagtgtgatttaatgacagaaagggcacagcgtacatgtggccacac

SEQ ID NO: 815342 - DNA, 572 bp, Homo sapiens
aaacaaacaaaaaacaacagcaacrttaaaccagttagttggagacaaaatgcatggctgtttccactgtcacttatttatttgggcatttattttggcccaaagatacccagattttctgtcttttagataatgaagtactttgggttttctccactcatgcagtacaaggtttacataaccaaatacaatggagatgtatttagttattgagacaaattggattccttagttagttacctagctagttagttagctagctagccagctagtctgtcattttgagtgtttgactgtatgtgtctgtatctgcacacattatagctgccaagcactttatcatttataaaaaacagttttaaaatgcagtaccttgtttgcatagtggctaaaatcatgggccttggagtcatatcaataaatatgcttggattcaaatagtggctccaccatatatttaccaagtgaccttaaattctgtaagcctcagtgtcctccttgtaaaataagggtaatagccatttcacaggtttgcaatgggagtagatgaggtattccattaaaatagctta

SEQ ID NO: 815343 - DNA, 624 bp, Homo sapiens
gtcctcatgttgcatcagtgatctaatagcttattgastaggaatggacttgacagatgggggaacacccatgcctgctaaatgacataatggctccctaatgcaacgatctgccataagttagatttccagagtcatacttaggagtaaagacaaaaagagttttgttttgtttttgttttagaataacctacttgttattgcctcattttgcatagtactggagcatgcattttctgctcaaagtctgcctgatcctatccttaagtctcctagttttaacagcacgatgtacaatgtcactatgacctcaggaagtggggagaaagagtggtgaacattttataatctggcttgctttaaagtcacttctaggtaggaatctgaatttttggtgttgtcaaacacctgtctctgtctgaagaaccatctctatcactcaagacatttcagatgtcattttctcagtaattctctctctctttgaagttttatacctcgttactgtgcacaatcataagacactaagttttactgtgtgttacagctttttacattcttactttcttcctctctaccagaatataaacccacagacagaagacaaccacctttcattaatct

SEQ ID NO: 815344 - DNA, 597 bp, Homo sapiens
taattaaatacaaaaaaaaaatctgggtttggtttgcattttaatcctgcccacttgaaactggytggcatcattcaaaacaacacatgcagggccattccctgaactgtcaggcatctcattaggcgttgcttcctggctccctgaaagcataagaggcgatgacttctcctgtaatgtggttagccatggcatattatgaaacacttgctgctcaggcagaaatactataggtccatgaagctcaaggactccctgtccccacataactcaaagaacctccagcttggcctgaaatcacttccacatgatccctattgcaaatgccctaggtcactacagtcagtgacacttcctggagtacttcttttcatcaataccatttgtattactattcccatcagaaaatctgtaatgtgggctaaaattctctttccttcttcccaataagaagatggattccatttgtatatagtaagttgcccaaggataccaatttatttaggggcaggaaccagggtctgaacatgctttgcattcatatacatatttgctcaatgttgtacgttgaaagttaggattatcagctataaaata

SEQ ID NO: 815345 - DNA, 597 bp, Homo sapiens
taattaaatacaaaaaaaaaatctgggtttggtttgcattttaatcctgcccacttgaaactggctggcatcattcaaaacaacacatgcagggccattccctgaactgtcaggcatctcattaggcgttgcttcctggctccctgaaagcataagaggcgatgacttctcctgtaatgtggttagccatggcatattatgaaacacttgctgctcaggcagaaatactataggtccatgaagctcaaggactccctgtccccacataactcaaagaacctccagcttggcctgaaatcacttccacatgatccctattgcaaatgccctaggtcactacagtcagtgacacttcctggagtacttcttttcatcaataccatttgtattactattcccatcagaaaatctgtaatgtgggctaaaattctctttccttcttcccaataagaagatggattccatttgtatatagtaagttgcccaaggataccwatttatttaggggcaggaaccagggtctgaacatgctttgcattcatatacatatttgctcaatgttgtacgttgaaagttaggattatcagctataaaata

SEQ ID NO: 815346 - DNA, 599 bp, Homo sapiens
gatgccatggtgagagataactggttaagggcaatattcccgaaacccctggccagatactattttaataccatcaaaatctyggccagctttcacatctggtgtgtcagcacataagagctggtgttatgtatcatccccttaggcacatctgctcttccttttctgattctccttctctctccttctcgagatttcctcttctttcttttctcctccttaattctcatcttgcttccctttcctctcttttgtcacatttctcttttcagcttctccactctctccattatcactcattcaggaaccactcgagctgcaggaggaactgagcagaatgatcctgtgtaggccctgtccccagggaacatctatgcaggtaaaacctggggaaaggaagtaccaggagcagctctgagcaaaaaagcccagagagtccccaccaggacagcatccacaggtaggagatatgcagaaagaaggacatggggtaatctgaaaggatgacaaaaggcagggagagagggaagttgcatgttgcctcatgtttcttaagagtcaaatggtggagagcagtggtgaagagcatctgttcaggt

SEQ ID NO: 815347 - DNA, 486 bp, Homo sapiens
gtggggggagtggccaacaccaagacaggctagtgtgctctacccatgcaggaataagaaaaggcaggccagggtaagaaggcaaggcagatgagtgtggcagctggtgaagaaacagaggaagagggcagagggcaagaagaaacgaactgccaccaggaggagccagactttgggaagaaagacatgtaaagatgatttttaggaaatctagctatatattttaagactagtgccctttttggtcttggctgactcctcaagaaactttcagtaaagacctccttagccttccaaggcttcctggagttagacttgatttcactgtgttgaactgtccacaaggcagttggttttatttggactacgcaggtaattgatttgttggcaggaagctgaaatcttgcatggtaagaggtgaggctgtttgcaaaaagkgaccaaggaggtggtttggtcaaggatttgaggagagtagaaatcttc

SEQ ID NO: 815348 - DNA, 544 bp, Homo sapiens
agcatgtaatatgtcatcccaagtcaacccgtaattgaagtactggcttaatacatcacaatgtgacattttccttaataaatagaagagttcttgaaaatacaaaggtgcgtattgggatagagagctgtttttatttatatcatcatagctttcagctaattatccttcccgcttgtctctactgagggtttttgtccaaaccagagggccttacaagccttaaaaggatcattctctgtaaagaaaactaaatagctgccctgtattttatacatgtgggacaacctgctttgtttcactagtttctaataaaacaaagacaaatgtttagttgcgatcagagtactgcaaaagcatcagactccaggagcttgctaaaatctcaggccattgctatcatctcagcawagaggaatgcctgtcacacaaaccctcattgttcaaaagcaaaacatgaaaaaggagttggatttctcttttcctttcttcttcccttttctttccccctttaaactaagatagcagtaatgcatctggacgt

SEQ ID NO: 815349 - DNA, 652 bp, Homo sapiens
aactgcgtgatttaaatatcatttgccattttcgagtgcaagagatactcaggggcccaggataaggaagagctgaaggtgagatatgaacccagaacttgtagcctctgagttccctgcagagtctgttcatggtactgtgtagtgtaagctaagcactcccatccataggttacttggttctcctggactcttcctctgtttggctcctgcattagttcattctcacgctgctatgaagaaacaccatagaataggtaatttataaaggaaagacgtttaattgactcacagttccacatggctgggaaggcctcaggagacttacaatcatatcagaaggcacctcttcacaggacttcaggagagagtatgagtgccagcaggaaaaatgccagatgcatataaaaccatcagatcttgtgagaactcactcactatcaggagaacaacatgggggaaacttcccccacgattcaattatctctcaccaggtccctcccaggacctgtgaggattatggtgagtacaactgaagacgagatttggctggggacacagccaaaccatatcagcwccattgatgaggtcaatttgtgaaagtgacaatggcaaaaaacaaagtccctaaaataaacttagtatctatgct

SEQ ID NO: 815350 - DNA, 635 bp, Homo sapiens
taacatacacaacaatttttttttcaaaaatgaaagcaaaacaaagccattttcatataaagaaaagctttgttagactttgttatcaggacatacccaatatatccagagcataagraaacctaaaggatgtacttcagactaaacagaaataatacaagatggtaacaagggtacacaaaaaataatgatgaacactatgaatgatgaatacattagaaaatataaagaagacttttttatttatttattgaaagagaattgtgtaaagcaaaaatagaaacactgtatttttacatattaacatgtagaggtaaaatatataataatagcacaagtgatgtgattggaaggatggaattatagtgttttcagggtactatagtatacataaagtgttacagtattcaaagtacattgtgacaacttatgtgtgataacttgtacactagagtgaccgcttaacattataaagactatagttaaaaggcatatagataaaatcagctctcagaattatttatttaactgtaaagaaagaaggaagaaaagaacaagaatccttaggacaaataaaaaataaataggaagatggtggcattaaagacaaatgcattatattaaatgttaagaaa

SEQ ID NO: 815351 - DNA, 585 bp, Homo sapiens
aattattaaaagtatgaggagtattgaaaaatattgggagaggtgttatgggctgaatatttatgtctcccaaaaagtcaaaagttgaaayctgtattagtccattttcatgtttctgataaagacatacccaagactgggcaatttacaaaaaaaaaaaaaaaaaagatttattggacttatagttccacatggctggggaggcctcacaatcatggtggagggcaaggaggagaaagtcatgtcttacatggatggcggcagagaaaaagagagcttgtgcagggaaactccagtttttaaaaaccatcagatctcgtgaaacccattcactatcacgagaacagcatgggaaagacctgcccccatgattcactcatctcccactgggtcccttcccacaacacgtgggaattatgggagttacaaaatgagatttgggtagggacacagagtcagccaaaccatataaaaacctaattttcatgatggcactatttggaagtggcacctctaagaaaataagtaaagttaaatgaggtcataaggatgagggtctcatccaataggattagtgaccttaga

SEQ ID NO: 815352 - DNA, 527 bp, Homo sapiens
tgtgcaaagagagaaaaaaaagtaacttcatagtgaagaaacctagcaaacaccttcagtcaggtgatcaaggttaatatccagyggtaagtcatactgacagcatgtacctttgatacgaaaaatggcagtttacctctgtgtgaacccataaccttagtctaacggtgtgaaaacctcaggacaatcccagccaaggagcattctacaaaatacctgacagcattcctcaaatttgtcaaggtcatcaaaaacaaggaaaatctgataaactgttagagccgagagactcctaaggagacgcaacaactaaatgaactgtagtgttgtggaagtaatcttgcaacaggaaaatgacatgaggtaaatacaaagaacatctgagtaaagtacaaactttcattaaatataatgtgtcaatattggcttattaattgcaacaaatgcaccttactaatgttaagctattattattagaggaacgtggtgtgtgtgtgtgtgtgtgtgtgtgtagggggttaatagga

SEQ ID NO: 815353 - DNA, 527 bp, Homo sapiens
tgtgcaaagagagaaaaaaaagtaacttcatagtgaagaaacctagcaaacaccttcagtcaggtgatcaaggttaatatccagtggtaagtcataytgacagcatgtacctttgatacgaaaaatggcagtttacctctgtgtgaacccataaccttagtctaacggtgtgaaaacctcaggacaatcccagccaaggagcattctacaaaatacctgacagcattcctcaaatttgtcaaggtcatcaaaaacaaggaaaatctgataaactgttagagccgagagactcctaaggagacgcaacaactaaatgaactgtagtgttgtggaagtaatcttgcaacaggaaaatgacatgaggtaaatacaaagaacatctgagtaaagtacaaactttcattaaatataatgtgtcaatattggcttattaattgcaacaaatgcaccttactaatgttaagctattattattagaggaacgtggtgtgtgtgtgtgtgtgtgtgtgtgtagggggttaatagga

SEQ ID NO: 815354 - DNA, 527 bp, Homo sapiens
tgtgcaaagagagaaaaaaaagtaacttcatagtgaagaaacctagcaaacaccttcagtcaggtgatcaaggttaatatccagtggtaagtcatactgacagcatstacctttgatacgaaaaatggcagtttacctctgtgtgaacccataaccttagtctaacggtgtgaaaacctcaggacaatcccagccaaggagcattctacaaaatacctgacagcattcctcaaatttgtcaaggtcatcaaaaacaaggaaaatctgataaactgttagagccgagagactcctaaggagacgcaacaactaaatgaactgtagtgttgtggaagtaatcttgcaacaggaaaatgacatgaggtaaatacaaagaacatctgagtaaagtacaaactttcattaaatataatgtgtcaatattggcttattaattgcaacaaatgcaccttactaatgttaagctattattattagaggaacgtggtgtgtgtgtgtgtgtgtgtgtgtgtagggggttaatagga

SEQ ID NO: 815355 - DNA, 509 bp, Homo sapiens
ttttactcttatagttcatagatttttgttttgatttttatcatttcttttttgtttactttggatttaatttactcttctttttgcactttcttgrtgattatggtatctcccctggtaagcatctttttttttcattttctttaggcagaagctgaagtaattgatttgagatgtgtatctttttctaatctaagcatttggcaatatatttttcccaaagtactacttcagtgccataccacaaatttttattttcatttagttcaaaatattttctaatttcccttttgagttcctctttgataatcagataattattaaaatttgataatgtgttaattgctattatgtaaacaaacagagtaatgggatagaatctcatagggaattgtctttgctttagatgcggccataagagaaggcctgttggaggagatgatatttaatctatgaccagaagggtgaagggaaatcagccaggtaaagagctgatacaagagcatttt

SEQ ID NO: 815356 - DNA, 614 bp, Homo sapiens
gaggcaggatcatgaagctcaaaaaaaaaaaaaaaattaaggggctctgtgggaaacaaggacatttcaagtgaggtctggtgagtgtaatgtcatcagtttaatttctaattatattcattggtggatggttcccctatggatgggaaaaatcacctaccaatgggatatttctcctaattgttatggattgttggcgttgggcaaccatcacagactgacctgtatggtggtaaagctggaactggaattttctttgaatcatttagaagtgtgtttacctacacatcacagaaatcacagaaatctttttttttttttttttgagatggagtttcactcttgttgcccaggctggagtgcaatggcccgatcttggctcactgcaacctctgcctcccaggtacaagtgattctcctgtctcagcctcccaagtagctcagattacaggcatgtgccaccaagcccggctaatttttttgtatttagtagagacagggtttcactmtgttagtcaggctggtcgagaacttctgacctcaggtgatccacccacctcagcctcccaaagtgctgggattacaggtgtgcaccactgcgcccagcctcattt

SEQ ID NO: 815357 - DNA, 614 bp, Homo sapiens
gaggcaggatcatgaagctcaaaaaaaaaaaaaaaattaaggggctctgtgggaaacaaggacatttcaagtgaggtctggtgagtgtaatgtcatcagtttaatttctaattatattcattggtggatggttcccctatggatgggaaaaatcacctaccaatgggatatttctcctaattgttatggattgttggcgttgggcaaccatcacagactgacctgtatggtggtaaagctggaactggaattttctttgaatcatttagaagtgtgtttacctacacatcacagaaatcacagaaatctttttttttttttttttgagatggagtttcactcttgttgcccaggctggagtgcaatggcccgatcttggctcactgcaacctctgcctcccaggtacaagtgattctcctgtctcagcctcccaagtagctcagattacaggcatgtgccaccaagcccggctaatttttttgtatttagtagagacagggtttcactatgttagtcaggctggtcgagaacttctgacctcaggtgatccacccacctcagcctcccaaagtgctgggattacaggygtgcaccactgcgcccagcctcattt

SEQ ID NO: 815358 - DNA, 479 bp, Homo sapiens
aagtacatcttttgtgagcagtgtggacagcattgaggtagatcttctttttttaaatccattttgtcaatctctggcttttattgcagtgattagttattcaaatttaatgtaattattagaatggctagagttaggtttgccatttactatttgttttttatttatttttattccctgttttggggtgggatatacagattttcatattctagttttatttcctctattgactttttagctatacttctttgcattttttttggtggttgtcctagggattacaatatgcattgttaactttcataatctacctagagttcatagtctattgcttaacataaaatacagttaccttgaagcagtatagatctatttatcccttcattcttcatgttattttatctgytatattaactccatgtgtttcataaatcttacatacagtttcataattttatatataacaagtcattttt

SEQ ID NO: 815359 - DNA, 624 bp, Homo sapiens
tctcagcctccagagtagctgggattacatgtcactcccggcagtaattrtaatttgttattcttagttggagttttcccagaagcaaattctgagacaatgacttgggtacaggtaggttatttgggaaatgattccaggaagccaacatgagggaggagacagagaaatagagatgagaaagggaggaaagtctaaaaagtaggttaatgacctcattaccactgtaggccgctgggggcccctgaggatataggaagctgagatatttatcaactacattttctcctttgttgagaatttccctggaacactgactcttctggatgtagatgatcaagcatttgaatgccatatcaaactcttaggctgagaggcagaactctgtcagcgtgccagggttatagatgagacaaagagatagggtcaaggcatcaggagcatctactatcctgagaaattaaagttggtggctccttgactataaggttctgtttcttttctttgtttcctacttggctctttgtctctatcactccgaacgccaattacatctggatccagaagtgtccaactgggcagtttccagaagtgtccaagtgggcagtttccccctgcgtcttc

SEQ ID NO: 815360 - DNA, 624 bp, Homo sapiens
tctcagcctccagagtagctgggattacatgtcactcccggcagtaattataatttgttattcttagttggagttttcccagaagcaaattctgagacaatgacttgggtacaggtaggttatttgggaaatgattccaggaagccaacatgagggaggagacagagaaatagagatgagaaagggaggaaagtctaaaaagtaggttaatgacctcattaccactgtaggccgctgggggcccctgaggatataggaagctgagatatttatcaactacattttctcctttgttgagaatttccctggaacactgactcttctggatgtagatgatcaagcatttgaatgccatatcaaactcttaggctgagaggcagaactctgtcagcgtgccagggttatagatgagacaaagagatagggtcaaggcatcaggagcatctactatcctgagaaattaaagttggtggctccttgactataaggttctgtttcttttctttgtttcctacttggctcttkgtctctatcactccgaacgccaattacatctggatccagaagtgtccaactgggcagtttccagaagtgtccaagtgggcagtttccccctgcgtcttc

SEQ ID NO: 815361 - DNA, 444 bp, Homo sapiens
ctctgtcacccaggctgaagtgcagtgggcaatctcggctcactgtaagctccgtctccygggttcatgccattctcctgcctcagcctcccaagtagctgggactacaggtgcccgccaccacacccggctaattttttttatttttagtagagatggggtttcaccacgttagccaggatggtctcaatctcctgaccttgtgatcctcccgcctcagccttccaaagtgctgggattacaggcgtgaaccactgtgcccagccgggcatgtgttttttgtttccgtggggggtgatgaaagcattctggaattagatagtggtgatgcttgcacactctatcagcatacaaaaaactactgaattatatactataaacaggttttaaggttagttttaaactggttaatgttagagaaaaaaatgatgcactgtataaaag

SEQ ID NO: 815362 - DNA, 444 bp, Homo sapiens
ctctgtcacccaggctgaagtgcagtgggcaatctcggctcactgtaagctccgtctcccgggttcatgccattctcctgcctcagcctcccragtagctgggactacaggtgcccgccaccacacccggctaattttttttatttttagtagagatggggtttcaccacgttagccaggatggtctcaatctcctgaccttgtgatcctcccgcctcagccttccaaagtgctgggattacaggcgtgaaccactgtgcccagccgggcatgtgttttttgtttccgtggggggtgatgaaagcattctggaattagatagtggtgatgcttgcacactctatcagcatacaaaaaactactgaattatatactataaacaggttttaaggttagttttaaactggttaatgttagagaaaaaaatgatgcactgtataaaag

SEQ ID NO: 815363 - DNA, 557 bp, Homo sapiens
ccagactgggcgacaagagtgaaactccatctcaaaaaaaaaaaaaaattgtctattcatgtcctttgcccactttttgatgttattatttgttttttccttgctgattggtttragtaccttatatattctaggtattagtcctttgttgactgcatagtttttgagtattttcttctactctgtgggttgtctgttaactctgctgattatttattttgctgtgagtttaattagtcccatgtatttaacttcatttttgttgcatttgtttttgggttcttgatcatgaactctttgcctaagccaatgtccagaggagtttttccaatgttgtcttctagaatttttacagtttcaggccttaaatttaagtctttgatccatcttgaattgatttttgtataaggtgagagaggaggatccagtttcattcttgtatatgtggtttgccaattatcccagcaccacttgctgaatagggtgtcctttcccccactttgtttttgtttgctttgtcgaagatcagttggctgtaaatatttggctttatttct

SEQ ID NO: 815364 - DNA, 616 bp, Homo sapiens
aaactcatgtgctcatacacacacagatacacatacagacacgcaaagcatttgcctaaattaacattttaaaattaacagaattaacccaaggattaggtttgaagattccatccattaattttacatagccttaatctaagcaaaatgtatcaatctaagcagagtcctacaatgtatgcataaaactgccatatctgggtaacttaagggaaaattctattgttggtttccctgtatacaattaaaccatttgaaaagtagttgtttcacacacacattctttttacttatatatttttattttcctaaaggctatgttgagattaggcagagcatcctaatgtgtggtctatggctacgccagcactaaaatcacttttgacttttaaccttttcaagttttgctgaattcaatatttcaatcaaaccctgagaaaatcagggttccacaaatgccagcccttcctctagaattatactggaaaataaacttttaaatatgtttaaactgttttaaaatttgtatataccaaccaatatattartatgcaacttcataaacactttgaacatgtataaatggctgtttcaatttttcatctcagcttaatat

SEQ ID NO: 815365 - DNA, 499 bp, Homo sapiens
taagtaaagtgccaagtaaatcaacattragttaatcaaaagggagattatcctaggtaaacctgacctaaccaggtgatcccataaaagggactggacccttctggaagaaagagctttgaacccacagagattctcctgacagccttaggaaagcaaatagtcatgttatggagaggaccagatggcaggtaaattcttttcacaaccatttctggcagtatccttcctgtccgtgggtttaatgcattctcatcaacacacatgatgtatccatcagggcccaggcaagagacagaaaccacatcagttatttgaacagggaaaatttaatacaaagatgccttaactagataagtagttgataactagaaaaatcaaagaataaaaagagatctctaaagtataatgagaatagtacctgcaagaggcagctatcactccaaaagccagggaacaaaaggaagagattggaagtattaaaacctacaagggatcc

SEQ ID NO: 815366 - DNA, 683 bp, Homo sapiens
agaaagattcttctgccttgggatcctgttgatctgtgaccttgcccccaactctgtgctctctgaaacatgtgctgtgtccactcagggttaaatggattaagggcggtgcaagatgtgctttgttaaacagatgcttgaaggcagcatgctcgttaagagtcatcaccactccctaatctcaagtacccagggacacaaaagctgcggaaggccgcagggtcctctgcctaggaaaaccagagacctttgttcacttgttaatctgctgaccttccctccactattgtcatatgaccctgccaaatccccctctgtgagaaacacccaagaatgatcaataaaaaaaaaaaaaaaaagaaatgatcaaactcttccagagaggctgtaccttcttacagtcacaccagtgatttttcccattttctaattggaattattattgagttttagaatttatttatatattctatattctcatccttcatttgttacgtaattttcaaatattttcctccagtcagtatcttgcatattcctaacaggacatttagcagagcaaaagttgtgaatcaatratgttttaatttgtcaaattttccttttacagaatatgctcttggtgtcaaggatgagaactctttgcctgattctagatccaagtgattttctcagatattttt

SEQ ID NO: 815367 - DNA, 581 bp, Homo sapiens
ccgtaggacatgggataagaggctgctgcggtggcggcgcctgcagctacggagcgctgcatacacgaggtgttgctaggcgcggccaatggctccggcaccgacacggacgcgggcgctgagcctggcgagatggaggccgggctccagatagatgaggcagctggtgtactcagcgacgacgcggccgccaccgggttcccacctagtcccgcagccgctgcagccgctgggttggcggaagagctggacgccgagctagaggacgaggcagagctggacacagctggcggcgtgaattggccactgctttcggagcccgagctctcccgcactggagaggacttcttcttggctgggcggctcttggttccgctcccgctctgctgctgctggcggcatttggcgcggcggttcttgaaccagacctgcagtgggccggatgggggagagtgggtcaaagggagctaggggagcttgttgctccaccgccccgyggacccaactcccggtccagaatatcgcaatcctttctcaccgaggcctccgccccttcctgtctctggcctggccagaccctg

SEQ ID NO: 815368 - DNA, 592 bp, Homo sapiens
tctttatatattttagaaactaatcctttgtcagtgttacaaataactcctcccaagttgttgcttatctttttcctgtctttgtggttgacgaaaaaaatttttgactatattaaagacaagaatgcaccattatacctttatggtatgcttttatatcttgtttaagatgtccttccttatttccaatctcatacagataatctccttttattaaagtttttacctttcacatttgtctttaatccattggggtttgggatgtgtgtgtgtgtgtgtgtgtgtgtgtgttggctcctgtgtccttttaaccctattagtctttggcagcagcttaacttttatggcatgagatgtcccagactcatcttgtaaattccttgtaaattccctgtcttacacctagaatctactatttctccatttcttctgttttctctgggttaatcttggcttttagacttttttagtggacagaaaagaaaatactttttttttttttctcagccaggagtagtggttcacacctgtaatcccagcactttgggtrgtgggtggatcacgtgaggccagaaattcaagaccagcctgg

SEQ ID NO: 815369 - DNA, 513 bp, Homo sapiens
gtgactgtgagtgctcgggaggtgtccaaatgtacaaactggttttttgtatggttttgagtggagttcccagctttcctattataagagttaggtaggcatttggcaggagtagaggggttagggggaaaatgtgctatggaaatgcccaagggctgaggtcagtgagaccattctccagtgacagcctcttgggaggctgaggctccaaccctttacctcttcagggttgattcactaataacccagcactataaggggaaagggactctgtcctccaaaaagctgaagtcaagtccaaaaggccccattggcacacaggccctaagaagttaatgtttttagggagaccaagtttttagtgataatgtggtgaaacaattgatgcagcacaatacagcagatgagaaacaatggagcacatagtgtcaaaataccagcctcagraagacgcatctatggcctagcaaccaaaattttcttgaggttattctgcccctaactctggtttct

SEQ ID NO: 815370 - DNA, 513 bp, Homo sapiens
gtgactgtgagtgctcgggaggtgtccaaatgtacaaactggttttttgtatggttttgagtggagttcccagctttcctattataagagttaggtaggcatttggcaggagtagaggggttagggggaaaatgtgctatggaaatgcccaagggctgaggtcagtgagaccattctccagtgacagcctcttgggaggctgaggctccaaccctttacctcttcagggttgattcactaataacccagcactataaggggaaagggactctgtcctccaaaaagctgaagtcaagtccaaaaggccccattggcacacaggccctaagaagttaatgtttttagggagaccaagtttttagtgataatgtggtgaaacaattgatgcagcacaatacagcagatgagaaacaatggagcacatagtgtcaaaataccagcctcagaaagackcatctatggcctagcaaccaaaattttcttgaggttattctgcccctaactctggtttct

SEQ ID NO: 815371 - DNA, 668 bp, Homo sapiens
taagcaattatagcaagattgcaggatacaaagctaatatacaaaggtcaattgctttcctatataccagcaatgaacaagtgcaatttgaaataaaaaacacgataccatttacataagcaccaaaaaactgaaatacttaggtataaatctaacaaaatatttagaagatctatatgaggaaaactataaataaattggaagatattccatattcatagataggaagacttaatattatcaagacatcagtttttccaacttgatctataaattcaatgccatcccaatcaaaatcccaacaagttattttgtaaacatgaacaaaccaattctaatgtttatatgcagaggcaaaagactcagaatagccaatacaatattgaaggggcataaagttagaggactgacactactcaacttaaagacttactgtaacactacaataatcaagacagtgtggtactggtgaaggacaaataggtcaatggaatagaatagagagcacagaaacggagccactaaatacagtcacctaatctttgacaaaggagcaaaggcaatacattgtaaaaaaaaaaaaaaaaaaaaaaaaawatatatatatatatatatatatagcctttccaataaatgatgttggaacaatggacacccacatgcaaaag

SEQ ID NO: 815372 - DNA, 636 bp, Homo sapiens
gaaatcagtgggattcaatgaagcatgaaatttaaacacagaagcattcactaacagacattagcagctaataaggcatcattatcactaatgtaataaataactaaccttgagagcttgccaacattttacatattactttttggattcttacagcttcaagaaataaatgttgtgatagtctttttacggaagaggaaaccaggtcttacttactttatccaagatcactggatcctggttttctgaactctatggctgtaccctgcaggccaaagaagctgtgttaaaatctagcaaatgattagaattgactgggaaaacaggaacccaactctaattaaggaatttgctaattacccttctctctgcagacattactccattcttggtcttcagccctggcatggatttggcctctatcacactttttgcaaaacagaaatggcagacagaatattgtttccaagttacatttggccacagaacaaatcccttctgtcctttctagagctacatccccagcccttggagagcagagctgcctactgctccccagaaaccayattaagcctagctccccacccaggctttccgaggcatgagcttcccaaggctctgggtcccactagcttg

SEQ ID NO: 815373 - DNA, 629 bp, Homo sapiens
tcctcaataagcatgttcctgaatttgtattatgacctgcagttgaaaggctaaacagtatrcattcaactagtaattcacatatagatttccatttggctgaagaaagttttgttttcctgggtctgttcttaattaataattcgattcaagtttaattaacattgtctagtgattgtttttgcttccttagcattcttcaaactattagctttgaaatttgaagtagctatctcaagtggataaagaacagtcttttttcttaaagacaatttcttcagtaggaaagattgtaattcagttatttgcaattggtatcaattggtggagcagagactaggggttgcggcagaggccatgatagtaggagctgcacccgtcccctgagacccctgctgcccacgtgcctgctgggtaaacacaggttggaccgactcacaaccaaaatcttgatccagtgtgtggacgtaaaaatcttcctggcatatttttgaaacctgattgcaaaggagatttttttttttttggaaagcctgagtatctaagaggcatgaaaataacgcatcattttagagagattctatgtgacaagagaaataaataatgtcatgacttcaactttttttaaa

SEQ ID NO: 815374 - DNA, 527 bp, Homo sapiens
gtccatggatttgacttgtagcttagttttcaggctttgaactatcttaggcttgaaggtcaggtttcaccagggagttgctcctgtctgccttggatttgtctacctcctgtcactatcagtacaggagaggccaaaaggcccaacacaggccttgaggtccccaagcaattccagagattcctggggaaagggtatgattctctgtgaataaaaatggcaaggatcctctgtcctacaggcagcagagtaaatgaaagtctgcaatttgttttctacacagattgccaaattgaatgcttattaaattcaagcatttagacattgacctgtatacatcaccacaaaactatgttctggacctggaagtacaaaagaagcactgaccatttttccacaattttatagctgagtcaggtttagagaaggtgctcaaatgttttcaattagctaaataaatattggttaagatgagctaaaaaygacaggccgtaatgcaattatgggaactcagaataggatggtgt

SEQ ID NO: 815375 - DNA, 589 bp, Homo sapiens
acttttcttctgtagtaggaaacaagatgtgagcagagtatcagctaagaaactcaagaagcattaaattttagagttgaaaagcaatagacagacaggtttccacttattagggtctctaaggcctcatgttctggctcctggaatgtcagctcctctcattcagtgccactaactggcttggttcctctggtcagaagggtctgttgttagtggccatgtagcatgagcaacgtcaagtcatgtggaaactgtgaatatgtggcagtggccaagggagaatataggtaggttgttaactcaaagtccagacttgggcaaatctttcttccactgatagcactacttccacaaacctggccaagagcatgctcatttaggccagttaattttgctggttttaaaggcgacagtattattatccctcctgtattgcttagggtgcagactaagctgctgtatcaaacagactccaayggattaaccatgatagaagtttatttctctgtaacacaacaattagaggcccaggacttggtagggtgccactgccaccctcaacatgtatcttccatgtctggattcaaag

SEQ ID NO: 815376 - DNA, 576 bp, Homo sapiens
catttccaactgaggtgcctggctcatctcattgggactggttacacagtgggtgcagcccatggagggagagcagaagcagggtgagatgtcgcctcaccygggaagtgcaagggctcagggaactccctccccttgccaagggaagccttgacggactgtgccatgaggaacggtgcatttggcccagatactacacttttcccatggtctttgtagtccgcagaccaggagattcccgcaggtgcctgggtttcaagcacaaagctgggcggctgtttggatagacaacaagctagctgcaggagtattttttgtgccccagtggcacctggaatgccagtgagacagagtcattcactcccctggaaagggggctggtgccaggggcctgagtggtcttgcttagtggatcccagcaagctaagatccactggcttgaaattctcgctgccagcacagcagtcggaagttgacctgggatgctcgagcttggttgggggaggggcatccgccattactgaggcttgagtaggcagttttcccctcacagtgtaaacaaagccgccaggaagt

SEQ ID NO: 815377 - DNA, 576 bp, Homo sapiens
catttccaactgaggtgcctggctcatctcattgggactggttacacagtgggtgcagcccatggagggagagcagaagcagggtgagatgtcgcctcacccgggaagtgcaagggmtcagggaactccctccccttgccaagggaagccttgacggactgtgccatgaggaacggtgcatttggcccagatactacacttttcccatggtctttgtagtccgcagaccaggagattcccgcaggtgcctgggtttcaagcacaaagctgggcggctgtttggatagacaacaagctagctgcaggagtattttttgtgccccagtggcacctggaatgccagtgagacagagtcattcactcccctggaaagggggctggtgccaggggcctgagtggtcttgcttagtggatcccagcaagctaagatccactggcttgaaattctcgctgccagcacagcagtcggaagttgacctgggatgctcgagcttggttgggggaggggcatccgccattactgaggcttgagtaggcagttttcccctcacagtgtaaacaaagccgccaggaagt

SEQ ID NO: 815378 - DNA, 531 bp, Homo sapiens
aatatttgtctttgggagtgtttttatttttggaaccaaccaaatgctctttagagccctggtgaaggtgggtgatctggcaggacgatggcacatttggtcaaaaagacgaagatgtgactctagtgcttctcagaagaggctacaccctgcaggtggagggaggatgcataggaagatgtgcaatattatacctttatatttgaaaaaaatgcctcttggaaacttaaaataacattaaaaggaggcataagaattttaggtatgtgaaaagggaactatcgtttttaaatgtttgagaaactgctttaagataacaaaggaaatattcctgtgtagtcagaaaaagagctatggacacaagtttctgcaagggctcaagtacattgcagcagcaggtggtggtgaagctgccccactctgaagcctggtatcagacgcacagggtcaggcaagcaggaaataccaggactgcccaygtcccctcacacaaggtctcagcaggcctcagtcccactgggaattttaatg

SEQ ID NO: 815379 - DNA, 551 bp, Homo sapiens
ttttttttacttatatgtataagtattttgtattgctatgtattctatataattatacacattattttttgttgagttagctttcaaaatccttataaaactgtaggcaattcataaacamaataggcaaattgaaaaattctcttgggttgatatttagtcatttacttaactattgattattataagcatttaagtgttcccagtgtatatttttataggtaacgcttcagtgaatatcttaggaagtctttaattcagtaacctggagatacattgtattagaagaaatgtgttaaatttcatatttataaaagagccaatagatttttgttgtgaaaagatttattttaaataatatgaacatccaggcccagtggcttacacctgtaatcccagcactttgggaggctgaggtgggctgatcactggagtccaggagttcaagaccagcctgggcaacatagtgggaccccatctcttaaaaaaaatacaaaaattatttagacgttgtagtgctggcctgctgtcccagctactccggaggctga

SEQ ID NO: 815380 - DNA, 365 bp, Homo sapiens
cctcagaggaaggtgaggcatagataatatatacaacttagtttaacacatgtatattgaaaacgtactatgtatcagagactgtgcacagacttatttcatcatggattttttttgtattttaatctattgacctggcttacttgaattaaggtagacaacaataaaaatgatctcacaggtgaattaactgctgaaaattacctaattttcatttatgtacttttttttttatgagacaggctcttgctctgtcacccaggctggagtgcactggggtggtcatagctcactgctgtctcaaactcctgggctcaagcattcctatcacctcagcctcstaaggtgctgggattacaggtgtg

SEQ ID NO: 815381 - DNA, 630 bp, Homo sapiens
gacttgatgcttctccctttgtaactggaatatacagaagtaggtaaatgtatggggagtggggcaaatagctgagagaatttgtgttggaccactcctattttcttgctgacgtcgtgctatttgctgagatttgggcagggtatgtgactggtaacgatcaggggttaaaagggacaatacccaaaagaccaagatcatctttggttttcccaagtctacttaaattctgctcaatgagagctaagcaaaagtttaaggaatttggttcctaggtactatctatggagcattaaaagtaaaactctggaataattggcagtttgatttttatgctctctataacctgaaaaataaaaagcaatttgtttttgtgttgcgtatcttgagacattaagtaaggttattttgaagctttttaagcttaagtactgtttgaaacacccaatttacttgcatttttgtatgagaggtttttctagttaagtttatgaaatatttgctttacaayacctaccaaccattttcaaatagaaaatacaaattacatgacaaatgggaggagggagaatgacattaatttaactgtctgcatgtccgaattctccactttctatgaaaaattggagt

SEQ ID NO: 815382 - DNA, 468 bp, Homo sapiens
cagcaggacaggcatttgctaactggtaattatagaattgctacagggctgggttaggawactgtaatgaagttactgcctgacttttatttgaagtctgctacacattgaaaaatgttacagcgagtagtacaaagagctgtgtcagcctggaaattggaaacaaggcttttcattagagtcctggtgtgaccaggaggcatcttgattggtaccttttaaaaacagtacttttgtccacaacctaaaataccattttctttatttttccaatgtcattaaagtaggtcaatctaagtgacagtaggatcgtgaagcacttctgcactgtcttccactatgggataactgaagagtcatcactgggccatgttttgataggcatgaatgtctcatggcagcatgtctggtgcatggctccatcgtggccagcacctttagcatgatggcctgctttagttatcctga

SEQ ID NO: 815383 - DNA, 512 bp, Homo sapiens
tgatggcctgctttagttatcctgagaatccacacagcccttgtgaattctttttcctcacttgctactgtttagtacaacacaggtatgaaacatgataaggccaaatatataagtacagaagaggaatagagtagaaaagccaagaaagtaggttataagtctataaagaaatgcaacttccaccaacacttgtgtgaccttgttaaaactgaaagaagactttgggcactaaccaaagatgttaaatagccatagaacaaattggccacatttcagtggagatggaaaaggagaacttcagagaccaatccctccaaagcacaatattctgtaattaggatacgtgaaaaaaagacattctgaagttacagagctactctttgttatgtctgttaatgtctccaggatgaccatgagggttagaagcactttgaaggtatcaarcccatttttatttcttggcgcttgttacctatctgctatgcttatctctactttagcttaataga

SEQ ID NO: 815384 - DNA, 608 bp, Homo sapiens
tattttctcttgctgcttttagaatcttctttctgcctttgatctttgacagtttgattataacatgtcttgattataatatgtagtcatatttggattaaatctggctggagawctttgactttcctgtacctggatatttaaatctttctctaggtttaaaaatgttctgctactttttctttaaaatagctttctacttatgtttctcttttctctcttaaactccagtggtttgaagtttgctcttttgatgctgtcctataaatcctgtaagctttctttattcttttttattcagttttcttttttctcctctgactatatattttcaaataagctatcattgagacacagattccttcttctgcctgattaattctgctgttgatgctttctattgcatttttcattttgtttattgtatctttagctctagggtttctgtttgattttttaaaaattactttcaactactctaatacatctttcattctggtcccttattgttttccttatttcattgatttttttcctctgtattttcctgaagtttgctgagctttcttaaaatagttattttaaaatctttatcatgcagttcatgc

SEQ ID NO: 815385 - DNA, 577 bp, Homo sapiens
ccaaccctgattccatatcaaaatcatgtgtgcacacaataattatacttggatttatgtgattatctgactatctcccccactggattggagcytccaccagggcaaggtggatcgaattcattctaggaagtgtcagcatctgccaacatggtgcctgaccaacaaacccctcctggattctggccatcatggttagggaaccaccagagttagcatcctttcgcaatgtttcaattgcatgagagccacactggagaccatttctagtgcatctctagttggggtggaaatgcccagaagggatccttttgggctaagcagaggtttggtgaaatgagtgtcatctaatctggatgttcagagccaacagttgttcttcttttggcaccattctaaattgggtagacaacccccttggtgggaagaattttgcacaaaatatgtttgtggggaaggaggagagacatagactccctgggtactgttacttacatcagaggaaacaagaaagtacagatcaaagagcagagttggcattttactacttatccttaaaggactagaagtcaagtga

SEQ ID NO: 815386 - DNA, 601 bp, Homo sapiens
aaataatctgctactttataataattcgacttcacattttataaccttttattgtgttaaaggatgagaccaccactgaataacataaacaaaaatcacaaagctgaatgtattgcttacttaagtaagtgagtgttcccggtccagtacattctcttctagctgatcatatgtagggtttttgagatggttggagctcaagggttggtggactttctgaggcaagtgagagtcgacatccactgtagatgtgtggttactaaggtgagactgttgctgactggttggcgtgtagaagggtgttcactggtgtgagtctttatcaggcagctttcagaggtgaagaactgtcactggttgactggcaggagttcattgtggcaaactttgttcatttttttttttactgaaatatttttcatttattcatttatgatgtggcctgcaatctaactgctctacagttgtaaaaaattattgaaaacygaagtattaaaattatttcacagactccttccttaggatgcacaaagcatttgtttgagaaaatgtattatgcattttatatgttgctgtaatattattattatcattaagcaaa

SEQ ID NO: 815387 - DNA, 601 bp, Homo sapiens
aaataatctgctactttataataattcgacttcacattttataaccttttattgtgttaaaggatgagaccaccactgaataacataaacaaaaatcacaaagctgaatgtattgcttacttaagtaagtgagtgttcccggtccagtacattctcttctagctgatcatatgtagggtttttgagatggttggagctcaagggttggtggactttctgaggcaagtgagagtcgacatccactgtagatgtgtggttactaaggtgagactgttgctgactggttggcgtgtagaagggtgttcactggtgtgagtctttatcaggcagctttcagaggtgaagaactgtcactggttgactggcaggagttcattgtggcaaactttgttcatttttttttttactgaaatatttttcatttattcatttatgatgtggcctgcaatctaactgctctacagttgtaaaaaattattgaaaactgaagtattaaaattatttcacagactccttccttaggatgcacaaagcatttgtttgagaaaatgtrttatgcattttatatgttgctgtaatattattattatcattaagcaaa

SEQ ID NO: 815388 - DNA, 512 bp, Homo sapiens
atgacttctgcagtattcttgcccaaaatgcataacccaaatacaatcatgagtaaataaccagacagccacaaacwaagcaacattttatagaattgctggctctgtgctcataaaaagtctcaatgccataaagaggaagaaagactgataaactcttccaaattaaacgagactaagagacatgatcagtgaagttaacacatgatctgggatgtcttttgctataaaggacattattaaaacaacggacacagtctgaattgatctgtagtactgttgcagtgttaactgactgattttgataattgtcctggagttgtcaaaaagaatgtccttgtgtactaattagctaggactgtcactacaaaatactactgactaggtggtttaaacaacacaaatttattttctcacagttctggagggagcagtagggttggtgcctggtgagggatctcttcttggcttgcagacaactacctcctcgctgtgtcctcccattgtttttc

SEQ ID NO: 815389 - DNA, 624 bp, Homo sapiens
atttatttttatctgtctagtcatacctgaatagggactctcttgacagccaaatttcattctgtttcacagttttccaagagaaaagcaacagcagcaacacagtggacacaatcagggtggtggccccacatcgattcagccaagtgcagagcttgctcagtccatgcacaaaaaggatgcagtagcccatgctggaaaacagggtggaaggaacgggattactttgggggtgcaatagcttccccccagaattatctcctacaaaactaactttcaaatgaagcttgtcctgtgctagagaaacaaatagaaactcccctgccttggacaatattaacatgttagttctctaaagtgctgcactagcaggtttgctatttcttgtagaaatatttcttgctatttcttcagtgtagggaatgagagagtcatcttgtaggcttaaagtgccctggatttcagcagctgaggcatcatgagaagtcccacatataagctcttgggtcctgaatggctcctctgacccaagctccctcatgtcactgtcattgtatgastctattggcactatgcgcctaaattcggagtttatgctgcagcaggtcacaccacagctttgta

SEQ ID NO: 815390 - DNA, 592 bp, Homo sapiens
taatatatttatagctttaattgtttttccccatgtctcaagggacatatttcttccagaagcacagttgctgaagcaaacatttatttgtattgtttcacagcaaagaaacggaagtacccaaccagctactataattctgtaaaatcaactgccagagaattttgtttaatttatacctttgctccaagttatgcctgagggtctgccttacttttctttttgaacttgacagaaaatagtctgttataataaaaccaattaaaaagatactgatacatttcctaccaaccatgtaagtttcaggcaaacttactgccctttttctcccttcaagaatgccatctaaaattgataaatagtaattaattattaaagcccaagtatactttatatgtacccttgaaggaatatgccttttaaaaaatgacatttcctcattgcaaaaggaatagatgttcattgtggaacacctggaacacacaaaaaattayaaaggaaaaaatcaatctataatcttacccaccagagataagcattatgaacattttggaaactgtcttccaatgaaagaatagaattcttgattaaa

SEQ ID NO: 815391 - DNA, 589 bp, Homo sapiens
ggtttgagaagcaaatccaggaaaactcagaattcaaggtacctgttaggaatgaggccaaggcactgaaaagaaaaggcctgtctgaaagtctacataaggaaagtctatctcagaccctaggcccacccccatgctacactgtcaggaactctccatcttccaccccaccacaagatacaagggttttctccctagcaacatttccccagagaaactacagtcatgaagcacagggaagtgtgggggtgaggttctgcagaataaacagataatgccttcagatctttcccttccctgaaggtggaggtgaggggaagggaagtaagaaaatgtccaggactttaactgtgcaggcaaatgtattcataagctttgtaagaagctgttgaaaggtataggaagacttcatcatataatcctagaaaaacagatgaagagttgaagtcactataataatattacctccaggaagaagaaaaagttgtataacaggaaaaataatccckccttggcttagtgggaaaaaattaacatagtcataacgatggaaagactgaatactgtagttgagcagaaagtgaggact

SEQ ID NO: 815392 - DNA, 636 bp, Homo sapiens
gaggcattagcagcccgaggtaacatgaaaaactagtgtgtgtgtgtctgtctgtctgtgtcatatggaagtctctgaggtataggatactagctagggagggtccgtgtcttgaaattcatgaaaggaattcctagagcagctgaacacagcaagcctcactttttatgaaaagtacatggttctgctgataactatttatcctgcaaagtagtaagttatgttttctggaagcataggagctgaaaagtattgccagaacactgatattttacaaggcctgtatgtttaaacagttcatgaaggtcatgggaaacaaaaggcaaagagaatgggtctgtttgaaaataaaataactgtataccaagcttgtttggggtactaatacattattaaggtagaactaacacatttaaattattatcctatcattgtaaataagattttagatcctatttgtattgcgaacaatttcctaaaatccattacttggccaaatcaaacacgttttggtgaaaatatgataggtgagttttgaataataaagttggtggctgtatctctgcctttcttgcaacttgaatgcactaattgaggactcaaggtttttgttayaatggatgctgttgacatagc

SEQ ID NO: 815393 - DNA, 453 bp, Homo sapiens
tgtaggctctttagagggtctttacaactcaacatccaaggtcataaattcactaataccacagcaaggactagtgtatggaaaataataaccattatctcttagatgagttgagtcttttacaacagaaagcacttttccatttattatattatatgagccttatagcaatcctttgaagcaggtattattatagactttgtaaggatgataaaattgaacctgggacattaaatgacttgcccaaggttatacatgggaatagtaaatgggggagccaagctccgtatcctagtcttgtgaatattttgctttccagtacaatacagctgcttcagagaaaaacaccttatctatccttgaatgagctrtctgagatatcttataaatgatggtaacaaattcctctaaggcagtttcctgttttccaagcatgatactgcataattggcc

SEQ ID NO: 815394 - DNA, 624 bp, Homo sapiens
gggaggggcgtctgccattactgaggcttgaataggtaaacaaaccagctgagaagcttgaactggacagaacccaccgcagctcaacaaggcctactgcctctagactccacctctgtgggaagggcatagctgaacaaaaggcagcagacaacttctgcagacttaaacgtcctgtctgtcagctctgaagagagcagtggttctcccagcatggtgtttgagctctgagaacagacagactgcttcctcaagttggtccctgacccccgtgaagcctaactgggagacaccccccagtagggactgaaagataccccatgtaggcgagtgcctctctgggacgaagcttccagaggaaggatcaggtagcaatatttgctgttctgcagcctctgctggtgatacccaggcaaacagggtctggagtggaactccagcaaactccaacagacctgcagctgagggacctgactgtgagaaggaaaactaacaaacagataggagtrgcatcaacattaaccaaaaggtcatctacaccaaaactgcatctgtaggtcaccaatgtcaaagatgacaggtagataaaaccacaaagatggggagaaaccagagcagaaacgc

SEQ ID NO: 815395 - DNA, 562 bp, Homo sapiens
taatcttagaggtcatatggcctcaattcattacatgggccccaggcaagacaagcctaccatgtgcctagaatcctggaacatttataatatttgatgaccagcacaactttagatataaagacctttaatttgttttatcacatttaaaactttacatttgtgagaaaaaaatacactgcttaacatcacaggttgatttttaaaaagcaacttctagatgaatatgaatttgtttgatttttcttctccttccatatcagcatgtgaagccctgactctctgagcctctaaatcttaaacactcaccctgacctccatgcgtcccatcaccaagggaatccttccttcctctccctgctgtccttgccctggccttcatctcttcgtgtctggaatatagcactagcttgctgactcttctgtctcccctccttcattctgctcctacacattgcagccttgaataatcccattaaaatatccttagggtttcagtgttgmaccagaggttgcataataaaatattaagcctatagcttatcacccaaggcctgttata

SEQ ID NO: 815396 - DNA, 592 bp, Homo sapiens
accagaacccaacctcttgtgggaccggttgacctccccatgcctgccaccaaccctgctgccacctctgcygctaccaccaccatggtctccgtggtgacctcatcaccccctggcacctggggctgccttgcttgcctaaagccaagtaggtggagccccttggtgccttcaacccccacccaacgccttaaccagagcaaaccccgtttatctgctttgtgcatcaagaccctgtctgcaaagaggggtctgctgcttaaaagcagagggctgagatccacggctacaggcccaggagagcccctgggattgttctgagcagggggcacccaggactgcctggagtgggggaggctcccactgaccgacttgcagggcagtggagggaagggaccaaagaccgtaggcatagtgtagaccagacaggatcctggggctcccaaaggacaggtggaaaaccagggggcccctcccacatctccagccccactcctgcctctccctgtgggcatggctccccatgctaccctctgcctgcagtgcactgggttagagccaggatggtgtctggccccagggaggtgcggag

SEQ ID NO: 815397 - DNA, 596 bp, Homo sapiens
aatttgaggctctaacttggcctcaaatcaggattttttttaagaaaaagtccccacaaggccaggtgcggtggctcacgcctgtaatcccagcactttgggaggccaaggtgggcagatcacgagatcaggagatcgagaccatcctggctaacacggtgaaaccccgtctctactaaaaaaatacaaaaaattagccgggcatggtggcgggcgcctgtaggtcccagctactcaggaggctgaggcaggagaatggcgtgaacccgggaggcggagcttgcagtgagccgaggagatcatgccactgcactgcagcctgggcaacggcaagactctgtctcaaaaaaaaaaaaaaagaaaaagtccccacaaatacatgtggttgatgtttctgagtccccctactgcacttacttttttatccccagaagtgggcactttgacagggcccctggccactgggtggggacttacaggcagagagacagtaaccaaggccaggtgcagtggctcatgcctgtaatgccagcrctttgagaggctgaggcaggcagatgacttgaggtcaggagttcgggaccagtctggccaag

SEQ ID NO: 815398 - DNA, 543 bp, Homo sapiens
tgttgctttaaaattttattataagaggacacttgaaagtattctcattttattggaacatttattacgtttaagatatttctatattctttgctacagcagtaaatgtgagagccacatttctttgcagcttcacactgcacacacactgcacacactgtgcacattagagagccacagagacgttcctcctgagccagactccaaccacttccagagttttcttgggaacggcacatagatctgtaggcatctgagtcttagctcctcctgtgactctctccctctggccccatgcatctcctcctgtcccaccttagttaatggttcacttgtctactcagttgctcaaggaaaaaacgccagcggagcccttctcggctcttcctcccttgtctagtcacctggcggattctgctgaaytatgccttcagtctctcttctctgcctgtcttctctccatccccactcccactcccaatgccactgccactcccactgcctcagttcaggccatccctgtttgtggtagacacctgcatc

SEQ ID NO: 815399 - DNA, 651 bp, Homo sapiens
ccagtatcatggtgtctgggttactatagctccatagtataatttcaagtcaggaaatgtgattccttcagttttgcttttgtgcttagcatagctgtggctattctgagtcctttttcattccataaagttttggaattttttttctatttctgtgaagaatgtcatattttgatagggactgcactgaatctgtagattgctttgggtggtatggacattttagcaatgtttattcttccaatccatgaacatgaaatatctttccatttcttgtgtcctcttcaatttatttcattagtgttttatagtttttattgtagagatcttttacttctttggtcacgttacttgttagatatttaatctcatgtggctattgtaaataagattactttttaattctttttcatattgtttactgttggcatatagaaatgctactgatctttctatgttaattttatatttttcaacattgctaaatttatcagttcaaatagtttttttttggagtctttaggttttttcaaatataagatttcatagtctgcaaacaaggataatttgacttcttccatttcaatttggatactctttcwttctttctttctcttgccttattgctttagctgggacttccagtactat

SEQ ID NO: 815400 - DNA, 523 bp, Homo sapiens
tttggttataacctttacgattttttttttttttttgacagagactcgctctgtcgcccaggctggagtgcagtggcgtgatctcggctcactgcaacctctgcctccygagttcaagcgattctcctgccttagcctctcgagtagctgggactacaggcacgtgccaccatgcccagctaatttctgtatttttagtagagacgggtttccccatgttggccgggatggtcttgatctcttgacctcatgatccacctgcctcaacatcccaaagtgctgagattacaggcgtgagccaccgtgcctactcaacctttacaatttttttaaatgagaccacagcactgctcaaactacttttccttaaaaagaaaagtaccttcatgtgtgctacacaatggcttataaatactaatttttcagcctgtctggaaggaacaagcactattctctgccctgtatgaacactgaacactctcacctcttatgcttttaagtgctttacagtggttctttcctt

SEQ ID NO: 815401 - DNA, 640 bp, Homo sapiens
cgcatccctggacctcaaggatcctgcagcctagtggatgtaccatgggaataaaytccctaggatttaccctctgccttaggctgcctcgggccctgctgctctgtgatgtttgcattcacacaaaagacccctctcactcaaaaaaaaaaaaaaaaaaacaagccctccctggagaaagcccagctatttattgagtgccacctgccacatgggttagtccagccccagatttttcctttatggccaaccccatttcaaccacagctgatatcccatctgacccttcagaactgttgagaaatgaggggcaataaatctccgtccactggcccagcctggctccctgccaccgccactgcctctgcctccacacttcagaagaaagactttacaggagccgcagatgatgctgaacttcaattaggccctgctggcaaattagtcacgcagggtgacattttccaatcatagaacattagcatcccccctaattatgaaattgtggagctaacatgtttgggagaaaataagaccagtgttctcagcatcacaagtgtgtgtttgcacacacacatgcacacacacacatgcacacacatgcgtgcacacacatgcacacacacatatgcacacacac

SEQ ID NO: 815402 - DNA, 626 bp, Homo sapiens
attccttccagtaaaatatggatgataattcttacctttcrggattcatatggaaattcatgatataatgaaagtaaagtatcgagcatataataggtgttcgattcatgtaactttatcctcccgtgacactgtcttcataggggagcccccatatctcagcacctgacccccaaattccctctcttcagcatacatttactgagttgtgcctactgtgtctcaaacactttcaggtgctagggatacaaaggtgaaaagacaggccttattcaggaccttaaattaagtgaagagcttaaactcaggtgggggagataggaaaaaaatgttttttaattaaattttaaaatgtgaaagtttctatgaaggaaacaagaggccagaatctggggagaaaaaaaaatgaatctgtttatgtaggcagtcaggaaagtctctctgagaaagtgccatttttgctgacccccaagggacagaaaagagttctatcactgtagccccctctgatatctggcatgagggtcatctgaaccagtgatcctgatgttgctactgaaagacacaggtcataccccagactctgtctcccctaggatggctgtagccaatgtcccctgatggca

SEQ ID NO: 815403 - DNA, 545 bp, Homo sapiens
tggagcccaggaggagcacttcgcaactacaggccccccagggagatgctgtgttcaccatctcctacagtcacctccaggtagctccattctgtccctgggagaagaggagtactgcgtaggctccagcctgcacaatctggagtggccaccacttaccccttctgcaaggaagaaccttgctggtcagcatcacaccagcctgcagccctcctcctgctcccaggctgaggatcagagaagtgatgggacaagggcacagccacccttcagggatcaaccaggtggtgccaaacttgccctgagtcttgctgcagtgggagaaagagagaaatccatagtcatagtaaggacaatatacaagcaatcatgatgattcttccacctgcacagagctttatatttagcaaggycccttcctttctgttgtccccatccatggcccggggtggagacattaggaaggcaggaagaaccccctgctccatccttcatctgggggatcaccccctctggcagaaggaaataggcagcacagagcctgg

SEQ ID NO: 815404 - DNA, 658 bp, Homo sapiens
cacactgtattccttcagatactttatgaaggtcatatgctttttatgacctaccctacataaagcagggaaacaasagattttaatacttcccgtgctaaagccctgcatctggccgggaagacaagtgtgctctactgggaaagacggcaaggtacaatttcgggaaacccacagctaagcttttcacctaaacacacttaatgaaatgcagcttttttctgagtgatactgcttaaatatacacacataacccttttcatctctacatgtaacaaaactgtaccaaaaccagccaatgaatcaccatcccagatctctacagctggtgggcgtaaacaccactgctcaggcagagaaatgaagtaaggtttcctgggttctatccaaaagcatcccgtgagtcacggcaggtgagaggagaacacctgtgagtcaagggtccctcttctgagaatgggttttgagagaaaggcctaagccacaccttggataaactatggctttaagtaaaataaaagtggattctgatctggagttttaaaaaaataggaagacatctctaaagtgtgtgtgggggggtaggtatttagtcctttcaccctagttttaaaaactgtaataactacattaaccaaaaaatgaaagtaaaacattt

SEQ ID NO: 815405 - DNA, 615 bp, Homo sapiens
gtggctggtgatgcgatcgaggaggcaagcagggctgcatcrtaggaccctagggtatggtgagcagttcattctcggaccacttccagtcagacagtggaaagagaagctgggaaaccagttagaaggtgactggtaggccagggatgaggtgatagggcttgggcaagaatggtagcagtggggagagagaaaggtggatggacttgtgctgaaaagtgcaaactcagcactcagggacaactcagtattctcatctcttttgcagacctctctctgggactcactgagcatgggcagcttccctgtagccacctgtttcatccaccacatggcattctctgagattaagtgagggagaaagcacagcatgattaagagagataaaaggattataacaagaaagttataatcccagattatcaggtcttagaatcaggtattttagggaatcttgtatattccccaagtagtaaaaacaacagctttgatttataaggtgaggctcctttccaggaggtccagagcagaagatactgttgctaggcttggatctatttttacaattggttttaggtattgaccaatatcctgccaacaaaggtggttctaggt

SEQ ID NO: 815406 - DNA, 629 bp, Homo sapiens
ggaatatttttccatttgtctgtgtcatctctgaatcaatctttgagcaatgttttctagttctccttgcagagatctttcacctccctgttagctgtattcctaggtattttattctttttgtgacaattgtgaatgagattgtgttcctgatttggctttcagcttgactgttgctggtgtataggaatgctagtgacttttgtacattgattttgtatcctgagatttcactgaagttgtttatcagcttaagtagcttttgagctgagactatggagttttctagatacagaattatgtcagctggaaataaaaatagtttgacttcttttcctttttggatgccatttatttctttctcttgactgattgctctggccaggactttcaaaactgtgttgaataggagtggtgagagagggcatccttgtcttgtgccagttttcaatggaacatttccagcttttgcccatgcagtatgatgttagatgtgggtttgtcatagayggttctttttattttcaggtatgttccttcatacgtagtttattgagagtttttaacataaatgggtgctgaattttataaaaagcttttcagcatctattgaggtgatcatgtggctt

SEQ ID NO: 815407 - DNA, 565 bp, Homo sapiens
aatgattaagtgaataaattaatgaacaaataaaatgggattatgttctacccactgattaaatgttggagtttgtaaagcttcagctactacctatgtgctaacgacttccaattacaagtctccagcccaggtctcttttctgcactcaggcatatgtatgcagcctctgaatagactcttctcactgacacttcaaactcaacctatctgaatctgatctcattaacctcacttccagatctgcttttctttcaaattctttcacgatctacacagtcaccaaagccaaacatttgagtgtcattctaggctccttcctatgtggcaccaagtcttactgctttatcattatgttttgtttcattttgagacagggtctcacactgtcatctagattggagtacagtggtatgtactgcagcctccaccttgtgggctcaagcaatcctcctacctcaggctcctgagtagctgagactacaggcatgagccaccacaacgagttaattttttaatttttattttggaaggaygagatctcactattttgctcaggctggtc

SEQ ID NO: 815408 - DNA, 584 bp, Homo sapiens
tgaaatgtactagaatggattaaggaaagaagaaatttgcaatagggattcttgtcttttatcttccatatgaatgacatcctaaatatatatgatgctgacctacatttctatrgttgaaggctattttctgagtgaaatcagctacaatgaaatgtgcagtaacagacatacaaaaaggaataggcaacagaactcaaattgaagaattaaatgggcaagaggtgaacagaataaagtgcagaacctcatatttggtaggctttaagaaagatttttacctcttaaggacagaaaaactactcctttaagagttttgccaagtctgcaaaacaagattctggctttgttcagcttcttcctctcctctatcttctgagaagagaagacatgttaaaagaaagcaatgctttggcatcagtaatggagaattgtcagagaaccaacagaaagaagcaatgcctgcaaggtggtaggaagaagaaaaagacttcacaggagagggtgggcagaggaaagtaaaaacagcccaagctggaggcagaggaaatggctcaggggagaagctaggagtgagaatagct

SEQ ID NO: 815409 - DNA, 605 bp, Homo sapiens
cattcctggctccatgttaactgcggctgtctaaaagaccttgagatgttcaagagaccagtgtaaataagttattttggttagcacaagctcaggggcctgccactttcctctcgctggtgctgtatttggtagagccatagatagaaccagccacaaacttgattcgggcataagcaggagacacacacatcagcataaagggtgctccaaaaaaggccctcttgcttggagacacaggaaccagactccccaaatgtctctcacttacacagcaatcctcctcagacttaggaggctctgtcaaacattttcaaaattacagggaacctggaaagaaaatacaataaagagatcagagacctaaagtgccagaccaaagagaagaaccagaaaaagcaagacgtgttcattgtaaatattttgaaactgtattcttatctcagttcagtgctgtgtactgccttttctctggtaattgtaaatatttaatgtgttayagctccatctccttactgatacgggaaacatgaataaatccacatggacaggatgtgtgttttccacttgcagactgcctgagagagtgagcatcaggaggggct

SEQ ID NO: 815410 - DNA, 550 bp, Homo sapiens
aggctagccctttccatgggggaacaagtccttctggggcccctgggcattaaatgttttaacctccactagccctgctgggggaggaggctgcaaatgggctggagccgtcgcagagccaaaaggaccacatccaggagaggaaaaatcattttaggaggaagataatggaaaaattcctatttctatcttgtattttgaaaaactgcttgattatagtttagtcaataaaatgatacaagaaaaaagaaaagatttatttaaaaatatagctgtctgatcctcatgttctaggaaatattgtttgtcacaatgcaaggatcaggcacctgtacctgttggccaggtttttgtcggtttctccttctggtgaagtggcatccccagtcaggacaatcgtgggagttggactgcaagatactcctgcggyaggaggaccctgccggtttagaacaaaaacacagagttaggcttgggctggtgggacttccagggacaggagccagagcatttattctcacatcatgatgctcagagccatcttgataag

SEQ ID NO: 815411 - DNA, 512 bp, Homo sapiens
tgtggtgaaagctgtgggtctttacccaagagaaacataaaccacgtagtggcttacatgcaatttcagttggctcacagacccctgaaggttatccgtgaaccctgggtttcaaaaaccctggctgaaacggaggccgcatgataaagaggacagagctttaagggacagaccacctgaattcacatctcagtgctgtcacttatttactggctgtggaacatcaagcaagttgttttacttcttccagcctcagtttccttttgaaggaaaggcgtagacacttgtgaggatagagtgcttttatgtaaatcatctaatctaatgctaggaatatagtaggtactcaatatgatatatgattttgaactctctctctctctctctcacacacasacacacacacacacacacacacacacagccagccctaagttccatttcaacttctgattttgattgtccctgtagtgcctgctgctggactcacaagatcaacctttgaagcgaca

SEQ ID NO: 815412 - DNA, 607 bp, Homo sapiens
cttttaatcaatatttgctcacagtttattgtgtttggattaatggagacgattttgtctgtttctgaattctattttccatcatgtagatttttgtgtgaaataaatgaaaaagttaacctacacaagacattcatttcttctgtaatttaaatttttatttaatttgtataagatgcttaagaaagaataattagaataacagtgagatacaagaatatggagaagccagcaaggagaaaataaaggagaacccagataaacaaaggacctttatacaaatagaatgcagaaggttctgaaatgttgtataagacttgtgagtccttttgaatcttaaaagaaaggttttttgcatcttagtatgagcagtcactctgccactctaagtatgaaaagagaaatggtcaatagggtttctaatacaaatacttaaacactcttgccaaaggcagtagaggttttatattagttcattctcacactgctatcaagmtactacctgagactgggtaagttatatataattatatatacatatatacatatacacacacacacatacacacacatacatatatatacatatatacatattgtatgtata

SEQ ID NO: 815413 - DNA, 612 bp, Homo sapiens
gaaaatactagcagactgaattcgacaacacatttaaatgatcgtataacatcattaaatgggatttatyactgagatgcaagaatggttcaatacagtaaatgtgacacactacactagcagaataaagaacaacaaaaaacctatatgatcatcccagtcgatgcagaaaaggcattcaaaaaaattcaacattttttcataatacatactctcaacaaattaaaagtagaaggaatgtacctttatataacaataaaagttgtacacaacaaggccacatttaacattatactcaatactgaaaagctgaacacttctaacgtacaatcaggaattaaaaaaagcattctcagtctattcagcatagtgctagaagtcctcaccaagggcaactagacaagagaaaaaatataaaagccactcaaagcataatgaaagaacttaaatttcctctgttttcagataacttgatcttttatatatgtatttaaaaaaagaaacactgggggcacaagagctcatgcctgtaatcccagtgctttgggaggccaagtatgaaagatcagtggagcccaggagttcaaggttacagtaatctataacagtgcc

SEQ ID NO: 815414 - DNA, 591 bp, Homo sapiens
ctaaagttaagatgaggaaagaatcttaagaactgtgagaaaaaagcaccaggtaacctgtaaaggaaaacctgtaggattaacgcagattttttagcagaaaccctacaagctagaaggaattggggccctatcttcagcctcttcaaaacaattatcagcctagaatgttgtatctagtgaaactaagattcgtaagtgaaggaaagatatagtctttttcagacaaatgctgagataatttgccacttccaagccaccactacaagaactgttaaaacgagctctaaatcttgaaataaatcctggaaacatatcaaaacagaacctctttaaagcataaatctcacaggacctatgaaacaaaaatacaattaaaaaaaaaaaacaaggtatacaggcaacaaatagcatgatgaatggaatggtacctcacatctcaatactatggttaaatgtaaatggtytaaatgctccacttaaaagatacagaattgcagaatggagaagacctcaccaaccatctgctgtcttcaagagactcacctaacacataagtagtcacataaacttaaggtaaaggcgtggata

SEQ ID NO: 815415 - DNA, 616 bp, Homo sapiens
ataatgttacaaagcatctatgtataaactataaactatgatacagctatatgcagcccttaatgtttaggaaccatttctagttcacatagaatgatgttcacaaagtgggatacaaacatatatatttatgtaatcccaacagtgtaaaacaatagtgtaaaaagaagtgtgctgttcagagtggttatttctacgacctgaagtatagatgacttttagtcttttctctgcactttcatgtattttctagtttcctacaatcagcatgtgttattataaacaggaaaaggtttatctaaaaatggccacagtgactcagcagtctcccctttgccctctgaaggaaacactggcttatcattaaaggacatttaaaagctcattgtggtggaagtgtcattaccaggattgtttaagaaaagaaaaacaaaaaccagggaaggcccatggggaagtagagaagagtgtcatggggtttccaaccmaagatccatatgctgtcactgcaaaatgtttagggaaagaagcgaggactgacttccaccctctccatacacaagttcctgaattctgtccatagttcaacagaaagcatggatgggccatgccagca

SEQ ID NO: 815416 - DNA, 462 bp, Homo sapiens
gtgtgacatgattcaaacccagttcttctgatcccaacacatattcttccttctgccatgttgactcctggggtagtacccactttctggatctaatcctcycagtgaattgtgcttttttgtgtcttattttcccagtgcctcctgaaattaccatgagttaattgcgaaagccggtgctcatggattaaatgactgatagagggttcatatattttccttctcaagggcatttattttcagcaagtcaaacaagcatatacttccttaatccacaaaaatgccattgaaataaatgagctttaagaagacaaactttagaaatatataatatatatattctacattttatattttcaaagatatttggatccactaaccctaatatttcttgtcagctattctgcagagagcacccaaactcagcattacttgatttctgtctgacagttaaactcatat

SEQ ID NO: 815417 - DNA, 581 bp, Homo sapiens
tagacttaaaactgtcaaattattttcacaacattcacacatagcctgttaggttatttagtatgctaaaaaacaaaaaacaggcatttaataggttaatattacataatataaatgtattttaaatatcagaaatgtgatctatacagtgtaatatcacatttctaaattacatttctagttagatgtagaaaatactaatttttattatatactgacaaattatagttgcatatatttatggaatataaagtaatgttaagattttttaatacaatgattaaatcaagctaattaacctgtccattacctagaatatttaacatttttgtaataagaacatttgaaatttattctcttaacgttactgaaatgtacagtactcaaatattagctatattcaccattctgtggaattaatctcaaaaaaagtcaaactcattcctcctatctgagcctttgtaccttttgactgacatatttcaagtgtatttgacatccactgaagaacttatgagttaatcacacagaacattctaggatccaytagaaaatctaaataaatatatggcctttggtct

SEQ ID NO: 815418 - DNA, 643 bp, Homo sapiens
gcaaaggcagatagccctaaagtcctatattgaaaagtctgaaagagcacagacagacaatctaaggtcacacctcaagaaactagagaaacaagaacaaaccaaacccaaatccagcagaagaaaggaaataaccaagaacagagcacaactaaataaaattgaaacaaaagaaatacaaaagttaaataaaacaaaaagctgattctttgaaaagataaataaaattgatagaccattagcaagattaaccaagaagagagaaaatccaaataagctctataagaaatgaaacaggagatattacaactgaaatcacagaaatgcaaaagatcattcaagactactatgaacacctatacacacataaactagaaaacctagaagagatgcataaattcctggaaagatacaaccctcctagcttaaattaagaagaattagagaccatgaagagaccaataacaagcagcaagactgacatggtaataaaaaaaagttaccaacaaaraaagtccaggaccagatggatttacagcagaattctgccagacattcaaagaagaattggtaccaatcatattgacactactccacaagatagagaaagaaggaacccttcctaaatgattcttttaagaca

SEQ ID NO: 815419 - DNA, 556 bp, Homo sapiens
ataattttcaattacaaaaacgtgtaaccaactcaaatgcccatcaatcaacgagtggataaagaaactgtggtatatatatacaatggaatactactcagccataaaaatggatgaaataacagcatttgcagcaacctggatgagattggagactattagtctaagtaaagtaattcaggaatggaaaaccaaacgttgtatgttatcactgatatgtgggagctaactaacgaggatgcaaaggcctaagaatgatacaatggactctggagacttggggagaagggtgggagggggcgagtgataaaagactacaaatagcttgcagtgtatactgcttgggtgaggggtaaaccaaaatctcacaaatcaccactaaagaacttactcatgtaaccaaacaccacctgttccccaataacctatggaaataaaaaaaamaaatactatagttatctcagggtaatacaattttggataatttttattttactgatatagttttctgaatttttaatattctgtaccataaccatgtatttacttacttttt

SEQ ID NO: 815420 - DNA, 483 bp, Homo sapiens
agggacccagaggagctgagaaagatataatttgattttgtgagtctcctaggtctctaggttagcaaagcaatctttgcttctgcagaaaaataaaagcyttaagaaattacctttatttctttttttttttttactatatccagttcagtaaaaacaaaaacagaaaacagttaaaaccatagagggattaaaaatgaaagtcccgtctccatctttctgagtgtgactgggctaaatacgtaccagagaccaacgagaggaagatcgaaaacatgaacgcaagggaaaaatctaagagtgtgctagttttagagggaaatttttttcaagaacactccattggacatattgctctccatacctatcatatgttgtaggaacatacccattgtcgatcttgtttgttgtcaccaagtaaggatgggaaactactcaagaaaatgtaagtgccttcatctgcccactaccttagtttgtaga

SEQ ID NO: 815421 - DNA, 518 bp, Homo sapiens
cccagaggtgtcttgtttgcaatggtgccaaaacctggggttacaggatccccttatttttcctrgtgttcagtgtccatgaaggcaggggagagcagtgatttgcgcttccagctaccgtggctctagtgcttcctgagatgtaggttctatggacaccacgtcctgacagttcttctcaaagaaaccagggtagtgcttcagaatcccttttcattcttttagcctcccttctctacagccaggctgttttctctgaaaaaataaggacatggatcatctgtcccactctgtcatactttttcacctggacatcatgatgcctgtgtcctgtgtctcacagagttttcgaagaaaagagccctctcagcaagcatgtagtaactcttcccaagagagctcaggcatttgttttcatggtggggaacaggatggggagataagattccagtctatcttctccatgccccattccttcagttacacctaccctctggcgctcagactcaaacatctac

SEQ ID NO: 815422 - DNA, 563 bp, Homo sapiens
cttgccttgaagtggaagtacaggtctacgrgactgtccaatgctctttccataatgcaatgatgcaggaactcaacagacagtgctatgggttggtttcacttttgactactagcaatttagcgtgattcaaagagtgattgccttttaaggtacagaagagcaagaggttgaaatagaggtctttccttcaaggtctagcataaataccacctcctctaaaagtcttcccctacctcctgagaaggaattaatttctttctcctcattactcccactagataattaatttctccctcctcattaattccaccttttctatggtgtttatcagagtcttctttataatataattagctagttctctaataaataccatatttcctcctgacagttgccatgtcctgttcactgctgtgcacttcacagtgcccagcaggatgcctggcactagcagaaattcaaaatgtaaactggatttaaataaacaaaactatctgggtctctcagggaaatttaaagaaacagatgaagaaatattatccctggggacttgactttca

SEQ ID NO: 815423 - DNA, 609 bp, Homo sapiens
ggtgatttccaagattttggtgtacccattacctaagcagtgtacttgggtacactgtacccaatgtgtagtcttttttccttcaccctctgccctcttgatgcctctscatccttgtagcttggttcccacttataaatgataacatacaatgtttggttttccattcctgagttacttcacttagaataatggtctccaaccccatccaggttactgtgaatgccattatctcattccttttatggctgagtagtattccatggtgtgtgtgtgtgtgtgtgtgtgtgtgtgtgtgtgtgtgtgtatcacattttctttatccactcgttggttgatgggcatttaggctggttcacagttttgcagttataaattgtgctgctatagacatgcatgtgcaagtgtctttttcatataatgacatcttttcctctaggaagataaccagtagtgggattgctggatcaaatgatagttctacttttagttctttaagaaatcttcatactgttttccataatgattgtactagtctacatccccaccagcagtgtaaaactgttcccttttcaccacatccatgtcaacatctggtactttttaaat

SEQ ID NO: 815424 - DNA, 558 bp, Homo sapiens
aagaaaaaaagaaaaaagttattttaatacctggatagtgtattctttccagagcagcttgccattctccaaaccagtgacttgcgttagcctccaatgcttgcaaaacattgatttaaaatgacgtttttcatgttaacacagtatcagtgtggaaggagtaaacttataggccgtttttataatttgagattatcttatttaagtaagaaacttataattatctcatttatcctaggagaaaaaatagcttccccccgccccacccttgtctggttattatgataaattattttgctttaaataagaaaaatgaacgtttatagaaaatatctaaaaggagatagggccaggcacggtggctcacgcctgtaatcccagcactttgggaggccaaggcgggcgaatcacgaggtcaggaggtcgagaccatcctggctaacatggtggaaccccgtctctactaaaaatacraaaaattagctgggcatggtggcgggtgcctgtagtcccagctactcaggaggctgaggcaggagaatggggtgtacccaggag

SEQ ID NO: 815425 - DNA, 586 bp, Homo sapiens
tctgcaaaatgaggattataatagtttctaattaatggagtcgtggggaccaaattggttaagtagagcttttaccaggccctgctacacagcaagccctagctcagcgtgaacttttattatcattattattggtttgctgctttctcccggtggccttccctgaagtttccaatcaagttataagtttccttgtatgtgctcacatctcaggcacagtaggacagcagcatcaaggccattcagcaaaggttccgatcagagctcataagatctcacttaagccttatctgaataatgtgctagaggaactttcctgttgaaaaaggaaggagcttacctcttcagagtgccactagatgattagaggcaaaatgtcacgttgatgtaaatatgagaatttagttatggaaggtgggagtgtttgcttaaaatgacagtaaagctgaatttttatgaatggctttttattatacaagacatctatgttcagtraagaaacttagaaagtatagacaatcaataatttatacaaattataatcagctgtaatcccactgcccattaaaaaaagtactatggcatt

SEQ ID NO: 815426 - DNA, 511 bp, Homo sapiens
aacctaccaagactgaaccatgagaaaatccaaaacctgagtagaccagtaacaagtaatgagattaaagctgtagttaaaaagtctccagcaaagaaaagcccagaaaacaatggcttcactgcygcattttaccaaacatttatagaagaactaataccaactctactcaaactattccaaaaaatagagaaaggaaaactttgcatgttctcactcatttgtaagagctaaaaattaaaaaaaaaaaaaaatgaactaggagatagaaactagaaggatgattaccagtgactgagaagggtaattgggggccggggagaggaaactggcgatggttaatgggtacagaaatatagttagatagaatgaatatgatctagtatttgatagcacaacagggtgattacagtcaacaataatttactgtacacttaaaaataactaaaagagtataattagaatgtttgtaatacaaagaaaggataaatgtttaaggcagtggacactc

SEQ ID NO: 815427 - DNA, 557 bp, Homo sapiens
ctcctggaaagatacaaccctcctagcttaaattaggaagaattagataccatgaacaaagcaataayaagaatcaagatgcaagatttaaatggtaatttaaaaattatcaacaaaaaatgttcgggaccagatggattcacagcagaattctaccagccattcaaagaagaattggtaccaatcttattaacactattccacaagatagagaaagagagaaccctccttaaataattctatgaagccagtatcatcctaataccaaaaccaggaaaggacataaccaaaaaagaaaactacagaccaatatccctaatgaacatagatgctaaaatccttaacaaaatactagctaactgaatccaacaacatgttaaaaggataaatcaccatgatcaagtgggtttcataccagggatgcagggatggtttaacatacacaagtcaataaatgtgataccccacataaacagaatttaaaacaaaaatcacatgatcctctcaatagatgcagaaaaagcactcaatgaaatccagcatgactttatgattac

SEQ ID NO: 815428 - DNA, 557 bp, Homo sapiens
ctcctggaaagatacaaccctcctagcttaaattaggaagaattagataccatgaacaaagcaataacaagaatcaagatgcaagatttaaatggtaatttaaaaattatcaacaaaaaatgttcgggaccagatggattcacagcagaattctaccagccattcaaagaagaattggtaccaatcttattaacactattccacaagatagagaaagagagaaccctccttaaataattctatgaagccagtatcatcctaataccaaaaccaggaaaggacataaccaaaaaagaaaactacagaccaatatccctaatgaacatagatgctaaaatccttaacaaaatactagctaactgaatccaacaacatgttaaaaggataaatcaccatgatcaagtgggtttcataccagggatgcagggatggtttaacatacacaagtcaataaatgtgataccccacataaacagaatttaaaacaaaaatcacatgatcctctcaatagatgcagaaaaagcactcratgaaatccagcatgactttatgattac

SEQ ID NO: 815429 - DNA, 557 bp, Homo sapiens
  misc_feature 556: n = A,T,C or G
ttcctagggaaaagcattgcttttttgtttccctaaatgtatttgattacaccagtatgtaactataataacagaaatcatttaagcagtataaaaktttaagtcatttccattttaaatgttgaaatatgtaactataggaaatttattctctacacttctcacattttgaagtaaggtataaaggcaaagacagttacattttggggacagataacttgaattctagtatgattgatgaatcagattacaaaaaaatctaaacatactgtagttttcatcaccatgatgaactgaaaaccaaacctacatgaaagttcaaaaacacttcataactgattttactcattctattataaaaacagttcttgattagtctaacgccagagtcactatttccacaattgtgtaagacaagcttttgggctgactaaaattaggaagctgagaaaagtctctggccaaaggctgttttccattgactttattttactgcagttttttgtacttgaaaaaccaacaaagagaaaatcctctttcatgagatttccagatnt

SEQ ID NO: 815430 - DNA, 597 bp, Homo sapiens
atctattacctcaattccagaattagtgacyaaggttgataattacagtgaaaagaggaggaaaaacaagaaaaaagaaaaagaagtatggggttcctaagtacaatatttacacccagcttggcatacaattccaaagcaaagcagagttttatcaaacaaaatttcatgaccaaaaatgtataataatcacttttcttcaaataaggtcccaaaaacagattttccaacaactaatagagttctatgtttattgatgacaatgactgaaaatcttttatcacttataatccaattattcttaagtaaatacaaaagaaaaggcagttttaatggtctgtgtaaatactccaaggaattaacaggctcttaatatatgaaaagtaagtagagcattatgtatttacgttttaataaatctcaacactcctactagagtataaactctgcacatagagactataactgtcctttcctctaatgacctaccacaacgtgatactatgatcaaggataattaataaatatgtattgcttctagaaactaagtaagtctttaaaaaaacaaaaatatttacgtaagcatagaaaaacacc

SEQ ID NO: 815431 - DNA, 590 bp, Homo sapiens
aagacttataaaactataataatcaagtgcattagtccattctcatgctgctaataaagacatacctgagactggataatttatcaaagtaagaggtttaatggacccacagttccacacggctggggaggcctcacaatcatggcagaaggcaagggaagagcaaagacacttcttacatagcaggcaagagagcttgtgcaggggaactcccatgtgtaaaaccatcagatctcatgagaattaactcactatcacgacaacagtatcggagaaaccaaccccatgattcaattattaccacttgctctctcccttgatggtggtgaggggcggattatggggattacaattcaagatgagatctgggagaggacacaaaaacctaaccgtataaacatcattagtcattaggaaaatgcaaattaaaaccacagtcgaggaacatatcaaatccgctaaaatggctaaaattaaaaagcctgrcaatatcaaatgtggtcaagaatatgtagcaactggaaccagtagtaggaatataaaatattacaacttttggagaagtgtttgccagtttttagaaaagttat

SEQ ID NO: 815432 - DNA, 472 bp, Homo sapiens
gaatgaaagaaaccaagcccacatcttggtttytaaatgtcactctccaataaaaggaaccaggattccttaagtagtagattccagggctggagtcaggagatcgagaccatcctggctaacacagtgaaaccccgcctctgttaaaaatacaaaaaattagccgggcatggttgcgggcgcctgtagtcccagctactcgggaggctgaggcaggagaatggcgtgaacccaggaggcagagcttgcagtgagctgagattgcgccactgcactccagcctgggcaacagagcaagactctgtctcaaaaaaaaaaaaaaaaaaaaaaaaagatgatcctagaatatcttttgatgctagaaagtaaggaagtgcaagaaagacagaaaagaagcaaggaaggaaggaagaaagaaagggagcatgtgaaaagggcggaagaaccaatctgaaaaaaaactttcaatggc

SEQ ID NO: 815433 - DNA, 633 bp, Homo sapiens
tccaacaatgattagtatagaaaaatttatctgatttacagtttaatgcaaataaaaataattaggaaagagctgtcaattmatcaattaatctaactaataaattttttcttttttttttttttttgagatggagtttcgctctgtcgcccaggctggagtgcagtggcgcgatctcggctcactgcatcctccacctcctgcgtttaagcaattctccgcctcagcctcccgagtagctgggattacaggcgcccaccaccatgcccggctaattttttttttgtatttttagtagagatggggtttcaccatcttggccaagctgatcttgaactcctgacctcatgatccgcccacctcggcctcccaaagtgctgggattacaggcataagccactgcgccccgcctctaataataaatatttaatgagctcttccattaaaaaacagtgataagatttatgaggtttacaagaaagagtaaggcatggtagatgatgtgaatgagcatataccctaattccttgagaaaacaaaatagaaatacactaaaaggaacatcacaagaagatgctattagttgtaaatgattaaatattttgtgacatacagtattttattcattcatat

SEQ ID NO: 815434 - DNA, 644 bp, Homo sapiens
gggcattattttccagtataaactttcctcttagtcctgtttttatctgtatcgcataagttttggcatgtcgtgtttccattttcatctgcctcaagrtattttttgagtttcttcttgatttctttgatgcatttgttattcaggattatactgtttaatttacacaaagttgtgaatttttcaattttcttcctgttattgttttctagttaattcatgctgttgtcaataaaaacaagaattgacatgatttcaatcttcttaaatttattaagacttgtttagtgatctaatatatagtctatcctggagaatattctgtgtgcccttaaaagaacatgtatggggctgctgatggatggaatgttttatatatgtctgttaggttcttgtggtgtgtagtgttgtaccagttaactgtttctctactgattgcttttgtctggatgatatctcccttatagaaggtggtttattgcagacccctactattattacactgctgtctatttcttccttcagttccgttagtatttgcttcatatattcaggtgcctgcccagagattctgggcagactgtctggaagaatctgtaggcagacttgctgctgaagtccttgggcagtgtggactagtgcct

SEQ ID NO: 815435 - DNA, 540 bp, Homo sapiens
ggctgtatcagtttcagaataagtcaatgttggagcaaagaaaactatcagggatgaagaaggacattgcatagtgataaaaagggtgatccacccagaatatttagcaattttaaattcaccatacaacaaagctttaaaatatgtgaagcaaatgcctacataactgaaaggagaagtagacaaattcccagtgataattgcgggacttcaacatatctcccctaaaagttaatagaatagctagacagaaagtcagcaaggatatagaactgaacatatcaaccaacaggatctaatcaacacttatggagcataccacccaacaataacacagatttttttccaaacacccagggaacatattagtaaaccacagccagggccattaaaaattattaaatcattgaaataattaccgagtgtgttattcaactacagtggaatccaagtaaaaatcagtsatgcacaaacacaagaaaatctccaaacaattggaaactaacacacttctaatagtccctgggtcaaatgactaga

SEQ ID NO: 815436 - DNA, 581 bp, Homo sapiens
ccatacaattccataatcccagaagacccctgggagaggggggcactgcctgccacggcttctgttgaggatgtccggctattggaraccatctctggacacctcctgttgatgacttccttgacaacgagaaccacctgatcacaagtcactgaagggtcctcttgttggtacaccaggatctcatcacagccacagtcaaagggctccagttctaggcaagggttctgacactcttccagctcacagcaaatctgtcggaaggcacaggaatttgtgtcagcactcaagcactgttgcactttgcaattgcactttgcaatttatctcgcttaatttttaaatataaaattaatctgtgttcatctgtctgaaaaagaagatctcaaacttagaaagttctgattactgtaccaccaaccctttctccaattctatccaactgtctctctgtttaattcaaaatccaggtgctcgattttgatggctcctgaacgtttgggtaaaggagtttaaaccacctattctttcctaactgtaatataataccatcttccaatagcaatgtaattcgagttgca

SEQ ID NO: 815437 - DNA, 591 bp, Homo sapiens
ctagtaaatgcagcctgaactgctctgtggtatttttattccagaaagcctcaagattcaggagkcaggctgcctgcacttgaatcttggctctgaccttttaaaatgtgcaaccttatacgagttacagaatttctatatgcctcagtttccttatctgtaaaatgcgaaaagtaacactacttacttagaaagttgttgtaaggattaaatgcgttgatttaggtagggatagggaacactgccttgccaatcatgactgatgacatataaggattagatattgctgttaccatcatttcagtaattttgttaaaaattaaatacaatagcggttttcaaaaccaagtgacctggattccaatggaattttttgaaaaaataggaaaatctattctaaaatttatttgaaatttcaagggacctcaaatagccaaaacaatcttgaaaaagaataaagctggaagtcttacacctcctaattttaaaactaattacaaagctacagtaatcaaaacagtatagtactggcataaacactgatatagctgagcactgtggctcactcctgtaatcccaagtactatagga

SEQ ID NO: 815438 - DNA, 586 bp, Homo sapiens
accactcgagttggtcccacacaccacagatggggagcagcccactgacatggcacaagcactcacagatccaccrtgggagcaaatatttactcaggtatcaaaaaagcccagtaggtcacaagacagtctgaggagtcaggcatgggttctggctaagtctgtctcaaaatatctcctgttacactttatgtgcctttcaacgagataacgggagaacaggaatgaaaacatcaacctatagatgcagctcaagagaaatgcttgtttgggcagctgtgtttcattgacaagcactgggctagacagagaagacttaaatttaggtcctaacctcaccactttctcatttctggatgacatgaagcagttcatgtgttaagtcagtttgctcatctggctgggaaatggggagaggaacacttgccctgtctatctcaagtgtcatttgggtggaccaaagaaaataatctatttgtcagtctgcaagcacttactatggaaagtctgctctgggtagggctggccagaaatgtagaagtgggtggagggcatgacagagagagaaagcaagagagaagaagga

SEQ ID NO: 815439 - DNA, 585 bp, Homo sapiens
aatacatagaaaagctaagattcaaacccgggtccttttgcctctaatgtccgagtcccttccaataygccacacagcccctgaccactcccttccgttaacaatgcatattgtcagcggtggaaagaggaagaaacttttggagtagaatactgaacagttttgattagggagcggatgtgaggcagaggaaatattatcactttggtggttgttactatgtccccatcctttcatggaaacatatggaagttttctcttaaacgtacatgtcagaacttgccggtgaaatttaagtgacaccctgcatatggtgcaagttcatctccgagaagcaagagatgaaaaagccgctgtttccagatgtatcaaatctcatataaataccacacgttgcttgcctctggagaaggtctcagtaaggtttgtccagatttcaacatagagtattcctatttacatatgtcccgctgcatacatacttagctatgtcaatatccacttggcatactctggagcttagaaaaagtttcctgccgaagctgaacagcttcccttgattgctcctttgcaaaccttcatggt

SEQ ID NO: 815440 - DNA, 528 bp, Homo sapiens
caagacatgagtgaatgcatggggtttttccttcttccatcattacatagtgatacccttggtctatctatgcttctgccatcagtagcagacttcgttctggggggagctgcagaccaggtgatatttcttcagtctttacttgccttgacttggtatgctgaccaggatccatgctcgatgaggtatgatttaagttgtctatccaagggcatgattcatgcaaacttcccatagtgtctgacttgcttttggggcccagcaactccataatctttggggccatcctcatccaacctgttctggtagcttcgactttgggggctgcagctatagccggcatccaggcaagtcacccacagacagttcacttccgtacctgcccatatgagtgacaaagataaacagatttaacagattgcagaggcacataaagtaaagcatttctggaaaagcatggtgwaagctgctgatgtttacctgagctgaattattcacttagaagataaaactgctcaattctagaag

SEQ ID NO: 815441 - DNA, 450 bp, Homo sapiens
taagcactgttgttgtattatcaaactgtcaggatggttttatatgttttcctagtacaagtaaaaaagattagttgctttgcaaggacggaacagggagttgttgatgacaaagtgargtaggtaaaagttgactgaatagttttgatatttttcatatggatttcagtttagatggttttgcgctaaaaaaaaaaaaaaaatctcaatattatggcatttcctggagtttaaaatacgctgacaatacaatttacaaaaggcctttttgtggttagtgtcttttcacacctctatcttctggcatttagaatctaatcatttctttgtggtaagaggtattatatatagaaaattggttgaattaaattaatcaacgaaagtgccttgttcattttgcactccttctcaaaagaaaccactgaggtgggaggactgcttgaacctaag

SEQ ID NO: 815442 - DNA, 492 bp, Homo sapiens
aaaaacatgagttgagggcctactgtgtatatatacataacatatatacatatatagtgtatatacatwcactgtatatatgtgtgtatacatacacacgtacacatgtatatctctctcaatatatatcaggtactcaatatatactgtctcccttcttccataccatatctcaactgtagggtgactaattacgtttgttttttattccttctgatttattattaatgagtctattttgacagcaatataaaagaaaatagcctcgtttttttgtaagagcttacttcactttcccaggacataagagaacatcaatttttgatgcaataggaattcagtagcaaaatagatgtctcaaaatatttacttcttgatggctggaaacatattttcagcattctttagtacagggacatggatttgatgttctatgagactacatccacttcagaatgtatatatatatggccaaaaaaaaaaaaaaaaaaa

SEQ ID NO: 815443 - DNA, 531 bp, Homo sapiens
tttatttattgagtgtctttaaataccccttacctttaaagtaagaaatattaaaatcaagcagaatataataatgaaaaattcttaagatatacttactaaaaacttatcsttcggttaatacactgtatgtaggttgtacatacaatatgaaaaagtatatttttgtagcctacttttaaatccagaatagaggaggttaagaaggttgtgataaccatgagctcttttttttttttttttgagacaaggtcttactctgtttcccaggctggagtgccgtggcacaatcatagcttactgcagccttgaactcttgggctcaagcaagccttccacttcagccttccaagtagctgggaccacacctggctaatttttaagtatttttgtagagatgagttctcactacattgcccaggctagtcttgaacccctagccttaagcgatcctcccacctcagcctgcctaagtgctgggattacaggtgtgagccactgagcccagccctcttttatttcttttgatag

SEQ ID NO: 815444 - DNA, 539 bp, Homo sapiens
aagagtgcttaggtaagctttgccaacttttgtccttattgccttttctatttatatcttcctataattgaccactcatctttttttttttaaggtttattgtgggatatatcaaacatatacacgagtcgagggaataagatgggcaccacccggtttcatcaactgtcattcatagccagtattatttcatgaacatccttagatattttctaactaccctgtccctacccctgaatttttttaaaataaataatatttgtacatatttatgccatacatgttcatatagtctttttttttttttgagatggagtctcgctctgtcgcccaggctggagtgcagtggcacgatctcggcttactccaagctccgcctcccaggttcacgccattctcctgcctcagcctcccgagtagctgggactagaatacgatttgatyacatttttgcttactagaatcacattcttgccctaccttcctaagagtattatttcagattactttgccaagtattttggatatccttaaactct

SEQ ID NO: 815445 - DNA, 595 bp, Homo sapiens
acaaaaaaaagaaaaaatcaaaacataccaccagaaaaaaatcacttccaaaaaaaaggaagacaggaaggaaagaaggaagagaagaccayaaaacaaccagaaaacaaataacaaaatggtaggagtaagtctttacttatcattaataacattgaacgtaaatggactaaactctccaaaccaaagacatagactggctacatggattaaaaacacaaaacaaaacaagacccagtgatctgttgcctacaaaaaacacactttacctacaaagacacacatggactgaaaatgaagggatggaaaaagatattccatgcaaatgaaaatcaaaacaagagcaggagtagctatacctatatcagataaaatacatttcaagacaaaaactataaatacaaacaaagatggtcattatataatggaaaaaggatcgattcaacaacaggatataacgattataaatataaatacactcaacgctggagcacccagatatgtaaagccaatatttatttatttaattaatttatttattgagacagggtcttactctgttgcccaggctggagtgcagtggtgtgaccatggc

SEQ ID NO: 815446 - DNA, 515 bp, Homo sapiens
agtggaatcatacagtgtttatctttttgtgactggcttatttcatttaaaataacgttttcagggttcataatattgtagtataggtaaaaattttcttcctttttaaggctgaagaatagtttgctgtatgtatataccacgtgttatttatgaaatgatgatcttttacactttcagggctctcataacttatctgatgatctatcacagtttctatcatttcactgtttttcctagctgaaattaactttttggcatatccttggcataagaccctggggaataaagttcttatataatcccacattttatttcgcttctagtcactctatggttaatgggtaaattctcagctttgactgtcttagatttggctgccgataagtaaagcgaggtgattagaaattgaaagaaagaaaaaaaaaagcaaacacaacatttttcccccaatcacctggattctgcaatggaaaasaatggcttttagtgctattgtctctgttaaatattta

SEQ ID NO: 815447 - DNA, 511 bp, Homo sapiens
cattaaatgcagcttgtacctataaaatgtgtttattaatctctcctcgtctatatataatacttgtggtggaattctcttcatggggttatacgaactccaactctactttgcaacactgaaagaattattattatagctttatcattactacctgtagctagtaccagtcccttctaaaatagacagaattcataaaatatagcataatgcaaatttctccctatttgcttcttccccagatagatgtctgaaatacaaatgttatggagaaaaactcagaattttccaactgtaaccaggtttcttatttaatctcttggcaaaagattcctcttggttatcatttctttcagctcattattcttgcacagaagattgtgtccatgaattcctgaattctcaaagttgtgtaaagtaaaatgaacatttgtaactattagaattagtttatctgtgcacagataggcaggatctatagcaattaatayttaataggatctaagtgttt

SEQ ID NO: 815448 - DNA, 515 bp, Homo sapiens
ctttgttgggctacccttctagtccattagacattcccagacctgtctgacccccagcwgtggacaaaaccttggctcaaggcaggtggttagtgtgagccagagagtttcttaatgctgtgtatcctattctcacatggatagtgggatcagtgtttcttcctgctccctgggaaacctgggaagatataatatttgatatgtcaaataacatatttagttgaggcaaagagtagatctatttgaagtggcggtaggacaagttcttttgctcactgagtatacccgcatgtcaggcattgtgctatgtgttacctaacttaatgatcataaaagtctgctttgtttttatagtttatattattactccaaaacaaagacagaaacaacccctcttgaaactcctgatatccagagttgtaataacttgcccaagtttattaggaatcaattagaaaatggtaggagtttcaaacctttgtcaatcagactccaatgcccattaacttctttca

SEQ ID NO: 815449 - DNA, 521 bp, Homo sapiens
aactgaggatcccccatcctcttaaatgattctttaaaaatttgcatgcagaatgtttactctttgtgctgtaaagttctatgtgttttgacaaatgcatatggtcatgtatctaccataacagtattatacagaataatttcactgccctagaaaaccttgtgcttcatttcttcaaccctctactcccaactcttagaaaccactgctctttttttcatagctatagctttgcctttcaagttacacatctggccagaaggtacaaggagagatgtgtcaaaatgctaaatgtggcctcaagatggatagagagagacacagtaagtgccactggaagctcagggatagatggatcactgctgtagtaatcgtgtttgtgtgcaaaaccagagttgaacccacttattcttggatagtaattttattcctcattgactcaaaaaaattttatattaaatacctgccacrtgctaggtactaagaagacaatgaagaaaaagccagggttcttgttattt

SEQ ID NO: 815450 - DNA, 621 bp, Homo sapiens
catctctcagtctcctatagaagcagctattgtgagggaaatgaacattagaatacagaagtcatagaacacttagacaccacaaaattagaaaatttgcatctggcaacccctgaatctcctaccagttgcccaccagccccactgacttttccctgctgtattagtctattctcgcattgctgggtaatttataaagaaaagaggtttaatggctcataatgccacacgtcgtacaggaagcataatgctggcatttacttggtttctggggaggtctcaggaaacttaccatcatggcagaaggtgaaggggatgcagtccaccttacatggccggagcaggagggagagagagaggaggcaggtgctacacactttcaaacaaccagatctcacgattattcactcactcactattgccacaacagcaaggggaatggtgttaaaccatgagaaactgccctcatgatccaatcacctcccaccaggcctcaccttcaacattggggattataattcagcatgagatttgggtggggacaccgattcaaaccatatcatctgctgtgccagtyctaatggtgcttcaacatcaggcagtggctggacccactgtaac

SEQ ID NO: 815451 - DNA, 564 bp, Homo sapiens
atacctgccttaagacatgcctgaatttcagacctaattctggtttttctctcccatcatcattcctttcttcagaatctctcttccacccccaaaagaaggggaaacacacacacacacacacacacacacacacacacacatttctttactcatcagaatttgtaatggtaccccaggcttgggatgttaaaaacctttgcataccgaacaaagggacagttagaaatatcagttctcagttgagaaagtgaatggctctactgactgcattacaaatctttaaatcttttttgttgttatgatatttagataactatgtttttcactttcaatagaattaaaggaggaccgaatgtcagctgatagatcatcaaaatacattttttatattagagcaataatccaaaaggaattcaaaaaaataagacactawtaaaacaaaacttctttcattcccttttagttatttaggtaaaaaagtttctcagcatctaaatcttgttgcaggaagtcagggaccccgaacagagggaccggctgaagccatggcagaagaacata

SEQ ID NO: 815452 - DNA, 531 bp, Homo sapiens
aggacttttcatcttcagttttcaagccatgaaactgaggtacatgaagtttaagtagcagtcacaggtgctacgaagtgcaagtgattgaatttgctctcttcatcttataatactgcctctaaatagcattcagtaattggttatctgatacaacttatggaaagctctctgaattaataatttcagcttgttacccagcaatctagtgttgttgattactagttatatgccagtgctgagtgctttcacatgcattaacttatggaatactagttttcccattttaccaatgtggaaagttaaatcagagatattaagtagtttagcttacatcaccctgctggtaagtacaaaccaaaaataaaatctgaagctccctcctcccccaaccctttgaatagacttcctcttytgggccagggcactccaaagctaacctaaaaggttggttcagtccattactggaagggatagtgttggacatatttaattatgccctccctccttttggaattcaggaaaatctga

SEQ ID NO: 815453 - DNA, 617 bp, Homo sapiens
gtagaggggttaattcaggggaatctgggtgctcaagatttggagatggagggaatcccctgatatgtcaccagtctatatgtcagggttccattctatctcaaccagggggctcttacctttgtatagcccacctgcctaggttagtagtttaaacctttctggagctgagttgctctgacaattaagtcctgggcgggtccacagctttatctgatctccctcttcaaaagatgagagcctctttgtaagatacacaggccctctggctttcacatttgattttcaattgcctattaaatgctttcagcttctcataatttttagagcatccatcaaattcacctacagccatcaaattccattgttcttaaagtttacatttcctctgtactttcaaatagttgatgcattgcaccagtgaccatattcctttttaccagtgtatcatcccaattcacctacagtgttagtttttaacagttgcagcatatgctggtaccaggagctattcgcactctacctaccagagatggagcctttgttgtcagctcagcagrgagtggtctgactccaaaactcaatcttatcacttgctttctctgcagactcttggt

SEQ ID NO: 815454 - DNA, 545 bp, Homo sapiens
tacaccaaagagcctaaaatggggaaggaggaggaactgtcacctgccttaccacctccttttccctcagccccccatcactggaccaaaataacaaagaggaaacagaggtcttgcytgaaccccctcctccaatgaattgggaaaaaggcaagggatatgctacagctataagacactgtcttaagcaagcagcattggaagtggagctcttagcctgcctggtaatgctagattgacaaggcaatcaggtatataaactcatttattttaacacttataaaaagataagaaaagtcattagaggctggagctgcatggccgagcaagcggtaggtagaaggaaaggctcagcagtgggtaagctcacaaacccaaagccggcaattgctcccaagagctcagcctgcacagtggcggtggccaccggaagccaggcccagagtgcaggagctggcctgctagggaggggtagaaggcatgcgtgggaatgtctgccagccagtagcagcctactggtggcaggggtagggagcaacacagaa

SEQ ID NO: 815455 - DNA, 541 bp, Homo sapiens
tcccttccgggtgcggtgatcacaaaaggcccaagcaaagtaacatcatttggacagctccctagaatcctcatctcaaggctgtaagaaaaatcttaggaatgatttagtgcacattcttcattccacggaggaggaaactgaggcttgtagaaaagaattgctctgcccaaggtcatagcctctttgtggcaagtagctgaaaacccaaacccgtgacagtaggtccagtgctctctgcagcaagccgtggaccccacctgctaaatcacatctctggcagaactgtcgggcagactttctttgaattgacaaacagaatgggagagaaagtcacgtgcttcagtcaaagcaaaaaagaaaagcttttattctgtatgtggtttctcatagaatacttctcgcccagctgcgcccaagtaggtaaaaggctcttgcttatgctaaggagcctttcttatctctgcacaycccactcctttcctgctaataccaagtacagaaggcaatgaaagaaaaggtcacctgccttcctcctaat

SEQ ID NO: 815456 - DNA, 602 bp, Homo sapiens
aattttttactggttgaccacttgggttggcctcatggggagatacaacagcgaaagcactgacttttaaaattaaggtatccagatttcagtcactctcaaccatttaataggtgtttgactttgaaagttgtttaactaacctctgtgagtctcagttttctagctgaatttgaacaataatagtacttaggagtaatgtttgaataaaggagaaaatatatgttaagcccttatactgctctggtcccacattaaggctgtgaaaatggtacatggtagcaagaactgctgagcaccccacttctggaattgggctctattatcacctattgtaagagtaaattaatcccagtaggtcagtcagatactcaggcactgctataaaaggaaaaaggacataagttcacatctaccattaccatgccatctgcctggctgaaaaaaatgcagcatttggaaattctccagttatcaaggctttgggaagtctagtcagtcagcggtgaacaactgaatattcagagaaacccaattagcaartccgtgcgaagattcccaaggggaaggtgtgaatttaaacacaaataattttaaagacg

SEQ ID NO: 815457 - DNA, 477 bp, Homo sapiens
ttttcatgtctttaggtcagattcctcatcattggattctgagatggtaatagtgctgacaagtgctttgagtttgaagttgttcaacttgaccctggtctatgtgtcttacctattttgtttcatgttgcaagcactgctagctttcctattcaatacccatcctcccttctttttttctaatagaaagctacttttgtttgtaatgacagtggcccatctataaacttcaacttcccagactcccttgcaactagaaatgattttatgatatagttttgggccaatgaggtgtaaacagaggtctgctaaggagctctgagaatttttgtttgtccgtttactcatcaattcattcctttattttaatatcagtgtcattccttctttcttcaytatttattctccatcctgtctggaacatgaatatgaggttagagttgcagcaacaatgttgagactatggatgataagtgt

SEQ ID NO: 815458 - DNA, 561 bp, Homo sapiens
cctaattttcccacctattccctttctatttatccccacttcagatcccatagttaggtctattacctatattcaggaaattgtttctgcttctttatamaattaacagaccagaaaaagtctcttaaggtatggttgtaaccttgtcatgctactattcaaatatattcaatttgcatattatgttgacgagttgttttgctttgtaagctgctagtaagtgcctttccatatcctacgtctaaactgtatcattccacctgtcattctatgaattaaaaccgtgtgttacttcttctaaatttattcacacaattttctctgaaacaattgccttctcattcttattacagttactcagcagaatttcagtgaacaaataggcatttctgcaattggataacactgagctatcatagtgtcatttgaccaaagtcaaccacttacctgcatgtgaccctatagtagacagcgatcatgctttatctgtctagcagcaaagcacttgcctatttaagagcaatcccattgtggatcctggtaggaatcaaggacttactt

SEQ ID NO: 815459 - DNA, 547 bp, Homo sapiens
gaagcttgctattcttaacaaaatctccttaattcaaagctcccttctctggtatagtccatggaacccagaagaaatctattatgtttgtccttctctggccagctgggcaaaatctactcaaacttcctccagtgtttcccggatctataccatattgccattcatgaagggtacaggtttcccaactactgatctactatgcacctgatgactctaaacttctctaattgaactcataacattaatccctatgtcacctttaacatggaagatatcctttgtgttcattcactgccagaaatttgtttggagtttactaatgttcctacaaatcagctattgtgaattactaaaatgtaataccttctgcttctttattttctatgatttgattctttattttcagttgtgcttgctatacaaaaatatggttcaaaagaatgatatctggtagctggctccaaatttgagctaggaaaccaayattttgatctacaatttgtattaggctattcttgcattgctataaataaatacttgagaa

SEQ ID NO: 815460 - DNA, 565 bp, Homo sapiens
cctaagtaaattaatgtgggaacataaaaataaataccacgtgctcttacttagaagtgagagccaaacatggggtacacatagacataaagatgaggaaaatagacactgaagactagtagaggggaagaggggaaggggaaagggctgaaaaactacctattcagtactatgctcactacctgggtgacggaatctttcatactcctagtttcaggatcataccacatacccatgtaacatagcctgcacgggttctttctgaatctaaaataagagttaaaattatataataaatattcagaaatgatccttcttgatcctattgtataatagcatccacatttcttcttgctaataataattaagcatttcaaaacataccacctcattccttgcttgttgattcattttaacaaagaacacaaaatggcaaggtggcagtttcaacttctaatacaaatgaattatatttgtcatctctgttagaggtattcctyccatggaaaccatgacctcccactgagaagaaagcaacgttgtgagagcagaaagcaaaaattct

SEQ ID NO: 815461 - DNA, 565 bp, Homo sapiens
cctaagtaaattaatgtgggaacataaaaataaataccacgtgctcttacttagaagtgagagccaaacatggggtacacatagacataaagatgaggaaaatagacactgaagactagtagaggggaagaggggaaggggaaagggctgaaaaactacctattcagtactatgctcactacctgggtgacggaatctttcatactcctagtttcaggatcataccacatacccatgtaacatagcctgcacgggttctttctgaatctaaaataagagttaaaattatataataaatattcagaaatgatccttcttgatcctattgtataatagcatccacatttcttcttgctaataataattaagcatttcaaaacataccacctcattccttgcttgttgattcattttaacaaagaacacaaaatggcaaggtggcagtttcaacttctaatacaaatgaattatatttgtcatctctgttagaggtattccttccatggaaaccatgacctcccactgagaagaaagcaamgttgtgagagcagaaagcaaaaattct

SEQ ID NO: 815462 - DNA, 626 bp, Homo sapiens
tcttggatttcctctgcaaaacttttttctcaaaatgatacactacttaygttctgactactaaaaatttgtgtgcttttctttttctttttttttttctttttgctagatatgaggatctcactgtgttgcccaggctagtttcgaactctggaatcaagcaattccgccacttcagcctccacagtgctggggttacaggcataagccaccatgaccagtttggttgcttttttttttcttaactctaagataaaatgttctttcttgctgtagtttacgttgttttcctattgtctttataagtgactatcccatgccttccttttaatactctcagatacgtaacagtaattagttgttggttttttacttgtgcatatatgccttgagagagaaagcaatatatcagggcttaaagtgaattgataagccaaagtcctattccttgtcattctttctagctaagaatgcttcatagcaaacattgtttaagctgctttaaaaatctaaatatgacatctgtagcatgtctgaatcttgtagccacttgaatacttctaaaattctaaattctagagaaatgaatcatcatttaatcatccaataagaagtacagtgaattg

SEQ ID NO: 815463 - DNA, 519 bp, Homo sapiens
tatagaaagctctttgaattattggatcctgaatcaacagcaaccattattatcatcctcagctttttcctattgtctttatagatttatctcattagatatctgtgtgttttctttttctttctttttttttttttttttttttgagatggagtctcgcttagttgcccaggctggagtgcagtggcgtgatctcggctcacggcaagctctgcctcccgggttcacgccattctcctgcctaagcctcccgagtatctgggactacaggcgcccaccactatgcccagctgatttttttttgtatttttagtagagacggggtttcaccgtgctggccaggatgtctgtgtcttttctttatgcaacttagacactgccttggctcccaagtctagttttccagccccaacaactatctacgcttaacamagaagacaaagtagagaataggaagcagaaaactgtgcaaagggtaaaccaaagacaggaagtcctagctagagcaatcactcaaga

SEQ ID NO: 815464 - DNA, 623 bp, Homo sapiens
acctaggtgtccattaatggtgaattggataaagagctggtacatatacaccatggaaactatgcaaccataaaaagaacaaaatcatgtcctacatgaatcctagcagaaaacctaggaaacccaatggatgcaatggaaggccatcaacccaagcgaattaactcgggaacagaaaaccaaataccgcgtgttctcacttataagtaggagctaaatattgggtactcatggacataaagatggcaataatagatactgggaactaatagaggtgggagggagggaggggagaaagggttggaaaacaaactattgggtactatattcactacctgcgtgatgggctcaatcatatcacaaacctcagcatcacgcaatatacccatgtaacaaatgtgcacatgtaccccctgaatctaaaataaaagtcaaaattattttttaaagggtaagtaaaaatgaaaaactatggaaggtgaaattattttctcccctakgatcttgttcattggtttgttttcaaccaagctagaaagctttggagcaaagaacgatctcagaaaacgtattctatgtctttatgctctagcagagataggatcccccataccagaaacact

SEQ ID NO: 815465 - DNA, 475 bp, Homo sapiens
ataagaagcaggcaacaaattcaacagatacttctgatgacgagacatcactttctacagagaaaaataggtcacatgcaaagcatcagaaatcaaaagtggcattgtatttctcaacatttacaataaaaacaatgtttccaaaaaaaaaaaaaaaaaaaaaaaaaaaaaggctaactaaggcaaaacctataagaagcaggcaacaaattcaacagatacttctgatgacgagacatcactttctacagagaaaaataggtcacatgcaaagcatcagaaatcaaaagtggcattgtatttctcaacatttacaataaaaacaatgaggaagtggaaaatgtgtttaaaattctaaggaaaattattttcaaactagaattccacagctaagcgattcttactgcaaggttatcgcaatcctatgtaggtaatgaataagatgyacaattctgacttcaatataatctaaata

SEQ ID NO: 815466 - DNA, 567 bp, Homo sapiens
gttgtcatatgagtttttctcctttgagttccttcaacatggggattttgtttcacttactccttgtatctgggtgtcatatatggtcatttgctcacagtaagcttcaataagcactgattgaactgcaacatgaacaacttgttacaacactatataccaaacactccacacttaagcaaaacttgcaaagtctgagttttctttatagttcttaactattccttacatcctgaaaaaaatatttttagataaaagtaggcatatttaacttcatcaggggaaccttgagcttttttggctattcaatagtaggaaatgaggggaaaaaagcaattattgtatggattaatatgatccaccttcagaaagaacgtagggcaatttacaacatgccagaggatgcgagaactggcaagcttcatcttattgatgctcagattccctgaagctacataaaaatgtakatgataaggatgagcagaggcacagagaaagcaccagaaccttaaggtaaataacagacatggtagagtttgagctacagtggaatcattttcatcctga

SEQ ID NO: 815467 - DNA, 577 bp, Homo sapiens
gaatggtctcgatctcctgacctcgtgatccaccygcgttggcctcccaaagtgctgggattacaggtgtgagccaccacgcctggcaaattcttttttatttttgtctagctgaattgatttgaagaaccagtctttgttctctgagattctttcctcaacttggtgtgtactgctgttaacactgctgaatgtattatgaaatccttgtagtgagtttttcagctctaccaggtcagtttggttctttcttaaaatagctatttcgtctttcagctcttgattcattttactggattccttagattccttggattgggtttcaacttccatctgcatcttaatgttcttcactgccatccagattctgaattctgaattccaaatgtctgtcatttctgtcatttcaatccggttaagaaccattgctgggcaactagtgtgctcatttggatgtaagaagacactctgtgttttagacttgccagaattcttgctctggttctttcttatctgtgtgggaaaatgttcctttaatctttgaagttgctgtcctttagatgggacttttttgctt

SEQ ID NO: 815468 - DNA, 626 bp, Homo sapiens
atctgttgacgttcttaatgccctttgtctagcaatcatccctctcctaatttgtggcttctaatttgctacagtttggaaaaccactcatgccataagtatgaatctataaatgtacttatgcataaatttacaaatgcatatacacttatccctttccacaaaggatgtatggcagctttttaaaattatgcaattacaaaaaataatttttgaaggaatttgaacaaaaggaaaataagaatatattaaagaataagaaaaataataaagccaaggtaggtaacacacgcagactgcatgctctgtacctctctgtaattgctagtgctaggtagcaaacagctctggatttcctggaagccaaagcaaagataaaaaggcaatccattagttacaggttcacaatgctcagaaaataaaaacaaaccagctattcagaaaaagtactaccactcttaacattaagacctaagagaattttttcatcatattcataaagaagggtaatataggatagaataatgtcttcaatggcattctgacaatagctaatgtgatacattccaaatagtgcttgttatgaaatcrctttaatataagccaaaagcaaaaacccaagcaaa

SEQ ID NO: 815469 - DNA, 437 bp, Homo sapiens
ctgcctcagcctcctgagtagctgggactagaggcgcacgccaccatgcccagctaattttttgcattttagtagagacggggtttcaccatgttggccaggatcrtctcgatctcttaacctcgtgatccgcccacatcagcctcccaaagtgctgagattacaggcatgagtcaccatgcctggccaagataacactttttttgcagagacttggccttatccacacatatactcacacacacatgcacacctggcttagatcctgagttcactttattgacaacaaattagcacactgtttttcaccatatcctataatgccatgagtatctatttataaaatcttaaggaaaaaaagctcctttgagaccagggccttcacctttcatctttgtatctccaggacttgtcacacagtaggcttcatataatgg

SEQ ID NO: 815470 - DNA, 620 bp, Homo sapiens
gcgccctctagtgtcactttagggactatgtgactctggaagcgccgttacctccaggattacgccaagggtgtaaatttctctatgtcaggtgcatgccctcyactgccaacgtcactccacagcttgataatggtggtgctcacagagcactgacattcatttaggtctgggtaaggctcacattccataaggtgggatggaaagaatcatcagtcccttctaacagggagctttcaagctccagaaaccaggagactcattcaacacattcatctctatatgtccacctgggaccattaggcacatagatgtaaattttatctggaaatagccctgagtgcccccatgcgtgtgtacagccagggaaacacacctactgggaggtcatactcaccaccccacttctaaaccaggccacagtttagaaccccttggttatataatatggataacggatgtctaataaatgcttttaatggcttgagattatatctgctcttgagcctgtgtgttcaaaggtagtaaaaccaaaacactggtgaaatggtagaagaagaataataaatttgttgacacaaaattccagcacagattttcaattgctcatctctgttcaa

SEQ ID NO: 815471 - DNA, 544 bp, Homo sapiens
tctttggagaaagatcatggatgtaaagtagagagagcagaagaacaaaccacaggatacaggataggggcaaaatattgtctcctgttgctctcagttttgtgaagaaacctaagctgacatgacagtcctctccaaatgtttaatgatcttcctctgttgtctaaaactgaccacttaactggtaagggccagttaacacagtcatccagccaaccacttattcatttgttgattcattcaacacagtttatcatgtgtcaactctgttgcactgggaccttatgtaaggacacaattggtgccttccagacactttatctagtcgggagtggtgggggcaactatggcaaatgggaaaacctaatggttaacatttattaagtaaatgattgtacagcaagccccatgmtaaatattttatctataacatcacacttaatactcataacaatcctttgaagtagttattggtgttcccctattttgaaatgaggaattcgaggggtaggacagtataataattgtctaatgtgatattgct

SEQ ID NO: 815472 - DNA, 512 bp, Homo sapiens
atttacagtctggctctgaagatgatagtacttgcagcaaatgctgacaggctggttccacccagctaatcacagcagttastgaacagataaattaagagcattttaaattcttgttcagagagacacttgccttagacatatgctgaaagcatggacttacctgcataaaaagactggcaagtaaccaaaattaaaaaaaaaaattgttctttctttcctttggacctgttttcagcatctatttgaaagttccaaattatatttaggctattcaagacaaccctgctaatgcactgtaattttatatttatagtcactggcttacacatgcccacagactgcattctgcaacacccaggagtgaaaggcctcttctgacacctgtggctctttttccataagtgcctgtacaaccagtgcagagtattcattgtctggtcctaatggtttccctttgcttattcgagaaattaccattattttctctttcgtaaatgactccgaagtaa

SEQ ID NO: 815473 - DNA, 577 bp, Homo sapiens
cttactatattgcccaggctggtcttaaactcctgggttcaaacgatcctcccatctcggcctcccagagttctgagattacaggcatgagccaccacaccyggcctcagatgttatttctaataacatacaataaggatacagtaaaagcatacctaaatattaacatttcttatctaactataagaatttaagtataatgaccaggtagatatgtttttctttttttattttttttattttttagggtacgtgtttcttttagaagtgaacctgagcaggaaaactttttcagtgttttatttatattgtaacaatacctaaaaagtggaaattccttatcatgaaagttattattaatcctgaatacaaagaataaaatgtgaaaatgtgatgtttcccacaaaaattgatgatcatttgtctaattgtgagaatggatgacttgcttagaataaatgaagcaaataaatgcaactgacaagtgtatatgtttccccagtgtgctcatgaatacctttgaaagcgaattaatttgctcaccattgaatatgtccttttgcccatatgcattgtt

SEQ ID NO: 815474 - DNA, 643 bp, Homo sapiens
agcaaatagtgaaatttattccataaaccacaatgcactacatggatactattttacacttgaataatgtaatatatttttcatggtatttttggattcactgtcatataaatgattcatttattcaagattccaaagctatataaagtcagatttggtatcaaagtcttgtcctgactacaaatttagcaaaaataaacaatctatgtttgcaataaaagttcttgtgttaccgttctaaccccattctggccgttaattaattaatgtattattcaagaaatatagcttatggttatatacagcatgtactacaaaagataccagagatttataacttgaaaaacacagtctgtgaggccaaagagcttgttatctttatttcatgagccatgagaagccatttaacatttccaagtcatagtgccttaaactacaaaatggagacagtaaataagatctgctttatataaattgagtgtatttatgtgtgcgtttatgtgtgtgttggggggagaggagagaaagagagaaagtgttttgttatgctggtrggatattttggccatgatttccacatttagaatgcctgtgttcttatttcagctccaacactaagtctgtaatgttagacagcaaacat

SEQ ID NO: 815475 - DNA, 506 bp, Homo sapiens
tatattatttggcatagggcaaacattgattggctttagatatttttaagttcagtgtgcacttctaaagtagtcattcaaaatagaaattgatgtacagtctaaattagtagaaaagaaaaatggaataagaaaacaagctaaatgaatgcaagacaggaaactgaagcaacagaaaatgagtacaaaagaagtaatagaatagaatccaaaatatccatacaaacaatccacgtactagattaaattccacagtgaaaatatgaagatttctttggaatttttttaatgctactcatgttcctttctagagagacaactataacatacacagacacacatactaacatgactggacacatacaaacaaggacataagaaagttgaaagtaaaagaatggaaagaakgccggacaaaaataaccaaaattacttgatttgctacattaacattaggcgtaatatacttcttgaggctaaaacaaaagattagtaacaataaagaa

SEQ ID NO: 815476 - DNA, 553 bp, Homo sapiens
agattcaggtgaaacatgggtattgaaaagttcagactgatgccctcagatgaaagygttgcctcgacgtcttcacactgagtggtgaataagatccaaagcctgtttcagctgttcccttagtgcactgcatgaggaatggatacaagcctctaccagagttaagcccagcaatagatatcttgacagagctgagcagaattccttcatcaaaatgttgcactttcctccagttgttcttaagctcctttttccaaatgaaatagaagattaagtagactgtacctaatcactcaattatagctcagtttggcaaatccgttttagaaaagtgaaaatggaatcaagaattcactcttcccacatcagagtaaatagtaaccagtacataaactatgaaccatgtaaataatcagaaaaaaaataaaggcatgagaattatgcaaatatcttatgttaagaaaaggaagaagaaaggaagggggagaggaagggaggaggaagagagagacagaaatagagaaagagagacacacacagacagaggtaataa

SEQ ID NO: 815477 - DNA, 622 bp, Homo sapiens
aggtagaggcaacccaagtgtccagtgttcatcaacagatgaatggatacacaaaacgtggtgtatatatgtgtgtatgtatgtgtatgtgtgtatacttayatatatattcatatatacatacatacacatgtataaaagaatgttagtcgcccctataaaggaagaaaattctgaaacatgttacaacatggattaattttcaaatcattgtgctaagtgaaataaggtaatcagaaaaagaaagatattatattattccacttataggagatagctagagtcatcctaaattcatagaaacaggaagtagaatgatggttgccaagggtttttggaagaggggagaacagaaagcattaaccaatacagagtttcaggtgaaatagatgaaaacattctagaagtgaatggtgataatgattgtacaacaatgttaatatactcagtgccacagaactgtacattttaagatggttaagcataaacaaaatggtaaaatttatgtcatgtatacttaaccatttttcaaaaatgggagcaacatatctttctgtatatctaagaaaatcttcaaactcaagttattcataaagagatctctgaaatatgtctcaattct

SEQ ID NO: 815478 - DNA, 622 bp, Homo sapiens
aggtagaggcaacccaagtgtccagtgttcatcaacagatgaatggatacacaaaacgtggtgtatatatgtgtgtatgtatgtgtatgtgtgtatacttatatatatattcatatatacatacatacacatgtataaaagaatgttagtcgcccctataaaggaagaaaattctgaaacatgttacaacatggattaattttcaaatcattgtgctaagtgaaataaggtaatcagaaaaagaaagatattatattattccacttataggagatagctagagtcatcctaaattcatagaaacaggaagtagaatgatggttgccaagggtttttggaagaggggagaacagaaagcattaaccaatacagagtttcaggtgaaatagatgaaaacattctagaagtgaatggtgataatgattgtacaacaatgttaatatactcagtgccacagaactgtacattttaagatggttaagcataaacaaaatggtaaaatttatgtcatgtatacttaaccatttttcaaaaatgggagcaacatatctttctgtatatctaagwaaatcttcaaactcaagttattcataaagagatctctgaaatatgtctcaattct

SEQ ID NO: 815479 - DNA, 621 bp, Homo sapiens
atatatcttcttttgaaaaattgtgtgtttatatcctttgtccactttttaatggagttgtgatatggtttggctgtgtccscacccaaatctcatcttcaattgtagctccaataattcccacatgtggtgagagggacccagtgggaggtaactaaatcatgggagtggttctttcccatgctgttctcttgatagtgattaagcctcacaatatctgatggttttataaaggggagttcccctacacaagctctcttgcctgctgccctgtaagatgtgacttcactcctcattcaccttcagccatgattgtgaggcctccccagccatatggaactctgagtcaattaaatttcttttctttataaattgtccagtctcaggtatgactttattagcagcaggagaacagactaatacagtaaattggtaacttaccttctagtggaaactacagacaaacaattagacttttgtggtcaaggaagacatgttgtatgacagaattatgcacaaattattttgcaaacacttagaagcatcactaaagctggcccagaaatataaagacagccatctgagaggacattatatcacagcctgaatcaggaaaaatta

SEQ ID NO: 815480 - DNA, 554 bp, Homo sapiens
gtttcaaagattccctgattaactgtctggaaacatgaagtgtcagattaagcattaagttcagctcakgcttactgctttccatgtcttagaaagggaaagaactttaaaagaaccaatctgtaatatagaagacagggaaaatggctcttaatagaaacaaggaaatgctaagaaaagtaaaccataactgaacaacgctgaaaagtttaaagggaattaaaacataaatggctttagacaggaacagaaaaattatgataaatagaaaaaacatctgcaatactggatatataacattaacgtggatcttcattcatataattttctaagagttttggacaaagtgtaccctgtgactttcataaactgttgatagaaatgtaaaatggtaaaatctcttggaaaatgttcttcagcttcttaaaaaattaaatatagccctatcatctgacccaacaattctactccttggtatttatgaaagagaaaaaggaaatatatgtccttttaaggacttataccaaatgttcagctttatttacaatagccaa

SEQ ID NO: 815481 - DNA, 513 bp, Homo sapiens
ttttaaaagcattcttcatgagaagaatcatgattagatayatgcccctaggtatctttaatgtttgacttaatagaagatacctgaattatcttatctgcttctactacattcaaacagttgcaatttgttgtggttaaagtataagtaaaagatctagcttcatatagttgaaaataaaaaagtattttaatatcattttctgataatcatggatattatcctttgatactacacaagaattctgtgatagtttcccaaaggttaatagcaatgtagaatctgaaaccatatcaacaaacttttcatattgttatatcagatccactggtcttgcactttaaatggatacatgcatgattccataaaagcatccgttggtcatttttaaaacattggctcactgtggtttcatggataggagaaatgccaacacatttcattttgcgacatcgaaaacccacattctttaatattgctatcaatttccttagaaaaaatttttcttttgaa

SEQ ID NO: 815482 - DNA, 603 bp, Homo sapiens
ttgctctatttatttagttgctcaagtttttgtaacattggccactgggagcaccttcaattrttccctttcttcttttgaataaacctatcattaattttttttttgaggggtatgtgagaacagggtcttgctctgttgctcaggctggagtgcggtggctcgatcttagctcactgcaacctcgacttctcagcccaccccagcctttcaagtagctgagactgcaggtgtgtgccaccacacctggccaaattttaaatactttgcaatgttgccaaggctggcttagaactcctgggctcaagtgatctgcccgcctcggcctctcaaagtgctgggattacaggtatgagccaccaggcctggcctgagtttttttctctttctttttttgattacttcttttctttctggaactaccagcctcaccttctatacttcttttcacatccagaaaattatctattcatctatttctctaagtatccctagttcttttgtttttttttttttttttttggagaatgatattagaagaaccaagatctggcactggctgtgctttgctgctattgaggtgtcattgcaactagaccctgt

SEQ ID NO: 815483 - DNA, 603 bp, Homo sapiens
ttgctctatttatttagttgctcaagtttttgtaacattggccactgggagcaccttcaattgttccctttcttcttttgaataaacctatcattaattttttttttgaggggtrtgtgagaacagggtcttgctctgttgctcaggctggagtgcggtggctcgatcttagctcactgcaacctcgacttctcagcccaccccagcctttcaagtagctgagactgcaggtgtgtgccaccacacctggccaaattttaaatactttgcaatgttgccaaggctggcttagaactcctgggctcaagtgatctgcccgcctcggcctctcaaagtgctgggattacaggtatgagccaccaggcctggcctgagtttttttctctttctttttttgattacttcttttctttctggaactaccagcctcaccttctatacttcttttcacatccagaaaattatctattcatctatttctctaagtatccctagttcttttgtttttttttttttttttttggagaatgatattagaagaaccaagatctggcactggctgtgctttgctgctattgaggtgtcattgcaactagaccctgt

SEQ ID NO: 815484 - DNA, 533 bp, Homo sapiens
atatactggtaggagaaaattaggactactactgggaaatattgttgttttaggataattttgaaaaagtcmatgaaattaaaatcaaaccaataatttagacatagttttacttatgtttaagtgtactgctgtttattgatttaattatttataactttgatgcttttagcctgtgtttccccaataaagcatttgcttaaattttaggtgaggaaaagattaaacactatgaaacatcttttggatttatgaacctacttggaagtattggagatcataattgcctctgtataaatttgaggttttcattattaacagatgtagctttgattctgtattatacttttttgggaaaatgatttggttatgggaacatattagactaaaaattggttttaatgaatgtcaagataactataatttatcatattgcattgctggttggcttggctttgttattctaataattttcgtgaggctaggagagctggggctcagcatcatttctcacctcacattagttacaacca

SEQ ID NO: 815485 - DNA, 501 bp, Homo sapiens
tgatgcagaaaatcacaactctaacgaatcccctaaaacaaacaaaaagcctcatcatcctactaatgatagattcatcttattctgattayacagcatgaaacagcatttatacagatatcctttttttcttccccccccctttttttttagctatttgccagtttataattctgtctcctcaaagagtgtgagtgaatctacattagtcctactttgcttcataaatcccagtcttaaagtatatcttttgataaaccattcactgttgtgatgaagttaagacgattatttactctaatgaactgaagcagagatgtgaataattgaaagcatgagtaatccaaagtcatttcacattatgtttcctatagctggagttaaaacacaaataaccaaatatataggaatacatttgctgcaagtatggcagaattaatacctttattacataaataatttatctaaagcaataggaaacaatactctcacaaagaaagg

SEQ ID NO: 815486 - DNA, 618 bp, Homo sapiens
ttttgctcagcatcaagttttggagcttcatcagtgtcattgcatgtacctatggggttttatttgatagcatttcattgcatggttataccacaatttatccattctactgttgatatttggattgtttctaacttaaaagtagaataaataattttgctatgcatattcttgcaaacgttttttggtacatacgtgcatgtatttttgttgcatataggcttaggaaggaaattacttggtcctgaagcgacaatcatgtttaacttacatagataatgatgtcttttctgaggtggttgtaccagtttatactcccaagaataaatgttctattgatgtacatgttctaaaacattgggtgttgtcaataatttttactattgccactattgttggtatgtagtggtaatattattgcattttgaaattctagttccatgttgaatcataaggtttaggagctttccaagtatgtattgttcatttgaatattctcttytgtggagtgtctatgtgtaggtcttctttatttttttgtattgcaatgttggtctttattattcattggtaagaaatccacaaattcaaaaattctttgttgtttatagttacaga

SEQ ID NO: 815487 - DNA, 635 bp, Homo sapiens
ttcacaatggggagacttagctgaggggatccctcctcrtgttgggtatgacatgccctacgagcagctgcaacagtgctgggttccggagtacagttgcctagagcagctgtgaagccacagtcctaggctcaaggtctcaataatgtattatagcatctgggtcttgaaatgtaggttcactctctgaggagggttggatgcagattgcgcacagagccaggttatctaaggcaccttgtagtagcttaaacccagagggccaggttagagctatgactcttaccatggggagcagggtaaagcactggcctggctctggggaagaaagagcactctggaggtttgggcttagggagccaagtacagctgcaaatttggaaccagagccagttaggctcaggggcaattcaggtcccaggggatgagggaccctggaccctgtcatgatgggactcagtactatcccagactctttgaggtcaggtatggcagaagcaagaaccctggagtggaagggtgcagctgttgtttgggccctgtggacagggagcagcaaaatcataattctactccctaggaagagggatgtctcagcagctcagaatgtaggggctagtccagttccagaaaag

SEQ ID NO: 815488 - DNA, 635 bp, Homo sapiens
ttcacaatggggagacttagctgaggggatccctcctcatgttgggtatgacatgccctacgagcagctgcaacagtgctgggttccrgagtacagttgcctagagcagctgtgaagccacagtcctaggctcaaggtctcaataatgtattatagcatctgggtcttgaaatgtaggttcactctctgaggagggttggatgcagattgcgcacagagccaggttatctaaggcaccttgtagtagcttaaacccagagggccaggttagagctatgactcttaccatggggagcagggtaaagcactggcctggctctggggaagaaagagcactctggaggtttgggcttagggagccaagtacagctgcaaatttggaaccagagccagttaggctcaggggcaattcaggtcccaggggatgagggaccctggaccctgtcatgatgggactcagtactatcccagactctttgaggtcaggtatggcagaagcaagaaccctggagtggaagggtgcagctgttgtttgggccctgtggacagggagcagcaaaatcataattctactccctaggaagagggatgtctcagcagctcagaatgtaggggctagtccagttccagaaaag

SEQ ID NO: 815489 - DNA, 548 bp, Homo sapiens
actttttatttttaattggcacatttaattgtacatatttatgggattcaatgtgatgctttaatacatatacgttatataatgatcaaatcactgtagttagcatcacctgatgcatttatcatttcaaaagcctctcttctattttgtaatatgcaataccttactgttaaccatagtcgctgtactatgcaataaaacactggaatttattactactatccaattgtaaatttgtacccattgaccaacctgtccgcatcttactcttctccctccctctcctgtctctggtgcacactgttctattttctacttctatgatatcaatttgttttttcttttaggattctaagtatgaatgagatcataggatatttttctttctttgtcttgcttatttcacttaacatgatatactccaggtccatctatgtcatcacaaatgacaggattctactctttttatgggtgaatcatacttcattctgtatatgtacyacattttctgtattcatctgttgttggacacttagtttgcttccata

SEQ ID NO: 815490 - DNA, 531 bp, Homo sapiens
aaaaatatatatatatttgcagactctgaactggttcagctgaaaggaaaagtacacctgcccagtgggagattatgtgggtctgagtcataaaagaaagaatccaacagatcacagaacgcactcagtgttgcacccacatttggaggtgatgccacctgttacctctgctgaagctgggtcaggcaatgaaccctcagccatccaggcccatcacctcccctgctgaagagactgtggccaccagacctccttaggtggttggatgagggatgatacaagatactaagatgaagtccaaactatatcttcactgtagaggaaaaatcaaaatggctttggtaagaaaatatttggcataatgtgtaccaaaatccttctggccataatatgctaagtmtacattattttgcctaataatacctgtaccatctaccatcccttcagagtgggctggagtgaacccacatgctcaagcacattttatatgtagaacctgaagagacaggcctattctgggtaggccttcag

SEQ ID NO: 815491 - DNA, 531 bp, Homo sapiens
aaaaatatatatatatttgcagactctgaactggttcagctgaaaggaaaagtacacctgcccagtgggagattatgtgggtctgagtcataaaagaaagaatccaacagatcacagaacgcactcagtgttgcacccacatttggaggtgatgccacctgttacctctgctgaagctgggtcaggcaatgaaccctcagccatccaggcccatcacctcccctgctgaagagactgtggccaccagacctccttaggtggttggatgagggatgatacaagatactaagatgaagtccaaactatatcttcactgtagaggaaaaatcaaaatggctttggtaagaaaatatttggcataatgtgtaccaaaatccttctggccataatatgctaagtctacattattttgcytaataatacctgtaccatctaccatcccttcagagtgggctggagtgaacccacatgctcaagcacattttatatgtagaacctgaagagacaggcctattctgggtaggccttcag

SEQ ID NO: 815492 - DNA, 321 bp, Homo sapiens
accactgggtcatctgcagaaccaagaaccagtgatagacaggtgacttttgtgcacacacacataggggccccaagtcagtttgctcgattatggttcggatgcagcacacatttcaggtaccagaggagtctgtggtcagagacaaggtaaattttataaagcagctatgggaatagcttccgaaaggatatagaaaacgtgcctaataggaaaattgtgcatagaatggcaaatatgtaaaactgtaatctggatgattttcagcctggaaaactagttttgtggtatttraaagcattttagacttttgatttcata

SEQ ID NO: 815493 - DNA, 626 bp, Homo sapiens
agtcaattgaagacatttaactgtgaaaatgaggctccataaaaagaatttagaggccgaagccgggcacagtagctcacgcctataatcccagcacttygggaggccaaggcgggcagatcacctgaggtcaggaattagagaccagcctgaccaacatggtgaaaccccgtctctactaaaaatacgaaattagctgggcatggtggtgggcaccggtaatcccagctacttgggaggctgaggcaggagaatcacttgaacccgggaggtggaggttgcagtgagctgagatggggccactgcactccaggctagacaacaagagcaaaactccatctcaaaaaaaaaggaattgagaaattaaaatagaggagagaacaaaggggccagtcccataaaaaatcccccaaacctctttaacaggagtttaggtaataatataaatgtgtggaggatactttttgccttcgttgatgaaggactccagcgagattgtgctgatgatattgttatacttggaatggactggtccttccatttcctggatttatccctttattcttctgagtgcaggcataactcatgttattacactttgcagatattgtgcttttcacagattg

SEQ ID NO: 815494 - DNA, 632 bp, Homo sapiens
tctattgatagcattttcttttctctagctyattttattgtaagaatacagtatataatacaaataacatagaaaacatatgttaatagactgtgttatcagtaaggcttctggtcaccagcaggctgttggaggtggggcctggtgggaggtgattggatcatgggggtggattaccctctgctgttctcgtgatagtgagttctcacaaaatctggttgtttaccagtgtgtagcacttcctcctttgctctttctctctcctgctctgtcatgtcaagaaggtgcttgcttccccttcacctttctgccatgattgtatgtttcctgaggactcccagccacgcttcctgtacagcctgtgacactgagttaattaaacctcttttcttcataaattaccagggagttctttatagcagtgtgagaacagactaataaataggataaaatagatccagaacaaaaagtattaccacacatgaagaagactagtttatgaagataaagcattatctcctcagataacaaatataaatgtctatatttttaataatggagcttcaaaatacatgaagaaaaaattaacacatttaaagggagaaatgaaaaattctcaatagtattttaaa

SEQ ID NO: 815495 - DNA, 621 bp, Homo sapiens
attgaccatgagataatagagatgatgcaatgagcacagaattttcaagtggatattatagctatgctcaagaactttttaaatgttcatatgaataaacaaatackaaatcttaacaaagaaaaaccaaactataaaaaaggaccaactgaaaattctagaaaaagtgcaatatctactatttttaaaaaattggagagtttaacaacagagtaaagatggcataagaaaaaaatcagtataagtaaaagtagatcaagactagttatgcaattaaaaaacagaggaataaaaagactttccagaattgcctgtacaacagtaatctcctttctgccttgaaaaacctggattttttttttaactatcaggcagcatcatattcaggaatggtgggaccagagaagcatgacattttggattaacatggtaacatcatctcctttataactgatattttagaggtaggcatatgacctagttctggaaaatgagaatgagaatgaatgagctggggcttctgggaatgtttctcgccctgaaaaacagcaataaacaggtacatgacctatgttcctgcctcttgaagtgtaaggatttgatttccggagctgcaagcat

SEQ ID NO: 815496 - DNA, 566 bp, Homo sapiens
cctttaaaaacctccatttttataaagctcccaaatrggtgaattatttctgcaaaaatgctgatatccagccctagctgtaacaataataagaaaaaaaaaattatcttatcctaatgacactcctttacccaagaactgcaattaggagtctcataaatttacaaagctttctcccttatttagccagtattccatcttcgtcaataccatatacattagttacacatttaaaacatttttattaaatatacatgtcttttggcaggcccaacggtgatcttaacccacttgaacatttacaattactgctttaaatttttcatgagctatctttatagcaaacgattctaacatttttctgaggattaaagtctaattcacaattttatggtttgatatatgagactgcatgttttctcatttatgataacataagagttcaagcaaggggtggttagaggtgtaccactgggaagaagatctgctaaatttatttttttggtattgcttttaaaaagtcttacttaacctgtatgtatctatggtaatatagatccaagaac

SEQ ID NO: 815497 - DNA, 294 bp, Homo sapiens
gatattcaacacattattataaaataggttttgtgttaggtgattttgctccagtgtagactaatgtaagtrttctgagaatgtttaagatagactaaactatggcatccagtagattaggtatattaaatgcatttttgacttaacagcattttcaacctatgatgggattatcaggtcataacctcattgtaagttgaggagcatctgtacatctgcaatgaccctatttccaaataaggtcaccgtctgagctactgggggttaggacttcaacatatgaatgttaggggg

SEQ ID NO: 815498 - DNA, 294 bp, Homo sapiens
gatattcaacacattattataaaataggttttgtgttaggtgattttgctccagtgtagactaatgtaagtattctgagaatgtttaagrtagactaaactatggcatccagtagattaggtatattaaatgcatttttgacttaacagcattttcaacctatgatgggattatcaggtcataacctcattgtaagttgaggagcatctgtacatctgcaatgaccctatttccaaataaggtcaccgtctgagctactgggggttaggacttcaacatatgaatgttaggggg

SEQ ID NO: 815499 - DNA, 600 bp, Homo sapiens
caatacacagtaacgcaataagagggttgctgaaatgtcctcaaagaaaagcagttcctttgtgttgttcccagcgaatacagtgcaaagtaatagagtcagctgaatttaagattcctatttcctgccggataaaacgtcttgcctgtttctaggtggcttgaaaaaggagaggagagaaggaagaggcaggagaaaagtcccactgaaaggacgtgggctacagtgtagtgagctaggctactgcctcactgcgctgggcggctccaacagttcactgtctcctagggaggttttcaaatgcaggacatttgctcacttttccaaggagagttattgtttttttgttttgttttgttttgttttgttttaaaaaattccagaatgtaaatgtataagataccggaagacaggcaaaataaaaataattggtttggggcagtgggtttataggtaacatttttctttactattrttttaaaattagatgtgatttaaaaaaatttccaaagccaaaaaacggtacaaatgctttaaaggatgaagatgttgtccccaagtgtcatcagacaaatttaggaggcccttcctcccaagcaa

SEQ ID NO: 815500 - DNA, 559 bp, Homo sapiens
tatggttgtgagctaagactaaattgaacaacaatcaattttaacttatatagtacaattgttcctctaagatagcagtcctcaatctttttggcgctggggccagtttcatggaagacaattttttcatggacaggagggtaggaacaggggatggtttcaggctgaaactgttccacttcagataatcaggccattagaggtctcataagaagtgtgcaacctagatcccaagcatgtgcagtttacaatagggtttgtgctcctgtgagaatctaacgctgctgctgatctgacaggaggtggagctcaggcagtaatgctcacttgcccgccgttcacctcctgctgtgtggctcagttcctaacaggccaaggactggtatgggtccatggactggaggttggggacctctgctctaagatatagggagggtaggaggcttaacagtctttccattgaaaagacttgaaagctccamtttacttaggttaaaatatgccacttatcttggctttcattaatagacagaaagtgtcccgattaaaggaggtgcta

SEQ ID NO: 815501 - DNA, 559 bp, Homo sapiens
tatggttgtgagctaagactaaattgaacaacaatcaattttaacttatatagtacaattgttcctctaagatagcagtcctcaatctttttggcgctggggccagtttcatggaagacaattttttcatggacaggagggtaggaacaggggatggtttcaggctgaaactgttccacttcagataatcaggccattagaggtctcataagaagtgtgcaacctagatcccaagcatgtgcagtttacaatagggtttgtgctcctgtgagaatctaacgctgctgctgatctgacaggaggtggagctcaggcagtaatgctcacttgcccgccgttcacctcctgctgtgtggctcagttcctaacaggccaaggactggtatgggtccatggactggaggttggggacctctgctctaagatatagggagggtaggaggcttaacagtctttccattgaaaagacttgaaagctccacwttacttaggttaaaatatgccacttatcttggctttcattaatagacagaaagtgtcccgattaaaggaggtgcta

SEQ ID NO: 815502 - DNA, 655 bp, Homo sapiens
aagtccagtgtgtttgctacttcctgctcactgaatccaatcagcaaaatgtcatcaatgtaatggacaagtgtgatatcttgcaaaagtgaaaagccatccaggtctctccaaataagattatgacataaagctagagagttgatatacccctgaggtaggacagtaaaggcatattgctggccttgcctgctgaaggcaaattgcttctcgtgggccttatggacaggaagggagaaaaaggcatttgccaagtccatggctgcatactaggtgccaggagatgtgttaatttgctcaagcaatgaaaccacatctggtacagcagctgcaattggagtcaccacttggttaagcttctaataatccactgtcattctccaagatccatctgtcttttgcacaggccaaatgggagagttgaaaggggatgtggtggcaatcaccacccctgtgtctttcaagtccttgatggtatcactaatctccacaatccctccagggatgtgatattggttttgatttactattttcctaggtagagrcagctctactgccttctgttcagcctttcccaccatcatagtcctcagcctaccagtcagggagccagcatgggggctgtgccagctgttaagtatgtctatgccaatta

SEQ ID NO: 815503 - DNA, 607 bp, Homo sapiens
ctgaggctagttgtcttagtcattttggattgctataacaaaaataccaaagcattttgcttttgaaaataacagatacttttctcagttttggaggctgagaagtccaagaccaaggcactaacagaagaaatttctggtgcagacccacttcctgattcatagcatagggacagaaaaggtgtaaaacctttcttaaaaggatcaccgcctacactcctatataaaagacaggttaacaagagaaaagcataacaaattcacttaatcaaagttttatggggcataggagccttcagaaataaagactcaaagactcaggaaaaactgtctgtttttgcttaggttcaataaatattggacagccatatagaaatgtgattggacaaaagagaatgatctaatggaatagaccaagtggggaatccagcaatgcctgtttgttcagattcttctttgtctctctgtgtggcatttattcctcccagttagaaagtaggactccttttggaatgagagttttatgacckaccatcagacaaggtaggccagattatttctttatggccagcttctacacagaaaggtgggagaaagttagaatgat

SEQ ID NO: 815504 - DNA, 641 bp, Homo sapiens
aaatgtgttgtgaaaaaactatgcgtggattcaaaagtttttggcaccaaaataaactttactaatttgctataacacgtctgaataggatctagtcagagacactaygaaggctaagacatcagtttagatgtcagagcagtatgagttctgctaaaattgaagtaagaccaaacagcaaatttatagtgaagtctgcatagaagaataatgaaataactgatgctttatgaaaattttatggggtcaatgctcctaggaaatcagcagtttacaaacggataacttgttctaacaagggatgagaccatgtcgaagatgaagcccacagcggcagaccatccacatcaatttttcaggaaaaattaattttgttcattccctaattgaagagaactaatgactaacagcagaaacaatagccaacactacaggcatctcaacaattggtccagtttacacaattctgactgaaaaattaaagctgaacaaacttttcacttgatgggtgacaaaactgttgcacccagattaactgcagacaggagcagagctttccatagaaatttaaacaagggatcaagatcctgaagcatttcttcaaagaactgtaacaggagccaaaacatggctttaccaat

SEQ ID NO: 815505 - DNA, 595 bp, Homo sapiens
ctatcacaacagcatgggaaagatccatccccatgattcaactatctcccaccaggtccctcccacaatacatgggaattcaagatgggatttaggtggggacatagccaaaccatatcattctgccmtgacccctcccaaatctcatgtcctcacatttcaaaaccaatcatgcattcccaacagtcccccaaagccttaactcatttcagcattaattcaaaattccagtccaaagtctcattcaagacaaggtaagtcctttccgcatatgagcctgtcaaatcaaaagcaagttagttacttcccagatacaatggggtataggaattgggtaaatacagccattccaaatgggagaaattggccaaaacaaaggggctacaggccccatgcaagtccaaaatccagcatggcagtcaaatcttaaagctccaaaatgatctcctttgactctatgtctcatgtccaggtcatgcggatgcaagagctgggcaaccacagccttggacagctctgcccctgtggctttgcagggtacagcacactgcctggttgctttcatgagatggcgttaagtgtctacagcttttcc

SEQ ID NO: 815506 - DNA, 595 bp, Homo sapiens
ctatcacaacagcatgggaaagatccatccccatgattcaactatctcccaccaggtccctcccacaatacatgggaattcaagatgggatttaggtggggacatagccaaaccatatcattctgccaygacccctcccaaatctcatgtcctcacatttcaaaaccaatcatgcattcccaacagtcccccaaagccttaactcatttcagcattaattcaaaattccagtccaaagtctcattcaagacaaggtaagtcctttccgcatatgagcctgtcaaatcaaaagcaagttagttacttcccagatacaatggggtataggaattgggtaaatacagccattccaaatgggagaaattggccaaaacaaaggggctacaggccccatgcaagtccaaaatccagcatggcagtcaaatcttaaagctccaaaatgatctcctttgactctatgtctcatgtccaggtcatgcggatgcaagagctgggcaaccacagccttggacagctctgcccctgtggctttgcagggtacagcacactgcctggttgctttcatgagatggcgttaagtgtctacagcttttcc

SEQ ID NO: 815507 - DNA, 402 bp, Homo sapiens
agaagtgatttaacagtgaataacgatcctttctgtaacagtaaagacaaaaagccagagacattacatatgggattccccaggcttagcataatgcaaaaatcatgagaataatgaaaatgatagcagacagcgtgtaccaagtgcccagaactttgggaggccaaggtggatgaatcacttgaggccaggagtttgagaccagcctggccaagatggtgaaaccctgtctctactacaaatacaaaaaattaatctggcgtggtgacgcgtgcctgtamtcccagatactcaggaagtttaggtgggagaattgcttgaatccgggatgcagaggtcgcagtgagccgagattgtgccactgcattccagcctggcagcctatgcaccagagtgagacct

SEQ ID NO: 815508 - DNA, 402 bp, Homo sapiens
agaagtgatttaacagtgaataacgatcctttctgtaacagtaaagacaaaaagccagagacattacatatgggattccccaggcttagcataatgcaaaaatcatgagaataatgaaaatgatagcagacagcgtgtaccaagtgcccagaactttgggaggccaaggtggatgaatcacttgaggccaggagtttgagaccagcctggccaagatggtgaaaccctgtctctactacaaatacaaaaaattaatctggcgtggtgacgcgtgcctgtaatcccagatactcaggaagtttaggtgggagaattgcttgaatccgggatgcagaggtygcagtgagccgagattgtgccactgcattccagcctggcagcctatgcaccagagtgagacct

SEQ ID NO: 815509 - DNA, 664 bp, Homo sapiens
aaattattacccttctcagctctaggattcgtaaggctcaattgagaaagtgcatgcgaaaacatktgggaaatggaaacgctattcaaacatatgataaggtgacagtggagatgatggcaatgataatttgggataaattttaaagtaagtccctgattttgacaggtagtgctagatgaggggagaggaggaaaggggccagggcacaaaggctgaaagacatcagcaatgccagggaacctgagcaggagagtaagtacaggaaaatggtgggagctagagctgcagttacagtaaagggatttgtcagtcagcttgggtcttctgcagaggaatttctctttttagtagggtagaggcatgttccctccaactcagacctcaagcagtactttggaagacctgcttgtagaaagatactaagaatggcaagggagagtggaaagggagagggagagactgagtctcgccattaggcgagaagaatggatggtgcaaggtccctgaggttgccagagaaggtcaggatctagagcacaggtgaagataagcaagagttacatgccttccctcagacacaggaaggacagtgctctcatcagtgtctcggaataaatcacctcttgaggacgaggcactggggtggatctggggccatgca

SEQ ID NO: 815510 - DNA, 545 bp, Homo sapiens
gaaaaagaataatatgacacaggtttgtgtagcttatcagtcctttccacaacattatatctttgattagttcttcccattttcaatcctcccatccacaacaactgtcactccataataagtagaaaacatatcaagagagacacagggagcaaatctggcagttagaatttcatcccaattcagagatctttgttcttggaagttctgtctatgaactttgcttttctcttccacgctacttgcaccttgcgaaataaggtgcctaacttgcagcagtgaaaactgcccagatgaatccagcctctttaggcaagctaatggcaaggataatgttcagcttgaaacaagttttccccatcttccagcatccacatagccagtctaggacaagaaaagaaaaaaaccttaaatactttttattagaaaggaaaggtacttgtttaactaactctactgtgattgaaagacaatgagaatggattttcagctactgrcactatacataaatgaggaaaactcagaacattgaggaaactcagaac

SEQ ID NO: 815511 - DNA, 626 bp, Homo sapiens
accaaggaagaagagcctgtggcctgtgctagtacatccgagaagatccaaacttaacctgaagggcccccatcagccacacagcactgcaggcctctctaatcctgactgtctagatgtcaataatgtgaggcctaaaaacgaacttctcagtagggtcttagaccacatgaaaaacagcatgccatctatattccctccttaattcccctatctcatgacatcctatacttgtctgtacctggatatgcaaaagcaggcaggcaacatgtttacacacaggtgtgcacgcactctttcgctcacgctcacacacacacacacgtgcatgcgcgcctggtgccataaagaatcagacatccaaatgatgccccaatgagatgacagcatacacaggaactcctcacagatgcccctctacccaggccgtgttcaaagagtctctgtttttccaactgcaaatgcattagcatgtccccttgattactaacagrtgtgcgcacaccatggaaacctgcaatctcaggaggccgccacagaggtgggccagggtctgcagctacactcagtgactgcaggtgggagggtggccaactctcaaatgccgtgtcaaggaacatctcact

SEQ ID NO: 815512 - DNA, 568 bp, Homo sapiens
atcttgaaaaaaaaaaaaaaaaaaaaaaargttacctgattagcacccctaatttcatctgcaactgtaattcttctttgccaggtatcctaatatattcacatgttctgggaattagaatgtgaagatttttgggtaggggagcattattttgcctatttgaagtgctaattattattggcaggttcttcggtttctatttttaatctgtggaaacaacaatagtatcaatttcaatttcatagtgtatttgtgataattaaataaactagtggacataaaacatcaaagagatcttttagtaaatgatagctattacttagtagttagagtctagtttttcacactagtaaaataataattgatatattaagaaatttaatattgtgaaaattagagagaatatgtgtatagttcctaacacttcttggttgtacaaactcagtttagttacttaacatttttggtccttatatttctcatctgtagaatatgctcaataattgcatagccctcgtagaatttttgaaaagataaaatttaaaaatggacatagagcttttagcat

SEQ ID NO: 815513 - DNA, 621 bp, Homo sapiens
ctaaactccatctcaaaaagtgatgctcaacatcactaataattagggaaatgcaaatcaaaactacagtgacataatrcatcataaacattagtatggctaccattaaaataacagaaaagtgttggtgataatatcgagtacttcatactcttgtgcattggttgtgggaatgtgaaatggtagtcactgtggaaaacattatagtggttgctcaaaacatctaaaaaaattaccatatgatccagcaattccactgttgggtacatacccgaaataattaaaatctaggtctccaagagacatttgcacactcattttcataacagcattattcaaaatagttaaattgtgagaaaaacccaagtgttcatcagtagatgaatgaataaatagagtgtactatatacagagacaatggaatattatccagccattaaatagaagcaaattttgacacatgctacaacatggttgaaacttgagggcgttctgctaaatgaaataagtcattacaaaaagggtcaacccttatgattccacttccatgagatacatacttagaataggtcaagtcatagaggctaagggtagaatagtagttaccagggactggaggaa

SEQ ID NO: 815514 - DNA, 581 bp, Homo sapiens
tctactaaaagacagagaatggcaagttggaaagggaaccaagacccatcagtatgctgtcttcaaaagacccttctcacatgcaaagacacacataggcaaaaaaaaaaaaaaaaatggaggaaaacttaccaagcaaatggaaatcagaaaaagcagatgttgcaatcattgattctgacaaaacagactttaaaccagccaagatcaaaaaagacagaaaaaggggcattacataatggtaaagggttaaattcaacaagaggagctgactattctaaatatatatgcaaccaatactggagcacccatattcataaagcaaattcttagagaccttaaaagagacttacacccctcacaataagagtgggagattttaacaccccactgacaatattagacagatcatcaagatggaaaattaacaaagatattcaggacacgaactcagctctggatcaagtggacctgatcaatatttacacaattttcytccccaaaacaacagaatatacattcttctctttgccacatggatcctactctataattgatcacataatcagaagtcaaagact

SEQ ID NO: 815515 - DNA, 624 bp, Homo sapiens
gggcctacaccttctgaagccatggcccaagctctatgttggcacctttcagccatggctggagtgtctgggacgcaagggaccaagtccctagactgaacacagcacaggggcccagggcccagcccataaaaccatttttcctcctagccttctgggcctgtgatgggaggggcttctctgaagacctctgacatgccctggagacatttcccccattgtcttggggattaacatttggcttcttgttacttatgcaaatttctgcagcctgcttgaatttctcctccaaaaattggattttctgttctatcacattgttggactgcaaattttctgaacatttatactctgcttcccatataaaattgaatgcctttaacagcacccaagtcatcttttgaatgctttgctgctaagaaatttcttccaccagacaccctaaatcatctttctcaacttcaaagttccacaaatctatagggtaggggcaaaatgctgccaggctgtttgctaaaatataacaaaagtcatctttgctccagttcctgaygagttcttgatctccatttgagaccaacttagtctgtatttcattgtacatatcattatcagcattttggt

SEQ ID NO: 815516 - DNA, 483 bp, Homo sapiens
actaatcctctttcaatgatctaagtaatttccattatttccctgtgctgagtactctggccaaatgcttctcagcctgtrggttataaacagacacatatgcctgacactttaggaagtgcagtctcaggttagcttttatattccctaaaactcatcttctttacaatagttgcactaagtaatatgggtggaaaataaacagagtgtttgtatagtaaattgcaaattatatagaagtgcaacattattagaaagactcaaacagagaggagaacacaaagtgccttttgttgctgaagtagatgtgatcttgaatatagattcatacagacaagaccaggatttcagattaaggaatggaatttgggcagaccactttatatattgggttttatttagaaaacaatatcaaattaaaatatcataattcaataattgccagttcagaggactcccttgtatataaatgcacagcgtaac

SEQ ID NO: 815517 - DNA, 590 bp, Homo sapiens
gggccaagcgggtaacttgagggagtcaaatgtgtgtggtttgayctctgacgtggggttttattcattggcatataaaaccttgattcttcccttggggtatgctgcccgcgtgtggggtggcctgccagcaccaaggaggggacacatgggcaatgtgtttactgaagttgtacccatgctcacttgaggcattcttcccttaccaatcaggtgttcccataagattaatatcagcaaactctgccactttgcctcttagtgtgcatgtttgaatctactttcccagctcctgagatcttactgggaagctgatcaccagtttcaggtttttctatttactgggagactacgttttccctggtgccagctgtgaccattattttatagagacagtttaacaaccacctgaacatcacttgatggtcagctgacattcctggtttgggggccctctcctgcctgctcatgtctgcctgactacctactgtaacattctgatgagggagcttgaaggccaggtagcaggagagaggcaggagagggaaacggatgtaaggtggggaaggacaaacaagtttgtacccacc

SEQ ID NO: 815518 - DNA, 590 bp, Homo sapiens
gggccaagcgggtaacttgagggagtcaaatgtgtgtggtttgatctctgacgtggggttttattcattggcatataaaaccttgattcttcccttggggtatgctgcccgcrtgtggggtggcctgccagcaccaaggaggggacacatgggcaatgtgtttactgaagttgtacccatgctcacttgaggcattcttcccttaccaatcaggtgttcccataagattaatatcagcaaactctgccactttgcctcttagtgtgcatgtttgaatctactttcccagctcctgagatcttactgggaagctgatcaccagtttcaggtttttctatttactgggagactacgttttccctggtgccagctgtgaccattattttatagagacagtttaacaaccacctgaacatcacttgatggtcagctgacattcctggtttgggggccctctcctgcctgctcatgtctgcctgactacctactgtaacattctgatgagggagcttgaaggccaggtagcaggagagaggcaggagagggaaacggatgtaaggtggggaaggacaaacaagtttgtacccacc

SEQ ID NO: 815519 - DNA, 642 bp, Homo sapiens
cccagaaagagagagagagccaaaactgtccatcttgccaatgaacagaggggagctacagcatggctcagcacggcatggcatgttatggcttgtgctcgtgcccagagagaaaaaagagttaagctactgaccctgaaggcagkgtcaagccagccatgcagctgtgtgttggagctgccgcctcaagcagccgagacagggcagacagtgtgagacagccagtgtaagaaagctattgatgagagctgctgctgaataaaaccatattctcctgcctacggccccccaagtgttctttctgcccatccacccagtccttctgggtctcagctggggctggaacctgatagagattttttattggcagcttattttctttaaaataattgcttcttgcttgaaaaatttggacttcttcatccaaaacagactaaatatggttaacagggttttagttccttaataaaaaaagagagtattagatataataagactttacttaataggaggtaatgagcaacttggtggattttgttagcaaaatttcattagtgtagtattagttttgtaagaaaggaatacttcacttacttgaataacagcagggttattttttggaaatgtgggctttattatatg

SEQ ID NO: 815520 - DNA, 273 bp, Homo sapiens
agagaggtctagtctccacaaggtatacttagaaggcaatagataaaagtagagagtaggagaggagggaagacattcataggcagcagagttgaggcttttcatcatgtttaactagattttgcatccaaagaaacaagatgaaggagtgcaaataatgaagaagttggtgtgggctaggtgaaasacagtgcataaagagcctaatctgcagtgacttgcttgagcattcctcttaggtggagtgaagtgagtccctttggaatgaaaacc

SEQ ID NO: 815521 - DNA, 601 bp, Homo sapiens
gtgaaagtctgaactccagctaaattcmccctatggccatatggtatttggaacatctgactattttttcaaaaatagtggaataccaaaataatagagaaacaagtagaatcctttgctgaaagcaatattaaatgttgatagtaaaaggaaagctaatattttctgaagtcagtttcagaggacttctctttatgtttgacctgcattttcagataatatggaccagtgatgttgcaattcattccagcctcataaagatgaaggtgaggtattggaagtcactaaaaggcacaggaggcaagcatgggagaagagccaaatctcagctttgtaactaatatgctggatcatgaaaaagtatcaaattgaacctattcctatggaaggtttcctgagggtcagaactcattcaggaggcccattactctgataggaacttatacaatcttgaagaaggaaggcaggtacactgcatattaaattcatccttgggtagggaccttaattttggaattctaaaagggacacacatattttttatgacttggacattttaaagtatattttttaaaagtcaaaggaaattagaaatagagca

SEQ ID NO: 815522 - DNA, 557 bp, Homo sapiens
tttaggtaaattgagcatggtagacctccaaggttgggagacagaggaatccacagtggcccagcatgaggaagcagagcctgggcaggatgcataagtgggatgccaggtgaagggatgtggggtgtcagmacccaggagaggtgagcaagttgtccatgaagcagggcagcctctggcatgggaagtcaggactcaaacaggagagaaagcctgtcacatgggagaatgagatgggatattagccgtactccagaggattgatcaaataaataaatgcgataagaataatgacagccaggtctctatggaaataaggaaaactaggataaattctgaattgttgaaccagaattagatgtgttggtgaaaacttaaagtttatcatatatagagatcaacgaataatatagttttaaatgtgtatatatgcatatacatttctattccctagctccgtgtgccgagagcagcgacaccccatgagcaatgaacacacctagtgctcagatctggtttctaaatattgtttttcactaaaaggaatgaggacttct

SEQ ID NO: 815523 - DNA, 247 bp, Homo sapiens
tcgctgtagccaccacagctgggaatgtgctgggtcacacttgaagccagcatgtctcagagcccaaggcccatagtgtattacctgggtattgctggtggttattcagggcctaggggctcttttgtcagcaggagatgaatcctgccaggtctccactgtgagacggcagcactaagttcaatgtaaagtcccccrgttgctgtgctctccctctcccaagcacaaagatttctctgcaccacat

SEQ ID NO: 815524 - DNA, 601 bp, Homo sapiens
atgttagaggtgggtgtgtatattacatatgataaattcactccaatatatagaatccctaagtgtttggattcttctctcacactatttcaaggcatttatgacatatccactttttatattggagatcactattgagtcctaagtttactaaaagcattcaggcgagcacattagaaccacttctaactgctccagttcacacactgaattcggactctggtacgtgcacacgtatattgataaactcagatcagtctgaatttatgttcttccctatttagtctagttctctaagactgtattctcacaggtatccttcagatattatataagcatttttacatatatataatatttatattatatactattataaaatctgttgttattttgaatacctaagcccctttctctcagatttaactttgtaattgcccctcagggtgtcctagaaactaactctggatgagtacgggtgttttatgttggctagagatgctggtgaaagtttatgtattaaattggctaccgaatktcagtggagagacaagaattccagagtatcagaggccaagcaatgaggcggagaccttagttg

SEQ ID NO: 815525 - DNA, 474 bp, Homo sapiens
cacccagacttactgaatcagggactcaagagtgggcccaaccatctgttttaacaagtcctctatgtaatgctgatgagtataaagcttgagaaccacgtttcagtataaagcagtacagaatcagtacttttgattaacattatgctttttttgttcttctgtgtactttatcatattgcaaagtgtttatcaaaacttccgcctgagtgctcttaacaacaaaagagtgaaaatgtacacccaagaggacctggtgagagcattaaccagaaatacagaagtctcctgttctgttttatttattttaattttgccctctattccataacaggtacatgtagtacatgtttattttagtataaaatgcatgtgtgccctakaaaaatcattgaataaagttgagactccagaaaaatgcactatattgtcaggtagcttaaagtatacctcgagacctcagtgttggaagct

SEQ ID NO: 815526 - DNA, 537 bp, Homo sapiens
tattgtactattttaaccaaaccatgtggtgaatattaagttatggtagctgattatatttttagaagataatcacarcaatgtctcttgccccacatatttttttagaacttcctaccactcattaagagttggggtctaattctcctattgaatctgagcacacttatgtaaccattagaatgcagcagaagggatgccatgtgactttcctagcttaggtcataaaaggcaatgctgcttccgctctgattgttggaataccagcctgcttggagccctgagaaatccgagtacctggaggttgctgtgtcaggaagctaagccttgtagaaaggtcccaagtctcaggtatcagatttcaggtcagaaatcatagtgtttgagtcctttcatgccagtcaccagccatgtgagtgaatgaactgttagatgatttagatcatgccagcttcagccactgagtcactcccagtcacccctagcctttgagactctgcatcaaggctgtagattttgtgaagtagagaccagcca

SEQ ID NO: 815527 - DNA, 635 bp, Homo sapiens
tctatcatctatcatctatacatctatttgtggccatagcaacactacaaaatcccttttaaaatgatcagtttccctctggcaagagacttcataatgtagtattttcactgattagtttcatatgttatttagcaggcctgataacagtgtataatagcaaataaattttaatgaagtagacaatttaaattgtgcattgacagtaatttcatagtccaggataatgaacttaatagactacagcagagtatttcttcctttttgttttgttcattcaacaaatgtttattaaacacctactatatgcctattctgagaatagaacacggcataacagatagaaatggctactggcaagaaagttacattctagtacaaacgtaaatttcttctcttaatacaatgtgatgcaatgcaaaaatgaaacacagaatagttgagtcaattcatctaagtcactaaactataaaaggaaacaggaaaataaaaggagctattaactttattccacatttcacagctttgaggcatctttttaaaacacttttttgatcaattttttwaattttaattgacaaataattgtgtatatttatgaggtacaatgtgatgctttgatttatgtatacatt

SEQ ID NO: 815528 - DNA, 503 bp, Homo sapiens
actctcattgttttgaaactttaatttatcagtcaagatgggttagattaatatgcagtaggaaacaatctgaaaatctcagtgtcctaaagtaacggaagtttatttctcactcacactacctctggttggggaagtgggacccactcgcttctatgtcatcttcaataaggggcatagaatgatagggccaagaccacctggcataatgctacttactgtggccaggggaaggcaacatggcaaattatgtattggctcttgaggggcttcccatcctctctcagagctgacacatactatttacactcacatttggttagccaaagcaagtcatttgtccatgctgaacttcaaggctcagggaagtgtagtactactttgcatccagatggaggtgaagtgaaaatattggcaagtggtaatattgactaccacacttagctttcaygatactgcacattgttaacagctccctgacattttcttcctggtttctttca

SEQ ID NO: 815529 - DNA, 615 bp, Homo sapiens
attataactgcaataacggtatcacatactacaattacagtattttaaattcagcacttttggatactgcatgttcatttgcttcatactttaaaaacaacaaaccgaaagcaaaactcttgattaattcaaactcaatattccacaatgcaatgttaatacaaaatagtctaaaaatttcaaatcattcagatgatagctcataggtcaaaattatatcttctccaacactgaagtttaagaacctcatcacattatttctcaggccttttcagacctattgatccccataatacacatctggcatgagctgacagttcaccctgcttcctacttgtccacaacttttacaacaaagagaagaacagaattagctatgtcttctcttttagaaccttgtggcaggtactttgcaaattaatgtatcacttcagatcactgtatttaagttcctgttcctctctcctcccacccccccagcacctgaatcctgccatgcctatgttcactctcactgtcagttctaaycaaatcaaaatacctgtaccatatcctttgtactcactaccttctcccaccacaagcatccattagaccacagagaatttctttcct

SEQ ID NO: 815530 - DNA, 612 bp, Homo sapiens
atcaagctatttttacattcctgattatgctgtattatttgtttaaataagctgctagatatgatttgctagtcaaaagtaagattggtttatatttttcatttttcaaagkaccaagcttgtgttcttgagagacctgcagaatcataagataaattggaataattttgttattttcaagcttacataacaggagagaattatttttcttgaaaaaaatgtaaagcttgctcagaaaaacttctgggctaggagcccttttggagataatttactgacagctgtttcctttttacccatttttattgaataattaagaatttttattttatcctgtgtcaatattatcactttaaacttttctgcataaattgaaattttaaaattgaatagcgtagaattatatatggtccgtattgtttttgtcttgtggtctaatttattaatatcatgcttttttgttaggcttttagtaatttggtaccaatttatacttcccactagcagtgtgtgagtggtcccatttcttcacatccttgccagcatttggtcttgtcactattttttaaatttagtcattgtgattggtatgtagtgatagtcattttggtt

SEQ ID NO: 815531 - DNA, 616 bp, Homo sapiens
taaacttatttttaaggttcaactttagtaaaaatcaaagatgtacaaaataatacaataaaacactatttttgcctgtcaatgtaattgtaatggcaatacacaatgcaggtgatggtgcagtgaagtgtacacaaccattacactgatgaaagtataaactgatgtaatcctcctagagcaattaataactacctaccaagaccctaaaaatattcagacagattgatctagtaattccactctgggaacctatttcatggaaacaaaaggggatattgttagaaaattttatgtatgttaatattcatcagcaatattttaatcacaattaattggcacaaatcaacattctattatatgcaaataatcgaaatactaagcaatgttaataaaaaataatgtatataaagaattataatgaaagagcaaatatatttttcatatataaaaatatatatataatctattatatcttatacataatacatataacatatataacatatattaaacgatatatttatcatattattaaatagtattaaatacaatgtgtgtatatattattaaayacaatgtgtgtatgtatatatatacattgtatttaataata

SEQ ID NO: 815532 - DNA, 607 bp, Homo sapiens
cacgcctggctaagcatctgcttgtatatgggctgtgtaagacaccaagagcatgaagcccattccctgccctggcagaatgtacaaactagttacaagctctgatgtcttcaaaatatttggagattaattatttctgcacatttttcttagggctgagtttaagtgaatggattcaaagaattcagggatttagaacctgagaacagataatgttctgaatattacccaatggtaacatgggactaggaatatagttcgctgtattttaagagactgccgtctttagaagacaatctatagagattgccctgttcagatagagagagcctatctgaacaagaaatccagagacagtaatggacagaggtcatggattcaagagctgggtgtgcacataattgatgttcaaggactttaggaacgagaggagaactgggggcaccctcattggcatctgcttcaaacactcattgacatctgcctccatggactaactggtacatgatgtaccagtatacggaaytggcttaaagggacagccagccggtcctcgttagcaggatcccctggagcctctcatttgttagagatggcataatatcca

SEQ ID NO: 815533 - DNA, 622 bp, Homo sapiens
ctccgttgccttttccttttcatcatgcacccacaataattatacatgttattacacttcatgttttacaaaaggctttcagatacaccccttctttcaatcctcacaatttccctgttaactaaaaattttatgctcattttaaagcctgaagaaactggaaactgacatttagagggccctaactactcaagatcatatagacactcaggagcaaagatggacccaaaaccagaccctgcactatctctacaaccacttctctaatcctagacaagcagacagatggacagatagataggcagacagatagacagataaagaaccctatactttttgcataaagagtgcttagtaattatctgttgatttattggactaaatgtgttttcttttgaatcaaatgtgatgccactgactcaccatcacatgccttagattacttgcccattagaggaacaggtttaacaactatttgtttgagtacctactatggacaaggcactgttgaaagtgttgggggaatacaaagggcgtcctatatcasttatattcttaaagacagtgaagagtgaatgagacatacactgtgcacacaaagctataagcagagtgtgataaa

SEQ ID NO: 815534 - DNA, 517 bp, Homo sapiens
caggaaagaaggcaacataaaaaagaaacgaaaccagacatgatcacccggggaacttccactctccaaaagcacccatagtgttctctgctcccaaggtgctctctcctctatctggacacagaagcatctatgttaatgtttgttaaatgaatttcttccctggttcatcgttcatccaacagacatcgttgatcactccttcaggaaacattgtattccctcgaggaggtataaggaagtgcacaggaagaccaaaaggatacagttctgtattcaaggagaaagcagcctcatgaggaaaccagacaagaaatttgatgtggtaattcctacagtagaggacatgccaggatttgtgagggacacagaggaggcattaaccaaactgatgctgagaaagttgcagaaaaattcagagcatcatttcaaatgaaaaccatttcagctgtttcatgaacctgacattgaatctgtcaraggagttttggttcaactccccaggtagagaagatgg

SEQ ID NO: 815535 - DNA, 609 bp, Homo sapiens
gttttgttactctacttctacgatcctaccctcatccttcacaatcacacccctaatacttttcagaataaaggcaaaactttcctctatcctatatattactgtagtgccttgctctgagggtgaaaaattctcaggggtatcaaaaaaagcaataattaaatgaggcaccgcaagcctgaggtaggacttcatgtctttctctgccatcatatcacattgtatcatatatcacatcagatcgtaaggttaagtatggtattaaaaataggacgggaaagtctatattcaaatatatcatgttgagaggaatgggacttgataatttatatctaacaacctcactttttctgtcacctattaacaacaaaatgcattgctcctgaaggtgagtgccttaagagtgaatgagagaatcggtaaaaaaatgttgaagatcacggcatgaatttcatttaggcaacaaatgcaggacagagctttgtatcttatctactggcrtatcctagaattcaatttaagaaggaaaagggttgtgaaggggctgtgtattaaacagaaaagtataaattgaaagatgaaggctgattttcctgacagaaagtaagt

SEQ ID NO: 815536 - DNA, 618 bp, Homo sapiens
tgaaaagtggctatttttctggtggtatatgaaaacacaatttcagtggagacggaaacttccactcaaaacttgctttgcttctttgcaattaataagttcctggtggactattcagaaagtgttcagctacaattgctgaaaaggatgtcgttgggtgaagaggttaacgatagcctcctagaagcagattcctgctagaagaaaaggaggtttaggaaatgcccagtgaccatggtctctctggtattgcataaaacaaccacaatttggggatgggttcttgcatcctcaccctgggcccttgtaatgagacaccatgcttgaactcaatactatttgtataggggctgggaatgaggagaagacagggaatcaataaactcaatgttcaagacatcatttgcaaataaattcaatatttgaaggggaacatgccaaagagaaaaatcaaaccataaataaaagaaaaaaagtttgttaattacaaatatctccagaagccacaatgtctccttcctccctcattccctaacactcyttcaggtaggactgtacttcagtcatgtaggaaaaaacatttttctatttcatattaaagattaatgaggcctgttt

SEQ ID NO: 815537 - DNA, 684 bp, Homo sapiens
tccaaaacgttgcagaacttttcagagaacgtaacacccctctcaccaatatatttatcaaggccttggtgaagaggatatcttctgaaccctcttaacaaacatggttaggataggtgagtcgatcacaatcaattctattgctcattacctttgggttatttccttatacatcatgccaaggaattttgggcatctaaactttagcatgggccatgttttaatccagattttagccatttggccaagaaaacactttgattgaattgattattaaattcagtctaatgtagtgctcttcctttcttggtacttcagaatatcttctcacacatatctcccaaagttttgttaaaataattgtccagttctttttatttctttggggtgaaatcttccctttttaggttttaactttgaatgtggtgaaatctcctcctcttaggcttaaagctttgaatctggcttacatgtatattccattccccaattctagtaggatgtgtgcagacattgaggtacaggcaagtcttcagaagaactgacttaccttgcaaagaacttttcttcatcatcttcaaatcagatgaaactgcctcatcagacataaaagatggcatagctycatctggcaaaggaagctagtgagagttagggtacaaagtacatcaaggtcattgtatc

SEQ ID NO: 815538 - DNA, 510 bp, Homo sapiens
atacatcatgccaaggaattttgggcatctaaactttagcatgggccatgttttaatccagattttagccatttggccaagaaaacactttgattgaattgattattaaattcagtctaatgtagtgctcttcctttcttggtacttcagaatatcttctcacacatatctcccaaagttttgttaaaataattgtccagttctttttatttctttggggtgaaatcttccctttttaggttttaactttgaatgtggtgaaatctcctcctcttaggcttaaagctttgaatctggcttacatgtatattccattccccaattctagtaggatgtgtgcagacattgaggtacaggcaagtcttcagaagaactgacttaccttgcaaagaacttttcttcatcatcttcaaatcagatgaaactgcctcatcagacataaaagatggcatagcttcakctggcaaaggaagctagtgagagttagggtacaaagtacatcaaggtcat

SEQ ID NO: 815539 - DNA, 552 bp, Homo sapiens
ccaggttcacgccattctcctgtctcagcctcccaagtagctgggactataggcgtccgccacggcgcctggctaattttttgtatttttagyagagacggcatttcaccgtgttagccaggatggaatatattttaaaagttaattttgaaatgttaataaaagagtagaaattggacttgataaaaatattagaggaaatgtcattaccacttaacacagtccttatttttgaggctgtgcctctccccatttttgtccccaaaaagttaacaaaacatgaaaagagaatttgaaggactttaaatcctaagggagagcttgaccttactagtttagaaaataacgcacttctttcaattaatctttccagcgatggttcttttcagtatgatatttaaggaaaggaaataactcagtgactcagttgcaagtgaccaagtttcaagttagataaaaactgggcacatggcaaagggacccaaacaagtacagagccatgggaaagagtaagaaaagttgagcttagaggactagcagtaatataatgaa

SEQ ID NO: 815540 - DNA, 485 bp, Homo sapiens
acttctttctgtctaccttgaggaaaggaaaataaacaagttcccagaaaaagcatcagcaaacttctaaatgaatataaccaaytcctctcaggagatggaacaggctcagtgatcacgtgtcttgggtttcctggcatgctcctggtttcacatattctgtgccatttctgctgtgagcttacttgtatcagaccatgtgtcctgacttggaatccaaaaatacagagatgcagtctttaaccacttctatgcacaacaacctccaagtccctggaatgacatggtgcctgtcttacctcccaaacctatgcaggccaaatcctaggtcccccacccccatcccatgcaggtcaagtcccagcctccccccatctcatgcaggtcaagccccagtcctcccccaacccagacacaaagaaacacactgagtaactgtcacctccccattcatagctgatggtgctcccagcttgtccccataa

SEQ ID NO: 815541 - DNA, 485 bp, Homo sapiens
acttctttctgtctaccttgaggaaaggaaaataaacaagttcccagaaaaagcatcagcaaacttctaaatgaatataaccaactcctctcaggagatggaacaggctcagtgatcacgtgtcttgggtttcctggcatgctcctggtttcacatattctgtgccatttctgctgtgagcttacttgtatcagaccatgtgtcctgacttggaatccaaaaatacagagatgcagtctttaaccacttctatgcacaacaacctccaagtccctggaatgacatggtgcctgtcttacctcccaaacctatgcaggccaaatcctaggtcccccacccccatcccatgcaggtcaagtcccagcctccccccatcycatgcaggtcaagccccagtcctcccccaacccagacacaaagaaacacactgagtaactgtcacctccccattcatagctgatggtgctcccagcttgtccccataa

SEQ ID NO: 815542 - DNA, 526 bp, Homo sapiens
atatatatatatatatatatatatatatatatatatatatatatwtttttttttttaagatctcatattttgtccttttaaagaataagaataaaaaggtcattgcaaagacttaaggggtcactgatcttaccttgcaggcttatggggaaagaggctcagagggttatattcatttgccccaaatcatacagagggtggtaaatctgaaattagaacctaactttgcagacctctaatgggataatccctccaccccgcccttgctcctcccagtatcgtggcatagcctgatcttgtgcaaccatttcatttagcaaatggggtggaagtagggttggagcaaccgagaggagagcacttagaaaagatttgaaaatacactgctcattaattttgtgtgaaggggttccaatgcttctaaaaacatgtccctgggtcagagataacactgttgccctgggctgctcagaggatgaaaagcagacgtttatattggcacagtcttcttcagctcacaaaaaag

SEQ ID NO: 815543 - DNA, 616 bp, Homo sapiens
ccttatcagattttgtgaaacacattgattaaactgtgtattgctaataatagtaacagttcaatccagaagaaaatttgcttcttaggaccctaatgatacagtctgatcartaaaaaactttgaaggatagagcatattcaattatgatagaatcctgtggtagaagtgaaataaaaatattttcagggagaaaaataatcaatgcaaaattttcaactggtcaaaggcttaagtatttttgaaatgaatgatggggtggatattaagtcactataatatttataactcactgcatacatttaaaaattttctgtaatcactttattttcaaaacatcattcataactcatcagaacttcgtaactacttaaatttataattaaaagcctttttaaatttatcattaaaagcccccctctccccacctttttttttctttgagatggactctttctcttttgcccaggctggattgcagtgacgcgatcatggctcatagcagctttgaactcctgggctcaagcaatcctcccaactcagcctcctgagtagctggggctacaggcatgcacaatcacacccagctaattaaaaaaatatatttgtagagatg

SEQ ID NO: 815544 - DNA, 589 bp, Homo sapiens
agtggtcctgaatggctcgctgaatacattacatcatgtacagttaagagtcaatgaaaaatagaagcttaaagtttcattgttaacctattacacttttaatcattttcacctggtaaagttaacccaggagggttaattaaaaacactgtactgtaaaacaaggaaaagaagaacaatgatagtttcttgagcagaaagtacatatttagagaataaaacaattggctaaaatttctgaatataattaaccacagaagacactttggatataacgctgtcaactgcccccttctatttccaacaaatataacagcatcatgtccacctgcacgtccgcatagtcctctacccctcccttgcttttctgcgcacactggcccaacagccagacctcacacagtaacaccactttatgtgacctgacaggtaggtccgggcatctgacactggaaagtttttttgtgtgtttgttgttgtttttaatttaatttgctatgttatcacrtagtattgtccaagaaatactatcaatgcaagtagatgggcccactgtaacaagttcttttagactgatttgtacaagtaa

SEQ ID NO: 815545 - DNA, 617 bp, Homo sapiens
tccatctctacaaatatatttttttaattagctgggtgtgattgtgcatgcctgtagccccagctactcaggaggctgagttgggaggattgcttgagcccaggagttcaaagctgctatgagccatgatcgcgtcactgcaatccagcctgggcaaaagagaaagagtccatctcaaagaaaaaaaaaggtggggagaggggggcttttaatgataaatttaaaaaggcttttaattataaatttaagtagttacgaagttctgatgagttatgaatgatgttttgaaaataaagtgattacagaaaatttttaaatgtatgcagtgagttataaatattatagtgacttaatatccaccccatcattcatttcaaaaatacttaagcctttgaccagttgaaaattttgcattgattatttttctccctgaaaatatttttatttcacttctaccacaggattctatcataattgaatatgctctatccttcaaagttttttaytgatcagactgtatcattagggtcctaagaagcaaattttcttctggattgaactgttactattattagcaatacacagtttaatcaatgtgtttcacaaaatctgataag

SEQ ID NO: 815546 - DNA, 545 bp, Homo sapiens
aagctatttgtgcttcatcttctgaaatactctatttttcttggggattttaatctgaccataggcagaaaggtgatcattagggtaaratggtatcttcttttttaaatgctccattacattgtgcatagtaataactggtactcacatgcacactatccacggaagtgaaggagattaaatgggtgctaggcagcatcagcttctgtaaactcagactcccaggagaagcccagcttgccctaggaggagcaagaattcagggccagaagaccaagtcacttgctgcctgcaacagctgaggcgaatcccttagcctttggcaccctaagtttagatgtaaaatgcggatagtaatacttgttctgccatcttcttggggtgggatggggcggggctggggaggttgggactcagtcccaaaaggaagggatgcaaattgaggcaggagaatagggtctggaggcagggaacctaaggctgtttcacgctgacttcctagaatgaaattgaaaggaaaaccctaacttttcctgtctaagtaa

SEQ ID NO: 815547 - DNA, 658 bp, Homo sapiens
cttgttgagttagaactgtaaaattcaaacccagctsggatcctttaaggtacaggtatttcaaatggtggattaggggaaaaaatgcctttttttttttttggcacagaaagaagacaagtaaactatctgttttattttggctttgagatagaaaaataaaatcccatttggaaattttaaaatcaaaacttatattagtgtgggtttggggttcaaagtttttaaacatatttattgaagtataatttgcatactataaattcacttttttaaagtgaacagtttgacatattttgacaaatgtatgtatttgtataatcgtcacgataaacaacatgtagaacatttatatcacctcaaaaagttcccttggtggggcacggtgctcacacatgtaatcctagcattttggggggctgagttgggaggattgcttgagcccaggagttggagatcagcctgggcaacatagcaagaccccatctccgtctctatttactgtattttaaaaatatttaaaagaaaaaaaagttccctcatgtttatttatagtgaatccctttgtcctactctcagccactggcaaccactgatctggttactgtgccctacagatttgccttttctagaatgtgatataaatggagtaatggag

SEQ ID NO: 815548 - DNA, 657 bp, Homo sapiens
gtaagtccagtgtgtttgctacttcctgctcactgaatccaatcagcaaaatgtcatcaatgtaatggacaagtgtgatatcttgcaaaagtgaaaagccatccaggtctctccaaataagattatgacataaagctagagagttgatatacccctgaggtaggacagtaaaggcatattgctggccttgcctgctgaaggcaaattgcttctcgtgggccttatggacaggaagggagaaaaaggcatttgccaagtccatggctgcatactaggtgccaggagatgtgttaatttgctcaagcaatgaaaccacatctggtacagcagctgcaattggagtcaccacttggttaagcttctaataatccactgtcattctccaagatccatctgtcttttgcacaggccaaatgggagagttgaaaggggatgtggtggcaatcaccacccctgtgtctttcaagtccttgatggtatcactaatctccacaatccctccagggatgtgatattggttttgatttactattttcctaggtagagrcagctctactgccttctgttcagcctttcccaccatcatagtcctcagcctaccagtcagggagccagcatgggggctgtgccagctgttaagtatgtctatgccaatta

SEQ ID NO: 815549 - DNA, 645 bp, Homo sapiens
agagagagggttattgagttctcagaaaatggaaattagccctgttcagagagtctcaaggagctgcccttaataaaaatagcggaaattatgggtttttttcttgccttacaaatatttttttttttgagacagagtctcaccctgtcacccaggctggagtgcaatggtgtgatctcagtccactgcaacctccgcctccttggttcaaacgattctcttgcctcagcctcccgagtagctggaactacaggtgcccgccaccatgcccagctaatttttgtatttttagtagagacgggggtttcaccacgttggccaggctgacgtcgaactcctgacctcgtgatccacccaccttggcctcccaaagtgctgggattacaggcgtgagccaccacgcccagcctcagatctttattccatatgagggacagtgagctgcattcgtggaattgctgcctggacacctgggaggcaagaggctcagcgcctgcccaagaagatggtatggttacaagtgcagggrggggcatatgaggcttgagggacttctcgtttgtttgttttctgttttcccaaatacacagtacatagtatagcagtctttagaaaaccaacctgccttaaattggtttactgttt

SEQ ID NO: 815550 - DNA, 645 bp, Homo sapiens
agagagagggttattgagttctcagaaaatggaaattagccctgttcagagagtctcaaggagctgcccttaataaaaatagcggaaattatgggtttttttcttgccttacaaatatttttttttttgagacagagtctcaccctgtcacccaggctggagtgcaatggtgtgatctcagtccactgcaacctccgcctccttggttcaaacgattctcttgcctcagcctcccgagtagctggaactacaggtgcccgccaccatgcccagctaatttttgtatttttagtagagacgggggtttcaccacgttggccaggctgacgtcgaactcctgacctcgtgatccacccaccttggcctcccaaagtgctgggattacaggcgtgagccaccacgcccagcctcagatctttattccatatgagggacagtgagctgcattcgtggaattgctgcctggacacctgggaggcaagaggctcagcgcctgcccaagaagatggtatggttacaagtgcagggaggggcayatgaggcttgagggacttctcgtttgtttgttttctgttttcccaaatacacagtacatagtatagcagtctttagaaaaccaacctgccttaaattggtttactgttt

SEQ ID NO: 815551 - DNA, 619 bp, Homo sapiens
agacatgaactgtgtaggcacatacaaggtagatactggaaacataactagtaaaggtaccaagtcacccttctttcgagcagagacagtcccttgccagaggatacagcttgggaagcaggattattaactcccacagagtctcccaaccaggtacaattccactgctaacctgatgactgtatggggcaaacttgggcatgtatgggaagaatatacagggcagtggtagttacttctgctaaatcttgggtccaccattccggttgtgcaactttaggtaaatcaacctcactgtaccagagattcattatctggaataaaatggtattaataactaactaatgactctaaagcctaatgagaaaataaagtgtcttatactaagcttggctaatgcaggcactcagtcagtgacagcagtagccattgtttgtgttagcagaaggaaagcagaggactttaagtattttagaaaggtggactggacstggaattctgagctgatatatctttggatttctcagtagtcaaaatatctgtagtaggaagccattattttagccaggtgtattagaccattcttgtattgctataaagaaatacctgagaccaggta

SEQ ID NO: 815552 - DNA, 552 bp, Homo sapiens
cttcttattaatgagtagtattccatagtatgaatctgtcacagcttgtttaagcatttgcccattgaaggacatatgagtcatttccaggtcttggctattttgaataaagctgctatacatattcaagcacaggctttgtgtaaatataaatttttatttttctgggataaatgactaaaaacaacccaaccattgttgggttgtacatttatttaagaaactgcatattgatttatagggtggttgtaccattttatactcccaccagcaatatttaaatgatccagcttctacacatgctcaccacatttggaaaaatcgaggagtgttatttagatcctgccggagttccaggtgagtttggggattccttaacagcctttcttttcccccaacttttaaaaaagactgatgttccatccytagtttggctcagatggcagattacattaacgataaaagccaaccaccatctagataaaacagtccaccaagccaagtccaccattttcctttaggacaacaagaaaggaaactcatacactttct

SEQ ID NO: 815553 - DNA, 633 bp, Homo sapiens
atttcccttcttcactgccctagcagaggctctccatgagggccccacccctgcagcaaacttttgcctgggcatccaggcatttccatacatcctctgaaatctaggcagaggttcccaaasctcagttcttcacttctgtgcacccacaggctcaacaccatgggtaagctgtcaaggcttgggggttccactctctgaagccacagcccaagctctatgttgccccttttagccatggctgcagcagctgggtcacaagggaacccaagtccctaggctgcacacagcacagagaacctgggtccaggctacaaaaccactttttcctcctggcctccaggcctgtgatgagaagggctgccgggaaggtctctgacatggcctggagacatttccccatggcggtagggataaacattaggctccttgctacttatgccaatttctgcagccaacttgaatttctcctcaaaaataggatttttttttctactgcatcatcaggttgcaaattttctgaacttttatgctctgtttaccttttaaaatggaatgcttttaatagcacccaagtcaccttttgaatgctttgctgcttaaaactttcttctatcagatactctaaataat

SEQ ID NO: 815554 - DNA, 510 bp, Homo sapiens
tattcttgccagaatattggattctaaaagctaataggtttagcaaggttgtgactggctggtttgtttacactggtctaagacaaatgacaattaggaacttcttccaagataagaattcccccatctggactgtaactaatgctgttcaagtgaagaaatggaatggtggttggtaggaactggtgccgccttgatttttcctgaagtcccaaactcatcggagtcttaaaaaattttaagtgttttttttgtttgtttgtttgtttttgttatatttgcatcacaactaccctgttgtgaatattttcaagaggaaatgaaaaagggtcagctaacttcagcaaacctatttaagaggattaaataagaaacttagattacctacctctaagatcctttccaactcraaagtgaattctatggagctaacccaaataaaggctccacaattttctatcagtatatcttaaataccagaaaggcacttgttgaatatgttatgaagtg

SEQ ID NO: 815555 - DNA, 590 bp, Homo sapiens
aaaagcagcaagtcactagggaaaaatgctctgcaagtgcagccattgttctcgcacttctcaactcccaggtgcatgtacatactatttaaatagagtcttatccagggtgccacttactataaatggctttctagttaggcagagatagcagacccacagctaagctccttaaaccggaataatcacagtcagatcttatcacaggatatgacttgaaattttcacatggactagccaattctaagagtttcataaaattaaatttcttatttaaaatccattatttcgtagaagccctcgatgtttcttgaacataaatttattttagcttgaattactatttcttgagcctccttaatctaaggtggaagaaacaaaacagattagtcaggtcttattgcctataagaatgtgtctcatagttaacctactgcttctagtaataaggatgacattttagagaaaatagatttacttttctaycattgtgtgtcattgatatgaattgattctgtttgttattcagtatgatcaatcagttagtacttcttaattatcaagtctgattaagtttttgcaaatatttt

SEQ ID NO: 815556 - DNA, 575 bp, Homo sapiens
aactcagaaaatacacaaacacatgaaagttaaacaacacgttcctgaatgagcatcatatcaatatgataattaagaagaaaataaaaatattctttgaaacaaatgaaaattaaaacacagcatactaaaataagtgagattcagcaaaagcagtgctaagagggaaggtgatagcagtaagtacctacatcataaaagtagaaggatttcaaataaacaatataatcatggactttaacaaagtataaaagcaaaaacaaagaaaataccaaagtattaaaagaaaaaaaatgaagatcacagcagagctaaatgaaataaagtcaaaaaataatgtaaagtattaacaaaagaaaaactggggttttcttgaaaacataaacaaaatcaataaaccacttactacattaaacaaagaaaaagagagaaatcccaaataaacaatattagaaatgaaaagaagccattaaatacaaaagatcrttagagactattatgaacaactctataccaacaaactaacaaacctaaaaaaaaaatggataaattcctgaacacatacactctaccaa

SEQ ID NO: 815557 - DNA, 465 bp, Homo sapiens
tctgattcatctccaaactcatttggagtggtgtagggaatagtactgagacagccrtagagaccatcatcccaaggactctagagtgactgtcccttgggatatataagttagaagtgtgtgtgtgtgtgtgtgtgcacgcgcacacacgcacgtgtatgtaaagggcatgatggggaacagagagaaaatgaaggcaggtgtgtaaatcaccagaaaaggattataagaagcctgtggtagcatgaataaagactggctttcttacatagaagtaggcatgcacaaaaaaaataggctcagtatgtatagcaaagatactaagctaccataaggacattgttaagctgtgatgccaacattactgttgtgagctttacatactaatacatttaaagtttaataaacatttgatatgtgaaaacaggcataaaataaatgaaaatggacactgaattttgggac

SEQ ID NO: 815558 - DNA, 588 bp, Homo sapiens
gctatgtaaatagttgttatactgtattttttatttgtatgatttttattgttgtattatgattttttttcacaaatattttccatytgtggttggttgaacccacagatgcagaacccacggatatggaggggaaactgtatacacagtatttagaaatatgcatgtaagtactagaagaaatagctgcaggaatcattgcttctggggactgatgttaagggggcttagatttttgggcagtgaactatcactttttattataaaccttcagaactgtttaacttttttttttgaaacagtttcactctgctgcccagactggagtccaatggcgcaatgtcagcccactgcaacctctccctcccgagttcaagcgattctcctgcctcagcctcctgagtagctaagactacaggcatgtgccactacgcctggctaatttttgtagagacaaggtttcactatgttgcccaggctggtcatgaactcctgacctcaagtgatccgcccgccttggcctcccaaagtgctgggattacaggtgtgagccaccacacccggctgtgaactgcttaactttttaaa

SEQ ID NO: 815559 - DNA, 628 bp, Homo sapiens
cacacctagtcccaagcaaccatcaatctactatgaatcactatagattagattggttttctctagagtttcatatatcaagcagtcaagcagctcctaggcaacagtgactacttctggtactagtccagctygctcttctgccatagtcttggccagtgaggagacatgatcccaaacagatttagacagtttattacaacacagtaggcaacttgagctttgtgttcttactgattctctttgatcctcaagacatatggggtgatgtggaggtgggcccaggttaatactgcacacattgtggatctatgacacataggaacactgaggctaggatccctaatattatacaggggctgctggcaaacctgtccatcctcccctgtggagacagatattatcttgatcatcttggtcaggaaacaaatttgtcctttgattcagattgagtgttatctttacaaccctggaatatctctggaaagagaagagaagactaactttattatgctagaatgtaaacaaatctgatccctgccatggagcagctttgcaaaccttgctgaacaaagctgtcaatgcccctcactcagaagacatgcataaatgccagaattgtctccta

SEQ ID NO: 815560 - DNA, 527 bp, Homo sapiens
gtgtggctactcctagaagagtagaaaactccccctacccaccatattctgcaggaagaggcagtaatcagactttttttttccatcagtggaaatgtggcccagttacctagtctggaaagaaagtggtggatgattctgggtgtaagaggaggaggacaaaaaaccaagagtgatcatgttcctggaaagtggctgtcatagagaactgcaagtgtaggtcactagatctataactggtagaagtccaactttggggcattgttggctgtgcctggctctaaaggactgggactcacctctctcaaataatcactgcagctgttctgggatctggagcagtgaaatatcacagaagcagatccacagcaactttggtaaagaaccagatccaacagagaaatgagagckgacccactggcagctcaaacaccatttttcctactccacggtaagaaaggccctttttatgggtctcaaattcccttgagtttcttggataatttatgggaataagaatactcaag

SEQ ID NO: 815561 - DNA, 618 bp, Homo sapiens
gatgaatgaaattctattgctgactactttttactgactataaaatcctgttgtgatatcacataatctcatagttttaaataccatgtatatactggcaacattcaaatttatttttcatcacttttaaactacagattcatatattcatctgtttacttcacatgtgtgcttgagatgccaggaagacattttaaagctaatatgtcccaaactgaacatcggatccactctttgctagagtgatcaactgtcccagtttgcctggggctggggagttctgaaggccatgggactttcagtggtaaacccaggaaagacttgtgtaaaactgggtagttggtcaccataacacacacacacacacacacacacacacacacacacacacacacacacactctttctttctctctgtctcaccatacaagtggcaccactttcagtctttcttatctttattctagtcaatcaactctatccctgcagttaattgggccaaaactttgragtcaatcttgactcctctttctctcacactcctcatccaatctttcagtaaatctttttggttctacctgcaaaatctagaatctaacctgtttacctcatttaaaa

SEQ ID NO: 815562 - DNA, 613 bp, Homo sapiens
aagaacaatattacacgggggtgtaccctttctatgacattgggagtaatatcaacctctcagcctttgaatattaagaacaatatcgcagggtggatgtacatcycctgcgatattaagagtaatatcagcctctcccctccatagatattagaaagaatatccaagggtgggtgtacaccaactgctatatggggagtaaaatcatcctcttcctcccaggatatcacagggtgagtgaacacagcctgcgatactgaaagtattatcatcctctccccctcgggatactaggaacaatattacagaagatgggtacactccctgcaatattgggagtaatatcatacatttcttccgtgaatattaggagcaatatcacagggtggatgtacacccactgctatattgggagtaatgtcatactctatcccctggatagtaggatcagtgtcacagggtgagtgtacacctagtggaatattaaaactaatatcatgcttcctgtccctggatattaggaacaatattaagggtaggtgtacaccccctgcagtattaggagtattcgaagcaataatattaattataaaacattaattattaatattaa

SEQ ID NO: 815563 - DNA, 613 bp, Homo sapiens
aagaacaatattacacgggggtgtaccctttctatgacattgggagtaatatcaacctctcagcctttgaatattaagaacaatatcgcagggtggatgtacatctcctgcgatattaagagtaatatcagcctctcccctccatagatattagaaagaatatccaagggtgggtgtacaccaactgctatatggggagtaaaatcatcctcttcctcccaggatatcacagggtgagtgaacacagcctgcgatactgaaagtattatcatcctctccccctcgggatactaggaacaatattacagaagatgggtacactccctgcaatattgggagtaatatcatacatttcttccgtgaatattaggagcaatatcacagggtggatgtacacccactgctatattgggagtaatgtcatactctatcccctggatagtaggatcagtgtcacagggtgagtgtacacctagtggaatattaaaactaatatcatgcttcctgtccctggatattaggaacaatattaarggtaggtgtacaccccctgcagtattaggagtattcgaagcaataatattaattataaaacattaattattaatattaa

SEQ ID NO: 815564 - DNA, 615 bp, Homo sapiens
caagttgtgaccatgaaaaatgcctccaccagtatgattccacttatgtgaggtacctagagtagtcaaaatcatggagacagaaagtgaaatgatggttgtcaggggctaggagaagagggaaatggggagttagtgtttaatgggtacagagtctcagttttgcagaatgagaagagttatatggatggatggtggtgatggttgcacaccagtgtgaatgtgcttaatgccactgaactatacacatgatatggttcaaatggctaattttatgttaggtgctttgtcacaatttttgaaaatggaaaaaaaagtgtctccagacattgccaacatactcgggaaagcaaaatcgcccctggttgagaactagtgttccagctgtagcacaacacattcaattgtataatatgtgtaaaaacatgggcctagggctcagccctgctttttgccattaagggttagaatctcatctctcctaaaatattttttatctactcagattttaggccaggatcaaaaggacaattgacctgtttgatctagaaaaagcccgtctatggacwcaaaactggtgtgatataaaactgtaaaaactcttacactgtttta

SEQ ID NO: 815565 - DNA, 578 bp, Homo sapiens
tgtgtgatgctgaggtttagggtatggatctcatcacccaggtagtgagcttaatacccaatacgtatcttttcaacccatgtcctcctgggagttgtgaaagtgaaaagactctccttaagaaaggagaaaagatgcctgatatggtttgattctgtgtccccacccaaatctcatctccaattgtaattcccatgtgttgagagagggacctggtgggaggtgattggatcacgggcatggtttcctccatgctgttctcgtgatagtgaggacgttctgacaaaaactgatggttttaaaaattgtttggcagttccccctgtgctcttctttctcacctgctgccatgtaagatgagccttgcttcctcttctccttccaccttccaccatgattgtaagtttcctgaggcctccccagccatgcagagttgtgaatcaattaaacctctttccttcataaattacccagtctcaggtagtatctctatagcagtgtgaggacagactaatataacgctccttycttaacctatattttccctgccagttgaaatccttttcgcttttccatat

SEQ ID NO: 815566 - DNA, 622 bp, Homo sapiens
tagttaattcttctaaataagtgcctgggatcacacagaccatttgccctttgcagtttaacattgagtatccctggtcacctgataggagagctctgtaagggccaatgtggctcttgtggagggttttgctgaatgtcagacaacaacccaaattcccaaattatgtcatcccagtgggaggctatctttttcagttcaatggacattgacttcttactttgggccccagctctgtgctaggtgctggagggtccttacccaagatccgaaggaatccgtggtgagatgcatgtggcagatagagaaaaaagcaggtagcatggatatgcaatgctttgagaactaatgagacttaatgagaaaatatgggggagaagaagggctggagtggacaacaagctgtttacaagagggacttgggatttggataggttaaataactcaccaatattacacagccagtagggggcaaaacagggattgaaactttgatttctctaagagacaktgaagagacagtgttacagttgcttagtcatgaagaatcgtaagaccttggtatgaagtctgacttgtctgattagctatgtgactttgggcatctcgaataatttctctg

SEQ ID NO: 815567 - DNA, 635 bp, Homo sapiens
ctttaacttttaacttttttttcctgactctaatttctccttgtcttcctctccttttcttctacttccattcaagtctgctttggactagagtttcagattaactttcaattctttctttagtagatttttaattatcccaaagccacactgagagcaggtcagttcagaggctccaggcagctttgctcacatctgcagaccacgtaggtataatctctatggcaactgacccatgttggttaggaacaaataagctgaaaaccaaaggttaattgctgtttcatttctgcttctttttttcccttgcaagtccagcattgtggatggaagttctaattaaaatcaaattatcagcagattgagcatcttctttataatttcagtggttgaaaaattattctggctgccttgaaaagggaaagcaatagatggtttctattggcctccatggctcctcttcccacctttaaggcaaagacaaatagcttagaggacccagccaaatggcctggatctttgctacacctaagaacagtatgcaccttcactgtcacttgattttgtyattaatactatcactgatagtgctgaccatattgggaatttactttctgccatgcactgtgctaagc

SEQ ID NO: 815568 - DNA, 617 bp, Homo sapiens
tgaaaaaattagactggcttagcctcccagcctacatctttctcccgtgctggatgcttcctgccctcaaacatcgaactccaagttcagctttgagactctgactggtgtccttgctccacagcttgcagacagcctactgtgggacctcaccttgtgatcgtgtgagttaatactccttaatgaactcccctttatgtatacatctatcctgtaaattctgtccctctagagaaccctgactaatataccactcatacctctaatttccattcatctctatatgatctttttcttctccttgggatagaagtgcactacactttaatttaaaccttaaaacaaagattgcccccccacccggctggcaccaccacacaataaaaccagaggatgtgtgggccgatttggcaacaaataatagatttacggtagcagaaacataaagtcacagagcaggttaaaactggagaaaagcaaataaaaacagcattataaatatctttccaatgacttatgcactcatttcaaaaaacattttttcggaatcwactgtgtcaagcactattttaggtattgagatatatcggtgaacagtttaaaagtctgtcacttta

SEQ ID NO: 815569 - DNA, 643 bp, Homo sapiens
tgaacatacagctaccaccccatcgacagcttctctttcttttgctcaatttcttttyttttttttttttttttttttgagatgatggaatctctctctgtcgcccaggctggagtgcagtggcccgatcttggcttactgcaagctccgcctcctgggttcacggcattctcctgcctcagtcttccaagtagctgggactacaggtgcccgccaccacgtccgactaattatttgtatttttagtaaagacggggtttcaccgtgttagccaggatggtctcgatctcctgacctcgtgatccgcccgcctcggcctcccaaagtgctgggattacaggcgtgagtcaccatgcccagccctcaatttctatgctgtagccaaagcagctttaaaacaaatttgaacttgtcactttcctgctttcaaagcttcatgactctttctggcctcctagactccgaattccctagatgggtctaccaggcttgtactgtctgtccccaaaccccctctgtaatctcactttcctccattcccccatgattcacacttctgtctactttgaatttctctgttgttatccctttctgaactacctctccctccattttctgcctagtaaacgtttcttcattatat

SEQ ID NO: 815570 - DNA, 629 bp, Homo sapiens
tgacacctgcctaggattcactgagagagaattactaagaaargagtgatggccaaagaccatgcaggctttgttgctgtggtaaagtggtcttttctgtctgctccagatgtgggcaagaaaatacaaagaagtttaagaagatttagtttaaatagaactggattgattccaaaaggcttaatgtttgcacaagagaatcccaaatcagatctaaaacataatcactgcttgagttcttagccttcctattagctattagattctgctaattatactctaaagtgtgaggagtgtttgctttgtttcttgaatcaaagcaccagtctttcctaaaatgcattgccaacttatagccattttcaaactattcaagtgagtcgatggaatctctctccagagacagtattgcaaagtggttgtgaacataacctttgggctagaaagagctgaatttgactaagaaatctctactgactttgcgtaaattattgaactccccattgcctcaaaagtgaggatgagaagtgtatcctaagaactaaatgttataagggataaaaagtgcctagtatagagcctggtacatgttgaagtactgtaggatgatcatcattatctatgtgttg

SEQ ID NO: 815571 - DNA, 588 bp, Homo sapiens
ctccccttcctgcactgctttctgctgtgctcagccaagcaaagcatcccctacatagaccacagggtataaataatactccatctcttgtggtatcacagccaggtccagtgtctggctcctgggaagaccatgggccagagaagtcaggagaaaacacatcccaactcagaagggctccagagtggatttcaggttccctttattgactccaaagaaaaatcctgtccaaatagggccacatggcatgcagcactagccacagatttcctcctttggaactctccaaaggtaagaggaggaaacagctttaaaaatgcaacccgaagcttcttacctctgccttatggatctagatcctttcccactattgcacagtgctatgccatctgcaattccaaccattctaaaccaactgcttattgtacttcttagagtagtaaactttgataggcctttgtttcacaacaattgtttytgaaacttctttttagtccacatctatggggtctgtgataccagtacagtggatgactttatagtctacgaaaaatggatccctggaaacctcttttcaaggagtaagat

SEQ ID NO: 815572 - DNA, 670 bp, Homo sapiens
ggagcccagctggcttcacccagtggatcccacactggggctgcaggtggagctgcctgccagtcccgcgctgtgcacccgcactcctcagcccttgggtgggtggtcgatgggactgggcaccrtggagcagggggcggcactcattggggaggctggggcagcacaggagcccacggagggtgggggaggctcaggcatggtgggctgcaggtcctgagccctgccccgcgggaaggcagctaaggcccagcgagacatctagcgcagtgctggtcggccagcactgctgggggacccagcacaccctctgcagccactggcccggttgctaagcccctcattgcctggggccggcagagctggccggccgctccaagtgcgggcccgtggagcccacagccacccagaactcatgctggcccgcaagccccacccgcagccccggttcccgccagcacctctccctccacacctacccacaagctgagggagccagctctggccgcggccagcccaggaaggggctcccacagtgcagcggcaggctgaagggctcctcaagtgccatcaaagtgggagcccaggcagaggaggcacctagagcgagcgagggctgtgagggctgccagcacgctgtcacctctcaaaattaaatatttttcattca

SEQ ID NO: 815573 - DNA, 584 bp, Homo sapiens
taatctcatgaagaaagcaatgtcgctgccattttctagacaaggaaaacgggcttttgagaggacaaataacacagctgaagaaacgacatgttggatttaatcccatgtttctggtttcaaagctactgcttatccctcttatgttagagaaatctaaggtttatgtctggttcctgagattccaaaacctgtactctttggttaagaaattgaaataaaaatatacaatagaagagaatgatgcactaatatgatactgcactttggttaagtggagtttatattattgttaaaatattcgtaatactaaacccttaacatttaaaaaatccatcccaatttagcatgaataaattagaccatagttttgagtacaaaacataattacaaattaattacaaaaaattagaatgaagctgagaattataactagtataaaagtctttsagtatttaattgtccatttgtaaaacagaggaaatttacctacatttgaaatgacttaaagacctagtatattaccttggatattactgactggtagtaggttttcaagtatattgaacatttttaacatctaa

SEQ ID NO: 815574 - DNA, 620 bp, Homo sapiens
gcacatgctactggcataaaaataaacatattgaccaatggtgcagatagaaagcccagaaatgaactatgcatttacagtcaatggatttcaacagaggtgccaaraataaacaatgggagaaaagacagtttttttaatcaagtgtattggaaaaacttgatatctgtatgcagaagaatgaaagcggacccttatctcacactatatacattaatcaactcaaagtggatagaagacttaagtgtaagacctaaaactataaaagtacaaaaaaaaattacaggaaaaactatgaagttggtctgggcaatgatttttttggacctgatcccaaaagctcaggcaacaaatgcaaaaaatgatgaatggggttacatcaaattaaaatagcttccatgcagcaaagaaaacaattaacatagtgaagagatattctacagattgggagaaaatatttataagccatacaaccgatgaggggtcaatatccaaaatataaaaggagctaaacagctcagtagcagggaaacaaatgatttgattaagaaatgagcagcactgtttgaatggagagtaaagtgaggaaagacgttggtccgagggtacagactttcagt

SEQ ID NO: 815575 - DNA, 533 bp, Homo sapiens
ataaggaaacttgtctattggcttatttttttttttcagtaaaggaatgatatttttaactgttttctgcttcctacagtacattagtctgctagggctgccagagcaaagtaacacagactgggtaatttaaacagaaatttgttgtcttggaataaatctggaaatccaagattttcagacttccacatttccaagtaatctggaagtccaagatcaaggtgtcagcagggctggtttcttccgaggcctctctccttggcttgcagatgtccatcttcttcctgtgttttctcatggtgttccctctgcatctgtctgtgtccacatctcctcttcttataaggacacactcatattggattggggcctgacttcattttaacttaattacctcgttaaagacctgtctccagacagtcatattcttagctactggcgtgaggacttcaaaatttgaattgtagaagcacacaggttagcccaaaacatagtgtcartgaccaaaattgacttcctaaaacagacctaac

SEQ ID NO: 815576 - DNA, 603 bp, Homo sapiens
aatctggaaatccaagattttcagacttccacatttccaagtaatctggaagtccaagatcaaggtgtcagcagggctggtttcttccgaggcctctctccttggcttgcagatgtccatcttcttcctgtgttttctcatggtgttccctctgcatctgtctgtgtccacatctcctcttcttataaggacacactcatattggattggggcctgacttcattttaacttaattacctcgttaaagacctgtctccagacagtcatattcttagctactggcgtgaggacttcaaaatttgaattgtagaagcacacaggttagcccaaaacatagtgtcaatgaccaaaattgacttcctaaaacagacctaacgaggtagtaacagtggggtgtgtgaggatgcatcagcacacatgatgggaaaacagtgcttatgacgaaggcacggagtgagtggtgatgaagtgtatgccaatgaacattawctgaggggctcaacttgaccattctgattctgtgtctattgcattctgagagctactttaggagttcctgtattacttatgtgaatggatccttgtgtcacagaaaactaaaag

SEQ ID NO: 815577 - DNA, 656 bp, Homo sapiens
aaaatatgcaggcttagacatagaggatccccttaggcaggggatrttaaacctccattttgttactaggtagccagatatcatgaagaaattaaaaaaagaaaattgagaaccagaaagactggcctatagagaaactttagagggaggcccaaaaagtgtatgtaagaagggatgaagaaaagcaaagcaaaaggcaaaaatcttactgtctgctctaaaacaaagtatccaaggcatcaaaccctgtaaagaactaaggctctactcgctaggccatataaagggtatgaaaaagcaaagcaagggaacttaaaaatagggagagtaaaagggcaaacaaatgtttcaaatgtggaagaataggtcacttcaagagagaatgtcctgaatgggaaaaagaaaaagaagtcatccacttatggcctttgaggaggaatagggagctcaggggctctgtttcttttatctcaagtcccaccaagagcccttgataaatttagaggtaggacccacttctttacctttttaatccactcacgagcagcttactcctctgtttgttatactccatctggtgtactttgttcaaaactatccttaatcagaagccaggaaggtggcttactgactcaaggattttaaagtatgaggct

SEQ ID NO: 815578 - DNA, 574 bp, Homo sapiens
acttaaatctaagacctgaaactacacagattctagaaagaacctgggaaaaactcttctgcacattggtctaggcaataacttatgactaagatgccaaaagcaaatgcaataaaaccaaaactaaattaaattggacctaattaagcaaaaagcttctgcacagcaaaagaaataatcagcagagtaaacagactacccacagaatgggagaaaatatttgcaaactatgtatccatcaaagaaataatatcgagattctcaaacaaatcagcaagaaaaaagcacaaatgatcccatcaaaaagtgaacaaatgacatgaatagacatttctcaaaggaggatatacaaataaacataagaaaaaatgctcaacatcattaatcatcagagaaatgcaaattacatagtgagatatcacctaactcctgcaacaatggccactattaaagggtcaaaaaacaatagatgttggcatggatgcagtgaaagtggaatgcttttacactgctggtgggaatgtaaattagtataaccrctatggagaaacagtatggagattccttaaagaac

SEQ ID NO: 815579 - DNA, 627 bp, Homo sapiens
aacttatctcacctgtgccccccaaattaggaaggacatggtatcagaataaagcacagtcactttaaagtgaatatatttgacttgatgaaaactttatactgctgaagagtctgaaacaataaagataaaaattaaggcaaactaaaacttcattccttttcccttcattttaccacagagggtaaaaattcaacacagattgctattgttctgggacagtgtttgagactccttacttcgccatagttatctaggctagtattatgtggcctatatttcacaatattagcaactcagattaaacacattgagcgcttattttctaggaacttatttaaaacaaccggcttcttcacaaacagcaaataaatatacacacacagaatacttccaagacttaatgataactaacatttaatcaagcaaaaggaaaaaaaaaaccttagtaatgtatgtaaatgttaaatatagttctctaagatgtaagattttgtacctggagcttatggatgtgtgttattgacctttgtgttatgaggtaatttgcttttttttttcttccacatccactaactgggcgtaagcttggaatgtrtatctttgaaattgcaggtcaaagcctcc

SEQ ID NO: 815580 - DNA, 642 bp, Homo sapiens
cagcatcccttcatgctaaaaagcctcaataaactaggtattgatggaacatatctcaaaatactaaaggctatttgtgataaacccacagccaatatcatactgaatgggcaaaaactggaagcattcccttttgaaaaccggcacaagacaaggatgccctctttcaccactcctattggccagggcaatcaggcaagagaaagaaatggagggtattcaaataggaagagaggaagtcaaattgtgtctgcagatgacatgatagtatattaagaaaaccccattctctcagccctaaaactccttaagctgacaagtaacttcagcaaagtctcatgatacaaaatcaatgtgcgaaagtcacaggcattcctatacaccaacaatagacaagcagagagctaaatcttgagtgaactcctattcacagttgcttcaaagagaataaaatacctaggaatacaacttacaagggatgtgaaggacctgttcaaggagaactataaaccactgctcaaggaaataagagtggacacaaacaatcctattccatgctcatggataggaagaatcmatattgtgaaaatggccatactgctcaaagtaatttatagattcaatgctattcccatcaagctt

SEQ ID NO: 815581 - DNA, 598 bp, Homo sapiens
ctagtttatttgcatagaggtgtttatagtattatctgatgrtagtttgtatttctgtgggaggaggaaatactcttaaactaatctttaaaaagccagcatcaccctcaaattaaggcaagaaaataacactgcaagaaaaaattatgggtcaatatccctgattaacaaagatgcaaacattatctacaaagtactagcaaacaaaatccaataccacattaaaggacttgtataccacaatcaagtaggacttaaccctgggatgcaagggtgattcaacatacaaaaatcgataaatgtgatatgccacatgaacagaattgagaataaaaaatcatatggtcatctcaattgatgcagaaaaagtatttgacaaaattcaacattgacaaaaagtctcaccaatttagatatagaagcaatgtacctcaagacaataaaggccatatgtcaaaagcccacagttaacatcatactaaatggtgaaaagctgaaagcattttctgagatcaggaaaaaggcaaggccactcacttcactctcaccagttctatttagcatagaactataagtcttagctggagcaattaggcaa

SEQ ID NO: 815582 - DNA, 679 bp, Homo sapiens
atatttgtttgtattcagactcttaggggcratgagaaagttcattagtgaaaaaagctagaacacaaaaatttcaccttgtaagtatctgcggaaatatttctctttaatggttttcttatgttgctaagaaggatcaacttttaacatttccctttgtgtagtttcttgtcagatctgtgtacacgcacctaccaaagatagggtgggaatttgcattttttatcaatcccggagagccgataagtttagaaaaagaaatataaacttacttttttttagaatcaagaactaacttactagtgtttcgctgtacaaaatttacagttaattgaaacttggttttgccttctgaactgtttgcaacccaaattgtctgctcttatttgttttacttaaattgtattgaatactaatatctaacaaagttgtagccctaagtggttccaaaatttcattaagttactgagaagtggatcttctctgcaaatgtattgtggtgtatatgatctcttttcttccccttctatggttccagggactcttcatagaaagtttggaactattttctgttacgtggtagtggtagaaatttggatggaggaagttcacagggttaaaaaaataaattgttgataataacaaaatagtttcaaggcttcttttaattctcatattt

SEQ ID NO: 815583 - DNA, 634 bp, Homo sapiens
gagaaaacataataaaacacaaattaagacacacacacagtggaaatagatggagtcaaatcatattcgtgacattcaaacaatatcacttttgaagattttaataaatataccttccttagcaatctgttactgatatagttagattttcagaaattttgttttaggaaaaattgagaatttcagaccttaaaatggattaatcaaatactcacttttggaggggtcagggaagataggagaaaatttccaatacattgttcagcagtctggggacgtgttagtcaatatctgtagtgactcagaatacagaagtgaggtggtgttttgagtatgctttatctctgtgcacaatggttccccttcttacaggttctgtttccagagaacaggaaatattctgtgctttctagattaactcacacttccaggtaggacttggtatctgaattgaatatatcccagctgagcagtctacagcgaactctgatgctgtcattggttgtgttttgttttgtttycagtaaaagaaacttacttagctgagttcaggtctctgacaaatgatcagtagctatttggaagtgcctaatggtctaacatctaaaactttgtattatgcataaaattttta

SEQ ID NO: 815584 - DNA, 540 bp, Homo sapiens
gtgtacaaatccagaaatcataaagtgtaaaaaattggagaatgctagtattcccatttctaattattatactgtgtagtttgcagtggtgtygtctctgggtatgttactatgttagtatagccttaattttaagaaaaactctgtttttctgtttggctttttagttgtcctaatgctttgtagtactttggagtacaaaatccaaggagctatcttctttcttattccaacattttaaaggtgataaagtgaaatattgcactggcttttcctaatagtgctcaccttgagagacatgtattatgatggcattttatgtttctaatggaatttgcacccatatctctgtgaagtgaatgtgtatttatcccttgactgtattttgctttctgttattagtgtcctctctatcttgggtgtattatttttccgtttcattccatctatacaatgagaacagcagtaaagccatatgttgacattgaagggggtcacagaattaacatgaaaatgtttattatatctaattttaaattt

SEQ ID NO: 815585 - DNA, 574 bp, Homo sapiens
ccttgtcagaaaacaggaaagatccaaaatcgatatcccaacatcacaattaaaagaactagagaagcgggagcaaacaaattcaaaagctagcagaagacaagaaataactaagatcagagcagaactgaaggagatagatacacgaaaaacctttcaaaaaaatcagtgaatccaagagctgtttttctgaaaagattaacaaaatagatagacaactagccagactaataaagaagacgagagagaagaatcaaatagacacaataaaaatgataaaggggttatcaccactgatcccacagaaatacaaactaccatcagagaatactataaatacctctatgcaaataaactagaaaacctagaagaaacggataaattcctggacacatataccctcccaagactaaaccaggaagaagtcaaatcccttaatagaccaataacaagttctgaaattcaggcagtaatttatagcctaccaaccaaaagaagtccaggaccagacggattyacagctgaattctaccagaggtacaaagaggagctggtaccattccttctgaaacta

SEQ ID NO: 815586 - DNA, 640 bp, Homo sapiens
caggaactgattagcacccattgtcaaaatcccaccttgctctgtaattttcacaactctctttagaaaggaaagaagtggccttgcaaatggtccagaaaaacacaaataagcacagtagtaataacaacacaacaacaacaataacacaagctaacataactagaacatttgctaagtgcttcacaacaaaaaggaaagctctaaacccattttagcaaacatttattagcccttactacatgccaggcgggcactgttctaagtgctttacaaatgtcgcctcatttaaccctctcaacaacgctatgagaaagacaccatcattatccccattttccagatgaggagtctgagacacacggaagtgaggtcactttctcaaggccacacagctcttctactctttgccaagggaaatctacgtttcattcattcgtctatttccaacaggtccccaaagccggcacgctcagttaccaccagcaacccttccaaattcactgcraagtttggagagtccgagaagtgccctcgatgtggcaagtcagtctatgctgctgagaaggttatgggaggtggcaaggtaagaccttctgtatgagccagacagaatttgctcatctccaccaggccattt

SEQ ID NO: 815587 - DNA, 558 bp, Homo sapiens
caacactatttcagcagctacataacaaactttttcatgttaagcttatggtccactaagacctacccctgatggcttttttaaaatatggactacaatccttcgtatttcacccactctttgattgggtaattgacatttttaaagctaaatatagactttgtgttacatttcctctagataaatttaatattattgctttggtccatccatctaggctattaaaatatttttattactactttggccattccatacattaccttgccctgttgacttggcgagagttaaacatttcaacagtgtccaatccattcatccattcaacctacattaactgagcacttactactctctagatgttacgtaggagccaaagatgcagaggatgtatttgacagagggtggcaagtacttctgtagaagcaagccatgggttcagagagcagggaatctctattgctgccagcagcaatggaaaggtttcccagtttatgaaacatggcagaagccaagacccagtctccttttctttytgagcatactgctgggctgtat

SEQ ID NO: 815588 - DNA, 629 bp, Homo sapiens
cagggagaatgttacttcacttgagaaagcttcatgattycctgactcagagatgccagagattcctggccgagcagtctgcagccgggatacatgcacctctagaaggcatccaggcctcacctctttcatgtgcagctttttctggacaggatatgatttcccacctcccttgtggaacgtacattttggagtgactacctgccaatataaggagtagaaacttattttaataaaaagcaacataatctgtgaatagacatagacattcaatgttaagcaatgcaaggaaggagaaagtgtctgtactgggagtcaagagacctgggctctagcctgattctgccacaaccaactgtgggacatcttctctgggccttggttctttatttgcaaaataaaacttggcaggtcatctttgtggttccctccagctctgataattaatgagtataaatttgaggaaataaaaaggcaaagtagaatatactattatgttaagatgttattattctctcaagatgagaattttatattggaaaagaacctggtttttacgtaatatcagaaaggaggctgagtgcagaggacatttcccaggcctactagaagatgtattcttgactctt

SEQ ID NO: 815589 - DNA, 629 bp, Homo sapiens
cagggagaatgttacttcacttgagaaagcttcatgattccctgactcagagatgccagagattcctggccgagcagtctgcagccgggatacatgcacctctagaaggcatccaggcctcrcctctttcatgtgcagctttttctggacaggatatgatttcccacctcccttgtggaacgtacattttggagtgactacctgccaatataaggagtagaaacttattttaataaaaagcaacataatctgtgaatagacatagacattcaatgttaagcaatgcaaggaaggagaaagtgtctgtactgggagtcaagagacctgggctctagcctgattctgccacaaccaactgtgggacatcttctctgggccttggttctttatttgcaaaataaaacttggcaggtcatctttgtggttccctccagctctgataattaatgagtataaatttgaggaaataaaaaggcaaagtagaatatactattatgttaagatgttattattctctcaagatgagaattttatattggaaaagaacctggtttttacgtaatatcagaaaggaggctgagtgcagaggacatttcccaggcctactagaagatgtattcttgactctt

SEQ ID NO: 815590 - DNA, 615 bp, Homo sapiens
gtctgtaaatttaatctgtaaatatagtgggcatggagaaatgtcaggagaactgataatcttaggctataaaacatcctcaataaatttcaaggaagagaaaaaatagaaacagtactctctgaccataatacattaaaggtgaaaatttaatttaaaggaaagatccttctactgatgaatttttaatgctattaaataattcctggttccaagaaaagataaaaaaacaaactatagactttctggaaaaattactaatgtgaccacaatacaagtcagaatctatgaaatatagctaaagcagttaccagaggaagtctaatagtatttaatatccatatgaataaaaattaaagaataaaataaataagctaaatactcaagaatttagaaaaagaataagacagtaagccaaaggaaagaatcaatgcagatcaaagtagaaatcaatgaaacataaaacagaaaaccagtagaagtaatgaataaaggtaaaatctggctctttgaaaaaawaacaacaacaacaaaatgtttaaaccgctagctaactctaacccaggttttacaaaaatgggagtataaatatacaaacttagaaatgataagata

SEQ ID NO: 815591 - DNA, 599 bp, Homo sapiens
cactgattattagtcgtttttttctctttctgcctcattttggctgtttctattcctatgtcttctcattttgatagtgtcttccacagtgtctaatcagctattaatcccatctggtatattttcacttctggtattatgttttttatgtctagaagtttcatttgggtctttttggcccatgtatactagttaatcatctctgtcatttctgcatctgttcctattgattgatttttcttctatatgagttacatttttgcttttttacatgccaggtaatttttgatggaatgctggtcattgcgaattttaagttattgatgctaaaaggtacttgaaaaagtgctggactttattttttggcgtgaaatttagttgtttgaatcagcttgatccttttgagtcttgatgttaagatttttttgcggctggttcatagcaacttttactctaaagctattttagtcccaatcctaaggtgtggtacttcagagaactctacctactgccctrtgtcttacaaggtctctccactctggcgagaaagtaaactattcctaactctatgtaagctccagtaattgttctggttactg

SEQ ID NO: 815592 - DNA, 479 bp, Homo sapiens
taaagtggaaccaaatttcatttggaaaatgagccaaccaagcatgtctccgttaacaaattgacacttggtgctgttgttctgtcactcccacttctaaggtaaatgcacatcagtaatttgacatgtgcaagggcctggtgtccagagctagcatggggtgaagtgggggactgtggggatggtggtgtctagcggaggaaaagcagattgtttcgaagattacatgacataagtgaatcaggagactgatgtctaaatacaggctggtaagtttgggggacagtggagatgttctagtcactaggagtggaaggaactgtgagcattggctacttttagtgactgagcttgttagagaggagtcttccactttakgaattgcagttagaggctgagaagtccagagtcagcctctgagtgtcactgcccctaacccgctcatggggtttgccagcagtctctggctgtaatatatg

SEQ ID NO: 815593 - DNA, 568 bp, Homo sapiens
gtccagagctagcatggggtgaagtgggggactgtggggatggtggtgtctagcggaggaaaagcagattgtttcgaagattacatgacataagtgaatcaggagactgatgtctaaatacaggctggtaagtttgggggacagtggagatgttctagtcactaggagtggaaggaactgtgagcattggctacttttagtgactgagcttgttagagaggagtcttccactttaggaattgcagttagaggctgagaagtccagagtcagcctctgagtgtcactgcccctaacccgctcatggggtttgccagcagtctctggctgtaatatatgggattggtgattgcaccgccgaactctggcaaaacactcttagatcttgtcatttgcttaggaaaagagtctgattttttgtttgtttggtttttttttttttttttttwgcaaaaatagttgataatgtgcatgtttcctctcaatcatagctggtttttctgtgtttctgttttaaagttggggtagaatgaaggtggaaaatagaaatttgttgcgtgaggaaatgag

SEQ ID NO: 815594 - DNA, 534 bp, Homo sapiens
ggggggcaagggtgtgttttcattattataacccatgcaaccaaccccgggtagtgytaagcgcaggaaaagggtcggcttcaggggaaagccgtgcctaaagttacctaacgatacaaaccggatacaacgcagaggaaacagaataccccagccaagcaatttccatgtcaaacatcatccgcgcggctgctccatctgtgaacgtgagtggtcgcctggctccctcttccgcggcggccgcttcctcataccttcacacggcgcacaccggccggcgcgtccagctgcctgcccagtggccgaggctcttccccctcgcccagtcttgagctggaagtgattcctattggccaaggtgtccatgtaaataggtgtgaaagaaaccagagctggccgggctctcccttctcgctcagtcccctccctctgcagcccccgctccccctcctcttcctcctcctcccaaggcgattgtcatatgatagctaagaagtggcacattaatgaagcgccgctacaggggtcttttct

SEQ ID NO: 815595 - DNA, 598 bp, Homo sapiens
agccctctgctttctgttatttgtttgtttttttttgagacggagtcccgctttgttgcccaggcctgagtgcagtagtgcgatctggcctcactgcaagctctgcctcccggggtcacgccattctcctgcctcagcctccggagtagctgggagtacaggctcccaccaccacgcccggctaatttttttttgtatttttagtagacacggggtttcactgtgttagccaggatggtctcggtctcctgacctcgtgatccacccgcctcggtctcccaaagtgctgggattacaggtgtgagccaccgcgcccggccgccctctgctttctgactcctgtaagccagctttctctcatgtaggtgactagttcttgcatcaaagttacgcctgaagaccagttacctgatcgtgagctccagtaggttgggtcatgttgtccaaggactcccaagttgtgcaagcgctgcatttgtacttgggacattttgtcatgactagcacacacttctkcgggaagggatggctggagctgcttatgctacagaaagaacccagcatgaaccagcttcttctcactcaagccctgcaagtc

SEQ ID NO: 815596 - DNA, 647 bp, Homo sapiens
agggtgcagagacaaaccaggctcaggcctggtccagtgacatagccatgtgaacctgggtgcacgacttaacgtctctgggcctggagaaccttgttctctttctcccccttagaaatacccacttcccctgcaggagccaggtcaaagggctgccctgctcctccatcccaggcaggctgcccaagcactcagcacacacaccaccccccagcccccacccatgcagcatttgcctcctcttgttacagtgatcagtttacctgtctgtcgccactcacaaattataaaatcaatgacagcacattatttatctttgaatccccaatatctaagcaattcctgggctataacagagaatccataagaccttttatggaaggaaggaggaaaagtggaagtgagaaaggaaagatgggtggagagaagaagggaggacagacataattgattatgctttcaaacagaaacagcaggcatggtgtgagaagtgctagaaaaacattctttccccratatgtcaattctgcttgcccagtgtctaaaacgtccttttttggagatttgttcctggggtaaagatactgtctccggttctccttgtcattgtttcccaccaaccaccgcccccgtccgcccacccccac

SEQ ID NO: 815597 - DNA, 596 bp, Homo sapiens
atggtaaaaactgtcaaaatctcaccggagggactcttggagggtaaagctaggtactgatgaaaaattcttggccaggcgtggcagctcatgcctgtaatcccagcaytttgggaggccgaggcaggtggatcacctgaggtcgggagttcgagaccatcctggccaacatggtgaaaccctgtctctactaaaaatacaaaaattagctgggcgtggtggcaggcacctgtaatcccagctactcgggaggctgaggcaggagaattgcttgaactcgggaggcagaggttgcagtgaaccgagatcatgccattgcactccagcctgggcgacaagagtgaaactccatctcaaaaaaaaaaaagaaaaaagaaaaattctcataattacttggaggaagactacctggcttacctcagatttattgtaataagagttctctatattcggcattccaagtttcccatattttatttgcatatggttcacaaaggacatgtgtatttgagtggatgctttccagctaagatcattaatggcaatgtcccaaatacattaaactggcaatctaggacatttgaaggctaaagtag

SEQ ID NO: 815598 - DNA, 511 bp, Homo sapiens
cactcgtttcactgtctctgaagaaatcagagtggcttgtgaggcaaggaaagcaagagaggtggttttaaaacaccttaatgagcagctcatagtaagatattgaraggatcctactggtcactgtcccctagatggtagtttaaaaaataaatcagtgaatggttaatacatcacctagagagagtgctatagagagaaggtctctagacttctcatgagagagcagagggctgatgctagtctggagagacacttggttctggggagaaggagctggacaggagtaggatttgagggtgcggcagcttctaacaaggctcatggttttcagcaatggtgctccaagaaacaagtatgctattgtgctgaattaatgctatctgtgcagatttgcttttatcctggaacatttcttacagaaacttcttttctagtatattctgtgatctgaattgacttgttcagataagagcactaaggatgctaaggctggcagagtcagtgcact

SEQ ID NO: 815599 - DNA, 622 bp, Homo sapiens
ggcagttcaacatgctgagttcaatgactgaaatcatttgactttaaggtactaaaatactattaaatgaaactcttcgttcaactacttaatatggaaagaattaagcttcaaaactkgctttatgatgccacatgtgatcttcccccaaaattaaaaccttagtgcggtgacttgtcatagcattgagaaagaacagacacctattttgcattctgaaataaatataattcacaaatgcatgagtgggtgtgtacttagactaatgaagacagttaaatccattgttattgaaaaaatgcatgggattctgctggctgtattcccttttgggtcttgagcaatggatttcatttatacctaaaaattccatcttctggccaggtgcagtggttcacgcctgtaatcccagcactttgggaggctgaggcaggcggatcacttgaggtcaggagttcgaaaccagtctggcaaacatggtgaaacctcatctctacttaaaatacaaaaaattatctgggcatggtggtggatgcctgtaatcccagctacttgggaggctgagacaggaaaatcgcttgaacctaggaggtggaggttgcagtgagctgagatagcgtca

SEQ ID NO: 815600 - DNA, 644 bp, Homo sapiens
tcacatcttcaaaatattaccaacaaatatgtacaaaaaagccctccttaggggtataaacaagtrtaagtaaactctccttgttcctttctctgaagctgtcttccttgcagtctaagaatcctgtgctgtatttggtcacaaatttccagtctataattttgttgtagccctttttaatttttgcagccagagtgggagagactcaagcttatcaacattttgcatcttgacaaaaaaaaggattattgtaacaagtttcttttatttaggactagagctgagttagttgtctactttaatgagtcacacacaaatgagaaatttaatactacataagcaaatattttcattacataaagaagacatattttccttgcaggagttcagcttacagatttagagagtaataaaagagctactggtattatttacatcagtaacacagatattctagctttaaaaggtggcattcataattattataagcctgacttctctatctgctttaatcaatcacataatgcttgcatgatttatgcatatctgtgtgcagtaagccatcgaccacatatcttattgctggttctttcaatgtaagtcagaaaatcatccataagctcagacaaattaaccagtgaagc

SEQ ID NO: 815601 - DNA, 627 bp, Homo sapiens
aagattttataaattctggaaggtcagggagaatcagatatcattttaagatgtcatatttcaatgtatagaagtagagtttattaagttgttgttgattgtgaatagcttaagaaagaagaaaaaggtcttccttacatatctggagaatggaaccttaaaaatacatcaacaatattccaagtaaccacagtgtaatttccttcagcgtttattcagtcctacgtaattagttttttttctgctggatcctggcttatccatccatttgcctgcagctgacttacactacactaaaatgagtcctggaaatcctaactcagtcaacaggtatggtatggaagttatctaagtgatgtttggtcagaaacctatacccatgggtccactcttttaacggtcagtagttagacatgtctggtacaatacttttctacaaaactctgagactatgtttatttgttgaatatacaatgactggctcgtagcagaaccttytagcaagtgtaacagtaaaatcaaaactacccacagatgagagaggattaatttctggctgtggttaatttattactataatcagtatatcaggaaggaagatggtaaaattctctattgcaatatagt

SEQ ID NO: 815602 - DNA, 611 bp, Homo sapiens
ttcaggctccatttcaattctagttctcttgctatttccacaacatcttcagttacttcctccactgaaatcttaaacccctcctttcccttggacacttagaagccattttagggttattaattggcccaatttcaatattgttgtgtctcagggaatagagaggccagaagagagggagagaggtggagaacagccagttgaaggagcagtcagaatacaagcagcatttattgataaatttgccatcttatatgggtgcagttcatggcatcccctaaacaattacaatgtaacatcaacgatcactgatcaccataacagatataataataatgataaactttgaaatgttgtgagaattatcagcatatgacatagagacacaaaatgagcacatgcttttgaaaaatggcacttagacttgctcactgtaggcgtgacacaaacattccatttaaaaaataaaaatctgtgaagcaaaataaagygaagtgcaataaatgaggaatgcttatatatacaacatgctttttattcattattttgatggtgggtacctagttttccatattttagcaattgtgaataatgctgcaatgaatgtggga

SEQ ID NO: 815603 - DNA, 609 bp, Homo sapiens
caatactcaatacaattttctaacacaattacttgggtcacaggtgtgacaatttttgagctattgaaactaacatgtttgagcttctgaaacamacagctctacagtcaacttaaaatcaataacagtatttgatttttgtcatatttgttgccttctagaattctgataggtagcataattctgtagtattgatcaatatgctatgctgtgtgtcaatatgaaaaatacaaatgccaatttcagttacttggaaacagtttaggagaactcatggaaggatttcatctatttttaacattcctgaccataggggttagcaaatttaccctttataatcatttatcttggccaaagtcaagaattcatttactatccgagtgaaatcacccatgttagaagaatgtctaaaggttttcttttgttgttgttcattttccagtttctttactaatatgggtacatttataatgggaaatactttgaataaaatataattttattcttcaaaatgcggacttgaagcagctgcttttcacagtgtacatctgcatagtgttatggaatgaaggtttttaaaatgagtgcttcaaaataccacatttattt

SEQ ID NO: 815604 - DNA, 531 bp, Homo sapiens
attttaataaaaaagaatgacataaacctatttattgtggccgaattgtgtgacacacacaaaaaaacacaccttgtaagcctttggtatcaaacttgaattcaaattccatgctccatctcttacaagtcacatgctatgtactatctctatgtgtacatccctcactagttaaatggataagttacccgatgaagttgttttatgcattgtgtgtgtgtgtgtgtgtgtgtgtgtgtgtgtgtgtgtgtgtgtgtgtgtgtagatatatagataagtagatcttgacacggggactaaaaatagtgaattggcagattggctttagttttccaactcaaatacaaacatatccatatacccttcctgtccacttttctggtgttttctgtggatggcaggtgtcctgagattttgggtggatagggaagtaagttaaatcagccttctggarttaaagacaaggcctcccaattttctggttagtatagatactaagtctgtaaatccaagctcatacagaaactgtgt

SEQ ID NO: 815605 - DNA, 605 bp, Homo sapiens
  misc_feature 361: n = A,T,C or G
tttctagaacaataagctttgaacaaaaacagtgccrtgttactcaataagttattctgagagtaaaacttagcttttcatgtggcaatttacttgtttataaaatgggaaaattatttactatagcctttagggctgttgggatataattatctatttggacatgcctatcacaggatttgtcatataaaatttcaagaactgttagtttccctgtcaatgaatgttaaaactcattccatttacagataaaagcagttgtatgctgaagacacagcaaactccccaaagtaatgtgggtaacagcattgtagatgtaacagtgctaatgttcccaatcatcttgttctcttgacctctntttccagaacatgttctcaataacacattctttccatgcttttgcaggtaatttctcttccccacctctattgctgtcagggtagcaatatgatctcatgttctcttattttgcacaagtcactttccttcagtggattatctagaactcctaccttaattcaaagaatgtgattataactatgcaagaagattataaatacaatccttttactttgtttcagctgaagtttctagacaatact

SEQ ID NO: 815606 - DNA, 615 bp, Homo sapiens
aattgcacgtgtcataggtgaaaaaatgtttcattttttttctctgagacactttaaaaaaattattgaatgtatgctttggaagaaatgtgagtgtaaatattatgcaatccaatgtatgacattctggcaatactactttaaacaatacatctaacaatagtagcaacagtttgtcttatttctactgaacataatatgactaatgacattactgctatgttttggggtttcttatgctttcaggatagattattttagatattctcacacgaccttgctattcctggtctctcatgaaaaattaaaacatttttatgttttatgttttatgacttaaaaccattcttacctctttcatttcgtcttggtgcacaagttcagggttacataaaatttgtttcattaggaaattgtagagcagattgaggttaccaataaaatgtcttagaaagttattgccaaggaactgaattcattttgttggttgctctctgtttttatagtstttgcttttgttcctcgacacaaacatacacacacacacacgcacaaacacacacttacttataattcctgagcaatttataaaccaagccacctttaagcctcaga

SEQ ID NO: 815607 - DNA, 615 bp, Homo sapiens
aattgcacgtgtcataggtgaaaaaatgtttcattttttttctctgagacactttaaaaaaattattgaatgtatgctttggaagaaatgtgagtgtaaatattatgcaatccaatgtatgacattctggcaatactactttaaacaatacatctaacaatagtagcaacagtttgtcttatttctactgaacataatatgactaatgacattactgctatgttttggggtttcttatgctttcaggatagattattttagatattctcacacgaccttgctattcctggtctctcatgaaaaattaaaacatttttatgttttatgttttatgacttaaaaccattcttacctctttcatttcgtcttggtgcacaagttcagggttacataaaatttgtttcattaggaaattgtagagcagattgaggttaccaataaaatgtcttagaaagttattgccaaggaactgaattcattttgttggttgctctctgtttttatagtctttgcktttgttcctcgacacaaacatacacacacacacacgcacaaacacacacttacttataattcctgagcaatttataaaccaagccacctttaagcctcaga

SEQ ID NO: 815608 - DNA, 504 bp, Homo sapiens
tggaagaaagggtatcagtgattgaagataaaatgaatgaaatgaagcaagaagtttagagaaaaaagagtaaaaaaaaaacaaacaaagcctccaagaaatatgggactatgtgaaaagaccaaatctacgtctgattggtgtacctgaaagtgacagggagaatggaaccaagtaggaaaacactctgcaggatattatccaggagaatttccccaacctagcaaggcaggccaatattcaaattcaggaaatacagagaacaccacaaagatactcctcaagaagagcaactctaagacacataattgtcagactcaccaaagttgaaatgaaggaaaaaatgttaagggcagccagagagaaaggtcgggttagccacaaggggaagcctatcagactaacagtggatcttttggcaaaaactytacaagccagaagagaatggaggccaatattaatatccttaaagaaaagaattttcaacccagaatttcatatcca

SEQ ID NO: 815609 - DNA, 527 bp, Homo sapiens
ttctgtggttgttggatagaatgaatgttctataaatgtctattacrtttgttttttctatagtccagtttaaatccagagtttctttgttgagtttctatcccagtatctatttagtgatgtcagtgaggtgttaaagtccccacttattgtattgctatcaatctgttttcttaggtctagtagtatttgttttatgaatctgggtgttccggtgttgggtgcacatatatttagaatagttacatcttctttgtgtatttaaccctttgttattatataatgaccctctttgtctttttttattgttgttggcttaaagtttgtttcatcttatataaggatggctactcctgcttgcttttgttttccattttcataatatatatttttccacttctttactttgagtctatagctgcctttagctagtaggtgggtctcttgtagtagcagttggttgggtcttgttcctcacactgtccccccaccccgcccaatttgccgctctatatcttttaagtaga

SEQ ID NO: 815610 - DNA, 521 bp, Homo sapiens
ttgagtctatagctgcctttagctagtaggtgggtctcttgtagtagcagttggttgggtcttgttcctcacactgtccccccaccccrcccaatttgccgctctatatcttttaagtagagcatgtaggccacttagattcaaggttaatattaatatgtgaggttttgttcctgtcatagtgttattagctggttgccttagagtttcaattatgtaattgttttataggatctgtgaactctgtacctatgtgtcctcttataatggtgagtattgtccttttctttccattttagaactcctgtgagcatttcttgtaggactggtctagtggtgatgaattcccttagcatttgtttgggaaagattttacttcacctttatttatgaaccttagtttggcagaatacaaaattcttgactgacattttctttttctttaaggaggctaaaaatagactcgcaatcttttctgacctgaaggttttttctgagaagtccaccgttagtctgatggg

SEQ ID NO: 815611 - DNA, 478 bp, Homo sapiens
caaagctgtcagacagggacatttaagtctgcagaggtttctgctgccttttgttcggctttgccctgcccctagaggtggagtctacagaggcaggcaggcctccttgagctgaggtgtgcgccacccagctcgagcttcccagccactttgtttacctactcaagcctcaacaatggtgggcaaccctcccccagcctcgctgcagccttgcagtttgatctcagactgctgtgctagcaatgagcgatgctccatgggtgtgggaccctccaagccaggcatgggatataatctcctggtgtgccgtttgctaagaccattggaaaagcacagtattagggtgggagyatcccgattttccaggtactttctgtcatggcttcccttggctaggaaagggaattccctgaccccttgtgctttccaggtgaggtgatgccctgccctgcttcagcttacagtccatgggctgcat

SEQ ID NO: 815612 - DNA, 586 bp, Homo sapiens
agggactaatcctggagaaacagagatatatgacctttcagacwgagaatacagaattgctgttttgaggaaatttaaagaaattcaagacaacccaggagagaaattcagaattctatcatataaatttaacaaaaagattaaaataattaaaaataataagaaattctggagttgaagaacacaattcacatgatgaaaaatgcattagaatcttttaatagcagaattgattaagcagacggaataatttatgaacttgaagaaaggctatttgaaaaataaacagtcagatgagacaaaagaaaaaaaaacaaataatgaagcacaactacaagatttagaaattggcctcaaaagggcaaatatatgacttattggacttaaagacaaggtaggtaaagagatagggatagaaagttcatttaaagggataataacaaagaacttcccaaacctagggaaaaatatcaatatctaagtacaagaaggttatataacaccaagcagatttaacccaaagaagactacttcaaggcatttgttgatcaaactcccaaagatcatggctaaagaaaggatccta

SEQ ID NO: 815613 - DNA, 534 bp, Homo sapiens
acttgtccttggcaataatttatttctcttttcgagggggtgtagggagcaaacctcagttttctgcagggaattattttctttgggagatgtgtcttcaaaaaaaagttctgaaagtctgtatatactgttaaatacgctatagattgagacagaagacacaatcaatatgtttataaacctttgtccatcatactgaatatttgatatttacccagggacatggctacatgatgaacatgcatatggtttctgggaagaacaaaaattatctgtgggcagtgacgtgtaagaggctgaaagggaaattaaaaatttccgttggagggaggctctgttttttcataaattatttatatgcaactattgagatgcttgcatgcatcataatcaagcaggttatattatggctattaggaccacaaaccatgtatgactggttgtacaaaagatacytagaaataaaagatgaggatcatctagagtctaaaatagtctcagaataattcttccagaaacatctatgtggacttt

SEQ ID NO: 815614 - DNA, 665 bp, Homo sapiens
tatgcttatattcacgaaagacatgtggatggtctaagctcccacttctggttgatctgaggctctgcacaagaattaagtgaaggctaagatgaagttgttaattgtctagcttagtgttaaaggtgtgcctcaacattcatgcagcagagtctcttagcaaagactgggagacatactgtttccagactttgaagaaaaactttgtccaatcactatctgacctctaatctaactgagcagacttcagtggccacacaaaacaaagaatagactttgtagaattagttaatattagacagtgaataagcaaaaacaacaacagcaaactatgggaaagtcagatagtttaatttcaagaatttatatcttttaattgtatgcttccagtttttaacaaaaaattaatacaaaaaccaaaacacaagcaaagcagaacaaaacaaaaacaaaaaccaataaaaaagtgtgtacagagagaataaagcagtcactacaaatagtccctaaaaaagcctagatgaacaatgtactagacaaagattttaaataagttatttcaaatatgattaaaagaaagtakgagaattatgtctcaccaaatacagaatatcaacatagagactgaaattatacaaaaaagaaccaaagagaagttctgaagt

SEQ ID NO: 815615 - DNA, 627 bp, Homo sapiens
gcattattaaagccaattaagtcaataagcaatatccattcttgacaaagcattatcaatttcaggaacaatactccattaggatgatttagaaactggttcaaaggttgcaacagattatttcaaggctgcacaactagtatcttgcttttaggattatgttttgtttacttactgttctgtactatttaactgagaggttgtcaattgaatccaattcaacatatatatttgagcacatcttacatgccttattgtatgccaggccatgtactataatgtgtaagaactaaatattgagtgtaatagacaaggtccttgccttcttctacctttgggcaaagagggaaattgagaagacatctactaaataagtaattacaaatgtgcattgaaatagaagatatatggtgctatagaaacatgtaaaaataatttaatctttttattttgattttttagagatgaagtcttgctctgtctcccaagctggagtgcagtgtcccagtcrtagctcactgaaggctcaaactctgggctcaagtgatcctcctgcctaagcctcccaagtaactgggactacaggcttgtgccactgcatccagctcaaaaagggatttaatctta

SEQ ID NO: 815616 - DNA, 574 bp, Homo sapiens
ttcactcattctgcagaccattgcattcttgcgaggtacatttccatgttcatagacttgggcgattstaatcgttctgtctttgagagtcccttctgttgatggagtataatttatatatgcatacacatatcctgagagaaaggtgaggtacagattccagttgaaagttactcacacattttctccgaacaattaggcctacttctgtaatggtgtccaaattctgagggaagtgaaaatttcttcccctagggaagccatctgttttcccctatgaaatgactaatgatctgaagttcctggacgttctgatcatgttctcagttcaatgaagcaatctgtgaaattcacatgggaattggctcagtaacaggctttatagaattgtcttcagctccagaaaaaagggtcaatgtcatatgcagttaggaacttcgaacaaaaatatgtcatgaaaaatttaaccaattttttttttgcttttgattcaatttcttagaatgttaattacaagtaatagtgattgcagacattttagagtcaatatgcaatctcaacacaaattgaggac

SEQ ID NO: 815617 - DNA, 545 bp, Homo sapiens
gcaacgagacacatgaaaactgaaacatggctcccactctaggtttctgaaaaaggttttctagcacacaccaggaacagcgtagaatcagcagaaccttctagctatayagtggtggaaagaacaggttcccataagcagtgctaaaaacaaatgaatgcttctggtagacattcatcattattttaatggactaaataactccatctaaaaactttattcattcagtaacttgggagtattttttcaactaattgattctagcagcctcgtcagatataaatctgggtaaaagtaagacccttgcctcccaggagagtaacagctatgtggaaacttttcctggccacagcattgctaacttggctgagaacatgagaaaaagcccggcagtgaaaggcagcctttgctcttgttgaggccccactgaagcagccagtaaggaataaggaatatccaggtatctccgggggaaatgtgatacatgaaaattaggaatgcctacaactttctgtgcccctcaccaaagccaaccagaagtcaac

SEQ ID NO: 815618 - DNA, 607 bp, Homo sapiens
tctttttgttcctttgatttagtctgcctaacctctctcaccatttaattctaatcagatagagccagaaaattgaactggcaggaatagtcattgacatttaattaatgtctggcattccatttgttgaagaagaaagttgaagtaatggaaacttggcatagccatcttgaagaataggcaatgataaaaattacatgaggtctgtgctttcaaaggccattaataacacaagaatacttatactattttatgtggttcattcttgtccctgtgaagaagcttaaactttagggctgatgttctacctgtgtccctactgcctagaacagagctaagaatacagcagatgctcaaaaggattttaaaatatcactgcgttttcacaaagagggcaattcgggggtgggtggctgcactattccccatgcacacagctaaatcttctcaaaaagtcagttgagagaatgacattttccaaaaagttgtgagaaaagagatgaggycactgagacataatagtaaaacccaaatatgtgcagatgacccacaggcaagatagctttgattgcccaatcaaacccacacataaaattccaactgcagg

SEQ ID NO: 815619 - DNA, 607 bp, Homo sapiens
aggtctgaagtctcttatatcctgtagtgcctggaagtgctctgcccacagtgggtgcacaatcctttcattgagacattcagcacatatctaccaagtgcctacttgtggtggcactgttctggggctgtggataaatcaggggatcaaaatgtgagatactctcatacagattatggtctggaggagaagataaataaactaatagataatatagtgtagaatcggtaagtactatgaagaaatgtaaagcaagagaaggaaagagagagtgatgaacaagaaagagacaaacacataaaggacaagaaattagttcttggaaccattttcttgatgaacaagaaagagacaaacacacaaagagacaagaaattagttctatggaaccattttccataatatagtcatagatggactttctgatgagcctgtgtttcagcagagacttaaatgaagtgaaagagcaagggayatggacatctggagtaaaagtccatcagggaacggcaagtgcaaaggccctgaggcaggagtaagcttgaagtggtgaagaaagtgcaagaagaacagtgtggatgaagctgagaaaggtggggacagaatg

SEQ ID NO: 815620 - DNA, 555 bp, Homo sapiens
atagactctcagacccccatccccttggtctggcactgctggacaaggctggcatcgtagccataatcctttctagtttcattactaagaatgctccagcagtgggtttatgaccccatcatcatttaattaaggagtgggccctgggaactgggagcaccagtggccccagctccctaatgccacctggaatgtgcagtctggtgtacaactgcaccaaggcagtggttccattcccagctgcaggagtctaactataagaagcaaagtgtaccaagctaggcgttccttcctgtgaaggactcctggccccagaactgctgtcagctgcaccttggaaacaagtgccccaaacaaaatgcaccaaggaactcattactcaagggtgccctgtggcaaaccattttgcaaagcgagcaattcagagtgagtgatcactctagcatttgagtttcactcacaaggattgttaacagcacactgtaaacrtcattcacattaatgttgtttcttttcaatcctttattttcagaataaaacattccttcacctctc

SEQ ID NO: 815621 - DNA, 614 bp, Homo sapiens
acccatcaggtcaaccgcaggccttgttactctggatgccacatcaggcagccctattggtgatgggcccagacattacagggctggctctaacagtcagaagtgaagcacctcccctgagccaggtakccactgggctctgatgacaatcatccttcggccttcccattgccgagggccaggacactcagacagccaggaagtgtcagagctggggctacccctgaggaccagggatttcctggaatctacacatttcacttacctgggaaagtcaagcccacccttacccttgtggagttcatttccaagaggattttggggatcgtattaaagcagctcctcatcaagccatcaagttggcagtgaggcagctatagtaagagtcataggcagtcttcttcccatgacccccagcccctactccatgagctttcttccctactgatatcacaccaaccctccccaccaagtttactctcctaccatctggagaaccagtctttcagctttcacaacggtacatatattattctctcagtgccaggctataagaacaaaggcataacgatgcaagaaaatgatggcaaacttgtattgaactcttcctatat

SEQ ID NO: 815622 - DNA, 618 bp, Homo sapiens
gctgagggtgtttttggaatacaaacactaatgaaccaaactgcattataaatagtggccacactgaaagggatgaagaagaaartaactaattttggaaaacagtattttgactggatactgtaaggcaagcttgtccaacctgcagcccaggatggctttgcatgtggcccaaaaccaattagtaaactttcttaaaacattatgaaatttttttgtgatttttttttttagctcatcagctattgttagtgttagtgtatttttatgtgtggcccaagacaattcttctttttccagtgtgacccagggaagccaaaagtttggccacccctgctgtaaggcttaggacaaaaatatttctccacaaacaatggactccagttaatcaatctgtcacaggcatatggaactactttatgatactagggtcaaacaaataagtgaataaagtgtacataacaagagccacacttcccactgttgaaaaggctaaaaagaaggaagagggggaggctaggatgaaatctgtgcttggattaaagcggaaacattcgttatcaactcatgtttattttaatatgtatacagacagatacagaaacagatgtagatgtg

SEQ ID NO: 815623 - DNA, 618 bp, Homo sapiens
gctgagggtgtttttggaatacaaacactaatgaaccaaactgcattataaatagtggccacactgaaagggatgaagaagaaaataactamttttggaaaacagtattttgactggatactgtaaggcaagcttgtccaacctgcagcccaggatggctttgcatgtggcccaaaaccaattagtaaactttcttaaaacattatgaaatttttttgtgatttttttttttagctcatcagctattgttagtgttagtgtatttttatgtgtggcccaagacaattcttctttttccagtgtgacccagggaagccaaaagtttggccacccctgctgtaaggcttaggacaaaaatatttctccacaaacaatggactccagttaatcaatctgtcacaggcatatggaactactttatgatactagggtcaaacaaataagtgaataaagtgtacataacaagagccacacttcccactgttgaaaaggctaaaaagaaggaagagggggaggctaggatgaaatctgtgcttggattaaagcggaaacattcgttatcaactcatgtttattttaatatgtatacagacagatacagaaacagatgtagatgtg

SEQ ID NO: 815624 - DNA, 558 bp, Homo sapiens
aagtataagtgtaattttattttctcaatgtatactaattcttttgtctctttcttagatgaatgaaaaaaattacacctttagaaaaagagttgttakaaaaaagccttggttgcgtctgggggaagtgacagcacagaagagaccagagaatagcctgctggaggagaccctgcactttgaccatgctgtccggatgggtacggtgccctcttctgcaaagtttttctatggttccattttgtaggaagatttggggtgatgtttcttttccctcaactttttattttaaaaacttgcaaacacagaaaagttgataaaataatacagtgaacatcagtatgctattcaactggattcaccaattaacattttatcatatttgttttgtctcccctgcatatggaagattgtatatgtgcccttttcccccctgaatcatttcaaagtaagttgccagtatcagcatttcagtgttaagtactttcgcagatatcttctaggaaccaggacgttctcctatataatcacaataccattaatcccaccccaaaaatt

SEQ ID NO: 815625 - DNA, 625 bp, Homo sapiens
acaccctctccttctggtcttytaactttatgcaattctagccctaaatctttctattcccagatgaagcctgccatctgttcatcaaacttgtagttggagggagcagctgcagtttctatctgaatctgaatgtgtatgtgttagtcattaagaaaaaaatttgtgctgctttatgttttgagtcataactatgccatcagttggtcccaacaaaactgtcaatgccaatcccacaggagctagtctgggatctgctcccagcaataggctcctggtggatcttgggcagcttatataaaatcttttctatttgtcttcatctaaaaatggaaacaattttttaaaaaactcacctttttttcctttttgagaatgaagcagcagctctttgatctccttccttattgtctctggggagagctgcttatgttgagctcttggaagaaagttctccttgaagagagagtctaagttgaggaactatggtgtcctaggactggaacaggctttggagatcaattggtccagttctcctcaatcttcatatttacatatgatcttgccagattttgctgtatctttatattgcttattttttacttaatatatacttaaataaatt

SEQ ID NO: 815626 - DNA, 469 bp, Homo sapiens
ggccagaccaccatggtgaaggcttctttccccactgcaggacccactttgagaaggaccgaggaggaggatttgggttgttttgttaggggttactttcaggggaacatttcatttgtgttatttcttaaacttctatttaggaaattacattaagtattaatgaggggaaaggaaatgagctctacgaggatttcaccctgcatgggagagagcagggttttctcagattcctttttaatctctatttatctggttgtttctgacaggatgctgcctgcttggctctacaagctggaaagcagcttcttagctgcctaattaatgaaagatgaaaataggaagtgccctggagggggccagcaggtcacggggcagaatctctcaggttgctgtgggatctcagtgtgccccyacctgttctcccctccaggccacctgtctctgtaaaggatgtctgctctgttca

SEQ ID NO: 815627 - DNA, 633 bp, Homo sapiens
ttatccatttggttcttaaaccacaaaatctagtgagacaatataagtatttagttttacggatgakacataaataagtcaatgtatccaaagccaaaaacttcattccctctccaacacttaaatctacatttccaactagtaatcttcccctgggccaccaaatcattttgggtggacaaaatagaattatttgcaccctcaaaatctatttcttttcctctatactctttccttaggatgtcacccagtcacccattaaagatggaagtgacacatggacacagggagaggaacatcatcacacaccagggcctgtcggggggtgggggggacaaggggaagggagagcattaggacaaatacctaatgcatgcagggcttaaaacctagatgacgggttgataggtgcagcaaaccaccatggcacatgtatacctgtgtaacaaacctgcatgttctgcacatgcatcctggaacttaaaaatattaaaaaaataattaaaaagatggaatgacagtattatttattaggggtagccttaagtcttctctcaccctagatctcactggtcaccaagccccatcaattccgtatccttaacatctctcgggtggatcccttatctattt

SEQ ID NO: 815628 - DNA, 584 bp, Homo sapiens
atactgaaagaagcactgaagagggtaagaaagacaatctcgaactgccaacaccactcctcccccatgccatcacagcagcctcgtggtgcagaaggagaatctgtgcgtttgcgagagggagattgcagcgattgcagaactttgcattggaaactggtgctgccaacactggggagaactcagccagcagcctcagggggagcatttagaccagccctagccagagggcaaacacccattctagcagttggaacctgagttccaacatgcctcaccactgaagcctaaagtgctttcgggccctaggtaaacttgaaaggcagtctaggccacaagaaccgcaactcttaggcaagtcgtagtgctgaactgggcttgaggccaatggacttggggaacacacaaactactgagacaccagccagggcagctaagggagtgcttatgccacccctcccccaaccccaggcagcatagcttgcagctccaaaatagccccscttccttctgcttgtaaggagaggggaaagtaaagaggactttgtcttgcatcatggataccagctcagccacaatagggt

SEQ ID NO: 815629 - DNA, 451 bp, Homo sapiens
cagagaagcactctccatttgttggggagaaagtaaggggagagaacaagagtctctgcctggtaatcaagagcattcttctggatcatgtccaaggccaccaaggcagtayctctgtgagtctagaagaaccacaacattacagggcttggagtaccccctaatgcaggtatggcttagatttcaacacccaacacctttcaaatacctggaaagccttcctaagaagtatggataaagaagcccagactgtaaataaagactgcagtaaatacctaactcttcaatgcccagacactgatgaacatcaacaaacatcaagaccatcaaggaaaacataatgacaccaaacgaactaaatgagttaatttagttccgggataaatcgtgtggaaacagagatacgtgacctttcagacagataaatcaaaatagctatttttagaaaact

SEQ ID NO: 815630 - DNA, 625 bp, Homo sapiens
tctctgcaggggccgggtgtggtggctcatgcctgtaatcccagcactttgggaggccaaggcaggcggatcacaargtcaggagtttgagactagcctggccaatatggtgaaaccccgtctctcgtaaaaatacaaaaattagccaggcgtggtggcaggtgcctgtagtcccagctactcgggaagctgagataggagaattgcttgaacctgagaggcagaggttgcagtgagccaagatcacaccattgtactccagcctgggtgacagcgagactccaactcaaaaaaaaaaaaaaagtctctgcaggtcagccttcctgtgtgggtagaggagtgaaggagtgtggaaaggaatctggagggatgtaaagaggaaggggattctagcttttaccttagatatcagatgggtaaattgtgaagactttgaatgtcacaagtagaaagattcttagattcaagctgttccacatcatttcccatataggaaagtggaagcccagagggtgttcgcgctgatctgagaccacacagtaaggtagtgtcagagatgagacgggacgaagtgtgaaccccccagttcattagtcaattgtttctttggaacaaagcatctaat

SEQ ID NO: 815631 - DNA, 488 bp, Homo sapiens
ggatccatctcttctccctctccattaattcaggccttcttgatttctcaccaggattgctttaatgtcctcctacgtgatctcyctgcctccatctcttgacccacttcacccactgctgccagaatgtcctttctaaaacccaaatctgccagcctgggcaacatagtgagaccccatctttacaaaaaatagaaaaaatttagctgggcatggtggcatgtgcctgtagtcctagctgcttgggaggctgaggtgggaggattgcttgagcccgggaggctgaggttgcagtgagctgtgattgtgacactgcattccagcttgggtgacacagcgagaccctgcctcaaaaacaaaacaaaacaaagcaaaacaaaaaagctcacaaatctgatcttattgcccttcagctgacaactctttgatgactgctacagtaaaatgtcaacttcttggtgtgacttctgaggcccttcacagttagg

SEQ ID NO: 815632 - DNA, 539 bp, Homo sapiens
  misc_feature 172, 360: n = A,T,C or G
tatttgaaacttaattaatgtaatcaaccatattaacaggtgaaataagaaaaatcacatgatcatatcaattgatgcaaaaaaaagcatttratcaaattcagcaacaattcacaataaaagttctcagaaagagaataggaatagaggactagctttctcaacttgatanaaagcaaagaacaaataccttcaggtaacattatacttaacagcgaacaactgaatgctttccctctaagactaaaaacaggcaacgatgtccatcctcaccactcttattcaacacagtgctagaattgttagccaatgtaataaggcaagaaaggtaattaaaaagcatacaaatcagaaaagaanaaccgtctctatgtgcacatatagcatgattgtctacaaagaaaatttcaaggatgctacaaaaatacaaaatacaagcaaacaacctcctagaagtaaccagtgatgttctatcacaaggtaaaagacaaatacataaaagtcagttgtatttttatacactagcaatgaacacatgg

SEQ ID NO: 815633 - DNA, 596 bp, Homo sapiens
cactgctttttctaagatgagactctatctatattctgattatcaggaagtgactctcttcctttgtctagctccacatcacataaagatctgaaataaattgctcttatttcgtgggatcatctattatattacatggttaccaaaaaaaacataatcacaattctatggccaatatactttccattcttaaagcacgaggctcttttgaatctcttgtgttgtggactgagcctgggttttgcaatcagccctagctcccttatttgcaaattatgagaccttaggcagatttttaagcccctctcatccttacttctttcatgtgtcagatagacataatcacatatacctgttgtgttgttgcagttatgaaatgatgtatgcatggtgtatatggtgcctagaagaatgtcaaactcatcgtgggagctaagacaacacaacacttctcttctttcttctgtcatgtacttttcgattgttttccagatccttaaaactgtctcataacacagtaactgataacagtggaaactaatctttrtcactaacgcgcaatccatctgggagaaagccatttcttcttaaatcag

SEQ ID NO: 815634 - DNA, 624 bp, Homo sapiens
taaatttgttgggattccaacaaaaaaatagtgttcggtttttattttgttttgttttacaactagccaaattgattagcaagttaatttggaataacaarcaagcatgaatagtcaagaaaaccctgaaaaggagagcagcactatgagtaatgggtaagataccattaccagatattaaaacaaaaagtctctatatttaaaatagtgtggttttggcacatgaatacatgaaagaccaatgaaattgaaaagaaaaattcagaaataaacccactggcatattgttattttgtatatgataaaggtgacattgaaaattaataagaaacagatggacattttaatcagtgacacattattggatagctatagagaagttttaagttgggtctattcctcatataccatacatacgtaagatgtacattaggatatattccaaatacatcaaaggtttaagtgtaaagaaataaacatatacaaatagtacaagtaaacatgagtgatttcttctatcatctgggataaggggaaactttcttaactgtgactcaaaatgcagatacaatgaggaaaatgatacttttcactgaaggagtgattattttcaccataagggcc

SEQ ID NO: 815635 - DNA, 248 bp, Homo sapiens
cccagcccaaattattacattcgtaagacagacacctcttagaatctatatatatgaggttttactcccttttctacactcagtatgttttaattgatgcaaagcaattaattggcctaaaatgtttcaaatattrtagtctatacattcagaaagtaaggtttaagaatgaattattggtgcttcttggtgggtgtatatagcagtttttagaagtttaaatttcacctctactcagaaagataagc

SEQ ID NO: 815636 - DNA, 632 bp, Homo sapiens
tgtaactagagttggtaattaggttcggtgtcttaccatggtgtcatgtaatgcttattttaatcctgcggttttcagtggggagaaaagttttcttaacaagcatatgtaagagayataatagattagaataaaatgtcacaaggtgtacaaaagcagcttgtctctaggaaattttacctttttttgctgtttttcaagtttgtggatagccagattttttaaaaaatctttttgaattacagtaaattgattagtaaaaataataacaattcttaagctctcaaaaggctttagatagaaatactgggattgagcaaaatctaaacagatttctttgggccttcaaggcattttgcattcttgtgggtccacctccttgggaggtgaaaacaaattaaaataatgagttccttcattattttaataatgaagggtcaaggaaggggtttttttcccccaaagggaatatacttacccaggagagcattactccttaaattatgtggggataaactagagggattcaaaagaatgctgtttaaaaatcagtgtctctttccagaataatattaaaacccgaggcttcttaggaagtttcaatttttggatcctagttattggctcacata

SEQ ID NO: 815637 - DNA, 647 bp, Homo sapiens
catttcacattaagttgtattttacaacatttttaggtagaattttattactgtgaacaattgactattgattcatgtttctcagaactcagcagggcatggagaaaagtctcagccaattgcaaattcttggaaagtgttctcaggcaacatggcttacaaccaaaagtgctgggaatttaagcaaaatcttaaagggttagtcctgtactctatcaatgaaataacttactcgtccatcttgagctttcttgggacaagtatagctgactcctgctacatcaaatgtcacaaccatataaaatctgttcagtgtgaccctggcattttcaatagtacagtcccagctgaaaataatattagatattatcttgcatctacagttaaagccatctgaatgtagccttaatctttcctgtgccaaatcagctctgatgatcatcacaaattaacatattagaaagctattttaaaaattcaagagattcattaaagttcaataggcctgtgttcaaatcctaaaccaagaggccttgaaaaaactatcttaacacatcataagtgtcataagtaaaacagggattaccttgcaggtttattgtgatgtttaaatgagataacraaggaaaaaatggaaaataattatt

SEQ ID NO: 815638 - DNA, 639 bp, Homo sapiens
attatttattctacccctctcacctctaagctaccattttttgaatactgctgctgatgcctaacatttacatccctggtggcaatataacagaattggaacctctgccactagaattgcaactagggtgaggtatatgagactcttaggacacaaaatttaagaagttattcccttttagagtcatagaagttcacagtgccatctgtgcggaattggagcccctgctgtatctttccttagggacctcctgtggatacttctataatactagattgacaatatacattgtgtcctcatattaatttgagctcttaaagatgaggatctctacctaactcaagtcagtgttcttagtgcttatcatagtgcctggcacattgtggaccctcattaagtgtctgttcaatgtaagtatgtatggtctcaaaagataagataaactttttgttgttgttatttgtgtgtttatataggttttattacaccaatgttcccaaaccaacaccagcactctttatatgttcttagtaaagagcaggcatactgyttatgataaaataaacagcataaatttgaagttaaaatatgaataaaatattataggggaaaagtttaataaaaaagaagacagtggga

SEQ ID NO: 815639 - DNA, 694 bp, Homo sapiens
aaaatatcagatgtaccctataaatatgtattggtatatattaattttaaaaattaaaaaccagagaatgcctccagaaatcactccctcacactaacagacaataagtaaaacaacattagaacagttaaaaaaaaaagagatggctgcaagagacaaattttcttggagaaccagagtaaatggaaagcccaaagacaaatgggaagacccaaagtcaagtagggagcaaacttcaaacccagtttgactcctcaagtagattagaaaaaatcactacattaaaaggctagaagaaggaaaggcatgattatctccaagcatcaaaattatttatgtctggccgggtacagaggctcatacctataatcccagaggatgggattgggaggatgaggtgggagggtcacttgagtccaagaattctagaccaacctaagcaacatcacaggacctaatctctactaaaaattatcaaaaattagtggggtgtggtggcatgtattcccagccacttgggaggctgaggcaggaggatttcttgagcccaggaggtcaagactgcagtgagttatgatggcaccacttcactccagcctgggtgactgagcaagaccctgtcttaaaatatgtaaaaacatattatatataataaatatatattatatrtatgtatatatgtagtagtacctac

SEQ ID NO: 815640 - DNA, 469 bp, Homo sapiens
attcagaattgattacaagatggggaaggactgagtacagaagcaggaagaaccataamtgggctgccacggtaacaccggggcagtaggagtgttacttctgcctgggtgggcagtgtccaggaagggaacaggatgtgcctctcatttgagatctttctagaaagttcaataggatttcatcaggcagagaaaagatgaagggtgctttagttagaggggacagtgattgcaaatgtacagacatctcttaagtacacagtgtgtgtaggaaacagtaacagtttatctccagattgtggtggggtctaaaaagtcaggagcagacagtgaggggcctggagcaggtgcatctccttcccataggatgtctctcactgtgctaataagcaaaaggcactgcttcctccaggtggatggggccccaaaccagagtacatgggaaggaaaagcagtaatgataatcagt

SEQ ID NO: 815641 - DNA, 485 bp, Homo sapiens
ctcaggagggtgaggcgggagaatggtgtgaacccaggaggtgaagcttgcagtgagccgagatcacatcactgcactccagtctrggcaacacagcgagactcagtctcaaaaaaaaaaaaaaaaaaggaagcaagatctcaaatcaataatgtaacttctgatgttaaaaactagaaaaagtggtggcaggcacctgtagtcccagctacgcgggaggctgagacaggagaatggcttgaacccaggaggcagaggttgcagtgagccaagatcacaccactgcactccagcctgggcaacagagcgagactccatctcgaaaaaaaaataaataaaacctaggaaaagccaagacatactattcccaaagaagaagaaaggaaataacaaaaattagggtggaaataagtgaaacaaataagtgaaataaaaaaagtatagagaaatcaaaactgaaactggcaaaccattagctaaactgg

SEQ ID NO: 815642 - DNA, 624 bp, Homo sapiens
catgagaccctgtctctaattatttctcagtagaagtctgcgttaaaaggtacctgtgtttgacaataagaggccaagtgacagaatcttccaactgaaatctgatttcataaaatccaagaggaagagaatttgaatgccctcttaggaggaaaatggggttcatatcatttagtcgtctccttcggcaggtgctggaacacaactcaaagtggcttatggtttgcaattataaatctgggaagagattagatacattatatctgagtacaggactatatgcatctagggagttgaaaacatagtcctcatagagctttatcaaaaagaaaaagaatatgcaaataaaaaactaaaactgaatccaaaaaggtagctgaacaccacactctcaaatgttgtaaccagacttttgacaactgctcagatccaggcctgggttctaccatcttgcctcagctcatttttggctttggttcctaattgagctcttcacctcgctatttaaggacactggctctctgaacattgagaacytgtggctcaccgcatcctcccctccccaccttaggctcatcctgtcatcagacggcttcctgatttacaaggccaaggtaaccaaaa

SEQ ID NO: 815643 - DNA, 635 bp, Homo sapiens
acatttctacaatgttttctttctgctcagataaagagaaaatcagccaggagctccaaagagacctactctatcaaagatccaaattccacgtgtgagaaccaggaaacgaaagagtctcagatccacactcctgtaacattttataagggcatgtttggcagctctgatctgaggctcacgcagcctgactcagatcaagctgcatttgcgaatccagtgctggagggaaggggagtttgggagaagcaattactgggttgcatcggagacaccattgtatctcctgcattcggtgacagagtctcacttttctccactgtaagtctcagtcagtttgattgatgcacagaactgttcctctccctcctccctggggagggaggggaagatgaagtgcagtattgcagagagaaaagtggttttatacacatcatcttaattctcaatgatggagaaagaagaaaaagaacaggaattctaagtagcagagaaaggttcaaggttaatttgattggcaatatatgaaatgccacttacctcaggccatttsaaattgcccctccttctctccacaatgaatgaaatgattctttccaaagacagggggatcaactgataatggctgctattac

SEQ ID NO: 815644 - DNA, 636 bp, Homo sapiens
aaatccttactgagtggaggcgcattcatatcatttccataaacaatggaggaaagatagaaagggactcagattagaaccatgccagagycctgacattttagatgatattaaacctacaaactggcacttaaaaatgatgaggaacacacaggagacaagcacatgtgcctcatgtcgctgattaaagtttgaaaggaagcgttaagactcagctgttatatataatgcctgaagaatttcagattagttggagggagacaaatagaaaactactattttttttttctgactcatgaagaggtactgaggcccaaacacctggctgctggaataaataaatttcctctgggctatgttgtatttattgcttgcagcggggagcatttgacttccgtatggactggccagagtggatcaagggtgcggctaagcccagtgatgtccaacaaagacactgcaagcaatgtcaggctgctgtgtggaaagtacaaaaaagaacatttccccttagcccaagagttatttttactgagataacccagacatttaccagagcttcagtgcagagaagctgccagcaaagctttcagatgcaattcacccaggaggggacttaaggaatctttccctttc

SEQ ID NO: 815645 - DNA, 644 bp, Homo sapiens
acaaagaaggaaattaataaatatttgtcaagtaagtaaatttattcattcattcattaatraaatcctggacatataataggcactcaaaaatatgtatatactgattaactgattggtttgttggttgattgatgagtgcttgataaaactccatgaaaatcaaacatttccagggtgatatttttaggaaactatcaaccatcacaaaaacctaatttttttttttttttttttgagacagagtttcactagttgcccaggctggagtccaacggcacaatcttggctcaccgcaacctctgcctcctgggttcaagagattctcctgcctcagcctcctgagtagctgggattacaggcatgtgccaccatgcctggctaattttgtatttttagtagagatggggtttctccatattggtcaggctggtcttgaattcccaaacaaaggtgatccgcccgcctcggcctcccaaactgctgagattacaggcatgagccacggcacccagccataacctaatgtttttgtatgaatttttaaaatgtctatttgaggacacaaagaagggaacaaaaaataccagtgcctacttgagggtggaaggtgggaggagggtgagaattgagaaattacctat

SEQ ID NO: 815646 - DNA, 486 bp, Homo sapiens
gccccatctgccccctgggtcccagccacttgcttcatcttctggccacaatggctgcagtaaagacagaagcttctgcaatcatttctctgcatctcataacaccatcacttttctcaktctccctagaggataagagtcaggctttgtcttggcttttatctcactctttcctgcaggaaatacaaccatctcaatgcccagatccaatgtgactggacccacccagggtctagctattcaacaagatgtccagagtgacaagttaatactgctaagaaggatgaggagttgatgcctcatggaaagtaatgtgacctttgatagacaggaagaagccaggagatcaattattcttccttccttcctacttgactgctgcaagacacagtgattccatgtcacgtctccaactctctagatacagccccagtaactgagcaaccaactatgtcatcttgcaaagctgtagcctgctctattagg

SEQ ID NO: 815647 - DNA, 537 bp, Homo sapiens
tcccttttctcattataaacaattcacttcacacatgcagaaaaatgaaattaggttgaataatacaaagttatgaatgctgatagaaaataaatawcttcttatcttcctttcactttgctgcttggtctctgtggttttgcctttctggatctgtgccttttaaatgccttaaagtctaaaagttgaaaggtagaaaagacgagaagatttactgttaaggagcacaattgggtcctatgtctttatagtcaatattttaagtagtttaaggaaaaggatgttaatttaagagataggtcaaatgtttgtcttgtttttcaacaggatcacctggaagaatatgttgtttttatttattagatatttacaaggctctcatagcccagccaattatgatgaacactaggtatttaatacaatgtgataaacgtaaaaactgccagtatagtttgtttccagattttttaaaaaagtactgaatcatggatccagtaaaaagaaagacagagaaatagaaagagggaagagaggaag

SEQ ID NO: 815648 - DNA, 582 bp, Homo sapiens
aaccagtgatttccaataggtccttcagagggcacrccagaatccctgtgtgtgcacatctatgtgtgtgcgtgtgtgtaagggggtgttcatagctggtaaaacctatttgacatgcctattatgttcctaataaaaagtaattaaggttaaatcccatctgggctgctggagatgtgcaggtgatcgagtgaagaatgaagttggggtgagggtgaaaaggggctgaggaacaccactgtactttttgttcccacactctcaacagcctcgtgagacagggagggcagagttattctcattttatgaatgcagaaactaaggccccacatggactctaagctccaagaggacaggaactctgttgattttgcaccccagtacacagcacaatgtccgcatggcccacaggacacactcaatgtttatcgaatggataagtggatgaaagaaatagctctgaaattacttgcctaaatttgtataattcatcagcagtggagctgataattatacaaattcttattacaagtcctgattgctgaatttctacgagattgagtcattccatcctcctcttca

SEQ ID NO: 815649 - DNA, 661 bp, Homo sapiens
tctatgcatgattttcctggcccactagcctagtggaactttctatcaggttctctacaacttggtgtctttctctgtcttagatggccttctgagctctgctaaagaagatcgatcagccatgaaatacagcctcatgtagtgggggaaccctcaatgtcacctttgatcatctctaattctttattttgaccgcattcatcaacccccttctactaaacatctctgcgactgaatgtgtgtttttcttaaacgagtgccagatttctgttctgttgtggcctgtcctcctcaggcatagtgaagggagtagattttattagtgtttgtgatcttgagaaaatgcaggaaactggacttgcaggtttgctataagaatggggagtaatggcaggtggaggactggatgggaacatcttttttttttctcttattacagcataaaacaaatgcatgaataatgcacatgcaactgtacatgctgttctgattgactatgtcacatatgaactctgaatttcaaaacaaaggtaagttaatttgctggccagcaaagaagggccatgccaggcaagaaaagacttygccgattctctgcaagctgaattttgaaggaccagatgtagaagcagtaatggaatttattccctatcacaaggga

SEQ ID NO: 815650 - DNA, 511 bp, Homo sapiens
gccccctttgtgcggctgcccaaacactgacaagatgtagtggactccatacagcaggagtgccctagcattgtggacttagttcctgagcaagactccaaattgcaccacgttcttctgagctctggggcctgcggacatgctcttcctctgcccaacatgcttgctccctctctcctcttttctctgactacttcctattcatccttgaggtctcagcttaaatattactcctctgggaacccactttgatcttccagactgggttaggtgccccttgtttgtgtccccacaattcccctggacttccccttgaaagcagtgatcacactgaattgtgttcccttgtttacttgtccatatcctctcatagcatccgtgcttcatgaggccaggtaccaggtctgctttgctcacatctgtattcctgctgtggagtaagttgctcagaagatgttggttrtgtggttgaacctgtctgcttcacagctcactcacatactcttagttg

SEQ ID NO: 815651 - DNA, 628 bp, Homo sapiens
gggagaaggactgaaggaggagaaagtggatatggtgagccattaggaacttggggcagatttccacttagacctcagcagattakaaaggcaaatgggaacatttttttctggcctcttctacagggctgccccattaagatgggtttattgccggacattcattgagttaaagggaacttagagaactgagcaaaactcttatcacatcaacagggaaactgaagcccagagagtgggtcagtggcagggcaggatttggaatgtcttaactcccaagctggggttgttttcaaagcactgtggctgcctgcctcggtacccagacatcaaaaggaaaatgagtcactgtttctggggagaggatgaggaagatgttgacttggagaccctctacaatcatcttggaaggcaacacttgccttggagagttgtgatttagtttggaaataaatcaccaaacacctgattccacttacatccctgctctgtgttttgctaccaacccatatcacctgacgtccaaaccgggcaggttgcctgtctgaaaggctcaggggcccagttgctgcctaaagaagccccatgtggactagccgggatagagggtggaagaatgaagggaaga

SEQ ID NO: 815652 - DNA, 644 bp, Homo sapiens
tgacttgaccaagctcccaaacaacctccctgctccacctcagcttggtctgcccagaggctcgtaccccaaccatcaccccccagccaccagatcggtggcagtatgttgttgggtcttgttgacattttagagagaaaagcgccagaggtgaagttttctcgggttttatatctcaaagcgatttgttcttgggaacagaattctgtctgaagtattaataattcggctctaggtgtccagccccgttcatattcatgatgtgaaacgggcaaccatgcacctatccctgcacaacccactccgggtacaaatccggtaacctttcaagacgcgtgtcaagggaagctggagacctggctttcccagtgggggttcagctcccgggaggggggagaggagcccgaggcccgcgccgtctcgtttcctgggtaggagaaggtgcaggcggaggcggggcctcccgtgatacaggtggcagctctcgtcccctgagagcgggcgaaggccagggtcccacactcgcagcgctgcgacggcgctcgggacctccctcgtccactgctkgagttccagaggtgggtgcttccctgtcctgaacttcagagtgcggagtcataaatgggttccggctggcttactgc

SEQ ID NO: 815653 - DNA, 556 bp, Homo sapiens
ggctcacacctgtaatgccagcactttgagaagytgaggcagacagattactggaggcctggaattcaagaccagattggccaacatggtgaaatcccatctctactaaaaaatagaaaaattagccaggcatggtagtgcgtgcctgtagatccagctcctccttgggaggccgagggagtagaatcacttgaacctggaggtttcagtgagccgagatagtgccactgcaatccaccctgggcaacagagcgagactctgtctcaaagaaaaaaaaaatcacttaacttaaataatactgctctatgtcacatgaccttgggcattcttatatgtaaaaaagagaacatatactcagagggttggaatggttattaaatgaaatatgtaccgatcattgtatctgggacaatcatacacattcaaggggacagactctacagtatgtttgtgtttgaagagagcattcagctccaccattgtactggtaggaaaggtgtttcccaaaatttaatttgactcaaaacctcagaattttaccttattaggaaagag

SEQ ID NO: 815654 - DNA, 599 bp, Homo sapiens
acacatatgtgtagatgtgtacgtatgtatgtatgtatacattcctccatacatatatgtatgtttctgtgtatatatacacrtacatacacacatacatatagtattttttccttttttccatttgtttcagataagtgtataagtcaggaccttgtttctttagccagaagcagagatcatgatttgtataattttattttccaagaggtgtaagctcttacaagccaatataaagaactttcgccacagaaattttatatgtgaacttctaagagagagagacacagaaaaatagagattctctatgaaaaactactttttgtagtatacaaactaggactacttaaaacagaggaaaaagttaaatgataaaattaaggcagctggcctgtaatcccagcacttcatgagggtgatgcaggcagatcacctgagatttttgaggacttattactacaaaaactggttggctttatattaaaatgatcatattttacatatattggggtaaataaaatagattaaataaaatatatttttaaaaataatttcactggtttctttttaatctttaaattttaatttgtatgtgtgta

SEQ ID NO: 815655 - DNA, 599 bp, Homo sapiens
ttacattttctacaaaatatattatgcagtgtttggaaaatgcagttgtgtacagcattatataagcacaaatggaatataaatacagtctatcttacatatagtgttacatataaaatattacacatatataaaatggcaaagatggtgaagaggtgagaatgtggagcaatgaagattctcattctttgccaataagagtataagttaggccagcaactttaacagttggcattacctagtaacttgaacaggctcatatcctatatcccagaaataccactcctaagtggaattctaaacaaactcatatacaggtaccaggaaccatgtaaagaatgctcacactagcattgttcactatggtaaaaaattgcaaagcacacaaatgtttgtcaatagtagagtcgatgagtgaatgatagtgcggtcatgcaacggcacagcacgctgccatcaaatgagctggctaaagccacaaacccaatgtagagccaagaagctgatcacaaaaaagaatrcatgcagatgattctgtttataagccagacaaaaccacacaacacttaacaatatactatttagtgataagtgaatag

SEQ ID NO: 815656 - DNA, 602 bp, Homo sapiens
ttcttgagtcttagttcttggttctctcatcatcgggaggaaggcaggtccttctcgttgggaagagaggacaagcctacacttttgcctcatttttggctcatttttatccttgtgtatgtacatagatttctggtcacctgcatgcttcacatccaggccagagtgcctctgttgtaccctctgtgttatgaagacatacagttggcctcctgccctaagctggggctgataggcaacgagtctctggcttatctcaaacctggtgtaggtcaaaggcttcctcgttaggggtgcaggtccccgaggcttttatgatcaactttgcaggtgtgcacgggtgtttaaagggatgctcaacatcagttctctctagtgggattatgtactccatgggctcccaggatccagacgtgcatccctgtgtctatgcagttctgcgtccataaacaggtgaagccagagatgggcagattgcagatgtactgcagggggccagatggcatggccctcatracctctgcacatgtctgcctttctcaaacatgcccatgtttcatctgtacctcccaggtggcgttggcatggaaggaaggactgtg

SEQ ID NO: 815657 - DNA, 631 bp, Homo sapiens
cacacagatatgccagtgggggatgcaggccagcaggagacctatttttgctccctcctttgaaattcagctcaaccaggagattagagtttataagataatggccttccctcccygccatattcatattctcacactctgcatttttatttctgcatgtaatgttgcacacactgatactaactgcaaatggtttatgccaaaattcagtaaacaaacaaacatagcagacatgcacagcagagttgtgaacacgaaaaagcagatcctgcataccatttagcggtgtttttaaaaagataacaaaacaacctttacctcttcaacaaggtaaatgtggctaaaatgaagatttaatgatatctgggtactgatgtttatttcctggtaacaaagtcagtataaaatttgattagataagaccagcttctcacagataggtgaattgatgatagccagatggatggacagatggacgcgtggacagatggacagatggttggatggatggatgggcggatggatggatggacaggtggacggatgagtggaagggtgcatgggtggatggatggatagatgatggatagatggatggacagacagatggacagatggatggatggatgga

SEQ ID NO: 815658 - DNA, 641 bp, Homo sapiens
atcaactggatatctggaggatcccagtgctgccacacattcatctgcatgtgcattttcccttctgatggtcaggccttctgttagctgctgctgcctgaagtgtacattttaaagggattcctccatcattcctgccaatactgccatattatttgcacgaggttccctgtccagcatttgcaggctttgtgtaggtgctcacacatctgtgatgtaatgctgatttcctcacccatagtaattgacatttgaatggaaattggccattttgattgcaaacattctggaactgctatgttgccaattgaaacggaaccctcaaaaccattattcaacaacaaaggaagtcacaggatacccatttggatgataggtcataggtgagaatcactacgctaaaataaattgatcaaattgttcctacaagcaattccatttcagtccctggaatttgttttcactttcctattcagccacatgaatacagaggctgcatccactctattttgctcttgmgaccaaggggtaaagacggtgccttcagatgcctgtgatggctcaggaaggggcctgggaggttgttggaggcagccatggaaccactgtcaatggtacaagtcatgcactattctttagct

SEQ ID NO: 815659 - DNA, 600 bp, Homo sapiens
cgtccattcttttatcgacttatcttctctctctctccctgtcctctctaatttcacacacacacacacacacacacacacacacacacacagccttggctctgtcctgctttcttctatgggctcagcacattttcctttctcctcatcagctcactttccctgtagcggctgttacaagaacctgacctttctctttacactacctccagtcatgcctgtcttagtccattcctgctgctataacagaataccacagaccaggtaatttattaacaatagaaatgtatttctcacagttctggagactaggaagtccaagggcaaggtggcagtaggtttagtgtctggtgaggactacggtctgcttttaaggtgctgccttgtttctgggtcatcacatggtggagggagaagagagagaggaatgctgtgtcctaatatggaagaggagacagaagggcatctcatgtccctctagcccttttacaagggcactaatcccttttgtgagggcagagccctcatgacctaatcaccttgaaagtccccacttcatgactatcaccaargtgattaggcttcagcatattaattttg

SEQ ID NO: 815660 - DNA, 633 bp, Homo sapiens
accaagagcctcctcatgcacaccttctttctgtctttcctttctggttctccctgtaaccacagtacctaagggaagggtgatcagcaactagcagacatggagagacttcctgcagactctcaaaatttcagaattgatcgcttgctctctttattttatttatttatttatttatttatttatttatttatttatttatttattttgagagggagtctcactgtgtcacccaggctggagtacaatgatgcaatctcagctgactgcaacctcaacctcctgggttcaagagattctcctgcctcagcctcccgagtagctgggactacaggtgctcaccaccacacccagctaattttttgtttatttagtagagatggggtttcaccgtgttagccaggatggtctcgatctcctgacctcatgatccactcgccttagcctcccaaagtgctgggattacaggcatgagccaccgcgcccggcccctctcctttaataagtgttttttcatgtgtattcttaatttatgaataaaaactgtacatatttatgatgtaccacatcaggccttgatgtgtctacacgttgtggaatggyataatcaagcgaatgaatatatccatcacc

SEQ ID NO: 815661 - DNA, 384 bp, Homo sapiens
cagtggctccacatatacaagttaaaagtaagtcagtcttggaactttgccttttggttttgtcgttggccttctttacttaaaataataattataagaagtaatgaacgcctgtccacatccatttttatctggcctagcacaattaattggctatgagtctttcgactcttaaggccctcggccataggaagttctgccgagggaaaaaaacaaaatgacactgtagaatcatatgacttctcctgtgacaaagtctccttttatctctcaagtayatggtgcaatatagaagtggtgggaaaaatagatttgtctactgttaacaagtctctaacaatttagacactgaggaccaggcagggtatttcttgcatttgattt

SEQ ID NO: 815662 - DNA, 527 bp, Homo sapiens
  misc_feature 39: n = A,T,C or G
cacaaaaaaacttgcacatggggatgtttacatcagctntattcataattgmcaaaacttggaagcaattaagatgtccttcagtaggtgaatggaaaaactatggtacatccagacaataaaatattattcagcactaaaaagaaatgagctatcaagccatgaaaagacatggagaaaccttaaatgcacataactaaatgaaaaaaagtcaaactagaaaggctacatgctgtcagtttccaagtatatgaaattctggaaaagttaaaactatagaacagtgaaaagatccatggtttccagaagtaaggggtgagggaggaatgaataggcagtgcacagggaagatttagggcagtgaaaatactgggtatggtactgtaatggtggacacatgtcattacacatttgtccatacccatagaatgtacaacaacaagagtgaaccctaatgtaaactacagactttgggtaacaatgatgtgtcattgtaggttcatcaattgtaacagatgtaccactct

SEQ ID NO: 815663 - DNA, 527 bp, Homo sapiens
  misc_feature 39: n = A,T,C or G
cacaaaaaaacttgcacatggggatgtttacatcagctntattcataattgccamaacttggaagcaattaagatgtccttcagtaggtgaatggaaaaactatggtacatccagacaataaaatattattcagcactaaaaagaaatgagctatcaagccatgaaaagacatggagaaaccttaaatgcacataactaaatgaaaaaaagtcaaactagaaaggctacatgctgtcagtttccaagtatatgaaattctggaaaagttaaaactatagaacagtgaaaagatccatggtttccagaagtaaggggtgagggaggaatgaataggcagtgcacagggaagatttagggcagtgaaaatactgggtatggtactgtaatggtggacacatgtcattacacatttgtccatacccatagaatgtacaacaacaagagtgaaccctaatgtaaactacagactttgggtaacaatgatgtgtcattgtaggttcatcaattgtaacagatgtaccactct

SEQ ID NO: 815664 - DNA, 608 bp, Homo sapiens
cttgtgggcctggtgaaatgggtccgggcagagccttgtacccagtcaggggaggcaagtgataaggaytgccagcctcacttctccggggggtggacctcaggatggaggcagctccctcactggttctgctttccacactaacctctaagccccgtccttgtccccaagtaggctctggccagcagtatataacacttaggcttcagggctccccaaaacattcctcaccccttgcctgtgcttgagtttcagacctgaggcctgacagaccaagcctgtggtggtttagacaaaggttcttggaggtctcactcccatgccctctcatgggccgagggtccctggacatttaggagctagccagagctctgagcagtggggtccttgtcttgagggcggggccaggcactaatgctgatttcctggctgtggcagggagatggcagaggcaggagcatgtctcctctgagcaagggagtgaagtcattgtaggctgaagggccggataaatgagctaggggcttggtccaagacccagaaagcaagagagtgaagggatatccccaggaggaggcagctgagcactcccagattttggggggtct

SEQ ID NO: 815665 - DNA, 574 bp, Homo sapiens
ggtggaagctaaacatttggtactggcagatgtaaagtgttcagcaatggacackggaggctgctgctggtggaggaggcaaaagaggggaagagttgaataattaactgttgggtactatgctcactacctgggtgacaggatcaataataccccaaaccttaatatcacacaatatgcccatataacaaacctgcacatgtacccctgaatctaaaataaaagttgaaattattaaaacatcttctctttaagcaattgtgaaatatgcaaacattattattaactatagtcaccaggatgtgcaatacatcactgaaacttaaccttcctgttcaacttaaactttatatcatttggctgacatctcttttttccccatccacaacctcccctactccagcccctggtaatcaccattctactctgattctatgagttcaacggttttagattccacatataaatgagaccatgtggtatctgtctgtctttggctggcttatttcacttaccataatggtttccagtttcattcatgttgttgcaaatgacaaaattaccttctttttaa

SEQ ID NO: 815666 - DNA, 528 bp, Homo sapiens
ttttagaatttcccaagatggtttaaaatttatatggaaatggaaataatgtagaatagccaatgtaatcttgayaaagaacaacatagaggaagagctccataacattggtctcagcaacgattttttgaagacgacctcaaaagcacagcaaaagcaaaaatagacaaatggggttacatcaaactgaaaagattttccacagtcagggaaacaactgcagagtaaacagataacctacaaaatgggggaaaatattgcaaatcatacatctgataagtggttcttatctaaaatacataaggaactcaagtcagcaaggaaagaaataccccagttaaaaaatgggcaaaggacctgaatgcatatttcctgaaagaagacatacgaatggccagtggttatatgaaaatatgctcaacatcactaatcatcaagcaaatgtaaattaaaaccataatagaataccgcttcacacctgttagaatagctattaccaaaaagatgagataacaagtgttggcgagg

SEQ ID NO: 815667 - DNA, 550 bp, Homo sapiens
tggaatatacacgcaacataatgttagccttaaaaaagaagaaaatcctgtcatttgtgacaacatggataaaactgaaagacactatgttaaatgaaataagccagacacaaaaaaatactgcttgatctcacttctatgtggaatctaaaaaagctgaactcagatgtagaaaatagaaggagattagcaagggttggggtttggggagaggttggggtgatgctggtcaaaggatacaaaatttcagttaggaagaataaggtcaagagacctattgtacaagattgtgactatagtcaatattgtgttgtattttttaaaattactaagaattgctagattttaagtgtcctcaccacaaaataaaatgtgaggtaatgcacatgttaattagctcaatttagccattcaaaaatgtgtgtrtatatatatatatatttcaaaacatcatgttgtacataattatatacaattttgtcaattaaaaataaataagtaaataagaaatgtgtaccaaaaaacaggaagaaagaacaaagggtgtaca

SEQ ID NO: 815668 - DNA, 605 bp, Homo sapiens
gtttgctaacagacgtggcatttatagttttgcactggtaacttgtgtttcatggtrtcatcctttttgtgccacttttttttttttcttttttttgagacggaatctcgctctgtcgcccaggctggagtgcagtggcgcgatctcggctcactgaaagctctgcctcccaggttcagtccattctcctgcctcagcctcccgagtagctgggacaacaggtgcccgccactatgcctggctaattatttgtatttttagtagagacggggtttcaccgtgttagccaggatggtcttgatctcctgacctcgtgatccacccccctcggcctcccaaagtgctgggattacaggcgcgagccaccgtgccctgcctgaaactattgtcattacattccaaaacttacctgcggtaaagatttgatagtcccctgggggcagtttagtgaagttgtaaactagccccaatgatctgcaggtaaaatctgcagatgtactgcaggcaggtgaaatccacggctttgtcatctttacaggatacacacaccaagcaggcagcaggcagcaggcagcaggcagcaggcaagcacacacctgccgcag

SEQ ID NO: 815669 - DNA, 316 bp, Homo sapiens
acacaagattgtactaatttacattcgcactaacagctataagagtttccttttatccacatcctcagcggcatttgttatcttctgtctttttgataatagccgtcctaactgggtgagataatatctcatggtggttgtgatttttatttccctgatgattattgatgttgagaatttttaatacacctactggcattggaatgtcttattttaacaratgtctattcagatcctttgctcacttcttaattggattatttttcttcttgctgttgagttgagttccctgtatattctggatagtaggcttttt

SEQ ID NO: 815670 - DNA, 598 bp, Homo sapiens
gcccatatgcaacaggtccagaatatttagtccctcttgccatctgtacataggcctctactggaaatatctcaccttcaggcgctcccccctcgccccaacgtgctgacccgtctgtgctctggtaatcataaggtgtgttgaaatctatgtcaggatttcctccattcgcaaacaggcagtcaggcagaggtggcgctgtgaagctcgcatttatcccgctggatttttaaaagtaaccctttccccagacgcagcctgtttgttataaatcttttcaaggagccagccacatgacagagaatgccgacatgaacctactgttatctcagatttatcacaaaggaaaaagatccatttcaggattaataataggtgctaatgcattgaattaagtacagattttgctttcttaaggaatcttcaaagctacttttcacaaatctaagcacaaggaagatttaacacattcctactccgtcctgcaaggtagaataaatccaarcaatccatacatgataaacgactctgtggtataagggcatgagcaccactgtttctgatttattcttctgcttggtagctttctcaacagatc

SEQ ID NO: 815671 - DNA, 644 bp, Homo sapiens
cagtaggtgtcttggttactataagatattagctatgcctgtcatagaaggagaagccacagccatcctagggacacattccatacttatttatacaaatatatatatatatatatatatayatatatatatatatatatatatattttaaagtgactattttgataaccactgagattatagatcctttgagcagctgcttttccacttggcattagcatgaactttaaaattaaacaaacattgtttcctcgtgaatgagaaaaaaataaaattagacaaacagacttgaaatactggctttgttggttactctgtgtatgattttggatgtgacttaacttctttaaactacctcctttttccataaaatggaaatagtatacacatcacatttagtattaatttttgatggttggatataatattttgatatttatcaagttatttttccattcttcttcagcttcggcccacaatgccataaaaacaaaataggtctaataaaaataattatacttaagtactggcactagaatttatatttaaagctccatcatagagaatttttttgaaaattttacataattctacaaagaatgtacatattttctattccataaatagactttccatggtggttg

SEQ ID NO: 815672 - DNA, 557 bp, Homo sapiens
agaggtagccccctggagtagggaaactttccccttttttatggcacagactctctggtctcacctacagccctctgcttccctgagggccgccatggaagtagtcaccttatgtatgcagcaccccacatagagtgaggacagtggccagggaaccaaaggcactcaggggcacagagcccaacacaaagtccctcatgtgggaggtaaagtgttcatcatttggcccttgggtagtcagatggaacagcctgccacacacccatctcccaaattacatgcactaaatctagatacgactgccatttactcacagtttctggtatttctttggcatctttccatatcgttcaaatggccaccatcagccattcaattagggtgtggtcgccttgccctgtgctaaccacctgctcacctgcaatcactgayggagggagggatgagtcataatggaagccaacttctccatttcagaggcagagcagacgatgctgttggctccctcatcccaaagatgaggcatcgaggcaggtaggggttcccccaagcactgc

SEQ ID NO: 815673 - DNA, 537 bp, Homo sapiens
cacaaaagaaattcttagatacatatgaagagatttagataaccacatgataatagcaggagattttgacaccccattggtagtattagacagatcatagaggcagaaawctaataaagatgttcaggatctgaactcaacatttcaccaaatgggtttagcagactactacagaactctccacccccaaacagcagagtaaacattcttctcatgtgcacatggtacatactctaaaatcaaccatgcaaccgggcataacacaatcctcagcagttaaaaaaaatcataccaaacacactgtcagaccacagtgcaataaaaactgaaataaataccaagaatatctttcaaaactacatagttaaatggaaattaaacaatctgttcctgaatgactgttgggtaaacaatgaaattcagtcagaaatcaagaaattctttgaaactaatgagagcaaagatataacatacgagaatctctgggacatagctagagcagcattaagaggaaaatgtatagtgctaaatgcccaa

SEQ ID NO: 815674 - DNA, 607 bp, Homo sapiens
gattaatattttcaaaggatgtggatcccatgttgacagcttttgccttcaagtactctaatratgtcttatgactgtcttctggcttacataatgtcttatgagaagtctgcaagtatccttatctttgtgataatgagtccttttccccctctgctgttaaaacattctctttcttactcatttttagcaacctaattaagttatgctttggtgtagtttgatttttcttcatccagcttgtggctagttaggctgtttggatctgtgggtttatacttttatcaaatttggaaattccaatgatttatacaaatatgttttaaattcatgctctcttcttggactcagattacatgttagactacttcatactgtcccactgatgctttattaatgtttccagacttttttcctactctttgcttcagattatagagattctatttccaccttccagttcactaacattttcttctggaaaacttaatgtgttgttactcataggcagtgatttattcatttcatatactgtagcttttatctctagaagttctatttgattttttatatttttatactctttgtgtccaagtatttcttgaaa

SEQ ID NO: 815675 - DNA, 497 bp, Homo sapiens
caatgagaccatcatagtgctcccatcaaatgtcatcaacttctcccaagcagagaaacccgaacccaccaaccaggggcaggatagcctgaagaaacatctmcacgcagaaatcaaagttattggggtaaatctaattcagaacgtgttggagaggggttgggggaagtgccaagagatgatatatgtcttgggactggacatctgtcgtgagtgtggagaccctaaaattttgctagagggactttagggtagaagccacttggagaaaactgtcccagaacttttccacaagaggttgtcttaaaaatatattttcccttattctgaatatgaggaattgattttctattgttgtctttgtatttttacaatacagtgcttttctatattttcttttacaaaagtaatggtggtaaataatgacatattgtgtgtatgtgtatatattccacaactgcatgcttaataatccaaactgactttttgcaaataat

SEQ ID NO: 815676 - DNA, 542 bp, Homo sapiens
tgctgatagactaattatagyaaacaaacattgatggtttaactagaggggaatacctatttacaaatttaatgtagtaatcctttagattaagatagaaaacgaatgccatttttcatttacctttggttaagtgaggaaaggcttaataatggaaattaaatcgtctagtataatttaagtaattgctaatcatgactttcccagcattccaggtcatgaattaaaaccaattctgtttagaggctttaccaatatatcttcaatggcagccatatggaatcatttctagtcagacataaagctggagaggttggttctgcccctgaagatcgaaggtttggcagtctttcctattgccaaaagaacgatgtcggaggccacatccatctccctaggtgtcgatgtgacgctgtctccacgaactggtttgtgggggagcagactttgccacaggccctgtttgagttccttactctttacacattctcagaactctttctccccctgtcttcctgccacttccttttctaccgttttca

SEQ ID NO: 815677 - DNA, 577 bp, Homo sapiens
ggttgtcttagtccatttgggttgctataacaaaaataccacaaactgggtgacttataaacaatataaatgtattactgacagttctggaggctgagaagtccaagatcaaggtgttggcagatttggttcatgggtggcgccttctcactgcatcctcacatggctgaatgggacaacaagctcccttggggacagttatcagggcactaatcccattcatgaaggctctgcccttatttcctaatcatctcccaaaggccctacttcctattcccacctcattgaggattaggtttcaacatatacatatttgagagacataaaccttcagaccatggcagaggttggaggcaggtgaagcgaatctctttggggtgagttgtcggggtgctagaatttgctctcctctccccactgggaaggagaggaggtgcttggcctgtatctactgatgtgagtttgatttakgctgaaaaagcctgcagatgaatgtctatggctgctggctgccctaggaaagcagagaggaagtggctgggatgggactggtctgtttctagagtttcccatgggc

SEQ ID NO: 815678 - DNA, 590 bp, Homo sapiens
cccaggcagcttccactgtctgagctgagacactgaggaagaggatccctcttcctgcccctccttactccagcagatacctgagattccacaatgagtaaagtaatgcattctcttctcttcttcttctttcttctttccttttcttcttcttctgcttctgcttctccctctcgctctcgctcactctgttgcccaggctggagtgcagtagtgtagtctcagcttgctgaaacctccacctcccaggctcaagcaatcctcctgcctcaaccccctgagtagctggggctacaggtgcgtgcatgccaccacgcccagctaatttttgtattcttagtagagacgaggtgtcacctcattgtccaggctggtcttgaacttctgacctcaggtgatccacccgcctcggcctcccaaagtgctgagattacaggtgtgagccactgcacctggccaartcatgcattcttttatgttagatgccacctcctcttttaaaaacaggggaactgagaagcaatttcacagaagttgtgccccttctgggatctggccctgcacccctcagaccatcggctttttagatt

SEQ ID NO: 815679 - DNA, 571 bp, Homo sapiens
tcttggctaaacggttcatccgggttttccttattgacttaaagcagyggtctccaacccttttggcatcagagactggtttcatggaagacaatttttccacagatggagtagcgggggtggattcgggatgattattgtgtactttatttatattattattacattgtaatgcgtaatgaaataattacacaactcaccatcatgtagaatcagtgggaaccctgagcttgtgttcctgcaactagatggtcccatctgggggtgatgggagacagtgaccgatcatcaggcattagattctcataaggagcatgtaacctagatccctcacatgttcagttcacagtagggttcacagtcctgtgagaatccaatgctgctgctgttctgacaggaggcggagctcaggtggtgatgtgagccatggggaggggcggtaaatacagatgaagcttcactcactcatccactgctcacctcctgttgtgcaacccagatcctgatagggcacagaccagtacccgtccatggccgggtgttggggacccctgcatgaaaggcgaccaga

SEQ ID NO: 815680 - DNA, 534 bp, Homo sapiens
gtataagactttttggtttatacttataatttctcaaaatttacttttatacatacctcttatcctcttaacatatacatgcaatgatacaaacccttacagccctatattatttgtattattagaaaaagaatacagctccaccatatcaatgctgtgtagaacaaaaatacatcatccttgtagtttaaagtattgaaattatttagttattcccttcccaagaagtgaaaaatatctgaattgtaaagagaaaatttccaggttggaacattttaatgaagagaggaaaaacacagcttctgagcaggtttgaggaagagtcaaagatgtatttgaaaattatgcactatatttgcaaagtgaagcatgtccactaaaagtacattctttatacacatgctaacaaaattaagggcacaccatcctttattgaatgagagcytgttagaagagctagtgtgtaccatttccttttgttccctggaggaaagctaagggatgaaaaatactttgttaatgaataatattaag

SEQ ID NO: 815681 - DNA, 618 bp, Homo sapiens
tatctagtttctcttgaaagtgtaatcattttgttgtaagttagatcaatcttttttccatcatctgtctttgatgaaattggggaaacaatcaatatttatttgtctataatcatttgtattaagtaatttcctcaaagtatccctaataaaaaagaatactggtgaaagctttggagtcaggctgtaatacctgtatctcccaattgctggctttgtgaccttcaacaattcacctgagctctcgggtccctcatgcagttgtaaaaattaaataggtttatgcatgtcaagtaatattcacataataagcattcaataaatgctagctatttaattgttactttgacaatagtctcaaaataaatgcttctgttaatagtcaggcaattgagtatgtgactttataaagtactttgatcaaaagtaaaactaagttactgagaggcttcagtagatggggcttctatgcatctgaacatgtgtaagggtgccaggaattaaccataaagaacacaatccyagatcagtgtttttcaaacattagcctatacagaaccaccaggaggacttattaaaccttagattaccaggctgtacctgccacagtttcttatc

SEQ ID NO: 815682 - DNA, 604 bp, Homo sapiens
gattcaaacaatagaaaggaacttgaatgtattaactctaattctcttgcaagtccaaaattctgagacrcgtgacttctttgtaactaccttaagcaatgttatataatactaatacttgcctatggcctggctgaaaagaggaagaaattaccaactgtggggtcagataagaataaaactaactggccgggcgcggtggatcatgcctgtaatcccagcactttgggaggccaaggcgggtggatcacaaggtcaggagtttgagaccaacctggccaatatagtgaaaccccatctctaccgaaaatacaaaaaaattagccaggcgtggtggtgggtgcctgtagtcccagctactcaggaggctgaggcaggagaatcgcttgaacctgggaggtggaggttgcagtgagccaagatcccgccactgcactccagcctgggtgacagagtgagactctgtatcaaaataaataaataaataaataaataaataaaactaactgaccgtcccaaggctgagactcagagcattaaacctatgatgccaagttttaaggctataatcactagcatatatgtctacttacaagaagcattc

SEQ ID NO: 815683 - DNA, 593 bp, Homo sapiens
atgaatacattttccaccatggaaaaaaaatagagaaacagtcaaagartgtagaaccacaccaggcagcccactgtgaccccaaatatcttaacttctagctaaggacacactgaccacagcacatggcagacttagtgtgagaaactgagacttcttgggaatggtgagaaaacccgctacacccctacaaattcagaagactatgaagaagagaagaggttcttactatttaggagacttggaatagacgagcaggaacatgtaaaatatctccaacaaaatccaggctgaatgcagcatggctaggctggtaatcctgcctcgatgatcagcagcaattaaaccccataaaacttccttttccccaatgttggggctcattctcttgcttcaagagaatccccgaagacaaggatggctacatgaggccaggggccttctgtgatttatccagtattcatcttttatgcacaaatgacttcaaattcttctcactgagaaattcttgttactatttatataaaatgatgccaaccattactcactctccttcaaccctgacatttatttcatcaagtctgaagcttagc

SEQ ID NO: 815684 - DNA, 423 bp, Homo sapiens
attgtgggttccccagtgcatattaaagttatatttacatgacactgcattctgttgagtgtgcaatagtattatgtttttaaaaacatgtacaatcatctaaaccttcaatgactcatcatctttttgctggtggaaggtctttcgtcaatgttgatggatgatcagtgatcagggtggtagttgctgagaattgaggtgacttgcaatttcttaaaataagacaacagtaaagtttaccacgtcagttgattcctcctttaatgaaatatttctatatagcatgtgttgctggttaagaagcattatacctacaggagaaattctttcaaaattcagtcagtcttctctaaccctgctgctgctttattaaytgagtttatgaaataatcacaatcttttgttgtcatttcaacaatgttc

SEQ ID NO: 815685 - DNA, 509 bp, Homo sapiens
tacgttgggttcgtaatttaagcctcataggctataggtacattagttgaaactgacttttttttttaactagtcggattctaatttcatgcaggttggcttcctatcaatcccttgctttaayagagagttgccattttgagttcactttatagcatggtctagtcattatttttcttgcaattaggaaggatttgtgtagtggtgagactagccaagtgttctttttttttttttttttttctgaagagatttgatggtgtagcctataacttgtacttctaataatatcaagaagaaagaaaattgatttcatttctgagttctccctctatggtttctaaattaagacatgatggttaacgggattaaggttgtatagtcttggctgggaacactgagggagcatttactccctttaaaatatgaacttatataacaaaagaaacaggcttccatacccttctgtgacagggaatgtgtagaggatagagaaggtaaggaaaaag

SEQ ID NO: 815686 - DNA, 652 bp, Homo sapiens
catttatttggaaaatattatcgggtagctagcatgtgcaaggcactctgtggtgttctgtaaaattaagaggacatgccaaacatccctgcgctgagtgggacttagaaatacacacatacaatgacagaacgggctaggcagcagaacacctttaagagccagacataaacggttaaggtcgtacagagaaagaagggatacctcagaggtgcagtgggaacaggagacaaagaaggaaggaggcgttgcccatgactggcagttgaaacagtccctaaggagaggtgaatgtgaatctttagaaataatgggtgagtcttccaaacagagaaaagagcttgaacaaaggctcaggaggggaagctcagaactgttttcattgttttgtaaatgagccacctattccaggctttcccattcctttcttagggctccttctgacttcctccaaggatattcgtggagaagggtctccttcccctattttatttttcacccaaattggacgaacatcaatgatttgwcagttttctctaactctcatttttccctgggccactttgttcttctttgagcagtctttcttatggaagacagtgaaggaaaactttgggtgtgtgtgttttaaaatatattccaaaaaaagaaa

SEQ ID NO: 815687 - DNA, 550 bp, Homo sapiens
tgtacttacacaaacctagatattgtaccctgttacatacctaggctatatgatatagcttgttgatcctaggctacaaacccatacagactgtwactgttctgaatactgtacgcaattgaaacacaacaggaattatttgtgtatctaaacatatctaaacatagaaacggcacagtacaaatacaatataaatgatttttaaaaagtggtacagctgtctggggcacttatgaatggagattgcaggactggaagttgccctgggtgagtgagtgagggagcagtgagtgaacacgaaggcctagaacattgataaacactactgtagacttcataaacgctgtacacttagaccaaactaaatctaaaaaaaaagcaagtgattgccctgtgatagctgcgatgtcacatggcaataggaaatgttcagctttattataatcttctagactatcttcatacatgtggtctgttgttgactggtactccattgtgtggcacatgactttatacacacacacacacacacacacacacacacagtgtt

SEQ ID NO: 815688 - DNA, 610 bp, Homo sapiens; identical to SEQ ID NO: 813359

SEQ ID NO: 815689 - DNA, 608 bp, Homo sapiens; identical to SEQ ID NO: 813360

SEQ ID NO: 815690 - DNA, 652 bp, Homo sapiens
tgttctctgaccttcctgcacctggatatttatttcttttccaaggttaggtaagttttgttattatttctttaaataatctttccactccttgttcttgctcaattccctctggaacatcaataaatcttagatttgctcttttaaggtaattttctatatcttgtagatgatcttcattccttttaaattttttcttattcctcttctattttcagtatttcatatttcagtattttcaaaaaacttgtctttgaactcactaattcttacctctgcttcatccattttgctattgagagcctctaatgagtttgtcagatcaggaaatatatttctcaggtccaaggtttctgtctggcttttaaaaattattttaatttctttgtcaaatttctctgatgatttctgaattgttttttcatttttgtaaatatttattttcattcatattgtgtaaataccaagaaatgaaatagctagatcacacagtaactgtattaatactttaaattttttaaaattatactttaagttctgggatacatgtacagaatgtacaggtttgttacctaggtatacacatgccatggtggtttgctgcacctgtcaacccgtcacctacawtgcatatttctcctaatgctatccc

SEQ ID NO: 815691 - DNA, 604 bp, Homo sapiens
ggtagggatcctagccacctcttcttttcctatccgcacagcatcactgacttcctctctttgcaaacataacacagttgatacaatcatgctcaaatcaggacattctccatcttttaccccactctgatggctgactctcccagctaaagattgagtgcacgtttgcttccaaaaggagaaataacttagtccggcatccagagctttttggaaaagagcaagaaatggagcccaagagagatcccaccacaatcaactctagggattaaataaattctcttggcttgctggaatcttacattaaatattcttggaaataagtaggccataggctaatgctaagaaatctttcataataaagatattcaggttgtaatgtaactgtcattataggatttgacctgaatagaaagaggaactaaacagagctttctcaacagagctctttgaggatggagcgtgctgaatccccagggggaaagagcagctctttcacrgaactttaaagatgcccacctctcctataagaagttcttgctgtgaaaaccagagagaaaaaacgctcctgggacgtaaaaaagtacacggacttcagattcaa

SEQ ID NO: 815692 - DNA, 617 bp, Homo sapiens
aaagtaaatcctgttgagaaaaagaaaacttgggacggactgccaggcagaggcatgacatgagcctcttgctgccaacagtcatcatgtggagagggtctgccagagagagaggaagataaatggaaaacaaactgtggagtaagcaagcaagataaagaaagaaagcggacggcattatttgagcccctggagccagctgtacctgacatttcagttacacactgaactggtaagtttcagttacacactgaattgataagttttattcgagtttaagccactttgggtttggtttctgtcacttgcaaccaaaagagttcttgatccatccagatgctttaggtccatgaaaggggccaatataggatgtcatctctggccaaggccaactaggttccttatttaggaagcagagatgatgctggcctagcagaagctttcccagattatccttgggggtgatgctacagggcatcctgcaggagggaatcctgcaaaaggggccgtggaccaggctgctgggagagggggtaggttccgctgcatcatggccttgcctycttgtggccagagagacacacttgatggaagcccgtacctcacaccaaggatag

SEQ ID NO: 815693 - DNA, 528 bp, Homo sapiens
tcttaaatgataaaggactgttacataaaatatacaaataacttcaaaaactctacattaagaatacaacctgaggccgggcgcgatggctcacgcctgcaatcccagcactttgggaggctaaggcgggcggatctcttgaggtcaggagttggagaccagcctggccaacgtggtgaaaccacgtctctactaaaaacacaaaaattagccaggcatgatgcctgtaatctcagctacttgggaggctgaggcagaagaattgctggaacccgggaggcagaggttgcagtgagtggagattgcaccattgcacatcagtctgggcaacagcgaaactgacttaaaagcaaaaaaaccaacctgactagaaaatggaccaaaacccctcacctcaccaaagatacacagatggcaaataaacatatttaaaaatgttccacatcatatatcatcagagaaatgcaaattaaartgagataccactacatacctattagaatgcccaaatccagaacactgacacca

SEQ ID NO: 815694 - DNA, 476 bp, Homo sapiens
aagccagttttgtatcaattaacaaacttatttcattatttctgatgccagtgtgtgtatctggcctttgtgttgtcctttgaatcagtttttaacttcattaactaatgagttaaataaaatcttttacacttgttcattttttatttgtatgacaggcatgatttctcccttgaaaaaataatcatttagtggcacgtgcctgtggtcgcagctactggagaggctgaggtgggatgatcacttgagcccggtaggtgaggctgcagtgagtggtgattgcgccactgcactccagcctgggagacaaagtgagaccctgtctcggggaaaaaaaaaaaaggatcatttaacaaaccagaaaaacaaacaaacaaaccagagacaatgaagactatgagraagagatttgaccaaggttagacgcctgttgtaacaaatacagcaccaatccctaaccctcaaatgtgagcttc

SEQ ID NO: 815695 - DNA, 569 bp, Homo sapiens
taaataattaagaacctttcacaattttctaaacataatttattaaataacaaagtcatagctttgaaattcaaggaaattgacattttaagctctgatttatgattttcttgcagacagcattagtaatctgattatttttacactgatgaaaaatagttcaatgagaaatttactcagacacttgtaccttgacattatatgtagaaaaataaagatacaatatttgtaaatttatgtaccagaaagtgaaacatatttgctttggattaatgagatatgagattagttcatttaaatagctgtttaaatgtctctctcatctagttttcctattgggtatttccacataaagaaacatgcaccactattgctaccataaaggttgacaacttctgaaaagtcagaagtctaaaatagtaaacacatgccactcaaattcatgatacactctactaagacccaragaaaggaatctgtaggaatcctataaatcatctcctattacccttctttattaacacacagcaatccaatttcctcttataatatcttcactgtttatgttt

SEQ ID NO: 815696 - DNA, 669 bp, Homo sapiens
gtgggaccctggcactagcacrcggttctgagtcctgctctaaagtagagaggcacccacagcccgcagcgggtctcttgcattctctcaggctgagagtatgtattttcattgctctcccattttgccctcctggaggacgtcacacctgtgttgcacaagcattctctaagtaacattctggctttctccaaagacaaactctcccctttgtcattgaggaaagagtttctttgccgtgagagtcaagccgtgtctgggtggtggaattcagtttgtgtccctgcgctgaaatatctaattgtctgtgggattcctggttgctggtgaggatgagggcagttaagacctccaagggatctcaagactctatgatctagtgaggtctcaaaggaactcgagaatcgttctagtttatttctagaggaaaaagataagaggcatgaaatggcttcaccaaggacccactgctaattagtgattgagctgggctggatgtagaattgacattacctgatgagggatttcggtttttgtttttgtttttgttttttttgccttgttggaatttctgtgtattgttaaaggcctttgcttcatgtattgttgacaaaaacccttgccatttattacaggttttaaataattagcttctgcctttcttaataa

SEQ ID NO: 815697 - DNA, 620 bp, Homo sapiens
aattctcttttattccaagtttgttaaagagtttttatcatgaataagtgctgaatttttaatgatttttckgcatttatcatatatttttttgtttttgctctttattctattaatatcttaactgactttttgatgttagaacaactttcaattcctgggacaaacctcacttggtcagggcatataatcttttttatgtgtcattggacttggtttcctaatattttagtgaggatttttgcatttatattcatgaaggatattggtttatagctttctaggccattcagaggtgaaatctggggccctttccgacctttgctaggcatgcacatggccctggacatgcttatggcggtgtagattaccaagaatgtatcagagcttttcagcgccccctatggacagctcgttccccagatcttcccttcagatttttggccaagttctttttgtgccaaatggtatccagcaactatgatgttaaacaattacagctgattgttttcaacaaatgccctggaaacagagctatttctgcagagtgagctgtgagtcaggtcaaataacaactaccacctgttaagggagttttcagagagcggtaaggcaggtca

SEQ ID NO: 815698 - DNA, 621 bp, Homo sapiens
atctctatctgtaaaatgggaatgataattgtttgcccagacatatcatatattaaatcctttgttatagctatatacatatatatatattatgtgtgtgtaatgtatatatacttttgattttacatccattctttgaattgcaaataaaaccaatattagaacaaagattcaaaattttagctaaataggggagttcaatgcgtgaaattctatttttatctaaattactcttgtgaaattttagaaaaatatatttggtgtgtatgggcctaatggcataattgtttgtggattttatgtgttgtggatattaatatcatttttcataaagaaaatcactactttattattttatgaaataaatatttcctagaacatgttgaagaaaatagatttatttatattatatatatattacattatattatctgatttattcaaagagtcacacttacagatgtgaaatttcttgtaaatagttcttatggataaaaccactcaaatgattgaaactctartatatttgacccatactgtgtaataaatagctactttctgaaaaacataaaatgattgaaggtaggataaattgtctttgcactaaaaaatacatacatt

SEQ ID NO: 815699 - DNA, 621 bp, Homo sapiens
atctctatctgtaaaatgggaatgataattgtttgcccagacatatcatatattaaatcctttgttatagctatatacatatatatatattatgtgtgtgtaatgtatatatacttttgattttacatccattctttgaattgcaaataaaaccaatattagaacaaagattcaaaattttagctaaataggggagttcaatgcgtgaaattctatttttatctaaattactcttgtgaaattttagaaaaatatatttggtgtgtatgggcctaatggcataattgtttgtggattttatgtgttgtggatattaatatcatttttcataaagaaaatcactactttattattttatgaaataaatatttcctagaacatgttgaagaaaatagatttatttatattatatatatattacattatattatctgatttattcaaagagtcacacttacagatgtgaaatttcttgtaaatagttcttatggataaaaccactcaaatgattgaaactctagtatatttgacccataytgtgtaataaatagctactttctgaaaaacataaaatgattgaaggtaggataaattgtctttgcactaaaaaatacatacatt

SEQ ID NO: 815700 - DNA, 577 bp, Homo sapiens
ctgtgtcccagaccttgaaacatctggcatatggtaagtgcttagtaaagactgtggattaaatgaacccaatgggcggtgagcttcatgacagcagagactgtyttgttcactattgtatcttcaacctctcttcaagtgtctatagttataggtagcaggtataggtattccaaaaacacgcattggttgaatgaataaatgaatgaaatcaaagatgaggtttctcttaaaatttttaatgaaaatgttttgcgacacttggggatttcatacaattaaagaaaagtcattttttttttccaatggagttcagggtgagtgataaattcttctctcctccatggtggacctcagattctgagctgcaagctccgaaggtgtgtagtgtgtagtgtgttctctcacacctcagtgagcaaatccaaataaacatgatcactaatatggttaaaaggagatgagtatacctcagggccaataccaattcataagcctcatggagttcttttcatgatgcataccctacttcttctctttcttctctatatttggagatattcattgtttacaaaat

SEQ ID NO: 815701 - DNA, 582 bp, Homo sapiens
cgttaaaaagaaaaaagcttcacttctctgctgatgaaggcacaacttaatctgctgtagaagatagtggaggtgaatagaggggcagaaagagggccagataagtccctggcagtgttggtgtcccttaccacagcgtccattgagcctcctgtcccctctctgcaattctttgtttctgtaaatcagtaagtttttctttttggttgcagttagtttagactgagtttctgtaacttggaaccaaaagttttaaatcaacaaagattcaagatgctgtggtttcacatactgtttatggaaaatccacattatttgcctttcttacatagtggacttgttagaagaggagggtggcagaagcaattttatcgggctgttctctggataaataagaagtgaagacaacaacaacaaataccttttagaaaatgtaggattaagccaagagaagggcaacagggaagagagtaaatctcaatagttattactatattttgcatttgtggttttgtacaaatatagatacttgcatacttcaatttcttatrgactaaatactgtattttaagttcaaaatac

SEQ ID NO: 815702 - DNA, 581 bp, Homo sapiens
gataatcataaaatgtgtgagtcatttataatagcatagaaaggctaaatatacttcaatctgttaataaacaaaaaaatgatgagtatctttctaaaaactatgaaatgggcttcacctacaaatactggtatgtaagcttaaaattactaacttcctaggctttctttagatattagggttgctaagagttgaaattgtagtttatatatatatataactaaaactataagatataaaaaaaaattctatatacagagtacacaaagaaagtaagatgtgggccaggcattgcggctcacatctgtaatcttagcactgtgggaggctgagacagaattgcttgagcccaggagtttgagacaacataggtaacatagtgagacccccatctctataatatgtttttagtagccaggcatggtgatgcacatctgtagtcccagctactcaggaggctgatgcagcagtattgcttgagcccatgaggtcgaggctataatgagccatgattgtgccactgcattacagaatgggtgacgaagmaagagaccctgtctaaaaaaaaaaaaaaaaaagta

SEQ ID NO: 815703 - DNA, 594 bp, Homo sapiens
actggacggtgagcaaggtgaagaggtgttttattgagcaacagtacagctctcaggagacccaaagtgggtagctcctttctgcaagcaggtcaccctgacatctctgcttcctcagcggaaaggagacctggagtgggtagctcctatccacagacaggtcatcccatcatctcagcagagaggagactggagtgggtagctcctatccacatgcaggtcatctcaacatctgtgcagcccttagcagagaggagacccagaatgggtagctcctatccacaggcaggttgccccgatgtctctgcagccctcagcagagagaagacctggagttggtaactcctctccacaggcaggctgtcccatcatctgtgcagccctcagtggagaggagacccagagtaggtagctcctatccacaggcagatcaccctgatgtctctgaagccttcggcagagaggagatctggagtggatagttcctatatgcaggcaggttgtcccgttgtctgtgcagccctcagcgtggattctayccacaggcaggatagctcctatccacaggcaggatagctcctatccacaggcagg

SEQ ID NO: 815704 - DNA, 579 bp, Homo sapiens
ccctgtttctactaaaaatacaaaaattagccaggcatggtggtgcatgcctgtaatcccagctacttgggaagctgaggcaggagaatcgcttgaacccgggaggcggaggttgcaatgagscgagatagcaccactgcactccagcctgggcaacagagcaagactccatctcaaaaaaaaaaaaaaaattgtaagagttcataagaaaattgcagggcaaatcaaatacataaattcaaccaacataagcatacctatattttgtggtctaatcaactacaaattggtataattttgtgacatggaaaaaattcaaataatttcaagtctctacaaaggttttactgcaaaggtgcttgatttggtagtctattcaatggtctgcaaagctgtgtactagttacatttcaaatttaattgacttttagctaccacggccctgtatcaccgctgatacttttctctgaacataaaaacatttctatgcctttaaaactcactgttgagctgggctcactagtgcacatctatagtcccagctactcatgaggctgaagcaggaggatcccttgagcc

SEQ ID NO: 815705 - DNA, 613 bp, Homo sapiens
aaccctaggtctggagaatgggtgctcttagtgggcttttcagaatctctgggcatcccagtgcagagtgtctgaaagctggagccaccacagccccacccaccccagctggccagccctcctccctgggttcttccctgggaggcgaaatggagaggggagggctggtcctgggaaagcttaatgttgcagtcaggaatgtgcatgctggagtcagctgacctggatttgaatcctgcctccagtactttattggttgtgtgaccttgggcaagtcacttaacctttctaagcctcagtttcctcatctgtagtgtagggataatgctacctacctagcagggttgttgagaggattaaatgagataatgtgagtaaaatatttaacaaggtccccagcagatggtgagtactactcagttaatggaagcggcggctgctaatggtgaccagggggatggggcttgctccccagcctgcctcctgccccatccatcactccacacccccagttcagacccagcccactggctgcacttgctacattggctgacccaygcatctctaggtgcactcataaaaggaataaatcaaccaattatttattgagcac

SEQ ID NO: 815706 - DNA, 539 bp, Homo sapiens
aagtccgtctcctcagcacagctcaggccagagctacaggctcctggatcctttccccatccgccccgcccggccctgagctgacctctaatccgcagggagcatcctccgaaaaccattaggcagccaggccctcccccagccagctccgggcccgacgccggcccagcccagcagtgccgggcgccgggcccaagccgaccccctgttttggctctgccgcctgatttctaccgcaggcagatatcttccgagaccccgggcccctaggctggcctcgcgccgctaccccagggccccaaatgcctgagagaggtggaagaactcttataactaggcttctgccccgtcactgcctactctagtcccgccagttttggggtagccgggggactcgctggcctcctgttcccgctgggagcggggccrgggtctcgaggtaggggggaggggggatgcggcgttgcaagctcgggcgtggcggcccctcccgggctgggtcccgccccgccctgccctgtccttgaatccaaggcggg

SEQ ID NO: 815707 - DNA, 602 bp, Homo sapiens
ccatgctgatgtgctccctccttaagagtcactgtagctaaagagcactggacagagagtccaggaactcatgcagtcatccaacacaaattttaaaagctgagaggtggctgatgtctgtaatcccagcactttgggaagctgaggtgggagcatcgcttgagcccaggagcttgagaccagcctgggcaacatagggagatcccatctctaccaaataataagaataatattaatataaaatattagccgggcgtggtggcgctgtggtcctagctacctgggaggctgaggcggcaggattgcttgagcacaggaggtcgtggcttcagtgagccgtgattgtgacactgcactccagcctgggcaactgggcaacggggaaagccaagtgggctctatctcagtttttccagtctgtagaataacagggtcgataattcaaactatggggttatttatttgtgtctgtattcrcagcaaccttcctttcttccccaggcggaatctcaggcagatgcctggtatagaattcaaacaaagcggagagtttctggttggagttgggagtgaggtccccctttccctctggcatcttcatc

SEQ ID NO: 815708 - DNA, 568 bp, Homo sapiens
ctccggggcaaggggggcgctgacctctgtttatgcttggaaatctcttgggcagaggaggcctgttttgctctggacatcaaggagcaggaggaaattagagaccctcaacgaagccccctgtggtccctcccaccccatggccttgtctctgggcccaggctagtggggcaggacagaaaggcaggatggtggggacccctgtttgctcctctctccttctgggcacagtgaggggatgggagaaggaacaggcctggactctgtcctccagatgcaggctcggggaggactccccagaaagagcactggactgggagtcagagactggggtttaattccgctgaccctgactccttggactccccatcccgttgggcctcaatttcctagggtgtgagagagagctgatcttcttggtctctaagggctctcccagcttggggccktgaaccccaaggaggtgactgagagatgctgctctcaatccagcctctctgcactgcagagagacccccttcccaccccagcagaaaagcagggggaacccaagtggatggaggaagct

SEQ ID NO: 815709 - DNA, 531 bp, Homo sapiens
taatagacatttacagaactctccaccccaaatcaataaaatatacattcttctcagcaccacatcacatttactccaaaaytgaccacatagttggaagtaaagcattcctcagcaaatgtaaaagaacagaaatgataacaaactgtctctcagaccacagtgcaatcaaattagaactcaggattaagaaactcactcaaaaccgcacaactacatggaaactaaacaacctgctcctgaatgactactgggtacataacgaaatgaaggcagaaataaagatgttttttgaaaccaatgagaacaaagacacaacgtaccagaatctctgggacacatttaaagcagtgtgtagagggaaatttatagcactaaatgcccacaggagaaagtaggaaagatctaaaattgacaccctaacatcacaattgaaaggactagagaagcaagagcaaacatattcaatagctagcagaaggcaagaaatgactaagattagagcagaactgaaggagatagagatacaaa

SEQ ID NO: 815710 - DNA, 479 bp, Homo sapiens
gcaccacagaaatatgcagaacacactcacgttcacacctcagacayctaccagctacttcggtccacgttgtgttatgagtcacacctgctcacttcataataactcacaggctgcaacccttctgatacccacctctaaaagcaatcttcaggtcttttccaaggtgaagtgccatttttattgtatttgtgtatttctaaaccatttaacacgtgcaaaactgtgatatcatttttattaggtttctatcttttattatgtgtcattgacaaagtttttcagcattgtgcccctaagcttatttttccagtaaactgagtggtctttgttggccgattctgtataatgtggtgatttttaggaaggcatatggggtattatagcagaagtggcgacacctatggctgcaggcttttggacagtgtggtttcccattgccttctttatgatctgggagctggtatttattgaacacc

SEQ ID NO: 815711 - DNA, 479 bp, Homo sapiens
gcaccacagaaatatgcagaacacactcacgttcacacctcagacacctaccagctacttcggtccacgttgtgttatgagtcacacctgctcacttcataataactcacaggctgcaacccttctgatacccacctctaaaagcaatcttcaggtcttttccaaggtgaagtgccatttttattgtatttgtgtatttctaaaccatttaacacgtgcaaaactgtgatatcatttttattaggtttctatcttttattatgtgtcattgacaaagtttttcagcattgtgcccctaagcttatttttccagtaaactgagtggtctttgttggccgattctgtataatgtggtgatttttaggaaggcatatggggtattatagcagaagtggcgacacctatggctgcaggcttttggacagkgtggtttcccattgccttctttatgatctgggagctggtatttattgaacacc

SEQ ID NO: 815712 - DNA, 447 bp, Homo sapiens
ccctggcctttgcctcacaggggttatccttggactacaaagcttagagctttgtaggggaagagagaagagaggaagcgggtactccaatgtgtaggaaggggaagggagatgggctcagtggaygtgctgtggatggtcacactcacgctggctacagcctgtcatgcgtctcatgggtgctcacaggctcaccaacacaaagacaagtgttgccgaacacaggtggccccagcaaacatccacagacaaccccccggatgtccggctgtatctctgactccttcctttcactttccactttcttcaacactcctcattgttctttctcacctcccctgtgagcctcacccctcctttgccctctgttctctttgtaggagattggggtggttggaggatggtggtggtcctccaggctgcttgggagccccgtggctggaggcc

SEQ ID NO: 815713 - DNA, 598 bp, Homo sapiens
ggtgacccatgcctagtgctcacaggagagctgccttaagcaccgtctaccaggcagcgagggtctgctgaaaagaagcattcatggctggggtttttctagtgtgactcccttcccagtgagaaagacctcrgagaacttaaaaggaagggcacagaagagtggcagagagggtgaatgacagcgtggcatgctccagggctgggcaagagagccaggaaaacgtaatgtatactccgctttacagagatgttaattaatgcctgccttgtcctagaaaccaaattggtacctaatgctaagtgcagaaagtgcagagattttctgaacccagatgtttagcttataaccagcataatgatactagctttgcattaaaatgatggatcctgaggctgcgaatacatgagaaaggaaagagggtagggaggaaagcagagaaaggagtggaggtctacagggaagacacagacatttcaggaagatcctgtaccctatccctttgcctcttccaggtcccatgagggactgtttacctgggaggcacccactgttgctggagctcattatttcttttgcaaaccatgtgctgctgtac

SEQ ID NO: 815714 - DNA, 531 bp, Homo sapiens
gtcattgaagtgagaaataccatgatgattaagtttgtgtgttttctggtgggtgctgggaagcagtggccctgctccccaggctgagttatggggtaggtcattccctcattagtggaaataaattttattagccccactctcacggcaatgtatcttcctctcttgctcctcgggtctaggtgtgggtctgggtaatgttgcctgcgtgtgggataaatcagccgaacaaatcccattatattttggaacactgacggagacacagtaatggcacagagaccagggaagggagtgggctgcttctctcccactgaccccgtttcctgcccatagggccacacacactagggaaaacatgtaaattgagaggccagatggagaagagctctctcagttgtctctttctccttctctccactgactttcttgataaaagaaacaagcctgrtgtggtgatgtgcagtccttcccttataccttacaaaaactaagggacatgtgaaggtaacagcagcaagcactggccca

SEQ ID NO: 815715 - DNA, 524 bp, Homo sapiens
caaaatgttaaaaatctttgtacattaaaggacattatcaagaaaatgaaaatgaaaaatgacctacagaatgagataaagtatttgtaaattacattccagataagggtttaatatctagaatatataaataattcttatacctcaacatcaacaacaaaaaacccaactcaattaaaaaaatcagctaaggaattgaatagaaagttctccaaataagatgtacaaatgctcaacaagcacatgaaaagaacctcaacaccactggtctttaggtaaatgcaaacccaaaccataatgaggtatcgtgtcacaccctgtaggaaggctataatgaaaaaaattttttaagggaaaataacaagtgttggccaaaatgtggagaaattgcaacctactcatactatttttggaaatataaaatggttcagccactgtggaaaacagtttggcagttcctcaaaaagttaarcagaattaccatatgacttagtaattatattccccagatacatactcatact

SEQ ID NO: 815716 - DNA, 591 bp, Homo sapiens
tctatttgattcttctctcttgtcttctttattagtctggctagcagtctatctattttgttgatcttttcaaaaaaccaactcctggattcattgattttttgaagggtttttcgtgtctctatctccttcagttctgctctaatcttcattatttcttgtcttctgctaccttttgaatttgtttgctcttgcttctctagttcttttaattttgatgttagggtgtcaattttagatcttttctgctttcccttgtgggcatttagtgctatacatttccctctacacactgctttaaatgtgtcccagagattctggtacattgtgttgttgttctcattggtttcaaagaacatctttatttctgccttcatttcattatttacccagtagtcattcgggagcaggttgttcagtttccatgtagttgtgcggttttaagtgagtttcttaatcctgagttctaatttgattgcactgtggtctgagagacagtttattatgcttcccattcttttgcayttgctaaggaatgttttacttccaattatacggtcaattttagaataagtgcgacgaggtgctgag

SEQ ID NO: 815717 - DNA, 566 bp, Homo sapiens
taactacttcctctatcctagggcatcatccttccttgaggatttatggttctattttacaaaagcaagcaggcttggaaccatctctggttttctgccctgcagagcctttcctgagataatgagcaggggtgagctatgtttggcctagtaaaaggaaagtaggggacatctggggtgggtgggggtgttatcaaaatatctagccaggcagttttctatgcattaggaaataatttttttctctgtctgccacattaagactataaaatctgtgaaggctggacccacaatgggcagcatgcacagaaactggcaaatggtaagaacttagagagagagagagagagacagagagagagagggggaggggtagagagagaaagagggagagagagaataaattaactgctaaggctgcacagaaaacactgtgaactactcatttgtccaaatctttgacagaatgacacattaaccatctggaatatawgccctcttctctaaatctcatgaattccccatgtccctttgcaggttttccagtggttctcccataactgtca

SEQ ID NO: 815718 - DNA, 585 bp, Homo sapiens
gggcatggtaactcatgcctgtaatcccagcactttgcaaggctgaaattgaaggactgcttgagtccagggagttcaagaccagcctgggcagcagagcaagaccgtgtctccccmccaaaaaataaaaacttacctgggaatggtggcacacacctatagttccagctacttgggaggctgaggtggaagggtcacttgagcccagaagtttgaagcttctgtgagctatgatcatatcaatgtactccagcctgggtaacagagtgagaactagtctctaaaaaactacaggtcaacacttcttatgaatatagacattatcaataaagtactagcaacctgaattcagcagtacattaaaaggattgcatataatggccaagggtatttagtctcagaatgcaagaattgttcaagataaaatcaatcaatgcaacatagcatgttaaggaaaaaaaacataataatataaataggtacaaaaaaattggacaaaatgtaacaccctctcatgataaaaacagtaaactaggaatcgaaaggaatttcatcaatatcatgtgtaaatctcacagctaatgg

SEQ ID NO: 815719 - DNA, 640 bp, Homo sapiens
aatgttaaatggtagaaacaccactgaacagaaggcagaaggtctgagtctgagtcttcgctctaccctgtagaagscatttaatttagtcataactcagttacatcccctacaacatgggacacgtgtgaccaaatacctttaatctctctttgtcatcttgttttacacactaagttgtagtagtatattttcggtcagtgtagtccagtgaatgcactctgcatcttcagtgacctttctcttggtgcaggtataatctatctgcaccacaaaggcaaaattataaccaacttaaaaataaaatagaacttgcaatggaatagttctactagccgcagttatgcaaccattataatgatgtcaacatttaaaaaatgctgatgcacaataagaggtacaggctagatttaaattgattatatattttatataaatataaaatcaatgaaaaaacttccaatattatacatgtgctgtaaaaagaaaacattctgaaataggctgatggcatttcaaaagcagtctaaaattatttttaaaaattgttttatcttggtggtaaaacaaaatattatgaaattcattttaatatgatgaagtttcaataaatctaacaattaaaattgattacacatgt

SEQ ID NO: 815720 - DNA, 617 bp, Homo sapiens
cattcattttatccaatgtttttctattctccattttatttatttctgctataatctttattatttccctccttctgctagctttgggtttagtttctcctttttttatagtaccttaagttgtcaacttagtttgttcatttgagatctttcttattttttttgttttctgttttgtcacccaggctggagtgtagtggagtgatctcagcgcactgcaacctccacctcccaggctcaagcaatcctttttatctcagcctccgaaatagctgggactacaggcatgattacaccaccaggcctggcgaatttttttgtatttttggtagagacagagttttgccatgttgtccatgttggtctcaaactcctgagctgaagtgatccacctgcctctttattttttaatgtaaatgtttatagctataaatgtgctttttaggactgcttttgctatatctcataaattttggtagtttttgtcattttatgaaattagaygcatctctttttaaattaattttaaacaattgacactttgcaattatatttactactggggtacaattttatgtttcaatacatatatatgttgtataatgatccattcaggg

SEQ ID NO: 815721 - DNA, 631 bp, Homo sapiens
tagaacactggttctgttaggaagatgcaaccccaccaagttctgactctttgactcaaaggtattgaatgcaaagaagcaatactggtcggaaatccattcttgcaggmgtagggcagtaagtgaagctacatcaaattccagaagaggcaatggtggtgattctgctagcctgtgcaacttccagcatccatggtttgtggggtacaacagctgtgcctgtgcccagtggtggctgcatagggatttgtatagaatcaattatctgacatcattttagagattgtttctgatggtgtggcctctaaacacaagttgtgtaagtattctagaatacagttctttcctgcataaattagcctgggttggttcatgatgcttaaaattaagaactttgactagccatctacctttctaacaaatccaaaactttaatctactgatattcactgaatgcaagaaactatgttatgtgcttgagtgaagggatagcgtcaggggtaaatactgaaatgtaagccacaggcctgctctccaggggcaagcagcataaaacaactgtaaactgagaaggatgattgtagggctacatcaaagcacaagccttgcagtacagaagaagtaacaacca

SEQ ID NO: 815722 - DNA, 547 bp, Homo sapiens
ccattatgtccaattggagctactttattccttacacttcacctcaggtggcctgcctgctgttattttcaaaagattaatcctggkggttatattgcataagactgctctttatttgacctgaaacattccttcactcctgacagacagacaggatatggcctaataggaaagggttcatgaagctccagccctagtacagctggcgtccatcctccgcctgtcgctgccaacagggctgggagatggccactctcctgagcacactggactctgcagctgggaaggtgcagttctctgggaacagtcagagttgagcccccatggtgggtggcatgtttatcttttcccttgaaaaacaaaaggtcaatgaggaacacatgtttctatgacaacaagaaattcaaaggggatgctaaatccaagcaaatgtgaatgcaagggaagaggaagagaaaagttggcccagtttgaaaggaagtgatttggtagtacattgagtctctttttatttcaacttaattcccatctgaatttacatgtgatg

SEQ ID NO: 815723 - DNA, 612 bp, Homo sapiens
tcaggccacgatgcagtccaggtcagacagttccatcctcaaaagcatctgtgaattgctgcccaggccagtgatcacataggaccagcactccctggakggaccatgtgggaccatgtcggaccacgtgggaaggcacagcttgggacatgaattttactggaatatagaagaaaaaatatattcagagaggggagtgttatttttacataagaacaggctcaaatatagcacattgtcaaatgcaaaacagtcatggaagtgtaagacaaaataaggaaatgttgatataatttcccacccaggctacaagcttctgagacccatctgccctgctagatgcctcaggatacctgttccccatcctcctgctggtctcttgaggaggcagagcacagttaaaaaggccagctttgggggcaagctggctggcctcaaatcttggcttcatcaactcgctaacttctactaactcaagatatggccctcggacaagcccagtcagcatcacctgggagctggttagaagtgcagaatctcaggccctgcctcagatccttggagtcagaaactgcattttaacaagatccctaggggacttgcacacacatt

SEQ ID NO: 815724 - DNA, 637 bp, Homo sapiens
agctcccccaccccacccaggaggcagggctaagtaaggccccatcactgagtcctgggcccagagagaaggctctgggcactaagtatgttggttgcctgtgcagcartgcaggtgagcacactttgcacactgcagggacgatatatgcatgacccatggagatgttcacatgaagctgtggggacaagactgtatgggatgttaaggctgcatttaagtacttgacaggaacctaagtcagaacaggaagacccacagagcagccagaaagagggaggccagactctaaggaggaaaacagccggtttgaattgtgctcctgtttatcagcttttccaatgacaacatgaattcctggctcccccatcctggcctggactgccagaagcccaggaaaagcagcatcctacaagccaggagggccaaggcgctgacgactgctgctgtgacccgggacaggtcccatcccatctcgtgcctcagtaaatgtgggaagaggggagatgggggccactgagcaatatttaaagctccctttttgctctcaaaccgtctatattcaaactctttaaagcattcagaggctccagcttgggatcaattcagagctgccttgtcataagcattaaggcac

SEQ ID NO: 815725 - DNA, 600 bp, Homo sapiens
ccaactccatatttctggggccaagaatggattgaccagttttagatctgagcctacctattatccaccrgcagtgccagtgggaagggtaatatgctgcaaacacagcccctagggtctgcctctgtaagcaaggggtgggtgtcacatactagacagattcctcaaaatgtgtcctccacacctaccttaggtagtcaccaatcattgcaccaactcattgaacctttatctttttctgaagtctgggcaaagggtattgtcatgagaagaggtaaatgttttgtttagttggccaaagttgtggcagagaatgactacctactaagaaactgtcatgacaggtttagcatacggttaagagtgcaggccccagagccaggcttcctgggctcgaagcctgttccaccacttgctagctgtgtgatgctgcacagatgacttaacttctctgatttcctaatctgtaaaatggggctaacaagtggaacctttcttatagggttgttgtaaggattacaagttactctctagacagtgtctgtcacatagttggtgctcaataaatactagctcacattattattagggtgctatgta

SEQ ID NO: 815726 - DNA, 447 bp, Homo sapiens
gcggggcccgagggcgcctcctcactctccggctgggactcagcgactcggggacgccttgtctctctccctgtctctcgcttccacatgctgtccctggggctgagtcgtaggcctggagtcagagacagagagacagtgagacccagagagagatatagagaggcccagagagagatagcgagagacccagagacagtgagagacccagaaagagacagagagacagtgagacccagagagagagagagagatacagagagccagtgagagatccagagagacaatgagaccctgagagaggcccagaggtagatacagagagatagtgagagacccagagagagacccaaagacagtaagagacctagagagayagtgagagacaccaagagatacagaaagacagtgagagacccagagagacagagacagggagacacccag

SEQ ID NO: 815727 - DNA, 591 bp, Homo sapiens
tgcatatcctcgagggctctgtgatatctatcaagccctttttggattcagcacacmtacccccaaactggaaagagaatcctagccagaggctcctcaaaggctgttgtggcagagctcagagtaaccaggcaactgatgataatagcaagaggctcccgcgagcgcgctggctttgtatgtgacattcaccacactcgcactgccccaccccaacctgtggcagctccagcatcgggtgggagatttgcatccagtctccctccccagtctcgctgagcatttgctaaactccagcactgaagccaccgtggagccctatgaattgatgggaagcccagaccccggtctgttactgagctgctccagtgaaccgggggtgggtcctgaccatctgccctcatcacgggccctggtgaccagaggcctgctcagaggaagcaggatcgatgagctggcatattctcccactctaggacattctatcagcccctgatgtcccgggcagtaaatgtcagtccctctgaaaatgctggtgttatctaaacctccaggtgtgatgatccggcatttcttaaagagccttcccca

SEQ ID NO: 815728 - DNA, 631 bp, Homo sapiens
aactggacacttgagttgtttttagttgctcatgatcacagacaaagctgcaatgaatagccctgtacatgtgtctgagtacacatgtgcaagcatttctcytaagaagtagtgggattactggtcatagggatgcacatattaaattctaccagcgaaattgccctctgagggtcctaccaatgcacagtcccaccagtagtatacaacaatgctcatttccatcatccttgccaccacttgctgtcagactagactttttttctaattgtcttctgtcttagtgtatttgggctgctgtaacaaaataccatgaaccaggtgacttacaaacaacaaaaatctattcttcacagttctggagactgggaagcccaagatcaaggtgctggcaaatttggtgtctgatgagggcctgcttcctggttcatagatggtgcctttttattgtgttctcacatggtggaaggggctagctagctttctgaggcctcttttataaaggcactgatctcattcctgaaggctctgtccttgtgaactaatcacctcccaaatgccccacttcctaataccattaccttggtaattaggtttcaacatataaatattggaaggacacaaacattca

SEQ ID NO: 815729 - DNA, 282 bp, Homo sapiens
ggtttttgcatctgaaggtaagtctgggatgacagggaatatagcaattgtctttggacatgacaacagtcatcatgggagaggagaatcrtctgcattttatttatcaaggcaatcaccaagtccttcccagggttcaaggggaagggaaatatactctactacttgataacaagtggcaaggttctgaaagagcatttgagactggaaatattgctgtggccatttttggaaaacacaatttgttaaaagagtaaaacgagacataactatagttaaaat

SEQ ID NO: 815730 - DNA, 551 bp, Homo sapiens
cgtcttccacagcagtgcagagcattctgtaaatggtgtggttttgtgagatattagaggaaaacccagtcttttatgcccaaaggccctcccaagcacgatttgtggtgagaggcagtatttagctggaatttcctagtcttctgtgactgtactgtagtttaaggaaggagcgtggacttcagaactgtatggttctgagctcagatccttctctgtgggtaagctacataatgtttcctagtgtggggtttctctgtgtaaaatggggatgctaggacccaccttgtggagtgcctgagagggggaaatgaaataatgccagagaatatgctattgacaaatcctcacttccccatctgttcccaaaaccacccaagacggctgtagcagatggagttgcctttctgtgcagattcctttgggtcccttctacatttccatgcacccattccccaactgtgtgtcctttacttttcagagcagcacaggtgactcatttcagagsactgcccttggctactggagcccctttgcccacatgtggagat

SEQ ID NO: 815731 - DNA, 519 bp, Homo sapiens
ccggcctccttctagctctgtcagacacttggccccttctgggtactctggcagagtttggtaccattctctcacactgaagagagaccctcataggtagaggcattgcaagctgcaggctgtggctcacattgcaatgtagctgtatcagccatgatttttagttacaggcatcagccaactctggctgactgaagccgaagagagtttgatgcaaagaacactgggtggctggagaatcagtaggaatgctgacagtaaggctggagaataagcagcctggagcagcaccgagaatcacacggtggaaggagtctggagaaacttctactgcttcagccattgaatgttgggcactatcattggcatcacagtcacctctgtgcacaaacttgaacctgcagtagggagasagagaactccacccttcctgtgtctagctccagagtcaaaacccagggtggcacatggtggatggatcctgtgtacagcctgtgcctggctgcaaaggctgctggg

SEQ ID NO: 815732 - DNA, 639 bp, Homo sapiens
ctatgcagataaaatgcctgtatcttttccactctacagccaatttacgaccatctctgttgtaatggtggtcatgtaggagcagttgtcctctgtcagcccgctgacacttccttaatctaggagacatttctaaccatggttacttaattgtcatttccacctaacatgtgataagccttttccagtcttcaggagtattacctcaaaacttttatcacataacgtgtgtcaacttatgtttattgatgttctttacattccttaaagcaacagacccaaagtagggcatgcctcacagtagaatgtataagacggtctattggaaggaaataaaatactaacaatttacattcgagagcagtattcattaacaatgtagattttcataaatgcctattgatggtttataaatagctacaatgttgggaatgtgttcagtatatctttaagaccactgttctgtaggaaaaaaaaatctagtatcatgtcataatatccccaytgcctatctccatataccttttccttcttagagctcaaagactgtttcctaacatactgtgccttttgctatttcctgatttactaactggtttttttctccccatgaatttttaaaagctgatgccctgtatt

SEQ ID NO: 815733 - DNA, 596 bp, Homo sapiens
ttatctgatttggtaaaatatctacaagacgggggagtccgggctgctttctttgacactggtcatcactccacacctagacgctatgtccatgtctggaagatgcttttaaggaagttttgatgcagagaagagtggccggtgctcttcctcgcgtgccaccatctgcttacttccagaagctaattattttcatgtgactgatgtgactaatattttttaacgcctgcaggtgagtgatttatttcgcatgaccccaaggtgagtgtcccaccagtgagtggtgagaaggaaattgacatttgacaaccaactgtgttcttgtcactgagctagggacattctcaggttatattatttttatttttaatcgtaaaaatatagaacataaaatttaccaaagtaatttttttaattttcaatcttgtgtgtctatagtaggtgtatatatttgtggggtacatgaaatattttgatacaggtagagcatacaatccgtaataatcrtatcagggtaagtggggtatctatccatcacctcaagcacttatcatttgtgttatatacaatccagttatatgcttttagttatttta

SEQ ID NO: 815734 - DNA, 363 bp, Homo sapiens
tccataattcaggatgttctggggtaacaattggatgaatcatttttggtctaggaggaatgatgcctgtgtacatcaatttaaatgggtaaggagctacccattccctcaacctgtaggactgccatccgtcctctacatattctaacaaataaactctgagcatgtcatattttggctggagcaattccgccaataataaataccctcttggagcccagtcaacaacaacaaccgtaggtagagtttgsaacactacgggctttgaagcattacaatcattccatacaattgaatttactaaaaaaggtccctttgtaggtttattggagcagtctggcagtccttttgttattttttgtg

SEQ ID NO: 815735 - DNA, 600 bp, Homo sapiens
gcaaagcttgcctttcaatttctgacgtttcttcgccttttgtttctgagagctttttatctttgaagttatagtgcaatttcagttgccgggagggaacccacacgggttgttgtccttcttttgggcaaacacagcaaaacccctaccccatgttaccacagtgcctgattcctgtttctcagttttgcatctttccaccatacccgcttttcctttttgtggatcaaatttatttccagtgaaatgttctgctgctgtaaaaggttgatttcttactaaatttaagaaatttagtgtaaaaaagcagcactagtgtagccggggccgtcattagtttttagtttctcgggacagcccataactgagaaagatgaaagtatgtgtcgtttaacatgaaccatatactttcccttgtttgacaagtgacccagataaaatgagaaaaggtgtcaatagttaatgtataaaagagagtttgccgaaagyaggataatgagtcacatccatttgccagagagcattttgtgaaagtcctctaggattaactcctgaagaaagtggctgtaacattaacacttgacaagtaggacagtgatg

SEQ ID NO: 815736 - DNA, 620 bp, Homo sapiens
tcttagctgattattccagtttggatccagtcactgcttttcctaagtcccaccagtgtccccatcccagttaaagggcttctgcattagtcaagaggaagaaaatggggcctgaactagataaatgtcagagaaaggtaaatacatgtttttgaggttcttctaccagaagcagtcttgaagcaccttgcatatgtgactatccttccttgtctggttcttaatttttcaaatctgtcattctgatatccttttaagataaagctgtaggcaaccaaatagatatcagtattaactgagtccattcagcatatggaggcctcttttaaggagttctgggagacataaacagacaagtcctttgagcatggatatcttagttctgaaaacaatgaacagtctggacaaaattttcactacagagcaggtcttagattctggatattaggggaagacgactggctccattcacgctcctactctgagtccttcattctgaraggagttgattttagatgaccttcaaaggaaataagatttatggacttggacatcctgtcttttccagaaaaatttaagagatgccatccattttctatgtgtgaggatgggcgagcagg

SEQ ID NO: 815737 - DNA, 616 bp, Homo sapiens
ttcctttttatcttcatagttcattttgcctttattggaaggaatttcagtgtcctggagcttctttgtagcacttgctacatgttggtagggtaaatcaactttargataagtcaaatttatcattaaaataaaatttccttttcatgaaataacctttacaacaacatgttctgtaaacacaaacctaaagtactatgaagtcctaagttacaaaattccatctacagggatattgctgtgcatcaacttaataaagcctagaagttctctaggaaatagaggacccttttccctccccttccccaatcaaatccattatcaaatcacatctatctctaatatatgtcttgattctatttacttctccctatctacactgctaccatcccagttgaagccattcacatctcttgcctgaaagcctgcaattgtttcctgtctccaaaatgtatttttgctcccatccaatccattctgtacacaactgcaaagctggtcttttaaaaatataaacaagattattatcttcccctacttaaaaccctccagtggctatgtattgcacttagaataaattaaaaatttcctaccatttctatgttattctttcagt

SEQ ID NO: 815738 - DNA, 592 bp, Homo sapiens
gggaagcttgactaaatggtggatgacctttggcacaagacagtcatttgctaggaatgaacacagactacctttatgggaaagagaatagagtatgacaaatttcagccaagttcaatgtcagagatgagagaacaaagatggatctagcattaagtggttaggacagcaggagaattaaactagagggccagaaacaggtgtttagcaaatacaaggctggaattgtggctgaaattccagaccaaaggcaatatagcctatcttcctccttcctgcccttctttctctcccttcttttctttattttttctgaagacaggcacaaacaagacctttctgaagtcttataactgatggtagctgaaaacaaccaagggtatcagaagtacagtgttcattttaccagccaaacttcttcctgtcagttatctcaaaatccagcttaccgcttgtattagtccacattcacactgctataaaaaactacttgagactggataatttataaagaaaaaaagtttaactggytcacagtttcacatgtctctggaggcctcaagaaacttacaatcatatcagaaggcaaagg

SEQ ID NO: 815739 - DNA, 628 bp, Homo sapiens
tgtctatacatttttctttgtatcacaaattctaggaacatgaagataatggcttaggtagctagtcaggcataaaatgccttttaaataattgccccaggctgggcatggtggctcacacctgtaatcccagcacttttggaggctgaggccggcggatcatctgagatcaggagttcgataccagcctggccaacatggtgaaactccatctctactaaaaatacaaaatttatctgggcatggtggtgtgggcctgtaatccaagctactcaggaggcggaggcacaacaattgcttgaacccaggaggtgaaggttgcagtgagcagaggttgcacaactgcactccagcctgggtgacagagtgagactctaactcaaaaaaaaaaaaaaaaaagtaaaagacttaatttttttttctgtggaaataagggaaggcacagctctgacctctcctttttctttcagaatttaatcctctgtccttttcaaatgtatgttacatctttataatggctaaataaacctcttctmagtctcacaatttaggacctgggagtcatgtttcaaaatgcgtattcaagggagacagctctcatagttcttctgggagggtaagaactgaa

SEQ ID NO: 815740 - DNA, 628 bp, Homo sapiens
tgtctatacatttttctttgtatcacaaattctaggaacatgaagataatggcttaggtagctagtcaggcataaaatgccttttaaataattgccccaggctgggcatggtggctcacacctgtaatcccagcacttttggaggctgaggccggcggatcatctgagatcaggagttcgataccagcctggccaacatggtgaaactccatctctactaaaaatacaaaatttatctgggcatggtggtgtgggcctgtaatccaagctactcaggaggcggaggcacaacaattgcttgaacccaggaggtgaaggttgcagtgagcagaggttgcacaactgcactccagcctgggtgacagagtgagactctaactcaaaaaaaaaaaaaaaaaagtaaaagacttaatttttttttctgtggaaataagggaaggcacagctctgacctctcctttttctttcagaatttaatcctctgtccttttcaaatgtatgttacatctttataatggctaaataaacctcttctcagtctcacaatttaggacctgggagtcatgtttcaaaatgygtattcaagggagacagctctcatagttcttctgggagggtaagaactgaa

SEQ ID NO: 815741 - DNA, 594 bp, Homo sapiens
tgaagttgctgcagacccatacaaagtcgctgctgccggtaactcagataccttccaacagtaacaggactacaagcatgcaccaccatgcccagctaattttttttagttyctatagagacagaatctcattatgttgcccagggtggtctcaaactcctggactcaagtgatcctcctgcttcagcttcctaaaacgctgggattataggggtgagccatcatgcctggccaagcactttttaaataaaattcttatgattctaatatcagagctcctacctatcttaaaaactttatgattttaacatcagaaattctatttataggaacaatggggatgcaaatctggtgctatgtaacttttggttatgaggaagtgagtcaaagtgcagcttgattaatgcttaattataattgtatttctgtccattattcttgctaaccccgtgacaacaacttcattaagtgtgtgagtggtgggaggaacaccttcacaagaggaaatgtatgttttactctcaggcagataggagagggcagagagctcatgttatgtctgctttttattaattgtcttcagctcaaaataat

SEQ ID NO: 815742 - DNA, 579 bp, Homo sapiens
gttttcactttcttggtggtgtttaagttttatttcaacaaaggaagtatctgttatggatgaaatggacattccttttgttcctcaaggcgagttagcctccctacccccaagagagacgtaatcacagccttggttggtgtcttgccaaggcatcgttatatttttatttctaaagaatatattttgtgtgtcgtgaagaaattccataaatgatatcaccctgtatatgtctgatttatctcatcttttattttctttttttcttttttcttttttttaaattttgagacagtcttgctctgtctcctccgcctcctaggtttaagcgattcttgtgcctcagcctcccgagtagctgggattacagatgtgcaccaccatgcctagctaatttttgtatatttactggagatggggtttggccgtgtctgccaggctgttctcaaactcctggcctcatgtgatcagcctgcctcagcctcccaaagtgctgggattacaggtgtgagccaccgcacccagcctattttatttcttttaactgtacrtgtgcatcttcccttcacaaacgtgcgg

SEQ ID NO: 815743 - DNA, 602 bp, Homo sapiens
tctcatgagatctgatggttttataagtgtttggaagttcctcctttgctcttctctgtcctgtcacctggtgaaaaaaagtgcttgcttccccttccccttctgccatgattgtgagtttcctgaggcctcctcagccataccgaactgtgagtcaattaaacctctttcctttataaattacccagtcttggtatgtctttatagcagtgtgagaacaaactaacacatatgccctggatggaagagctcatttcattaatgctaaagtcaacagagccttgaaaatggcttgcaggcatggcctcaggaagagccaagaaccaagtgtgatcccctcttctaccctaaggagctatgggctgagccccttgaccagcagacttcccaggatgaaaaggagaagagctcaaggaattgccatgaagagttagtgtagagagtagtttggtgatgagtcaatggtcattcaccccccacctcayggtgcaagactttgtagtgaatcttctgagtcctatgtctcattttccttatctaacaaatggcgtggtggtcctcgccctagctaacccataggattgacttgatttgaaaaccct

SEQ ID NO: 815744 - DNA, 435 bp, Homo sapiens
cgttccactgtcagcaattggtagaacaatagctagaaaaccagcaaggatataggagaactgaacaacaacatcaaacaacaagatctaattggcatttatagaacactccacccaacgacagcagaatatatattctttccatgtgtccatagaacatacgtgaaaatagatcatgtcctgggtcacaaaaaacaacttcaacaaatttaaaataattaatgttgcacaaactgatctctgaccacaatgaaatcaaactagaaatcaataacagaaatagagaaatttttaaacaggtatatatcagaaatataaatatacatatgtacatacacagacacacacacatatatatatactctgctctgaagtayactttatctgatattttctgtagatagatgattgatagatatagacatacatgtagat

SEQ ID NO: 815745 - DNA, 476 bp, Homo sapiens
tttgatccccagaagatccctttgcagctgatctattatctgaattttacaggtaatagaagagacacacaaaggttaatgggcacatctaaggtcacacagtcagtaagtaaatgagtcatgctgaaaatcaggtgtcttcactcaaaatccaatgttctttcttctatcccacactttgctccatataatttttgtgtgagaaaactgtatttgtctaaactactgttttttcaaactgcaggttgaaactcactagttggtcataaaatcaatttagtgagggccaagcagcatttgaatagaatgggatggaatggaacagaatgcaatagaatgcaatagaatagaatagaatagaatagaatagaatagaatagaatagaatagaatagaatagaatagaacagaacaggtggmgtgtgacacgtcatgacatgtcagagtgtaagtattgtttcttgaaagtttttctc

SEQ ID NO: 815746 - DNA, 535 bp, Homo sapiens
tcaccgctttctttgattaggaaagggaattccctgaccccttgcgcttcccgggtgaggcaatgcctcgccctgcttcagctcacacttggtgcactgcacccactgtcctgcaccygctgtccgacactccccagtgagatgaacccggtacctcagttggaaatgcagaaatcacccatcttctgcgtcgctcacactgggagctgcagactggagctcttcctattcggccatcttgaaatgccggaccgagggttatattttggatttattaaaatgttttagaactacctagaggtagtggttgcacaacattgtgaaagtaccaaatgctactgagtcgtacactttaaaatgtttaattatatgttatgtaaattttacctcaatttaaaaacaactaaaaataataaataattttaaaaataaaggtatacagagtgaaataaaggaagtaatactatctttatttgcacatgacattatagttttacagaaaattataaggaatttacaataacatctatagaac

SEQ ID NO: 815747 - DNA, 570 bp, Homo sapiens
tgacagaggttagtgactaagcctgaaaaatttatcttagccaggcaacctgctgtaagccwgccagttggttaacacagacatttaaagaaatttgctcttggtaaaagacagcaaaagaatctgcagtgaatttaacaatgcaaggcatggtgaccccttctctcccaaggagctgctgaatggagaatgctgtttttatggaggaactaagaaaacattggctaaaagacaattcttgaaaagtgaggttattttatccatccattgattgtgttttaaaacatacctgttatttgattaggtgtgtttagtgctgcataagaatcatatactgttactataggactcaaagaacagaaacaggaaatagaaggagacaataacaatattccttggacatcagggtagaggtcatatcccttctatagcaatgatgaagaaaagatcaattgtagaagctgcagagacagtcaggtggcttgaagacagacagttattacttgtatgggagggggtaacgcagagaagaaagggaccctgaatgggagcaaatctccagcctgagct

SEQ ID NO: 815748 - DNA, 570 bp, Homo sapiens
tgacagaggttagtgactaagcctgaaaaatttatcttagccaggcaacctgctgtaagccagccarttggttaacacagacatttaaagaaatttgctcttggtaaaagacagcaaaagaatctgcagtgaatttaacaatgcaaggcatggtgaccccttctctcccaaggagctgctgaatggagaatgctgtttttatggaggaactaagaaaacattggctaaaagacaattcttgaaaagtgaggttattttatccatccattgattgtgttttaaaacatacctgttatttgattaggtgtgtttagtgctgcataagaatcatatactgttactataggactcaaagaacagaaacaggaaatagaaggagacaataacaatattccttggacatcagggtagaggtcatatcccttctatagcaatgatgaagaaaagatcaattgtagaagctgcagagacagtcaggtggcttgaagacagacagttattacttgtatgggagggggtaacgcagagaagaaagggaccctgaatgggagcaaatctccagcctgagct

SEQ ID NO: 815749 - DNA, 615 bp, Homo sapiens
acatgcggtgcctggccctttgtccctgygatagtttactgagaatgatgatttccaatttcatccatgtccctacaaaggacatgaactcatcattttttatggctgcatagtattccatggtgtatgtatgccacatctttgacaaacctgacaaaaacaagcaatggggaaaggattccctatttaataaatggtgctgggaaaactggctagccatatgtagaaagctgaaactggatcccttccttacaccttatacaaaaattaattcaagatggattaaagacttaaacgttagacctaaaaccataaaaactctagaagaaaacctaggcattaccattcaggacataggcatgggcaaggacttcatgtctaaaacaccaaaagcaatggcaacaaaagccaaaattgacaaatgggatctaattaaactaaagagcttctgcacagcaaaagaaactaccatcagagtaatttttttaaattcagaaaattctatcgtgtaaaggaaagggcggctaccggcatacctcaggtttttgtcagaagctctgatttccctgcctctttattccctttctccaaactcttctccacactgattccaga

SEQ ID NO: 815750 - DNA, 525 bp, Homo sapiens
gaatgaatagattaattgttcattttatgatcagagtcatcagggaaattgtattttatttgcaraaatttacttaaactctgtaggtgtccctctgtttctttaggcaatatttctcaacctgttcaaactctaaaaatctcctggagggcttcataagaatcaggttccagagctgtacctaagatttcactaaattaaaatgtcaggaagtagagaggtaagtatctgtattttaatgcaatttaaaaatgctaccaggggagatgatttaagcatctatttccttaacatctcagcaccataggatcatattttaaaagcctcaacctgtatttatttcaataagatgtcaggtgactctattcagctcaaatttaaagacaggattcagttgccatttccaagtctgagggtgcctgtggtgttattgagcactggtcttaatcataccctcttctgctgtagcctccggttttatgggaagcataagatcaagtcctgctgagattttaaatgcagcct

SEQ ID NO: 815751 - DNA, 634 bp, Homo sapiens
tggagacaaaggcctgaggggagggaatgaggttttaggaaccttaaccgagagaagttaagcagtaagtcattyatttggacaatagatagaccaacatagacagcatgtctagattttctaaacattaattaaaactctccaaaacctagcaaagaaagacacgcagctaaagctgttattttcttacccaagatgcaaaaggaaggaggagtttttgaagaacaatattgacttagcactgaattagatgctttatatttaatatctcacttaatcccacagaagaccttattttctcccacttttcagatatagaaattgaagctaaaaacactgaaacgttctggacaacatcactcaagtaaaacattttcagagctaagatttgaacccaggcctaattctgaaacccatgattttaacccaagagttgtcttgctttactgaggttagtcaatgggatcctacttagagagatgagataaattggtgagggggtagaaaggagtgaagcacctattctctaaaagtttatgctatgactagaatacctaggtcaaatctgtgccaaaaggaaggggtgcagagggagatccagtgaaaggcaggaagactgaattggtataaggat

SEQ ID NO: 815752 - DNA, 515 bp, Homo sapiens
tctcctgtctacgtctccatctatggatccttatgggaaggaccatactcagtaatcctstctacccccactgcagttaaagtagtaggagtggaatcctggattcaccacacctgagtcaaaccttggacacctcctgaggaacttgtaggatcatcacctcaggagtcacgaagtcagccagaccagcctcgatacacctgtcagccaccagaggatctgcatctcatatttcggaaagaaaaacctctgagcagaaaaactcctgcagttaatcctgaaaaggaacttttttctacctaaaggaggataagtagaaaacctactgatctttgacatctccccttgctctctttaatggaatccttctactgcttcattacattattaagcagtacagtaactacactttttgcagtaggattatatactgtagctccagccgagacaaaaatcttaatcacatcaggttatcacatcaacccttcttctatcgtccttccttctaacagcaa

SEQ ID NO: 815753 - DNA, 586 bp, Homo sapiens
atgaatttgcttttcatcgagagggctgtaaaacatgggtgacaggcagcacccaaaagcagttgacatgggastggagagctagcagagcctggagagaggccagacaatttagagggagataaagcagagggtagaggaggctgacctctgtccagtgggccgtggtcacagccggccagagttcccactgggacctgctcaggacagtcttgatgagaaagtagatttgattgacagtgaggtgtggtagaaagggaataagttttggagtcagatagaactggatttctatttcagctgtacaattttctactctagggagttggtctcaattcttcacgactcgatttttctaatctgcaagatgagcagataaccgaacttgttgcacagatgaaggtgaaatgaaactgtgtttgcaaagtgcttattttgctgcatgtgaggctgtcaaatgcatttgttaagaggaaaggactgcagagtagggtggacctgggggcaaatcctgcctcttacctactagctgagtaaaacttgggtaagtcattccaccattttgagcttcagtttctttatattg

SEQ ID NO: 815754 - DNA, 633 bp, Homo sapiens
tgaggctgtcaaatgcatttgttaagaggaaaggactgcagagtagggtggacctgggggcaaatcctgcctcttacctactagctgartaaaacttgggtaagtcattccaccattttgagcttcagtttctttatattggaatagtaataggaacgtctgtccagggtggttgttataattaaattagattagatgatgcatatgaagttatattagcacactgcgtgtaacatgatgtgaattcagcaagaagagggcatcatttttgtcaatctgattctcatccatcccaaacagggcacagaggaagctctctgttaacatcggctcaattgcatgataaattaatgtttttaacacccttaaattgggtaatttgaggagagtttaatacaaaagttaatgacaccaaaacatatttaaataataaaacaaccattaaaattatacatgcatgatctatttacaaatatgtggatggggctctggaaaaacaagatgaatgctgaatgccaggaatacaccagtggggagccatggccactgtggagtcaataagagtattgttccagcactttcttttcgaaccattgcaatacctcccagtagaataggaagaatgaacctgcc

SEQ ID NO: 815755 - DNA, 429 bp, Homo sapiens
gtcacaagtaggaggaggaaactccacactgagtctaatggagagagtaatccccgggcctcagagcagcaagggtgcccaggcctggtgaggcaagactaaagcaggagggagtcacgcctgtaatcccagcagtttgggaggcagaggtgggtgaatcattcgaggtcaggagttcaagaccagacttgccaacatggtgaagccctgcctctactaaaaatacgaaaattagcctgccttggtggcagatgcctgtagtcccagctactggggagactgaggcaggagaatcacttgaacccaggaggcaaargttgcagtgagccgaggtcatgccactatactccagcctggggaacagagcaagactccttcagaaagaaagaaagaaagaaagagggagggagagagagagacagagaggga

SEQ ID NO: 815756 - DNA, 523 bp, Homo sapiens
tcctagctactcaggaggctgaggcagaagaatggcgtgaacccaggaggtggagcttgcggtgagccgagatcacgccactgtactccagcytgggtgacagagcaagactccgtctcaaaaagaaaaaaaagaaaaaaaaaaaaagaaaatcacattcgaatatcacctcctccctcaagtattgccttatttcccaagattggctagttatttcctcctttttgttccttttagtgtacttttgtagaggctaataataatcataagataggttatggaaataattacaatatctactcagaacggaatgcttttttatggcccaagtactgtgctgttacagcaacactattgtgtcatcctttcattgaccctctgaaagagatacaattattctccctatttagtagatgaggaaattagggctgtgattggtgcaaagtcatccatacagcaagtgtcagagcctgaatcaacatgaagttgtctgaccccagagcctgtgtgcgtagccatagca

SEQ ID NO: 815757 - DNA, 593 bp, Homo sapiens
ccttaaagagacatacccactctttttctaacacacacacgcacacactcacaccctttgtcacagggtcttgtatacactttcacactctctcctccagcctctctcacacacactcttatacctcatcycggtctctctcgtccacgctctgccccacggccaacacacacacactcttttatcacaagtgagcctacagatgcccttctcttggcccttttccccacctgctgagacacatgtattctggtgcattctctcaacagagaaatgtggagtcacgcacagcatctatggaaatatgtacacactttctttcccatcctgcatgctcgtgcaccacctatactccctctgttgagcatactcacagttgttccataagcattccatatgttttggtattttatgttttcattttcattcattcccagaatgacttatttcccttataattttttttctttgacccatcggttgtttaagagtgtattgtttaatgtctgcatgcttttttaattaactagttttgcttctggtattgattcctacctcctttcattgcgtttggagaatataattcatataat

SEQ ID NO: 815758 - DNA, 477 bp, Homo sapiens
atttcagggggcaatatttggccagagctgaattgcagctgctcccatgaatgccacagtccccaccactccctatcacatctcaggcactgaagaggagcattagctccatttaccattgcacttacacyactgttctggtaaagatgaaagtgacatatttttaatattcatgtctctaacaaaactgagaaacttttttttttttttgcatatagcccttgtaggttatcttcttcgccttactacccttggaggtacctgaaattgagagccctggcctatgtgatttataaagtcccactcaggttggagagtctgaatggggtgatggatttatgtacaggatacactcaagataatttaatttttttttttttttagaaacaaggtctcactctatcacccacctggagtatagtagcacgatcatggctcactacagcctcaaactcctggactcaagcagtcttccca

SEQ ID NO: 815759 - DNA, 544 bp, Homo sapiens
atggtctttgaactcaccctgaatggttgggtgattttcttttcttttcttttctttttgyccagaggactgtgctgcagggccacatttaagagaaactggggcttccttgtcaccccagagtctgagtgcagcggccgcctcctctctagagaaaaggatatataacgctgaacgctgtgaaatttgccgctgtgagaacagctaatttttcacacccagacgaactggctgggtttgttaaagcccaagataatcaaataatcattataactcatcttcgcccctcctgtctttcgctctttgtaccattaatgtcccagtggggagcagcactgggttagttcagacctagcctatttagataaccttctggttggtcttctgagagcaaaatatccctcctggagtatcttacaacaaatgaaccaatcctctctaatcttcttatcgttgtagcctctgctccaggcctggttatctcttgggcttgcaaaagagagaaagagagagatttatacatatatatttatggtgcatagaa

SEQ ID NO: 815760 - DNA, 399 bp, Homo sapiens
agttactggaccttgagtcataagtcacaaggtttgggatccactcattcattcattcattcatccatccattcattcatgcatcaaataatccttacatttcctgtgtgattcaagctggccacactccttttcaatggcttcagtgtcctttctggcataggagtagatactcccataaaatcccataatttttaaaagtgtgaaccccaggctcagacacctttgtttcattccaggttctgccacctctgtgaccttgggcaagccacttccccatttggatctaagtttccccagtgtccataatcccacctacttattggttgttgtgaagagggtgaatgagatcatgaatatgacacatgtacctgggycctgggctatagttagcacttc

SEQ ID NO: 815761 - DNA, 571 bp, Homo sapiens
ttgttcccatgaaattcattaattgcttttgaaagaaccamttcaccatgtgttttaaattaccatgagcagcaattatgatggactgcacacaacagagaggacttgacaagtgtccttgcttcttagagaactaagagagacacacttgagttcacaaagtgaggtttctgatgattccattttgacttaaggattgcagtgcctcattaaggatctgctttaatttagggagaaaacaatgaatctgttaaagaaataatttttgattagaaagaaaacatataatttgggaggggaggatgagaacactaattaaacttttaattgtgtctgttgccctttagggtgtaaactaagaaactgagtaaagcaagagaaacagagtttttctttaagcggttttccattgttctaggcaattccccacagagcagccacctctgttgtaacccatttttagttgtaattgccatataagctgaaactaggctgttttttcttctattttttaaagcaagaaattttggcattttaaaaattacatgtcgtgataattttcttattcttt

SEQ ID NO: 815762 - DNA, 646 bp, Homo sapiens
attgttcactttatttctattattgttacattgttatacataatgaaataattacgtaactcaccataacgtagaatcagtgggagccctgagcatctctttttttttgagacggaatcttgctcttgtcgccaggctggagtgcagtggcgcaatctcggctcactgcaacctccacctgccggtttcaagcgattctcctgcctcagcctcctaagtagctgggactacaggtgtgcaccaccacacacagctaatttttgtatttttagcagagacagggtttcaccatgttagccagaatggtctcgatctcttgaccttgtgatctgcccgccttggcctcccacagtggtgggattacaggcatgagccactgtgcccggccaccttgaggtgcttttcctgcaactagatggtcccatctgggggtgatgggagacagtgacagatcatcaggcattagattctcataaagagcagcaaattagatcccttgcatgggcagttcaccacagggttcaagtgctcctataagaatctaatgccactgctgatcagacaagaggcagtgctcaggtggcaatatgtrtggtggggagaggctataaatacagatgaagcttcactcactcgtacctgctgc

SEQ ID NO: 815763 - DNA, 663 bp, Homo sapiens
tataagattttaaactgggaaaaggatcctaaaataagaaaatcagcaaaaatgcctattaaaacaggagtgttttaaaaattgaagtatcaggatataaagagaatccatgttttcagctgggcgcgatgtctcatgtctataatctcagcactttggggaagctgaggggagtggatcacctgaggttaggagatcgagaccagcctggccaacatggcgaaaccccatctctactaaaaaatacaaaaattagccagacatggtggcacacacctgtaatcccagctactcgggaggcaggaacaggagaattgcttgaacccagatggtgaaggttgcagtgagccgagatcgtgccactgcactccagtctgggcgacagaccaagactccgtctcaaaaaataaataaagataaaataagagaatccacgttttgttactatctccaaaaccagcaatagagaatgagagagaaggaactcaaaagtagtaagattaaggtgttaagttactacttgccaaccatccttgcatcaaagcacagaaaacaagcaaatatccagaatgaacggctgtgtttttactcatattaatatctgatgcctagtcttcccrcaagtaaaatcaccaaagttatcattaacagttatacgccagg

SEQ ID NO: 815764 - DNA, 559 bp, Homo sapiens
gaccatctgggtggcagaccatgatgagtgtctgagtgactgatagaagtattatgagacctggtcatggtgcaagttgtctctcagccactgtaagctcataagccacttaagtttctaaaaaaaaaaaaagtctgagaaaaatagatggtttctaaagttcattccagattagatttttttttttttttttttttgagacagagtcttactcttttgcccaggctggagtgcagtggcacgatctcgactcactgaagcctccacctcctaggttgaagctattctcgtgcctcagtccagcttagatttttttaaatttaatttttaatttaatttttttctagggatggggtctcattatattgcccaggctagtttcaaactcttggccttaagtgatcatccctccttagcctcccaaagtactgggattacaggtgagtcaatatacctactaccagcttaraaattaaaaagatggggaaacagtcttcctgtggtgtttctggtactaaatagaagccccttctcccattctgtgtcaatccaagtagaa

SEQ ID NO: 815765 - DNA, 539 bp, Homo sapiens
gttaaactcaattcctcttgtgagacctctattcgacccttctctctcccactccagtaagcattctagaattcaagataatagaaatgaggtcattagaagaccagccttaagatatttaatttttattataaaaaatttcaaacataaacaaagtaaatagaatagtgtagtgtattcctctccctgtaccttctgccagcttcagcaattaccagcatctgtattgtcatatctattccttcccatactcctcacctttcacccgataatgacattgatgatggttttcatagatatgtgtggtttttatattttacttgaatttttttttttgttgatttacaaggagttaccttttgtggggaagttaagttccaaaatcagtgagaaaggcaaaaaccatacatgcacaaaatactccttyaagcaccattgtcccttgagtatagcaacagtttggtattcgttcatttgaaggggccggatgaaatggctgcctgacatttgggggcattctgtacaaaacactatcatct

SEQ ID NO: 815766 - DNA, 481 bp, Homo sapiens
acgagtcacttccaagggtggagaaggctttgaagtcggtagtgacgccrtggagggtgaaggcttcggagaactgaagaggtgaacacagggccagcagataagcaacctaaacaaccaagagtgcactcccaggcacagaatgaagaatttctgacaatgagtttttgcctggcttttgcttagtctagtttttagagctatgaaggatgatgttcctgaacttggctaagccagaaatggaagaggctattagcttagcagtagtctatgaactttcccccagagctggagctctggatctcttgcctcagttagggcttccctgtagctttctctctgtctttctgtattgaataaatcaatctagggcctacaagagtcctgggagatgcattttatgcgaatgtccatttttcttctgagagtattcaaagccttcactggagcctgtgggatccctccttgaaaagttaaacct

SEQ ID NO: 815767 - DNA, 310 bp, Homo sapiens
ccctgcaccctcatcctaaccctgtgaaacataaccctgggcctctcacatcatggaacatttcaggggactgtgcttatatggagcacacgttttgaaatctgtattatcattgcatgtgcttaaaataagcaaaatgccatgagtttggttttgtttttcaagtatcaggaaggaaagaagagaggaaatgaataaayttctttttaatatggagtttttaagaaatatttgtgactatataacatttcaaatggagtcctaagaatatattagattaaaatatatctattaagatatattaaaatat

SEQ ID NO: 815768 - DNA, 603 bp, Homo sapiens
ggtttcagaggcaatttgatgtgcattatctcagcatacgtacataacacctcccatggtgygtgtacttttacaaatacaagcttgtcatccaatacctatattggaaaaataaaaacgcagaacaagaaaccaactcttttcacaattttaaaacacatagatttttcttatgttgttggtagctttaaaaaaacaatacagagaccaccactaaaagtgaagataacaataaaaacagatttgcaaaccatcataaatttttgtcttaaagacgatttcttggtttgaatcattaaggaagtaattcaaatcatcatagttcataaaactatgaaaataatttataaaatgaagaaaaccaaacttatttgtctatcactctaccctaattattgacttaaagtaaaaacactagaatattcattgtagtgctagcataatgaaaaatttttaattttctaaacctcgaatgaacttattgtctatctgttcaatatcatattatgtggctgttaaaaatgtcaaagaattatatttattgacataaatccatttgctatatattaaagggaaaaagcaaattataaaactgtgaagtgg

SEQ ID NO: 815769 - DNA, 587 bp, Homo sapiens
tatcactctaccctaattattgacttaaagtaaaaacactagaatattcattgtagtgctagcataatgaaaaatttttaattttctaaacctcgaatgaacttattgtctatctgttcartatcatattatgtggctgttaaaaatgtcaaagaattatatttattgacataaatccatttgctatatattaaagggaaaaagcaaattataaaactgtgaagtggtaattttctcctttttgaaagataaaaaatgtgtacatatatatttttgagtaaaacagctcagaaggactgcaaaattatttatggataattaagatacagattattttccttattcttatgttttctaattttttaccataaactattttttgtataacaaaaaagcttttagaagtttcttaaagaaagaaaataatcattcatacatgcattcattgtaaaattcgttggctattaaaaaagatctgctagttttgatcagaaaaaaagaatacatcctacacaatgcagattttgattgactcctctcccagtctatgactaagatgtggccagggctgcatgtttccaatgtca

SEQ ID NO: 815770 - DNA, 567 bp, Homo sapiens
aaaaatcaggaaatgtaagtggatcctggcatgtttttcctacatatctggtgcaataatatggtacatgagtcacagaaacacttgttcccatccccgccctccaaatgagcctaatgtaaaaatctatttactaaggatattttgcacaaggcatcctatgtgcttaattttctttaaaaaaggcattaataaaatcatagtagcttctaataagatttttaattccttaagggtaggaaccatggctaatctttaatgagtccaatttaatgggagcatttagttcccttctggtagaaacaaccaacagaatattcctagccctacaagatacatgtaggttgtatcactgaaagctccaggatgaaagggaaagtagactatgttcgctaccagtgactggcactggtcaatatacctgtatatgcttaaagactgctttccagagttactaacaacagatactgayagcaatggtatcaatgaatggaacaggagtttcagaaacaagatgctattttattacaaagtgaactcccatttgcaattacatgaacaatatga

SEQ ID NO: 815771 - DNA, 616 bp, Homo sapiens
tcagtttcagtctttacaactccagagaagtaaaataaatgaagctataaacaggtaacatacttcctgacttgactatccaaatgactattgtgagattttaatcctaaatattcttggtggcaaattaaaattagaaggcaatataattacaaaatagtataagaattattgcattttttgttttaccttttctgccaccaagttctatactacatttcatagaaatacacaaatttccaaacttttcctggtaagaagtagtccgctgcttctgtttcttatcatttcagtggggatttgctgatctgttattcaactaattaaacaggagctgaatcagagtttttggacatcctctttttaaagcatagccaataactaggacactaaaacaaggactttgagaagcagagtagtcttgaatttttctgttgtaggagaaataaactgatgatctcagaaggcataatatgaactccctgtcctaccccagattaaactttacccagagtgacasaggttatacctgctctattgagagaatgcactggggatcagtcgagtgaagaaacacaagttgcctgggggatcctcatctggaacaggctaatga

SEQ ID NO: 815772 - DNA, 500 bp, Homo sapiens
tcagtagtgatgaggtttgattcttttctctttctcctttgtgtatttgctgtaccagtgagttttatacttttgcayattttcataatagtgattatcatctttttgcttccagatgtaggattcccttgagcatttcttgtaagtccagtctagtggtgatgagtttcctcagttttaccttgtctgggaaagactttatttttctctcatttctaaagaatagccttgctggctggctgtagtattattcacttgcttttttttttcttcttttagtgcttttaatatatcataccattctctcttttcctgtaaggtttctgcagagaaaatctattgttagtctaatggaaattctcttatatgtgacttgatgcttttctttgctgtttttgtctttgatttttgacattttgattatagtgttccttgaggtggacttttggttgattctgtttggggatttttgagcttcctggatctagatgtccatatct

SEQ ID NO: 815773 - DNA, 657 bp, Homo sapiens
ttaggtttccagcttttagtggtaactggtattttttctgctacccttacccttgatgagagggtgggaagaatrggtagacaaaccctctccttctgcctggatggcatttcctatgatgcttagagaaaacccagtgagtcatgtcctaccacacatatattgatgggaaaatgctgccaagaccaagccttgggtctacagatcttgctccaactcatcaaagcaattttacatgttacgttatttgattctcacgaagacctgtgaagtaggaattatcagccccatttgacagataaaatggaggctcagggaacttaaatagatttcataaagttaaattcttagaaaatactgggactgagacctttgggccttggcttttatatgggttacatatgtaaactgtggacccagtgattaatcctaaggaaatcatcttgaatgtgtacagagatttagttacaaagatgttcaccacagtgttgtttctaagaccaataagtgggggaaaaaaaccctaaatatttgatctaatggtcaaataaatagagacaaggggaatgaaggcatgatactgttatctatctgtctatctatccacccatttatcttgaaagcaatacagatctttactaaagcctctcaagggac

SEQ ID NO: 815774 - DNA, 610 bp, Homo sapiens
tgcactggcttcaggtatagttggatccagacactcagacaatatcaaaattctacttctacacatgcctcaactcctctgtgggactggctttattctcaggtaagctctccacagactgggtcaagaatgaccactatctgctcccatcctctttgcagttaggaagaggaaaaaaaaaaaatgtttcccaatgattccattgaaagttttgggcagagctcttattggctaggattggtagtataccgtgccatgagccaatcattgtggccaggactgtgatgctctgattggccatttctgggtcacatgctcttctaaccccattaaaggcaggggcatggaataagctttaccttaatgagttgggtggagagtgggggatatatggcttctcagggcaaaattgtaacatttgagtactattactagatccaacaggataaaatgactacttcagggagatttcaggtgattgttttctttccttttttttttttaattttcttttgcctctgcattttctaaacttctacaatgaacatgaattgctccccmaaaaatgtttttaaagttataaaaaaaaaaaaacaaaagtattgagaat

SEQ ID NO: 815775 - DNA, 585 bp, Homo sapiens
catggtctccagatccacaactagagtcagattctagaatgtcctgaaatcaaaaccaaacctgggaagagaagacttacrtaccaaaagaatagcaagattatgaagaggtttacacttcctgcttggctgtctaaaagtgagtctcaatggtggcctgtgcaggagaagtcagatgccacacaatccttgatgcgctgtggaaaaaggaacccaaagccttagagagatacaaatgttggtgtattagtccattttcacgctactataaagatactaccggaaaccgggtaatttataaacaaaagagatttaattgactcacagttccacatggctgaagaggtctcaggaaacgtataatcatggtggaaagcaaaggggaaacaggcactttcttcacaaggtagcaagagagagagagctcaggggaaactgccactttgttttttttcttttttgggggggacagagtctcgctttgtcacaggctggagtgcaatggcacgatctcggctcactgcaacctctgcctcccgggttcaagtgattctcctgcctcagcctcacaagtagctgggatta

SEQ ID NO: 815776 - DNA, 513 bp, Homo sapiens
acaattgctttatgtttttacaatttaagtctctgatcaggacgcatcttacaatcaatgactcattctaatttaattgrcaaaatcattttctttcttaattttacacaaaataatggtctgtcttaaaaatggatgacagataaaataaaatatgatgtacacagacatattatatatactttcttttttttttttttttttttttttgagatggagtctcgctctgtcacccaggctagagtgcagtggtgcaatctcggctcattgcaacctccgacttccggattcacgccattctcctgtctcagcctcccgagtagctgggactacaggtgcccaccaccatgcccagctaattttttatatttttagtagagacggggttttaccatgttagccaggatggtctcaatctcctgacctcgcgatccaccgcctcagcctcccaaagtgctgggattacaggcgtgagccaccgtgcctggccaacatattatatatacttaaaag

SEQ ID NO: 815777 - DNA, 470 bp, Homo sapiens
tcaggggtctcacagtcttcagagctgacagccctgaacagagatttacccacatatttattaacagcaaaccagtcactggcattgtttctatagatattaaattaactaaaagtatcccttatgggaagtgaagggatgggccgaattaaaggaataggttaggctagttaactgcagcaggaacacgcccttaagacacagatgctcatgctattgtctgtggcttaagaatgcctttaagcagttttccgccctgggcgggccaggtgttccttgccttcattcccctaaacccacaaccatccagcttgcccattagagccattatgaacatgttatggtgctgcagagattttgtttatggcaagtcttggggccagtttatggccaggttttggggggctggctcccaacatttttgtactagtgaagacctttggttstgggaggggcatcaactcattctt

SEQ ID NO: 815778 - DNA, 621 bp, Homo sapiens
aaatagccacagagaaaactcagtagcttaaaatagtgtaatttgatgtagtcaataaaatatatcagtgaagccaatttttatgtaaaattttaccaaagataatttacatggaaaaaattagaaattttttttctacactctacaggaaaattttttatgagtgctataagaaaaagtaattggaataatcagtatcattctaaaaaattatggtaagatttatggacaagggtggagcaaggcaaaacttgatttttcccattgttctttcgtattctaaataaaagatactcttttgttttcttaggtttatgttctgctttggatttaaatgggaggaaggatgaaatgagacagatgtaggaacaggacccattgtgagggaaaaggaccagagtgctctttagaaagtaggggtagtttacctgtttattgttaatgttggtcctcaaagtttttgattgcttgaaatgttttggacagaagaatttggcaaattacaacttttttktcttcttaggattggcttttgtcattcccatctttgtcttcctaagtatcctcacagtcagcactataaagtttcttactctcctgaaaaggaccacttcatctttc

SEQ ID NO: 815779 - DNA, 659 bp, Homo sapiens
acccatcttcaaactctatcaggataactgggcttcctgtatctggatgtgtaaatctcttgccagactttagaagtttaaagctattatttcaatacataggtttttttaaaaatgcctttgctcttctcttcaccttctgaaataccccaaaatttgtatatttggttgctttatgatgtcccatatgcaatgttggctttcttctttgtttttttttttctgattgggttacttcagaaacctatattcatgtttcttctgcttgatctattgtttaagctgttgaatgtatttttaatttcattcattgaattattcagttccagggtttcttttaggttctttttttaaggtatctatctctgatacatttctcattcgtatcctgaatttttttctaatgtttttgtgttttttatctgtgtttttaatatctcactgagcttctttaatattattattttgaattctttaccaagcatttcataattttttttccattgaaattttttgctagaaaattattgtgytcctttggaggtgtcatattctctagatttttaaatgtttcttctgtccttatttcaatatgtgcacatctagtgtaacaatcatgtcttccagttttttgaattgtcttttgtaggggaagattt

SEQ ID NO: 815780 - DNA, 542 bp, Homo sapiens
taattttcaaactggatattatcacttaaaaacagtttctttatttcatatgaaaatatgaaatttatctttttattactagggaatttagrtagtcctgtacacatttggcattaatttttacctttgattttattgctatcttagtaaatccatattttatttataacatctttacattctttcaaaatgtaagtccatctattataagtgactttattgtacagaggaattggcttccaggattggcctgagtacagtccttggaaaaaaatgtttaaaacaggataagaataatcaatatgttataataagtgcttgtaacagtccagagtaagagttgtatacttacttatggttgattgaaaactcttataaatttaatcaccactataataatttataagtgacagatttattcattcccattgttcttaaacttactgcgaagtcttttaacttcacttgtaacaaactggatattagtggcctgttcgaaatttgttttcagctctgtttttctatatttgccattcagatcc

SEQ ID NO: 815781 - DNA, 536 bp, Homo sapiens
ttttataaacaacaacaccagccactcaacagcatacattcctcatgttcaacaacgaatcaaatattagaaagacaggactcatacatttgagaaaatcaatcagcagaaacagatctcaaagtgattcaaagaatacacttagcatgtcaggacattaaaacagatataaatgtgttccatatgatcaaaaaggttggaaaatatgagcaccatgagggaaggaatggtacatgtaaaataagccccaaacaaacttatagagatgaaatacaatatccaaaatgaaaagtatacttgatggaataaacagcatgagacattatagacaaaaagatgggtgaacctagagacataggaataaaaactacccaaaatgacacacagagatcaataaaagatcagaaagcatatcagtgagcagtgggacagcacaartgacaaagcatgtgagtaactagagtctggacaaggttgggggcaggatatttaaagaaataatggccaattatttttataaatatgatgaaaactgt

SEQ ID NO: 815782 - DNA, 508 bp, Homo sapiens
tgttacaaggttcttaataactctgcttatctcttctagaattcttagcctgatatttcttaaaaagaactgccagcttcaggttcccacaaagtaygcagattctggctaaattattcactcccactgtttacagaatgtacctgtcactcttcacctacactcatgtgtggatttgcattgtctaagaggatagcttctcatttagtaagtgcttattaagccaagcataaattacaataatttcttaattatatttagtactcaggtataaaagagccttttgttgaagaattttagagatcaaggggataaagacaactaagtaaatcaactgtagctacaagcaaataaatgtcaaactattgatttttctctctctctcttctttgcagttttaaaatgcttatttacagaacaagacttagaatgacagcatgaggaactgcatgaacgctcttccaatcaaatcaactatcaccaatgaaaacatgttttttaactattt

SEQ ID NO: 815783 - DNA, 404 bp, Homo sapiens
ataaaacacactgtggagaaagaacgttcacctccagacaaggctctcatgtcattgaaagcagctttatttccttctccaggctgaaccttgaagagaatgagttgacaaggaacaaaaaactaagtaaatgaaaggccagattaaattctttacaagacagataaataatagatttacagtaaaaaggagatgggaataaaatgacttagtgatttggaaatacccattcctttcaaaaaattttacagtaaaacagttatacgtataatggtacttcttgctctactgcaagagaataaaamtgaaaacctttttcaccataactgaatctaacagaccaaaattccaaaggctaatttaaaaaatgttaataaaacaattttttttctgaaacagggtct

SEQ ID NO: 815784 - DNA, 630 bp, Homo sapiens
accgtttttgtgacctcattttttttcctttttttaaaaaccactttctattaaaggtttaatcggtggaatgaaacatcttgtaactctagtccacaactgctagtcactaaaaaactggctcattgttccgtatgttcccatccaggtaaggagacatagggaatggttattagtatctcatacccatgttttaattcttgttcacatagtactttttacatgccaatattaataatactttgaagggttttacattgtcttctccactagattaggaattccttgcagtcagttttgttatatacacatagtagtcactcagtaaatgtttattgaaaccaataatgtgatgtagatgataaatataagtacagtttcaaactatgataccaaattacttagatcttaaaactatgttttcaatatagaaatccattttaagaaaaaaatatatactaataagtcttagggaaaatggaactgaaaccatttgttaatatattggtgatttatatttatctacttaaatgattcttcattgtcctgtawtgcattttgtgtgtgaagacagtgacttaaaactaatttctaatacatgttcactattcttgaaaatagcttggatct

SEQ ID NO: 815785 - DNA, 640 bp, Homo sapiens
aagaaatgagacacgaaaacttggaaaatatttaagaaggcaattactgaatctttagtgttgatcactaatttgaataactatattatttacactttggtttatgaaaactcatcacatttgtcactttaagaatgattttaatcatttctactcccaaagatttcagaaggttaagatttaagatccaagtaagcctttattattttctggaacttcattcagtgatagctgcattgatgacaaactaggggttgaagagtcacctgtgtgatgtatttaggtcacgattcatggaggatcaatttagtcaattactttccccaattcacaaaagcatgaccttaatacatataaattttaagttttatttttagaagttacacatattttaaaagaacaatttctttttattctttcattctagtaatattatcactacttagaacattaaaggaagatattttcacttatgatagttgaaatcaaaactttgtgaggccaaagcaatgaataatcttcaattcaacaagagatgctgggatacctgaggattatgtttcccrttctgtatgaaagagcacaacattcaaaactacaacaaaattcagacatgagttccttagctaatgaaagttta

SEQ ID NO: 815786 - DNA, 531 bp, Homo sapiens
ggatccctgggaaccgaggtgggcccctggccatggggaatcacccagggcggatgtgagactcargcgcctgttggggattatccaggtctttcactcatttatgcattcagcaatcagcaaggattcctgaggaatactgtcaattaatcactcaagtttcaccctcagaaacataacgttctggcatcagagggacagaaagattgttgacgtgcctggtcaggaaggtgaattcggtcgagcaggattgtgctggggagctgctacagtctgaatgtcggtgtctccccaaagttcatagttgaaatcctaaccctcaaggtgatgggatttggaggtaggggctttgggaggcgatccagtcacgagtgttgagtcctcatgaatgggattagtgccttgacaaaagaggctccagaaagctttctcgccccttcctccatgtgaggacgcggtaagaagacactgaaccaagaagcaggttctcaccagacaccaaatctcccagcgcattgatcttggactttt

SEQ ID NO: 815787 - DNA, 649 bp, Homo sapiens
tccaaattttaaaaacaataggggcacatcgtggaatatgttaaaaagtgtaatttttaaaaagcagaaaaataattttggggtttttttgtygctggtttattcttgttctttaaaatagtcaaatttgtattgcatatacatttgttatcctactttttacttactatcatgtcattcacattttcatgtcaaaaattatttgtaacaaagtttaatgctagttatagttgattattcagatataatgcctaattttacaatagtgaaatttcaattgctttgtattggtttataataaatgctagctagtttgctatggaagcttggatctactcataatttgtttttttaagcatcagaaatagttttgaattcaagcaaatgtctttgtagcactaattgagatattcaacaatttttctctgttacctgttaaaacatgagttgttaccttcattttcctccttttcttttttattttaaagtgctgcagttgggaaatgtggtcagaaacatgtcttaccttttagaatgatctgagattgtctttgggagtatcttgtttataaatatgcactttcagtggtattttgaagctttgacaatggagaaagaagcttgaggttatttttcttaaacttataag

SEQ ID NO: 815788 - DNA, 617 bp, Homo sapiens
tctatggtcactcattccaaagcagcactcttctccacctatccccccaatcactctgtwatgttaagtgccttattttttccacagcacttattacaatctggcattgcattgtttactagttatgttcctctgctaaactattctcatgagagtagagaccttgcctttcttgttgcctgtagtatccacaggtgctcctgaaaggagttcactaagtgtttgttgactgaataaaaaagaatacaaatcagtttgcagaactcttaatgatatcccaatttttcagctgacagactgggaaacaccggcttaacttattctctccccatgtagtcccaatcaaccccaatgggttgtataaataagcatttaatgagtgttatcctgtcatctcagaatttctaacggtgccacaaagttgagaacaaaatattctatagggaggttttagacagatcctcaaaacacttattaaaaggtggccaaactatcaaccctgctttcccagcttccgcccacataagtaaaggtacttactggagcagaaagagcagtggatgaaggaggggagagagatacttttccctcaaggcaagtgagggctgcaccaagac

SEQ ID NO: 815789 - DNA, 426 bp, Homo sapiens
gcatacattaaaccaaccctgcatcccaaggataaatcccatttgttcatgatatataatctttttgctgtgttgttcattttggtttgctagcattttattgaggatttttgcatcartgtccatccaaggtactggcctgcagttttcttttcttgtgatgtcttcctctggctctgggatcaggatgattctgacctcataaaatataaatgatttgtagaattcagttctgacatcatattttcctgggcatttctgttttgagaagtttttgattactaattctgtctcttgttattggtgggttcaggctatttctttttgattcagtcttggtagtttgtacgtttctaggaatttgtccatttactctgggttaatcagttttttgttatatgattctccataatagataatagtccc

SEQ ID NO: 815790 - DNA, 673 bp, Homo sapiens
tatttaattaataataatatatgattaaatgtgtgtgaagacagagtggttcctataaatacaaagctgcagctaggcatggtggctcacgcctgtaatctcagtactttgagccactgaggtgggtggattacttgaggtcaggagttcaagaccagcctggccaacatcatgaaactccatctctactagaaatacaaaaattggccaggcgcggtggctcacgcctgtaatcccagcactttgggaggctgaggaaggaggatcacaaagtcaggagattgagactatcctggctaacacggtgaaatcccatctctactaaaaatacaaaaaaattagccgggtgtggtggcgggcacttgtagtcccaactacttgggaggctgaggcaggagaatggtgtgaacccgggaggcggagcttgcactgagccaagatcctgctactacactccagcctgggtgacagagcaagactccatttcaaaaaaaaaaaaaaaattaggtggccatggtggcgcatacctgtaatcctagctactcgggaggcggaggcaggagaatcacttgaaactgagaggcagaggttgcagtgagctgagaycacgccactgcattccagtctgtgtgacgcagcaagactccatctcaaaaaaaaaaaaaaaaagttg

SEQ ID NO: 815791 - DNA, 592 bp, Homo sapiens
cccttggcctcccacaatgctgggattacaggcatgagccaccacgcctggcctaaatacagaatctttttttagagactacttagattttggtaattaaatttaatarcatttgtaggacactaatattttctaataaaagtggaatgattttgtaagtactcgtattgtgtttagaagcaataataacttgacatggaaagtaaattgaatcagatcaaaataaaatggattcagtaaataaatttcttctgaaattagcatcctaaaggttaaatggcaacttattataatgaagaccgccacaaaaagaacattgccaacattgctatattattaggtaattaatagtgacaagtcacaaattttacttgctagactgttcttttgcacagattcctcatttgagttgtcaatgttatatgcagtaaggttttttactcctttacttattccatataaagtcgtccctcagtattcatggaagttggttccaagaccctggcaaatatcaaaatttgcagatgctcaagtcccttacacaaaacagtgtagcattttcatgtaatctatgcaggtcctcccatatatg

SEQ ID NO: 815792 - DNA, 604 bp, Homo sapiens
attaagcatttcactgttcaccttaagggcgtgctacatagactattttttttttcctagtctggcatgctctggggcataaaatgatttggttgccgaagttttgacattttaaaatatttcaatgattaaatgtttaattaagtcagtggaccctgaggtcacttggcaaagggtagtttttttgttttgttttgttttgattttgattttggatcaaattcattaaaacacacacacatacacacccaatttgagaaaagcattggtaaatctgttgggaaaaaagctttcctaaaaatattcatttactaccgtttcttgagttaatcagagttacaagaaagcggtacttctgcatagaattatctggaagtgtttcactggaaaaaggttcattatcctaataaatgatggagtaaataacaaataacaggcctggtacaggcctggctcacacctgtaatcccaggactttgggaggcygaggtgggcagaccacttgaggctagaagctcgagaccagcctggccaacatggtaaaaccccatctctactaaaaatacaaaagttagccgggcgtggtgacatatgcttgtaatcc

SEQ ID NO: 815793 - DNA, 654 bp, Homo sapiens
atttacataacaatatagatgttgtacaaattgttacactgtattacttttaaatatttattatttttattgttgtattgttatttttattatgttttttaaaaatacttcaattcattgttggttgaattagagaagcagcgtgcaattaaaaaaaaaagtgtggcatgtggtgtctgtagcattgaatgaatttccatatatatttatcacgataattttttgagacagagacttatgtttttattgcatattctgtgtttttttttttttgttttttttttttatgttctcctccctttctttccccccttaaggaggtggccacattctactttctttcctcatatgagattagtttttgtgcttctagacttttgtttcccagtgtcttaacccactgaaaataatagaatttgaagaaacatgctgtatctctagactaaataaggattcttgcaggttgagtggtgtgtgtgtgtgtgtgtgtgtgtgtctgtgtctgtgtgtctgtgtgtctttgtgtatggcgctgtgtggggggagatgccatgtggcagcatctccaaagatgtggcagaacctcagtagtaatgaacacacattacaytgagaagactggaagggtccagcaattccagccaatatggtaat

SEQ ID NO: 815794 - DNA, 703 bp, Homo sapiens
ccaatgtccagtatttttcttaaatatcgtccaagacacccattccataacacattataaattaatattaaagacaatgttacaattggtgtatatatatatatatatgattatatatatatgattcaagtggtgtatcattgacaactggtaattcattggaaaaaatcaataatatccccatgtcacatttcactgcaaaatcatattgtttagagaatgaattcataaaatttaaaggagaataagatatttaaatatatctttaatataattgtaagaaattataggtagtgatacaatatttaagcttgaaaatataaaaacaaacacagaagaaaatataaatggattctattactgaaaatgtgagtattccacatcacatatcatacagaaaatataatatcaaagaactaactaaaaatattatatgacctaatgttatatgagctaatacactgtcatatataaaggatttatacaaattgataaggaaaacacatataaaatttgaaataaaatttaaaaaataaattaacagttcactaaaacacagcaaataaagtggttagaatgtcaaataatgtcgataacaaaagacatgtcaatgaaactgactatttttacctattatatcagtaatgayttttttaaaaaaaaattcctctacctaccagtcattatcttgaatttcttctat

SEQ ID NO: 815795 - DNA, 591 bp, Homo sapiens
gtcactgtcagcaccaaatactgtattctccctgtgcactgcactgcttctactattgctgctcctattcctggggccttgrtgatgttgccactattgctaaaattggtgttctatggtttttgccctaaattccaattcaaagtctaaggtgggaaaaactgacttgaaaaactagatcacatgctctcaatctagctgcaagagaggctgaaaatctcacagttctctaggaagagatggactttttctttttgatactcagagtcagagtaacccacacgtgggaagaattatcagatagccatctgacatcaactcacctctattgcacatcttatgaattttccatggtttcaatgagttgaaggtattgacttgtcagcaaaatagacaatcagaaaccctaaatataagttgatggatcaatggaattcattaacatagagacaatggataatgggcataaaaacattattgttggttttaatttgtgattgaaactacaaatccaatattattatgaatgtgctgtaagtttttcttttattgtggagttagaacttcaagaatttacccgttatgaatgaa

SEQ ID NO: 815796 - DNA, 442 bp, Homo sapiens
tgccctatgtgggaattaaaagttgatctcatagagggagagaggagaatgacagaggttgggaagagtgtttatgtggggtgggagatgaagagagcttggtgcatgggtacaaacatacagttaaattgaagaaataagtaccaatgtttgatagcagagtagggtgactatagttaataataacgtattgtacatttcaaaatagttagaagagaggatttgaaatgtcactaccacatagaaatgataaatacttaagaggatggataccctatatagcttgactttgatcactacacattctatacatgtaacaaaatatgacatgtacctcataaaaatgtgtaaatattatatcaagaatatcttgactggctgaaaatrttgacaaatgacattactaacaaatgattggtacttttcagtgttccacttttat

SEQ ID NO: 815797 - DNA, 531 bp, Homo sapiens
tgagatttcttctttgactcatgtgttatttasaagtgtgttgcttaatctctaagtattttggaattttccaactatcatttttattgatttctagtttaattccattgtgatttcagagtaggcattgaataatttatattattttaattctgtgaagctgtttccatggtccagaatatggtctattttgatgattatttaatgtgaccttgagaataatatgtattctactgtgttagataaagtagtctacagatatcaattttatcgagttggtttatcatgctattgagttcaaccatgttgttactgaaagtctgactatgttacaccttttaaagttgtctatggttcttagatactttgttctttttttcttctttgcttttcaattttggaagttcctactgacatcttcaagttcagagattccttcctcactcatgttcagtgtactaatgcccatcaaaggctttctttgtttctgtgttttttatctctagccgttttttaaaattctttcttaga

SEQ ID NO: 815798 - DNA, 615 bp, Homo sapiens
agctgctctactttccattcccatcagcagtgtatgagggttccaatttctccacatcctccagagcacttgttattatctatctttttaattgcagctatcctagtgggtgtgaagtggcatttcactatggtcctcatttgcattttcctaatgacattacctttcaactttctgatttaagcttcaaccactgaatttctaccatgacactgaggggtaggagtaagataggaaaactaggtaataaaagtgttaataactcaatttttgaaaaacgagctttatacagtgttacaattaatacaaactctcatgctgcagtgaaatggcaggtatgtgaaggaagcaggagtacttccactgctcatccaatggaatattattttgtacttatcacttcttagtaagtaatcacaactgaggcaaactaatgctaaaagtatatttctaataaaagggtgccaagaaactggctattaacaaaataaagatcttaaaaatagaccaaacaaraacacattcttggttgtttttcatggtaaagaagcttaaagtacttaatgttctttcagaaaaagataaaaataaatttcaagttatcttagaggaaaa

SEQ ID NO: 815799 - DNA, 632 bp, Homo sapiens
gtctcaaaaaaaaaaaaaaagaaagaaatgctgttcaaacttggaaaacatacttactttgatataagagagaaaacttaaggagagaatggtcctggtatagaaaagaatcaaagataactcttcaaagttgtatttttttccttaaaaggcaaaagtatttcttcagtagcactgtcaatgttatactacgaattttgttaaccacacactctatcaaaacaggctgacattacctaacacaagaactgctcaaaaacttgaagagaacgccaatgaataataatgggactctaaaatactccctaatagtttgggtccttgaatgtctattatttagaaatatgaagatatgattaagtagtatactcaaatgtttataacaagtcaattttgtaagttggtttgtcagattctgtatttaagcagccttaaagaatctttattagaatcagtagcagattacataaattggaaaggcatccaaacagggcaacatctggtttttatctaytcttatggggctcagaagtgttttcaatagaaaataagattctggttcctgggtcataaaataagcagcacaatgtgaaaacaagcaggctggtatgaaagaaattgtacgcaaccca

SEQ ID NO: 815800 - DNA, 569 bp, Homo sapiens
ttagcagactcctgacactgagatttgatccactgctcacttctttctagatgttgattatagtcttttctccaattgctargcccctccccaactttaagcttatgttctttgtccttgcttctttatgtccgggtcccatgaatgagtaaggtatttctttcctggtggaagtggaagtgatctgctttgagccttagaaggaaccagcagctgactgaagagagttagggatggttgtatgggcagatttcttgctgcttggggtagccaaaaggagggtgagggagagattgagagaataaatgagaaatatttcttaaagtgtaaggcaatataaaaggtagttgtaggtcaagatctgggcagtggagttaagttctaagtgtgcaaagtccaactaagtgatggaagtgatgtggacataaaggtctttgacattaagaactcttgggttaatctttaaatgatttcaattacactcctgaaaccatccaataaaatataattaaaaagaaaaatttgggccagagagacatggtatgaaaggacactatttgaataaaaat

SEQ ID NO: 815801 - DNA, 630 bp, Homo sapiens
gtctaagttcctaaagaactaattaattccttattttatttsatgttgaatgcttccaaatagcagatatttgtgtccaaaatagaaaatacagaaggattacagctttctccctctctagacaattctgcttctgaggaatagagtgaggagggtcagctggaggaatgaaataatgggatgtggcaaacaaggctcagtaaaagattcgaactgtgtccaccatgagcttattttttggtgcctctcatttgaccagtggtatgataacagagaattttttaaagtgtggatgtcccatactgtggccatatagtactataatctgcagtctgccctttcttccataaagtaaaagattatttgctcagttcttcttcagaaatgaaacttctagacttatgctgtctaatatggtggccactagattcatgtggctacttaaatttaaattaattgaaatgaaataagttgaaaattcagttcctcagtcacattagccacatttcaaatcacctgtgttcacatgggaatagaagctactccactggacagtgcagatttatggcacgtctccatcatcataggaagatcttctggacagctctgtaattcagacacctggatttt

SEQ ID NO: 815802 - DNA, 648 bp, Homo sapiens
agactctgttgttcaggcccccaacctacaatttgccttatttctcaggtcttcaattatgttctcctctgcctctgactcattcaaaagcattactgctattagaaacaaacacacttagaaagagccatcttwtgtttcccctcctgctcttgcacccaacccatctcccatcttcactgcttgcaactctgagctcaatgactgaggccttcttctgtgtctggaccactggacttggtcattaatcctggtgtccttaatgtttagacagtggtttccccaaaggactctaacctagactattctgaattgctatgtctttgctgctgtgagaaagcagctctaacccatttttcatacaaccccatcccactgaccctcaacattgggtctttttgaatgaaggttgttatgtccttggctccttcatcctgtctattttttctgagttctcacaagtgagtcataatgctcaactcctaggagtcaaggtctatgatctgcagacctaatgaaatgacaacaaatgtattgttgtttggaagcaggtttatttattatatacttgcaattgaatataagatacagacatatatatgtgttatgtatttctagaaatgcacataacatatatttgcctattgt

SEQ ID NO: 815803 - DNA, 640 bp, Homo sapiens
cttgtttgggatccagccatttcaattacaggtttcacttacttcccggaagctcgcagacttctcaccaaacagcttattgacactttccagtaaataatyccctgtggatgcattgattgcagagctgagagagcggaaggatgaatggattttatctgcagcttgtgccttgaaaagaaagaaggaattctttatatataacacagaactactaaacaagatagttcttaagccatggtaatagtttttgaatacaatcatgaaatgctatattaatacatactttatttttggtacattagaggaatctttgagaaaatcatttcgataaggatgtggtacattaaaactaataaggtgaattttaatttctttccaattttgctctgtctatggattggatttaaccaggtgaccaacagcctagaagaaaggccccttctcagtttcctaaacttcaaagtctctaaggaatttttgttgtatttataagatggataagttctggggatctaatgtacagtataatgactatagttaataagattgtgttcattaatagttatagttaataaaactgtttacttgaaatttgtgaagaatatattttttaagtgtcctcactatacatacacac

SEQ ID NO: 815804 - DNA, 602 bp, Homo sapiens
atgcttatgttgagaaggaagaatacaaaatgggtactggtgattaaatggaatgaattaaragtattgattgaatgaatgaagagcggggattttactggatgaatgatgattcaggtatcattactgtaccttctgcatttgagcatagaaaataggaacagaaaatttgaatggaaagcaaggaattatatgagctcttcctccaaaatttacatcatataagttgaaaactgggtgaagtataagcagggagcatttttgcaatgtttaaagtcctaattcataattttgaattgtgtttttcttaaatggctccttaaatataagactatattttagtgaagccaataatgttttcatattcctattgatgtgatctacaaaggcaaaaaacaattttaaagactaatttctaatcttactttaattcctaaactagattttcaatggatactgtctttccatgacattaattgctacaaaagaatacagaaatttccccacaaataaataaatcaaaaattatttttgactttagctatttttacagacttttgtccagtttgttgtattttatataaattcatttcttacacaaa

SEQ ID NO: 815805 - DNA, 539 bp, Homo sapiens
tgtatatagcattatatataatgtattctatattgtatatagcattatatataatgtattctatattgtatatagcatyatatataatgtattctatattgtatatagcattatatataatgtattctatattgtatatagcattatatataatgtattctatattgtatatagcattatatataatgtattctatattgtatatagcattatatataatgtattctatattgtatatagcattatatataatgtattctatattgtatatagcattatatataatgtattctatattgtatatagcattatatataatgtattctatattgtatatagcattatatataatgtattctatattgtatatagcattatatataatgtattctatattatatatatagcattatatataatgtattctatattatatatagcattatatataatgtattctgtattatatatagcattatatataatgtattctgtattatatatataggattatatataatgtattatatattatatat

SEQ ID NO: 815806 - DNA, 539 bp, Homo sapiens
tgtatatagcattatatataatgtattctatattgtatatagcattatatataatgtattctatattgtatatagcattatatataatgtattctatattgtatatagcatyatatataatgtattctatattgtatatagcattatatataatgtattctatattgtatatagcattatatataatgtattctatattgtatatagcattatatataatgtattctatattgtatatagcattatatataatgtattctatattgtatatagcattatatataatgtattctatattgtatatagcattatatataatgtattctatattgtatatagcattatatataatgtattctatattgtatatagcattatatataatgtattctatattatatatatagcattatatataatgtattctatattatatatagcattatatataatgtattctgtattatatatagcattatatataatgtattctgtattatatatataggattatatataatgtattatatattatatat

SEQ ID NO: 815807 - DNA, 539 bp, Homo sapiens
tgtatatagcattatatataatgtattctatattgtatatagcattatatataatgtattctatattgtatatagcatyatatataatgtattctatattgtatatagcattatatataatgtattctatattgtatatagcattatatataatgtattctatattgtatatagcattatatataatgtattctatattgtatatagcattatatataatgtattctatattgtatatagcattatatataatgtattctatattgtatatagcattatatataatgtattctatattatatatatagcattatatataatgtattctatattatatatagcattatatataatgtattctgtattatatatagcattatatataatgtattctgtattatatatataggattatatataatgtattatatattatatataacattatataaaatgtattatatattttatatatatagcattatatataatgtattacatattatatatagcattatataaaatgtattacatattat

SEQ ID NO: 815808 - DNA, 539 bp, Homo sapiens
tgtatatagcattatatataatgtattctatattgtatatagcattatatataatgtattctatattgtatatagcattatatataatgtattctatattgtatatagcatyatatataatgtattctatattgtatatagcattatatataatgtattctatattgtatatagcattatatataatgtattctatattgtatatagcattatatataatgtattctatattgtatatagcattatatataatgtattctatattgtatatagcattatatataatgtattctatattatatatatagcattatatataatgtattctatattatatatagcattatatataatgtattctgtattatatatagcattatatataatgtattctgtattatatatataggattatatataatgtattatatattatatataacattatataaaatgtattatatattttatatatatagcattatatataatgtattacatattatatatagcattatataaaatgtattacatattat

SEQ ID NO: 815809 - DNA, 478 bp, Homo sapiens
aataagctttctaacatacagtagcagcaaagcaacttgagccactgagccctgkggcaggcgtttcctccaagccttggttctctaattgaatgtcactctttttattaggaggagaaggagattgcctagagacattgcttaacacttaagtaggctcgcctaaacccctttctctgacacaagcagcagccctggagaactgttagcaaagggcttcattctaatgagagaaacttcaaaggccccaaatgaggaaagaagtgtcgctggaaaatgttgaaatgacaaatagcggtatttccactgacaaaagatgaagatgaaacaaatgttagaacagaaaacatgattttattttgccatgctctcactggaaactatcatcaaagcccttaactgaaatgaaaaaggtatcgacataacaagcacaccagagtgaagttagatttctaacaacgaaagtcatctttgaaat

SEQ ID NO: 815810 - DNA, 669 bp, Homo sapiens
ctgtactaaaaaaaccacacaggatcctactttaaaaaggtttggcctaattgtctagcacagggtttctcaacgtgggcaatgcagcattgacatttggggccaggacacttccttgtctcatataagcattgtaggatttttgcagcacttctggcttccatccactagatgtcagtagcacctctcagttatgggatctaaaactccaggtcttcgcaagggtccccaggaaggaaaaattcacccaccgacccctacctcccacccaccaggtgagaaccactagtctagcaaatttattcatgccagcaaggcagtgtgcgataattcagggggaaggcagaacagaaaaaagtaagtaactgggatgaattacaactcgggtaatacaaacaaaagcagcaataaaactaaaaatgtttcatctgcaattttacagaagttctccagaccatattataaattaaatgtcaagtcagagtgagaattaaggttattcctatatctctcgatcacccccagtccaaagcctcactcctccaatcagttgaaagaaacaaccacagaaggatgtcaactggggtccctgggtgcattttaggagaytgtctatacactcctgatattggtggcaaaatgatatccatttggcaattatctgggaca

SEQ ID NO: 815811 - DNA, 491 bp, Homo sapiens
acttgtactgggcacttgctgtagcctgcactggcttcatcrtgcattagcacacatcacagcatcaccacgtgtaaacaggtgctagtatgatcccgattttgcagaggaggaaaccaagcagcagagatgttcagtagctcgcccaaggctgtgtaggaagtggtagagtcaggctggcatttaggtttcttatccagtgagacttccattgattcccaggagtttagtgtctgcttgaactaagcatgccacagagaaagccatactttatcacatcagcagctccacagaaggccacagaatccatctaggggacacagaaggcactcccagtgccctgcctcccttcctgggcctctgctttttttttttcagacggagtttgactcttgttgctcaggctggagtacaatggcgctatctcagctcgccgcaaactccgcctcccacgttcaagtgattctcctgcctcagcctcccgagtagct

SEQ ID NO: 815812 - DNA, 580 bp, Homo sapiens
ctgaagaggaggatggaatgactcaatctcgtagaaattcagcaatcaggacttgtaataagaatttgtataattatcagctccactgctgatgaattatacaaatttaggcaagtaatttcagagctatttctttcatccacttatccattcgataaacattgagtgtgtcctgtgggccatgcggacattgtgctgtgtactggggtgcaaaatcaacagagttcctgtcctcttggagcttagagtccatgtggggccttagtttctgcattcataaaatgagaataactctgccctccctgtctcacgaggctgttgagagtgtgggaacaaaaagtacagtggtgttcctcagccccttttcaccctcaccccaacttcattcttcactcgatcacctgcacatctccagcagcccagatgggatttaaccttaattactttttattaggaacataataggcatgtcaaataggttttaccagctatgaacacccccttacacacacgcacacacatagatgtgcacacacagggattctggygtgccctctgaaggacctattggaaatcactg

SEQ ID NO: 815813 - DNA, 467 bp, Homo sapiens
tctcatgtttattgcaggactattcacaatatccaagatgtggaatcaaattaaagacccaccagttaataaatggataaggaaaatgtggtatgtgtgtatatatatatatatatatatatatatatatatatatatatatatacacaatggaatattattcagccatacaaaataataaaattgtgtcattgtgcaacatggataagcctgaaagacattatgttaagtaaattaagccaggcacagaaagacaaatgccacatgatcccattcatatgtaatacctaaaaaaattgatcacaaaaaagttcagagtagaatagttgttaccagagagttaggagaatacaagaaaaagggagatggggagrggctggtcattgggtacaatgttacagctggataagaataaaaaattccattactttatagcacaacagggtgactgtagctaacaataatgc

SEQ ID NO: 815814 - DNA, 434 bp, Homo sapiens
agaatatttatgaatttgctcttttttggaggccatgaggagctgtcaagggagcgctattcagggagtgtttagagatctaatatgtagtcactctatgaaaattaattaactttcaaaactcctgccgaagaagctacagaagccatctttctgtgtgtaaataagaaagcggtggtgtggaaacattaaacacacttgctgggtttgaaaacatgatggtctgatggggcacttggtgtctgcttggacactgtctcacagtgccacatcccctgctgtgggggaccaaggactctcttctcacatgtcagattccctttaagtttcattctcctctcatacmgatgaagcattcagtatttgctttcaagtaaatgatttccacatttgctctttttttctctcaaaagattctctccatttatttcctt

SEQ ID NO: 815815 - DNA, 379 bp, Homo sapiens
taataaatggtgggagtttcatatatctgtttctttttctcttctttcctctttgccttgtccaaaagagtgggaactgagcagtacagtcataaattaattttaatatmttaacttaggcatcagtacactggctattgttccttaatacatttaacacatagtcattgactgctgattatgtgccaagggctgtgcttggcactggggataaagaagttattaagtcttttgcaaggtgttcatagtctagcggttggggacagacgtgagggaaaaatcacagttggaaaagagcgtagcaaatgaaaccattcagttaaattcaacaaaccctgcgtgcttaccatgtgccaagcagatggcaaggaggatagga

SEQ ID NO: 815816 - DNA, 648 bp, Homo sapiens
actcctggcttcaacaatatctgtgtgatcttgagtgagctgctctttctcattgagctgcacaagaaaatgttgttaatcctccctcactaaccagttcccaagttttatggtatggtttcattcaatgttgaaatttctaagctctttttaaaaaatgataaaataaatatgtttaatcgttgagcttattcaatatacctgaagatcaagagaaattgccaatgagacagccaagaaggatgaacatattaaataaggtagaacatttgaggtgtggctgaggaatgaactagctcacgtaaatatttctgcatgagtgggcgtgtgtgcacacatgtgtgctccagagcagtgcttctcaaacttaaatgtgcacaggaatcttgtggggctcttgtgaaaatgcagattctgattcagaagtccaaagcggagcccaaagtcctgcatttctaacaagttcccagtgatgctgacaatgctaggccaggggctacactgtgagtagcaaaaggagtcactcatgacattmaaaatatctaagaacgtcagtaggttcaggtccgttagtgtttttgtttgcctggagtttttctttctattattaaatcagccttttaaataaaaatgaagcacctagtaata

SEQ ID NO: 815817 - DNA, 633 bp, Homo sapiens
aagctccagattcatttccttcaggtgatcacgtgctctgaattccaatcaacactggttctatcttgttctggggtttaatccagtctctagagctgggctagcaagttgattttccccagccagacaaatggcagggacagttaccagctgtcaggacaatgcctgcctcttttcaattctgagctgccaaagcagcacccctcttttagaaacctaagcctctgtaacaccagcatccgaatcccaccatccatctttggtctccaattccatagtaaatggtataagtcccctgacatctggctgatgctacaagctcaataaggagcctccaaagtcctgtcacttctgctttctaactgctcgaatgttccctaagggccaggctccrggcactatatctccaccagtcccataggacctgtggtccaatgaggcttcagtctagccctcatatttgcaaaaagaatgcttggggtccaacattatttgtcctagagctggaggttgtgtgacattagaaacatgttgataagcaggaaatagaaggggaggaacctcagagggaaaggatgtccagcctgtgtgcctgctgcctgcaaaaccagctgggaggaacagtgacaggga

SEQ ID NO: 815818 - DNA, 436 bp, Homo sapiens
actcttaagctatttgcttttggccaagaaccttccrtaatgtgccataaaaatattttataatttcctgcgggtgctgggaagcactgttcattctgtctcttcatctgtacaccctgcatttgtacctccagtcagtccacaacaccctggggaccgggagcctcctgcccgttagacagcacgtcattccctgttggctgcagaggtgagggacatgagctgaggcccagagcttgctgaggcccgtgcagtctgcatctctcctgcaaaggccagtgggccgccgccaccacccgtgaaccctctccaagtatttctagctgtatgagtcagaggaggcagaattacactttggagtgggagccaattcttaggttttgttaataacctgatggcagaactttctaaaatagactaataggatctcagagct

SEQ ID NO: 815819 - DNA, 640 bp, Homo sapiens
aaaactaaattaaaacaaaatgccgccatcaccagtgctaacaaaaaatccttcaagattgaaaatttgaacctgctgaacaaattcggaagctgctttttgtaaaatcaaakttcttttttagtaaaataaattatagcttattttcacgtcagcattatttgagcttagagaaattgtggccaaagtttaaccaagcagggtagcttgacatgggatatatatacctgaaaaaacaggataaatataaatattctaaatttgccaggtatagtggctcatgcctgtaatcccagcactttgggaggctgaggcgggtggatcacctgaggtcaggagttcgagaacagcctggccaatatggtgaaaccccacctctactgaaaatacaaaaattagccaagggtggtggtgcgtgcctgtaatcccagctactcgagaggctgagacaggataatcgcttgaacccgggaggtagaggttgcagtgagccgaggttgcgccattgcacttcagccagagcttgctgttagaaggcccttttctaaaatctactaatttcatattataatttgaattttcacttaaattagtgtgtgccagtggatctgtcctcccttgctgtcattgtatctcatca

SEQ ID NO: 815820 - DNA, 640 bp, Homo sapiens
aaaactaaattaaaacaaaatgccgccatcaccagtgctaacaaaaaatccttcaagattgaaaatttgaacctgctgaacaaattcggaagctgctttttgtaaaatcaaatttctkttttagtaaaataaattatagcttattttcacgtcagcattatttgagcttagagaaattgtggccaaagtttaaccaagcagggtagcttgacatgggatatatatacctgaaaaaacaggataaatataaatattctaaatttgccaggtatagtggctcatgcctgtaatcccagcactttgggaggctgaggcgggtggatcacctgaggtcaggagttcgagaacagcctggccaatatggtgaaaccccacctctactgaaaatacaaaaattagccaagggtggtggtgcgtgcctgtaatcccagctactcgagaggctgagacaggataatcgcttgaacccgggaggtagaggttgcagtgagccgaggttgcgccattgcacttcagccagagcttgctgttagaaggcccttttctaaaatctactaatttcatattataatttgaattttcacttaaattagtgtgtgccagtggatctgtcctcccttgctgtcattgtatctcatca

SEQ ID NO: 815821 - DNA, 583 bp, Homo sapiens
ttgcttaaaatacatgttcaactcaaatacataaatagggcaataaatatawgcattgaccttaaaattgtgaaggtagtttaaacgaggtatgaggaaaagcagacaaagtaaaaaatgaggcacttggttagagaaacgaaagttggaggatgtcatcaacagaagctgctggtgaggaagcaattgcaggatttttacaaagtataatgaagttagaaatggttctgtgtttaccttattaacaaaaggagaggtataacataaacagttctaacacatattacaggaccacacttaaacaagaagaaggaattatttataccatatatgtatgtgtgtgtgtgtgtgtatatgtatatatgtttgtacatgtatatacgtatgtgtatatgtatatggtatatatataccatatatgtgtgtgtgtatgtgtatatgtgtctgtaaatatatacatatataatgtatacatattatactctacatattttatataatactatatatacatatatagtatttataaccctccaagatcttctgggttcagctttgtactttactttgtgctcatttgttg

SEQ ID NO: 815822 - DNA, 702 bp, Homo sapiens
acctacatgcattagcatattaagggtttgagaaattctgcagctaacaaacctaagttatttattccagagatccctgaatattactcttcctagcatacctataaacatcccatggaatatctttcttcttggatagaagaaaaacatagacttgaaagcaaatatgtagaatttagagtgagatctagaataaaatttgaattctatcatttcctaactgcctgacctttggcaaattacttaacgtccttgagctttatttttcttctttagtaaatgaatgtaattatttctacttaataagtttgttaaatagtactagaaaagaaaataatttatctatgctaaataaattatttaccttaggtacagggcttggcacatggctcaaatattataagtaatgataagaatgataagtaataataagagtgacactatatgatatttgttgagcatttactatgtgtcacatgctttccatagtactctcacctgtgttatctgttttaatcctcataacaagcttgtgaatgttattgttgttccaaattttagattaacatacctyatcttagagatataattactcaccaaagatcacaaattgtcagaatggggatttaaacccagatatttttggctgtaaagactcataaacccttatgcaatctgtatcagatagtgatgatctaggct

SEQ ID NO: 815823 - DNA, 626 bp, Homo sapiens
tacctccctcaacacatgggaattatggggattacagttcaagatgagacttggatggggacacagagccaaaccatattgggatgctatataaaaaytcaaaacccagacaagactgggaagaatcctggcagactggggcaattaaatggagaggcaaataactttctggctcttaataggagctgagggcatcagttattagttgtcctacaatcattaatgttcaccatgatggccccagctttcaagaagcaattctaatatgcataaaatattcattgctagcatttcttgaatgtccactgcctatcaaatgctgtatatgcacaccccatttaattcacatagcaaccctatgaggtggttactattgttcttattttatacataagaaagttgaggctcagaaagattactacttgcccaaagacggaaagtcagtagataaagaaacagggattcgaacatagcaggctgactccagaacttacatttccagcactttcagaaatatttccataaagactcgatgaagtaaaacaaaacaaaaatttttgattagtcacttagctttaggcatctggaaaattcacatcaatagaataaagcattcacacatattc

SEQ ID NO: 815824 - DNA, 665 bp, Homo sapiens
taatacagcagttttttcactacagaatagtttgttacacacttattacttgacctttgttagtggggaggtctgaaagactgcgccagttcccacctgtgacccttgctggttttccctctgtctttacattggccatccctatctctttacagagccaacacacagtggggtttcctcttgctgtttcctttctcagttggcagcagagacggtggcctctgtccatgttttctgatgctctcatctcatctatgacctataaatttcagatccacacatttattcatcatgaacagtcgtctgattctcattcctgctttcccccggacaaatgatggatagaaactatactcagtccccaccacatctggctggctcttagattctgaaccaattcttggccaacctgaaggtcttttataaatctcagcctgacagccacacatttaggcctatccacaagggaaaatatcattttcagagagcaaggcaggcagaacatgaggtgtaatgttgacacaaatgggasttagggtatttaatgtttaagactcacgttttagtatggatgctgtatagatctgtaatttggacttgtttatagctatagaaatgccaggcagctgtagacttaaccttttgctatttcttggacatttcat

SEQ ID NO: 815825 - DNA, 637 bp, Homo sapiens
tttgaagtactgtgggttacgatgtcaagctatacatttagggggagaaaacaatttaacccctaacagatgctaaaatggccacttccaagctgctccaggaagagtgtggggtgtcctgtaacccctaacccagaggaatactatcatggatagataaaagcaaagtatttcgttgcctttatctgctcagcatccgtctcccttttcctgggtacacaccctgacttttctttgaggactcaccccatgatgcccttagcccatatggttcagatagaattggtcccaccgcagatacaagatagggtatgcttgctgggcacggtggctcacgcctgtaatcccagcactttgggaggcctagggggcagatcacttgaggtcaggagatccagaccaatctggccaacttggtgagactctgtctttactaaaaatacaaaaacattagccgggctgatggtgcaggcacatttaatcgcagctactcgggagactgagatgggaggatcacttgaaccctggaggtggaggttgcagtgagccatgatcctgccactgcactcctgmctgggcaacagagcgggactccatctcaaaaaaaaaaaaaaaaaaaaaaaaaaaattgggcata

SEQ ID NO: 815826 - DNA, 440 bp, Homo sapiens
ggctgcagtgagctgtgatcactccgttgcactccagcctgggcaacagagtgagaccctgcctcaaaaaataaataagtaataaataaataaaaataaaaaattaacaagttataataccagcgacttgaacccttcagtccagcctttctagacccagccatttgaggcttcccagttgaaattccagatatcctagagcaaaggcaagaggtccccacagtgccttccttgactcctgagtcatagaattaatgaacatcataaaatgatgttttaagccactaagttaaggctgtcaatttatcagggttcgccagacaagcagaccaatagaatatcatccatatctgtatctatatctatatagattatagatctatatatatagatctatagrtctatacataatttgatataggtctatagatatcaatcta

SEQ ID NO: 815827 - DNA, 457 bp, Homo sapiens
tctcacttaaatttcataattgccattaagtaatgtgttattattcccatattgtagataggaagaatcagacttaaaaagttcaaaagactcggacctaagcacaagatgaggaaggagaggtcatggaagcaaaagagcgaaattataaaaatagaagtgtccaagaacactgtggatgagcaggtttaagtttccatagctagatttaaaataacaccagacaagcaaaaggttgtacattccttggtaaaatacaacaaggtttgacactggcaatttctgcaagatttattttcaacaagcatgttcacccatagcattttagatatttagggaaaaaggcactggcaaatgccaggaattatatttgtttccttatataaaaagcatatttaattgctacaacactrtaagtttcacattattttctgcatttgctatacggggagacaaa

SEQ ID NO: 815828 - DNA, 574 bp, Homo sapiens
acacccaacagtttccaagtttgtttacagctcagtaggacacattatgaaaaatactgcagttgtattattttaattatgcaaaataagattaaatgggattattacatgcaactttatttcttaaggtcataaacatgtatttaagtgatcaaaataaaacataaactattccagaagaaaaaataagaaaatatccatttttttctcccagcataaagtatcaagttttttttttttttaactaaaaaacaaatgttgcacatttaaagcaaggcaactttaaatatgttaatttataggattaataaaattattccattttattacttatttcctagaaaagtatagtggagatatgagtagagataactaatgttattttcctgaagaaaagttaatatatgttaatgggggatgggatatgcgccatgattcttatttaatctttgtttttagaggtacagcagtacagtaaacttaaacttttaagytataggaaaataaaattgggcttctctctctccattacactttgctttgactatagaagaaaaagaggtttctactgtct

SEQ ID NO: 815829 - DNA, 600 bp, Homo sapiens
acaaatttatttcacagaaattcagttcaaccctaagctgggtagatggttttaggtatctttatgcaaaaaatgtatttcaatgctctttcctatgaatctctagggttgttattattcctcaattgaaattaaagctggtcataaagcaaaacagatgaattatttcagaagtaaaatgggtattaagataaaaaatgaaaggaggaggaaaaaataggcactcatacgtaatctatatattaaaacgctttgagaactcagtagccagtcttggcctggcacaaagagatctttgatatgtcacagcaaattgacccaattagtccaacaataaagtggagaaagaaaacttgtttctcttccttgctatatttcaagataattttctctgtagtcattataccattccacttgctactcctcaaaatatgtgcctcaatccaattattctgcacaattcaaggaaaagattcacaygcactagctttaggaaatgactttcagggtacctctgaagtttcacaagcaaacatgattccttttgctgactgttttgtagcattcacacaccaatctcctgttatactgtcctacttg

SEQ ID NO: 815830 - DNA, 569 bp, Homo sapiens
agtaatgaattgtaaacagcaacacacactcagcacagaatatgtcccctctatacacctagaatccaccaatccttgcccctaagggtctcccgtccccagcttcacaccctaaatgtattgtgtgttaggagttgatcactaatgctacagagggtgcttctgtggtcaaaatctggacgctgcagcttgtttttccagtcatttatttcacccatgctttcgtaaaggcttattgaggctcgagtagaaacacaagaaagtgtacaaattagataaatacagtgctcagggtacataagactaattgctttttaattttctctatttgcatgaagcctgatgagactgtcttcacagctcttgaccctaaggagccaacatatgacaagagcatttaagatggggaatcaagtttccaggcaaaatgtagccagtgccagaaaaacagaaaaatgagaattggaaattcaatgyttcctgggttgaaaatgctcatttattgtggagccctgctggtctcattaatccctcccagcctttgaggatccgtacacgccttgcctcct

SEQ ID NO: 815831 - DNA, 546 bp, Homo sapiens
gaattaaaaaagaaatatcaaaaatgtcattatttgcatgctatcattgctctcataagaaatccaagaaaggccaggcacagtgactcgttcctgtaatcccagcactttaggaggccgaggcaggtggatcacttgagctcaagagttggagaccagtctgggcaacatggcaaaaccccaactctacaaaaaatacaaaaaaaatttagctgggtacagtggcacgtgcctgtggtcccagctactcaagaggctgaggtaggagggtcgcttgggcccaggagatcgaggctgcaatgatccaagatcacatcattgcactctagcctgggtgacagagtgagactgtctcaaaaaaaaaaaaaaaaaaaaaaaatccaaaagaatttacaattaaaataaagaggattcagcarggttgctggatataagatcaacttgtaaaaactgacagtgttctcttacataccgtaataaccaacttagaaaatgtaattttttaaaaaaaaccaattacaatagcaataaacactacagggtaac

SEQ ID NO: 815832 - DNA, 638 bp, Homo sapiens
ttatgtcctgaatggtattgcctagattttcttctagggtttttatagttttgagttttacatttaagtctttaattcatcttgagttaatttttgtataaggtgtaaggtcagrgtccggtttcgattttctgcatatggctagccagttttcccagcaccatttattaaatagggaatcctttctctgttgcttgtttttgtcaggcttgtcaaagatcagatggttgtggatgatgtgcagtcttatttctgagatctctattctgttccactggtatacatgtctgttttcataacagtaccatgccttgcagtatagtttcaagtcgggtagcgtgatgcctccagctttgttctttttgcttaggatgtttttggctataggggctcttttttggtttcatatgaattttaaagtagtttttcctaattctgtgaggaatgtcaatggtagtttaatgggaatatcattgagtctgtaaatgactgtgggcagtatggccattaagttgaaagcattttgtctttgaacatgacttagaaaacaggtgttagaccagtacaggtaaggattttggtaagatggcagagtaagaagtaccaggaatctgttgccccacctagacaacaaatct

SEQ ID NO: 815833 - DNA, 616 bp, Homo sapiens
tcctccctgccgagattaggtttggctgcaggccaccccgtcagctctgggcctaatgaagactgaggaggaagtccctctttcactgcccccactgggacccagcccagagtccctgggtcaatcagggtgtggcctttatggtcagccaggaagacaagaacaaccttaaaaagcttggctggccaggtgcagtggctcacgcctataatcccagcactttgggaggccaaagcaggacagtttgaggccaggagttcgagaccagcctgggcaacacagcaagactctgtctctacaaaaaataaaaaaaaaacagccaggtgtggtggtacgcacttgtagtcctagctattcaggaggctgaagcgggaggaaacttgagcccaggagtttgaggttgcaatgagctatgatggtgccactgcactccagcctgggtgacagagtgagagactttctcttaaaaaaaaatgaaaaccagccaggcgtggtggctcacgcctgtaatcccagcactttgggaggctgaggcrggtggatcacctgaggtcaggagatcaagaccagcctgaccaacatggtgaaaccctgtctctactaaaaatacaaaaaa

SEQ ID NO: 815834 - DNA, 665 bp, Homo sapiens
accatggtgttttggttactgtagctctgtaatattgaggttaggtaaygtgattcctccagttttgctctttttgcttaggatagctttagttatttgggtcttttgtgattccacatacattttaggatgtttttttctttttgtttctgtgaaaaatgtcattggtatcttgatagggattgcactggctctgtagattgctttgggtatcatgggcattttaacagtattgattcttccaatcgatgaacaaggaatatctttctatcttttggtgtctgcttcaatttctttcatcagtgttttatagctttcattgcagaggtctttcacttctttggttaagttaattcctaggtattcaattttatctgtggctattgtaaatgggattactttttttgatttcttcttcagattgttcactgttggcatatagaaacgctactgatttttatatgttgatttttaccctgcaactttactgaatttatcagttcaaataattttttttgtggagtctttaggttttccagaatataagatcatatcggcaaacaaggataatttgacttcttcctttccagttcggatgccttttatttctttctcttgtctgatttctctagctaggacttctagtactatgttgagtaacagtg

SEQ ID NO: 815835 - DNA, 644 bp, Homo sapiens
acttgaggaactgttacatcagtggatcccttgcagactttcccagcaccaacctggagtgtggcaactccactgggttactagacccagaggaacagcagcattcatagtggcctggytctcagggactcctggtcctaggcgaaaggaaagtatgccacattaaggggacgctccatgggacaaaagaatccagctggcaggccttgagtcccagatctttttgctgttgggaagtttctttcttcagaggcacagttgcagtactgggttcagcagggaaagtctgcagctgtaccccaacagtcaggcagctctggtgctcatgaagggtcttggagaaggggaattctttttcctcccatccaccactgcaagacacaactgggtcttctcttacaggtgttcagcatgggtgcacctagacaacctttttcaaacatttcagggtgactgcatcctggaggatgcacctttcaggttcaggtgtggttgagaggtagagtcagaactcctctatacttggaacatcaacattcctgaagatgaaaataggtgcctgtctgatggaatagcaggaatactggaacaatgggtcatgagtgtgtctggaatgtggattgcttttctgctgccctgacaca

SEQ ID NO: 815836 - DNA, 610 bp, Homo sapiens
acttcaggagcttcagatcttcttcttggggatcccgtggggagctggatcctcagatatttaggagcggacaggtcctcacaggcttccaccttcatcgtcttcatcagtctccgtttattgtgagctttcagagcttatgctgaattttcttgctatgttcaaatcaccagggccccaagccttggacctatgttgggctttgatttcatgagagcgtgttagaggttactcatggaacacctgtcaggccaaggtaaaagtgtataaggtgggtcctaccctggcacacttagcctgtctttttaagcttgaaacatttaaaagtatttagagatcttgttgatgaagactctgattcaaagtcagaacttggagaaattcagatagacatcctgagaattttcagcagaaagtaatataggctttttcagctagaagggccatagctcaccattgtggatcaattcagggaactggggtgctggagaaagcatgatccatacagtcccaacagacttttgcctcttgccaggaagttggagagattgragattattgttgttgtatttcatgtgtactttgtcgtatatgttaactcttgtactaa

SEQ ID NO: 815837 - DNA, 656 bp, Homo sapiens
  misc_feature 321: n = A,T,C or G
atccagaaggtctcacctcgcttcagcctcagtgccctcagatccggaacactgagtatatcccccaggtgggaacaaggtgacatagatcacacaagccaatcctgctcctaagcaggaagaagaatgaggcatcgcctttctgaagcatggcacttcatagacaagagttcgtgggatactctgattccgtccaggtggagaggaaggggaccttaccgtcagagcagcacaccatgaaaggcaggctgtctgcctgctgtaggaaacgggctggtgaaggatccaataaaaagtgtcatccactaacacccgaggctntaaggcttgttcacagctattaacaggaagtgaaatatccctgttcgctgcccaacagaatacggggaagagaatatatagccattcaatacgaggccaccctctggcctcctcccctgggaagccacacacctggcagaggtgagctgcagcagaagacagagaaaccaccacctgccccggagctcccagccacacagaacaatccagaggcaacccgcgccgtragcgtctccccatgaccactcgcccagctccctcgggctcctgcagagaacctgaggggaacgtagggggcagccacaggccaggtggcagccttccccaggggacag

SEQ ID NO: 815838 - DNA, 656 bp, Homo sapiens
  misc_feature 321: n = A,T,C or G
atccagaaggtctcacctcgcttcagcctcagtgccctcagatccggaacactgagtatatcccccaggtgggaacaaggtgacatagatcacacaagccaatcctgctcctaagcaggaagaagaatgaggcatcgcctttctgaagcatggcacttcatagacaagagttcgtgggatactctgattccgtccaggtggagaggaaggggaccttaccgtcagagcagcacaccatgaaaggcaggctgtctgcctgctgtaggaaacgggctggtgaaggatccaataaaaagtgtcatccactaacacccgaggctntaaggcttgttcacagctattaacaggaagtgaaatatccctgttcgctgcccaacagaatacggggaagagaatatatagccattcaatacgaggccaccctctggcctcctcccctgggaagccacacacctggcagaggtgagctgcagcagaagacagagaaaccaccacctgccccggagctcccagccacacagaacaatccagaggcaacccgcgccgtgagcrtctccccatgaccactcgcccagctccctcgggctcctgcagagaacctgaggggaacgtagggggcagccacaggccaggtggcagccttccccaggggacag

SEQ ID NO: 815839 - DNA, 538 bp, Homo sapiens
attagcataatattatgccctacctcataggcaataatggagcttaaagaaaggatactgtgtgacaaatgctttttatacactatggcacctcatgaaggtttgttacatggtagctcttaggatttttctttgtttctcttactctactaggccatctcagacacttctagactctcacggcatcaagaagagacaaacatttgtttggccatcttttcacattgccagtgtctgtgtccttggtacccactaggtagtcacttacaggcaggttcatcctttctattctttgcatggtaaaatgagtgatagagttcttgagttggatgtatgaatctaacgctgatggaatgaatgactttcagtttcaaatacatagtaggagctcaataaatatttttgtatawaaatcagtaaatagaaagtggtatatttgcctcttattccataccttaatataattttacattatgtctttttatctcacaagcttagcacatagtaggactttaattaatgtagatggcatgatgga

SEQ ID NO: 815840 - DNA, 614 bp, Homo sapiens
gatgcatttgttgtctatttttctccactaaagaagattggcaacattcatgtcacacataaaatggtttaagagtctctaatgatatacaaggtargatttcctaaggttgaaaaaaaatacttccaggcttttaaaacaatgcataaatactgttggttttagatttcttattgtattggtccatgtcagttctcccctctttatgtggctttgagtgcatctcacttcctccaccaccttttgcaacataataatagttaaaggatttcatacaatccctggcatctgtaaaaaacatttctttctttctttctctcatcagctctaaaagctcaaacatttgcccactttcacacatctcccccagggatgctgcaagaaacaggaggatgagatgattttgtcttttgtttcctaagtgtggcaaaaccctttctggcaaagaaaatgggtggaaagataaatgaaatgccaggaaaccttgctgcttagctcagctcatctgttgagagagacagagacaacatatacattcacatgctctgggcctttgctgaggtttacataaacctttatacagctattccattgcttagtgaaggctattagtg

SEQ ID NO: 815841 - DNA, 502 bp, Homo sapiens
ctccttaatggaacaaattttctggctccatatgttttggacttcgagaaactcatgtatctttcaagtttcaatattcagtttctagtacatgatctatcctagtccttactttgtaaaaacaaatgccagaaaaaaattaattccacaacaagcaataaagagaacaatgagaaacaaagaaagatagaaaatggcagtaattgaattatctctatgatatatttaactcattttttttctgtttcttgtgaaggtttcattaaacaggtaatcatacctgtccatgttacctatagaacctgtatagggagaggccacgggagttcctattgtagcaatatgaagctgagacacagaggagggcgagtccaaccctcaccagggcccacgcctctcagtggtagaatctgarcagtggcccttccttctagccaggccatttgccttcccacgtgaaaccctcatggccttcctagattttaacacatcaaaggtgagg

SEQ ID NO: 815842 - DNA, 634 bp, Homo sapiens
aatggctattactaataagaaaaaaaattacagattttgatgaggatacagagaaaagggatctcctatgcactgttgatgrgaatataaattagtacaaccattatggaaaacaaaatagagatttctcaaaaactaaaaatagaactaccaaatgatgcagcaataccactactgggatttccaaaggaaaataaatcagcatatcaaagggatatctgcacttgcatgtttattgtaggactattcacaatagcaaaaatatgaatcaaactgaatgttcatcaatggatgaattactaaagaaaatttgacatatatacacaatgaaatattatttgggcataaaaaagaatgaaatcctgtcatttacaggaactggaggttattgtggtaagtggaataagccagacatagaaagacaaatttcacacgttatcactcacatgtgggagctagaaaacttgatctcatgaaggtagagaatagaatgataaatatcagaagctgcagagtggtgtgtgggtgagcgggggaatgaagagaggttggccaataggcacaaacatacagacagatagaaggtataagttctaatgtttgatagcagaatagggtgtctatagttaacaac

SEQ ID NO: 815843 - DNA, 558 bp, Homo sapiens
ccctaaggggccactaatttagaacacattttacagagactgaacttttggggccatcttttagaacagcagtgatgaagagacagatattacctacaagggtggggggaaactgactcccatcccttcacatccaatactcaactattcattcatgggtttctgtgcctctacccacacctgtgccaggaatgctcgctgagtgctccctgtcattacaacttgctgataatgctgcaccctcattcaacatccagcctggctcctattatgcagtcagagaaatgatccctgaggaggagtctgtcatgtacatctgtgctgctgcaacacgtcactcacagtgggctgtttatgggggtcatgaagggtacagatgctggactgctgggctcccactctgattcaccacctgctagctcgcgtagccataggcaagcaatttcatcctccaggacttctgcttcctccatgattaattgaggataatggtggtctactttacaacccatgtaacatacygatagtagctagtttgtagcacctaataaattttaa

SEQ ID NO: 815844 - DNA, 356 bp, Homo sapiens
actccatctctactaaaaatacaaaaattagccgggcacaatggcgggtgcctgtaatcccagctacttgggaggctgagatggttgaatttcttgaacccgggaggcagaggttgcagtgagccragatcacgccattgcactcctgcctgggcaactgagcaagattctatctcaaaaaaaaaaaaaaaaaaaagtctgtagcacctaaaatcccccatgccagaaggcagacacagaagtattaacaagattatgctactgagagattttttttaacaattaaaaagtaataataataaacatgaaaataagatagctaattagcaatctcaaacatgtggaaataggtcaga

SEQ ID NO: 815845 - DNA, 587 bp, Homo sapiens
taacccaaaagaaaaatcaatagmggttgtgaacaggcaagtcactgaagaataaataaaaatggccaacaaatatataaaatatgcttaacttcatcaatggccagggaaatacaattcttttttttaaaatctactttccacttaacaaattggcaaaaattaaaatgtcaaaaataaccagagtgttggtggatatgaaggaagcaggagccgtctttttctcattggtgaggatatataaattggtaaggtcttttggaaggcaatttggcagtacatttaaaaaatatttatcccctttggctctacaattctgcttccaaaatatagtctcagaaatactcatacacatgcacagagatgtatgcactaggtgcttgttttgaaaaactgagggaaaaggtattcgcatttgctagagaacactgacagacatgtgcacaaatgtgtgcataagaattttcactgtggttttggaaggacttgaaactatctcagatgtccagtaagagcagattacttaaatgaattatgtgcacccacttaatgaaataccaggcagcttgtaaagtgaatgaggttga

SEQ ID NO: 815846 - DNA, 534 bp, Homo sapiens
agtctgatgtagcttttattgagtaaaggaaaaagggaattcagccgcatgatacagaggttccaaytgatcagagtgcacaaagacccttcccgtctgcgtgatgggaaccacaccagcacatggggcatgcggaagccactgctgcaaggaggtggttcccactctcacacacatgaacagctcctggtcagtcccaagaggcaagggcagagggcacagcagctcttacagagctactttacaaataaactgtgtgccttcctctggagtctcttacaacactttttaaaaagatctgggccaggggtggctcatgcctgtaatcccagaactttgggagaccgaggcgggaggatcatgatgtcaggagatcgagaccatcctggctaacatggtgaaaccccgtctctactaaaaatacaaaaaattagctgggtgtggtggcgggcgcctgtactcccagctactcgggaggctgaggcaggagaatggcatgaacccgggaggcggagcttgcagtgagccaagatc

SEQ ID NO: 815847 - DNA, 461 bp, Homo sapiens
ttaagctttaaatgggggactaaaggaaactgaaaatatttcaccccaaaatgtacttctttgatatattcccacaggaataaccctgaaaagctgccttttgtggaggagacttgyatctgtagagaaaatctacactggtgaaataaacaaccaggctttcttggaggcacccccttatctgtacctaggaaattattaactgaaagtctgacacctacgaaggtctgacagagcaacttaacacaggctcatgcctattctttctaggagctgctatctatgaagtttcatctgcataactagaccatctttgccccagccccttctttctttctccctcccataaccatgttccaagcccctactctgctgtaacctcaagatggtataaaagcatcaagcatctggccctttctctcagttttcatattttgtatgactcccatgcccatatgctc

SEQ ID NO: 815848 - DNA, 422 bp, Homo sapiens
agaaataaagtttaaatggggcagcaggctgcagtgggacccacaccctgacctccataaatggataaatgttcaggctgctggaagaccatggaggtggtttgggggtatccgaggagcacagaattaagagactgggacttcagtccccattctgtcactcctcagctcagtaattttgggcaaagtcacttaactactgtgagcatcagtttcttcactcagagaatgaggacaatgattctcttacctgtaagctaacagatgaacaagcgctcggtaaagccctgtaagggtgtgaggtaccatacaatgaaggaactatgggcatgcaggatttagctgagagtgcctttactcacttygtcctttccctacctctccctcttccccaaaaggagtctgtctcctataaaaggggt

SEQ ID NO: 815849 - DNA, 589 bp, Homo sapiens
tgatacacccctgtctcccactgtcagcgctcacctgcatgggaagcactcgctgggtcaygagactattttcccatttccttcagcaccagtggctgtggtgacttgaggtcatttagagacctgccagctcagtctcctctgtccttcttgctctcttgctgcctctgggaagggctgagctattcctgacacctggagtaggacaacagcacgaggaatccacgcagagctgaatataagcaagctgggctcctcatgcatgacaaaatgcaagctcatgaaccctctacgtgcctggaaaggccactgtccccaggatgtctccatattctccatttgggggtggggaggcttatgttctcacctctggctcctagtttctgcttccactgagttctttcagtttgagtcactttgccatcccgtgtacactgtcctgggtctgcactcagatgtggaactcagacctttgccttgatttccacagaaaacaaaccaaacacccgtctaagacttctgtttaggcagcagactctgtcaagggctgctcagccaagaggatttacactgcagcagaacaaacaac

SEQ ID NO: 815850 - DNA, 610 bp, Homo sapiens
aaatgcagtcatgtgtagcaactgggagaaagcaagaggaagcagggcctcctcctgtccacatgctgatggcaccacagctgtaccctgtgtgwgatatgactgctggctggacctctccatttctccagcaccgcactgcatagaaggtccctttccccaggtctgcccctctgcctaggagttctttgggcacccaaagcggaaacctgggggttgttcttgatgcttccgtctccctcattcagggcaggtcccctagattgccagctcctcagtcagccagggcttctcggggcaagcaccagccaccctttgtaggcccaggaatctgaacttgtccgtatcccaaaatggccagacctcagagtctgactgcaggccaaacagcgtgaatgagaataggacttgactgactgatgccaagggcactggggtgcacattttttcttgctggggcttgtgctcccctactacctctaaggggggcagataattctgcaaaggatatctgggggctctaaagtcagcaccgagtagaggaaggtggtcagtaattaacaaagaggaaatgcatggctcatccagaggtctggccttctatttatac

SEQ ID NO: 815851 - DNA, 592 bp, Homo sapiens
atgaagaatgattgcacagcataagaatcatctaaaggcacatcatytataagaggttgtgaggactgagagcctttagtgctgagtaactttctcaccatggtcattaattttacttgtaacctcagactatcaaagctctctgcaggtcagctgtaattgagagtgctatacagaggcccaggcatgcagcatctcctcaccagaacttgtttgcttctccctgaaattcttgaactggaagtatcttcctgaaaatcaagtagttttcttatttttattttttagagacagggtcttgctctgttgctcaggctagagtgcagtggggcaatcatggctcactgcagcctctaacttctgggttcaagccatcctcctgcctcagcctcccatgtagctgggactacagagacccgccaccatgcccagctaaaattaagtaatttaaatagtccatcaatgaggtggagtaaaacctgctgcaggtgctgtgggatttcttccacacttaattttcatagcattctttgggttttcctctgggctttacagcattgtggtcatctctgaagctttgatttcctacttg

SEQ ID NO: 815852 - DNA, 563 bp, Homo sapiens
gcagacagagaagcagaggtgatgctttgacaaatagtagcatagatcaggataaatgacaggaagctctcataaaatatacttcgatgagagcaaaggcaaataatgatataatgccctgcagctacatgtttgaaatggaaatgtttggaatgaggatgttagggaaaataatattagaaaaagactaatgctgtatgaggttcctgtcagatgaggagtgtaggataattgtgtaatagtgaaataatatggtttagaaaaaagaaggtgctgttgactgagactgtttgattatcatagaagagatgaaacactttttcatagtcagaaaaatcaatatacagcccaagaagagaagtcgtttgatgataaggcaataaaaacttcaaagggcaagttaaaaatgtttcctaattcatttcagcctaaactgatccctgcgcccgtctcacactgtccgccagctcttttgmtgaagtatgttaccctttctccttggaatcattacccggtctccttggaatggaaactgtgtcagactccaggggtgagtgggaggg

SEQ ID NO: 815853 - DNA, 641 bp, Homo sapiens
aattgcatttctaaagcaagaaacaatatgtggttaaggcctgtggctcasaatatatccaatgaatacataacctacttatcttagggatcactggattctgaatacaaattatggcaaattcagtctaataactcctgtatttgtttttgcctatacctgctcagacaggatatttagtttctcaaaaattatatctgaaagtcctcaggggattctttaaatgttctcatgagacattgttattgctattcctattttgttgatgcatatcataggataaatcaaataagtatgccggcttattttaattacttgaatttttggcacaggagaaaggaaatacagaagtaagatgaaagaggttaaattaaaatcctgtagtcttgattttgataggaagtatcaataggatcttaaaaatacatattttctatatcctctgaaaaggctgagaaaaatgatgattacagtggcaatcagcatccttaacacttagattgtgtctcaaaacaccatttcccttgagaaggaacccattatcctgaagaaatggctgatttcagatatgggacaagaattcttcaataagagcctgaagcatcttgtcatatatgaaagcaggaagcaatccaagagta

SEQ ID NO: 815854 - DNA, 574 bp, Homo sapiens
aggggacctctgggaacagggttttgattagaagtcaatggtcatggggcttggagagaccggtgagtaattttctatttcagcgtggataaatacaggaagcaccaagacagytgagctttgaaacggcagacaaagggcaagatttttttaagtactggctgaagtgactctcctctaagcctgctaattaggggatttaatctcccagcaggtgaaaaggacaaagggctttttccatagtgttttgccaaattttaaggttaagcacagtccaaaagctattagccttctgccaatatgagaatgaatcacaagtaatgtgagggaattaaaatcaaggttagattaagtcaaaaaataattaaaaaccatttaagggaatcaggaagttatgtgatgtgtacctaagtatttctttttcattaaatcttatttcaaattgtatatattatcattaatatgcacatgttggggtggtttatgtttaatctgtagaggttgttattttagtaaggttgtatataaaatactatggaaagaagcatatgagaaatagaatttgatgcttagc

SEQ ID NO: 815855 - DNA, 574 bp, Homo sapiens
aggggacctctgggaacagggttttgattagaagtcaatggtcatggggcttggagagaccggtgagtaattttctatttcagcgtggataaatacaggaagcaccaagacagttgagctytgaaacggcagacaaagggcaagatttttttaagtactggctgaagtgactctcctctaagcctgctaattaggggatttaatctcccagcaggtgaaaaggacaaagggctttttccatagtgttttgccaaattttaaggttaagcacagtccaaaagctattagccttctgccaatatgagaatgaatcacaagtaatgtgagggaattaaaatcaaggttagattaagtcaaaaaataattaaaaaccatttaagggaatcaggaagttatgtgatgtgtacctaagtatttctttttcattaaatcttatttcaaattgtatatattatcattaatatgcacatgttggggtggtttatgtttaatctgtagaggttgttattttagtaaggttgtatataaaatactatggaaagaagcatatgagaaatagaatttgatgcttagc

SEQ ID NO: 815856 - DNA, 522 bp, Homo sapiens
agaaagggtggtgagacgccttatgacttttttaagggattgatgcagaatttagacccacagttaatgtattcatttttgggcacatttaagaataagtatttgatataccaaattgatacactgttcatcttttggaatagtggatgagatcttttgccaaggtggtgtgggtatccaagataagtgagaaaacgttaaatctgttagaatgtcaaagcctacaaattaagaagatttatttatttaccaagtatttatcaaggatctgttttattctaggtatggagaaatacagatgaattgaatatgattcctgcccacaaagaccttataaagttatagacatgtgacatcatatattatacctctattctaacacacaacttcaagtaatcttttagaaacaacaaccaaacaattaaataatgaaaatgtggtaccattcttacctggstttcctcctatcttatatagccttatccttattttttttttcttttgcttgttcaacattaaggt

SEQ ID NO: 815857 - DNA, 585 bp, Homo sapiens
aaagcttattgaaaatgcatctcctattgaaatggataaagatggcattttcccccatcagtttgtcaatctacagatgaatattgcttatcactataatgggacagaattcaccttcagttttctcytccctctctccctccccacctcctccatccttcttcctcactctctttttccctttctttcttaacctaggggtgggtgctgagaaaacttgctggcaaaagttggtggaatggaagaagttttgagataggactatcattcagttatttgaagtccctctaagttgtatgccagaacaatatagtaattcataatcaaaagtatttttaattatttggcagctgatgacctcataatgacctcatataattttgtaaaatgcaagcattggaaaccctctgattttgcaaatcatttaatttctcaatatctaggaaatgtattaaaaagactttaatacaacttattagctattattcccattagtctttaacttagagacccttgtttatggtgctaaaatgacataaaactggggtaaaaataactccataaattggatgctttgtactttag

SEQ ID NO: 815858 - DNA, 592 bp, Homo sapiens
taattatgtatagtatataatacttgctattgataataaatgactgttactgatgtatgtatttactacactttttatcattattttagagtatacttaattcttctacttattaaaataaaagttaactgtaaaacagcctcaggcaggtccttcaggaggtattcagaaggcactgttatcataggagatgacagttccctgcatattattgcccccaaagaccttccagtgggacagaatgtggaggtggaagacaatgatattgatgatcctgaccctgtgtagtcctaggctaatacatgtgcttatgtcttagtttttaacagcaaagtttaaaaagtaaaaaaattaaaaattaaaaatgtaaaaatagaaaaatgcttacagaatatataaagaaataatatttttgtacagctgtacaatgtgtttctgttttaagctaagtgttatcacraaggagtcaaaaagtttttaaaaattgtaaagtttataaagtaaaaaagttcaagtaagctgaggttaatttaatgttgaataaaattttttactttgggaggccgaggcgggcggatcacgaggtcaggaa

SEQ ID NO: 815859 - DNA, 592 bp, Homo sapiens
tcattccccaaatagcttttccacaaaaacctaaacttccccttttaattgagttaagcattcctttcctggaacattctgatgagcatttctttcaggggagtgaatgtatatcctaatgacatttgtattctttgtagaaatatgtccacctttgataaggatgattcaagactgtgtccataaaagttaaaaatagagttaagttggtagttttcccataatcaaccttttctgccttcagtcattgcttcaaatctgtgcaaggcattgtgctaggcaggtcaaagggaacaaaaatggaaaagcctcagactgggtgacaaataaccattaatctagtcaggagaataagacaagcatattgcaaactatatccaagagagaataaagtacccaagggatgttctaaaaagaaagatcgaaatcaggttccctgaatgagccaacatctgtataggccttgaaakataacctgtttttttttttttaaggttgtgttaccttttattctgattataaagcatatatagtaaaagttaaaatatatacatgtaaagaagataaagtatgtgtttttcagaagaggaaa

SEQ ID NO: 815860 - DNA, 613 bp, Homo sapiens
ttcttttgttgctttagttcccttttttttttttttttgagatggagtctcgctcttttgcccaggctggagtgcagtggagtgacctcggctcactgcaagctccgcctcccaggctcactgcaagctccgcctcccaggttcatgtcattgtcctgcttcagcctcctgagtagccaggactacaggcgcccgccgccaccatgccaggctaattttttgtatttttattagagacggagtttcaccatgttagccaggatggtgtcgatctcctgacctcgtgatccgcctgcctcggcctcccaaagtgctgggattacaggcgtgagccaccgcgcccagctgctttagtttcttggtccaatatggtagtaatattacgtcctaaggtctaatattatgtcctaacctctattaaaatactttaaacattttactttttttttgaaagaagaatagacaacaagggttactttctcatttagaactcaraaaatcttcttaaacctccaattctgtgtttggtgtgagttcataccacaccccgttgtcccgagggtttctgcggattgaagtcacactgagctcagctggctgcatccttggcttg

SEQ ID NO: 815861 - DNA, 554 bp, Homo sapiens
ttaccttaccccggaagcgcaaggcattggggaactccctccactagcaaagggaagccctgagggactgtgccatgagggatggtgctgtctgacccaggtactatgcttatccaacggtcttcacaacccacagatcaggagattccctcgggtgcctacaccaccagggccctgggtataaagcacaaaactgggtggccatctgagcagacaccaagctagctacaggagttttttcataccccagtggtgcctggaacaccagcaagacagaaccattcactcccctggaaagggagctgaagcctgggagctgagtcaccttgctcagcagatcccacacatacagagcccaacaagctaagatccaccggcttgaaattctcgctgccagcacagcactctgaagtcaacctgggactctccagcttggtgagggaaggggcatccaccattactgaggcttgagtaggcaattttctcctcagagygtaaacaaagccagtgggaagtttgaactgggtgtggaacccaccacaacgcagcaaagc

SEQ ID NO: 815862 - DNA, 491 bp, Homo sapiens
aaagaccttataaaaggtacatacctctggctgatctttaggctcagtgcaagcctccttgccttagcagtgcaaggaggctaaggsagagttgtagactaactggctgaacgttgaaggaatacatcagattagagccaatctaaaatgactgagagagtatgtttttctctttttggcttcagtggttcaaggtcaagtcactggctgacattgaaataacaaaacaaagacttcagagactacatgacaaggaagtctttgtaaaaatagcctggaaaagtcactaagcaaacaggcaacagcagacctcaacaagcaacaacagcaaactctgggaagctgaaggaaatctagatttccacaattaccatattataacattcaagatgttagttgtcaataaaaactataaggcatagaaagaaataagaatttttgacccattaataggagaacaagaagttaatagaaagctacattgagatagc

SEQ ID NO: 815863 - DNA, 597 bp, Homo sapiens
cccccaaactttgtcactatctcctaaatgtctctgaagctggtctgtttttcttcatcttcacatgttctatctcagctcacgccaccatcttcccacctggttatcgtaataggaagcttgctagtattttgactgttaggctagctcagttttttgtacgttagattgactgcattcatggccccagttcttcacccctccctgtatacatatatttgccatgagactttgcaattctcctcactaaaaaggggaatcaacctatttttcctcttcttaatctgggctggttttatgacttgctttagacaacagaatgtggcagaagtgagggaatattgcttcctagcctaggcctccaagggccttgtggtttaccttgttctcttgtacctctgccatctccacaggtgcaaggctagtctagcctgctggacaatgagaggcctacggaacagggcggagtcaccatatcccactgaaactggcctaggttagccaacagcccacctctcccaggcacgtgaaagctcagcggactctgaacagatggacaataaacatttaytgtgtttgccacataagttttgtatt

SEQ ID NO: 815864 - DNA, 523 bp, Homo sapiens
tctatatattataaaataattaagaaaaagctacaggagttaggcaggagtcaaaatgtcagctttattgctggcaaaactggattagaggttactgcttacacctgaggatgaaatcaaatttcctattacctacccctgagttaaatcaatttacttacctagtactggggctaagaagcctttccagggcttgtatacccatcaaagagcaagataaatgaagagaacatatgcatctcttaaacagagtgagctatatatgctcactagcctttttgccctgagggtagtaacaaaggcgctagagtataggacaaaggctacttattaaaggacagaaatctacaatttatgagcctgtaggaacacagaatgaatgagaaagtgatcatggctacaggcaaaaggtctgggattaactggttcaatatctcatcccatctgaggaatactggctcccgcaataaaaccagcacacctgttgataagrtaaaactgaactcattgctcactatggtaa

SEQ ID NO: 815865 - DNA, 608 bp, Homo sapiens
gctgtttgatagcattttatccacagtagaactttcagtattacagtcaatcctctcaaaccctactgctgctttatcaactaagtttatacaaagttctaaatcttttgttgtcatttcaacaatgtttaccgcattttcatcaggagtagcttccatttcaagaaaccactttctttgctcactcagaagaagtaactcctcatccattcaagttttatcctgagattgcagtcatatcttcaggcttttagttcttattttattttattttttgagacggagtcttgctctgtcacccaggctggagtgcagtggcatgatctcggctcactgcaagctccactcctgggttcacaccattctcctgcctcagcctcctgagtagctgggactacaggcccctgccaccgtgcccagctagtttttttgtatttttagtagagacgaggtttcaccgtgttagccagggtggtcttgatctcctgactttgtgatccggctgccttggcctcccaaagtgctgggattacaggcgtgagccacygtgcctgggcaactttagttcttattttggttcacttgctatttctatcacatgtgaagtt

SEQ ID NO: 815866 - DNA, 577 bp, Homo sapiens
ccatgtctttgctattttgaataatgctgcaatgaacattcacatgcatggtctttctggtagaatgattcatattcttctgggtatatacccagtaatgagattgtttcagccatrtatcatattttacaaattagattgtaagttctgcactggtggagatagtatttattttttcatattacctaatacatatttgaataaaatgtgtaatgattaaatgcatgaatgaataaatggatgaaagaaatttgctatgaacaactgcaccttaagatctctgtgagttcttgccttttcaaggatctggcctccaggattacctctgtcttattttattttcaatctctgcctccctcctgtctcactcttacttaccttcaaatgcgtttgaggatcttccatatttaaaatattttacttgatcccatgtatctacctcctatatcactctatcatttttctcctcttcacaaaggactctaaatattagagactatttatttttacttccatacttccatttactctttaaaatgaaaatgattttatttaatatgtaaacttctcaatgacg

SEQ ID NO: 815867 - DNA, 617 bp, Homo sapiens
agaccatggtgactgttaattcctttgtcaagtgccattatctttgtctttttgctggtagggatgggtgtggaaggaggggtgagccctgctggtragagatagacagacagacagatggggtgagggtgtggatgagtagtggagagacaggactagagaccaggccaggagtcctgagactaaggccctcctcctggccatgacactaactagctgttacttccctgaacctcagtctcctcacctagaaaacaaaggcaataaaaatgcagtttctttctcacagggacagataaggtgaaagtaatttaaaaactgaacgtactttagaattgcaaaatattactattgtagagtgcataaataaaggctcctaattttttaagcctggaaatctggtttctaaatttagtttcttctaggacagcaaaggaggtgcaggtaggagcaggtaatggaaggacagaactgctctactccaataaaaacatggggtgatagttggcaatggagcagctgctagaatcaccaacaacagtctaaagacagcactgtgagggtgaaccagctgaaaacacctcaacatgggccagaaacatcaagaaaaagaccac

SEQ ID NO: 815868 - DNA, 641 bp, Homo sapiens
tgcattttttttccacaaaaggcaaatttgggttaacaggcagaatatggtattcagagaatttgtgacraagtataggcacaggcaagtggttaaatgtcagggactttccaagagggatatcagaaaatcaccgatagtcaggtcattggagcatgacaatgaacaatttaggagctgtcactgttcagagatccacagaagtgagctaaaaaataactgcacgaagtaacagggtgacatattaggggactaattgcagtctctaaactggtgagagaaaagggactgaccagaaagaaagcaggagttcagggtgaggaacttaagtgggaaactttgcccaggggaccaggaccgatctgcgattacagacatgtaccttcgaacaaagcagaagcataatttcttgatttggcctgtatggtcacagccagattggtagcaatgacaacttgttgctgaccatctggccgtgaattaaatccttgctggcaagggagaattttgggtctagaaagtacagcagggttaagcttaatgtcaaaaagtctggcaaacgaatggtagccagcttctgatgctgtgaacaactggcccatttcataatgtattcatactacttttttttcagtagtctt

SEQ ID NO: 815869 - DNA, 630 bp, Homo sapiens
  misc_feature 1, 2, 3, 4, 5, 6, 7, 8, 9, 10, 11, 12, 13, 14: n = A,T,C or G
nnnnnnnnnnnnnnccccaagtgaccatctcacctcataatcaaatgaccctaaatccctcactaacctacgcccgccctcgctaaacttaataataaatgctggtatatccagtgcattgttggcactgcgggaccagaaggtggtgacccccctggacccagctttcactatcatgtgtgtgtctattatttctcaacctgccgatccacctaggaaaaaagagagagccccgttgcattgcgggctgctggccagatcccacaataggtggctaacacagttttaactccattcacaaaaactgatttttagtaaataaaggcttttaaaaaaaatttgagctagcataacctgaaaattttaaaaatattatatgtacatatttttctatatattgtaatgaatttggttttataatatgatgatatattgggatctctacactttattacatatagaaatacttgtatatggaatgtggggaattttaagttaagtttcaaacagagacaatactaatraatttaaaatacatctatttattaagagattaacttaattattattatttatgattatttagcatgaagaaaattaaggcaaaaccagaaatatattagcctttaa

SEQ ID NO: 815870 - DNA, 655 bp, Homo sapiens
atgaattattatagtcacaagcaacagaaataacctctctgttaaatatggaactgcttttgatccttttatggccattatatttgtattattaccacttaagtttttatttatttatttwttttttttttgagacagagtctcactctgtcgcccaggctggtgtgcagtggtgcaatctcggctcactggaaactctgcctcctgggttcacgccattctcctgcctcagcctcccaagtagctgggactacaggtgcccgccaccacgcccagctgattttttttgtatttttagtagagacggggtttcaccatgttagccaggctggtctcaaactcctgacctcgtgatccgcctgcctcaggctcccaaagtgctatattaaactaaatatttaaagttttatgtcattgtggccattcctattttttcaaacaaaatgagttcatttacattaattacatatgccaatcaagtataattatgtaatattttcaagagtcaacaaataaaaatttaatcttgtctgaatcagatatcactagatattttgaagatgtagatttttagtaagaaatagtttagcaaaatgcggagaatgttgaatcagcatcatcttttagtttgctaataataaagtaattatcttat

SEQ ID NO: 815871 - DNA, 502 bp, Homo sapiens
attataacattatttaaaattacagtatttaaaactatctagatgtctaacaatagaagaatgtgaagtaaatgatggtacagtcataggatggaatatcatatgactattaaaatgttatttacagtggttttgataatatgccaagatacttattataaatgcaaagtggaaaatcgatttaaaattttatatgtggggccaggtgtggtgcctcacacctgtaatcccaacattttgggaggccaaggtggaaggatcacctgagaccagcctggccacataatgagtccctgcctctacaaaaagtaaacaaaattagccaggtgtgatggcatgtgcctatagtcccagctagttgggaagctaaggtgggaggatcatttgagcccaggagttcaaggctgcagtgagccatcatcatgccactgttctccagcctgrgtgacagagcaagaccttgtctccaaaaaaataaaaagaaaagaaattgtatatgtta

SEQ ID NO: 815872 - DNA, 669 bp, Homo sapiens
gggacgcctggagcaccatgggggtcctggtttagtctacagcagggtcttaaaataggatgtaagtgttacatcttgacacagtgtacacatgctgacacatattaaaacaaattttacacagcagtattatcctgagtatgagtgacgccttttaaggagtttatattctattaattccctttttaaaatgctggtccacatccactgaattgattttatgacctactaataatgtgttataacccacaattagaaaggcaccgttctagggcagggcagagggagacagaaaagaaagagaagcagaaaggaaataataaggacaaagggaaggaagaacaaagtgaggtcagagtggaggagggtgttttgtgggaggtcacacaaatgcctgccatgatgtcccttcagccctctcctaacacaaaccacatcccactctgtgtctgcccttaagtcttttccattggaccctgggtttatattttattaatataaaagaatatatttttggtggaagggatatataatagaatatatataatatatagagataagataaatagaatatatayaatatatagagataagatatatataatagaatatataatatgtatagataagatacatataatagaatatatataatatatatagataaga

SEQ ID NO: 815873 - DNA, 666 bp, Homo sapiens
tagatctgtattctgcaggcattttctcagctggactcaacagccaggatctayattctagaagagatgctacaggtcagctaatatcttgtttgtatttcaaactaggaagcaaactcaaagttcaatatttgggttcttaaattgtatgttacttgtgcaatatggcagaaacaccaattttctattattattttttaacttattttgggttcaggtgtacatgtgcaggtttgttatataggtaaattgcatgtcatggaggtttggtgtacagattatatcatcgcccaggtaataagcacagtacctggtaggtagttttttgattctctctctcctccccaatccatcctcaaataggccctggtgtctgttgtttccttctttgtgttcatgtgtactcaatgtttagctcccacttataagtgggaacatatgatatttggttttctgttcctgcatgagtttgcttaggattatggcttccagctccatccatgtggctgaaaaggtcatgatcttgttcttttttatggctacacggtattccatggtgtatatgtaccacattttctttttccaatctactgttgatgggcatttaggttgattccatgactctgccaggaaacgccaattttctgaagctgccatcgtgttgtg

SEQ ID NO: 815874 - DNA, 553 bp, Homo sapiens
ttttcatctacaaaatgaaaaggaaatgagcactaactaacattgaatctactttactatgtggatttacagtggtatcctggtccagtctggtctgtgggccagacagacagttatgtacttcccacagtgctttggtgacctcaccaaaaaggggacccacctcccagcagggtggagggtttctcgtcaattcattctctttcagtattttgcaatatattatgttttactatgcctgattaagtgaatttccatataattatctagtttcaaggaaattgactctcacaaaatgattcctattaaaatacgtctgaaaggaagttaataattaaagataacacatttcaagcccaacagaaaaacaagaatacagcagagctgactcttcgcctgtgctcctatggatacttttcatcatattgtgagattaataccattactrcttaatcctatgtgacaggtagagaaaatactcaaaattgtcaagaagataatttgaaatatgggttatttggaatatgtgacagaggaactttgccttattgtg

SEQ ID NO: 815875 - DNA, 711 bp, Homo sapiens
actcagctctcctttcaatataacctgctctgaggaatataagtggctgacaaccttcagcttctacccctttggagctgctaaggcacttagcccaaagccactctctcagcagcccctagccaaagactgcacttggtggggttaatgaagtcagcatttttcctaacatgggacacctctagagggatatcttttctctggggttctctttgccctggccaagactttctcagagctgcactgcaatctgaggttcatcctacctcatcctccttcctgccctctctttttcacaggtgtcagatctgcacgcaccagaagtctctctctcctcctcttgcttcctagctcatcagttcttataggtgttcctctcaataaatctcttacgtatctcattccatgttgttgtctgcttttcatctgacctggcctgacagcctcatggagaaggtgagatttgaacaaagctttggaggaggtaaaggagttagcaatgcagatcatctggggcggggaagggaattcaggcagaagagagagcccccaaaagttcctatgtcaggaagtaggtgtctggcatgtttcaggagtagaaggatgccacagagtctggagcagaggaaatgaggggaaggtkgtaggagaggagggcctagaggttagggggtaggcagatagtataggatccttaggctattttaaagt

SEQ ID NO: 815876 - DNA, 539 bp, Homo sapiens
gcataggaggcattatttgatgcaaacgaatgaaaccccaggaaatctctaattaggctttttaacctctcatgccttaccaaattaacatgctataaaagaagtaacaytacatctgtagaaaatgactatttcaatttaagactacagaagaatctccattgcctctttactagataattactgggtcatacattaactgtatgtttaacctctaaagaaatgtccatggccaggcacggtggctcatgtctgtaatcccagcactttgggaggctgaggcaggcggatcatgaggttaggagttcgagaccagtctggccaacatagtgaaaccccgtctctactaaaaatacaaaaaattagccgggtgtggttgtatgcgcctgtaatcccagctactcaggaggctgaggcaggagaatcgcgtgaaccagggaggcggaggttgcagtgagctgagatggcgggcgccattgcgctccagcccgcgcagccgtgtgagacacagtctcaaaaaaaaaaaaaaaaaaaagtcc

SEQ ID NO: 815877 - DNA, 539 bp, Homo sapiens
gcataggaggcattatttgatgcaaacgaatgaaaccccaggaaatctctaattaggctttttaacctctcatgccttaccaaattaacatgctataaaagaagtaacattacatctgtagaaaatgactatttcaatttaagactacagaagaatctccattgcctctttactagataattactgggtcatacattaactgtatgtttaacctctaaagaaatgtccatggccaggcacggtggctcatgtctgtaatcccagcactttgggaggctgaggcaggcggatcatgaggttaggagttcgagaccagtctggccaacatagtgaaaccccgtctctactaaaaatacaaaaaattagccgggtgtggttgtatgcgcctgtaatcccagctactcaggaggctgaggcaggagaatcgcgtgaaccagggaggcggaggttgcagtgagctgagatggcgggcgccattgcgctccagcccgcgcagccgtgygagacacagtctcaaaaaaaaaaaaaaaaaaaagtcc

SEQ ID NO: 815878 - DNA, 569 bp, Homo sapiens
tttaaaatttactttatacaaagtaactacttcataacaaaatattgattgttaatcagggagtagtttttaatcattatctattttgagacacgtgtatttaagtcacatatagtcatttttctacatgtttttcagttacttttttatatcagtttgggattttttaagttgatgtataatatataataataattttttcatttaagataaaaaatgccccaggttagcaattttgcaccgaattattgatttattgtaataaatttacataaaatttaaatgtactttctacaagtcagcaacagcttcttttacaatgtgatattcagtctgatagccataaaactctacggcatctggaagtaaagttaacataaaacatgcaagatctttatagagaaaattatgtaaaacattttaatgataaaaatgagaagctgaacaagttagatacatgttcataaataggaaaactaatacaataaaatgtattttcccaaatatacctttaaactcagtgtatctcaatccrtcttcaaaataatttttttttctgagacatgaca

SEQ ID NO: 815879 - DNA, 454 bp, Homo sapiens
cgtctagctcatttcacagaacatatctctgtcattaagcaaagcaaatgttatatattattggatatttgtacaataatatataatatgtattcttggatatatttatatattatttaatatattattggatttctatattattggatatttctatattgtcctgttcctgttgcctcctcagaatattttacattaattactgacttttctatgaaacagctcataacttgtagttgtgaatattattgttttaaagtagaaacatgtttgagaaatacttctgtgatattgtacaattagcaactttaaaaatctcttttcatttgatgctgatgcactaaaatattcatcttgatcaaaagttcactatattgaaatatctattgtgatatttcggggaagaatttaatctaatatcaccttaatcgytatacatgctttagcaacattt

SEQ ID NO: 815880 - DNA, 641 bp, Homo sapiens
aatgtgatgtcaaagataacaagatgtttttggcaattaaacatctgtagagatctttcctcatctgtggctctaaaaatttattagcctrtgtctcctttacacagatggtttttgaaaagcaaagaacattaattaatagtgaaatgacaatctttaatgctacaggaaattttctggcataaatacagattactgtcagaagaatgtataaaactatcttcagcaattaaaatgtatttattagctttggtgatcttggtgcacatacttattaagatatgtgttaattaagattgcagcaaattgaattataatattttggagcaacactaaatctgcgtagtatcttttctggtatcaggtttataatttccagtatttgacatatttttatatgttttctttttagaaatataataaatgtgagttattggtactttcaattcattttacgggaaatataaggcatacatcgaaaatatgttagttctattgatccacacaataatccaggtggcatatagaattccacctatttttgacttgaagaaattgaggctctgagcttaattgatgaaagaagtttatctacccaacaagccacaaatcttggatttacaccttatcctttacacccc

SEQ ID NO: 815881 - DNA, 700 bp, Homo sapiens
aatctgcgtagtatcttttctggtatcaggtttataatttccagtatttgacatatttttatatgttttctttttagaaatataataaatgtgagttattggtactttcaattcattttacgggaaatataaggcatacatcgaaaatatgttagttctattgatccacacaataatccaggtggcatatagaattccacctatttttgacttgaagaaattgaggctctgagcttaattgatgaaagaagtttatctacccaacaagccacaaatcttggatttacaccttatcctttacaccccaagtattgtattgattttgctgtgtcagagcttttacattctatatgacattagtttaggctggtatatatgtgtttataatatatatatatatattcctaacattactactattgcatcactatctgtaatctatgtatatatccatcgactatctacctatcatctatttatcttatttatccatccatcatacacattcatatcattctatgtaggcactactaagcctaaatattgcacttttttctgagagaaaagttccccttatagatgacttccagactggaggcatcatatatcctattattgtgacagaacccaatattatgacaagtgatyaccatctaacatctgatcttctgatttcaaagtagaaactcacaggaaacct

SEQ ID NO: 815882 - DNA, 578 bp, Homo sapiens
atgtcatcagtaaataatttttgagcagttactcattggcctargcacattagaaattataagttaataatgatatgttttccttaacagaagtcagctgcattagaaatagcagactcaattatttaaaagccattatgcagttcctttgcaaatatttatgattaatctactcttgcagtattttgctttaaaatcagaatacacagaaatataccaactttctagactttaacatagtctctcaaaaaacttgattttcaaatccatacattgaatagtaagttattaatttattggttttgtatataaaccagtctaccatagttcctgtcattggctgctgtttaaggcaatatctggaggtttttttaaacatataatttatgtagtctgatttttttgtacagtaatatgctatttcagcaagtttagttacaaatcttagaaaatattaaaagcaaataaagcaaggtaattatgttatcaataatgataaaaaactgtgatgtccagaaagatcacatttattttcttgtaacacccttgcaaacatagcatattgttactttatactc

SEQ ID NO: 815883 - DNA, 492 bp, Homo sapiens
ttacccagagagagtgaggaaaaacagggtagggcactggctcactggggagtgtcacagagtcaggggagcccccaccttcaaccaaggaaggcaacgagtgattgtgcaacccttcccgggaaagcacgattttcctatggatctttgcaacccacatatcagaagatccccttgtgagcccatgccatcatggccttgggtccaaagcacagaaatgtgtaagtcttggtagaaacactcactagctcactcaggcatacaggaagacccaggagttttgcatactccagccccaggaagtccagcaaggcaggatatctatctatgcattcccctaggaagagggctgaatcaagaaagccaagtgatrttattctgaggccccactcccatggcacctcacaaggtaagacccactggcttggaattgcagctggccagtggcagcaggctacagagagcctgaaatggacagagttcccagggaga

SEQ ID NO: 815884 - DNA, 625 bp, Homo sapiens
tgtttattgaggtgattaaatgatgcaaatccggtaaagcattgagcacagtgccygcacatagtgagagctcaacaaatagttttgttttagaattacagcactttgtatttattcaaagcattttcagatacatcatcttattgatctgagccttaattctgtaaagatcatgaggcaggtattatacacctcttgtacctctacacgcacacacacaccccccaccccttccggttctggacagacacagaaagttcaagagtcgttcaagttagtgatagagctggtattacaagagtcaataacactggtctttctccctcctatctcactgagtagggaggacatccatatgtgttcccaggttcaggcagagtggcatcatgtcaacaactactgttctatttctgtggtacagtgttcatggaatagaaaaaaaaaatgctattttcttaatggcttgaaaaaactttatagacaacttaaaagacgtcaagggctctttgagtggcagagaaaaggtgacgtttagatgaggtgaaggattggtacttagccctgcttggggaacaagctcaccagaagtaagggattttaatcaaaactgcctgggaagaggaga

SEQ ID NO: 815885 - DNA, 625 bp, Homo sapiens
tgtttattgaggtgattaaatgatgcaaatccggtaaagcattgagcacagtgcccgcacatagtgagagctcaacaaatagttttgttttagaattacagcactttgtatttattcaaagcattttcagatacatcatcttattgatctgagccttaattctgtaaagatcatgaggcaggtattatacacctcttgtacctctacacgcacacacacaccccccaccccttccggttctggacagacacagaaagttcaagagtcgttcaagttagtgatagagctggtattacaagagtcaataacactggtctttctccctcctatctcactgagtagggaggacatccatatgtgttcccaggttcaggcagagtggcatcatgtcaacaactactgttctatttctgtggtacagtgttcatggaatagaaaaaaaaaatgctattttcttaatggcttgaaaaaactttatagacaacttaaaagacgtcaagggctctttgagtggcagagaaaaggtgacktttagatgaggtgaaggattggtacttagccctgcttggggaacaagctcaccagaagtaagggattttaatcaaaactgcctgggaagaggaga

SEQ ID NO: 815886 - DNA, 625 bp, Homo sapiens
tgtttattgaggtgattaaatgatgcaaatccggtaaagcattgagcacagtgcccgcacatagtgagagctcaacaaatagttttgttttagaattacagcactttgtatttattcaaagcattttcagatacatcatcttattgatctgagccttaattctgtaaagatcatgaggcaggtattatacacctcttgtacctctacacgcacacacacaccccccaccccttccggttctggacagacacagaaagttcaagagtcgttcaagttagtgatagagctggtattacaagagtcaataacactggtctttctccctcctatctcactgagtagggaggacatccatatgtgttcccaggttcaggcagagtggcatcatgtcaacaactactgttctatttctgtggtacagtgttcatggaatagaaaaaaaaaatgctattttcttaatggcttgaaaaaactttatagacaacttaaaagacgtcaagggctctttgagtggcagagaaaaggtgacgtttagatsaggtgaaggattggtacttagccctgcttggggaacaagctcaccagaagtaagggattttaatcaaaactgcctgggaagaggaga

SEQ ID NO: 815887 - DNA, 603 bp, Homo sapiens
atttaatttgtgtgaattccatgcatctagacttatggcaaatctacatcaagagtttgcactccaccacaaaaaacaaacaactgagaaatctatagccatagttgtagacatgttttaaggaagcagtaataatatatttaacttttcactttaatacacaagttactatttagtgacccatctataaatttgtcagtgatatggtttggttttgtgtccccacccaaatctcaccttgaattgtagtaatccccacatgtcaagggcaggacaaggtgcaggtaattgaatcatgggggtggtttcccccatgctgttcccataacagtgagtgagttatcacaagatctgatgcttttataaggggcttcacccttcactcagcactcattctctctcctgccaccctgtgaagagatgccttccaccatgattgtaagtttcctaaggcctccccagccattcakaactgtgagtcaattagagctcttttctatacaaattacccagtctcaggtatttattcatagcagtgtgagaacagactaatataatcagcctataaactccaggaaaaatttcattctgcagcatttgaat

SEQ ID NO: 815888 - DNA, 529 bp, Homo sapiens
tgatcccatacacagaaatttgatcccttgcaagtctctgtagtgccatttgttccctgggcatctatacttgaatgtctccagaccccttaaactcagtaattgagctaaagtcataatttctctccaaagtctatacttcctccagaatactccgattcagtagtggtgcaatggctccacctaagactgttgtcatgtatgatgcctccagtttcctcttccttcctctctgcctgcacctacatgttatccagaaagatctttgtagctactcccaagtgtgtctacttctctctatcccattactactgcctcagtctatgtcacaattatccttttctgaggttgctgcagcagcccctaaagcagccttcctccccatcccgtgaccttgccctgtcaccatcccattgtcctcactgagcctcattgtcctgcttgaagcctgattatcctcctgcttgaagctcttcatgtctccccagtggctctcrggacaaacctcaactccatactcaggctatca

SEQ ID NO: 815889 - DNA, 624 bp, Homo sapiens
gtgtaataactatcaattcagctatcataacagctaaactgagtattagcagctagctaccatgaactgggcgaaatatagagatcatatgcctaagtttaccacttctacaacatgcagcataagcctaccactctgaaaacaagcaccaattacataatcaacatttagagtgcccactgagtcaggctatggaggaaaccctggggatacaaaagttgtacatgtactgtgttgattcccaaattccttagagagtattcatggaggataaaacatacatgagatttgaattgctctttgccaaaacttagcatcactcatatattatctatcatatctccacagcattagaattcctagatagccaagtatggcatcacaacaggccaagcttctatctgatttctaagagaaaagtcattgttttagtgtatgtggacaagaaatggctctttgactgaactcactaatggtcttcagtcacaaaaaataaacagtggaaaattttctctgaagagaactccaggtagtagcctgttatcaaagaaaccagtgttagcttasttagaattatttgacttgatgtgtgggcagaaccacagttaaaaattgttaaggcct

SEQ ID NO: 815890 - DNA, 558 bp, Homo sapiens
aacataaatataatgagatccatatcgaattttaaattttctagtaaaaatgttatgaaaaagtttttttaaacttaaaattaatattaataatctattttattgaactcagtatattcaaaaatatcatttcaacatgtagcatagctgcattttaagtgctcaacaggccacatgtggctagtggcaactgtattggagagggcaacactagatagttttcttgggaaatcattttcttcagttaatcctagtaagcaaccacttcttacaaagagttttccatgttaaaaaaaaatcatggcaagtcaaaacttcccaactgtataaatcagtgttctccaaataacaaaagcagtaggatatgtatataaaatatatgtatagagagatttaagaaattagctcatgcaattgtggaggccggcaagtccaaaatytgcagggcaggtcaacaagctggagacctaaggaagagtggatgctgcagctggagtctgaagatggtgtggaggcagaatttcttcttcctcaaaaaacctcagtttttgttctctt

SEQ ID NO: 815891 - DNA, 558 bp, Homo sapiens
aacataaatataatgagatccatatcgaattttaaattttctagtaaaaatgttatgaaaaagtttttttaaacttaaaattaatattaataatctattttattgaactcagtatattcaaaaatatcatttcaacatgtagcatagctgcattttaagtgctcaacaggccacatgtggctagtggcaactgtattggagagggcaacactagatagttttcttgggaaatcattttcttcagttaatcctagtaagcaaccacttcttacaaagagttttccatgttaaaaaaaaatcatggcaagtcaaaacttcccaactgtataaatcagtgttctccaaataacaaaagcagtaggatatgtatataaaatatatgtatagagagatttaagaaattagctcatgcaattgtggaggccggcaagtccaaaatctgcagggcaggtcaacaagctggagacctaaggaagagtggatgctgcagctggagtctgaagatggtgtggaggcagaatttcttyttcctcaaaaaacctcagtttttgttctctt

SEQ ID NO: 815892 - DNA, 561 bp, Homo sapiens
gtgtgtgggaggggttggggatgaaaagaggttggttaatgatacaaatatacagttaggtaaaaggaataatttctaatgtttcacagcagagtagggtgactatggctaaaaacaatgygttgtatatttcaaaatagctagaggagagaacttaaaattttcccaacacataggaatgataaatacttgcggtgatggataccccaaatatgctgacttaattattacacattctatgcatgtaatgaaatatcacatgtaccccataaatatgtacaaatactatgtgccaataaaaataaattcttaaaagttatgtttacagtataccatagtatattaaatatgcaatagacgcaatagcattgtatctaagaaaaaggtacataatttaatttaaaaatactttattgctaaaagatgctaatgatcaactgaaacttcagtgagttgcaatcttttagctggtggagggtcttgcctggatgttgatggctgctggcaatttcttaaaataaggtaacagtgaagtttaccacatcaattgaccttttcttt

SEQ ID NO: 815893 - DNA, 539 bp, Homo sapiens
tggggacttggggggggaagagtgkggggggagagggataaaagactacaaatttggtgcagtgtatacataggtgatggatgcaccaaaatctcacagatcaccactaaagaacttactcatgtaaccaaataacacctttaccccaataacttagggaaaaataaaaaagaaaaatcctttgctgagaaacattaagactagaatgctaagaaaaaatattaacagttccataggaaaatgacaaagagcatgcatagataatttatgaagaaagagcaaaatttttaaaaaagtttcacctacgttgtcaagtaagcaatgcaaattaaaagaaaaaccatttagactcagttgacaatgacttttttaagctaatactcattgctttaaaggatggggccttgctgtatgactgaaagacattcttgtagctggtagaagtaacaccattacactctctcaagaaagcaattgagatgtaaaacaattgtgtatgtagaaccttaaaatatttaagacttttgatctaaacatca

SEQ ID NO: 815894 - DNA, 501 bp, Homo sapiens
ttctggattgaaaattgttttctttatgaatgttgaatattggcctccactctcctgtggcttgtagagtttctgccgagagatttgctgttagtctgatgggcttccctttgtgggtaacccgacctttctgactgcccttaacattttttccttcatttcaaccttggtgaatctgacaattacatgtcttggaattgctcttctcgaggagtatgttcgtggtgttctctgtatttcctgtgtttgaatgttggcctgccttggtaggctggggaagttctcctggataatatcctgaagagtgttttccagcttggttccattctccccatcactttcaggtacaccaatcaaacatagatttggtctttkcatatagtcccatatttcttggaggctttgttgatttctttttactctttttttctctaaacttctcttcttacttcatttcattaatttgatctttaatcagtgataccctttcttccacttgat

SEQ ID NO: 815895 - DNA, 644 bp, Homo sapiens
ttctgtttgattcctctagctaggacctccagcactatgttgagtaacagcggtgaaagtgggaatccttgttgtgttccaggtcttagaggaaaggctttcagtttttccccattcagtatgatactaaatgtttgtctgtcatatatgggttttattatattgaggtttgttccttctatacccagatttttgagggtttttatcatgaagggatgttgaattttattcaatgctttttaagcatcaattgaaatgataatatggtttttgtccttcatcctgttgatatatcaaattgattgatttgcatatgccgaaccattcttgcatcccagagataaatcccatttgttcatgatgaatgatctttttaacgtattgttgaatttagtttgctagtattttgttgagaatttttgttatcaatattcatcagagatattggcctataattttttctcatgtgtctgtctggttttggtatcgcaaaagcactggccttgtagaattactctggaagtattctatcctcttctattttaaaaaatagtatgagtaggattggtattagwtcttctttaaatgttttgtagatttcagcagttaagtcattggatcctggggttttctttactgggaga

SEQ ID NO: 815896 - DNA, 581 bp, Homo sapiens
ggatggagagagaaagagagaaggtcgtccagtctctctttgaaaagacttcctggaagaawtggtaagatttctacttacatctctgttggccacatacctggacacaaggccacaccagcctcaagtcagctgggaagtgagggctctgtccagaggagaacatcacagccaagcccctcattcatttctgactcagaacaggagaatgaatattgggtgacaagtaacctggcatgcctcccgtgttatcaccctgagctaggacaatgagagacatgtgattctgagataggaagttggcaggactgttttacaagacctagctcaaaaaacaaacaaaccaaaaaaacaaaaaaaacctgataaaacaggatgcagtaaagaagccagccaaaacccaccaaaaccaagatggccacaaaagcaacctctggttgtcctcactgctcattatatgctaattataatacgttaacttgctcaaagaaactcctaccaatgccatggcaatttacaaatgcgatggtagcatcaagaattaccctatatagtctgaaagggggaggaaacattagttc

SEQ ID NO: 815897 - DNA, 618 bp, Homo sapiens
ggaagagccaaggtagggttctgtgtaatatgcaagcatggggaggcagccttttactatcccttgtgatcttgaaatgatttccttgaggtctgatattttggcttaaacctgaagattgacttaggtagacacagaggtagagaaaaggggacactgttccaagggaggaaactgacttgtaaaatcaggaagcaagaccaagaaaaatggttcattccaggagctgaaagatttttgatatggcttggtgtgtggaatgcaaggaaatggaatggcaaggtgtgaggtgaaaaaatagtgttaacaccctaagagcaatgaggaccactgagttaggaggtagggtaatatgagtaggcctacagttcagaaagacaagagcatgagttggtgggaggaagattaaagacagagagatgcttcccactcctgagagtcactgctgtaaagagcttaatagaatggtggccagcattaaattcactgattgattatctacaggcagtgaaagagagagaaatgtccaatgtgattcctgagtctctggttggaacaattatgtaaataatggtgccatttgcyagctggggaacaccaaaagagaaacaagttggg

SEQ ID NO: 815898 - DNA, 622 bp, Homo sapiens
tcctcatggaatcctcataaagatttaataaatgatgcatatcaagtacttggcacatcttaagtccctaataagtgtttttattatgatggagcctgggtacgtctttcaaggggcccaagagttacatttacttcattataaaccgggcaaatgatacttaaggaaagattcatccagatgtttgtgcctctcccatcagtgcagctgacggagcaagtcacagctgccagccaaattaaagttggatcatggctattcccaagagcaaaatttatcctcaacaactcaaagaataatatttaacgcttactgggtaatatggtttagctgtgtccccacctaaatctcatcttgaattgtagctcccataattcccacgtgttgtgggagggaccccgtggaagataactaaatcatgggggcagtttcccccacactgttctcctagtagtgaataagtctcacaaaatctgatgattttataagaggtttcctctttcacttgacttttagtctctcttgtctgctgccatgtgagatgtgcctttcaccttccgccatgattgtgaagtctccccagccacatggaacgstgagtgtattaaacttctttttcttt

SEQ ID NO: 815899 - DNA, 564 bp, Homo sapiens
attttaagccagatgttaataaattgaagagcatcaagaggcagartggtgcagagcctgggaatgttgttacatgaacgcctgaaagaagtggggaagcctaatttgcaaaagagcctaaagtgaccctttcctgggatctcatgggctatttcaatgagacggggattctttaccagaattcagaattcagactactgtgtgactgttacaggaaggcagattttagttcaatgtatggaagaataattagacctgtccaaaaatagaatgtgcttttgttactggaaatattttgtcagttggatgaacacgtgctgtgaaggggagcccacatagagtgcaaggtcatacctgctgacctctgaaggctgcacctatccaaagctcccttagaacatcctggaaaccatgtatctctgccaatactgtgtacagtataactgaatttagggctgtatttatgtgattttcaaacaaccaaccagccatacaaagtagattaacaacgtgtccactaatacatcagggcatatgtttatttcagcaccgggattttgccca

SEQ ID NO: 815900 - DNA, 619 bp, Homo sapiens
aacccctggtagggtcccatggtagtcctgtctctttttggcagccagttaggttctgctgaggtctagctcccgacacacacrtggcatttgtacagtcactcattgctcctgcaaacaaggctgtactgttcccactgctgctggtttctctggtcactgccaacctttataccatcactatggatggctgctggtgctcacgctatcactcagtactgccatgctctccccagcagggataagacattcgcagttttcccagagggaagcctccagtttccatggtgctcctgctgtttcagctctatcttttttttttttttttaattgagactgagtctcgctctgtcgcccaggctggagtgcagtggtgcaatctcagctcactgcaacctctgccacccaggttcaagcaattctcatgtcttagtgtctcaagcagctgggactacaggcatgtgccaccacccccagctaattttttttgtatttttagtacagatggggtttcaccatgttggccaggctgttcttgaactcctgacctcaggtgatacgcctgcctcggcctcccaaagtgctgggattacaggtgtgagccactatgcccagccca

SEQ ID NO: 815901 - DNA, 606 bp, Homo sapiens
cagttttccaaaagtatatcaattcttggtaaagaccaagtgaccacttcttgctaaaattctaaatcttacaaagtaaaaatcttccctcaatttatacaacaattgcattcctggagaatgcattatatacaaaaatcatgtaaaaatacattgtgttttttatgtatagcagaattatctgcttaatcataaacaggcttttttagccatataaatgtccagcaggacatttaagggttacgcaggaggtgggtgggacaagtcctcatcccatggggctgtctcacatggtgcaggacctctcgcctatcatctgagcccccagcctctctgtgccagtaaccctaacctggcattatgctaaccaaaaatgtccctgcatttccaaaacaccccggttaaaaaccactgagataaataatcagcttgttttcagcacgaattattagaaatgagacctctacattttattaamtataacaaatcgcatgcagcaccaggaaaatgttcaagataaattcaaaagttttattgcaccaaatgccacagaaaaatggatcaaaataatacataaacaagttaaaaaaaattcccacacaatga

SEQ ID NO: 815902 - DNA, 526 bp, Homo sapiens
atatgtgatgttatatgatgctgagtgtcttggagaaaaacaaaacaaggaaagggataaggcataagcagtacagcgtcaggagagtagatgattgcaaaggatattgagagaagacttcactgagaggtgaaatttgagtaaacacctaaaggaggtgagggggaaagccatgcaaatatgtaactataagtgcaaaggccctgaggtcttgcctggcgtgttttgagcacagcaaggggtcagtgtgcctagggctgagtgagccaggtgaaaggtattcagagatgtcgtaagtgggaccttataggttgttgtaaagacccttaactgcccttggtagattttgagcagaggggtaggatgatcgacttagattttgccagaatcaccckgtattatgtattggaagcaaggaggtaaattaggaggctactacaacaattcaagcaggagatgatggtggcttgggccagggtggtggcaaagaaggaggtaagaaatgttgagattctggtcatatttt

SEQ ID NO: 815903 - DNA, 571 bp, Homo sapiens
tatggttacttaaaagtgtgtggcacctctgccgaccacactttctctcttgctcttgctttcactatgtgacttgtcctctcccccttcaccttccaccaygattgtaagcttcctgaggcctccctagaagccaagcagctgccagcaccagcttcctgtacagtctacagaactgtgaaccaattaaacctctttttaattaccgtttatcatctatgaattatcatttatcctgtccatccccgtatcaacttaatttctaaccttctaccactccatttctagatcatccaaggaattcaatatggtctttgtcacagcctttgagagcgatcctaattttggttatgaaaaatatacctggataagctgctttctctttcaagtccctcttcttcaactcatttctaaacgtaactccttgctatagaagatcatagcagaaacagtcctgtgtgtttctcaaaccatctcaatttcctcctaggcacaaaggaagactacatttcccagtctgattgtatctatgtggggctatgctaccagttctggcaaatggactatgtac

SEQ ID NO: 815904 - DNA, 629 bp, Homo sapiens
catccatacattagaaaccataattttttttaagtagtggacttgaagtcaacacctgagtacttgtccaactttgtccttaattcattttctttctgtttcctcatttgcaaaatgacatsagactccaagatttctaaggtccgtctgagctctgatattgtattattaatcacaatctccaacttaattgacaaaacaactcaataattatttctatcataaaaataatctgattaaaggacgcaatttattacaaaatcagaaatagacacctcatccaaaggtcaattcctaatttcttgtataatccaaatcttccaaatgcaataatttaatccagaatatctagggagtgacatagcctctgtcccattaaaattggattaaaatccaaaataagaaaatcttgtaaatgtcttttctgtagtcctcagagaaagacagagtgagtgtactccttttgccagagtcagttttctctttagatcatattctttattccaaacacttactggtaactattacgtccactaagtcttctctccttaggttaaagatcacagttctatgacctctcctgacatcacatgattttttcaccactcacatacctgttcactgttaat

SEQ ID NO: 815905 - DNA, 629 bp, Homo sapiens
catccatacattagaaaccataattttttttaagtagtggacttgaagtcaacacctgagtacttgtccaactttgtccttaattcattttctttctgtttcctcatttgcaaaatgacatgagactccaagatttctaaggtccgtctgagctctgatattgtattattaatcacaatctccaacttaattgacaaaacaactcaataattatttctatcataaaaataatctgattaaaggacgcaatttattacaaaatcagaaatagacacctcatccaaaggtcaattcctaatttcttgtataatccaaatcttccaaatgcaataatttaatccagaatatctagggagtgacatagcctctgtcccattaaaattggattaaaatccaaaataagaaaatcttgtaaatgtcttttctgtagtcctcagagaaagacagagtgagtgtactccttttgccagagtcagttttctctttagatcatattctttattccaaacactyactggtaactattacgtccactaagtcttctctccttaggttaaagatcacagttctatgacctctcctgacatcacatgattttttcaccactcacatacctgttcactgttaat

SEQ ID NO: 815906 - DNA, 630 bp, Homo sapiens
aagtcaatcctctcaaaccctacactactttatcaactaagtttatggaatattctaaatcctttgttatcatctgaacaatgttcacagcatcttcaccaggagtaaatcccatctcaagaaaccactttstttgttcattcataagaagctactcctcatccactaatggtgcatcctggaattgtagtaattcagtcatatcatcaggctccatttttaattctagttctcttgctatttccatcaaatctgtagctactttctccactgcagtcttgaactcacccctaaagttatccatgagggttggaatcaacttcttctaaactcctgttcatgttagtattttgatgtcctccaatgaatcacaaatgttcttaatggcatctagaatggtgaattcttttcagaaggctttcaattgactttgcccacatccatcagataaattactatctatagcagctacagacttatgaaatatatttcttaaataataagactcaaaagtcaaaattactccttgagtcattggttgcagaatgaatgctgagttaacaggcatgaaaacaacatacatctccttgtagatttacataagcgctcttgggtgactaggtgcatggc

SEQ ID NO: 815907 - DNA, 605 bp, Homo sapiens
gggtgtggtggctcacacctgtaatcccagcacttttggaggccaaggcagccggatcacttgaggccaggagttcgagaccaacatgaggaaaccccgtctctactaaaaatacaaaaattagctaggtgggtggtggtgggcgcctgtagtcccagctactcaggaggctgaggcaggagaattgcagtgagacttcgtctcaagaaaaaaaaaaaagtgacatgctaatggtatcttaaactttatcactagatctgtgagggaaggatttttttctgttttgttcactgcagtattctgtatacctagaaaagtgcccggaagagaaggcactcaataattatttgtacaaatgaatgaatgaaattttgatttttgttcacctaaggaaggttgcagtcttggagttacaagactgcttacttggttggctttcaccttagtggttagttaagccaaaagaggactccttgagcttacttcttcctgtcctttaagtgtcttctcctctgactgtaagttgtactggtacttgggcctgatgtacagcactgctagaccaggtccctgaaactcccmttcatgggatcctctagggcctt

SEQ ID NO: 815908 - DNA, 354 bp, Homo sapiens
aactgggccatttacaaaagaaagaggtttattggactcacagttgcatatggctggggaggcctcacaatcatgttggaaggtgaaaggcacatctcacatggcagcagacaagacaagagagcttgtataaggaaactctccttttaataccatcagatcttgtgagactaattcactatcacaagaatagtacaagaaagatctacccccattattcarttacctctgactagctccctacaacaacatgtgggaatttaagatgagatttgtgtggggacacagctaaatcacatcagggccctgggggtatacattttccaatagtttttctaggaagctgctgtgaca

SEQ ID NO: 815909 - DNA, 674 bp, Homo sapiens
aatgggaagaaacttccaaactatgcatctgacaaagggctaatatctagaatttacgaggatctcaaacaaatcaacaagagataaacaaaaaactctattaaaaagtaagcaaaagatgtgaacattttttcaaaagaagacatataagctgccaaaaaacatattgacaaatccttagcatcactaatcatcagagaccacaatgagataccatcttatactagtcagaattgctatcattaaaaagtctaaaaacaaaagatgttggcaacgatgtggagaaaagggaacacttatacactactggtgggaatgcaaattagtgaaacatttatggaaaacagaatggagatttttcaaataacagaaaatataactaccatttgatccggcaatttaacctctgggtatatacccaaagagaaataaatcattatataaaaaagatacctgcaccttgtttatcacagcactatttacagtagcaaagataaggaatcaacttaagtagctatcaacagaggactggataaagaaaatgtggtgtgtatatgtatatgtatatatatgaaatatagtgatatatacatgtgacataaatayatatgatatacacacaccatggaatactactcagccataaaaaagaatgaaatcatgtttttagcaac

SEQ ID NO: 815910 - DNA, 619 bp, Homo sapiens
atggatgtaaaaggaacaccaggatgcaaaggagttcaaggcgttagtaagggtacagttgaaacctgtgattcatttcaaagtacacattctatgcagatttttcaagaaaaaaacatgcagcaacttaagaacagagactcttcccttccggggcctaggattactccttatactcagaagatattcagatatttttgaatgagtgaattaattaacaaacaaaaatctgactttgctaaacatttctgaatgtattaggtttacttttgtgatgaatatgttgattattttagagaattagaattctgtaccaagagccacattcctataatttacttatactaaaatgactagaccaatgccaaattcaatctggaacacaaaagtttattagaataaaaatacacatacagtatcaacactaaaattatttcacatcgcatttaggttttacctccattagttttttttaatgcttataaagtctatgctctaaataatttgyacatttgtaaacaaatcttagatgaccaaagatgcagtgtatctatcagatattgaatatcaaaacttaaggatgggaactgatagcgaaatccaattacactaaacattc

SEQ ID NO: 815911 - DNA, 506 bp, Homo sapiens
aacagagtacaggtatttgtattttccccattttaataatctgggatttattttcaatatttctttctaccccatagtaatcctcaccaacaccaagacaccacactcatttcaaaaatatttktgagtcctttatctaatcataaatatttctcatatctatctacttccttccatcgtcatttttactacaatgtagtgtatgtttctgctaggcaactacaataacagtggtgagatctcggctcactgcaagctccacctcccgggttcacgccattctcctgcctcagtcttctgagtagctgggactacaggcgcccgccaccacactcgcctaattttttgtatttttagtagagatggggtttcaccgtgttagccaggatggtctcgatctcctgacctcgtgatccgcctgcctcggcctcccaaagtgctaggattacaggcatgagccactgctcccggcctacaataactttttaactggtattcctttgtcc

SEQ ID NO: 815912 - DNA, 644 bp, Homo sapiens
atgaatatcacaagtacaaaccattaccttagtgaattaccaagtatccacatctgggaaaatctttcagggcattgtgagagcagsgatgatgatgtctgcaatgtgcttggcccttcatatgtgtctgatccagtttactttcggggacatccgtcatcaccattggaatccagacacacaccatgaaacgtgagtatgagagcacttaaatgggatgacaggccgggtgcgtggctcatgcctgtcatcctagcactttgggaggctgaggcgggtggatcacctgaactcaggagttcaagaccagcctgggcaacatggcgaaatcctgcctctataaaaaatacaaaaaaaaaaaaattagcccaggcgtggtggcatgtgcctgtagtcccagctacttgtaagggttgaggtgggaggatggcttgagcctaagaggttgaggctgcagtgagccaagatcacaccactgcactccagcctaggtgacaaagtgagactctattaaaaaaaaaaaatccacttttaaaaagaataaaacaaaggaaaaaaatgggacgacagacatccagcccaacaagccctttgcacaggcatcctggctgttcttactcttagcccatcttcccttggggccg

SEQ ID NO: 815913 - DNA, 586 bp, Homo sapiens
tggccttccaagagtactcactggatggatgactcaccccagcttcagactcagccctcagtatcataagatgaacagtcttctctctcctgaacttgaggtttggtctctgaagccccctggggccagatgaactggaggcttatgggatggggtcggggggtggggagagtacatctcagtggttgaaaatgagtaatgtcagtttaaattacttttaccaatgctgctgtccgtcggaaacatcggcagttctcttgctggtccctctttcccctgagctggaaggtggaggcctctgcagagtctggtttctccatcagttcaacttctgtcttgaaactgcctctcaaaaattctcccagtagtaccatactcactcattatgcttttttgctatggatttattctgctcttataaacctcacttattgccatggaatttgggctggaaggaaaggcaaacatatgytcaagcttcaccttgaacttgagctccttgcggatttaaaaattttgtgccatcaccttttcagttgccactgcttccttccatcacatctttttttttttttttttttttttt

SEQ ID NO: 815914 - DNA, 637 bp, Homo sapiens
caaagaagaaggttatgccaggattaaaaattgggtgttgaactccgagagctctgtcccttccagcataacccactagtacagaacgctgactttcaaaagctggtgaggctcagccactccagggaatcagagctctaacatcagagtggctgagctgggagatacccaaaaaggaccatctcagtcaaatccttgttttatagatagtattattaataatgttttcaagtgcagattggagctggatatttttatatacattagcaggggtgcttccaggttataggtagatttaaaattgttctgattggcaactggctgaaagagttattatcaatagaaaggaatgtctgagctgccataagaggtttcagaaaccaaagttttatcatgcagatgaagcctccaggtagcaggcttcagagagaatagactgtaaatgcttcttatcagagttaagatctatgttgatcttaacgctggtcagcttgtcttgaaatcaaaaagggaggaggtcataatgaggcttgtctaacaccytcttcctgtcatgacctgagccagtatctcaggttaatgttggaatgccctggccaagaggagggatccattcagaggatttggcggaggaact

SEQ ID NO: 815915 - DNA, 571 bp, Homo sapiens
tttgacactttgtcaacttttagtcatattaagacataattccatttttaaaaaaatttagataaaattccttgaacagtacaacttaacaaaagcagattctagaagtagataaccagctaatactatttttagtaagtaaaatgtactaattaaaattaaattgaatttgtaaataaatccattccccaaaccacaggtctaaaaggatgtactggaaaattcttcttataatcttacacaaacttttccagaaaatagaaaaggaactactttccagcccattttatgaggccagaataacttaataacaaaacctgataaaggcattagaaggaaaaatatttcaggccgtaataaccctcattagcagatagtttaaattatatacacttgatggcgtatagcttataaagtatattttaaagtatatagtgaatactaacagtatataaaaaaggataatccatccaaacaagttgggctcattctaggaarcaaggtgtgacttatcatttaagaaggaatcagggtaactgataacgccaacaaaataaagtagaaaaacaga

SEQ ID NO: 815916 - DNA, 639 bp, Homo sapiens
aagaacaggcacagggaagtcacccagcattctcatcaccattgggtcatggggacactgctacaattkcctcttttatgaaggctatctttgttcatactctcagaaggaagaacaaagggagaaccttgtttgtcttgtgaaggaaatgcagaaagcctggtataggtgagaaaaagtgacttccctttacaaactaaagaaatacaggggtcgccccactagctgtggggtatgggtggaggtggggctgagtgtctgagagaaaatgctctatggtgtgggctggagtttgctatgagtgaattgttccagagccttccagcttcctgctagggcattgaaatcctttggctcactctgggatttggatgtgagacaatttgctctaaagggattttggcacagataagtcattattattaataaacacatggtgaatgccaaccatgtgcctaatgctgaaataaagctttctttttctttttcttttcaacgttaagtcaccaagtaaaggagaaggctactcagccccttgttatcccagaagaggcaattttatagtctccctgtccccgtgtccttgtctttgaatcctcaagtgcatttttgaaggatcttttctcttcctttaagaga

SEQ ID NO: 815917 - DNA, 644 bp, Homo sapiens
atcaaattttataggtcaatttttaaaaatacatttttaaaattattatttcctggacaccagtattaccttatgttctagattccataggacatgttttaattatcagtggtcttggctaatatattggctaagtagatgtgatatggtttagacggacttgctacaaagtttatttggaaaggtttagctacacagagtgataaatcatgttataaacaggaaaaattgtcctggtttgatgattctctaattagaaagagttaatttaataaaaatacatatttgtaaaccaaaaatataagtgcatggtgaagtaaacccattgctgatagttatggactgagttatatgctcctaaaattaatgtacaaaattcttatgttgaataaacccaaatgtgactggttttgaagataggaactataaggagataattgaggtcaaatatggtcataaaagtgggactctaatagttagaactgttgtgcttataagaagtggcagagaggaaagaccagggccctckgtctccctctgcatgcacagataagagggcatgagaggacacaaagagaaggtggccctcagcaagccagggagagagccctcactagatacctaatgctgtcacttaaatcatg

SEQ ID NO: 815918 - DNA, 534 bp, Homo sapiens
gtctctctagagaataatatgttctttgatcattcagatgrttggcagaattcagttccttgaagtgggacgactgatatctccatttctttcctgtcagctgctggccatttcaagcccaaatcagtgaggagaaatatactctcttcctgaaggtacagagtgaagggaggagacaatttctaagcatttacatattttattataccgtttgaaatattcagcaaggtaatgaatattaaaggttagtactttacctgtagtatagttggcctttgattggtgtcttttttttttttttttttttttgagacggagtctcactcttattgtccaggctggagtgcaatggctcgatcttggctcactgcaacttccgcctcccagattcagttctgcctcagccttttgagtagctgggactacaggtgcacaccaccacgcccacctaatttttttttttttttgtatttttagcagagatgggggtttcaccatgttggccaagctgatctcgaacttctgacctcaggt

SEQ ID NO: 815919 - DNA, 538 bp, Homo sapiens
agcaaaaatgctttgttggctgmtttcacgttatggacggggctcttttctccaagcacagtcataaaattgctttgccatttttttcagttaccaataaaacctgtcaaagagccatgctcgaaagtgagtcattagctgaagtcagctcttttatttatatttcgtggacccacagtacctttagcacttaatattccaaccaagatgtaagcatccaaacaattatatattaccccaaagccacataatgctttaaatatttttattcacctgctcccaatattatctatttagataattctaaaaagagggaaaactaatcattttctatcgcagatgctattttagggaaaatatctgtcatacgacaaactaccataatatttgaagcatagcatataatgtaagcatatgccagtccaacagaactgtttttattaaggtacttgggagattttttggttggttctgtgaaagaagctaaggtatgtgctgcaatattaaatagtatgaagattttctcatgacaaaaatg

SEQ ID NO: 815920 - DNA, 490 bp, Homo sapiens
ccgacacacacaactcaaaatgaatcaaagaactaaatgcaarctgtgtaattgtaaagattctaaaagaaaacataagaaaaaatctacttaacttcacctttggtgatagaacaccaaataaataagccatgaaataataattgatattttgaagtttattatagctgaaaacttttctgtaaatgacgctatcaaggaaatgaaagaaaagttacagattgagagaatatatttgcaatatatttgcaaaatatatatctggttaaggaaaggacacattcaaaaaatcttaaaaatatcttaaaactcaacataatttttttaaaaattaaaaatgaacaaaagatctgagcagatattttactaaagaatatatatacatatgtatatatggcaaaaaataagaagatacacaacattatttgtcatgagataattctaaattcagacaacgatgagatacaactacacaattattataatggct

SEQ ID NO: 815921 - DNA, 490 bp, Homo sapiens
ccgacacacacaactcaaaatgaatcaaagaactaaatgcaaactgtgtaattgtaaagattctaaaagaaaacataagaaaaaatctacttaacttcacctttggtgatagaacaccaaataaataagccatgaaataataattgatattttgaagtttattatagctgaaaacttttctgtaaatgacgctatcaaggaaatgaaagaaaagttacagattgagagaatatatttgcaatatatttgcaaaatatatatctggttaaggaaaggacacattcaaaaaatcttaaaaatatcttaaaactcaacataatttttttaaaaattaaaaatgaacaaaagatctgagcagatattttaytaaagaatatatatacatatgtatatatggcaaaaaataagaagatacacaacattatttgtcatgagataattctaaattcagacaacgatgagatacaactacacaattattataatggct

SEQ ID NO: 815922 - DNA, 627 bp, Homo sapiens
tgccatccgattcacccgctttggtttggatccaggatccgtcactcactggctgagtgaccttggacagggcgccaaacctgtttcctcatccgtaggatgggaatgataattgtgcacattttataggggtattggaaagatctatgggatggtgttcgtaggtagacatgtgctgggcacacaggaaacactcaatcatatgttagctagtattattattagctttgcgagcccaagcttgttatccaactttccgaagctgcagcagttccgtcgtccgtgtaatggggacaataattcctgggggtctgttcgtccggggtattcggagaggtggaagtaaagcacgggtcacgcaataggcaccggtggctgttgttaccgtttattcctgactctggggcagtgaggctggtcgcctggcccgagagcgactcagggaccagtcctggccttgcttgaatacaaacttgtctatgctcgggaagggagggggttgggagctcaagaaaccctatgcgcagggctctgggaaggagggagggggycagagacttgagcgcggcaaatgtgtccgccctggtcgctctgtacgcgccaggggctccaagccagaaggggacg

SEQ ID NO: 815923 - DNA, 681 bp, Homo sapiens
acccaactaataagtgacagagccmggatccaaacctgggtctgtctcattccaaaaccttactcattctgccataccgaggtgtaatgcatcacagtgtttgagcttaggtgacatagaggaggcccagagaggttaagctgggcttgagacccatggtggattagtcacagccagtgaagcttccggttctccagagccaccttcccaccctgcggcgctgcagaagggccatgccggctgccaaggctcagctgtgcttctctcccatcatcccacatgcatattaatcacacacatagactctaatgagcagttcaacctctgcagcaggctcagaccagaagccaggggtcctcaccagctgggcatgaagagccctgtgcccactcctccagccctccagagcctgagccgtgccttgctgaactccagcctgagccatgccttggccccctcttctaataccacacaggtctcccatgtgaccttgttctggtcactgctgtgttctgagcctctgtttccacctctgggaagtggaggctagcagcaccagccccatgagatgtctgtaaaaaaaaagccaggcaggtcccggcaggcaaattcccagctggcctggccaggttccctgtagttgttggcagccaggcgtgcttgctgtatctctacagcaag

SEQ ID NO: 815924 - DNA, 608 bp, Homo sapiens
tggagaaagaaaagtcttttaaacaaatggagttgagtatggaaaaagtacacatcaatcaccctcaaaccatgcacatcaactaaattgaaatggttgataggcctctacataaaagatacagctataaagcttctaggagagaacacggtagaaaatatttacaaatttcaggtagtcagagttttctcagaacacagaaagcactgtctataaaagttaaacatgaaattggactttattaaaacctttgctcaaaaacaaacattattagataaatgaatagacataacgtagactcactaaatatattcacaacatatatatctgagaaaggatttgtatcaagaatatataaacaattcctacaaattacagtaggaaagacacaaaatccaataataatgaacaaaaatttaaaaatgcaattcacaggaaaagatatgtaaatggccagtaagcacataaaagagtgctcaacatcatttgccatcagggaaatgtgaatatctctgacaaccacaaagaaaycccacacacacttctttaaaaacctaaacagactaataatactaagtgttggcaaggttgtagagcaatgggatctc

SEQ ID NO: 815925 - DNA, 608 bp, Homo sapiens
tggagaaagaaaagtcttttaaacaaatggagttgagtatggaaaaagtacacatcaatcaccctcaaaccatgcacatcaactaaattgaaatggttgataggcctctacataaaagatacagctataaagcttctaggagagaacacggtagaaaatatttacaaatttcaggtagtcagagttttctcagaacacagaaagcactgtctataaaagttaaacatgaaattggactttattaaaacctttgctcaaaaacaaacattattagataaatgaatagacataacgtagactcactaaatatattcacaacatatatatctgagaaaggatttgtatcaagaatatataaacaattcctacaaattacagtaggaaagacacaaaatccaataataatgaacaaaaatttaaaaatgcaattcacaggaaaagatatgtaaatggccagtaagcacataaaagagtgctcaacatcatttgccatcagggaaatgtgaatatctctgacaaccacaaagaaatcccacamacacttctttaaaaacctaaacagactaataatactaagtgttggcaaggttgtagagcaatgggatctc

SEQ ID NO: 815926 - DNA, 280 bp, Homo sapiens
ggaagcttttctaacataagcagaacccacgtgtaattggggtcctattgcatcatggtttctttccccacctgcgactccagtgtccaaacttccactatcaggaatttgatgggttcattcaacaagttaaaggcatgtttgttgggtgccttttccgtggcaatgacttctcttgactggagctatgcagtggataaggcaggcaagacccctactsttatcaagtgtacattctggagggggaggacaagcaagaagtgcatatatcagataagta

SEQ ID NO: 815927 - DNA, 280 bp, Homo sapiens
ggaagcttttctaacataagcagaacccacgtgtaattggggtcctattgcatcatggtttctttccccacctgcgactccagtgtccaaacttccactatcaggaatttgatgggttcattcaacaagttaaaggcatgtttgttgggtgccttttccgtggcaatgacttctcttgactggagctatgcagtggataaggcaggcaagacccctactctyatcaagtgtacattctggagggggaggacaagcaagaagtgcatatatcagataagta

SEQ ID NO: 815928 - DNA, 557 bp, Homo sapiens
caaagccacagcttgaaaagatggtctcatcttttcctatggagtaaattaagtcgtgaatcagaagtccaggtctacctcatctgacactggcccattcacctgctattgcagtggggccttctttctcaggtaatcaggagttgtttgggcccctacccatcccccagccctcaaaattcctcactgatgcatttgacatatattctcaggttacactttccctggaataatactgtgtccacatttacagatatatcagtatacacttttccacatttacagatatgtaggtgtaaatacatagaaaacttaatggaaagattcatataaaatgttcacagtagttacctctggggaaagggtttgagttcagaaaagggagatcaaatagagttttttatatatctgtacagttttaatatttggaagaacaatgctttcagaacttacttgtgcaatggaaattaattgtgtaaaaaaacaaaaaacactaccagcatctgggtagaaatgaatcagatagactacaagayaaaaaaaaaaaaagaaaaaag

SEQ ID NO: 815929 - DNA, 476 bp, Homo sapiens
gactctaactgcagcaatgaagacctctgcctaaagcaatcctgtagggaattgacaaggaaaccacctctccctctgacataaacccacatcgctcagggttggcaatgctgaagactctgcccacaagggacagggagaagctggcccttggccacctgcacctgccactgagccaggctgtcctgaggagactctcactcactaccacattcacagccaggctgggcacacacacgtcttacctgcattctgcccaaactgaaacataaccagactcaggggtaaaataagcaaaataagctaagaggttgggcaccaccgggatagcctgacaaaacaggatgttggtgtgaggcaacagagmccaccacatggggcctaattcaagttcactgggaccctcacaagctccacagccaagggagcaaggcaagagaggcccagcccactcaaggttcccctttcccgcagag

SEQ ID NO: 815930 - DNA, 268 bp, Homo sapiens
aggcataatgtaatttgcctgttgggttttagacttgctcaggacctcttcctactttcttctttcctatttctcccttttggaagaggattgtctatcctatgtctgtccctccattgtatcttggaagcacaggacatgtttgatttcacaaattcacagctagagaggaatttgcctcaggatgactcatatcttgagtctcacccayatctgaattagatgatatttagaagatagtttagactttgggcttttgaattgacaa

SEQ ID NO: 815931 - DNA, 638 bp, Homo sapiens
gggctggcaggagctggacgcaaggacacagtcagcttatccctgccccaatatataccaccacaggctcagactgyagggttaaaagatatgtttgcaatcaactagcccacttgccagatcacaaagcaagtgatctgcacaaggtcacccagatggtttgtgacagagctggaaacagaattgaggtctcctaactcagaccagagttcttgccattctactggggctccttcatccccatgaaacatccttatctaacaccctcctagcctcactacccgtactatcagcagacagatctatccctctagagttgggtagttatctccatgggaaatacgcatgtgctaatgaaaatgtaaggcatagagaagctacacactctgcatgagtctcttcttcctggatgtggaagacacctgctcactgcagcatggagaatggaggccagattccatggtgagcccaccatgaggaagggtcagctttcttcaggaattcaggtactggtcctgtcctcttttcctccatatctttcctagtatcttgagacaccagctactctattccaaacatgaggcatgaatcagaactaaaattctgtttcctaaattcacaattgaaaaacaacagca

SEQ ID NO: 815932 - DNA, 609 bp, Homo sapiens
aggtaacgaacaaccaaactctttcatttctmctcaaatattattttccagcagtctcctggcacttccatagaggcaactccgtcttccggttgctcagactgtggagtcatgtttaaccctccttttctctcgcagcccccatccaatctgccagtaaaccttatagcttcccagtcaatatggaactaacatccaaccactcctgccctctgctgacagcctccaaggctcctcacccacctggagtgagagccaacgcctcatactggccttcatgtcaggtggctacacaccctggcctgcctcagaccctggcactcacgtctatcctagtgcaattactaacagcacctcctttcactatctagggccccgactggataataaactgcatgctgtcccccacaacatgcacatgtccaatctgatcctcattcctctccacgctctctactgctgtctcctcccttgtaccacattgtaaacaccttcctccccaacaggctgggttccgtgcctctatatgggacacgctctccccagacagtctatgtctcattacttatttccttcagctgctcaaatgtcaccctatctgctcaataa

SEQ ID NO: 815933 - DNA, 610 bp, Homo sapiens
taatattaatgtcatttttaatagtagctattawtcttaataattattgttttattaccaacatctcatgattgattgaagtaacattaattactgatatcattattttattattaatagtgatattgctattaattatttatagtaaccgttaatattttcaatccgtacttttactgtctctactgtaattattaatataaatgattactattgtttatatttactaatattaataattaatataactgttcccgatatccgtgggggagaggatattactccgaatatcgcagaaagtgtacacccctctatgatgttactcctaatagccagggggtagaggatgacattattgaaaatatggcagtgggtgtacatcccttcggtcatcttgttcctaatatcctgggtgggagcggatgatatgactcccaatatcgcaggtggcggagacctcccccgtgatactgtccctaatatccaaaggtggagaggatgatatttcttccaatttcgccgggggtgcacaccacccttgtgatatcgatcctaatatccaggcggcgagaggatgatattagtctgaatattgcaggaggtgtacact

SEQ ID NO: 815934 - DNA, 537 bp, Homo sapiens
ggcttttcacaaagcctctcctatgatcaaccttggttttatagaagcaacatcgaattgtaaaatggtggagttaaagtaacaagcaactttaaaaggcaataaaataccaagattatacccttaatggaagtggcagacctaatgttgaggactactttaaagaagggttattttgttcttaacagataacatggagacagtgtaatactttcttaatgtgcaatgaagacctaattttgaggactactttaaagaagggttatttcgttcttaacagataacatggagacagtgtaatactttcttaatgtgcaatgactcgaatttattgctggagaaaaagcaccatcttaaacattgatctgaagcatcttatctcacatgctggaggtcttggagttgtgtgacttctgctgttctatgtaattactgacgtggcttgaggggaaagtgggactgctctagtggggagaacagatgcagaacctgwtctggagaacctcacatacattgaaggtgctgctttaagaaagt

SEQ ID NO: 815935 - DNA, 521 bp, Homo sapiens
catgtcatccccagaggagtacaggctttttaaagtcaggaatttcagtcttcattatttgtaactggacccctrttgctgggaacagtgcttggcacagaattggtactcaataaagaattgatgagtgaacacattatctgctttctttacctgtaaactgggggtaacagtacccaccatgcaattttcctttgtgccttagtgataatgcatataaggtaattagcacagtgctcagcacatagtacttgctgaacaaattatggcttttgttatttttataatacagtaaaaacctaaaaccctgtttcatctaattccataaacatatatggataaattctgttatgtccaaggcaccatttttacagagtataaagacagaaaaggcaaagcccttagccttataggagtagcatataaacatggaaactattttttgtatttaggtaccccaaattcttgcatgattcatatttaaatttctagagtttccagatatctcaagtgctgatagg

SEQ ID NO: 815936 - DNA, 542 bp, Homo sapiens
agagtaattgttatgccacagtggtattttcaccaggtaaagaaagctttttatggttcactgactgaccacaatcaaccycttcacaatctagaacccgaagattggatcttctgagaacatcagagaaagactgcccttgccatccacactacaacaaaactttaggaccttgaacctggtttcataatatcacaactgagaagggtcgctccacactcttggaactgcactcctattggaacccttaaggtaaagctaaccagggaagtttctccccaaaagaaaacggcatccttgatgtgaacagcttttcccaagatcatgcatgaagacttctctactattatgagatgcttatctttcaatatttttctcttgcttatgcctctatgaacaatagaagtgaaaaaggcagtatgttttgtgcacttatggggtatacttttatttgtgaaggattttgcagccagccttatacctggataaccttataccttgatgaggccccaatgtaggtgaaaaaattaaatagtacatat

SEQ ID NO: 815937 - DNA, 644 bp, Homo sapiens
ccatgcagacttggattgagctgtagcagattacagaagttcttgaacgattgttttccttacttctggatgggaagaatatacatggaggaagttctttttctttccttgaagatcaggattccccaacccctaggcagtggaccagtacccggcagtggcctgttaggaacctggccgcatagcaggaagtgagcagcaggcaactgagcattactgcctgagtgccatctcacatcagatcattggctgcattagagtctcataggaacaggagccttattgtgaactgtgcatgcaaaggatgtaggttgcatgctccttctgagaatctaatgccctaatgcctgatgatctgaggtggaacagtgtcctcccaaaaccaatccccctcctcaacccacctctccatccatggaaaggttggggatggctgctgtagatggcatatttccagattctctagagtctttggctttttaaggatcgttttaacccttgtatattgtgttttcttctaattgtttcctcttaaataagggatcacagaactagacacctctatggataagttttstgctaaaaagcagttccttatctacaatcttttctccttcaggccattgccacttcctcttccttga

SEQ ID NO: 815938 - DNA, 580 bp, Homo sapiens
caagcaattctccggcttcagcctcccgagtagctgggattacaggtacccaccaccacgcctggctaattttttgtatttttagtagagacggggtttcaccrtgtttgttaggctagtctcgaactcctgacctcgtgatccgcctgcctcggcctcccaaagtgctgggattacaggcgtgagccaccgtgcccagcctccccttccttattataaataaatagtcaaatgctgggagactctggaatccattccaaacactgagaattgtctgagaattgaactggctcagtggatgcataatacgtttcctataactggggctgaaagagcttaaattagagttagctgttatgcaaatagaaaaagaagaagaggaaaagaaatcaagttctcagaatccaaatgcctagagaaaaagcttttaggaatcaagaaaggcaaaaatatgttttatgcattaaagcttctcttgagatctttcatacagccagcggtgttctggaagtcaagagaatgggaactaacagaggctctatcataaaccatttgtgtattgttgagcaagtcacataaa

SEQ ID NO: 815939 - DNA, 625 bp, Homo sapiens
catgaccctgaacaaactgggccctgtgttgtctctgtaatgaatctccccttctggagayattattagcaaaacaatattccaggaacttgccttatatcggttccactttctctgaggctgcttttccagcaagaagtattactgatggataggcccttctgcttatcacagagccagcccttttaaaacacattcttatctttgaggattttggcagcaggtactccactgttgagcacttacttttagaaaatgcactgactcccagatgaaattaggtagatgaattcccacccctatagtgagtgacatatttttttttacttctttcttttttttttttttttgagatgaagcctcgctctgcagcccaggctggagtgcagtggtgtgatctcggctcaccgcaacctctacctcctgggttcaagagattctccttcctcagcctccagagtagctgggattacaggcatgcaccacagcacctggctaattttttgtatttttagtagaggtggagtttcaccatgttggccaacctggtcttgaactctgacctcaggtaatctgcccacctcagcctcccacagtgctaggattacaggcgtaagtcaccgcg

SEQ ID NO: 815940 - DNA, 643 bp, Homo sapiens
gagaaagaaagtagaacaaggctggaaatacgctgtaaaggtagctggggaggagggggtgatatggtttggctttgtcctcacccaaatcttaccttgaattgtagttcccataattcccatgtgtcatgggaggaacccggtaattgaatcatgggggtagttttccccatgctatttttgtgattgtgagtacattctcacaaggtctgatggttttatacggggcttccaccttcactaggctctcattcttctccttcccagtgccacgtgaagaaggacatgtttgcctccccttctaccatgattgtaagttttctgaggcctccccagacctgcagaattgtgagtcagttaaaccttttctctttataactacttaacaataagatctaccctcagctactcgggaggctgaggcagtagaattgtgtgaacccaggaggcggagcttgcagtgagccaagatcacgccattgcactccagcctgggcaacagagcgagactccgcctcaaaaaaaaaaaatcttaaaatatacaacamactactgttatctacaggcactatgccttgtagtagatctctaggacttatccattttgtataactgaaactttataccctttgactaatacctc

SEQ ID NO: 815941 - DNA, 599 bp, Homo sapiens
ataattggcatagacatacttagcagctggcatatcccccatattggctccctgactggtaggaggaaggctattatggtgggaaaggccaaatggaagmcactagcgttgcctctacctagaaaaatagtaaatcaaaacctgtattgcatccctggagggattgcagagattagtgccaccatcaaggacttgaaagactcaggggtggtgattcccaccacatctctgttcaattcttccacttgacctgtgcaaaaaacagatggatcttggggaatgatgacggattatcataagcttaaccaagtggagactccaactgtagctgctgtacagatatgatttcattgtttgagaaaattaacacacctcctggtacctggcatgcagccattgacatggaaatgcctttttctcctttgtctataaggcccaccagtagcaatttgcctttagctggcaaggccagcaatatacctttactgtcctacctcagggatgtatcaactctctgcctttgtgtcataatcttattcagagataacttgattgtttttcacttccacaagatatcatgctggtccattacattgatg

SEQ ID NO: 815942 - DNA, 311 bp, Homo sapiens
tatttattagtttaatgataccaaggtatctcataggattattctgagtataaaataagatayagtatatttgccagactctcatatgccaaaggctgtgtgtgcctttatattgcccacagttcaatgctccttcatatatttatgtttataaactgtattttgatgtagtcttcaaattgggcagcaagtgacacttcccaataatgaaaactgatatgcatattgcattcactcacacatcacaggcattggatcctgaaatagcagctctgacacttttacagagcatactgtacaggtgggtcccc

SEQ ID NO: 815943 - DNA, 528 bp, Homo sapiens
cttccctccaaacattggctatctcttccggtcttttctcctccctaaatctgatatgcttgccatttatgttctcattctaaccattgataactttgcaacacaagaacagggcaagggcagagaccttttcaaggacaccatttggaacctctttccagtctgatatcaatactttgagctatttagttccaccaaatataaacccattaaaatggacattgtttggttcacatcttttgatggaattcacatatatatgacaagggacacatcaaattcctttataattgcaatggtcacttgaaatggatttttctctagtttttgtctatggtttacgtattatttattacatattccagaagttagcttttatctatgggtaccctcgttgaacactcaatgaatggtagcagttgttattattgttaatattgttggaagacaattatccatggatttctcatgtttatgcrtggatgtttgtatagcaattaccttgaaagataaagacaatgtctactt

SEQ ID NO: 815944 - DNA, 598 bp, Homo sapiens
ccaacaacataaaacttctaatgaatatgtatgactgtaggaacatgaaattcagtcattattaagtacttgctatacttgactacacaccaattgaaatstgtcaaagaattccctgtaaataaaatctcagcatgttttctaagaagctttctgtttggggaattcaaaaatgggcactaatgacttttgagcagtgctttccaggaggtcaaaggcctgtttcctcatacataatggtcatagcactctttttgtgatttaacaatctacacacttttataaataaatattatgtttcatttagtactttatcatccataatatcttactctctaatccacataatggagttgtgccagactccaaactgaacataatatttatatatacatatatatttatatatatacacacatacataaactataaacctgaatatcttagcatacaaaacttatctaacaactaataatttaggattcctttgagagggaggggttagaagaaactcttcttagtctttgaaatagtcctgacagtaagcaataaacaacattattaatttctgggttctcatttattcaagtgaaagaca

SEQ ID NO: 815945 - DNA, 598 bp, Homo sapiens
ccaacaacataaaacttctaatgaatatgtatgactgtaggaacatgaaattcagtcattattaagtacttgctatacttgactacacaccaattgaaatgtgtcaaagaattccctgtaaataaaatctcagcrtgttttctaagaagctttctgtttggggaattcaaaaatgggcactaatgacttttgagcagtgctttccaggaggtcaaaggcctgtttcctcatacataatggtcatagcactctttttgtgatttaacaatctacacacttttataaataaatattatgtttcatttagtactttatcatccataatatcttactctctaatccacataatggagttgtgccagactccaaactgaacataatatttatatatacatatatatttatatatatacacacatacataaactataaacctgaatatcttagcatacaaaacttatctaacaactaataatttaggattcctttgagagggaggggttagaagaaactcttcttagtctttgaaatagtcctgacagtaagcaataaacaacattattaatttctgggttctcatttattcaagtgaaagaca

SEQ ID NO: 815946 - DNA, 614 bp, Homo sapiens
aacactgtatatttaggcaacactacatatactgaaaatatttttctctcatcagtaatatattaaccttagcttactttttataaacttttgaacctttgagttttgactcttgtaataacactgtagcttgaaacacaaacacattgtgcaactgtacaaaaatttttattcggtaaactttttcttgtttttaatttttaaaaatttttctttaactttttaagcttttttgtgttaataactaaggcaaagacaagcacatcagcttaggcctacacaaggtcaagattatcaatatcactgtcttccacctccacatcttgtcccaccagaagctcttcaggggcaataacacacatggacctgtcatctcttatgataacaatgtcttcttctggaatccctcctgaaagacctgcctgaggctgtttcacagtcatttttttataagtataagcagtacaatttaaagtaatgagaagatatatagtaaatacataaaccagtaacagtttattattattatcaagcattatgtacagtacataattgcrtgtgctatacttttatacaactgaatgctcaggtttatttacaccagcatcaccgca

SEQ ID NO: 815947 - DNA, 575 bp, Homo sapiens
tttttcagcttcagaattctgctcgattctttttaattatttgaatcactttgytaaattgatctgatagaattctaaattccttctctgtgttatcttgaatttctttgagtttcctcaaaacagttattttgaaatttctatctgaaaggccacatatctctgtttttccaggatttctccttgttgtctttcttagttcattttattgaggtcatgctttcctgaatggtcctgatacttgtagatgtttgtctttgtcttggcattgaagagttaggtgtttattgtagtcttcatagtctgggcttatttgtacccttacttcttgggaatgctttccagatgtttaaaaggactggtgtgttgtgatctaagctgcatctgcatctgcctgagggggcacataagcccagtaatgctgtttttgtttttttttttccagactagtagagatactaacttgatggtcttggacacaatttggaagaattttctggattaccaagaagaaaagctcgttctctttccttattttctcccaaacagtctctccttctctctgttctgagcca

SEQ ID NO: 815948 - DNA, 597 bp, Homo sapiens
ctgatacttgtagatgtttgtctttgtcttggcattgaagagttaggtgtttattgtagtcttcatagtctgggcttatttgtacccttacttcttgggaatgctttccagatgtttaaaaggactggtgtgttgtgatctaagctgcatctgcatctgcctgagggggcacataagcccagtaatgctgtttttgtttttttttttccagactagtagagatactaacttgatggtcttggacacaatttggaagaattttctggattaccaagaagaaaagctcgttctctttccttattttctcccaaacagtctctccttctctctgttctgagccacctgaagctggggggtagagtgacacaagcaccactaccaccaggattttgctgagttagatctaaagccagtccagcactgggtctcacacaaggcctgcagtaaccactccttggctaccacgtattttttttttcgagaaacctccatagtgttctccatagtggctttatttatttcctttccaactgacatcgtataagarttcatctctctatgtatttttgccagcattcacgattgcctgtcttttgc

SEQ ID NO: 815949 - DNA, 610 bp, Homo sapiens
caaacatcacagaatgtacttacacaaatctagatgttatcacctatygcatacctaggcttatggtatagtctatttcttttaggctacaaaactttacagccatgttactgtactcaataccttgagcaattgtaacaaatactaattatttgtgtatctaatatatctaaacatagagaagatacaatgaaaacatggcacaaaacattaaagtggtatgtatagtacataccataagtggaattgctctgggtatgtgaataagtggttagtgaatgggaagacctggaatattactgtacactctagtagactttataaacactgcacaattaagactacactaaatttattacaaatattttactgaacactactataggctttataaacactgtatatttaggcaacactacatatactgaaaatatttttctctcatcagtaatatattaaccttagcttactttttataaacttttgaacctttgagttttgactcttgtaataacactgtagcttgaaacacaaacacattgtgcaactgtacaaaaatttttattcggtaaactttttcttgtttttaatttttaaaaatttttcttta

SEQ ID NO: 815950 - DNA, 578 bp, Homo sapiens
caaaacacaaaacaggcactttcataatgtattcaatctctaattgaaattcaacatcatttagaaattaaaatttttaggtgtcataattgcttcaaaaaccttttgtgcattatatgttaaatatttgactgcattaaaaagtatttaactgattgttgttaaatcacttagacacactctcagcaaagagcttatgccaaataagtcaattgttgcaatctattataccagcaagtaaaagccatcaacatttttgcaggcatcatcatccacacacttcaaaaagttaataactcaaatattttgttttataatttaaatctcctttacctcttcctctcaagatttggatttttgttacaagtctctcgatggaaacccttaatctaaaaaaaatttatcatttcactttaactgtgccttctctgcctgtctgatttatgctctaaacatatgcaccgtgatgcctttggaactaggttatggccttgagttctcaaggtcaagtgcatggttgacaatttttccttacaagtgtgccrgccatattgatatgggattataggaggtccttt

SEQ ID NO: 815951 - DNA, 601 bp, Homo sapiens
tgtagttttctcatgattagactgtaattatgtgttttggaggacgaaaaccacagaggccaattgctattttcatgacaacatacaaagggtacaaaccatcaacattacttagcaatcactgtttrtatttactttgatcatctggatgaaatagtgtttgtcaggtttctccactgcaaagttactctttttttttttttattgaactctttagaagaaagtcactttgcacaacccatacctaagaagtagagaattattttccacctccttgaaggtagagtatctttataattatttggaatcctgaaacaatttttctctcattcctattcatgtgtatattcaaccatttttacatcagtttggattcatgcatatttgtttcgaacttttacttagaatctgcaactacattattttattggtcaaattattctagctgtggcttctgggaactcttttagttggatcttgtgtcactttcatatagtcccatcaatgtgttactgggtttttttcttattgttttgtcttgattttatcactttcttactttacagcactataaaattcttcagacctagcttgtatgttt

SEQ ID NO: 815952 - DNA, 594 bp, Homo sapiens
ggagaaatcaggagttttttcagaaggaagacagtcttaacctttcttgggaggatggctattctgtccctgaataagtgagctggaagttgaatctaaaagatgaaaaggagttggtaaggcaacagggagccacaggggcagagcaagaaagggagattgtgagtggtacaggcaaaaagaacagcaggcgccaataaggacctttttcaaggaattgaagagttcagaatgtttggaacaattgtgggaggggtataaatgagagaacacagcaaacaacttcctgcctttagagtgagagttgagttaggcgttgttagaagaatcaaagacactgtggttttgaatttgattcttgactctgcattttaaaaaacctcgttagacttcaatttcctcttctattgaatgaatattgtaacacttaccttaatgttttctttttggtgaagagtaaattttatatgtgtaaagtgaaaacatattccttttacatatatagaagcttcttaggtagcagcaacagcaattattstaatatcctttgttccagactattgttaagactgggcttggttttatgctatgtta

SEQ ID NO: 815953 - DNA, 643 bp, Homo sapiens
ttactgggcatatatccaaaggaaaatacattgttctacacaagaaaaaaagaatcaaaaaattgtcaatttggctgaatttttcaatttaattaaacactggatcttaaggaaatttmtcttatcaatttagtatgtgttacaaacccctttattagattctccagttcatttccttcccactcaattagaataagatgatgatcctaaaaagatagagaaacaggccaggcatggtggctcatgcctataatcccagcactttgggaggtagaggcgggctgatcacctaaggtcaggagctcgagaccagccttgccaacatggtgaaactctctctctactaaaaatataaaaattagctgggcatgatggggggagcctataatcccagctattcgggaggctgaggcaggagaaatgcttgaacctggaaggcggggattgcagtgagccgagattgcaccattgcactccaggctgggtgacacagcaagactttgtctcaaaaacaaaaacaaaacaaaacaaaacaaaagatagggaaacacttagaacccctcagtacttcttgtttctattcctgtcttccacaccatatacatgtgtattaagaactctgacactattttttctttcattt

SEQ ID NO: 815954 - DNA, 571 bp, Homo sapiens
cattctactagattacacaaagtgttttattttagtgctagtgatctatatatatatttattccaaatttatatatgtgtatatatacatagtattgacccttgctttcactgcatttattttatatacatatacatatacatatacatatacatatacatatacatatatatattgtgtgtgtgtgtgtgtgtgtgtaattttgatcacttagatgaaatagaccaatttcttgcaatgtacaaattaccaaaagtcactcatggagtaataaataatctgagtagctaatgtctattagaaaatttgtttcaataattaataaccttctagaaaccagcacacaatccagtggtttcacgggtgagatccaccaaatattcaagaaagagctgataccaattatctatgatcttcctgaaaatagaagcagaaatacatatacatatttcgaagccttgtgctgtacaacaaaataatgtatatcatgttttaaawatatatatatatttacattaaaaattcctttttgtttttattctgttgatgtaatttacattgaacaattttg

SEQ ID NO: 815955 - DNA, 616 bp, Homo sapiens
aattattattattgtttttttagagatggagtcttgttttggtccccaggctggtctcaaacttctggctkcaagcaatcatctcagtcctctcactcctcccaaaacctgggattacaggtgtgagccacatcgtccagccagagaagcatttttgcaatgacataatcaagtacaaaaaaaattgtaaatatttgtaatctgaacatttcttatttcttgccttttaaatgctgataaaagtttgtgttatttgtactacgattcaacataggaccatttttaaactcaatggactcttgatgtcacttcatgataataaacacttcttttagaatccccagttttcaagtgaggatcaaaattcagtaccccatcagttaggaaacttttttctgtgaggggtcagataatagttttgaaaatattgtatgggtagtaatataacaaatgagagaacagatttccctaagatttttattggtgaaattcaaataataaaaataaaaataaaactttttttgtaatataggtttactaataaggaaaatggaatccattttttgaattaacattttatttattggaggttcaaaattgatgttccttaccatca

SEQ ID NO: 815956 - DNA, 596 bp, Homo sapiens
aaaaataatctgtcaaatccacaaattcactgaaaaatattaatattggcccaaactgtcaaataggttatttagaacaagatagatctaacatgtcattgttttacctcttgttgccctttttgtttttcgtgttttgctgttttccttgaacaggtactatgatattgggtcagttatggccacgttaaaaccttacagaaagatggctaaaagagtagctggcattttataaatggagtatgtggtggagaaaggtgaagagctttacttaatatactggaagaataatcagaaaggggaaactgtatctagtttctttgatttttagtaaagttcatatgaagagaattatcctcaactattctctacaatggaaagctttgctataatgacagttcatttaagaattgtcatgtgtgaagttaaaacaactttatggagaagtatagcaactgctccttccatgaaaaaawttatgttattagttacaaaaaatgtatccaaatatctttcatatcatatttgtttatggatgctaatggcattttggaacaatgaaggcattccatctggcaaataggtgaaaggcaaat

SEQ ID NO: 815957 - DNA, 636 bp, Homo sapiens
gagagctataggtaaaaatgtgattttttaattttatgattactaattcaaagaaaactacatagaaagtgctagtgtgggtgtgtgtrtgtctgtgtgtgtgtgtgtgtatttctttctagttgtcgtaatgttcttttctacattgccatctattataggagaaatctagataagcatacctgaactagttaccaaagctttgcctgaaagattctcttaagttctattattacttggaagtgcttctagcaaagtgtaaccatttttctctaaggggtgagatggtgaaaggaggaatcagaagctatgccaattctagaataatctgtatattaggagaatattttaaattttccagttgctgtaattcaagaaaaaaactaaactgcttgtaataatagaggtccattatgtactcccagatggttgaagtgtgagtgaattgtgatactttgaagacaaggatctggaatagtctgaacggatatttactttgatcatgtcttagaattataaaagagtgttatgaattttctaaaatgacatctgtaattgcttggtcttagggtaagatgaactatatttatgttaatgataatgagcctttaacttcatacccttcagaaaaaacac

SEQ ID NO: 815958 - DNA, 517 bp, Homo sapiens
ttcaccctcattagctcgtcaacaaatgacaaatctatacctattttgactttctaaatgattattactaagaagctacgtataatttatttatgtttctaagaatctccacataaggataactctcttcaacacctttatcataaaatctaagtacatcaaaatttctaaatagacaagcacataaaaaggtagaagacaaacagaatggtatataaatgtaaaactgcttaccttcgcagaagtagcaaagtgaaattttttccaatcaaaatattttccgtggcacaacaccttatggtatgacaagggatttgtgatgaaatggacatattttcccattagtttgcaggtaaaaacatgaccatgtttcctttgatttgctctgaggaactcaagaggattggcaccaaattgcagagcacagcccaggtatggaattaatccattctctagaggtggttcacccgtttgcctgtcagacacaartgtatgatagacatggatgattacagtt

SEQ ID NO: 815959 - DNA, 604 bp, Homo sapiens
ggaattttgtcccttgtcttctgtgcttatctaactcctaatatcttaaatccttttaaggcccagctaagtaccaactctgtgctaggcatcttattcactttatctcatttaattctcaaagcaatactactatacaatgacttgtggaggacatatccaagttctgattgtgatatttaacttttcatggatgaatatgtcaaaacaggcatcagactatatcctgagggtctttctgtagattacgtaactcctcttgtaaattaaaaacacagaccatcttatgtccagagtttcagataatgaaactgtcttggcttaaaatgacaatgagacaataactgttttgatttcaaataccgcccaaggaggtggaccatgaaaataagcactgttttctgtaccaaacagacctgtagaaatacaacgaaactgggaaaatttcgatattgaatatgaaatcaaaggaagtatacacttagcattagaagatatcatacktagaaaaaaagattgcgaacaatctgctatacattgtattataaacagattaaacacagtttacgtctcaacctatatattttaaggaaactcagttctt

SEQ ID NO: 815960 - DNA, 622 bp, Homo sapiens
cttacatgtcagtttctccaatgtaacaaattctctgtgacatgacacgagcttttactagcaagcatttattaaatatcattacacttgacacacaagtatcaatactatgtgttggttatattttatcatctctatcttcagttcttcctatcttatatttcatatcttaggtgagttgaagttaccaccttaatggtggccactataggatcattatctcaggcagccagagattgcttattgggcagagatctgaggtcagaatgcagggctgaggcatgaacaaatccaaagggattatttctgagtcattgaaggacaaagtttttattttcttaccactttaacagcctcctttatgggaatttatcatctgtatattagtcaccaactctagctgtcttaagccaaaggaatttgttggagaaacataagggctcagaaaatcaacaggaggctggagtaacaggcattaagcaactaaaaycagctggaactaatggcactggaggaccaggcagtaagaacacagctacagccacacagcagaatggactggtcaaacactgccccatccctgatacaaatggcctgtttcttccatcctttcagcacttgc

SEQ ID NO: 815961 - DNA, 633 bp, Homo sapiens
actaaagagcttctgcatagaaaaagaaaccgtcaacagagtaaactgacaaccttacagaatagtagaatatatttgcaatctatgcatcttacaaaggtctaatatacagactcttcaaggaatatccagactctgcaaggaacttaacaagagaaaaccaagtaacactattaaaaagtgggcaaaagacataaacagatacttctcaaaagaagacataagacataacattatgaaatgttcaacatcactaatcactggagaaatgcaaatcaaaagcataatgaaatatcatctcacaccagtcagaatagctattattaaaaagtcgaaaaacaacatatgctggcaaggctgcagagaaaagggaatgctgatacactgctggtgggaatgtaaattagttcagccactgtggaaagctatttggaaatttctcaaataaattaaaacagggctaccattagacttagcaaccccattactggatatttagccaaagaaatatagttcattacaccaaaaagacatatgcactcatatgttcatcaccatgctattctcaatagtraaggcatggaatcaaattaggtgtccatcaatggtggattaaataaagaaaaatgtgta

SEQ ID NO: 815962 - DNA, 303 bp, Homo sapiens
aaagaagaggagaaaggtgtttgactatataagaaaaattttaaaaatatcccwggatgagtatatcagaaatcatatcagccagaatctagctacttggtcatctcttgctggaatcctataagaaagaacctaaaaatagattggatcaggcctaacagtgtctgacacactatacttgtacaaggtatgtaaatttgtatctagtttataatcaacaacatagatcttacaaaatgtattactacgtatcatagaatttgttttgtcttcattggtctccatcagctcctttttgattac

SEQ ID NO: 815963 - DNA, 562 bp, Homo sapiens
gccctggtcaggagttcaagaatccagtttacctccgacagactatgtgaccttggaaaattcatttttctccaagcttcagattcctccatttttaaaatggattttcccttttaaatgattataagattcctttttaaaaacatttttcttatttcataaataatacacaatcactgttgacatttttaaaagtatggataaattaaaagaaaaaataacaataattcacaatcttaccacctaatgattgacactgttagcatttttatgtattccttttggtgagactgcttgggattttagcatcactgaatatatatctcccagtgagagttgcctcttcaaagcctttccaagccttgcacatgtaccaacaatgctgcccataaattaggaagttggggaactgctcttcggtaactcactccctgtagactgtgactctgtctttggaatgtccttggtaataataagtcatctgagggtcrtagtgattattggaagagtcatttgaagacaaatttacatgattggaagaatgatcaagctgagtacctcc

SEQ ID NO: 815964 - DNA, 632 bp, Homo sapiens
caatcataacttaatcatacattttaaaataaaaaagtattgtccaggcgtggtggctcacgcctgtattctcagcactttgggaggccgaggtgggcagatcacaaggtcaggagtttgagaccagcctgaccaacatggtgaaaccttgtccttactaaaaatacaaaaattagccaggcgtggtgcgcacacctgtaatcccagctattcaggaggctgaggcaggggaatcgcttgaacccaggaggcagaggttgcagtgagccaagatcatgccattgcactctagcctgggtgacagagtgagactccatctcaaaataaataaataaataaaagagtataattggattgtttgtaagtcaaaggataaatgcttgaggggatggataccccattctccatgatgtgcttagttcacattacatgcctgtatcaaaacaggcatgtacatggggtacatctcatgtaccccatagatatatacacctgctatatacccacaaaaaaaattttttaaaccttacaaattaaaaaaaaaaagaagaagyagatggtggaaacacttggctatctcagccttaggtttacatggtacagaataaaagaaaaaaaaatcccctgataat

SEQ ID NO: 815965 - DNA, 589 bp, Homo sapiens
aataatggttgatacaaattaccattttatacatagtgggyccagcaataaataaataaataaataaataaatatacacacacacacacacacgtaagaataggaaaaacaaaagtaaatatactgattaaaagaagaaacaaagaaaaagcaatatttctttcaccatctctaccaaatagtgtttggcattgctaagaatgattttctggattgtaatagaggaacaacgaagcgttcatacttttgtttcatgtttaaatgtttatttttatgagatattttgaaacatgttttacagatacttcagaagaatcaataataatttgatacgtatcaaaattaaataaaatgttaattaaacatttaattgcagatagatgaggtgactattttggccaaaatatattagaacaatagccatttatagaaataagatatattttaatattttagctgaataagatgattttttatattctgaattttttttcaactttcattttagattcaggtggtacatgctgacatttgagatatgaattactccattacccaggtactgagcatgttacccaacaggttttca

SEQ ID NO: 815966 - DNA, 468 bp, Homo sapiens
  misc_feature 43: n = A,T,C or G
catggcgtactgtgatttttttgttggtgctatggtcctttcnacctggatgaattccatctccctcattggaccagaagctcctcgaggaaactctgcgccctttaractccaatttttttggagaagctacagggtgtaggagaaagaacatgagtttggaatcgctggaaactgtcaaatctcagctccttccacttttttcgctgtgtaactttagaattcctttagcctcgtttttccttctttctttccacatagcatggggccttcaactgctggagggtctgggcggtcatttatccttgctgggcctcagaggcctcatgagtggtgcctttaagagtgcaatgaggccgcagcagaaactatctctaaggccagctcttaaattctctaacccatgctcctggccaactctcctctgtccagccgcaggtcctcatagaaaggcagagacactgaata

SEQ ID NO: 815967 - DNA, 472 bp, Homo sapiens
ctccaggatcctggtgggcaggatggttaggaacacaggtttttgagtcagacagacctaatttcacatccagcctctgctacctactggctgtgattttgcccattccttaacctcccaaagctctggtttccttaactgtagagtggggtaataaatatacttacttctaaagcattaggagagttaaacaagataaagcaagaaaagtgatctgcatagtgggcattcatgacagtaattaataatcacaggaatgacaataaacatttattgaggactgtgccaggaactggattaggtgctgagaatacagagatgagaaagatgtcgtctcattgtagagaagactgtcataaaagcaggtgctgaggcagaggtatgcayggggaatatgaagcacagctctacattacaattcttcctcataatgcaccaaaatgtctttccctgactctctacccacagacct

SEQ ID NO: 815968 - DNA, 510 bp, Homo sapiens
gaatgactggggggagagctgggccctggtacagggaggggcagaggtctgtctttggaaggctttaggaagaagggagaggtggactggaagactcagatctagggctcgggggaaagcaytgggccatgaggtagatttgggacaagtcctatatctgccgtttgctagctgtgtgacctcaggcaagttacttaaactctctagtcttagtttcccatcagcaaaatgggctttattgttccccggctcatggaatcattgtgggacacaatgagatcagggacatgagagtaacactggccaagagctcagatggggagtcaaagtcctgatcaaagtctggctctatcacttattagagctgtgtgggccttgccctttgatactcagcttctctgagccccagtttcctaatccacaaaatgggaataagtgtactcagccacaggtatccttgaagagaggcttaaataggatttttttgcatgttaatagtgctttgcaaaa

SEQ ID NO: 815969 - DNA, 617 bp, Homo sapiens
aggctattattagctatatctgtggtttattttgataattaatgtaaatgacacaggaaagcaccttcttagaatatgcctgatacatgataattcccttcttcctttccccaccttgtctacttaaacttccatgaacccagaattctaaacccatttgttagccacatatttaggaaatttatatctcttaataaatcacattatgcctccaagacatcaacattagcctgcacatttgcaggaggaatatgggatgagaatagcaacagtgttcccaccggcagccatggggtgtgtgttgaatgagactagattgtctgggttgctttgcctctgttagaattcaggtcacacctttgctgtaaacatagatactgcattctttacagcagacgccagacatttccaaattcctgaactgatggctctacaagcttgtgctttgagaattacagtcataaacacagaaaagtgtgcccataaacagtagtttagtactcttgtttgcttcatactctacgctaattgacttaaccaaatgatttatgtttatataaagtgtaatttcaaaaggacattaaaaaggatccragctaatgcattaaattaacttg

SEQ ID NO: 815970 - DNA, 606 bp, Homo sapiens
ataaaaatccttaaaaagtgggtatacaagaaacatgccccaacataataaaggccaaatatgacagacccacagctagcatcctactgaatggggaaaacctgaargcttttcctctaagatatggaagacaacaaggatgcccactttcaccactgttattcgacataatactggaagtcctagctagagcaatcagaaaaaaaatgaagaaataaagggcatctaaattggaaaagaagaagtcaaaaatcaaattatccctatttgtagatgatatgatcttatatttggaaaaaaaatctaaagactccatcaaaaaacagtactataatggataaattctgtaaagttgcagaatgtaaaatcaacgtacaaaaattcatagaatttttatgtgctgacaataaacaatctgaaagaaatcaagaacataatcccatttacaatagctccaaataaattaaatacctgggaattaaccaaataagtaaaagatctttaaaataaaaactactgaacatttatggaagagattgaagaggagacaagaaatggaaacttgttatatgtgcatggattggaagaatcaatattgttaaaata

SEQ ID NO: 815971 - DNA, 627 bp, Homo sapiens
agtgactgtcttagattgccctgagaatgaaataacacatgtaaagtaygcaaagtacatatgacaaattttagcatatttatctatatattccaatttattttgctttgtcaaattcactttaaaaagaggtttgtatttaattttctttgggagatctataatgtttaaggaatacttaaacagaagcaaacattatttatgctatcatgtagttgagtgaaataccaggttataaagtccttaggcccaaggacttgtcttacccatttctgtatttctattttgtatgtacagtatttattgaatcaatgaatgcatggttgattgaacatattggtatttaatgacagtgtgcaatgggcctataaataataaaaactgttgtttaagacttctcccatgttgtgtactttatagcaattccagatcgctcttacagtttaggtggtaaagagaattgtttgctgttttagtgttttttaagtgctaagaccttttttgacaattcatctccaactgcacttcatattttctttgtagcactctgtaccactcaacatattatatgtttatttattacttctcttctctcatttgaatatcagccctatgaatgtataaact

SEQ ID NO: 815972 - DNA, 631 bp, Homo sapiens
aaatttttcttaatgtatgaaggctaaacaagacatattctcaggtagcttctacaggttttcacttgggygaagaactgaatgtgcagtgaggatgtgaatccaaaaaattgagtaggtgaggagatgtgaaactttgttgtgtgctcttacacaggactctgtggttcctacaacaacaaagcagaggatgatttcatgtcaagtcagaatatattggagaagacatctcaggcatttgctaactcttgggaaatgatgtcctgtcctaaaggaaacccctcttcatgtattagtatagaaaaaggtaatattaattgactatcaaatctgtaattacatatttgttgctaggaattatgtacttatgtatgtatatatgtaataatatgataatcctggtttaagctagtttttgttgtactgtctgaattttggaggacacagcagagaagcagtctggctggctgatcttattcctataaaacaaatatttcactgggagttcatcttggttgtttggttttctatatctactcttttcctccttacacaattttcaccatcattatagaataacaagattagaagagatttggggcacatttagttcttcaattattccctcctt

SEQ ID NO: 815973 - DNA, 593 bp, Homo sapiens
atacttctctgaaagtaaaaaataaaagatatgtttcagtacacaatgtgatatgtactcagacttaattcataaatttctcttatccttcatccgtggatcttttctttatttacttattgcgtttgttaaaatgcaggcttctctgaaaaattatttttaaaaatagtttttagacaatgaatcatattttctcaagtattttaacattgtaatcattatgataattatccaaggggaaattatacttattttttattcatttattcattcatttggcaacaatacattgaacatttactaagcatcaaactggctctaccacttaatagtggcatgatgttcatcaagaaattgttagtgcaatcaagaacactagaaattcattggatgaatttaaagaagcttttagaagggtattatattataattgaggcactttatgaatatataaataatattatgttttcatgctagagatcatgccaatgaagatatttactttgaaaaggrgaagattagaagtttaaaagcatttccatattgaagtaaatattcatttccatatcttcacagttatctttctctgagtt

SEQ ID NO: 815974 - DNA, 593 bp, Homo sapiens
atacttctctgaaagtaaaaaataaaagatatgtttcagtacacaatgtgatatgtactcagacttaattcataaatttctcttatccttcatccgtggatcttttctttatttacttattgcgtttgttaaaatgcaggcttctctgaaaaattatttttaaaaatagtttttagacaatgaatcatattttctcaagtattttaacattgtaatcattatgataattatccaaggggaaattatacttattttttattcatttattcattcatttggcaacaatacattgaacatttactaagcatcaaactggctctaccacttaatagtggcatgatgttcatcaagaaattgttagtgcaatcaagaacactagaaattcattggatgaatttaaagaagcttttagaagggtattatattataattgaggcactttatgaatatataaataatattatgttttcatgctagagatcatgccaatgaagatatttactttgaaaaggagaagattagaagtttaaaagcatttccayattgaagtaaatattcatttccatatcttcacagttatctttctctgagtt

SEQ ID NO: 815975 - DNA, 232 bp, Homo sapiens
ggaattgggcaaggacgactttattcaagcctatcacagcaggggagagagatcagactgaactaaactccactgaaacaaaaggtgggagagttttaagcgcaggggtgagctaatggaaacgtactggagcaccttgttggaaggaagtgggagcagttgtcaatgtsattaggccatctgtgtttgctaattgtcccttattgaaggtaggctcctactctcccacaga

SEQ ID NO: 815976 - DNA, 578 bp, Homo sapiens
aaaaaaatttgtacaaagtatatctttttttaaaaatgataaccgaggagccagacagatcacagcatcgcaggtcttgtaaagacattakcttttattctgagagacatgagaaaccacacatgtaatctacagaatgacatacagtaacatatgttgactgtttctttcccaaagtagttataatgcatacacttttcatcttctgaagtgtatgagcatgttttaaaaacatcttttaggcccaaaaatccatgtgcaggaagtcaagatacaaatgagaatattgaaacatggttaccatgacttcaccttttctcaatgagcacctaaacatgctacatgaattcaatgatttccatcatactctactgaaaatcactgattgaattcacggaaccaagaaatgtaaattgttcagcatatcaaaaaaaaaaaaaaaagtatttgagtatgtcaccatgtaacacttttgactttaatttcaaggcttttaatgaatatttctatgagaattcagcattgtcacactgagtcataaaacccctgctatggctacactgaggtgtgcttccttt

SEQ ID NO: 815977 - DNA, 670 bp, Homo sapiens
gaaatgaaagtgaaaaacaaacagagatgagtatcaaaactgaattacataaatacatttgaaaaaatttgaaaaacagtaaatccaagaaagatagtaaatcttttaaagcaatggcaacttaaaaaaatgaaataaaagcagagcaagagattagatgaggatcgattttatgttggttattacggctcttctataaagaaagaaaaattaaatttttttcctgtagagcaaagtgatattcagccacaaaagctttgaaggtttgatattcagagaagatgaccaaagagttcttttatttaggctactgaaatattattttataaaacttaaatattatagacaaatcacatgccgagttgtacaactatgtttctctagagaatatcaaccacatgtacatggaaagatgaaagacaaattagtagctaattgaatgccacataatatattcatggttttgtgagggaatattacttaaacagagaccaagattaattactttaactatgtagctttaagcatcaataattcttctgaaaaacaagttttytaaaattaaattttaaaacatatagttaaatgcttaccccattaatgcacacttgtgtatgcctattacagtctgtgaagtttggtttagggtcagatgctgggcagagagctg

SEQ ID NO: 815978 - DNA, 487 bp, Homo sapiens
attaaaaagatccaaattttaaacaattattttttattttaaaaagtctacaaaatgtggactgttatgaaatttgtctatttgtgaaatacgctgaccaagatttttaaagacatattctgctctaaaagtcaacttagtagctgtggtaggactctaaatgagataaaattaaacagtaactgtctaggatgttaaaaataaatgcctatagactgattcttacatggtaaaacaagatattcaaacagcaaataagttacttgggagattaaaacaggcttcctgacccaattactattatctaccactgcctgtcttctctctctagtaattctgctattttgctattctcccttactttstacaagttaaataagaaaatacagaagaaagcagcatctatatggggtattttaacatctcttctcagaaagacaagtgtgtatgctctttgttttaccctggggcttctaattcttgcaaa

SEQ ID NO: 815979 - DNA, 530 bp, Homo sapiens
tttctatgtttagatatacaagtacttagcattgggttataattgcttatagtattcagtactgtaccatgttgtacaggtctgtagcctaggagcaataagctatcccatatagctargtgtgtagtaggctgtaccatttaggttcgtgtaactacactgtgtgatattcacacaataatgaaatcacctaatgatgcatttctcagaacttatcctcgttaagggatgtgtgcctgtgtgtgtgtgtgtgtgtgtgtgtgtgtgtgtgtgtgtgtatctcctattgattgtttctctggagaacactgattaatacaacagaacaagccctgattcgtagtgctgctaatttctgtggtgtaaatgctccccctgtgggtgatttcaggctgccaatgtcactgaacatggaagtggaaggaggtgtgcatgatggtccttgtaagctggtacaagccatattccagcacaccactgaccccctcccacaaacacctttctcacccctcccccagagggatcagacc

SEQ ID NO: 815980 - DNA, 601 bp, Homo sapiens
tgagtgaagggaagatgcctgaccactcacacgtgtctgtctctccaggcgggctccagctcagtgcctggcggccttgcagatcttgtcgtacacctcggggaaggcgtcctggcaacccagcttctctcgcagcttgtggtacaaggagccatcaaacatctcccagaactcctcccggttcatgtagcagtcggcatacagcatctggaagctgcagaggcagagaagtgggtgaggacgccaggaggcacacggaacgtgaggcgtgagagaaacccaactgctcattctgcagcccagaaaaggcttttggaggatttctcttgtttaaccccgttaacctggtgaagaagatggtgcaggtattcttatcccccttttgcaggtagggaattggggcttgggggttaggtagcttagcagtggaggtagagtcaggagtagagctcagactgctgggcttctgcccctctgcttggccagaggcacagctgcctyccctaatggagcagtggggttgttttcctttaatctgttattgactttcaataaactagacataatttaaagtacacaattggataagcttgacacatgc

SEQ ID NO: 815981 - DNA, 632 bp, Homo sapiens
gagggcttgcggtcacaggtagataagagacaaatggctgcattcttttcagtttctgataagcctttccaaaggagctaatcagaatatgcatctatctcagtgagcagagggatgactttgaatagratgcggaagcaggtttgtcctgagcagttcccagcttgacttttcccttagtttagtaatttgggggccccaagattttcctttcacactattttgtatgttttaaacacaacacacacaaaccaaaagcataactcattttctgttttgcctttttaaaatttaacactatactatgaccatcatctcttatcattacacattcttggaacacatgatttttaatgtatacatcccttggacttctacttctagccgaagtggaataacaggaaccacatttaccctgctgcctgaaaaaaaaacctgacaaaatatatgaaataagagttttcaatgcagtggacataaacaattaaagttagtgatccctcagagacaggaaacaaggtgagctctgaggcgggaggattgcttgaggccaggggttcgagaccagccaggacaacatagcaagacctaaaaataaaaaaataaaaaattattttaaaaaaaggtgagct

SEQ ID NO: 815982 - DNA, 643 bp, Homo sapiens
tcccaagtactgggactacagrtgtgcactactacacccagctaatttttaaatttcttgtagagacatgcttttgctattctgcccaggctgatcttgagcacctgggctcaagcaatccacccacctcagcctcccagagtgctgggactacaggcatgagccaccacgcccagcccaattctatgagttttgacaaatgcatgtagttgtcatacatataacctcaggcaagatatagaatattcccatcccccttgtgctatctgtagtcagtctactcctcccactgccaaccctggcaattctaccatccctggagttttgccttttccagaatgtcatataagtggaatcatctgtatgtagaattttgtatctttttctttcatgttacacggtggtcttgagattcagccatgctgttgttgtgtgtatcacagtttgttccttttcaatgctgagttggattgcgttgtatggttgtgacacagtttgtttatccattcctaagttgagggacatttggattgtttacagtttggggaatttttaataaagctgctataaacagttaaatacaggtcttcatgtagacgtatgtttttatttctctctggtaaatatctaggagtaggatttc

SEQ ID NO: 815983 - DNA, 619 bp, Homo sapiens
tcactgggaagcaggtctgctctctccgttttacagaaagaaaatcagctcaggtaggccaagtaacaaacatacccagtatcacttggcttgtgagtaactgagccaggatcccacactcaagtctgtggcactctggagctcatgctatttccattttctcagaatgctctgaaagttccatataaatattgctaatttggaggaggctgagccaggaagaggtggccacgagggctgagtaggtagtgtggtgagtatgatggactttggagtcaaacaaatctgggttgagctctgtctatgcaattactcattatatgaccttgtgtgtatttctactctctctaagcctcaatttcctcatctttacaataggtataataatagcatccacttaaaaaggctgctattcgtagaaaataaattagtgcttataaagcacttagcaaagtggccagtacaagcaagtactcaataaatatytctgtttttactactaaacatatgtgttcagcaattataaaattgtaatatagatgggttgcatctagacacatgtacattatagcaatgaacatcattgtcacctttccaatcccattgcacaccaactatt

SEQ ID NO: 815984 - DNA, 627 bp, Homo sapiens
aggcatgagaggaggttgccaaagcttccacagtgaatgagactcaggagggcactaatgtctgctgtattgcaatttgacagattctagaaccttttgttagaaggggccccattcaaagtgggcttattttgcaagtaacagcgtaaatgggcttacctaaaatctacaaatgaaggatgtgtttccttgaactcaagaggcctgaaggatgctgggaggtttattagaacactgtgagtactcagagggtcaataattattttttgacagtgtcagggatggagcatccctcaactgaccagacaatggccagaaattggtgtggatccctgtactatgcctgggcagtggcccatacttttttgttttagtttaatcccaccatgtggaaacacaaaccccatccttttctatgagttctttgtgagtaatgtcctgagtgtgtcaaatgaatttgctgaaagaagggtgtcttcagggtgatgttacacctgtactcctagagaatgtcagatgcagttcaaatcctgcctgcaaagattgtgtatggtggcagaactgtcgaggtacccygtggtagccagataacggtctattgtgtccttcgggggtgaaagcaacctg

SEQ ID NO: 815985 - DNA, 527 bp, Homo sapiens
gacactcctctccccacagaagtctcactctctgcagcattggaacaaagtccaggacctccttatctaaatcaggttcagatcagataaagcttcttcgggctgggcacagtggctcacacctgaaatcccagcactttaggaggccgaggcaggtggatcgcttgagtccaggagttgaagaccagcctgggtaacatggcaaaacctcatctctacaaaaaaaaaaaaaaaaaaatctttttaattagctgggcaaggtggcacacacctgtagtcccagctactcaggaggctgaggtggaaggatgagcctgggaggcagaggtcgcagtgagccaagaatgcaccactgcactccagcctggacaacagagaccctgcctcaaaaaaaaaaaaaaaaaaaggaaagaaaasaaaagaaataggctcctcaggtatggtttattgggtgcagctccttgggtgcacctcctcttgaactagaggcctgtgagctgaaaaattgtttcttccctgctgccaac

SEQ ID NO: 815986 - DNA, 527 bp, Homo sapiens
gacactcctctccccacagaagtctcactctctgcagcattggaacaaagtccaggacctccttatctaaatcaggttcagatcagataaagcttcttcgggctgggcacagtggctcacacctgaaatcccagcactttaggaggccgaggcaggtggatcgcttgagtccaggagttgaagaccagcctgggtaacatggcaaaacctcatctctacaaaaaaaaaaaaaaaaaaatctttttaattagctgggcaaggtggcacacacctgtagtcccagctactcaggaggctgaggtggaaggatgagcctgggaggcagaggtcgcagtgagccaagaatgcaccactgcactccagcctggacaacagagaccctgcctcaaaaaaaaaaaaaaaaaaaggaaagaaaacaaaagaaataggctcctcaggtatggttyattgggtgcagctccttgggtgcacctcctcttgaactagaggcctgtgagctgaaaaattgtttcttccctgctgccaac

SEQ ID NO: 815987 - DNA, 584 bp, Homo sapiens
agctcgattgcaagattctcagagccttcagccaagacttcagctgggctgacatcttaatttcagcctaaggagactctaagcagagaactaagttgagcccacccacacttctgctggcaggactgtgagataacaagtgggtattgtagtaagccattacatttgtggttatttgtcatgcagcaatgaaaaacgaacacaaccatcttcttccaagttttaaatacggcctaagggatacaaagctcatacctgcatcttctctgatctgatgcataggtcacctctattatactctatagatctagacatttcttaatctattcattgagttgggcaaaaatggacataaaacttctaaggaaaaactccaagtttgtaaaacaaacaaaatgaaacaaaacaaaaactaggctattttctcagacataatctattggctgaggaaataatattatataaagaaatgttacaatgtcttcaragtttcccaagaccaatgactgaaggaaagataagaggatttctaggattaactgagtcttgaagacaatgggggtcaatcttttctgaaataccag

SEQ ID NO: 815988 - DNA, 596 bp, Homo sapiens
taaaacccaaagaaacagaaaaggagaaagtagaagacacatagaaaggtgataacctcaaggagaaaagttagagaaaattgtacaaatggtagcaaatacaataacaacagcaatatgggaaggaagcacagaagaaattatgcagagaaagaaacagatcaaaataattaaagaacccatgaagagtgaaaactgttgtccaaggaaaggggcaggtcgagggcctatggagctgaagtcagtcactagatagaagcagctcccagcaaagggcacctctatcaatagtgagttttccaatccaggcccccctaggtagacagtggcacagaagcatactcagagagtaagagtactctttccccagtctcatctgctcaggtagtggaatgattctcatgtacatgtctgcgatgcagacctgctttccaagctcttccatccatgtgcctgaagatatttatcccaggaccctgccccttgcaatgtctttcaggaactacacacatccaaaagggaaaccaacacctcctcygaacctagaaactcccctttctccagggtttactctgtcagtaaagggatgaatatcc

SEQ ID NO: 815989 - DNA, 565 bp, Homo sapiens
tgtacctcattgcagataaattcaaagatcgtatttatatgaagcagagcctgttcctcactcagctagaaattgsatgggggggtagcggggggaaagagccatcattacctgtttatgaaaccttacgctaactgatagctagaagatctacacttaatattctcacatgaattagagcccttcaggaataccctagcctaatgtcacacccactcccaatctcaggaactttctccattaatacactgcattggtatcgtagggcttgtgtctccctccaatcatccaatgagtcattctgaaatgtgctcacttgaatgagtcctgggctaggccatttctgccagcctggaaaaaaggggaaaaggccatgtaagcaattgtggatgttcaaaggaaactatttacgagacctcttcatctcctgctttgcttctttttacactctattccttagaagatcctaaagtagaacagttcattaaaaggtgagaagtcatgttggtcctagccatggacttgttacaaaacataactagaattatgacttcatttagagtaa

SEQ ID NO: 815990 - DNA, 595 bp, Homo sapiens
ggggaaaaaaattgaataaattatttggcaacagtcaaactgttcagaaaatacttagcattgtaaaaaaatctgtagstaggccaggcgcagtggctcatgcctgtaatcccagcactttgggaggtcgaggcgggcagatcacaaggttgagagatcaagagcatcctggccaacatggtgaaaccccgtttctactaaaaatacaaaaattggctgggcatggtggtgcgtgcctgtagtgccagctacttgggaggctgaggcagcagaaatgcttgaacccgggaggtggagattgcagtgagctgagatcacgtcactgtactccagcctggcgacagagtgagactctgtctcagaaaaaaaaaaaattctgtagctagaactcaataagctttttctgttagtttaagtacatgattgaaaaataccaattttaaagtgaaatattttattagatcttcaataaattgggaattgagaaactgttggagaactggaagttaataacatttatatgaccaactaccataacacaaatagccatttcatgttaaagtttattgattttattatatgcctgacatctgat

SEQ ID NO: 815991 - DNA, 495 bp, Homo sapiens
actaaattagcatccattgaggctttttctsaatttttattatgctgattgccaaaaagtgattttctaattccatctacatttgttagcacagacagtgtgatttccatatggccctattcccagagatagtcatcactagcattcctttttgatagtctgatggggatttttctctacatgctcaggtataggagtgaaaagccactggttggatcgacccagagtaggttcagtaagtgatctttcaaaggagtaaacaagttaattgtcttggcaagagtaggatcgaagagatggattgtggggcgtagctggataaggaaggaagtaaagccagaggcagctgacagattaggaggagatggagagagagaaggactgccgtagtttgaatgctctaccccttcgaatctcacattgaaatttgatccctaatgttggaggtgggacctaatgggaggtgtttgggtcatgagagtggatccttcaaga

SEQ ID NO: 815992 - DNA, 634 bp, Homo sapiens
ggatccctgccaaaaattgaattctcttatttaactatccagataatataagtgagctgagccatgaatcttagataaaccacaacatggactctgacgaaagaaatgttgaacaaggcaaaggaaataaagaggatttcgatgggaatgaccagagcaagcaggttctgggcaatagtggcagtgtggattggacaagcaaagctggtttggccaaatccaagaaagcaaagaagtgtttttttagtgtgcaaaatgaaacaaaacagcaaggagaaaagtcccctgatttccatcctagtgcttctagatcacacctagtaggcatagcggcattaaaacataaccacatctgtctaatcttactgctcatagctattaaatacccagtctcaatcaggaattttagagatggaggcttcaatgctttcttgttcccaatgtttcacaagcaaacgaacggatattgggaggcacggaggggaagagtatgttaaaatccctaagaccagttaaataaagtctcctgaaaatgacagtgaaacagagacagcaccaataaattgattcatgcagtgaataggwcaaggcagattaatacaaagagcatggcagttaacatcctgtggtgcca

SEQ ID NO: 815993 - DNA, 628 bp, Homo sapiens
ttcatctcacagaatccagcttttttgtgctaatttatttgaacagaataagtgtttgtgtatgagtatttatacagaaaacacacgtccatctcatacacaactagaactactgcatatcagatataccatgacaagcaggaaaaacatacgttttattttttcttggatgtattttttcaaaagttccaatgaaatgttttcatccaaacaaataagaatttattgaagtcctagtgtatgcttggtttataacaggatagagattctttatacgttttagctttgagacctgtttcatctttatcaacccctctattcaatctgacctcctgatgttcataagaaaaactcacttcctactcaatgagtaaatcttggccaaatgaacacaattattttaacttttcttttcttcatgtgcatgttcttctcccatttacttctgttcaagaagaaggtgtatcccccacccgccattccaaggctaacgtcttcatctgggaaattctcccccgttccattctcagcctagggcagatgcttctaagygttcttgcttcacagtgctggcagggtctcagtaactcgttcattgactgctaggccaaaagaattacctaacagt

SEQ ID NO: 815994 - DNA, 528 bp, Homo sapiens
accttgcaacaaatggatttaacagatatatacagaacatttcatccaacaaccacaagataaacacttcaaaagttcatggaactttctccaagatagaccctatgataggctataaaacaaacctcaataaatttaagataattgaaattatgtcaatcactctctcagaccatatagggaaaaaaactggaaataaactcaaaaggaaccttcaaaaccatgcaaatacatggacattaaataacctgctcctgaatgagcattgggtaaaacatgaaacaaagatggaaatttaaaaattctttgaactgaaagacaatagtgacacaacctactaaaacctttgagatacagcaaaggcagtgctaagaggaaagttcatagccctaaacacctacytcaataagactgaaagaggacaaactgatattctaaggtcgcacctcaaggaactagagaaacaagaaaatccaaacccaaacccagcagaagaaagaaaataaccaagatcagagcagaagtaaa

SEQ ID NO: 815995 - DNA, 481 bp, Homo sapiens
cccaaacccagcagaagaaagaaaataaccaagatcagagcagaagtaaatgaacttgaaacaaaacaaaacaaacaaaccaaaaaaaacacatacaaaagacaaatgacacaaagctgattctttgaaaagataaataaaattgatagaccaatagcaagattagccaagaaaagaagagagaaaatccaaataacctcaataagaaatgaaacaggagaaattacctctgacaccactgaaatacgaaagaacattcaaggctactgtgaacacctttacgcacataaactagaaaacctagaaaagatggataaattcctggaaaaatacaaccctcctagctkaaatcaggaagaattagataccctgaacagacgaataacaagcagcaagattgaaatagtaattaaaaaattaccgaccaaaaaaaaaaaaaaaaaaagcccaggaccagatggattcacagcagaattctaca

SEQ ID NO: 815996 - DNA, 582 bp, Homo sapiens
gtatttttttttggccccaaaatattgctctttcatctgcactctaaccactctcagttggtacttgttttatgttgtctacttaatgtcataagttgtaatatttttacctaactggcttctgcctgtctctcttactaaaagataagctccaggaagtggctgctctttgaagtttctactcttgttggttttgactttcctcatcacaggatacagttggaatctcacctaggatgtattccagatgatatttcctggaaatattccctgataactgagcttcttactctattcctggcaagtagagctccaggacacagtgtcaccagggagcctggatcatcgcagaggaggggcatgccaagttcccacaatgtagagcaggaaggcaaggaagacctgaagaaaagtgcctaggggtgcatttggactagctctaaattaacaaaccttgtgatgcttccattacraagagctggtgtaagagaattggaaagacatgtagtatagaagaatggaaataacatatagaggtcggaaatatgagactggagtcagagcctggaggtgctagaattt

SEQ ID NO: 815997 - DNA, 615 bp, Homo sapiens
tcttcatacttttgttcccattgcaatggtagtgtctttgaccagagggtagtgtatggtagatgcacctgacagcaacaacttaagcataccctgagaatgactgtatggcagacatactgaatgtgttcagcgttctgagctaaggagtctgggagtggccaacccagaaattcattccttatcagtgaagaacatctgagcccctggtctgtccctcatgtacaggggatcaaggccctttgtcttgggttaaatgaagtttgccaggtggaggtagttagtgggaagatgctaaatgaaaatgctatataaactgcatactgtgcgagggtagtgattctcctgaccagtgtgccgccaccagaccagtgcttctcctgcccagtccactatccctagactctcccctctgtatgtaagcccctggtaaaaccccatgtctcattcaatggctctgagtctcttcttcaaccccttgaacatagtgccatccccattggccttgataggggtttggcacaacaggtaaagacagcttacactgagtcttagctgttccctttaaatgattgaaaggaaagaaaatatggtcwtcaatggttatatttaaat

SEQ ID NO: 815998 - DNA, 652 bp, Homo sapiens
atggtgtgtgttcttcaatccagacatattcccagatatattcctcctctaaccaaaaatgtagcagaaaacgatcttttcatgatagttttactatttgctgaaataggtatgtttggttgccttcttgtatactggcatgaggaaccctgctttaccacagcttgaggtttagcttcaggattatctacagtagtcccaagtagaagcacatactcccggatatccaggagtagatgtctgtggccaacagggcctaaaattgcattactggacacacatgtccgccagctgggttcctgtgtaggatgactaaagagtctgctcgtactcctggcccttggcttcctgaaccattacttcattctactatggtcattgatttaaagattcagaacaccttgagggagagcatctaaaatctgcagaatattatacccttgtggatttctttgcgtgatatatttggtagaaccaatggatgctataatcacgtggctattattttgtttctttccccacaatgtaggaacatggttctgaaatattcccatattaatacaaaaaaygctctcagagcactgagatagccaattgtctatgggcaggaaaggtaaacatacatctagaatacaggaggatcctagttagg

SEQ ID NO: 815999 - DNA, 656 bp, Homo sapiens
gaggactttatttctaatctcttctcttttattccagtacctgaaagtctgtcctgatcttaattgcataagccacatttccaaaactgctgaagctaacattgccatctagaatattaaaaatttgacttcactgtcatcctcagggcctggcttgttccaactccaccagaccaagaggctcttgagatctctcctccccacacaacttaatttagaagcatagtgaggtttaaatgttgccaagctcttgacactctctgagcagccatcccccttctcctttggtgtagagggcaccagctcctttctgccatgcctggtgaggacagtgaacctctctcaatttagggctggagtgaggattaagagcatgtgtggtcacctccaccatgagatggtaggggagtaggtgggcagggcttctggggagaatttgattcctcataaatagaaggaaggtgaagaattttgccccacattttttcctggaagagtttttagtggatatgacactaatgtccttagcttagagctgttgcagtcctctggagatcatgaggacttgagtccaagactgaaaatccaatgtggkgaaggtgaacctggtttcctcatgctgcccccaagctgctgcaccaaccctaatactccaa

SEQ ID NO: 816000 - DNA, 545 bp, Homo sapiens
ttctgttctgtggcccccagagagaaacttgttctctgctaacaagtgtatgcaggcctgatcaatcttaggacccctgggggacactaggcctgtgcaatattatgcagrtaaagtcattcttgcatctgttgaaattttcattttcaaaaaaacacagccaacttcctgaagacttgtacacaggctggtcataccacttgcaagagtcagtcccagtcaagacacagcatggacatgagggtccctgctcagctcctggggctcctgctgctctgactctcaggcaaggaaggagaacactaggaatttactgagccagtgtggtcagtactacctggctattcaggaaagtcctctcataacatggttaatagtgttaatagttttgtttcccatctcaggtgccagatatgacatgcagatgacccagtctccatcctcgctgtcttcctgtctaggtgagagtcaccatcacatgccaggaaagtcaggtagggcattagccatgttttagcctgatacaaagagaagccagggaaagc

SEQ ID NO: 816001 - DNA, 597 bp, Homo sapiens
ctattacttctcgttgctgcctgatgatccagtcaagatgtcaactacatttaacctatgttcctggtaatagatacccaggttgtctctaactcctcatctttagaaataatgatacaaaagcctygtggatatctccttagttgtcttctaagaggtgtgtgtgttttggattgtggggattatttggaaaattacatggagcaaaactgatggttcataagaaaatatttagttgacttgagcagtgccagaattttctttggaaggcttacattgacagatgttaaagctggaaacttttaaatcaaattatacctcttttactctcagaaagagacagctttaataacaaaattgcacaaagatcaaaagattagcatcctgctttagaaatctttaatctccttcttcaagtgaatgaagctttcctgcagagcaaaacaaattatctcacatttaacaatggaagaatatgtgacatatttaaaggccccttcagctgcaagagcctcggcagggcagaacaacagcagaaaggaggatgcagtgggctctgagccacatcttgccagaggaaaggctcaatgaaagctc

SEQ ID NO: 816002 - DNA, 597 bp, Homo sapiens
ctattacttctcgttgctgcctgatgatccagtcaagatgtcaactacatttaacctatgttcctggtaatagatacccaggttgtctctaactcctcatctttagaaataatgatacaaaagccttgtggatatctccttagttgtcttctaagaggtgtgtgtgttttggattgtggggattatttggaaaattacatggagcaaaactgatggttcataagaaaatatttagttgacttgagcagtgccagaattttctttggaaggcttacattgacagatgttaaagctggaaacttttaaatcaaattatacctcttttactctcagaaagagacagctttaataacaaaattgcacaaagatcaaaagattagcatcctgctttagaaatctttaatctccttcttcaagtgaatgaagctttcctgcagagcaaaacaaattatctcacatttaacaatggaagaatatgtgacayatttaaaggccccttcagctgcaagagcctcggcagggcagaacaacagcagaaaggaggatgcagtgggctctgagccacatcttgccagaggaaaggctcaatgaaagctc

SEQ ID NO: 816003 - DNA, 623 bp, Homo sapiens
tgtcaatttattttcttacttgcttgattyctggggaaacaagtcctttcaagcctaggcccttctgagacctcagggatgcaaggcaaaaagagcaaagcagctgcacgtgtatgagactgaattggtcacctaaactgtcattaagttttttgctaagtcattgcttttctctggaaatagtttttcaagatgcaagtatttgatttttaaaacatgtgtggcttttccaaatgcttttcttctaagtcttcttctccacaagtccaagttaggctaattatatccagtaaagtctggtagcccttctctaatagctcctctttccgtacccctagcaacactcagtcataatcccactgattcatcagatgacaaatgcaaaaacttggaaaaatatatattcttcataacaaatgctatatattttaaactgaggccctagactttcatcttctccaatattgtgtctcaactgtgtgaattatataatatggcagcaattgtatttcaatctctccagttaggagcagctcagtgcttgcagtatctttccatttgatttctataacattcctagtggtagaaaattcagttcatttatccaattacatggcttagta

SEQ ID NO: 816004 - DNA, 327 bp, Homo sapiens
agggcaaagaaacatgttttggggtaaaatattttaattttctgccttgttgcataatgttccaccacagtcaggttggaaagtaagtccaaggatatgtagggttaaataaaacccatctgatgagaatttatagtttgtagggcatgactccccagactccttagataggaactgagacaaggaaaaaaaaaatcagagcttagtccttaccttgataaacacaaatgaaaagaaaatattacttgtagayattcaataaattatctgaaatcaatttaagaaaacattgctcagaatcacatgaaattatagaggacagtaatt

SEQ ID NO: 816005 - DNA, 327 bp, Homo sapiens
agggcaaagaaacatgttttggggtaaaatattttaattttctgccttgttgcataatgttccaccacagtcaggttggaaagtaagtccaaggatatgtagggttaaataaaacccatctgatgagaatttatagtttgtagggcatgactccccagactccttagataggaactgagacaaggaaaaaaaaaatcagagcttagtccttaccttgataaacacaaatgaaaagaaaatattacttgtagatattcaataaattatctgaaatcaatttaagaaaacattgytcagaatcacatgaaattatagaggacagtaatt

SEQ ID NO: 816006 - DNA, 576 bp, Homo sapiens
acagatgaagaaactgagttcagagaggttaaattattttcccaagccatgcatgtaacaggcaaccagactaggtccccagcctagccttttacagcttcgctgctaccccagccagtgtttgttttatttccaaacaaatcattcgttatttatttattctttcgattaacctagattgagcatttatgattgtaaagggctctctcacgcactatgcacacataaagacatgcagacaacaatgtttttctctggaagaacaaagtgcacaaatgactcaccaacctaaatatatctgagctaagagtctaattagcagaaaaacctcaatgttacaaaggtaggtaacctgtcttgtgtaatagtgggatgggcctccaggaaaatgacattgtagctctccctccaaggatggatagaatttcaataagggaaaagaagagaggtgactttctaagaaaagggaataaaatgaaacaaggaaacgacttgttttcgaaatctagtatggagttaattgaaggaagtgtttgaatagaagrgaaacattagagataagactaaaattgatgt

SEQ ID NO: 816007 - DNA, 626 bp, Homo sapiens
agactcgtgtttaaatgaggaaactgagcctcagagaggtttaattcacctacggtcacataagtggtaaactgtgaaatcagtattcaaacccaggaagtctgacagcagtatccacacttttargttgtatattgttccttagtaacatacctccatcctgttttcccaacttcaatcccgacactttctatctcccccttacctcactctgggctttagtcacagatttactgtaacttgaaacaagccaggctctttcctaccttcttggcttgacaaatgctgctgcatctgtcggaacacttggcctactctccacctttcccatcatttggactcatccctccagaaagagtccaagcctcactgctcctggggaggcatctaagtcaaatgctgttccttgcttcttcggtttttctacagcatgtgttgttctggtgttttggcctgcaagttacgtgaggcgggaccttgttttattcattttgtactctagaagttagccagcacctagaaaatcatagttactccatctgttaggtagggttccctgggaaccagacattgagaagtgtttgggaacagtacccgggaggaagtgaggttagaactacatggag

SEQ ID NO: 816008 - DNA, 577 bp, Homo sapiens
tcagaggcataatgctaagcaaatgaaagaagccaaacagaaaagactcttttctgttcaattccatgtatagttgtccctcagtatccatagaggattgtttccaggaccccccaaaataccaaaatcaatagatgcttgactcccttatataaaatggcctagtattttcatataacctatggacatcctcccatatactttaaatcatctctagattacttataatacctaatagaatgtaagtgctatgtaaatagctattatactgtattattttcatttatattatttttattgtcaattttattgttttttctctaatattttcaatggacagttggtcaactctgcagatgaagaatctgtggatatgaatggcctactctatatgatattattaaataggcaaagactgtagtgacagaaacaggccagtacttaccacgacctgggagtggcaggagggaattgactgcawatgtgcaagagagaacatttcagggtaatagaaatgttctatgtcctcattgtgatgatggctatgtaactgtgtacattatcttccaagcattca

SEQ ID NO: 816009 - DNA, 571 bp, Homo sapiens
cactccaaaaatctcttcaattgtgcatattttgtctgcagcaaacctctaaagccccaagtgttaggttggccctactaccttctaaattaaaatggccaagaaagaatacaagtatgagaaatggatccagcctcggtggctcccaccagtaatcccagctgaggcaggcagatcgcttgagcccaggagttcaagaccagcctgggcaacgtggctaaaccccatctctactaaaaaatacaaaaattagctgcgtggtggcacgtgcttgtggtcccagctacgtggggggctgaggcaggaggatcacttgagcccagggcgtcaaatctgcagtaggtggtgtacaacaccgctctccagcctcagtgatagagtgagaccctgtctcaaaaaaaaaaaaaaaaaaaaaaaaaaaaaggtgtgagacatgtgttaggcacttcaagaactcccagattccacttctcaagaactgtcatctttggggttagaggtagtaatagaaatggtaatyacaccaagtggcattgtcataggcaatgccaagggatagctgggagggagt

SEQ ID NO: 816010 - DNA, 588 bp, Homo sapiens
tggatccttataaattttaggatttttttttccatttctgtgaagaatgttatggtattttggtagagattgcattaaatctgtagattgctttggctagtatgaacattttaacaatatctattcttttmatccatgaacatgggatttctttctttttttgtgtgtctttaatttcttcactcagtgttttacagttttcaatgaagagatctttcacttctttggttaattcctaggtgttttattttatttgtagctattgtaaatggaattactttgctgatttctttttcagattatttgctgttggcatatagaaatatcactgatttttgtatgttgattttgtatcctgcaaccttgctgaatttatcagctctcttttttttttttttttttttttgtgcgtgtggaggctttaggtgtttccaaatataagatcatattatctgcaaacaaggataatttgacttcttccattacagtttgggtgcctattatttcattctcttgtccagttgctctgtctagctcttccagtactataatgagtaacagtggtgaaagtgggcatccttgtcatat

SEQ ID NO: 816011 - DNA, 612 bp, Homo sapiens
atcaaaatgatcatatagtttttgtcttcattctgttaatgtgatatatcacactgatttgcatttgttgaaccatccttgcatccctgggataaattccatttggtcataataaatgatctttttaatgtgttgttgaattcagtttgctagtattttgttaaattttgcatcaatattcatcagtgatattggcctatagttttctttctttgaagtgtttggttttggtaacagggtaatactggcctcgtagaatgagtttggaaatattccctcctctgtttttcagaatagttttagtaggattggtgttagttcttctttaaatgtttggtggaattcagcactgaagccattgggtcctgggattttctttgccggggtgctttttattatggttttgattttgttacttgttattggtctgttcaggttttggatttattcatagttaaatattgttaggttgtgtgtgtctaggaatttatccrtttattctagattttacaacgtattggcatatagttgctcatagtagccaataatgatcctttgaatttctgtggtatcagttgtaatatctacttttccctctctgattttatttat

SEQ ID NO: 816012 - DNA, 609 bp, Homo sapiens
tttattaaaaattctgtaagaattttacctaacaaatattcaataaacacgtgatattactattctttttaaaaaatcatttctacaacatttattctattaaagtattttggaatttgttcaaatgtatacccaacctcacatatgcagctgacccagatattctataattctttcaatagaatatatcaaagaaaaagagttggaaagaatcgtatagtataggttttgtgttacctagtacctctaaacaaaacttgagatagtctttgctcggcaccctagaaatcaaaacaacttgaaattgaattttacaagtgaaaaagatcctaaagaaaacctggatcttctggcttatatgatacgtgatgtaattacacataaggttcagtgacttctaaaatcatttagctaattattgacatggttgtcactaaaatctagatatgctgacttctatattagtgttccttctaatggaattattgacaaactcaaataayaaaagatttaacatgaaacaatggcaagggcaatggactagtaatcagaaaatgtgcttgtatcttacaatatttggttgagcctatagaatactaatttaacctc

SEQ ID NO: 816013 - DNA, 578 bp, Homo sapiens
cagtctgggcaacacagcaagagactccgtctcaaaaaaaaaagaaagaaagaaagaaagaaattgaagttatgtcaccctgtaagcactgctttatctacattcctcaagttttgatctgttgtattttcattatcattcccttcaaagtattttctaatttcctttttgatttcttctttgtcctattttttatttaggggggtgttaagtttcaaaatatttggtattttcctatcttactgtcattgaattttaattctgttgtggtaagagaacaaactgcataatttcattccttttaagtttgttgttttgttttattgtctatcacatggtctctctttgagaatacactatgtgaacataaaaaaatatgtatttggcagttatttaggtatagtattccaaatgtatccattagatcaaatcggttcaaatcttctatgtctttatagattttttttttagttgttctatcaattactgagaagggggtgttaaaatcttctaccatgatctcaatttttgcttcatgtatgtttaagttgctgttacwcaggcatttgtgattacat

SEQ ID NO: 816014 - DNA, 608 bp, Homo sapiens
taagtaattagactaggatgactaaattaagagtcaggctgggactaagatctctgtttttttgtcttttcactcttaacagtgatttataagcaacyttcaactctataaagatttctttgtataaaaagattctatgccctgcatttaaactgttattttattttattttattttattttgagacagagtcttgctctgtcgcctggttggagtgcagtggtgcaatctcagctcactgcaacctccacctcccaggttcaagcaattctcctgcctcagcctcctgagtagctgcgactacaggtgcatgccaccacacccagctaaattttgtatttttaatagagacagggtttcagcatgttagccaggatggtctcaatctcctgaccttgtgatctgcccaccttggcctcccaaagtgctgggattacagcgtgaaccactgcgcccggcctaaactggtatctctgttaaatactaatatctaaagaactggctgggcatggtggctcatgcctgtaatttcagcacttttggaggctgaagcatgaggatcgcttgaagccaggagtttgagaccagcatgggaagcaaagcgagac

SEQ ID NO: 816015 - DNA, 568 bp, Homo sapiens
ttttcagaagccaaatgcatttcctaatacatacatataccaacatggattatgcatctcaaagaggcagatacagaatgcagcatttctcaaacctatttaatcataaaacccccatttggaggcaagatcaatgattaacattttgtagcatgtgtgtagtccccaaaaagtagtttgtgaaatgctggtctaatttgattggcagatgctgcttggatgctctccttgaggggaaaaagaaaacacaagccagaaattaagtcagtttcctataaggccatagagacagtcctgactattcaatgcatcccaatccctcaacagatcaacttaagcaatttaagtgttagtagcaacaaaatagaaatgctgcactttaaaagacctgtaggcatgaccaacttgagagttaattcttgatatcatccacggtttctggcaacacagagggccaggtgggatcctgaaacatgcagagtytatttcagtgatgttgtcactaatgggttgccattctgccataggctataaaaccagcatggaagcaatcattgttgcataatgt

SEQ ID NO: 816016 - DNA, 568 bp, Homo sapiens
ttttcagaagccaaatgcatttcctaatacatacatataccaacatggattatgcatctcaaagaggcagatacagaatgcagcatttctcaaacctatttaatcataaaacccccatttggaggcaagatcaatgattaacattttgtagcatgtgtgtagtccccaaaaagtagtttgtgaaatgctggtctaatttgattggcagatgctgcttggatgctctccttgaggggaaaaagaaaacacaagccagaaattaagtcagtttcctataaggccatagagacagtcctgactattcaatgcatcccaatccctcaacagatcaacttaagcaatttaagtgttagtagcaacaaaatagaaatgctgcactttaaaagacctgtaggcatgaccaacttgagagttaattcttgatatcatccacggtttctggcaacacagagggccaggtgggatcctgaaacatgcagagtctatttcagtgatgttgtcactaatgggttgccattstgccataggctataaaaccagcatggaagcaatcattgttgcataatgt

SEQ ID NO: 816017 - DNA, 647 bp, Homo sapiens
ctacctacatgtcttttgaatgtttagtattttgcaactttatttattcacatagcaaatatttgttgagtagatactatagtctactccacaccaggccttttgctatggcactagaggagagattgtgttaaaaggtatttgaagtccttttaaagctaaattcttacttgaagaactacttaaaatgcaacttaaatgtaaaataatctaaaaaatgttaatatagagtttgcatggggggtataattttcctaaatattaagtgcacatttttttatccctattagagacaagagtaataattaacccttatatgataccatgtgccaggaattattctaagtgctttatctgcattaatttattccgacaactgtttgaggtagatattattgctatcctcaatttaaaattaggtaatcgggagtcagagagtttagataatttgtccggggtcatccagctaatatatggcaaagcccagtttcaaacccgggcaattttgcatagggcttgggcttttaatcacaacagcatcatgatggccactataayataaggccagtagagaagtcagtggcagtcaacagaatctccgcagtggttagaggttctgaccacatcaattccatggtaaaagatct

SEQ ID NO: 816018 - DNA, 515 bp, Homo sapiens
ctcagaaataagactgcacgtctatgatcatctgatcttcaacaaacctgatgaaaacaagcaatggggaaaggattccctatttaataaatggtggaaaaactgactagccatatacagaaaattgaaactggaccccttctttacaccacacataaaaattaattcaagatggattaaagacttaaatgtaaaacccaaaactataaaaaccctagaagaaaatctaggcaatacctttcaggatataggcatgggcaaagattttatgatgaaaacaccagaagcaattgcaacaaaagcaaaaattgacaaatgggatctaattaaaaaaaagagtgtctgcacagcaaaagaaaccatcatcagagtgaacagacaacctacagaataggagaaagtttttgtgatctaaccatytgataaatgtctaatatccagaatctacaaggaacttaaacaaatttacaaggaaaaaaacattaaaaagtggacaaaggacatgaatagacact

SEQ ID NO: 816019 - DNA, 519 bp, Homo sapiens
gctcaatgaggtataggctacaattttggggaagtacattctttcctgcatataaagtcagagatggcccagcgcagtggctcacgcctgtaatcccagcactttggraggccgaggcggatggattacctgaggtcaggagttcaggaccagcctggccaacatggtgaaaccctgtctctactaaaaatacaaaaaaatagctgggagtggtggcgcatgcctataatcccagctacttgggaagctgaggcaggagaatcgcttgaacccaggaggcagaggttgcggtgagtcaagattacaccactgcactgcagcctgggcaacagactgaggctctgtctcaaaaaaaaagaaatcagagataaggacaaaactctttggccttttatttttgtcatttgtctctttcttttttttttcctttgctgatcatgaatatgatgcctagaaatgcagtaccacatcttacaaccgtaagaacggcagcaaaacactgatgaggctcaggacata

SEQ ID NO: 816020 - DNA, 638 bp, Homo sapiens
caaatcacatcttaaattgtaatccccataatccccatgtgtcaaggaagagatcaggtggagataattgaatcatgggggcagtttctcccatgytgttcttgggatggtgagttctcacaagagatctgatggttttataaggggttgttccccctgccttggcacttctccttcctgccgccttgtggagaaggtgccttgttcccctcttcaccttctgccacgattgtaagtttcctgaggcctccccagccatgctgaactgtgagtcaattaaatctctttcctttataaattacccagtctcaggcagttctttatagcagtataaaaacagacacatatagcatccaaagagaaaaagaagaagtcaaagtatctctcttcactgactatatgatcctacatataggaaaatctgaagactgtcaaaaggctgctagaactgatagataaaacaactttagtaaggttttagaatacaaaatcaatatgtaaaaatcagtagcattcctatacaccaataatgtgcaagctgagagtcaaatcaggaacacaatctcatttacaatagccacaaagaaaatgaaatacttaggaaaatacagctaaccaaggagatgagatatctctat

SEQ ID NO: 816021 - DNA, 594 bp, Homo sapiens
tgtctttgtgtttaacaaaaagtttgaaaataaaaaatagagaaaaatttatagaaaaagcacaaaatatttttgtacagctgtacagtttgtgtttcaaactgttaacaaaataatcaaaaagttaaaaaattaaatagtttataaagtaaaaggttacgtaagctaaggttgatttattattgaagaaaaatgattttaaaacaaattcagtatagcctaagtgtacagtgtttatagtctacagtagtgtagagtaatgtcctaggccttctcattcactcaccactcactcactgacttacccagagcagcttccattcctgaaagctccattcatggtaaatgccctaaacaagtataccactttttatcttttatactgtatttttactatatctttctgtgtttctatataaaatattgttatattacaattgtatatggtattcagtacagtaactatataagtttgttatataggagcaatagcaatrgcaatatgctatagtctgtatagtctatggtatatagcctggaagagcagtaggctataccatctaggtttgtgtaagtacacgctccaatgtttgc

SEQ ID NO: 816022 - DNA, 572 bp, Homo sapiens
gtttggttttctgttcctgtgttagtttactgagaatgattgttctagtttcatccatatccctgcaaaggacatgaactcatccttttttatggctgcatagtattccatagtgaatatgtgccacattttctttatccagtctatcactgatgggtatttgggttggttccaagtctttactattgtgaacagtgttgcaataaacatacgtgtgcatgtgtgtttgcagtagaatgatttataatcctttgggtatatactcagtaatgggattgctgggtcaaatggtatttctggttctagatccttgaggaattgccacactgtcttccacaatcattgaactaatttatactcccaccaacagtgtaaaagcattcctatttctccacatcctctccagcatctgttgtttcctgactttttaatgattgccgatctaactagcatgagatggtattgtgtcyagaattggtgggtgaccggagctggttgccaatgctggctcgggcagcctgcttttattctcttatctggccccacccacatcctgctgattggtagagcca

SEQ ID NO: 816023 - DNA, 572 bp, Homo sapiens
gtttggttttctgttcctgtgttagtttactgagaatgattgttctagtttcatccatatccctgcaaaggacatgaactcatccttttttatggctgcatagtattccatagtgaatatgtgccacattttctttatccagtctatcactgatgggtatttgggttggttccaagtctttactattgtgaacagtgttgcaataaacatacgtgtgcatgtgtgtttgcagtagaatgatttataatcctttgggtatatactcagtaatgggattgctgggtcaaatggtatttctggttctagatccttgaggaattgccacactgtcttccacaatcattgaactaatttatactcccaccaacagtgtaaaagcattcctatttctccacatcctctccagcatctgttgtttcctgactttttaatgattgccgatctaactagcatgagatggtattgtgtccrgaattggtgggtgaccggagctggttgccaatgctggctcgggcagcctgcttttattctcttatctggccccacccacatcctgctgattggtagagcca

SEQ ID NO: 816024 - DNA, 590 bp, Homo sapiens
tagctgggattaaaggcacctgccaacccgcccagctcatttttgtatttttagtagagatggggtttcaccatgttggcgaggctcgtctcgaactcctgacctcaagtgatctgcacacytcggcctcccaaagtgctgagattacaggcgtaagccaccgcgcctggcctataattccaattttagcagtatatcttgctaatcaaccaaaaggaacacttaagtgcttatattttatatttactgttagtcatttagaaatgatacaatttgaattatagatgtaattgacaaatttgtactttcattgacctgattggttaagatacttaatcatatgataccacttttcctctttaaacggtaataaccattcattgcaaattactaatatactgacttactcatagttttcactagtcagcactgaatcatactgcatgtgtattttgttctcagcatggaaaagtacatgtcaaatagtaaaccctagtatgccaatcatttagtaacttcaagattactaattaccataatgttgaagtgctaagattatcagggtataatgcattcattatgttaatgat

SEQ ID NO: 816025 - DNA, 637 bp, Homo sapiens
gcagtgagccaagatcacgccactgcactccagcctggcgacagaacgagactctgtctcaaaaaaaaaaaaaaaaaaaaaaaragagattctaaaagtaaacaggctccttctcactgactcctctatagtattttatttgtgtggaggaacatttttttgctgcctcagtaggaagaagccatattttgagacactttggtttgatggacagagctgtacccgggatcagatggacaagggcttgaatcgtggctttgcctcctgttacctgggggacttcaagggagtggttcaaggttccaagctaatgtttctctattcacagaatggagctagtaaccgcaatgctactatgtccagcacacgttgagaatttggtctgttttagttaacactaagggaactttggatgtaagttgactcatttgtaaaaggaggaactgggaaatatacagagcatgtgcaacccccggccctccgctgttcaatgaaggcaatgccttccagcccagctgaggggcggcctcattatctttctctgcacagcagccagagctggcagcaagaccaaacccactggatgacctgaaaagaacttgcagttctcacattctgtggggttgctacgaggcta

SEQ ID NO: 816026 - DNA, 618 bp, Homo sapiens
cttagcagtgattcaccaggcccttgctctcagtttattgcgtagaagacrtaagtattacaaggtgaagactttcagaggataaatgacacacaagtaggccagtaacagggtcccaggatcttgtctaccctagaacaagactcgatccagttggaccaatgcttattgagtgtccactgtctgattgtcatagtataggctgtgataacattgcaagaaagaaggtaccatcatctgtgctcttgatgagctcacagcttggtggaaaaccaagttgtgaaacaaatgtgcactgttgaaggactgagggccatgagagaggaatgtatgtgatacagtgaagcccagcaagggacaggccagctcactgccatgttcaaagaaggctttctttgcgaagaaggggatattgaagccaactggaaggatgagtgggtattttccaagcagacaaaatagaggagggcattctattccaaaggaatagcatatacagcatgtggaggtgtggaccagttgggtttgctcaggtcttaccagactctggagtgaaaatgctccttccccacacgtggacagtcactcagctacaaagtgcttatgcaagtgttctct

SEQ ID NO: 816027 - DNA, 621 bp, Homo sapiens
attctgttcccactgggaaaggtgtttagaaaagggaatatgggcctggtgcagtggctcatgcctgtaatcccagcactttgggaggcagaggtgggyggatcaccttaagtcaggagttccagaccagcccagccaacatggtgaaaccccatctctactaagaatacaaaaattagctgggcatggtggtgggcgcctgtagtcccagctactcgggaggctgaggcaggagaatcgattgaacccaggaggtggagattgtggtgagctgagatcgtgccactgcattccagcctgggcaacagagcgagactctatctcaaaaaaaaaaaggaaagggaagatgatgcagttctgaccagggaggcctgagatgtacctgccgggaggattctggaacatccaccatgcttcttaaaagcgacacaagaaagagactctttttcataggcatgagggtatggcccggggcaccagggtggctcactgataacgtgaaggaacagtatgagaacaaaagtccatccttgagaacaagagtcagaaggacacaaaacatttagatccttgagtctgacattgagcctctgatttactcggccctgtgattgccctagc

SEQ ID NO: 816028 - DNA, 475 bp, Homo sapiens
gtgcaaaatcaaacaaccactatgggaaactttttgacagtttcttatttagacatacacttaccccatgacccaacaaattaactcctaggtattttcccaaagaaaagatctacttctcartttatccatccatccattcatcatctatctatctagccccacaaaaagacttaaataaaaatttcttgcagcaatttatgcataatttctgaaaactgcaaacatttccgattttctttttcttttttctttttcttttctctctctctctttttttttttttttttttttttttttttttttgagataaagtcttactctgtcacccaggctggagtgcagtgacgtgatcttggctcactgcaacctccacctcctgggttcaagcgattctcgtgcctcagcctccccagtagctgggcgtacaggcccacaccaccacacccagctttttaaaaaaaattatttttac

SEQ ID NO: 816029 - DNA, 565 bp, Homo sapiens
tgcaccttctgtacatgtaccccagaacttaaagtataataataataaaaaaagaattattcattcaaccaaaatagtgccattcattctaagtactagggatggagtgaattatttacaaaacagataaaattcctgccctcaaggggcttatattctggtgccagaggttgggtaaggaacatataagcaagcatagcagtagcaatgagggctgttaaaaaataaagcaggatgagggtatagagatccacctgtgttattctgggtaggatggtcagagaaggaagtggtaatatttgagcaaggccgaaatgtagtgaaggggagagccatgttaatatctaggggaaaagctttccagttgagggaatagcaagtgcaaaggccctgaggagagaatatgcttgacctacacagaacagcaaaggatggaagtaccattgtgggtaaggggcaggagggtggagaggcagcagcagaagcctagatcakatgaggttttgcaaaccatagtcaggattgtgaatttcattctaacagggatgggaagcccttgtagagt

SEQ ID NO: 816030 - DNA, 573 bp, Homo sapiens
gaggcaggagaatcaactgaacccaggaggctgaggttgcaatgagccgaggtcgcgccattgcactccagcctgggcaaaaagagcraaactcagtctcaaaaaaaaaaaaaaaagtaaagagaaaaaagaaaagaaatggagtatgttaaaaccttattcaacaaatgttacagctaaaaagcttccaacaacaaatattccaaacctagattgtttcacggacaaactctatcaagatatttaaaaaaggaataatgtcatattctacacaaactcttacaaaataaagaggagggtgcccttcccaactcatttatgaagccagctttaccctgagaccaaaatcagacagagatattgcaaaagaagaaaactacagtacaatatccctcttgactacagatacaaaaatcctcatgtcaaaatacaagcaacttaaatccagcaatctataaaaggataatatatcatgacgtggattttatcccagaaatgcaagactggttcaatagtcaataattattccatgtgtaatactacatacatggtgttatggtttgaatatgttac

SEQ ID NO: 816031 - DNA, 573 bp, Homo sapiens
gaggcaggagaatcaactgaacccaggaggctgaggttgcaatgagccgaggtcgcgccattgcactccagcctgggcaaaaagagcgaaactcagtctcaaaaaaaaaaaaaaaagtaaagagaaaaaagaaaagaaatggagtatgttaaaaccttattcaacaaatgttacagctaaaaagcttccaacaacaaatattccaaacctagattgtttcacggacaaactctatcaagatatttaaaaaaggaataatgtcatattctacacaaactcttacaaaataaagaggagggtgcccttcccaactcatttatgaagccagctttaccctgagaccaaaatcagacagagatattgcaaaagaagaaaactacagtacaatatccctcttgactacagatacaaaaatcctcatgtcaaaatacaagcaacttaaatccagcaatctataaaaggataatatatcatgacgtggattttatcccagaaatgcaagactggttcaatagtcaataattattccatgtgtaatactacatasatggtgttatggtttgaatatgttac

SEQ ID NO: 816032 - DNA, 495 bp, Homo sapiens
ttgtactgtaaaaaaaaaaaaaaaaaaaaaaagacatataggctatgaaaaataagatgaaaactgcattgatatattttccaaacacacaaaagaccaaattttaatacccagcctgatcaaaagttttagatgcaaaatcagtattaaaacataacctcctttaataatggctaacagtggctgggcgcagtggctcacgcctgtagtcccaacactttgggaggccaaggcaggcggatgatctgaagtcaggagttcaagaccagcctggccaacatggtgaaactccatctctactaaaaatacaaaaattaggtggacgaggtggcacgcgcctgtagtcccagctactcaggaggctgrggcaggagaatcgcttgaacccaggaagcagaggttgcagggagccaagatcacaccactgcactccagcctgggtgacaagagtgaaacttgtctcaaaaaaaaaagaaaaagaaaaaaaaattgtta

SEQ ID NO: 816033 - DNA, 439 bp, Homo sapiens
tgtgttcataaggtcatatggttttgttaaatttgtaaaagatattttaaccaaaatcatcaaacaactgttgttcttccatttcaaatctccctccattccacttccccagtgttmaatggtgctgaagtgacacaagtattttgagtttctgtctaaaaagaagttgaattgagaataaaccactataaatgtaatttgagcaggcatttttaaacattttaataagatgtgaagaaattacagttcctagtttaagaactgaaaaaaacagataaaattaatagaatatgaagctaaagtcataaacatgaatgacaaaatcagtgattattctgtattcaagaagcaaattataagagagaagttttcaaatcataccaatatcagtgattcattaagaataaataaatttcaaaaaagaaatgaataagcttct

SEQ ID NO: 816034 - DNA, 439 bp, Homo sapiens
tgtgttcataaggtcatatggttttgttaaatttgtaaaagatattttaaccaaaatcatcaaacaactgttgttcttccatttcaaatctccctccattccacttccccagtgttcaatggtgctgaagtgacacaagtattttgagtttctgtctaaaaagaagttgaattgagaataaaccactataaatgtaatttgagcaggcatttttaaacattttaataagatgtgaagaaattacagttcctagtttaagaactgaaaaaaacagataaaattaatagaatatgaagctaaagtcataaacatgaatgacaaaatcagtgattattctgtattcaagaagcaaattataagagagaagttttcaaatcataccaatatcagtrattcattaagaataaataaatttcaaaaaagaaatgaataagcttct

SEQ ID NO: 816035 - DNA, 618 bp, Homo sapiens
cgggtatattggtatatttatagaaaagattttaaaaccatttttaaggccaggcgcagtggctcaggcgtgtaatgccagtgctttgcgaggcygatacaggaggatcatttggggccaggaattggtagccatcccgggcaacatagttagaccctgcctctacccacacacacacacacacacacacaaattttaatttcccaagtgtggtggtgcacctatagtcctagctactcagaaggttgaggtgggaggatcacctgagctcaggtattcggggctgcgatgagccatgaatgtgccactgcactccagccttggtaacagcaagaccctgtctagaaaaaattaaacaaaaataaaaaccatttttatcactgtttgggctaagtgattttatcactcttcattaaataaaccaaggctaagtgatgttattactcttcattaagtaaaccaatctcttatttgtatagttcttataatttacatttcaatttgtttaatgcatggctaagaaactgagtttttcaactttcatttttacaaatttgtattaagtaaacaaagatagtcatgtcatttattgtatatctcccatttgctttcaggaat

SEQ ID NO: 816036 - DNA, 597 bp, Homo sapiens
tctattccttgagagatggaattagatattagttttctattgccacaaatrtagcaatttaaagcaagagtttattatctcccagtttctgtaggtcataagtaaggccataatgtgactgggctctctgctcaaaggtctcaccaagctataatcaaggtgtcagcctggactgtgtttctcatctgaggcttgaggtcctcttccaagatcaagtggttgttggcagaattcatttccttgcaggactgaggtccagtttccttgctggctgtcatccaggaactgctctcagctcctagaggttgcccacattccttactacatacctgcgtccatctttaagccagcaatggcctatatgcttcaactctctgactttctcttctgcaaccagccaagaaaattctttgcttttaaaaggctcatctgattagggcaggtccacctggataattaggtcaactgtgccataaaacgtaacctagtcaaggtagtagatacatcaaatttacagtaacagggtgtgtacagtgggggtaagtcttggggaccattttagaattctgcctactacaactgtcctaaagagactca

SEQ ID NO: 816037 - DNA, 662 bp, Homo sapiens
ggctttttaaaaataattttgaaatatgcttttacatctyttccgacaactttgtatggtaaatactgttcgttgtttagaggagcaacttggcttgagtgccttacctaaagtcacagagttaatcagtggtagatgaaggctttgaactcaagttttctgatgttaggtcctgattcttttgtgtaaatatcacaatggtcctcaaatgaaagagttaaacacatgatctgtgtaattctttctgtcactaagaagtctgttatcaaatgtaccaatcttagggatagtgctaaaggaattgggtgttagactgccatcactccctgagataagacaaagagtagacaacaaagcctcatttataccacatccttggttaggatacctccagcctaaatgagagagctgggggactcaatcacaatggtgaggccaagagtggattcaaatctgctttctggaaagtatttttgagagatacaaagtctccattcctctatggccattccccctggataggcaccaaaatctggggatgaaatgaacatgcaatctactgagttggaaagtctgcttaaattttggaggctataggtctatgcaagtcaagttgggtttttccgattttctcagatccttctgcacccaagttttgtttt

SEQ ID NO: 816038 - DNA, 645 bp, Homo sapiens
ggcaattaccaaatgtttaataagcaactgttatatgtggttcattcatttactattcaaatgcttattgagcacatacaccagtacaggcagtatcccatagttaggttgaaggmaagcaaatataaagtgaagaagtcctgtcctcaaaaccttttaagtttgtttgagtctattttttcagtctaccaactggagaccaatagcctgaatggtgtctaattactaccacacccaagtcctccaaggagaactagatgcattcttaggcctgtccagtgggtcagttttaataaccttcaatttaaagagaaggaaaagatatgcaaaaaagtaaaatcttctcatctgtactccggtctttgggctgaaatgtcaagggattgttaatgctgcctcatttaatgattagaaatctaattacctggaatggagggctgcattaggaaagtctgggagcagaaagaatctttcctatcataaagtgctgccacccctcttcctggggatcatcagtgctgattttttgtcatgtgagggtcaaacgtgttgagatgacatagcatgtttcatttaggatattcttcatcagtgcattgggcttgatcctgctttagttttcttaatattcttcatgctctgaga

SEQ ID NO: 816039 - DNA, 616 bp, Homo sapiens
aggttgcagtgagccgacatcgtgccactgcactccagcctggcaacagagtgagactccgtctaaaaaaaaaaaaaaaattcatatagaaccaaaaaagatcycaaatagtcaagatattcctaagcaagaataaagcaggaagcatcatgttacccaacttcaaattatattacagggctacaataaccaaaacagaatgatactggtacaaacacagacacatagaccaatggagcagaatagagagccccaaaataatgccacacatctacaacaaagctgacaataacaagccagggtgaaaaggactctctattcaataaatagtgcgggcataaacgtctagcaatatgcagaagattgaaacgggaccccttccttatactatatacaaaactcaactcaaaatggattaaagaattaaatggagaacctaaaactataaaaacctcggaagataacctaggaaatactattctggacatagaaactggcaaagatttcatgacaaagagaccaaaagcaattgcaacaaaagcaaaaattgacaaatgggatctaattaaactaaagaactttgacacagcacaagaaactatcaacataataaaca

SEQ ID NO: 816040 - DNA, 618 bp, Homo sapiens
ggaggggaacaacagacagtggggcctacttgaggtgggaggatgggaggagggaacagatcaggaaaaataactatcaggtaccagtcttagtagatggtgacaaaatcatctgtacaccaawcccctgtgaaacgaagtctacccatataacaaacctgcacatatattcctgaatctaaaataaaagttaaagaaaagaattaggagtatgtggcagtgaagggttaagtcttggttttgctaaggtcattggtgacagtaataattaataataatcatcatcatcatcttagcagttcccattgattgaagcttatgccaggcattatccaagttatgtttcttacgttactttgggcaagtatttttgagcctaatttttcttctctgataaaaccgagctattaataactacctaagtgcctcctccccaggcaaggaccaaatgagataagataggtgagcgtgctttaaaaattgtaaagtgctctacaaatgcagagtgtcatcattttccgttgaaatatcaacctgggaggaagcgagggaaggaggaggttttcattcctctctgtaagcctactgcagcaccctgtgatctcagaagtgctggaa

SEQ ID NO: 816041 - DNA, 633 bp, Homo sapiens
gatgtaccattagtatgtgtcgattaaaaataacaataaaatcaaaaagcaaaaataagtacatggtaagtgtggtgactactagttattattacttatttttattgtaatctataatgtatgtcaaatttccaagataccgttttgtccttaaatgaaaactactgctatagccttaatggaaaaacgtatctttggttatgtggtcattaattcattttttcagggaaaaaacccttaaaactattcatttacaagtgtacataaaacacacatgatgggacagtataaaatgcagatgaaagaagagaaataaggacagtggcataaagtgacaaccctatttaagttaacatgctgagttttttctttagagtacttagcatcattcagaattatacgtttatttgcatgatcacttattcaatgcttcattttactagtccaaaattatcaggggataggaagcattttatttttttattttttattttttttcagcttctaactgatttctttttttttttattatactttaagttttagggtacatgtgcacattgtgcaggttagttacttatgtatacmtgtgccatgctggtgcgctgcacccactaactcgtcgtctagcat

SEQ ID NO: 816042 - DNA, 673 bp, Homo sapiens
cccatactgcactctaatgttaaaccaaccttgcattcctgtagtaaattccacttgatcatggagtgtaattatttttatttgtggctagattctattctcttatctacactcttggcaattttcaagtatatgatacattattattaattatacgtcaccacattgtacaatagatctcctgaacttattgttttgtctaactgaaactatgtaacctttaatcaacatcttcagaatagcacatcctctcactgctccctgcctctggtaaccactattctactctctgcttctaagagtttgactttattttccacctataagtgagatcatactcatacatatatacatacttccagaattccactgtgtatatataacacattttcttcattcatctgttgatggactcttaggttgattctatgtcttggctattgtgaataaagctataatgggcatgggggtgcagatatctctttgacatattgatttcattacctttggacatatactcagaagtggaattgctagttcatatggtagtwctgtttttaattttttctctaatgtttttttctttgtatccttcatattgaatcagtttcattgatctatcttcaagttcactgattcttttgtcatctcagttctactaataactagccca

SEQ ID NO: 816043 - DNA, 639 bp, Homo sapiens
atttgtaggcatatttcaaatcaggtgaatgatccaagaaactttaagccaaggaacttcaaatcytactgatcacttaacgcagcgatgctcagtatttaacgtgcctaagaattacctatggatcttgttaaaattcacattcttgttaaaatacagggatagaacttgaggtgccatgtttcctaaaaaaacttctctgccagtctgagaaccatactttgggtagcaagctcttagtgcatctaaatacttgacaagagcaaagtaaacctttagagaaaggcacctttaggcctcggaaaatgctacacataatctaaggacaatgaacagaatatacataacactcaagtaaacaaggcatcatgaataaaaacctgcaaaaagacacaaaacatttcagataggagaattatcagatcttaaaatgctcacaatgtgtagatgcataaaggacaaacatgagaaagataaatgaaacagaaaaactattaaatgttacatagatttggaaaacaaccaaacagaatttctaacatgaaaaataaaataataaagctcagacaggtctggctgcctattagacaaagacagcaaagtggaagacagaaggaattatataaaatatatacagaa

SEQ ID NO: 816044 - DNA, 609 bp, Homo sapiens
cttgaattttctcctcttcttttccctctagtttctgcttttctcccttaaatcctcttcattccttgccttaggggagtttcccaagacaacaccttgagatgcaagagtttaggagttttaaatttcaaaagcccaaacattgggtagaggcttaaagtttaagacacagataatagaatggttagaatatgcagagtccatctctgtattctctaatcaagcaaacatctcagattgcaagagggagaagatattctcagagaatgaggttagatactgctgtttcccatgaggcatcctcagctttcaatcaagttggggagtgaaagtcagtaaaccagtggctgagcaaacctccgccccgacctttctcacagggccacagatgaatgggagagccagccgagaaatctaaagtgcctcgcatccccagcagtttgctaaaggaggtagtggctggacaggttaagacaccctcccagccccccagcctcctgcagtactcagggaaccatyaggcaccttattctgcagccaccagtggggcagtgttgccaagagggtaccaggaggagaatcctgcagccttgagctgtgcaactgata

SEQ ID NO: 816045 - DNA, 466 bp, Homo sapiens
ttgttgaccctaccctttttccaaatatttataaattttaattattattctactaaataatctggcaaaaagaaattgcctctcagaaccacccccgccccgcaataccgaagagtttattatcaccagtagtcataattgcacagcgttgttaaggttgcttaagcagtaacacatttttcagcaattttagtgcagatattcaaatatgctacattttaacaaaaagcaaatttagactttagatctaaacacacttttaatacataatgtgactgtaatggctttaaaagtttacggaaaagacaattgatgattcccacactgataccgatttccaatttgtacttaaaattcaggtaaacacagcaaatgcagagacagacgaaccaattctcaaactgattttacacagaaaatcatttcaagcactaaacaatwaataaacctacatgaaatcaacata

SEQ ID NO: 816046 - DNA, 576 bp, Homo sapiens
ggactttccacaaagggccttggtataaacatggaggagtgtttccaacctggcttttgtctggtacctaaagattaaagataatggaggkgatggagtctaaatatgtgtttcattctgtttaataggcattgtagactcagacagatttgagttttaatctaggcactgctacttattggttatttaattataggaaagttacttaacttttctgagtcttggattcatcatcagtaaactgaatgtaaggttttttttaggattaaatgagataatatggataaaatgcctagcatggtaccagacattcattaggtgcccaaactagtattcaagtttgtttccccttcatttactgtgcttttccagtttgtttactcaacagaatattgagcacttcctgtgtatcagtcactgtgttggggacatcagctggaggagaatgtgctccttgctcctagtgtgatgagttagttcattgttgaagctaatgttctgtgagcagtgatggtggcatgcgcagaggtgaggcatcctgttcaaactcaggagtcagggaagactgcctaggtc

SEQ ID NO: 816047 - DNA, 511 bp, Homo sapiens
aatatgtggaggaagcaatcagtgccagttctagggctagcccttaagtggcctggcagtgcccacttcctgcctgtgggagaccagccaccaggtaagaagtataactactcagaaatcatsatgtgagaactccaggctctgttaagaggcctggaggatgagatgtcacgtggagagatagaaagaagccaagcagcaccaaaatgcccatgtgtaaggagatcctacgctccaactatagagaccaaccatccagtaaaattctccctgaattcttgacctacaacattttaaataaaacaataaataaaaaattaataaataaaataatgaatttttattttaagcatctaggctctaggatggcttgttaagaaaaaatagattatcagaacaattgtccatatcatataaatctgaagttctatggactaacaaaaaagcttgaattttgtgatttacttttgagtttcaatagtttgatttctcagtaacaaaatgaatctgg

SEQ ID NO: 816048 - DNA, 630 bp, Homo sapiens
cagaaagagaatggagaagaagctggaatgaggaaagccaggagagaccctattaaaagaagtccacgtgagatagtgaaaaaatggtaatatttcaaggtatggggtacctggagggaagamgtgtttatatcactcccataacaactgtggggatgtgaaaagagaaaaaataattagtcaaaagtcctttatgtttatttcacctctgtagtttactctcagtgttgctttcaattaattgttaaccttgttaactgttaactcactttcctcatctctaaaatgggaaaaataatatttgataaattaatgtgataaaatatgtaatgatgtatgaactcaccataagttaaatgaatgataattaggttacctaaaagagtgaatgaatgaatgagtgaaatacccagctccagagtataagcaataagctctgcatatctaaaataccatccaaatgcttcttcagagctgaacttcccaggtaaacatttcagtgtgtgtgtgtatgtgtgtgtgtgtgtgtgtgtgtgttttctcctgataatcaaagtcatgtttaaatattcagtagatggctttagtgccttaagtacttgtctggagattacacctagactggcacaa

SEQ ID NO: 816049 - DNA, 483 bp, Homo sapiens
tgaatgcataaaaggttcttggataaaagctgatggtcagggacatcttgaggctaacagaagagacaccatcaatcgtcttttatgagaaatctgcatttcttatgtrgctcttggaattagaagtgaataatacctctgaaaatgaaaggctgtctcttccagctctgcttttttttttttttttttttttttttttgaggcgtggtctcactctgtcaccaggcgggagtgcagcagtacacccttgaatcattgcaacctctgcctcctgggttcaaacggctctcctttccttagcccccaattagatgagactaaaagtgcacacaaacatgcccagctaatttctatatttttagtagagatggggtttcaccattttggccatgatctcttgacttcttgatccccaaacatgggccccccaaagtgctgggattacaggtgtgagtcaccatgcccagcatcagtgaggctttt

SEQ ID NO: 816050 - DNA, 634 bp, Homo sapiens
acacgctttttattttataatcgatgtctattaggacctcacttcctgtcaaggcgatgaagtcttacaaagatccatttgcactgaactctccacgtgcaggaagttacygccttgctctctggacctcctgtctcttttctctgaatcttcattccctcctgttcctctgtctctgaccctgtctccatgtctgtctcttccactgcctggctccttcctcttcttcacttgcttctgacagtcagggtttctgcctcgccccgtctttctctctgtccctccacgtctttgtttttctcatctccgcttctctctccctccgtgtccaggtctcttcctgtccatccatctctcagcctcagcctagctcggtcctccactctgattctctcccatccatctccctgggcctgacagaggctctttgtcgagtctcttcctctgtctgcccccatccgttgttttctctgtatgtcgctggctgcgcatgtgccactgtttctatcattttctctccatctagccattgatctctgattcccctgctccgcttctctgtctctcatccctgtcaccacctccctctctgtcactttcttattctctccctgcctctttgcacgctctttgc

SEQ ID NO: 816051 - DNA, 589 bp, Homo sapiens
cctcttagcacaaaaatttagatccattmctttttcttcccatttcccttttccctctcccagccgcccccaaactcaggcacacaaaagcgaccctgatagatgtagagtgatattacgattgattggcctgccactgatggtgcgtatgtgttttgtcgttagtggggagggtgaaaggggggccgggtaatagaatgatttggcctacaagacagctcctccttgatgaacaatcagacacaaatgtcaataacaattggattgtctgtaagctacagtcacttagggctcccggagcctgtccacagagcctggattgaaaccctcagccttgtgaactccaaatcaggtttggcattgggaatgaaatgccatcagcagtaatagtattatgaggctgttggtcgaagaagtgcaaagggctctgaataatgcttgggctcccatgtgtcacagggtagagaaaggctgcatggaagagaggagatgagagggaaaacaaggtaggggctggtgagctctgaggggcacctatagtgctacaggcatggagttggagcttgcttgctcttatgtttggagattg

SEQ ID NO: 816052 - DNA, 589 bp, Homo sapiens
cctcttagcacaaaaatttagatccattcctttttcttcccatttcccttttccctctcccagccgcccccaaactcaggcacacaaaagygaccctgatagatgtagagtgatattacgattgattggcctgccactgatggtgcgtatgtgttttgtcgttagtggggagggtgaaaggggggccgggtaatagaatgatttggcctacaagacagctcctccttgatgaacaatcagacacaaatgtcaataacaattggattgtctgtaagctacagtcacttagggctcccggagcctgtccacagagcctggattgaaaccctcagccttgtgaactccaaatcaggtttggcattgggaatgaaatgccatcagcagtaatagtattatgaggctgttggtcgaagaagtgcaaagggctctgaataatgcttgggctcccatgtgtcacagggtagagaaaggctgcatggaagagaggagatgagagggaaaacaaggtaggggctggtgagctctgaggggcacctatagtgctacaggcatggagttggagcttgcttgctcttatgtttggagattg

SEQ ID NO: 816053 - DNA, 494 bp, Homo sapiens
gtgtatacccaaaagaactgaaaacaggtactcaaaaaaaatttgtacactaataatcgaagtagcaaaatccacaatagctaaaagaaaggaaacatggccaggtgtggtggctcacacctgtattcccaacactttgggagactgaggtgggaggatcgcttgagcccaggagttcgagaccagcctgagcgacagaatgagaccctgtctctacaaaaactaaaaaattagctgggtacagtggcacacgtctgtggtcccaactacttgggagactgaggtgggaggcttgcacgagcccggaaggtagagggtaaagtgagccgtgatgtcaccactgcactccaagcctgggtgacagagtsagactctatctcaaaaaataaaataataaaataaaataaaataacaaaataacccaagtgtacaacagataaatagacaaacaaatacggcatatccatagaatggaatattagccataaattagt

SEQ ID NO: 816054 - DNA, 736 bp, Homo sapiens
tttatatcacgctggatctgccagggcaacacaggctcttcagagggcctagagatgaactgccaacactttctgaagcccaggacccacttgtgcctgctgaatcctctgggtaaggacaggcctgcctctctgcctgtgctacagtcattcagaagatttgagccattctccaataacaagaacatctggagaacaagagacaggtgggcacccaactccagctacacaacttatggtctgtgtgtgaccttgaatgagttacacagccagtcctcagctgccccatctgcaaaatggtactactaaatgatacctgcctcagagggtggctgggagaacagaaatcatggctataaagcatttaatagcatggctgacccatagtgaacagtaattatgaatactgtaagtatacttccctgctatgaaccaaactccaccccccaacaagtaaccaagagttataaaagggttcaaacttaggctgtcagagaaccaaacacaactggttcctcaatgcaaaataatttatttactggccaccccaaagatacagacagagtggccacattctatggcaaatctaacactgttctggccatgttctgagtctcaagtcaatggaacatttattgggcacctactatgtactaggctaaatagtggagtggttaatagtgttccaggagttagacaacagtttggatcckagcccagccactaactagctata

SEQ ID NO: 816055 - DNA, 582 bp, Homo sapiens
tgttctcaatagcaaagacatggaatcaaaccaggygcttatcagtggtggattggataaagaaaatgtggttcttacaccccatggaatactatgcaatcataaaaaagaacaaaactatgtcctttgcagcaacatggatgcagctgaaggtcattatcttaagcaaattaacataggaacagaaaaccaaataccacacgttctcacttacaagtggaaactaaacgttgggtactcatggacataaagatggcaacaatagacactggagaccaccagagggaggaggaggaaagggaaaagaggggcaggggttgaaaaactaactgctgggtactatgctcactcctgagtgatgggatcacttgcacccatacctcagcatcatgcaatatacccatgtaacaaacctgcacatgtacccctgaatttaaaaataaaagttaaaatttttaaaaaaagaaaactaaaatgagcaataggccaaagagaggactgcatgattccagtagtttttgtcacggagctttaaggcaactaaagctgtgagttaggtagagcaattgaacatctttagtg

SEQ ID NO: 816056 - DNA, 578 bp, Homo sapiens
tttctagtgcaaatgagaaaattatgacctcttgaggtatgtactgctattattctcatcctcattctataggggaaacctgaggtaattaatatgtctaatratgacctcctgaggtatgtactgctattatgctcatcctcattctataggggaaacctgaggtaattaatatgtctaatgatgacctcctgaggtatttactgctattatcctcatcctcattctacaggagaaacccaggtaattattgtgtcagcagtggtgctgaaaaatatgctggtctttaaaccaggtttatctggctctagagctcacacatgtcgtcactaagtcagtggatcttaaacatgaacatacggaagaaatatctagaaggtttggtaaaacacattgcaaagccccactctcagaatggctggtccagaaggtctgggatggggcctaagaatttgcattttcaacaagtacccacttgctgctgatgctgccgatgggcagtcatacttccagaaccactgcattaagttaaccttgtgccacatgggctacattatatctggcttcttcactaatga

SEQ ID NO: 816057 - DNA, 637 bp, Homo sapiens
ggggattgcaggtggtgctcaattcttcttctttaaaaatttgaatcactttctagggagaattaaaggatggcagaatgaaagaatcgtgcccattgttgtccattcgaaaccatgcaaagtggaacataagtccctttaatctcagatgccaatggagaaatgtacctgcagcaggcttagtgctaacttttccaagcactaaagggtctccttcttttgaggactcacaggtgtatggaaaagtaagaagcctagcactaaggaaagaaccaataaaacaaaacctaaatgttaagtgaaaaatggggaacacccacagcaagtactattggagtttagaaaagggagagagaccttgatagctggataatcaggagagacctcttagaagaagtaggttttgttggttcaaattcatcccagagagtgggaactgtgtgcaaagttttggagctggaaatgccataccactcttactccttatgaacatgtgaagaatcaacccttgtttgaaggtgacatgtcttttgctatccatttatyccccatccttcaatttttattacaagagagaaaatgagggcaggtatcaaccataccaaattattctatgggatatcctgttttccatttt

SEQ ID NO: 816058 - DNA, 606 bp, Homo sapiens
agcccagccccagaagaaaaaggaatcaggaaagctgctgtaactgggaatgggaatgggatgcttcagtctgtgggggccactctccccagcatgggagcatctctaatatcagctccaggggaagacccttatgctgcctaacgctgtgagtagctacctaccctgaacacctatccagtcccagatgctgcactaaatactccaaaaacaccatctcatttaatacctcaatattcctaggaggtgagtgtctttcttatcccattttaccattgaggagcctccagggatggagcaacttgtgcaaggtcacacaactgctcccagaaaggccagctccatctctctagctcctaatgcctctcccttctgcaggggccccgcaggcaagctcgggagcacccagggaaccactgtcccagcgtcaatatccacactgcaacttacactccctctttggtgactttcaacaagagtttaagatggatatttacagaatcacattccmtcttggcttctaacttatgtcatttggcctgatacaaggctcttcactctcttagctgtaattttctcaactttaaaaataaagctggatgtaag

SEQ ID NO: 816059 - DNA, 606 bp, Homo sapiens
agcccagccccagaagaaaaaggaatcaggaaagctgctgtaactgggaatgggaatgggatgcttcagtctgtgggggccactctccccagcatgggagcatctctaatatcagctccaggggaagacccttatgctgcctaacgctgtgagtagctacctaccctgaacacctatccagtcccagatgctgcactaaatactccaaaaacaccatctcatttaatacctcaatattcctaggaggtgagtgtctttcttatcccattttaccattgaggagcctccagggatggagcaacttgtgcaaggtcacacaactgctcccagaaaggccagctccatctctctagctcctaatgcctctcccttctgcaggggccccgcaggcaagctcgggagcacccagggaaccactgtcccagcgtcaatatccacactgcaacttacactccctctttggtgactttcaacaagagtttaagatggatatttacagaatcacattccatcttggcttctaacttatgtcatttggcctgatacaaggstcttcactctcttagctgtaattttctcaactttaaaaataaagctggatgtaag

SEQ ID NO: 816060 - DNA, 502 bp, Homo sapiens
ttaataatgaaagtatgaattccaaatatacagtaagtatatacagaaggcactgttaacataagtaaggtacaagagactataaaaaatgaccagaagcaagagtaarttttgaaaattgaaaatataattataggaattaagatcgtaatggagaagtttaagatcagaattgacatagcagaagagatcactgtgaaatggaggatagatctgaaggatttacccagaaaccatcagagggacaaaaagagataaaaaaatatataaaggagaaattaagatgtgtagaaggtaaagtaaggctagtcaatagataggttttgaagttcaaaggagatcgtggcaagagtggggaaaaaatgatactcagtgagattactgctgaacattttctgcaaataatgggaggaaaaaaatctgacttcctaaatcctttaagctggtctgctaaaaagaatccacttctagatgtgtgacagttaaacctcaacaccaaaga

SEQ ID NO: 816061 - DNA, 546 bp, Homo sapiens
cattagcatgctaaagacactcccaccagctccaagacagtttacagatgctatggcaagatcaggaagttaccytatatggtctaaaaatggagggaccctcagttccgggaattgcccacctctttcccagaaaactcattaataacccactccttatttagcatgtaatcaagaagtaacaagaaatagaagcagctgagtggcccatgccgctgttctgcctgtgaagtagccattctttcttcctttactttcttaataaacttgctttcaatttactctatggattcatcttgaattctttcttgcacgaggtccaggaaccctctcctggggtctggattgggacccctttccggtaacactcatgtggggaatctattccaggtgcttcagatatgcaagtgtaagcatgtgactcaggaacacacttccttccttcagctaggcactggctcagagatgatctcccaggatccaagccaggccgatcagatgacttttctcacagagcttgcaggagcacagtctcttctgctggag

SEQ ID NO: 816062 - DNA, 541 bp, Homo sapiens
ggccaggagagaaatctgtggttccccgtgtgacctgccatctcaacctcaaatcccagagtactttgcacagggagaggctttggcattcttgttgttggaaaagtagcgatttagcaccattagcgagtcacagagaggacagaaaacaaaaccaggacagggttaatggggaggaagtatcttctcacatccactcaccacctatgggatctggtgaccttagaaatgaggcagccacagaacaaaatagccaaacctcaggcagggcaaggaggaagaaggggaaattgggaaaaatcaagtgtattgagcactaaccatgcactggtgctcatttagtcttcacagagtccccgatcaggaatggaggggctgctggaaacttacaatcaaaacaagagcagcctcttctgcttcctaggggagtagcagagttcttctcacrgaactcatggttttgaaacgcaaggcgccagctagccaggatggaagaaggtctctatcagaaaaaacccagacattccgcccaccaccctaa

SEQ ID NO: 816063 - DNA, 604 bp, Homo sapiens
agaagctcgctgatgacatcaccctcagcaaaaggaggcccagaatgaggaagccaatggctgcttgatgccctctacctaaytcctatctttttaagagtccaggcctggggaccaaatgaacgatcaacccattgccacaagagggtattcagactacaggcccgactttgcaagcaaaaatggaagggagcaaagcaaatcaatttatgtacaaagtcttgcacccatggtgacccaacagagcaacagaccatcctttctccaatttgttcatctccatgatgggtggggtggctggctgaaacatcacagtttagcaagacaggcggtggccttacaattaaaatagcttttcaataattatgaaccagtgaacatgggctgggaggatgtgcgtatcaggaggaaggatacagtgtgtcacctgctcttggccgacttggaggactgactcccaggcactgccttttggcggctcctctgtgcttgagggagtggctcctgtccacagatctctgtgcccatcactaggttctgtaagtcacacccaagaaccctggacatctcagtgctgtacaaagggaggacagtcgctcagacc

SEQ ID NO: 816064 - DNA, 560 bp, Homo sapiens
tatcaagtttagtaggcattaattacattcatggtgttgtgcaaccatcaccactattttcaaaactttttcatctctccaaacagaaactttgtacccattaagtagtaagtactcatttcccctcccccactgcacctggtaacctctaacctactttttgtgtctatgaatttgcctattctgtgtaccttatataagtgaaatcaggatatttttccttttgtgtctggcttatttcacttaacaaaagtccatccatattgtagcatgaatcaaaactttattcctttttatggctgaattatattccattgtatggatataccacttttttttttttttttttttaagacggagtttcactctgttgcccaggctggagtgcagtggtgcaaccttggctcactgcaacctccgcctcccaggttcgagcgattytcctgcctcagcctcctgagtatgggattacaggtgctcaccaccatgcccggctaatttttgtatttttagtagagacagggtttcaccatgttggtcaggctggtctcgatctcctg

SEQ ID NO: 816065 - DNA, 656 bp, Homo sapiens
atgtcccaccgccttgctactacaagcataacaatcctttctttgtataacttctgcctccgatctaataaactgcttctaaatagccttcattcattggaaatctgttccacctacgtttgygctaaacactgttttgaaatgtttagcactcagattttccacactcagggtaccccgggtgggaggtaacagttgggcacatacagacttccactgttgactgtggtgtcacaggtggcaaaaactatggactaaacccgaaagctgcaatttcttaaaatatgatcacaactccccagttcagttatatatataggaatgtgcacatgaacctatctgtgtatataatcacacacaaactagggctggcggagttcacaagaaacatccatttctccacatcctacaggtaaagaaaccattctttgtgttttctctggtgccccaccagtaaatgtccaattaacatgccttgagtgaatgaataagtgaatgagtgagtggtcttttcactacagtatacaaatcaactggaaattacttccattaacactctaaccaaataatatccatacaattattcagtcctagctaacggtacacatctctaaattggcacttgggaaacaaaactgatgtgacatcacgtgaat

SEQ ID NO: 816066 - DNA, 314 bp, Homo sapiens
cgtggggtgaatgaacagcacacttacccagtggggtaggctgggagaggacagagagcccagcctccttagctggatcaggacartttaggaaggagggttgcgtccatctgagatgagagttctgagagacatgggctccccaggaagaccccaggcacttgtcattgaaggatgaggaccgaagcacttatcacctgaagcaatcgtgtgagactggggaacttttcgttacacagagggatggcagctctataattaacaggtgtggtgacatctccctgcgtctctgggaagggaatctggtaggagtt

SEQ ID NO: 816067 - DNA, 489 bp, Homo sapiens
aaatagccaagaatgtcactcaagttgacaccaccaggaacaaaaatcagaggcattgctttctggccctagtagaaaacaattccaaacaaaggaaaaagacacactgcaatacagcagggatggatggatgggccacagcctggaggtgagagtgctggagacacctgccctgatgccacagcactgaccactctaagccaggcagagccacagacacgcttctgggggaatgccttccaagccatttctgcgggactccagcgtttataaggaaagcctcaccttttcaactgcaaagacctggagagacaggacacataatcaaaaggagcacataaaagggagagacacatgtgctaaccatagtgtgttatttctacttagagaaaaagaaaaaagagtccacattctagagtaaatgyctcatgattctgtttcaagatgatagtaaaaagctgtttggatccgacacaagcacgttaaggt

SEQ ID NO: 816068 - DNA, 599 bp, Homo sapiens
tcccaatttagaaagcttttcatagcttcagaacaggggtcggcaactgctttctgtaaagggccagggagtaaatattttcagcttygccggccctgtggtctctgttgcaacttcgccactgtagcctcaaagtagccacagacaatatgtaaatagatgtgttctagtctgtcttctagtaaaattttatggatcctgaaattggaattttatataattgtatataaattttattcattttaatcctataagatattcttcttcttttgattttttttttcaaccgcttaccaatgttaaagaccatctttagccctcaggccatacaaagtcgtctgtgggcacccaagtcggaggaagtgtcaccctggggtgatccagagggctttttgcagcaccagcactggatgccttggggagcagaggacacttctgaatctcgaaccttcaaaactttgaaacttaaccgatattttcctgaagtttcctttaacagtgcattatggatttaacatacatgagtatgtctaagccttttttgaacctgtttacattttcaactcggagagcttctgagagtaatcagttacatctgt

SEQ ID NO: 816069 - DNA, 548 bp, Homo sapiens
gttttggtaaccattactttcagttattttgtgatcccccccacaggggaagagtgggtccttttcttcractgcagcatgaagcaggctgtacgcagccccatcacctacctcagctacagagcagatccgatggccttaggggaccaaaagctggggagcggctgggtgttgtacctttgctttctcctttctgctgcaggtgaaccctgtaccacttaagcctgatgtccatggctgttctcagcaacttccaagcattactttcagttattttgtgacctttgatgaggcagctacttctttctcctcccagcctcagataagggatgacacaattcagagaatgagagagtcaaattcttgtggtttgggcttaaaaggagaactagatgaagagttaggttatggggtccccatgctctcaggactggggagatgccccagagaagcaagagaggttgggtttagctgggtcctccagaggggactgtgcatcctgcccaggacctggggaaatggtggtaaaaccagaaaccccaggcagg

SEQ ID NO: 816070 - DNA, 548 bp, Homo sapiens
gttttggtaaccattactttcagttattttgtgatcccccccacaggggaagagtgggtccttttcttcaactgcagcatgaagcargctgtacgcagccccatcacctacctcagctacagagcagatccgatggccttaggggaccaaaagctggggagcggctgggtgttgtacctttgctttctcctttctgctgcaggtgaaccctgtaccacttaagcctgatgtccatggctgttctcagcaacttccaagcattactttcagttattttgtgacctttgatgaggcagctacttctttctcctcccagcctcagataagggatgacacaattcagagaatgagagagtcaaattcttgtggtttgggcttaaaaggagaactagatgaagagttaggttatggggtccccatgctctcaggactggggagatgccccagagaagcaagagaggttgggtttagctgggtcctccagaggggactgtgcatcctgcccaggacctggggaaatggtggtaaaaccagaaaccccaggcagg

SEQ ID NO: 816071 - DNA, 505 bp, Homo sapiens
gtcagaaaccttaggaatctacctgatgttctattttactatggctaagctggcaccgaagccacaaggcagagtccttctcactcttccctctcccttccataaggagaggggtctctccccatggccagcacttccccaagcccgtagcaagttctgcctggctactgctgatactcacgcaagacccagaggcatttcacacaatgctgccaggccacagactctactttcagggcattgggctcccctctggcccaggataggtccagaaatgccatccaagagtgaaggcctggatttagggatcccaagaacccacttagtgccaagctggtatctaagctgcaagatgaagtcccctttactctttcatcaccttttttcaagcaggaggagtctctccctgtagccaccacagctgggaatgtgytaagtcacaactgaagccagcacatctcaaagtctccccaaggcccacagcgtataacacctggctactgct

SEQ ID NO: 816072 - DNA, 599 bp, Homo sapiens
tcccttatgaacttgtgaccctaaaaactacttaagttctctttgcttcagatagctcatctgtaaacatgaggacagaaggatamtaagagccacctcatggtgttgttttaaagattaaacaaattgaaacacagagaacatgagaccagtacctggtacacagcaagtgctcaataaacactggctattattattactcaactctaaaatttctcataaaattaacctacgaggttgcaaacacattaaaaaagaacatggccgggcacggtggctcatgcctgtaatactaacactttgggaggccgaggcgggcagatcatgagatcaggagatcgagaccagcctggctaacatggtgaaaccccgtctctactaaaaatacaaaaaatttgccaggcatggtggcatgtgcctgtagtcccagctactctggaggctgaggcaggagaatcgcctgaacccgggaggcagagcctcccgtgagccgagatcataccactgcactcccgcctgggtgacacggcgagactcttgtctcaaaaaaaaaaaaaaaaaaaaaaaaagaagaagaatataatttggcaagacgtttg

SEQ ID NO: 816073 - DNA, 603 bp, Homo sapiens
tgaaagtaacttgtagacatgatgacgtttgtcttctaaatacacatttcagcgtgtgtgtctttaataaaagggacattgtctaacatagccacagtacaatgataaaagtaagggaattaacatggatacataatctaatataagactttattcaaattttgaaaattttaatccaacatccagtctagagtcatgtattgcatttagttgtcatttctcatcaatttcctttaatttagaacttgcttagtctttgtcttttatcaccttgacatttttcagaagtataggccaattattttgtagtctgtctcttgaatttgaatttgtctggtttcctcatgattatatttggatcatggatttttggcaggaatgccgcaaaagtaatgttctgtccttctcagtgcattttatcaggcacatttctttttgtcccattatgagtgatattaacttggataacttggtaatggtagaccattgtaaagatgctatttttccattrtacttattatgtatcttgtggagagacactttgacactctgtaaattatcagactcacccattaattttaacattgattctttactgaataa

SEQ ID NO: 816074 - DNA, 603 bp, Homo sapiens
cagccatctctgttgaggctgtgacctctgcccaccactgggatactgcatttacccaactgctttagttgtagctgtttttcaccatgggcacctcctactggcctgaagcctgaactgttcaacccagtaaataaaacaacaggaaaataaaattttaagtgcatacctctgaggaatgagataagcttcataagatttctaccattccagccccacaggagagagtaaacctgctcacacacccagcacatcgctactacaaccagcatcagagaaagccatcacacaaagattttctataaccaggaaactcacacagagtctttgccattgaaagtacccaaagccaaaactaggtgacaatcaactataaacattaaagttacatcctcaaggtggggcagcggggagaagaaagtttttaaaaatccctgtccaatcaaaaacaaattcaaaaataattagaagaaacagtctayccaaataagaaggaaactagaaaaataattctggcaatatgaaagaacagagttctataacactcccaaaagatcacactaactctccagcaatggatccaaaccaagatgaaatttttga

SEQ ID NO: 816075 - DNA, 614 bp, Homo sapiens
gcatggtggcgagtgcctgtaatcccagctactccggaggctgagacaggagaatcgcttgaacccaagaggtggaggttgcagtgagcccagaccgcgccactgcagtccagcctgggcgacagagccagactcctcaaaaaaaaaaaagtaaaaatctcaataagttttatatttactccattgaaaacatttttctatattgcgctaaataaactattatttaatttcaccagtttctttttacttttttaatgtgggtactacaaaatttaaattcacctgagtggctcacactgtatttgtattagacaacactaatctgcataattaataaaaaataaacaacaaatgctgagcacttgcagggtgccaggcactgtgctagatactttacataatactcaaatcaatgctgcaattaatggtaaagttttaccagacgcctacataacagattggctccatcaaaccaataaaagatgcagctgggattcaatgtcaggtatttttacgaaataattcaattaagggactgctaacagctaaggctggagcaaatcctatgatggcaygggaaagagaggtcactaataaagcgttcccgagagtag

SEQ ID NO: 816076 - DNA, 586 bp, Homo sapiens
cttagtgatggtcagagcagctgattcttgacatggcggctcaaggttcccaaagtgagtgtcccaagagaaaacagcaaaaatgatgtggccttttctaactcagccaagtcacacagcatcatttctacctcattttatccactgaggcagtcacaaaggcctacccaggctcaatggggggacgcatggactcaacctcttcaaagtatttgtggacatatttttaaattagcacatcaaccctcacatatggttgcttttttgttttgggtattttttttttttttggccaaaaagcatattaaaaggttctaatttcacatcagagaaatgcaaataaaaaccacaatctacccccagaatggctggaatttacaaggcccaacctaccaagtgctgatgaggatgcagagcgactgggactgttgataggagtgtcaatttgtccatccaccrtggaaaactctgcccataattgcaacaattaaacatacacctatacagtccagcaaccttctagatatacaactaatagaaatggatacatatatccaccaaaagataaacaaagacagacaagaat

SEQ ID NO: 816077 - DNA, 361 bp, Homo sapiens
tcaaactcctaggcttaagcgatcctcccactttggcctcccaaagtgctgggattacagtaatgtgtgcatttttatctatgtatattatgcttcaattaaaagttcacttaaaaaataagtcactctcatcaatacagcccctggcaggacaggataaaccaggaactagacctttacaggaacacctattttcccccaagaaaatcactggccacatttatgcagcctctatctcgagagaactctgtgaccccatggccactcctaaaagagacaggccatggaagctccaggcccayaggctgacccatcatcatatcccaaaaggaatgctctcctcctgttcctgccaggaaga

SEQ ID NO: 816078 - DNA, 593 bp, Homo sapiens
gataccccaatctagaaaacagataattcagagccattctggttgaggaggcgccagacggggccatatctctgcctccccttcctgcccagcatgcctgaaaggcttccacgttgtttaacttcttgcccgggctcacaggagcccccttgcgggccaggagagtttctgcagatttcaaagacatctaacttgccatcaagtcctgaaagcacagagtggacacctggggtgcaggaactcgttttagggcctctcctctccttcctgcctttcaacataggggacggtcactcagagtgaccacgatgcaggtcaaagtgcagcctctctgtctctcttagggtgtctctctcaacctacataacatagaataaagagactcagtttctcttctataaaacaggaatgtcctgtccagaccaggtagcctctctgagcctcggtctcctcatctataaaacaggaatgctcactgctctgcccacctcacaaggatgttattggagtgaaaaagtgggatayggacatgaaagtgttttggaaggtgaagtcaggcaggggaaagggcttatcattttgcatatgtgggt

SEQ ID NO: 816079 - DNA, 615 bp, Homo sapiens
  misc_feature 1, 2, 3, 4, 5, 6, 7, 8, 9, 10, 11, 12, 13, 14, 15, 16, 17,18, 19, 20: n = A,T,C or G
nnnnnnnnnnnnnnnnnnnncttaacacagatcagtgcacatctttcttgatctaaatctttcactagctgcaaaacatttcatattgtgaatagaccaatttttcaaccattcctccaccgataagcattcagattacttccagttctgggccactagaaactctgctaattaacatccttgctcttggatacaacccactggtgcttttatttctgtaggatagatgcatgaaagtgagcattgcaggtcaaagagtagacacatttttaattgtaaatgtttacatattttctgtagtgtttgggttaattccagtaaatatatgttacctttataataaagactatgtacataaagctaaaaagtcacagctgtgggccatcttgcatcaaacatggctagagaaggcctgtttactcttattctgcagaaggacatggggcaaggatggctgcggcccccacactcggtttcagacacagtcaacactcatttcccaggtcccgrctctcctctcacttcctggtgcccctgccctttggccactgggatcctggcacacaggtgacagccagctcttctggggctgggcagtccactgggtcatcactg

SEQ ID NO: 816080 - DNA, 627 bp, Homo sapiens
attatcaccactttatacttagaatgaagtactgattgaagacaaggctgtagggtactgtgataggcaggattatggcccccaaagatctcacaccttaaactctgggactgggaatacgatgcggtatcatkcccataaatatgttaccttgcatggtgaaagagactctgcaggtgtaataaagtttgctaatcagccaaccataaaatagagagattatcctggattatctaggtgggcccagtataatcagatgagcccttaaagcagaagaacagggcaaaccagagacgttggatgcccaggaagggtttgatgtgtcattgctggcttgaagacagaggggccacgtgtcaaggaaggggaccccagtcctacgaccatgaggaactgaattctggcaacaactgaatgaatttgggagtggattcttcccccaaagcctccaaaaagaaacacagccctgccgactccttggtttcaatgttgtgagagcctgagcagtggactcagtcacattgtaccataccccttacctacagaactatgagatgataagtgagtgttgttttaagccactgagcctatggtgatttgttatgcagacatagaaaacaaatacag

SEQ ID NO: 816081 - DNA, 601 bp, Homo sapiens
cccagtataatcagatgagcccttaaagcagaagaacagggcaaaccagagacgttggatgcccaggaagggtttgatgtgtcattgctggcttgaagacagaggggccacgtgtcaaggaaggggaccccagtcctacgaccatgaggaactgaattctggcaacaactgaatgaatttgggagtggattcttcccccaaagcctccaaaaagaaacacagccctgccgactccttggtttcaatgttgtgagagcctgagcagtggactcagtcacattgtaccataccccttacctacagaactatgagatgataagtgagtgttgttttaagccactgagcctatggtgatttgttatgcagacatagaaaacaaatacaggtactagggaggggtcattgtcagagaagagatgaaaagcctgaagaattcaaggactgtggggtgggtggttccttctaagggcaatgaccaggtgaaagaaaggacaaaagttcygattcctgagttcttggtctaatgggctccacttgccagtagcagtgaacaacctaagatatcacacagcacctcgtggagaagctggtgtttttctat

SEQ ID NO: 816082 - DNA, 595 bp, Homo sapiens
aaacaacattgcttttaagaaatctatttttctgcaaaataaaaaaaaatggttggtggtcttcattcattagttttaccatgtaccacatacccgtaggcagctggccttacagaaggatgcattaacatattgcagactcaagtgataccatcaatggagagacaacagcttttgaggttagggtgctgatttccagggtacaatgtacgccttgaaccaggagccagtacatggggcctagaaccaaggggtggatgtggaaatgttgcttgtcactgtcacacctaatgatccattcacaatgtttttgcttcctatccctacaactcagggctgtttgggtttaaaggtattagtcttgaaaaaagaatgcttccaacaacagacacaatggtttcaaaaacatggccatttcaaaaacatgatcattttagctccccatagtactgtggttgtaacaaaactactacatcatgcaggcagagaagggtgaagatggaacctaggagtctcctgggacttctcccagtacyttgatgttcagtagtaaaaatgaatggaaactctagccagtggcactgaattttagtgt

SEQ ID NO: 816083 - DNA, 714 bp, Homo sapiens
atttgaactctctgcctttaacctcccctttgttcatagggctcgtcctccagtcactactgtagaggcaggaggggagctcttatatccatagctgcttgattccccctgtattttgtctttctgttaaygcacataagcacatcatagactacataacagcagtgtgaggagttcaatacatgcatgtagacatacatctcaaccaaacttagtgtcagaaaaagcaacttcaaaattcctaattcagtgaaaacaagaagaacatggttggtccaaatgccacgacaagctcaacaatcacaccaggaatagaacctcataaaactcttgtgctaagaagcagttttgtgataatcaaagcatctctcttttcactcaggtctaggtactgaggttaagttagttatacaaggtcacaccaataattaggagtatacctaggagccaaactcaagtcttgtttacatttgtacatttcacaaaactttataaattctccatcattaaatatgtcctggattatctaatctacacacacactgtccagtaagaagaaatttctgcagaaagtctcaacttccagtgagcccactaatctctaaaagacatgtcttacttgatttaatgttaatttctccccacaatgcattctcttcctcttccacgcagttctattttgatggatcctgataagccttgtacctaggaaat

SEQ ID NO: 816084 - DNA, 573 bp, Homo sapiens
cactcaagtcctaaaggtgctgtactctggattaaagaggtagcttggggcaaacagaaaccccaaaagactcatgtttttctttggccttaggaagctcagacctgactttgtaggccaagtttggttatggtatgaggactttacacttagctttatcttaatcctcaattgcctaacataattacttttgtcttatacatatttctgtaagtcattgtttatttttctgaagaacaaggtaaattactttcaccattttttttttattttgaaatagtcaccaaaagttttcaagatattacagagaagtttagtgtgccctttacccagtttcactaaatggttacattttacataaataatcaaaatcaagaaattgacactggtgcaatatgtatatgtgtagttctaggtcatgttctcacatatgtagattcctgtaaccctggaggcaccctgtaatcaagatacacaamtattccatccccacaaagatctttcctgctatctcttcatatcgtacccactcccttcaccccccgtgtattagtccattctcagaccactata

SEQ ID NO: 816085 - DNA, 615 bp, Homo sapiens
cagctgtcccacaaaggctctggaccaaaggagacagacaggtagaaatccagcccatgctctgattggtgcatctgcccagagggccaccttttctcatcactcagaggagccatgaaagctagtgatggccagtgcaatgcctgcatggcatagctgaatttctactgggtcctgactctgcttgtctttgagaaacaggatgcctgcaataaaaagttccctttgtaaccagaccaactgagagtggttagagccaagatagcccaccctcaggcttcattctaatctcatctccttgctaaatgatgctcccaccagtgccatgacaggttgacaatcaccatgacaatgactggaagaagccatcaaaggacaaaaaggaaggcagcccttcagctccaaggcagttcaccacccaattccagaaaatatgggaatattcctcccctggcttttaacatccaactccttcatgagagaaaatcctatattctcacccsttcacccctcacttgttgagaggtcgatttgtgagccaggctcccgctcctccaattccatggccattgaatcagtcccgcactgcttgacactcactttcggctttgtgta

SEQ ID NO: 816086 - DNA, 439 bp, Homo sapiens
tttctattaaagtgtcctatggaaataaaacacctgaactgattctagagtccactggtgggagtaaagactgtctaccagtgggcacagtagctcaygcctgtaatctcagaactttggaaggctgaggtgagaggatcacttgtgccaggtgttcaagacagcaattttcttttcttcttcagtggggtaagtagacaggaaatgaaactcttagaaaggagatactacaacactgcagtttcagtatttttacttcaaaattcctctactacttgtcatcagttaagtgttgatagcctcacagaaagtaactttattataaatctctacttccgatattaaaggaatgaaataggatggcccaatctgaaaagtagctccaactgagacacaacaacacatcctctgagactgcatttattcatttatttattta

SEQ ID NO: 816087 - DNA, 439 bp, Homo sapiens
tttctattaaagtgtcctatggaaataaaacacctgaactgattctagagtccactggtgggagtaaagactgtctaccagtgggcacagtagctcatgcctgtaatctcagaactttggaaggctgaggtgagaggatcacttgtgccaggtgttcaagacagcaattttcttttcttcttcagtggggtaagtagacaggaaatgaaactcttagaaaggagatactacaacactgcagtttcagtatttttacttcaaaattcctctactacttgtcatcagttaagtgttgatagcctcacagaaagtaactttattataaatctctacttccgatattaaaggaatgaaataggatgrcccaatctgaaaagtagctccaactgagacacaacaacacatcctctgagactgcatttattcatttatttattta

SEQ ID NO: 816088 - DNA, 598 bp, Homo sapiens
ggtctccttagaagtcaataaggtagtaatgtgttcatttctaggtcaaaacccatttttaggaataaagttatgagaagctttcattcaagacttagactctgaagaacgcagaaackagagaacttcagtagtaaaacttacataatgtttgcccccttaacttttttttttttttttgagatggagtctcactctgtcacccaggctggagtgcaatggcatgatctcggctcactgcaacttcctcctctcaggttcaagcaattctcctgtctcagcctcctgagtagctgggattacaggtgcacaccaccatgccaggctaattttttgtattttagtagtgacggggtttcaccgtgttgcccaggctggtctcgaactcctgagctcaggcaatccaaccacctcggcctcccaaagtgctaggattacaggtgtgaaccaccacacccggctgctcccttaatttttatatccctctcttgccaacaggttttttttttaaggttattttctttcccttcacaaggctatgtgatgtaatgcaaaggaaaatgagaagcatctgctgaagagttaaacacccatacca

SEQ ID NO: 816089 - DNA, 623 bp, Homo sapiens
aatagtgatatgaattagctttaactaagaaaagggtagtaaagtgaacaatagaaagtattcgttttattttaaatttttagtccataatttttctttacccatttttttttggagaatttctgtytgtttctcttagtatcatcataatcttaatatagcacttttggaacactagattgtgatttagtttcttcactctcttggtaaatatataatgtagtttgaaggtacttcatccattggcacttgttgaaaaattcattctttagaaatggttattttctaaattggtttaacctatggtcagggtgatggagcagcaagggaggtgggactgcatggggccaggggatggagagacttagggacaagatgagtgtgtcatggagaagctgaggaccacaggaaggcattggcaatggacataatgaagaaagaagtaatgctggatgaacaatcctgttgggcttttagctctgacatcagtcataaaaattttgtctcccaaattggttgccaagaacctatagttctttgtttcaacaaagaatgttttctgagcgtgacaattgtgtgcatataattgtatatgataataagtatatatacacacactattt

SEQ ID NO: 816090 - DNA, 623 bp, Homo sapiens
aatagtgatatgaattagctttaactaagaaaagggtagtaaagtgaacaatagaaagtattcgttttattttaaatttttagtccataatttttctttacccatttttttttggagaatttctgtctgtttctcttagtatcatcataatcttaatatagcacttttggaacactagattgtgatttagtttcttcactctcttggtaaatatataatgtagtttgaaggtacttcatccattggcacttgttgaaaaattcattctttagaaatggttattttctaaattggtttaacctatggtcagggtgatggagcagcaagggaggtgggactgcatggggccaggggatggagagacttagggacaagatgagtgtgtcatggagaagctgaggaccacaggaaggcattggcaatggacataatgaagaaagaagtaatgctggatgaacaatcctgttgggcttttagctctgacatcagtcataaaaattttgtctcccaaattggttgccaagaacctatagttctttgtttcaacaaagaatgttttctgagcrtgacaattgtgtgcatataattgtatatgataataagtatatatacacacactattt

SEQ ID NO: 816091 - DNA, 613 bp, Homo sapiens
gaactttttcccaaatgaggtaactttgaagctgggagacagattcacacgttcataaagtgaaacttccagggcataatttcctaaattatttctttcactgccctcttggtagctcagtgtcacggatgagtgagtttacctcacaagtaagcatttagctcccccaaaacagtctcttaaccttagctcaccacgtgattagactcagggtgaatgcacaagattaatgagagccctgagtgaaaacagtctcttgtaaggacagcactaaatcttgaaaggctggtggttattgtttgtggaagctgagccctggactaatcccagaagggatcatggtggtggtgactcctaatctgggtatatctttcgggcttgatcatgtttttctgtgactgccattgtgtgtctgttggaatctatttttaggagccactgcatatccttgtgttttcttgctgtgcctaaatgtagatccttctattctacttttactccatttattttccaratgatataaagaggacatattctcacatctggaagttaatgccttggttctagtttattctccctccaagcacactaaagactttttcatttcctagca

SEQ ID NO: 816092 - DNA, 523 bp, Homo sapiens
tctgcagtaagtatagttgttcatcagggacaaataatgttgcacattaaaatcttgtctccttatgtattgtgttctaatgtctcaagctactgtaacaaatctcaaagtggggtgacacgtttaggcaaacaaagagcctaaaaacgtatgaacagccaatagaaacaggaaattcaaagtcaatgtgcagccttctgtgattcatcagttcaccaggtaagatcttggataaaaaaaaaaatcatcccattgttcacacagtctctagcagaatgtgggtaggcacttaataacattacaatgcagtttgaattcttgaaaccctgcaaagcatttatgagttaaatgttagagcactaggatgcaccattcgatagaacaatagtaaaactggcagaactgtttttcatatgtcaattaagactgmactccggagaccattaaggaaaaggatgctgctattccccgcagttaaaggaaatctattgtgtttcctttggtctagatatataagttctgc

SEQ ID NO: 816093 - DNA, 428 bp, Homo sapiens
ccattgttatgaaaaagaagatgctaataagattcacctaatcacttagaaaatgaatagcttcacctgccttagaaactgcaagaaaaattaaatttttaaaaaaaaatttggacaacacatctctaaattattttttaaagtctcgaaaaaatctaaaaaaacataaaacacccaagatcattctaacaggctatactggtgaaaaccagaataaactcctctttgaatgggattctatttcaaatgacttctccaaactcaagaaaaatcacctatgagaaaaccttaataaacactctaagctaaactccccagggagttacaggatgaaaaggacttggacattttagagccctgttaacctgtgggaaagtgctatagtatgacttygtttatatgcctggtagagaagagagcccccaaag

SEQ ID NO: 816094 - DNA, 593 bp, Homo sapiens
taactctctatctgccaattctaacwgaagttatttacttattagattgtgaactcctcaattcacccatggtgcctagcaccaagtcttgtccatgaaagaaaatgaaagggtatctgaaaatagaactattcaatcaaaagactgctggcattccttttttgaaagcttgcagccaaacacaccacacctcatgtcattgttgctcttggtactggcccaaaaaccaggcaggaccatgtgttcaggtgagcctctgctctgacccaaacaccacactcctcaactcctacgcagacctctccactgtgtgctccaggcccttcattccatggtgaacaactacctatccaacaactgcagcctcttcccagatgcttcctccttctcctgcctagaaatatcactctcctctgaacaaatgcttcccctggagcctccctcctagtattccagagtctgtccacttccctccatcccaccaccatcataccagctcaggctcccatcgtcttcccctgggctgctacagcctccgacaccccctacccaaagcctgctccctctacactgcagagtgtgttgtctttaac

SEQ ID NO: 816095 - DNA, 645 bp, Homo sapiens
gagggcagtggaagagtggaaaactaatacaaaacactattccattctgctacagagcctaagaatacttcataggcaacttggttggatcacgggaagagaaggtaggaagattaactgtgttaatgatgactattcactccagatgtaaagggggacatcaagcaaaattaaaaagggctttgacatacagactaatcatccaggccctcagggcttctggaacatatctagaaataaagcagcttaaaaaaatctctcagatatcagagaaaccactctgaacctccaatgaccaaagaagataacagagaacagaaaattggaagatgaaggtattgtcctctgactagctggttccttatgtggaagaaaaggcattttctgctgactacttatgtctacaaaaggacgtccaggctcttctcacaaaagctcagaaacaatgaagaactgggtagagacaacggtaaaaattcaaaagagggggaggagatcaggaacagatcagaggggccacaggractctgggcagcccccattaaatgtagagttcgtgaaaaagatcatttaagttctcttcaaaaagcgacctcatcgccagagaggggatgaagtaaggaaaagggaacactgaccctgcct

SEQ ID NO: 816096 - DNA, 578 bp, Homo sapiens
gtcctcactctgtttgttacatagttgggacctcacgtccatcattataatcactgccctgcacacctcaactcctttgctcctctcttgcttctttgaactcacttgaacattggtcaaatgcaactctcttacttcatgcctgcaactgtgcagctgagcatggctgccaattagtatcactttaaatttttgataattagcttagtgcagcccagaaatgcttctacattttctaatatatcagttttatgctctcctgagtatttcacaccggattctacttccttaaactgctgacacttagtctttctttttcactctcagctgatgatcctactgcccatatcactaaaaaacaatagcaatgaaaacagaacttcaatgacctcttacccccacatcttcctacctacctgcatctgtgctcatatattctgcctccctacctgttactcaggggtaggctgtggatgcaccctgaccaggtcagccccttctttgatgactcattcttatcccttcttgcttattcaaggacactggtcccacagygcttaactcggtatgctgcatca

SEQ ID NO: 816097 - DNA, 510 bp, Homo sapiens
ttctcccctcctggccactgtccccagctcctggctgagcatrctgctcatggcacctggcctttttggatctccaggaacaacagtccttgtaccccaggtgtgttcagctgattcatgtgaggtgacttaatcagtgacaatgccccattcaggatggccctcctggaagacgccctggggtcaacttaactggtgggagtttctgagcaattctcttatccacaagccacatcctgaaaccccaaatttgttagactggttcagacttctccaagcacagcaaggagagtaaattatgtaaggatgactgacagtcattagttctatcagagaggggtccttcagagatgccatagtagtttatgaggatgctatatctgggcctcagtcatttgaatgggagtgagtttagggttgtgcattgctcctgtggtgcccatggagatttcccttggagcaccgccctgccctggacttggctcctcactggagagggagttacctcct

SEQ ID NO: 816098 - DNA, 481 bp, Homo sapiens
ttaacataaacagtgccccagagacttccccacatctcagctaagccagcraaggagggatttggggtgggctgccttgtctgatgaccccaggccaagctgtctttgaggctcatcatggagccttcctctgactttcattgactgcgtctctttggacatacagcgaccactgtgtttggtgtttggcacctgctggtgagcacagtgggggcaggatccttgctcttctcagccaaggaaatccagccccttctacctcatcacttagctggtctctcgaggcactgtatctcttgatcttttaggtcaacggcttatcttgtgctgggttttaatctgtgagaagcttaaggcctttcataagtagttggggtataaataagcacacatgaaagccatgcttcccctgggttgttatttggatcattgcagcagctctgaaaggaaaggcgtgtggtgattacaggaaatcatgcta

SEQ ID NO: 816099 - DNA, 739 bp, Homo sapiens
tatctgggcctcagtcatttgaatgggagtgagtttagggttgtgcattgctcctgtggtgcccatggagatttcccttggagcaccgccctgccctggacttggctcctcactggagagggagttacctcctctagctccacagatggctacccatggcctgaccaaaggttcactccaagggaggcaccttcagcagggccctgcccctgcccagcttccctccagggcagcctgaggcatggactactaggtctgggcagtgcaggtgataaagggctgccatctggagtgggacagctggatagcagtgacctgcctccctggtttgtggtggtagtgtgcgaacaggcaccttgagtcatcaggggagtattctggctccaaggaaaccctgtaaggacactttgatcccactcagagactgtttcttcaggaatccgtcttgggtctttctccaaggagtctgtttcagtgagggctttgccttgcttaacataaacagtgccccagagacttccccacatctcagctaagccagcgaaggagggatttggggtgggctgccttgtctgatgaccccaggccaagctgtctttgaggctcatcatggagccttcctctgactttcattgactgcgtctctttggacatacagcgaccactgtgtttggtgtttggcacctgctggtgagcacagtgggggcaggatccktgctcttctcagccaaggaaatcc

SEQ ID NO: 816100 - DNA, 481 bp, Homo sapiens
ttaacataaacagtgccccagagacttccccacatctcagctaagccagcgaaggagggatttggggtgggctgccttgtctgatgaccccaggccaagctgtctttgaggctcatcatggagccttcctctgactttcattgactgcgtctctttggacatacagcgaccactgtgtttggtgtttggcacctgctggtgagcacagtgggggcaggatccttgctcttctcagccaaggaaatccagccccttctacctcatcacttagctggtctctcgaggcactgtatctcttgatcttttaggtcaacggcttatcttgtgctgggttttaatctgtgagaagcttaaggcctttcataagtagttggggtataaataagcacacatgaaagccatgcttcccctgggttgttattyggatcattgcagcagctctgaaaggaaaggcgtgtggtgattacaggaaatcatgcta

SEQ ID NO: 816101 - DNA, 519 bp, Homo sapiens
aagtatcgttttcaccatgtcctctttggagacgatatcctatctgcctctcattttacagtgtttgaatatttaagctaattttatataatatctgacgtgtctacctacaaaagtatcctgaattttgctttttttcatattttatcatactttatactgatcaaaaaatagttcatgtgggaaaaggtatctgcctctctgtttacccaaatagatattaatagtgttgatagactcttactacagtcctgtcataatttttttttttaaaacttctcatctttctttgaaatggcaaaacttcttgaatataaagagttgaggatgtagaactctggttataatttcacaacctatttcagtattactctttggaaatacatacaatctcaacaccaaactttgaaacaccatccctccacacaccccaacctccaaaaatwgaaagaaagaaaagaaaaatagtacaatctcttcacagattcagtaaaataatattagcattaaattttggat

SEQ ID NO: 816102 - DNA, 611 bp, Homo sapiens
attggataacgatacaatatgtgccatacttgtaggattttgtcattgtgcaaatagggtttcaggggaaagggcagaacattacccatggtttggtgtgagtgcagctcacaattaggaccatctgctgagtggtcccagagtaagacttttttggaagttggcatgtggggctgcccagcctctgggatcctctggttaaaaaaaattctgaggacactggtggcccagagactatcttgatgtatgtattgggaacccagcagttcagagatggtgaaggatagtgactcttgagggagttcaaagtcaggagagattggattcactttaaaaggctttctaggtcagtgccataaaacaatcaactcatcgttggagtagactgggtttggcaaggactgattttactgccttgggggttgcccaagagttcaaagctactttcctgtatgctgctaacaaagctactgggggcraaagaggctctgaaaattcagtttcaaaatcagaaggatctcagggctaggaggaacttcttttcttctcccttctttctctcctttctttcctactatcctctcttgctccctctttccccttttccttct

SEQ ID NO: 816103 - DNA, 622 bp, Homo sapiens
agtattgctaaagttctcataatttttaatgaggtaattatttggctaccctttaagcattctgttatcttcataagagagtaataaaccaattttttaaaaatccaatttcagagtggttggacaaatggatctcacttgagatgattaccagcaggggagatattatttcaatacaatcaaagactaccaatggaacacatggaaatataccctgcaattcttttaggtcctagtcctaagatgtcaagcaaaatgagccaaagtcttgaagaaaaagaaaagatggattgtgcatggagaacacatatttatttcctaccataaactaggaactgtccatatgtatattaatattgtcaataacattatgaaataggtggggatttttcctgctgctgttaaacagcagagagtctgtcacataactattaatgatccagccagagagcaaataaaaatctgcctattgctaaggctggtggccttctagtttatcataaatgcatcatggtcacaagaagtgttttaaagatggcaaatccctaatcatgacrcagttattattctgctgtcactggaattataaacttagaaaagtagtaaccaggttgacacgcca

SEQ ID NO: 816104 - DNA, 648 bp, Homo sapiens
acaaaaacacaacaatgacaaaaataatttggaattctgtaaagatttttgcctcatctctcccatttattaattaattaaatcacttatttgtatatcaatacgggttcatgtatatgtaktttgtcttttgttggttttttgttgttgttgtttgagacagattctctcattgctggtggtaatgcaatattttgtagctaaatggtactggctttgacctgggaagcacttttcaggttggcttttgtgtccctttgacagaccaccattcttttttaaaaaaaaaaaaattgtggtaaaatatacatacataatatttaatagcttaatcatttctacatgtacagttaagcggtattaaatacattcacattgttgtggaattatccttttgtattttgagcacgcctgtactttctggcactataggatgctcaggttcatcttgtattttttcttgctctagccctagagttagccatttctttaaggcaccctgaattccttagaatggagaatggtatttagaaaccaagatttggcttattttttcattctcttagtgtaaatcacagggcaaaagctttaaattttgatgaagtccaacttaccaatattttccatggaatgtgcttttggttttat

SEQ ID NO: 816105 - DNA, 527 bp, Homo sapiens
tacactgtcatgcccgtctttgagtggtgcctttgttttagccttttttgaaactcacaaaccaatcagcacacactccccattctgagcttgtaaaagccctggacccagccacactgagggagaaaccatctgactttgggtaaggggccaccctcacatctgctctctgctgagagttgttttgtcactcaataaacttcttctctgccctcctcacccttcgattgtcagcctatcctcattcttctttgacatgggacaagagctcaggacccacagaacataggtacaaagaagcctgtaacactgtgaccctctgccctctgccagcagaaggcagccgccccacgtgataggaagcagcggtagggcggagccagccccagagccatgggcyggagcagggcaacagaactgatagagctgttaacatgccgccatctgttgggctgtggatggtgagactgaaagggctattagcatgctgtaacaccccctctagggctttggggttgcaggcatcc

SEQ ID NO: 816106 - DNA, 625 bp, Homo sapiens
agtggacctactttctgttctgaaatgtttcaccaattgactcatcatcagccacttacatatgatgtcggacattttctccctcgatctagactgtgaagcatccccttcccttgcccttccagaacaaatatccctttgatgaaagaaaaaaaccagaaacaaaaccactacttcctcctcaacaaaaacagaacgcccaaaatagcaaggcagtttatgaaaaatatccagctgacactggcttaggtagggatcaatgcagttgtcccagcttaagaggagaaagggaagtttaccttggatggctatttgagggaggcaataatattcacatgttaaccaagaaagttgatcaaaataataaacctcccttgctatttataaagcaagggaagaaaaggaaatgggtaactccatggaaatttccttcctttgtctagttttgcttctggtatatggctaccacactaatttctcgataccaatttaggactatttaatttataggaagtcattttgaagggccccagggagctgcagatggtacctcgggggcccatctgtttaaggatgaaagctttgtgcamaccattacatcactctgacctcctcagaaacttcc

SEQ ID NO: 816107 - DNA, 558 bp, Homo sapiens
ttacacttaaaaactcattggaaatgcccttaaaaatggccaacaaagaaatctgagctagaagtctctgatgcaagaaaacaaccaaatttkatgttcccttgcctctaaggaggcaatttataatgttcaaaacactttatatacattctgtcatttgaccctcaaaaccctggagacatgtctgtcttccatcaggggagcatatatctaacatagctcaacttgaaagcctacaacttgtgaactctcaactatctttgcatagagggaatactgacatagataactctattcagctaagcactacagagcccatcacctcccatctcccagtggggatgctcaggccagatcctaccctggggagttatcgcccatgattttgctttgtggtagttgcagacagctcactatctgcaggcatttagatcttcatacatctcatccaccaggcctttcgtgttactccacaaggactctcccttgaactcactgcatctgctaggattgtctttaatgtttttgcactatcatcctatggaacctcccatttca

SEQ ID NO: 816108 - DNA, 635 bp, Homo sapiens
ccactctggcatatatcagagctgagtctgaacccaggcagcgggatccagagtccactgtctcagtattgctccccttggagaaggctactgagaaaggctttcaacattatgtcattttgcatacttaagaaggaaaaccaaaaatagtatatgtaggtctacgcacagtactgggccaccacagaggggaagaaaaaaaaaacaaaaaaacaccctgttccctcgtctattttcacttttcatgccggctggttaattagctccacagcactcctgcagcactccttttgggaggtacccaggcccagtgatcattaatcttctctcagtcacacctcatgctgtcaccatacaagcgaagtggatccaggataggtgtttagtcatcaagcaccctagtttcctctcctctccgtgggtactggacatttattaactcttgcagcatttgggcctgctgcttctgcagcacagtggcgctggctccggtcattctgcctggcccaatgaarggtgaagtcacgagctagctgtggtggaaggcaacctggcaggattcaccgtcaatctgcatggaatttgggattctacatttccttgccagcacagacttgtccaggtctaccagtcct

SEQ ID NO: 816109 - DNA, 518 bp, Homo sapiens
ttgttgttgcaataaacaattggtggcctaaccacactccagtctataaaacatcagagcccagcccactgtggaagggggaggatagcaaacccctgaccctggagtcggcctctgtatctccaccctgtgcccaccagcaggaacaacagctccagatcagtaaaacctggctgattgcatcttttctcttttgataagcctcccccaaccaccacccaaaataatcaatgacaggactgagaaaacatagcttattagtgaaaggaaagagaacatctgcttgaacactcaaagacgactgagaacaaaattctgtgaaccgcttggtaccatcaatagaatataagatggcctggcctccagacccttcatagagtgtttctttcctgatgacaatccataccgggggtgtctaatcttttggcttccttgggccacattggaagaagaattgtcttgggccacacgtaaaatacactaatgatagcygatgagttttttaaaaaagtcacaaa

SEQ ID NO: 816110 - DNA, 514 bp, Homo sapiens
ttcttttttccaaagctcagctttctgatttatatatttatttctcgataagtaatagcactcaaaagcaccaatttgcttcaggcttggtaaagagtactttcatgaatttaactgacagttctgtaatatagggttataatttacacttgggaaaaattgaggaatttgttttgtctaaattgaatttaaaactacatccacttccagattcacataagtaattctcagttttcaagctcatgattgaatatgtaccttacaccctaagacccattcacttgcaagcaggctgaaatgacctaccaggacactaaaaacctctctatttaggtctaggctgtcaggacatccaggcctggcctgttgttttcagtgtccatggcccttccttccccacagctgaagcctcttaacccttgcccccacactcsccttgctggctcaacccagcgggaatttctaagatagagatttaaatagctctggctaagttgctcttgctgcttaacag

SEQ ID NO: 816111 - DNA, 636 bp, Homo sapiens
agcggcccccagcagggcagcctgtggagataagctcccctgccacctcgttgcaggggctggaggcaagagtgaggaaggttttgatttgcagcatggctagttaaggtggtgatatcagtgaccaggaggaagaaaggccactgactcctagcctgaggctctgggcctttggagacgagcaaatgacctgcagattagtcatggatgtaagagggagctccgggaggtcggagagccagagggagcttagtaaactcttcacactacccaaatggactgaaggctcatagctggcagagattagagcaagcccaagccatgtccatatgcccagggcacacagcctgtgtgtgtgccggtgccagtgttaggaagtaaaagccggaacacccttgcaaatggcccggggcgtgcctcctccccattgcacatagatccagcagcagatggtggaaaccatattggctttaactgatgtttgacaaactatgcaaacaagaagcgacctctaagaagccattctgaaaaattaaagcaaacaaatgccaacaataaaactkaacaatgacctgagtgagtgcacactgtggaggagacaggcttcctgcatggagtccagccaggagacagtac

SEQ ID NO: 816112 - DNA, 636 bp, Homo sapiens
agcggcccccagcagggcagcctgtggagataagctcccctgccacctcgttgcaggggctggaggcaagagtgaggaaggttttgatttgcagcatggctagttaaggtggtgatatcagtgaccaggaggaagaaaggccactgactcctagcctgaggctctgggcctttggagacgagcaaatgacctgcagattagtcatggatgtaagagggagctccgggaggtcggagagccagagggagcttagtaaactcttcacactacccaaatggactgaaggctcatagctggcagagattagagcaagcccaagccatgtccatatgcccagggcacacagcctgtgtgtgtgccggtgccagtgttaggaagtaaaagccggaacacccttgcaaatggcccggggcgtgcctcctccccattgcacatagatccagcagcagatggtggaaaccatattggctttaactgatgtttgacaaactatgcaaacaagaagcgacctctaagaagccattctgaaaaattaaagcaaacaaatgccaacaataaaactgarcaatgacctgagtgagtgcacactgtggaggagacaggcttcctgcatggagtccagccaggagacagtac

SEQ ID NO: 816113 - DNA, 604 bp, Homo sapiens
atgcctgtacatggaaaaagaaacagaaactgtgccaagaggttccaaacaattgcctctggaaagcactgaaaaatcaagacctagaaaaggctagccagaagcccaagtttgattttggaaaccttacagaggtgaggatagctattttgaaattactatggggaggaagcaggcacagaacacagaacaacctgacagaaatggcccaagaatcttaaagtcttgcaagatgtctgtctgcatgaaagcaaaaagaaaaaataaaatattaaataaaaaaaaaatcttagtctgaagtttaagtagggactttaattgactactgactctaaactgtgcggctctaataaatctactaaaagtaatctaacttttaaaagcaccatatgaatagacaatttaggaaagaaatgttaataggcctcaaggaacatgtttttgaagtgagccttgaaaaatccgcaaaatgatgaggttgcattgggcaaactgaagctattatgagaatgttcaggtcaaaaaaattacctgacaaattcatgcamaggagatcacaaggaacacaaatgtgttcgcgggctttaaaaaaatcacattaaca

SEQ ID NO: 816114 - DNA, 604 bp, Homo sapiens
atgcctgtacatggaaaaagaaacagaaactgtgccaagaggttccaaacaattgcctctggaaagcactgaaaaatcaagacctagaaaaggctagccagaagcccaagtttgattttggaaaccttacagaggtgaggatagctattttgaaattactatggggaggaagcaggcacagaacacagaacaacctgacagaaatggcccaagaatcttaaagtcttgcaagatgtctgtctgcatgaaagcaaaaagaaaaaataaaatattaaataaaaaaaaaatcttagtctgaagtttaagtagggactttaattgactactgactctaaactgtgcggctctaataaatctactaaaagtaatctaacttttaaaagcaccatatgaatagacaatttaggaaagaaatgttaataggcctcaaggaacatgtttttgaagtgagccttgaaaaatccgcaaaatgatgaggttgcattgggcaaactgaagctattatgagaatgttcaggtcaaaaaaattacctgacaaattcatgcaaaggagmtcacaaggaacacaaatgtgttcgcgggctttaaaaaaatcacattaaca

SEQ ID NO: 816115 - DNA, 437 bp, Homo sapiens
ccaaagtgctcggatacaggtgcccggcatccaccgcgcccagcatccaaagagagaatcttcttgaggaactcaaaagacttttctcttttggataagcagttcatatttctgcatttattagggattttcacattttacttcattttacactacattttttttttgttcagtggtataacattttcaccaaggcactgaaaattccatttgcattagtgtccaatgtcatatattccctaccatgttgcaaatacagttcatttgtccagctttattgaggtataattcacaaataaaaattgtrtacatttactaggtacaacatgatgttttgctgtccaagcatacctcattttatcgcactacattttattgtacttcacagatactatgttttttacaaattgaaagtttatgcccaccctgtgtcaaac

SEQ ID NO: 816116 - DNA, 437 bp, Homo sapiens
ccaaagtgctcggatacaggtgcccggcatccaccgcgcccagcatccaaagagagaatcttcttgaggaactcaaaagacttttctcttttggataagcagttcatatttctgcatttattagggattttcacattttacttcattttacactacattttttttttgttcagtggtataacattttcaccaaggcactgaaaattccatttgcattagtgtccaatgtcatatattccctaccatgttgcaaatacagttcatttgtccagctttattgaggtataattcacaaataaaaattgtatacatttactaggtacaacatgatgttttgctgtccaagcatacctcattttatcgcactacattttattgtrcttcacagatactatgttttttacaaattgaaagtttatgcccaccctgtgtcaaac

SEQ ID NO: 816117 - DNA, 547 bp, Homo sapiens
gctctaggagacttttctctttctttatagaccaactacataaataataataataaaaatctatagtgcagagaagtcaaaggatgcttccttaacacctttcatatcctagcagctwtactagaggctttcccaatggtaactactgttaatgttcataatgactttgaaatgcttgggaataactagcctggccctatttacaccagatgaaattgagactctgaaaccaaatagcttgttcaggataccatagttagcaacaaagttgctgagacttgaacctcagccagtgaccccctaaaacccatacttcttctatcgtcataccatgctgcctttggtgaaactggagttaggggaaggggaagagaaaccgtggtttctgtgaaacacagaaaacatagtttggggatgttctccagaaggctcagcctgaatccacatcaagtgtctttgaatgcctgtaatttgcgtattgttcttgagcactttctgatttgtcctgctatagcaaaggcagaacagcagcaatatttggtttcag

SEQ ID NO: 816118 - DNA, 590 bp, Homo sapiens
gaagcatatactcacatgagactgctaaaccatgcaattgaaaggccatctccttgggcactgatattttttaaaatttaaaacatcaaatgtaattcaaacttttgcagtggtccaaatcgaagagggcccaaggctattaaagtttatagcagaagtttgatgcatttgtatttgttgctgtgatttgtgtggagcaaagaagagaataaaagatactgcaggggtttcagtttgaggaaactcgatggctccagggaagctctccatccctcagatgtcaacttgcacttactttaccccaaagagaggacccaatctagccatgacaggccttatcaggaattctttgcagccttgaaatagcccagctgtgttggacctgttctagaattaagatttttgacatggcggtcatgtaatatagaacaaagattgttaattttccatgtgaacttggaggaaactgctaggcttttgtgttraatctcaagattctaaggtcaatattcggtgaggtttgtccaagttcctgttttttatttccaccctttagaagtgtggataagaagagtgacagaatattataa

SEQ ID NO: 816119 - DNA, 592 bp, Homo sapiens
aggacatgattttgttcttttatggctgtgtagtattccatggcgtataagtaccacattttctttatctaatccactgctgatgggcacctgggttgattctatgtctttgctattgtcttttcactttcttttttaattattatttcaataggttttgggagaacaagtggtacttgattacatggatgagttctttactggtggtttctgagattttggtgcactcattacctgagcagtgtacactgtaaccaatgtgtggtcttctatcatttgcccccctcccacccttcccctcgagtctccaaagtccatttgtatcattcttatgcctttgtatcctcatagcttagctcccacttataagtgagaacatgtgatgcttggtttttcattcctgagttacttcgcttaggaatagtggtctccgattccatccaggttactgtgaatgtcattatttcattcctttttatggcttartagcagtccatagtgtatatgtgccacattttctttatccactcgttgattgatgggcctttgggctggttccatatttttgcagttgcaaattgtcctgatataa

SEQ ID NO: 816120 - DNA, 528 bp, Homo sapiens
attagcgtgaaagaccatctgatccagcagacttatttgttaatgcaccgacagcagcaacagatgtgctgtttttcatctacaacccgatctgctggctgattcatctgcttccgttttcattttcctgtcattgatttattaatgatgtcttacttatctgtggttcttttatggggtgggcttcctctggcatggtctcaagagagatgtttttgcaccttccccaggcatcaaaaacccagcccccttctccggtgttctttatcaccactccagagattagagactttaatcatttagtaactgaaataacctccgtggcttgcagagtttatggccaatttgtcttcattgcaccgaattcaactgcttttctttgctaaggaatgggccttgcttattatgctccttctttgcaccagagggaatcagtgtgttgtctacagacccaatgcagatagtgggtggctatgrgtggctcaggaccatgaaagtatggctcagagaacacatgtatgtatacca

SEQ ID NO: 816121 - DNA, 560 bp, Homo sapiens
atataatcttgggggttctagggccccaccctctgccaatccctcaccacactactacagctgatactttctggaaagtgtcacctcctggcagaaggccaaccagcacaaaaatagagcattaaaccaccaaagctaaggaccctcatggagtccattgcaccctccaccacttccagcagaacaggcgctggtatccatgactgagagacccacagatggttcacatcataggactctgtgcagtcaacccccagtaccagcctggagctgggcagacttgctgggttggctggaccaagaagcgagacaacaatcattgcagtttggctcacaggaagccacatccatagagaaagggggagagtactacatcaagggaacaccccgtgggacaaaagaatctgaacaacagccctcagccctagaccttccctctgacagagcctacccaaatgaraaggaacaagaaaagcaaccctgataatatgacaaaacaaggctcttcaacatcccccaaaaatcacactagttcaccagcaatggatccaaacaagaag

SEQ ID NO: 816122 - DNA, 606 bp, Homo sapiens
tgctataaaattaggatgattactaaaatgaaatttcaacaaaatgagagctctaatttatctttccctcctttcctcattgtaaataccacctagaagaatatcaagttgttcatggcaaatagaccaggggaacctgtttgcttccatgtatcattcctttcatatgtaaagaaaggcaggaatgaaaggaaaaaacatcagtattcatgaaagttacttgaactacataaaggtttttagattgaatagctgaatttaagccctatagcctaagttttctctttgttaatatctaacatatatgtccacttttaaggacgtttcttttgttccaattctattccatggagttctagggtaggatttttttttttttttttctgttcccatgcacttttaggtcatcccgtgacctaattgattattcaacaatcacatagtcaaaaataggaataaaattttagcctaagacaagcacacctgggaagataaatyagctccaaaataaaataatttatactacagaccaacgaaactattttagaattgtttacaattttaaattatccatatcactgtctcctttatttaaaaaaatatata

SEQ ID NO: 816123 - DNA, 543 bp, Homo sapiens
ttctactaaggtgtagatgatttcgtaaagaacaccaaggcctcattttgtagcatatcttgctggaacccagatatgaggtcatcttggatttcatctgaggaaataaaggggcatttcacaattgataacatcctagattttctagcattcttatctccataaaattctttcataatcattattttgttttacacataaaataaatagggcaaagtttgttttatccatttgaaaaatctatgaaagtgagacacacttattaaataagctagatttgctttacctacataattttaacttgattgattccaggcacttgatcatccacttccaggttttcatacttaatccactcagcatctctgtgaatgcaatgccacctgcaatactttacatgtgaagaaaatgagactcagagagggaagatcatttttcycagtcaataagcctgagcgactattttcacgtagccctgcatctctcagagcctggaccattttcattattctttaatgtcacacaaagtactactcatagtaa

SEQ ID NO: 816124 - DNA, 532 bp, Homo sapiens
caacaaagttgttttttcctgttcaagtaaagtcacttaataaagaatcagagattgatttgactttgactcctgttgcctgaaggaaattacttaaacacacacacacacacacacacacacacacacacacrcacacacaatctttattctattctctaaactatacctagggagaatgttctgtttatagataacggttccctgaaacaaactgcttctttgtaaaataagtgtatagtatatgataccctgtgcaggtgaacataaaatactaagactcatgtacacggatgagtatgtctttatttatagagaagttgggggatttggttttctttttttttcttttcttttttttttttttttaaacagagtctcactctgtcacccgggttagagtgcagtggcctgacctcaactcagtgcaacctctgccccaggggttcaagtgattctcgtgcttcagcctcctgggtagctgggattacaggtacctgccaccacgcctggctaatttttctatttttag

SEQ ID NO: 816125 - DNA, 541 bp, Homo sapiens
ttgtgatcacagagtgagaaattaattatgaatttttaaaacaccaaaagtcttgttcaatttaacatgtctctaaacaaactttcaagagaataagaacatttcattctcaataaaactttgcataactaaaaacccctagagctttctcaaaatgattgacagatttacttctaggcaaaaattggattaaaagatacaataaatacttaggttttaagtcttcattgcccctcacaaatatattcaggaaatcataataaaatctaaaattatgattttcaaattagagctatttcttgaaaaattattagaatttatattacacacttaatttagcatctgtctttttatcctatgttcttttgctagttttcaaatctccaaaactgtatgttatatcactggctgtcagaatgtggtctctggacctgcagcatcaacagcacctggaaacttgttagaaatgcaaattatagggccagatcccagccctactaattcccaaaccyctagaatgaagcccaacaatgtttcacaa

SEQ ID NO: 816126 - DNA, 541 bp, Homo sapiens
ttgtgatcacagagtgagaaattaattatgaatttttaaaacaccaaaagtcttgttcaatttaacatgtctctaaacaaactttcaagagaataagaacatttcattctcaataaaactttgcataactaaaaacccctagagctttctcaaaatgattgacagatttacttctaggcaaaaattggattaaaagatacaataaatacttaggttttaagtcttcattgcccctcacaaatatattcaggaaatcataataaaatctaaaattatgattttcaaattagagctatttcttgaaaaattattagaatttatattacacacttaatttagcatctgtctttttatcctatgttcttttgctagttttcaaatctccaaaactgtatgttatatcactggctgtcagaatgtggtctctggacctgcagcatcaacagcacctggaaacttgttagaaatgcaaattatagggccagatcccagccctactaattcccaaacctcwagaatgaagcccaacaatgtttcacaa

SEQ ID NO: 816127 - DNA, 648 bp, Homo sapiens
agttctgttctaagttatttgagaaaacttcaaactgctttccacagtggctgaaatatttcaccttcccaccaacagtgtataagcattcccttttctttgcagcctcaccaacatctgttgttttttgactttttaataattgccattttgactggtgtgagatgataggttttttttgttttgttttgttttgttttgttttgttttgttttgttttgttttgttttgctgagcggaagctctttagtttaattaggtcccacttgtcaatttttgtctttgttactattgcttttgaggactttgtcataaattttttcccaaggcccatgtccagaatcatgtttcctaggttttcttctaggattcctgtaactagagatcttacatttaaatatttaatctgtcttgggttaatgtgagttaactttgcataaggtaaaaggtagggggtccagttttattcttctgcatatggctaaccagctatcccaacactatttattgaatagggggtcctttccccattacttatttttgtcacctttgtcaaagatcagatggttataggtgtgcaagyttatttctggttcttttttgtgttccatttgtctacatgtctgtttttgtaccagtaccatgata

SEQ ID NO: 816128 - DNA, 429 bp, Homo sapiens
gcattatgactcttgtgggaaaggaatgaaattatggaatcaaagaaaacaaacttcacttaaagagaatggtttctataaggtatgatttttttacttcttatggtaggaccgttttacattattattcaacaacaactgttatcgttaattaatactgctgtgcttcaataaaagatgttgtcaggttctaaatccttgcatttaaggtggaaaatcattgattaaaatgtgtatttggcattttcactttaatggctactaaaatttatttagtttacagacaaatggaaattatttaaattgagaacagcagtaggttatctcttaaatagcatttaaattaagttttgcacagggaaaaggtraattttataactttaggaatgtctcttggtttgagtctctgaattatctgttttgtgctta

SEQ ID NO: 816129 - DNA, 617 bp, Homo sapiens
cttcaacgcactcagaagtggaagatcggggcggatgaaatcaatgaattctctgagtgctctgtttttctctgaattctatttcatttgccaaatggagggtgggggcagctccatctgaccccygggggataactcctgggggaagtctggaagcagccgattcggggtttctgggtgacactggtttttcttatcttcccggttctatttctgtaatagacgcaagtgtcatgcaggaaaaggcttgctgctgcggagccttctgtggatggctgtgacaggccactggaggagagggtttcaggctcagggctgggctggtcctggttgggaatctcagtgttgtgggccatagcgtcctcaccacacttgctaggaggaagctcctgccctctggggcaatgcttgctgatctcctcacctaaatgcaggcactgctaacctgccttggtcacagccctttgttgggggggcagaaaacaactttgtcactcatcacagtggccactgtgaatcgcttgctgcagctcaggacgggggccgtcaccttcagcctggcaaaacagaccttggggtcgtgccggcatctccaggggcagtgttcgcctatgtcc

SEQ ID NO: 816130 - DNA, 517 bp, Homo sapiens
gaaaacgataatttaaaaatagtgtgttatactatttctgtggtttatgtacatatattaactggtctcttggataggaaacatgactagaagtttatcacactaagcactgtaaaataaaggcaagagctaatcatcttctagcaaaaatagtctctatgcaacaattgcaaatgtcaaagctattatttagtagttaattgcctgctacaatacataaaacaaagtacatttactggattgtttttcagtttgcagctgccctcttgacatcccaaataaggaattcccgttaagtaaaacctgcagtgcaattcactcagtggttagtttcaggccaagcctccccctaccattatgcttgttcttccccaccgcccccaaatcctgcagtggcaccrtattattaaaaacactaagtacctgggatttatgcctcagagcaagacatcatttgagtaatttcaaatgatacacagctccttcatgtaaaaaagatgttttgtggtcacaatta

SEQ ID NO: 816131 - DNA, 577 bp, Homo sapiens
acttgtgcaaaatttcctggtgccctatagagagttccagccacctcctgggtcagcccgggctgttktcccaaatccaccagccacccagccgatcagctgggccagtcccacctgcccgccaggagcttgcagccctcggaggggataaataaggcgtgacgcggagaagctaacatcagacctgcccatgaataatacccctacgagggatgcggtccggaagcacggtgccaggggtcgggtagaaaagcttcctggccgggcacaccttgccctaggtgcataggatggatctgagctgagatgtctctcccagagagacttccctcgtcaccgtttctcaccttgttgctctgctccgtcacaatatcctgttgcattttttatagcacttacccctctgacatcatcttgttaatttatttgtgaaaattcacaatcgaactgagttcttgaaggcaagaatcttgccggtcttgctcaaaaatcatcctcagtgtctcccatatagtcaaggctcaatgactacttattgaaaaatgaaaaaaatcaatagctatttgtgggatgaatg

SEQ ID NO: 816132 - DNA, 577 bp, Homo sapiens
acttgtgcaaaatttcctggtgccctatagagagttccagccacctcctgggtcagcccgggctgttttcccaaatccaccagccacccagccgatcagctgggccagtcccacctgcccgccaggagcttgcagccctcggaggggataaataaggcgtgacgcggagaagctaacatcagacctgcccatgaataatacccctacgagggatgcggtccggaagcacggtgccaggggtcgggtagaaaagcttcctggccgggcacaccttgccctaggtgcataggatggatctgagctgagatgtctctcccagagagacttccctcgtcaccgtttctcaccttgttgctctgctccgtcacaatatcctgttgcattttttatagcacttacccctctgacatcatcttgttaatttatttgtgaaaattcacaatcgaactgagttcttgaaggcaagaatcttgccggtcttgctcaaaaatcatcctcagtgtctcccatatagtcaaggctcaatgactacttaytgaaaaatgaaaaaaatcaatagctatttgtgggatgaatg

SEQ ID NO: 816133 - DNA, 330 bp, Homo sapiens
ctcgccaaacagtgagcttcctgagggcaggagctgtgttttgttacttttttggtcactagctcctggcatcggactgcacacagaaatggggctcaatggctgacggattgaattaatgatagtsagaatcccagcaatatagaaataaatgaaggagctggaatgttgggagtccccaaacataaaaagtctttatctccaaaagttacttaccagggttttggactcagaattcatttattaccaaaaaaatcctgtaaacactgatcaccttcctgcaataaattttggcctgtgcacaaaatttaaaggggcaccaaaaacctc

SEQ ID NO: 816134 - DNA, 587 bp, Homo sapiens
ctaagaaggaaaaaaaaaaacttgctcccatgaactggcagcaagaggggccactaatcagccaagaattgctgggtggggagtttcagagtaaactgaaggcacccagcaagctgtggcrtggattattgcagcatcctacaggacagagctgagaaaatggcagtgggtcagcctgggctggggaatgcagagcactcattattgagacgtgcaacttcaaagttaccttttactctaccctagctagttacccaggtataaatcctattgttcttccttcgaaatatattttgccgctagttacccagactggaaacctcagttcccatgagagttcctccccgttttcacccatctttttctaatcagttgtcaagctctaactttcagttattgtcactactgtggccactgttcaagttcagagaccttaaacaaaaatgttgccaaagtcacatgctaataacttgaagatccgttggccccaagccccatccttctcccctaatgacacaagatctcaagttttgtccttggacagtcaagcctcgtgtcagtactggcacagagcgatgcttcataaa

SEQ ID NO: 816135 - DNA, 611 bp, Homo sapiens
tttcgtcaaacaactactgaccactcactaagccatcttctcagcactggaaatctaacattaatatggttcatgaaaatttctactgtcctggaactcatattctaatggaaactccccagtgttcttaaatgccattctgtatacattccattgcttaacactccctcagcatttgaaaattttgttaatatgagtaaacactcatgtctggtattttaaaaaattataaaatgaaatatttctcagatttcttgtaatttaggtcctctccagcaattcgaaatgggccagaaataccaaagattcataaaaaataaactgcaacaataatcagcaaaatcatttgacaatattttgactgatagatctttattgttgcaaatagagaatactggtggttaaaataagtgtttcaaaacttgtctgaaatatatagaatctttgatatgacaataggtttcactttcactgttgaccacttgagtacttttattgtcatatttatgttgttctttttayagaaatatatgttattgttgtacacagcccaaaaaaaggtattaagaaaaaatttcaaagcattcataatctcacaactagaaaataaa

SEQ ID NO: 816136 - DNA, 574 bp, Homo sapiens
tctgcccaccagagaacaactcccctttgactgtaattctcctttacctacccaaatcctataaaacggccccacccctgtctccctttgctgactctcttttcggactcagcccgcctgcacccaggtgaaataaacagccatgttgctcacacaaagcctgtttggtggtctcttcacatggacgcgcatgaaagtatccatttttaaaaattagaaaagtagtaattgaagggatagaaaagtatattccatgcaaatggaaaccaaaaaaattatatgagtaactacattataccaaacaaaacagaaattaagtcaaaaactattaaagacaaagcaggttattatacaatgataaaattatcaagtcatcaatcacatatagcaactggaaatacagaataaacatcctaacttgaaaatctaaaattttgaatgattytaaattcgaaactttatgaccaccaccatgaccatctcactgtagcattttagatttcagatttttggattaggaatgctcagtggttaagtatacagtgaatattctaaaccccacccccccaccaaa

SEQ ID NO: 816137 - DNA, 620 bp, Homo sapiens
cagaagggtgtacaccccctgtgatatggccagtaatatcatcgtctctacctttaaatactaggaacaacatcacagagggtgtctacaccccctgcgatattgggcataatgttatcctctcttcccctggttattaggaacagtatccctggtggggggaggtggagtacattaagaacatcactgggtgggtgtacaccctctgcgatattgggtgtattatcctctgtttcccaggatattaagaacaatatcacaggaggggtgtacagcccctgcgtttttgggagtaatagcatcctctccccctctcgatacaaggaacaatatcccagggtgggtgtacatcccctgcgctactgggcgtaatgtcatcgtctcccaacgtggatattgggaataatgtcacaggggggtgttcaccgtcttcgatattaggagtaatatcatcctctcccctcaggattgtaggcaaaatatcgaaagggttttacaactagtgcgatattggcagtaatatcatcctcctccaacctagatattaggaactttatcacaggtggctgtacacttcttgcsatattgggagtaatatcatcctctcccatcatggatat

SEQ ID NO: 816138 - DNA, 619 bp, Homo sapiens
attgcatgtggtcattcaaattgaggatctgaattttcagctcaagcatagcacaaatgaggtgaaattttccacgaaggcctgaaagagatgcttatcctctstagccacaggctaaaactgctgaaagctaaacatagagttgaatcttgagtggcttaatacaatgtaaattgatttcccaactttgcgatgtgtctactgttgaattgagggcactgcttatgaagaaatgggattctaaaagttcagatggggtcctgtggaaagatcctaataaatttgaggacatgtagtccctaaattctgatgagtctgcttggccagtagaagcaccctttccatcgccatttcaggggattaattctgcattttttgaggaaactgtaatggcctctcttgagggagttaccttgctatgattctcctctgacccagtcaacgttacaccgctttgcttctggacctataactagactcaaatcccagcacatgcttaaagatgaggtaccaagtgtgactcaggaagaggtgcactatactccaaaagaactatttgagctttctaacatatacagacataaataggggaatatgtgtgtgaacggatattaagagt

SEQ ID NO: 816139 - DNA, 565 bp, Homo sapiens
gttgactaaaatggattctctaatggttttcttagaacaatttcatgggaattstattccctgagttattacatgttcagaaataatcaatttgtctttcaaattcagtggtagcatccatacaaattttatgaggccgtttttatttcattagagacccagtggatattgatccctgttttataggctgccttcctgcctgtctgctttccttctttccttctctcattgaacaaatatttgtggcatttctaatatgcaactagccctattcttgggactacagtcatagcaaaacacaataatgctataaaaattatgccgtcagcattagttttatctactttataggttaaaaaagtattagtaggatgtctataattgttgaagttattattatatgcattaacttggcaatgccatgcttcaaggttggtcgtgctatatcaactttccattaatactatgagtactttctattgtagtatccaagcttccattttcattgtctctttaaaattgtatttttttagtcttcaatttattttctttttttcttcatggc

SEQ ID NO: 816140 - DNA, 416 bp, Homo sapiens
tacatctgtatgaaataattgatagccacagttatcatcatcactcagtttttaaaaataatgcgtaaagagatatagcaagtcaaagtgttgtattttgaaaaattattttatttgttgaggatctttttcaccaaagcctttttctgagggtttttacacttaaaaatttctctgtcttcagctcatgtatataataaaattcctttggactaattttgatgtctgtggaaccactttcaccttcccataagattgttcctgtgggattccaggctcaatttctcctagctggttcttctgatgagcccacatgttcagyactatcaaaagcatctcattgctgccagtactttatgaagacagctgggtcacgtgtgggcagatatgtgtggcttcagtttattatagtaatt

SEQ ID NO: 816141 - DNA, 630 bp, Homo sapiens
caaatctaatccacacccccagtatcagcattagtggaaaatctcgtcctaataaacattttccctggtgacatttccacygtttgaccatttagctgtgtcaagagtactgtgtatgtgtaccgcattgttttaatgaagatcacccagccaatctcagataacccagtcactaaagtaaaattagtcatcgaatattgaaagaaatattcattatttttaaaaggttcagattttgctaagcattccaactttagtcagagcaaattaattccatttaaggatatttttcaatactgaaataatccaattagaaaagaaaattaaaggcagaaaaaagtgtacaggcaacttataaaagtcttaagacataaaaatgcagaagaaggaaatttcaaacacataactcaatcatgtgttctaagcacaccatgttagtttttaaggatttcagccctgcaaaaagcttcgtgtgcattgctgttgaatgacttacatttgaagatttgcttgctgtcagttcaatgtaaaagccatgagtataccttaccttggggaaaactctttcctgataacaatatttcccttatcaggttgttctacttgcacactgtgatttgctccaaaatg

SEQ ID NO: 816142 - DNA, 441 bp, Homo sapiens
atgacgggctgcaggtcccgagccctgccgcgcgggaggcggctgaggccccgtgagaattcgagcgccgcaggggcaggctggcagtgctgggggacccggtgcactctccgcagctgctggctcgggtgytaagcccctcactgcctcgggccagcggtgccgacccgccgctccaagtgcggggcgggcggagcccgcgcccacctggaactcgcgcgggcccgccagcgccaaccgcagccgcggttcccgcccgcgcctctccctccacacctccccgcaagcagagggagccggctccggccttggccagcccagagacaggctcccacagtgcagcggcgggctgaagggctcctcaagcactgccagagtggacaccgaggccgaggagacgccaagagcgagtgagtgctgctagcaggttgtcacctctca

SEQ ID NO: 816143 - DNA, 544 bp, Homo sapiens
actttcctcactgaaataaatgagcatcttaattcttatcacagatcatgaatgtaaatgtgacattataggcacagcagtggaatcagwgtcaccatcattttatttctgcccccactttgttagtcatcatgcctgtaattacaaacctaattaattgcctttattagaatcttaacacatacacagataactcattattatccagtaggaggagggtatgaataatgaaaatccatcatttataaaataaccacaacagtttcatcaacaacaaaaaaatatcaatttaaccttctttgcttatgattttagtagtcataagtattgccagagacaactgttagaggctgaattgtatcctccccaaatccatatgttggagtctcaaactccggtacctcagaatgtgactgtgttaggagttagagcctttgaagaagtggtttagtgaaatgagacttttagggtgaaccacaatccaatatgacttgtgtccttaaaagaagatgaaatttagacagaaaagagacaccaggaatgc

SEQ ID NO: 816144 - DNA, 671 bp, Homo sapiens
agtaagatgaggatttttagcatgcttttactttcctcaaccacttccaattcccaggcataacgacagkttattacgtatcttcacactttagaactatttggacatttgtttgctttatagctatagctctgtgattcctttgacttaccagttaactgatatttaattgaacattccttttataacttccctcattgtttttattgtctctttttttttttgagatgtagcctcgctcttgttacccaggctgaagtgcaatgacgtgatctcggctcactgcaacctccacctcccaggttcaagtgattctcctgcctcggcctcctgagtagctggggttacagatacccaccaacatgcctggctaatttttgtatttttagtacagacagggtttcaccatgccagccaggctggtattgaactcctgacctcaggtgatctgcccctcagcctcccaaagttttgggattacaggtgtgaaccaccacatccggcctttattgtctaatattttacctttatgaaaggaatgttttggccagctggaatagaccttgacagtgtagatcatgtgtgtggtctctagggaaggtgctatttcttacattccaggatccagtgccctactacttgagcatatgtactgcttgcattatttatta

SEQ ID NO: 816145 - DNA, 604 bp, Homo sapiens
gctgatagcgcgcggccgacccccttcccgccgggccggccctgcccagccccctctggcctcagaagaggcgccccgctcccagcctccccgcctcgctccccggctcctcaccrgcagcgccagaaccgcgagcgcgagcacgcaggcgcgtgcacgcagaggccgggacccgccgggaaatctcaaccgggcagcccccaccccgctcgaacgccgaggcggctccacccgcgcgagccccgccgcctcgggcacctcctgcatcacgtggttccgggccgggtgacgccaaacctgcgattcccaagcggcagcgcggcctcccgagccgggttgacgctggcgtggcggccatgtttattgagggcacctggcttctcccgcttgcgccgccgggtgagcctgaaggcgcgcacccacctggctccaggaagagggaccgagctcgcgtgctgggcctcactcccactgggggcgtcggccactcgatcgcaaccgggtcgtaggcattttgggggctcattttaacagaagaaacgctggagaagcttgtcagaggtgacagctgagaagtactgcctctgggacttctgcctccaag

SEQ ID NO: 816146 - DNA, 604 bp, Homo sapiens
gctgatagcgcgcggccgacccccttcccgccgggccggccctgcccagccccctctggcctcagaagaggcgccccgctcccagcctccccgcctcgctccccggctcctcaccggcagcgccagaaccgcgagcgcgagcacgcaggcgcgtgcacgcagaggccgggacccgccgggaaatctcaaccgggcagcccccaccccgctcgaacgccgaggcggctccacccgcgcgagccccgccgcctcgggcacctcctgcatcacgtggttccgggccgggtgacgccaaacctgcgattcccaagcggcagcgcggcctcccgagccgggttgacgctggcgtggcggccatgtttattgagggcacctggcttctcccgcttgcgccgccgggtgagcctgaaggcgcgcacccacctggctccaggaagagggaccgagctcgcgtgctgggcctcactcccactgggggcgtcggccactcgatcgcaaccgggtcgtaggcattttgggggctcattttaacagaakaaacgctggagaagcttgtcagaggtgacagctgagaagtactgcctctgggacttctgcctccaag

SEQ ID NO: 816147 - DNA, 625 bp, Homo sapiens
tggtgatgatgcaattaagtgtaaaattatgtaaaaaatccagttaaaagaaattgaggttaacttaaagcaaataatcaagagtagtattttagtttaatagactgaagcgatttaaaaatctatcatataaatctgaaaaatggtgatcaactcttgatcattagtgaattaaaaagagagcatctcattagaaaaaaataccaaaagaaacataatccaatatgttttaaatgaaaacaattgttttttagacacaacagaggaaaataggacaaaagataaaatcaggattccagaaatggtggcttctgctaccttctggaaaggaagataagagggcctgtcatttagctttggaagctcagagatggagtaacaacactatcaaagttcccaaaatacttatttttctgatttaattaacaaccaaaatatttttcttttgccatctcaggttataaaagtagattataaggtttgcattgagtgaacctgtaattatctaataatccataaaacrtgaaagatcatttcctaatcttgaattttgtcttaaggttctcatagcaaatgggacagatgtggagtagtattatccattacaaacaccttctattcagat

SEQ ID NO: 816148 - DNA, 625 bp, Homo sapiens
tggtgatgatgcaattaagtgtaaaattatgtaaaaaatccagttaaaagaaattgaggttaacttaaagcaaataatcaagagtagtattttagtttaatagactgaagcgatttaaaaatctatcatataaatctgaaaaatggtgatcaactcttgatcattagtgaattaaaaagagagcatctcattagaaaaaaataccaaaagaaacataatccaatatgttttaaatgaaaacaattgttttttagacacaacagaggaaaataggacaaaagataaaatcaggattccagaaatggtggcttctgctaccttctggaaaggaagataagagggcctgtcatttagctttggaagctcagagatggagtaacaacactatcaaagttcccaaaatacttatttttctgatttaattaacaaccaaaatatttttcttttgccatctcaggttataaaagtagattataaggtttgcattgagtgaacctgtaattatctaataatccataaaacatgaaagatyatttcctaatcttgaattttgtcttaaggttctcatagcaaatgggacagatgtggagtagtattatccattacaaacaccttctattcagat

SEQ ID NO: 816149 - DNA, 597 bp, Homo sapiens
gagtgattctttgcttgttttgttcaagttaggtgcctatcagagtcctgtattttatgagataagaaacttgatggaatttcactgatcttcttttcagcaggatccrctaagaaaaaattctgtgttccttaaaattgtataagctttagtgtattttaatagctaaggtttctcattattgagtttcacattctaaattttatatatagtttttgtgtgtgtgtatgtttgaccattgattgttaaggaaaatgatatctgtaaatagtaatttagaagctagaaactaattctgtatctcttatgttttatttcctaggaccagcattagcagtacagggcccagccatgtttacagagccagcaaatgataccagtggaagtaaagagaattccagccttttggacagtatcttttggatggcagctcccaaaaatagacgcaccattgaagttaaccggtgtaggagaagaaatccgcagaagcttattaaagttaaggtaatgcattgatttttgtgggtgtgcttttcctcaagtcctccattgaataagctcatggtagattcctatagcctaggaataaattattat

SEQ ID NO: 816150 - DNA, 662 bp, Homo sapiens
tttaaattcaacaattaaacctgtttggataacactctgaacccaataaaggtattggtctacgggtcccttctctctctctctctctctctctctctctctctctctgcctgtactccttggtgtgtggtgtgtgtgtgtgtgtgtgtgtgtgtgtgtgtgtgtgtgtgcgcgcgcgcgcgcccgcgctccctccaggatctgtaagtaccaaaaacgcttaaactttcacactgcggttgtgtcactgaagcagtgcctgaaatctaatccctgagtgtgacgccgccccaaagggccccaagcaggtagatcccatgctgatgctcttttatcctggcctctcagctgttgaggagagtaattgccgggctaaactgataaagtttcattccaaacaattagcctagtctgcaggattgcagtcgcggcttggacaccatcccggtgtctgtcccccgcagagggcttgctaccttgctgtatcagctggcccagcaggtctggggccgcgcgctgcttacaggcgctggatctcgstgctcgtcgctgcgcgctactaggtcctgctgtcgtccgagtcgcctccgggactctccggaattgtagcggctgtagccggctccttgcctgcggcgcggagggcaggtcccagtggtagg

SEQ ID NO: 816151 - DNA, 361 bp, Homo sapiens
aacgcctcatccctctctccacgctcactgtcacwaccaggctggagtcagagtgaaacaacatctcatctgaagtgtcacagcctcactctggccatcagcggcttgcctcccctcttccaatccaaccgcacactcttgctagatgaacctgtgaagaggcgtcttttttcccactgcttccctgctgaagccacgacttcttggcccagccccggagtgttctgcatcactctctcctagcaggacggcttcagccacaatccaagcacatgggcttcagagccaggcacccctttcttcatctggacatggatcctatcaccgacccatagggctgttgtggattcagcgtggaaac

SEQ ID NO: 816152 - DNA, 340 bp, Homo sapiens
atgaacacaggtcatgaacataggtctaaagattgtaagttgaaacggttgcagtttgaytaatcaaatcaaccttagacatgctgtggctacaaatggcagtgattctgagctgtttgtataattttatctttaaagattattttcaagagcctttttcatattgacaatatagtaatccaggaagaggtatgcattgtatctggaaggggtctgtatcagtatcagtggatacaattattaaaattgatgcaattgttataattgatcccactgttacaactgatacaattttaacaaaatgttaaatagcagccagaaaagatttgcaaaaaaatta

SEQ ID NO: 816153 - DNA, 544 bp, Homo sapiens
aatcagtgccttgtttcttccagcttctggtggctccccagcatttctgggtttgtggctgcatcattccagtctctgcctctgacttcacatcaccttctgccttgtatgtttctatatgatcttcaatttcctcttttttataaggacatttatgatggcatctacgatccacccaaataatccagggtaatcttctcatctcaagatccttaactcagttacaactgcaaagacactttctccaagtaaggtaacattttcaagttccagggattaggacatatctctgggtagccattattcaacctactaccactacaagggataaggatgaaagaaggcttcctgggggaacagtgtataaattaggacctaaaaaattaggcagaattttgtcaggaggagaagcagcaagagtgatagagaatattccaagcagagaaatcagtgtgtgcaaaggccctgagttgagggagtgtggtgaatcagagaatctgcacsgagtgtggttatggctggagcacatagtaggtgtgtgtgt

SEQ ID NO: 816154 - DNA, 645 bp, Homo sapiens
cacaatctgggggagacaacacaactttatggttttttcctctggttgctttgaagattttctctttattttaagcaatttgataacattatgccttcatgaaattttcttcttstttcctaagcttggtgttggttgagcttcaaatctgtgagtttatatctttagacaaatttacatctaaaaaaattaatttaaaaattttttctgtcttcacattttccaacaggaaaataatatataattggactgcaatactccaattatatgtgtattggactgcttaaaggtgtctgatgttctcttcatttttcagtgtgttttctccaggagttttattatgcatggttcctatggctatgccgtcaagttcactaatattattttatttggtgttgaatccactgtttatcctacccagtgtatttttttcaggtgttgtagttttcatttccagaagttctatttgggtcatttaaatagatctcatgtctctttttaatgtgcttaatctttcctccaccttcttgaacatatggaatatagttacaataactacaatgacatgatctcagctcactgcacccttgacctcctgggctcaagagatcctcccaccttagcatcctgagtagctgggactat

SEQ ID NO: 816155 - DNA, 533 bp, Homo sapiens
tggatgcacaacaatttaacagatcttttaaattgtttaaaaatatttttcttctgaactaagtatttttgtrcatgtgttattgagagcattacaggaatctgtagggtaagtgcgtaggaatagaattgctgggttgaatgacacatgcatctgaaatattgatagatagtgcagaatttcctggacctaacatacattcctatgggattgaccattaggaggccaaagaacggaagtggaggggtagggagtagaagaggagggtggggcagtgaggcctggaatagcagacatcaagattctggtggcacagttcctgctgaggacaaggtccagggtgtgcccgcaccaggaagtgggtggcatggggcacagtgcaggcgaaggtcagtgaagcagaggaagttaaagagctgtgagttggtgggtgactcaccccggtgatgtcagctagtttatgctggtgagctcttcatcagaactggagaaatgtggttagagaaaccttcagcttctctttaaatctagca

SEQ ID NO: 816156 - DNA, 533 bp, Homo sapiens
tggatgcacaacaatttaacagatcttttaaattgtttaaaaatatttttcttctgaactaagtatttttgtgcatgtgttattgagarcattacaggaatctgtagggtaagtgcgtaggaatagaattgctgggttgaatgacacatgcatctgaaatattgatagatagtgcagaatttcctggacctaacatacattcctatgggattgaccattaggaggccaaagaacggaagtggaggggtagggagtagaagaggagggtggggcagtgaggcctggaatagcagacatcaagattctggtggcacagttcctgctgaggacaaggtccagggtgtgcccgcaccaggaagtgggtggcatggggcacagtgcaggcgaaggtcagtgaagcagaggaagttaaagagctgtgagttggtgggtgactcaccccggtgatgtcagctagtttatgctggtgagctcttcatcagaactggagaaatgtggttagagaaaccttcagcttctctttaaatctagca

SEQ ID NO: 816157 - DNA, 273 bp, Homo sapiens
ttattatcagaaaagtacagaaggatacatttaaggttgttaatctgggatatgggagaaggtgggataaggatgtaaaaagtacatacatcacacatttatgcatctgcaaaaactatgcacgtgtgtaagtatatgtacatataaaaagttakgaaatttatgcaaaagttataataaatagaaatgaattaattttgactaattaatagacattttatgaaattcaatagccatttctaataaaagttcttagtatactttattgttatg

SEQ ID NO: 816158 - DNA, 519 bp, Homo sapiens
agagaaagccaattttcagtttataccagtaggtgtcatccattcacacaaagcataacccaagaaacctaatataatttgacttaatctctataatttctaccaaattccagtgtagtgttccagcctatctaagctccttgggtgaaggccatttaggctttcagttggatttggagaagaggttatttttgccatttaaggtgcttccaaagaaaagaaaaaagacagcagttttgaaatggaatgcattgcatagtttgaagttatcattttatatcctaaaaatacatcaattactgggaagaggttattaaaatcttaaaatcttactctgaacagccactcaaagaagaccaatgttactattttcatgatttttctgaaagagggtaaccagtyttaatcctgagtacaaaaatttgggatgagtccaaacataatacaatatttcaaaaatatcaatgatgattaaagagtcatgaaaatttaaaataataataactatatttttggcat

SEQ ID NO: 816159 - DNA, 572 bp, Homo sapiens
gcatgcctttctggccctaaggtatcataggttctctcacactgatgcttggctcagagatgggggaaaatggaaatcattaacacagccagtgagaagctctgatcttcatgacacctgcagcaygctccttgcgaagagggtgattctccatttgaaacaggctagagatacaggacataatgaacaatggaagtcagtgggagctaccttgcattcatatttgtgaactttggaatggggctagtttctaaaagggtaataaccagcctggagcagaagctgagggtggggcgtcgggggtgaagaggagggagggtctctgagttcaggctgagggatgctgggaaaaggcaatgactccctttgaggaaaaaaaatagagggcaaaagcagactccagggcctgaagatgcccccaaatggcaaattaagtgaactggtatacggtgaaaaaagttatagagctgggtccaatgccacaggccacatagaagattgagagaggctctaggcagaagcagggagctggtcagccgagattgtgatggaggtagctatgcataagtaat

SEQ ID NO: 816160 - DNA, 568 bp, Homo sapiens
tggggccactgggccatctggccatgcagctggcctgagcttctgagtctgagaacacaatggtgattcactttgtgcaatccaagtccttagatgacatctaggaaataaactgccagggaatagttacatagacaaagggtttttgtctttgaaacctgttaaaatttgtcagtgggccagtcacggtggctcatgcctgtaatcccagcactttgggaggccaaggcaggcagatcacttgaggccaggagttcaagaccagcctggccaatatggcaaaaccccatctctactaaaaatacaaaaattagccaggtgtggtggtgcactcctgtaattccagctactgaggaggctgaggcatgagaatcaattgaacccagaaggtagaggttacaatgagcctagatcatgccactgtactccagactgggcaacagagcaagaccctgttgcaaaaacaaacaaaaaaaatatgttaatgtattagcatcrataaagatgatctttttcagtttgttcttattcttaaaataaccaaattgctaaatatgtttgcagtata

SEQ ID NO: 816161 - DNA, 595 bp, Homo sapiens
tataaaggttttacgtctcagtacttcgttgaaagagccttagccctagtcattatctaagacttggattcagtgmatttcacatcgctgagctctcacatggctcctggtcttggaaatggccactggactgcctccatagtcaggtaaggcccagcttttccacggtcccttttgcttggatctgagaggactgagtttctgctttggctctcttggctgccttgctctgaccagttcttttcgctgaggccagaagccctgacccaaactcttatctttctatcctgggagctggggctcacccatctgtgggcccaccttcccaatgaagacgtatccagctgcctgcctggtttccttcttgtgctctatatgcctgcctgtatgcgttatcttttctttaggttctagtgcggttattcgaattatgcctggtaaaagtttgtcatcacacctgctctgatcccccaggggggcctgatactcggctgcagtcctgcacaagtggtaggtaaggaggaaatctccttcctctccatctctacttgccttgtacggttgtaaggcaggaacatgccttctcctcaattct

SEQ ID NO: 816162 - DNA, 578 bp, Homo sapiens
gaaagtttcaaataaaaggcagtcttgawactgcacaaactgtgtctatctcaaacaagaaaaaaatgagtgcttcaaaatgaaaatgaaaatcacagactttatttgcttaaaaaacaaaggaagtgagctatttaggatgaaacaattgaattttggagaagcctgcttcactagtcctcaaagtacactgatcatattgtttttcactttgaaagaaatattatttttttcagattataacacagtaaagataaactttaggaatggactaaatgctgtctttgatcatcaacattatttcgaatattaggctcacgatttctaaaaagtcatgaaaacatcattctcatgaaaaaattttggtgaagcataacttattttaaaaagtaaaacatgatcttgatatagtttattctcaacataaaaatgtttttttttgcattgtgctatgaaaaataacacatgcaaattaaatgttgatcattgactcaactaactgatcagtgtgattattttttctgtcttcattaatataattgaagtatgcattatacctcatgagctctccttaatat

SEQ ID NO: 816163 - DNA, 589 bp, Homo sapiens
actatcaaacttgcttcatctatttgtcctctccccaacccttacaggttactacttttctacagctttattgaagtagctttatgtatcataaaattcacactgtaaatgtatagtttmacgatttttgatgaatttctagagttgtgaaatcatcaactgcaatccagttttaaagtccattccttttttatttaaagagagaaaaagcaactctctttcttttgtcgttaccatactttacattatttttaataagggttataatgagaagagacaatgctcacagaagaagaccaggcgtctatggacatttttgtcttttccatgtctgctatgagaaaaagttgtgttttctccacactgcaagagtctgttatggaaacaagagggtctttggacttgtttgtctaactgttttaatcttctcctcccactgcaataaaaaccatctggcatgttgaaaaggtggaagataaagaaatggacaaactataaaatgctgctggaggctgaagatggttgtttaatatgtgtacagaaacaaaacagattgggttaattacaagagatgatcaaacttaaggca

SEQ ID NO: 816164 - DNA, 602 bp, Homo sapiens
atctcattaaatccctgattgcttgcaccataaagaggcctaattttgatgggaacccatctgcaacaccacttcttgaaatgagacacaactctttgtttttttttttkttttttttttgagacggagtcttgctctgtcgcccaggctggagtgcagcagtggcgagatctcggctcactgcaagctccacctcccaggttcactccattctcctgcctcagcctcccgagtagctgggactacaggcgcccaccaccacgtccagctaattttttttttttttgtattttcagtagagacggggtttcaccgtgttagccaggatagtctcgatctcctgaccttgtcatccacccgcctcagcctcccaaagtgctgggattacaggcgtgagccaccgcgcccggccaagacacaactctttaactggattgacctattcctatgtctcttaccactcagctactaaccttgttttcctctctatacgaactcatgttttagtgtatgaaacttctggagaagttttagacaggggaaataaaggagttcagaatgtgccaaaatatgccacttcggtatgctgattacttcaggaa

SEQ ID NO: 816165 - DNA, 503 bp, Homo sapiens
aaagattttacaaagaaaaagggggaaatgtagaagaaaataaatctttgggccccaaaatcactaagttaaagggaaaagtcaaggggggaactgcctaggacaaactcacctcgcattctattcaaagtcatccctctgctcactgagataaatgcatatctgattgcctcctttggaaaggctaatcagaaactcaaatagcatgcaactgtttgtctctcacttacctatgacgtggaagcccccttcctacttcaggttttcccgcctttccagtctaaaccaatgttcattttacctatgttgattgatgtgtcatgtctctctaaaacatataaaagtaaactgtgctctgaccatcttgggcacatgtcttcaggaccttctaagtctgtgtyactggtgcacatcctcaaccttggcaaaataaactttctaaactaactgatacctgtctcagatttttagggttcatagagggttggtaatattccatactt

SEQ ID NO: 816166 - DNA, 582 bp, Homo sapiens
taatgaagatcaaaacagaaattgataaaatagaagacagaaaaacagtagagaaaatcaacaaaaacaaagctggtcccttgacaagaaaaataaaatggagccaggcatggtggctcacgcctgtaatcccagcactttggaaggcgggacagttggatcacctgaggtcaggagtttgagacgagcctgaccaatatggtgaaaccccatctctactgaaaaatgcaaaaatcagctgggcttggtggtgcacacctgtaatcccagctactcaggaggctaaagcaggagaatcgcctgaacccgggaggcggaggttgccccattgagccgagatcgccccattgcacaccagcctgggcaacgagagtgaaactccatctcagaaaaaaaaaaaggaaaagaaaaagaaaatggataaaactcgagatagactgattaggaaaaaagagagatcaaaatttttcwtattaggaatgacagaataatatctacagatattaaaaggataaaaagggagtatcattttaaaaactttatgcctataaattttacaatggaaatgaaattaataaattt

SEQ ID NO: 816167 - DNA, 582 bp, Homo sapiens
taatgaagatcaaaacagaaattgataaaatagaagacagaaaaacagtagagaaaatcaacaaaaacaaagctggtcccttgacaagaaaaataaaatggagccaggcatggtggctcacgcctgtaatcccagcactttggaaggcgggacagttggatcacctgaggtcaggagtttgagacgagcctgaccaatatggtgaaaccccatctctactgaaaaatgcaaaaatcagctgggcttggtggtgcacacctgtaatcccagctactcaggaggctaaagcaggagaatcgcctgaacccgggaggcggaggttgccccattgagccgagatcgccccattgcacaccagcctgggcaacgagagtgaaactccatctcagaaaaaaaaaaaggaaaagaaaaagaaaatggataaaactcgagatagactgattaggaaaaaagagagatcaaaatttttcatattaggaatgasagaataatatctacagatattaaaaggataaaaagggagtatcattttaaaaactttatgcctataaattttacaatggaaatgaaattaataaattt

SEQ ID NO: 816168 - DNA, 177 bp, Homo sapiens
accaggagggaaccacttcctaaggaagctccggccctckaagtttaagaaggcaagtccctcagcaggcccgccgccatcttgcggagccacggggagagcgcgccagaaatgaggctggcggggcggaggcgcgtgggagtgggggaggggcggaggcgcgtgagtgggggagcg

SEQ ID NO: 816169 - DNA, 565 bp, Homo sapiens
attccaaattgacaaaagaataaagaaatatattccaaaatacaaacagtggttgtgtgatctgttagtgttaggatttataggtcctrtctatgggtctatcttcataatactaatctaaatttcaaatttctacacatgacatgaattactttcagaatctgtaaaaaaaatacgttaatttcaaaagaggcaatcaagaaaagacagttggccatttagtacatgtttttaaattttcttattttgtttatgagtaggctacaaattaactttaatattagagacaccaactttggtcttaattgaatattatacaaattaaactttgacttcttcttactttagaataatattaatcttgtaggaaagtttaacacaattttaagcacatatactagcaaattacaagtcttctcttaaagaacttcaaaaattcttatttaatttaaaacatgatttaaaaatgaacaaaagactccttggctatgttttaagtctaaaatcatttgagttttcttgatatttctgttcactgtttaaaagaaatgctattctgttaata

SEQ ID NO: 816170 - DNA, 565 bp, Homo sapiens
attccaaattgacaaaagaataaagaaatatattccaaaatacaaacagtggttgtgtgatctgttagtgttaggatttataggtcctgtctatgggtctatcttcataatamtaatctaaatttcaaatttctacacatgacatgaattactttcagaatctgtaaaaaaaatacgttaatttcaaaagaggcaatcaagaaaagacagttggccatttagtacatgtttttaaattttcttattttgtttatgagtaggctacaaattaactttaatattagagacaccaactttggtcttaattgaatattatacaaattaaactttgacttcttcttactttagaataatattaatcttgtaggaaagtttaacacaattttaagcacatatactagcaaattacaagtcttctcttaaagaacttcaaaaattcttatttaatttaaaacatgatttaaaaatgaacaaaagactccttggctatgttttaagtctaaaatcatttgagttttcttgatatttctgttcactgtttaaaagaaatgctattctgttaata

SEQ ID NO: 816171 - DNA, 479 bp, Homo sapiens
tcatatttcagatccataaatccatccagagtttatatgccatttgtatttacttttctgtaaagtgctcactctcttggctcatttttctactagaattttcatttatatatatatrctttttaaaatagaacagatatttgtcctttgactgttattttagctaaattttttttttttttttttttttttttttttgagaccgagtctcgctctgtctccctgctggagtgcagtggcgcgatctcggctcactgcaacctctgcctcctgggttcaagcgattctcatgcttcagcctcccaagtagctggggttagaggtgcatgccaccacacccagctaatttttgtatttttagtagagatggggtttcaccatgctggccaggatggtctctggatctcctgaccttgtgatccgcccacctaggcttcacaaagtgctgggattgcaggcataagccaccgcgcccggcc

SEQ ID NO: 816172 - DNA, 655 bp, Homo sapiens
cctaatcacacagttctactacatttttcaggcttccttgcttaagtgagattttgtgtctgatttctgaacaatagaatttaggaggaagtgttgggcaatacttccaaggytatcccataaaaaaatttctactgggatttcccatgctgctgtcagcaatgacttcagtagttatatgttgaatatagaggagccacaaaatgaaaggagcctggattactgaatcaccacttggatgagagctcccagctaattggtaacctatgtttttcactttatataaatgttaaaccactcatatttgaggatttatttgttacaatagctactataactttatttaacagaaattcattctttgaaacaaaaaatacctgccatagcagaaacctaaaatacatgtataagtttaatggtcatgcagtgagcagaaaggtaactgacttggaggctgaaaatatgaaggcccattatacgcagtggcaaaacatttattaacactcttgcctgctataaattggaaggaaaaccatatgcccactgaatatgcagctccaaagagtcagagtcagggtaatagtatatcctgttctgatgttctgcattgagaaagtattcaaagagattaattagaaaaatatttggctagttt

SEQ ID NO: 816173 - DNA, 655 bp, Homo sapiens
cctaatcacacagttctactacatttttcaggcttccttgcttaagtgagattttgtgtctgatttctgaacaatagaatttaggaggaagtgttgggcaatacttccaaggctatcccataaaaaaattyctactgggatttcccatgctgctgtcagcaatgacttcagtagttatatgttgaatatagaggagccacaaaatgaaaggagcctggattactgaatcaccacttggatgagagctcccagctaattggtaacctatgtttttcactttatataaatgttaaaccactcatatttgaggatttatttgttacaatagctactataactttatttaacagaaattcattctttgaaacaaaaaatacctgccatagcagaaacctaaaatacatgtataagtttaatggtcatgcagtgagcagaaaggtaactgacttggaggctgaaaatatgaaggcccattatacgcagtggcaaaacatttattaacactcttgcctgctataaattggaaggaaaaccatatgcccactgaatatgcagctccaaagagtcagagtcagggtaatagtatatcctgttctgatgttctgcattgagaaagtattcaaagagattaattagaaaaatatttggctagttt

SEQ ID NO: 816174 - DNA, 571 bp, Homo sapiens
aaatattaagcctgtgacataatcagtgtcctttcatttggagtgatatttcaatatatacttacttgtaatattccaacctattttccagtcagcctttttagttaaaagcrttatcaacttactcaactttccttaaaaataaagacaaaaaatcaaaatcttacattgccatattatcatgttacatctccccttcccttcacattcaaaacttttaaaaagtatgatctagaattggttttcattttcttacaaactgtttctttgttcctcattatcgagttttcattcaaaatgaaagtgcctttcttgcaggtaattggttatctcctaactgtcaagaccaaatgcttcttctcaatcctcgctgggtatttgacactgttcatcaacaccattgtaaacactatctcatttttaaaaatcttttttcttcctcttcacaataacgttatgacgtacaggctgatgactaccacatctataattcttgccctgcttcctctttcaagctctagactcattttcaacatatggcatggcatgtgtctccttgtgaatatgccgc

SEQ ID NO: 816175 - DNA, 706 bp, Homo sapiens
ctggagaaatttagacttatgctcacacaaaaacctgcaaataagtgtttatagcagctataatagccaaaaactggatacagcccagatgtccttcagtgaataaatgcttamacaatttaacaaattgtagtatatccacaggacatcatccatgttgtatgtatcaatagtttgaaaaaagtcaatccccaaaggttacttaatatatttttctgtttacatactaagtagcctttgattacttcctgtgattccatttttgaaatgacaaaattttagaaatggagaaaagattagtggttcctggagttggtaaggggttgggaggatgtggaagcgaggtgggtgcagttttaaaagggcaacatggccgggcgccatggctcatgcctgtaatcccagcacttgggaggccgaggtgggcggatcactaagtcaggaaatcgagaccatcctggctaacacggtgaaacctcgtctctactaaaaaaatacaaaaaaattagccgggcgtggtggcgggcgcctgtagtcccagctacttgggaagctgaggcaggagaatggcgtgaacctgggaggtgcagcttgcagtgagccgagatcgcaccactgcactccagcctgggcgacagagcgagactctgtctcaaaaaaaaaaaaaaaaaaaaaaggcaacatgagggatccttgtgttaatgaa

SEQ ID NO: 816176 - DNA, 611 bp, Homo sapiens
tctaacaacaggggcttctttcaggggcactggtagactaatttgttagtgaagggcttttcagggcactgagtaatgaacaggggagtatcagtgaagcactacgtggggttgcaaaggctgtgtcagtttttttgccagaggaactggttgaaaaatgaaggatttagataaatcaggggaagtaggtgggttgattctagaagcaagattaggaagagaagttttcttttgtgatttctgtgtttttttttttattgtcttgaaagtctttattggaactttattcattggttgattccctcatttctgtatttattcatttattgaacatctgttggataccaggaattgagctaatgtgtaggcccttcttccaaaaagcctgtgttagtccaggacttctggaagcagacactaagacaggattaagtatgcaaaaattttattagtggaactgcttcactctctcaggctctcaggctagacaccctaagcattttctactcatctttctttttcactctaaaatccctcctctccccacagtgagccacaagctcctatcattctgtgtcttcccaatttckcctttctcttctgttgaacac

SEQ ID NO: 816177 - DNA, 592 bp, Homo sapiens
gatccccctctcacatgtcctaaaacctttgcccattgatgtgcatagtcataactcttacctgtgtttacacacaaattagttttacacattcatataactatatacaaatacccacaaacccactcaatttaaggttagactgattctgcttttagcacctactaataagacgtgcataaggggatgggaggtgggtcacagagcttgatgccactttctactcaacccattgatgctgatgctgtgatgcccaggaaagggaagctgagagctgattgcaggaggagcctttggccctgtactggtgtctgctccagcagatacaaatgcattctaactgaattccagctttttggagtctctgacactgcagaaagccctaccctttggaccacaaagtggttggcatgatataaagacagggaggctgatctgatgccaggcagagctgggctgagagctcttgaacttcatcaagttctgctgtgtgttttgcatatctgttaaatagtgtgtaagcttgttaggggtaggacccatgtctycttgccgtcctatttccctgggagttctttttactcaggggaaa

SEQ ID NO: 816178 - DNA, 603 bp, Homo sapiens
catttcctatgaataaggatattctcttatcctaagacaataagtatctttatcacatctaaaaaatgaacatgatgcaaagcatgtaacctctgacatagcttaaatattgacctttaaaaataaatttcttacgttatgcttttaaattcagccaatgaaatctaaataccagaaggctttgatgcccatcactatccatttataaatacataagtaagttcttctttagcatttgaacattttacacctttactttctttccttgaatttacatatcccgctgactccacaaaatcttatcctactatataattctttatgcttgaaagttttttattgatcatcctagcatgttcttctaaataaaaaaagcattgattaaaattgaattcttttttatatgctgtgatcactaaacgctattaaaattattttcaaatgggttatttttataatcgtacacagatgcactatgagtatactattagcacagcaagattrcagttttgatattagtcataaaatgtaaaaaatgttttggaaatgtatctcctaaatgacatgatttaacaaatagttactgtatttatcgatgaatat

SEQ ID NO: 816179 - DNA, 498 bp, Homo sapiens
tcactgccatctgcaataaccacggctgccgtgcacaggcaccacatctaagacatcatacgtttattatttattatagcaattttcccacagatggcagtaaagtgttttgttctaataaaatcagtgtgttacagtagttttctgatagaagtaaattaccttgaggaaggggcacctttttctaattcacacaagggcacaatctagccttggtggttaaatctgtgggcgctcacccttcacgactcagctgtggctgacagcacggacgttctctgcttcttgatcaaccttctgtctgtacccagcttctgtgataccacagtcgcctggtggtcctcctctccctgtggcttggcgtccctctctgttcgtctgtgatgttccccrggtctctttccctggcgctgttctcgtattgtatggctcctaggcaccctcacctgccccactttctctgccttctacaggtgaatgaacccggaatccctcact

SEQ ID NO: 816180 - DNA, 498 bp, Homo sapiens
tcactgccatctgcaataaccacggctgccgtgcacaggcaccacatctaagacatcatacgtttattatttattatagcaattttcccacagatggcagtaaagtgttttgttctaataaaatcagtgtgttacagtagttttctgatagaagtaaattaccttgaggaaggggcacctttttctaattcacacaagggcacaatctagccttggtggttaaatctgtgggcgctcacccttcacgactcagctgtggctgacagcacggacgttctctgcttcttgatcaaccttctgtctgtacccagcttctgtgataccacagtcgcctggtggtcctcctctccctgtggcttggcgtccctctctgttcgtctgtgatgttccccaggtctctttccctggygctgttctcgtattgtatggctcctaggcaccctcacctgccccactttctctgccttctacaggtgaatgaacccggaatccctcact

SEQ ID NO: 816181 - DNA, 570 bp, Homo sapiens
ggaaagtggcaatcaagcagtttctttgtctgaagctcatgtcttttaatatgctgtcccagaaactgcctattccagaaggagaagcagggacaacaagcggcttggaaggctgcaaacagtttcaacttgttctgtcttcctggcctgtggcttatgattgtgtgtgtttatttattttacattgctcccatgccattagagtgtaaaccccaggaggagggactttgttgtcttgctcactactgtatcctcagtgcctagcaaaaaacttgatgtgcgttagacactcattgcattgctgctgaatacatgaatgaatgtgtgttttacttctatctccccttctgtcttccaagtattcactgtgtcttgtggtttctgtttcctattgatgtcttgggactgcctacctctccctacctcctacctccatcagctgagttcgggctgctgccattgttcccctggatgtccacagtgcctcttaagtggcctgcccacatcccatccaagccctctcygatccactctccatactgtggctggaaggatccttgtaacatataa

SEQ ID NO: 816182 - DNA, 618 bp, Homo sapiens
cttgctcctgctctcaccatgtgacatgcctgcttctgcttcgccttctgtcatgagtaaaagctccctgaggcctcaccagaagccgagcagatgcaggtaccatgcttgttcagcctgcagaactgtgagccaattaaatctcttttctttataaattgcctggcctcagatatttctttatggcagcacgagaacagaccaacacacctgggcagtcctggattctccaggcgcatcacaaacaaaaccagttagacattcattcaatcccagagcgacttcctttctcattacttttttaaaaaataaatttttaataatctcaagccttcctggctctccatagaattcttcctagcacaacatttctattttaatcatataacctccaggattcagatgcaccaaatgcaacaattgatgaacgtctgaatctccactggtttcactttccagatccaggttgatctatgattcttctacagaatcataatctccatatatttatccccaagagagsttaaatcaggtgcttcattatctggagttctcaggaagtaaaccgtcagccagatgctgcttagatttatgcttctctggcatgtggtgcaaccg

SEQ ID NO: 816183 - DNA, 467 bp, Homo sapiens
ctttctccttttttgatgtaaatggaaaacaccaatttaaatccctatttaaatccaattgatatccatgttgacatgactagtagttactgatttttttttatttatttatttatttatttatttatttttgacagggtcttgctctgttgcccagcctggagtgtagtggtgccgtctcggctcactgcaacctccgcctccaggattcaagcaattctcctgcctcagtctcccgagtagctgggattacaggcgctcgccaccacacccatctaatttttgcattttttagtagagacagggtttcgccatgttggctaggtctgtctcaagctcctgacctcatgtgatccgsccgcctcggcctcccagaatgctgggattacaggcatgagccaccgcgcccatccctgatttttttttttttttttttttttttttaagaaataaagcaacttctccca

SEQ ID NO: 816184 - DNA, 549 bp, Homo sapiens
tttggattttttttgccttcagtttcccaaatacttcagggaaaaaccaaggaagactcacatgctccttcatttaccccctcaatccataagatgatgatctggaataactatgtrctaaaattccatttgttacaacttgatctccaatgcatgtataaaatgctatctcttcctcaaagcttcaacacctcagcagagatctccagatccctgtgtcatgtgtgtgagtcagggggcttagtgaacacagtgctggctctgggaggagacagaattgaatttgagtcttatctctaaatctatacctgtgtgaacgtgggcaaatgtcacaacccatctaaacttctgtttcctgtttaaaatgaaaacaataataagtatctggcaggtactcagtaggtcttcaagaaatacctgtttcttcctcttcctttcctttgattactactattttgatgggtgtatatcaattgtcttcgtatctaaactttatgtacctgtggggcataagctgtgtctctctcttctctaaatcctcaacagaat

SEQ ID NO: 816185 - DNA, 607 bp, Homo sapiens
ctgctttaaccaagcaaagcaatctcactattcttggcagtgacwgggggtgacatgtgacccagttctgaatagtgccacgtcagggagatcctgaggtggggagttgtaggaaggagattctcagtcttacgaagcatacaacagaaaagacatattcattcctgtctctactagagttatatctgtgggtaatgcctgggccaacatgtgtgcatgaggggaaaaatgagaagaaaacagatacggaggaatgcaggaaatacagttgggaggaaaccttagatcttagatactgtccttgagtaactgaattaaccagccctggagctactctgccttggctgcgctcttgctgaaggcattctcaggagtttcttccctagttggcagctgaaagcttcctcactggcccagaggcacagaggagtaaaccaatttgtttgaggtcacagagccagtgggaaagcttgtctgtgaacagtgaaaccactatctcccaatttttcatctcttcagcttttggattaaatgagtaaatgctgttcagatacaagtggaaggaaaaatcacatgtttttacagttatttctatagcaatgtggca

SEQ ID NO: 816186 - DNA, 560 bp, Homo sapiens
aaaggccagaggctgcatcgcttcaggcatggctggatccaaggcccaaatggtatccacaggactctgcctccgtctccacacccctygtccctgctctctcctgtgtggtttccttcctgggcagcctcctgcctgttgcaggctgatgtctaatgagcccagccccctggccacttgcccctggaagagggggattatttaacaagagtctcacaggagtcccaggacttcagctcactgggctggtatggggctgaatcacttcctccccgaatcaatcctggtgcccaaggagtagaacaccctgattgtcagactggtgggggctgcccagtccctggactgagagtgaaagaggcacggtagatgggggtggggtcacttggagaggaagagaaaggatgccgagactgcagcagtgtccagctgggggcttctctgccacaggcacttggaatgtggcctgtcacgttaaggggggattggactgggagcctcagggcaacacctggtgacagttgttccggagagctccaggagacccaaacagtgctggc

SEQ ID NO: 816187 - DNA, 560 bp, Homo sapiens
aaaggccagaggctgcatcgcttcaggcatggctggatccaaggcccaaatggtatccacaggactctgcctccgtctccacaccccttgtccctgctctctcctgtgtggtttccttcctgggcagcctcctgcctgttgcaggctgatgtctaatgagcccagccccctggccacttgcccctggaagagggggattatttaacaagagtctcacaggagtcccaggacttcagctcactgggctggtatggggctgaatcacttcctccccgaatcaatcctggtgcccaaggagtagaacaccctgattgtcagactggtgggggctgcccagtccctggactgagagtgaaagaggcacggtagatgggggtggggtcacttggagaggaagagaaaggatgccgagactgcagcagtgtccagctgggggcttctctgccacaggcacttggaatgtggcctgtcaygttaaggggggattggactgggagcctcagggcaacacctggtgacagttgttccggagagctccaggagacccaaacagtgctggc

SEQ ID NO: 816188 - DNA, 633 bp, Homo sapiens
aagttaagatccactatttctattcctagtaacagtgctacaaaacaayagcctattcaaaaaatcagatgaaaatcaaaattataaacaaattcttaaatttaatctataacatatcaagactagcttctattcaacaatctcactgtccattactaaaacatcctctttagaaaaataaaagattcaatgagagaaggaagtcaaatagtcactaattaaagctttctaaattatctgtaagttgtgacaaactatgtcaaatatagtctatactactgagctcttttctccttacatctttgatcagagtgttaacaacccactcttgtgaaaatataagtccccaaagtcatgaaaaaatacctaacctaacagataacttcgtaagaaagaagatcctgccaagcaggaagaattgctgctgaaagcaacatggcaggacttaaaggaaacatgccacaaagttatctttgggacaagtgatcagagatggggacaaatgttaacagggctgaaacagatgaacatgagttcacatcatgagtcacttaaaacattactgaaaatattcaactgaaaggaaattacggttcttaaaaatcttaggttccagctgggctcagtggctca

SEQ ID NO: 816189 - DNA, 644 bp, Homo sapiens
tcagagactgttaagataaatgactgcatccataataatggaattcccaggtcagcagcaggcaaatacagaaatcattttcaggcaaaattattgcaaggctcatcaatttgtaccacatatttytaggctgcccttgatttgaacttacagacttaatataaatgctttgattaaattcaatttaagtaaaacgaataaataaaatagagcccagaaactccagctgaaattattttttctgatctgtacaatttaatttagtgttcaacttagtgactttttttctacatgggtgtaaaacttatttactccaaacaatgtaaatatattttaaaatgcatcttagatttcaaataatcttttctttcttctctctacaaagtatcatgttaactcctctcctgggcaccatctaatgggcctttcttcctttgagttctcgtaacctgcccttgtcctttatcatggaaatctcattgtgagcagcatttcctcgtttctagaaccggaaataattatagctaatcatctttattttaaaaatctatttataatgctggcacctaggcttagagaatagttaagtcacagagccattgggagaaattctctaggtatttcacaaacttccctctgttggt

SEQ ID NO: 816190 - DNA, 640 bp, Homo sapiens
atcctgagctattggcaaaatacccacattttaaccttaagtttcttacttaagtaaacatctaaaattcatgggctataaaaatggttaactggggggattcccgagcaagatggccaagtaggaaaagctccagtctgcagctcccagcaagaccaatccagaaggtgggtgatttctgcatttccaactaaggtacctggttcatctcattgggactggttagacagtgggcgcagcccatggagggcaagcagaagcagagtggggcattgccccacccaggaagcacaaggagttagggaactccttcccctagccaaaggaaaccttgagggactatgctgtgagggatggtattatctggcccagatactaaacttttccatggtctttgcaacacacagaccaggagatttccttgggtgcctatagcacaagggccctgggtttcaagtacaaaactgggcggccatttgggcagacactgagctagctgcagcggttttttttcataccccagtggcacctggaatgccagcaagacagaactgttcactcccttggaaaggggrctgaagccagggagccaactggtcttgctcagtggatcccacccccatgggccccagcaagctaa

SEQ ID NO: 816191 - DNA, 638 bp, Homo sapiens
atgttaaagaaaaacagaacttaagtttaaccaatcagaagcaaccaaaaaccttataattatacaacaactatataagtagagaatttctaaagggatagamcaattaagatgactgtcttaactgtgataaatcaaatattttctttgttttacttttgtgtttatcatataaaagcctcctctttgtgtttccttggtggagctccttggtggaattctaggttggagctgtccaattagagaattgctgtttgctcaaataagctctttaaaattttattgcaccttagtttatctttttaatactgagtgtaaatgtatatgcatgtatatatgtgtctgtgtgtgtgtgtataaaatgtggagggatgttcaacattcctaagtaaaaaatgagattataaaataacacatgtattatgattctgttttaacaaaataatatattcaccagaaagaatatatactaagtaccaaaaatatttataggactatagtcaagttataataaacatcaaagatagaccaaaagaagaagagaaaccataaaattgtgctgggaaggctgaaaggcatgtgtaggctgaaaaacatgctgagctcttagctttaccctttaaataatgtggacaaag

SEQ ID NO: 816192 - DNA, 638 bp, Homo sapiens
atgttaaagaaaaacagaacttaagtttaaccaatcagaagcaaccaaaaaccttataattatacaacaactatataagtagagaatttctaaagggatagaacaattaagrtgactgtcttaactgtgataaatcaaatattttctttgttttacttttgtgtttatcatataaaagcctcctctttgtgtttccttggtggagctccttggtggaattctaggttggagctgtccaattagagaattgctgtttgctcaaataagctctttaaaattttattgcaccttagtttatctttttaatactgagtgtaaatgtatatgcatgtatatatgtgtctgtgtgtgtgtgtataaaatgtggagggatgttcaacattcctaagtaaaaaatgagattataaaataacacatgtattatgattctgttttaacaaaataatatattcaccagaaagaatatatactaagtaccaaaaatatttataggactatagtcaagttataataaacatcaaagatagaccaaaagaagaagagaaaccataaaattgtgctgggaaggctgaaaggcatgtgtaggctgaaaaacatgctgagctcttagctttaccctttaaataatgtggacaaag

SEQ ID NO: 816193 - DNA, 617 bp, Homo sapiens
aggaaaataaatcattatatcaaaaatatacctgcactcgtatgcttatagcagcaatatgcacaatagyaaagatatggaaacaaactaaatgcccatcagtggaagaatggataaagaaaatgtgatagatagatagatagatagatagatagacagatagatagatagatagatcaatccaccatggaatactattcagccataaaaaagaatgaaatcatgtattttgcagcaacatggatggaactggaggccatcatcttaagtgaaataactcagaaatggagtcaagtactacatgttctcacttatagaggggagctaaataatgtgtacacatggacaaagagtgtgcaatgttagacactagggactcagaggggtgggtgggcagaagcagggaagatgatgagaaattacttaacaggtacaatttacattagttggatgataaatacattaaaagccaagatttcaccacttagcaatatatgcacataacaaaattgcacttgtacccctttaattttagcaaaaatccctatggtagtgctcttttatttgtggtttcactttccatggtttcggttactcacagtcaaccacaatctaaa

SEQ ID NO: 816194 - DNA, 617 bp, Homo sapiens
aggaaaataaatcattatatcaaaaatatacctgcactcgtatgcttatagcagcaatatgcacaatagcaaagatatggaaacaaactaaatgcccrtcagtggaagaatggataaagaaaatgtgatagatagatagatagatagatagatagacagatagatagatagatagatcaatccaccatggaatactattcagccataaaaaagaatgaaatcatgtattttgcagcaacatggatggaactggaggccatcatcttaagtgaaataactcagaaatggagtcaagtactacatgttctcacttatagaggggagctaaataatgtgtacacatggacaaagagtgtgcaatgttagacactagggactcagaggggtgggtgggcagaagcagggaagatgatgagaaattacttaacaggtacaatttacattagttggatgataaatacattaaaagccaagatttcaccacttagcaatatatgcacataacaaaattgcacttgtacccctttaattttagcaaaaatccctatggtagtgctcttttatttgtggtttcactttccatggtttcggttactcacagtcaaccacaatctaaa

SEQ ID NO: 816195 - DNA, 640 bp, Homo sapiens
atttcacgttacgtctcttggtttcgttacaggaatcttctttcagttcactaattgtatcagtttatcactgctgcataacaaaccattctgaaactcagcagcttaaaacaatgagtatgtattactattgctcatgaaccaagtcagcaggctgatccttgtgatctcagttagattcacttaggtgtctgaaggaagctgtgggttggctttgcagattttggctggttttagccaaaatgtctggggtctcaactaagatgactcagctcttctctgggtactctctcctcaggctagcctaggcatattctcatggtggttatggggctgtgatagagcaggaccattgaggccaagtctcaagctcctatcaggtttcattattatttttgtgaaccctacatatgttgcctttgcaaacatcacttcattaaaaagtataaaaatcatgttttacaatggtattggtagaaagattaatatgatccaagctacacttattactgtaacttcatcttttttctcctacttaattaattgttattattayttttggagatagggtctcactctgttgcccaggctggagtgcagtggcatgatcttggctcactgcagccttgaccttctgggt

SEQ ID NO: 816196 - DNA, 619 bp, Homo sapiens
atgcacaatttcacttggaatttamgcattataattacagagtcaccaggatttttaacacctagaatttccatcacctaaaaacacatccagcataagtaagatttttttcccataagaacactgtaagaaaaaaaatactgcatctgtgagaatattccaatgaagataatcctctattaagaaacaaataaattctcaattctttggaaatggtggaaatagttagctattataactgtttatgagagcagagaaatgactgaatcttagcttgtaagaaatttctccatgtacttatcaagccattaattttcttaataaattagaaatttccttttacaattaataaaaactggctttagttaccaaggtttcttttaagaaaggtaaattttggtgcttcatatttgaaatcaatttcaacaaaaaaaagacaagtttttttcacaacagttctctctaaggcaccctgatattggcatcagaaagaatgaggtcatgtgcttttaataaacccaaaagctatcaaatgtagaaaatcatttggttatttcctttactggatacagaaccttatatgtattagtcatttaattatgagttcagaaatgaattt

SEQ ID NO: 816197 - DNA, 512 bp, Homo sapiens
ataataataatttagaatgataatatataataatttagaatccatctataaatggattctaaattattgagctaatctctgattgaaggacctttacattaattatctttaccttaatcatgctgtgataaatatgtgaatatactttgttgtactgtagaataacttcctaaaactagtatttttatattaaatactttatatatttaagttttcctagcattatcaaattattttccagaaaatgttatagcaattcacatcctaaccagcccagaatgcatgttagtgatccaacaactctaatctaatgggaaaaaagagcattcattattttctctaccaactgctcaagtaaacatctcttcatatttaatgactatttatatgatcttgcttataactcatatgtttataytttttgtccactaattaaggagttttcattttcttaaaagtgttgtgattgcttgcttatgattgctagtgatataaataagattaaccatttc

SEQ ID NO: 816198 - DNA, 608 bp, Homo sapiens
tgggccaaacaatattttgttatttacagtagctttattgcagaaattatctgccaaacaactttcagctttgttyttccagaatgtcttggctattcttggccctttgcccttccctgtgaatttttgaatcagtgcgtcaattaaaaaaaaaaaaaaaccacccataactctgatatttgttaggataacattgaaaatattgataaatttgggaaaattgtttacctttataatattgagtcatctaatctacgaaaatgatatatctcttatttattttgttattctttcatttctgttttaagttttatagttttccatgtatagattttatatatttttatttaaacatactctcatgtatgacattttaattattgtgaacggtatcatgtctttaacttagtttcataattagttgtagccaataggcagaaatacagtggatcttggtatcttgatagatcttatatctagtaacctttcaaaatttatgacttttaaacatgctgggcttaatacctaggtgatgggttgataggtgcagcaaatcaccactgcacatgtttaacctatgtaacaaacgtgcacattctgcatatgta

SEQ ID NO: 816199 - DNA, 425 bp, Homo sapiens
cttccatccttcaagcacccaacactttcacactttgtattggtctgttctcatgctgttaatwaagacatacccaagtttgggtaatttataaagaaaagatgtttaattgactcacagctccacatagctggggagacctcacatcatggtggaaggtgaagaaggagcaaagtcacatcttatatggcagcaggcaaagagagcttgtgcaggggagctcccatttttaaaaccatcaaatctcatgagacttattcactgccacaagaacagtatgggggaaaccacccccatgattaaattatctccccctggcctcaaccttaacgtggggattattacaattcaaggtgagatttgggtggggacacagccaaaccatatcattccaccctggccccttccaaatctcatgccctcac

SEQ ID NO: 816200 - DNA, 457 bp, Homo sapiens
tgtctttttctgagccctccaaactgttccaacctctgcctgttacctaattccaaagttgcttccacattttcgggtatctttatgcagcaccccactcccagtaccaatttattgtattagtccattctsacgctgctaataaagacatactcaacactgggtaatttgcaaaggaaagaggtttaactgactcattgttccacatggctgtgggggggggtggggcttacaattatgacagaaggtgaaggaggagcagtcacgtcttaatggcagcaggcaaagagagtttgtgcagggaaactcccatttatacagccattagatctcgtgaaacttatttgctaccatgagaacagtatgggggaaaccgcccccgtgattcaattatctccacctggccctgcccttgatacatggggattattacaattcaaggtgagatttgggtggg

SEQ ID NO: 816201 - DNA, 457 bp, Homo sapiens
tgtctttttctgagccctccaaactgttccaacctctgcctgttacctaattccaaagttgcttccacattttcgggtatctttatgcagcaccccactcccagtaccaatttattgtattagtccattctgaygctgctaataaagacatactcaacactgggtaatttgcaaaggaaagaggtttaactgactcattgttccacatggctgtgggggggggtggggcttacaattatgacagaaggtgaaggaggagcagtcacgtcttaatggcagcaggcaaagagagtttgtgcagggaaactcccatttatacagccattagatctcgtgaaacttatttgctaccatgagaacagtatgggggaaaccgcccccgtgattcaattatctccacctggccctgcccttgatacatggggattattacaattcaaggtgagatttgggtggg

SEQ ID NO: 816202 - DNA, 457 bp, Homo sapiens
tgtctttttctgagccctccaaactgttccaacctctgcctgttacctaattccaaagttgcttccacattttcgggtatctttatgcagcaccccactcccagtaccaatttattgtattagtccattctgacgctgctaataaagacatactcaacactgggtaatttgcaaaggaaagaggtttaactgactcattgttccacatggctgtgggggggggtggggcttacaattatgacagaaggtgaaggaggagcagtcacgtcttaatggcagcaggcaaagagagtttgtgcagggaaactcccatttatacagccattagatctcrtgaaacttatttgctaccatgagaacagtatgggggaaaccgcccccgtgattcaattatctccacctggccctgcccttgatacatggggattattacaattcaaggtgagatttgggtggg

SEQ ID NO: 816203 - DNA, 619 bp, Homo sapiens
aagcctgcggacgcgcccgggcgcccccgcgctccgggtgaatcgcgttctcagagggaggctccagggcccggagaccatccttttgtcaggcctgaggggagcttcgctgtctcgccttagygctaccgaacctcctttgttttacagaaggggaaactgaggtcgagagaggggaaagggcctcgctaggccaactcatgagccagaaacaagtccgcgccactagctctttctgcctttttacggtgtctcttacctcaaatctgtagagtttggctgctttttaatggctccaacacagcagactcacttgggattctcctcgcagcaagcgaggaaaattccaagaactctgtggagtttcgagtggagagtgactggctggggggaatgtgagccctgaagctgtgccgcctgggggtcccgaggacacaggtcctgacaggtcgagtgagcgcgtgttcatgaaacagttgtaggttagaacccacgtcaaaggggcagttcatcccctttgggatattatacgggaggagggctaccaagaataacgtgtcaagagatcagatttatcacatttatattgaaaagcactttcttagtagttcggcccctc

SEQ ID NO: 816204 - DNA, 585 bp, Homo sapiens
acagaaagcaggaggcagtccagctgtttcacagtgggcaggtctatgcaaacctgccacaaagtttgaggaagctgagaagccaaagaaagaggctgacaaatctggtttcatatatatatatatatayacacacacacacacgtatatacacacacacacatatatacacatacacatatatgtataaacacatatatattttattttttatatttatttatttatttattttgagacggagtctggctctgtcgctcaggctggagtgcagtggcgagatcttggctcactgcaagctccgcctcctgggttcacgccattctcctgccacagccccccgagtagctgggactataggcgcccaccaccacacctggctaattttttgtatttttagtagagacggggtttctccgtgttagccaggatggtctcaatctcctgacctcatgatctgcccgcctcggcctcccaaagtgctgggattacaggcgtgagctaccgcgcccggccatatatatatatatatatatatatatatatatatatatatatatatatatatatttaaacagagtcttg

SEQ ID NO: 816205 - DNA, 626 bp, Homo sapiens
ttcctctacttccccttttcacatgtaaaatgtcaatttactgaggctaatcagagcctcacaagaatgtaacaattcgcctcactacctaccctacctcccgttttccccctcctgcttgctctttctcctttaaataatgaagttccctgccaggtatggtggctcacacctgtaatcccagcactttgggaagccaaggtggacggatcacctgaggtcaggagttcaagaccagccttgccaacgtggtgaaaccctgtctaaagggggttttgggaattcttaaattctaatcgtttatatgtaaattttgcggacaatttttgcatacatgtcatgatgttaccagtggagggtgtccaggtccctggtgtcttaaacaaagatttggacaaaatgtacaaagtaaggaaagaatgaagcaacaaaagcagagatttgttgaaaatgaaagtacactccacagggtgggagcaggccaaacataggggctcaagggctcagttacagaattttcctgggtttagggtgtggtggctcatgcctgtaatcccagcactttgggaggccaaggygggcagatcacctgaggttgggaattcaaggccagcctcaccaacaca

SEQ ID NO: 816206 - DNA, 329 bp, Homo sapiens
gtttaaaaataaaaaccagtgagcaaagggcaaaaatgaatactcctatatcttatatgagtcttaattcaccattttactttagattgactttttaaacattaattctaattataaaagtaatgcaaatagattttaaaaaactcttggccaggcacaatgccttatgcctgtaattccagcaccgtgggagaccaaggcagtagcctgaggccaggaatttgtgaccagcctggacaacacagcaagacccctagctctacaaaaataayaataataatagtaattagggcatggtgatgcacatttgtagccccagctgctcagga

SEQ ID NO: 816207 - DNA, 596 bp, Homo sapiens
agtagcaaacttaccttgcacttcattaaagaaaataaatttgtatttaaaatcttctcacaaagaaaattctatgtccagatcactggtaaattcaacaaaatatttaagaaaaagaaataccaaatattaatgaattcagatatttagggaggagcttttacagaaaagtgttaaagcttttatagaaaagtgcttccttcttcctgcttataacaaaactggagaggagaaaaataaattgaatgaggaagtagtcatcaaaaatgaactaggacttgataattcggaaatttctcagcttatctaaattgcaaaaatcggtaaaattaagacattcgctgtcaggaaattgtgctctagaaaaaaagctatgatgtgactggacaactttttgctaaagacttgatttgcagaaaaattaaaatgtcagagtaatttagccacaaaaaaagggctcttcgaaaakattaagtgcatgactcttagatacccttacccatcacaacaaaagccaaaattggagatagaattatccatcaaatgtcaatgaaaaggctttttgtttaacggaatgaatctctgtgacacacagg

SEQ ID NO: 816208 - DNA, 620 bp, Homo sapiens
acttagccataaaaaggaatgtattaatggcattcacagcaacctggatgggactggagactattattctaagtgaagtgactcaggaatgraaaaccaaacattatatgttctcgctcataagtgagagctaagctatgagcatgcaaaggcataaaaatgatacagtggactttggggacttgtgaggaaagggtgggaaatgggtgagggataaaagactacaaactgggttcggtgtattctggttgtgaggctggaaaatagggtctggaggcagggaacataaggctgattcacacttcagctataacaggaaatatcctctctataaggcgtaggccaagtaaatgactttgtaactttacttcatcttcttcatttacatagggtgtaccccaagtagagggtatttaaactcccaaaagttctgtaatggagcctttgtgtccctatgctcagtcccgctcttacaccgtggaatgtactttcattttcaataaaacccttcattccttccttgctttgttagtgagttttgtccaattctttgttcaagacaccaagaaccttggatactctctaccgctaacatttgtgtgatgggtgcaccaaaatct

SEQ ID NO: 816209 - DNA, 446 bp, Homo sapiens
gtcaaagcaaggagcaagactgcaacaaaagcttaggcacttgtccatgagtcaaggacctcagcaatccacttgccatttaaaataatgtaaayttaccatgtgccaagcaggactcttgatttctacctcctaaaacctgctctcccctgaatttctttataatagctgtccaaacaaaatatcacagactaatattcttaagcaacagaaattacttttcaacacttctggattctcaagttccatgatgaaggtgtcagcaggttcagttcttctgggccctgtttgcttggcatctagatatctgccttcttgctgggttctcccatggggctgcgtctgtgcctacatacttcttgtgtctctctgtgtgcacatttccagttctcagaaggaatttccactccttctaaggacactcatcttactggatttagttccac

SEQ ID NO: 816210 - DNA, 570 bp, Homo sapiens
ataggagtggtgagaaagggcatccctgtcttgtgccagttttcaaagggaatacttccagtttttgcccattcagtatgatattggctgtgggtttgtcataaataactcattattttgagatacaccccatcaatacctggtttattgagagtttttagcatgaagggctgctgaattttgtcaaaggccttttctgcatctattgagataatcatgtggtttttatctttggttctgtttatatgatggattatgtttattgatttgagtatgttgaaccggccttgcatcccagggatgaagccctcttgatcatggtggataagctttttgatgtgctgctgcattcggtttgccagtattttattgaggatttttgcttctatgttcatcagggatattcgtctaaaatttccttttttgtttcgcctctsccaggctttggtatcaggatgatactagcctcaaaaaaatgagttaaggagaattccctctttttctattgattggaatagtttcagaaggaatgggaccagctcctgtttgtaactctcatagaattcggct

SEQ ID NO: 816211 - DNA, 570 bp, Homo sapiens
ataggagtggtgagaaagggcatccctgtcttgtgccagttttcaaagggaatacttccagtttttgcccattcagtatgatattggctgtgggtttgtcataaataactcattattttgagatacaccccatcaatacctggtttattgagagtttttagcatgaagggctgctgaattttgtcaaaggccttttctgcatctattgagataatcatgtggtttttatctttggttctgtttatatgatggattatgtttattgatttgagtatgttgaaccggccttgcatcccagggatgaagccctcttgatcatggtggataagctttttgatgtgctgctgcattcggtttgccagtattttattgaggatttttgcttctatgttcatcagggatattcgtctaaaatttccttttttgtttcgcctctcccaggctttggtatcaggatgatactagcctcaaaaaaatgagttarggagaattccctctttttctattgattggaatagtttcagaaggaatgggaccagctcctgtttgtaactctcatagaattcggct

SEQ ID NO: 816212 - DNA, 658 bp, Homo sapiens
gtgtttttgtggaggttacataggcatgattgattaaaccattggccattggtgatcaacttgaccttcagcccttctcccctccctggaggttgggggatggggctgaaggtctcaaccctctaatattgtctttggtcattctggtgaccagcctcactctgaagttatcagtcaatataagtataaaaaaaagcaagcactttggagagtacaaggattttaggagttgtatgttaggaaactggggaggaagaccaaatgcatatttcacagtatcacatcctcacatctgccaaacctaattgaacatctgaggattttggtatccacaggggtcatggaaccaatccactgtggacactgagggatgactgtaaatatattaagcataatggaagccaagtttcttgaagggaactgtaaatgtagaaagggcaagagtagcatgtggtcttgaattggaattgaagaatattagtctgttctcacactgctataaagaactgcccaagactgggtaaaytataaaggagagaggtttaattgacgcacagttctgcaggactgggagacctcagaaaacttacaatcgtggtgggaggggaagcaaacacttccttcttcacatggatctcatgagaacttcagatctcat

SEQ ID NO: 816213 - DNA, 539 bp, Homo sapiens
taatccactgtaagcgttttttgtgttttttttaatctcttcatgtattgagtatcaatgttccaagtgcattgctccatcagggcccagccaggtaaaggagacacatcccttccttccctagtcaactggatactctagtggagcagatcgacttcacagaccagctacacaaaatgctagctaaccacaattgtagcaaaggctggggaggagcaataggagcacttgacccatcagactagaggagctggaaggacatcacctggtaaagcctttgataccacctgctgagtgtcattcatctaatgccatgtcttcactgacctcagtcacaaagaggtggccacaggctgcacatggcccatccgaagggttttgtttggactgtgtggcattgacccacataccattttaaatkgaattaaaggattttaaccttttcattccttatctttcttccatttaaccttaagtaccatctggcaggtaggtcatgctttgtttcaaagagttctgacctcataagagagggttga

SEQ ID NO: 816214 - DNA, 651 bp, Homo sapiens
ttaccactgtctgtgtccagctgatgaaaattactgaaattgaagtcttgtcttaatcaactaatattacaccataatttagttttagtcattgtttataagaatctttgaggcatccttttgaagacagtttagtcaactcagagtattttagggcctggctatagaatatagcctttaggatttataagttctgagtacagcagtgcagaaaatccagggaggtaatagtagctgcttggctggacaggctgtggattccataataattctccttcccttcctgtctacatccagttatttcccttcctaccagagtcagcccttcttgatcgtttcatcttcctcattctgcttctatgtaaagagccttgggaatgtcactgtttgccactcttcaaagtagcaatgccatcaaaatgtgatattccagtcatctgtgcccatataaacattggcttcacgttgcgtcagttaaggggttttggaccatgtaacatcggtgagcaagtattcttctatggtcattaattaaatcattgtttatagwctcagattgttatagtatggaggcagcataacatttttcatctcaagtgtcatgaggtccagagggcccccttacatattttcaccctgactcagccaagt

SEQ ID NO: 816215 - DNA, 564 bp, Homo sapiens
actccctcacaaatgaatggatgaatgaatgaatgaatgaatgaggctcaggctctgtggctcccctttgaaaaaataatgctctgtwtcatcagcagaataaaggaaccctggggaccacatttatgttccaagcatcttcaaagcttttgctggctaaaagagaacaattacccaaagttattctagagtgttattactgctcccaaatagtttcaacagccttcagggatgacagctgacaaatgccatgcaaagtaaaaagttatctattactattaatgacaaatgagaaatcaacagaaacctggagatttcctaggctattctggctgcctcccttgctctgcttcatcagccatggaagacacagctgccggcggtttaagtctagagacacatgaggctttcttctgcctcttaggcaggctggcaggtgaaggggcagctggattccagggtggagaggagagagtgaagggcctttcacctcacaggtcctcactgcaccctagtccagagaggaaggtcaaatattgagaaagaagctttttagccaaaggg

SEQ ID NO: 816216 - DNA, 596 bp, Homo sapiens
tgtttcaattatggcccattcctttggggataaagcgccaactcaataatatgatataaaaagccacttggggtttaatgtccacctgctcctccacaaggtgtcccaatacctgtsaaagctttctccttccgccccatgcctatgcctatgccccaccacactgagagctcacacgccctgaccccagccctcctgctcactgctctgccactaggctgccctgccctgcaccacagagaactccacattccttgcagatgttccctcccagaggccttcccatgctttcagccccaggtgcccctgcatgggcttccacagactcccctgatccggccccagcccaccgtgcctatcacatggaattgtaaactgtctgttgatgtgtttgtttgacccattatcatggaaacttctaaagaacagagactcttattttagctactaatcccaggtaccccacacagagcctagagcacagtttgtgctcagaataaactgctgaataaagaaataagcgagtccccatcaggcattagaacagataaaatgctgaaattcccaaggtaggccaggagttaaaatatagacaa

SEQ ID NO: 816217 - DNA, 609 bp, Homo sapiens
aaatcctggctctgttgctttctatctgtgtgaccttagacaggtcattttcactctctgggcctcaaatttttcayctctaaaatgggatgggtgacctcctcatggtgaagatgggataactaaataaagtaatgcatgtgaagaggctggcagggcacacagagcaggtgctcagtgaagctggctttcctccatatccacctttcagagcacccctccatcagctttgtttcctaactcctggcctgcctcctttcttgtggcgccatctcacagccaaatgacaacaagccctctctgtccctcacaagtgagtatcttcctttgtctaccgtcaccctcaccccaagctcttctctgctgtgggcagccagactcagcttcatgggcatgtgaccttgttacctggggcagtgactatgtgacagagctgaatttctaccctgtcctaactttgcttatctttaacaaacagaatgcctgtgataaaaagttccctttgcagccagaccagctgagactggtacatagaaccaagacagctgaccaaaggacttcaaaaagacctcagtcttcatgataatcttatttccatgctaaatgata

SEQ ID NO: 816218 - DNA, 609 bp, Homo sapiens
aaatcctggctctgttgctttctatctgtgtgaccttagacaggtcattttcactctctgggcctcaaatttttcacctctaaaatgggatgggtgacctcctcatggtgaagatgggakaactaaataaagtaatgcatgtgaagaggctggcagggcacacagagcaggtgctcagtgaagctggctttcctccatatccacctttcagagcacccctccatcagctttgtttcctaactcctggcctgcctcctttcttgtggcgccatctcacagccaaatgacaacaagccctctctgtccctcacaagtgagtatcttcctttgtctaccgtcaccctcaccccaagctcttctctgctgtgggcagccagactcagcttcatgggcatgtgaccttgttacctggggcagtgactatgtgacagagctgaatttctaccctgtcctaactttgcttatctttaacaaacagaatgcctgtgataaaaagttccctttgcagccagaccagctgagactggtacatagaaccaagacagctgaccaaaggacttcaaaaagacctcagtcttcatgataatcttatttccatgctaaatgata

SEQ ID NO: 816219 - DNA, 609 bp, Homo sapiens
aaatcctggctctgttgctttctatctgtgtgaccttagacaggtcattttcactctctgggcctcaaatttttcacctctaaaatgggatgggtgacctcctcatggtgaagatgggataactaaataaagtaatgcatgtgaagaggctggcagggcacacagagcaggtgctcagtgaagctggctttcctccatatccacctttcagagcacccctccatcagctttgtttcctaactcctggcctgcctcctttcttgtggcgccatctcacagccaaatgacaacaagccctctctgtccctcacaagtgagtatcttcctttgtctaccgtcaccctcaccccaagctcttctctgctgtgggcagccagactcagcttcatgggcatgtgaccttgttacctggggcagtgactatgtgacagagctgaatttctaccctgtcctaactttgcttatctttaacaaacagaatgcctgtgataaaaagttccctttgcagccagaccagctgagactggtacatagaaccaagacagcygaccaaaggacttcaaaaagacctcagtcttcatgataatcttatttccatgctaaatgata

SEQ ID NO: 816220 - DNA, 543 bp, Homo sapiens
agaataggcagtttttctggtagctatgtgtggtcgtctcactaaagagacagcaaatggaacataagtagaacttgtgaattcaggtcccaggcactatccttagagcagtggtacctcatttatcccttttttaaaatcttcccattggttagaatccagacagtagctgaagctctaacagaaatcttggaatataatgcaaccttgggaatgaatgccttgcacagagtgacaagcctggagattttgagggcctcttccaaaaaaagcaaagtttggggaaagagaatgtcagttttcttggcttcaagactagacttaggaagactcagggtagagtagtgctttccagggaacagggtcaagttaggagttgagctactgaagtttttggtttcaagtctctggtcagaaccctagggcagaccagartttatgatagctcaggtcatgggtgtatcaaacaccacactgagggcttgtgtcgagagatcagcgatactctagagtcactgtgagaccctcaagccatccaccagc

SEQ ID NO: 816221 - DNA, 480 bp, Homo sapiens
ttcctaagggagtctaaatcaggatttttatataaaatctatgaaatgttgactacttaaaaaaaaaaaaaggaatatamatctgatcaaggctctagatgtaactcccaagttacaggaaatctctgagatagagaaacacacagaacagcaccaagggaggtaatcaccaaatttcagataggaggaaactacagtttcttcaacaaaattttacagcaatagcaaggaaaaaaagagaggagagaaacctataaattaaatgaaatttaatagtgtcaattgcactgtatggactttctttggatttgagccttgaacaaataaattggttttttaaaagatgacctctcattttttgaatgctatgatgttttgatgttattaaggaattattgttctttgttggtgtggtctagtactgtggttatttttcttttttagtaatccacatttaaaaaatatattttaaaagtaatc

SEQ ID NO: 816222 - DNA, 644 bp, Homo sapiens
aatgctctccaggaagcattctgctccactcatccgtgggaaacaaattacatttattgagtaccaggcactgggcaatgtctttacataggctatttcattaacacacacgcaccagaattcgacctcattatcctcgttttatagtgactttgagaaggtctcacaaccagacaaagccaggatgctaacctaggtctgcctgactccaaagcccatgtttttgttccttctcaacactgtagagaaaaatcatttatagaaactgaacagagtatgaggaaaggagatatgataaagtaatgcagctttaggatggcagttagtgactgccctggaacaggattaaaggaggctgtgtcaggttcagcttcccctgaattgggcttcccttatatctcaggagattgccctataaaatcagtaaaatttgtgcacttttttaaggatatggagtaaaattgtaatagcattataagctggtaattttcacacaaagaaaaaaatacgttccgtcgtcacagactctactcctaaacttagctaactaactatcttgcaaatgcctgcagtttgtcccagtgggcaatgtgagaggggatgtcggtggctcaggcagcacartccatcaccaacacagagaa

SEQ ID NO: 816223 - DNA, 477 bp, Homo sapiens
gacatgctgagatacctgtaataattgcaatttttatgttggatgattgtatgccacagaagcacttaaatttcctggttaattggtaacgttaatcagatctttacctatggctgttctgggtttttgtcattcacagttattattttaatttcttctttggaagcgttcgcaatcagctatagtccaaaattgctaattaagatcaagcaaaacaaaattaattacgtaaaattaatttataaggatgtttttatgacgtaaatgttttattttccagagccaaggaaattttctgtcacaagctatctaccgtttgcaataatttgataaataatcctttgtgaacaaatatggaagcatttgctttttctctctacttgattcctkcaaaattcagaaactatttgtggatatttttagttttatttatacaacttcagtaaaaatccactctctctttataagcaggatcca

SEQ ID NO: 816224 - DNA, 571 bp, Homo sapiens
ttttgttagatttatacctaagtattttattttttgaatgataatgtatatggcactgtgttctcaattaaaagtccatttgtttatttctggcatataraaaagtgattgacttttgtgtattagccatgcattctgcaaccttacatatcagtaaccttgcatgtcagttcccaaaattgtcaattattttggattttctacatagatgattatgtcatctgcagagaaatacagttttatttcttactttctcatctgtataccttttatttcctttatttccttttcttgtcttactgcattatctggtacttccagaacaatgttgtaaagtattggcgagagggacatctttgccttgtccttgatcttagtgggaaaacttcaagtttctcaccatacttgaggatgttagctgtaggttattgtagatattctttattaaggtgaagaagttcttccctatttctagtttactgggagtttttgtcacaaatctgtgttgaattttgtttactgaaagttatcacaaatgggcgttgaattttgttaatttttttgtatatat

SEQ ID NO: 816225 - DNA, 633 bp, Homo sapiens
tctaatatctgaactggggaggcagttaaaccaggaggcatttagtgtgactgccatgtttcataggttatggaackgaggcccagagagggaaagttatcagccaaaggtcacttagagtattcatggcaggtctgagtctgcaacttgggtctcctgattcccagtacagtgttctttctactccccttcggcttctcaaacctcacccctaactctggtccacagctgaatggattcttcccatggatccaggagttcttgagtcatcacagaccaccatcactatgggagaatgcaccatgttggtggaggcagccacactctcttaatacaaaggacaggatgcattagtcagtaatggccacaacagtgctatgtaacaaaccaccctggaactcaggggcttacaatagcaaggatataacctcatgttcatgggtctgcagattaacagagaattgggtgacccaggctggacttggctggacaggcctcctttggaatgctggttggctgaggttggctccaggatgaggattggaatgcaagtggcttaacatgtgttcaatctgtaactcaagctagagcctagaagtctcttattgcaaatcaaggaagcacacaataatg

SEQ ID NO: 816226 - DNA, 658 bp, Homo sapiens
gctaagcattattgtgcctatattacctcctatatttacaggagaggaaatcgagcttcagtggggtcacttggtcaggatctctcaaagtgttaagtggcggagctgaactatgaygctgggtaattctgacttcaatagcagcaatctctctccctcacacctggtgggtgtgactccttattccagcaaactaagtgtatcttcatcaagtatctcaaaaagagtaatttggagcaaataagcgagctcatagatagcaggatcttaaagctgactgttttgtcccagaaatctcaactttaggaatctatcctaaaaaaaaaaggcaatccaaaaaaaaaaaaaaaaaaaagaaacactgcagataagagtttatatgaagagatgttcaacaaagatgctatttataacaacaaaacctgggaaaagaattcaaacacccagtaacacagtagtagagaattaagttatagttataactatatgatggaatattaggcaactgtgaacaataatatcaatgaagtgtttgtaataacactgaagagccttaaaacctaacggagagtaaggcaagatacaaacgtctgtgtaagttagaactcatttatgtaaactaatatttatggaaagagagatgtagaccaaaatagta

SEQ ID NO: 816227 - DNA, 622 bp, Homo sapiens
attgtgcctatattacctcctatatttacaggagaggaaatcgagcttcagtggggtcacttggtcaggatctctcaaagtgttaagtggcggagctgaactatgacrctgggtaattctgacttcaatagcagcaatctctctccctcacacctggtgggtgtgactccttattccagcaaactaagtgtatcttcatcaagtatctcaaaaagagtaatttggagcaaataagcgagctcatagatagcaggatcttaaagctgactgttttgtcccagaaatctcaactttaggaatctatcctaaaaaaaaaaggcaatccaaaaaaaaaaaaaaaaaaaagaaacactgcagataagagtttatatgaagagatgttcaacaaagatgctatttataacaacaaaacctgggaaaagaattcaaacacccagtaacacagtagtagagaattaagttatagttataactatatgatggaatattaggcaactgtgaacaataatatcaatgaagtgtttgtaataacactgaagagccttaaaacctaacggagagtaaggcaagatacaaacgtctgtgtaagttagaactcatttatgtaaactaatatttatgg

SEQ ID NO: 816228 - DNA, 622 bp, Homo sapiens
attgtgcctatattacctcctatatttacaggagaggaaatcgagcttcagtggggtcacttggtcaggatctctcaaagtgttaagtggcggagctgaactatgacgctgrgtaattctgacttcaatagcagcaatctctctccctcacacctggtgggtgtgactccttattccagcaaactaagtgtatcttcatcaagtatctcaaaaagagtaatttggagcaaataagcgagctcatagatagcaggatcttaaagctgactgttttgtcccagaaatctcaactttaggaatctatcctaaaaaaaaaaggcaatccaaaaaaaaaaaaaaaaaaaagaaacactgcagataagagtttatatgaagagatgttcaacaaagatgctatttataacaacaaaacctgggaaaagaattcaaacacccagtaacacagtagtagagaattaagttatagttataactatatgatggaatattaggcaactgtgaacaataatatcaatgaagtgtttgtaataacactgaagagccttaaaacctaacggagagtaaggcaagatacaaacgtctgtgtaagttagaactcatttatgtaaactaatatttatgg

SEQ ID NO: 816229 - DNA, 600 bp, Homo sapiens
tttcccacttgggcctagcattccaaatttaaagttcccaatgacagtggtaccttacctttccaaagatcacaagacccattttctccttayttcaatttcgcaagcatcattcccaatagatatctatgtgaaaatgttgtatttctaacccctcattagaaaactagaaaaataggccaggtgcggtggctcacacctgtaatcccggcactttgggaggctgaggtgggcagatcacttgaggtcaggagttaagacagtctggcacatggggaaaccccgtctctacaaaaatacaaaaattagctgggcatgatggcaagtgcctgtaaattcagctacttgggaggctgaggtgggagagtcacctgagcccaggaggtagaggtggcagtaagctaagattgtaccattacactccagcctgggcaacagagcaagactccatctcaaggaagaaaaaaaaagaaaactagaaaaataatcttagcttcttattccagaattatttcctaagataaacatttgaggaatgttttaattacaaagtaagacttttatcatacaaacaaagtctgtggcctcagcagtcacaag

SEQ ID NO: 816230 - DNA, 621 bp, Homo sapiens
ttggaggagaaaatgtgctctctgtatatagcagatgtcaaggcagcagaagaaaagggaagtaaaaggagattccctgcatgcccagttccttctcactcactcataagatgaagagatgataagcttattatgctagcggaggtccctctgcatggaagcaggggtcagagaaaggagattcctctccaataaatgtttttggtgactgcacatgagctatactctgatgacttcagaaattactagggaagtattggagggaaggtggcctgatggtcctgcagtaacaggtgggaatgagagcccaataaatctaatttattaggccagtgtcctacataggttattatctaacacagattagaaaaatcacaatgaaatatattaaacactagattaaacatttgtgacaatgttgtgacaatatgaaggaagtggtgatgaagtgctggaggcaggggccaaaattagagtggggtcaggcmagacttcatggaagcttctgacttgtacagataatgaataggagacctatgtggctgaactcaggggtatgggcatgggaagaaactgagggagaagacgtgggagagacagtttggagggagttggaggatt

SEQ ID NO: 816231 - DNA, 598 bp, Homo sapiens
gtgtgtgcaccacacaggccctattctccgctccagacagatgagctgtctcccttcccatcaaaggaaaggttaagaaggatgagacagggaaattcatgtgatgatgaaaaccaggtcaggtgaggggtttgaaatatgctttggttccggccacatgtggtggctcatgcctgtaatcccagcactttgggaggctgaggctggtgcatcacctgagatcaggagttcgagaccagcctggccaacatggcaaaaccccatctccacaaaaaatacaaaaagttagccgggcatggtggcaggcgcctgtaattccagctacttgggaggctgaggcaggagaattgtttgaacctgggaagcagaggttgcagtgagctgagatcgcaccattgcattccagcctgggcaataagagcaaaactctgtctcaaaaaaaaaaaaaaaaaaaaaaagaaagaaagaaagaaagaaatatgctttgattccaattgcctagcaggagccagtagcattgcaggcatttccctagytccagttccttaatggtgccatgcactttaggaacccagaggtaatcagagaaagttgcttc

SEQ ID NO: 816232 - DNA, 536 bp, Homo sapiens
ttagcaaactcctcagataaccaggaaacaaaaagcttaaagtaactgagtaacttacctattgtgacactacaaaactatcaataatcaggaaatggtcccatgtcttattagttcccagacctagtacttgatattaaaacacatcaatttttcagactcaaaattttgttggctattacaaaaactataaagtggactactccaatgaacagttttaagactgatttgttttaaatgacccacacacaaaattagtgagagataaaacacacaggtgccaccctttcttgtaatatcaatttacagaaacctttatataagtcacataaatgcttctccttttccccaatttgcttggttcacgggaacagatacgctaacatcaaactgccatgttggttaattctgagacattcaaaacctaaaataagcaaagtaataatactgaataagccacctctttctccatrgcagcctggtgtttcttgataagtttctccatttctgcagcaaaattgttacgctgagtttca

SEQ ID NO: 816233 - DNA, 651 bp, Homo sapiens
ggctgccagggagtgtggcagcactaagggcacttgtgccagtggctctgttggggtggggattaatgtctggagtggcccagctcctatggccagtgaggtcctagggtgcaggtgagggtgtggggagagaggtcactgcttcttctctcgggtggtgatggtgaccagctgcttggcagccttggcgatgtcataggcgcactggatcacctgctgagtcagcagctggaagtccactggggcgccgggctctgggggcactgtcttccggcactcactctgcagccggtaggcgctggcgttgagcagccgcagtgagctccgcactggctccagggctggcctctggagggggcaggagtgaggctggaccttggactttaagccgccagctgagatcagggcccagtttgtctgtgtctccacccaggtagcgatcagatgggattctccacgcctgccccagctcgaggccctcccactcctggtcctctctttggcccctgtacctttgggaagagggaggccatctcggtcacagccaaatggatcttctctgagcagggcacgaagctgcggggagaagggaggctataaagcagggggctctcaagggargttcccagggacagcagaacccagggcccc

SEQ ID NO: 816234 - DNA, 434 bp, Homo sapiens
tagcgtgatgcttggggttattggagcctgagcttgacctcaaacgggtggcgatttgatgggtacccccaggctggggaaaatgacagcgcttctcctaatcagctcactggattccatcaccctgagyggtaaaccagatgggcgtcaccccagttctgcagacacatacacaacccgtttgctgcagagccggacccagtggctacacccacagcggtctgtggtagagaactctcttccttctttccaccgacaggggcgagggctgcttcctcgcggcagcccccgcgaagaaatctcgagagaactggcatgaggagttaggttcatcacaaatacacacacactgcccccaaccctctgccgttgcctctctcagaaaaacaagacgtactgaatgaaatattttactaagcgttcagtctgtgcct

SEQ ID NO: 816235 - DNA, 631 bp, Homo sapiens
cacattacatagctaagagaaaataagaaaaatgaatattggaaagttatgagtctgtatcacccagggggaaaaaggcaaatctacggttgaagcaattccataccattcttacttgtagagagggcacatgagtgtattcgatgctgccatcaagacgtgagcataacagaagctgaagtaatttctgtcaattataggtccttaatgagatctatttcaacggtaaacctctctttttaaaataatgacgactatcgtcatctacttctggttcaattttaaaagcatttctttataaacttttcatttggccagaatattttaatacatgtaactgcttagagtgatcaccactaaaacattaatataacagagacacctacactagattgaccacagcaaggtaaatatagtaaaaatataccttaagagttacgcagtacctttcttcggaaaaatgcaaagtattttgtattttatttttcaagtcactatgtatcaggacctgttattatgcccgrcactttacatacattagcacatttaatgcgttaaatgttattaacccctgaaaagtgaggctcagagaggttacgtgacttgcccaggttacacggtatctgggttt

SEQ ID NO: 816236 - DNA, 652 bp, Homo sapiens
ttattatgcccggcactttacatacattagcacatttaatgcgttaaatgttattaacccctgaaaagtgaggctcagagaggttacgtgacttgcccaggttacacrgtatctgggtttgaaagaccatcctttttataccatacacaggcaagaagacaagggcattatatcctagatatagaactgcaaaaccagtgagagaaaaatctacacttgtctcaaggcaggggctgaaaaaaaaaagtctaatccgttagcaaagactgactgagattcctccgttaacaggaaaagccattcaatattcaattaattctataaacatttatggaactctgactcttcgaaattattcaggcatttaatgagggacagtcctgggtggtggctcagagcagagctgctggactcaagagggcctgggtgtgaatcccagcttcaccacttataaactgggtgatactggacaagaagttactgaacactttttgtttcttgggccttgtttgtttgttcatctctaaaatgtggattgtaacagcaccttcctcgttaggatgcaaggattaagtataaagtccttacaacaatgcctggcacagagtaagtgctatggcagggtggttatcattatagaaacactggttgt

SEQ ID NO: 816237 - DNA, 593 bp, Homo sapiens
caacttgcccaagacgtccttgagggaggatggtgactcatcgcacctacgccctccccaatgcctcccagagctgctctccagccctagtttccctcccaagtccacaggctactgctcaataggcctgtcatccagacaatgctcagaacactaccaggaaggaagagagggccctacccaggacaggcatctcttctatgactggtttacaatgggaccaagcagagtctgcctcgccagtcaaatcattcccctcaactctgggcccagagttaccagccacaaaaggctaagcacacaccctctccacccttttgtgcccagcgcctagtgctaagctgctaagctactaagctatatgttcctaggtacatgtaacagcacatgaagaaatgaatgaaaaaaaggagtgaatgaacccatgaaggagcaaactccacaggaagctccaagcaagacacatcaccacatgcaacactgcaaggcaggtattgytcatgccacattataaatcaaggaaagaaatctcagagaggttaagtaaacaccccatagtcacatagctaagaaatgatgaaactaggctttga

SEQ ID NO: 816238 - DNA, 656 bp, Homo sapiens
ggcaaaagacttacttcctaatgatgaactaattaaatgacccagaatgagagttggaactagtttagaaatgaaattgttttgtttccttatactataacatttggmacttgaagtatttgggacatgttatgaagttgatggattcttttaatatggtaatgttttctttctcatcacccactccaaacacctttataaaactgaatgagtatcttgtatttaggggaaaaatagtagtagggaggcatcaaaatatttctgataactattttcaaagtctgttcaactttcattacttcagtcatagaaactcttgttctaatattaagtagcataggaggaaaaacatgctgaggtcttacagtgtttaatggatttcttttatataactcattcctatctgtactacataactcattcttatctgtactgtatggatttcagggatcttaactgtttagaattccaactttcttttctgcctataacactctgtccactgtcttccttagtttccttttctgtttcctgtcctgtgatgtattctatggattagctgaaattatagttttctcagtccactttttcatcactcattccgtggatgattctacctcctttttgcatttctctgtatgcctgctatctcgcct

SEQ ID NO: 816239 - DNA, 551 bp, Homo sapiens
aggctgagttgagaggattgtttgagcccgggaagtggaggctgcagtgagacaagattgtgccgtgcactccagcatgggcaacagagggagaccccatctcaaaaaaaaaaaaaaaaaaaaaaawtttttttttttaaaagagttagcctttcttcttaagtatttatattagtatgaactcatgggtatttattttatcctgttactctcattatttatcttgctgttcaaattgtctcatcctcttttaaaatatttcaacccatctgtttcctgttaagctgcttttcctaatgagatgtggcccacggctaagtcactccctcagtgtcaccccccagccatagcacgtcagacactccctggtatgcagggcaggtggttgggagacctctgagcctttgtgtgagcaactaggtttcccgtttccctgaaactcactgaggcatcttcccaacaagggctgggctttttcctggaatgggcaggttgcagtcggaggagtcagtcctaattccacaggcaaagagttccaggaagggctgagc

SEQ ID NO: 816240 - DNA, 610 bp, Homo sapiens
ttttgaatatgggtcccatggagaacaaagttcaattgtgcatgtgcaagtgtctcctcaaaactactcatgactcttcctatagattactgaatatgtatatttggctgtcttgctcagcataaattcctatttccttttcacctccctcaaagtgtgtttctggcttctggctggaggctatgcctcccagcctgtcagaatggccaccctgtaagctgcaatcctttatgagaaataaaggtctccttatcaaatgtatgaacttcattattctttggttgacagtattttagaagcacataacttgtttaatttcacaggtttataactggaggagactttgcctcaggatgaatcgcacctttgagtctcactcatatctgatttagatgacagtctggactttagacttttgagttgatgctgggacatgttaagacttatgggagtggctgggcacaacggctcattcctgtaataccagcactttaggaagccaaggcaggaagatcacttgaggccaggagttcgagaccagcctgggcaacatagtgggaccctatctccacaaaaaawttttttaaaaatgaaaaaacaaaaagactta

SEQ ID NO: 816241 - DNA, 582 bp, Homo sapiens
ttctgccattgagctcatacactgagtttcttgttttttttttttttgttctacaattttcatttggttcttttgttttctatttctttggtgaggttttctgtctttccattcatttcaagagtgcccactcttaattgtttgaatatttttgtaatagctgctttaaagtctttttgagataattctaacatctgtgtcatcttaacattagcatctgttgatttgtttttcaatgaaacaatattttttctgggtattttttttgtacgccaagtagttttgtattgtatcctaagcattttgaatgctatattatgagacctcgaagcatgtttaaattttaagtataagtgctaattttttaaaaagcagtaattcaaccctgttgggttcagggtgcaaaatctggcaatttttctttgattttttaaaatcctaatatcagttcatttttcaaaactttttgtaatactatccatatctgttccctgtgcaggctaccgagtggccattctggggcttgggaggtratgtattccatatttagttctgtctatgctgtttggggtcagatccatg

SEQ ID NO: 816242 - DNA, 558 bp, Homo sapiens
ctcagactgctgagggagtttcaggttctcacaggctggtggtgattctgattctgacccatgctggttgagatcttagctaaaatagtttcaaatgaggggcagcaggctggggatgtgactattagacatgaattctccctcttccgcatccaagtctctttcaaagaccatacattcaaagagctgtggtgaggctgggcacggtggctcatgcctgtaattccagcactttgggaagccgaggtgggtggatcacctgaggtcaggagttcgagaccaggctggccaacatggcaaaaccccgcctctactaaaaatgcaaaaaaaaaattagctgggcatggtggtgggcgcctgtaatcccagctacttaggatgttgaggcagggataattgcttgcacccaggaggtagaggttgcagtgagatgagattgcaccactgcactccagcctgggcgacaaagtgagactccwtcttaaaacaaaacaacaacaaaaaaactggctgggcgtagtggcttacacctgtaatcccagtactttgggaggccaa

SEQ ID NO: 816243 - DNA, 539 bp, Homo sapiens
actaaaaatacaaaaattagccaggcgtggtggtgggcacctgtaatctcagctacccgggagactgaggcaggagaacccaggaggcggaggttgtggtgagccgagatcatgccattgtactccagcctgggcaacaagagcaaaactctgtctcaaaaaaaaaaacaaaaaacaaaaaacttaatgctactgaatttgtacacttaaaaagttattaaaatagtaaatgttatatatatttttccacaataaaaaatggttcaaggccgggtgcggtggctcacgcctgtaatcccagcactttgagaggccaaggtgggcggaccatttgaggtcaggagttcaagaccagcctggccaacatggggaaaccttgtctctactaaaaatacaaaaaaattagccaggtgtggtggcacatgcctgtagtcccagctacttgggaggctgaaggaggagaattgctgcaactggggaggcgaaggttgcatgagccgagatcgcrccattgcactccagcctaggtgacagagtga

SEQ ID NO: 816244 - DNA, 588 bp, Homo sapiens
ggaggccgaaggccagagagcgtcctccctgtcccatggcctaaatgcctctcagaactcacagatggtcagtcgggagtacaggcagttcctgtcattccactgcccatctgtgtacatctccacacactkctcttttccccgacctgcgggctcccctcggtaccagttggtgtagtttacaggggtcccgtctgagtagcggaagtctccagggctgggaccctcagtcaggcctacataggcatatgtgttgtacttcttcacgaagcttgcaatggcctcattttcctctggattccttgggacagcaatgcggccgcctgctctggcacatgcctcctgaatggcatcaaaagtgatggactgcccattgctggagaagaccttctctcctactgtcattatggagccctgcagactgagggctgagagcagaggagtccgggtcaggccactgaccactttgtctctaagccacctccctcacctggggtctctgctaccagattctccccagtctctccatctctgcctctctctgtgtcttctcttcctcttccaattgcagttttctaaattcacttt

SEQ ID NO: 816245 - DNA, 474 bp, Homo sapiens
cttttaatgctttgtgctttggttgagggacatgatacacattatacaaagcatggttttgaacactgatccccatctgttgcagggatattgttgaggatgtggcttccctatgaagcctctctatgaacacctagaggagaatatgctctttggtcctcagtatctggaatagttgtgctttttcttagaaacctgcaaatattctggatctcacaatgtgtcatatatccctctccccatcagcagctagggtcttagagccaaaccagtgaacaaccatgagtccacacaaagagggctaatcactcgggttggcacagtcagtgaggtggcatcagagcctggggtataggcaagatgccgtagtggctcgatctgccatgggcagatccagatgttgagtgtcagggaaccctctccctagaggagggttggcratgaacatggatcctccaaaccaccctaatgcag

SEQ ID NO: 816246 - DNA, 636 bp, Homo sapiens
tagggagaaggtatttatggagaagaccttaatttggagagtggagcattttgaaaaaaaygaagtggcttactaagacgaatgcttattccaggaaaataagaatgcagaagaaataaaaaggggaaaatgactacattcctccttcccagctatacctccgcatcccttcacaacctggaacttcagtcctggacccccgtctccacatacggcttgcatattgtcatattgtaagaattcataagaaaatactcaactcattactcttctttctgaaaacttttctttgtcattcattttcatttctcattccagatacactttttaatacctttattgttttgacaggctggtagacaaatatgaataagtgggttgtcattgttcttttgttcttactgaatttgctctattttactctgaactaagttgctgtgatgttctctgtcagccaggggtcctaagaagcagaccattttcatgcattcttgtgacaatggacataaacccaacccctaaagggcctatttcctcccgggcaccccagaggtgcacactggactgtttccgctgaagaaaagccggggcccatctgctaaagggcctgacgagggaatagccctacgtggcttg

SEQ ID NO: 816247 - DNA, 612 bp, Homo sapiens
cccagagtggagacccatcacgtgtgcctagtgaggtttagagcccgagcccctatccatcccttccagcccagggatgctgggctcccgagatgctggtggccccttggtctcaaggctgaggcccaagtcttagccttgccaatgatctctaaatacacagactccatcctgtgtctcaccagctcgtggcccagaaacacggggtgtcctctctggtgatctcctgccatctagggaaggaactctgagtggaagagtaagtggccctctccctcccgctacctcttcttggggcttccacaacctcattttaggaaggaagcagaaaaatcagtagtggcccggaagtctgcagcccccacaaagtaatttggagcaggcagaatcagtgaaaagaatttatcagattgagaactaggcgcgccatgtggccagagcaccggggctcagggaccacaggctgcagccctgctctgctcctgcaattaagatgatagcatcaagacmacagtaatcctccagatcgtaaactgtgtcacaaggagcctcctcagcagggtggatccagcaggtagctggtcataatttttttgaggctgcctttttgac

SEQ ID NO: 816248 - DNA, 620 bp, Homo sapiens
agtcaatttggtagataatctgagtctttgattatcctgtctctccatttattttcccaataattttgcatgttttttctaacaaataatgctgtattcttgtcacatagtgcataggaatgctaatttataaatttatttattttactatttataattgcaatgtgtaccctaataatgcatttttagcatgcctacaatttctttggcatgctcttttttgtcaaaatatcttagttttactctattatttttttattctctatgctttcatctctacattttcttcaaaagagtttcaactggttgttgactcatacaacagtatgcaaaagcaggaggcaaatataaaatacagtgtgaaaaagtgtttgagacaagactagaaagaccaagaaagtctaacactatgtataatattgtgatgcctttcttctttctgtcaacatcatacatagacatcttatgcacatttcaagtgatttccatgtacaaaatmcatttatagtaggagatgtagatcaagttggttattttttttttttacatactggtttatttaaaatattgcagtacattttatgaaaataagtctattttttccacatgaaattcagtca

SEQ ID NO: 816249 - DNA, 620 bp, Homo sapiens
agtcaatttggtagataatctgagtctttgattatcctgtctctccatttattttcccaataattttgcatgttttttctaacaaataatgctgtattcttgtcacatagtgcataggaatgctaatttataaatttatttattttactatttataattgcaatgtgtaccctaataatgcatttttagcatgcctacaatttctttggcatgctcttttttgtcaaaatatcttagttttactctattatttttttattctctatgctttcatctctacattttcttcaaaagagtttcaactggttgttgactcatacaacagtatgcaaaagcaggaggcaaatataaaatacagtgtgaaaaagtgtttgagacaagactagaaagaccaagaaagtctaacactatgtataatattgtgatgcctttcttctttctgtcaacatcatacatagacatcttatgcacatttcaagtgatttccatgtacaaaatacatttatagtaggagatgtagatcaagttggttmttttttttttttacatactggtttatttaaaatattgcagtacattttatgaaaataagtctattttttccacatgaaattcagtca

SEQ ID NO: 816250 - DNA, 638 bp, Homo sapiens
aaacctatgtttgattggtgtacctgaaagtgacaaggagaatggaaccaagttggcaaacacacttcaggatattatccaggagaacttccccaacctagcaagrcaggccaacattcaaattcaggaaatatagagagcaccgctaagatactccttgagaagaataacccccagacacataattgtcagattcactaaggttgaactgaaggaaaaaatgttaagggcaaccagagagaaaggtcaggttacccataaaggggagcccattagaataacagcagatctctctgtagaaaccctgcaagctagaagagagtgggggccaaaatacaacattcttgaagaaaagaattttcaacccagaatttcatatccagccaaactcagcttcaaacacaaaggagaaataaaatcttcacagacaagcaactgctgagggattttgttgccaccaggcctagcttacaggatctcctgaaagaaaccctaaatatggaaaggaaaaactggtaccagccactgcaaaaatgtaccaaattgtaaagaccatcaacactatgaagaagctacatcaactaatgtgcaaaatcaccagctggcatcataatgacaggatcaaattaacccataac

SEQ ID NO: 816251 - DNA, 633 bp, Homo sapiens
tctcattatgacatattatatgaatgtataaaaatattacatgcatccccaacatatgtacatctattttgtatcaatgraaataaaaagcaaaacacttcaggatcatttaaaaaaagatcagtggcaaagccccatttcagaccaattgtatcctagaatggtgtgtgagcacagtgcttcaaatatgcagccagagttgagaaccactggtctggtatagcaacctcattttacagttgaaaaaacagacaatctttacatacaatctttaaaagccttggtcatctggttccctgaccctaaatgattgagaggaatcagagcagaggctgttagaggcaaacgggatgatcacagacatgacagctgacagcttgacaggcactgcatcaccacaggatgtgaaaatggatgttcatgatgaaggctgggagtcatcacgataagagtcaattccctgtagtggcctctttttacgaagagagagtagtcttctagaagatttctatcaacatatgattaaaataaatgtttccatgggaccaaaaatcagtttccacttttggaacaatcagtaagtgcattcccttttactgggggtcatctcttgggtactaggaagagaactag

SEQ ID NO: 816252 - DNA, 546 bp, Homo sapiens
ttccctgttaatactgctttctctgtatcctattgattttggtatgtgtgtttccattatcatttgtttcaaaatgttctcaattttcttcctaattccttcattgtcccactggtcattcaagarcatctagtttaatttccatatacttgtatagttttcaaaattccttgtgattttaatttctagttttgttccattgtggtcagagaagtttcttgatattatttcaaggttctgaatgttttaacacttcttttaccacctaacatatgatctattctggaaaatgacccatgtgctcactagaaaaatgtgtattctgcagccattggatgaaatgttctcaaaatatttattattttttatacaagttaatttccattttttggttgattttctgcctacatcatctgtccaatactgaaagtgggatgttaaagtctcctgcttttattgtattgagatttagctctttatctccaataatatttctttcatatatcttggtgctccatttttgagtgcatatacatttacaattgt

SEQ ID NO: 816253 - DNA, 586 bp, Homo sapiens
taaggtgaatgcaacagaacagagggtgcagaaataaactcgtggctatatgtcattttatatgagacaggtggcactcatcagtggagaaaggatggcttatataggtgatatttggrgaactggtttactattggagaaaaattattcagatctctatcttctaccatatacaaacataatctccaaatatagacctaaatgtgaaaggcaaatttatgatattgaaaaaatgaaggagcttgtgtgtgcacatgtgtgatttgggggtataaaagatttttcacacattattcaaatagcatgaatcataagggacaaaatggttgcgtgcaaccacactaaaaatttctgtttaataaaagacaccatacaccaagatgacagattgatcgtaggtttgaagatacatgcaacttttaaaactaacaaggatatttctagaatataccagggactaccacaaatcaagaaggaaaaggcatgaaaaaattagacaagatattaactcacaagaggctaactaatgtacaaacagatgcttaacttcactagtgatcaaagacacacaaaacaaaagaagatg

SEQ ID NO: 816254 - DNA, 631 bp, Homo sapiens
cattcccaactgagctctcccaaaatgagggggcatttcctaaaaagtagcgagcctcccatcactagacatatacaagcagagatggtgcccatcagtcatcaggctgtcatgcaggagatggggagttaaaccagatggcttcgaaggtcccttgaaactccaaaactctgatgctttatgtggccttgttatcctttattcatttcacagatctctcctgagcacctaccatgtgcaggtgctgttctaggtgcggggacacagctgagaaacagagcctccgcactagtgactcacattgtggtgaggggagacagataataaataaacacgtatgcaacgggtcaggaaggggcaggagctccaaagtaaaattaggcagcgtcaggagagagtgatgtgggttgggagaaagacgaatagacacccgggaggagctgtgcgaggtgcgctctgtggcttcctcccatcctttgtctcaggagcttgttttcccgtagccaggcataaagctgccaacagggaggatggagaagttttaggsgtcgcctgctggcccttccgagcaggtgcgtgcacggtgtttccatgcatacttctggatcctcaccccaggaaatacagccag

SEQ ID NO: 816255 - DNA, 501 bp, Homo sapiens
agatgaggcttgttgaatagaatggaacattttaaacccatgcctttccttgcaaatctgtgcttcacgttttaaaagcaacctcttacacaaattgtagctgcctaattttcaagaagatcattcacccttttgctgtctgatgggattctgcgaggtttcttttgttgttgttattgtttttctggatagcaactgttaaccattgtaatgtatttcacttttgttgtcctttgtgtatatttacctacgttttacaaaattggtatcgcactattcatcatgaacctttttcccttgagttttccccaacattttattgtgaaaatttttaaacagaaaagttgaaaaattgtacagcgagcagccatatatcyaccacttagattctcattaccattctatgatatttgcctatcacttatctgtccttttatccattcctctatgcacctattaatccatcttacttttttaaggcatctcaaagcaagttgtaga

SEQ ID NO: 816256 - DNA, 604 bp, Homo sapiens
catatacggacaactgattttttgacaaagttgcaaagacaattcagtggagaaaggatagtcttttttaaaacaaatgatgataaaaaaattagatactcatatgcaaaaaaaagctttgatccataacttgcactacatgtaacaattagatcaaaatggatgacaaatctaaatgtaaaacctaaaactataacacttccagaagaaaacaggagaaatctttgtgaccttggtttaggcagagttttaaaatatgacaccaagagcataatccataaaagaaaaaaataatatattggacttcatccaaatgaaaaacttctgctctttgacatatactgtcaagggaattaaaaggcaagtcacaaactgggagaaaatacacaaaaatcgtgtatctgatgaacttgcatctgtaatataaaagcagcttacaataaaaataagaccacctaattaaaagcaaacagaagattgtaatgcacattttactatagaatataytcaaatggttaataagcacatgaaaagatgctcaacatcattagtcattagggaaatgcaaactgaaatcacaatgagatatcactatacatcctat

SEQ ID NO: 816257 - DNA, 512 bp, Homo sapiens
tctatatttttcaaataacatgtaatgttttattaaactgtaaacattttatttttctcttaaaamtctttatctgtaatagaagcatctgttgcatttaggagtaattctagtactaattttaactctgatttcatagtgacatagaagaaatgaagactgttaaccaccttaaggatcttatttttaaaagtatagagtgcagcaaaatagaagcatataatattgctatatccctaaattggggagatgattcagggaagactttggaggaatagaatctagacaggtaagagtgagtctggaaaagaggtgtaagaagagcataggtggatcagcaagtgcgaagacctagaggtgaaagcatggcgcttagaaggatctttaacaagttcactaaggctgaagtgtaagagtcaagagacagggctggtgaggatcctacaaatctttgttagcttggttaaggagtttgggctttatcctgaaaacactgggcaaccattaagggt

SEQ ID NO: 816258 - DNA, 661 bp, Homo sapiens
gtcctggtaacttagtgaattttaatggtgttccctgagatggtaaacacaggcagcctctgtaaacatataaatgagtgaatggatggatgaatkatagatgtacaaaggcaggaccatttgatgaggaggaggatgatagtaaatacatagtacttgcggtaggtttaacctatcagtttttttcttcttttgcatgctttatatagctggtgctcttttcttcattatttcaacagattaggttagctgcatcttctaattgtatatcatattttggatacatattactttctctaggtcaagtgtcttggcaaatcttcctttcttcacgtaagatgtgtattggcggcagccgtgggaggtccagacacaggtggccatggaactcgctggtaatagaggacacatctcttaactgggttgctctaagaactgatgcctaaaccatctcagcatggcgtataaaggagaaggtgggcatggccagcctccctcagctacactgtctcaggttagccctggaagtctttacacacgtagaacccatacccataatatatgtatggcatctgactttttctacccaaatatgggaggtgtggaaagccacatttaccagctccctcagtgcctgattggaagaggggataaggttata

SEQ ID NO: 816259 - DNA, 661 bp, Homo sapiens
gtcctggtaacttagtgaattttaatggtgttccctgagatggtaaacacaggcagcctctgtaaacatataaatgagtgaatggatggatgaatgatagatgtacaaaggcaggaccatttgatgaggaggaggatgatagtaaatacatagtacttgcggtaggtttaacctatcagtttttttcttcttttgcatgctttatatagctggtgctcttttcttcattatttcaacagattaggttagctgcatcttctaattgtatatcatattttggatacatattactttctctaggtcaagtgtcttggcaaatcttcctttcttcacgtaagatgtgtattggcggcagccgtgggaggtccagacacaggtggccatggaactcgctggtaatagaggacacatctcttaactgggttgctctaagaactgatgcctaaaccatctcagcatggcgtataaaggagaaggtgggcatggccagcctccctcagctacactgtctcaggttagccctggaagtctttacacacgtagaacccatacccataatatatgtatggcatctgactttttctwcccaaatatgggaggtgtggaaagccacatttaccagctccctcagtgcctgattggaagaggggataaggttata

SEQ ID NO: 816260 - DNA, 532 bp, Homo sapiens
atcttggataaggtctggaagaattctctgcattaccaggtagagattcttgtgtgtgcgtgtgggtttttttctttactttatccgaaacaaatggagtatctccctttgtgctgggcctcctggatctggggatggggggacacaagtacccctgtggccaccaccactgagactgcactgtttcacacctgaaggcagcacagcactgggtctcgcccaagacctgctgtaaccaccacttgcctaccacctaagttcactcaaggctctagggctctattatcagcaggtggcacatctagccaggtttgtgtccctcctttcagagtcatgttcccccaggccctgttgggtccagagatgctgtctaggagtgagattgaagtcttttttttttgagacggagtctcgctctgtcgcccaggctggagtgcagtggcrcaatctcagctcactgcaagctctgcctcccgggttcacgccattcttctgcctcagcctccctagtagctgggactacaggcgcctg

SEQ ID NO: 816261 - DNA, 260 bp, Homo sapiens
caaaaaagtatttattttggacacatttttggttgtagaatcactgcaacaaagatgcctgacatattttgcaaatagacttataaaaagactatactatttacattttaaaagcatgaatgtatttccaaatatatggtataccttatttatttaaattaacctttgttaaattagattataayaaaggttagtctagagaaactacctattcacctcctcttacactaatgggcaccatctctgtgcgacactgaata

SEQ ID NO: 816262 - DNA, 517 bp, Homo sapiens
aatctatttgacgaaagtcacaaggaagttattaactagagttaagtcactgacaagagatattattaatgatctcatcaaaattttaagtgcatttaactatcacattgcaagccttattattgacgactcagagaatattaaattattctacagtagttacttggctagagatcaaatgaaaaaagatgaaaagcttaagttctaggtaattccataattctttaggcttcacacaattaaaaagttagaatcattagcctttctgtctccccgacccccaaatctactgattgttaatgcagtgggtttcttttaattgttcattgttccctgtttctcttccaaatgctgacgcaggaaggatgaaagtcaaaaaatcttccargctttggttttccaaaagcagttcaggaagttcaatttattttcagattggaagagatactttcaagtacactaggtctttaattgcaactcctcaaggactttccacaagaaaaagaggcattctcct

SEQ ID NO: 816263 - DNA, 619 bp, Homo sapiens
gatttgttgaggtttccaatggaaatattgaacaggaaaaccccactaattttacaaccaaaaaaaaaaaaaaatgagaactggatgataacatgcttcttccagtcccagtgttttgggctatgtagrgggtggaagatttccatgcggagatcttgttgagaaaaatgcagtaaatgttcagttgagcttttacctcctcttctattttatgtccattatttatgatcatttgcaaatagagggcgcttttcatcttcaactgctttacaaccattaactgaatatttatattttgttaacgagagacaggggttttggttttttttttttttcctcagttgctgaggtgaaggtctgactacaaaaaatggaaatcatcattagaatgatggggaaaattttgccactgatatagagccactaaattgagagtccatggagggcaaggagggtagtcagaaaataaatgactgtttctccaaaagtgatggggttgaatggacctgccactactctgaggttcaaaaaaaatgctcttcttataattatagcttccagcatgactccacaacccttttaatagcgcccctcacctaacaccctgtcagggactctt

SEQ ID NO: 816264 - DNA, 493 bp, Homo sapiens
gcagagtaagatggccaaatagaatcctacactgtatatcctccctgcgcaggaacaccaaattttaaaaactagctgcacacacgcgcgcgcacacacacacacacacacacacacacaaatcaaaatamccaaaaatcaggtgagcactcacagtacctggttttaactttgtatcactgaaagaggcactgaagaagtgctctttcatggctggttagcagtcagtcctcaattgcctacaccatctctccccagtcccttactggggatgtacagcatagagacataatctgtgcacttgggggacagtgtagtgactaggagactttatattgatctcagtgctaccctgtaacagcagaaagcaaagctatgctgggctcaactagcacacatgctctaagggagcatttgaacgagacctagccagatgggaatcacccatcacagaggtcagaactggagtttcttggcaggcctctgcaccatg

SEQ ID NO: 816265 - DNA, 603 bp, Homo sapiens
ttttttttttttttttttttaaaggctgccttgacctagttttgaggccctggctgtaggccggtcagtcyttcttcttaagcagtagatgaagtttacaccccagctacttctcctatcaagctctcacactatgtgcgaggtacactatgtgcatgcctacgtcagggccacataccagacaactagaaacagctcctaccctcctgagctgcaaattcttcaaattagctgattcacagattagctgcacccctgatccctcttgtcatatataggctaccccttccaaccccagctggttgtcactctgttactctggttagtctgagcagcccatgcatggccctgcatggcaaccttttctcttgtttgcagatgtaagtaacatggagtactgcctttcatctgtcagtgttgtgttgtgttccaccataaaaggacctttaaatctcatgaaacagtgacatactccaccctccaacatgccaatcacaggcgtaagcactgtctaaatggagtgatcaaggtgaggttgtcaatagatgaatgtcccctttagcccaggggcttcagggggacagtggcaatgtctgtgctagt

SEQ ID NO: 816266 - DNA, 603 bp, Homo sapiens
ttttttttttttttttttttaaaggctgccttgacctagttttgaggccctggctgtaggccggtcagtctttcttcttaagcagtagatgaagtttacaccccagctacttctcctatcaagctctcacactatgtgcgaggtacactatgtgcatgcctacgtcagggccacataccagacaactagaaacagctcctaccctcctgagctgcaaattcttcaaattagctgattcacagattagctgcacccctgatccctcttgtcatatataggctaccccttccaaccccagctggttgtcactctgttactctggttagtctgagcagcccatgcatggccctgcatggcaaccttttctcttgtttgcagatgtaagtaacatggagtactgcctttcatctgtcagtgttgtgttgtgttccaccataaaaggacctttaaatctcatgaaacagtgacatactccaccctccaacatgccaatcacaggcgtaagcactgtctraatggagtgatcaaggtgaggttgtcaatagatgaatgtcccctttagcccaggggcttcagggggacagtggcaatgtctgtgctagt

SEQ ID NO: 816267 - DNA, 580 bp, Homo sapiens
aaacagtttccagttttcatgattatgaatggtgctgcaatgcacatctttgtacctaaaacttttttttttttttttttttttaagatggagtcttgctctatcgcccaggygggagtgcagtgacatgatctctgctcactgaaacctctgcctctcagggtcaagtgattctcgtgcctcagcctcccgagtagctgggattacaggcacctgccaccatgcctggctaatttttgtattttagttgagacggggttcaccatgttggccaggctggtctcaaactcctgacctcaggtgatccacctaccaaagtgctgggattacaggcatgagccatcacacccggtttacctaaaactttttaggttgtgaaaattattctggagaataaattccctgaagtgttcttgctggattgaagggtttgcccgtttactagtttgatagtgattgccaaattgccctacaaagctgctgcaggaatttgcattccatgagttctccaacgttgaatattattaacctttaaaattttgacacataaatgagggaaaaagcacttcacagttttaat

SEQ ID NO: 816268 - DNA, 580 bp, Homo sapiens
aaacagtttccagttttcatgattatgaatggtgctgcaatgcacatctttgtacctaaaacttttttttttttttttttttttaagatggagtcttgctctatcgcccaggcgggagtgcagtgacatgatctctgctcactgaaacctctgcctctcagggtcaagtgattctcgtgcctcagcctcccgagtagctgggattacaggcacctgccaccatgcctggctaatttttgtattttagttgagacggggttcaccatgttggccaggctggtctcaaactcctgacctcaggtgatccacctaccaaagtgctgggattacaggcatgagccatcacacccggtttacctaaaactttttaggttgtgaaaattattctggagaataaattccctgaagtgttcttgctggattgaagggtttgcccgtttactagtttgatagtgattgccaaattgccctacraagctgctgcaggaatttgcattccatgagttctccaacgttgaatattattaacctttaaaattttgacacataaatgagggaaaaagcacttcacagttttaat

SEQ ID NO: 816269 - DNA, 600 bp, Homo sapiens
tgttcatagatggtatgatcttatatttggaaaaacataaaraatccaccaaaaaactattagaactgataaattcagtaaagttgcaggatacaaaatcaacatacaaaaatcagtagcatttctatatgccaacagcagataatctgaaaaagaaatcaagaaagtaatcccacttataatagctacaaataaaattaaatacctaggaattaacttaaccaaagaagtgaatgacctctacaatgaaaactataaaacactcatgaaagaaattgaggaagacaccaaaaaatggaaagatatttcacgttcatgaactaaaagaatcaatattgtgaaaatgttcatattgcccaaagcagtctgtagattcaacgtaatccctatcaaaataccaatgacatttttcacagagatagaaaaaacaggctgggcaaggtggctcatgcctataatcccagtactttaagaagccaaggtaggtggactgtctgagcccaagagtttcaaaccagccagggcaagatggtgagaccacatctatacaaaaaaaatttttttaattaaaattagaaaaaaaatgctaaaattatatgt

SEQ ID NO: 816270 - DNA, 600 bp, Homo sapiens
tgttcatagatggtatgatcttatatttggaaaaacataaaaaatccaccaaaaaactattagaactgataaattcagtaaagttgcaggatacaaaatcaacatacaaaaatcagtagcatttytatatgccaacagcagataatctgaaaaagaaatcaagaaagtaatcccacttataatagctacaaataaaattaaatacctaggaattaacttaaccaaagaagtgaatgacctctacaatgaaaactataaaacactcatgaaagaaattgaggaagacaccaaaaaatggaaagatatttcacgttcatgaactaaaagaatcaatattgtgaaaatgttcatattgcccaaagcagtctgtagattcaacgtaatccctatcaaaataccaatgacatttttcacagagatagaaaaaacaggctgggcaaggtggctcatgcctataatcccagtactttaagaagccaaggtaggtggactgtctgagcccaagagtttcaaaccagccagggcaagatggtgagaccacatctatacaaaaaaaatttttttaattaaaattagaaaaaaaatgctaaaattatatgt

SEQ ID NO: 816271 - DNA, 658 bp, Homo sapiens
actcctggcttcaacaatatctgtgtgatcttgagtgagctgctctttctcattgagctgcacaagaaaatgttgttaatcctccctcactaaccagttcccaagttttatggtatggtttcattcaatgttgaaatttctaagctctttttaaaaaatgataaaataaatatgtttaatagttgagcttattcaatatacctgaagatcaagagaaattgccaatgagacagccaagaaggatgaacatattaaataaggtagaacatttgaggtgtggctgaggaatgaactagctcacgtaaatatttctgcatgagtgggcgtgtgtgcacacatgtgtgctccacagcagtgcttctcaaacttaaatgtgcacaggaatcttgtggggctcttgtgaaaatgaagattctgattcagaagtccaaagcggagcccaaagtcctgcatttctaacaagttcccagtgatgctgacaatgctaggccaggggctacactgtgagtagcaaaaggagtcactcatgacattmaaaatatctaagaacgtcagtaggttcaggtccctgttagtgtttttgtttgcctggagtttttctttctattattaaatcagccttttaaataaaaatgaagcacctagtaatatgcataaa

SEQ ID NO: 816272 - DNA, 443 bp, Homo sapiens
tgggatcccttccagctctgagatcctattagtctattttagaaagttctgccatcaggttattaacaaaacctaagaattggctcccactccaaagtgtaattctgcctcctctgactcatacagctagaaatacttggagagggttcacgggtggtggcggcggcccactggcctttgcaggagagatgcagactgcacgggcctcagcaagctctgggcctcagctcatgtccctcacctctgcagccaacagggaatgacgtgctgtctaacgggcaggaggctcccggtccccagggtgttgtggactgactggaggtacaaatgcagggtgtacagatgaagagacagaatgaacagtgcttcccagcacccgcaggaaattataaaatatttttatggcacattayggaaggttcttggccaaaagcaaatagctt

SEQ ID NO: 816273 - DNA, 534 bp, Homo sapiens
tttccctgggataaaatacacacgaaaccctcagctttgcagcatgtgacccaaatgaagccctccataagcggcagctagtattactttcccctcttgagcttaygcttttataacaaaaatcttcgtacagcttctgataaaagtcaagggcaagagaaagcctatgtcagaatagttgttcactcaccaagggcagaggaactgactgggaaagggtgcaggggttcttccggagtactggcaatggggatgcataagtgtacatgcgtgaaaacccatcgggctgtgcactcacagctgggtgtgttaagtgctttagtattatacctcatagaaaagcttaaaggaaaaattgacaaaaacaaaacctctgcagtgttagaaattcctttcgtgttgagtctaataaaactttctgtgatgatgaaaatattctctctctctgctttccaatagagtagccagtaaccatttgtgattattgagccacttaaatgtggctaatatgactaaaaacctgaatttctagtt

SEQ ID NO: 816274 - DNA, 534 bp, Homo sapiens
tttccctgggataaaatacacacgaaaccctcagctttgcagcatgtgacccaaatgaagccctccataagcggcagctagtattactttcccctcttgagcttacgcttttataacaaaaatcttcrtacagcttctgataaaagtcaagggcaagagaaagcctatgtcagaatagttgttcactcaccaagggcagaggaactgactgggaaagggtgcaggggttcttccggagtactggcaatggggatgcataagtgtacatgcgtgaaaacccatcgggctgtgcactcacagctgggtgtgttaagtgctttagtattatacctcatagaaaagcttaaaggaaaaattgacaaaaacaaaacctctgcagtgttagaaattcctttcgtgttgagtctaataaaactttctgtgatgatgaaaatattctctctctctgctttccaatagagtagccagtaaccatttgtgattattgagccacttaaatgtggctaatatgactaaaaacctgaatttctagtt

SEQ ID NO: 816275 - DNA, 621 bp, Homo sapiens
gctggaaatcaggttacacacctgatgtggataatctcactaatccacatgacaatcctttgaggtaggtactattattaacctcattttatagttgaggaaatggaagcttagggaatatgagtaatttacatagatctccagcctggattcgactccaaagctcaagcatttaaccaccgccttagatgagaagtatttctgcatttaaagaggatccgctttccttttgtgaacttagactgtgagggtatggattctgtagcaggcaggattttttaacttgctaacattttattttgaaatacttcaaactacagaaaagttgagcacccacatatcctttatctaaattcaccaattagcatactggcacacttgcactcttactctatacagatattttctaaatcacatgaaaataagtagtaaacattaaattcaccaattgtcagcattttgccacatttgtgccatttctctaaacagattgatgggtattttctttttaaaaaaatttttrtgggtacataataggtgtatacatttatggtttacatgagatattttgatataggcaaaatatcgatgtgtaatatgatgtgtaataatcatatcagg

SEQ ID NO: 816276 - DNA, 655 bp, Homo sapiens
acagagaaaaatagcttaccagcttccctattgatctgaaaatcaccttctcaaagaagtaaggtgacagagtgcacgcatctctactccacaaaccactgtcactcattggcaggaacaaagagtatcgagtctctattaggcttagagctatccttagaaatcatgttaaaaatgcacacagggctggaaatggaggggaatggatgactcaggatttctcatgatgaatgcaaaagagctaccctctggggcactcccttgactaaagtagaggtcagaaaagactaaacatggataccaaaaggtaagcactgactacaggtaatcaagcattcagggtatcagcatttctatagaatagtgtggaaaattacaagtaggtgggacaaggtggctcacacctgtaatcctagcactttgggaggccgaggcaggcagataacttgaggtcagaaatttgagaccagcctggccaacatcgtgaaaccccatctctactaaaaatacacaaaaattagccaggcgtggtggcsagcgcctgtaatccaagctactcaggaggctgaggcaggagaattgcttgaacccaggaggcagaggtgacagtgagccgagatagcactattgcactccagcctgggctacagagtga

SEQ ID NO: 816277 - DNA, 624 bp, Homo sapiens
cacatgtacccctgaactaaaaaaaagtttttaaaaaaacttttgtctacttcccttacctctaatttttagccttcctatttgaactattctgaaacaggtgctcatgagcatcttaggggttctgaaacttggctgaatcacccttggccctattctagattagtagggatcaacttgagtttgtgctgtttgttacagatgtagaaggtacaattatgaggctgagttgactgaccattcaataaatattaagtgtcttctaaagaaacagattcaggctatgaatagattcctcagaggaaggagccctggagcccacactcaccctggtacccacactatacataaattgcctggactagttctcaggaaatttggattctaggtcttctctgtacatatgttgaagcttagaagatacttgtttcatctgtaaaatgggctcatgtctacaatgattatcccaccctcactcccccattgccccaaggtcatggctttccatgagtccattatgctaatcacttaasgtgttatctaattatttcaaccctggaaagcaggcattgttatccacattttatagatgactaaattaaaccttgaagaggtaaagcaacc

SEQ ID NO: 816278 - DNA, 538 bp, Homo sapiens
tccctgactatactgggaaatcattaagacagggacttgttttcttcgccactctatctgtgacatttggcttataatgcaaactttataaacatttgtagggaaggaagaagaggaaaggaaatcaaggatagaaatttcaactacggaaatgtcatgtttcaaagtatctgccctcagtaaaatagctattggctatattattggctattccccatgccctcattctggactttttttctgttcccttttcatttcttccctctttctttctcctaattctgcctagaatcacttaatatcctgttcatgtctggtcttgcttcttgtatcccatgggaaattttggtgggaatttagcgttttgtaaatgaggggccttcatgtaagacaatttgttttccatgtatgagaaaagcacctagtaggtattccctggtactttcacaaaaccttgcactgatctgtccaggagcccacctcatgacaaggaycatattctaaatgagtctcaatatccaactctttatgcaatgcc

SEQ ID NO: 816279 - DNA, 541 bp, Homo sapiens
gatattttaaaatctatgtttctttctttctcttagagtttttcccaataagctgctaaaacatgaataactgtatttcaacaattttctcttctatataatcccctgttagatgttttcagmtactaaagacattttcaaagattaacctttggaaaatgtctttttagacaggaataaacaaaaggaaatgaaaactatgtgaaatttgccagagaaacttcttctaatgtacactaatgagtatgcaggtcatatggaaaattaaacaccaaaatctaagttttcagggcaagagaatttgtgcatacaaatcctattacccgttaatgggatttgtgtggatccccagtgacctatttagaaaatttaccccctgctgttcaagatgaatatatcatgtgaactaaacctgaaaacagagtcctactgttggcttcatccccaatctgtcaagcaagccctctatgatttccacaggattctggcaacaatttcagtatttatatctgactgacagtgcaaaatgacatctgtattt

SEQ ID NO: 816280 - DNA, 587 bp, Homo sapiens
agagactattccttttccattgaattgtcaaagtttaacttatcaaatgtaaaggtttagttctaggcttttgttctattccgtcggtatatttgtctgtccttatgccagggatacactgtctkgattactgtagtttaatagtaagcttcgaaatggtgaagtgtcttcccactttgctcttttttcaatattattttggctattctacatcctgtgactttccatatgaattttaggagcagcttctcaactttgcaaaattctagtctgcattttgataggaattatgttgaacctgtagatcagtgtgaaagtatttccattttaacactgatcaatgaacattgagatgtctttccatttacttagaacttgaacttctttcaatgatgtattgtaatttttagtggacacgttttgcattccttttgttcaatttattactaaggttctttttttctttttggtgctattgtaaatggagttattttcttaatttcatttttaaatcatttattactagtttatagaaatgcagttgatttttttgtatattggtcttgtttcctgaaacctcagttaat

SEQ ID NO: 816281 - DNA, 465 bp, Homo sapiens
ttaaccacctatattacatgtgtccctgatgtaacctgagcaaacttagcaagtcttttattctgggtgaatgccccgcttcacccaaatcatgaatgctstttgcttcatggaactctattgcttttgttcccagaaccaattatatcttagctaatctcttgcccctttaattatccttgatagttttccaaataaaatatgcaatctgtgaacactttattagtcccactctctggtttatccattcatgggtaaggatacagaattgtctgaatccagcttattataaattcattattctcaattgtgcccaatgacaaaattttccttgccctgggtcaacaatattctcagtcatctctactatttaactgtaaatctcaaactatgtgctgtttagaattatatgtgcctatcccattctgccggacgtacgtgttcttttctccatgagatttacat

SEQ ID NO: 816282 - DNA, 610 bp, Homo sapiens
cccctaaactgcatcctggaggaagggggcacaggagattattattattttttttttattgaggrcaaaggaagcaggggaaagaaagaagtgggagaaagtttggtatgtgatgactttgggggtcatcagctgagtggtggggtgaggtgaagcagagtcggaggacctgagcagtggctcctggtggggccctggagagacacaagggggacaaagagacaaagacagatgtatggcctgatctcaggcaccatgttctgggctgctttagaccaggtggtagagacaacttctgactatgtgaggcattgttgtgagacctggaacaaaaaaagctgagtagggaaggtatcccaggctagtgccacagaaaaccacaaaagctggagtatggaagggctggggcagactgaagctggaggcaggagcagcatgtgcaggactctgggtttccttctaaagagacaggaaggcctggtgtggtgtctcatgcctgtaatcccagcactttgggaggccgaggcggtggatcacctgaggtcaggagttaaagactagcctggccaacatggtgaaaccccatctctactaaaaatacaaaaactgg

SEQ ID NO: 816283 - DNA, 635 bp, Homo sapiens
atgagtacacatgaaaatatgaaggggaacaacacacactggggcctgttgggggagcaatgggagggagarcatcaggaagaatacctaatggatgctgggcttaatacctaggtgatgggttgatctgtgcagcaaaccaccatggcacatgtttacctgggtaacaaacctgcacaactagcacatgcacctcagaacttaaaagttgaagaaaaaaataaataaatattaaatttaattcttggataaatgtaatgttaagcaaaaatttcaaaacacaatgtctgaagctcagtctagtagatcaaagtaagctcataataaacagacccttccagagataacaactatagctcctggccaaaatacataaagcaaatatctaaggactctggggaataaacaaaaggaggcagttttgggagaggagggcactaaaacttggagaaaagaatcagcatgaagtgagtttcccgtttttgttgctttggcctaatagctgatcaaggttgtgacacagcatgaggaagttaaaactctgacagataatccctagtttctccagcttaaggacaaaggggaggagccaggagcaacagcactgtaatccacaactgagaggggtagagaat

SEQ ID NO: 816284 - DNA, 614 bp, Homo sapiens
cattgcaatgatcttttcaggccaagtactaatttctaaaatgaagaatagtggtttcaaatgaagtcatttgaacctacagccaagtagctatgagtactaattgtttaaatataattatcttaaaacttgggccggttgcagtggctcacccctgtaatcccagcaatttaggaggctcaggcaggtggatcacttgaggccaggagttcaagaccagcttggccaacatggtgaaacctcatctctactaaaaatacgaaaataagccggacatggtggcgtgcacccgtaatcccagctacctgggaggctgaggcataagaatcacttgaacccgagaggtagaagttgcagtaagccaagatcacaccactgcactccagcctgggcaacagagcaagactctgtctcaaaaatataatataatataatataatataatataatataatataatataacataatataatataatataatgtaataatttttaaactwtaaaacagaaattagaggagaaattggagatagtcagtatagggaacactttcaaggaattttttgtataaagaagagagaaatgtgcagtagctggaaggaaaaacgagg

SEQ ID NO: 816285 - DNA, 614 bp, Homo sapiens
cattgcaatgatcttttcaggccaagtactaatttctaaaatgaagaatagtggtttcaaatgaagtcatttgaacctacagccaagtagctatgagtactaattgtttaaatataattatcttaaaacttgggccggttgcagtggctcacccctgtaatcccagcaatttaggaggctcaggcaggtggatcacttgaggccaggagttcaagaccagcttggccaacatggtgaaacctcatctctactaaaaatacgaaaataagccggacatggtggcgtgcacccgtaatcccagctacctgggaggctgaggcataagaatcacttgaacccgagaggtagaagttgcagtaagccaagatcacaccactgcactccagcctgggcaacagagcaagactctgtctcaaaaatataatataatataatataatataatataatataatataatataacataatataatataatataatgtaataatttttaaactayaaaacagaaattagaggagaaattggagatagtcagtatagggaacactttcaaggaattttttgtataaagaagagagaaatgtgcagtagctggaaggaaaaacgagg

SEQ ID NO: 816286 - DNA, 614 bp, Homo sapiens
cattgcaatgatcttttcaggccaagtactaatttctaaaatgaagaatagtggtttcaaatgaagtcatttgaacctacagccaagtagctatgagtactaattgtttaaatataattatcttaaaacttgggccggttgcagtggctcacccctgtaatcccagcaatttaggaggctcaggcaggtggatcacttgaggccaggagttcaagaccagcttggccaacatggtgaaacctcatctctactaaaaatacgaaaataagccggacatggtggcgtgcacccgtaatcccagctacctgggaggctgaggcataagaatcacttgaacccgagaggtagaagttgcagtaagccaagatcacaccactgcactccagcctgggcaacagagcaagactctgtctcaaaaatataatataatataatataatataatataatataatataatataacataatataatataatataatgtaataatttttaaactataaaacagaaattagaggagraattggagatagtcagtatagggaacactttcaaggaattttttgtataaagaagagagaaatgtgcagtagctggaaggaaaaacgagg

SEQ ID NO: 816287 - DNA, 481 bp, Homo sapiens
ctggcaatattagctctctaatgaattgcttcaactcgtatattttttggacaaatgtgacttttagttgaattgtgcaacatccataaatagcaaatcctggctgattagaatcaaygaatgcccttaaagttgccagtaaaaatgggcccttagctgcatgttacttaataatttgaaaggcatctgattatttttgggaaaaaaccttttacacacacattctgtcatctgttatgtatgtagatatgtatttgaatttgaatggattattgcaagccagccatgttatgaatataagtgctagatatacttggatttgaaactaaacacatctgggtttgaatcctaccctctgccacttacaagctacgtgaacttgggtacatttcttaatctctctgcctctccagtttctcatatgtagaatagatgtaataaatcccttgcaagcttgacttaaggaataaatgagaccaca

SEQ ID NO: 816288 - DNA, 549 bp, Homo sapiens
agcagagagagaaggcagcatacatctgcattttcttctatgcacttatcagaaagatcaaagactttaagactttcactgtttcttctacygctatcttctaagaacttcaaagaggaaccaggagtacaggaggaacatgaaagtggacagggagcatgaccactgaagcacagcaccacagggaggggtttaggcctccagatgactgtgggcaggcctggataatatccaacctcccacaagaaggtggtggagcagagtgttccctgagtcctccaagtaaagcgagactccctttcatggtctgctaagtcacgggtgctttcccaggcactggcattaccgcttgaccaaggagccctcaagcggcccttatgcaggcgtgacagagggctcacctcttgccttcttggtcacttctcacaatgtctcttcagcacctgaccctatccccgctggttattcctttgttatatcagtaattaaacaaacagtaatattaaaggctaatgattaataatggttatactaatgattgataatgtc

SEQ ID NO: 816289 - DNA, 549 bp, Homo sapiens
agcagagagagaaggcagcatacatctgcattttcttctatgcacttatcagaaagatcaaagactttaagactttcactgtttcttctactgctatcttctaagaacttcaaagaggaaccaggagtacaggaggaacatgaaagtggacagggagcatgaccactgaagcacagcaccacagggaggggtttaggcctccagatgactgtgggcaggcctggataatatccaacctcccacaagaaggtggtggagcagagtgttccctgagtcctccaagtaaagcgagactccctttcatggtctgctaagtcacgggtgctttcccaggcactggcattaccgcttgaccaaggagccctcaagcggcccttatgcaggcgtgacagagggctcacctcttgccttcttggtcacttctcacaatgtctcttcagcacctgaccctatccccgcyggttattcctttgttatatcagtaattaaacaaacagtaatattaaaggctaatgattaataatggttatactaatgattgataatgtc

SEQ ID NO: 816290 - DNA, 582 bp, Homo sapiens
caggagaatcccttgaacctgggaggcggaggttgcagtgagccgagatcgcaccactgtactccagcctgggaacagagcaagactgtctcaaaaaaaaaaaaaaatgattaagtgaatcgcattaaaataagaacttctgtttatcaaaagcctccattaagaaagtgaaaaaaaacaagccacagaatgggagaatatgtttgcaacacctatacctgacaaaagatttatatccaaaatatatgtggaaccccgctccttcaaatcataggaaataaagataaataacccaattaaagggaagaatgggcaaatatttaaagggcacttcacaaaagaggatgttcaaattacaaaaaacatatgaataggctcaagattattatccatcaaagaaatgcaaattaaagccacaatgaaatcccactacagatctagcaaaatggctgcaatttaaaagacctataattccaagctgctggaaagcatgaagagcaactgaaactcttatctactactgagaagaamgtaaattggtgtaacgactttggaaaactaacaattcctactaatgtcaaa

SEQ ID NO: 816291 - DNA, 621 bp, Homo sapiens
catcttttgctcagcatcaagttttggagcttcatcagtgtcattgcatgtacctatggggttttatttgatagcatttcattgcatggttataccacaatttatccattctactgttgatatttggattgtttctaacttaaaagtagaataaataattttgctatgcatattcttgcaaacgttttttggtacatacgtgcatgtatttttgttgcatataggcttaggaaggaaattacttggtcctgaagcgacaatcatgtttaacttacatagataatgatgtcttttctgaggtggttgtaccagtttatactcccaagaataaatgttctattgatgtacatgttctaaaacattgggtgttgtcataatttttactattgccactattgttggtatgtagtggtaatattattgcattttgaaattctagttccatgttgaatcataaggtttaggagctttccaagtatgtattgttcatttgaatattctcttytgtggagtgtctatgtgtaggtcttctttatttttttgtattgcaatgttggtctttattattcattggtaagaaatccacaaattcaaaaattctttgttgtttatagttacaga

SEQ ID NO: 816292 - DNA, 524 bp, Homo sapiens
attaggcaaaactgaaaaacacagagaagcgaaaaaaggaaaaggcagacgttccagaatttcaccattcccaattcttctgcacgaccttccggaatttcaccattcccaattcttctgcacgaccttcyggaatttcaccattcccaattcttctgcatgctcttatgttcagggggggctggcttaaaaacaacctttcacttttttccccgaatgcacacacatgtataaatgtggttagggaaacccttgggggtggttaacacattcataaaaagcttccgcacgcctacgcctgccaggcactgactgcattattcatcatttataataatcataaacctgacgatcagctgttgttcggagtgagaataggttcccactccttgtgttccgaggtggaagtctctgcaatggggcagcattcctattctctctgccttggagagctcttccctgcagttggccccatccatggagctggtgttgagggaggcgcgctttcccaatcctccgtacca

SEQ ID NO: 816293 - DNA, 267 bp, Homo sapiens
ctaaatctttcagtcatgagtactgaaatttcagactctaaagtgtcattcaactttctaccttatcttttttagagattagttataatcaaataaagagggctaaaggcagacttatctccaaatctttgccatatacatatttttcatttacaaatattatatattggcaaaaattcttattatgtcttacacacaaaattgatgagttaataaataagcatagkagaagtgtcatcactaaaagatgtatgttacgtgtgtgcg

SEQ ID NO: 816294 - DNA, 612 bp, Homo sapiens
aaggcattcttaattacagtattcaccagagaatcaaagcacaactgtgactccaygaatcctctagagcagattcacagtgacaggatgaaacaagcaaaagcaaatgcaacgaggagaaatcaggtcgcttacctgcaaacagtgcaacgttggcatgtttggcatcatatgggcatctggccattccgctgaattcatccccgaatggttccaatgtatccatctaaatgaaataatcagacttaattacaaacaacaaccttttcttttgccctaaaccctcagaaataatttccaggatgtgacaggccttttgtaatctgtaatcactttgagatggaccctgttgaagccacttttaaactgtagttgagaatcacataaaatagctgtgttaaaaacatatttttaggggaaagatggtcaaatcagacattctttcaagcagtgtactcttccacccagcacatttttttatgaaagtccttttcagatattttataccaaccaagagctttttgttgaactctgacagactctgtggtctgtgggtctggcatgtattcaaaaatgatgcttagcacacagtgatgcaacggaaatgccctt

SEQ ID NO: 816295 - DNA, 612 bp, Homo sapiens
aaggcattcttaattacagtattcaccagagaatcaaagcacaactgtgactccatgaatcctctagagcagattcacagtgacaggatgaaacaagcaaaagcaartgcaacgaggagaaatcaggtcgcttacctgcaaacagtgcaacgttggcatgtttggcatcatatgggcatctggccattccgctgaattcatccccgaatggttccaatgtatccatctaaatgaaataatcagacttaattacaaacaacaaccttttcttttgccctaaaccctcagaaataatttccaggatgtgacaggccttttgtaatctgtaatcactttgagatggaccctgttgaagccacttttaaactgtagttgagaatcacataaaatagctgtgttaaaaacatatttttaggggaaagatggtcaaatcagacattctttcaagcagtgtactcttccacccagcacatttttttatgaaagtccttttcagatattttataccaaccaagagctttttgttgaactctgacagactctgtggtctgtgggtctggcatgtattcaaaaatgatgcttagcacacagtgatgcaacggaaatgccctt

SEQ ID NO: 816296 - DNA, 525 bp, Homo sapiens
atcattcattgagctgagtattaggatccgcatttcctggtggtgtattragccagaaggccagctcaaaggcttcatttgtaactttcatttttaggtcaccctggcttatgaacattagtacattgctttttgggaaaaggacacctaaataggaagcttttatcaaaaaacttaaaagcacatttttctcatcctccattcacactgagaacaactaggagtagtacgtcaggtcctctctctgtgggtccggggaagcccattgatgagcagcttttggcttggcttgctcatttcaggtcagtcgatcaagcagccttaaaatatccactggtgttcaaggagtcatttgatcctcactcccttcctgttcttctctctggaaagctcagaactacctgtcctacttttcttcaattcagaggctctcttcccagaaagctgcagtctacttactggatttcatgaacagacacttctcaaaagacgacacacaagcagccaataaacataaaaaaaaaa

SEQ ID NO: 816297 - DNA, 277 bp, Homo sapiens
tcttttccccaccacctttgtcaaaaatcaaacctgtttctgggttctgggttctctgttttcaactgttggttatttttgctatttctgtgcaaatgccactgtgttaatggctccagctttataaaacactgatagtctggtaagggcaagtctcttccttctgtttttcttcttyagtagtgtttaattcttggctcttttctttccatatgaattttagaatcagcttgttagtttccacaaagaaaccttgttaggattttgattgaaatag

SEQ ID NO: 816298 - DNA, 534 bp, Homo sapiens
atgcattgtcaaattagagaaatacctttccagttttaaaattttatatcattatcctttttttgtttcttagtttttgaagacattacaytctgggttttttttggtcagctgttataatccaggtttcacgcttcaagtctttagataatatcatcttattgaaaattttgcagaaggattttcttgttttctcagtggctcagctaaaatcagtgagtggaaaattttctcggattggtttttgaagatacccaataaatcctgtataacctaacagacagctgccttttcttttcttctttagtattttttgaacatgaagtgagggtcgtattgatgagagatcactaaagaaggttaagcctcagcaaaagtcttccaaaaaatgggctgtgctaaaatttcatgtaatactctagcgtttgacacattaaactaaactgagttcataacacattttaagaagagttttctccgttgctcatttgaccattccttgctccttcaggaaacagacaaggttatgtagga

SEQ ID NO: 816299 - DNA, 599 bp, Homo sapiens
tatttttaacttgcatgaacatactcattggctatgtctttgggcagctttttaagaaactgtaagtatgccattggttaatagttatttgatggcttgaaaaagttaatatttttagagctattaacgtacttatgcctggaaaaaagggtataaccagaatcctttttatcacaaattccagcagctacaatattaataacagactccatatctggcatttttttaaagcacttatatccagtgtgacgttgactttagacaactttattatagtaaattttactaaaatctgttaaccaaatagcttttctatttctaaaggcccctaatccaccatgtgtggtgaatgtgttgattgaatttctgttgttttgcatcgtgccctgaatcaagcggggaatttcggcagtgtcatcacacagatgcgtgtgccacccttgctgcttttctccttatttctaataattttgtcctttcagcttgtgttttggagctgtagctgagtttygtttagttggataagatgttgcagggtttgggaggatgacaggagtgagtgaaacggtaattgctgcttcatgcattagcatagaatc

SEQ ID NO: 816300 - DNA, 599 bp, Homo sapiens
tatttttaacttgcatgaacatactcattggctatgtctttgggcagctttttaagaaactgtaagtatgccattggttaatagttatttgatggcttgaaaaagttaatatttttagagctattaacgtacttatgcctggaaaaaagggtataaccagaatcctttttatcacaaattccagcagctacaatattaataacagactccatatctggcatttttttaaagcacttatatccagtgtgacgttgactttagacaactttattatagtaaattttactaaaatctgttaaccaaatagcttttctatttctaaaggcccctaatccaccatgtgtggtgaatgtgttgattgaatttctgttgttttgcatcgtgccctgaatcaagcggggaatttcggcagtgtcatcacacagatgcgtgtgccacccttgctgcttttctccttatttctaataattttgtcctttcagcttgtgttttggagctgtagctgagttttgtttagttggataagatgttgcagggtttgggaggatgacaggagtgagtgaaamggtaattgctgcttcatgcattagcatagaatc

SEQ ID NO: 816301 - DNA, 521 bp, Homo sapiens
cttggttttaagttaaagaaaaaacctgaagtatatggataagaattggacaggaatatgaaaaaatatagaaatttatttttgtgtggtagggattctgggttttaaatttttaagtttctattttttgtggtagtatatttacattaattatgataaaaggaaaatatggggttacattgccatcattaatcaatctatttcacagagcccttgaacacttaaatgtttgcttatgcattcacttattcattcaacaagcatttctttagcacttaaaacctgccagagataatcagagattcattagactggcaagtgccatgttataaagataaagatcaataaatatggtaattcttagagttcatgattctaagaagcatatttttttctattttgacatctctaaaatttggacacatcatataattgtgtgtttcaattgtaattggcartatgttttccttaatggtaaataaaataagagtgtcttacaattgatgtcttagatttgatga

SEQ ID NO: 816302 - DNA, 670 bp, Homo sapiens
tgggcaagctgcttcatctctccatgtttctgtttcctaatcaataaaataggaaaagtaataggaactatctcattggatttggtgaggattaaatgaattaatatatataaagtatctggcagagtgtcaggatgatggttactatatattagttgtattctttctttctttttttcttttcttttctttttttttttgagacgaagtcttgctctatcacccaggctagggtgtagtggtgcgttcttggctcaccgcaacccctaccttcctggttcaagtgattctcctgcctcagcatccctagtagctgggattacaggtgtgcaccaccacacccagctaatttttgtatttttagtagagatggggtttcaccatgttggtcaggctggtctcgaactcctgacctcaggtgatccaccaacctcggcctcccaaagtgctgggattacaggcatgagccactgtgcctggcctagcttttaaatttctaatctttttagctttttgtcttcatcataatatcaggatatgtgcccacaaattgggggatttgtcagtgtatgtgcawgtgtatgcaggtatgcttttttttcttttaggtaagtgggttttacttcagaaagttagtcattacctttgaaacatcctccaactaatccaa

SEQ ID NO: 816303 - DNA, 551 bp, Homo sapiens
gtcttttttttttgtctcaaagtctataaaaataagatcgtcaaaaattaaaagttgaagatttcagcaaatacaacttaatttctgattatccatatcactttaaggaagcgtcagagtgtaaaaaaagagaaagttttaaattaccttttgagattttcataatctctatcccttatatatttgtgaatttttttgataacagtaatcacccaaaaggtcaagaaataggtaggtgaggtgagggaagcactccgtggtacttagaagatgaatggttagcaatggatgtttatttatcctgatacatattcatattttacatcagtttcttgaactctatgaaattttaaaaaaggaacattttaatttggtacagctgtttcatgaaaaccattattagcatgaagagaaagtgctattcgaagyaatggtacaaaggtttaatttttatttccaagggaaaacgtgcacgtgcagtaaaagtaataaaggaaagctgagtttcccttgaggtatgcgaggctgaatgaaatctgctatattatcct

SEQ ID NO: 816304 - DNA, 551 bp, Homo sapiens
gtcttttttttttgtctcaaagtctataaaaataagatcgtcaaaaattaaaagttgaagatttcagcaaatacaacttaatttctgattatccatatcactttaaggaagcgtcagagtgtaaaaaaagagaaagttttaaattaccttttgagattttcataatctctatcccttatatatttgtgaatttttttgataacagtaatcacccaaaaggtcaagaaataggtaggtgaggtgagggaagcactccgtggtacttagaagatgaatggttagcaatggatgtttatttatcctgatacatattcatattttacatcagtttcttgaactctatgaaattttaaaaaaggaacattttaatttggtacagctgtttcatgaaaaccattattagcatgaagagaaagtgctattcgaagcaatkgtacaaaggtttaatttttatttccaagggaaaacgtgcacgtgcagtaaaagtaataaaggaaagctgagtttcccttgaggtatgcgaggctgaatgaaatctgctatattatcct

SEQ ID NO: 816305 - DNA, 596 bp, Homo sapiens
cagagtgatggcaactagcagagagaagtttctctttagatataatggaagtttttaaaaatttttattttttgtagagatgggggtcttgctgtgttgcccaggctggcctygaactcctggctttaaacaatcttcccatcttgacctcctaaagtgctgggattacagatgtgagtcaccttcccgcccactgaaatgtatttttattgaaatgacttagatgcttttcaattagaaaagtgttttactgcaacagaagtaaactctacttgagtccaataacagagggggtttgtttctctttctgtttttgtgtttaatcagaggtccagagagaggcaggccaagattattgcagctgctttgtgatgtcaacgtgcatcaaggactcaggcatctctattgccacggttcctcatagttggaagttggctactgtgcctctagtcatcatatttgaatacaaaaaaggggaaaaatgaagggccccagagctgaaaggacatgccagtctgcctctttccagattgttccatagtcttgtctagtagtgtgtgagacccacgggcagtgtgttggtgatgtattggcaa

SEQ ID NO: 816306 - DNA, 604 bp, Homo sapiens
ttggaactgtttcagaaggaatggtaccagctcctcttgatacctctggtagaattcggctgtgaatccatctggtcctggactttctttggtcggtaggttattaattattgcctcaatttcagagcctcttattggtctattcagagattcagcttcttcctggtttagtcttgggagggtgtatgtgtccaggaatttatccatttcttctagattttctacttcatttgcatagagatgtttgtagtattctctgatggtagttgtatttctgtgggattggtggtgatatccccttcattagtttttattgggtctatttgatttttctctcctcttcattagtcttgctagtggtctatcaattttgttgatcttttcgaaaaaccacctcctggattcattgatttttttttttttttgaagagttttttgtttatctatctccttcagttctgctctgatcttagttatttcttgccttctgctagcttttgaatgtgttcgctctygcttctctagttcttttaattgtgatattagggtgtcaattttagatctttcctgctttctcttgtgggcatttagtgctatacatttc

SEQ ID NO: 816307 - DNA, 604 bp, Homo sapiens
ttggaactgtttcagaaggaatggtaccagctcctcttgatacctctggtagaattcggctgtgaatccatctggtcctggactttctttggtcggtaggttattaattattgcctcaatttcagagcctcttattggtctattcagagattcagcttcttcctggtttagtcttgggagggtgtatgtgtccaggaatttatccatttcttctagattttctacttcatttgcatagagatgtttgtagtattctctgatggtagttgtatttctgtgggattggtggtgatatccccttcattagtttttattgggtctatttgatttttctctcctcttcattagtcttgctagtggtctatcaattttgttgatcttttcgaaaaaccacctcctggattcattgatttttttttttttttgaagagttttttgtttatctatctccttcagttctgctctgatcttagttatttcttgccttctgctagcttttgaatgtgttcgctctcgcttctctagttcttttaattgtgatrttagggtgtcaattttagatctttcctgctttctcttgtgggcatttagtgctatacatttc

SEQ ID NO: 816308 - DNA, 553 bp, Homo sapiens
tgattacaccactgcactccagcctaggtgacaaagtgagaccccatctctaaaaacacaaactcacacacacacaataacaacagccaaacctgtacttaattccatctgcaaggaaatcaaactggttttgattttttttttttttttttttgagacagggtctggctctgtcatcaaggctggagtacagtggcacaatctcagctcactgcaaccgccacctcctgggctcaagagatcctcccacctcagcctcctgagtagctgtgaccacaggcacgcaccaccatgcctggctaattttttgtatttttggtagagacggggctttgccatgttgcccaggctggtcttgaactcctgagctgaaggaagctacctgcctcggcctctaaaaatgttgggattgcaggcataagccaccacacccagcttgctttttacttctgtagatttttcatcctattaaaaaamacacacagctcaatgggatgttattttgtacacatataaatatggccaccagtgggatccatacatacaaattata

SEQ ID NO: 816309 - DNA, 604 bp, Homo sapiens
gaaagcaagaaggaagaaggaatgaagatgtgctacatcattcattttacatggggaatctcatttcattcctgatagacaaatatgagtttatactctttaaataattaagaataactgctgggagactagaaataagtaactttcagacaatatacaggaggggggcaggaaaaagaccagggttcggtagaacaatgttggggaaaagaaaaagagagcaggagagaaaaaagttgaaaaaatatataaaataaaatgacagaaataagaccaatacgtgtgaatgggataaaatctactcatataagataaagacacactggatcaacaaataaaattcaactatatactgtttacaaggcacacatttgaagcaaaatgatatgaaacagttaaaaaaaaaagagagatgagcaaggatatgccagggaaatgcaaacaaaacaagaataatattaatgaacaaaacagcattgaagccaagaaaartgattaaattagacaaatttgtcaaacacaaaaaagtaaaatctacaatgaatatgtaaaagctaagtatagcactgaaatatttttaaaactattaaaaatgcaagagaaa

SEQ ID NO: 816310 - DNA, 629 bp, Homo sapiens
ctattgttaatgttcgtcttgatcacctggccgaggtagtgtttgtcaggtttctccactataaagttactatttactccccttttctatgctgtgcttctttttctactctcacccatttgtttatttatccaattatttatttttatatcagtatggagtcacactcatggatattcattttatatcgtgtgttgtaatccaatgctgttttgttgttattgttgtgtgatttttgtttggttcattggttgggctttttgtttttggggtttgagtacttccttactttctggcactacaagatgttccaagatcatatatcctgccccagtcctagaatcagctatttttcattttttttaatagaagatggtgttagaaaccaagacctgggtgctacgtgtgcttgttgctacaggggtgtcgtttccagatcccttcaactaacagagtgaggtaatatatgtgtgtatactaacccatgtatataaacatttctaaaaaatgtattcatgtattcatmaatacatgtattcatacatgtattcatctgtgtctatattaggctaagcatgagttcatactgatatcctcaactctaatctaactacaaaggatcattctag

SEQ ID NO: 816311 - DNA, 619 bp, Homo sapiens
actgcactccagcttgggtgagagttagactgtatcaaaaacaaaaagaaattaactstgtagtttatttctgttaatggcaaccctgcagaaaagttaaacttagaatatgtctcaaagtaatctctgtctgatcccttaatgaaggatctcttcaaacacagcaacttttgtctgtcttctgaatgtaggtacagctgtggctgtagaacagaccatgtaattttcatctagattccttacaaccacaaggacaattattacaatgaaagccagagaactagctcagttttgattttattactaggataaatccagccaggtagtgtggtggctttgatgttttctgtctatatctaagggggaagctgcttcattattcgatattaagataaatagggcctaaaaatagtcctaggtcaaacaccattatgattaactcaactttcaaaaccatttacctaatgtaggatttgttaataagtcttcttcaaaattagcaagaaatacaactaatgcctaacccgtcatgatgaattaaagactgatccaaaaataactgacagttctcttccagttgccctcttctttgacaatcccaccagtctatgctctaagc

SEQ ID NO: 816312 - DNA, 604 bp, Homo sapiens
taatatatgtttgctataaaaagccaaacccagcrtaaagatggataaggaaaaaatcaattattttgtgagtcccccttttcaatcccatccccctgaagttacagtgtcaacagtaaatggtgattacctctatgcctttcttcatgcaaaaacttaaataaaaatataggtgcatacttagagattttacctttttcttcttttaaaaaaataaaaatttgctcctgttaaacattacattctttcattgtttttaatgaatgccacatcatggtattacattagctagtaaacttgctgaaaaaacatctctcctatcagtaaggggcatgggcaaattcaaaccttcagatacatatgaataacttttgaaaaatatgaagggatataaaagaacaataagaaaaagagataaactcgctaataaagcagaagatgttaaaggagaatgtgttatatgaggaattaaaaatgaaaaaaatccatcatttttctatgttagtaaatgtaaatattctttttttccaatagctgcatatttatattcgatagcacagacatacttttttcaacattttaactggtagacattcatttttaa

SEQ ID NO: 816313 - DNA, 541 bp, Homo sapiens
aggatcctctttcttctagttttgaataacattttttcattttcttctgagcccttaccagcagcaccttcaacatccgtatttctrcaaacagttctttcacaacaattgaagtgttttttaaagtgattttggttttctttaccatgttcctcattccttctgagtcttagtaaagttgttaacatccatatttctaatagtctgttcaaagaaacctaggcttttctatcatgctccttacaattcttctagactgtgcaactgctgtttcaaagtcactttcacacttttaggtatttgttacagcagccccgcttctggtaccaaaaactgtatttacttcttgtggctgctataataaattcccacaacaaaaatgtattatcttgtggttttgaaggtcaggagcccaaaatgggctccactggggtaaaataaagatgtcagtagggctgcatttctttctggagggtctagagaagacccttctgtcttcaaagccactggttgtgtctttctcacattacatcactctgac

SEQ ID NO: 816314 - DNA, 601 bp, Homo sapiens
gaacaaattaaacctgatggattcctttcgctgyctgtgtagtgtggggcaatgcagaacaaagtgctgtggcgttgcggaaggggttccctctggcagttttggaatttggtggtaggaaatgttagttatttataaaaaggaaaaattcctctgttaccattctggttttcacaaaaaccgtaattttatcatcacggcttgtagcaggaagccaacaaggggtgccgatgacggccacgaccccgtatctctgggctgtctctctcacctccatcggccactgcctgcttgctctttaggagcaaaggacatgatttagaagtaattcaaaaccccgtcgcgggacccagaacagcccagatggtctggccctggcctggggtctgcgggggtgggggtgccagccccgggggtggagtcgaggtcggctcccggccaggtcccgcgacgggtctgcacgcagccagggaggcctgagggggcagctgcggggctggcggccaggagctgcttcgcggcttgcggcgcaaagtagaggccccgctagctcgctcccgcacgccgttctgcgccttctcttcctagccccggcaggctc

SEQ ID NO: 816315 - DNA, 552 bp, Homo sapiens
gggggaggtggcaaaaggggcctttagccttgtctgtaatgcttttaaattttataaaagaaaaccatgcacatagtgtgttctattttggtaaaatagacgtaacacaaaatttaccattataaccattttaaatatacaattcggcggcattagttcattcacaaagttgtgcaaccatcaccaccatccatttccagaactctttgtcatcccaagctgaaactcaatacccattaaacaataactccccattctccccttccccaacccctgaaaaccattattccattatctgtctctgtgaatttgcctattctaggtacttcataaacatggaattgtatgatatttgtccttttgtatctggcttatttcacttagcataatattctcaaggttcatccatgtgacatgttatcagaatttaattcctttycatggctgaatatattattctattatatgtatataccactttttttaatccattcatctgctgaggaagacctgtttctaccttttggctattacaaataatgctgctgtgaa

SEQ ID NO: 816316 - DNA, 586 bp, Homo sapiens
aaataaaaaaattagctgggcatggtagcatacgcctgttatctcagctacttggaagcctgaggcaggagaatcgcttgaaatcaggaggtggaggttgcagtgagctgagatcgcaccactccactccagcctgggcaacagagcaagtctccatctcaaaaaaaaaaaaaaaagggaaccagaattccttgaaggaatgactaactccagaactgtgttaggtaaagtacaagatgagcctggaacatcttgtgccacaaagtaaggaaatattcaaagactattcagaacatgtcaaaagacacaggagtcagcttaaaggggctttcagtgaccaaatctggaataatttgagctccaaaatgaatattgacagtaaaataatattatctgttgaataaaataggaatctgtgattccagtgctgataggaagaaagagacgggaccccctttcttacagtaaaaagscaactaatgttagaaaaaatgatgaattaggcagaaatactgtttggcaaccatcataatattcagacgtgaatggatactaacatggtgaaagattgtggagtaacaagata

SEQ ID NO: 816317 - DNA, 605 bp, Homo sapiens
ttttatattccagaatactacccagaaatacttttagttctacctttactacagtctcaatacttcagtgttaccttgtctttcatgcccttgtcacttttgaagaattatcttgtctaatacccctcaatctgggtttgtttggtcgggcgtggtgactcccgcgtgtaatcccagcactttgggaggccgaggtggctggatcatttgaggtcagtggttcaagatcagcctgaccgacatggtaaaaccccctctctactaaaaatacaaaaaaattagccaggcgtggtggcgcacgcctgtactcccagctactcaggaggctgaggcaggagaatcgcttgaacctgggaggtggaggttgcagtgagccgagattgtgccattgcactccttcatgggtgacagactgtctaaaaaaaaatttggatttgtctgatattttcttgtgattgaactgaggttatgctttttggaagaatattacggaaatggaatgtcctcaatcatatcatgagattcataatgttsatgtgtcttatttattactggcaatgttgaccttgatcacttgattaaggtggttccaggctgagcgcggt

SEQ ID NO: 816318 - DNA, 524 bp, Homo sapiens
gcagatcacttgaggtcaggagttcgagactagcctgaccaacatggagaaacactgtctctaccaaaaatacaaaattggccaggtgtggtggtgcatgcctgtaatcccagctactcgagaggctgagtcaggagaatcgcttgaacctgggaggtggaggttgcggtgagacaagatagtaccattgcactccagcctgggcaacaagagtgaaactccgtctcaaaaacaaaacaaaacaaaaaaaccagatgttgaccatcaatcccaatggatattgaaatgtagataccaatagtacatttaagcttctcaataaatagtttaatttattgagataatatcattactattaaaatgtgtaaaagtagattaatctttgaaagaaaaacatgytataacattttaattttattttttatttttttaactttcattttaggttcaggggtatatgtgcgggtttgttgtataggcaaattgtgtgtcagggttggctgtacaaattatttcaaaaccca

SEQ ID NO: 816319 - DNA, 588 bp, Homo sapiens
aaaaagactattttaactttttttttttaaccctacctcagtctgaagaaggtcagttgaagtccttactgtacaagtccaaaatttaaaaaaatgagttccacagtgaacttcctcatgcttcggcyatgcgtggaccagtcagcttccgggtgtgactggagcagggcttgtcttcttcagggtcactctgcaagggttgtccaggcttggtcttgccttctaggtttcaggtgctgcaggttttacatggctgtggtggatccaggctgggattccctctaccttcacagcggtgggagtggtcaggacgacaatctggggtcctttccactgtgggcacaaagaggctacgttccagtccttgatccacactcaatcacctggggagaaagggtgaactggggagaataagctaacagggcatctctcatttacccaggctgagattgtgtaatttttcctaaagcctgtagctgtcgctgtaactcaatttcacctaactcttggggagtgcctggaagtccccacaatatgggagggggcctatgatatagtattttataaggggaatatcctgctctttta

SEQ ID NO: 816320 - DNA, 322 bp, Homo sapiens
tcttgaacaatctaaagccagaacagcccatctaagattcttccaatccccaacccacagaaactttgtgaggttgcaaagggaacaaaggagaaaggaagggacagagagaaagaaaaaaagaaagtagtaacacaaaagaaagaatacaaaaacactgtctgtccacatgtcgatctcattagatttatagattgcatctcmttgatcataagacaggacactaaattagtgcttaataactattattaaatacatttttaactctcctcttctgcctagatcttttccctcatatttattcctgcactgcatacctgtc

SEQ ID NO: 816321 - DNA, 322 bp, Homo sapiens
tcttgaacaatctaaagccagaacagcccatctaagattcttccaatccccaacccacagaaactttgtgaggttgcaaagggaacaaaggagaaaggaagggacagagagaaagaaaaaaagaaagtagtaacacaaaagaaagaatacaaaaacactgtctgtccacatgtcgatctcattagatttatagattgcatctccttgatcataagacaggacactaaattagtgcttaataaytattattaaatacatttttaactctcctcttctgcctagatcttttccctcatatttattcctgcactgcatacctgtc

SEQ ID NO: 816322 - DNA, 606 bp, Homo sapiens
caccaagagattatatcccgcacctggctcggagggtcctacgcccactgagtctcrctcattgctagcacagcaatccgagatcaaactgcaaggcagcagcgaggctgggggaggggtgcccgcaattgctgagttagttgtttgattaggtaaacaaagcggccggccgggaagctcaaactgggtgaagcccaccacagctcaaggaggcctgcctgcctctgtatgctccacctctgggggcagggcacagacaaacaaaaagacagcagtaacctctgcagacttaaatgtccctgtctgacagctttgaagagagcagtggttctcccagcacacagcttgagatctgagaacaggcagactgcctcctcaagtgggtccctgacccccgagtagcctaactgggaggcaccccccagtaggggcagactgacacctcacacggccgggtactcctctgagacaaaacttccaggggaaccatcaggcaacagcaactgcggttcaccaatatctgctgttctgcagccaccgctgctgatacccaggcaaacagggtctggagtggacctctagcaaactccaacagacctacaggtg

SEQ ID NO: 816323 - DNA, 552 bp, Homo sapiens
tatatatatatatacacatatattttaagtatatatgtataatgatgaacagaatgataaccaaatattaataatgttactttttaaaagggatttggaaagagcttaactttcctctttgttctttgaggcatgatatgaaattttttctaatggtgatgtactattttaacagaaacaataaaatcattctaaaggaggaggaggcagaggaactccttttggaatgtagagtgcagctttgaaaagccatgaatcaatccttgacttcaacatgtgggattaggctagtgggtggtggttaggggaggtgaaaatgaataggcggcaactctcaagttgagtaaataaatcatatctgctaatcttatgtgggtactccccgtgtcaggcactggctaaatgctttgcgtgcatcacctccttccatccctaaataacctacaaagtaacactattcaggacagccacttacagttttgaaggttgmgcactccaggagacattattcgcattgtcaatcacgtgtttctggcactcctggagtcgtgt

SEQ ID NO: 816324 - DNA, 646 bp, Homo sapiens
aggagttcaagattacagtgagctatgatcacaccactgcactctagcctggatcacagacagactctgtctaaaaaaaccccaaatgtatacactttcatcrgatggagtattctatatatgtctattaggtcaagttggttgatagtgttgttcaagctcttttatatccttttcattttttgtatagttatttcatcaattatttagagtggggtattaaagttaacaattattattgctgaaatgtctatttgtcctttcaattctgtcagtttttgcttcgtgtatttagggctctgttgttagatgcatatatttataattattatatattcctgaagaattgcctgtgttttcattataaaacaccgctctttgctgttaataagtttttttttttttttggtcttacagtctattttatcagtagagccactccagtctctcatgaattttttttacgtggaatatctttttccattcctttactttcaatttatttgtgtcttttaattgaaaatgtgtttcatatatggcatatggttagatatttcttttttatatggtttgacaatatttaccttttgatttgcattttccatgaattaatgcttaatggaatttgatatggttctatttatat

SEQ ID NO: 816325 - DNA, 549 bp, Homo sapiens
caaatatctggacttgcttctctgtcatcttaaaattgaaaatacttttaaataaggagccttgtgatttcattttgcattgagcctcacaaattttgtagctgtccctgcaggaggggagcgtgctggctgtgcaggggaggccagcaccaagcctgggaggtggacgttacctgggtgagttggaatggattctgagttcctgggcattttctttcctgctgatgatctgattctcttcctatgccatagtttctttaagaactgaatttatagaacattcattataggctaggtgttgtgcaaacaggcatttaattctcacaataacactatgggcagaattattagcctctatataaatggggtataataatttcccaggcttataaagctttatagccaaggaaatggaagctcggaagttatgtaacttgcaraaatttaaccccggccaatggcaggacccagatccaacctcaggcatgtgtcacagtgacattcttcaaccccttccaactgacagcttgttttctgacctgggtttag

SEQ ID NO: 816326 - DNA, 549 bp, Homo sapiens
caaatatctggacttgcttctctgtcatcttaaaattgaaaatacttttaaataaggagccttgtgatttcattttgcattgagcctcacaaattttgtagctgtccctgcaggaggggagcgtgctggctgtgcaggggaggccagcaccaagcctgggaggtggacgttacctgggtgagttggaatggattctgagttcctgggcattttctttcctgctgatgatctgattctcttcctatgccatagtttctttaagaactgaatttatagaacattcattataggctaggtgttgtgcaaacaggcatttaattctcacaataacactatgggcagaattattagcctctatataaatggggtataataatttcccaggcttataaagctttatagccaaggaaatggaagctcggaagttatgtaacttgcagaaatttaaccccggccaatggcaggacccagatccaacctcargcatgtgtcacagtgacattcttcaaccccttccaactgacagcttgttttctgacctgggtttag

SEQ ID NO: 816327 - DNA, 625 bp, Homo sapiens
ttgcagggacatgaatgaagctggaagccatcatactcagcaaactaacacaggaacagaaaaccaaacactgcatgttctcactcataagtgggagttgaacgctgagaacacatggacacaaggagaacaacacacaccagggcctgtcagaagggtggctggtgagggaagggagagcatcaggacaaatagctgatgcatatggggcttaaaacataggtgacgggttgataggtgcagcaaaccatcatggcagatgtatacctatgtgacagacctgcacattgtgcacatgtatcccagaacttaaagtaaaaaaaaaattaaattaaaaaataaaagaacaaagctggaggcattatactacttgacttcaaaatactggcataaaaagaaacatacagatcaatggaacataatagaaagccaagaaatctatgcatttatggtatatctttgacaaagtttgcaaggacacacaatgggaaaaacacactttcttccataaatggtgctattaaaactggatatccacatccaaaagaatgaaaytgaacctatacctcacaccatatacagaaatcagctcaaaatggattaaagccttaaatctagggcctga

SEQ ID NO: 816328 - DNA, 440 bp, Homo sapiens
ctcccccactgaatattaaaaaccacatcacagggatgttgtccacccctgcgatatggacagtaatatcattgtctccccgcctaaatattaagaacagtatcacaagaggggtgtacaccccckgcgatattgggagtaattttatcgtctctacctttggatattaggaccaatatcacgggggtggggtgtacaaccccctgcgatatcggacataatgttatcctctcttcccctggatattaggagcaatatcctggaagggagagggagtacaagctcttcgatatctgcggtaataacatcatttcccttcttggacattgagaacaatatcactgggagggtgtacaccgcctgcgatattgggtgtcatatcatcctctcttccctgggatattacgaacaatatcacaggacgggtgtaccgcacctgt

SEQ ID NO: 816329 - DNA, 537 bp, Homo sapiens
cacttcttgcgatacagggagtaatatcctctcccatcatggatattaagaacaatattacaaaggaggtgtccaccccctgcgatattgagagtcatattwtgctctccccttagggataagaacaatatcgcaggaggtgtgtacagcccctgcgatattgccactagtatcatcgtctccctcccgggatctaagaaacaatatcacaagggggtgtataccccctgcgatattgagagtaatatcttcctctcccccgctggctattaggaacaatgtcacagaaggggtgtacaccccctgttatattgggagtgatagcatcctctccgtccctggatattaggaacaacatcactagggagtgtacacctccagcgatattgagactaatatcatcctgtcgccgcctagatattaggaactgtatcacaggggtggtgtacatccgtgcgaaattggaagaaatatcctctccacctttggatattagagacaatgtcacggtggaggtctacgccccttgcgatattg

SEQ ID NO: 816330 - DNA, 621 bp, Homo sapiens
ctgcaggcagaactctggaactgcccggacttttctggcccatttccaagcctccacattcccagtgatcacctcctcatatctcttcactgggatccaaggttcttctctatttgccaaactgcatattatgtggggagattggtggtgctaggggttttctttttggctacttccttactttcattaaaaaaaaaaaaaaagctgccaagatagtggctcaagcctgtaatcctagcactttgggaggctggggcgggaggattgcctgagctcaggagttcaagaccagcctgggcaacacggtgaaaccccgtttctactaaaatacaaaaaattagctgggcgtggtggcatgcgcctgtagtcccagctactcaggcggctgaggcaggagaattgcttgaacccgggagatggaggttgcagtgagctgagattgcgccactgcactctagcccgggcgagagagtgagactccaactcaaaaaaaaaaaraaaagaaagaaaaagaaagctatgcagtactctcaggcagtaggtaatgaaatacatccatttttaaaaaaatcaaatgctcagtgagtgcctactgtgaaccaggcactatgcttgatcctg

SEQ ID NO: 816331 - DNA, 540 bp, Homo sapiens
cgggtcaagggacggggaggctggatcctgttgcaggggcatagtccacatgratggagtgctggccatgtgctaagtgctgttctaagcttgatacttactttaacttaattgatcctcacaacatccctatgcggtaggctattactccattttacggacacaggaactgaggaacacgggcccaatttcacctaaggtcactactgaggaccagggttcagattaagtgtctgcctccagactgaatcattcttacatggtgcctttctggatgagctcattgccctggacgggtggaggtgaggggttttgtcctgtgtacccttcctgaagcctgacagatcccgccccagaggcagattctggctgttgccatgttatactggaacccagaattatcagccacccacttgtagggtacagagaaaaggaactgctctgcagtgatcagggctgtgagaaatggtttactgtgatgaggtctgtcctaaccacctcaaagaagtatctgtcagcaccccagggacatgctccttt

SEQ ID NO: 816332 - DNA, 540 bp, Homo sapiens
cgggtcaagggacggggaggctggatcctgttgcaggggcatagtccacatggatggagtgctggccatgtgctaagtgctgttctaagcttgatacttactttaacttaattgatcctcacaacwtccctatgcggtaggctattactccattttacggacacaggaactgaggaacacgggcccaatttcacctaaggtcactactgaggaccagggttcagattaagtgtctgcctccagactgaatcattcttacatggtgcctttctggatgagctcattgccctggacgggtggaggtgaggggttttgtcctgtgtacccttcctgaagcctgacagatcccgccccagaggcagattctggctgttgccatgttatactggaacccagaattatcagccacccacttgtagggtacagagaaaaggaactgctctgcagtgatcagggctgtgagaaatggtttactgtgatgaggtctgtcctaaccacctcaaagaagtatctgtcagcaccccagggacatgctccttt

SEQ ID NO: 816333 - DNA, 648 bp, Homo sapiens
tgatgggccttggggtagtggggatccctggggcttctccactcagcagaacctggaccctagcagggamacatccaaatgccagcacctgtgcctcccttcctgcccggaaaatcctccatccccaaacctctctctttaattcgccaaacacctgctctgtgatgttgagtgtggtgggcttgttaagaagcctaagacataactatttcctgtgtgcccactgtgagcatgctttgtagctgctttgcacagagctcattcaaatgccaatccttacagtaaccctgtgagacaggtcttacaatacgaatttggggagaaaatggaagtactgagaattgttaaacaaggtacccagtgacattcaggggcaagtggaaagaggagcttccaacccagggctgtctgattctcattaataataacagccagcatttgttacatgccaagcactattaataagcactctacatgcatctattcagcccaacaaggtaggaacaatcatcactttcctcctttcactgatgaggaaactgaggcacaaagagattaggtgccttgtctgcggtccaagtagtccatagtatggatggatttgaacccatagaagtggtctagatgtttctccacagtgagtccggt

SEQ ID NO: 816334 - DNA, 549 bp, Homo sapiens
cattgtgctggaaccaaagagccagcattccatggtattgtttgactttggattgtctctgctgatttacgatcacgaggtctrtagtcctgccctcgaagggaggcagatgttagagccagatgagaatgtgagacacaatcagaacttactgcctccttttttatgttttttaatttattatttattattgttattattatttgagacggtgtctcgctctgtcacccaggctggagtgcagtggtgccatctcggctcactgcaagccccgcctccctggttacaccattctcctgcctcagcctcccgaatagctgggactacaggcgcctgctaccatgcctggctaatttttttgtatttttagtagaggtggggtttcaccatgttagccaggatggtctcaatctcctgacctcgtgatccacctgcctcggcctcccaaaatgctaggattacaggtgtaagccaccacgcccggcccttattgcctccttttaacttcctaaaaactgggctttgggttgtcagctattcattgggtcc

SEQ ID NO: 816335 - DNA, 524 bp, Homo sapiens
aagacttctgtttttttcttttatggtttcgatggcaggcgcactttgctcctaactctcagttattagaytcagaagagtctgaaccttcacagcttagctgtggcttagttggggctcactgctacatctctaccagtaggcaagttcctggggaggaggcccactgagtttgttcacctccatgtcccagcacatgaaacagggcctggcatgaagcaggccagcagctctataaaacatgttcaatgaatggacaaattaatggagtttgccttcatagataccttcccaaatctggtttcctactatttaagtctctattacagtcagtcatcttaggaataaaggtaggcattgaccacccaaaaggctgtttctgtcttcttcacaaagtggggctggaaagtgggtggcattatcactgacagagtcttctgtagcggccacttgcatgacaggaatggccagtacccagcacctttccatggtagtcatgcctgataccatgtgtaaggaacatg

SEQ ID NO: 816336 - DNA, 631 bp, Homo sapiens
gtgttgcagccatcctatcacctctggccatcaagtttccgttggcctacagcctatctgctgagtttttgaggcattttacaagtatcattaacctcatcatgttcaataactgtaaaagtaggaaaatcattgagtgtgcatttagaaagactcatgatcatgatggaatttaaagtgaaacaattttacatgagtaggtacctatctagtatttgtggaatgtttcactcctgtccaacaggaaaagtatcttattcatgtggggttaaaaaatattgataacagaaggctcagttcacacatgcctcctcatcaatgagccagggcacataattagttgaccagaaggctcgctgggattaattagcagctgtgtgtgaaaagcttggttcagatttgtagcacgaaggataggggttctagaatggccacttcctggattcacagttcaatcacgcaggaggatctcagggcttggctgttgaagttgctgggggctcttggctcctatatggaccrgtgtgggcatgtgcacatccagctaccgccggcagagggcagcagtacgctgcgcgtgttcaatttgcatcccagattagcaaatccccaaggacctacataagaaaga

SEQ ID NO: 816337 - DNA, 614 bp, Homo sapiens
  misc_feature 1, 2, 3, 4, 5, 6, 7, 8, 9: n = A,T,C or G
nnnnnnnnntacagagatgggatcttgtcatgttgcccaggctggtctcaaactcccaggctcaagcaatcctactaccacctcagcctcctgaaatgctgagattacagtcatgagtcagcatgcccaaccttagacacattttaaatcagctgtttcaaatacatttaagaaagaaagccacatctaaataactaaagtatgaaaacaatgtcttaccaaatagcatcagtaaagaaaaattatagtaaaaacacaatataaattctagagttgaaaaacacaataatcaaaatgaaaattttactaaagcgctcaaccactgatttgagccggtgaaagaaagaattgggaaatttgaacacagatcaactcagattatctagtctgaagaacagaaagaaaaaataataagcaaaaataagtaaagtgtcagaagcctgagcgttaccatctagtataccaacaaatacataatgggaatcccagaaagagaggaagcagaagaaatatttaaagaaataatggtcaaaatcttctcaatttgratgacaaatattaatgtatacatgcaagtggctcagcagactcctgcaggataaactcaaagagat

SEQ ID NO: 816338 - DNA, 530 bp, Homo sapiens
gagtttggcgtgcaaagggacagaatgatgtaacttggaattgatggagtgctaattccctgtggggaaagctttgaccagtgggaaagagaaggaaaggggacccaagaagataaagttcttyttttttcctcaccctccaacttaataatttcataaagcatgcccaggaatatactgtgtgctgagctgttacacctgcctagtaacatcatggcctattgggaagcagtagccagacatataaacacagcattccatttattttccacatctgttccttgcctgcttgcccttattccttactctccctgcacactgaaattaggtgcattggctccatgttctagagagcttggcaagcaaagccatttggtgagaattaccacgtgggattgttaaaaatgcaaattccctaatgttgacttcctccaccttaaacatgaaaacttttctgggtcattatttaattccagatgctatccttgagtcatattaatctatgcatttaaaagagaatctgtgacata

SEQ ID NO: 816339 - DNA, 505 bp, Homo sapiens
ctgaagtgactcctgccagctcctctgactcaggtgtgccttcctggcactctcttccccttccaccacaggatgtgtgtgaatggtggattagagacgaaaagaaggagatatagtctggacatcaataggcagtggaatgagaggagtatggaaggaagggtgtgaaggaggaaggagtagagaaagatgctcaaattcatcaccttcccaacaatgtggacgttgatgttgctaccagcatgacgatcaccgaaggagaaccgggatatcagttaatgtccaggcagaaatcctgggctgttattttgagtatgaatttctattacacaaggactttaaaaaatgtaaagctataatcacatccaatgaaataaaccatatttatgtaatattagtagcatccaataccgagtctatgttcgttttttgcccccataatgtcatttaacaatcggtttgttagaatccaartaaaggatccaacgctggtttttttgttgtt

SEQ ID NO: 816340 - DNA, 585 bp, Homo sapiens
atctgaatgggcatttctagaaatatgataaactaatagygtaaaagcacgtgaaatgatgctccgcatcactagccatcagagaaatgtgaattatagctgcaatgaaataccactctctacctactcatatggctatcataaaaggatagataagaagaagtgttggtgataatgtggagaaattggaatcctcaaacactgcttggaagaatgtaaaatggtacagccactttagaaaacagtctgccagcgtctcaaaaagttaaacatagagtgaccatatgacacgcaattccagtcctatatagccaagagaattgaaaacatatgtgcacacaaaaacttgtacactgtttacagcaacattattcataataaccaacatgtgggaacaactcaagagtgcatcaacaagacacatggagaaacacaatgtggtatatccatacaatggaatattattcagccatgaaaaggaatgaagtgctgatacatgctacaacatggatgaacctcaaagatattatactcagtaaaagaagccagacaccaagaaccacacagcatttgattccatttcta

SEQ ID NO: 816341 - DNA, 564 bp, Homo sapiens
tcagcaatggtggacgcccctccccccaccaagctccagtgtcccaggtccatctcrgattgctgcactagcagtcagcaaggctccgtgggcatgggacccgccgagccagggacagaagggaatctcctggtctgccggttgtgaagaccgtgggaaaaactcagtatttgggcagcagtgtaccactcctccaggtatagtcactcacagctttccttggcaaggaaagggaagtcccctgactccttgcacttcctgggtgaggtgagaccccaccctgcttggactcgccctccatgggctgcacccattgtctaaccagtcccagtgagatgaaccaggttcctcatttggaaatggagaaatcacccatcttctgcttcgatcttgctgggagctgcagaccggagctgttcctattcggccatcttggaagtgacctcagtcattatttctttaaataaacttttcgttcttttctttttcttttaactttctgtaacttccaaaatgcacatattcatttctttgttggtgtcccataagtctaagttttcttca

SEQ ID NO: 816342 - DNA, 547 bp, Homo sapiens
agtgtaatcaagttgtactatgcgtaagaaaaggagtagctttctttttggaaatatgaagtgtgatccggatgggggatgctgaatgaaaactttgaagtgggcgtcctcttcgtwtaatccatgtgacacacgtgttgtgtttgctgaggagtctaaattggaggcctttggtgggtgagcagtctgggccttgaggccacccaggcttttcggggacaggccaggatgtcactgctctgacctgggcactgattaaagtcccatgaaatggctcccaggtaacaatgaccctcactttgaaagtgactttgtcagaactaggcttaaagtcctctatgctgaggcccacgctgctcctctcactcctttgttaaaatcccagttcctcctgggaagggctgcagaaaagcgacctttagacactcacctttgagtgtgaattagttagttcatcagcccccttgcaatgtggctgtctgctgttctctgtgacacagaagcacactggatggcaagacttggcttggcttgacttggctgggtg

SEQ ID NO: 816343 - DNA, 598 bp, Homo sapiens
agccaagaatattacagtgtaatcaagttgtactatgcgtaagaaaaggagtagctttctttttggaaatatgaagtgtgatccggatgggggatgctgaatgaaaactttgaagtgggcgtcctcttcgtataatccatgtgacacacgtgttgtgtttgctgaggagtctaaattggaggcctttggtgggtgagcagtctgggccttgaggccacccaggcttttcggggacaggccaggatgtcactgctctgacctgggcactgattaaagtcccatgaaatggctcccaggtaacaatgaccctcactttgaaagtgactttgtcagaactaggcttaaagtcctctatgctgaggcccacgctgctcctctcactcctttgttaaaatcccagttcctcctgggaagggctgcagaaaagcgacctttagacactcacctttgagtgtgaattagttagttcatcagcccccttgcaatgtggctgtctgctgttctctgtgacacagaagcacactggatggcaagacttggcttggcttgacttggctgggtggkgaaaagccacaggctcaggggctgcaagatctgg

SEQ ID NO: 816344 - DNA, 555 bp, Homo sapiens
tggggtacattaggagtcatcaatctcttcctttatgcttagggtttgtgtttcatgtttaagaaatctttccctacctcggggtcatgaaaatcacctcctatgttattttctgaaagycttattctttaaaaactatagcttaaagactcattaagaactgtaatgcacctgatattgatttctgcatatagtataagataaaggtacaattccaatagacttacaatacagagttaacaagttaaaatactaataaaatgaatactaataaaatgctgctcttctttctattcagattaagaaatagagcatggccacttatgggactcctgtgtctccaccatcaaatcacctatctctccctcataaggtaacatctatcctaactcttgttttggttattgttttaccacctgtgtgtctatacccagacagcatattgttccatatggctactttgagtctttatagaaataaacacatactgtatgcattcttagagtgaagtgcttcttgcaatgcaagtctgaaaattatattatgagtccatgc

SEQ ID NO: 816345 - DNA, 610 bp, Homo sapiens
tttgaggtgtactaaggtaacttcccattctgtaatctctaaccgtggctgtgtgtgaatgtgcatgggttggtgatgagggaacagttgttttgtaggacattaaatcaagttgccatgtgccacaaagggtgggcacagacaacttgctctgcatgtggtcctccggtgggaatgtgcctgacctgggagtcaggaatctgtcagtgattacaggagaatctggtgaatcaggaaaagttgtaaagctttcattcttttcagagaataaagaaaacaaaatctctcttattgtagaatacagcatatctgttaagagcataagttttagaagacacacataagatctcatttaaatctcagctcatgtgatcttgggcacatttctaacctcagttctaccattcattaaattgagatgacatttttatatatcttacagagaattaaattagagaatttaatgaaagtaagatgcttagtccagtgccaggaatatagtaaatgctcaaataggtgrctgttttctttgaacccaagagaaggttcttgctgatgatacaaggatatgacaagaaagactatttcaagctttaaaggagtacatatg

SEQ ID NO: 816346 - DNA, 574 bp, Homo sapiens
atagctgtggattagtcaaagttcaaataataatggccagtgcatttatcaaaaatgaaataactcacagttataactgtatgataagtctccattgcttcttgtgacataaataaaagagtagctaatgttacccctgagcaaagtagagtgttgtgtgctttcgttggattatcatttttaggtgtgttatacccatgtgacagatgaggaaactaagattcaaaaagattaagtaaattgtctaaggagatgactagaaagtggcagacttgggaactgacaacaggaagcatgattgtgataatactctaaacctcaccagaccacactgtctataagagatgctgaggccgggcgtggtggctcatgcctgtaatcccagcactttgggaagttgaggcaggtggaacacttgaggtcagaagttcaagaccagcctggccaacatggtgaaactccacctctactaaaatacaaarttatctgggtgtggtgtcatgtacctgtaatcttgggaggctgaggcatgaaaatcgcttgatcctgggaggtggaggttgcagtgagccaa

SEQ ID NO: 816347 - DNA, 611 bp, Homo sapiens
ggtcgataggtgcggcaaaccaccataacacatatatacctatgtaacgaacctgcacrtttaacacatgtatctcagaacttaaagtaaaataaaaaataaaatttaaaaatgctggtctattacatttggttattctctgtgattcacaagcagttgtgagcattagatattccaactgtacaaggtaaaccaggcaattattgttattatgcccatcttagagatgaacaaaatgaacctaatagagatgaagaaacatactcgaggctgtgaaatctaataggtgccagagccaggactaaagctcaggacttcagagttttccatttaggtgtctgattacttggggagcctatgtacagcttctgtagcatttgatgattttatgatgtgctttgggatttattgatgttattttgttggttcctctccacctcataatccacaatagcagtgtctgtcttttgtctatgaaatgtataaaagcacccagaggttgttaagtggtaggtgcatccaataaatacataaatcataaaaatacaaagagcatatgatggctggtttccattctgacaaatctgtttcccttctgacaagagatgctg

SEQ ID NO: 816348 - DNA, 564 bp, Homo sapiens
agcactgccaccctccccacccctggtccctgccctttcaaatatcccagcacgtctgaaggccacattttcacattaaagacctgagcccagaatggaggggaggaagagtggctcctccagtagccctgttttcagagcacctgcagggagaccttgggaggtggtggtttttctcctaaccagcaaataaatacgtaatgctatcaaaataggatcattaaattggattaggagtgagcgcagctgaatcattttccagaagtcctgttggaatgtgcttcccacggttggggttttggccactttgtgcctggcactggcacacttccttcatgagggagaccataaagctgagacatatcataggctatgggctctctccgttaatctcccttccccttctatctctagctgccaaacaggaagcccaaacgaagtgagatgagattgtggggacttttcttcctaccccagctaacttattcatctccaagaggctcagaaatgagcaagaaggtggcaggcrgtctgcagaaacagcaagtggttcccagcttgtca

SEQ ID NO: 816349 - DNA, 561 bp, Homo sapiens
ctgcagggcaacctctgatccaggtatcaggagagaaattrcatctttttttgctttctcttttagaatcctttccctctcatccttgtcctggctgcctttgtaagaattccctatggagacaaaagggtttagaaccttgggttgcaggtgccgctagggctgagtgacacacgtctgtttttggtgatgttcttccagaatctgatcagttgatccagccttgagtcttaatgtgggactccatcgtgttgagctaggagggttcacaaaactcacttccacagaacaattccacttaaataaggaaaactgaattaaaaaaatttcaaggaccaggaaataatagcaatccctcagcaaactgacagccttctattttgggatgatggtgaagttttcctgagctgaaagaatataaaaataaaagagctaatgtctattgagtgctatgtatataacagaaaccataatgagcactttccatggatcaactcaatcttcacgatggtcctatgagctagatctattgtcatcctcattttacagatgagaaaattg

SEQ ID NO: 816350 - DNA, 602 bp, Homo sapiens
gtgggaggattctgagcaggggcgagctgtggtttgatttgcacttagaagataattgggatgtcgtgaagactggactgtaacgggctagagtggaggtgaggaaagcagttcgagttggtcatgaagcakttggtgaggaaaacctaagtggatatttgcctcttaggggcaagcagtgttctaggcttcggcagtgaacaaaaatcctttcctgatggagctcgaatcctggcaatctgctgttgctgtagtcccaggaggagacagcgtggtaccttaatttaggctatggctgtaggagtgagtacagtgggacatcattggctttgggtatatttcagaggtagaactggatttgagcaaggattagaagtgggatgtgggaatgagacaggctcggtttctggcctgagccactgggtagatgatgatcgcattactgaggtgaagtaggaaattgttaggaagaggacatttggtgaggaaaacccaagtttcttggcttcgttacattagagatgcctattataaatttaatggaaatggcaagtcaccaattaggtatttaggtcgggagaagtttgaggtcggagagagac

SEQ ID NO: 816351 - DNA, 506 bp, Homo sapiens
gttttctttttgcttgtttgtttatgcaaacagcattgttatcaacttaaaatactgagttgtaagacagtatttgcaaacatcttggtaacctgaaactaacatacaacgaatacagaaaaaataaaargcaagaaactaaataatatcaccagagataaaggaagacaagaaagaaaaaataaaggaaaagaccacaaaactaccagagaataaataacaacatggcaggaatcagtcttatcaataatgacattcaatgtaaatggactaaactctccaatcaaaagacagagtggatgactggattaaaaaaagacaacgacaacccaatcatcttttgcctacaaaaaacatatttcacctataaagacacacataaactgaaaataaaggaatggaaaaagatattccatgccaatggaaaccaaaagagagcaggagtagctatacttttatcagctaaaatagattttaagactataagaagagaccaaaaaacggcc

SEQ ID NO: 816352 - DNA, 384 bp, Homo sapiens
cctttttacaacagtgatcagagaagcccttactccaggcacgggtctgaatccacacaggtcggtcagccccgggcaggttcaggctattcaaactgaccttttcctggcttccrccttatcttggcttcatccctccagatgagaatgactttcaaatgctatttcctgacctagtatcatctttcagtcctaatgaatgtaacactgtaactgagttgttctaccctcaacaaattgttttagaaacccctggggagacattggaggaagggactaatcagaagcctccaggcaccagtggggaggggtgtgtcacctctcacatcctcaggagtcttagcttaagataaacgatgagctatttaactccaaatccacttt

SEQ ID NO: 816353 - DNA, 644 bp, Homo sapiens
tactgaaactttagagaaatatcatgaaatgttttgttaaacaaatcatttggcattctgtaaactgaaraacccagttaaactgaatttaaacattttgaaaccttatttatgtcaaactgatttaccactgaggctttatgtgttcttatctctcagatcttctccagcaaggcaagtcctttgatttaagcctgagagttgtaaacgtagtcataagatttcttttaaaagtgcttccaaaacattgttaatcttaaaatatactcttcacgtagtgtggcttccatattcaaatgctaaccaaagagactgctttatgctagaagctcttggcttgaaactctacttagtaacttggattacaaataagtaattgtgtgttcaattatacacacttagagaaaaggtagaggcagcaataattatctacatgaaattagacctaaattttacagggaaacactgctagtttcctgtgaaaatccacttctaaaacagatataacaacagcatgcaaacccatacacttaaatgaatatccactgaaatgaatatccactgacagaacacgttcccaatttagttttaaaggaatcatgggaaacactttataggttcatgcatgaaggcaatagataggg

SEQ ID NO: 816354 - DNA, 618 bp, Homo sapiens
aaaaatgacagcatagaacttcatgtttggttccaccatgttaaaatttggaagtcattatatctatccttagcaaaaaaaaagctggacataaggacaaactgaaaatcaatgacttttcttggactctttagagaactgagtttgcagagtgaactgccaccccaaaatccgaagagaaagactcattcaaagagacaaagccagaatctgtttagctagatagaaaatgctgaagccataaacttaaacagtattattttctagggtccctgtaacaaattaccacaaactcagaggcttaaaacaatagggatttattctcccaccaaaagtataaaataaacattcatcaatccatattgatattaacaaatgagtgaataaatgggggcgaatagacaaatctgttcagaattctgaagagtgaatgtagatactgacccctcaaggagatggagcataaccaactccccagtccttaagtgtgggctgctcagagtgktttttttccaaagagtagagtataaaaaagagaaaaaaagagtaaatctgcagaggagaaaccaaacaaacactacctctgccaggtgataaggggagtatcaacagtgatag

SEQ ID NO: 816355 - DNA, 613 bp, Homo sapiens
actttttgttaaatggataataaatatcctcatgatttcagcttcttttagttttattttgttagagttaagagcaccataacygttttatgtcgaattatgccactctataaatttgttctttcccactccaacttatgtttgtctacctgaacctgatctatatattaatcaaagtccaatgacatttttgacacctgaaaacctcattccaagggaagagagccctactctagttcattaacctttattgtctatagcattagttcaaacatctcccagcacatcagaaccatttaggaacttaaaatatccagcttcccaggctctgcttcagacgtattaaatcagtcgctgaaaggaaaaaaatctggaaattgcatttttaagaagatacttgcatgattgttgtggtcatctatatttaggaaacactgatctacattgcattaatacttagtttgcatgcttattttctaacgtcataatcagagatttgttagcttctagaggacagaaactaagccttgggggtgatgatatgtttccgtttttctggcatattttctgtcttctgaggtaatattacttaaagaatagcccacatccatga

SEQ ID NO: 816356 - DNA, 584 bp, Homo sapiens
ccactgcactccagcctgggccacagagcaagactccgtctcaaaaaaaaaaaaaaaaaaaaagcaaattaaaacaacctctggttgttgccagataaaatacaggacacccmgttaaatttgaatttcagaaaacaaatttttttagtataggtatgtcccaaatatcacgtttatctgaaattcaaatttaacagggcattcgtattcttatttgctaaatctggcaacccaaaaatgaatgtactagaaataactggagatttcctagaatatccctaaaaccagaacaaaagtttttccctggcctaggaagtaagataccccaaaatcttcgtaaaatggaatgtgggacttctgagctaagaactcactagaaagatgtaaagtggggctagatagccactttatcagaaatgctgtacaataagtgcctgcattgcttaatatattggacaatatcacttctaagtcttgacctttttgtgcattttacttttgctttaatttcgggagtcctttttgctatcagagctagaaaatcttgaactttttaattgatttgtctccaccagtgaacttgg

SEQ ID NO: 816357 - DNA, 584 bp, Homo sapiens
ccactgcactccagcctgggccacagagcaagactccgtctcaaaaaaaaaaaaaaaaaaaaagcaaattaaaacaacctctggttgttgccagataaaatacaggacacccagttaaatttgaatttcagaaaacaaatttttttagtataggtatgtcccaaatatcacgtttatctgaaattcaaatttaacagggcattcgtattcttatttgctaaatctggcaacccaaaaatgaatgtactagaaataactggagatttcctagaatatccctaaaaccagaacaaaagtttttccctggcctaggaagtaagataccccaaaatcttcgtaaaatggaatgtgggacttctgagctaagaactcactagaaagatgtaaagtggggctagatagccactttatcagaaatgctgtacaataagtgcctgcattgcttaatatattggacaatatcacttctaagtcttgacctttttgtgcattttacttttgctttaatttygggagtcctttttgctatcagagctagaaaatcttgaactttttaattgatttgtctccaccagtgaacttgg

SEQ ID NO: 816358 - DNA, 530 bp, Homo sapiens
ggatgtctgccttctgaatgtgtttctggggcctcttgggctgctggcggtaggtggactcggcctcccgacagttgtaggccctgttgtccttcttttctgtccggcagatggacatgaacaaagccaggatcaacccgaagatgcccaacagtacagccaggcagatcaccgtcagcatcgacatgctcaaggccccaggcttgcgggctgagtccctcaggtggtccacactggtgacaaacatgaccctcaacagggctcgggtctgtaagggggggcttccctggtcctctactactatctccagctcccactcactcccaatgaggctgctggcattggtgacattgacgaacagctgccccgtatgagggttgaggatgaagaggtgggcttcatttccaytgcggatgctgtagaggggctctccatttgcccccgagtctgcatctcttgccacaatggttgtcaaaaggaatggccgggagctgtgagtggccagtggaggtgtgtcagtgcccgctggg

SEQ ID NO: 816359 - DNA, 615 bp, Homo sapiens
taaattgcccagtcttgggtgtgtctttrtcagcagcatgaaaacgaactaacacagtaatcattcaaaggcttgaatagttctgtacctgtggtgctggttggcaacaaaagtgcacataacatattctcatgcacgtcctcccgagaaatatatcgcacaaaaacaagcattgttgccttgttgtcaacattcgtagactcgtcaacctggattgcatgccacagtgactcattaatcttctctaacaattgtgcctcaatatcctcaactatttcattcatctagttatggggctagccaaaagaggaacatatgccaccttttgaactgcagcatctcctaaaagttcatgactaacatccttaatggtgggcaggatcaactcttcaccaatagtaaagggcctcttagtgttagtgatgtggttagccactaagaatgatgctctcggtgcagacacatttgatgaagtggtggccatcaataattgcttttgttcttcctgttcatgtttttttaatttgaaaaactccaaaggcttgtcttttagtgcagggtgtttggtctccacatggtgaagcagttttgaagatttcatggctccattgaata

SEQ ID NO: 816360 - DNA, 643 bp, Homo sapiens
tcccctacatcctcttcacatctttgtcaagtgttccttttcaaaactctcctcaaaccacccaaattcagtgcgctacctatttcctgccaggattctaatgctacaacatccagtttatttgtttatgtaggtatatgtattctggaaaattacatgatgtcatgaaaagttgcatgagctatttcagagacttgaaatttattcttattcaacagatggggaatcaaaccgatcatgcattataatacagccaaatatatattattgttgctatatagccaaaagtcatataagtgtttgaaagtaatagactaatgatgcaataagatgaatatgccattcaaattcatggatggttttaaaaattagtgacagataggtatattattatttcttccattttacgataagtgaagtcagagaagtaacttggccatggtcatatgataaatagccaagctgggatttgaccccaaggagtttggctccaaagcctgggctcttaactccacccactgtttctctgggcagtacctggaaatagytggacttcaggcaggttggtcaggtatggcacaaatattggaaacctcagatctgaaattttaaaaccaacatggtgccatgtaatttcttacag

SEQ ID NO: 816361 - DNA, 641 bp, Homo sapiens
agaagtcctttgctgagtccgtatgtagcctccactctttccaccatggtcacttgttcttggactattgaggaagaccggtgtgactgatgaaaaaggataacttctccacagccttgtaattttgttcacctggttattgacaagcccatctgtagtggatgcctttggtgtacatttacaagggacaaaaataatttttacatactgctcattctcagtggtccatccacatagctcttccctagatgttcttgtatgctctgttcctatactattttcttccaagtccttaaccatccatccacattgagtgttaacctttaccccatgattcagtgtaaagccataattctggccatttctcagtgtaggtaaagaggacaagcaaatgtactagttacagttctgttgggatgatttcacatttgagggatgctcattattggagatgtcatgctgtagaagtccacttttgcttggtaccagacattatacaaaccttctctaaaccgggcccaagtttcctttccaggcasctggtcttaaggaaatctttgtgaagccacaggtgtggttgtatgctaggagtaggtgttagagatacctgagacatctgctcttgcaatttcttgtgcctt

SEQ ID NO: 816362 - DNA, 569 bp, Homo sapiens
tctgatcacattcctcaccctgaagtgccttactttgcagatttgccgtgagctcacccctcccccacctgcttccctatgtgagtttccccttcccctgcagtgtgattcaggggacttcccagatgctttaggttttgtctgcaactagaaacattcagaattactgtgttttaaaatcgaactttctaacaaaatggcttcccataaagtaggttttggctacgttattatttatcatatctgaaaatgattatttagaaatttgaggactgtgttcttggagatacaaagaaataaaaagccatggcttttgagaggtttataggctactaggaaaaatcatatatactgcataactttaatacaggcatgatgtggtaaatggacaaaggtggaggtgtcgcagatggtttcatgaaggagaagacttgaggaggactttgaaagctgggtacggacttcaactggcagagactatrgagtgaggataggcaattcaggtggagggagtgacatagagaaaagtgtaataggtagggcacatgttggcttatcttgagcatttg

SEQ ID NO: 816363 - DNA, 597 bp, Homo sapiens
tataatctaggctggtgatatggtttgattgtctccccaaaatctgatgttgaaatgtaatctcaaagatgactgaataggagcagctccggtctgcagctcccagtgagaccaacatagaaggtgagtgatttctgcaattccaactgaggtaccaagctcatctcactgggactggttagacagtgggtgcagcccacagagggtgaacagaagcagggtggggcattgcctcacccagaaagtgcaaggggttggggaactgcctcccctagccaagggaagctttgagggactgtgccatgagggacagcgctgtctggcccagacactaggcttttcccatggttttcacaacctgcaggccaggagattccctcgggtgcctacaccaccaggacactgggtttcaagtacaaaactgggtggccgtttgggcagacactgtgctatcagcaggagttttttytttttcataccccagtggtgcctggaatgccagcaaggcaaaactgttcactcctctggaaagggggctgaagccagggagccaagtggtctagctcagtggatcccacccccatgaagcccagcagg

SEQ ID NO: 816364 - DNA, 651 bp, Homo sapiens
acatatgatggaatctggtccacctctagaaaactaggctcataacaaagaggggagttacctgatctattgaataaatgggaggtaggcttatatkactgaccaagttaacgaacatttctaaggggtagttagtcttcaaaaaatttttgtgtgtattcatttttttaatcaaataaggctattagatgctatgcttgttcaagattccatatagcttttactcctaacatgtgaccttctggatgaaaattgcttgaaactctggtgtccatctcagcattttcttaagaaatggttgctactttgttctctgttgctaggaactcaagaatatagacgctcaggaatgaaatatggcatttgttggtaactctattgtaacatcattagatagactatctcggagaaaaacaaaaaggaatattattttaagagattacaatagattttgtaataaaggttactaaaagggatattgtaagaattatttcaaaagtcataaaatagatattagaaaatttgtgaattacagaaagccttataaaaattgtaatagtaaaaattatcatttgtgaagtacttgccacaatatgagaactaagcccttctatatattattgattcatttctcccaagccgcatgaaata

SEQ ID NO: 816365 - DNA, 406 bp, Homo sapiens; identical to SEQ ID NO: 814041

SEQ ID NO: 816366 - DNA, 445 bp, Homo sapiens
cacttgaacccaggaggcggaggttgcagtgagctgagatggcaccatcgcactccagcctggacaacaagagtgagactccctctcaaaaaataaaaataaaaaatwaaaaatatgtaatagatttattgttccttgtaatatatgaataaaatttttaaaaattagttttaatttcaaatattaagagatataactcatgtaaaaaagcccattggagagcttcagtgatttttaaatgaggggttctgagttcaaggagtttgagaactgctagcatatcttaatctctcagtttgaaaatctccctctcaactacaggcatgcctcattttattgcacgtttctttattgcactttacagatattgagttttttttttttacaatttgaaggtttatggcaaccctacattaagcaaatctattggcaccattttttcaac

SEQ ID NO: 816367 - DNA, 601 bp, Homo sapiens
agacagtgatacggtttggctcagtgtccccactatagtctcatcttgaatcataatctccatgtgtcaagggagggacctgtgatctccacgtgttgaaggagggaggtgattggatcatggggccatttcctctgtgctgttctcatgacagtgagtgagttctcaggagatctgatggtttcataaaggcctctttcctcttcactttctcttctctctcctgctggcttgtgaagaaggtgcctgtttcttcttccgccatgatcgtaagtttcctgaggcctccccagacatgtggaactgtgagtcaattaaacttctttcctttataaattacccagtattgggcagttctttaaagcagtgtgaaagtggacaaatacagagaagtagacagggaccagtaattactgcagaagatggaacatcgaatgcatgttttcagaataaaagtgtgtgctgagacacatcgagtgcctgagcaccacctgtgcttggccagaccaatgggagaaaatgatccmggaagtcaaaatgagcaggttcagccatctggaagggcgtgaacgtggtatgggggtgatgaggggaggcaatg

SEQ ID NO: 816368 - DNA, 601 bp, Homo sapiens
agacagtgatacggtttggctcagtgtccccactatagtctcatcttgaatcataatctccatgtgtcaagggagggacctgtgatctccacgtgttgaaggagggaggtgattggatcatggggccatttcctctgtgctgttctcatgacagtgagtgagttctcaggagatctgatggtttcataaaggcctctttcctcttcactttctcttctctctcctgctggcttgtgaagaaggtgcctgtttcttcttccgccatgatcgtaagtttcctgaggcctccccagacatgtggaactgtgagtcaattaaacttctttcctttataaattacccagtattgggcagttctttaaagcagtgtgaaagtggacaaatacagagaagtagacagggaccagtaattactgcagaagatggaacatcgaatgcatgttttcagaataaaagtgtgtgctgagacacatcgagtgcctgagcaccacctgtgcttggccagaccaatgggagaaaatgatcccggaagtcaaaatgagcaggttcagccatctggaagggygtgaacgtggtatgggggtgatgaggggaggcaatg

SEQ ID NO: 816369 - DNA, 473 bp, Homo sapiens
attataagaaaccttaccagccaaaagagactgtgggcctattttcagcattcctacagaaaagaaactccaaccaagaatctcatatcttgccaaactaagattcataagcaaaggagaaataaaatccttctcagataagcaagaactaagggattttgttactaccagaccagccttacaagagatccttaaggtagtgctaaacatggaaataaaagtttgaaacctgctaccagaaaaaaacacaatcaagcacatagcccaaataaaatataaagaaactacacaatcaagtctacaaaacaaacagccaacaacataatgacaggatcaaaatcatgtatatcaatgttaaaccttaatgtaaatggtctaaatgtccccacttaaaaggcacagagyggcaaactggataaaaagtcccagccctctgctgtcttcaagaaacacatctcactttgtgataacac

SEQ ID NO: 816370 - DNA, 613 bp, Homo sapiens
caaacatagtacaagaaaagaaagcttttcttatctctcataaacatcgatacaaaaattctcaacaaaatgttagcaaattggatccaacaatgcatgagaagaactatatactatgaccaagtgggattaatcctaggtctgcaaggtctgttcaatattctaaagtcaattaatgtaatctattacatcaataggctaaagaagaaaaaccacacgatcatatcaacagatgaagaaaaaaaccatttgataaaatttaacactcattcatgataaaaaaaaaaaaatcccagcaaactaggaatagaggagaacttccatctacaaaaaatatagttaacattataattaatggtgcgaaacttaaagcttctccactaaaatcaggaacaaataagaatgactcctcttaccactccctttcaacattgtattggaagtgctacctagtgcaataaagcaagaatattacataaaaggcatacagactggaaaagaataaataaaactatctttgttcatagatgacatgattgtctaggtagaaatttgaaagaatccaccaagmaactcctggaactaataagttacggcaaagttgcaggataaa

SEQ ID NO: 816371 - DNA, 586 bp, Homo sapiens
caatgtagctacccaagcctgcagtggtatagttctaattttgtgggtcgagggttaggagctggcatttgggtgtattggaacacatccccaggtgattctgattcccaccaaaatctcagcaccactatttcacaatttgtgtctccaatcagtacaatgcccacatttgtaatgcaatgaatgccagcagatcagcataaaaaagtagcacacagtgattacatttaataccaccattaataaagtcacagaagaatgaatagaacacattttgaagataaggttgctatgtggcaaccaagaactataactactattcaaattatgcagaccagagaatatatcttgctcctgtgcaccatagtactttaaaatggttatcatcccatttgctaaagtcataaatatattttatctttttccccttactagtttataagtttctaaaagacagagacgcctcttatccatgctcacagccccactgccagtggacttgacagtacctaacaggtttctattcrtgtttgttaagtgaaggaaggacaaccttttctgctgtaacactaactcaaatacccag

SEQ ID NO: 816372 - DNA, 643 bp, Homo sapiens
aattgtaaatacataaatatatacaagaacacaaacgcgagggtaacagcaggaagcaatgggagggttgacactgttcttcatcatttagagtcccctgttagcagctaaccatggaatgagatcagyccaccagaccacgttcaaaacacgggacagaggaatcgggacagatacagctatcctcaatcttaggcacaggtgtgtacaggagtgttggagaaagacccagggacatggaaacttgtgcattgctgtggctttcaaatgtgcacagcctgagcaacacggcgaaaccctgtcactccaaaaattacaaaaattagccaagcatggtggtgaatgcctgtagttccatctatttgggagggtgaggtaagaggattgcttgagcccaggaggcagacattgcagtgagctgaggtcatgccactacactccagcctgattgacagagtgagcctgtctcaaaataaagtaaataaataaaaataaaatttgcacgatgtgggacatagaaacagaagtcctaagtgacagcattttataactgtcaatggcattctcgttggatatatgtgaattcccttcatggacttgacttgatgagtcaatatttccatggaaatcatccagtaaggaa

SEQ ID NO: 816373 - DNA, 364 bp, Homo sapiens
caatccaaactaccaatcaaatgtgaaggtagtaacaataataacaacaacaaaaaaaccactttcagacatsaatgtttcaaaagatttacttccaacgtgctttctcaggaaggttctagaggatatatactccaccaaaatgaagaaataaacgaagaggaagacatggaatatagaaaataaaagattcaactcaagggaagtaaagggaatctaagatagtactatacaacagatatggggacaaccagtccagactggatcaagttagaaggctctagaagacagctcaggaaaataaaactgacaaaatgttggctgaaaagaactgtcttgagatgagaaaacaatttaggggtaa

SEQ ID NO: 816374 - DNA, 515 bp, Homo sapiens
cccataaacacttcatctcaccatgaggactggtggaggtgaagactgaattccagyattgttttctacacttagccagtatttaactctggaattgtactttcaaaaaagtcattctttggtgactgagcagggacggacagtaaggaggaccttgtaggacctgggaaggccaggctgagcccatgggacccacgcaggtcaccctcagtgacccacagtcacggcggcgtgggtagcactgatagacccagtgctgatagaccccggaacagaaaatcagggagccccactgagatcaggacacttcagcagaaggagtgtcaaagggcaggacttctaaggaagattcttcctcccagaagcccaccattgtggcctgcaggccaaatctcgcaggacatactacagctggctgggcaccacagaacacgccctatgcagaaaccacagacacgtgcttcctggcccattataaaagattcccctgagattatgaacaaaatcaggctgcc

SEQ ID NO: 816375 - DNA, 447 bp, Homo sapiens
ttaaccacctatattacatgtgtccctgatgtaacctgagcaaacttagcaagtcttttattctgggtgaatgccccgcttcacccaaatcatgaatgctstttgcttcatggaactctattgcttttgttcccagaaccaattatatcttagctaatctcttgcccctttaattatccttgatagttttccaaataaaatatgcaatctgtgaacactttattagtcccactctctggtttatccattcatgggtaaggatacagaattgtctgaatccagcttattataaattcattattctcaattgtgcccaatgacaaaattttccttgccctgggtcaacaatattctcagtcatctctactatttaactgtaaatctcaaactatgtgctgtttagaattatatgtgcctatcccattctgccggacgtacgtgttcttt

SEQ ID NO: 816376 - DNA, 622 bp, Homo sapiens
gcttagagcatagactggtgggattgtcaaagaagagggcaactggaagagaactgtcagttatttttggatcagtctttaattcatcatgacgggttaggcattagttgtatttcttgctaattttgaagaagacttattaacaaatcctacattaggtaaatggttttgaaagttgagttaatcataatggtgtttgacctaggactatttttaggccctatttatcttaatatcgaataatgaagcagcttcccccttagatatagacagaaaacatcaaagccaccacactacctggctggatttatcctagtaataaaatcaaaactgagctagttctctggctttcattgtaataattgtccttgtggttgtaaggaatctagatgaaaattacatggtctgttctacagccacagctgtacctacattcagaagacagacaaaagttgctgtgtttgaagagatccttcattaagggatcagacagagattactttgagacatattctaagtttaacttttctgcagggttgccattaacagaaataaactacasagttaatttctttttgtttttgatacagtctaactctcacccaagctggagtgcagtggc

SEQ ID NO: 816377 - DNA, 629 bp, Homo sapiens
ctccttagggtctgtaagcggcctggttccctagcccactccttcactaaatacctgtgtctgagtgcatttgttgttcagccagggtctgcaagtaggacccagcaaggaagtgtttaatttggtaaaacagaaacactatatagttctaacagtttggaattgtagattggtaactcatttaacaaaaggataatacttgaatcacttaggatgaataggagtgcttaggtggcaaaatgttggataaatgttcatcataatttaaatttaacaagtttttagttatttttcaaaaatgatttacagggttaagaatgagtagggggtttgggggaaaggtgcatgagtacaacatgaaagagatcattgtggtgatgcatcagttctatatcttgcttgtaatgatggttacacaaatctacacatgacaaaatttcatagacctacatgcatacatacatacatacacacacacacgatcgtatgtaaaattggtaaaatctgagtaaggtctatggattgcaccaatgtcaatttcctgtttttttttttaatttttgattttaatttttgtgggyacatagtaggtatatgtatttatggggtatacgagatgttttgatata

SEQ ID NO: 816378 - DNA, 642 bp, Homo sapiens
aaaaagtaaaaagaaaaaattaagatacatcaccagaaaaaatcaccttcactaaaaagaggacaacaaggaaagaaagaagggagagaagaccacaaaacaactagaaaacaaataacaaaatggcaggagtaaatctttactcatcaataataacattgaatgtaagtggactaaactctccaatcaagagacagagagtggctgaatggataaaaaaacaagactcaatgatttgtggtctacaagaaacatacttcacctaagaagacacacatagactgaaaataaagggatagaaaaaggtattccatgcaaatggaaaccaaaaaagcaggagtagctatatttatatcagacaaaatagatttccagacaaaaactataaaaagagataaagaaggtcattatataatgacaaagggtcaattaagcaggagcatataacaattacaaatatataagcatccaacactggagcacccagacataaaaagcaaatattataagagctagagagtcaaatagacccaaatataataatagttggagacttcaacaccacrctttcagcattgtacagattatccagacagaaaatcaacaaatatcagacttaatctgtgctatagaccaaatgga

SEQ ID NO: 816379 - DNA, 583 bp, Homo sapiens
agcaatgagcacttacataaaaaagtagcaaaacttcaaataaacaacctaattatgcatcttaaagcagggtccccaaccccctggccatggactggtactggtccgtrgcctgttaggaaccaggctgcacagcaggaggtgagtggcgggtgggcaagtgaatactaccacctgagctccgcctcctgtcagatcagtggtggcattagattctcataggagcacaaaccctactgttaactgcgcatgcaagagatctaggttgcgtgctttttatgagaatctaatgcctgatgttctgaggtggaatagtttcatcctaaaaccatcccccatcaccccctgctgtccatggaaaaatcgtcttccatgaaactggtccctggtgccaaaaaggttgggaaccactgtcgtaaagaattagaaaagcaagagcaaaccaaaccctaaaatttagaagaaaataaataatatagatcagagcagtaaataaatgaaattaaaatgaagaaaatacaaaagatcaatgaaacaaaaagttggttttttgaaaagatcaagaaaattgacaaaccattag

SEQ ID NO: 816380 - DNA, 539 bp, Homo sapiens
cttctcaaggaagctgtcactcatctgatcacagccattcacaycatatgcatggacacagtgaccatgggcatggtcacagccacggatctgcgggtggaggcatgaatgctaacatgaggggtgagtccttgcaaaatattatcctacttttcaactgtgttctaaatcaaccctctgtgtttatttgtattaagttttgggcttctggtatgatatgatttttaaaaagcaatctgtgactaaaagaaaggtctgaagctatcactatagaaaatattcttacctgaatacacataaaattaaatattattcagcctttaaaaagagggacattctggctgggagcatggtggttcacgcctgttaatcccagcaatttgggaggctgaggcgggagtaccacctgaggacaggagttcaagaccagcctggccaatatggtgaaaccctgtgcctactaaaaatacaaaaattagccggacatggtggcaggtgcttgtaatcccagctactcaggaggccgaggcagaagaatc

SEQ ID NO: 816381 - DNA, 600 bp, Homo sapiens
ctaaggaggacaccgtgcatctgggaaataatgccccccctgagggaagaatcatgggaaaggggcaagcctacaaagtcctggggtcaaggttaaacactgcacctgacctcagtgcccacttgggactcttccaagcgtactttgttttcttccctgttctaaagcctttttaaataaacttccactcctgctctgaaacttgtcccggtctcctcttctgccttatgcccctcagttgaattctttcttttgaggaggcaagaactaaggttgctgcagagctctacagactcaccgccggttacttggataccttccactggtaacatacttggggccatgagacttggatatttgccaccacaacattttaattccctaacaccttattcttattacacattaattaccctgttgaaatttatttttttatactttctaactggctctttaaatagtctctttctacttggtttgtgttcgctttctgttctattgctcttattttgtctctttggatgccactctctcttttggaagactgctctctcacttgcactttctttgggatgamtgctttctttagtgagtttttgg

SEQ ID NO: 816382 - DNA, 602 bp, Homo sapiens
atccaaaagcaaaagaatgaaataagacccttatctcacaccatttacaaagatcaactcaaaatgaattaaatacaaatgtaatacctgaagctgtaaaactactaagtgaaaacataggaagaaagctctataacaccggtctgggaaataattttttggatatgacctcaaaggtacagctaacaaaagcaaaaatagataactgaaattatatcaaactagaaagcttctgcacagccaaggagacaatcagcagaataaaacagacaacctacagaatgggagaaaatatgtttaaaccatacatctgataaggggttaatatgcaaaatatataaggaactcaaacacatcaatagtaaaaaactaagtaactcaattaaaacatgggcaaagcatatggcttaaagcaatctatagagtcaacactattcctatcaaactactaacatcatttttcacagaattacaagaaactattctaaaattcatatgcattcaaaaaagagcctgaatagccaaagcaaaaaagaataaagccggaggcatcacattactggacttcaaaataygctacaaggatacagtaaccaaaacag

SEQ ID NO: 816383 - DNA, 635 bp, Homo sapiens
atttttaaatgaaatacacacttctaatatcatcaacactaatctcattacttcacaatcaccgtacatagagamgaggaaaagaaaataaagaataaaacatgctgctaaagattgtgtggtcatgggaaaatgtgcaaagatattttatgatatcatattaatgctatctatagagctgacaaagaaatacctaatcatggagaaacatatcttaccaagatattgttgattttagctacagattatgtaaatcatggggattaacataaatagataaatgcactagaaagaataaaaacatggtaactgggtattctagaataaaccatgtgttcaatgtaatcataattaaagtaaagcaaagacatgcaagaaaacagaaaaaaacaaaccataaactggggagaagaactggggagaagatttttaaaatctgctatgtcagtctaacaatttaatggagacagaaacaacaaatctgacaattgtagcaccctacttctaaaggttatcttgacaaatgctaacctttaataaagaaattacaaaagcaaataaccaggggtatacaagttaatgaaaactttaaggaataaaaataaggaagaggaggaaaagaaatagtaggagtc

SEQ ID NO: 816384 - DNA, 597 bp, Homo sapiens
aataagaacagcttgaaaaagataaacttcttgattgctgtataattagcaacaagtaaaagaatattatttcaaagtagcaggaggaaagagagcctcattatcttaagtaggtgacaattttcttcygacacatgatgtgattttcaaaaaatctgatgacaacctgattttctccaaataattgacttgctctttttgcatgaatgtgggcaaagaatttttcttttaatttaaagtcttttaagacatgttttatgaaaaacacggtagttgttctgggtttagttattcagatttgtggcataatctttcaatttagagtgctttcattattctttttaaatctcaggaatattttcttgaagtagaatgttttgtgtttgttttcttccattgccttggttttcttctttggggtgtgcaattatagatatgtaagaatttttctacctttgatttatattgttgtcctacagttttcttaattttagcttattttgtaacactgtcttattttcatgttttttttttatgggtgttcttcctgacatgctttcactgcctaaaggaactttattctgctccttattgtct

SEQ ID NO: 816385 - DNA, 581 bp, Homo sapiens
tcagaaatataaaataatgtcatatttttcctatttctgataagccataaatagagcaatatttttcaataccttgaagggtctcaacaaccttgttaaaagtggaagagctatcaaaaattaatggtgacaataaaacttattgataagaacagggacttgagtccttggtttttatgttgattcctcaagtgactggctccatgtcctgggagaagtctctcaaaaaatttccaagttataattaccccccttaattccaatatgcagaaactgaaacagaaagtttaagtccaagttagcatgagacgtagccaagaattgaatttgggtatatctgaatacataattcatgctgttttaaattattgtgccatgactatctctccaatattttacaaaatattcttcccacatataaagtccttagtttagagtcccatgcttgtcaaattctcagtaaatgttgtctattaaggctatgttcaatgaaattggttgggcaaggcagtttgktttcagatgtggaacagcaggagatggggagaaggaaaggttggcattggttaatgtgaacagac

SEQ ID NO: 816386 - DNA, 527 bp, Homo sapiens
tgaggtgtatacttttcattatcccatttgcaaagtgaatgatttttttttttaatccaaaaaagcagcatcaaaatcaggccactaagaagaaaggtaaatctggtgctgaaggaatatgctccttattcctcaatggcgtacggaagtttatgattctgttgaaaaagtcataactccgcttcattctcttgagatgcagagtaaagggagaaaatagtgttattaattttatcaaaattctgccctctcaggatggctgagttgagatgtcagatgccagttctcctcagaaagaaccaaagttacagatgaataatcgtaagttgaatagaagattaaggagagagtgccagaacctattggagaactcacagaaagaagctagggcacagaaaaaagaaggaagagtgtggcagagattgaaccccaaggaacttggagtctggtggaaagggtaggtgcggtgttttgcgttccactcacagctgtggcaractgggtttccgagctgtaggagagctcct

SEQ ID NO: 816387 - DNA, 601 bp, Homo sapiens
ggacacattagttttattcacatacattggtcagtagttcataccatgtgcacatctaactgtgaagtcggctaggaaagtagtttttctycagtatgtttatgtagtcagttaaagctgacggtatgggtggggaagcaaaaggagctatggagctatattatatgaattaaaaagagaataactattcatgaggaagagttaggaaatgcttccatatttcccttggaatatttagattaattccaacttattttactgttaatattcatcctaaaaccaaatattatgttatttttattaaagcactgattatatgcaaaccaaaatagaaaaattgaggcaattataagtaaagaaaacttttgttttgaacaaagaaaaattttcatcctgaaataaaattcttatatttaaatgtttgtgtactttaataatttcttaattatttccttaaaacaaaaatctcagaagtgtaattgctatgtcaaagagaatataatcttaaggcttttgatatatattactaaaatatcctccaaaactctgtactaatttatactccaatagaaaatgcactaggatgtgtttctttcaatct

SEQ ID NO: 816388 - DNA, 614 bp, Homo sapiens
aaagaaactatttgaaatgctcaaaccactgcattccaaatacccgatataagagttataaaaataatgacagtgtgagtgttgtccattagctgaactagaacacaaacacttttccttttatatagctactagtggggaacaaagttgaatttcctctggattctgccttatctagctatttttacctgtgttcgaggtttcaaatgtctgttttggggacagactttgttggtttgaaaatctgtgtgttgtaaactctataagtaaactcctttcctcctagtgttctgagtaactgggaaagagaaaattatctaaatgtttccctggacactggaatggtagtcagtgccattagaaacaaatattaagtttaactcagaggtattagatttttgatactaggagtgaagctaccttggccatgtcagacctttggtttctcttttcctaatgtaaatgttttgtgccaaatgttttggttcaagttcctcatgctcaagtgtgtttaggttattgtccatcgtcttttccaacagttttaaggcacctagcttctctactggaagaygtttgatgggggccataatattttataaattgttagcaat

SEQ ID NO: 816389 - DNA, 564 bp, Homo sapiens
ccgagcagcaaggctcaggggcagaacttctgtctctagaaagcagagccttaatacagaataaatggaatgcgtatcagatggaggaccttaaagcagagcttgaaaatggaacacaggacctggttaccgcaaaaagccaactatcagttcacaggaaaagagaagaaactaagttaatggaacccaaatacccacccagaagagaggaagtgatagaggagtactggtacccagcctcaagccaccaaattaaggatttttaaacttccttggctaagaaaaggattggttccaaatcccagggaaggtctgaacatatgaaagtttaaaacgttctaggagaaggatgaaaaagattcaggctgttggcagggcgtcatggctcatgcctgtaatcccagcaccttgggaggccgtggtgggaagaccacttgagcccaggagtttgaaaccagactgagcaaygtagtgagatctcatctctacgtttttttttttaagttagctgggtgtgatggtgtgcacctgtgctaccagctactcaagaggctgagaggcagg

SEQ ID NO: 816390 - DNA, 467 bp, Homo sapiens
acacagatgctccagttttttacccaagcctgaaaagaccccgtccttccctctgagcctgctagagagctgttcctttcttaagattcggcccaagggccccattcttagcaccacatctacgagaaagcttttcctgactttccacaaaacaaaagatggcgacgtactttgagtagcttccactcaacatccaagactgcatatatcaaagtgcatcagacatgctgtacacttctatctccctgattagactcagagctcagtgaattcaagaaccaaaccacattcactcccatattcctcaggcctggaacatactagacattcaagtatttaccaaaggcaaagatgaggtcagaaattatgaataatgaaagttatatatctayatagagatagagatacagatacacacacacacacatcacccaaaagatatcagggatataagggaagcatttaaa

SEQ ID NO: 816391 - DNA, 620 bp, Homo sapiens
agggatagtaaaaccaagttcccacctcccattctcaattatattctccctgctgaggaccagtgtttgcccagccacacagaaagatctctttttgcagagaaattcattctgaattttttcttaccatagtggtcattagtgaacagggttaggtaggttaatgcattctcaatcttataatggtactttggtactttcacaacagatgtgttattgctactgtgtgttctggaatatgaatcataccattcagcaattattactgaattacttttaagtacatcactgcaatagaatgcctcattaaccagccatgctctctccattagcaaactaatcattagagtgcagccctctactctaacgggaaaaaaaactcccaactcagaacatttacagcctctttaggcataattgcaggccatggcttatgaaacttggctctctgattgcaaggtaagcgccaaaactcaaaattaaccttggctgctaccaagttctgmgaatcagttttcagaaggaactggcttcccaccccgcctcatctcctgtattggagagcataatttgaatggacaagtataaaataccattttttaggagaaaaatatccaaat

SEQ ID NO: 816392 - DNA, 638 bp, Homo sapiens
ctcccaactcagaacatttacagcctctttaggcataattgcaggccatggcttatgaaacttggctctctgattgcaaggtaagcgccaaaactcaaaattaaccttggctgctaccaagttctgagaatcagttttcagaaggaactggcttcccaccccgcctcatctcctgtattggagagcataatttgaatggacaagtataaaataccattttttaggagaaaaatatccaaatgacctatggtgttttaaatttgtgctaagaaatatagaaagaatataaaaagcgtaaggaagaagtttcaaaatgtttataatctgggtggggagaatgctatagagtgaatggcttcaacaacaaatacttatctcacagctctggagaataaaaaataggtggaaaaatataaggtagtatataattaacccaatgctaaatgatatatcaataataagcagtaaatgagctcaaagatgagatcagtcatgctgggggatgatatacattcaagagtaactattatgtctcaagaaagggattaaagcatcattttaggttatcctytaaagactactagcttaatatgctgctgggatcataaaaaacaggaagatactggccattgtcagaa

SEQ ID NO: 816393 - DNA, 641 bp, Homo sapiens
catacaattattcacggatccaggttgtccaggcctccaccatattttctgtttgaaacacagagttgattggacatcatgaaagggaaatgagaaattagagaatgggtattttgttgcctctgtctgtaagtgacatatatgatttccaataaaatttgatttcctagaatttatcacatgcttctgcccaaataatagaggtctatggagtcaaatattctgtccacacaaaaggagaaaagaggatattggtgaagaccagtaatttctacaaaatgaaatttccctaaatgatataatgacttattatgaaactatagtaattaagagaatatattactgacagagtttagccaataaaccagtgaaatataataaagagccaaaaagaaatccctccaaaattggaactttgatctcccacaaaggtgaatctcacattagggcaaaaaggaaagatcattcaacagaggtggaaaaatggttagataaatgtaaaaaaaaaatggaaccaaatatctcatataacaacaattatctcactatttttcaaaggtgttcaatgtaaggaaaaaaattaaactcacagttaaaaatagagataatatcrtttagagcttgagtagggagaaagttct

SEQ ID NO: 816394 - DNA, 586 bp, Homo sapiens
gctaagaataatggcctccagctccatccatgtttctgcaaaggacacaatctcattctttttatggctgcagagtattccatggtgtatttgtaccacattttctttatccagtctagccttgatgggcatttgggttggttccaagtctttcctattgtgaatagtgctgtgatgaatatacatgtgcatgcgtctttataatagaatgatttatattcctttgggtatatacccagtaatgggattgctgggtttaatgatattcctaactttgggtctttgaggaatcgctacactatcttacacaatggatgaaccaatttacattcccaccgacagtgtaaaagcattcctttttctccacaacctcaccagcgtctattattttttgatttttagtaatagctttctgacttgtgtgagacagtatctcattgtagttttgatttgcatttatctaatgttcagtgatgttgacctttttttcatacgcttgttggccgcatgtatgtcttttgacaagtttctgttcatgtaytttgcccactttttaatggggtgtttttctaatttgtttaatctc

SEQ ID NO: 816395 - DNA, 590 bp, Homo sapiens
tgcatcataaagctacaaaaattcggccgggcgtggtggcccacacctgtaatatcccagcactttgcaaggccgaggcaggcggatcatctgaggtccggagttcgagaccagcctaaccaacatggagaaaccctgtctctactaaaattacaaaattagctgggcgtggtggcggctgcctgtaatcccagctactcgggaggctgaggcaggagaatcacttgaatctgggaggtggaggttgcagtgagctgagatcacgctattgcactccagcctgggcaataggagagaaactccatctcaaaaaaaaaaaaaagaataaagaaaactacaaaaattcaaacagtatgatgatactggccccagaacaaataggtgaatcaacataaaagaaaaggaagttttaggaatatatccaaacaaatatgaagatttactgtcttactgataaaagcagaatttcctatcagtggaaataagatgaattattcagtaaayggtaaaagtcatatgaggaaaattaacttggccctattccttacaccaaatcaaattcgcaacaaatcagtaatattaacattaac

SEQ ID NO: 816396 - DNA, 618 bp, Homo sapiens
aacactatgtcgacaatgtgtaaccatagcaacattttcaactgtaatcaggtctaatcattgcaaatgtcatattgatctaaaagggtatgttttttcttccaacaacttactgacatttcacccatttcccaaaataagaacaatgaaaagaaatagctgacaattgttaagttgccttacatcattcataatgtgcacaggacatggagtcttacttatgaccaaatcacactttttgcgcaatgaaaactttccaatcattgaggtcccccactcccctctttcagtatttactctgtgccaatgatatccacagtatggaaaggtatcattgccacatatgtcactccttactgagatccacatctatttctaggcatgaacatatcttaacaaactttagctttgcaaatagatacacatacaaagagactcacagctggtcataaagctcacagttccactttcacatacctctcggacatcaaagctcctcttaaggttagcaccaactattccatacaattcatcagcaggaaataaaggctcttcagaaggttcaatggtgacctgcagaaatayagatcatgttaacctgtttaaagacatgatttc

SEQ ID NO: 816397 - DNA, 587 bp, Homo sapiens
gaaggaaggaaggaaggaaggaaggaagaaggaaagaaggaaagaaagaaagaatttaaaaaagaaatttacttttcacrgttctggaagctgggaaatccaagagcatggcactggcatctgacagtcatcccatggtggaacagcagaaggtgggagggcaagagagggcaagtgtgtgtgagacagagagcaaacgaaggccaaactcccacaatgatagcattaatccatccatgagggcagagctctcatgacctaattacctcccaaaggtgccaccatttaacatcaccacaatggcaatcacatttccaacacataaacttttgggggacacatttaaactgcaccactgggaaaataaaagaagaacattgcaaagatcatcatgtcatcaggcctcagatatggagaaggcccagagaaggcattgtcatgacatgagactcaaagaaagaccaccagacacccacacatcaactctttaaactccagaaacgattaaggggtcttaaaatctgccatgaaggaaagatgaaacagaagagaacataaaagtaagtacctagtttaactatcttttc

SEQ ID NO: 816398 - DNA, 618 bp, Homo sapiens
tgcgtagacatacaaagattactttttatagaagcttgatcctttatgaaatctggtttgtgtgatcaatgaaagtactgataatattctcaacagacacttggcctagtgcttcttagttattaagaagacagttccatgagagtctttgctatagctgttggagtagatctttcttttgctcctcagagtgttccttgggttgtaggatcagcttcttgcttatgtagggacaggaactttagtcagagggtcagggagttatatttccggacaggatgctcaggggcccagctccaacttacatacagcctgcatttagttgctttttgacagcaactgaacaggatagaattttgtttgtgtgtgtgtgtgtgtgtgtgtgtgtgtgtgtgtgtgtgttttaacttacatacactgtggccattcagcccatcattgcaagggctttttccattcctacaagttagaaaggggaatcacagttacccaaatggaaaacttctagcttgagtgaataaaggaagatgtaaccaagtggatttgattaaggatgaacccctatttttgcagctccactggcrgggatatggaataaaacctgtttcttcatgctgg

SEQ ID NO: 816399 - DNA, 600 bp, Homo sapiens
acaaattgcttctacaggcagccaatatttcttgagtacctattttgtggtggagacagtgctagacacactgcctgggagatactcatgctttgacctctggcttccaacagtggcatagtggctggcctttgctttactgacttgggtagatagataattctcagataagtactaatgcctctgaaaatatcttctttctttcacactcagttattccaagaaggcaaagagggaggcagttagttgttatgaattcagggcaattataaccctgatttacttaagagtacatggaatgaaacaaataaagcattaaccaacattttctttgaaatgaggttgggtaagattagcttagaggagggcatcattacggggagaagagccattcatcactgtctgcaataatccatgttgaatatcttaatgtttaattatttttaatcttttggaaataaagaactgccctagggtgttttccttactctttccctcctacagagmagcctgctttgggagctgaagattttctatgtattctttgaaatggatccaaattcattacagatacactgtgaagtggacatagacgatgaa

SEQ ID NO: 816400 - DNA, 479 bp, Homo sapiens
cccctttctttaaaaagaaaaagataaaaagaagaaaaacaaaaaataaacagagctttgacatgcagtaattggacttgtcatatttcawccatgcaattaaaagttaaacccattttctaagattgcattgtttaattacaaaagtaagtacatataattaaaaagttaaatagatatggttagatgcactgtcagcagagcactgaaatatagcaaaagatatttgaagacagtttctgtcatttcaaatgattacgaagcagccttgtcctcacaaatgatgaaaataactgggatattccaattattggttatttttaatatttactctcatgctgcttgagtgtaaacaaaaagaaaatgtcttttttctatttaatctaaaaataggtaccatccacccgtcagaaaaagtatagcagaagatctgaagaaagatacatttttttggagtctggtaatttacctgcaggtaa

SEQ ID NO: 816401 - DNA, 631 bp, Homo sapiens
aattccatcaaattattttttttttaattttckgttaatcaccttggcagtcctgaggcaggaaccatgactatctcacatcaggtacaggtgtgtcttaaatggacaaatagatgggtcaaatgttaagctttgtttaaggattttcaataccacactaatttgaaataaagtgtattcttcaagataaataaagagttagagagatctagcctaatcattgacacaggaaatagaggtgtttatctaaaatgtttgaaagaacatgctggagataagcaactgaacaaggtattttcaaccccggaaaagtggacaactctaattatcaatgggttcagcaagcatttacgagccctggggatggagatgcaaaatgagctaagcgttgccagggactgaacagtgtccccacaacattcatatgctcaagctctatctggagacaggatctttagcaatgtagttaagttaaatgagtcctaagaatgaggccccaattaataggcctctagcctttgtaagaataggaagagaaagagatcgtttttctgtctccaccatgtgaggacacagtgagaaggggactatctgtaagccaggaaggggttcttactggaacctgaccatg

SEQ ID NO: 816402 - DNA, 557 bp, Homo sapiens
catgtacacatatacatgcaggtatataacatgtatgcacatgtatgtttatatacacacatttgcagcattttatttcaaaattgkgaaaaatacagaaagaaccagtaataaaggaaacattcaaaattattgagtgatatttcatcttatttcatcttcagattcttttgaaacttaaatcatattacacttaaataagacatcactgatggggttgtgtttctctgcttccctttccattccaatactcctcctccctttctcctcaaggaagacgtgatcaggaattttgtatgcaattctaatccattcgttttgctttatcacaaatatatgtgtctctaagctagctatctgtttattcatctaattatgatgtgcatttttaaattttccaatacttttgttatttaccaaaatattaattagtgttgtccttctaaagaaggcaaggacctagcatggtttaattttactccaaaaccacctcttcctttgcatatttctacactttttgttccatttttaggcaaaaataaatgatccttttataa

SEQ ID NO: 816403 - DNA, 551 bp, Homo sapiens
gtaggaaaatgtcttcaaatatgactgtaaaaatagaaaagttaaggttaaaataaatagcatgccaatggaatttatgtttactgccatccaggtaaygactattttgcaaactcaccttgagtgcactgacaaataaatgctcattcaagaaacaagaaagcatccgggccatagacgctccctaggacaaaagaagctgtccattatttgaacaaaattcaatatccacatactgacacattccatatttataagcaatattctgagctgtgctcctgattgcattttgcattttagttgaatgtttgaattattttggaatgtgctaacaaaatagtaggctgtcactaattcagaggtaaaaggtaagcagatgtcctacatgtaaagagtacagagtacataaaatttttaaaaattgagatctttacatagcaagaataaatttccaccaagcaaaagggttcaccttaaaagtagcaagttgttaaagtctatggttgatggacccaagcattaatattggcttgatggatatttgcaaggtg

SEQ ID NO: 816404 - DNA, 627 bp, Homo sapiens
tttcatagaaaaatttgtctgagggttataccgtcagaaggaggagggtagaaagtaaagactctggctttctccwtttgttcttttctctgtcttcccccaccttcctccctgcattagaaggactgtccactctcctctactatacagcaagggctcttatcaaaaagggtgggggaccagatgggcaactgtccttctagctagtcaggaggctgagacaagaggatcacttgggcctgagagtttgggactgcagtgagctatgattgtgcccctgcattccagcctcagtgacagagtgagatcccatctctgaaaaaaaaaaaaaaaaagggtggggaactaaggctggctcaatattttcaaaaatcaatcaatataatacccatattaacaggctcaagaagaaaaaatatcacatgattatatcaatttatgcagaaaaagtgttagaaaaattcaacatgcattcatgcaaaagaaactctcagaaaaaaatatgaatagaagacaactttctcaacttgataaaaaacatatacagaaacctacatttaatattatgctcagttgtaaaggctaaaaactttcccactaagatgaggagaaaaaagcaagaatgtt

SEQ ID NO: 816405 - DNA, 621 bp, Homo sapiens
tggtgtgtgacatttccctcgctgtgcccatatgttctcattgttcaacttccacttatgagcgagaaaatgcggtgtttggttttctgttcctgtgttagtttgctgagaatgatggtttccacctttatccatgtccctgcaaagacattaactcattcctttttatggctgcatagaattccatgttgtatatgtgccacattttctttacccagtctatcattggtgggcatttgggttggttccaagtctttgctattgtgaatagtgctgcaagaaacatacgtgtgcatgtgtctttttacatgattagaatgatttataatcctttgggtatatactcagtaatgggattgctgggtcaaatgatatttctagttctagatccttgagtaattgccacaatatcttccatattggttgaactaatttacactcccaccaacagtgtaaaagcactcctgtttctccacatcctctccagcatttgttgtttcctttttgaaaaytgccattctaactggcatgagatggtatctcattgtggttttgatttgcatttctttaatgaccagtgatgatgagctttttttcatatgtttattggctgcataaatg

SEQ ID NO: 816406 - DNA, 621 bp, Homo sapiens
tggtgtgtgacatttccctcgctgtgcccatatgttctcattgttcaacttccacttatgagcgagaaaatgcggtgtttggttttctgttcctgtgttagtttgctgagaatgatggtttccacctttatccatgtccctgcaaagacattaactcattcctttttatggctgcatagaattccatgttgtatatgtgccacattttctttacccagtctatcattggtgggcatttgggttggttccaagtctttgctattgtgaatagtgctgcaagaaacatacgtgtgcatgtgtctttttacatgattagaatgatttataatcctttgggtatatactcagtaatgggattgctgggtcaaatgatatttctagttctagatccttgagtaattgccacaatatcttccatattggttgaactaatttacactcccaccaacagtgtaaaagcactcctgtttctccacatcctctccagcatttgttgtttcctttttgaaaactgccattctaactggcatgagatggtatctcattgtggtttygatttgcatttctttaatgaccagtgatgatgagctttttttcatatgtttattggctgcataaatg

SEQ ID NO: 816407 - DNA, 621 bp, Homo sapiens
tggtgtgtgacatttccctcgctgtgcccatatgttctcattgttcaacttccacttatgagcgagaaaatgcggtgtttggttttctgttcctgtgttagtttgctgagaatgatggtttccacctttatccatgtccctgcaaagacattaactcattcctttttatggctgcatagaattccatgttgtatatgtgccacattttctttacccagtctatcattggtgggcatttgggttggttccaagtctttgctattgtgaatagtgctgcaagaaacatacgtgtgcatgtgtctttttacatgattagaatgatttataatcctttgggtatatactcagtaatgggattgctgggtcaaatgatatttctagttctagatccttgagtaattgccacaatatcttccatattggttgaactaatttacactcccaccaacagtgtaaaagcactcctgtttctccacatcctctccagcatttgttgtttcctttttgaaaactgccattctaactggcatgagatggtatctcattgtggttttgatttgcatttctytaatgaccagtgatgatgagctttttttcatatgtttattggctgcataaatg

SEQ ID NO: 816408 - DNA, 547 bp, Homo sapiens
cagacatacattttgcaaatatttcctcccagtctgtgacttgccttgacattgttataacaatgtcttttgaagattaaaagtttcaaattttggtaagatcaaatttattgattttttcctattatagtttgtgctttttgtgtcagatttaagaatcccaaggtcactaagattttctcgtacatgttcatctagaagctttatagttttagttctcacacttagatggtccacttcaagtaaatctttgaaaatggcagaaaataagagttgaagttcatttttttttttgcatatggatatccaattgttccgtcgtcgattgtttaaaagattatcctttcccccactgaactgtcttggcacctttatggaaaatctattgattgtaaatgtgtgggtctatttctgggcactattctgttcyagcaatccatttgtctgtctttatgctgttaaattaaatttagactaaactgcttccttatatattttaagttcggcctaaaggtttctccatacacagtgaactgtcacctaaatg

SEQ ID NO: 816409 - DNA, 638 bp, Homo sapiens
caccaatttgtcaatggtttcttagctttgacacctaaagcataagcaaccaatgaaaaaacagacaaattggatatcattaaaacgaaatatcatcaaaacgaaatatcatcaaaacgaaatatcatcaaaacgaaatatcatcaaaacgaagtatcatcaaaacgaaatatcatcaaaacgaaatatcatcaaaacgaaagacttgtgctttgaaagatgctatcaagaaaacgaatacacaacttatagaatggagaaaacatttgtaaatcacgtatctgataagggcctagtatctggaatgtataaagaaactcttacaactcaacagcaaaagacaacctgattaaaaaatgggcaaaggacttaacagacaattctccaaagaagatgtatgagtggctaacttaatgcacgtaaaaagatgctcagcatcactaggcattagggaaatgcaaatcaaaaccatgatgaaatgccattcacactcattagaaatggctataattttaaaaaaggaggggggataacaagtgttggcaaggaggtagcaaatcagaacccttatacattgttggcaggaatgtaaaatggtttagccatygtgtaaaagagtttggaggctcctcaaaaag

SEQ ID NO: 816410 - DNA, 623 bp, Homo sapiens
taaaatgcttagtaaacccctrtcttttagacaccagtgcagccacggcctctcaaattacaaacttcctcatcagtagattgaagctttttatttaatcagcatgaacattcaaaaacacatataaaacccaccatttttacctgtaatgttttaagttagggaaaatgtatatggcatttataaaaatcaagagccgaatgtcatcatcatcaaggaacttaacacagtatcctcttttttcttcttggagacttttatatatgatatgcagactaccttgtagaacttcgtcacatctatgcttccaaattctgagtctaccatcccgtatttgcatgtctttgtgtgtgtgtgattgcaattttaaaaactagtaacaaaaggaagtaaacaccatcataaaacacccaatatgctggcagcatttccacagtgcccccctgcagccggcctggctacctctgcccccagtgcctacttagcacagtgcctggcacacagtgggtgccagcgggaggcactgtggttgctacggtgcccagggcttcggagggaaagcagaggtagctgtggtttagttcaatcacgtgggttttatttattaacatcatgtgcaaatt

SEQ ID NO: 816411 - DNA, 571 bp, Homo sapiens
gcaaagggatgtcttatatggcggcaggcaagacagtgtgtgcaggggaactgccctttataaaaccatcagatctcatgagacttattcactatcatgagaatagcatgggaaagacccacccccatgattcgaccacctcccaccgggtccctcccatgacatgtggagattattacaattcaaggtaagatttgggttgggacacagagtcaaaccatatcaaatcctttttttatgtttcccttcctccttccttcttgtttcttcttctctgtattgtttaccactacaacatcagcagcagcaacaaacagaacatcagcagcagcaacaaacagtatatcatgatgattgctcattgctcctcatggtcttatcattgcactgttgtctttgtcatcatcatcatcatcatcatcatcatccactattaccrccatcactgccacatcaacatcaacatattgtcttatcttggtcttattgttgcatcattgtttttgtcattgccatcatcatcccaatcctcatcactccctcttactgagtgcttgctttgtgccaggca

SEQ ID NO: 816412 - DNA, 617 bp, Homo sapiens
agacaaaataaagaatatgggttttaaagttttctttggagggagtcaaagattttttcctgtgccaaggactagggaatgcttttgtagcttcttgttttcctttgagacgggtatctccctgtaagacaggcaggctggttgctgtggtctgagtgtttttgtctccctaaaatacagatgctgaagcctgattcccaatgcaatagtattaagagttggtgcctttaggaaataattacatcatgaggatggggcccacatgaatggaattaatgccctttcaaaaaagaggcccaagggagcttatttgcccttctaccatgtttaggaccctctatcctgtagcaccatgaccttggactctacagcctccagaactgtgggaaataaatctctactatttacaagccacccagtttatgatattttgttatagcaggccaaaacagtggtgaagatcaggcaccctggaatcgtccagamctgggttcaaattctgcctgactcttgccaggtatgtaaacttggcaagttacttagcttctctgagcctcagcttttctcatgcataaagtacagatcataagaggtaccatctcaaagggcagttgtga

SEQ ID NO: 816413 - DNA, 617 bp, Homo sapiens
agacaaaataaagaatatgggttttaaagttttctttggagggagtcaaagattttttcctgtgccaaggactagggaatgcttttgtagcttcttgttttcctttgagacgggtatctccctgtaagacaggcaggctggttgctgtggtctgagtgtttttgtctccctaaaatacagatgctgaagcctgattcccaatgcaatagtattaagagttggtgcctttaggaaataattacatcatgaggatggggcccacatgaatggaattaatgccctttcaaaaaagaggcccaagggagcttatttgcccttctaccatgtttaggaccctctatcctgtagcaccatgaccttggactctacagcctccagaactgtgggaaataaatctctactatttacaagccacccagtttatgatattttgttatagcaggccaaaacagtggtgaagatcaggcaccctggaatcgtccagaactgggttcaaattctgcctgactcttgccaggtatgtaaacttggcaagttacttagcttctctgagcctcagcttttctcatscataaagtacagatcataagaggtaccatctcaaagggcagttgtga

SEQ ID NO: 816414 - DNA, 605 bp, Homo sapiens
aatctgggaggcagagcttgcagtgagccgagattgtgccactgcactccagcctgggcaacagagtgagactccatctcaaaaaaaaaaaatatatatatatatattctcgataggacagcacagtccatctytccctgctttacagaagaggagactccatttctggtaggtgatgtgacttatgcaagaacacagagtgtgtttatgatcgagccaagatgtatgtgcatgtttaatttccagctcagtgttcttaacactcctttttgagatgttcagtgttttctgaaaccttcagctgcgttttggatctccaacagggacttgcacattatttccccaaatatcactgaggtcagcgtctgcaaatcagagtctcctggaaacatttacagtgagattagaaaaggaattgaacgaggttaggtggtctctgttgggcctgaaaatgtaacatgcagagtgggaaattaaaacagggtctttggggagagaaaagagggagaggaaaaacccggcttctcttatcttcctgtcacatgtgaactctgtcattggagcttccgtttttgataagctcagtgtgtcttatcacagccttt

SEQ ID NO: 816415 - DNA, 545 bp, Homo sapiens
cttcccttcctgggctgtcctcaagggcctgagttatgcctcccagactaggggcctggaattgtggcccaagctgactcctgtccaggtggtgggcccagcacagagcccaggagggtttatggggtaatcagcaggaactcccagctcaattatgagagaaacagtgcttcctgccagtcacacagacttgatgacagtaagtgctgagttccagacctgggaccctctgcccagccagcatccccatccagctcctcctcctcaccctctgcagagtaggcacatgactcaggctcagcccgccagagaccctgtggcctctgagcaactaagctctgcaaggaacctgggagctgctgtgagtgaaggctgagtatggggacccagaggtctggcttctctgcttctgtcatcagctcactatgtgaacttgaaccaggcctcaggacccccatgccccatcagcccacctaggccaaagcagcccctgcagatctcccatgcctccacctcccmtccctgcctgcactgttcccaaagtc

SEQ ID NO: 816416 - DNA, 502 bp, Homo sapiens
cccttagttaaagttgagggtgtgtctgccaagtttctctactgtaaagttattattttgccctttgtaattgacaatttgtcaggcagtgtttgagaatatgtatgtatcctattcctccttgaccttctacccactagttttagcatctcctattgcttggacagctgcagaatggtgattttctaacttcatgattcatacccatttattagctgctgttctactataagaaaaagcttttcattttcctttatttaacaaaattctgtcaccaaagccctcattcctgggaccttcatttaatcgctcacctataaacatttattattaatattggtataggctcatggattcttattttatttgctggtttataatccattactatcattttttttttttgatgctcaaattgtgcccagatttggccagtaggaatccaccaggctggcttctgtgttttcttggyaggtccccaacatgttgtaagtactgctac

SEQ ID NO: 816417 - DNA, 310 bp, Homo sapiens
atcttcattattttcttgtgagctcagatacacatttaaaataatccttgtgatrttttaaacagagtatctgtgtgttttatggcaagataatttttacgttatctgatttatttgcttgatgtcctaaaattaaccttttttgaattattttgtgtatactcaatggatcttatccttacattgaaagtatgtatactttttcttttatggctgctcaatcagagaatgtatttttaaggccatctaatgggatttaggaccaggtcaatagaggtcaataaaggtcgtaatcgtttctttgtgttct

SEQ ID NO: 816418 - DNA, 530 bp, Homo sapiens
catatggttcctggagaatccacttcactttccaaaactttattctcctgtctcctcttgtcagttattcaaggcttgaattgtgttcaattcattttgtatccycagcccctaacagaacttggtgcaaaaaaatctttgaatgattgtctttccatttttgctaaagttttattagaactgttttctagtatcagaattgaatcccagttctagacctagagccttaaggctgcagacctaaagaagacagatctcagagctaaatctctctcttctctctctcttttttgtactggatgattgacatctgaggacacagcatattgacttcttttaagatgttgaaacaaataaaaactatgtgcaggaggaaacatgatcctacatttatttatgaggcatcagacaatgtctcaggaaacagatgttttgtgctgtaattcctcttgatggcactggagccttaaatatcatcgcaagtccagcctttcacattctaaatcctattatctaggttagctcatctg

SEQ ID NO: 816419 - DNA, 522 bp, Homo sapiens
ccacgcccggctaattttggtatttttagtagagatggggtttcaccatgttggccaggatggtctcgatctcttgacctcatgatctgcctgccttggcctcccaaagtgctgagattacaggcatgagccactgtgcagtctattaaatatcaattaaccaagcactatagtatgtgttttctgatccactcttttttcttgttttgtttggagacagaatctcactctgccacccaggctggagtgcaatgttgcgatctcggctcattgcaacctctgtctcttgggttcaagcaattctcccgcctcagcctctcaagtagctgggactacaggcgcttgccaccacgcctggctgattttgtatttttagtagagatggggtttcaccacattggccaggctggtctcgaattcctgacctcgggtgatcctcccacctcagtctcataaagtgttgggactacaggygtgagacactgcacctagcttttctgatgcttacttctaacacccctg

SEQ ID NO: 816420 - DNA, 599 bp, Homo sapiens
aaaaaaaacgttgcttggcattaacagtttttctatcaaatacaaaattctgagtgagttacatcactagagagtatacgagtcttccactctggtcggcttattctatggagtgagactgatactactgcttatctcatagttttgttatgatagttaatatttattaaaaaactcagactaatgtttgacacagtaaatgctaaagacatgcttacagaataaataaatacattcataaataagtcagtctctgttctagtcatgccatattaattacaatccacatgctagagtttgtgatattctctctgcctgcttccccacctgtctttctatttatttaaatcctattattcttcaaggactgtgcagatcccacctttctaagcccttcaggacagacaactctggactctactaacctcatgtttctccttcactcatttgcacttatgcacaaatatcctgtttgctttatttagcctttactgttggttgttaaccaggcaagggcattagaaytccctgagtagcttttctaaaatgtatatccctaggccaaacccctagaatgttagattcagtgagtcctgcct

SEQ ID NO: 816421 - DNA, 645 bp, Homo sapiens
gaagcacataattacgtagcataatgtcaggaagtgatgggtgtcatggacaatgaagtcgggctggagatgggagctagagagatattgctagacagaaggtggttttgagcagagagacctgaacaaagagcragaatggctgggtccttcagtggaggacaaaggacatctctggacttttctctgaaaacgataccacagaaaaatgaaatgacttttccaggatcacacaaccaggtggctacccagctgcagtactgctctggcctcaagatggtaacctgtaccaaccagttttaaaaatactgctccctgccttcaaggaagcctgcacttggatcatcaaatacagcctagagccaactgaggactccaggaagagcatgtgatgaatcccacagctaagtgcgcatgaatgcatgaatgcacgcctcagatatgtagacaggtgcacgttggctgctgcacagaacagactaaatagaggtaatgaaaccataagtgaagaccctgtttgtttacagttcttttcgtaagaggagtcatttatctctgctctttcattctggaaattagcatatgaaggtgtttgctgagtttcctaccttgagagaatgcaaagcttaataaaagaaaatgttt

SEQ ID NO: 816422 - DNA, 643 bp, Homo sapiens
atatattacttagcatccatttactgccctttcctgcactgaggaaactgagctttgtcaatatgaaattagcccttaatctcttatctgaaggtcatctacagaggagaaagccctctcctgaggttggtatgggtagtctacttcaggaggtttcactgtctgtaaaattccgggcttgtattgcattcatccttctttgattatggaaaactttcctctgcagctaacactcaggaacaatgtaataagtaacttccaattaaagttttccatatgtggcaaaaattgtaatgaatgaataagtaaagaccgcataatgaaagcctattagccaagtgaatatactcttttaagtgaaatttctataccacttttgtattatctgccatcagaagagaacgtgcaattactaattttatcttatctcagcttattattaaagagtagtaaaggaaacttcattccaggagccataatgtgatttttgattaataggaggttcttatgtgacaagaatatttctcttaggcaaggtatgcacatggattyccgcctgagctggcttggaagctacatctccagtggaacgactgttcaacaatagaacatgtgttcctacacgcgaggtcagattcttaac

SEQ ID NO: 816423 - DNA, 501 bp, Homo sapiens
tggtggctctcatctctgggggggacgagctgaccaagactggttggggtagggcctgggagaaatgaaacctctccagaccccaaggactgaattctctgaagaagatgcctgtagtccaaggtaaaggtatggtgaattctgttacccatcatgattgtgggaagatcataatcagaattccaggggagaaggtaggaatccaagagtggttggtctgactcactgcgagtgagacttgatacagtttcaaggaaaggggttggcagcaagaatatataagagttagttatgtattattaggctacactcttaatatggagaggcagtgttattataaagccttatttactacattgcaaagaactatgttgcrtgtttctcccagctggctctgcagcacctccctcaggacaccgtctcacattttcctagattgggtgacgactttttttctgaggtttctcagctccctgtaataacactgtcaggatccttcct

SEQ ID NO: 816424 - DNA, 620 bp, Homo sapiens
aatgagtgtacaatttctgttaagctttttgaaatattgcaaatagctcatgtacccccatttctgcaatgaaaaccttacctgagacgattgctgcagggccatttgttcatgtagttcaattttcacttaagctttgaaagtttacacgttaggaccgtgtaggtacagaacccagggcctatgactttattggctcaggatatttgttaattgacattaaagtattaagtatcaaaattgaaataattgcttaagtatttagaaaatgaacagtatattagctagtcaactacaactcaacagttttgcagttgtatttacgttgtatttatttggggaggttttttctttttaatatctttgacacatgatatgaaatggggccttcaaaagtcaccttgtttagagcctgcttttttgtctaaagagctccaagaaaggagattgagtggtataatttaagatctaaaagcagatgaccctgttcttcctggaaagtagactggagatgcaggtcccttgggcaagacatatctgctatctcctattctattgtgtggataagccrtcatttatataataggatccctgatgtggggatatttatcttgcttgtt

SEQ ID NO: 816425 - DNA, 302 bp, Homo sapiens
ctgttgaaatttgattttgctaggttatttttccccaacatcttagaatagaaggaaatttcctgaagacgacaatacagttgaattgaaaatttgctgcagattcatttcagttcaagtaatatttattaaaaatctaaaactgtggcagcactgtactgtggggactattaacaaaatacagtaataagtaatgtatggccaccacttatttaaccatgattttgtgccaggcccsaaataattaactagtttaattatcatgacatccatgtaaagtgtaggtatcactattcctattt

SEQ ID NO: 816426 - DNA, 499 bp, Homo sapiens
cactacaagccagactagagtgactgccagatggaatgggaaattcttccagcggaatatatagcggcagccccacagaggctttaggaaagctacccccaattccattttgtaatcactggtttttgccttaatcctaccttaaaggctgcttttgaatacttggcctcctagattagggagttttagttaacaggactaataagccctgcttatgttaattaggcaccctcccagagctggattacttcaaaacaaacatatacacaagtctatgaccaagaaacaaaaagaagctttacaacgttaaaaccgaagcacacagctcgttttatcccaggcgcgcttgctgaacagcatcagaaccrtgcagtgtttggggaagtaaagcctgggatgcattgcagcatggcacagtttatcttgctggtgacgggcttctaggatggacatcacgcagggcaacgcccatacactgggattgcaggagtgtcagcgg

SEQ ID NO: 816427 - DNA, 578 bp, Homo sapiens
caaaagccttcttggccctgctatccttttagctactgccctattctgttctttgctgcaaaactcctcagaagatttatcttcatttagtttctccagttcctttcttcccactccatcttaaacccaatccaatgagacttttgtaccctctcccatcccactgcgtggaaactgcctttcaagccgaagacctccaaatgactaatacaagtctcttttctttgtcctcatcttaactgagctttcagcacttgggacagctgaccgcttcctgactcactcttctcttggctcctaggacattgcacttgcctgggtttcctcccaccactctggcatcttcctctcattctcttttggggctcccactcctcttcctgacctcttcccatcagaggctcttagggctctgtcttggcttctcttctctatccacattcacctactcagtgatctcatccaactcagagctttaaatgctgtcagtatgctaagggtttccaartttccatcttcagcctagccctctcctcgtctatccaactgcctgttcaacactgccacttgaatgtctg

SEQ ID NO: 816428 - DNA, 578 bp, Homo sapiens
caaaagccttcttggccctgctatccttttagctactgccctattctgttctttgctgcaaaactcctcagaagatttatcttcatttagtttctccagttcctttcttcccactccatcttaaacccaatccaatgagacttttgtaccctctcccatcccactgcgtggaaactgcctttcaagccgaagacctccaaatgactaatacaagtctcttttctttgtcctcatcttaactgagctttcagcacttgggacagctgaccgcttcctgactcactcttctcttggctcctaggacattgcacttgcctgggtttcctcccaccactctggcatcttcctctcattctcttttggggctcccactcctcttcctgacctcttcccatcagaggctcttagggctctgtcttggcttctcttctctatccacattcacctactcagtgatctcatccaactcagagctttaaatgctgtcagtatgctaagggtttccaagtttccatcttcagcctagmcctctcctcgtctatccaactgcctgttcaacactgccacttgaatgtctg

SEQ ID NO: 816429 - DNA, 632 bp, Homo sapiens
aatcatggatgtggacaaaaattgagctatgacattatttttaatctctcacaaatacaatgtttgttactgcrttgtttgtatttgcaagagattaaaaataatatcctaatattgtttctaaatatccaacactgaaggatttgttgaacacactttgggaagactacatgaacgtgtttgtacaaatgaggctccctccaccaaagccgccctcagcacccaggtttggaaggtttggcatcttttccaatgctgcccagcactctctggcccaccccctttctcaggccagcttttagctgcctcccagcctgtcctctggataccatgttctctcccacccctccacatgccacttcccagctggcttcatacacccctctgagggagatgcccagccttgctgtccccaccctgccaactgatgggcatatcctgagattcagacacatacatgcatctcctgtaccaagcccatacggcagcaaatgtgaggggcttgacagttatctatctttagggcactgtgggcccagctgtgtgtcaggacacaagaaaaagccgaggaggaactcgtgactcagagaaacgaggctgacatgtccacatcagttcaatggtccatgggc

SEQ ID NO: 816430 - DNA, 550 bp, Homo sapiens
tcagaagggttgtgggtgcaagaaagaaggggagaaaataccttgaccagtcaaactgagtctyagtaaatctgaaagaaccctgagtcaaagagcatggagtgctttttcaaatccactgaaattaccctagctcagcttgtctaatctttccccaaccacagttagagagaaagcctcgatttccttgcctgacaaatgaggtaacccaggcatacaaagcttaagacactgccgggcacagtggctcatgcctgtaatcccagcactttgggatgccaaaggcaggcagatcacctgaggtcgggagttcgagatcagcctaaccaacatggagaaaccccatctctagtaaaaatacaaaattagccaggcgtggtggcacatgcttataatcccagctactcgggaggctgaggcaggagaatggcttgaacccaggaggcggaggttgcagtgagctgagatcgcgccattgcactccagcctgggcaacaagagtgaaactctgtctcaaaaaaaagaaaaagaaagaaagaaagcttaagac

SEQ ID NO: 816431 - DNA, 550 bp, Homo sapiens
tcagaagggttgtgggtgcaagaaagaaggggagaaaataccttgaccagtcaaactgagtcttagtaaatctgaaagaaccctgagtcaaagagcatggagtgctttttcaaatccactgaaattaccctagctcagcttgtctaatctttccccaaccacagttagagagaaagcctcgatttccttgcctgacaaatgaggtaacccaggcatacaaagcttaagacactgccgggcacagtggctcatgcctgtaatcccagcactttgggatgccaaaggcaggcagatcacctgaggtcgggagttcgagatcagcctaaccaacatggagaaaccccatctctagtaaaaatacaaaattagccaggcgtggtggcacatgcttataatcccagctactcgggaggctgaggcaggagaatggcttgaacccaggaggcggagkttgcagtgagctgagatcgcgccattgcactccagcctgggcaacaagagtgaaactctgtctcaaaaaaaagaaaaagaaagaaagaaagcttaagac

SEQ ID NO: 816432 - DNA, 616 bp, Homo sapiens
taacacatgacatatagtagaatctttgcaaatgaggtgatgcgatgtttgggattttccttttttttttctttttttctttttgttttttgagactgctctgtcaccaggctgtagtgcagtggcgccatcactgcaacctctgcctcccgggttcaagcaattctcctgcctcagcctcccgagtagctgggactacaggcgcgtgccaccacgcctggctaatttttgtatttttagtagagacggggtttcaccatattggccaggctggtctcaaactcctgaccttgtgatccacccgcctcggcctcccgaagtgctgggattacaggcgcgagccaccgtgcccggctgggattttcttaaacataaggggagggaggaagtagcttgtggatggggcaggattggcaggggttgacggttgttaaggcgaggtgatggttccactggggttcctgtgctagtctctatttctgtgtaggttcaagattctcgtatgtgttttgaagmggggtaaaccaatgatggaggtggctttattaagcctcccttatcgaattccattttttctaatggtatcccatcttttttttttgcatggtttagatgc

SEQ ID NO: 816433 - DNA, 719 bp, Homo sapiens
atggatgtgccacattttttgtatctgttcatttattggcagacacatgggttgcttctaccttttggctgttgtttactgaatattttttatacatggtataaaaagtttgaaaaaacatccttgagttagtggcaatatgcaaaaaagaataagaaagtgcttggaggatgtgggtttaaggaaaatcttgaaaacagcagatgccggacatgttatgaacatatgtatcttagttttctcttgtttagagtacgaaatatggtctaaaccataggtttagaaatttttgtagagtatgaattttttcttttcagaatatgaatcacaaaacgagaaggaccacagcagtagcacctacattcttacagagtcatgttggaatatagccatgtaccattaaatgtatgatcttagccaggcatggtggctcatgcctgtaatgccagcactttgggaggctgatgcaagcaggccagatgaagccaggagtttgagagcagcctggctaatgtggtgaaaccccattcgtctctactaaaaatacaaaaattagccaggtgtggttgtgggcgcctgtaatcccagctactcgggaggctgaggcaggagaattgctttaacccgggaggcggaggctgcagtaagctgagattgcrccactgcacggcagcctgggcaacggagcgagactctgtctcaaaaataaataaatgcat

SEQ ID NO: 816434 - DNA, 622 bp, Homo sapiens
ggtgggtggagtctgaatggagccctttcctgggtggaggaagagatcttgcagtttcgaaatttcgaggggaattttatcaggaagagcaaataatcgcacaaaaggggaaaaatggacaaaactcagcatttgcctttcttacctctcctgagctggtctccacgtgagttccaaaacaaactccgttagacgattaacatttttttttttctctctctctcttttttttttttttttgacagagtctcactctatcgtccaggctggagtgcggtggtgcgatttcagctcaccctttccgggttcgagtgattcttgtgcctcagcctcccaagtagctgggactacaggtgcgcagcaccacgcccagctaatttttatatttttagtagagacggggttttgccatgttggctaggctggtctctaacccctgacctcaggtgatctgcctgcctcggcctcccagagtgctgggattataggtgtgagccaccgtgcctggccgtgattattgaggctttagctgagcgcagtggtgtaagcctgtggtcccagctasttgggaagccgaggtggtagggttgcttgaggccagcctgggcaacataatgagacc

SEQ ID NO: 816435 - DNA, 549 bp, Homo sapiens
tcagatgctcacaagggtatattgaaagctgctctgagtggtcattcctggcagtctgtattgtaatccatgttccccattgctgcaccctcctgcgctctgatctttcttcttaatcaagccttttattctccagtgtcacttttttaaaaaaaatgatggtgatggtgtcatcatacatgtcctactgtcgttccaggccatctcggaaacgcaggtcccttggcgatgttgggaatgtgacggtggccgtgcccacggtggcagctttccccaacacttcctcgaccagcgtgcccacgagtccggaggagcacaggccttttgagaaggtggtgaacaaggagtcgctggtcatctccggcttgcgacacttcacgggctatcgcatcgagctgcaggcttgcaaccaggacacccytgaggaacggtgcagtgtggcagcctacgtcagtgcgaggaccatgcctgaaggtagggctgctgctccggggtccgagtgtcatgggtgggacatcaaggctgaccaaggacagattctccaccctc

SEQ ID NO: 816436 - DNA, 540 bp, Homo sapiens
tgttagtttgttttttgaaatggagtctcactctgtcacccaggctggaggacagtggtgcaatctcagctcactgcaacgctgtctccgggttcaagcaattctcctgcctcagcctcccaagtagctgggattacgggcgtgtaccaccattcccagctaattttgtatttttagtttcatcatgttggccagactcgtctcaaactcctgacctcaggtgatccgcccgcctcagcctcccaaagtgctgagattacaggtgtgagccaccacacccagccttattattatcattatgatgattatttttgtatttttagtagagacgggttttcgccatgttgcccaggctggtctcgaactactgttctcaagcgatctgcccgcctcggcctcccaaagtgctgggattgcaggcatgagccacggtgcctggcctgtttcttacagttctatgtgttggttgggtggttcttccgggaacagcctcwctcctgtgctgaggcctctgctgggagagccaggattgcttgtctt

SEQ ID NO: 816437 - DNA, 563 bp, Homo sapiens
tattgaaaacagatgtctgagacagcattgcctgagtttcccacaggccatgtcaggggtgatgctgacggctattatggagggctggccctttctgctccccttgccttgtctgggctggatgtggttttctggcttagagatgttaagagaaacctgctttgaaggtctgctttgggagtggtaaatctggggcatgcggtgagacctttagtgcttgaggtggggcacatacagaagataagggagactgggtatactcctgtgtgtctgggggttagagaacacagctaaaaatgtctttggtctgagtataagggaccaagacttttaaaaattctcttcttgggccagagactatgctgcccttcttcttgacctcctgattcagtcagaaattctcccccacattcctagctagctttctcaatgaaatgatcttggtcaaaaggcaggtgggacaaaggagaaaggacgttcagtggctgaccrtctctaccccttgtcagagctctaaccacacactttataatgggggtgggagctagtgcaatttctcttgt

SEQ ID NO: 816438 - DNA, 660 bp, Homo sapiens
aactcaatgtggtgacattgcttatcccatggtatttagtatttctggcggttacttgtgcctttgattaataaagatgggaaaaatatgttaatgatgaatggtatctggtaacaattttttttgaaaaaacaaaaaacaaaaacataggctttatgagggaaaaaagagccaaacagaatcattgataaaaagtacagaaatgtttggtctctctttctcacaccgtttttcagatctgtgagtatagtggtcaggcatcatgttttctcatcataataaacatttcccacagaaactgacatatgtataggatctgtcaataatcatgtctgggtcgggataactctccaaaaggtgaattgcttagtgaggtcctcagttctttcagacctttgagcctgactatacctcgatgtggctatttcttataataattgaaatacacttcaatagctgtaaccaaagctgtgctatcattggaagagatctggagaagatatcctaaactggcacagctaaaagtgattttagaacgtgattggccaaatctcttcattttacagctgaggaaactgagagccagaaaggtcatagaaccctctcaaggtcatgccactagctaaattctggatcckaggtctccttccctttaggcca

SEQ ID NO: 816439 - DNA, 643 bp, Homo sapiens
tgcccaccttagcttgtgttattaaaatgcttagtaaacccctrtcttttagacaccagtgcagccacggcctctcaaattacaaacttcctcatcagtagattgaagctttttatttaatcagcatgaacattcaaaaacacatataaaacccaccatttttacctgtaatgttttaagttagggaaaatgtatatgcatttataaaatcaagagccgaatgtcatcatcatcaaggaacttaacacagtatcctcttttttcttcttggagacttttatatatgatatgcagactaccttgtagaacttcgtcacatctatgcttccaaattctgagtctaccatcccgtatttgcatgtctttgtgtgtgtgtgattgcaattttaaaaactagtaacaaaaggaagtaaacaccatcataaaacacccaatatgctggcagcatttccacagtgcccccctgcagccggcctggctacctctgcccccagtgcctacttagcacagtgcctggcacacagtgggtgccagcgggaggcattgtggttgctacggtgcccagggcttcggagggaaagcagaggtagctgtggtttagttcaatcacgtgggttttatttattaacatcatgtgcaaatt

SEQ ID NO: 816440 - DNA, 653 bp, Homo sapiens
ggtgatgagccgtgtgagagcgcctgccatcacactgcattatggaatagccaaaagcagagagcaggtgctggtggaagcagtccagtcttcagcaagctgaygtgaatgcatgtaggttatctaatcagagacctacaaatatttaggtagatcatattttccacctctgaactttgaacacctcttatagcacaaggacaaaatatctcttctctgtgttaggtattaatgtcaataccttcactgtaatttttctttggacttggcttcagtattactaccttcttctgaattatcctttgagtttttaatcagtcctttaacatttcccatcactttgcgacaggtaaacctgtgacaggtataagtgtctatgtatgtgtgtacaatttgatctcttcctggaatctgtctaaaagccactatttttttaaaatttttcattctaagtctatttgcatccggctaactctcaagtacctacgatgaggtacaaaattcttccatgaagatcactttttattaaagtctcttaccttcacctaaacaccatgccattaagtcactgtttttcaaggtgtggtccatggggcagatgcattaaatctaccttgaatgcttagtaatatataataataaaatctatacta

SEQ ID NO: 816441 - DNA, 545 bp, Homo sapiens
atccatttaggtgacagttcactgtgtatggagaaacctttaggccgaacttaaaatatataaggaagcagtttagtctaaatttaatttaacagcataaagacagacaaatggattgctggaacagaatagtgcccagaaatagacccacacatttacaatcaatagattttccataaaggtgccaagacagttcagtgggggaaaggataatcttttaaacaatcgacgacggaacaattggatatccatatgcaaaaaaaaaaatgaacttcaactcttattttctgccattttcaaagatttacttgaagtggaccatctaagtgtgagaactaaaactataaagcttctagatgaacatgtatgagaaaatcttagtgaccttgggattcttaaatctgacacaaaaagcacaaactataataggaaaaaatcaataaattygatcttaccaaaatttgaaacttttaatcttcaaaagacattgttataacaatgtcaaggcaagtcacagactaggaggaaatatttgcaaaatgtat

SEQ ID NO: 816442 - DNA, 545 bp, Homo sapiens
atccatttaggtgacagttcactgtgtatggagaaacctttaggccgaacttaaaatatataaggaagcagtttagtctaaatttaatttaacagcataaagacagacaaatggattgctggaacagaatagtgcccagaaatagacccacacatttacaatcaatagattttccataaaggtgccaagacagttcagtgggggaaaggataatcttttaaacaatcgacgacggaacaattggatatccatatgcaaaaaaaaaaatgaacttcaactcttattttctgccattttcaaagatttacttgaagtggaccatctaagtgtgagaactaaaactataaagcttctagatgaacatgtatgagaaaatcttagtgaccttgggattcttaaatctgacacaaaaagcacaaactataataggaaaaaatcaataaattcgatcttaccaaaatttgaaacttttaatcttcaaaagacattgttataacaatgtcaaggcaagtcacagactrggaggaaatatttgcaaaatgtat

SEQ ID NO: 816443 - DNA, 617 bp, Homo sapiens
ggcctcccaaagtgttgggattataggcgtgagccactgcacctggccccatgtctctaactttggatttttaaattgagataatgtggatgygcctcacacagtatccaccatgtagtaggtggttattagcgttaatttccttcccctggtgtcccatttcttaactatgggtttgtgtatgtattttagctttcatgttcactagcaattttgctattgtacacacgaattacatggaatttctaccctaaaaattctgatagataaaactatatatgaaaaacctaggccaggcgttgtggctcacgcctataatcccagcactttgggaggccgaggcaggcggatcacctgaggtcgggagttcaagaccagcctgaccaaaatggagaaaccctgtctctactaaaaatacaaaattagctgggtgtggtggcatgtgcctgtaatctcagcgacttgggaggctgaggcaggagaaacgcttgagcccaggaggcagaggttgcggtgagccgagatcatgccattgcactccagcctgggcaacaagtgtgaaactctggctcaaaaaaaaaagaatgaaaaacctaacaaaaatttactctcctgag

SEQ ID NO: 816444 - DNA, 645 bp, Homo sapiens
aataaataaattacagggagactccaatgagaagaaagataggaggatggagaatgaggaaagggaaggggttccaggcagagggcacagcagaaaggcttggaggctgtcagagaaagaacaaccagttcagggagactgtaggtaattccggagaggatcaaatttacaatgttattgttactgcccacgcatttgtcataatcttctttagatgtgacaggtctgtggtgcagagccaccttaacaagtatagacatgatcctcagagtagcagggagccatggtggacattagaacagagggagaggtagtcggattcaagctttataaggagatgtccagccaggcatggtggctgacacctgcaatcccagcacttttggaggctgaggcaggaggattgcttgaggctgggagttgaagaccagcttgggcaacacagcaagacaccaccactcccatctctaaaattataaaaaagaaaaattatgaaaggtggcttggtgcggtggctcatgcctgtaatcccagcacactttgggaggccgaggtgggtggatcacgtgaggtcaggagttcaagaccaacctggccaacatggtgaaacmccgtctctactaaaaatacaaaaattagccagac

SEQ ID NO: 816445 - DNA, 555 bp, Homo sapiens
ttctctggcaatgtacagctaactctgcttctcatgttgtgtacttctcatgttgaaactgttacacactttccaggtactaattcacttggtcctcgccacccaccctgcaatctaggtattactgtaactctcattttacacaatacaaaactgagctcataaagacttaacaagctactcctagtcacacgtctattaactgaaggagccacaatttggacccaggcagtctggttccaaggcacctgctcttaaccccccaaatactcggccgacatctatgaatctgaactgcactacaggacaccacccagagcacctcatggaccctctaccccaaaggccagcagcactcctggggggatccccagagtattctttcgggacataggggtataatgggtcctgtaacaagatcttctccagagaaaagcgcagatgttgtggctctggggtggtgccccctcctccawgctgatgactaaggccagaggaccaactacttctagacctttatttctctgtgaaaagggggaaaataaaaggaataaa

SEQ ID NO: 816446 - DNA, 687 bp, Homo sapiens
cacaagcccaggaacacaaggaattgctggagccaccagaagtcctaacttccagagaggcatggaatgggtctccctcagagcctccaaaaggaacsaaccctgccgagaccttgatttcagacttccggcctccagaactgtgagagaataaattcgttgtgttaagctacccagttcatggtgatttgctgtggcagtcctagagaactattatatttggctaacacacataatagatctcacaacaagcatttacatgttgggacctcatttgatcctccagatcctaaaagaaaagcatggctaatatcctcttttcaccactttggaaagtgacgatcagagaggtaaagacacctaccaaagcaagcaccgagggagtgtgggatccaaagccagctgctctgatggcaggacagactgtgaaactctcccctcatttcttcatcaccacgaggcctctcctattattaatagctcccagcactgtcacaagaatggaatgagctcatgagtgtgagagtgggaggaaatgctttcatgagggggagagtgactaatggtcccacgggggacctttcttcctggatagaggcagaacaggtagggacagggcgaggttgaggagcaggagctcccttagcctgttctgttctgaggccctacataactgagacgaggtct

SEQ ID NO: 816447 - DNA, 578 bp, Homo sapiens
gaggagatgccaggcccctttaaacaaccagcttctgcatgacctaacagagtgagaactttttcatgrccacggggagtgcaccaagccatttgtgagggatctgctcccgtgactcaaacacctccactaggccccacctccaacactggggattgcatttcagcatgagatttggaggaaacacatatccaaaccatatcagcctcctcatatatggacattgaatggagtcctgagaaggatattgtctcactggtggccaaattaactttagactagaggctgttttggacctggctaacagtctgaaaagcaagccttgaaagtttcatactgtttcgcataacttaaatgcatgctaaaacaaaactcccaaatatttatgggaatataaaaaatgtcggcagtcagcaatgtagaattcataatgtttgacgtccagtaaaaagttaccaggcatgcaaagaagcagaaaagtaggacccaatcgtgaaaaaaaaatcatccaatagaaagagaaccaagatgttacagatgatagaattagtagataaggacattaaaacagctattag

SEQ ID NO: 816448 - DNA, 578 bp, Homo sapiens
gaggagatgccaggcccctttaaacaaccagcttctgcatgacctaacagagtgagaactttttcatgaccacggggagtgcaccaagccatttgtgagggatctgctcccgtgactcaaacacctccactaggccccacctccaacactggggattgcatttcagcatgagatttggaggaaacacatatccaaaccatatcagcctcctcatatatggacattgaatggagtcctgagaaggatattgtctcactggtggccaaattaactttagactagaggctgttttggacctggctaacagtctgaaaagcaagccttgaaagtttcatactgtttcgcataacttaaatgcatgctaaaacaaaactcccaaatatttatgggaatataaaaaatgtcggcagtcagcaatgtagaattcataatgtttgacgtccagtaaaaagttaccaggcatgcaaagaagcagaaaagtaggacccaatcgtgaaaaaaaaatcatccaatagaaasagaaccaagatgttacagatgatagaattagtagataaggacattaaaacagctattag

SEQ ID NO: 816449 - DNA, 608 bp, Homo sapiens
ctgccccagatgcttacccagggaaatcccttcaggcctaggctggaatcctaggacccagagacaactgaggcacgggccacaccacagataagcagcctccacccygccatggtgggtaagcgccaccagccctggcaagtctctccttcctacctatagcactgctttctaaacccaaaagtgtgctattgtcaggggtggctgcaggttatacccaccttgcctgggctctctgcaggggtcccgcccccagagagacacccttgagtccaggtcttcagccctcctcctggcaggttcaaagtaaggctggccagtgttcgggggagacagggttcctcatccacagctgaggcatcgaggctgagcctagtggagaagacagggtactggggcttcagcaggtcttgcccacctggctgctgccccaggcatccaggggggcttgaaagaacatgcaagggggcccttccaggacaaggaagggtgcgcaagccacagaaaggggtccagacctcccaatatgagaggagtgggtggcaagggggagaggacaaagaaagccagcctggttagatttgttggagctacatttgcatctcaga

SEQ ID NO: 816450 - DNA, 566 bp, Homo sapiens
agagactctgtctcaaaaaaaaaaaaaaaaaagtaaacaagagtgtctcctctccataaacaaattaacaggagaaactcagccccactaaaacacacacaaatttaggaaattgacaaaaacctaagagctgagaaaatatgggttctggagtctcagtgtttggcatcaagtcatggctccactttctcctcgctgtgcgactcctggaggggaacctagtgtgcctggtcctcagtttccctgtctgtagaatgggctgggaaaaactatgcagattcttggaaccagggtgacacaagcaaggcactggcctctggcataaaagttaaggcgtgccaaaaccgtcttcaagataagttatatatataaatatatatgtatatatggagagagagagacagagacagagagacagagagagacagagtcttactctgtggcccaggctggagtgcagtggtrcagtctcggctcactgcagcctctgcctcgcggtttcaagcaattctcctgcctctgcctcccaagtagctgggattacagccacccaccaccatgcccag

SEQ ID NO: 816451 - DNA, 566 bp, Homo sapiens
agagactctgtctcaaaaaaaaaaaaaaaaaagtaaacaagagtgtctcctctccataaacaaattaacaggagaaactcagccccactaaaacacacacaaatttaggaaattgacaaaaacctaagagctgagaaaatatgggttctggagtctcagtgtttggcatcaagtcatggctccactttctcctcgctgtgcgactcctggaggggaacctagtgtgcctggtcctcagtttccctgtctgtagaatgggctgggaaaaactatgcagattcttggaaccagggtgacacaagcaaggcactggcctctggcataaaagttaaggcgtgccaaaaccgtcttcaagataagttatatatataaatatatatgtatatatggagagagagagacagagacagagagacagagagagacagagtcttactctgtggcccaggctggagtgcagtggtgcagtctcrgctcactgcagcctctgcctcgcggtttcaagcaattctcctgcctctgcctcccaagtagctgggattacagccacccaccaccatgcccag

SEQ ID NO: 816452 - DNA, 593 bp, Homo sapiens
tagaggtcaagagggcaagttacgtcaacaagggtcaaagatcgaaatcaagtttggggtcaaatgtcagaggccagaggtctgactggagtcaatgggacttagaaaacagagatggaggccagaaaataaagtcagagttgatggaggtcagaggtcgagatgtgacaggttgagatggggtcagaagtcagtgtgggttagtcagtgtatcgggggtcagagattagaggtagagggcaagtcaggttgatggaggtcaaaggccagaggtggaggcccaaagagagcgttgtagtcagtggaggtcacaggtgggaggtcagggggccaggtgggggtcactatggccctacctcctcccgccggtactccggactcaggaaggcctcgtagcggctcctcaggaagcggcccagctccagctgctggcggaccccctcctggggacagaacagcctcagcctaccactccccacccctcccacccttgccctcaccgcctacccgcttctcacygtggtcagctggcccaggcctcgtggccacagggtggaggccacctccttgtgtgggtccatggggtaggaggc

SEQ ID NO: 816453 - DNA, 607 bp, Homo sapiens
acttccggaaggaggtggaggcgaccctcactctcccgccgtgcgcctgtgggaacattacccagaatggcctgcgttgggcgacggcgaccttcagccaatgaggcctccgaaaggtggtgtttccgtaagcgcacgcgcggtcgcggcgggacttccgttgtcctccttgtggcggtcgttttggcatttgtctggactgattacttggtagaaagccccggagcgctgggtcagcatcatccgtgactgactgagaaggcgcgagaggagtcttccccgctgcacagaggcgtggctgaggctcggcggcgcccagggtacccaggcccggcccggaataaggacatcctctctggccccgctccgctcacagagtcagatggcggcggccgagctgacggccccggcccaggtatgtgccgcgtcctctgggccttccccgccctccccacgctagtcctagcacccccgagggcgcttgctcgcggccctgctgcccaggacaggacaygggggctcgccggaggggctcccgtttccaacacctggtgtgctagggaagggagggcgcgactggcaaggagcccctgatgagaggcgccac

SEQ ID NO: 816454 - DNA, 558 bp, Homo sapiens
ctccacccaggggtgtggcttttttttttttttttttgagacggagtctcactctgtcgcccaggctggagtgcggtggcgctatctcggctcactgcaagctccgcctcccgggttcacgccattctcctgcctcagcctcctgagtagctgggaccacaggtgcctgccaccacgcccagctaattttttttttgtatttttagtagagacgggatttcaccgtgttagccaggatggtctggatctcctgacctcgtgatccacctgcctcggcctcccaaagtgctgggattacaggcatgagccaccgcacccagcccttatttatttttttctaaaatcatatttgaaaaaaggggatgtgtttcttagtattataatgagcaaaaggccattctaggatgaattattagaggagtgtgcacgmtccttaatagggaaaatcccctagctgggttatttctggctagggccagataactcccttcctgggccagacaagtccagccacaaggacaggtgtaggcaatgtagccactgtcctgcttttgctgt

SEQ ID NO: 816455 - DNA, 558 bp, Homo sapiens
ctccacccaggggtgtggcttttttttttttttttttgagacggagtctcactctgtcgcccaggctggagtgcggtggcgctatctcggctcactgcaagctccgcctcccgggttcacgccattctcctgcctcagcctcctgagtagctgggaccacaggtgcctgccaccacgcccagctaattttttttttgtatttttagtagagacgggatttcaccgtgttagccaggatggtctggatctcctgacctcgtgatccacctgcctcggcctcccaaagtgctgggattacaggcatgagccaccgcacccagcccttatttatttttttctaaaatcatatttgaaaaaaggggatgtgtttcttagtattataatgagcaaaaggccattctaggatgaattattagaggagtgtgcacgctcyttaatagggaaaatcccctagctgggttatttctggctagggccagataactcccttcctgggccagacaagtccagccacaaggacaggtgtaggcaatgtagccactgtcctgcttttgctgt

SEQ ID NO: 816456 - DNA, 493 bp, Homo sapiens
acttaatcagggttcagtagtggagaaccctttaaatgttttctaccagcagaatagatttcctgtgttgcagggagagttacagactttaacaggccatgtctaaggaatgggttaatgataggctcaagtccttctgttgcctctggccatagcgagtattgtttcttatgaaagaagtggaaggttttcttagctggattttgactgggactgcagttattgcccttcctagtgtatcaaagcccatatctcagggttatttgtgattccagatcaagataattcagcaatgtcatgggtgagtcttccaaaaaaaaagaaagcctttcagggaagttcaggtaaatgtgaagcgtgcccctagtttggagagtatatccctgccctaaagacgtatgggacattcagacaktatcaggaactcatgggaaaagattaattggtcttttaacaataaagaaggtgtaaatcttaggaagagatgccattt

SEQ ID NO: 816457 - DNA, 583 bp, Homo sapiens
aagaatcaggcgcagatggctttcattagggagggtttgktgtgggggcgtctgtgggtgcaactcaagagggagtgattatcagggtcccagagtaagggaaagatttctccaagaatcagagtgaaacacagcacactgacctgcggcccaaaggcttccactgggactgtccttgggaagataaagctgccacattcttgcagccaggccggtggcctctccctgtttattccaagataacagagtcacagagtcacaaggcagctggggagctgaggggcaaggtccttgaaacccgctgtggaacatggacctttctccagtgcagaggggccacggggccctgggaagggagttggagggttacagccctggtcatggcagggagacgcaggaactggaggcaggaagagctgtgttcatccccacagggtgcccctccgctcaggaatttgtgcaatagaatggggtgagctaatggggtcacatttagggaaaggagtctttctgtccacccaacacacatctcatcctatgcacacgcttctccctttccccattgtcctctctatgatgggaa

SEQ ID NO: 816458 - DNA, 586 bp, Homo sapiens
aagaatcaggcgcagatggctttcattagggagggtttgktgtgggggcgtctgtgggtgcaactcaagagggagtgattatcagggtcccagagtaagggaaagatttctccaagaatcagagtgaaacacagcacactgacctgcggcccaaaggcttccactgggactgtccttgggaagataaagctgccacattcttgcagccaggccggtggcctctccctgtttattccaagataacagagtcacagagtcacaaggcagctggggagctgaggggcaaggtccttgaaacccgctgtggaacatggacctttctccagtgcagaggggccacggggccctgggaagggagttggagggttacagccctggtcatggcagggagacgcaggaactggaggcaggaagagctgtgttcatccccacagggtgcccctccgctcaggaatttgtgcaatagaatggggtgagctaatggggtcacatttagggaaaggagtctttctgtccacccaacacacatctcatcctatgcacacgcttctccctttccccgttgtcctctctatgatgggaaact

SEQ ID NO: 816459 - DNA, 284 bp, Homo sapiens
ggggcctgggcagtggggaaggggtggggtgagaagggtaaaagtcgccctgggctggggtctgggcaacgggaaagggctggaagagggcggcgggatgggagggtggaagctgctatggtgcagcctgggctgtgggaagcgggcagggccgggaaaggagcgggcctgggctctctactcctcttggccccaggtcattttctgctatgtcagcctttctctccactaggactggatcawcagcattgcactgctaaaataaagtttcagctaattgaaat

SEQ ID NO: 816460 - DNA, 581 bp, Homo sapiens
ctgcctttccgtacttctcatctcatggctttatgccccacctgttaatactcagccccatgtaccctgcagaccctcctctgaggtctasaatcctgtgtctagttgtctccaaaactctctacagggatgtcccaacaggcatctccattttcatatgcctaaaagtgacttcttggctgggcacagtggctcatgcctataatcccagcactttgggaggccgaggcaggcggatcacctgaggccaggagtttgagaccagcctggccaacatggcgaaaccctatctctactaaaaatacaaaaaattagccgggcgtggtggcgggcgcctgtaatcccagctactcaggaggctgaggcaggagaatcgcttgaacccaggaggcggaggctgcagtgagccgagatcacgctactgcactccagcctgggcaacaagagtgaaactctctcaaaaattaattaattaattatttaaataaaagtgacttcccaaactcctccaaacatattcacccctgcagtcttgcacatctcagctaagggcaaccctgtacttcctggggctcagctga

SEQ ID NO: 816461 - DNA, 576 bp, Homo sapiens
ttttttatatggtgagagatagggatccagtttcattcttctgcatatgtttagccagttttcccagcaccacttattgaatagggtatcctttcctcattgtttatttttgttsattttcttgaagatcagttggttggaggtgtgggcctttattttaggggtctctgttctattccattggtatatgtgtctgtttttataccagtaccatgctgttttgtttactgtagccttgcaatatggtttgaagtcaggtaatgtgatgcatccagctttattccttttgcttaggattgtcttggctctttgagctcttttttgctttcatatacattttagaagttttttctaattctgtgaaaagtgatgttggtcatttaataggaatactgttgaatctatagattgctttgggcagtttggacatttcattgatattgattctttcaacccatgagcatgaaatgcttttccatttgttcgtgttgtctgatttctttcactggtattttgtagttctcctcatagagatagttcacaaccttggttagacatactcctagtcattttttg

SEQ ID NO: 816462 - DNA, 369 bp, Homo sapiens
ccgggccctgctgctccccaggcctccccttcgcagtcaccgcttcccctgcgcccgcgttggggaggtgcccggggcctgtcctgtgacacccggtgttcttgcctgcccagctccaccckctggaaaatgtgctcctccaggatccaggtgtcttactccaaaccctcctgtgaatgtgtgggccaaagggatcaggaaacagagaggggctgagagtgaattacaaaaactgagaggaaagaatgaaggaaacccataaacacatggcaaagtagaggatgggtcgggattcgcagagacgggaagagcgaaagaaggatccaggcgcggtggctcacgcctgtaatcccagcactttgggaggcc

SEQ ID NO: 816463 - DNA, 608 bp, Homo sapiens
aaaagtgtaagagaaggaacattcacctctaaacacacatactcaaaacctgaaaatccagatyaccagagaaggatttagccttacctagggccgaaatgaatttagagagccaagcaaaatataaaagcagaagcagtgggaagagccccataggcactcttgatcctcagggaagccatttctgactttatctcacaggggtccttgggaagggctgccagtggaattggggaagggctacagggagaagaaaacttccagctaaaccctgtaagaattttgacctagtgtcaatgttccttggcagaatcgatgaggggacagtgaatgagaagcacagatacgggcacaaaagccatggcaggtggtgaggggtggcgcctgaaagcccaggttgctttctcaatggggaggcttatagcctggggcaagatctcagtactgctcacggactggatataaacttggtgctgtttgtggggtagggtgtgaatgaaactggccttgctggcttcatgggagctgagtgaggcctgtcactgctggctttccttcacttccatcctgacctgtatgatacagcagaggcagccataatccccctg

SEQ ID NO: 816464 - DNA, 521 bp, Homo sapiens
agaggggctttcactctttttgcccaggctaaagtgcaatggtgtgattttgactcactgcaacctttgcctcctgggctcaagtggctctcctgcctcagcctcctgagtagctgggattacaggtgytcaccacaacacccagctacttttttgtatttttttggtagagacggtgtttcaccatgttggcaaggctggtctcaaactcctgacctcagatgatctgcccgcctctgcctcccaaaatgttgggattacagccatgagccaccatgcctggctggatttttttatttctgtgaataattcttctgccacatacttccatcactacattcaaatagaagcattgacaatggacacaatatagttttgtattggtgtctgaatttgatggagtaaacacctcttcaagttttcataaactgattttagaagcatttccttagggaactgtgtgggtttctttttttctttttcttttttttttttgagatggagttttgctcctgttgccc

SEQ ID NO: 816465 - DNA, 607 bp, Homo sapiens
cttccatgagttttggccaggagacttctcattcagttggaattgttacaaagttcaactggaggtttccttctccctgtggccttttcccagtgcctcttgcagccttccccmaggacccctgtgaggcaaggcagaaaatggcttgctaggggacccagagagcttttcccgctacccttgtttttcactcagctaatttttttttttttttttgagacagagtcttgctctgtcacccaggctggagtgcagtggtgcagtctccgatcactgcaacctccaactccagtgctcaagcgattctcctgcctcatcctcctgactagctgggattacaagcacatgccaccatgcctggctaatttttgtattttttgtagagacggggtttcaccatgttggccaggctggtctcgaactcctgacctcaagtgatccacctgcctcagcctcccaagatgctgggattataggtgtgagccatagcacccagcctcagttctctaaattgactgagttccaggtaaggtcagaatcttctcccatgatctagaccttcaggtttgccagtgacggtttgtgttcttggcagacaatcttcctt

SEQ ID NO: 816466 - DNA, 371 bp, Homo sapiens
gatccctcttctggtccccaacccctggcccagtaccagtccatagcctgttaggtactgggctacacagtgggtgagcagcscttcgtctgtatttacagccactccccatcactcgcatcaccgcctgagctctgcctgtcagatcagcagcagcactgcattctgaaaggcatgcaaaccctattgtgaactgcccatgtgagggatctaggctgcatgctacttacgagaatctcatgcctgatgatctctcaccctctcccatcgccccctgaagggaccatctagttgcaggaaaacaagctcaggggctcccaatgattctacattatggtgagttgtgtaattttttccatgtagtaataata

SEQ ID NO: 816467 - DNA, 371 bp, Homo sapiens
gatccctcttctggtccccaacccctggcccagtaccagtccatagcctgttaggtactgggctacacagtgggtgagcagcgcttcgtctgtatttasagccactccccatcactcgcatcaccgcctgagctctgcctgtcagatcagcagcagcactgcattctgaaaggcatgcaaaccctattgtgaactgcccatgtgagggatctaggctgcatgctacttacgagaatctcatgcctgatgatctctcaccctctcccatcgccccctgaagggaccatctagttgcaggaaaacaagctcaggggctcccaatgattctacattatggtgagttgtgtaattttttccatgtagtaataata

SEQ ID NO: 816468 - DNA, 371 bp, Homo sapiens
gatccctcttctggtccccaacccctggcccagtaccagtccatagcctgttaggtactgggctacacagtgggtgagcagcgcttcgtctgtatttacagccactccccatcactcgcatcaccgcctgagctctgcctgtcagatcagcagcagcactgcattctgaaaggcatgcaaaccctattgtgaactgcccatgtgagggatctaggctgcatgctacttacgagaatctcatgcctgatgatctctcaccctctcccatcgccccctgaagggaccatctagttgcaggaaaasaagctcaggggctcccaatgattctacattatggtgagttgtgtaattttttccatgtagtaataata

SEQ ID NO: 816469 - DNA, 572 bp, Homo sapiens
acctggccaacacctcccccaaggcgtcatcagagaggctttccaactgtgagggctcactggggccccggcctctggctgtgagcatctcactgattggggtgcgaggttggtctcttcccacctaaaggggagttccaggaggagcagtccctcctgtttctgctgacccctggggctgatggcctagcactaggacaacagaataaggcccagacgcgcactgagccagagatatggagctggcctgaccacgctgtggagcccgtgctggtccctcaagcctccagccacctgcacgcggggcaagccaggccaggtgagacacagccttgcttacacgccagctgcgtctgagagcagagaacccctgctgtcgccttctctcctggacgcaatctaaaacaatctcaacttacaaaaaacctgcaagaacagtacaaagaacagccatattctgtgacgtttctgccacctgcccctcscccccacccacgcctattatccacatacttagatgtagcaacacacttgcttcttgaaccatttgagggccggctggagactttgcc

SEQ ID NO: 816470 - DNA, 607 bp, Homo sapiens
aggcctgggtgtctattggggatgtctgtcaccaaaatatctttgggcgccaacactgtggagtcatggcttcagccgggaagaaagtctgaagctttaatcttctgttagtcattggttttctttactccatccatttgttttcacttttaggtttaatttttgtttatttccttaaccagacttctagcctggcccacagtagactgacctgacttttgcttttcagttttgaaagtcctagcgtttttccccctaactccgtttttgttgatttgttgaaaaggtttgtccagaggggttgcgtttatccggtttgacaaacggtcggaggcagaagaggcaattaccagtttcaatggtcataaacccccaggttcctctgagcccatcacagtgaagtttgcagccaaccccaaccagaacaaaaacgtggcactcctctcgcagctgtaccactcgccagcgcgacggttcggaggccccgttcaccaccaggcgcagagattcaggtgggtcgggagggtgcgcgctcctgaaagccatacttarccccgctggcaggcgacggcacagccacagaatagaaaccacggggatgatagac

SEQ ID NO: 816471 - DNA, 613 bp, Homo sapiens
ctcttatggattttctccatttcagaagcttgtagggaggctgttttctgactgattgatgatgagaagcatggccataggagtgaagcaatggctgtttggctgattttcagagcctgtgtgtcgatacaaagtcgtctgggaatgaacaatgcttactcatttacaactcggaaatgtggccaaaaaaatagtcttttactttcttaaatatgaaaaataagtacttttaattctcagtttcctcttttggtcttctcttagccaaatctgcaggagagacaatgagggattgtccagatgtttatttccaaaagaatgatttctagctggtgttgctatttaagtaatttaagtactaattatgggtgcagaaaaatagctctagctgctgaatttttctaatttattggggggaaaagccaaatacagggcatttaatgtgttctgacaaagtcaatacaggacactggatatgccctgtatgcaaataatgcctggcaaccctacccaaacmcaatattctagttgtcacaaacattaaacgttttatgtaacagtaataagattttctttgtatagtttttaaaaaaatatcatttgaacgaccttg

SEQ ID NO: 816472 - DNA, 626 bp, Homo sapiens
acttttacttcaaaatttaaaatttcatcttactgaaatgctttagttttgtaaactatccatgatattttttgctttggaatggtttttctcaaataatgcggcatggattattattatccgggggatagagccctggagtgagaacttgttaaaaagtgcaccctcctaggtcctagcccaaacttaaggaatcagcaactttgggggtagaagccaaatcagcattttaactatgcctcctaaatgattcttaagcacactaaaagttgagaacgactcctataggagtataaaaatagatacacgtttagaataaaaacctgaaacatagtttaattttattttctttttgtttttttaaatacaaatttatgactctcaaaaccagcacttctgaaagtatggacaaggggatgcttagggacctcccccaccacaagtccttttcatagagtccacaagatcaaaactgcttttgtaataatactgaaatgttatttgactttttctattcattctctcatgaatgtgcagtggaattttccagaggctaaatgacaaatgctatcataacaaamaaaatgcagaagtagataggaggatccagctttcttctattaagc

SEQ ID NO: 816473 - DNA, 626 bp, Homo sapiens
acttttacttcaaaatttaaaatttcatcttactgaaatgctttagttttgtaaactatccatgatattttttgctttggaatggtttttctcaaataatgcggcatggattattattatccgggggatagagccctggagtgagaacttgttaaaaagtgcaccctcctaggtcctagcccaaacttaaggaatcagcaactttgggggtagaagccaaatcagcattttaactatgcctcctaaatgattcttaagcacactaaaagttgagaacgactcctataggagtataaaaatagatacacgtttagaataaaaacctgaaacatagtttaattttattttctttttgtttttttaaatacaaatttatgactctcaaaaccagcacttctgaaagtatggacaaggggatgcttagggacctcccccaccacaagtccttttcatagagtccacaagatcaaaactgcttttgtaataatactgaaatgttatttgactttttctattcattctctcatgaatgtgcagtggaattttccagaggctaaatgacaaatgctatcataacaaaamaaatgcagaagtagataggaggatccagctttcttctattaagc

SEQ ID NO: 816474 - DNA, 544 bp, Homo sapiens
cctcagtctttcggcagatggcctgctggcgtgtaagcaggaaggtaaacgcccccagtttccatccctcacagcargcacctgtctgccctctcacgggactcccacttcctggccaggctgctatggaaattccactcagtgtccagaactcacctgtagcctcactttctctagtaccatttcctggggccccagggtgaaggcacccccgctttgctctcagccccctgcgactcccacagcacttcccacaggatagcgtgactatctggttatgggtccatcaccccattttattgtgcacaccttgaggcaagtacagggccttccttaatttgacattcccaggacctgggcctgacccgtggaaggtccatggtgaagactgttgaacagtaataatagttgtaacaattgccattcactgaatactccttgcattagacactgcgtgatggactttatttatattattttattgaatcctcatagcagcctcaataattaagatcaaacactatccccatttttatgaatgagg

SEQ ID NO: 816475 - DNA, 554 bp, Homo sapiens
tccagggatcctcctacctcagcctcccaagaagctgggaatacaggcatatgccagcatgcctagctaagttttttgttgttgttgttgtttgtttggttggttggttggttggctttttattttttatttttttattttatttatttatattttttttttgagaaggagtcttgctcttgttgcccagactggagtgcactggcatgatctctgctcactgcaatttctgcctcccagactcaagcgattctcctgcctcagcctcctgagtagctggtataacaggagccctccaccattcctggctaattttttggtatttttagttgagatatggtctcaccgtattgcccaggttggtctcaaactcccaacctcaggtgatctgcccgcctcagcctcctaaagtgctgggattataggtgtgagccacagctaatcttttaaatattgtttttttagtgatgagatctcactgtggtgctcaggctggctttgaactcayggtttcaaatgattctcccatcttggccacccaaagtcctgggaat

SEQ ID NO: 816476 - DNA, 458 bp, Homo sapiens
tcttgtgtttaccaaaggcatggayataactcttttggagtgtcagcattctaaaatcaatatcccaaaaggcctgtaaacacctggagattcttggcttagcacgaataattgaaagtatggaagaaagtgacagctgtttaaatattttaaagccattcaaaagagatgctctcttagtctgctcaggttgccataatgaaatgccacgaactggtggcataagcagctgaaatttcttttctcacagttctggagactggaagttcaaaattaaggtggcaacaggaccagggcctgttgagtggtttctctttgggttgtgaattgttgactgtcactatgtcttcacgtggctttttctcgatgtatttgctcagaaagagaaaactttgctgtctcttcctcatcttataagggccttaatctcatcataacagccccatcctcatgacctc

SEQ ID NO: 816477 - DNA, 392 bp, Homo sapiens
ttattgttcacaacaacattattcaacagtattcttaggagttactgtttcacggcaacattagtcaaaatagttcatyaactgagagtggataaacaaaaatggatgaacctcaaaactgttatgcaaattgaaagaggccagatgaaaaagatcacattgtaaatgatttgattataagaaatgtttaataagagaaatacatagagacacaagtaggttagtaggtgaggcatggtgttggcatgggaaattttttcaaagtattagaaatgttctaaacatgtattgcagtgacaagagcaagacactgtaagttattaaaattttgtatataaatgtcacatattcaaataccatttttatgtatacacaataatgtaagaatgata

SEQ ID NO: 816478 - DNA, 392 bp, Homo sapiens
ttattgttcacaacaacattattcaacagtattcttaggagttactgtttcacggcaacattagtcaaaatagttcatcaactgagagtggataaacaaaaatggatgaacctcaaaactgttatgcaaaytgaaagaggccagatgaaaaagatcacattgtaaatgatttgattataagaaatgtttaataagagaaatacatagagacacaagtaggttagtaggtgaggcatggtgttggcatgggaaattttttcaaagtattagaaatgttctaaacatgtattgcagtgacaagagcaagacactgtaagttattaaaattttgtatataaatgtcacatattcaaataccatttttatgtatacacaataatgtaagaatgata

SEQ ID NO: 816479 - DNA, 603 bp, Homo sapiens
ttacctcaggtgatctgcctgccttggcctcccaaagtgctgagatgacaggtgtcagccaccacacctggcctggatcattcttatgtagacaaatgcagatatattgcatcatcataagcttaatccacaaaaaacacatcaaggcagagcgtagtttatttcagaaataaaagattggttttgcagccataaattgctctaattcagcatatgaaccaaattaaataaaatatatacacgcatatacatacatatcactccagatgaatgtttaaatcactgatttttctaacttttcattatttcatataaagtccttgaacagttttccttaaagtacaactatagctatattctgcctattttccagtgtcgtatttccatgctgtttcttaaattcatatactgattacatgctatggtacatcatctcacacacgtgtttagaaatgtacagtataatttggaaatattcagaaatttttaaaactttttgttatttctagataattctaaagtagtctacatacactatacatttagtcctktgacatttgatgatacataccatgtatctcttttatttacacctatatatgc

SEQ ID NO: 816480 - DNA, 624 bp, Homo sapiens
aaggatttttaaatgcactgtagtcatatcaactctctagcatacatgatgagcatgaaaataccttttctctaacttgtatgctggttcgtrggtgtgcaattgggaagggagttagagttgcaggtttaatagataacttcagttgcctagagtagtgtattttttacatttgtccttttgttgttaattgtaaactttgtgaatcagttttccctttaaatttcttaggtaaaaatcaacccaaggcagtgattaagaaaaattgagaaaatttaattcaaatcacttgagccaaagcttaaggcagttgaagtaggatggaaactgaggaaatgctacaggtgatcattgcgggatgaaagtaagaggggatggttgatggaaagcctagtttacttctcaggttagtaactagctctgcaccagcctaagaggttgttctcagatcatggtttgctttctatggttcagatataaagagtttctaccgtttaaaatgaataccatcatatatgttctccagttggtctgtgtgtacttcaaacgactatatcctttttaactcattagtaagcttctgaatggttattttcatatttttaaaattacctcaagtatata

SEQ ID NO: 816481 - DNA, 705 bp, Homo sapiens
gtgggatccaacaggaaggccaagtgggcatacattcaaacccctatctcatttcatcacactagctcaatttttatctatattacacattggattccatattataatttatttgataaaacrccttctatggtcaaataatgtttgaaaactagaaaacctctaagattcaagtctgaatatgtgacccagggtgatcccaaagcctacaagtcctccattctttcagggtcccctttcttttactatttaaatactgatgtgatgttgactgcaagacattctgtttcctatcccaaatttccaagaattcctgtaggcaattacattttcctggttaacacctctgacctcctgcttccaaatgctcctcctcacccctagccatctcatcattacttcttaatgttcccctaggcccatttggtctgcatcatcccaaaacatggacatggtgctcctttgattccttaaggcagtgctaacacaaggctgccatcgttagtggttaacatggcttttgtttaagacttggggtgactgagggcaagttttcatacataaaacttcatacataaacatgaagctggatggaaaacatccagcattgtaaggagccccttctgaacttttcttcaccccattttcctgcatattgaacagactactccattttatattattctgtaagttttagcctctgct

SEQ ID NO: 816482 - DNA, 611 bp, Homo sapiens
gttaacaaattatttaaacatagtatgctccttagagagggaaataactgggagggcctgagggaagaaaggaaaaagtaatcaggaaggcttcatggaggaagtgatattgaactgagattytgaagagtgaataggagtacacaatgccattaaactttaacaaaaattctcagtaacccatggttaaaataaagttaaatccctaaaataaagctaaatcataaaaacatgaaaaagcaagtttatatcagggatttagcttttaggataaacagaggaattcagcatatatttaatccaggttaggatacttccctccactatgcaactggtcttcctgtccagacttctgccctttgagatgccgtaagatctcatagtccccatctgtaacagagataagaaagtgaagtcacattttgtggaaagcttttctaaattaaggggttaagacaaaaaagattttggcttcattcacagttaactagaaacttccattaaccataatgacccattccccaagctggctggctaatggaggtcctgctgcattcgtctttttgttttgcttccttcctttcctttgctcccaggctctctatcaactg

SEQ ID NO: 816483 - DNA, 609 bp, Homo sapiens
aacaagctaaaagatatgaatctttacatcacatagtttactcctacamtcttgtatagatgacacaggaaaatgttgacaaacaacaactaaaactaagctgggagaacactgattgtgtctagtgatgctgttgtacaggtgagggcttaggtaagcactcagtttgttttatggtggagctactttcagtagcaacatccgtatacatcctagatttcagatgattaaaataaggcaatgttaatttatatttatatcacaaatctatagtgcagaccaaattgattaatttgaagtgaacttttaagaccttttaaaaatttgcaccatatggtaatcttgctgtaaaagaccacacctaacatagtgcctacctagtacataatttgagctcattacatacttgttgagtgaataaatcttgacttaaaacagatgatgccccaggcaagcaaaccactcctgttagcaggctgctctcaaataaccatactcactcttttgagttgtatttttactaaggatcagttgtgattgttccaggacctttttatactagttatacttgttattgctgtaacatgatttaattaaatattgcttaag

SEQ ID NO: 816484 - DNA, 501 bp, Homo sapiens
aaaccattctgcttttcactttcaggagatattcaataaactacatgagatattcaacactttattataaaattagctttgtgttagatgattttgcccaactgtaggctaatgtaagtgttcccagcatgtataaagtaggcaaggctaagttatgatatttggtaggttaggtgtattgattgcacttcgacttacaatattttcaactcatgatgggtttatcagatgtaaccccttcataagctgatatggtttggctgtgtacacccaaatctcatcttgaattcccacgtgttgtgggagggacccagtgggagatggttgaatcatgggagcagtttcccccatactgttctcatggtagtgaatgagtctcacragagctgatggtttgataaggggaaatctgttttgtttggctctcattctctctctttgcctgctgccatccatgtaagatgtgacttgttcctccttgccttctgccatgattgtgag

SEQ ID NO: 816485 - DNA, 443 bp, Homo sapiens
caggaggcgcccacggaggatgaggccacctctaatcccattcatctctatatcctgggccaccaccagcctggctacagggcaggggaaacatggggaccttgctgaatttaaaaatgggctggagactcctgttaaccagaacagagggccctttaatagacattgtgattttattacctgtgatcaataggaaaatcaggtgctgaagaacccaccaaatgtagtaaacaccaggagaagagataggaaagccagtgggccatgagacttgttgtgtagccctggaaggcccactgtgccctgaatatttccaggaagatgggagtggtgatgtctagcacctcatctgccacctggyaccttcttcttaatgccaacttcaaatccgctacagaaaaatactgttccaaggcttctcactgcaggttgctttgtgttct

SEQ ID NO: 816486 - DNA, 362 bp, Homo sapiens
tttgtttagttgccttgattggcaatatactgcaattaaaacaccaaataatatgtgcaaatatatcattaattcatcattaaaatttgaaaacattgtatgatgatgtattcttttacaaggagtatacattaggcaagtaaaatactaattattaattgaaacatattatgaaaagcagcatatgttaaaattgagtgaaccaatagataatatccatatttatttatttctatgtctttctgagtaattgtacataactgaattyaaattaatcagaaaaagctgctacatttcagatataagagtaattttctaatgccttaatttcaaatactgtgcatccgatttgttggaactgg

SEQ ID NO: 816487 - DNA, 509 bp, Homo sapiens
tggtgtctcatgcctctctaaaatatgtaaaaccaagctgcatcctgaccaccctggggacatgttctcaggacttcttgagggctgtgttatgggccatggtcattcatatttggctcagaataaatctccttaaattttacagagtttgactcttttcattgacagcaataatctttttgtgatgaatttcccaggtgttctttgtgatgcttgtatttggatgtctaggtctctagcaaggccagggaagttgtcctcaattattcccccaagtttttagaattcttttcttcctcaggaacactgattattcttaggtttggtcatttaacataatcccagacttcttggaggctttgttcatattttcttattcttttttttttgtctctgttggaatgggttaattcacagaccttgtcttcaagctctgaatttctttcttctcctgttcarttctattgctgagactttccagagcatgttgcatttctaaaagtgtgtcc

SEQ ID NO: 816488 - DNA, 611 bp, Homo sapiens
gtaattgcagcacttcgggaagctgaaatggaaggatcacttgaagcctggagtcaagaccagcccgggcaacaaagtgatgagacatcatctctacaaaaayattttttaaaaaacttggtctggcattgtgacatgctcctgtagtcccagttacctgggaggttgaggttggaggaccacttgagctcagaatttgaagctttgtgagctatgatcatgccactgcactccatcccatatgagagactaagaccctgtctcggaaaaacaaaaacaaaaacaaaaacaaaaaacaaaaaacaaaaaattaccagaaagcaaaaaacaaaacaaaactgggaaaagataaggatgcccactttcacgatttttattcaacatagttctggaagtcctagtcagagcaattatgagggagagaaataaaggacattcaagttggaaaggaggatgccacatcatccctctttgcagatgacataatcttatatataggaaaacctaaagactcaaccaaaaactcttcgaactgacaaaagaattcagtaaatttgcaagatctaaaattaacatacaaaaattagtagcattgctatacatgaacaaca

SEQ ID NO: 816489 - DNA, 615 bp, Homo sapiens
atagcagagatggaatgatcckgagtgcattatgccaataaaccactcaattacctctaagctttgtgttatatgagagaatacactttctttatttttaagctgcttgagttgggttttctttacttgctgctgaaagtatcctgacaggtaagtgtgtagtgtgtatgcatgtgggaatgcaaggaggattaaatacagtagaagtcggagtgaaaggaaggaaatagttaaggtcatccctcatgaaatggaagggatatggcagcatacgttaggtggtatgtaagctgagaacaggtggaaaacagcccacatctacctggattttcctctgtacctcctgccatacgtttatttgccctgcatggattgttaaaaagtaaagggaggcacagtaaaattttaaagagtttatttgagcaaacagtgattcatgaatcaagagtagcagtttcaaaccagaagtggttcaggagatccacagagagaatacaagtgggaggcatttataggacaaactcaaaagtaatgcaaagaaaatatttgattggttgcagtcatacagttgccttatttggtgtatcccattggaaaatgcctagttacataagt

SEQ ID NO: 816490 - DNA, 568 bp, Homo sapiens
tcatagagctcttccaaaatggtagaagactcttggcattcacagtcaatggctcatcaataaatcagcttgtgggaaagtttagaytgcctttgaaataaaagaagaaaaagagagataaggtttgatgtaccttattttaaaatctacgatatggtcatgttggatataacagcaacaacaaacctcaccacatttatcccacagaaatcatcattttattgattgacatccctttgcatattctatctaccaactcttgcaactgaatctccgtttagtgctaacaaactgtcaagctttgctctccttcaggactgggagtgtgtgacactggccttctagggacaagtcagaaatgcctctctcatatgcctcatgtagttcttgcagaattagtttttttttctaccagtgcatatgtgctcctgctccctcttccttaccctttcattttcatctgaactttgtagacatgattttaacagagggtctccattctatgaaaaagtaaatgagaaactacttatgctgacacttgtcaaagaatatgtaaaaagaaatatta

SEQ ID NO: 816491 - DNA, 545 bp, Homo sapiens
tatgtttgggggaaagtaagggaagattaaaagaatctctgcctggtaatccagataattcttctggatcttgtccaagactatcaaggcagtacctctgcaagaaccacagtgttgctgggcttggggtgctcctgaaacagatacagcttagatcatgacacttaagtcctttcgaatatataaaaagcctccccccaaaaaacagctaaatataagcccagacagtgaagactacaataaacacctaactcctcaatgcccagataatgaagaacatctgctagcatcaacgccatccaggaaaacataacctcaccaaatgaactaaagaaggcaccagggaccaatcttggagaaacagagatatatgacttttcagagagagaattcaaaatagctgtattaagaaaattcaaagaaactcaagataacacagagaaggaatttagaattctatcrtatacatttaacaaaatgactgaaataattaaaaagaatcaagcagaaattctggagctgaaaagtgcaataggcatacagaa

SEQ ID NO: 816492 - DNA, 595 bp, Homo sapiens
tctctgataactaatacagctcccattgtatctgattgcttcttccttatgagacactcagcaatgctggaaaatcagttaagaatgtaatcttttgttaaaactgtatcttctctgcataatttcagtgtgtttataatgtattgttctttcatagttgaccaatcaaacttatctgcaataagctatttctgtatgagatgatctttgtattctgaaatcacaagtaacttttaatgaattattttacatctagatgtaagcctatcgtatactgatggatggcataggccggggcatacaatggcttaaaacagaaagatgttttgagaagatagactgaacagatgacttttgcctttatgtcagcagcttcttttctaggagggaaaacaggccatgtagaacggatcattgattccacacaatatgaatcaaaagcagaaaaatgcagtgatttaacatggtatcaaccaatcaagaatgaatatagaatcaaccattgaaacttgggccttactgccagagcatctgagctaactgtacatttccttaccccagcagatggatcckggctctgctggagccatcctcc

SEQ ID NO: 816493 - DNA, 702 bp, Homo sapiens
cttcctgctgggatcctaattgatacctttggtactactgctttgtaatacatgcctatttatrtgttcctccttaggcataagcataaggttttgatttgtgtttagtttgcattcagaactctctgagaattaggtctgatctagctgaaggatgcctgctgtaaattcatgcagtaactatagtgtaagagaaaccatgatctttgaggatgagctacccctgggcccaaatctgaccacttggataaggggatgttaagactgacatagggatagctgtgtggtgttgagaaatgattgcagtggtttccaggactcaatagaagttctatgaataagttctagagatcccttatacagccttgtgcctagagtcaacaacattgtattttacacttaatctgttaagagggcagatcttcttaggttcttttaccacaaatatttttaaaaacagtcctgttacacatattatgctaagttttgattaaagtatgaactaaataaagagataagctaagcaccatatctagtgttgccagataaaatagaggatgcccagctgaatttgaatttcagataaacaacaaataattttataaaaaaaaatcattggatcaaacaaataatttttaatgtagagctatccaaaatattgcatgggacatatttatacgaaaaaagaaatcattgtttatc

SEQ ID NO: 816494 - DNA, 607 bp, Homo sapiens
catatgacaggcgacaagtgctgcttcacaaagaattcttttccttacctttagttttgaaactgaaaatctcagagccacctactagactagcacctggtcctaraaattccagaagctgtcaagtccctttgctcaggccctaatggaagggctactctaaaggatttaaagaagtccgacctgtagttcggcaaattgatcccgtaaagcttcaattcctcctaccctaaacattcctgatataattcctgcttagactgatggcaattgacatacattgaattatgaaacagctttgggagccatttgtaaactgtaaatgaagtgtgctctcctattgccccacctgggacaaattgccaggtgagtttatcataacaccattgtatccatgtgtttgtcatttggttaggttaaaccaatttgtaaataaagaaagaaggctgaaagctgaaggtcaaatactacatcttttttttttccatctttgactactgagtggttttggacctttctctgcaattcatttagtgtagagcaaatcctgcataaaaccagtatgtaaaattgactgattcggaggctcttctgagcatgaggtttc

SEQ ID NO: 816495 - DNA, 571 bp, Homo sapiens
  misc_feature 156: n = A,T,C or G
cgcccaggaggggacaaaggtacccccagttgagaaccattgctagtccatcccctcattttttttttttttttttttgagatggmgtttcactcttgttgcccaggctagagtgcaatggcgcgatctcggctcactgtaacctccgcctccagngttcaagcaattctcctgcctcagactcccaagtagctgggattacaggcgcctaccaccaaacctggctaatttttttgtagttttagtagagatggggtttcactatgttggccaggctggtctcgaactcctgacctcagttgatccacccgcctcagcctcccaaagtgctgggattacaggcttgagccactgtgcctggccccatcccttcattttatagttgaagagaaattcagaaaagatcagtgacttcgcccctggtcacccttgctctgatgagagagcaggaacacgtcttctgattcctgtaagttttctctctctaagttctgggtcaaccagtggactctaaagcagggtggtggtgcatcgccggggacagcaagacaatccactgagatgccagaag

SEQ ID NO: 816496 - DNA, 571 bp, Homo sapiens
  misc_feature 156: n = A,T,C or G
cgcccaggaggggacaaaggtacccccagttgagaaccattgctagtccatcccctcattttttttttttttttttttgagatggagtttcactcttgttgcccaggctagagtgcaatggcgcgatctcggctcactgtaacctccgcctccagngttcaagcaattctcctgcctcagactcccaagtagctgggattacaggcgcctaccaccaaacctggctaatttttttgtagttttagtagagatggggtttcactatgttggccaggctggtctcgaactcctgacctcagttgatccacccgcctcagcctcccaaagtgctgggattacaggcttgagccactgtgcctggccccatcccttcattttatagttgaagagaaattcagaaaagatcagtgacttcgcccctggtcacccttgctctgatgagagagcaggaacacgtcttctgattcctgtaagttttctctctctaagttctgggtcaaccagtggactctaaagcagggtggtggtgcatcrccggggacagcaagacaatccactgagatgccagaag

SEQ ID NO: 816497 - DNA, 563 bp, Homo sapiens
acctgaggtcaggagtttgagaccagcctggccaacgtagtgaaaccctgtctccactaaaaatacaaaaactagccaggtgtagtggcacacgcatataggtattacataattactgkttttgaaagatttagaataatacttggggttttcattattatatttaattattatataataattataagtaatgataataattgggtttgaaagacttcgtaattcaaatatttttaaaatgtaaagcagtaattgtcctgagacacagtgcagaaggacctctgaagcagcccagagtttggaagcaaacccgcagaccgcactgttaatgggtttgacatttctgaagaatgagtagtgttccttaaagttatctaagcccccaaggaggtttacatttccatatgcaaccctaagagaaacacatattttagtcaccttttatcctggtttctaaagagaggacactcaaatagccttttggtcttactgatgtcactacatttggtagtggcacagaaagccattgctacactggatccaaaaataatgatataaaaacg

SEQ ID NO: 816498 - DNA, 563 bp, Homo sapiens
acctgaggtcaggagtttgagaccagcctggccaacgtagtgaaaccctgtctccactaaaaatacaaaaactagccaggtgtagtggcacacgcatataggtattacataattactgtktttgaaagatttagaataatacttggggttttcattattatatttaattattatataataattataagtaatgataataattgggtttgaaagacttcgtaattcaaatatttttaaaatgtaaagcagtaattgtcctgagacacagtgcagaaggacctctgaagcagcccagagtttggaagcaaacccgcagaccgcactgttaatgggtttgacatttctgaagaatgagtagtgttccttaaagttatctaagcccccaaggaggtttacatttccatatgcaaccctaagagaaacacatattttagtcaccttttatcctggtttctaaagagaggacactcaaatagccttttggtcttactgatgtcactacatttggtagtggcacagaaagccattgctacactggatccaaaaataatgatataaaaacg

SEQ ID NO: 816499 - DNA, 521 bp, Homo sapiens
gatagaaactcattcaagttaataaacctaattttctctagaaattccccagagtctcattgtgaatctgacttgatagctccccatacctcttcctaaaaaatagagatcgccgtgccactccgtccagtggtttgctctgcctgtctttgtcacacatagagttctgctatagcaactcatgaaaggatctgtcttctgtaccagcatcctacctcaaagtgatcaaacctctatgcatttaattcatatttcatatttcatatcaaaatatgccctcagtagtcactgaccccagcagttccacacctcccacctcgtttcagggcctacagtatttctacaatagtcttgacaaccctttcaacccttgtatttagttttcagaaactttgttgacttcttagtttcttttttttttctcctttgacttactataccatgcagggatttaaactcctttttcaggtcatrgtgctttaatttattgggttttttttcctgaaattgtttactgaaat

SEQ ID NO: 816500 - DNA, 521 bp, Homo sapiens
gatagaaactcattcaagttaataaacctaattttctctagaaattccccagagtctcattgtgaatctgacttgatagctccccatacctcttcctaaaaaatagagatcgccgtgccactccgtccagtggtttgctctgcctgtctttgtcacacatagagttctgctatagcaactcatgaaaggatctgtcttctgtaccagcatcctacctcaaagtgatcaaacctctatgcatttaattcatatttcatatttcatatcaaaatatgccctcagtagtcactgaccccagcagttccacacctcccacctcgtttcagggcctacagtatttctacaatagtcttgacaaccctttcaacccttgtatttagttttcagaaactttgttgacttcttagtttcttttttttttctcctttgacttactataccatgcagggatttaaactcctttttcaggtcatagwgctttaatttattgggttttttttcctgaaattgtttactgaaat

SEQ ID NO: 816501 - DNA, 591 bp, Homo sapiens
actatagctctgcattattaaaatatacagactgtgtacaccattacacatcctttttccctttgctttttaatgctcatgaaaccatgattaargtgttgagtttatgaacacatgcacgaacaggcaagcacgtacacttaaaagatgaaacaaagaaaaaagttgattcatgtcattccatgagaaaggctgcccgcagcactccagctcaaacacactgtcccctcgagctctccatcccccttcccactccctcaccttccctcagattcggggaaatcaggttgggaggttagtgcatcattgacagagaatgccccccttccacgctctgttaagtctcccccagaagggggaaaggcagttcccttcagtagcacagttacggtcgattagtgttggttccacaagttaaggcacttccggctgctttggtggcagcgtggttcctcccctccttttttaaggcatgtgtcctctaagagtagtaaagctttggaaactgtgcagactgttaaagttgacagcttaatacaggatcaatgaaggcggcaggcaaaaggatcctcggagacacctccctcagac

SEQ ID NO: 816502 - DNA, 612 bp, Homo sapiens
actcatcttccacacacgagaggcccgttctgctcatgttaagcctccaagcggtggatgctgacctgaaccctgctmgtctccacgctaagcccccttttacacagtggctgggggctgacatttctgctgctaacaaggcctccagaaaactagtcaagtttattcttctccataaactccaatacaagtgccttatctgatgcaggtgcttcaaaaacacatgaagctggagtcaaaggctctgcagacagccattgggcgccactcagtccccatctcagacctggcctgacgatgaaggggcaggaggcagaaggagttgttgctgggttcatgagatattactatgtgcatggcaagaccttttcttaaggaattgtaaaagagaagtcaagaaaaagagaaacgcgaccaactaattttaactcttctttaaataagccataccataaggaaagtgaatcctattagttggaaacaagaaaatcaataaatacctgctttcaagaatagctcgttcaacacaggatgtcttctcctttaaggacaattccaaagactgttgactgatgactgacagaaacttgaggatcaatttagtgctttcgg

SEQ ID NO: 816503 - DNA, 568 bp, Homo sapiens
agatgcagcaatgtcctcgggtgagcagagaggagggatccatgacacacctgaaggaaaaggaatctgatacgagcagggcctttggtgcacaggacacgctagcctcccagcagcacacatcaaggctggcagttttctagatccagcccatgtgtcagcaaacaatggtcctcaactctgacctgctgcctgtttttataaataaagttttattggaacacagtgcaggctgtgcgttgcatactgagtgctttcacactacaagggcagagttgattagttgcaacagaggtgcttttgcccacaaagcctaaaatatacactctttggctctttacacaaaactttttgctgccatctataacactacttagaaatcaattcccttgatccacatgattttctcaaaatataaatcggatcattccttcaattgttagatgaacttgggaaacttctctactgcctaaaagattaactccaaaggtcttagcaagccaaacaaagcccttwtgtttggaagctgtaccagaaagtaggattctgttctggaaatacagacttc

SEQ ID NO: 816504 - DNA, 622 bp, Homo sapiens
caacaagaaaactagacagaaagtccaaacatcctgagagcatctataccatattatagcaatttgtaatattttatattcatagtatcagccaggaacatcaagcaaagtattgttwtgttcagtataacttttcaaatgtaaataagtccatacaggttgagtatcactaatccgaaaaccaaaatctgaaatgctgtaaaatctgaagctttttgagcaccaacatgatgctgaaaagaaatgttcatgggggcatttcagatttcagattttctgatgagggatgcccaactggtaagtataatgcagatatttctaaatcagagaaaatatcagaagtccaaaacacttcaggtcccaagcattctggataagggttactcaacctggaatgtgttttggaaataatatgaagcaaaagatttaaaaaaaggttaaaaacataaaagatattaccatatgacccagcgattccactcctagatacatatcaaaaagaagcgaaagaaaatactcaaacacttgtacacacatgttcacagaagcaccattcacaacagccaaaggtggaaacaatgccaagggcccatcatcagatgaatggatgtggcatacccac

SEQ ID NO: 816505 - DNA, 591 bp, Homo sapiens
cctagaaaaaggcgccaagaagataaaatggggaaaagacagtttcttcaataattgatgctgggaaacttgataactatatgcagaaaaataaaactagacctctatctctcaccatacacacaaattaaaccacaatggaacaaagacttaaatctaacacctgaaactatgaagctaccagaagaaaacactggagaatgctaattctcaatataaatatcaaggatactggtttgggcaaagatttttttgtgtaagacctcaaaaccacaggcaataaaagcaacaaaaatagacaaatgggattacagcaagctaaaaaactgcacaggaaacaatcaacaaaatgaacaaaccacagaatgggagaaatatttgcaaagtatccatctgacaggaattaataattagaatatataagaagcttcaacaaatcaatagcaaaaaaaaaaaaaaaaattctatkgtaaaatgcaccagagatctgaatagacatttctcaaaagaagacgtgcaaatgacaaacaggcatatgaaaaaatgatcatcactaatcagagaaaactacaatgaaatatcatcttgccc

SEQ ID NO: 816506 - DNA, 607 bp, Homo sapiens
ggattccttgagttagggggtaccactccagctatacaaccctccccatgaagcaaggagtctattgcgccaagaggacttgtctaactggagcacattttctcccctaatgctacatcattctatgggtatgcagaacctaaaatatctgcccaaacagccctcaacaagcttccaaagcctctttcaccagatcagtactccagaaggaaaactataccaactagactgtgtatccttaggcttgaagggtaccaagagtcaactgtatgcagaggatgtgaacatgttgcttgggatgtctatacaggtctgcccaaatactcttaattgtagtaacgagcagtggagaaagcagaagcagagagggctgtggaccagaagccagatggtaactttgtaccaccacagtctgatacaagaaactccaacaagtctgaaaatactaaattctaacctggcctcccagggtcttattatggtatacttacgaaggaaggaggacgaaactttttttttggcaagttcttttttaagattgatttataacktttaaattagacgtacggtatgtgacactccatttgtactcttgttcctagaccca

SEQ ID NO: 816507 - DNA, 413 bp, Homo sapiens
ctgttcatggtaatactgagtttcccttttccatagggaagtmtaggacataaattaataatatttacagcttttagtatacaacaaaataatctttggctttcctcttaacaaactttagacaaaagaacttacaaaaggataaaatgcttgtatcttaaatgacttctatactaatatatctgaaatattctatgcataactaatccccatttgaagtggtatccaattaacaattttttatcatcatttcctttttataaagaaaaaagggggaaatgaggactactctgtccaggagaaaaggcaaagtagtcctcacttcccccatttttactaggagaaatggcatgtttcttggtttgcaaacataaaaaattatataaaaatatatgtacttttatttcttctta

SEQ ID NO: 816508 - DNA, 454 bp, Homo sapiens
tcatattggaaattagggaggtattcataaaaaattttcccatgcatgtatatctatttgtcctaacatcatttattgaataactaattttccatgatatgaagtgccacttatgtggtamctatattcccttatatcttttgctttattgacagaattctaatctgttccattaatccagctgtttactttttgttagttccacactactttaacttcataataggcttagtatttggcaagtcaaattctcttttcttctcttttcctctttcccctctctctctctcactcctaatttttttcaaaatatcctttgcattcttgcatgttttattttccaaatgaactttaaagccagtttttcatataaacattttattggtattttatttgtacaatattaagttatagattaataattttctacggattttcaataagtgaagtacta

SEQ ID NO: 816509 - DNA, 530 bp, Homo sapiens
tcagatatttgtagactcccctctggcctctttttcttcctctaattccctggttgggcattgtgttcatgtgtccatgcaatgttttggagaaatgtagacaggaacacatttcctccatgggtgagaactctgggaggcttcatagcacttccaatatcagaaccatcagaactagcacaaatgagccattttttataaagcttagcaggatttctggcaaaccagagtagggaggtgggtgaggaagaagatgggagaagaggaaagacgaaaaggatggtccatatctcatatcctcagcttcaaatttatactttttatgttatctccaaatgaagttttagcacagatattgcattttaaagtaataattgataaatggaaatattaaaaatatgccatagttctttaatgctatttcagtatttctctccctcctctttttctcctttttcccactcttctyccttctttgtaatgtaaacttcaaaaaatgaaggtgctcgggtagtgtttgaactttaata

SEQ ID NO: 816510 - DNA, 608 bp, Homo sapiens
ggtgatagccctcttatcatttctaattgtgtctatttagttcttctctcttttcttctttattagtctagctagtattatctattttattaatttttttaaaaaaacagctgctggatgtgttgatgttttgaaggttttttttgtgtctctgcattctccaggtctgctctgatcttggttatttcttgtcttctgctagctttgaggtttgtttgctcttgcttctctagttcttttagttgtgaagtttggttgttaacttcagatctttctagctttttgatatgggcatttagtgctatagatttccctctgaacaccgctttagctacatcccagagatgctggtacattttctctttgttctaattagtttcaaagaacttcttgatttctgccttaatttcattatttacccagttgtcattcaggagtaggttgatcaatttccttgtagttttgtggttttgagtgaatttcttaaacttgagttttaaayggattgtgctgtggtctaagagactgtttgttatgatttcagttcttttgcatttgctgagaagtgttttacttccaagtatgtgatcaatttttgagtgagtgct

SEQ ID NO: 816511 - DNA, 464 bp, Homo sapiens
ataaatgcttccttttctcatcactgttacccatagaggtatctgcaggcctctttggcattttcaacaacatctttacaccacagcacagaataagcaaaaatcatcatgggtaatccacataggtcttggccccatgtggggcatcagaaacctgttgttggcacattcggcctacacacttgccatcttattactctttgtggatgtgcttgcatggaagaatctgggtgtgctcagggaagatatattgtaactgaaaaggtttaccaagggtcttttccctcaggaacatcgaataaactgtatgttgtgcacctgcatgttgatggcaacccatcataagaggtcagttatggaattttctacttgcrgcatcatgtcaacacaaaaagttttggattttagcacacttaagatttcagattttcagattaggagtgtttaactattatagaaaatgt

SEQ ID NO: 816512 - DNA, 631 bp, Homo sapiens
cctgatgtttttgttgttgttatttgaatactcttaagttcatttatatttgagaatgggacacagaaaagctgagagctggccgggcrcggtggctcacgcctgtaatcccagcactttgggaggccgaggcgggcggatcacgaggttaggagatcaagaccatcctggctaacatggtgaagccctgtctctgctaaaaatacagaagaattggctgggcttggtggcgggcgcctgtggtcccggctactcgggaggctgaggcgggagagtggcatgaacccgggaagtggagccgagatcgtgccactgcactccagcctgggcgacagagcaagactctgtctcaaaaaaaaaaaaaaaaaaaaaaaaaaaaaaaaaaaagctgagagctgtgtttgtgaacaagtgtgtcgagagtgatcaggtgtgggcaatgaccattatctcagggaactcccaaaggccaaaatgtggaggtcttttctctatgactatttaatttctctagaggaggaacctgtaatttcttgcctacctggtagataaccttgctgctgtccttctgagagagaaagagagagttggggtagagatgggaagaataatagtcttgtttcttcttgat

SEQ ID NO: 816513 - DNA, 606 bp, Homo sapiens
cattcgggtgagggggtatcgttggggagaggagacagttaaggacattrcagaaggcacacatctttgtgtctagtacgtctttatatcatgacactcacacatctgctgtaccctgtgctttactgggtgggagaaaaagagatgccattgtagctcttatagccccaggcatggaaactgtacgtgaccctgggtatatccgtgtgatcctgtcactccgtgaacatcatcagtcatatgtgttttcatctcagctccaagtccatgtgataaattggatattgcttttgcttatctaattctcattgccccagccagactgtcaagtcgttgtggtactgtttgtgcattgtactgaattatgacatccacatgatagatgtagaatgcccctttgaaatgtatcgcacacactctgtctgtcttgcacgctgtagagctggggtgggacagatgaggggtggatgctgctgcaggacagggctcagtatctgccctcccaaggtcaggcctgacattgctaggagacagaggcacggggccccaccttcctgtccaacctcccttcctgctcctcccccctcaccctctctcatcatcaca

SEQ ID NO: 816514 - DNA, 654 bp, Homo sapiens
cataggcatgggagaattagtcttccctacaggtagatcagaatgggctggctttcggataggggtgyagtggctcacgcctgtaatcccatcactttgggaggccaaggtcaaacacctgaggtcaggagtttgagaccagcctggccaacatggtgaaactccgtttctactaaaaatacaaaaattagctgggcgtggtggtgcgcacctgtaatcgcagctactcaggaggctgaggcaggagaattgcttgcacctgcggaggcagagggtgcaatgagccaagattgtgccactgcactcaagcctgggtgacagagcaagactctgtctcaaaaaaaaaaaaaaaaaagggctggctttcttccaactgtttcacagtcaggcagacagactgtttctctctttcatttgcttgggaaatgcatcatgtggtttccatgattgtctccaatctacacaagttccaacacacgtgttataccatagcccaatgtacgaggcccagaagcaaacacaaactgcctgtgggtcctacctggagtggttatgactgctgccatgggaaagccattcccaatccctttagccatggtgacaatgtcaggcaggacatcgtgggtttggaagccccagaagtgagagcccaac

SEQ ID NO: 816515 - DNA, 602 bp, Homo sapiens
ccctttagaatatgctataatattaaccaagtaccagagggagacagaactctgataatattgtttttcttctacatttttctatgaagaatactgtaaactagaaaaggcagagtagtaattgaygcccaaaaagggaaagttagcataaaagagtcttggtgatttcaatcactggctcctaaatgtttgtcttctgcaaatttttttttttaattagtgagtttactttacaaaactattttcaatttaaaagagtgccttttattccgatattgttttattcatttgtttgtataggtttcacatattctttgtcttatttgcttcatttttaataaaattgtggtgatggcagatgtaaaaaaaaaaagaaaaaagaaaaaagaaaaaagaaaaacctctttttctttataaattacccagtctcaggtatttctttatcagcagcatgagaaaggactaatacgtgggaacagcagcaacagggcatactatagaacagttgataggtatgaactgagttaacacatgcaaagtgttatgaacagtgtctgacacatagcaggtactcagagagttccagctattcttatttttac

SEQ ID NO: 816516 - DNA, 619 bp, Homo sapiens
gatttccacatcctctagtatgttagacttaatctaaatttacagaggatggaaacaaaagactgctaaatttgaaacgcatatgtagtgtaagcaactmaatagccaagtgtggagtccagggaagaagtcagggatgggggtgcgtgtggtgggtgtcttggtgtatataatgccaagagagtgaatgacatcatccaaggagtgagtatacagagagaagaaaggatggtatttgaggactgggctgtgggacaagccaataaagccaacatgaggagaatctagcatgaaaattaggaaagagagaccagtgaagacagcggaacacaacagtagaaaagtgtagtccaaaaaaaaaatatagtcaaagaagccaaatagaggaagtgtttcaaagacagagataaaccgggtaaggatgaggaaggattgtttgttaagacaaaaactaactgttctggcgagtgagaaaatgaattgactagggaaagcagtaggattgtgagcagccgtgaggacgtcttagcgcttgaggtcctaaacctccttaaaatcatctctttaccacccatcttttctccataacctttcactactattagtttttggctttcgt

SEQ ID NO: 816517 - DNA, 601 bp, Homo sapiens
aatttactaatctttgtctatatggtttgtgggttttgtgtgtcttaagaacttctctaattctaggttataaagacagtctatrttgtcttctaagagttttataaatttaccttgcacatttaaccactagaatggatgtcatatgtggcataaggtatagacccaatttttggtttttatcctgtgggtatccagttatcccagcgtcatttattgaaaagtccctgcaacttaatagctactgtcataaactaattatccatatgctataggctgaatggtgtcttccaaaaattcatgtgttgaggccttaagtcccagtatggtggtgtttcaagataggacatttagggggcaattagaattatatgaggttataaggatagggctttataagaagaggaagagagagattgctgtctctctgccatgtgaggatacaatgagaaggcactcatctgcaagccaggaaaaggcccttaccagaaaccaacttagtcacatcttgattttggatttccagtttctagaactgtgagaagtaaatgttatgtaagccccccagtctataatattttgttatggcatcacaagcaga

SEQ ID NO: 816518 - DNA, 580 bp, Homo sapiens
gtgtatttcacttagcgtaatgaccttgagcttcatctatgttgtagcatgtgtcagaattcccttcctttttttaaaaaaaaaaaaaattattttaagtttatgagtacatatataggtytgttacacaggtaaaagtgtgtccaaggcaggtctggtagtaataaatttcctcagcattttcttgtctgaaagggttcttatttctctttcacttacaaagcttagttttgccagatataaaattctgggttggaatgtctttttttaaagaatgttaaattttgggaaccaatctcttctggcttgtaaggtttccactgagaggtgtgctgttagtctgatgagcttccctttgtaggtgatctggcctgtttctctatctgcctttaacattatttcttctattttgaccttggagaatctgatgattatgtgtcttggggatcctctcatggagtagcttactggggttctctgcatttgctgaatttgaatgttggcttgtctagctaggttcaggaagttctcacggatgataccctgaaatatgttttccaaattggtttcattcttccca

SEQ ID NO: 816519 - DNA, 468 bp, Homo sapiens
tagttttggtagcaaaataaatgctggaaaaatatgtttaagctttcttttttaagacttacgggcagcactgttttgtwtgttttacatattatattgccttatccctagccaaaaacaaaacaaaacagtaagccttctcatactctttgaacatatttgcctgcatctgaaatatcacaataacactcaaataatattattgccatctaaagatgtattcaggcactacaccaccagcaattataaaacatcccttttttgttagtttaagaagtttgcatgcaggtgttaagattatgggaaatcggtggtgaaatatacaatcaggacctacatttttttaaaaaaatatataaattcttgtaaactatgatttacctgtgacagcagagatcttttctctgtctctcagaatagtattgtcatttcttttttggcaagaagaagaggcccctcctcttctct

SEQ ID NO: 816520 - DNA, 612 bp, Homo sapiens
tcgatttttttttaaatccctcagttacccacaaatctaagatctgaaaaatttccttccacagaatttgtcatctctaataaacagcccttttagccaccaatctgctaaaactcatgcctctccaccatgtttatagttttgaaattgttattgggaaatggctagagagagacattcccagccccctgccccttggcctagatgtgatcccatgacacatttttaccaatggaatgtcagtggatgtgaagtgccttaattctagccaaggcttgaaagaaagggtttgccctctccattctctttctccttgtaccagctacaatcacaagaacctagagggatgcagagccaccagatggaaaaagtctgggtccctgactcactgcatggagagagttacctgccatccagtaggattcacctcaaactggaaaaaaaaagatgattaaaataaactatgattacatttgtgcctttatactgcattgaatctgttacaacagctaacattacactaactaatgcaagtccttaacaaggacagccataatcttttaagaaagagctgaaayacagacccagttagacaaaccctgtgttcttaac

SEQ ID NO: 816521 - DNA, 598 bp, Homo sapiens
tcttctgttctagaaattagcatgggatatgcttcaaaaacatgactggccacagaaacagcttcatggttcattccattctttattgcatggttagtttttcactttttttaagcctgtgtctgcagtttacaagtagtgtagtatgcttgcaaccaaatcattccaatgctccccattggtctcctcttctgaaaaaggaaggtaatactagaatctacctaaaaggatcagagaaagggtaaaatggaacaactcgtgcaaagggctagcgttgcacctggcacatagtaagtgcacaataaatgtaagcacattttgaaatgtattattagtctttgggctaagcacctgcaccgaatttgttacctcctctttgctgctatttcctcattgatgaaattcagaaaacggtgggacctaattaactgtgttattgtgaagattaaatgacacaatacagtgccarcacctagttattactcaacataaatttgtcacagttctcacaagacatcagaacacccgctgatgtgctgtcccccatggcactcagcatattaagtgtggtcggcacaagcggctgcctggtgtgaag

SEQ ID NO: 816522 - DNA, 555 bp, Homo sapiens
cctgaaaaggggtttggaccttaggagaaatcgtgtcctaagcatwaagatgtggtaaaaatcctacttttctcaacagcaaacaagtcttctacttcccatggagaaacctgttactattgagtgatttttttaataagatactcagcctgagggtgggggcatttgaattacaaacatgggtcctaggactgatttctaataggagtggattcagatgattgaaatgcaacaggaaaatccctgcccccaaatatttattactggtaagaagtttctaccctacagatcaattccttttcatcttgaaagtctttctgtcttttagcatttttgttaaaacacagctctcccagacaggggtaaactctaagacattcatcaggtgatgaattatggacatagaccctgtatattccgtggagtcctataataacatacctgtcctatactggcagaacttactacattattttttcctcatgtctgtgacctcaccaggcagacagatttcctggagagcagataatatatcttatccatcttttcactccc

SEQ ID NO: 816523 - DNA, 562 bp, Homo sapiens
cagtgtctattgttcccttctttatgtccatgagtacaaaatctttagtttccactgttaagtgagaacatgcaggatttgatttttggtcctgcattaattcgcttaggagaatggmctccagctgcattcatgtgctgcgaagcacatcatttctttctttttatggctgcttagtattctgtggtgtatatataccacagttttaagatccaatttattgttgatgggcacctatgtggattccatgtctttggtattgtgaatagtgctgcaatgaacatatgagtgcatgtatcttttagtagaataatttattttcttatggatatataaccagtaatgggattactgagtcaaatggcagttctgcttttagttattagagaaatcttcaaactgctttccacagggcctgaaataattaacattcccatcaacagtgtataaatattcccttctctctgcagcttcaccagcatctgttactttttggcttttagtgatagccattctgactcatgtgagatagtttctccttgtggttctgatttacatttta

SEQ ID NO: 816524 - DNA, 470 bp, Homo sapiens
agtatatagtgctttacagcaagtggagccattgacaaagacmtttcctgtgattgtgagaacaggtctaccaatcaagggatagacagaaggactgtttaaacaattaacctccactgtagcccaaacaccaatcttgaataaatggcatgcctatttgcaacagtgaagagttttggcaacgagttccttaagctcagactctcattctgcattaggccctgttacatttgagcaaacaaaggactcccctttagctcctcctactctaatgcctgatatagtaagaaaaaattgttacccatctggacaatgcttggtatatggatggctccagtagaggaagccacgttacttggactgctattgctatacaaccacaaactgataaaatctggcttgatacagatacgcatcagagtagtcagtgggcagagttgagagctgcttggttagtaatcacacatgag

SEQ ID NO: 816525 - DNA, 572 bp, Homo sapiens
aaatcacacaatcaagtatattgtaccaccataattttaaaatctataactaacagtcaattccaacactgtatggtaatmattcattcattcattcaatcattcatttcatataaacagtaaatattttccacgtgttttttgaatgcataaatgaacaaaatagataaatctccctgtttgttgggtcttatgtcattatttctcattcttaacaaaactacttcaaatgtttctcactttaacaaacttctgtttccccaatcccctcagaagatggactggaacccacttcacagagaagccagaagtcagcaggatgcaacttttcttcctcaatactctgtgtgtgtgtgacttttggttcatattcatcttctccaagaatagggatcatatccattatcacacacttctcatgagcaacttgtgcttagcatctagcttgtatttaagatccatttgaagaaatgaaatcatgcaggatttcctccagatttttccagtaaaacacagtaatcttactggtaaacaactgagcttttacataaaaaattctaaatatagctttc

SEQ ID NO: 816526 - DNA, 572 bp, Homo sapiens
aaatcacacaatcaagtatattgtaccaccataattttaaaatctataactaacagtcaattccaacactgtatggtaatcattcattcattcattcaatcattcatttcatataaacagtaaatattttccacgtgttttttgaatgcataaatgaacaaaatagataaatctccctgtttgttgggtcttatgtcattatttctcattcttaacaaaactacttcaaatgtttctcactttaacaaacttctgtttccccaatcccctcagaagatggactggaacccacttcacagagaagccagaagtcagcaggatgcaacttttcttcctcaatactctgtgtgtgtgtgacttttggttcatattcatcttctccaagaatagggatcatatccattatcacacacttctcatgagcaacttgtgcttagcatctagcttgtatttaagatccatttgaagaaatgaaatcakgcaggatttcctccagatttttccagtaaaacacagtaatcttactggtaaacaactgagcttttacataaaaaattctaaatatagctttc

SEQ ID NO: 816527 - DNA, 505 bp, Homo sapiens
caggtgatccgcccgccttggcctcccaaagtgctgagattacaggcgcgagccacagcgcccggccggatagtttccttctgtgggctgtgagaaagaatccgtcccgtgcctctctcatagctttggtggtttgttggcaatttggggcatttcttggcttctagacctctgccttaatctccatgtggagttcttttgtgtgcgtctgtctccaaattccctcttttaatgaagacaacaatcatattgaattagggccccagcctactccagtacaacctcatcttcactaattatatccccaagaaacctattttcaaagaaggtcacattctgaggtactgggggatagaatttccacatacaaatttgggtagatataattcaacccataacctcactcataagcatttgtctctgctgattattccttcatcttccaacccaggggcacaggggaggggkcagggaggagcccagggtctccacacacgcacttgct

SEQ ID NO: 816528 - DNA, 360 bp, Homo sapiens
tttaaaaatcggcttctaatttccaaaacaaacaaacagcacaggctgggaatttgactggagttgtattaaatctgtagatcagtttgcagacaattaatattactacagtgctactacagcatggagtcggagtcccccagtccaggaccttcgtttatcccttcatttacttaggtgtttaaacatttttatcaaaaatatcttaagttttccatgaagcagtcttgcacatattttgctagatttactcctggatatttgrtttaaaaatatgattatagatggactttttgtttgctaaacatttattgatatatcaaaatacatttgatgattttgtatttattttgatcaact

SEQ ID NO: 816529 - DNA, 520 bp, Homo sapiens
tgttagaatggctcttacataaaaggcagataaaaagtattggtaagggtgtggagaaaaaggaaactttgtacactattagtgggaatataaaatggtatagccactgtaaaaaatgtgtgcaatttactttaaaaattaaactagaactaccatatgatccaaaaatcccattttggggtatatattttaaaaaattaaaattactgtctcaaaaaatatctgtactccatgctgagttcagtattatttacaatagtaaaaatataaaacaaactaatggtccctcaacagacaaatgaataaagaaattggtatataaagacgatagaacattcaactgttgcatctacagcgaaataaaagagagaaaattcttccacgtgcaataatgtggatgaatctggagracactatgctaagtaaaatatgtcagaacaaatacataataccacttacataaagaatctaaagtaggtcaaactcataaaagtggatagtagaatgatagctgccaggg

SEQ ID NO: 816530 - DNA, 606 bp, Homo sapiens
aaccacacttatttcagatgcttatttcatgaggtttaaatgagataatgcaaagagcagtgacgttgtgcatggtaggaccagaataaatgtcagctattagctgtcatttacttccctcctgaattctgtttatatgcagccagtcattccagttattcaacttctaaaaattatccttgacacattcttcattctcatgccattatattcaaacaagcactaagttcagctatttttaatacctaaatgctatcaaatctgtccccttatttttaccatgcttctttagttcggatgctatcttgatgtaatttctctttacatatttagaaaatgtttaacgcagtatcacttagatggcatatatttgtataccttctctttctaaagaaatgtttaatatttccttagtgtatcagcaaaacctcttgttttgagggctataagtaacttgcattttttgttctttacatagagggaagtayttgaaatactggtgaaaaaaataaaatacaatacaataaaataaaataaaaacagtgttgcatgtcagcctaaaagtattgtgcagtttgatttctcttaagtgacaacaaagtggtc

SEQ ID NO: 816531 - DNA, 570 bp, Homo sapiens
tctctactaaaaatacaaaattagccaggcacggtgatgcactcttgtaatatcatctactsaggagactgaggcaggaaaatcacttgaacccaggaggcagaagtggcagtgagctgagatctcaccactacactccagcctgggcaacaaagttaggctccgcctcaagaaaaaaacaaaaataaaaacaaagcaaacacatttatatacagaatgtataaagtaagatgtaaataaatttgaaaatagagaataatttttcttttacgtgggagaattttgtgtggttaagatgataaaggggaaagtaaagtaaatttttgtcctaaggtaaatggtagtataaaactgatggtttaagcaagttgtgggtttgtggaagattgatcttgtgaaaggagatttctgtatgataaagttggccaaaatgtaaaggggtttatttaatttttaaaaaattaaatgttaatttcaaaagcacattggtgcaggggcaaagtctgggcccttgtgttaggtaacagggttttcttggagcattggtcttctctgtaatagaaaatttta

SEQ ID NO: 816532 - DNA, 606 bp, Homo sapiens
attaaaattaattacattaggctgggtgcggtggctcatgcttgtaatcccagcactttggggaagccgaggtgggcrgatcacctgaggccagaagttcaagaccagcctggcaaacatggtgaaaccccatctctactaatgtaaagtacaaaaaattagccgggcgtggtggcaggtgctgtaatcccagctacttgggaggctgaggtagaagaatcccttgaatcggagaggtggaggtttcagtgagctgagttggcaccactacacaacagcctgggtgactccatctcaaaaggataaaataaaataaaaattaaaaaaaaataaattacactttagaaatagatgtatccctatcttccatcttgcaaccacctgcaggatacaaaagtagcaaactattaggtatcaagccaaagatccccacggggctcaggaaaatggcgtttggttgactggagagaaagaatgagtgacacagaagaggactttagaaagtagcccttagggtcactcagctgatttcaggacgttgctcaatgggcattgttcatgaccatctttaaaaatggcttcgcttgagtgaactcaaagaaatga

SEQ ID NO: 816533 - DNA, 394 bp, Homo sapiens
atctatcgaaaatttcagtttgcatatcctttgacatagcaatattacatctaggaatttattctacttttttttttttttkgggggggacagagtcttgctctgttgcccaggctgaagtacagtggcacgatctcggctcactgcaatcgacctccacctcccgggttcaagcaattctactgcctcagcctccccagtagctgagattacaggcgcctgcaacaactcccggctagttttcgtattttttttttttttctgagatggagtctcattctgttgcccaggctggagggcagtggcacgatctcggctcactgcaagctccgcctcctcggttcacgccattctcttgcctcagcctcccgagtagctgggactacaggtgccc

SEQ ID NO: 816534 - DNA, 621 bp, Homo sapiens
accccaaaagggcaattgtagtagctttcattgaggctaaaaaataaataaatawtcgtgctttaaaaattttacctagcctgtgtttgccagttttatgtaatataaaccaagtgctcattcctttttctaagacttaatgtttccattacaacatacagaatatgtggctgggaagaaatgttgtacagcagatcattagggtttgcttattagatatgctatgcccaagactttgactttccatttacccagaaaatgtctgttcaagtaattatttgatagaaagcactgcagattggggaattctacttaggccataaagagaaaaaatcagtttctttttttttttaaccctctttccattcattaatccatcctacaacaagacaataagatgatagtcagcaacctatttgtatgaaacagcagcgaagaagcagtacttattaactttttacaaatgcaagtttaaaactaaaagaaaaaacctatttaaatcactgtaatttgactaaaacaaaaagctcaaacaagcatacacacacaagtacaatagtgtgccctaaaatacgtcccaaggcaaaaacttataattatttttataagtggaatacagag

SEQ ID NO: 816535 - DNA, 509 bp, Homo sapiens
ctggatcccactgggcagcctgacccagaggagcagcaatatttgcggttgtctggcttacagggactcctactcccaagagaaggggaagtacaccacatyaagggaacacctcatgggacaaaagaatctggactgcaggcctaagtcccagatttttccactggtgggaagtttctttaagcaaggcacaactgcagtgctgagttcaacagagaaaatgtgtagctctaccaacaggcaagcagctctggtgctcatgaaggttcttcaagaagacttgttttcacttttgtccatcactgcagaaacaactggggcatctcccatgggagcttagcatggcagcacatatagacggcctttctgaaacacttcagggtgattgaatccccaaaaaaaggaacgccctccagatactggcttgcatgaggggtagagtcacagttcctccctacttgaacatcaactttcctgcagatataaaaaggtgcctgcctggtcttagt

SEQ ID NO: 816536 - DNA, 570 bp, Homo sapiens
ccttataatttacaatttctgtgattatatggcaaaaaaacaaggtcttgtcatytaaaaactttttaaaatactttgactgtagaaaaataaattcctagataaatatctgcataccaaatgccagatatatttactcaaacacactgaaacataggcaaacacatatggaggaggagctaaatatgtttaagaggatcaaataaaattatgtaattctgtcttttgtaagggcaaaagaaaaataacaataagtgatacacactttgcacatgtttgatagtggcactattggctacagttttctcagacatttaggaggagttttcatttactattttagtaggaaaagagagattccagagcttccacttgactctctctaaccatgaattagaaagggaatgtgtagcttctgtaagttgctaagcaaaataattctagctctatattcagtaactgagtacataagcacaatgttcaggatcaagtggatgcaccttgaattggacttgattaaaagttacattaattgccagaaccctgttaaacatctctatggtctgattg

SEQ ID NO: 816537 - DNA, 668 bp, Homo sapiens
gtagcttctgtaagttgctaagcaaaataattctagctctatattcagtaactgagtacataagcacaatgttcaggatcaagtggatgcaccttgaattggacttgattaaaagttacattaattgccagaaccctgttaaacatctctatggtctgattgaccgtgatacaccagcttctcacatatttatgttagctagggagagtttccagtaataattgatttttctaagtagttctcaatctcgcttgtgtaattactacgacaatcgaccttagatacctttaaaggccagaaggagtatttacagcagacctctcatgttctcacatggttcttcttaatgataatatccttaagtttcattcaggaagctttaggactacataatagttgaagtctaagaactgggtgaggcaccatggtgatagttcaagtctggaatatcttcacaatgcaactgtatataaagccccttcctcaattatacatttgatgcgtagtagggcctttgaagttagcctggtagtttttgaaaatctgtaatctattcttcccaaagtctttgaatrtcttctcaaggaatacttgttatttcaaacttatttagcttttgtttgctctgggatagagctttcaattaaccacacagtaaatataattac

SEQ ID NO: 816538 - DNA, 668 bp, Homo sapiens
gtagcttctgtaagttgctaagcaaaataattctagctctatattcagtaactgagtacataagcacaatgttcaggatcaagtggatgcaccttgaattggacttgattaaaagttacattaattgccagaaccctgttaaacatctctatggtctgattgaccgtgatacaccagcttctcacatatttatgttagctagggagagtttccagtaataattgatttttctaagtagttctcaatctcgcttgtgtaattactacgacaatcgaccttagatacctttaaaggccagaaggagtatttacagcagacctctcatgttctcacatggttcttcttaatgataatatccttaagtttcattcaggaagctttaggactacataatagttgaagtctaagaactgggtgaggcaccatggtgatagttcaagtctggaatatcttcacaatgcaactgtatataaagccccttcctcaattatacatttgatgcgtagtagggcctttgaagttagcctggtagtttttgaaaatctgtaatctattcttcccaaagtctttgaatgtcttctcaaggaatacttgttatttcaaacttatttagcttttgtttgctctgggatagrgctttcaattaaccacacagtaaatataattac

SEQ ID NO: 816539 - DNA, 615 bp, Homo sapiens
caaaatttattttatttatttacttgttttgagatggagttccattcctgttgcccaggctagagtgcaatggcacagtcttggctcactgcaacctccgcctcctgggttcaagtgattctcctgcctcagcctcctgagtagctgggattagaggcgcccgccaccacgcctggctaatttttgtatttttagtagagacgggtttcaccatgttggccaggctggtctcgaactcctgacctcaggtgaaccacctgccttggcctcccaaagtgctgagattacaggtgtgagccacggtgcccggcctcgaccccaatatttagtgaaaagaatggtactattttatgttttgcaagttttcttaatgtctggcttaatacaagacagttggagtttcctgtttctgcagtttcacaactgcttcagtgagttgtgacatcacacatcatgtagtctttgcaaaactccactatacattcatgagaaaatgagactgagagggacaaatgacatcttagtattattatgagaatggcttaaagagaaggctcgttccccactgttgggwctctcacttcagtcaaactaataactgaacattcatcatct

SEQ ID NO: 816540 - DNA, 529 bp, Homo sapiens
ccatcctcatctgatacagacacttcagccactattagatcagctgggttattagggccaagtggtagcactgcttgctctgcagtctggaccatctgaaaagccttttaatactctgggccctactccaagttggtagccatacaggtagctcagtaaatgggtccaagcagcacatccaaatgtggtatgtctccaaaagccaaaagagatctgccaagcttgtgcctctttcacagtggaaggtgcaggaactagttttttttttttttttttttggcgggtgggggagtctcgctctgtcaccaggctggagtgcagtggtgcaatctcggtttactgcaattcttctgcctcagactcccaagtagctgggactacacgtgcgcaccaccatgcccagctaatttttgtatttttagtagagacggggtttcaccctagtctttcactttggatggggtatcccaaaatgctccaggccactggycctctatcagctttactgaggtgatgggtccttatgttc

SEQ ID NO: 816541 - DNA, 579 bp, Homo sapiens
atatttagggaaaagactgcaggttcattatattgagggaagaaaccataggataaattactaaaaacaaaggaattaagtgaccatcagcaatctgkatgctgattccaacagtttttttcttctagttagataacttttgggagattccactgtaaaaattttaaatatgaagggggaaaaacaaaaaatcatgacttacgtctaatgaatgaatccttccaggttatctgacaatgaaattcaaattttaaaagccatatccatatactgaaggcttccaatcaaaatattcaactctgtagggcaaactaggaaaataataccaaaggcaagctgacattttaagaaagaatctaccatgaaagttagagatgaaaacaagaaataaatgggtatgcaacaaaatcaatacagaaagggaaaaattaaaataaaaaatattgtcaagatatgagaagattttagaataataaagcaagattagtatattattaaaaattgggaaaatgtagaaaacaaaactctcaaaaatgaaaaagaaaaattaacagaaaaaattaatagaatttttgtgca

SEQ ID NO: 816542 - DNA, 491 bp, Homo sapiens
tctctgaagtacagtaattttgctaggatatgtctcagtgatgaggacttttgttcatttcttctggaatctgttgttccttttcaatagctwgattaatgttctccttggtttctgaaacattttgataaattgtatccttaaatatttgttctgttacatgatttctgtttttttcttcagagccaccacttattggtttattgtgtttcattggcttttcttgtcctgctcttcattgtttcttgtgtatttttcattgaggtgtaattacatacaaaaactgcacatgtttacgtgtacagtttgatagatcagtttcaacatatgcatgtacccatgaaaccattgccccaatcaaattgtgagcatattcatcaccccaaaaagtttccatgtaccctttataatgtctccctgtatcccttcctacccttttttccattcccatacatcactggtttgttttctttcactttagttggcatttt

SEQ ID NO: 816543 - DNA, 608 bp, Homo sapiens
  misc_feature 1, 2, 3, 4, 5, 6, 7, 8, 9, 10, 11, 12: n = A,T,C or G
nnnnnnnnnnnntcataagtttttctggaactcgaggrccacaacttatacctgtttgtcttcccagaaacttgaaactgatctgcacatagaatagacaggatagtgggttcctgggctctgctctggagtcagactccctgggttcaaaacctggtcctgctagttgcttgctgtgtgacatcaaactatggaatctgctcacatgccttcctgaagagttgttgagaaaattaaagtacataataattttcaagtggtcagcacagtgtctggcacacattaatcactccacaaaggccagatattattaggagcccaatttgttgttaatagtgaatgactcaactggttctcaaggttaaaatatatatatatgtgtgtgtatatatatatatttgggccctaaaccctggtgtttagtcaagactctagaaggtcaatggttgaagagaaatgtaaggctgaagcaggagcttccaaggaggtggctaagcaggcgatatttttcgagtcaggaaatatacttctctggatgtatgtacatgtattttagtgaaatggcccatttcttccaaggactttataggacaaaagcttgccttcct

SEQ ID NO: 816544 - DNA, 554 bp, Homo sapiens
  misc_feature 1, 2, 3, 4, 5, 6, 7, 8, 9, 10, 11, 12, 13, 14, 15, 16, 17,18: n = A,T,C or G
nnnnnnnnnnnnnnnnnntcataagtttttctggaactcgagggccacaacttatacctgtttgtcttcccagaamcttgaaactgatctgcacatagaatagacaggatagtgggttcctgggctctgctctggagtcagactccctgggttcaaaacctggtcctgctagttgcttgctgtgtgacatcaaactatggaatctgctcacatgccttcctgaagagttgttgagaaaattaaagtacataataattttcaagtggtcagcacagtgtctggcacacattaatcactccacaaaggccagatattattaggagcccaatttgttgttaatagtgaatgactcaactggttctcaaggttaaaatatatatatatgtgtgtgtatatatatatatttgggccctaaaccctggtgtttagtcaagactctagaaggtcaatggttgaagagaaatgtaaggctgaagcaggagcttccaaggaggtggctaagcaggcgatatttttcgagtcaggaaatatacttctctggatgtatgtacatg

SEQ ID NO: 816545 - DNA, 535 bp, Homo sapiens
gaatagtctcccaccactactaatttgcctcatgtactrgttgaacacactcctgcagccagagaaagcccccagttgcttgtagaagccatcagggctgggtgcaatggcttacatagtggctgtaatcccagcactctgggagccaaggtgggaagatagcttgaggctaacagttccagaccagcccggacaacatagcaaaaactagtctctacaagaaaaaaaaaaaaatagccaggcatggtgatgcacacctgtagtcccagctacttgagaggttcagacagaggattgcttgagcccaggagttcaagactgcagtgaattataatcgccaggcactctggtctgggcaacagagcaagacctgtccctaaaaagaaaaaaaaaatgtgggggaaaaaagccatcatcatgtacagcaacagtgagattaaggggatatgggtagccataccggtaccttatgctactcatcatagctacaactaagacttctagactcaaatgccccaaagtcttccattctttc

SEQ ID NO: 816546 - DNA, 535 bp, Homo sapiens
gaatagtctcccaccactactaatttgcctcatgtactggttgaacacactcctgcagccagagaaagcccccagktgcttgtagaagccatcagggctgggtgcaatggcttacatagtggctgtaatcccagcactctgggagccaaggtgggaagatagcttgaggctaacagttccagaccagcccggacaacatagcaaaaactagtctctacaagaaaaaaaaaaaaatagccaggcatggtgatgcacacctgtagtcccagctacttgagaggttcagacagaggattgcttgagcccaggagttcaagactgcagtgaattataatcgccaggcactctggtctgggcaacagagcaagacctgtccctaaaaagaaaaaaaaaatgtgggggaaaaaagccatcatcatgtacagcaacagtgagattaaggggatatgggtagccataccggtaccttatgctactcatcatagctacaactaagacttctagactcaaatgccccaaagtcttccattctttc

SEQ ID NO: 816547 - DNA, 613 bp, Homo sapiens
aatacataaccataaaagtaatattgaaggtaaatggggtaaatgtcccaagtgaaaggcacagaatggcaaactggataaagagccaagacccacgagtatgctgtcttcaaaagacccatctcacatgcaaagccacacataggctcaaaagaaagggatggaggaaaatttaccaagcaaatggaaaacagaaaaaggcagtggttgcaatcctagtttctgataaaacagactttaaaccataaagatcaaagaaaggcattacacagtggtaaagggctcaattcaacaaaaagaactcatgatcctaaatatatatgcaagctaatacaggagcacccagattcattaaacaagttcttagagacctacaaagagatttagactcccatacaataatagtgggagactttaacaccccacagacaacattagacagatcatcaagacagaaaattaacaaagatattcaggacctgaactcagctctggatcaagtggacctgakagatatctacagaactctctacccaaaaacaagagaatatacattcttctcatcgccacatggcatttattctaaaattgatcacataactggaagtaaaac

SEQ ID NO: 816548 - DNA, 421 bp, Homo sapiens
ttttttaagcttcttacatctgaatgtacatttaactaggcaaaagtttttaattttaacataacctacattyaacttttaaggaagtatcaaaatggcttgctttgcaaaaataatataaaaattttaacatgaaaactactattttattgaacatggaatatatgataaatgtgtaatgcatataaaaacgtttccattttacaggcaattgaatgaatatacattaaatatacattacctgcctttccgctgtatggcactagctttggaaatccataccatttttaacattgtaacaaaattcagagcatcaaaggatttctgtaatatttaaaccatctttatgttagaatataaaaggtatttaaaaggtaatagcaagaatgttatcaacatattttaacatgccaaaagttta

SEQ ID NO: 816549 - DNA, 631 bp, Homo sapiens
actgtaacaatcctttaactttacctctatccccagccatatgaatccctcaggatgtagaagaaaaatacatggaaaggcaaaaaagaaaagsatggcttttaaaaatgaatattacctctgtcagaggcgtttgaaccagagtaactccatcttgaataggggctggatgaaacaaggtgagacctactgagctgcgttcccgggagtttaggcattcttagtctcaggatgagacaggaggttggcagggttgatatcacaaggtacaggtcataaagaccctgcggataaaacaagatatggtaaacaagccagccaaaacccaccaaaaccaagatgaaagtgaactctggtcatcctccctactcattatatactaattataaggtattagcatgctaaaaaaaaaaaaaaaaaacccatcagtactgtgacagtttacaaatgccatggcaatgtccagaagttaccctatatgatctaaaagtgtgagaagccctaagctgcccctttcttggaacactcatgaataatctacccctcgtttagtatataatcaagaaattactactcagtcgaacagaccattccactgctctgcttatggagtagacattcttttgcttct

SEQ ID NO: 816550 - DNA, 631 bp, Homo sapiens
actgtaacaatcctttaactttacctctatccccagccatatgaatccctcaggatgtagaagaaaaatacatggaaaggcaaaaaagaaaagcatggcttttaaaaatgaatattacctctgtcagaggcgtttgaaccagagtaactccatcttgaataggggctggatgaaacaaggtgagacctactgagctgcgttcccgggagtttaggcattcttagtctcaggatgagacaggaggttggcagggttgatatcacaaggtacaggtcataaagaccctgcggataaaacaagatatggtaaacaagccagccaaaacccaccaaaaccaagatgaaagtgaactctggtcatcctccctactcattatatactaattataaggtattagcatgctaaaaaaaaaaaaaaaaaacccatcagtactgtgacagtttacaaatgccatggcaatgtccagaagttaccctatatgatctaaaagtgtgagaagccctaagctgcccctttcttggaacrctcatgaataatctacccctcgtttagtatataatcaagaaattactactcagtcgaacagaccattccactgctctgcttatggagtagacattcttttgcttct

SEQ ID NO: 816551 - DNA, 631 bp, Homo sapiens
actgtaacaatcctttaactttacctctatccccagccatatgaatccctcaggatgtagaagaaaaatacatggaaaggcaaaaaagaaaagcatggcttttaaaaatgaatattacctctgtcagaggcgtttgaaccagagtaactccatcttgaataggggctggatgaaacaaggtgagacctactgagctgcgttcccgggagtttaggcattcttagtctcaggatgagacaggaggttggcagggttgatatcacaaggtacaggtcataaagaccctgcggataaaacaagatatggtaaacaagccagccaaaacccaccaaaaccaagatgaaagtgaactctggtcatcctccctactcattatatactaattataaggtattagcatgctaaaaaaaaaaaaaaaaaacccatcagtactgtgacagtttacaaatgccatggcaatgtccagaagttaccctatatgatctaaaagtgtgagaagccctaagctgcccctttcttggaacactcatgaataatctacccctcrtttagtatataatcaagaaattactactcagtcgaacagaccattccactgctctgcttatggagtagacattcttttgcttct

SEQ ID NO: 816552 - DNA, 640 bp, Homo sapiens
tcaagagagtggaagtattttgtagagatgttacaagaaagcaattacgaaccctctctctctaatccaaaatggtggtctccaaccttgtttttaaaagatattgagtaccaacatttgtttttagagacaaggcctcactatgttgtctagcatggtctcaaactcttggcctcaatcactcctcagccttccagagtgctggtattacaggcatgagccactgtgcccagcaaaatatagttatttaatatgtagttaatatcacactacataataaatggagtcacatttttgtccaaagatttctgagatcattgagtacaaaactctctcccactttcccaaggactgaatagaagtgaacatgtttcatggatgttacccatgagaaaaatctgagaacaggggaggcaaggggaagtagaagatttagtgtttattcatcagtgatcctgtctagctacaaaactccaccttgctgttcactacttctattactgtaatttttctttgatactaaggtaacatcatcctactccctacattagcaatgaakagtctagtaactctaattagataagaagagttcaggcataggatttcttataggtaatattttatatttatgataagaaaa

SEQ ID NO: 816553 - DNA, 626 bp, Homo sapiens
gagtaccacaccagaggaaacaaatgggaggctctcagcatttgactggacttttcaggatgaagagaagacacacaatcttaagaatccctcacacaraatagttgaatggatttttataaaaatctaactgtatgctgcctacaagagactaacatcatctttaagtttacacaaaaactgaaagcaatggaacagaaaagagtattctatgcaaatgaaaatcaaaagaaagtatgggtaatacttatattgcacaaaatagactttaaagtggtcattcaagaggatataaaaatattaaatatatatatatcaaatattggagcatctaaatatatgatatggttacattacataaagagaataaaggattagttcatatggtcatctcaattatgcagaaaaagcatttcacaaaatataatacattttcataatgctcaaaaaattaaaaggaatatacctcaacacaacaaagatatgacaaacccttagctaatatcatactcaatggtgaaaagttgaaagcttttcctgtaagatcaagaacaagacaaggatgcccactctcaccacttctattcaacatagtacaggaagttctagctagaacaactagacaa

SEQ ID NO: 816554 - DNA, 621 bp, Homo sapiens
aaaggcctcaggcatctagggagggctgtctccacagatcactcayaagtaaattatttgctggcctcccataaacaaggacatgccaattgtaactgtgggtctacagtctaagtctagttcctaagactaaagtctgttatacatatcttaccaggtacagaacaaagacaagatgaagtcagtcacttcctccatctacccagaaatgtctgcattattgattctcctttactcctttttttctcttcaggggttccctttatcccatgtaaaatgtagattcactggccactaactaaagtctcataagaatgtaactgcctacctgtctctcttccaaatgccgtaatctcttccaaattacataagaatgtaattcatctaactgcctacctgtctctcttccaaatgccttcccctgctttaaggaagtgtataaatactgaactcctgaaaacctctctgaaaaacaatcagagaagaacatatgtctatggcttattttttcgcagaataccctaaagctggcttaataaatctagatagttgagactgttacagtaggtagctagtcaggtgtattagttcgttttcatggtgctggtaaagacatacctg

SEQ ID NO: 816555 - DNA, 534 bp, Homo sapiens
ttcctctacattgtcaaatttatcagcataaattagtttataatatcctcattatttatatttttctaaaatttaagaaaattgttgtaatagcttccttttcatttcttatgctgctaattagattattttggctttaaaaaatctatcttgctaggggttatttattttattaatcttttccaagagctacccttagactttgttgatgtcttctattatatgccagtttcctatttccttgacttctgcttgtatctttcatttaattattcatagtcttgtagattttgagttggtagcttacatcattaattttatatatttcttgttttccaaggtatgcatttgaagctgtcaatttctttctaagtgccactgtagtacacctaaaaagttttaataatgktgaacatttaatatgttttggttcaaaatatttttaatttttcactgtgatttcttcttttttgcatatattatttagaataatgttgcttaatttccaaagagctgtagacttctttgttatat

SEQ ID NO: 816556 - DNA, 596 bp, Homo sapiens
ccatatgaattgcagtctcgctttcatgttttccatctaccttgcagcattcgttytgaataaatatttcagctgtatatttcaatttattaactttcttcaaatgttgattttttattcatttgcctgttcctcttttgaaatttcaacaattatattttcatttctagaaactccatatgagtgtctttttgtctatccattttgaaagtttcctatgagtcattcatttttctaactgtatcatttacttcctctgatatatcctatatagtccttctatagtatgtctaacaattccaatatctgcagtccttgcatgctgaacctatctgtttttttttttatgctgtctttcattcatagtggctttccttctagtatttcccataatctttgtcaatttgttgatctcattttgtggtagtccttaaggatacttaaggggttgctttctacttttgcaggcagtgtatgggtacaccccttatgaattctggttgagagcaggtgtgccatgttataattctctaacacctagctgttccaaggttcattgtgcccacagcagtgttgctatagtgatccatctcagg

SEQ ID NO: 816557 - DNA, 596 bp, Homo sapiens
ccatatgaattgcagtctcgctttcatgttttccatctaccttgcagcattcgttctgaataaatatttcagctgtatatttcaatttattaactttcttcaaatgttgattttttattcatttgcctgttcctcttttgaaatttcaacaattatattttcatttctagaaactccatatgagtgtctttttgtctatccattttgaaagtttcctatgagtcattcatttttctaactgtatcatttacttcctctgatatatcctatatagtccttctatagtatgtctaacaattccaatatctgcagtccttgcatgctgaacctatctgtttttttttttatgctgtctttcattcatagtggctttccttctagtatttcccataatctttgtcaatttgttgatctcattttgtggtagtccttaaggatacttaaggggttgctttctacttttgcaggcagtgtatgggtacamcccttatgaattctggttgagagcaggtgtgccatgttataattctctaacacctagctgttccaaggttcattgtgcccacagcagtgttgctatagtgatccatctcagg

SEQ ID NO: 816558 - DNA, 622 bp, Homo sapiens
ttttaattgaaacataagcaacagaaaattttaagattcttatatgtggaccactttgtataatgtgcctacaaggtaaagattttgtggtcatctgaattttgggagaagtaattttccaagaattaatacttaagctttttgaatcacagttttgtatacccaatttcattatttggttctgtgcgatatagaatgttcaaggctaactataatcatttttgtccaatttgttttaaagagggttcagcagctccaggaatggtataatggtgaatgatgtttccatatcaatacagatctacaaatatgagtatatttgaagaaaagcaaattcatattgaatttaaaggcatataaattggatttcttttccattcatggacatctacttgtataaagaataaaaattacagtttgaatacatccaaaaccttttctcttaccgaatttcaatactcttttctaacaatgtcttagaattttgtagtatatctattcctccsctagataagatctgtagcacacttactctcttcctccctgttactatcctagaatgcttttgtattttaattttagattatttccttttaaaattatgcataaataattatttaaa

SEQ ID NO: 816559 - DNA, 609 bp, Homo sapiens
aatttactaatctttgtctatatggtttgtgggttttgtgtgtcttaagaacttctctaattctaggttataaagacagtctatrttgtcttctaagagttttataaatttaccttgcacatttaaccactagaatggatgtcatatgtggcataaggtatagacccaatttttggtttttatcctgtgggtatccagttatcccagcgtcatttattgaaaagtccctgcaacttaatagctactgtcataaactaattatccatatgctataggctgaatggtgtcttccaaaaattcatgtgttgaggccttaagtcccagtatggtggtgtttcaagataggacatttagggggcaattagaattatatgaggttataaggatagggctttataagaagaggaagagagagattgctgtctctctgccatgtgaggatacaatgagaaggcactcatctgcaagccaggaaaaggcccttaccagaaaccaacttagtcacatcttgattttggatttccagtttctagaactgtgagaagtaaatgttatgtaagccccccagtctataatattttgttatggcatcacaagcagactaatata

SEQ ID NO: 816560 - DNA, 649 bp, Homo sapiens
aatagcattggcaggggaatttcttggatcccaaacatggactcctttagaactactaggtaaaggataaccacattttaaggtattttttttaaccacttcccgaaatsgcagtttgcattaccaccccttcctgccccacttggagaagcaatgcaatatgtaatgtcaagagtttagactgaggattatagaatctgctctctactcttggctctgccaagaagagggctacatgacatgggacaggtcatttgtcccctctgagcctcagaagtgattagagtactctgtatttccctggttctttctgggtctttctgtgttgttttcattctttccttctgaatgttccctttgcttgtcctctaacagcaatcattcactccgcctcccagttggggccaattctgctgtttgacctgcagttggagccagtgctgcttatcccagtcaacattattgatcaacattactgaacaaataagtgatcacatacatgaacaaatttttgactctttcctctcagcatgctggacctctcagtaggctgttattacatctcaacaaataggggtgttaaaattaacttaaattgtgctcaattaatcagaacttattcaagactttttgtgtgtcaggcattaaa

SEQ ID NO: 816561 - DNA, 445 bp, Homo sapiens
cattttgtgagtagtgtggtgaatgctagatgatatccatactttcattcaactgctgaaagcaaaagtatgggtgaggaaacatgtggattctcacttttctttcaggataccttcacatagcatgtgtgacatacatgtcttgttgattgagtcagaatgctattatcaatcgtatacattattaataaagcttcatttcttatttttgggatttaaaaaatataaatagaagttccaatagccttcccccaaactggatggcctttacgtactccattgcacagaccactgctatgtcaatcaaggcaggcaagactaccttgccttcatttacaaaattatcttgctttatttgcaagattggcttttatatgytgattactttaccacataaatctcctattattatgcagccaaatttaatgtttttccattgaagttt

SEQ ID NO: 816562 - DNA, 514 bp, Homo sapiens
tgaagaaacctcatctttactaaaaatgcaaaaytagccagggttggtggcacatgcctgtaatcccagctacttgggaggctgtggcaggggaactgcttgaacccaggaagtagaagttttggtgagccaagattgtgccattgcactctggcctgggcaacaagaccgaaactgcattaaaaaaaaaaaaaaaaaaatccccccccaacaaaagtatgcaataatggagaagctgagaaacaaacaagacataacattggaaacaaattttaaaattgaagacataaatcctactttatctttaattacattaaatgtaaatggattaaatactccaaccaaaagacagaggctgacagaacggattaggaaaaaacaaacatgatctaaacatatgctgtatacaagagatacactttagattcaaagacacaaaaaggttgaaggtgaaattataaaaaaagatatactatgcaaacaataacaaaaatagatgtggaaaagtaaaagt

SEQ ID NO: 816563 - DNA, 514 bp, Homo sapiens
tgaagaaacctcatctttactaaaaatgcaaaattrgccagggttggtggcacatgcctgtaatcccagctacttgggaggctgtggcaggggaactgcttgaacccaggaagtagaagttttggtgagccaagattgtgccattgcactctggcctgggcaacaagaccgaaactgcattaaaaaaaaaaaaaaaaaaatccccccccaacaaaagtatgcaataatggagaagctgagaaacaaacaagacataacattggaaacaaattttaaaattgaagacataaatcctactttatctttaattacattaaatgtaaatggattaaatactccaaccaaaagacagaggctgacagaacggattaggaaaaaacaaacatgatctaaacatatgctgtatacaagagatacactttagattcaaagacacaaaaaggttgaaggtgaaattataaaaaaagatatactatgcaaacaataacaaaaatagatgtggaaaagtaaaagt

SEQ ID NO: 816564 - DNA, 444 bp, Homo sapiens
tatgtatcaacgaagagaattgaaagcccagaaataaatccatatmtctatggtcaattgatttttgacaaaggttccaaggcgattcaatggaaaaaaatgttctttccaactaatggcgctggaaaactggatatctatgtaaaaaagaatgatgttgaacttactaagttaacaacacatagaaaattaactcaagaaaatcaaagaattaaattcaagaaataaaactaaaacctatttagttagaaaacatgaccatatatctacataaccttggattaggcatggtttcttaaatatgacatgaaaaacacaagtaagaaaaaatagataaattgaaatattttaaattattttataattcaacaagggataactttgtaacttttttttttttttacagatggagtctcgctctgtcaccaggttggagtgcagtgg

SEQ ID NO: 816565 - DNA, 500 bp, Homo sapiens
tagcagattcactgaatgtggaaaatgtattttcagtgctaaaatgggttttcaagaagtacttttaaagttcctgggcttacagtgataccagaagtgtcagagcacaggaagacgcggtatttcttttcatgctgtcaccgtctgtctactcctctctgatattattaataccaacgggttgaaaaactatggtgaacttcaaaaatgagttctgattaagtacattactcacatatgagaagatttttttaattagaagaatgtatatattagaagtatgacatctccacttggctgttccaaagtccactcagactttagatctccaaaacatcactgaagctttctccctcgaactcagtcccrccacagtctcctcatttcggaaaggagtgcaggcttctgccctcctccaaagcctgggagctgctcttgactttgcctcacccttcaaatctcactcaacaagtcacgcttgttctcctttaaaaatacat

SEQ ID NO: 816566 - DNA, 549 bp, Homo sapiens
tcttagtttgaagcaagtgcaagtttagtagcgcattatctgtatgagaattcaccctcctgccattagaatatgagtgatggttttaccacacacctctaacattgggtgttattggacatgtaatgaacaacaataaaaatagtggtctcatgtattcaacttcactctcctggtgataagtagtttaagactctgtatttcatgtttatattaaccatttaaagtttctctctctgacatgcatattcacactctttgtcaatcttttatttgcccttttcttgtaaatatttcaaaggatattgaggaatgttatgccttaaacagaaatttatgatttcaatattttctgttttaaatgttaatacttactaatatagtcaaaaagaaacacaaagcttacataaaatatggatgtccrtgacagacaggacatgtcatcacagctttcttttttccacaaaccatgacattgttttttataccccagcatatgcttttctcattccttatgctttattttggagtaatgtttaaattcgtgtt

SEQ ID NO: 816567 - DNA, 618 bp, Homo sapiens
ttagactacagtagtagcattagcagttgtaagattctgaatctatttttaaagttgaaatttgaattggatgtagactgtcagaaaaaaaaaagagaaacaaacataccaattggartatggctccaaggtttgttttgcattacgaaccagaaagattgtttccatttgtcgaagagtagaaggctggggaaaaatgtttgatgatagtgtggaaataagaattgcaattttaaagatgttgaatttgagatgcttttagttattgaagaaattatctgataaactattagatacttgaatacagagttaagagaagaaaataagaaggaaatacaaatttgtgagctaccatatagattgcttttaaagctatgaaacaaaaaagcgtatagtttgggaatgaaaaaataggaaaagagaagagatctaaggactaaacctgagtaccactctacactctaagtcatatgaaaagaactcaaaaaggatatctgaaagtatttacatattaaaggagtgcagaaaattcaggaaatggtaacatataataaacctaagagacaatagccttattaagatggtagtttgtaaagattgctatgcatatcattttcc

SEQ ID NO: 816568 - DNA, 567 bp, Homo sapiens
ttttggggaaacagggtctcctaagcatggctaataccagtctagtgatatcatgatatctagagccacctatttttgtgttktttgtttgtttgtttgtttgtttagacacagggtcttgctctgtcacccatgctggagtgcagtagggcaatgatagctcactgcagcctcaaactcctggtctcaagcgatcctcccacgtcagcctcccaagtagctgggacataggtgtgcatcaccaaatctggttaattatttcttttatacttttagagatgaggtctcactatgttgtccaggctggtctcaagcaatcctccctccttaatgtcccaagtagctagaattacaggtgcgagccaccgcccctggctagagtggtatagttttaatgccagaatcatcttggacataacctacctggaacatccaccttgaaatatagagaagacactgaaaccaccaagacagggtcctgcccagagccacatagatagttaatgcccataattacaacccaggccccctggctccaagtccatgttgtgcttctagcatgtggtt

SEQ ID NO: 816569 - DNA, 546 bp, Homo sapiens
  misc_feature 528, 529, 538, 540, 541: n = A,T,C or G
caaattagttttttaaagatgtaaattaattgccaaatttaaagccagaagttttcatataaaatcctaacttcaggattctccttaaaaataaaaacataaaaggatctgacggcagcaggaatccctcatggtatctgtcaaccagagccgaggtaggaatgtgctcttccttcagggttgctagtgcccaggtcaccccagcctgtcacacacattaactgcctggctcccgtaggcatgtgagcttgcatccctggataaacagtatcaaatgaagctacctagttttcactggacattgtctaccagcagggccagtgccttacaacttggaaatgggcacagtgggtatgaccaggagccataaacagaaggaaggacatggaactgaggagcaaaattgaacctggggggttgtttatatttgctcatcgtctaaccaagaaagataatgggctaagatgtttgaaaattaaccataaarcacttaaaaacccatcttccactgaattatgatcttctaannacatttcangnnctaag

SEQ ID NO: 816570 - DNA, 652 bp, Homo sapiens
ataactggatcctgagatgtcagggaccaagtggtggcactcaatcgtcaaaggaaaggtagacatagctatcataatggacaccagaggcaaagtggcaatcagaatagtctgactcatgtagcgctttggcattagctaattaattacagtgttcctagaagtgaaattgatagggagcctgctgcatccctacctaagttgtataagcaggaaatttacaggtcaaatggatgaaagactaatttgaattataaaaacaaagaatcatggcccctcaattaatttctagacttgagccagtttataggcctagaaccctttgaatgaaggggaggctgggtccccttgaggaagaaccccactacactaccaacaatttatgttgttaatctttttcccattcttccccaagtagacctcccagccttttaccagagtaattgcacactggggaaagggaaatgatccaacattttggggagtactggacactggctctgagctgacattcattccaggagaccctaaaagtcattgtggtcctccagttaaagtaggtgcttatggaggtcaggtaattaatgaagttttagctcaggtccaacttacartgggtccagtgtgtccctggactcatcctgtggttttt

SEQ ID NO: 816571 - DNA, 640 bp, Homo sapiens
ttcacgtaatgtcaagtctaggatgtagtccaaataatcagggaaaaatggagatacatagaaaagtacttaaagttggcaagtactaggagcttagtattactggggcccaggtggaaatgcacagaagwagcttgcctggttccatttcaggcctttggatatgctccaccaactgccatggtccctgggtcagctactcggcccatttgttgatatagtagtatcctcaatttgatagaatcgtaaggacgccttaaatttggttagcagttctacattcttgatgcaataatattttcagagtgtgggagaacatcaaactatggaaatatccctggagagatttgcttattaagttagttttcttccgccttcctggtagtttttgtttttttgctaaacaccaggggttttgccttcatttttcagatacatgtttttcatttgtctagtgaacttttgaatactttttgatgagatattaaggttggaaaaaataaccatctctttaaaataagaaagattgtgataatgataagtatataaagccctaaaactgaagatattcattacagcctgttaattggaatgaaaagctcatgcttactaattcagagtctataaataaaagacaagg

SEQ ID NO: 816572 - DNA, 620 bp, Homo sapiens
ttctgcatttccaactgaggtaccagattcatctcactggggagtgtcggaaagtgggtgcaggacrgtgggtgcagtgcatcgagcgtgagccgaagcagggcgaagcatcgcctcactcgggaagtgcaaggtgtcagggaattccctttcctagtcaaagaaaggagtgacagatggcatctggaaaattgggtcactcccaccctaatactgcacttttccaatggtcttagcaaacggcacaccagaagattatatcctgagcatggctcggagggtcctatgcccacggagtcttgctgattgctagcacagcagtctgagatcaaactgcaaggtggcagcgaggctgggggaggggtgcccaccattgctgaggcttgagtaggtaaacaacgtagccgggaagctcgaactgggtggagcccaccgcagctcaaggaggcctgcctgcctctgtagactccacctctgggggcagggcatagccaaacaaaaggcagcagaaacctctgcagacttaaatgtccctgtctgacagctttgaagagagtagtgattctcccagcatgcagctggagatctgagaatggagagattgcctcctcaagtgggtc

SEQ ID NO: 816573 - DNA, 620 bp, Homo sapiens
ttctgcatttccaactgaggtaccagattcatctcactggggagtgtcggaaagtgggtgcaggacagtgggtgcagtgcatcgagcgtgagccgaagcagggcgaagcatcgcctcactcrggaagtgcaaggtgtcagggaattccctttcctagtcaaagaaaggagtgacagatggcatctggaaaattgggtcactcccaccctaatactgcacttttccaatggtcttagcaaacggcacaccagaagattatatcctgagcatggctcggagggtcctatgcccacggagtcttgctgattgctagcacagcagtctgagatcaaactgcaaggtggcagcgaggctgggggaggggtgcccaccattgctgaggcttgagtaggtaaacaacgtagccgggaagctcgaactgggtggagcccaccgcagctcaaggaggcctgcctgcctctgtagactccacctctgggggcagggcatagccaaacaaaaggcagcagaaacctctgcagacttaaatgtccctgtctgacagctttgaagagagtagtgattctcccagcatgcagctggagatctgagaatggagagattgcctcctcaagtgggtc

SEQ ID NO: 816574 - DNA, 632 bp, Homo sapiens
gctttccactcaaaataatccctacatcaagtggtatattttggggaggcagactctgctgtcctttaacgttaggcacagatcatttttggaaaagaccaagaagtatatgttctgaattctaataaaaatggaagaaaatacaattattaaaaatcaccgggagccaagatggctgaataggaacagctccagtctacagctcccagcgtgagtgacgcagaagatgagtgatttctgcatttccaactgaggtaccagattcatctcactggggagtgtcggaaagtgggtgcaggacagtgggtgcagtgcatcgagcgtgagccgaagcagggcgaagcatcgcctcactcgggaagtgcaaggtgtcagggaattccctttcctagtcaaagaaaggagtgacagatggcatctggaaaattgggtcactcccaccctaatactgcacttttccaatggtcttagcaaacggcacaccagaagattatatcctgagyatggctcggagggtcctatgcccacggagtcttgctgattgctagcacagcagtctgagatcaaactgcaaggtggcagcgaggctgggggaggggtgcccaccattgctgaggcttgagtaggtaaac

SEQ ID NO: 816575 - DNA, 540 bp, Homo sapiens
aaatcctgcttccgttatgtttctgctaactttcctctttcctacagagtttgagattttagaaataaaagtcaggtggggtgtggtggctcatgcctacaatcctagcactttgggagcctgaggcaggaggatagcttgaggctaggagttcaagaccaacctgggcaacatactgagaccctgtttctcaaaaaaaaaaaaaaaaaaaaaaattagccgggtgtggtgcctcgtgtctggtgcctgttgtcccagctactcgggaggctgaagtgtgatgatcacttgagcctaggggctgaagtgaccctatgatcacaccactgcaatccagcctgggcaacagagagagaccctgtctctgaacaaacaaaacaaaataaaaacaacaaaaaaaaaaaaaagaaagaaaagtcaagatgattaacatgctattgctgctttcagccctgccatacccctcctctragcaatgaacacaaagcctgctacctgcttgagtccagaagggaaagggtgaaaaaaaaagaagaaaag

SEQ ID NO: 816576 - DNA, 581 bp, Homo sapiens
tgtatagacaggttctcaccaatttcccaggctcgtcttgaactcttggacttgagtgatcctccctccttggcctcccaaagtgctgggatcacagrcatgagccaccgtgcctggcttaattttgttgttgttgttaatagataaattgtccttgtggtttctatattagtcactttcgagctttgttaaatggatcaacaaccttatatcccatcaactcttaatagttgactcacttgagtttaagttatatatcctggagcagtcatcttgacttttgctatttaatgatgtttcttgacagttagcaagttatatagcttgttctgggtgaaacccttctgccttgcatctttacccatttgtattccatttttacagtgatttatttcaaggcaatgaggacaaggaggatgcaaaatcaaaaaaggcattggatttaatggttaaaggtggtgtataagggacaggaatgcagtttgagtaaaatggtgaatacttctagataggcacaaaaattttatttcccctagttcactttttaaaaattaataaactttattttttagagcagtttt

SEQ ID NO: 816577 - DNA, 538 bp, Homo sapiens
ggtaggtactgtaattcgttttacgcatgtgcctccatttgcacatgactctcaatgttattgtaaatcagtgttaataatattcgcaattctatgaaatgggatctttgactgtagccatttttcatatcagaaaaattaggtaagggacagtgacctgtccagcgtcacacagcaagttgctggactgagtctgaggtctatgtgacctcctcgagttttgtttgttttttgagacggagttttgctcttattgcccaggctggagtgcaatggcgcgatcttggctcaccacaacctctgcctcctgggttcctcccgagtagctgggattacacgcatgcaccaccacacccggctaattttgtatttttagagacggggtttcaccatattggccaggctggtctcaaactcctgacctaatgatccgcccgcctcggcctcccaaagtgctgggattacaggcgtgagccacygcgcccggctatgttcttgattttaatcacttggctttactgccatccaaattaggcag

SEQ ID NO: 816578 - DNA, 602 bp, Homo sapiens
atagatgagaaaacagagctggatccaggtaacttgtcaaagttacaccctaggaagtgttaagtcagtgcttgaacgcaagcagtctggctttgcaacctacactcttagtcattattgtctattacctcctatgagaagtgtttgatttgaatgatcgtttatggaagaagcactaatagtaactcttaggctgttgcagtggagttgcatagaagcacagctatgtatcgtgcatccggccagttctgagtcatttttcatcttctcttcaccggagtgtaaaaatgagacttggtaaaatcgttttgtatcttaagtgttatttttggtagtatttgctggagaagaggaattttgcagaggtccccacccaaatggccagcctgccccccttcctgtaccacgagttgggtccttgagtgaggcctcacagtgagtcaggggacaggctgctgatctcccagttcagggcccagacatccccgagcttcggctggcagggcttcagggagagggcccagcggtgctgggggcctgaccccctactgtctgarcagggctgggagggtggttgggacacctgtatttcagggccctgt

SEQ ID NO: 816579 - DNA, 603 bp, Homo sapiens
aaacctgggtgcaaccaaagcctgctgtgattccagcttggtatttactctggctgggtgacgatgatgcgaagctatctagaatcagttctttaaagaacagtggtgattttgccccccagtaacatttggcaatatccaggaacatttttagttgttataataggagggcaatgttactggcatccagtgagtagaagccaaagatgctgctaaacatctcgcaacacggaggacagtttctcataacaaagtgtcaatggtgaccataggtcaagaaaccctgctttaaaaatatcttatttggggccgggtgcggtggctcacgcctgtaatcccagcactttgggaggccgaggcgggtggatcacgagtcaggagatcgagaccatcatggctaacacggtgaaaccccgtctctactaagaatacaaaaaattagccaggcgcggtggcgggcgcctatagtcccagctactctggaggctgagrcaggagaatggcgtgaacccgggaggcggagcttgcaatgagcagagatggcgccactgcactctagcctgggcgacagagtgaaactctgtctcgaacaacaacaacaaa

SEQ ID NO: 816580 - DNA, 606 bp, Homo sapiens
ttgtgtaatgccgtaaattmcattcaatacccaattattaaacacagctttatgccaagcacagtcactatgttttccccagcaaacacgtttcttacactggttttgctacaccccagtgtcacccaaaggtgtgagagatttttgtaaaaaaccaaccaagtaaacaacaagttttgtaaaatttctatatctgtaaggcaaaatttacatgttacatttgtataacttgagaaagtgaaatggttggttattttttctagtcttgagtttaatggtgctagaactttctattaccagcagaggcgttttggcagttcgcatctgtgtaagagaaatccatatagctagctccgaatcagggagtgatccattttagagatttacgtggacaggaaatggaaaaccatccatccttgagacatctacgctttccatgtttctctttctgggaacacacctcttatattcttttctctgtgccactgatcaaagttcccacttgtcagggcagattggctttctctgctactctctcagctcacaattgactgaaaaaggccacctcattctcatctcaatgtaacctttcattaagatgcctgc

SEQ ID NO: 816581 - DNA, 479 bp, Homo sapiens
cctcactatcatataattaacctcaaataacatattttccttattaaagcaaacatgakttatcatgtgggcaagttctgatgtacttatatataaatacaaataacttataaattttctgatacatcaacttctaaggaaggaataatagtttggctaacaatactatatgaatggcatttgctaagtatctctaaactcctttactgctttgaccaccatgggatacagaaaggaaattagttatagggtccaaaattaacatgggttcaaagttcatgagaatagattcacttggtatgaagagtgacatcaatgtcaaattaaattcgatacatctggaaaagttcctaaagtttgtaatttcagagggaaaattttgccaagattcttttgttttctctttaattctcattctaacaaaagtattcctttctttacccaaattgatatcaaaatatttagaaaattttgccttc

SEQ ID NO: 816582 - DNA, 598 bp, Homo sapiens
tatctcagggaagaactatttaaggaaatgcatattgaggaacattgaaaattatgaacatcactatccctttcggtttattttctacttaataagaaattaaaacaatatatatttttcagaatatagtgccttggggaaatggcgatcatggtggatgggaggcaagattagattgcagctccagacagagcagcatgcgggggctagcattgtgaattttagctccagattgactgcaagaactaaccagcaatcccaagaggacccacaaaaattctgaaggaagtggactgctccggcaggacacaggagatcccgccaaaattgtgagtaccccaactgctgatgtgggaaagggaaaccctcctctcccgaacacacatcaccactggagaagctgaaggtctatttgtgggagaagtttccaactttacctggagctgagtcaatttggagagccgagcaaaattcaaaggtagaggaagcagcagaaaggcccagggagctcactgggtcctctagcaggccatttctkcctggcaccacagggatccaatgggagagaatcagggggtaaaattacacaggcagatgg

SEQ ID NO: 816583 - DNA, 645 bp, Homo sapiens
ttttccaaatgaagaggatacagacttttagtgacaaggtcctgttgctgagtctaagttgggtctttctgtttattgtacataatttcaccaacatacaaggwatagcatgagaaattaccagaaccatttctttagaactcataaacatttgttctgtgctccaggatttcctcatctttggctaatccctttggtgagtttaatcatctgttatattgtaatagttgctcattttcttaagtcatggagcatcgttgttcaaccacaaacatctctgcaccttggtaacacgagttctgtggtacatgaggatgatcgctaacctatgcccaggaacaacgcctactttgccctaagcactttgtcagggtacaaggcagtgagatacagttaaaatgaggtaggctccttcccttaaagacttttaagtcttattcgggatacacagtgtacacattgaaagcacttggaaggggagtagatatagggacattcctgcaaattaaggccaaggagagacaccatactacaaagaatatcaataaaagacatgtgaaggcagttggcaaatctccaggtatctccaggtcctcaatgtataacatgttaatatcaacatggatatatacctgcttttttcag

SEQ ID NO: 816584 - DNA, 417 bp, Homo sapiens
atattgatcgatgggaactactagcattttactagtatttaattgaagctttctccagtggaaagtaggcagttatggagcttggctgagttttgtgataaattacagactggatgaattataggaagcagatttgcaacaaggggtgaatctaactaatgaaaaggttaatggagtttgttgatgtacacacaggtgatgtttactgtgtttcttaacttgaggcaagtacatttgcaggggattaaatttaacctatgacttaacttacatgttcggcaagggatactgtgcatggatatctwtaactaatcaaataattaagaatttcattgttatttgtgacatagataaactaggacatacctatgttgccaagagttctgccttttcacatataatgttacactctgtaaa

SEQ ID NO: 816585 - DNA, 423 bp, Homo sapiens
gattccatgtcaaaaagaaaaaaaacgaagtagaaggggctattcctaattttatcacaagagctatggtaactgttaggaatgctgcttgggttagtatttttgtggttttcattgtccagagtacattatattgataataacagctatgattagaattgtagatgtggttgcttgtgaaaggaagtattggttcaatctaaatacacagataggtcctggccaagacatgcactcaggagagctttcaggagggattcaatcccaaactcctgctcccaaatgccaaggaactatccaaactgccaactcaagtcagcggaatgtagaacccaggcccggcagggctcamcatgcaacacagagcagcacactcagagcaccagctcctccagccagcagcgctcaccccacatgccagcc

SEQ ID NO: 816586 - DNA, 423 bp, Homo sapiens
gattccatgtcaaaaagaaaaaaaacgaagtagaaggggctattcctaattttatcacaagagctatggtaactgttaggaatgctgcttgggttagtatttttgtggttttcattgtccagagtacattatattgataataacagctatgattagaattgtagatgtggttgcttgtgaaaggaagtattggttcaatctaaatacacagataggtcctggccaagacatgcactcaggagagctttcaggagggattcaatcccaaactcctgctcccaaatgccaaggaactatccaaactgccaactcaagtcagcggaatgtagaacccaggcccggcagggctcaccatgcaacacagagcagcacactcagagcaccagctccyccagccagcagcgctcaccccacatgccagcc

SEQ ID NO: 816587 - DNA, 331 bp, Homo sapiens
catgttggagtgtgctggcctgatcaaaacacactgcaacctcagaatcctgggmtcaagcaatccccccgtctcagcctcccaaagtgttgggatgacttgcttgagctgccatgcccagcctctccctaatttttctaagccagcctgtagaggctgggaatcagccctggccattcagggaatccgtggagggtggcccgggcccagcaggctaccctctgactgctttgggccgagacacaagttggagtgagaccctgaccaggtggcatctggtccggtaggggaaggtccaggtccggcgcagtcccaccggtggtcgggcgcc

SEQ ID NO: 816588 - DNA, 621 bp, Homo sapiens
gttttttaagttagacactgagattattgattacagatcattctttggtggtatatgtgttcaatcgtmtacatttcagccaggcactccttttgctgcattctacgtgttttgataagttctatttttatttaattcaaaataatttttaatatcttgagacttttctcatccatgcattatttagaagttcaggatttaatatccaaatatttgtgggttttcaagctatctttctgttatcaattctggatctgagaacatgttttgtattctctagtcttttaaatttgctaggaagtattttatttaccagaatgtgagatatcttggtgaatattccatgtgaacttgagaagaatgtatattctgctgttactgaatgaattattctggatttcaattaagtccagttgttttgatggtgctgttcaatttaattatgtccttcctgatttctgcctgctggatctctaaattaatgctgggggttattgaaatatacagctgtaccagtgaattcatgtatttcttcctgcagttgtattagttttcccctcatatattttgccactctgtggttatgtacatacacagtaaggattgccttgtcttcttggt

SEQ ID NO: 816589 - DNA, 574 bp, Homo sapiens
tctcttctagctgttttgcaatatgcaatgttttcctgttaaccacagtcaccctagtgtgcaacagaacacmagaattcattggttcaatctaattgagactttgaacccgttgaccaactgctccccaccttcctaaccccttcttctccccaatctctgataaccactgttctactctctgcttctattatatcaactttttttttttaaagattccacatatgaatgagatcacatggtatttgtccttctgtgtctggcttatttcatttaacatgacgtcctccaggtttatccatgtagtcacaaatagcaggattccatttgttatggctgaataatattccattatgtatatataccacattttctttctccatttgttgttagacacttacgttgattccatatcttgacttgtgatagctatacaataaaacatgggagtgcagatatctctttgaaatacttatttcatttcctttggatacatactcagtagttgaattactggatcctatggtagtgttttttttaaattttttgagtaacctccatacgtttttctata

SEQ ID NO: 816590 - DNA, 472 bp, Homo sapiens
aggcggtgcttccaaactgccacctagagataaagctctcagcatcattaataaacctctgagggacagccattcctcaattttgcttcaaactcccagctttaaatatagctctctagatgtgtatttcatgcaccttttcatgtggtgttttgctttaggacatgctttctttccctctaaattttatcctggctctgttttccccactgaaaattagttctttctcatggctaaagatgccttttcgctcctctttagtatatggattttcatggctgtgcctccagataaaatgaaacatattggtagagggtcccagacttttcccttttcttaaacaggaagccctaccaacaacaataaaaacttcctagcaggttcaaaacaaaactttaaccacagccaataattttaaaacatttgtaggtgattttattttagcaragaacccgttacagagagtcacaaa

SEQ ID NO: 816591 - DNA, 630 bp, Homo sapiens
tgctaggaggagaaaaaatggccattttgaaatattccagagcattctgttctgctttacaagtcctgcctacaggacaaactatcttatcagascctaacctgctggggttttatcacagctaaactgatgtggggaaaggaaaatatccaactccagccccctgtagccatcctgtctcacctaagagggatgggtatactaaacagcacctgtgaagttcacagctcaagggtacaggcttaccaaaagatggagactaataaacaccaggactatagaatgcttcccctccccctacaccttactactactttactaaaggtttatttattacattttcttcacccagtacatcatgcccacctttcagtaaaaaattacaaggcatttgaaaaggaaaaatacagtttgaaggaccagagccagagtcaaatatgtaaggaatgttggaattatcagaccaggaaattttaaaaaacctaattaatatgctaacgcttttaatggaaaaagtaggcaacaatgcaagaacaaatggataatgtaagcatttgctgctgttaagaatgcaaaatggtgcagccactttggaagacagtttgacagtttcttacaaaactaaacata

SEQ ID NO: 816592 - DNA, 482 bp, Homo sapiens
cctcactatcatataattaacctcaaataacatattttccttattaaagcaaacatgakttatcatgtgggcaagttctgatgtacttatatataaatacaaataacttataaattttctgatacatcaacttctaaggaaggaataatagtttggctaacaatactatatgaatggcatttgctaagtatctctaaactcctttactgctttgaccaccatgggatacagaaaggaaattagttatagggtccaaaattaacatgggttcaaagttcatgagaatagattcacttggtatgaagagtgacatcaatgtcaaattaaattcgatacatctggaaaagttcctaaagtttgtaatttcagagggaaaattttgccaagattcttttgttttctctttaattctcattctaacaaaagtattcctttctttacccaaattgatatcaaaatatttagaaaattttgccttctca

SEQ ID NO: 816593 - DNA, 401 bp, Homo sapiens
taaggatacctgtccaggctggagtgaacactgagttttcactacttcctctcatctctcagaaatcactgaagcaggcccaaattygtggttagtccaataacaacccactctatttgagccaaaaattatagcaggccaggtcctgggtcagggagctcatttccttctctgccctctctccaccttgtccttcctgcccaggtgtgaatctttccccagagccaggcccacaccagaataagccctgggaagcaggagagtgggacatggcaaggtatttgtctctgtgtgtgggattgcactgggagaggaggacggagggaaggcattcctcatgcagtaaacagcccagaccaatttgcaccccagccactgagccttaatcttttcatgatgct

SEQ ID NO: 816594 - DNA, 646 bp, Homo sapiens
catgtgttctcattgttcaactcccacttaataagtgagaacacgcggtgtttggttttctgttcctctgttagtttgttgagaatgatggtttccagcttcctccatgtccctgcaaaggacatgaactcatcctttttcatggctgcattgtattccatggtgtatgtgtgccacattttctttatccagtgtatcattgatgggcatttaggttggttccaagtcattgctattgtgaatagtgctgcaataaacctatgtgtgcatgtgtctttatagtagaatgatttataatcctttgggtatatactctgtaatgggattgctgggtcaaatggtatttctggttctagatccttgaggaattgccacactgtctcccacaatgattgaactaatttgcactcccaccaacagtgtcaaagcattcctatttctccacatcctctgctttatagcatcctctgctttataggtgttaacctatattgttttaagggttcattgactgcctaataaatatcttctcaaastctggacaaaaacattctcaaaaaaagtatatgttcctttctctgtccctagacaataaaccacttgaggataaatctgtgtgtatattacttgtgagtcctcagagcct

SEQ ID NO: 816595 - DNA, 600 bp, Homo sapiens
taaaaatcaagagtagaaatgatgacactttaaagaatttaactgtagtagtaaaaagaatcaggtgagaatttatgagaggacgctgcagaactgggagaatgaagacccctaagtttctccttcaggagacttttaagaagaactcagagacgaagagggagagtctattcatggagttgtctcctgggaccctctgaagagaacatcaaaaacccactgaaaacaaaaagattattgctaaatatttaatgtttctgttttatgaaaggattcagtttttaaaccataggcaaaatttacccatgcagatagctaaagaggaattgaatacatttttccgttgcttgacagtgtattcatatcccacaaaataaggattttattttccccaggggcaaaacccacttagtatttcgtaaatatagtactttatttcttactgatatttttcttcaaaatattcacaagcaaaattgtggtaatcactgaattgttgtgatggttatacyggtcttctttatactattctttttactttggggtatgtttgaaaatgttgacaattttttaaaaaaatcgttaagagtctttctagcc

SEQ ID NO: 816596 - DNA, 598 bp, Homo sapiens
agtccccatctcaacaaaagatatacaaattacctgggtatggtggcatgtgtctgtagtttcagctattcgggaggctgcagcgggagattcacttgagcccagaggtcgaggctgcagtgagccgtgatggtgccaatgtgatccagctctggcaacagagcagcagacactgtctcttaaaaataaaataaaaaatggtataaaagacatctgaaagacacccctgaccaccaccaccaatggccaagcattctgaacaacataaataaagtagctcggcttaaaacctaaaatgtaaaacaaatattaacagaatcattccaacattaataaatgattgaataaaaaattgatgggaaaataatcaaatatactatgtaaaattccaaataatttatgaaaacactcccgtggcaaggaggtagagaataactccccactatttaagtgggctgtgcacagtgcttttcttccagcgaatacaacacagaaagggaagaaaaacacaaaagcaatttcacattggggaaaaatgaaaaatactacctcaagccaaagataagkttcacatcaaagtgatgtcatatgaaaagtg

SEQ ID NO: 816597 - DNA, 627 bp, Homo sapiens
catgttatttttaatagaagagaaatagtgtaaatatttaatgagacatattgttaaaggataytgtttcattgaaaaaaatgattattttaaattagggtagaacattcaatacactttattttaaatgcagatttccttctccaaactctatttcttccaataagatcaagtatattaagtcatatatccagtcagcaagttggtcatggcacagttagtacatgtactgtgcctcccaccttcttaattcctaacatgagtgtgaatgagtttgaagtttgaatgctgtagtgcttttttactatagtactctgttaggtgatctggtgattgttcctatagttgctatgtgcttggtcaaccactttgctaagtcatctcagctgtactactcgaggattttatgcaaatcagctccttcttcaactgccttaaaacaggaagcttttctctatttctgaaactccttgaacttccttccttagaatacttcccactatagtcaaacaagtaggaacaaagagaatggtccaatccttcttccctctacctgataatatagtaatcattgccgtgaaatcattaggctgatgcttcacagcttataaccttcatcttattcat

SEQ ID NO: 816598 - DNA, 530 bp, Homo sapiens
agttccctcatacacttttattcccactcaacaactatgtattggtgtctacagtgagtcaagccctatctatgcctggtgctgggaatacagtggtaaataaacaaaaaaagtccttgttctcatggtgtgcattctcctcatttaatagttcacattttaaattcacaatgtctttttaagaagttcactaattcttacatagaagatgaaaacccagaccttaggacttttcgagctaatatacatcaatatgttcaacaggggcttatactgtcagcatactatcgtgttcacatttcataaaacaatggaaatacctaaatcaaaagataacggaaataaacttgtaatgttagtagtatggaagtagagcatggctgggtgcagtggctcaagcctgtaagcccaacaatttgggaggctgaggtggggaggatcacttgagcccaggagttccaaaccagcacatagcaagaccccatctctacaaaaataaaaaaacttakctggacgtggtggcacatgcc

SEQ ID NO: 816599 - DNA, 538 bp, Homo sapiens
ttatatatactatgtatacacattatatatcacattttatttatccattcattcgttgatggacacttaggttaattccatatctttgctattgtgaacagtgctgtaacaaacattgggatgsaggtatccctttgatatattttcctttgatttcctttcctttggataaataaatacccagtagtgggattgctggatcatatggtagttctattttcagttttttgagaaatgtccatgctgttttctgtagtggcggtacaaatttatattcctaccaacagcttataaattatattaagtgaaataaaccaggcacataaagaaaaatattgcatgttctgactcataagtgggagcaaaaaaaaaaagttcatcttgtggaagtagacagtagaatgaggggtggagaatggttgggagcaagcggtagggacaaagattgaggtcagttaatgggtacaaacatagagttagacagaataaataagccctaatgttggatagcagagtagggtgactgcagttaacaata

SEQ ID NO: 816600 - DNA, 539 bp, Homo sapiens
tgacaccattcactcttcttgaatgtctttttttctatgagactatattacttcattacttcccaagtctctggttcttctacttccatcctccttttgtgttcttcctctatttgtcctcacaaagttcccacagtttagcttaaagtttctctgacttctcggcagcttaaacagttaagaatcttcaaacaggccagacatagtggttcatgcctgcaatcccagtgatttgggagatcgaggcaagaggatcatttgaagccaagcattcaagactagcctgggcaacataataagaccccatctctataaaaaaaattttttttaatcagctgagtgtggtggtgtgtgcctgtagtcctagctactcaggaggctgacggggaaggatcacttgaactcaggagtytgaagttagcatgagctattattgtgccactgcactccagcctgggcaacagagcaagaccctgcctccttctctaaaataagagttttcaaaaaaattaagtataccagctagttatgatacattg

SEQ ID NO: 816601 - DNA, 662 bp, Homo sapiens
taattatccttagtgatatatatctaaagtgagatactgaaaatttactttgattaacttcrtttgttctcagcacaggtgtctgcatcaggagttattcatggacatttatctccaagtcctttttttttttttttttttaaaccttggattccacagaccacacaggactttttgatctcagttcttcctcactggcatgttttttttttttgacctgaatctaattttagagaaacacgtaactcatttgatctatcaggatatatttgtcttctatatgggttgagggatagcggcaatcatagataataggaaaatttaaactaaaatcctctaaaaacaatgtccctgatttagtattctacgtcattagtgactaaaagtagaaaatctgttcaacacagtttgtcttaaatttgtaccaaccgtactgacacgctgaatgtatttctgttcacgtacatcatgggtcatctttttttagcgttgagtgtaaataatgtgctgtggtccaattccaggtgcaatccttgagctttttccagctgtaggactggaaagtctattggaggcattttcaaagccccaatctctctctctctctctcttttttttttaacttgtaaagatttaaaggatacaagcgcaattttgttaca

SEQ ID NO: 816602 - DNA, 597 bp, Homo sapiens
gatcttcctttgtttttaggtaacatttaagcactgagtacttattacaggctctctgtaagtgttctagattcagcaccttgtttaaacccctcagcggcactgtggaggcaaatatgatccccttttttacaaacaagggcaatgaaactcttaaatgttactttctaaagggaacacgctggtggagccagatgggaatttggtctgcttgactctaaaattaaatgattctctctataactattgctgtccagctttaaaagtagatacaataatttttgtaatttttaaaaatgatgttatagacctgctaaaacagaaacatttttcctaccatgtaaatctttatgggaattgaagagcctttcatttgctttaattaaataccttgtgtgattggaacaatttcaaagttgcattaatgcaacttggccttaaaaatttcaaaggaaatattatcattgtcatttcatttcacagtctcagttccattctctctctttagcaagaattatataagggcctaattaaagttttagcttactgaaagatttttaatgttttttgcacscttaaaactttagaaagcaattt

SEQ ID NO: 816603 - DNA, 566 bp, Homo sapiens
gcttctcacacttcctcacaccctccctcttcctgggcattctgtcttaaccccctaacctggtaccagctgttttctgggacacctgagggctctccgggcacagtcctggtcccctcctgcccacagcctgaaggggcagctttgtcccacagggtggacttgcctgctttgcaaggctgaggcacatgctccttgcagatgaacagacctacagctaggcgagcatgcagcacagcccgactcaggagctgaggcctcccgctgcacgagcccgggctccctctgtgtcacttgcttcgctctgagtctttgtcacctgcctgaatgctcctgatgcctcctaggccactggggagagctgtgcttgtcccacgctctggcacagagtgtctgtcccgagtgcttcctctaaacctttcctgtgcagaagctgggacaaattctgtgcatcctggtgcagaacacacctgttcagaaagtaactgggtggtgagragtttcctttgcaaataccatttgtggccatcaagaatcactaaatgacattttcttccggaatgtac

SEQ ID NO: 816604 - DNA, 550 bp, Homo sapiens
ctaacagcaaagcacattggcttggagatgccactgctggcatcagyggatgccgacccaaagcaaggaaaaggtcacagtgatccagaagatggcgagaacccagggatcaaagttaccaggggggaaaaaggcattttttggatttacttttggggcaacgaaagaaaatgcagagaaaatgcaggggtggggctgagtcccaccaggtggcaggaaaaggcaggtgcaggtgggcgtggtgagaaggcccaccttgtagtcttccctggcatgcgcgccccgtgactccttccgtgcctctgctccgtagatggtctgcagcgcacacagcatcaggttctgcagctccagggtctccaccaggtccgtgttccagaccattcctggggacacaaaaagttccatcaggggcaggcgggacccagtcacatgggccctccgagctgtcagcctgggcctgctagtccatggagtcactggttgtggctttatagctgtgggccaggacccatccagacagcaagcacggaactaagtcagcactgac

SEQ ID NO: 816605 - DNA, 590 bp, Homo sapiens
gaacctgagggcaaccactaccatctactgaggaccatgctttctcaccctgaggcaggtgctcctgtcctcaccctttacaggtgaggaaccacggctgggaaaggccatcaccctcacatggttatatcaaggcctgtgtctaaaccgttattctacaatgcctctattttcattaaaataaagaaactctaaatgaaatttattcatttttataaacaaaataaagtagaaatgagattcctaccctgtggcaacaacagtgttctttgctcttatgcgatggatggacccgtcctctatgcacagtgcgatgacaccacggcactccccattctccatcaggagatccaaggcaaaatactccacaaaatagctggtatcatatcgcagagactaaaagaaaggaaaaaaaaagggcaagaagtgttaagccaaactttaaggttttaaggtggtatctgctcatgtgaataggtgaaagaacttgatccaaatggaccaggtaaatccaaggagatcagcaacagtgtcagtgacactgtcagagcccgagaggcattccaygccgagcagtacagacaaggcag

SEQ ID NO: 816606 - DNA, 598 bp, Homo sapiens
ttctgcttccccccttttctctcagtcttcttgattgccctttccccatctctctctccgtgcttttcccatctctccgtgctttctcccctctagygttcctgtacctcctgtttcctcccctgacccagaaaacatagttttagagctgaaagggactggttgagttcactgggcccaactcagtttcttttaattaaatattttattttggggtcatgtaaatcacatgcagttgtcatcagtaatgcagagagcccgtgtaccctctacccagctttccccagtggaagcatctgcaaaacgatagtgcagtgtcacagccaagacatctgccaggatgcggtcaagataccccaatccctggggcctcacgtgctgccctgtgtaccgcccctccctccatagcccccggcagctactgatctgttcttcatctccagaactttgtcatttcaagaatgttatgtaaatggaatcaaacagtatataacctttcgggttgacttttttcattcagcataaccccctgaggtccatgcagattgttgctgtatcagtagttcatagatagtttcattgctgagtcgtgttttat

SEQ ID NO: 816607 - DNA, 669 bp, Homo sapiens
cacccatggacagcaggcatgcggtggaaggcggagggcttctgtggcagcttcgcaggtctctcatctgctgcrgaccccctgacaggctgagggtcttgctgtcgggtagcgggaccagatgagcctgaatgtggctctgcggctcacaggacaagtgtaccttgagagctgctgccgccgcctggatgtttgctgggtgagctccagattcacgggagccctttgtgccagcatggccgccccaaccccatggggaaagcagatctccctcacctgggaatctggcagagacctcaggcagtgccccatctttcatgacctgcctggtccaggtagaggagtcaagtcctgctccaggagcaggtgcagggcctggcctgggtgccgagagtggggtgaggagggaggagtaacgaagaaaggcagatgggcagaaagtgccacattggggcactcaagtggctctgtttaatattccagcagggacactgagaccgagcccatccctgctgggagagcttctcgaagctggttggtggctgacaggcagggagtggggtgctggggcctcctcgggaggtaggggtgctggggccctgctcttgacagcactgtgccatagctccgaggtggctgctccccatgggccaggggctggtggtgcca

SEQ ID NO: 816608 - DNA, 610 bp, Homo sapiens
gcttgggagtcagacagcgcgggctctgagtcctgactagtactttctagctatatttctaaacctcggtttcctcatttggatcataggcttttaaagatctactttgcaatgaacaaacagttatcaatgaacaaatgtatgtagggtcacagtggctgacacagtcagcattcaataaatggtaacttctgctattattattattattattattattatttgagacagagtcttgctctgtcacccacactggagcacagttgtgcgatctcagctcactgcaaccttcaccttccgagtagctgggactacaggcatgtgccatcacacccaggtaattttttgtatttttagtagagacagggtttcaccatgttggccaggctggtcttgaactcttggcctcaagtgatccacctgcctcggcctcccaaagtgctgggattacaggcatgagccaccacacccggcctcctgctattaataaaattggacataccacgtagaacaccaacaagggactgaaarcagacacagatacagcaagaaagtgctgataaaatcttttagatatgagagaggacaaaacagaaaaaggaagagtttt

SEQ ID NO: 816609 - DNA, 581 bp, Homo sapiens
  misc_feature 244, 245, 246, 247, 248, 249, 250, 251, 252, 253, 254, 255,256, 257, 258, 259, 260, 261, 262, 263, 264, 265, 266, 267,268, 269, 270, 271, 272, 273, 274, 275, 276, 277, 278, 279,280, 281, 282, 283, 284, 285, 286, 287, 288, 289, 290: n = A,T,C or G
  misc_feature 291, 292, 293, 294, 295, 296, 297, 298, 299, 300, 301, 302,303, 304, 305, 306, 307, 308, 309, 310, 311, 312, 313, 314,315, 316, 317, 318, 319, 320, 321, 322, 323, 324, 325, 326,327, 328, 329, 330, 331, 332, 333, 334, 335, 336, 337: n = A,T,C or G
  misc_feature 338, 339, 340, 341, 342, 343: n = A,T,C or G
tccagcctgggatcaagaggctaggaaggaggtgtaggagtgtaaagcctagaagtggacctatggccgagcagaatggtccctgctttctgtgactaaggcagctcagagagtgctcaatttaagcctggagtggaagtagatgaacttgctggaaaggagcatgatcctctggtggggctgcggcagagtggaaacgtgaggacatggaaggaaactggttcatgctgaaagcgcaagtccnnnnnnnnnnnnnnnnnnnnnnnnnnnnnnnnnnnnnnnnnnnnnnnnnnnnnnnnnnnnnnnnnnnnnnnnnnnnnnnnnnnnnnnnnnnnnnnnnnnntcgtaggctgggagagtgatagactggggtggaagtctttggacaaatccatttcttattctctaggtagtaatgggccatgagttgaggagtcaatagcaagaactcataggggaagactttggtatgtgtttgggattstgcctttgggattttttaaaatcctgagatgagggaacagactactgtgaaggcatgatggatcctgtgaactgaactttttactctgtccttggga

SEQ ID NO: 816610 - DNA, 581 bp, Homo sapiens
  misc_feature 244, 245, 246, 247, 248, 249, 250, 251, 252, 253, 254, 255,256, 257, 258, 259, 260, 261, 262, 263, 264, 265, 266, 267,268, 269, 270, 271, 272, 273, 274, 275, 276, 277, 278, 279,280, 281, 282, 283, 284, 285, 286, 287, 288, 289, 290: n = A,T,C or G
  misc_feature 291, 292, 293, 294, 295, 296, 297, 298, 299, 300, 301, 302,303, 304, 305, 306, 307, 308, 309, 310, 311, 312, 313, 314,315, 316, 317, 318, 319, 320, 321, 322, 323, 324, 325, 326,327, 328, 329, 330, 331, 332, 333, 334, 335, 336, 337: n = A,T,C or G
  misc_feature 338, 339, 340, 341, 342, 343: n = A,T,C or G
tccagcctgggatcaagaggctaggaaggaggtgtaggagtgtaaagcctagaagtggacctatggccgagcagaatggtccctgctttctgtgactaaggcagctcagagagtgctcaatttaagcctggagtggaagtagatgaacttgctggaaaggagcatgatcctctggtggggctgcggcagagtggaaacgtgaggacatggaaggaaactggttcatgctgaaagcgcaagtccnnnnnnnnnnnnnnnnnnnnnnnnnnnnnnnnnnnnnnnnnnnnnnnnnnnnnnnnnnnnnnnnnnnnnnnnnnnnnnnnnnnnnnnnnnnnnnnnnnnntcgtaggctgggagagtgatagactggggtggaagtctttggacaaatccatttcttattctctaggtagtaatgggccatgagttgaggagtcaatagcaagaactcataggggaagactttggtatgtgtttgggattctgcctttgggaktttttaaaatcctgagatgagggaacagactactgtgaaggcatgatggatcctgtgaactgaactttttactctgtccttggga

SEQ ID NO: 816611 - DNA, 637 bp, Homo sapiens
tttataatttaacagttacctccgtgtttatagcatccatcgtacttttattttattccacaccaggatactgaatgaagagtttagagtttatgaaaaccttatggaaatcgttcatcttccctaatgcatgttggctaccctgctgtgtgagatgtgacttcagttctttgcttccactttataaacataagagaaccagaaaattatttagtaaaggcattattagcaggagagcagtgattttggctgaatcactgctgggcttggcaagttaatttttgcctgcatggtaggtaggttcatatttagtaaatgatttgtggctctcaacaagtgaggggttattgttaatttgaccagactgttaaacctcatttcattaaaatatgtagtcctctgattcccttaaatctttgcctcaggcttttcttctatgccaaacaaaatggttgcttccgttgttgaaatgactggtaaatgccaaaaggattctcctgctgtaaaatgacattgcagttagatatagtattttcatctaatttaggttatactatttcrttaaatttcttaagaactctttacaaataaatctatatttaaatatgtcaataatccacacatttttttgtaaaat

SEQ ID NO: 816612 - DNA, 382 bp, Homo sapiens
aattttgtcaaattgcttaattaatatcagaaaactgttttcctttgacagcatcattaaaattttttcttcatttatatttgtagcatttgtwttcttatgagatgaaattagtttttgaagcaagaataaaataattacattgtctgttctgaactctttttacaaaataaaaatctctaaaacagtcttgtaagtaataggaaattggactctcacaaatattttctataatctgaaatagcttaccagtgatttaattttagtaaaatatgtcttcaaagcaataaattatttctgtatgcaaattaaatggttaaaattagaacttattgtcaccttatcctttacatctgtctttattccattgtctataaaaatc

SEQ ID NO: 816613 - DNA, 617 bp, Homo sapiens
gaggccaccctcttctgtgggggtcagcacggggaccggcccttccctcttggacctggtggaccctgtggcacgtggggtggcatcggctgcctgggcacagctctcagcgggagggccaggtcccaggaaatgaggcaggggctgccaggcccccacaggccacctcacctgcagcccctctttctggccctctgcacgcagggaagtggtggtcagagaggggcacacgggcgggctggcagccgccctgtccccatgcccccactccagactttccccttcccatccttcccagaggacccaagggaggaccacgcctttttaaattatttttaattttttggatacataacagttgtacatatttatgaggtatgtgtgctatagtgatgcgtgcacgtaacacctaacgatcagaccagggaaactgggctacccatcacctcgagtgctgatcattcctttctgtcaggaacatcccaaatcctctcttctagctattttgaaataaacgayaaagtattaactatagtcaccctacagtaccaccaaacagcaggtcctagttcttcagcctggcagcatgcctgcagcccttcatctcccccttccct

SEQ ID NO: 816614 - DNA, 629 bp, Homo sapiens
tttgaccagagagggcctcagggggatcctggccctcagctcccaggaagaggtcctctccccgcagcatccatgggaagtgccttcagttgctccagttcttcacccctctctgtatctgccctatgtctgcagcttggcagggtgtttgctgcttacattttgagactctcggaaacaaactgtgccttctaaacacacagtggaatctgacaccaatgatgcagtccagaatgctttcttcccctggtgacaaactttccgagtatcttacattagtttagtggggccttccagcagctgtcccaactcagagacagacctgcaggcccatgggccaagacagagcccttccccaccaaccttgaccttggatgaaaagcatcatccctgtttgctggaagtgtgtagtaggatgacggatgtgttggcagagccaggcccatgctgtccagggaggcatcaatgctttgcggtgtccagacagtttacaaggcccaagaatgctgctcccttggtgaggcaaccacctygtgctacaaatcccctgacaagtcaccaagacttgaagggaggaggctctctggagcatgagccaactctcccagatgctaacttggatggctgtg

SEQ ID NO: 816615 - DNA, 616 bp, Homo sapiens
gtttcagaaggcggattgtccaggatcctgtatcctgaattaaggacaatgtagagtagasgatgggcatgcagcatgagtaagaaatagatctttattattttaggtcactgcaatgtttacagttgtccattacagcaggataacatagcttattctaactttccaaagatgagaaactattaagatctagcattcaaactcaggtcttatggtattaaggccaatgcttttgtactaccttacagtacactgcttattagaaataaaacaccctgtgaatgtaccttccacttcgaagaaaatggacttttctgttgctctttgacttaaaaaaaattaaaaattctctgagcaaaggtcaatggaaaggtagcgaaaaagttggtagaggtgggcagataataaaactgatgagaaagatccattagtttagcagaaccctttatttcccataggttcatgacctgaagattacataggatggagggaggcccttatcataagcctgcaattctgtggctaacaaaatcaatttttaaatgatttatgtgatgtttttcaggaccaaaagagcagtaattcatttcccatgtggtacttggagctgctgctt

SEQ ID NO: 816616 - DNA, 519 bp, Homo sapiens
atcataatatcaagcatgtttgctcaagaagagtcattggaacagacttgaaacattgagaagataataagcatgaaagggcccatctccaactggctcactctgtattcatgacattattcttgaaagaattgtatgtccttagggtgatgacctttcagcttccagctttgtgtctagaactgctggtgccccctgataacagctgtaaccatcactgctcttggccaccataacttgaagcacttgaccagcatccatctttcttttctcaactcagccacatctcatcaagtactctgaccatcctcactgctacaaattcaaagtgccttgtagaatgtaataagaaatgacctcgatttttcctaatgtagtggaaacttgggacagttctctccaaagaggcactctgtgctgaatccatgayggagtatcccatcacctgggaaataaacaattgaacagataaacttctctaacattgagcacagactttcctcaagaaatagctgctaa

SEQ ID NO: 816617 - DNA, 393 bp, Homo sapiens
tacatggttgagggggtttgaaggaagtgaagaatcagatatgtttytgaaccaggactcaaaaacaagttttataattgcaatatcttcttaagagctcggcgaaaatggttttcattttcttcttagattcttttaagaggtgccacattgtaaatgatcataatggcacaaaatgtgaattcatgtggaaaaaacaggcattaatgattctgaatacagaaaagctggattctgaagggaagaagtcttaactaatttacttcaaagtattttccttatgatgtatgaaaaagaatgataagataaaaatctatttaattaagaccaaaaacatctctgtaggtttaaaataaaatttgtatgtggtaagaaagcattgtgtcacggtta

SEQ ID NO: 816618 - DNA, 577 bp, Homo sapiens
aggttgggtctccatgaatttttgaccaaactgttgctccaactttagaatccaaaaacaattctaaagagtacattagaaattcctgaycctcctggtatttggagcagaggtagattgcaagttagaatgaaaatcaagctaacacatttgcacaggtatatggacgtgattttatgtacataaggtatctatcagggactcaccatattgaaatgttcagaaaagttaatgctattttcattctcattcatcttaagagaaaactcaagattgtactatctcagataaccaaaaagataattcttctagtaaagatggtgaatataacctcttgtgtgactgtgtaaactttgtaaactcatcaactgagaacatagtcatcttttgacaagtggatctattccaactcagtttatttttctgatcaaggtaaaaaacatagtccttggaatgttattcatgcagcttaaatggaattcagggaagtcaaaaagcacagggcttcacattgataagtgatttccatctgattcctgaattaattatgcatattaattcccacattctatctcaa

SEQ ID NO: 816619 - DNA, 446 bp, Homo sapiens
taacacaaagtgataaagttgtttgtttgtttgttttatttttgagaccgagtctcactctgttgcccaggctggagtgcagtggtgcaatctctgctcactgcaaccttcgcctcctgggttcaagcaattctcctgcctcagcctcccgagtagctgggattacactaccgagtagctgggcgcccactaccacacccagctaatttttgcgttgttagtagagatgggctttcaccatgttggccaggctggtctcgaactcctgacctcatgtgacccccccacctctgcctcccaaagggctgggattacaggtatgagccaccgtgcccagccccatgagcctttttctactcaggggattaaatatytaaagtagaattgtttttgtcttgcttatctcttccatgccacctctgtttctttagggtaagcatccattc

SEQ ID NO: 816620 - DNA, 658 bp, Homo sapiens
cctaatacttttcaaactttctttttcttcaaaatagccaggtttgtttgagataaaaataaagtttagtttgatcaagtgtgtgtgtgtgtgtgtgtgtgtgtgtgtgtgtgtgygcgcgcgcgcgcgcgcgtgcgcaaaatctaactactgaggatcaaaataaaataagaggtctgggactggacaaaagtatctaggtaacaaccaggtaataaaagtccaaaagagagtaaacctcttaagaatgaaaaatttgtgaccattgcctcaagagatccgtttagaaagttaatgcttataatttaaaaatagagaaacactagtttttttaatattaagatgacattttacctatgatgttatgaaagtacttatctatcttttcaagaatgatctagtccagatcctttgttattaaccatatctttgctattttaatttaatttttattatagaaatatttgatgaatgactatttcaatggtaacaaaattggtattttaaaacagaaaaagcaattaaaaaatatatttgttattgatttataagtcatcaaattaacattgtagccataagaatacatatttatagagtgatttttttctccctcagagatcacctacatcctgatacttgtcccagcacctaccagagc

SEQ ID NO: 816621 - DNA, 662 bp, Homo sapiens
aatgtaaatacaatgggaataattggatcctgaggtggcaggggccaagtggcagcattcaaccaccaaaggcaaggtgggcatagctactgtaatggatggcagaggcaaagcagcaatcagaacagtctaactcttgtggagctctggcattggctaattaatcatggtgttcctagaagtgaaattgataggaagcctactgcattcctacttaatttatacaagcagaaaacttctaggtcaaatgaataaaagactaatttgaattttttaaaaaaagagagaatcactgcctctcaatcaatttccagacttgagccagttcaaagacccagaaccccttgagtgaaggggatgccccatccttttgatgtaggaccccactacattactgacaatttatgcagtgaatgtttcttcctttcttccccgtggagatttctggccttttaccagtgtaactgtgcactggggaaagggaaataatcagacaactcatggactactggatgctggctctgggctgacattgattcgggggacccaaagtagrggcttatggaggtaaggtgattaatggagttttggctcaagtctaacttacagtgggtccagtggttccctggactcaccctgtggtcatttccccagtgccagaa

SEQ ID NO: 816622 - DNA, 609 bp, Homo sapiens
tcagctttcatagaattcgtttctactcagttgttatgacagataagaaggaactggaagccttgctaagaaactaggaccagtatagagctgctatgtaggtatttaaagcatctagatcatctgcgcatctgggttgcaaggaataggtcacagaactagtggcttccagggcagagaaaaaatacaaatataataagatcagaagctgcatgcacaccaggtggaaggagtcatttctcaacattgaggtaaaagtttagcatattacaaaatgagactgaaaccctcccaaaacactaatgctagcttggacttaggtgaagatgattatgtctactccaaattttacttttcctgtttaggtagttaatagtctcaagacccgggattgtaggtgtagggaaatatgtcacaagttaagtcacacaaatcacacaggagtcagcccgaacatcgtatttttcaaaaaaaattctctcattcyaacagagtaggttatgtttatcatttgctttcatatcacactgtgtgtattattactctctcatttatcccttattaatttggtatctgacattcaataaaacacatcagtaaatatgtata

SEQ ID NO: 816623 - DNA, 560 bp, Homo sapiens
cctctgaaatttttatatgactgcacacatacacacatttacagatcatgaaaatgcctttgtacttaaagtatcttcacccttaaaaacaaatgagtcatcatcttggtcctctgtattacagtacatttgagtcagtttcaataattaaggtgatcaaaatataaatttgataaaatagttgtatcacattaaaataataaacattcttaacaattggtatattaaactgaaattcacattataaaaagacatgcacgtgtgtgtaagttaatatgcattatacatggtcacatatactacagatttgatctatccatgtgtacacatacataaagtattctttttcaattttctttaaactaatcattactgtgccaaaataaaagcgtaagctttacccttcaagaaaatcaggaagacaagcttttctatcatgaatctctacaactccccctaccatatgtgygatatttacacaaggtgattttctagttccaaaggactggtcctctttgtttcctcctggttgctggagagggaacccaagtgtgatccct

SEQ ID NO: 816624 - DNA, 617 bp, Homo sapiens
ttagaatatcaaaggagaaaaaataactaaaaatcatcaagtagtagaacagcctgaaggagaaaaawctatacagtggaaaaatcaccaaaggataagcatttggtcaaaagaatattacagtcacttaaagaatattttaacattttgattattccaatacccgggccagatctgggacctgcctccatcttttttgcagttcagatagcataaagtgtgagtcaatgcctgataacataataatggtaccatctggtcaggttctacctgactcttgggcacattcttgaaattataatacttcaatttccagttataagttaccatgtgtcatttggttacacaacacaccatactctttttttatggacccacacgtgcattgtcactcatcattcactgaagatgtttacatattttacaattttatttatgttaattattttttccaactcaaatgttattcaatcatcaaataatcttcatccatttcttgttttttcttcccctcttatacctcttgtgaatcttattcactttaaaatcccctaaatcacagctcctagattggtaaaggcatccattgctgggaaggtggtgcaccccacctccat

SEQ ID NO: 816625 - DNA, 598 bp, Homo sapiens
tttgaataaactcttaaaatatttcttcctaaaagtactatccaccactgtaactctccaatattatccactatagttacygagtacagtaatgattgtatccatcagtgcacatgcttcaagtcaatactaatgacttctttctcaatgaactgtagacatcaatctgctcattctgccttctaggtcagcagcaacaaggtatacgagaagaaggctgacatgacaaaagagcaagtaacatcagacatttctcactttagtttcccgttcttatatactaaatcatctcaagcactcaccatttggaatttccatactcgctattttggaaggtggtgatgagcccacagaatttttagccactacgctgatgatgtagtcattcttatcaagtcgtatctctgctttgtgctgaggatcagggatttcagaaagggactgtgtttcctcatctgatgaacacgatacattgtaggaaagtatttttccattagcttcattaatgggtaaaggctatgaaaaacagacaaattgttataaaaccctgcaaaacgtgactgtgactaggcaaggtaattgggtttaaactggacac

SEQ ID NO: 816626 - DNA, 494 bp, Homo sapiens
ttatgggaactacaattcaagatgagatttgggtggggacacagccaaaccatatcaccaccaggccaggccgaatggagctgtgctgtgccctggggacatcttgttacgctccaacatctgatggttgagtgagtcatcctgtccacccttgggcctggaggatgccaggctgcctctctcggtcttgcatgtttatgcatgttgctgcctctctctgcagccttcttgtcctacctgaatatccaaccccttccacctgggcatcccacattcctcatccagtctcaggtgagcagctgcttggaaggcctagcatccaggatgggtggtcctccggggcctgattgtgccacttcccacagtgggctccttttagcttgtcaatcgtgtctcctgcgatgagactcccattagggataaattgtgtctgttttcttccttcatttaaygaacatttattggttacctatgctgcatcagccatggttcca

SEQ ID NO: 816627 - DNA, 580 bp, Homo sapiens
catggagagtaagtgccatggagacgaccgaacgtgcggtgtgctgaggagtraagtgaaagctttttaggaaagggtctgggggtctgggaaggcatcctgagggagagacctttcacctggggctgaatactgagaaggggtggccatgaggaagtcttggggaacagaattctgtgcaaaggaaaagtaaatgcaaagtgtctggagtgggaaagaccttgatctgtgtcttacctatgtctataacattctgtactaatataaaggcatatctgaggctcggtaatttataaaggaaagaggtttatttggctcatggttctgtaggctgtgcaagaagcatggcgcctgtatctacttctggtgaaggcttcagagagcatccaatcctggtggaaggggaaggggggctggcgtgttacatggtgagagagagcaagagagagagaagggaggaaagcaccagtttccttttaacaaccagatctcaagtgaactaatagagcaagaactcactcattaccgcagggaaggcaccaacccattcatgaaggatccactcccatgatccaaacat

SEQ ID NO: 816628 - DNA, 598 bp, Homo sapiens
agcctattcattacctcaaacacctgtcatttccttgtggtgggaatattcaaaatccyctcttctagctattttaagatatataatacattattgtcaatgatagtcaccttgctgtacaataaatcaccaaatctcacagaagcaaaaatagaatagtggttgccagaggctggggaggaggatgggggaagtagaagaggttggtaaacaggtagttttttttttttatttgtaagtttgatcagatgtaatcatcccaaagtcacagataagggagcaggctcagaggagacatgcagattgtcagggatcacagagataacagaatggctctaaatattttcttatttagactagattggggtcagcaaatgttttctgaaaaaggaaagatagtaaatattttagtctttgtgggccgcatatggcttctgttgcctattcttctttattatatttttcacaatctcttaagaacgtaaaaataattcttggctcacatgccatattaaaaacaggcagtgggctggatttgcctgcaggccagagtttgtcgacccctgaactagaacaattttgctgatccattatttgc

SEQ ID NO: 816629 - DNA, 532 bp, Homo sapiens
gtctgtgtgatatgcaactgtatttttaattttatttttgaatgaaacagtgagaggcattagagtaggagtctgcatcttttcttagtttttactaccagcagtgtataagcattcccttttytctgcagcctcaccagcatctcttattcaaaaaagacatttaaactgtggtctgaatagtaaggaggagatcactatagtcccagccactcaggaagctgaggcaggagaatcgcttgaacccaggaagtggaagttgcagtgagcagaaatcatgccactgcacgccagcctggcgacagagtgagactccatcaaaaaaataaataaataaataaaaaataacagtaaaaataaaaataattataatactgcaactctcttcacttctctacttatagcatgaaaaattctgttttccatagtgattattagttttaactcatgtaaccatgtagctatttaaagaagaataataattttgatgacaaggaaaaaataaaaagcgaaagaaaggtggatttaattg

SEQ ID NO: 816630 - DNA, 630 bp, Homo sapiens
taactacacctcctatgtacgtctatttttaactttattaagtactatatttgaatgaaatatctaacaaatgaaaakaaactaaaaaatccaattataatttgttgtatatataattttttatatgacacatgtaattcagaatagttcagaaactcactcttttgtaaaataattaaaattgacagatacagctaaaatcacctcagactagttacttctaatctcgatgtcttccctagcagtaattccttctatgaattagggtttacctttttcaatgtttttctatatatttacttggttacatatgtacctacagaacacatatagttttatttacaattttctttaaaatatgaaaaatcaaaagggcatgtattcttgagcaggcataaatgccacaatccagaacctattatattagcagagaccctgagatggaagaaagctagctgtatcactgccttaacacagctggaaaaagagttggcttgcagttaagatgatgtgggagtagtgccattaatgaggctgggagtggaggcattacataagcagacaccttcccttaccgcttacctacacagccttctccatcgggccttcgggccattccaggagggcaga

SEQ ID NO: 816631 - DNA, 538 bp, Homo sapiens
acactgctccatgcgaatatctacaccgagaacgaaatcacagggtgagaatgagttgaaacatccattgaacagtcacatgtcaagcgtctgctcagcaccaggcatcatgcaggacccttgcggtgtactggtgggcaagatgcagtccctgacctcctggaatggactccataatgacagtcatttaaggagaacaaaggtgagatcctcttcagtcttaattctcacaagaaaccctcaggaagaaaaggtcctctcatgagatgactgcttcatgtctattactccttttttgtattgttcactttagaaaaagtaagataattttaatgataattcttcctgttcagagaattgcttcaagtgccttttaagcagccctgtcagatcccattcataaacagtaaatgatcggctataatctatttgccmatttgttacaactattaagatcactaccaaagaaagtgttataatattattacatttaaagtttttttttttctcctgccaactttaccttttgcatcatggt

SEQ ID NO: 816632 - DNA, 538 bp, Homo sapiens
acactgctccatgcgaatatctacaccgagaacgaaatcacagggtgagaatgagttgaaacatccattgaacagtcacatgtcaagcgtctgctcagcaccaggcatcatgcaggacccttgcggtgtactggtgggcaagatgcagtccctgacctcctggaatggactccataatgacagtcatttaaggagaacaaaggtgagatcctcttcagtcttaattctcacaagaaaccctcaggaagaaaaggtcctctcatgagatgactgcttcatgtctattactccttttttgtattgttcactttagaaaaagtaagataattttaatgataattcttcctgttcagagaattgcttcaagtgccttttaagcagccctgtcagatcccattcataaacagtaaatgatcggctataatctatttgcccatttgttacaactattaagatcactacmaaagaaagtgttataatattattacatttaaagtttttttttttctcctgccaactttaccttttgcatcatggt

SEQ ID NO: 816633 - DNA, 637 bp, Homo sapiens
cagagccatggatcctagcaattggagaaatggtaccatatttttgttgctgattcaggacatgtaccaccttcgggaggacattatctcagccatacaattatcctacactgtgctrtaactgaattttcaaaaggtttcattattttatcaagccatctgcttcagggtgatgggaaatgtggtaataccagtgagttccataagcaagagcccattgccagatttcatttgctacaaaagaagtttcctggtcagtaacaatgatgtgtggaatatcacagtagtgaatatgtgtttctcttaagtccacagatggttgttttggcagaagcattgcaggcagagaagaaaaatttctgtccagggtaaatgtctgtttcaatgagaacaaaacactgagcttcctgtgatgccagtataatcaacctggcactaagtgactggctgatctagacatggaatggtatggagttaaatgttggtctctgctattggcattttgggtactcagcagtgactgtagtcagatcagccttgggaaatgaaaatccatgttgctgaacccatgtgtaatttttatccttgtctttatggtcactttgttcatgggccaattgggcaagggcatgggtgg

SEQ ID NO: 816634 - DNA, 490 bp, Homo sapiens
tattgaagcagagacccagaggaggtgagggaggagccatggggggatcccaggaagggtgcacyagacagaggacacagccagggcaaaggccccaaggtgggaccgtgccttgtgtgtttgagggaagaggccggtgtggctggagtggagtgatggaggggaacgggaggaggaggtgagggcagggaagtgatgggagctgatcaagccctgcctgtggctgctgtgaggacctgagcagacgggggatgtgcatgacccagttcaagcatccacaagttcctctggtcactgttggggaacagactacgggacaaagagctggggaccaggacagagggatgtgcattgacccagttcaagcaaagatggagccttgcaggctggcagcagggacaagagctgggtaaatgctggttgaggatggagtctggggccagggccagggcccagagccaaccaaggaacgtgaggccactcgggcccc

SEQ ID NO: 816635 - DNA, 624 bp, Homo sapiens
gacgggcagagggaacttcagatgggggtgggagggcatgggagacatctctgagcctagacctgaaggagaagaaaggcacagggccgtgatcatttaggaacacagggtaagagcagggacagcaacctgagacaggaagggttttagtgtttgggaaaagagaaaagcaaatatgactggggcagagacagtcatgcgatgagggcaagctcccaggaggaggctggacactggcaggggccctggacacagggctatggagccacagtgaggagttgggctttcaacatttgtccacatggaccagaggtgccttgagggaaacatgcacttaatagctcacagctcaagattttaacaaatgacaacaaaactgaaaaacaggctaactcgttaaactacattttgatgttaaaggtttccaataaataataaagactagaaagcatgcagacctcgatctgaactggacgcaactaatttcaaacagaaactatttggaaattgttttttaaaaaatcgaacaaattcagatgtcaatgggaaaataactgaamaatgtgagctggttataggatgctgcaaatgcatctttcagaagtgattatgtattaaaaaaga

SEQ ID NO: 816636 - DNA, 635 bp, Homo sapiens
catggctcgctgctgctaccacagaggcctaaggctggcccagctgccgttcttattcctaggaaagcctcaccatggtctgtgcaaagctaaagtatccttcccagttatcatcatagaaacatcttcaggaaaaagtcttcctctacgaaagtcaatgaaaaattgaaaggagtgattgttacaccagctgcatggatatctacataaagacaccagaaacgtgaacaaccaaggcaatttgacaaaggatcagaataattctccaacagcaaattccaataaaaataaattcatgaaatgccagaaaaagatttcaaaattatcatattaagaaatttcagtgaggtaaaagagaatgcagataaacaacaaaaaaaaatcagaaaaacagttcaaactgtgaatgagaaattcatcaaagagatagattttataaaaaagaactaaagcaaagttctggaactgaagaattcaatacacaaaataaaaaatacacttgagaggcacagcaatagactagaccaagcagaagtcttttgaaataacccagataagagagagagagagaraaaaaaaataagaatgaacaaaacctatgtgacatataggacaccataaagagactaagtatt

SEQ ID NO: 816637 - DNA, 633 bp, Homo sapiens
aagaacatcatagggtgtacttgtacacaaccagatagtatagcttactacacagctatgctggatggaatagtcaattgctcctaggcttcaaacctgtacagcattttactatactgaatacyacaggccagcggtccccaaccttttcggcaccagggaccagtttcttggaagataattttttccacagacagggggtggggaagatggttctgggatgattcaagtgcattacatttattgtgcactttaattctattattattacattgcaatacatagtgaaataattatacaactcaccgtaatatagaatcagtggaagacctgagcttgttttcctacaactagacggtcctatctgggggtgatgggagacagtgatagatcatcaggcagtagattcttataaggagtgcacaacctagatcccttgcatgtgcagttcacaatagggttcatgctcttacgggaatctaatgctaccactgatctgacaggaggcagagttcaggcagtaatgtgggagatggagagcccctgtaaatatagatgaagctttgcttgcttgcctgcagctcacctcctgctgtgtggcccagttcctaacaggccacagaccagcccatg

SEQ ID NO: 816638 - DNA, 633 bp, Homo sapiens
aagaacatcatagggtgtacttgtacacaaccagatagtatagcttactacacagctatgctggatggaatagtcaattgctcctaggcttcaaacctgtacagcattttactatactgaatactacaggccagcggtccccaaccttttcggcaccagggaccagtttcttggaagataattttttccacagacagggggtggggaagatggttctgggatgattcaagtgcattacatttattgtgcactttaattctattattattacattgcaatacatagtgaaataattatacaactcaccgtaatatagaatcagtggaagacctgagcttgttttcctacaactagacggtcctatctgggggtgatgggagacagtgatagatcatcaggcagtagattcttataaggagtgcacaacctagatcccttgcatgtgcagttcacaatagggttcatgctcttacgggaatctaatgctaccactgatctgacaggaggcagagttcaggcagtaatgtgggagatggagagcccctgtaaatayagatgaagctttgcttgcttgcctgcagctcacctcctgctgtgtggcccagttcctaacaggccacagaccagcccatg

SEQ ID NO: 816639 - DNA, 563 bp, Homo sapiens
agcattaaatgcctacatcaaaaagtctgaaagagtgcaaatagacaatctaaggtcatacctcaaaagaactagggaaacaaaaacaaatcaaactgaaatccagcagaagaaaataagaaagatcggagcagaactaaatgaaattgaaagaaacaaacaaaaaacaatagaaaagataaaccaaacagaaagctggttctttgaaaagacgaaattgatagatcattagtgagattaaccaagaaaagaagagggaagatccacgtaagctcaattagaaacaaaacaggagatattacaactcatatcacagaaatacaaaagattatttcaggctactatggacacctgcacacacataaactagaaaacctagaggagatggatacattcctggaaatatgcagtgcacctagattaaacctggaagaaatagaaactcagcagaccaatccaagtagcaaggttgaatcmatagtaaaaaaaaaaaaaaattgtcaacaaaaataatgtcaaggaccagacggattcaaagctgaattctatcagacattcaaaga

SEQ ID NO: 816640 - DNA, 562 bp, Homo sapiens
gggcatcccaccttatagacctctgctatagtsgaaatatgagtggctgatttaatttaactctattcaatatataaaaaaggagtaattttaagttttcaaaagattgcttaaacaggttcctcatttaaatgaccttaattatccacctgagacatctgcatagcatatagaaggattattcaacacacagctaatactagcaaatggaaaaattaattcaactttactagttagcaggaaaatctttcatcagtaatttatttagcatattattgtcactctaatatatagaggaattatcaatttgaaacctatttagttattatgtacaaaacaaattacccgccaataaatagtcttttgatatgaacattgttcacggtatggaaatttaactttcacgcccttcgaataaaggctcttcattttcacaaacattatgtgaagtaaacatcagtcatataatcagtatcagacaaaaagaaataggaggaagaaagagagaaatggaactagccaacatgttacattggtaagaactgtaactgtagcagtttca

SEQ ID NO: 816641 - DNA, 410 bp, Homo sapiens
agttgtgcagacggtgctcagttctcccagcaatgatgtttgacgccaagccagggacactcactcaaatcttggtgtccaaggttttttcttgggggtgggtcatgtaarcatggagtacctgtgtggctgagcttagctactcctctccagtccctccagaggtcaaactaatgccacatgacccaagtcttctaccattaagtcacattcttagcataaactctctggcaaggccaaacacccccaggtatacaaagacactcttgtcaagcaggatattctgaggggttagatcttatctcccaggagccagtcctttctttggaatgcacatggtctcaataccccacccctggtgagttaacccttcactacacatcagggttttaatgataggtatataggaa

SEQ ID NO: 816642 - DNA, 645 bp, Homo sapiens
atcagatgcccccctgtagccatgggccgtcggaggagagggcggatgatgggcatccctttgtgccccaggcatgaagggtctgaggctgaattttcgaggctctcrgttgtctttttcctctccttcacctttgggtctccccacggctcattagggattctattggaagagacgcaaggaactcaaattccacaatttggtttctgtggagaaggtttaattaggagggtgtattaacttaattggctatcatcaggcttccagcttctttgtgtattttaagtaattttctctccttttttcttacagccagtagagcatgcctttaaaagattaagtcttttctttggtctccttgagtaaaaaaagctctggttcagaagtcagagagcctgaattttgattgtgactctttctggaaagatctgtgtatacttagatcagatactcactcacttctcctggcctcatttccacactggctagataagtaggttaaattacaggaccacgaaagtcccttccggtgcttgcaatgcataacctaagtgtttctgtgaaatgacatgaaactcctcctagaacaacatttggtgtgtttcaaaagtcaataaaaataccaatctacatatgttatacaac

SEQ ID NO: 816643 - DNA, 595 bp, Homo sapiens
aattagacatgcctaggttatcatggagatctttgggagaaagtgggattcgaggtagatttcaaagaatrgtatgggtgtggattgtagagcaatagaaaggcagcatcctcagggagagatctttatgttgtccactcatgtatcctaagcacttagtccccagcacagagtcactgcaataaatatttgttaagtgagaggccaggcgtggtggcttatgcctgtaatcccagcactttgagaggccaagtcgggcggatcgcttgaaaccaggagttcaagaccagtctagccaacatggtgaaacccccatctctatgacaaatacaaaattagccagatgcggtggtgtatgcctgtaatcccagctacttgggaggctgaggtgggagaattgcttgagcccacgaggcagaggttgcagtgacccgagatcacgccactgcactccagcctgggcgatgagagcgagaccctgtctcaaaaaaataataaataaataaataagtaaacatttgttgagtggaagagtagaggagggaggaagagcattctagaagtcaacagtcaggcggaagctctaggtgggaat

SEQ ID NO: 816644 - DNA, 548 bp, Homo sapiens
ctatacccttagataaccaaacttgcagatgttcagtttccttacataaaatggtacattttcagcatacaacctatgcacttctcccacatacttaaaattatctctagattacttaaaatatgtaattctacttaaatgctgtataaaaagctgttgtactccgttgtttttatttgtgttattattgttactgtattattattattttttaatattttcaatctaccattggctgaatctgtagatggcaattatgaatatttcattaggattttatctaaataatctattattatacttgaaacaaattttaaaaatctcttttcttcagtctatatgtatgaaaacaccagcagaattccgttaatattctggggctgtactgtaaaataaatgttatcagctcaataataaaaatttcttggcaccaatgccaatttaaatgttactatagcaatcaccatggtaatgctttcaattagtctccagcataacatgaktctaatgtaccatttggcaacatcataatggatctacagattatt

SEQ ID NO: 816645 - DNA, 504 bp, Homo sapiens
actgtaagtccaataaacctcttcctttcgtaaattactcattctcggttatgtctttatcagcagcataaaaatagactaatacagtaaattggtaccaggagagtagggcactgctgagaagatacctaaaaatgtggaagtgactttggaactgggtaacaggcagggtttgaaacagtttggagggctcagaagaagataggaaaatatggaaagtttggcactctttagagacttgttgaatggctttgaccaaaatgctgataatgatatggacactgaaatccaggctgaggtggtctccgatggagatgaggaactttttgggaactggagcaaaggtgacctttgttatgttttagcagagactgacgccattttgcccttgccctagagatttgtggaactttgaacttgagagagatgatttagggtatctggaagaagaaattyctaagcagcaaagcattcaagaggtgacttgggtgctgttaaaggcat

SEQ ID NO: 816646 - DNA, 419 bp, Homo sapiens
atctttaagagggtatgagacaatatctctagaacacaggtgatttgcctggcatttgatgaaaaagggactaatatcctattgtagtaraaaagaaagcagggcatcttttgggaaattaaagacaatttcacctgattatttccactgtctcagtggagtacaaggtaaggttattatgtaagaggaaacatagagaaaaagaggttttgggggattatggagagaagagaaaatgtgaaagtcactgaggggagagggaatttgagcttacgaggaaatacaccagtctttccaagctagtatattttgcaaataaagtgaatttaaagtgagacctgctggtgaggtgggaggcctctacccctattgctgcaagacctcctaaaaacactgctcattaacaaaggctttgctga

SEQ ID NO: 816647 - DNA, 587 bp, Homo sapiens
tttcccccatactgttctcatggtagggaataagcctcacaagatctgatggtttgataaggggaaacccatttcacttggctctcgttctctcttttgctgccaccatgtgagacatgactttcatcatccaccctgattgagacgcctccccagccatgtggaactgcaatttcaattaacctctttctcttgtaaattggctagtctcaggtatggctttatcagcagcatgaaaatggactaatacaacaggcaaggagcacattactattgtgacattaaaaacactgctgagcttactccagctacaaaacttatatgtgcaactgtaaggacatgaaatcttgatcaggtatttctaaggaaacaatatcttaacctccaaaacctactggaaacattatacagaatgacctgagttctagacacaaccctatgacatgttttggaaaaataaaataacaaaatagtcattaagtaaccraagaaaccttggaactacctgttccaagaaacaggtagagtcacatacagagcttatgtgaaaaaaaaaaagatagagaaagtaaatcttgatattcaag

SEQ ID NO: 816648 - DNA, 558 bp, Homo sapiens
acaaaaactgtgagataataaattggtattgttttaacaaattaacaagcaaaacaaaaaaaaacaactccatcaaaaagtgggcaaaggacatgagcaggcaattctcaaaagatgacatacagccaacaagtatataaaaaaaagctcaacatcactaatcattagagaaatgcaaatcagaaccacagtgacatactatctcacacagccagactgtctattattaaaaagtcaacaaataatggatgctggagaggctggggagaaagagtacgcttatatactcctggtgggaatataaattatttcagctactgtggaaagcagcctggcgatctctcaaagaacgtaaaacaactaccatttgacctagcaactccattactgggtatatacccaaagggaaataaatcattccaccaaaaagatgcacacttatatgttcatcgtggcactactcacaatacaaagaygtggaatcaacctaaatgcccatcaatggtggactggataaagaaaatgtggtgtgtatatgccatggaatactacgcacct

SEQ ID NO: 816649 - DNA, 564 bp, Homo sapiens
tcaggcacatgtttgctgtgggggtggtaccttcatggagaacctctgccagggcagtgtggaagggaaatgtggggttgaagcccccacacagagtcctcactggagcactgcctagcggagctgtgaraagagggtcactgtcttccagaccctagattggtagatccactgacatcttgcactgtgcactttgaaaagccacagatgctcaacgccagactatggaagcatcagggagggaggctgtagcctgcaaagtcagagggtcagagctgcccaagacaatgggaacctaccccttgcatcagcatgacctggatgtgagacatggagtcaaaggagatcattttggagctttaagatttgattgccctgctggattttggacttgcatggggcctttagccccttcattttggccaatttctcccatttggaatgggtgtgtttatccaatgcctgtacccccattgtatctaggaagtagctggcttggttttgatattacaggctcataggcaggaggaacttgccttgtctcagatgagactttcgactgtg

SEQ ID NO: 816650 - DNA, 608 bp, Homo sapiens
ccaatcctggagaaagagagacatgtgacctttcagacaggaattctaaatagctgtttagaggaaactcagagaaattaaaaataagacagagaataaattcagaattctatcagataaatttaacaaagagatttaaataattaaaaagaatcaagcagaaattctgaagctgaaaaatgcaattggcatatttaagaatgcattagagacctttaatagcagaaataaacagaagaaagaattagtgaacttgaagacaggttatttgaaaatagtcagtcagaggagacaatacaaaaaagaataaaaaacaatgaagcatgcctacagaatatattatagaaaataatcttaaaagggcaaatttaagagttattggtcttaaagaagtggtagagaaagagatcgggataggaagtttaatgcaaagggataataacaagaacttttcaaacacagaaaaagatatcaatatccaaatacaagaaggttgtagaacaccaagaagttttcacccaaagaagataaattcaaggcatttaataatccagctcccaatggtcaaggacaaggaraggatcctaaaggcagcaagagtaaagaaa

SEQ ID NO: 816651 - DNA, 650 bp, Homo sapiens
caaaaattagccaggtatggtggcgggcacctgtaatcccagctactcaggaggctgtggcagagaattgcttgaacccaggsggtggaggttgcagtgagccaagatcgtgccactgcactccagcctgggcgacagagcgagactcagtctccaaaaaaaaaaaaaaaaaagtgtgttttgatcaatgctagtacatacttgtgccagccttggaggtggcctccctgctcttcaccaactccccccataccttcccacatccctgaacctgatttcaaccttcccatgacagcccacgacctcaccttgtaattcatcaaaggactgagagcatctaacatcagccaccccaccttccatcctccgcagcgtgctgcatccctgtctttctgcctttgtcagatcctctctatattttgaatatatttgagttcctaagtctctcccatctcaggttgtctaggcatttagctgcttcagatgtggcccccacctagtaattctcacaggggccagggaacctgggtctctgtattctgtctttgtttctggcttctctggctgggcttgaacttgacactgccccgtgatgtccctctggttttggcatcccgtaccagctgatgctgcccctgttgacctctgct

SEQ ID NO: 816652 - DNA, 496 bp, Homo sapiens
tgactaaaaaaagagacaatactcaaataaacataattataaatgaacggggagacattaaaaatgatttcacagaaagacaaaggattatgggcaatactatgaacaattatatgccaacaatttggataacctaggaaaaatagaaaaaattttaaacacatacaatctaccaagactaaatcatgaagaaatacaaatctgaacagaccaattgtattagtctgttttcatgctgctgataaagacatacccgaaagtaggaacaaaaagaggtttaattggactttcacttccacatagctggagagggctcagaatcatggtggggggcaaaaggcacttcttaaatggtgccagcaagagaaaaatgaggaagaagcaaaagtggaaacccctgataaacccattagatctcatgaaacttattcactatcaygagaatagcgtaggaaagactggccctcgtgattcaactacctccccctgggtccct

SEQ ID NO: 816653 - DNA, 522 bp, Homo sapiens
gcaagtaatcccagcactttgggagtccaaggtgggaggatcacgaggtcaggagttcaagaccagcctggccaatatggtgtaaccctgtcactactagaaatacaaaaattagttgggcatggtggcgcgtgcctgtaatcccagctactcaggaggctgaggcaggagaattgcttgaacccagtaggtggagactgcagtgagccaagattgcaccactgcactccagcctcagcgactgtgcaaaactttgtcttgggaaaaaaagaaaaaaaaagcaagaaccaatcgtatgccatcttcaaaagacccatttcacacataatgacactcataagctcaaaatatagggataaagaaaaaaatctaccaagcaaatggaatayaggaaaaagcaggggttgcaatcttaattttacacagaacagacttcaaccaaaaaagatcaagaaagacaaaaaatgaatattacataataataaagggttcaattcaacaagaagacctaactatccttta

SEQ ID NO: 816654 - DNA, 636 bp, Homo sapiens
ttgaaaccaggacttcttggaaaaatggctgattgcaggtctagaacaggaaatgtgtaagataagcctggacatcttgtcatgctggatagcaaggaggctatcagagactaaaagatcatatcaaaaggacacgggaaccatctgcaaggggctcccactggccaaacatagagccatttgagcatcagtaaagacgataattgtgatggataaaaacccataaaatatgtttaaatcttcaatttatgaaactacttaaaacattgtcaccttcagaggatgaggaacaaattcactctctgaaaaacaggtaaataatgaggaaagaatcgcacatttatcctgcctctgtttaatatgtgaactgtaccactgggtaagcaaatggtggacgactggaagcatctctttttaaaagtactcaagttaatatgtgaggaagtgacagaattagaatatcaccattttgaaacccctagtgaattaacagagctaagcattgtgcygcaacagctgttagcatcacacaaagagaggcaaaccggatattatgtgcctcctaacgaaggaatgcagcacctctggtcctgccaaaaggacagaaggtgagtgtgatccaacttctggatccat

SEQ ID NO: 816655 - DNA, 497 bp, Homo sapiens
ccaacactgattttattaccaggaggaagaactgccactctgcccctcccagcagaccctgtgctatacaaaagtgcctcagcgctccctgaggaagatgccctttttgtatggttctagtctgtagcttctgatcaaatatcactgaccaataacatcaattaaaagtcatctcgaagtgaaaagatttattcaagtcattcaccataaacacaattaagggtcttgcttcaagtttagtagatctacgtgttttagggcagtaataaaagtaacgataacgctgtaagtttacttggtatccattactgcactgaaaataggaaatcatttatcacatccaatttttggtgcaggttatctcccaccaaaggcaaaraaataaagaaaattggtagattttcaaaattaatatctaaatatatttagatagatataaacacgtatgtataatacactcacatgcataattagcccagaaaaagtgagggaagtat

SEQ ID NO: 816656 - DNA, 611 bp, Homo sapiens
gctatgcattctggggcttcaaaaccagaaagaggatacaggaacaaagaagaggaaagggaaacatttactcgaasaaggaaccaagtagaaactggaaatgcatatccaaataattaggacttgtaatatatgaaaattataaacatgttagatattgtttctgatggtcaactgttgaaatgtcaagagaacggcttttctctcagtgaagaatatttgaagaattaaaaaacattccacccttaaaagaggtctgttctgacataggaagtatcttgaaacaggagaaatatgagagtccagatattgggtatgttcggttaaggcagtattatggaagatactccttcttggataagaggttgtacagatgacctacagttccctgcgactttacgatcctatgacactccttttaatatgtcctaaaagcaattctatgagtaaagcttatgaaccatacaactggaaggaaatggattaagatgttgacagtgattattactgggtagtgagattacagggattatagttttatacttttggctcacctatgtcctctaaatgttttacagtaaatatttcagaacattttagagaaaactctt

SEQ ID NO: 816657 - DNA, 476 bp, Homo sapiens
agaagttaaaaaataacaaatgaataaacataaagaaagcattggaaagttataagaaacaagcagaagttaataaaataaacaatgttggggtttttttttttttttttggatatgaggtcttactctgtagtccaggttggagtgcagtggtgtgatgtcagctcactgcaacctctgcctcctggactcaagggatcctcccacctcagcctcaaaagcagttgggacttacaggcatgagccaccacccctgggaattttgtaatttttctagagacagagtttcactatgttgcccaggctagtctcgaactcttgaactcaagcaatccacccacctcggcctcccaaagtgctgggattacaagcgtgagccacwgcacctggccaaataattcatttttttacaaaagataaaaacccaatgagataattatttgggaaaaaaataataaaatagaaaacatctagca

SEQ ID NO: 816658 - DNA, 476 bp, Homo sapiens
agaagttaaaaaataacaaatgaataaacataaagaaagcattggaaagttataagaaacaagcagaagttaataaaataaacaatgttggggtttttttttttttttttggatatgaggtcttactctgtagtccaggttggagtgcagtggtgtgatgtcagctcactgcaacctctgcctcctggactcaagggatcctcccacctcagcctcaaaagcagttgggacttacaggcatgagccaccacccctgggaattttgtaatttttctagagacagagtttcactatgttgcccaggctagtctcgaactcttgaactcaagcaatccacccacctcggcctcccaaagtgctgggattacaagcgtgagccactgcrcctggccaaataattcatttttttacaaaagataaaaacccaatgagataattatttgggaaaaaaataataaaatagaaaacatctagca

SEQ ID NO: 816659 - DNA, 521 bp, Homo sapiens
gatgcagtctgctgggggtggggctctcaaaatggtgccctgctgtagctgcttaggactcrgggggatgagctccctctctggagcagtgccatcatgcagtccccaagttccctgtttgtgtgggttgagggtttcttccatggctgggattgcaggacttcacaatgggaatgcggatgctgactgttgggggtcacttacccttctccagcatgggggagcctccccaaccaatccctgccaggtaccctgccttgcttccctctccttacttgcctcaggtgtttcctgtcattttggtggtaaattccagcattctctcttaggtgatctattcaaagtgtgatttatctactactgttttggtggttcttcaagcagaaagcaagtaccaggggcactttagtcagccatcttgaaaccactccattgttttctactaaatggcttgctgtcctcgaccatagcttttgcttcctcctaactttagtttgcaaataacctattatgtacccatt

SEQ ID NO: 816660 - DNA, 583 bp, Homo sapiens
acttttggcagtcagactgaaaactataatataacttaattctattacctggttttaattattttaatatgtttattttatttcacctagaaatttaatttctaaaaacatcaatataattatttgcttttaatactacataaataaaatagtttcaaaatgaccataaaatattatcattaacagcaatactggggaaagaaacttaagatattttcacatttctttttgtccttaggcaccatgttgacttacattatcttctgtttattgaaaaaaattagatctccacatgcattttcaaagcctatatcactcacaagtgtgcttatataaaagagaaattacacataaaataatttagttaagctacttttaaatccttctatattcctagtcttgttattctgaatcatttttaaacttagtcatcaaaggctatattgttcctgttctgttctatgctgtcctttctgttatgtggggaaaacaacgtttctttctttctttctttctttctttytttttttttttgaaatggagtcttactccatcgccaggctgaagtgcagtggtgcaatct

SEQ ID NO: 816661 - DNA, 650 bp, Homo sapiens
aaagaattagaaaagcaaagcaaccaaaccmaaatttgtggaaatcatcattctcagcaaactaacacgggatcagaaaaccaataccacatgttctcactcataagtgggagttgaacaatgagaacacatggacacagggaggggaacatcccacactggggcctgtcagggggtggggggctaagggagggatagcattaggagaaacagctaatgtagatgatgtgttgatgggttgatgtgtgcagcaaaccaccatggcacatgtatacctgtgtaacaaacctgcatgttttgcacatgtatcccagaatgtaaagtataataaaaaaaaagaaagaaaataataaagagagaaggaataaatgaatttcaacttaagaaaacaacaaaatatcattgaaacaagaagcttttttttttgtaaagttaaataaaattgacaaaactttagctagactaacaaagaaaaaagagaaaagacccaaataaataaaactcagagatggaaaaggagacatgacaactgatactgcatatatccaaagaatcattagtggctactatgagcaactacaggccaataaattgaaaaatctaaaggaaatggataaattcctagacacatacaacctaccaagaaccat

SEQ ID NO: 816662 - DNA, 611 bp, Homo sapiens
aagaaaataaaaataacatacatgcagatgtgagtaagggtgagaggcctagagtcctgacagctttccaatccctggaggaactccgccctgcttttgtgtgtgtgttttgattctgagaactaatgaatttttttttggcttgttttgagtaagttaatatatagtgtccaacacccattaataagcatttaaactatataatcctgtgtgtattaaccttttctctttttcaaaatactggaaggatgtattatatttagtaataatcgctcacgctagcagtgcaaaataggacagggcccaagatggcatctgacacctttatgacctaggacacgtggcttccaaatgctctggaatcttttatttacctccaaagagaaaccgacctatcttgggttaagttggaaaccaattcattcaaagttgtgtattttggggcagaaaatattatgtattcaccatagtcacaatatacaaaatatctacttaatctaaaaacaaaatgattgaaggaatacrgtaacttacataataaaaaaataccatgcagtaaaatatggaatttccctctcaaatattatattgaatttatgtatatataacag

SEQ ID NO: 816663 - DNA, 599 bp, Homo sapiens
ttcactataatcaagtgctattaatcataaggatgcagggatgattccatgtatacaaatctcttaatgcaatatatcacattaccagaatgaagaacaaaaactaagaatcatctcagtagatactgaaacagcatttgacaatatttagcagaagttcatgataaaaacttgcaaaaaattaatgatagaaagaatgtaactcaacctcataaaggctacatatgacaaaccctcatctaacatcaagcactattagaaaaagttgaaaacttttcttctaagattagaaacagaacacgggtgcttacttttgttacttcaattcaacgtaatagtggaattcctagacagagcaattaggcaagagaaaaaataaaaggcatctaaattggaaaagactaaaaattctccctttttgcacattaaatgatcatatatatagaaaactctgaagacttcatcaaaaatactattagaaytaataaattcagtaaaaatgtagcatgcaaaatcaacataaaaaattagggtcgggcgtggtggctcacgtctgtaatcccagcgctttgggaggccaaggcgggtggatcacgagg

SEQ ID NO: 816664 - DNA, 599 bp, Homo sapiens
ttcactataatcaagtgctattaatcataaggatgcagggatgattccatgtatacaaatctcttaatgcaatatatcacattaccagaatgaagaacaaaaactaagaatcatctcagtagatactgaaacagcatttgacaatatttagcagaagttcatgataaaaacttgcaaaaaattaatgatagaaagaatgtaactcaacctcataaaggctacatatgacaaaccctcatctaacatcaagcactattagaaaaagttgaaaacttttcttctaagattagaaacagaacacgggtgcttacttttgttacttcaattcaacgtaatagtggaattcctagacagagcaattaggcaagagaaaaaataaaaggcatctaaattggaaaagactaaaaattctccctttttgcacattaaatgatcatatatatagaaaactctgaagacttcatcaaaaatactattagaattaataaattcagtaaaaatrtagcatgcaaaatcaacataaaaaattagggtcgggcgtggtggctcacgtctgtaatcccagcgctttgggaggccaaggcgggtggatcacgagg

SEQ ID NO: 816665 - DNA, 638 bp, Homo sapiens
atgcaattagttcctacacttagattgctgtcaagatattttttacactaaatgtgctattttgaacatcttttttacattatgcttgctatcactgctttatgtgacacagtgattgctaaaggtactctccccaagaccccttcaccagacatgtacgccaacctgctagcctctgggagtgatggctaccaaaactcacagttgattacttctcttgaatgaatgactgaataggagcaccttacccaaaatggtagcttgtggtcactgactaactgatgaaatgacaggctcaattacctcaattggagccatctctgtggttgaacttgtgcttcagatattatagagggagggggctaaatttagtctccagccaaaggcccattcatggttagctttgttaccctactctctcctgcttcctgtacttccagtgtctggaaagcattctctcaatcactttagcaagaatgtccctctcagactctggggtgtttctaaggaarttaacctaaaatagctggtaccaggacttagtgcctggcatgctgtagcagtattattgttaacacctttacccacaaggaggcaaacatatacaagggaaatgctgaaggctgggttcctactca

SEQ ID NO: 816666 - DNA, 681 bp, Homo sapiens
tatacaagggaaatgctgaaggctgggttcctactcagttgagtgtaaagggattcacatgttgaaagtttattaggggatgtgtgggatcaacaactttggaacagaggagaggagaagaaagcaagctgaatttggcagaaggaagaattagtcagcaataactaataccacctgttgtaatcactccaaggcatctactgcccctttgaggatctctgaaaatgggataacccatcaaagtactccaaagttggagccaagaaatgccgggctattgtattagtcttctcaagctgtcataataaaactacacagactggttggcttaaacaaaaattaattttcttacagttgtggagtcttaaaaaccaagatcgaggtaccagcaaagttcctttctcctgaggcctctcctcttggcttgtagatgggcatcttctcactgtgtcttcacatggtctttattctgtttgcatacatcactggtatcttattctattcttacaaatacaccagtcctgttggattagggccccacctttatgatctcatgtcactgttattaccgtcttaaaagccctgtctccagatacagtcacactaggagttaggtcttcagcaaataggctttggggggagatagggcactactaagtccawaccagctgttatatctta

SEQ ID NO: 816667 - DNA, 571 bp, Homo sapiens
gagacgggcgccaaggagaggcttccgagggggtccccgcggctggagagaggccctgcctgtgtggatagcgccccattacccccagctccacccctccgagccagccgggctccccgctcattaggccgacatctcctccttaataaaaaatacatgaataaataaataataacagccacaaccgagcgggaaaccgcttgccactcttctgtttccccagctccttccttccagtgcggccccgggggctcccgggctggctcggccagtaaaggccctcctctctcccgcccttcagtgccgcaggcatcccgcgactggaaggggaccgggctggggcgggcgccgctcttagggggactgagcaggccctttgcgacccagacctgctcttagaggggcgtgggacgagagaaatctggaggggagtcttttctctygaccttcgaggaggaagaagcaacagctgagcctttaggtccgggtctttgagtggtccccaagcacacagaccccaaatcagggagaggccagacacggcgtggagaaggaaatggaaagtgggacg

SEQ ID NO: 816668 - DNA, 540 bp, Homo sapiens
atgcagaaacacgcatcagggcatgaagcagaggacgtggatggcactgtgatgccttttaaatgcaggcaattagtggctaaataaaatatagaacgagcatctctgcctgtttctggcagggactcactaaagactgccagagttagggaccttggaaactgatgggggaacaaaagagagtgggactccacccagtcccctggtgtggagtctcttgctgggataaagttgtagagaagaaaggcttgcagactcaataaacctcttaacctcattcagggatgtcttagtctgtttcagctgctacaacaaaatatcataaaatagggagcttgaaaacaataaaaattgatttctcacagttctggaggctggaaagtccaagatcaaagtgccagcagattcrgtgtgtggcaagggcccacttttcctagacggtgcctttttgctgtgtcttcacatggcagaaggagtgaaggagctctcaaggatctattttattaggatactaattccatttacgagggttctgacttc

SEQ ID NO: 816669 - DNA, 639 bp, Homo sapiens
atggatccagaagttggatcacactcaccttctgtccttttggcaggaccagaggtgctgcattccttcgttaggaggcacataatatccggtttgcctctctttgtgtgatgctaacagctgttgcrgcacaatgcttagctctgttaattcactaggggtttcaaaatggtgatattctaattctgtcacttcctcacatattaacttgagtacttttaaaaagagatgcttccagtcgtccaccatttgcttacccagtggtacagttcacatattaaacagaggcaggataaatgtgcgattctttcctcattatttacctgtttttcagagagtgaatttgttcctcatcctctgaaggtgacaatgttttaagtagtttcataaattgaagatttaaacatattttatgggtttttatccatcacaattatcgtctttactgatgctcaaatggctctatgtttggccagtgggagccccttgcagatggttcccgtgtccttttgatatgatcttttagtctctgatagcctccttgctatccagcatgacaagatgtccaggcttatcttacacatttcctgttctagacctgcaatcagccatttttccaagaagtcctggtttcaatca

SEQ ID NO: 816670 - DNA, 647 bp, Homo sapiens
aatgagctgcatttattattttcaccatggagacgtccaagaaaactgaccttttcagcttcaataaaaacggattttcctgcagatactttgacaacagctgtgatcatgagcttggctgaaacttaatattaaacaccaaagaccaggaaaaagagatgccttcccaaggcctgggagagttactgacacccgcttgcaattagacactggtatgggcatggcagcctgagcccagctcacagaggctcactcactcctctctggatccagatggctgaggaacccactcagcatcaaagccacctattatttacgcgtttagtttaaggcatgtagcacgggactcagagcaaagctgcagtagcagactgccctggaattcagcaggactaggttccggtctgcttggattcagcatcccctcctgtcatgtgaccaggagccccagacatcacactctggctcgtcttcccctaaacacagcccagagctgaccctcctgccatgacttggccatactagttggcaaaaagcttgccaacttcctgccccaccatttctactgaccatggtagccaatacccagaggaacagatgacagtcaatggcagctgctgccttgyactgaaatcaggtgttggaca

SEQ ID NO: 816671 - DNA, 576 bp, Homo sapiens
acatcattaataagtgctttacagtttgtacttttaaagatccacataattttctracttcctttgttttattcacgtttattacaaagttttcctatcacagaacaattcttctttccctgagtctgttacagaacttcatacatttgaaattttgcacagtgctacttctgatatcagaaatgctatttcccctctaccttggaaatttattcattcatctaggcacagctcaaatctcaaacttcctgaaaaatatatcccaatttactcaagcaattggttaatttctatgagtttctgttatttgtttattctccttttgtattttttgtgcaatctttctacacttcatatttattgttttccaatttttctcccttactagactttagtcaagaaactattcatttttgcgttattagagctttgctcacactgaattcaataagtgtttgttgaatgattaatgtcttaagtttaaaccagtctttttccctctcgctataatgtataatcttataatgtgaatcttaatgaatcaaaccaaatattttcttaaattttctttatgta

SEQ ID NO: 816672 - DNA, 521 bp, Homo sapiens
ggtaacgtgactgaatcttcagacagcatgaatatgtgtgccatctcatatgcaattccttatagatccagcttggctcttctccagtgtcktctttgacagttgtacctataaaacttatgtggatggtctgcctgccactctgtgcatcactttcttttttttttttttttttttttttttgagatggagtctcgctctgtcacccaggctggagtgcagtagcatgatctctgctcatggcaagctccacctcctcggttcatgccattctcctgcctcagcctcctgagtagctgggactacaggcgcccacaaccacgcctggctaattttttgtatttttagtagagatggggtttcaccgtgttagccaggattttctcgatctcctgacctcgtgatgctcttgcctcggcctcccaaagtgctgggattacaggtgtgagccaccacacctgtcctgtgcatcactttcaacatcatcttgtcccaacttaaaataagttttccatttacaa

SEQ ID NO: 816673 - DNA, 585 bp, Homo sapiens
gatttttagtacagacaatgtctcactacgttgccccggctgatctcgaactcctgggctcaagcartcttcctgcctcagcctctcaaagtgctgggattacaggtgtgagccaccgctccgggccctgactttatttccatgaaatatgaaacccctatcctccacctcctgtgtgtaataggcagttttgcttgtcacttttcagtttccattatccactcaaacaacccaggaccttgcttagtttaataagccgttctgtcagttcccgctgcaaccagcgccccactccacccctttaccgaggtccctgcccctctcccccgccctgccccagactgaggggagctcgccccgcctgcaggacgcacgactctacctgctccaaaaaggcgctttgcattaaaaccattttcaatttaagaagagaaactattcagcgttcagcacacgtggtctactacaataagttgttttaccttcgattgtttgaaatgttaacttaaaacgggcaggaagcatccatgtgatattaggggtaacatcacggcacaagagaatgaatccaccaatcagaactcg

SEQ ID NO: 816674 - DNA, 441 bp, Homo sapiens
aaaataaatgtctatttatatttatacatgcatgcgcacacgtgcctgaaaaaagacccaaaggataccaatcaccrtgttagcagtggctatttctggatgatgggcttatgtcttctttttcccaaaatctcctgccatgaatatgtattctttttgtaaacagaaaaacaatgaagaaaaaataatccctacagaacccaacctcttttgattcagagagcgcatttctgcagagtggtatttagggagaaaaggagagaactgtgcttccttaaactaaacagcagaattattaaaacaaaggcagaaggtagaatccggccacaggcattacctcgccatctctgagcagtggggggaaatggaagaacagggactggccaagggaaactgtctggattggattgtcgaggttttcgcttttgtaaagcttgacct

SEQ ID NO: 816675 - DNA, 441 bp, Homo sapiens
aaaataaatgtctatttatatttatacatgcatgcgcacacgtgcctgaaaaaagacccaaaggataccaatcaccatgttrgcagtggctatttctggatgatgggcttatgtcttctttttcccaaaatctcctgccatgaatatgtattctttttgtaaacagaaaaacaatgaagaaaaaataatccctacagaacccaacctcttttgattcagagagcgcatttctgcagagtggtatttagggagaaaaggagagaactgtgcttccttaaactaaacagcagaattattaaaacaaaggcagaaggtagaatccggccacaggcattacctcgccatctctgagcagtggggggaaatggaagaacagggactggccaagggaaactgtctggattggattgtcgaggttttcgcttttgtaaagcttgacct

SEQ ID NO: 816676 - DNA, 441 bp, Homo sapiens
aaaataaatgtctatttatatttatacatgcatgcgcacacgtgcctgaaaaaagacccaaaggataccaatcaccatgttagcagtggctatttctggatgatgggcttatgtcttctttttcccaaaatctcctgccatgaatatgtattctttttgtaaacagaaaaacaatgaagaaaaaataatccctacagaacccaacctcttttgattcagagagcgcatttctgcagagtggtatttagggagaaaaggagagaactgtgcttccttaaactaaacagcagaattattaaaacaaaggcagaaggtagaatccggccacaggcattacctcgccrtctctgagcagtggggggaaatggaagaacagggactggccaagggaaactgtctggattggattgtcgaggttttcgcttttgtaaagcttgacct

SEQ ID NO: 816677 - DNA, 512 bp, Homo sapiens
acccacataagattctgcttgtgaagatgacactattctaagaggacccttaattaggatgaaagttccccccgccacagatgaaaggcagacagccagaggagacgggaggacttctgatyagggaggcacccacacccaggtgcagcggcagcactgaatgccttacctcaatcaccctatggtgggggagcgcccgctcaatgtggtcgttgccttctgccttgagctgaacgtggtacacacatcccggctgcaaaaaaactcaggagtcagttctctagaaagggggcttgtcgtatcgtgcctggtccaagcctggtttggctgcacgagatcattaagacaggagcatttctctcccctcatttcctaatctgtggcctgttaaccttaagagtccagagttcctttaagaacacccctagtgttgaaacatctgaaattttgcgactccttccatcccaactcagtttcattttctcctaccccaaaataaatcaaatttggtt

SEQ ID NO: 816678 - DNA, 624 bp, Homo sapiens
ccaaagagaatttcgcaaataccatataaactatatttaaagtcagatcatcccaaatgtcccctccatcccatatggtgaaacttcgattaattcttttcacataatacagcaacagacagaaaataaatataataccacatatatgtaattttatttatgtcaatttcacagagaggattgcagagtttaccttgcatagtacaatctctctccatcctcactgtctcttccaaaccttactttcttatccataagcctctaagtccttctgtgtccacctctggctctcttactctctgtccctctgtctcttcctgtctctccactcactcctctctccacccagcctctcactctaactcctcactccactcccttctggatccacttctaatgtaaagcaatttagctcttcccagtgtggatatctttatccctcacctctctattagcactcaaccatcaccagattccccttccttaaaatacaactaagaggtaatgatttttttctttcatttattttttccaagcacttcctaagttatgtamttcatttggtacaggagacaataattatataccagtggttgccacttaactgcacaaatagtcatttgt

SEQ ID NO: 816679 - DNA, 592 bp, Homo sapiens
tgaagtaacccaggatccgttccttaccaggggcacagattttggaattctggtggcagaaactgtttttggacacaatcctggactgtttttttattatctaaatcatgtttattttcaataaatattttgatattaatattgtaatcacttaataaatgtcttaactaaattgagcataaaaatcttactatattccaaacccaagcataagtatctccttgtatctgttgttattaattattccaacttcttagaagtaaaataattgaagaatagagagagcaatgtgaaagtgtctttaatttactgtatttttcatcaactgtaagtcttctctcccttttctaatcagaattataaaagtaacttttttttgactaatctgactctaatttttggcgggcaatttcatatatgttacaatttccataactcctcttatttaaaaaataacccttaaccytaagcattcctaaccttcaagcagacaaaactttctgtgtaccatcgtccaactggcaaacacatctccatgtactgatgccgtttgttttgtctatttgttggttggtttgttggttggctgatt

SEQ ID NO: 816680 - DNA, 603 bp, Homo sapiens
ctagtttgatagaaattgttttcatataattgatacttgccagtgatactattgaattttcttttttcttctttcttttcaatcccaagtcccaaataccactttaagtttatagtctcactttttcttttttttgtaatcttgaaagcttgtggtttttccactccatacatacaattcgagagaaaatgtcattatagagtgaactctcaaaatgtgtccaaaaagattcttaatcaaatcaatgtgatagtaaaggtgccatcagctctaagttttataaaacgtcataactgttgattagatatgatagcaagttatcatcatttaattcagtgcaggacatttcctgtggcagagaaagcttctcagtgcagaattactgtaatcttctccagaaagcaaactaaagtaaaacatctgagtaaaatacatcttttggaggaaagattacccacttttctgtaagaaaacatgatactctccttttcatrgagtgacacagtcaataagcatcccatggatagttaacagtgtcactgaagcctgtgatatttctattacttgtgtaggatgcttagaaatcaattcttttcaacatca

SEQ ID NO: 816681 - DNA, 581 bp, Homo sapiens
ttacctcatcagtaatattcaccacattttgctaaatatttattgattagagtgttgaaatcaaattctgctctaaatgtgtgtgaatatgttggaraggctttgtgttcttcactgtgaaatgcaattgtgccttgaataagaaggtacctagaagccaaattaaagtaataatgacttcttattggctttgatttttcattgcagtatatgggattgtacagcaggaaatgcttatcattaatttctgatgttttttaaagcacaactcgaaacatttcgatcatacatacatagcagtagagatctgtgcccttcaggtacattgaatctgaccatcagtttatatatgtcattgaattttaagaatactcatgttaataatagtcatctatccttgcattttgaaactgttctaatcttagtgaacttgaattggatttctgggtaaaagaatgtgtttcttttatgttgcttatgtccgaaggccttgtcagaatctgtcagactcttgtttaggtttagtgtgatcatggcgtcagagaagcaaagctttcaaataaatagtacttcaggaaata

SEQ ID NO: 816682 - DNA, 615 bp, Homo sapiens
gggcctttttctaccatagtggctcccagctcagatacctagttatttcttaaaaatttgctctcaaacttgacattaaaaaagagagagaaaaagagaaacaacattctggcatttagaaagcagcatytatgcagctacgcaccaggtagcattcccaagtatgccccttggaactggtgttgtaggatgttaacaggttgtattttgcagaaaaaataaggagttgtgtgattaaacacatttagaaattctaagttaaacacaactaaatacattttttactctgtaagaacatccagaaactttaatactggtaattttttttctgattctctaaaaggagatatattttgcataagggcccaaattttggctatgtgagcttttctagaagaaacaactcttcataattaagctcctggatatactggtttgggaaactctgccgaaaggggctgcctccaagattttggtaccgaaggtgacttctttttcctctttctataagcactgttcaaagaggtggactaatggttttaaaatctaggataattgatcttaaatctaaatgaaattcctctcagatttggtctgtgggttgactgagttccc

SEQ ID NO: 816683 - DNA, 599 bp, Homo sapiens
ctgcttgtgatgccataacaaaatattatagactggggggcttacataacatttacttctcacagttctagaaactggaaatccaaaatcaagatgtgactaagttggtttctggtaagggccttttcctggcttgcagatgagtgccttctcattgtatcctcacatggcagagagacagcaatctctctcttcctcttcttataaagccctatccttataacctcatataattctaattgccccctaaatgtcctatcttgaaacaccaccatactgggacttaaggcctcaacacatgaatttttggaagacaccattcagcctatagcatatggataattagtttatgacagtagctattaagttgcagggacttttcaataaatgacgctgggataactggatacccacaggataaaaaccaaaaattgggtctataccttatgccacatatgacatccattctagtggttaaatgtgcaaggtaaatttataaaactcttagaagacaayatagactgtctttataacctagaattagagaagttcttaagacacacaaacccacaaaccatatagacaaagattagtaaatt

SEQ ID NO: 816684 - DNA, 617 bp, Homo sapiens
aaggcattcttaattacagtattcaccagagaatcaaagcacaactgtgactccaygaatcctctagagcagattcacagtgacaggatgaaacaagcaaaagcaaatgcaacgaggagaaatcaggtcgcttacctgcaaacagtgcaacgttggcatgtttggcatcatatgggcatctggccattccgctgaattcatccccgaatggttccaatgtatccatctaaatgaaataatcagacttaattacaaacaacaaccttttcttttgccctaaaccctcagaaataatttccaggatgtgacaggccttttgtaatctgtaatcactttgagatggaccctgttgaagccacttttaaactgtagttgagaatcacataaaatagctgtgttaaaaacatatttttaggggaaagatggtcaaatcagacattctttcaagcagtgtactcttccacccagcacatttttttatgaaagtccttttcagatattttataccaaccaagagctttttgttgaactctgacagactctgtggtctgtgggtctggcatgtattcaaaaatgatgcttagcacacagtgatgcaacggaaatgcccttatcct

SEQ ID NO: 816685 - DNA, 617 bp, Homo sapiens
aaggcattcttaattacagtattcaccagagaatcaaagcacaactgtgactccatgaatcctctagagcagattcacagtgacaggatgaaacaagcaaaagcaartgcaacgaggagaaatcaggtcgcttacctgcaaacagtgcaacgttggcatgtttggcatcatatgggcatctggccattccgctgaattcatccccgaatggttccaatgtatccatctaaatgaaataatcagacttaattacaaacaacaaccttttcttttgccctaaaccctcagaaataatttccaggatgtgacaggccttttgtaatctgtaatcactttgagatggaccctgttgaagccacttttaaactgtagttgagaatcacataaaatagctgtgttaaaaacatatttttaggggaaagatggtcaaatcagacattctttcaagcagtgtactcttccacccagcacatttttttatgaaagtccttttcagatattttataccaaccaagagctttttgttgaactctgacagactctgtggtctgtgggtctggcatgtattcaaaaatgatgcttagcacacagtgatgcaacggaaatgcccttatcct

SEQ ID NO: 816686 - DNA, 629 bp, Homo sapiens
tccaggcctggcgaggtccctgctccttcatcagcacctctgttagctgcatcaaaaccagctagatttactaactctttaagagggctttttccagcccttgcataaagccaaagtaagcaaggccgatggtcaagaaagctgagtgctcaatggaattaaattcctgtgttcttgtaggaaagtctacggtttcaaatgccgtgcttttgagataccttttagaatagaaatcactcaccatataagtgtgcttttgtgctcagaggttagatagtggggtgggagggagaaaaaaaatagaggaaatccacatggtgtacgtggtaagtatgtcagtcttctgaacaatagagaaaagggtcttacagaaactaactttgctaggcaggctctttaaagatgtgtcaatcaatcctgaacaaacaggaagcttagaagcctgcttaggatcactcatgtggagcaatacattaagttgaacaagtgagaggaactcaggtggtgttgaattacccctcttaggttgctgcaggtacaatcacagtaaattatgaaatgcctcctggcagtgtggttccaacygacaaatagcatttaccttatagtttctgcaggaagggttgaag

SEQ ID NO: 816687 - DNA, 266 bp, Homo sapiens
ctaaatctttcagtcatgagtactgaaatttcagactctaaagtgtcattcaactttctaccttatcttttttagagattagttataatcaaataaagagggctaaaggcagacttatctccaaatctttgccatatacatatttttcatttacaaatattatatattggcaaaaattcttattatgtcttacacacaaaattgatgagttaataaataagcatagkagaagtgtcatcactaaaagatgtatgttacgtgtgtgc

SEQ ID NO: 816688 - DNA, 497 bp, Homo sapiens
gggagggacccagggggaggtagttgaatcacgagggccagtctttcctacgctattctcrtgatagtgaataagtttcatgagatctaatgggtttatcaggggtttccacttttgcttcttcctcatttttctcttgctggcaccatttaagaagtgccttttgccccccaccatgattctgagccctctccagctatgtggaagtgaaagtccaattaaacctctttttgttcctactttcgggtatgtctttatcagcagcatgaaaacagactaatacaattggtctgttcagatttgtatttcttcatgatttagtcttggtagattgtatgtgtttaaaattttttctatttttcctaggttatccaaattgttggcatataattgttcatagtattgcccataatcctttgtctttctgtgaaatcatttttaatgtctccccgttcatttataattatgtttatttgagtattgtctctttttttagt

SEQ ID NO: 816689 - DNA, 564 bp, Homo sapiens
tatctattttgtacatttcattacatattattttacacatttactttttaatcatttaatagaagaaatgagaaaaatatgtattgataatgtcatctatattcataattaccctttattggtgcttatgttagtttgtttggattcagattatcttctcattttacttgctttcatcctgaagatcttttagtaattcttgcaagactggtctgctagaaaaaaattttttttgttgttatttgtggaaaagactttttaaaaatagatttcttggatctaagatttttggttgacagtgtggttgttggttttgttctgtatttttttctattgagtattttgaatgtgttattgcactgcctgttggtctgcattgtttttgctcataagttaactgttaatcttattttaatcttataagagaaatttttttttttttgcttttctttctgctgtcaatgttttctctgtctctttgactttcaggacttttactgtgatgtatttctatggatcttcttgcatttgttatwtttgaatttttaagcactatggatccat

SEQ ID NO: 816690 - DNA, 567 bp, Homo sapiens
attagaggttattgcacacaaaaatttccccaaccttgctagagaggtcaaaaagcaaattgaaaacattcagggaaygacctgtgacatactataaagaggataattctcaagacacatagttttcaggttatccaagatcaatgtgaaagaaaacatgttaaagacagctgtacagaaggggcaagtcacctgtgaaaggaatcctatcaggccaacagtcgaccttttaacaaaaactttccaaaatataagattggaggcctatttcaatatccttaaagaaaagaaattccaaccaggaattttatatctaggcaaactaagcttcataagcaaatgagaaataaaatccattcagacaaacaaatgctaaaataatttgttatcaccatatctgtcttttaagagggtcttaatggagtgttaaacatggaaacaaacaagcaaacaaagaaaaacattaccagccatcataaaaacaaacaagtatatagactattgacagtataaagcaactacacaatcaaatatatataaccatcagctaacaacacaatgacagga

SEQ ID NO: 816691 - DNA, 655 bp, Homo sapiens
cctgtccctcttgagctacatggtaagtggaacctccagtctatgtyttattccattgcccagtgttagacatcatggcccatgtaatgggggccctgatcactacctatctttcttggcatagagtgcatgacagtgagtgaatggcatgttttaccgggaaggtctgtaagtagccccgttgttgtggctacacaggataaggcatagcttgtccctcctctgtggggcagggggccgacataatcgacttgccagtcctgcatagattgtacagttcaacatatgtaacctggtgaggagggaaattttctaggtcatagccatgaacgagtcttcccagttcagaaaagttgccagaatatctgcatatttgataaggatgcctgctgcctttgctatggcccatcccatggctgccccttagtggtcgctcttatgatgtaaccatatggtgggctcctccaataggcttgggcaaattgccagcacatgagtaagggcatctacctcctgatttactcaaggtgacttggagctgtgtgcatccatatggtacactgtaagataggcatccttcttgtgtaacttgatgtggatgtcctgccacatggacgttccacaaaggggcctgatgaaaacctgccaaatgtct

SEQ ID NO: 816692 - DNA, 655 bp, Homo sapiens
cctgtccctcttgagctacatggtaagtggaacctccagtctatgttttattccattgcccagtgttagacatcatggcccatgtaatgggggccctgatcactacctatcyttcttggcatagagtgcatgacagtgagtgaatggcatgttttaccgggaaggtctgtaagtagccccgttgttgtggctacacaggataaggcatagcttgtccctcctctgtggggcagggggccgacataatcgacttgccagtcctgcatagattgtacagttcaacatatgtaacctggtgaggagggaaattttctaggtcatagccatgaacgagtcttcccagttcagaaaagttgccagaatatctgcatatttgataaggatgcctgctgcctttgctatggcccatcccatggctgccccttagtggtcgctcttatgatgtaaccatatggtgggctcctccaataggcttgggcaaattgccagcacatgagtaagggcatctacctcctgatttactcaaggtgacttggagctgtgtgcatccatatggtacactgtaagataggcatccttcttgtgtaacttgatgtggatgtcctgccacatggacgttccacaaaggggcctgatgaaaacctgccaaatgtct

SEQ ID NO: 816693 - DNA, 619 bp, Homo sapiens
aaactagcctggccaacgtggtgaaactccatttctactaaaccaaaatacaaaaattagccaagcatggtggcacatgcctgtaatcccagcaacttaggaggctgaggcaggagaattgcttgaacccaggagatggaggttgcagtgacccgagattgcaccactgcactctagcctcggcaacagagtgagttaaattccatctcagaaaagaaagggacattattggtgtggagttctagcagctggacttagattgcagacctgaagttaaaattggcatgtccttgtttattggaggccggcaaaatttgacttacgaatgatttgtcggggcagcccttccagatgcctgaggcctttaccttttaatggggatttggctgtctaatgctagtaacagccattcatttgtaagagcaggttttatgactcagcttcagggattaatgtttatttttgtgtaactttgtgggggtgggggagcggatcttgagatttttattttcctttacatagcaaaacaaacaacaaaacgcttccataacrcgggctggatggaatgcctatatactgacttttggggtccctgtacagtccctaggtgggttccatg

SEQ ID NO: 816694 - DNA, 562 bp, Homo sapiens
caccccctcacctccccaaattagcctcctgcctctgctccggaagcttcctaatggtctgtgtgcaactgtgcaattacagcagcctgtgttaacaaagctgcgtgatcaccagctttgggcaaaggcttgtgattggagcggtgtgaggtgttgtctcacccctttcacaggcagtttctcgtttttcacatgcgcccacttataaatgtctgtcacagggtttcaggccattcaccacttacacatttgctaattgttccccattcttctgtgtttcttagcctcagacttttcgtatccatctgttctaactaaaatctctctcatcaaattgaaagcccctccaaatgatttcttaccattttctcctaattgccactctagagacctggctatccatttgaaatacctttttgaagtcttgattatctgtaggaaatatttttttctgacatgatagaagtaaccagttttggtgctatttgggttgcttaagtaactacaggctggaaayaggagattctctttccttttttccttctatttttctttccgtcct

SEQ ID NO: 816695 - DNA, 602 bp, Homo sapiens
ctcatgaggtaagtggaagagattataaaagagagaatgcagtaagatcatctttgtgaaagtactataagagttgaaagccatgagcaaatttgagggaattttattttgaatttttaggatttttattgtttgaaatctatcccaaattttaaaagatccatgatcctgcttatgataagtctgtgccaactctaaaacagctattcttatcttcagctgcaggaaaatggaaatcttcatttgtttcatcaaatattgtatgtgtttgatattagccaagttctgaacccagcgtaagaaaactaggaatcccttacttcatctctaaggctattcgagaaaagatgaatgaattcttcccttccaattttttcagatttatttatatttttcgaatttgtgtgtgaattgatgctaattccttcactttggcgattgtttagtaacaaggtttaaaatggatacatttgaatggcaggacttaggtaagtgggtgtcagtgaagygagagacagcccaaggatcatagacaagtcgactcctagagcagaaagacactcaaagcatcacccaatcaaacccccacctgcatatgcgaa

SEQ ID NO: 816696 - DNA, 626 bp, Homo sapiens
ctgatagaaatctgaaatgtaatctatccaaaattaaggcttgatcttccacccctcactgtgccccacttgaagtcttttgagttaatggaaatttatcttccagttgctcaggccgaagagtttagatttagattctctcttgactcctcttttttcttctcgtactccaatcttacctgccagtaaatcacattgacattacctttaaaacacactcagagtgaaatgcaggcctatttaaaggaatgtaacataattcagagtttctatgttacattataaacaccagcattacctcaaagatattgcaggttcagttctagacgactgcaataaagttaagggcacaataaagagagtcatactaattttttactttcccagtgcatatcaaagttatgtagtctattaagtttgctataatattatgcctaaaaatgtacacaccttaatttaagaatactttatttattgctaaaaactgctaacaatcatctgagccttcagtgagttgtaatctttttgctggtggatggtcttgcctcaatgytgatggctgctgactgatcagggtggtggttgctgaaggctggggtggctgtggcaatttcttaaaatagaca

SEQ ID NO: 816697 - DNA, 553 bp, Homo sapiens
agccctgccacccccttggtgttagcccagaaagatccttgttgaacttctaacctacaaaagggtaaaatatcaaattcacattgttttaagccactaagtttgtggtgatttttcacagcggaataggaaattaatgcagggagtcactatgagagaaagagtggccagggaacccgggcagaacagcacccataagattgtttatgtcccacaaatccatgggggaaactatttctagaagaaaggagcagagctctgtgccagactttgctgaaagataccactgatgtagagaatgaactttgcacaggatttgttaaggtagaggtaaccttcacagagcagcttcatgaagtataggcttccaacctgcattgattggagaggattagagagtgaggcatctcagcagaggtctcctgtaaggagcttgagaggcacaggaggtcaaacaagggtcctgggtttacttgaraggagtttgaatgctgatgggaacgtgcagtagaaactgaagaacaggtcttcatacagaggcaaagccaaggag

SEQ ID NO: 816698 - DNA, 589 bp, Homo sapiens
tgccttctctgggcaccctgtaaccacagtctcaaggatcccatgcctcyagtaacctccatcctctcccacatggagccacaagaacctgagacctcttctacaccttctaatggactcagaaacctggaatggggtgagggtgacctgcatctttctcccaggcatataatactgtggtctcagcttgcctcctgccttcagaaatctctggacccaaaatagacaacagcctctatggccgagcacatcctccaactgcagggaacctgtgtgaagctctcctaaagactcccccagattccactttgacagcagcaccaagacgggccccgggacttctggagctcagcaagtgtccagagggagaaagctgccaggctcctcatgctgcagacacttccatgggccctaataattcccctggagacctgcccttgacttcaaggaaagacaccacctctactgtgggactcccccaccgccagactccatgtacccaagaacgccagccacccgacttcctggggatggcagtggcaggatggtggctgctgtttatagggcctatggaaggtgtccaatatta

SEQ ID NO: 816699 - DNA, 573 bp, Homo sapiens
aatcccagctactcgggaggccgaggcaggagaattgcttgaacctaggaggtggaggttgcagtgagctgagactttgccattgcaccccagcctgggtgacacagcgagactccatgtcaaaaaaaaaaaaaaaaaaaaaggctgattcaaaaagctggcaagcaaggccaataatagagagagtaaaaatactatgagagatagtgaaataagagatagtgaaaatagtatacattgagcaggatgtgttgagagatatgacagacaaggcaacacaaaggtgcattgctcaagcagtgacacacagatttacagatgacatcatacaataacagatgtgggtattagaaagaagcaacagctcacagaagagtggttaccatgacacagctgtgatgttatagagatatcgccaagctgggcatggtggtacatatctgtggctccagctacttgggaggccraggcgggaggatctcttgagcccaggaggtcgaggctgcagtgagctgtgatcacaccattgtactctagcctgggcgacagagagacaccctgtcttaaaaaaaa

SEQ ID NO: 816700 - DNA, 626 bp, Homo sapiens
aggttgttgaagtttccagctattattgtattggggtctatctctcactttagctctaatagtatttgcttgttatatttgggtgctccagtgttgggtgcatatatattaacaatggccatattctcttgctgaattgatccctttatcattgtataatgaccttctttgtctcttcttatagtttttgtcttgaaacttattttgtctaagtatagctactcctgctcttctttggtctccattggcatggaatatctttttccatcccttcattttcagtctgtgtgtatctttataagtgaagtgtgtttcttgtgggcaacagatcattgggtcttgtttctttttttaattcattcagtgaccctatatcttttgattggagactttagtccatttacatttaatgttattattcataagtaaagacttacttctggcattttagtttgctttctggtcttcctttccttctttcctatcttgtttttagtgaaggtgattttctctggtggtttaatttaatttattgctttttatttgttttgtatccattgtatgttttttgatttgaggttgccatgaggcttkcaaatactatcttataaccattattttaagct

SEQ ID NO: 816701 - DNA, 488 bp, Homo sapiens
tggatccattctggctggaaaatatccctaaatccacaggatgttatctatttaatggcacatgttaactgaaaatgaggtggattttttttttaagaaaagaccttaaattaatttctatctacatcttaattggtttgtcttctgagccagctcacaatgtcaatgcaatttctagtgcaggtgtctctgagtgccccttgaccacaccccgaggattgtggcagtgtcctggccatgtgtggaaggatcgaagggcagcaggtgcagccttgctctgcacatggacagcagctggctggtccaccgccacgcaccttcagcagtgtacctccggcacaagttccaccattctgcttcmataaagctgggaaaggccgcagtcccagggtgctgctgggtggcgaggaactgtccacccccagaaaccccaggtgactgcttccaatcacaaatattctatattttgcccattttgtataagctta

SEQ ID NO: 816702 - DNA, 632 bp, Homo sapiens
ttttttttttttaagatggagtattgctctgtcacccaggctggagtgcagtggtgcaatttcagcttagtgcaacctccacctcccaggtcagrcaatctcctacctcagccttctgagtagctgaaattacagatgttcaccaccatgcccggctaatacttgtttgtatttttttagtggagacagtgtttcaccatactgtcctggctggtcttgaactgctgatctcttgatccacctgcccattatgcctggcgcaagcctggctaatttttgtatttttagtagaggtggagtttctacttgtgattcatccacctgctttttaaaacaagtgaatattattagatggcttcatatattataagttttacaggacagactctaaacttcctttgtttaataagatttgtcggcctttggtgatgttgatgatgagatgccccttttcctatctcactcatttcatcgttctgttagaaatagcttagactggccagccgcagtggcttatgcctctatttccagcactttgaaaggctgaggtgggtagatggcttgaggtcaggagtttgagaccagtcgggcaaacataatgaaaccttgaatctactaaattaaaaaaaact

SEQ ID NO: 816703 - DNA, 625 bp, Homo sapiens
gtatgtcacacaggggacccgctttctgtgttagagcttgccttccttatctgtgtttcctgaaagggcaacgacttcttaggctgctttttgttagaagggaattctgccaaggacccttgccctaactatttgcctaattgatttctctctctcctctcacattgatgctggcctggctggagcaggtagagctggaagtagcatttttgcaaggacatctctttagcctctgtagattttcacctcaagtcattcggagcaggtcggaagctaggttttttttggggggggaagccagtagagctaaagtggttatgtatctgtttcctgccttccttctttccacttctacatgcattttcttgctgtgcagaaactgttttgagagtgcagacccaaaactgcagaaaacctgttttgggagtggtgtctgggtgctggcctggaagccagccttgcagaccaagcatggcagggctcagggtcttcacgccckgggaaagggaggttccttgcagcctccaaaggggccctcctgagacctgggcagtgcctctctttttccaatataattgacagatgaaaagctggatataaaccagaactaagctcaaaggtgatt

SEQ ID NO: 816704 - DNA, 555 bp, Homo sapiens
ctcactcatggtggattattccctctgagttttgtaattttgcactgtgagctcactcactgggaattcatctttgggaattctgtgcgaatgggttgaaggcacgtagctccagggtcatcagtgctggtgtttgccagactccccagggtgtcaccgacccactatctacttctattgggttttctgtttgggagggtccctgatctttcagggaggtatgaattaaacccccaaatgctgtgaaaatagagctgggcttatgaattttcagagactcccccttcacccctctccttacttaactgtcacctcctcaaggaagcctctcttaacccatcagggcctctctgctacccatgctcctggcactggggcccctctcctacctagccctagtcacagtggtcatttgacatttgcttaggtggctttttgtgcaacacccgcctccsgcactgaactgtgagttccacagagcaaggcctatgtctgtggatcgccactgcccacatgatgttcattacaattctggtcactgacagtatctacttt

SEQ ID NO: 816705 - DNA, 596 bp, Homo sapiens
tctcaaaaactactttctggtgtatgcattcaactcacagagtttaacctatcttttgacagaacagttttcaaacactgtttttgtagaatccgcaagtggacattttgagcactttttgggctatggtggaaaaggaatatcttcacataaaatcagactgaagcattctcaaaaacttctctgcgatgtttgcattcaacacagagagttgaatatttcttttgatagagcaattttgaaacactttttttggagaatctgcaagtcgatatttgttctgctttgaggccttcattggaaacgggaatatcttcacataaaaactagacagaagcattctcaaaaactacattgtcctgtgtgcattcaactcgcagagattaacatatcttttgacagagcagttttgaaacactctttttgtagaaactgtaagtggacaatttgatcactttgagagctatggtggaaaaaataatatcttcacaaaaaaactagacagaagcattytcagaaacttctttgtgatgtttgctttcaactcactgagttgaaactttcttttcatagaacagttttgaaacactcttttt

SEQ ID NO: 816706 - DNA, 656 bp, Homo sapiens
gacagagcagatttgaaacactctttttgtggaatttgcaaatgcagatttcaagccctttgaggccaaacgcagaaaagcaaatatcttcrtataaaaactagactgaatcattctcagaaactgctctgtgctgtgtgcgttcaactcacagagtttaagttttcttttcattcagcagtttggaaacgctctgtttgtaacgtctgcaagtggatattttgacctctttgaggccttcgttggaaacgggatttcttcatataatgctagagggaagaattcttagtaacttcttcgtgttgtgtgtattcaactgtcagagttgaaccatcatttagacagagcagatttcaaacactctttttgtggaatttgcaaatgcagatttcaagtcctttgaggccaaacgcagaaaaggaaatatcttcgtataaaaactaggcagaatcattctcagagactgctctgtgctgtgtgcgttcaactcacagtgtttaagttttcttttcattcagcagtttggaaatgctctgtttgtaacgtctgcaagtggatattttgacctctttgaggccttcattggaaacggatttttttcaggtaaggctatacagaagaattcttattaacttccttgtgttgtgtgtattcaa

SEQ ID NO: 816707 - DNA, 449 bp, Homo sapiens
tgctttgaggctttcgttggaaacgggaatatcttcacataaaaactagacagaaagattctcagaaacttctttgtgatatgtgcaytcaacacagagagttgatcctttcttttgaaagagccattttgacacacactttttgtagattctacaattggacatttagagtactttctgggctatagtgcaaaaagaaatatcttcacatgaaaagtagacagaagcattctcagaagcttctttgtgatgtgtgcattcaactcacagagtttaaccttccttttgattgagcagttttgaaacattctctttgtagaatctgcaagtggttattaggactactttgaggccttcattggaaatgggaatatcttcacataaaaactataaataagcattctcagaaagttatttgtgaattgtgcattcaactcacagaattgaac

SEQ ID NO: 816708 - DNA, 371 bp, Homo sapiens
agccaaggagaacctggggccaccagaaactggcagagacaaggaaggatccttccctagcacctctggagtgggcatggccctgatgccaccttgttttcagacttcargcctctagggctgtgggagaataaatatctgttgttttaagctgccctatttggggcattttgttatagcagcttgaggggactaatacacctagcatgattttttttcttctttttttttgttggtcgggggatagagtctcactctgttgcccaggctggagtgtcagtctcgtctcactgcaacctccatctcctgggttcaggcgattctcctgcctcagcctctgaagaagctgggactacaggcgtgtgccacca

SEQ ID NO: 816709 - DNA, 632 bp, Homo sapiens
cctcgcagttccccagacaaaggcgagccctgcagggttggggtggcagcagcagaggaagcagaggcagtggtggcggtggcagcaggggcaccacacccgctgcccagcaggaggcaggagggccgggcggcgagcacagcagcggggaaggagggcaggcagggcagcgtcccagccgccagcccccaccagcccatccagccaagtcaaggcaaagagacaccagcatgatgctgtgtaccatggctcggggttgatggccacggcacgggggctgccgagaatacggatggccacacagggacaggcctgggttcacagccacgtgtggacctctggatgcgggcatgggaaggcctggacccccttctaagtgtcctgggcacctgcctctgtgtgcctgtgtgtccatggctgcaggcctacctgggcgccacgtgagcttgcaggtacaagcgtgcatgcgtgtgcacgacgtaccagactctgatgaagcctgtgtctgcaagcacaygcgatctggtgctagttctgtcacacgcacacagccacctcgcctaaagcatgtctcagacggagcaccttgccgttctggaccctcctcccaaagaatcataaccagagcagcc

SEQ ID NO: 816710 - DNA, 618 bp, Homo sapiens
aaaacttcagatgtttctgagaaacaactttgtgatgtgtgctttcatctcacagagttaatcatttcttttgactgagcagttaggaaactgtgtttttctagaatctgtgaasggatatttgggatcacatttaggcccatggtgaacaattaaatatctttagataaaatctagaaagaagctttctgagacactgctttgtgatgtgtgtattcatctctcagaggtaaacctttcggctgattgagcagattggaaagactgtttttgtgaaaactgcgatgggatatttgggagcgcattgaggcctatggtgaaaaaggaaatatctgcagatgaaaactagacagaagctttctgagaaactgctttgtgacgtgtgcattcatctcacacaattaaaattttctttgactgatcagtttggaaacactgattttgtggaatctgcaaagtgatatttggaagtgcattgatgcctatggtgaaaaagaaaatatcttcaggtaaaaactagaaagaagctttctgagacactgttttgtgatgtgtgcattcatcttacagagataaagctttctgttgattgagcagtttggaaacactgtttctcta

SEQ ID NO: 816711 - DNA, 492 bp, Homo sapiens
tcaaaataaattttttaaaaaagaataaatcctatattattccacttatatgaggttcctagagtcatcagagtcacagagacagaaagtaaaatgggatgtcgggcgcagtggctcacacctgtaatccctgcactttgggaggctgaggcaggaggatcacgaggttaggagttcaagaccagcccggccaacatggtgaaaccccatctctactaaaaatacaaaaattagctgggtgtggtggtgggcgtctgtaatcccagctactctggaggctgaggcaggagaatcacttgaacccgggaggcagaggttacagtgagctgagatcgcgccactgcaccccagcctgggcaacaaagcaagactccrtctcaaaaaataaaaataaaaaaaaagaaaagaaaaagaaagtaaaatggcaggtgccaggagttggggaggaggatgagtgtgactgtttcatgggggcagagtttcagtttggtt

SEQ ID NO: 816712 - DNA, 659 bp, Homo sapiens
aaaaatgaaaaataaacattttataacaataataacttctttgggacaatgtataaattattatagtgaccaatactggcggatttttccatatcaatgggctacagtaatagaaggaattgggggctggccctcaatagaagacctgagcatttcaagtcactgcaaaacctgtctctgcctgatggctgcagaggggtagagagttgcctagacaaatgaaacagtgagtgcttgagatatggtaaacagagaggcctcagccgggcgcggtggcccacgcctgttatcccagcccttttggaggccgaagcgggcagatcacgaggtcaggagatcgagaccatcctggctaacatggtgaaaccccgtctctactaaaaatacaaaaaattagccaggcatggcggcaggcgcctgtagtcccagctacgtgggaggctgaggcaggagaatggcatgaacccaggaggcggagcttgcagtgagctgagatcgagccactgcactccagcctgggcgacagaacaagactctgactcaaaaaaaaaamaaaacaaaacaaaacaaaacaaaaaaaccagagcggccttgatacaagcttccactgttgttttgattaaatgactcaatgatgctgacctttcgtttatttattt

SEQ ID NO: 816713 - DNA, 565 bp, Homo sapiens
tttaatcacttctccctgtgtctgtattttggttatgttttccaccaattaagaaaagaccctggtgtttaaggtctcccacgtccatactataggttacaccctgcctggcaaaagccatgtaaatcagatcaaaatgttgaaattcttaaaatcaggctttgaattattttcttgttacaacttgccagagaactgtatatcccaccacagtggtccatggaggatcctaaactatagtttagactagaaaagggccagaaggcaagagtggaactatattacattgaaagactagaaagaaattaacatacaatgtttttgtttcatttattcatctaacagttattttaccctacatttctattataggaatcttttcatttcaaatctgggtaatcatttcatttcttttacattgtttgatttgtctttatatcttccaaatgaaatggatactttttagacattgtgcttttaccttcatttttattgtakttaaaaaaaatacaacattaaatttaccatcataatcatttttaagtatagttcagtagtgataaga

SEQ ID NO: 816714 - DNA, 633 bp, Homo sapiens
gggatcctaagacaaaaaaaaatgagaatcwttgtttttcatcctctgattaaaagcttgaaatttttagattggtaagaaacacagtagttggccaggcatgatggctcatgcctataatcctagcactttgggaggctaaagtgggcagatcacttgaacctaggagcacgagactagcctaggcaaaataataagacctcatctctacaaaatatacaaaaattagctcagtgtggtggtgcatgcctatagtcccaactacttaggagactgaggtggcctgagcctgggaggtgaaggttacggtgaaccgcgattgtaccacagcactccagcctgggcaatggagaccctgtctcaaaaaaaaaaaaaaaagaaaaaagaaataaaacaaacaaacaaacattttttaaaaacacagcaatcatgctatctacaaataacctgttttcgaggaaaagatatacataatttaaaagttaaagaatgggacatcatgcaaaatagcatctcatgtaaatactaagaaaaaattggctaaatgaatatcagatcaaagaatattaccagagataagatattatgactgccttatgtatattcaccttataaaagagtttcaaaatacat

SEQ ID NO: 816715 - DNA, 529 bp, Homo sapiens
tgcttccagaaggctcaggggatccttctaccagaaaacttaacacacattactgagatcctccagggctggtgagctggtaaaggtgaacacagtgggtaggagacgtgtctagcagcctggtttggcatttargtggtctgtgttgcttgagtcaataaaatattcgccctttagatccaggttgttccaggaccaatgggagtgcgagccttctctcagaagtggcatttctgagtggcatttcagtatcacggcctgtccttcttgtgatccactctgatcactgatcaaaaataagtcactatggcctggcatggtggctcatgcctgtaatcccagcacttgggagaaccaggtgggcagatgacttgaggccaggagttcaagaccagcctggccaaaatagtaaaaccctctctctactaaaaaataaaaaaaaaaaaaaaaggccaggcacagtggcttacgcctgtaatcccagcactttgggaggccgaggcaggcggatcacgaggtcaggagatca

SEQ ID NO: 816716 - DNA, 607 bp, Homo sapiens
cctcacagagcttacagaacgtctaactccggaagccccttccctgacaggagagcgacagctgacactgctctcctgggtaggaaaccagctaaccacgtgctaagtcagtgccacttctctgtgatccggttaccactcgtttccgctaatacaattgttttccttccaccatgcacacctttcctgaacatccagttctcctgtcttcaccatctagtccagaccgtgggcctagggggagtgagcattctgccagtggctgcgacacaccaggaacgacacgagctattttacatggaatatttcatgtgatcctcatgccacctggggagcaggtgttctcctccccgtctcacagtgaagaagctgagtaaggaatccaagtgagcaaacagcagaaccaggcgatctacagggcccagcccctccgcaccagctgcctgtcacctatcaactctccgtgtgtctaccagactcccrcgtgggaagagggagggtggctgagagtcagtgctgacattacctggtgagcacagcgcctcggaggtggactggggatgtcaactttggtccaggtgtcctttctggtattgtagacatagag

SEQ ID NO: 816717 - DNA, 491 bp, Homo sapiens
tatggccgacctcgaggacagggcgattgctccaccagaatgttcccagatggcacagatgcttctggttcyggcactgggacctgcagcaggattcccgggtggcttaaagaggttccttgaagtttgtgatcaggaattcaaagtagcgcagattgggacggctgggccttctcccctcagcacactccgcgaagggcagtgcaaacgcacgctggcaggaagtggctgggaagcaggcagagagcgaccaggaagcggccaggaagcaggcaggaagtgggcaggaagcaggcagaaagcggccaggaagtggtccaggaagcggacaggtaagtggccaggtaagcaggcaggaatgtgggcaggaagcggccgggaagcaggcagagagcggccaggaagcgggtaggaagcggtcaggttttaccgagcggcgtgacggctccagaggggatgatggagtctggcagagaatggggcgggaggct

SEQ ID NO: 816718 - DNA, 582 bp, Homo sapiens
aggcctgtgcgccagcagctcggccagtatgcagcccacagccctgcagagaacagtggacctcactgcggccagacgtctgctgaccccgccagcgcgaggaacagaggacctgactgcagccagacctttgctgaccctgccagtgtgaggcacgctgggtcagggacactgtgaaggacaggcagggaccactggctcccctcctgggccccgcaggcctcccggggtgacaagtgcaggggcaggcgtgcctcctccagacctctgtgctcccagcctgagaacagcaagctaagttctcacacctcctcctgggtttccaggctcaggcccacctccctgggagtgggaggctggcaaagaccccactgcactcctgcccctcccctgaggctgagctcaggaaccaggtgacccggctcctgtcccagcccttcctgaggccccaggagcggtaaccrtatctcctcaccacatgtcgatgctggtggtctgcgtggtggttcccaacagcagttcaggggctcggtacctacacacagaagcacccacctcaatacagccggctcctctccccca

SEQ ID NO: 816719 - DNA, 554 bp, Homo sapiens
  misc_feature 13: n = A,T,C or G
caggctggctgantggggcttaggaacctgtgttggcacaggtgttggcacaggtgtggggtgtgagagccgggcctgggggatgggctccgcatgtctgacccaggacattccggcttccgctcagttcacggcgaagcagctggagaagctggccaagaaggcggagaaggactccaaggcggagcaggccaaagtgaagaaggtgagaccctgggggctgtggggtcatgactctcctgggtttgtcttctgtccttttctgcccttatttttgtgtcctgttttgttttgatgccttttggggaggggcagggcactttctacatcatgatttaatcgtcaccttgaggtacatatatatatatattttgtttgtttgtttgtttgtttgtttgttttttgagacggagtcttgctctgtcgcccaggctggagtgcacaggtgcgatctcgtctcactgcaacctccgcctcccgggttcaagtgattctagggccttcgcctcacasgtagctgcgattacaggcttgcacccagctaattttttaat

SEQ ID NO: 816720 - DNA, 635 bp, Homo sapiens
acaggagcagggctgtgaaccagggacccaatgtcctctgtggtgctgcacccagggaagagcctccagccatgagtggggctgtgtggaggaagtgagtctcttatcagtagctcttgtccagaactgagcctcagcagctcgttctgtcatcagggtcagagggccgatgtcctggttcctagggagcagcatcctaaaatgggagctggcatatatgagaataacaaaacctacaaattcagaagccctttggttttctttccagaaaatataatttcattttttgtgggtgtatgagaacaccctagcaaaccgtatacacacccacattgatgtttacaggtctatgacacttttatctctgtaagtaaaaattattggtcactgtgatcttttctgcaactttgccatttcactgaaggcgaggacaggtccttctgcatgggttcaaacaaaaggctcagagaccacctggaaagtgaggagctcacctggttctggaagtttggtctgtctcttcccctctgttgccccacagaaggtcagcccactytttccaggtactaagaagagagcccaggtttgtcctgattatatgactcacccagcttctgatgactctcctgttacca

SEQ ID NO: 816721 - DNA, 600 bp, Homo sapiens
ctgcagatgatagtgtcaaaccaagtggaacaaagaaagaagatctggatgacaaagagaaaaaagatgaaactcctgcacctgtatataggrccaagtcaattctggagagctgggtatgggagtaagcaaccaggtaatctttgatcagagatagaaattagtatagacattttgcctccagatcctcaggtggttttagaaattggttctctaattctgtaggagaaggttgatactggtataggcttacacgtcattgaaactggaaaaggtagctagatattcttctactcatgttttggataatgagatattttatgcttcacacacttggagtatgtcatctactgtaatacggtatctgaatgaatactttaaataaaatacatttctgtaagttaattgtatactttaaaaatctctgaaaaatttgagtagcaagtctcagaaacttggttctaaatattaagaatatatccttccttgggagggagcatgtagtaaacatgttagtgtgattgtaagcatactgtctttctggaggtcgctgtgttcctgcatccactgttttcatttcagggatgttcacagaacgcc

SEQ ID NO: 816722 - DNA, 567 bp, Homo sapiens
aaaagaaattacacatttgtgaggtgatggatatgttaaatagcttgattaacaattccatggccgggcgcggtggctcacgcctgtaatcccagcactttgggaggccgaggcgggcggatcacgaggtcaggagatcgagaccatcctggctaacacggtgaaaccccgtctctactaaaaatacaaaaaaaaaattagctgggtgtggtggcgggcgcctgtagtcccagctactagggaggctgaggcaggagaatggcgtgaacccgggaggcggagcttgcagtgagccgagatcgcgccactgcactccagcctgggcgacagagcgagactccgtctcaaaaaaaaaaaaaaaaaaaacaattccatgatgtatacatgtatcatagcatgtgtgaagcgacctacctgtatgaaggtgaggtgacctggtcacgtgacagtgaggtgacctgggggatgtgtraggtgacctgggggatgtgtaaggttacctgggggtatgtgtgaggtgaacttgggctcatgtgaggtgacccagggtgcatgtgtggtggcctg

SEQ ID NO: 816723 - DNA, 567 bp, Homo sapiens
aaaagaaattacacatttgtgaggtgatggatatgttaaatagcttgattaacaattccatggccgggcgcggtggctcacgcctgtaatcccagcactttgggaggccgaggcgggcggatcacgaggtcaggagatcgagaccatcctggctaacacggtgaaaccccgtctctactaaaaatacaaaaaaaaaattagctgggtgtggtggcgggcgcctgtagtcccagctactagggaggctgaggcaggagaatggcgtgaacccgggaggcggagcttgcagtgagccgagatcgcgccactgcactccagcctgggcgacagagcgagactccgtctcaaaaaaaaaaaaaaaaaaaacaattccatgatgtatacatgtatcatagcatgtgtgaagcgacctacctgtatgaaggtgaggtgacctggtcacgtgacagtgaggtgacctgggggatgtgtgaggtkacctgggggatgtgtaaggttacctgggggtatgtgtgaggtgaacttgggctcatgtgaggtgacccagggtgcatgtgtggtggcctg

SEQ ID NO: 816724 - DNA, 517 bp, Homo sapiens
agtagctgggaccacaggcacgtgccacctcacctggctaattttattttttgaacagacagggtattgttatgttgtccaggctggtcttgaactcctrggctcaaacgatcctcccacttcagcctcccaaagtgctgggactacaggtgtgagccacacctggccaggttctactttttaatatttaaaatatctgaaataggccgggcacggcggctcacacctgtaatcccagaactttggtaggctgaggcgggcggatcaccagaggtcagcagtttgtgatgaaactccgttcctactgaaaatacaaaaattagccgggtgggtggcagatgcctgtaatcccagctactcggaaagctgaggcacctaaacccgggaggtggaggttgcagtgagctgatatcatgccactgcagtccagcctccgcgacgcaatgagactgtctcaaaaaaaaaaaaaaaaaaaaagatggtgtcagtgatttctgctacatcagctctggaggca

SEQ ID NO: 816725 - DNA, 517 bp, Homo sapiens
agtagctgggaccacaggcacgtgccacctcacctggctaattttattttttgaacagacagggtattgttatgttgtccaggctggtcttgaactcctaggctcaaacgatcctcccrcttcagcctcccaaagtgctgggactacaggtgtgagccacacctggccaggttctactttttaatatttaaaatatctgaaataggccgggcacggcggctcacacctgtaatcccagaactttggtaggctgaggcgggcggatcaccagaggtcagcagtttgtgatgaaactccgttcctactgaaaatacaaaaattagccgggtgggtggcagatgcctgtaatcccagctactcggaaagctgaggcacctaaacccgggaggtggaggttgcagtgagctgatatcatgccactgcagtccagcctccgcgacgcaatgagactgtctcaaaaaaaaaaaaaaaaaaaaagatggtgtcagtgatttctgctacatcagctctggaggca

SEQ ID NO: 816726 - DNA, 446 bp, Homo sapiens
ttttttttataagctcatcagctgtcgttagcaatagtgtattttatgtgtggcccaggagaattcttcttccaatgtggccctgagaagccaaaagactggacacctgtgcactagatcaaaaggctactccttctggaagcaattgtaaagaatttctgacattatcttgacatgaaaaccaatggatagtgggacagaatgcaaaatcttcaagaaattttttttttttttgagtcaaggtcttgctcagtggcccaggctggagcacactggtgagatcacagctcagtgcaggctcaagtgctccgcctgcctcagccacagtagtagctgggactayagatgcgcacaaccactcctggctaacattttattttttgtagagacatggtctcactatattgtccaggttggtctcaaactccttgactcaagggatccag

SEQ ID NO: 816727 - DNA, 383 bp, Homo sapiens
ctatattgtccaggttggtctcaaactccttgactcaagggatccaggaaaggataacaggtgtgagccaccacacctggccatgtgcatgaaaaaggycccatgaaagttaaggttttcccacctaatttccaggggatcttttggtgcaaggatgagaagcccttaaaagtacacagacaactccaaagattcaagagagttcattcgggctgagccagcccactgggcagactgaccttcaaaaaaggcccacccatgacatacactagatagctctccaagaatctctccagtcctcagggtccctaaggtagtggacagagctaggaaagcaaacccatttgcttcttcctgcaggaaaccccttgaggtcaagaccc

SEQ ID NO: 816728 - DNA, 588 bp, Homo sapiens
agggctgtgtctatcaatgcattatatgacacagatgaagactatgtgtacyttcctcaatttttaccccatgtttcagcctttgtacatctttaatgcaaacatccatgcgagaattcttgtgacattaattttttggaacaacctgtttgcagagcaaatttcattaagccattttaatccagagtttaattttttatacagctcgactcaatcatttccattttttttccattagaatgtctatttgtagtaacattattttcatgggatcaattattttctgtttaaatttacaacaggcatttgactcatcagtctctttttatataccatcttttgctgattctgacttctgctatttggagaggttttcttgttgtgtgtttgattcttttgtggccattctttctattaagtgaaaatcgtctggatcaaattttgtagatttaaatttgttattagtgatacctgttttttttccctgtcaattttagctcattacacattctagtcattttaaccctgctagttttgttagttgctgatcacttttaccataccagtaatacgtggtagaaataatca

SEQ ID NO: 816729 - DNA, 615 bp, Homo sapiens
ccaagagttgagggacttgcttaatgccacccaagacagagccatgcttagaggctgggcacctcaactcaagtggggtcccttccctctaggcagggctgcagctcctaaagtagttccggagacttctrggaagttttgtgccctctcttgcactcccccccccgcccccaccaagcccaaaagacacatccacagaagaactggtttatttggcagaatataatcttcttatcctctctgatagctctcctcccacctcattctccagagctcccacatacagaggtctgatccccctcctccaggtgagtgatctccatgggcaattggacaaagcagaatggcctacgctctggcacagctgatgggttaacatgtaacatttattgagcatctagtacgtgccaggcactttcccatccatttgaatgtcatatcaacattctgagaactacaaattattatttcaatttaccaaatgaacagacaggctcagagaagtgaagaaactcaatcaagatcacaaagctcagaattacagagattcaagcccaggtattttttttttttttttgagatggagtcttgctctgtcgcccaggctggagtgca

SEQ ID NO: 816730 - DNA, 466 bp, Homo sapiens
cactacttgtgagccaagagctaaaggaactgtaagctccatgccataaaggttttgaaagagcgaacttctggaactcccactttatggacctagtatgatttcactccttacctaaacatatccttgctgagctgacacaatgcctgcaaccttccattcttgctgatggctgtcttagagtttgggctggaagaacaattgcagtgcctctacctcaacctccttcttttcagatgtgcaaactatggccacaagagacaaatccttagagcaagatagatgagacaccagagctcaggcctctagcatttgctggggttaattaagtcaaaagcctgagaaggaagraggattgaaattcggctcttaaaaatgaacatcaatcacattattgatcctttcttcttttcctttttcctctttgtgtttgggattcctggatcccaaagcctgcttactgcag

SEQ ID NO: 816731 - DNA, 589 bp, Homo sapiens
ttaatcttattaacacatagttgtattcacatattttatttttcctaggcttttttaaaattgaaatgagtaatacccctatttttgtagatgattcttggagcaggagccaatttacttgctcacaaatttgagggtaagaaattgagggaaggcacagtgaggatgggtttgtctctgtttcacaaggcagcaattggggtaactcgaattgctggggccagttcagatgcatctgcagtgatcatgcgtctgggtcttgtgatttacattgtctgtatctcttggatcttgtccagtagcctcttcatatggttaatttgggcttctcgggcatgatagtctcagggtacttaaaaatctggctttcctcaagagacaaaaatcagaaacttctaagtcttaaaccttagggatggaacttacatttccacctccctctattggttacagcagttctcatgcttagcccagaatcaacgggagaggactacacaaggacatgaatacaggaagaaatcatttattakagtccaccaatgtaacagactactaaagtttacattattaatacgaaactaataacaca

SEQ ID NO: 816732 - DNA, 614 bp, Homo sapiens
acatctctagccaattagagattagtacctcaagtaagttttccagactcacattgtcttcgccctcaggaacaccaattattcttagttttggccattttacttaatctcatatttcttggagactttatttctttgattcatttttctttatttttgtctgatttagttaattcaaaagccttgtcttcaactatgaattttttttttaacttcttctagtctattgttaaaactaggcagtagtcttattgaaagtgtcccttatatatgatgagtcagtatttttgttttgttgttgtttggtttttgcagcttttaatagtttctccttttctttaaatttcagcatttttactcaggatctctttgcacttatactacttagagttagttgagtgtcttgaatgtgtagatttatatttttcagcaatttggggaagtcttcactggtcatttcttcaatttattttttctgttatttttcttctcttctttttctggtgcttccattatgcatacattggtgtgygtaaagtgccctacattcctctgagactgatgctttttctttatgctaaaatctctgttattgagattgcataatatctatt

SEQ ID NO: 816733 - DNA, 623 bp, Homo sapiens
tgcatacattggtgtgcgtaaagtgccctayattcctctgagactgatgctttttctttatgctaaaatctctgttattgagattgcataatatctattaatctatcttttagttcactgattcgttctttgccggttcagattttctgtagtacccctttattttggttattgttcatttcatctacagaattaacatttgtttcattctataatttatatatcttcattgatattctctatttaatgagacattgtcttcttacttcctttatgtctttaagcttcatttcctttagttctgtgaacatatttataatggctaagttgaagtctttgttaaacctgaaatcttgtccctctcattggcagtttctgtttcctacttttattcctgtgtattggtcacagcttcctgtttcttgcctatctcatttgttgttgtggaaagtggacattgtgagtaacattttagtgactttggatactgacccctaccacacccccaggtttggttttgttgtttgtgttcacttaatttgtgtgtgtgtgtgtgtgtgtgtgtgtgtgtatgtgtgtttgtaaatttggttaactattttagtgatgattttttcttctgt

SEQ ID NO: 816734 - DNA, 425 bp, Homo sapiens
gtgccctacattcctctgagactgatgctttttcttyatgctaaaatctctgttattgagattgcataatatctattaatctatcttttagttcactgattcgttctttgccggttcagattttctgtagtacccctttattttggttattgttcatttcatctacagaattaacatttgtttcattctataatttatatatcttcattgatattctctatttaatgagacattgtcttcttacttcctttatgtctttaagcttcatttcctttagttctgtgaacatatttataatggctaagttgaagtctttgttaaacctgaaatcttgtccctctcattggcagtttctgtttcctacttttattcctgtgtattggtcacagcttcctgtttcttgcctatctcatttgttgttgtgg

SEQ ID NO: 816735 - DNA, 626 bp, Homo sapiens
ttttgattttttttttttagctataagagctgagtctacttaccatgtagtctgtactcagatttccactcctctactactcattgacttwgactgttccattgtagttttttccccaacatttcctcccatgatgcaaatagtcctgttaaggacatcactgtgatattttagtttaccccttcaagtcagatgctctgaaaccaataaaattgcaactgcacatttaagtttgattccatgatctattgagttcttttgcttaatagcccaataacttttccagttccaagattctgtgattccataagaccagtagtgtcactttagtgcccccttgacatggcttcattctcaacatggaacactcattactccatgttatgtaaacataacaccatgtcagaaaacatcagttgttgcctttccacagatatggataacagctgtttgtctgacaacatagatgagttagtgccctgtgtgacttcagagccttaaaacagctttttgtcttcagcataaagataacccttcactctttgaagactcagattacaaaatttcataaggtgaagatagtcagacttcagaatgatgataattttgaaacattgtattttcct

SEQ ID NO: 816736 - DNA, 662 bp, Homo sapiens
aagcgctggctggttcctggctggaggttgggctggatcctcattcatgaccgaagagacatttttggcaatgaggtgataatatggwgaaagagtatgtgtaatttagggtatatatttatttcatgagcacagtggggacaagggaggcttttttcttttctttctccttgtcagtcaagcagcatgtgtgtggcagagctgggctacgaacccagagggtctgatctaagaatgccactagacaccatcactttccaagattaaaaacctgatagaaaggtcagaacaagaaactctaagacagagatgcttaagaaaagctaaacaacatgtttcttgtgggtgtcttttagatccgagatgggctggtgaagctgagtcagcgcattttgggaccctgtaccattgtccagggagctctgaaaagcatcctatgtcgcaccccgggagagttttaccacaacactctgagcttcctcaaggtaagggcagctcctgccctccactttgggagtttgggagtcagagaatgccgcccgtggaattaggaataattggttctcctttctggagccatgttccaatattaggagacggcatcggtgtaagcatccacacacacgtttctcacttccggccattctctctgcccctggtga

SEQ ID NO: 816737 - DNA, 608 bp, Homo sapiens
tcaaaaactgcagaaatagtgttaatcctttggatctaaatttattatttttgaattcattaaatataccactttatacattattttctaaataaaatgtaaacagctctaaaatagtgggcatgtcttaaactctcatttcatcaacacagactttaacatagcacataagaagcactcagtaagaactctttgatgtgacaatgacttagttattagggaaacagcatagttggggatgatattaaaaactgtattaaacacttttcataactggcaaagggtgcgcaccaagttaacagaatggatactggccatagccattgagcagagacctagaagtgcctgctcggccagacatgatgcctttagttaatggacagccacaactacgagcattcctgggaagaaaaatggcacctggaaagctcagggaagtaactgtgtactaactagtacagaaatagtttagtactgtaacactggtccagccgtaatagtgaaactagctccctacagagtaaaattaaaagataaaattatttagagttagatttaaaaactcaggttggccacytatgagcacagtgacgttgagccctgatgaa

SEQ ID NO: 816738 - DNA, 397 bp, Homo sapiens
tgagaaggaatagttgacttstattctgtaactaagctggtgctgcataaatagcatctaccacatttgcaagacagggattccaatttttggaatcagtgatgctctcccttcccaaggctgctggcttgctgatgcacactatcagaaagacacgtgtttttacttgtttctgtggtggtaatgggttatgtcaagctctccacccaaccctgccctgcctcccttggaactgacagcatttatttgttaaacagacagctggagctggaagtctaggaatcagctgttaagagatgtgattaagtacgctacgtggcatcaacccattgggcaggtgcacagtggagctggatgattgacaggacttcccaagctctcccaggggtggggtgga

SEQ ID NO: 816739 - DNA, 650 bp, Homo sapiens
ccccctttccctgctgtcagctagaggtcactcagctctctgacamccccttctcacccctagagccccatgtgccttgtgtcatggcctcttccatctccaaagtccacaatggagaatttctcatatgctaaacccctctagctatgaacctctctgacttcttctcctctctttgacctctggacccaatcaaatttaaagggatcacgtaattaggtcagacctacctggaaaatcttcctatcttaaagttaaccaatctgcagtcatggttacatctgcaaaaactccttcccagaaatagactgaatacttggagaaagtgtcggtacactgggagccagcaattttgggggctgtcttagaagctgacctcgccaggtgcggtgactcatgcctgtaatcccagcactttgacaggcaggtgaatcatgaggtcaggagttcgagaccagcctggccaacatggtgaaaccccgtctctactaaaaatagaaaaaattagctgggtatggtagtggcgcctgtaatcccagctacttgggaggccgaggcaggagaattgcttgaacccaggaggcggaggttgcagtaaaccgcatcacgccactgcactccagcccgggcaacagtgtgagactctgtcg

SEQ ID NO: 816740 - DNA, 650 bp, Homo sapiens
ccccctttccctgctgtcagctagaggtcactcagctctctgacacccccttctcacccctagagccccatgtgccttgtgwcatggcctcttccatctccaaagtccacaatggagaatttctcatatgctaaacccctctagctatgaacctctctgacttcttctcctctctttgacctctggacccaatcaaatttaaagggatcacgtaattaggtcagacctacctggaaaatcttcctatcttaaagttaaccaatctgcagtcatggttacatctgcaaaaactccttcccagaaatagactgaatacttggagaaagtgtcggtacactgggagccagcaattttgggggctgtcttagaagctgacctcgccaggtgcggtgactcatgcctgtaatcccagcactttgacaggcaggtgaatcatgaggtcaggagttcgagaccagcctggccaacatggtgaaaccccgtctctactaaaaatagaaaaaattagctgggtatggtagtggcgcctgtaatcccagctacttgggaggccgaggcaggagaattgcttgaacccaggaggcggaggttgcagtaaaccgcatcacgccactgcactccagcccgggcaacagtgtgagactctgtcg

SEQ ID NO: 816741 - DNA, 598 bp, Homo sapiens
accattctaccataaagacacatgcatgtgaatgtttattgctgcactattcaccatagcaaggacatggaatcaacctaaatgcccatcaatgacagagtggatgaasaaaatgtggtacatatacaccatggaatactatgcaaccataaaaataaacgagatcaggtcttttgcaggaacgtggatggagagcaaggctattatcattagcaaactaacgcaggaggagaaattcaaatcccacgttctcacttataagtgggagctaaatgatgagaactcatgaacacaaagaagggaacaatagacactgaggtctacttgggggtggagggtcggagaagatagaggaacagaaaagataaccattgggtactgggcttaatatctgggtgatgaaataatctgtacaacaaacccttgtgacatgagttcacccacgtgacaaaccttcacttgtacccctgaacctaaaagttttaaaaaaaaatggataaaaacatcatgaaatcttcatacagaaaaattttatgattctactcatgtgaaattttgataatattaatctattactatgagattattaatttgagac

SEQ ID NO: 816742 - DNA, 598 bp, Homo sapiens
accattctaccataaagacacatgcatgtgaatgtttattgctgcactattcaccatagcaaggacatggaatcaacctaaatgcccatcaatgacagagtggatgaagaaaatgtggtacatatacaccatggaatactatgcaaccataaaaataaacgagatcaggtcttttgcaggaacgtggatggagagcaaggctattatcattagcaaactaacgcaggaggagaaattcaaatcccacgttctcacttataagtgggagctaaatgatgagaactcatgaacacaaagaagggaacaatagacactgaggtctacttgggggtggagggtcggagaagatagaggaacagaaaagataaccattgggtactgggcttaatatctgggtgatgaaataatctgtacaacaaacccttgtgacatgagttcacccacgtgacaaaccttcacttgtacccctgaacctaaaagtttwaaaaaaaaatggataaaaacatcatgaaatcttcatacagaaaaattttatgattctactcatgtgaaattttgataatattaatctattactatgagattattaatttgagac

SEQ ID NO: 816743 - DNA, 405 bp, Homo sapiens
atctgtttttgccaagagctctgttttcatgttgcagtatgctttccgtactcagcaaggcagtttacaactctgccttagcctttgcttgctgcctatgcagagcctccatgtcagtctaggtatggatttttaggtatttcctgaacatgtgcagctgtgggcatgtgctcagccctacacgtgtacatggccttcttgaattccaggaatatgttagaacttttcaaagctcctatggacctctcattcctcataaattttcttttaagacttttgattagccaatcrttttccccaaatgttatccaacatctcaggcagccacagtgttaactaattgctaatgattgtttttttttttttacaagtgtctccaagaaaaagtctgcattgaatgatctg

SEQ ID NO: 816744 - DNA, 697 bp, Homo sapiens
tggatccttggccttaatcaacttcttcagggctctcctgatccctggccttttttttaaagatagctttatggggatataatccatacaccatgacatttgtccttttaaagtgtgtaagtcagtggttttaagaatacctacagttgtgcaatcatcactataatctaactttttttttttttcatacagggtcttgttctgtcaccccggccggagtgcagtggtgtgatcatggctcaccacagcctcaacctcctaagcaatcctcccacctcagcctcctaactgggactacaggcaggtaccacacccggctaatttttttttttttttttggtagagatggtggggtctcactatgttgctcaggctggtcttgaactccttgcctcaagtaatctgtctgcctcggcctcccaaagtgctgggattacaggcaggaccgcactctgcctagaatctaactttagaacattttttatcatctcccaaagaaaccctttgccaatagcaatcactccccattctccactccccggccgaggcaaccacaaatctgctttgtctgtttgtggatttgtctattctggacatttcatctaaatggagccatgtaatatttgtctgagactggcttctttcactgggcatratattttccaagtttgtccatactgtagcatgtatcagtact

SEQ ID NO: 816745 - DNA, 558 bp, Homo sapiens
gcctagaagtccactctgcaaatagaagctggtgttgacccagcctctgcctgctgcctgcctttccagtccctgcatgtgggtgtacttggctgcctgccacctgtctgtggactggakttccccaaaggttctgggtaacccctcagcccagatccccagaccccactcctccaccccttcctttgctttttcaggcctgaagcgcccacatcagagctgtgggtcctcaccccgccggaagcagtgcaagaagcagcagctaggtgggtaccagtgtggggaggaacataaacagagagatggggttgcctgggggccaagacccggaccctggaccttgtcccctgccaataagcctccagaggcccagtgactcttgtctcgcaagtttccaggagaaaaggactggaggtcttgcacaggcagaggagaggcctgggctggcagcgaaggggctccccacccatctggctgcatggggacttctctgaagagggctccgctgaaggagctggaagcaccatacaggtctcagcttcgctgtccaggcttttc

SEQ ID NO: 816746 - DNA, 548 bp, Homo sapiens
ggtgataaaaaggagcatgtccctggggtgctgacagatacttctttgaggtggttaggacagacctcatcacagtaaaccatttctcacagccctgatcactgcagagcagttccttttctctgtaccctacaagtgggtggctgataattctgggttccagtataacatggcaacagccagaatctgcctctggggcgggatctgtcaggcttcaggaagggtacacaggacaaaacccctcacctccacccgtccagggcaatgagctcatccagaaaggcaccatgtaagaatgattcagtctggaggcagacacttaatctgaaccctggtcctcagtagtgaccttaggtgaaattgggcccgtgttcctcagttcctgtgtccgtaaaatggagtaatagcctaccgcatagggawgttgtgaggatcaattaagttaaagtaagtatcaagcttagaacagcacttagcacatggccagcactccatccatgtggactatgcccctgcaacaggatccagcctccccgtcccttgacccg

SEQ ID NO: 816747 - DNA, 548 bp, Homo sapiens
ggtgataaaaaggagcatgtccctggggtgctgacagatacttctttgaggtggttaggacagacctcatcacagtaaaccatttctcacagccctgatcactgcagagcagttccttttctctgtaccctacaagtgggtggctgataattctgggttccagtataacatggcaacagccagaatctgcctctggggcgggatctgtcaggcttcaggaagggtacacaggacaaaacccctcacctccacccgtccagggcaatgagctcatccagaaaggcaccatgtaagaatgattcagtctggaggcagacacttaatctgaaccctggtcctcagtagtgaccttaggtgaaattgggcccgtgttcctcagttcctgtgtccgtaaaatggagtaatagcctaccgcatagggatgttgtgaggatcaattaagttaaagtaagtatcaagcttagaacagcacttagcacatggccagcactccatycatgtggactatgcccctgcaacaggatccagcctccccgtcccttgacccg

SEQ ID NO: 816748 - DNA, 662 bp, Homo sapiens
cagctagctcagggctgtgtttttctgaattaagtcattatgtctattatacaatgttcagattctacccagccatatgcatttttaccagtaaaatcacaatatacaacacttgtaatcttgtccttatataagtgccaccaccaccatgcagcaaaaacgttataggatgacaatatgacaagaaacagctgtcaaacactggcttttttccagcttcagccaaattcaacaaaaattgagcagggtaacttccttgtgtgtccgccttcagtcttccttaaagccctgaagatcacagaagcgctccagccccttgctcctctaagtgtgctccctggaccagcagcgttggtggcacctaggagcttgtgagaactgtggaagttcagaccccaacccagacccactgaatcggaatctgcatttcacattcacaggcacattaaagtttaagaagcgctgctctacgactgtcctcttcccactcattccctacacacatgctctggccccagatctgagatccacctctgctccctggaggccactgaagctttctccgaggggcccagctgccatagcaacatcactctggctggcattccacccacctggctgcaccctggccccatcagctgcmtcccttgacctgccaaggt

SEQ ID NO: 816749 - DNA, 624 bp, Homo sapiens
gtgttgggacagggatatatggaaaatctctgtaccttcctttccatcttgctgtgaacctaaaactgcattagaaaaataaagttaaaaagttagtgaagcaggaaaccaaaaactgaccaggttcagttcagtttttgacatgttggatttgcaatttccaagacatccagatagacatgtttagtaagcagttgattgtatgaatctggtgttcatcagagaggtctgggctggaagatatacatgtgggaatcattggcccttagatggtatttaaaggtataagactggatttaatcatcaattgagtgaacatgtattgcagagaagcaagacctaaactcctggtgcactcgaatattggaggtggaagggcaggaggagaaaagaaataaaggagactgagaagaaacaacttagtgttctgaaagccaagtgaagaaagtgtttcaataatgagatagtgataaactatcaatgctgatgatagagcaaataaaattaagacagaaaatttatcattgaatttaacaatgtagaagtcattagctatcttgaatagtgtagttttggttgartgttgggagcaaatgccttactaaagtatctttaagaagaaag

SEQ ID NO: 816750 - DNA, 348 bp, Homo sapiens
tggcccctactctcttctggcttgtagggtttttgccgagagatctgctgttagtctgatgggcttacctttgtgagtaacctgacctttctctctggctgcccttwacattttttccttcatttcagccttggtgaatctgacaataatgtgtcttggagttgctcttctcaggtagtatctgtgtggcgttctctgtatttcatgaatttgaatgttgacctgccttggtaggttggggaagttttcctggataatatcctttagagtgttatacaacttggttccattttccccgtcactttcaggtacaccaatgagacatagatttggtcttttcacatagtc

SEQ ID NO: 816751 - DNA, 656 bp, Homo sapiens
gaattgattagatttgaattttagaagcatttattctgaaatacatttgggatttgcggggccgagcagtcgtacttggaaacacttaggagacgggctaggaagctgattagtaatgatggtggcctgaactgaggaaatgtgaagaaaatgtagtcaagagaaaacgagcaggtaaggattaatccaactgggcctggaagtaggggacaagataagactcaaggatgacacccaggtttttagatgatggaccattcaagaagagagtacaagaaaaatggtttggggatcaagatgttttccacgttgaccttgaatttggggagtttaaattaactggtggggcattaaaatataaatattgagtaggcttttgtatatatgagttaggagcaagggaagaactttaggctggatttctagactggaaagtattgacttgttgaagtaaatgaagcctagaaagtgtatggagtcagaagagggctttggggagaatactcacaacaattaagactctgctgtgggtgaagtataaagggaactttaaccatcactggcagtggttgaggaatgtgtggcacagatgatcaatagagccagggtgtggaggaagtgttkattctgtagctgttctataatgaactactctg

SEQ ID NO: 816752 - DNA, 550 bp, Homo sapiens
aagacacatgcacaagtatgttcactgaagcactattcatgatagcaaagacatggaatcaatggaatatattccatgttttatatatatatatayacacacacacacacacacacacacacacacacacacacacacacaccatggaatacgatccatggactatattccatggtgtatatatatatccatggaatatattccatggtgtgtgtgtatatatatatatatatatatatacaccatgcaatactatgcagccttaaaaagaagaaaatcatgtcctttgaagcaacatggatgcagctggaggccattatcctcagcaaatcacacaggaatggaaaaccaaatacttcatgttctcattgataagtaggagaaaaacactgaatacatatggacataatgaagggagcaatagatagacatcagggcctacttgagggtggagggtagaaagagggtgatgatcaaacaactacctattgggtactatactagttacttgggtgacaaaataatttgtgtacaccaaacttccatgact

SEQ ID NO: 816753 - DNA, 564 bp, Homo sapiens
tgttagaaaggtatagggggatgctgagggcccaaaagctaaaaataaaactcacaatatatcacagcttacccagacagcattgccgaatagttctaattgttcttccttaagcggacycttacatattgctttgaaatattcttaatcatattaaaaaggtttgtagctatttatgggtaatgacaacatgtaggatttgaagttatactgctaatacatggataacatgatcagtacatttctgttggtgaggctacggatgattttattacatctttggttctctcactcaaccgaatttttctgcattaagatttttgttgtcttttacagaaaagcaaacctattaatgttaaaaaatatttggagaaaaaatataaacataaacattaaaaaatagactcaaagtcatatgccactttatttacaaagtctatctttggatggttgaaatatatacattttaaaattttatttacttatttattgttttactttgtatctattatccaacttttcatctcctggcatatattatttttaatcagagaaatatgagta

SEQ ID NO: 816754 - DNA, 593 bp, Homo sapiens
actttgataggctgagatgggcagatccttgagcctaggagttggaggccagcctgggcaatatggcgacaccccacctctaycaaaaaatacaaaaattagccgagcatggtagcatgtacatgtaatcccagcaactcaggaggctgaggcgggaggatcacctgagcccaaggaggttgaggctgcagtgagccatgatcatgtcactacactccagcctgggtgacagagtgagatcctctttcaaaaagaagagaaaagaaaaaagaagagaaaggaaaacaaaagaaaaggaaagaaaataaaagaaaaatagctactaagagtggcaatggtaaaggaagtgggtgggctgggtgactgagaggcagcttggagattcattagcaggaaatcctgacagtcggcaactcctggaaccttcatcccaaagaggctcatttcctctctgctccattttttgggtctccatccagatcttcaccccagtcttaccgtagtctcttcccttctctctttatgtaggtgtgtgttggatggagggatataaagagagaggatcccccacttcattatagtggtggaagggg

SEQ ID NO: 816755 - DNA, 611 bp, Homo sapiens
agtttactcacccaaaaccttctgaatgaagaggaggtgggatccccttgaggaaagaccccagtatattatgaaaaatttatatgttaatcttttccccaatattcaccaaagggacctayagctgtttacctacagctgtttaccagggtaactgtgcactaaagcaaaggaaataatcagaattttcagacactggctctaaactgaaactaactttaggtgacccaaaacatcatgatggtccactggtcagagtaagggcttatggcagcagtccccagcctttgtggtaccagggactgatgtcgtggaagtcaatttttccacagactgggagacaggggatggtttggggatgattcaagtacattacatttattgtgcacatctattattattacattgtagtatataatacaataattatacaactcaccagaatgtagaatcagtggaagccctgaacttgttttcttgcaactagatggtctcatctatgggtgatgggagacagtgatagaccactatgcattagattctcataaggagcacacaacctagatcccttgcatacacagttggccatagtgtttgtgctcctatgagaa

SEQ ID NO: 816756 - DNA, 572 bp, Homo sapiens
gaagtccatgtttaagtgaacaaggcctaaagcatcagggtactttaggcatagaattaacattttatgaattgtatgaacatttggaattgttatttaataatcatggaaattactaaaatggattaggaaggtcaagtatgtttttaaaattgaatacttccgcttccttaaaaaaaacccaaaacaatcaagaataaaacttgtttttctgcatctattcttattaaatataatttaatatcttttatctgagaataacatttaattttgtatatttaggaagaactcgatctgaattaatattgactcaatagcttgtacctttctacaccttactgtttatgctctatcagcctgtcatttattctgcttatcaccatcaccatgccatttatttcaccaaaatttattgagcactggattagtcagcttgagctgccataataaaatgycatagactggatgacttaaccagcagaaatgtattttctcatattgtggaagctagaagtctaagatcaaggtgccatcagcgttggtttttgatgagacctctcttcctggtgtgt

SEQ ID NO: 816757 - DNA, 634 bp, Homo sapiens
agggctgtatagaaaagagcaaggtttggtgagagaatattgggaaggggaaacctcctttagattgggtggtcagggaggcttagagaggtaggttggctctgcctaagtgtgttaaccttgggctagtcaaaacttacgttaaatttggttggagaatggctgtgaaactcagaaggaaatgtgtctgaagtaggtacatatctcagtctaccaactcatatgtacaagaggtgtaacgttctctgctcttccataagtgaatttaccttattttgtgctgccattgttctaggagaccaaagctaagcgaatttactttgtgtttggtgactaggggcaaaaggcataaagtttaaccgcagtgtatctgggatctcctttccatgggaggggttaatactaagccagcatttttaccgacacagcccccagtatatcacccattgctttttgtacggtgaatcctcagtaacgttcaataagcgaacatgtgaaaacactcccrttgtgacagaggacataatgacattatctctgacattttcccaatctgttcttccaaattttaggggcctttgtagacttccctcaagaggaagtttctctgccatgattccttgcctgtcagtca

SEQ ID NO: 816758 - DNA, 475 bp, Homo sapiens
gtgaaacttgtattgaacaaatcaggtagttgcttttcataaaccattgcagttctaccatactctgaccatatgataagacccagtgaaaatttaaaaaagaaaaaaatgaggaaaactaagaaatawttagtagcttatatctaggctacacatttaatgtgagtataaaaatgtgtaatggcatccactaatatacatttggcatactgtgtattaatcaagtataaacttaattgaattttaatacatactaaatcaggttatatttaatgactcaagaaaaagtctactcaagttactacttaatatgtaattaacccttgacatctaattaagaatatttctttcttaaattgtgtatctcaaaacttagaaaaaatactgattgaacattgtaagatttattaataatgtttagaattaatattttaaggtatacgtgaatgttctctaaagaaaacctactcactat

SEQ ID NO: 816759 - DNA, 624 bp, Homo sapiens
tttcttgttaaagatgtttttcttttttacaatcctacctctttgcattgtcatattagttataaaattatctcataaatttcatttaaaaactgcttgaattttcatggaatcgtgttgcatataaaggtcatctgggggctgggcaccgtggatgacactgtgatccctgcactttgggaggtcaaggcgggagggtgacctgaggtaaggagtttgagaccagcctgtccaacatggtgaaaccccgtcgctactaaaaacacaataattagccaggttggtggtgggcgcctctagttccagctactcaggaggctgaggcaggagaatcacttgaacctgggaggcagaggttgcagtgaggcaagatcatgccactgcacacagcagtctgggcgacagagactccatctcaaaaaaaggtcatttgtaagaacagatattttaataataataatatttgaacaatgttgagtcttccaatggtatgtttcttaatttctttgaatattttaaaatttctttcactactatttaccatttttaatttttcccctttttatktttataaattgtaggagtacatgtgcagtttttttaaacacaatgttgtagtcttgg

SEQ ID NO: 816760 - DNA, 655 bp, Homo sapiens
ccaaaatatgtatttaaaatcagcatgagattgccaatttattttccatagtaatgtgtttctgtatcatctaaaaacaatgacagtgaaatggaaaattggtccagcyatcctcatattcattctatttaagcaaaaatatttggtggcataaattatcaaataattacttcaaattttcactttattttgcatgtgtgtaagcagaaccaaagatggatcttatcagcaaagaagaaataatcttattttcatggcattggattatttccagatggaggaatatttaaatagagtacttataattcatatttttattctttcgtttgctgatatctgaatctgaagcctaagttgttccaagcgcagatgttcttattgctggattcatctgtgccaataaggtaaaatacatgtatacaaatacagattttaatctttgactcatcctgttcactagtactatccatatactcaaagatttgctttacattggtaattcaaacacccaatttgtgtattataatgttttaccctaattatatgattttaaatatgtcatatcttttatgaagataatatgatatagtaatggtcctatttttcttataaaacttgaaaaatcctaccattacactatttcaaataatataaa

SEQ ID NO: 816761 - DNA, 326 bp, Homo sapiens
caatatggtgctttttctcagaatgatcaaccagctacctggttgcaggttaaaggcgttggaccacttccatcacggaacaggcagccttttgtcttgtggaatagaccctggayatgaattttaattccctgaatacaatgtttctgcaaaaactgccagctgtggactagaatgtcttatgtaccacaatggtattccatacagcattacctctaatcaaggaactcacttcacagaaatgaagtgaagcaatgagctcatgatcatggaattcagtcactcaccatcttccccactgtcctgaagaagctggcttgataaaa

SEQ ID NO: 816762 - DNA, 608 bp, Homo sapiens
gacagtctactccagattacattctaacatgattttgacatggtttccatttccttaaatgactgctgtctgcagcttcttaaatccatgtggtagccatcctggagaagaatgcctgaaatgaaacagctgcaagggttcagatgcccctgtcaatctcatttgtcattttccatcaaagccatcttagtccgacaggcagttctgtggtattcttagttcaggtctacttagttgactgaatcactatgacctttctttttatggcaatctattcgaactgcttcacttgccagggacctcccattcacactgttgttctcctccctcttatctcaaatattgccttaggagagatattttctaatatctaatacatttctaataaatgtagttttcttctcttactttttaaaaaaatgaactataaaaatatatatcaccagtagtagctcctgatggccagctatgttcmaagctcatttagagaaaaatttgaaaggtcgatgcctggtacaagttagaattatgttatattgcttgtgaatacatagctccagcataagaagcttagaaactccctttacttggtgttttctaccatttct

SEQ ID NO: 816763 - DNA, 632 bp, Homo sapiens
atagagagtatataaaagcctgttagtttagcttttgcacatatggtatccaatcctgaaagccccctttgtattacaaagacacaaataaactggtagcaatcacaatgaatgtatacatgytactttatcatcactactatatatcttgtttaatttcacaactgaaagcttactgtccaatggaaaaagcagtgcagattggaagacaatagacaataatgagaattctgtgtgcagaatgaggctgtatgtggaccatagaagaaatgataaacccatggtaaccattagagatttttatttttatacagactcaattaatcaaaatcatttggctaggatttttttaaatagaagaatcaaactccaaaaattcctactcagtatttaaggctataagaattgtacttcaaccactgaaaagtagaagaaaataaacaatctaagtcttcattcattcctcacataggggaaacagggaattagatcttgcatagtacctaatagacccataatttttcctctattatgttcagtattatttccagtaattgcaaaagtaagtacatttcttgtttcttctaaaagtctaaaggtcatttaaagttgagtttcaaaggcatagaatg

SEQ ID NO: 816764 - DNA, 635 bp, Homo sapiens
tccttaacaagaaaagtgtattttyccctgataaaaaaaaagacagtgccactatgtattggtagttatatatcacagggagtgagagaaactgagagggagagagagagagagagacagagaggaagttgatttacagattgaagaaagttgataaattatagtgttacagtgtaagttgcctgatatttttattttgacactgtcctccaaatatatatcagagtaaatttccccaagaatacatactgccacagactatctgaagatataacctggctatatttttacagaaaacaagggggtatacacatctgaatagatttgctgtttgtacataaacactgagaagttagttactattacccatccagttcccttgctaaaaaccttaagatcctctcatatccctactctcaatgctaccctataagtgctagttaaatcttttcattcatcaccatcattttactcttaacttttcatctatttccaattcctcttcatcttcccaggtaaagactctcatcatctgtcataacctcctaattccctgttaccagcctccactcatcttctaattgccgtaggaatgattttcccagaacaaaattctgaccatgcactcaaagtta

SEQ ID NO: 816765 - DNA, 620 bp, Homo sapiens
gggtttcagatgcatgctgagaacaatgtggtcttgctgtctacacagaattggatgagatyagaatccatttggaaggggcattctcttcactgtggaagggaagggtacacacttctaatagctcttgaattattttctgtttttccccatagaacatgagttcgagaccagcctggccaacatggcgaaatcctgtctctactaaaaatgcaaaaattagccgggcatgggggcgcatacctgtagtcccagctactcaggaggctgaggcaggaggattgcttgaacctaggaggcggcagttgcagtgagccaagattgcgacattgcactccagcctgggtgactctgtctccaaaaaaaaaaaaaaaaaaaaaacgagaaggggttgccttaactattttacaaaaatgtaaatataaagaggaaaaatgtggtttcgagcaccttcaatgagcactttgaccctggtgtcaaaatatcactagcaggagaaatggggaaatacagaaggtgaaaaacttcaagggcagccctaatgcaagcttttatggagaaaatattagtgttattttttatcatgggaatgttataggaaaacatcctactgtatgtga

SEQ ID NO: 816766 - DNA, 620 bp, Homo sapiens
gggtttcagatgcatgctgagaacaatgtggtcttgctgtctacacagaattggatgagattagaatccatttggaaggggcattctcttcactgtggaagggaagggtacacacttctaatagctcttgaattattttctgtttttccccatagaacatgagttcgagaccagcctggccaacatggcgaaatcctgtctctactaaaaatgcaaaaattagccgggcatgggggcgcatacctgtagtcccagctactcaggaggctgaggcaggaggattgcttgaacctaggaggcggcagttgcagtgagccaagattgcgacattgcactccagcctgggtgactctgtctccaaaaaaaaaaaaaaaaaaaaaacgagaaggggttgccttaactattttacaaaaatgtaaatataaagaggaaaaatgtggtttcgagcaccttcaatgagcactttgaccctggtgtcaaaatatcactagcaggagaaatggggaaatacagaaggtgaaaaactycaagggcagccctaatgcaagcttttatggagaaaatattagtgttattttttatcatgggaatgttataggaaaacatcctactgtatgtga

SEQ ID NO: 816767 - DNA, 518 bp, Homo sapiens
acctgaatacacccattagaaagcagaggttatcatataagataaaaagtctaaactcaaatacatattgactaccagaaacacactttaattatcaatacacaggtaggttaaacaatttgttaaagtgctgtatcattctaaaacgaatccaaaaatactagaagtatatgttaatttgagcaaagtatatttcagtgcgaagaatattgccatgggtaaaaaaggtcatttcatcatgataaagttgtcaatttatcaagcggatgtagaatcttaagcatgtgtgtacacagtgagatcttcaaactacacagagcagaaacaaatagaactgcaaaaagaaaaggataaatcagtagatatagctggagatttcaataccttcactcaaccattgagagattatgyggacagaaaatcaataaagatacagatttgaacaaaattatcaatcaactcgaaataattaacacttacagaacactccatccaacaatagcagaatgcacattctt

SEQ ID NO: 816768 - DNA, 624 bp, Homo sapiens
gcaccaaaatttaggtgtcagcagggctgaatttttttctggyggcaccagtagagcctgttccagcttctagaggctgcctacatggtccccttttgtatgagtctgttcttaggctgctaataaagacattcccaagactcggtaatttatgaaggaaagaggtttaatggactcagtttcacatggctgggggagcctcacaatcatggcagaaggcaaagaagcaaaggcacatcttacatggtggcaggcaagagagcttgtgcaggggaactcccatttacaaaatcatcagatctcacgagacttattcactaccatgagaatagtatggaggaaaaccacctccatgattcaattatctccacctcgccccaaccttgacatatggggattattacaattcaaggtgagatgtgggtggggacacagctaaaccatatcaccttccttggtcttcaaagccagcaatggactaattgagtgtcatattgtgaaagtgtgacttcctttttatatctccctcttccaggggctcactctgtcacccaggctaaagtaaagtgttgcaagcttggttcactacagtcttgacttccaaggctcaagcagtcctcccat

SEQ ID NO: 816769 - DNA, 609 bp, Homo sapiens
aattcacttttattttacatataagatttaaggtctgtacagaatccatgattttcctatcaaattctccattcattttttatttcactaccaccaccactataattttctttctagactttttcagcagcaakttaaaatttttatacatagttaaattgtctgttttctctttcatatgtaagaattggctaagaaaaagtataaggagcaattttttaaaatgtggaatcccaagtgtatatactatgtaactttatattgaaaaattagcccactttttgacttggccaaaacattacaactagcatttcactttatacaatatcttgtttttagaattacaatattaggtcttcttttccaaacacaaaatacctctaggctgctttcttttactctttggtgacaggtgcattaagaacatgttattactttagttttttcttataaaagtaaaatatgcttgatattttattaagccattcttccattgctgtaaagaaatacctgagactgggtaatttataaagaaaagagatttaattggctcatggttgtgcaggctgtatacgaagcatggcaccagcatctgctgcggaagcttcg

SEQ ID NO: 816770 - DNA, 591 bp, Homo sapiens
attcttaaaattcagtaaaatcctattaagttgatattggtgttttaaagccagctagaatttgaagagtaattcccaagtcatctaaattatattatctgaacmaatataaaacttggaaatttgacccagagccatgtgcatctagaaacatttaatatcaagtaagtgtttttaaaagtctgaaaatactcagtattaactcacaatttgtaaagcacctagcaaaaagcaaaaagaaagaggattaaagcagtgtttacattttagttttttcttctgcctttcttttttttttttctttctctaaatcccttgtcaaataaccatttgtgtcaatagcaagtggtttgcctgaaggaacaatctcattttatgcttaagttggctcacttaaaatcaaataatggtgaatttatatatctttaattcaaaggtgtttcttcctggtccctgttgttttaaagagttgctaaaggataaatcaagcttttaaagaattaaggttagtttgattcagaagtcttattgagggctatagactgagatctctagcctgggatccggagacctgtagaaaggttagtctgc

SEQ ID NO: 816771 - DNA, 271 bp, Homo sapiens
tatctggcattcctctttctccagtgtatgggcaccaatgtaaatactcatagatccatttggggaaatatcagaggaatcatacagtaaatacatgacattgtaataccacgtgttctctgggggatctagccatcacatcagttattggattctgtgtcaaaaaactgactcaggtyttgaaactggacaagacaatgtgacttccttttggggcaaccaccctcaaatgcctgctcatctgtccttgtcttctttttattgtgtatgt

SEQ ID NO: 816772 - DNA, 271 bp, Homo sapiens
tatctggcattcctctttctccagtgtatgggcaccaatgtaaatactcatagatccatttggggaaatatcagaggaatcatacagtaaatacatgacattgtaataccacgtgttctctgggggatctagccatcacatcagttattggattctgtgtcaaaaaactgactcaggtcttgaaactggacaagacaatgtgacttccttttggggcaaccaccctcaaawgcctgctcatctgtccttgtcttctttttattgtgtatgt

SEQ ID NO: 816773 - DNA, 475 bp, Homo sapiens
tatgataactgtcaaatagagacattccatgtccatcattctttttatatttattagttggtatttcactataaggaaaagcttttcttatttattcacctatttactcagtcatagatttctatattgttcaatgggttgtaatctattactatcatcatttatttcaatagtcaaattatctcagatttggctagtgagaagccttcaggtgtgtgtgtgtatgtgtgtgtgtgtgtatgtgtgttgtgtgtgtgtaacatacccacatccatttttgagcatttccttaatttatggcataagatgttccaggctcacctcatacttcttctgacctaggcttggaatcagctctttccccaargggccttaattccttttagtggaggacagcatttaggcataaagatcttgcttctcaggatgttcttgttacttgggtgcatcatttttaggctctctcagtaaacac

SEQ ID NO: 816774 - DNA, 592 bp, Homo sapiens
gggccttgaagctcttggttcaaagtttttgtaattattattcttcaagatattgttgcactgccttctggtctccactgtttctgatgaggtcagtggtaattctaattgttgttctcctatatacggtgtttcagtctggctgcattcaagattttctcttcatcatagtttgactatgatatgcctggatgtattctttgtattagtttttctttctttctttttttaaattggagacagagtctcactctgtcatccaggctggagtgtggtggcacaatcttggctcactgcaacctccgcctcctgggttcaagagattctcctgctcagcctcctgagtagctgggaatacaggcgtgcgccaccatgcccagctaatttttgtatttttagtaaagatgggatttcaccatgttggccaggctggtcttgaacttctgacctcaggtgatttgcctgcctcagcctcccaaagtrctgggattacaggtgtgagccaccaggcccagcctgtattagtttttcttgatgttctatgaccttgaatctgtaattgtatgtctttcaccatatttggaactctaat

SEQ ID NO: 816775 - DNA, 442 bp, Homo sapiens
ctcacctaggatcctcttagaaatgcagaatctcaggccgggagtgttggctcatgcttataatcccagcactttgggatgctgaggcaggaggatcacttcatcctaggagtttgagaccagccygagtaacatagagagaccttgtctctataaaaaaaaaaaaaaaatttaaaaattagccaggaaaggtagcatatgcctgtggtcccagctactttgggaggctgaggtgggaggattgcttgagcccaggaggtcgaggctgcagtgagccatgattgggccactgcacttcagtctgagtgacacagtgagaccctgtctcgaaaagaaaagaaaagaaaaaattataaatgcagaatttcaggctccaactcagacctactgaattagagtctaaattttattaagattcctaggtgattcaggggcacattac

SEQ ID NO: 816776 - DNA, 561 bp, Homo sapiens
gtcttatatggcggcaggcaagacagtgtgtgcaggggaactgccctttataaaaccatcagatctcatgagacttattcactatcatgagaatagcatgggaaagacccacccccatgattcgaccacctcccaccgggtccctcccatgacatgtggagattattacaattcaaggtaagatttgggttgggacacagagtcaaaccatatcaaatcctttttttatgtttcccttcctccttccttcttgtttcttcttctctgtattgtttaccactacaacatcagcagcagcaacaaacagaacatcagcagcagcaacaaacagtatatcatgatgattgctcattgctcctcatggtcttatcattgcactgttgtctttgtcatcatcatcatcatcatcatcatcatccactattaccrccatcactgccacatcaacatcaacatattgtcttatcttggtcttattgttgcatcattgtttttgtcattgccatcatcatcccaatcctcatcactccctcttactgagtgcttgctttgtgccaggca

SEQ ID NO: 816777 - DNA, 620 bp, Homo sapiens
agacaaaataaagaatatgggttttaaagttttctttggagggagtcaaagattttttcctgtgccaaggactagggaatgcttttgtagcttcttgttttcctttgagacgggtatctccctgtaagacaggcaggctggttgctgtggtctgagtgtttttgtctccctaaaatacagatgctgaagcctgattcccaatgcaatagtattaagagttggtgcctttaggaaataattacatcatgaggatggggcccacatgaatggaattaatgccctttcaaaaaagaggcccaagggagcttatttgcccttctaccatgtttaggaccctctatcctgtagcaccatgaccttggactctacagcctccagaactgtgggaaataaatctctactatttacaagccacccagtttatgatattttgttatagcaggccaaaacagtggtgaagatcaggcaccctggaatcgtccagamctgggttcaaattctgcctgactcttgccaggtatgtaaacttggcaagttacttagcttctctgagcctcagcttttctcatgcataaagtacagatcataagaggtaccatctcaaagggcagttgtgaaga

SEQ ID NO: 816778 - DNA, 620 bp, Homo sapiens
agacaaaataaagaatatgggttttaaagttttctttggagggagtcaaagattttttcctgtgccaaggactagggaatgcttttgtagcttcttgttttcctttgagacgggtatctccctgtaagacaggcaggctggttgctgtggtctgagtgtttttgtctccctaaaatacagatgctgaagcctgattcccaatgcaatagtattaagagttggtgcctttaggaaataattacatcatgaggatggggcccacatgaatggaattaatgccctttcaaaaaagaggcccaagggagcttatttgcccttctaccatgtttaggaccctctatcctgtagcaccatgaccttggactctacagcctccagaactgtgggaaataaatctctactatttacaagccacccagtttatgatattttgttatagcaggccaaaacagtggtgaagatcaggcaccctggaatcgtccagaactgggttcaaattctgcctgactcttgccaggtatgtaaacttggcaagttacttagcttctctgagcctcagcttttctcatscataaagtacagatcataagaggtaccatctcaaagggcagttgtgaaga

SEQ ID NO: 816779 - DNA, 544 bp, Homo sapiens
tttttggtaagatgaatgaaggatagaggccaattgctaaccatcaatcagtatctcttttcaattcactccagtcttctcagaaagaaaatcagtttttagtgtcagaaggacacagcttttcctggagatcttccagctttgagttaattaatctcacttctaaagctgtgaagtcttatttaacaaatcacacaggcctagaggggtccggaaagaaaacatttagacttgaaatgataacactctcttaaaagatgtctatgtgagcagcaggcagagctcaatctactgtaatgaagatttacacacagcgcaaagttatgacctacaggtcatatggaaagttaggacctgtgccaaccattttaattctttcaggatgtgcgctcagtgttgaagttaaaaagatcatagagaatacccagttttacttttgatyccttgtggtgaagaaactggaactcagagaggtcaccttggatcttatagttagtggtaaagctcaaataggggtcttggctccaagaacagtgttccaaac

SEQ ID NO: 816780 - DNA, 624 bp, Homo sapiens
taaagtcatgggactagaagacatcacctagggaatgagagtaaatagaaaacagtgtcatcctacacaaattactcttagacaattatcgagcatggtaatttgtgaaatttaacaattctatctctacattaggaaaggtgtgtttgacttgaaaatatgtgtttaattgggtcattcagaccacttcaaaactcttgccacgtttatttcatttttcctttatggctgcaagttgtaatgtcttagaaacaacacccaagcccctctgggctgaagtgattgttctgatgaatgaggctttctgtcttctgagagaatgaggctaaatgaacaagaaacaggtcagtgctgtgcaggctctgaacggccgagctctagttttgaagtttcatttgtacagttgctgcctgggggaaatggaaagaaaaagaaaagatcccctggtatttctgtcacaacaggttggagctggcccgctggctttgttcttggactgcacgaatgaatgggcggcttgtttcctggccccttttractgctctgcactgctcacctggatgaggcgcagtcctgaactggggtcttgggacatttccagcattcgttgacatcagcagaaac

SEQ ID NO: 816781 - DNA, 608 bp, Homo sapiens
atgggatccagccactgcacagtcagacatgctggctgcaccaggtgcactacaagctgcttccccagctggcattggggaatgcggtggtgtccggaagcttggagacatcagaaactgcagggcctcaaagagggagtcacagccctggctcagggagtttccaggtctggcctccccaaagggctgccgctcttcttctctccacccacaatgtggtgagcaaggggcatgtttcagccctgtttgtgttacagctcttttagtcttgcctttcagcgagtcccaagttcttgtcctgcaaccaggaagaatgaggtatgcagacaagtgaaaggtgagcaagatgaaaaggagcttcaatgagcattagaacagctcaaagaagacctgcagtgggcagctcctttccatagacagggtgtcctgatgagtgttcagctcctagcagagagggtagctcctctctgcaggcaggtcgtcccaacaattgttcagttctcagcagagagagtagctcctctctgcagtgggttgtctcrccatctgtagctctcaccagagaggaggccctagagttggtggctcctctctgtaggcaggttgtc

SEQ ID NO: 816782 - DNA, 526 bp, Homo sapiens
gtccttggaggtggcctgggcttcaggacctgagtgacagcagggtgcaagcatgtttgagaccatggctgtacacctttgggtgagctgctgaacctctcaaagcctcrctcttcattggaggacagaatggtgccagcagtcatgatgcatgatgtgtttctaagttacttctcttcctggtctcatcctacttaccctttccccccaagcaaaccttattattatcatttttctaaattgaaaaaagtacacactcctgatcgttgtaaatactgcaggcacactgaagtaggcagaataaaaatgttaatttcacctttttctctaaaccaattctattcccctccccccaaagctgctgttcttaatttggtgcttacacttccagatcatgctacatatttacatacacatgtgtacacactggatagaatatgtataggcagaaatgcatgtataagtagtaaacgacaatccaatatcacttaaattattatgtgcatgtgggagatttttaggtttt

SEQ ID NO: 816783 - DNA, 600 bp, Homo sapiens
taccatttttttcacttatttrtatattttttcattttatggggatttgcttaaaattttaggaaatcatgcttatcaatcttgtgatgagtgtgaatataaattcatatgttttatcacatttagacaggcctcttcacaattattttaaaactcacctaagttttcttttaatagcttcattatttcaatgctatatttttattctttgttcagcttggaatttattttgatataaagagcaaagttttgtttttttttccaaacgatttgccgttttcccaagaccattcatccatggccctgcacctcccccgcctggtgtgcaaagcctcccttggacccatgcctgcatattatctgggtctgggctctactccccacagcagcttcactttacaattttgtggagtttgtctcccttaacacctttatcttacatttcttccctgagtcttctcataagtctctctctctttaagtttttgcacatctaaagtgaaagaaacactttaccgtaagtattttaatgtgcttaattgtgtttggtcttcacactgacagagttctggaatcatctgtacagcaggctcatttcag

SEQ ID NO: 816784 - DNA, 613 bp, Homo sapiens
ctgaaagccactctaagaacaaacgcactgcagggtcatggaagtgtaggaccactggctgagactgactctctcagagaatctctgtgcatgttacctgcacaaaggctctgaagatgcccatgatatttatccctgcttgctgcactttatttcattcagcatttctcatgcttacttacttgagcaagcttcccagggaattccacttagcactgcagttccacttcaggaatcaatcaaggaaatcgaggagaaggccagcaatctgcttaaagtctcatgagatctccatttccacaaaaataaacattctcatcactcagataataaaatgttggtgtcgtatataatacaaaagtgacattgacactgatgtaaaacatagatgctaactgttaaagtggagttaaaaaccatctctcactaagcatgattcagaatgcaccctgatggaagaaatcataaaagttctatactacaatwaataaataaccatagaattaaaaagctctggagaaatattttcaataattatgacagtggatttacaacaggtaaaatgtaggtgagtgttaacaagaggcatattaatgccacagatgttacaaca

SEQ ID NO: 816785 - DNA, 602 bp, Homo sapiens
tcaatcaaggaaatcgaggagaaggccagcaatctgcttaaagtctcatgagatctccatttccacaaaaataaacattctcatcactcagataataaaatgttggtgtcgtatataatacaaaagtgacattgacactgatgtaaaacatagatgctaactgttaaagtggagttaaaaaccatctctcactaagcatgattcagaatgcaccctgatggaagaaatcataaaagttctatactacaataaataaataaccatagaattaaaaagctctggagaaatattttcaataattatgacagtggatttacaacaggtaaaatgtaggtgagtgttaacaagaggcatattaatgccacagatgttacaacaaagagtatgataagcaatttacataaaacatatttagtcaacaaatattccccatagggctgggcacagtggatcatgcctataatcccagcactttgggaggctgaggcaagaggattgcttgggcccaggagtttgagactagcctgggcaatatagygagagcccatctctacaaaaaagaaaaagaaaaaaaaaaaagaaaagtcccacaccaaatatcc

SEQ ID NO: 816786 - DNA, 250 bp, Homo sapiens
agcttgagaacctcagtttagtcctctgagcctgtacccttaaaagtgaggactagaatagtgggtttgcagatgttcagaggcagagaagaaatgggtttggctataatcctgaaagacacaatcccaaacaccataatcccaaatgttgaaatctcaraagatcaaaaacccaaaaacatattctggaaaaaataataaaaagaaaatttaaaagacatttattcacattttaaaagggcaatgtttc

SEQ ID NO: 816787 - DNA, 652 bp, Homo sapiens
gaaatctctgcagaacaaattaccagtttcttcaaccaataaattgcacaggaaatttgtcaatggacatatcaaccaaatgcaatatgcataccttgttaggatagtgattggaataaataatttaaaaaattagaataatgtagaatatttaagtcctgacaggataattgacataaaagaaaactattacataaatggcctgatggagctgaaaaacacaacacgagaacttcacaatgcaaccacaagtatcaacagctgaatagaccaagcaaagggaagaatttcagagcctgaagattatcttgctgaaataagacaggcagacaagattagagaataaagaaaaaaaaggaatgaacaaaacctccgagaactatgggattgtgtaaaaagaccaaacctacgactgactggggtacctgaaagagacgaggagaatggaaccaagttggaaaatgtacttcaggatatcatccaggagaactttcccaacctagcaagacaggccaacattcaaattcaggaaatacagagaacaccactaagatactacatgacaacatcaacccaaaacacrtaattgtcagattctctaaggttgaaatgaaggaaaaagtgttaacggcagccagagagaaaggccagg

SEQ ID NO: 816788 - DNA, 634 bp, Homo sapiens
cacaaagaacattcacaaatgttgcaatggctgccagtattatgatttttattattccatcttttatrgaataagcatttatcttgagaaccaaagaaggtagagactttggtcaggaatttctcagttctaacttgcctctctttccctctccagctatagttaattgggccgtgcatggctaaatctcaatatataaaatatgatacattaacatctagttaaagagccaactgaggaagtttttcagttgctaggaaggtcatagctgacagcaaaacttgtctctgaactccccatctgaggttctattacactacacatcttgttatactttctcattttaggatgatatcccaataaaaaacaaattttcacaagttgataaaatagcctaacatgtaacaaactagactctaaatatgtaacagctttaggaatttctgtttttgctactttttttttgttacataaccaaaggctcaagcggcccagactgtaatcagcaacccacgatatccttgatttcatcagttgtttgaaaccacaaggtcctctcacctgaattttctcagtaggaatcctatcgggaaagtcaatgacaggttgagatgattgggctctgcagatctaa

SEQ ID NO: 816789 - DNA, 600 bp, Homo sapiens
aaagaggcaaagtcaaagacagaaggaaagagaggaagagwcaaaggagtcagagagaaagagatagaagtagtaaagaaaaaacagtgcaccctattcctttaaaagccagggtaaatttaaaatatataattcatgcctgtaatcccagcactttgggaggccaaggcgggcagatcatgaggtcaggagtttgagaccaacttggccaacatggtgaaaccccgtctctactaaaaatacaaaaattagccaggtgtggtggcgggcgcctgtaattccagctactccagaggctgaggcaggagaattgcttgaacccgggaagcagaggttgcggtgagcctagatcatgccactgcactccagcctgggtgacagggcaagactccatctccaaaaaaataaaaatgaaaaataaaacctacaattgataattgaaggtcttctctgtaaccctgtaacactccaataccaccttgttgtcagtgtaaacaagggcatagcccaaaagcactgaggccactgacaacctgtagccttcctatcaaaaatccttaacccagcaggttcctaacaggggatctaaatctgaaggtc

SEQ ID NO: 816790 - DNA, 435 bp, Homo sapiens
tccttcattttctcctcatcttctgggggctctgggcgttccttggcttggggtcacaccattccaattcctgtctctgtctgcacatggccttcttggattctgtgtgtcttctcatcttatataaggacgccagtcattggatttagggcccacactaatccactatgacttgttcttaactaattacatctgcaaagaccctatttccttccttccttccctccttccctcccttccttcccttccttccttcctcccttcctatactttcttttcttttcctttccttttctttctttttttgagataggatcttgttgtgttgcccaggctggaktgcagaggcatgatcgtggcttactgcagccttcagctcccgggctctatcaatccccctgcctcagcctcctcagtagctgggactacaggtgt

SEQ ID NO: 816791 - DNA, 540 bp, Homo sapiens
cacaaccctgtgtccaaataggatcatatcctggggtactggtggttggcactggggagacacagttcaccccatgacatagtgcrtgatctcatgacatctctttgtgaaacctctcagtggcttattggcccattttatagatgaggaaagctgaggcccaggccaatcaagaatatacagcatgccatcatttcttggttcattctacaagcaattactgagtgcctgctgtgtgccaagcccctgtgttgggcactaggggcccagtgtgagcagacatacctggtgtccttcccaaagggctcacaacagacaggcacagggccagggggttagggcagcaaggatgcgagctttggtggtgcaagtccaggtgctgctggggcccagaggaggtgcctggctcagcctagggaggtgggagtggggagggtgacccccatgcccagggcatcatagctgagaagtaacgttacagagcagggaaaggaagggtatttcaagcagggatccagcatgtgcaaaggccctgaggta

SEQ ID NO: 816792 - DNA, 545 bp, Homo sapiens
tgagatatcacttcacacccattaagatagctattatttaaaaacaactacratagtgccgggcgcggtggctcacgcctgtaatcccagcactttgggaagccgaggcaggcggatcatgaggtcagaagatcaagaccatcctggctaacacggtgaaaccccgtctctactaaaaacacaaaaaagtagctgggcgtggtggtgggcgcctgtagtcccagctacttgggagaatgaggcaggagaatggcatgaacccaggaggcagagcttgcagtgagccgagatcatgccactgcactccagcctgggcgacagagcaagactccgtctcaaaaaacaaacaaacaaaaaaaaaactacaataaaatcacatgttgacaaggatgtggacaaattggaacctttgcacatttctggtgggcatgtacaacagtgcagccactataggaaacaatatgacagttcctcaaaaaattaaatgtagaatcactatatgatccagcaattccacccctaagtatatactcaaaataattgaa

SEQ ID NO: 816793 - DNA, 545 bp, Homo sapiens
tgagatatcacttcacacccattaagatagctattatttaaaaacaactacgatagtgccgggcgcggtggctcacgcctgtaatcccagcactttgggaagccraggcaggcggatcatgaggtcagaagatcaagaccatcctggctaacacggtgaaaccccgtctctactaaaaacacaaaaaagtagctgggcgtggtggtgggcgcctgtagtcccagctacttgggagaatgaggcaggagaatggcatgaacccaggaggcagagcttgcagtgagccgagatcatgccactgcactccagcctgggcgacagagcaagactccgtctcaaaaaacaaacaaacaaaaaaaaaactacaataaaatcacatgttgacaaggatgtggacaaattggaacctttgcacatttctggtgggcatgtacaacagtgcagccactataggaaacaatatgacagttcctcaaaaaattaaatgtagaatcactatatgatccagcaattccacccctaagtatatactcaaaataattgaa

SEQ ID NO: 816794 - DNA, 545 bp, Homo sapiens
tgagatatcacttcacacccattaagatagctattatttaaaaacaactacgatagtgccgggcgcggtggctcacgcctgtaatcccagcactttgggaagccgaggcaggcggatcaygaggtcagaagatcaagaccatcctggctaacacggtgaaaccccgtctctactaaaaacacaaaaaagtagctgggcgtggtggtgggcgcctgtagtcccagctacttgggagaatgaggcaggagaatggcatgaacccaggaggcagagcttgcagtgagccgagatcatgccactgcactccagcctgggcgacagagcaagactccgtctcaaaaaacaaacaaacaaaaaaaaaactacaataaaatcacatgttgacaaggatgtggacaaattggaacctttgcacatttctggtgggcatgtacaacagtgcagccactataggaaacaatatgacagttcctcaaaaaattaaatgtagaatcactatatgatccagcaattccacccctaagtatatactcaaaataattgaa

SEQ ID NO: 816795 - DNA, 545 bp, Homo sapiens
tgagatatcacttcacacccattaagatagctattatttaaaaacaactacgatagtgccgggcgcggtggctcacgcctgtaatcccagcactttgggaagccgaggcaggcggatcatkaggtcagaagatcaagaccatcctggctaacacggtgaaaccccgtctctactaaaaacacaaaaaagtagctgggcgtggtggtgggcgcctgtagtcccagctacttgggagaatgaggcaggagaatggcatgaacccaggaggcagagcttgcagtgagccgagatcatgccactgcactccagcctgggcgacagagcaagactccgtctcaaaaaacaaacaaacaaaaaaaaaactacaataaaatcacatgttgacaaggatgtggacaaattggaacctttgcacatttctggtgggcatgtacaacagtgcagccactataggaaacaatatgacagttcctcaaaaaattaaatgtagaatcactatatgatccagcaattccacccctaagtatatactcaaaataattgaa

SEQ ID NO: 816796 - DNA, 582 bp, Homo sapiens
gcccccgcctcgctctacgcctcctccctggctgcaggcagaccgcttcacacagccgcagtgccctgtgtgtggacagcctgtgggagactcgcacgcccacactcaccccgcctggctgcacccctgcccagcatgtcggcgctcgagtggtacgcccacaagtctctaggcgatggtatcttctggattcaagaacgtttctacgagtcgggcaaccgtgccaacatctggctggtgcgcggctccgagcaggacgtggtgatcgatacaggcctggggctgcgcagcctcccggagtacctgtactcctccggcctcttgcaggaccgagaggccaaagaggacgcggcgcgccggccactgcttgccgtggccacccacgtgcacttcgaccactccggcggcctctaccagttcgaccgcgtggcagtgcaccacgccgaggccgaggcgctggctcgcggggacaactttgagaccgtgacctggctttccgatagcgaggtggtgcggrcgcccagccccggctggagggccagacagttccgggtacaggcggtgcagcccaccctcatcctg

SEQ ID NO: 816797 - DNA, 539 bp, Homo sapiens
tagacaaccataccaaaaacaataatgtaatgtgtggtctgggatttacttcagaactattcaaagtgggaggagagttgggaaagcattgggagtatagaaaaaacaaaattgtgagttgataattgttgaagctgaatgatagatccatgtgggctcattatactattctacttttgtatagatttaaatttttaaagaaaggaatactttaataaatatattattaatctcctcaaaggtaagacaaaagttggcatccataaaagaacagaatggtgtataaataagcaacaaaaagaaaaaataactcttaaaaaagatgatagtagaaactttatagatattttggacaatatggttgaaaaaaactttctagaaagtaaaccaaggaatggaaaataggacggaggtgataartaaatcagagtatcagtccaggaggcccaagattcaaatagtaagtatcctaaaaagcaagaaaagagaaaacaaaggggaaaatattatcagtgaaattattcagaagcatttatgag

SEQ ID NO: 816798 - DNA, 614 bp, Homo sapiens
tatcagagttgtaccctcccactctaaatatcccccgcttccctaacttcagctacttcttatgactctttagatattcatttgtggtttagaacatacgaaaggatagcaatacaaaaagtgastgggagggcacatggtcagttcttccttcttgagtcacgttttcctgtggcttcctgacaccacactcctctggttttccttctcacctcactagaagcccctctgcctcctttgctgaacccttgccttctttctgacctctacgtcatgggacgtatcacttctcaggctcagactgcttcatccacattcagactcactctggtctcattcactcacctgtaatttaaaataccgtctcccaaatttacatctccagcctaacttccaaaaatttcctaacttcccctaaattccaaactcattatctccatgagactatttggcatctccaggtgaagattttttaatctcatttttactttctaaatatataacacatttatatgaatccaaagttaaacctatataagaaagtatattcagagaatgctcacttccatttacccattcttttcctccctctatagataatcatttctactagg

SEQ ID NO: 816799 - DNA, 456 bp, Homo sapiens
gtggtacttggttttctagggaactacatttcttctatacctttgtcatgttgtaaatctgttttattatattgtgtgttacagttcttagagcaaatttcctctgaatgccgtgtgatgtggtttctygccaaaagggaatgtttaaagtaaagttgagtaaatctagtttatcgtcatgcatatcaaaacactgcctagctctgataacactcatctcacttctttcttttcttcctctaaagcgtcattttgatcccagtgttgcaaaaattaatgttctaaattcatattccctattgtgttttgtatatgctgtaattcatctagttttcaacacaatacaggttgtgcatccctaatctgataatcccaaatccaaaatgctccaaaataacaactttttgagtgctgatatgatgtggaaaattccacacctgatctcacatgatgggt

SEQ ID NO: 816800 - DNA, 536 bp, Homo sapiens
agagcctaataattcacatctctgggatccatgttcctcatgtataaaatggggatagggatagtactgacatcctaaggctgcrgtgagaatttagcaaacctctgcccatcaaataacttgtaagcaaatattcatggcagcgttactcataacagcccaaagcggaaactacccaaacgcccatcagctgctaagtggctaagccacatggggtgttcccatacagcagaatatcacgcagccataaaaggagtgcggcagtgacgcgccacagcatggatgcaccttgagcacacgccgctgggtgagggatgccagacacaagaggccacacagcgcaggactccacttctgtgaacacccagaaggggcaaatccacggagggagaaaggcggttagtggctgccagtggactgggggaagaatcagagtgatggctcagaactactgggtttctttttggggtgacagaaacgtcctggaattagatagtgacgatggttgcataacactctgaatatcctgaaggcca

SEQ ID NO: 816801 - DNA, 597 bp, Homo sapiens
tcacctctatgtgtggaaaggtcatccagacagctttgcagattggcaatttgtgaacctgtctcaagatctataaaacatattgcagcagaacttcaaagcacactttgccacatgggtgggagacctttgtttccttttttttttttctgctttttaagtctgtaaaccataataagggcacatcaaaaccctgttgctttctaatgtaacacaacaatgacatattaagtagtatgaaaagcattagctttctttttggataccattttttaaataaacattttttttcttagacttgccattctctccgctgagagaatagtcttccaaagttgcaaattcttgttcaaaagccagaaggaaaagaagccattctgaacatactttagctgaagaacatttctgcccctgtgaggacagcgttctgactacctagatcacaggatttttgcctttagcagaatactttttgttgataaacctttataatctaaattgattgtttccatgtctgtaagattcccttagctatatctaaaaaggactaggaagaaacccgaggaactggttccwactgcaggaacagactgtggt

SEQ ID NO: 816802 - DNA, 597 bp, Homo sapiens
tcacctctatgtgtggaaaggtcatccagacagctttgcagattggcaatttgtgaacctgtctcaagatctataaaacatattgcagcagaacttcaaagcacactttgccacatgggtgggagacctttgtttccttttttttttttctgctttttaagtctgtaaaccataataagggcacatcaaaaccctgttgctttctaatgtaacacaacaatgacatattaagtagtatgaaaagcattagctttctttttggataccattttttaaataaacattttttttcttagacttgccattctctccgctgagagaatagtcttccaaagttgcaaattcttgttcaaaagccagaaggaaaagaagccattctgaacatactttagctgaagaacatttctgcccctgtgaggacagcgttctgactacctagatcacaggatttttgcctttagcagaatactttttgttgataaacctttataatctaaattgattgtttccatgtctgtaagattcccttagctatatctaaaaaggactaggaagaaacccgaggaactggttcctwctgcaggaacagactgtggt

SEQ ID NO: 816803 - DNA, 613 bp, Homo sapiens
ggctttaagcatctctctcctctaaagcttatcagcttcttcacattttagtgctctgatttaatttatttgaatttgattgagatgtttcactcctagaaaatcaatacagttgtcttcctgtcactcttcagaaatctgtttttctgtgttcagtatgcatttatttaatcattttttaaaatgaaacaaaaataatttatgattatttcttttatatttaacactaacactctttaaatgaaacaaaaacaaaacaaactgcttgtttttgtttgtttgtttctcaagcagccctataactttttggaagtagttgctttcatttctgttattttcccaatactagattggtcattgttttcaggtagtggcttttggtgaaaatactggcagtatgtatttgtctccttatatctgtgtctctaatttgagtgaggagagggtaaaaccttaaacatctttaaccttttgaaacttttytacttttcaaaatggattttgaaaaaatccccttgcacatttatgttgacatctaaaatttttcagcataaatctaggtagtattagttattttatcatacttcttcgctagaaaaatgtttaaaatttt

SEQ ID NO: 816804 - DNA, 477 bp, Homo sapiens
atttgccacctcgaagacaggcaaaacatttcagggattttctgaggactctgtaccagtggcattcgtgactcccatgccagtatgtaagggggataaagtatctggatatgggayagggggtttactgggggatggagcagatggagaaggggtaggtgaagtggggacaggctgaaaagagtgtgacaggcaaaaggaaggatcatctaagacatcaaaatcagggacagaggaagttccctggaagcatgcatgacaattttcacataattttgggttttgggataaagccaaaaagacctgaacatatggaacctctgaatacaaaagaaaattatatgcttctttctgagagtttgtgagtcaaaatgggattaatttttaagaatatgatctaagggtaagtaggaatgaataaggaagtgcaagagccctagggcatccttttgtctcactctattcggggacatccca

SEQ ID NO: 816805 - DNA, 524 bp, Homo sapiens
tagaaaattgcctgtctgttggcaggttttgtgcacctggttttttttccctatagtctcatacctgagaaacrtggagaaatgttctttttctaaattgaaaaactcagctgtagtctaaatgaaatgggataaattatctttttcacaattatccattaaagagagaatcagaattaatattaatcacagatgtttcatcaagttttattatcaaccagattgactgccaaagtgctttctggaagacattttctctctctcccccacctgctactgagaacaaactattatgggtccttagataaagattaatggttttggcaattcatttgaggaaatctgtattttaccgtacattccaagtcagttcaaggcaccactgggaagcatggtttgtcacttcactaataaaattacaccacggagacacaagatagaataattctttctaccatcagaaacaggttaatcaataagtcgcccaaagttagtatcacccaatctatatttttaaaattttg

SEQ ID NO: 816806 - DNA, 600 bp, Homo sapiens
ggtgacagctgaaacatctatccaaattgcctcttcagattatctttcttcatttttctgtaaaatgcaagatattgaccatggtctgctggaagctttccttctgtgatttccatgtcatttttatctttttatattttttctgtgtctatcaagctcttcccattgctggctcctcttttccacctatctctgaaatatggcatttctcaagatttttctctggccttatcttctttccctattagaaattttcatctactttagttgttccagatattctttttatgctaatgactcaaatccaaaatatatacgagctttaaagttatatacactttaaactctagttctgcctcttactaattgtgaccttaggcaaattgtgtggccaagatctttaggactcagtttgggtaaaataataatgccttatctcataagcttgcttatcatattggcaaccagggcagcctggttgcccccagtggtaagctgtttactaatatrccccgtatttacttttatctagttctaccccagtggtaagctgtttactaatataccagtattttctttctgtctcacttccctattccc

SEQ ID NO: 816807 - DNA, 606 bp, Homo sapiens
agttgacctcaaaacagtgtaattgtgtgtgtgtgtgttttcttttctttaaattttttttataattwttatttttaattcaggggatgtatgtacaggtttgttacaggagtatatggcttgatgctgagacttgtggtgccactgatgctgagcatagcacccaataaatttttaaaccttgacctcctcctcccctcccacctctagtcgttcccagtggctattgttcccatctttatgtccatgagtcaggtgagctcatcttgatagtcaccccttgtgactttttttccacaccttacaggggaaatggcatggttctccaacggcctcccagtcgttagcaggaatgaatgagggcccttggagaacatttcatctgcctcctagttacagtcaagtcaatagaattccagagagcaacacaatggcctgcctcagatttcccacagatagtgaattgccctgactagttaattagaaagttcttttctatatattacacatggacaaatacaatgactagcatttcggtgtattttttatttttttaattgacacataatagttgtattatgtattatggatacagtgtatgatgtt

SEQ ID NO: 816808 - DNA, 641 bp, Homo sapiens
ctgaaggaagcactaaacatggaaaggaacaactggtacaagccacagcaaaaacgccaaattgtaaagaccattgatgctaggaagaaactacatcaacgaatgagcaaaataaccagctaacatcataatgacaggatcaaattcacacataacaatattaactttaaatgtaaataggctaaatgctccaattaaaagacacagactggcaaactggataaagagtcaagacccatcagtgtgctgtattcaggagacccatctcatgtgcaaagacacatataggctcaaaataaaggaatggaggaagacctaccaagcaaatggaaaacaaaataaggcaggggttgcaatcctagtctctgataaaacagattttaaaccaacaaaaatcaaaagagacaaagaaggccattacataatggtaaagggatcaattcaacaagaacaactaactatcctaaatatatatgcacccaatacaggagcacccagattcataaagcaagtccttagacacctacaaagtgacttagactcccacattataataatggragacattaataccccattatcaacattagacagatcaacaagacagaaagttaacaaggatatccaggaatggaactcag

SEQ ID NO: 816809 - DNA, 641 bp, Homo sapiens
ctgaaggaagcactaaacatggaaaggaacaactggtacaagccacagcaaaaacgccaaattgtaaagaccattgatgctaggaagaaactacatcaacgaatgagcaaaataaccagctaacatcataatgacaggatcaaattcacacataacaatattaactttaaatgtaaataggctaaatgctccaattaaaagacacagactggcaaactggataaagagtcaagacccatcagtgtgctgtattcaggagacccatctcatgtgcaaagacacatataggctcaaaataaaggaatggaggaagacctaccaagcaaatggaaaacaaaataaggcaggggttgcaatcctagtctctgataaaacagattttaaaccaacaaaaatcaaaagagacaaagaaggccattacataatggtaaagggatcaattcaacaagaacaactaactatcctaaatatatatgcacccaatacaggagcacccagattcataaagcaagtccttagacacctacaaagtgacttagactcccacattataataatgggagacattaataccccattaycaacattagacagatcaacaagacagaaagttaacaaggatatccaggaatggaactcag

SEQ ID NO: 816810 - DNA, 509 bp, Homo sapiens
ggaggtagagtgagataggagtagaaagttcatccaaagggataataaaagagaacttcccaaacctaaagaaggatatcaacattcaagtacaagaaggttttagaacaccaagcagatttaacctaaagaagacctacctcggccaggtgcactggctcacacctgtaatcccagcattttgggaggccgaggcaggcacatcacgaggtcaggcgatcgagaccatcctggctaacacggtgaaaccccatctctactaaaaatacgaaaaattaccgggcgttgtggcaggtgcctgtagtcccagttacttgggaagctgaggcaggagaatggcgtgaacccaggaggtggagcttgcagtgagctgagattgtgccactgcactccagcctgggtgacagagcsagactccatctcgggaaaaaaaaaaaaaagacctacctcaaggtatttaataatcaaacttccaaaagtcaaggataaagaaaggatcctaaaatcat

SEQ ID NO: 816811 - DNA, 543 bp, Homo sapiens
aggaaatagccttgaaagggcaaatctaagagttattgaccataaagtggaggtagagtgagataggagtagaaagttcatccaaagggataataaaagagaacttcccaaacctaaagaaggatatcaacattcaagtacaagaaggttttagaacaccaagcagatttaacctaaagaagacctacctcggccaggtgcactggctcacacctgtaatcccagcattttgggaggccgaggcaggcacatcacgaggtcaggcgatcgagaccatcctggctaacacggtgaaaccccatctctactaaaaatacgaaaaattaccgggcgttgtggcaggtgcctgtagtcccagttacttgggaagctgaggcaggagaatggcgtgaacccaggaggtggagcttgcagtgagctgagattgtgccactgcactccagcctgggtgacagagcgagactccrtctcgggaaaaaaaaaaaaaagacctacctcaaggtatttaataatcaaacttccaaaagtcaaggataaagaaag

SEQ ID NO: 816812 - DNA, 619 bp, Homo sapiens
aagcccaggagtgagctatgatcacgcccactgcattctagcctgagcgacagagaccccgtctctaaacaaacaaaacaaaacaaaaaacaaaagggatrgtgcacacctgtgcttattacagcactattcaccatagcaaatatatggaatcaatctaagtgtctatcagtggatgaatggataaagaaaatgtggtatatatacataatgaaactctagtcggccataaaagagaaataaaatccttccattcgtggtaacatggatgcaactggaggttattatattaaatgaaacaagccaggcacagaaagacaaatactgcatgttctcactcatgtgggagctgggaaagttgatcttatggaggtagagagtacaatgatagatactagaggccgggaagggtgtgttgggacgggtgaagggtaggaagagagggtggtgaatgggtacagacatacaattagctggaaggaatgcctaatgttcaatagcacagtagggtgactatagttaataataattcatcgtatatttcaaaataaccaaaagagaagatttgaaatgttcccaatacaaagaaataaacattcaaggtgatggatagcctaca

SEQ ID NO: 816813 - DNA, 558 bp, Homo sapiens
tgctctttctttccctgtctttcaacatccagtgaaaagtctcacagtgtaggtaaaycaaacttaaatatcataactctattatgttattcaggagtacattagttctagctactttgatttaaaattcggacataacattaatgattgtaacttcggaatttggtcacatagagaaataatgttttgtgactagcaaattagaaaaacagagatggcagataattattacatatatattacgtgcaattcttatctaagaattttacatgcctttgcccatttaatccttattttaaaacaaaaaccctgtgagctataggtactgttattattctcattttaaagatgtagaaaactgagcctcagagaggataactaccatgctagatcacgtggttagtaaaatggcaaagtcaaggtttgaactcaagtcataaccccagagcctgtgctattaactttgacattgcactgcttcctgggtctgggttggcagctgagagacttacgttccaatccaaatctaccacttccatattttctaaaccaaagcca

SEQ ID NO: 816814 - DNA, 519 bp, Homo sapiens
acaagactagcactcaactttggtcattctgctgtgttcattaggtgccaatgtgaagtctggattttaattggcatgttattgggtatcaagaaaattaatgcacaaaaccacttattatcatttgttatgaaatcccaattatctttacaaagtgtttaaagtttgaacatagaaaataatctctctgcttaattgttatctcagaagactacattagtgagatgtaagaattattaaatattccatttccgcttggctacaattatgaagaagttgaaggtacttcttttagaccaccagtaaataatcctccttcaaaaaataaaaataaaagaaaaaggaaaatcattcaggaagaaatgacctgtctaaaaaaacctaaggaagaataataatataagaaaggaaatttaaaaacattccacaagaagaaaaattattgtttatactyctacttatggttatatcttatattctctattcaagtgacctgtcttttaaaaaggcagtgctgtc

SEQ ID NO: 816815 - DNA, 658 bp, Homo sapiens
cctgggggatcatttaactcacaggggttaaaggactggagtaaagaagaatgctgctttggccttcaggaaggttaaatgcccatgagaactattgtcttgtgtgatttcaagayaaaaaacaggtataaatgatcattccccaatcctgaccttgtttctttagaggaagccctctctctgtttctccctgagttgtctttattataacaatggtaagaatgaggacggtctcaccaggagatgcttgctgacatcttcccaggcttcaggctatttttgcatgaactatcacattcaaccctctacaatattctatgaggtaggatgggctcactattactactgattccattttaagaaaaggacatggaatctcagagaagatatggaacttcctttttataacgcaactagtagattgtgaagccattttgaacacagaacacctatcggctccaggctgggttgttaattacgcctgtgctgaacttttgttcctcatgaacatactacccacatagtcaggcagggcaatcctcttgctggctagagttggacaatataagccttcagtgagcattcatctctatagcaagggctgttagtaatgttggccaggtctgtagacagacatcaccatggattttttgaatgc

SEQ ID NO: 816816 - DNA, 604 bp, Homo sapiens
cagccagtcaacaatttacttttaaagrcacaatgttatactggagagcaaaaccagctgtgttgtgtataagtaacagacttttctatttcttctatttggccgtttgcattgtgctcacctggggcccttcacaacttattataagttttttacaaatgtattttgatcagtatgtttttgttaaattcatatgtccaggaagaaattacagcttgtggtattttcctgtgtcatcttgcttatgtagtttgtataaaactatacaaactgcatatatatatttatatttatctgagtctaccaattgaagtaatgtgtttttattgtttctttcagtaatgtgttctcattttgcccaagacctttggccagagcagagcatgaaagattctttccaaaaagtggtactgagaagatatgaaaaatgtgaacatgacaatttacagttaaaaaaaggatgtataagtgtggatgagtgtaaggtgcacaaagaaggttataatgaacttaaccaatgtttgacaactaccccaagaaaaatatgtcaatgtgataaatatgtgaaagtccttcatcaatttccaaattcaaacggacaaaa

SEQ ID NO: 816817 - DNA, 604 bp, Homo sapiens
cagccagtcaacaatttacttttaaaggmacaatgttatactggagagcaaaaccagctgtgttgtgtataagtaacagacttttctatttcttctatttggccgtttgcattgtgctcacctggggcccttcacaacttattataagttttttacaaatgtattttgatcagtatgtttttgttaaattcatatgtccaggaagaaattacagcttgtggtattttcctgtgtcatcttgcttatgtagtttgtataaaactatacaaactgcatatatatatttatatttatctgagtctaccaattgaagtaatgtgtttttattgtttctttcagtaatgtgttctcattttgcccaagacctttggccagagcagagcatgaaagattctttccaaaaagtggtactgagaagatatgaaaaatgtgaacatgacaatttacagttaaaaaaaggatgtataagtgtggatgagtgtaaggtgcacaaagaaggttataatgaacttaaccaatgtttgacaactaccccaagaaaaatatgtcaatgtgataaatatgtgaaagtccttcatcaatttccaaattcaaacggacaaaa

SEQ ID NO: 816818 - DNA, 284 bp, Homo sapiens
gtagctccagagcattccccataccactacatggtactggagcctaaaaatgtttccatgaggtcaagagtggcatgagagtcaactgagagacggctgaacatggagagatcctgagactggaggaagaagcacttagctggacctagagtcacacagaaggatgcacagctcagtgactggcattgagatggctgtagcccagagcagtaagcttttggctctactctgcccttcataaagcaygctgtggcagatatactggaacgaagactatgacctgg

SEQ ID NO: 816819 - DNA, 493 bp, Homo sapiens
aatacttccctcactttttctgggctaattatgcatgtgagtgtattatacatacgtgtttatatctatctaaatatatttagatattaattttgaaaatctaccaattttctttatttytttgcctttggtgggagataacctgcaccaaaaattggatgtgataaatgatttcctattttcagtgcagtaatggataccaagtaaacttacagcgttatcgttacttttattactgccctaaaacacgtagatctactaaacttgaagcaagacccttaattgtgtttatggtgaatgacttgaataaatcttttcacttcgagatgacttttaattgatgttattggtcagtgatatttgatcagaagctacagactagaaccatacaaaaagggcatcttcctcagggagcgctgaggcacttttgtatagcacagggtctgctgggaggggcagagtggcagttcttcctcctggtaataaaatcagt

SEQ ID NO: 816820 - DNA, 524 bp, Homo sapiens
taggaaagctttgcaagactttagcctttgaagcttaatgtgttttggtgattcaatgagcaattcactgcttcatgaccaagtttattttattgtttaagctactgcccaagtataagttaggtaacttttgaaaaactgcaccacttacatctggtgatttgagcatgttaatgttcagtgtgcccaatttaataaagaagtcaaatttgcatccaagaatcttttaagcagtggaaagctcatcatctcagtgtccagaaaattggtttgtaagcctacaaatgtacaataaaatgctaaataccatttcagacgcaagtaataagtttaatttcttgagggaattatcttccaaaatgcatcatccagaatgaccagaatatcatatgatagtcttagaagaaaattcgtttcstgtgtgtgtgtgtgtgtgtgtgtgtgtgtgtgtgtgtgtatgtgtacaccatgcacttaaggaaattgtaaagtaatatttaatcgagatgtccagagctctcagt

SEQ ID NO: 816821 - DNA, 623 bp, Homo sapiens
aagagttttctctaaaatgttctgaaatatttactgtaaaacatttagaggacataggtgagccaaaagtataaaactataatccctgtaatctcactacccagtaataatcactgtcaacatcttaatccatttccttccagttgtatggttcataagctttactcatagaattgcttttaggacatattaaaaggagtgtcataggatcgtaaagtcgcagggaactgtaggtcatctgtacaacctcttatccaagaaggagtatcttccataatactgccttaaccgaacatacccaatatctggactctcatatttctcctgtttcaagatacttcctatgtcagaacagacctcttttaagggtggaatgttttttaattcttcaaatattcttcactgagagaaaagccgttctcttgacatttcaacagttgaccatcagaaacaatatctaacatgtttataattttcatatattacaagtcctaattatttggatatgcatttccagtttctacttggttccttsttcgagtaaatgtttccctttcctcttctttgttcctgtatcctctttctggttttgaagccccagaatgcatagcagacattggata

SEQ ID NO: 816822 - DNA, 655 bp, Homo sapiens
ttgcatatgtttgttggccacttgcatatcttcttttgagaactgtctatgttcctggctccctttttaatttttttttctttgttttatttattatactttaagttctgggatacatgtgctgaacgtgaaggtttgttacataggtatacacatgtcatggtggtttgctgcacccatcaacccgtcattcacattaggtatttctcctaatgctatctccttcctctagcccccactcccaacagatcccagtgtgtgatgttcccctccctgtgtccatgtgttcttactgttcaactcccacttatgagtgcaaacatgcagtgtttggttttctgttcctctgttagtctgctgagaatgatgtttccagcttcatccatgtcactgcaaagaacatgagctcatcctttttatggctgcatagtattccgtggtgtatatgcaccacattttctttatccagtctatcactgatgggcatttgggttggttccaagtctttgctattgcaaacagtgctgcaataaacgtacgtgygcatgtgtctttatagtagaatgatttataatccttttggtatatacccagtaataggattgctggtcaaatggtatttctggttctggatccctgaggaatctccacactg

SEQ ID NO: 816823 - DNA, 599 bp, Homo sapiens
ccattgcttgtttttgtcaggtttgtcaaaggtcagaagattgtagatgtgtggcattatttctgaggcctctgttctgttccattggtctctatatctgttttgctaccagtgccttgttgttttggttactgtagtcttgtagtgtattttgaagtcaggtagcatgatgcctccagctttgttcaatttgctgaggattttctggctatatgggctctttattgcttccacgtgaaatttaaagtagttttctctaattctgtggagaaagtcagtggtacctcgggatagcattgaatctataaattactttgggcagtctggccattttcacaatattgattcttcctatctaaccgcatggaattatattccatttgtttgtgtcctctcttagttccttgagcagtggtttgtagttctccttgaagaggtttttcacatcccttgtaattgtattcctaggtattttattctctttgtagcaattgtgaatgggagttcactcacgatttggctgtctgtgtattattagtgwataggaattcttgaatttttgcacatcaattttgtatcctgagtctttgctggagttc

SEQ ID NO: 816824 - DNA, 574 bp, Homo sapiens
actgaagagggtaggaaagaaagtcttgaaccacttatgccacccctggcccatccctgccagcaacagtcacatggcatggagagagaatctgggactttgcattggaacccaatgccgccctatcacagaggaaagcaacagagagtagaactcagccagcacccaaggagggagcatttagacaagccctagcaagaggctaatcatccatcccaacagttagaacctgaattccagcaagcccctttaccacgagctaaagtgttttggagtgctaaataagattgaaaggcactctcaaccacaaggatagcagtttctgggcaagtcctggtgctgtgctgggctaaaaacacctcaccaaatgaactaaataagtcaccaaaaaccaattctgaagatacagtgatatgtgacatttcagacagagaattcaaaatagatgtttgaggaagctcaacaaaatacaagataacacagaaaagaaattcagaaytctattggataaatttaacaaaaatcattcaaataaataaaatcaaacagaaattatagagctaaaaatgtaatt

SEQ ID NO: 816825 - DNA, 627 bp, Homo sapiens
catataagaaactcaactcaatagaaaaaatgatctattaatctgaatttaaaatgggaaaaaaatctcaataggcattttyaaaattaagtcatacaagaggcaaataggtatatgaaaagattgttcaaagtcattgattatcacagaaagtcaaattaaaactgcaatgagatatgatctttctccaggtaaaatggcttttatccaaaagtaataacaaatgctggtaaggatgtgaagaaaagggaaactttgtacactgttcaggggaatgtacattagtacaatcactatggagaacatcttggaggtttctcgaacagttaaaaatagttaaaaataagatccagcaatcccgctgctaggtatatacccaaaagaaagaaaatcaggttagtgaagagacgtttgtactcccatgtttatttcagcattaacagtagccaagatttgaaagcagccaaagtgtccatcaaaagatgaatggataaagaaaatatggtacatatataaaatggagtactattaagctattaaaagaatgagattctgtcagttgcaacaacatggatgaaactggagatcatcattttaagtgaaataagcaaagcacagaaagataaa

SEQ ID NO: 816826 - DNA, 579 bp, Homo sapiens
aggaagataaccttaaggtctgactgcctgtggggtccagcagaatgaagccatagttttcttcttgcagaaagcgagtaggagaartatcgctgaatttttttcccagcaaggaataaccctggggaaggaatgcatttccaggggtaggtctatggatggccactctgggagtgtctgtcttacgtggttgaagctaagggatgaaataagccctggtctcctgcagtaccttcaggcttactaggattgggaaattccagcctggtgaattctagtcagactggttgtctgctctggaatcctgtttcctgttaagatgtttatcaagacaatacatgcccagtgggacatggaacctcatccagtaattcttatttcaccctgaccttgtgatcttgctctgctcttctgccctcatgatgttttattgccctttgaagcatgtgatctttgtgacttactccgtgttcatacccccctccccttttggaatccctaataaaaacttgctggttttgcacgcttaagaggccatcatggaacctaccaatagtgatgtcacccctggaggcccag

SEQ ID NO: 816827 - DNA, 519 bp, Homo sapiens
cagaatctctattttatctggagaattagtcattgtgttttgccttttgatgtactgttgcaataaggatccacacatagattctattaagctttgctaatgttctatcaactaggggacctgcagatttaacctatagagagaatgtagctttcactgccaaaatcaagttttccctaaagcacacatcgaacttccatcttccactctagggcatttcctttccagaaaagatcccctaatggatattagactaaaataatagcatagcagctaaatgtattgtttctttacaaatgtttcaatacagagacaaagggagtgtgttaatttccctccttttagtctcacttaaaaattcatatagctgagtacctggcaatcaacacttaatcaaacaaccaacagagaaattawttgtaaaataaatgtgatctaaactgtcactgtaaaaaggctgaagtagaattcattttatgtagacttcaagcaactcaacttaatttctgaagcatgatt

SEQ ID NO: 816828 - DNA, 604 bp, Homo sapiens
acctccagacaaggaaaattgccagaaataaagaggacacttcataatgataaaagggtcaattcatcaggaagacgtatcttaaatgtgtatgtgcctaataaaaaaagtttcaaaatctgtgaagcaaaacaagatattctcaaatcagtaatcacagttgggcatttttaacactactattagtacttgatggactatccacacaaagaatattgataaagagatagaaaatttgaacagtactgtcaacatatctggcctaaataacatttacagaacatttcacccaacactgcaaaatacacgttcttttcaggtttacatgagaaattcaccaatataggcaacaggatagaccaaaagaagtctcaacaaattttttaaaaaaggaaatcttattgagtattctcctgcaatagaattacattagaaatcaatacaatatataaaaatctccaaatattataaaatggaaaaaaaatgttttmtcatctcatctttaaaaatgaatgtcagtgaaagctcttattcaactctatgaatcccaagtgggtaacgaaaaatctccactaaattgttcaagaaaattaactctcaaaac

SEQ ID NO: 816829 - DNA, 585 bp, Homo sapiens
tgggattacaggcatgcgccactatatccagctaatttttgtgtttttagtagagacggggtttcacaatgttggccrggctggtctcgaactcctgacctcaggtgatccgcctgcctcagcctcccaaagtgctgggattacaggcatgagccaccgcgcctcgcctatttatttatttattttcggagacgggatctcactgtgttgcccaggctggagtgcagtggcttattcacagggacaatcccactactgatcagcaagggatcctttcctttctactctttggtaaactcttattcaactatcaaagccccagcctcagtgcccctctcctgatcccaggcatgaagaatcacatgggggacactcacagctcatagtcgggcactgggtggggcctaggcttatgccccttagggatggctccaataggcttcttggcgcccaggagggcctgggagagcaactcatcctcaaacacaatcttcttggtctttgccttgtggggtcccggctggggctggcacggagggcggggggcgctggttttgaggcctcggggcgccagtccctgcagct

SEQ ID NO: 816830 - DNA, 628 bp, Homo sapiens
tggattttaaccaactctactgacgagtctgctttaggactcttggtccagactgacttcatggagagtgttgggggttgtgggagaggccaagcctacaagctgtgggaagctggtggatggaaggctggttagaattcttcaggatctggggaacctcagagagtgctgaacctgttgggacgttggatgagccaatacttggcaaatgcaagaatacaaaggtttctttctttctttttctttttccagatactcaaaagctggggccatgttacatgtgcccagctgtttcattagttaatatcttttggttgcaggccatggcaaccaaatctaaagtaacttaaacaagaaaaggaatgttttggctcatgaaataaaaaagtttagggatggccaggcatggtggctcccacctgtaatctcagcactttaggaggccaaggtgggcagattcctcaagtccaggaattcaagaccagcctgggcaacatagcgagacctcgtctctacaaaaaatacagaaattagctgggtgttgcgacacatgactgwagtcctagctacctgggaggtggaggcaggaggcatggttttttgtttgtttgtttgagacagggtcttg

SEQ ID NO: 816831 - DNA, 526 bp, Homo sapiens
ctaaacccataaccctacacgtggatcctgccccatcactcgtgtgtgtgtgtgtgtgtgtgtgtgtgtgtgtgtgtgtgtgtgtgtccatctctytgctcaatggtcactctgcttgtccatctatctcaggatggcctggagagcccagagaggtgataatgagtattagcttcctgggaagatggcccgctcagaaaagccatgcccagaagtctcagtctacctaccccactccccaggcatcacctccagagcatggtggaactatgacccaactccctgagaccacatgaatccataaccctacacttgggtcccaccccatcactcttgtggccccagcctgtacctcccaccagttctgttcagcctcagccttcgtgagctccacaatgtctccagggttgagccgtagaaagggtccaatggctccagggggtggaggaagcccgtagtattcctgaaacacctccatcttgggcagacctggaggacagggtacaggagtacagggtggttggca

SEQ ID NO: 816832 - DNA, 615 bp, Homo sapiens
aaggcaaattggattctgccacaaacttaccgtttcagaggatcccaggagacacctgttggcctggcaagcccccaacatttgaaaagaaacaggaggccctctttcctggggagaataytatagtgttgaggggaaactgcacttagatagagacaacatttcctcccaataaccagaatcgtgagaattttcctgagttcagttcagccttgagtaatgggtcaatttagcccaactacgagtcacagttaaataacattgaagtaagcagggcacaaatgaccttcagaaaatatctctattggtcaaaatctaatctgactaatgcaccctgccacctgcagcacataattctgagaactccagagaaccttcccccacccttttaaggaatgttcatctacttatttcaagagctgtcaccctcacttttccgacccagaagatgtttgcacaagatcagtgtgtgtgaatggcccaaccagaatgtagttgcaccccagcgtccaacagcaacctcttagccactaaacttgagccgcagcgccctctggtggtcacttgacagtttgagttctccaggccccctttttaactggggaacatctcgcc

SEQ ID NO: 816833 - DNA, 545 bp, Homo sapiens
tcacctcgatcaagtggcttgagtttcagcctaccatttacaaaatcaagctaataataccccttagtggaaagggttgtttcggggtattaaagaggtccatatatgcaatggcgcttcaatcaatattgcttttctctgcccagagtcaatataagaacaaaagattatttcagctttccacgttctagcgttttcactgcttcctttaataaaatgaactcagcaggagatgagactagctagcccagaactgtttttacagtttcccttcctaaaatcaattttgcttttccctcgttctgcagatgacgtaaaatctagagagactacaggaaattgaaagaataaaatagatggtgatcctgcagagttgttgctgggttacagaaaagtgccttttgagaaatctaycaaacaacataaaaagccagaagcagcatcttcctttaattccccccacctccccctgcttctggctttgaaagtccttgaccatgaagctgcctagatgctttattgggtccttgagtgatcaatggcat

SEQ ID NO: 816834 - DNA, 612 bp, Homo sapiens
atatagtttcttgattaatgtctataaactataggatctatatctagtttttctctcagttgaataacctatgctcacaaagctggctggaacataataaatattgtcaaataagaaagagaaagtcatctgacttcgtaaaataatggcaatgttctggatctttagatagccaagaaaccttagaaatcattaaattatatataattgttttatagattagaaagcaacaggccgggtgcggtggctcacgcctgtaatcccagcactttgggaggctgaggcgggcggatcatgaggtcaggagatctagaccatcctggctaacacggtgaaaccccgtctctactaaaaatacaaaaaaattagccgggtgtggtggcaggcgcctgtagtcccaactactcgggaggctgaggcaggagagtggcttgaacccgggaggcgcagcttgcagtgagtggagttcgcgccactgcactccagcctgggcgacagagcaagactccgtctcaaaaamaaaaaacaaaagaaagcaacatttttgctgttgctgtcatttgtattaacttcgttaaattatgcttgtcttattgtacatcatctatcagt

SEQ ID NO: 816835 - DNA, 612 bp, Homo sapiens
atatagtttcttgattaatgtctataaactataggatctatatctagtttttctctcagttgaataacctatgctcacaaagctggctggaacataataaatattgtcaaataagaaagagaaagtcatctgacttcgtaaaataatggcaatgttctggatctttagatagccaagaaaccttagaaatcattaaattatatataattgttttatagattagaaagcaacaggccgggtgcggtggctcacgcctgtaatcccagcactttgggaggctgaggcgggcggatcatgaggtcaggagatctagaccatcctggctaacacggtgaaaccccgtctctactaaaaatacaaaaaaattagccgggtgtggtggcaggcgcctgtagtcccaactactcgggaggctgaggcaggagagtggcttgaacccgggaggcgcagcttgcagtgagtggagttcgcgccactgcactccagcctgggcgacagagcaagactccgtctcaaaaacaaaaaacaaaagaaagcaacatktttgctgttgctgtcatttgtattaacttcgttaaattatgcttgtcttattgtacatcatctatcagt

SEQ ID NO: 816836 - DNA, 612 bp, Homo sapiens
atatagtttcttgattaatgtctataaactataggatctatatctagtttttctctcagttgaataacctatgctcacaaagctggctggaacataataaatattgtcaaataagaaagagaaagtcatctgacttcgtaaaataatggcaatgttctggatctttagatagccaagaaaccttagaaatcattaaattatatataattgttttatagattagaaagcaacaggccgggtgcggtggctcacgcctgtaatcccagcactttgggaggctgaggcgggcggatcatgaggtcaggagatctagaccatcctggctaacacggtgaaaccccgtctctactaaaaatacaaaaaaattagccgggtgtggtggcaggcgcctgtagtcccaactactcgggaggctgaggcaggagagtggcttgaacccgggaggcgcagcttgcagtgagtggagttcgcgccactgcactccagcctgggcgacagagcaagactccgtctcaaaaacaaaaaacaaaagaaagcaacatttttgctgttgctgtcatttgtattaacttcrttaaattatgcttgtcttattgtacatcatctatcagt

SEQ ID NO: 816837 - DNA, 614 bp, Homo sapiens
caatcaaaaaattttattacaccatcatccacaaacagttatcacatgctggtgctcactttacacatatgccattttggctgatgcactcaccccatggaacctattgtttrccaacagggcctaagaatccgtatctttttttgaggattaactctataaagcagatcttgtcccttcttaccatgtgtacatgggaattatcaaccttaaacctgtatctttttctgagaccctattgggaataagatagctccttctgtttcagtttacagagagaaacctgacattggcagtcattcttcagaaacaatagctttatcctgatatctggttttttcctaaggacaaataagcaggtacaggcttaccttaaagggcaaaatggagaaaacaaataaaaaccaaagaagaaaaatctatcgtcttcagttatctatggatatttgacttatccagttgttaacaattggcttttaggttcctaatacagctcctagaattacagttttagtctgtgctttttatttgcactgaagtgaatttatctgtgtcatattgagttgaaaactctgaagacacaagaaattggttctcaaacctactagtttact

SEQ ID NO: 816838 - DNA, 613 bp, Homo sapiens; identical to SEQ ID NO: 810224

SEQ ID NO: 816839 - DNA, 613 bp, Homo sapiens; identical to SEQ ID NO: 810225

SEQ ID NO: 816840 - DNA, 672 bp, Homo sapiens
taacctcaagtaaacggacaaatgaaacaagcttcctttctagtcaattattatgggttttgrtgcttcctaacacattatacccttgatgtcaaaatcgagcttgagaatcagacatttgtacacatattgtctttcaagtcagtatgacctaggaggaatatgtctcctaagtcaaagtttacatgcttctctgcagggttttgctgagtagtagccaacagttacatgaataacagctctagtttattgtttattatatactaactgaagtgcatttattatatcaaggttaatagcttccagcccacagtcatattgtactttgtgtgctcactttgttctcaaagaacaaaagaactctctctttcaagcaaaagtttctgcgtcgtttttaaaattaaagaaactagttttgatcaaattagagaaggcacagtccttcataaaaaaaagaagctaaaatataaaactcatattagatcaattgaactcatagcttaaaacaatccttatttaagtcaattgtatgtttcatagtgattaaacaaataggatcaggattcagacatacccatattctaatccaagccaatgccaggaagcatccttcataaactttaacttccctaagattcaatttccaaaattacaaaatgaaaataatacagc

SEQ ID NO: 816841 - DNA, 594 bp, Homo sapiens
aaggatacagtggcaaatgtatggcaacataaagaagatgtgggaatttttagcagagagattgtattataaaaacaaaaaagaaaaatctagcctgaagaatatattagaatgaaatgggcttactaacaatgaaatgggcttactaactggcagagtaaagcaaaataaatgatcagtacagttaagtcaaaataatagaaattatcccaaatgaattgccaagaaaaaaaagcaaaaacaaaacaaaaatataaagaacgcctaagatctgtgggacaatattaaacttcctaatatagatataaatggggtcccaggagagaaaagaaagtggtttaaagatgtatttaagtagataatgtccaaggacatccccaaatttgatgaaaatcattaatccacataccctagaggctcagcaaatcctaggcaggataaattcaaggaaaaccacacttgggcgcatcagagkcaaatctctttttcaggcaggaaatagataaaggtatgtgaggtaatggaaagggagtatctataaaataaaatttaaaaatctcaaaacacattaacctgaaaaatgttaaaacaggc

SEQ ID NO: 816842 - DNA, 573 bp, Homo sapiens
caacctgggaggcagaggttgcagtgagccaagattatgtattgcactccagcctgggcaacaagagcaaaactctgtctcaaaaagcaaaaacaaaacaaaacaaaaaaagcagagtctctgctctcctgtagggttggaggccgaccacaaacaagcgcccaaatgcctgagacaggaacagcactgggtggtcacaggaggatggaaaaacccaaacagctgaaacaggaactaggcaaataaaccataggataacagaaaacccaagggagagaagatggccaaaactctggccagggtgtgacatgtccatgcttcttccagcaaacccagatataggaagaaaggagacagtaattgaggtggaggtccctgaaatcccctccctttccagaatgcctaacgataattccatcctgtaactaaaagaaacacccataaaattaggaacccaaactccattgtgcaagactcattctcacgggcatgcctgcacttctctcttaaatgwgtatgttcactttgcaataaaagcttcttgcagctcggtgcagtgtcttacaactgtaa

SEQ ID NO: 816843 - DNA, 653 bp, Homo sapiens
gacacggatcctgtatgctttgttcaccactgtgtttccagtactttaactgatactggcatgtggccaatgctcagtgratatttcctgagtgaacaaaggaatagtctttagagaagtgagaaagcatgatacttgcctgtatcttttttttttttccccatacaaagtcttgcactgccacccaggctggagtacagtggtgtgatcatggcccactgcagccttgacttaccaggctcaaacaattctaccaacccagcctcccaaagtgctaggattacaggcatgagccactgtgcctggctgcctgtatctttaaaaattctgaggttctgattttctttagattactgatactgtatattattttatgctttaggttttgttgaaaccaaggtagctgaatttaacaaactatcactgttcccagaaataataaggcctgaacaattcttatttactactgcattactgataggatattgaatccttatttgtatatttatttttatataatggtcttaagatacaaatagcatcattaaagaaaatatatttgaaaataacatttttgaaaggaagaaaagtcactcccatcaccctaacatatccacatgcagacattgtatgcaattataattagggtgtac

SEQ ID NO: 816844 - DNA, 665 bp, Homo sapiens
tcccttgtgatagggaataaattccattactgcttctacatctggtccttcaaaattcagcttgcagagaatcggcraagtcttttcttgcctggcatggcccttctttgctggccagcaaattaacttacctttgttttgaaattcagagttcatatgtgacatagtcaatcagaacagcatgtacagttgcatgtgcattattcatgcatttgttttatgctgtaataagagaaaaaaaaaagatgttcccatccagtcctccacctgccattactccccattcttatagcaaacctgcaagtccagtttcctgcattttctcaagatcacaaacactaataaaatctactcccttcactatgcctgaggaggacaggccacaacagaacagaaatctggcactcgtttaagaaaaacacacattcagtcgcagagatgtttagtagaagggggttgatgaatgcggtcaaaataaagaattagagatgatcaaaggtgacattgagggttcccccactacatgaggctgtatttcatggctgatcgatcttctttagcagagctcagaaggccatctaagacagagaaagacaccaagttgtagagaacctgatagaaagttccactaggctagtgggccaggaaaatcatgcatagaaggt

SEQ ID NO: 816845 - DNA, 553 bp, Homo sapiens
ttggcgtaactgcagggaccacctcccgggttgagggggctggatctccaggctgcggattaagcccctcccgtcggcgttaatttcaaactgcgcgaccgtttytcacctgccttgcgccaaggcagggggcgggaccctattccaagaggtagtaactagcaggactctagccttccgcaattcattgagcgcatttacggaagtaacgtcgggtactgtctctggccgcaagggtgggaggagtacgcatttggcgtaaggtggggcgtagagccttcccgccattggcggcggatagggcgtttacgcgacggcctgacgtagcggaagacgcgttagtgggggggaaggttctagaaaagcggcggcagcggctctagcggcagtagcagcagcgccgggtcccgtgcggaggtgctcctcgcagagttgtttctcgagcagcggcagttctcactacagcgccaggacgagtccggttcgtgttcgtccgcggagatctctctcatctcgctcggctgcgggaaatcgggctgaagcgactgagtcc

SEQ ID NO: 816846 - DNA, 604 bp, Homo sapiens
ttcagcaatacacttctagaacaagcagtactcatgctgctgaaggatgaggctggacatcatcctgaaatcaaatagactcatctaaatagcctactcctattggcaaaccggcccaattccatatttcttaaactaaaatgaaaatcatttaacttccttttccaacttgaaatgctgagaccaagtacatgtggatgagtaagaagacagaaaaaaaaaatactggaatcacaacttgaatgaaaacttgttttaagaattgcctattttgtaccagatgttctgtcaggtactttgaatttctttttaaatttattatcttagcaagccagtgaagtgagtattatttttcccattttacagataaagacatagtctgagagaaagttggtggcttcctaaaagtcacacacctagtaaatgtcagaatcagaactcaggtcattctgaaggttctttccactacatcaccctcctctcacattttagatactgagtaataaacatttaatattaaatcacagaagaataccamagacatttgagtaagaagagcattatttcatataaatatggcccttctcctcagtacacctagatg

SEQ ID NO: 816847 - DNA, 373 bp, Homo sapiens
tgatgaatgtggtattatatattatatttttcttaatacacttctttatccaccttgaaacatcctaattatttaaatactaatatctttaaagtttatgaagcatctgaagaagcagtcctagaagaaaaagtacttgtgactcaacctcaaaagacaaaacccaaactagcaaaaggtatataacaccaatgatccactctgaagaaaaattattttttggccccttttaaaaagctcaatatttttsttcaccatttataaatataactatactcatatcttttaagtgcctgagccacccaagaaagttgttccagaagacaaaatatatgtgactattcctaaaaagagagaaacaccagcaactaaa

SEQ ID NO: 816848 - DNA, 658 bp, Homo sapiens
ggaagttcctcctctaaaacctgaaacaccacctattatgggaacttgttaccactgatctcagctcaggagaaaaaaatagctcttttgttcttgaaaatgtctttgtatctatctagtaatctctgtattttctgagtgtaaaaatactaatatctttcaagtgcacgaagctcccaaagagattatccctgaaaagaaagtgtcggtggtgcctcctaaaaagcctgaagtcccacctgttaaaggtatttgtcactgactttaggcttcagaagacctaattcttctgctcttgacaatatttttttctagcggtcttcataacacctaaatgtaatttcactaatatctttcaagtgccagaagcttccaaagaggttatccgcgaagagaaagtgcccttggctcctcctaaagagcctgaagtcccacctgttaaaggtagttgccactgaccttaggcttcagatctcattcttttgctcttgaagatattttttccagtggtcttcataacttctgaatgtaattttgctaatatcttttaagtaccagagcctcccaaagaagtagttcctgaaaagaaagcgccagtggctcctcctaaaragcctgaagtcccacctgttaaaggtatttgtcactgattttaggc

SEQ ID NO: 816849 - DNA, 432 bp, Homo sapiens
gagaaacagctgatttggtgtggacaaagcctctcagtgatggtggtagccccattctaggatatgtagtggaatgtcagaaacctggcacrgcacaatggaacaggattaataaagatgaactcattaggcaatgtgcctttagggtacctggactaattgaaggaaatgagtacagattccgtataaaggcagctaatattgtaggagagggtgagccaagagaactagcagaatctgtgattgcaaaagatatccttcatcctccagaagtagaacttgatgttacttgtcgtgatgttattaccgtgagagtaggccaaactatccgcattctagctcgagtcaaaggcagacctgaaccagacataacttggactaaggaaggcaaagtattggtccgagaaaagagggtggaccttattcaggatc

SEQ ID NO: 816850 - DNA, 359 bp, Homo sapiens
tttacacaaattgttcaagttgtccccaaatgatacgtaaaatttctttccttcttggagactttaraagactccattaactccattattattaaagcaacccgaatctaggatatagatcctgaatattggatgtggttattttatatgactaacaatttaaaatgtgaaattactcacaggtgagggccttagaagttctcctttcagtttccattgtccaggaatgtctgcctctgagatttctgcatcaaagcttgcactttctttctcataaatggtaacgtcctctattggtttaagcagttcaacttcacgctctgtattggtcagggatgaagtaacataatgctttagac

SEQ ID NO: 816851 - DNA, 584 bp, Homo sapiens
taaaaacagtactaaagaacaaacagaaraacaacttacagagactacaggaattctgggagattcaaggggttacttagggtctaaggaaaggtgcataatggtagaatatatatcatgtttatattatgtgagaacaggagtaattacacccacatgaggaagccttgggagtattgctaccacagtcaaataaagtaggaagaaaaggaatcctgtaggtaattcagtacagaaataaggaaagataagacagagatggtgaaaagcagcaccgtggataattcaatacagaaataaggaaagataagacatagatggtgaaaagcagcaccgtagataaaatgagcatgaatttggagttagactcacttggatgtgaatcccttttttgccactcactagttctgtaataggagacaagttataaaacttccagcctcagtttccagaattacgaggaaagtgaaaaggaacaatgtgaaaaatacctaacagtgtattccataaggaagattattgatgcatttatagagcactgaaggcagggtgggagagagaggaaggaagggaagagaaggaaa

SEQ ID NO: 816852 - DNA, 636 bp, Homo sapiens
ggcttttgtgatgggagctgcctttgcagttgtgttcagatttagctttcacactctgctattcccattgtcttgttccacttgttatcttctaggtccattccaaaagtaggrgctaaaaaaactgagatgacagctaatggggccaggaaaacagagaaagcagagttgaagtcaggtcagctaagaatattctgcaaatgagctcagcgagcctgagtttttcaagggtcacaccaaagaactcaaagggcttggatttaaatcgtctctaagcatatctgagaaaatttagaactttagtaaaaacatacatacaacccctaatattgtccctgaagtatatcctaatacccagagaatggccctgggtgtatagttgcagttcaatagtcaatgaatgaatgaatagatagatatacagtaattcctgtatgagagactgagcaaagatatccccacaatatctttgttaagatattcaactattaggctattttccccctttaattttttggcaaaacttctcacttgggattaagcaaaatttgtctccattagactgcaaatctccagaattctttggatcctattcacctgattgaccaagggtggaaaatatctaatgctataatt

SEQ ID NO: 816853 - DNA, 415 bp, Homo sapiens
aagtttgagatgcttgtgagacatccaagtatacatgtcaagtatatagttagatagatgggcctggaatgcagatgaaaaattaaaatgggaatattaagtgtagtgggcaaaggggctagcagaggatagtgaagttaaagaaatcaagtgtcaaatcagttagagctttataggatccatagtaagagctttggattaattccagtggctttggaaactatgggaatttttttaatagggatgtaaaaaatctgagttacattataaaaattactttggctgcagtgagaagtaatgtgtggaaagccaagttattataaactagacatgatggtggcctgaggtagtatrttaacagtgaagacagtgagcagtggctgggttggggacatgacttgaaggaagaaccagc

SEQ ID NO: 816854 - DNA, 555 bp, Homo sapiens
gcctacagatcttgttttgcaagtaagaacagaagactctggccgggcgtggtagattaygtctgtaatcccagcactttgggaggccaagggggggcggatcacctgaggtcaggaattcaagacaagcctggccaacatggcgaaaccccatctctactaaaaatacaaaaatcagccaggtgtggtagcacgcacctgtaatcccagctagtctggaggctgagacaggagaatcacttgaacccgggaggcagaggttgcagtaagccgagatcgcaccactgcactccagcctgggtgactctgtctcacagaaaaaaaaaaaaaaaaaaaaccacaggagactctagggaggccaccaggcctgtcaaggttgcatggttctcaggtggcaggctggtatcacaccccccgccctgactcacaaactgttcctattttcatttccttccccttaaaaaaagtagaactatctcactgatgtaagaagaacatacttggctttttttctcgtaaggagtcttaaaaaacacactgatagttgacactgta

SEQ ID NO: 816855 - DNA, 555 bp, Homo sapiens
gcctacagatcttgttttgcaagtaagaacagaagactctggccgggcgtggtagattatgtctgtaatcccagcactttgggaggccaasggggggcggatcacctgaggtcaggaattcaagacaagcctggccaacatggcgaaaccccatctctactaaaaatacaaaaatcagccaggtgtggtagcacgcacctgtaatcccagctagtctggaggctgagacaggagaatcacttgaacccgggaggcagaggttgcagtaagccgagatcgcaccactgcactccagcctgggtgactctgtctcacagaaaaaaaaaaaaaaaaaaaaccacaggagactctagggaggccaccaggcctgtcaaggttgcatggttctcaggtggcaggctggtatcacaccccccgccctgactcacaaactgttcctattttcatttccttccccttaaaaaaagtagaactatctcactgatgtaagaagaacatacttggctttttttctcgtaaggagtcttaaaaaacacactgatagttgacactgta

SEQ ID NO: 816856 - DNA, 522 bp, Homo sapiens
gtagcttgcttgacatcgtctaaggctccctcataccttgccacctttaccctagtcacctacctgatttcggtgatgctcasgtagaaagggaaattgtaggaaaaggaagttgtctatgtactgtgaggttgtggtgcacatgcacacactgttggattcatgttacaatcatgggctttgagatgcctttactggggaatgtgaggcggttagaaatggggagtatttgcttttacctatgcacatgtgtgtttctgtttccaggtctcctctgtggtctgcttcctactgtctcctgcagcttccttcatcactggacagtcgggtggatgtggatgggggccggagtctctatactcactcgtatgaggtaccaggtgagcagctgaggaatgagcagtcaccagctttatgctgtgtcatgttcaggggtttaaaatttattataagtagttacttaagagatgagggtgctctcttatagaacatcaaaatgtacaaaatgtttatattcatgat

SEQ ID NO: 816857 - DNA, 512 bp, Homo sapiens
catctgtagtataggaaaattgaaagcatatggaagaattgtagataacttakcagcaagaatgtaaaatctaattatctgcagagggatataccaatgataaacaaactgattcatcctgcagaatctgagataggcttaggaatcagaaattaggtattatggaagttggagtgtgattgtgagggagagatgatgtgggtggcatacaaacaaaagaattgtttaaaattaattatatttttcagtcatccctactaggcactaacaactgccacttccctgtctctgctgcatatgaaacgtataatctgtgaagaactgaacctgagagactgcaaagtagggaggataggagtgaggggaattaagtgatctgcataatggtgagacttctagctgccttcctgtgctgagttctacaacagtagcagcaaggcttataactgcctttctctcttaacacctcttcagataggtgatccttctctgaagggataacatgcttcaga

SEQ ID NO: 816858 - DNA, 566 bp, Homo sapiens
gggaattatcctctcagaaccaaatcccccattttaccatctcattcttaatctctgctkctaccttgttttgaatttaagtttattattgttacagaatgttcttaatttcaaagttacataaagtattataaaatgctttttttagaaataaacttgccttttcacgtgtatcaggtgtctgatttctattttaactgatgtttgcccaattcaaagaagcttctttcattcttcattgaagaaaaccaaaataagtagaccgtggttcatacttttaaaatgtctacatatactttatggatcaatgaataggaatgcgaatacattcatcaaacaatttgcctgaaaacaaagcaaagctaaatatgaaaaactgaatagttaattctaactataattatccaacatacatatgctttttaattttttatactaacaaagaaacatgtgcaactaattacttatttgccacaatccaaagtcctcccacctaccatattcatgggctggattcttcctgttacccagctgaggcccaagcctgccaatatggggaccaagct

SEQ ID NO: 816859 - DNA, 617 bp, Homo sapiens
gggtttctgctctgggcaactagaaggctgtgggtacaaataacyaaatggggaaaacacaaggagacagagtcagtggggacattaataaagcacatgctagatattttaattgtacagtttggtgaaaaatgccaggaaacatgttccataacacttgtctaagctcagaaaaaaaagatgaagtcttgagataagaatagggatgttatttgtagggaggttttgaaactgtgactatagaagacatcttccagggaacatgtgagaataagcagagaagtcaggggataaatctctgaagaactcattctgaaaggggagatgaacagcatttgaaggtgtcaatgaaagctggtagaaaggtcagaagagattcacaaactaatgggtctacagatatccaaaggagaaataagttaatgaagagtacgatcaagtttgagggtttgaaaacaaatcaaccaaaatgaagaatttactagaaaactaacttagaatgttacttatgatcttaatgagaaaagattttctatatagtaatatgcacagagctctacagctatgatttgagcagtgactacaagaacaaatggtaaagctcaatgtagaataca

SEQ ID NO: 816860 - DNA, 607 bp, Homo sapiens
aacttttagagggggccctagtgaaaaaatctgaagtatactaatggaaacttttggtaaaatttgctccacaatttgtggtaaaagaatgtaccataaaagtcccgatatcattttttcccaattytagaagaaaacgtagtttccttgtgtaatcaactcaattaacaacaaagaagaatattgttcaacatttatgtttggaacacccaagagaaaatattcggcaaataactgcaaatttaaatgtgaaacttgagagagggttcagggctagaactcaatgcagaatttgaggagttttgtgatttgttatattaagagaatgagagagattttccagggagaatgtgcagagaaaaaaaaaaaaaaaaaaaaaacagaagggaaaaaccacacatagaatcttggttaaggggatagttgtactaggaatttaaacatgtcaataaataaatatgtcacaaaaatgtctcatattcctgaagagatgggaataaaatgagataaaaatgaggcgggcttagaaggactaatctccggaatggtctgagatattagaaagaacaggtaaccaggtattagtaataactaaaccaatgaaagc

SEQ ID NO: 816861 - DNA, 527 bp, Homo sapiens
gagatgggcgaccccgccccagcgcagtgccggccacaccccaaggcggttgccagagcttaagccccgcccccagcagcgagaacatcccagctccacacaccscccccccccccggcagccagtgctccttgtcaagctccccccgtcactccaggtgggagccaccccggtgagggggtgtgccacttgcccccagggcactcctctgggcatcccgggtgggggattttggggccgtggggggcagtctttggtacctgtgttcgtcagggatgctctgacaaccaggtgtcgtccacgggcgggggcatgggcatggtgacagtggtcctgttgatgtcaccgatgatgctgagcgcctccttcagcgcgtggtgcatgtgcagcatctcgtcatgctgctgtgcctgctctgccaactcctccatcagtgtgttctggttcccacatgagtacatattggccagcggctccgagatgatgaactccggggtctgagagtgggcaaacagggaagaaggttg

SEQ ID NO: 816862 - DNA, 613 bp, Homo sapiens
ggccgccagccctcatttatcagcctgtttttccttacccttggaagacctgggatcttcatgggagacagcatggtggagaggaggaggctgggttttgctgtcttgtccttcccagtaactggttctgtatttgctctatcctttgtttttgttttttcaatcacgtagtcatttgctaaggatttattgaattctagttatggactaggcaaaaagctagttgtgaggagaagaaaatgaacaagacaaagtccctgccttccctgggagacacgccagaaaactgtgatggtgagtgctagatggtgccttgacacaaggagggaggccttggtgtataggttgaagaagtctcttctagaaagagttgtgaaggatgagtaggaattctctaagcagttagggaatgaggaggagaggagaaaggagagatttgtgtcttatgtatccatctacccaattcccccattcctgccaccatgcagrcattatgaattgattgggaactgtttcccagtgagctcacccttggcttcacagtctttctccagacgtggctccaggcagcctctcacacaatcgtcctcagacttgagtgagcaaacaagtc

SEQ ID NO: 816863 - DNA, 596 bp, Homo sapiens
gaaatttattaatttcatttccattgtaaaatttataggcataaagtttttaaaatgatactccctttttatccttttaatatctgtagatattattctstcattcctaatatgaaaaattttgatctctcttttttcctaatcagtctatctcgagttttatccattttctttttcttttcctttttttttttctgagatggagtttcactctcgttgcccaggctggtgtgcaatggggcgatctcggctcaatggggcaacctccgcctcccgggttcaggcgattctcctgctttagcctcctgagtagctgggattacaggtgtgcaccaccaagcccagctgatttttgcatttttcagtagagatggggtttcaccatattggtcaggctcgtctcaaactcctgacctcaggtgatccaactgtcccgccttccaaagtgctgggattacaggcgtgagccaccatgcctggctccattttatttttcttgtcaagggaccagctttgtttttgttgattttctctactgtttttctgtcttctattttatcaatttctgttttgatcttcattatttcctgttgtct

SEQ ID NO: 816864 - DNA, 596 bp, Homo sapiens
gaaatttattaatttcatttccattgtaaaatttataggcataaagtttttaaaatgatactccctttttatccttttaatatctgtagatattattctgtcattcctaatawgaaaaattttgatctctcttttttcctaatcagtctatctcgagttttatccattttctttttcttttcctttttttttttctgagatggagtttcactctcgttgcccaggctggtgtgcaatggggcgatctcggctcaatggggcaacctccgcctcccgggttcaggcgattctcctgctttagcctcctgagtagctgggattacaggtgtgcaccaccaagcccagctgatttttgcatttttcagtagagatggggtttcaccatattggtcaggctcgtctcaaactcctgacctcaggtgatccaactgtcccgccttccaaagtgctgggattacaggcgtgagccaccatgcctggctccattttatttttcttgtcaagggaccagctttgtttttgttgattttctctactgtttttctgtcttctattttatcaatttctgttttgatcttcattatttcctgttgtct

SEQ ID NO: 816865 - DNA, 227 bp, Homo sapiens
ccaaggcgtgagcaggattgagtgtgcctggtctgtgtcatcaacattcaggacagcatccacaggacatctttgcatcctcaggctgyctgttgtctgatactgctctctgctgcgctatccctggggtctgtcacaaggctctgtctctcagctgactcccttgctcctcgcaggacatgagagcattgtgctgctttagcgccttcactgactacagaaatctt

SEQ ID NO: 816866 - DNA, 754 bp, Homo sapiens
aatgtagactgcttagcatggatcctttgaatttctggcatggtcacrtgtgcctgtgtgtgtgtgtgtgtgtgtgtgtgtgtgtttaacaaggctacttaaaaagctatctttcttactctacatgatcgccttgtctctgtggtgaacttctaggaaatgtaaatttgcttttcttttttttttttccttttgtgcatgagaaagtggcaactttgcaaaaacaagccaggcatctgttcactttttgtagaaacggagaaacaatattgtgattttttttttttaaaaagagagaaactcctagctcctataacaatttttgttgaagaaatattcatgttagaatgactagccattattacgcactaataaggtataactgtgtggtgctagacattaaaaatataagagttttccctaaaaggaacatttatttccaggagcaggaaaacagcagcagggttttatggtcccaccgctcatgcacagtgtacagtaagtgctacagaaacattagcgtataagtgcccattagcctcgcacagaagaatccagggcccattactcagacttctaaaggctcaatattggatcactgttatcaaactaagattagctaaaaatttacctggtacttccttagaaatgacctcatcaatttaatacaaatttggcagatggggtattttgttatcctgatggccaattttgacttttacaggaaaatgcagtctttgaaatcttgtcttaa

SEQ ID NO: 816867 - DNA, 335 bp, Homo sapiens
tctgtgagcctcagttttcttaattataaggataagaatatctgttcaatctattcctgagaattgtttgagtcaaaatggtattatagtaacattcctttaatataaattggtaaatggcacacggatgttgaaaattattattagaaggaaactagactcttaaatatcaaggtgtgacaagaggcttcatccaagctcatctgactcctccatcacacatacctgcaaagaggttrttttcaacgtcaggcagggacatgcaatacccccacctgcaagctcacaactttgaagtctgtgacccaaaatggaacaatgaaatgtagtcgtag

SEQ ID NO: 816868 - DNA, 617 bp, Homo sapiens
aggatcagtccctaaccagtgcacacttgattcttaaccttcttatctcagcttaaatgttacctcctcagagaggccttcctgacctaccagtctaaaggcgttacccagtcaataggaatgcgtatcctatttgtattaactgcagagcagctattgctactggacatttttctggtttatttatatggtttgtcttttcactttttctcttagccccactacatttttcgtttattagaacatactttttatccagcattttcgtcgctccatccccagcatctaggacacagtcaggcataaaataactgttgcatagacatttgctgaatgactaaatgtaggatggattttgggtggtggatgaaatggatggatggatggaaggatggagggatgggaggataggtggataaatttgggaaaagctaccttgggacaggtcagccatgtgtcatctcaaagcaggtctactgagctgaagtttcctgtgcaartaactaccactttttagttgtgattagttggatactataagtatacattttagtttttattgtcaagaatggaattgctgtccaaattcaagtattaattaagtttgaaacaaatat

SEQ ID NO: 816869 - DNA, 386 bp, Homo sapiens
gttggcttcttcctcatttatctattaatcagttcatttgtcagtaactatgcctattattcttccaagatatagattccaattctgcttattttattttattttattttgctgctaccctcatgcctttctctttaacttaataaatctactctgagaataatttccatgatagattaagatagatttgtaatctggtctttcccctgagtcacagtattcaatttagaaatttttctgtgattttattgcttttaaaattccatctctcatgttttaggacatggargctgtgagcttttccaacctgccaccctggaatttctggattctctggagtccctttcatgtatgtcttgcaaattggttaatttcttctctctttt

SEQ ID NO: 816870 - DNA, 386 bp, Homo sapiens
gttggcttcttcctcatttatctattaatcagttcatttgtcagtaactatgcctattattcttccaagatatagattccaattctgcttattttattttattttattttgctgctaccctcatgcctttctctttaacttaataaatctactctgagaataatttccatgatagattaagatagatttgtaatctggtctttcccctgagtcacagtattcaatttagaaatttttctgtgattttattgcttttaaaattccatctctcatgttttaggacatggaagctgtgagcttttccaacctgccaccctggaatttctggattctctkgagtccctttcatgtatgtcttgcaaattggttaatttcttctctctttt

SEQ ID NO: 816871 - DNA, 319 bp, Homo sapiens
cactattgaatatgctgatgttgatataccaaaatcttgctttctcagccttctgtgcaactaccgtgggaaagtcattggcataaactattcgagtacacagaaacacaattttgattgtgataatgcagcaatgaagtatagtcatttcaaaatccattctagaaatttttaaaaatatagctacacagaaacatatacacaaatgcttatagcaacattactcataatagtccaggagtgaaaataacgtaaaygtccatcaactgataaatggtaaaattaaatatgatatatttgtacaatagaatattatttc

SEQ ID NO: 816872 - DNA, 615 bp, Homo sapiens
caccctgttgctctaggttctgttggtgtcaagatgttggtccccrggagaggaatgtttccataagaaacagcaataatatgactaacgagtttgtggtgaggccaaacactggaggaactgggcaaaaatgaggttgctgtgttggctgagtaattgatgcaagctatcaatccaatgccctatcaatagattccctttctgcttggatcagtaggagttgtttcctattgctttgaagaaccatgattgaaataatcttctaaagcgaaactcagagactttttcactgccagatgttgaccgtcagccaccagcgaataagaaatggcaattaaaatattcatgcttttacaatatatcctacatgtctattgagagcatgtctttttaaaaacctgagctctacttgtaattttgccttttccatatttatttatttatatttattattttatttatatttattgtaaaccaaatgtcccaattcacatttacctttcttccttaaagatatgaaatatttttcctgctttacgtctaagtccttttcttttgcttgtatctttcaaatcaatttctttaatcaattgattatataaacagagttttaaa

SEQ ID NO: 816873 - DNA, 422 bp, Homo sapiens
cccttgctgctgctcatctgtgccatgtgcacccccgccccaggacctttgcacctgctgttcttcttcctggttctggccaactatttccatggcttggacccatccttcattcctgctctgcccacatgacatctgggcatagggaccttctctgcccattctatgtgagtttatccttcccacacaaaccttctctataccccatccaaacgtacagtttttacaccaatagatacacatttccttgttcattgagtgtctcttaagccagttccaaaagaagggctttgtccattgtgctcactgttgtttccccagaatcttgtgaygatctcgtcacaaagaggtgcacagtaaaaatgctctgcctgaaggacacagggaggatgggtaggtctcttctaagatcagagtaaata

SEQ ID NO: 816874 - DNA, 463 bp, Homo sapiens
tgcccaggaaaatgctggtgaagggatccaaacagyggaagaaacttgagtacttgtcttgataacagaaataaagggacagtggaaaggggatctgagcaatgacagttcttcattttaaaaatagaatgtttagatatattaagtgtggaatgtccacgtagacgattctaccaggcctataccctaaatgagctcaccatatgtgctccgtgaaacaagaataagccatttttgaaattctttttttgaaattcttacatattccaatcagtataaaaattgcttatctgtgggagataaatctgtagtgaacgttgggaacatgattagctcatggagagagaaaattcctttgcacgtgtcactgtagacagaaataagattcaggaaaaagctgggatctgggatgcaacctgggcagaaacaagcacagcccctgagctgctgcgtaccttgacac

SEQ ID NO: 816875 - DNA, 584 bp, Homo sapiens
cttgtcagttgttttcctttacccctcctcctttctgctacaaagaaagagtgaatgggatgtaaatacagaaaaytggcgctcaaacaattgagttctttaaaattaattttactgtcttaccttagacaacagtgcctgtagcaagaattttcaggggtaccctaaaaatagactaattttacctgtcactcccttttctcctgctgttatttctcttccttgttaaaattgggactatcttagtgctcagtgtttaacattgttccatgaatctttctggctgtccatgtagctgcatattattttttagcctttagaagtgaaacattctctttcttcagtccttagcaagctaggtgtgaatctgatgttaataattcacagtaagcaataaagaagggtagatagtgtcaggagacatttccatttgaaacatttgctagcgcaagtatatttcagatagaagaataagtgaaaatggtgttattgagaaaagtcatttgctcatttcttctaggaagtgacacagaatcaaaacttgaatcacacaatctccttgcaaactaggatctcatcatttc

SEQ ID NO: 816876 - DNA, 624 bp, Homo sapiens
gaaatagggatgctatcaccttctatgttcagatttcagagatggttcccagattcttgaggatgacattttctgaattataaaactagcaaaatatttacatacatttcaaagggacagagaaaaatttacatttgttaagtattctaaagtaaatgttctaagaaaagagagtttggcagcctattgtcaggaagaaacctgtgtaatgtaggcaagcttaggctttttgggtcaattacattcaaaaattgcctaggaaatgtaaaatgaacaaacctaccaaaaaacaaaacaaacaaacacataaattccaggtcctactgtggaccgattaaatctgaaaattagaatctctagtgacctgggcatcaatattttgaaaagctactcaggtgactggaatatggactgagcatcatatgtctatatgcctgtcccataacattatactccaacacctctcccctaactgagccataatggtctttagccccatgatcggcttattgrctaggattattttagatgtatttttagatgtagtgacggtttgtaggggcaaaggggaagttttatctctgaaggcctctgaaaatcaactgacgaaaggcagattaatac

SEQ ID NO: 816877 - DNA, 423 bp, Homo sapiens
tatcttagtttaataaatctctttacagccattggagttcactgttaaaccagtatttttgagtgagatcttaatttcagttaatgtkttttttttggttatgcactttgcatttggttatgttttatggttcagcttcttccagacatctaaatcttatattttatttccttgagaacattaagtaaagttatggtgactccattatatgtcttccttctgtgacaagtgctattaatatcctgcccatatcccctaggcatttatctctaaatatccaaacactcttcaaacatctcttcctcccagccttttcccctttgttttgccagttggagtatgcttggtttatgcacagtgcgagctgcaaacattgaagagggaatgcctgtagaagtagccctcatccagtgatttttggga

SEQ ID NO: 816878 - DNA, 616 bp, Homo sapiens
aacatttttcagggcatttgtgggaaagttcttatcttgtaacagatatgattcgtggctctctcagatgaccttccaactaagaataatcaccaatagtatgtcatgtaaaacttaaataaaaatgtgaagatgaaaatttgtacataaactaattaaaatacattataaaaatgtgtttagactcagtacataaaatgaaattaaaatattcatttcagaatatcatctatttctaaagtctaattgttatgtataaataaatcctattgatttagaagtgttaaatacgtcctcatattgcaacaatacatactacatgtttataaaaaggagaacttttttaaaaaaatggatctcatgctacctaaaaaaatagttataagaattcaatatatttctaagtatttacctgatttccaaagtgtttggcaatatgttaacaaaccttgtacttttaaagaattatgtaggtgaattaaaacatcttcctcaaaattaacataatttgaaataaatataaacctaagttatctcttactacagtattatcacatcagttwtctcttatcacatcagctttcatacttcagtgactttgttcacacgattaaat

SEQ ID NO: 816879 - DNA, 537 bp, Homo sapiens
taatttcacatctgatgtcttctacagcacaggctgtcagcaggcattgcctgcaagctcagaagtaatctcagagaccctcctgctgagtccatcaactcgaataaacgttcttctwatcaggaaagtggcactcagaacctctttgctgacaattagccaggcagaagtcaacaaacatttgtgtaatagtgacaagatggcttgtactttaaattgataataatcctgttgccagtcgaatgtaagtaactactccctatgttatttagcctttgtctgaaagcataactcattacccatcgtttggcttgtgagtgctgatgaactaactggaccacttatttagactgtgttgttgatccaacattcaccctcctctgatgtccttgagccctgggaaaggagttttacttcatttgtaaaataaggtgggtggataacataggatgactctcaccagctctgtgattctaacactagtacaaagaaaattcacttctgtagtgggttttcaacctacatttttgcctataa

SEQ ID NO: 816880 - DNA, 603 bp, Homo sapiens
acacaggtatacggaaatggagagaaaaatgttgagagaaatggagagaaaaarcttgagctaggtaggatacgcaaattcagctgatgtaacaatgaccaaaataccagaggcttaaagaagagtgaagatttcctccccatgatgagcagtccagagctggtagggaggccctacacacctgctggcttcttgctgtgcaatcctttgcaccagccttcacctcatggaacgaatgagctgttccagctcccatcaccctgtctgccttccaggaatcaggagggaaaggaggagacacaggaggcctaccagttcctctggataccaatctggcagttgagaatatcgctttttatcacatggagtgcctaaaacttagtaacataagcacatctagtgcagagaggctagaaaatgtaatggggaggaaggagtattcctaaagaaaaatgtttagaaaggggcattgagagacagatagcagcctgccactgagcttaaagaaaagtgccaatgtgagattgtgggagtggatgggggtaaatggataggtgccatgatgggcttattcctcaggcccactttcgaggaataaagggg

SEQ ID NO: 816881 - DNA, 613 bp, Homo sapiens
tgattttgttcaaatgagcattgatacaatttcaaagccagcrtggattgaaggtcttcaaaagttaggaggactgaagttgtttgtgatcttaatgcaatgtttttctccttgatctctatcataatacatgcttttattgtctttgtttcacttgtgctgttttaaattatcttgttgatctatttgttcccttaaatattgttagtctcctccaggagaaatggaagttcctggagagcaaagactttgctaactttatccattgatatattcctttatgtccatgacagatggcatgtgtgtgtgtgtgcatgtgctcgtgtaatattaaacaagtgaattgctttggtttgtgcatgtctgtcattatattttagtgccttgtactctgtctactcttgtctgctgtgttctccattagcttgtggattcatcagtggtttaaaacatatcttgatgatctttgatggcacccagtagagaatgtggtttgaaatagcaagtatttggtcatctcaacaatcttctctttgctcagaaagatgctatggatgacccctcacatctcactgtcctgacctcacttcggtgaaggagcaggggtgagact

SEQ ID NO: 816882 - DNA, 609 bp, Homo sapiens
acaagacggtctttgcaacagcttctatctgaaatctgcttagaaacaaacctgcagtgtttctgccgggaggaatgtttcagacttgaaggtgtagcaatttctcagacggaaccccctgagtcagtgagacagccctgcgtccagaacatggggtccttgccagccccccgtccacagcctggggtccttgccagcctggccctttgttgctctttggtggcttttggatcagtgatgtgacaactcagaatctcagtttccccaggtgtaaaccagtcatgacccatgcatcccactgtcccacagggggtgaaaatgcggtgcagcaggggcacaaaaaactactccttttacgtagaaagtgcagatatgcgtacaatacagtgtatctaccatattaaatttcatggggagggagtggggtgattagggaagaaatgcctaaaccatctccttagttgggttgaattgtaccccacaaaagatatgttgaagtcctaacctcggaacctctgaatgtgacctgatttggaatagsgcctttgcagatatcgtcaatttgaggctattagggttggccctaagccaacatgactggatataaga

SEQ ID NO: 816883 - DNA, 585 bp, Homo sapiens
aagctgggtcactgtcatttcattggcagtcagagtccccgtcttgtcagaacagagaacgctgcagcaacctggtacaacaaacaccagtttatagaagagaagttgccatcctcaggcttgtgaaaccctcaggctggattgccctgacagccaagcccccattcaattccacgtgtaaggattccaccagctggagtccctcacctaaagtctccacgatgggtaacttcttcacgatgacccgcttcttggccatccgcagcactcccaggaccagcgtcaccatgacgacgatgggcagaccctctggaatggccgccacagccaggctggatcgaaaggtcaaatgagtcccctctaacacatttaaggagtgtgtgactctcagctggggctggcaatgcttttggctggtgaagcttgtcttaggtgtccccagtgtcctggttctagtctccattcccaatcctaaggtgcacctgcctccttctgcagcacccactgtcctgagccctcccctgcagaccccgctcttgggaagggacctcycctgtcagtcatccacaccttaatgtgaattag

SEQ ID NO: 816884 - DNA, 594 bp, Homo sapiens
  misc_feature 277, 295: n = A,T,C or G
catagcttgtttcatcttcacaataaccctgtgaaatggaaaccaacatcagccccttttagagatgaggagatcgaagctcagagaggtgaattccttccccgagtcacgccctaggagctatggggcctggggttctctgacttccaacacacactgcagtacggcagccccacacctgcctctcactcacctgtgccaggcaccgttctgagcacttttggcatctctgaagatctgtaatcctcccaagtaccctatgggcatcaccaccccncattttgcagatgagaanactgaggcaccgagagggtgactaacttgctcaggttcacaaggctttgaatgatggtcccagggctcaagccaggctaatgcccaaccccaggtcattggccacctctcatacggcctctctctgcctctgcaccagcccttgtggtggacctgtgtccttctcacaagctgcctggcatctggagcatcccgttaggaccccccttctcgggagaaggaaaacgtggaaaatgtgagcccagcttccccagtcctscttgtaggcggggattggccacagacagccgttcctctgac

SEQ ID NO: 816885 - DNA, 340 bp, Homo sapiens
agagcaaggggaaaaggctgtggaatctctctgtcaccccgagaattggtgttaaaagcacaaaatggtaccagcaccttcatggacatgaactcaagaacacagtgaacctacagaatgagtgtcacaacgacggcctctgaggcctccaggatcagaaaagctttgaatgagcggcctctcttaaaaacataaaagtctcatatcttygcttaatgttgttcgaaattttgatacaatctaaaaaaaaaatgaaggtgatggctattttaggatatacctttcaaaacacctgtgtgagtccccacatacgcagcccactctttaccttggagatgcc

SEQ ID NO: 816886 - DNA, 340 bp, Homo sapiens
agagcaaggggaaaaggctgtggaatctctctgtcaccccgagaattggtgttaaaagcacaaaatggtaccagcaccttcatggacatgaactcaagaacacagtgaacctacagaatgagtgtcacaacgacggcctctgaggcctccaggatcagaaaagctttgaatgagcggcctctcttaaaaacataaaagtctcatatctttgcttaatgttgttcraaattttgatacaatctaaaaaaaaaatgaaggtgatggctattttaggatatacctttcaaaacacctgtgtgagtccccacatacgcagcccactctttaccttggagatgcc

SEQ ID NO: 816887 - DNA, 560 bp, Homo sapiens
aggtaaaacttaagtcaggatcctttcagaggtgataggaaatgtgatctgagaggccaaaatagatgcccctgtatcagctaagatggaccataaggttaaggaaamaaagttacctgtggttccagtgttcaaggttcagggcccagctggcatgggaaattaattaatttttttcttttttgagacagagtctcactgtcatccaggctggagtacaatggcgtgctctcggctcactgcaacctccgcctcccaggttcaagcaattctcccacctcaaactcctgagtagctgggattataggcatgcgccaccacacccagctaatttttgtatttgtggtagagacggggtttcacaatgttggccaggctggtctcaaactcctgacctcgtgatcagcccgcctcagcctcccaaagtcctgggtttacaggtgtgagccaccacacctggcccaatttatttatttgacaccccggctggagtgcagtggcgcgatcttggctcagtgcaacctctgcctcctgggctgaagcgattctcccacctcagc

SEQ ID NO: 816888 - DNA, 524 bp, Homo sapiens
gagggagactgtcaccctgtcctctaagtgccaccaagacacagagcctgagcgcagggacrtcatgtgtatgtcccttgcacctgggcctggtctggccgcagcgggggctcaagaaacagctgctcaccgagagtggtggctcacacctggaatcccagcactttgggaggccaagatgggaggatcacttgagcccaggatttcaagaccagcctgggcaacacagggaggtccctcaaccctacaaagagtcaaaaattagctgggcgtggtggcccacgtctctggtcccagctactcgggaggctggggagggaagattgcttgagcctaggatgtagaggctaaagcgagttgtgattgtgtcaccacacttcagcctgggtgacagagccagtcaaaaaaaaaaaaaaaagaaagaaagaaagaaaaagaaatggctaccgaatgaacaaatggtcggttggttgctcctgccccactcagttcccccaggtaaaatggatcctgcctctcaccta

SEQ ID NO: 816889 - DNA, 442 bp, Homo sapiens
tgggtgttgcgcacacagcacatttctcacagctgaggatccctgagctcagggagcccaaatttcttataagaaatcstgatccttgccctgggggcaaacatctatctatattggacagaaaacaaatttgccctttgatctgaggggacacactgtctctgtctaacaaagttgtttgctatataaacatccttgtaaagatagttcttctacttgcaagacatgtagaaacctgagagacccatggagaattgtctcccaacaatgacacagaaagaaaatttaggccgggcatggtggctcacgcctgtaatgctagcactttgggaggctgaggcggctagataacctgaggtcaggagttcgagactagcttggccaacaaggcgaaaccctgtctctactaaaaatacaaaaattagccaggcatcatggcgtg

SEQ ID NO: 816890 - DNA, 647 bp, Homo sapiens
gatggaaggaagtgtaggaattttacaggtgaaagaaaagggacatttcagacagagggaacagagcgtgcgaaaacataaccatgtgcaagggcatcctatggtcagggagctgcaagactgacagttttatygcagcacagtgggctctcttctgaacagctgatgctgacttccaacaggaaacactaaccctctaatcatggccctgccacaagaagagagtccaggagacgtatcgtaaacactgcctgacatagattaatcctgcctgcctgttgccagcttttgatgactgttcctctttcttcaacaatgaagagagccatgtcagtctaatgactgtcatattatctcccattaacttcattattggacactaactgtttctagtaataattcattcactggtaatgacttggtgtccaatgcctggataattactgtcacaaatgcgatcagacgggtgcttggggttgttttctccatctgggactagggtgcaaatcaactgagggctcagagcttgtggggttttcctggatgtgacaaaggaaaatcccctcctgagtgacagggatggagatttctcctgaggactgaaaactcagaaaagctttttccctgcccttgggcttgggaacagc

SEQ ID NO: 816891 - DNA, 627 bp, Homo sapiens
aattgtatttttatatactagcaatgaacaaatggatatggaaattaaatagcagtaccatttacaatagtttcaaaagyatgacaaatgtaacaaaagatgttaaaaactatacactgaaaactataagatattgttgagaaacattaaacaagactgaaatagatataccctatcatgggctgggagagttaatatttgtaagatgtcaactgtccctaaattaatttataaaattaatgtaatcacaatcaaaatttcagcaggctttcttgcagaaattgacaagctaattctaaaattcactggaaatgcaaaaaaaaaaaaaaatctagaatagccaaaacaacttaaaaaaaggaacaaagctgagagaaaacattacctgatttcaagactaataaaaggtacaggagtcaagacactgtggtattgatataaagacagacaaaagtatcagtggaaaatagtagagtccagagacctgcagatacacggaaaacaggtttttgacaaagatgtaaaagcaattcagtggagaaaggatggtcttttcaacaaatggtactaaacaattggatattcttatgccaacaaaacaaagcaaaagaactttcaatttgcata

SEQ ID NO: 816892 - DNA, 644 bp, Homo sapiens
ttgtgctgatgactggtattcttgagaaccatataatattcatgatagtagaaagctttccaggcactgcactggcacctttattagcaggtcgtgttcacttttggttgatttttacaggctgtgttgcatytaagcagatcctcattttcccacgtttgcttattaatgtgtttccactgtacgtacttagaggaggcagtgggagcttcatttattgaaaatgtccagttttattgtattttcaatacaatttaatactcattagtactgataaaagagatgattctcgggagtttaatgtcttgtttcttttttctgtgtctcatgatgaagcggttagtaaagctttttgcagacatgttatgaaatttaagcaagtgctttgtttaatttttaaagaggattttcccctaattataatatttaaactcttagttttaaaagccttaaaaaataagtggtgacttatttctacaccactccattttcaaagtaataaatacaatagcaaattaaataggaaaattagaacactcagtgcaatttgcaaatagcctgcgaactcggccttttttctgtgagctgagaattgaaggacacaggaaccccatggaaaacgacccagcatgtggaagctgctg

SEQ ID NO: 816893 - DNA, 608 bp, Homo sapiens
tttaggaaaatggtagctgctgaaaaaagtgcctttaaaaaatatctatttctcatagtatagcataggctgctaaaatgccagaaaccaaaattgcaactgattcaaacacagatacaaaccagcaaataaccaaaaagactgcaaaaaagagggttaacaaaaatcgtagcaaaatcttgtttcttcaatctgaaaacccaggaatatgtccagtttgaactgaaacaggcctgagaaggggattcctgggagctgtacacgtgttttctggtcttataccgacccactggatgacaggatctcagaatgggacgctgattaatctacttcattgcagtgcctgagcttctgaactctgcccctgcctgcgatgaggttaatcatcaaaggataaaatgggggtaacaatcaatagaatcagtttgagaggcagctttcagttcaggttttgcagactgacaagtacgaaagtagccattcaaactggaaayactgagggtaactcagacctgtgcatcccacttgctccttggtctgtagattctcacttatctaaaagcagaggccacagggcatctggcctttcattacttcctttgcatcat

SEQ ID NO: 816894 - DNA, 645 bp, Homo sapiens
tcacagaagtactgccttggtggtctcggataagatcaggaagaattctctggaataccagacagaaactcttgttctcttcccttactttctcccaaacaaatggagtctctctttctccctgtgctgagcagcctggggctgggggtggggtgacataagcacccctgtggctaccacgactgggactgtgctgggtcacacctgaagccagcacaacactaagtcttacccaaggccactccctggctacagcctgtatttgctcaaggccctagggctctatgatcggcagacggtgaagccagctgggtttgtgtctttcccttcagggcagcgagttcccccagctgggtccagagatgctgtctaggagccagggactgaagataaaaaccttagaaatctacgtggccttctattccactctggctgagctggcactccaactgtaagccacagtccttcccatggtcccctctcctttccacaggcagaagagcctcatcccaaggccacgaccacgacaggcccacagggattactgccaggccactgccgatgttaacttaatgcccaaaggcccctcagtcaagtygtggtgagtgctgcctggcctgggactcacccttcagggcagtagac

SEQ ID NO: 816895 - DNA, 603 bp, Homo sapiens
aacaaaagcaaaaattgacaaacgggatctaattaaactaaaaagcttctgtacagcaaaagaaactaccaacagagtaaacagacaacctacagaatgggagaaaatttttgcaatctatgcctctgacaaaggtttaacatccagcatctataaagaacttaaacaaatttacaagaaaaaaaataaaccgctccatgaaaaagtaggcaaaggacatgaacagacacttctcaaaagacatacatgcagccaacaaacacatgaaaaaagctcaacatcattgatcattagagaaatgcaaatcaaaaccacaatgagatatcatctcacgtcagtcagaatggctattattaaaaaatcaaaaaacaacatgctggcaatgtcgtggagaagaaggaatgcttttatactgttggtgggagtgtaaattcaaccatcgtggaagacagtgtggcaattcctcaaagacctagaagcagaaacaccatttgacccagcaatcccattactgggtattacccaaaggaatagaaattgttctattgtagtrctattagcaatagaaaagacatgggatcaacctaaatgcccatcaatgat

SEQ ID NO: 816896 - DNA, 588 bp, Homo sapiens
ttctagcaaaagaaatgtagtgaaatttctgcttcactaagccattttaaaacattatagtttggagccatttcctcctccaacttcttgagatttatggtaagtgttcaatcttgtatactattttatagatgcactctattaaaccagcaataatataagatttcaaatatggatagcaaatgtcagtaagacactatataaaaccatgaaataaaacataaaaagttatttaagttgaatatagaacacaattttagtgttatattgcaaatgttaaaaattatgcagtcttcaagaatataaattagagctttttaaggaataattattttagaaatattaatatgcaaggacactttcactggaacgttaaatttatctctaagacagcaggcattttaaacaaatgttatattttttaaggaagaaaagcctttgcattcaactatatgaagrcatagagaagtaacgtttcctgctcagaactatgggaacaggcagtcatagtcgttgtaggagagcaaatggtgaggaaaggaccagttcttcctttttataaacaaagactcagcatggccaaggtca

SEQ ID NO: 816897 - DNA, 538 bp, Homo sapiens
tttgcaaatattttctcccatttctataggatgtttactcttttgatagtttattttgatatgtagaaactatttagtttaattagtttatatttgtcaatttttgcttttgttgcaattgttttcggtgtcttagtcatgaaatctttgccagggcctatgtccaaaaaggtattgcctaggatgtcttccagagtttttttttaatatagttttggttttacatttaagtatttaatccatcacgagttgatttttatatatggtgaaaggaaggggtccagtttctgctttctgtatatggctagtcagttatcactgcaccatttagtgaatagggagtcctgtccccactgcttgtttgtgtcagctttgtcaaagatcagatggttgtaggtatgcagccttatttccaggctgcctwttcggttccatttgtctatgtgtctgtttctgtaccagtaccacgctgttctgattactatagccctgtagtgcaatttgaagttgggcagcatgatgctttctgccttgttct

SEQ ID NO: 816898 - DNA, 609 bp, Homo sapiens
gttcttgcctgtcttttggatataagccattttaactggggtcagatgatatctcattgtagttttgatttgcacttctctgatgatcagtgatgttgarcaactattcatttgcctgtttgccatttgtatgtcttcttttgagcaacatctatttaaatcttttatccaatctttgatcagattattagattttgtttttccttcacagttgtttgaactccttacatagtctggttattaatcccttgtcagattcgtagtttgcaaatattttctcccattttatgagttgtcatttcactttgtggattgtatcctttgctttgcagaagcttattaacttgatgtaatcctatttgtccattactgttttggttgtctgtgcttgtggggtattactaaaaaaacgtttgcccagaccaatgtcctggaggttttccccagtgttttcttgtggtagtttcatagtttgaaaacttaggtttaagtctttcatgcattttgatttaatttttgtatatggtgagacataaggatctagtttcattcttccgtatatgaatatccagtttttcctgcaacatttattgaagagactgtcttttc

SEQ ID NO: 816899 - DNA, 589 bp, Homo sapiens
ataggcaaaaggtacttgccttgtatgagaygagattttgaatttagacttttcagtgaatgctggaatgggttaagactttggggaactgttggaagagcatgactatgttttaaaatatgaggatatgagatttggaggggccagggaagaaatgatatgctttgactgtgtccccacccaaatctcatcctgaattgtagttcccataatccccatgtgttttgggaggaacccagagggaggtcattaatcaaggaggtggtttcccacatgctattcttgtgatagtaagttctcacgagatctgatggttttattaggggcttcaccattctcttggctctcattcttctccttcctgctgccctgtgaaaaaggacttgtttgctttcctttctgccatgattgttaagtttcctgggccctcaccaacaatgttgaactatgagaattgactaatgcactgtgccagcctttaggctttggggagcccaaaccaactggggactgaagtggttttccagcacagcacagatgtcctatgaaaatgtaacaggctgctttttaaagtgggtccccaatccca

SEQ ID NO: 816900 - DNA, 659 bp, Homo sapiens
tcccggagtctacgctttcctcatgttcttcctacatcactggctaccgtcaatttcattctcycttgccaaattcctcctattttttccacatcttttaaagttggagtactgcagagttcagtctttagacttctcaatttctctaactgctctcactcccttggctgccttctccagcgtatggctttaaatactatgttatcttgaccaccccacatttacattcctcatcctgacctctttcctgaatctctggactccagtaaatgactatgtaatgaacatatctacatggatgtctgattagccatctcaaatttaacatgctcaaaataaatacatgatttttcttcccaatcctgttacttactaatattccccatgttgattatggaaaattcattcttccattttccctcataaaaaatcttggagtctttattgactgctttttttttctcatatcttcacatcaaactagtcatgaaacgctatcagaatagctctttcagacgaatacacgtgactgcttcttactacttctttctctatcactctggtccaggtcaccatgccctcttgcctggagattcaagtctcttaactggtctttctgttttcatctttgtccctattatatactctctatgtagcag

SEQ ID NO: 816901 - DNA, 542 bp, Homo sapiens
ccttctgtgtgaattttatggaagagcatttgaatgaaattctacctagatgcttcttgatgatctgaaccatgaaaccaccaagccattgagtgggaatgtattatgattctctygcttgatgccctcatttagtcatggaaactgatccaaaactaatgagctgtcctacatagatttcagttaaatgctttactttaaggattattagatctgatcatgaggcggaagaagaaagcttaactttatttcaaacttttaccttttgcaatttttttccaagtaaaattacacttcctagtgtgctgctggtatatgtaaacacttgctatctttaacatctcaaataacatgaggattctggtatttacttccataaggcagccagcaggatgcagaatatttctgactaaattcatcaaaggcaggaatactttatgtataaggacagattaaagattaggatttttccctctgaaaagataaaagcttaaaagcaggtttttctaaaatgaataaaatcacgtaagttaatacagatc

SEQ ID NO: 816902 - DNA, 363 bp, Homo sapiens
gtttacatgtcccaggttttgtattgaacaaaaactctctctagtagtaaaaccaaaaatccaaggggaaagtttcaggttagcccagctggaattcagcgcatattagaacagtgaaccatggcaggtagaactgtgtaagaacagggatgcagtactggaagtgtagagttgaaatgagggaagggggtttgccaatcagttttatactctgcaaactttatcatcttttaagagaagggtcttacctaaactaatgggttataaaaagaaaaagaagatatattccctgtctttaaactgtatgttctctgttgttgttttttttcttttytttttttttttttttgagacaaagtctcc

SEQ ID NO: 816903 - DNA, 626 bp, Homo sapiens
tatttttgttcttgttttcttcctactcctcatctgatttaccccaaagaaacaatagttgactcttcacccatcctaaaatgttgcaataatctgatagttctttctctagactaagttacttgagtctttccaaacatggtcttatatattcccgtagggtcttaaagcaatcactcaacttattatctataagagaggcaaaaactatttatctcatattatgacaaatctacaatatctgaagatacttagaacttagctgtcatgtggtatcacagcattacataaaatagaaaataggacataggcattaaattgaatttaagaatagtgcacaccgtgcaaagtgaaagacaatacaatggtgagtagttctttttatattcaaagacaaaatgtataggtatggattaaacaccaggaagctggcagtgttagtcaattaaaggtaagttggatatttacagttctaactttgctggttacaaacagtctgttaggaacataacagaccttttaatttacccaactcttgtcttctctgtgtgttttaagcttaatagttgcataaaatgattggggccstgaactgattgtgaatttgtggggaagggaaacaaggt

SEQ ID NO: 816904 - DNA, 580 bp, Homo sapiens
gacctaaatggaagtaatttccaacaaaaaaccaattttaagctctttattctatgtgggcctatcagaagaaattgcaaaggcagggctggatttctgctctcctgaagcctacagtgtaatggattcwctgaagtaaatctactatttggagaatatgctatgagggaaaaaagattctgagaccctgtctttggtttgttctcttaagttccttttttacagctctgatacagaaaggttgtttttttttttgtttttttaaattcactattgacacatttattcactcaacaatgagcatttcctgtgtacctactgggtgctttcttattgagataagaaagatgaataagagatggtttttaccttcgaagagcttatagttcaatgagagaaacataaaagagagacaactatagagatttgcacaagggctgtgggaggagatccaaatgcaccgttgggtaagggtggtaccaagaatcacttctcagagaaggtgatgcctgagttgagttctgaagaatgagcaggagcaatgtaaacaagagaggccaggctgaaagggaatttttgc

SEQ ID NO: 816905 - DNA, 461 bp, Homo sapiens
caccctcatggtgggatgcccttattcaaagagggagagaccagggccctcctttctctgtcatgagaggatacagcaaaaaggtggccatctgcaaaccagatagagggtcctcaccagatagtgaatctgttgacaacttcatcttggacctcctcacatctagaactatgagaaataaaagtttgttatttaagctactctgtatatggtattttattgtaacagtctgaactgactgagacaagaacaataattgtgaaaatatattgtgtgcttactatatttgggtatattccaagtgccttatatatgttatttcatataatctccataataactctacaaagtaagtatsatcaagtaagactgtaggcaagagaactgagactttgaaaggttttatctggcttggagtaacagagggagtaagcagttgcactgagattgaaacccaggaa

SEQ ID NO: 816906 - DNA, 624 bp, Homo sapiens
aacttgatcgtgtatatggaaaattctaaggagtctcataaatgaatttagtaagggtgcaggataaagtcagtatacaaaaatcaaatgtatttctatatactagtaacaagcaattgaaaatgagattttttaaagtaccatttaaaatagcatacaaaacacaaaatacttaggaataaatttaagaaaatatgttgaaaatttgtatcctgaaagctatgaaacatttctgaaaaaaaatttaaaagacctaaataaatggagagctattccatgttttggattggaagactcaatatttttttactcaatatttttaagatgttaattttccctaaattgatctatagattcaatataatcccaacccaaattccagatggctttctttttggtaaacttcacaagctgattctaaaatgtatatgaatatgcaaaagatctagaatagccaaaacaatgttgaaagagaagaacaaagttgtaggacttatattacctgtttgcaagactcactataaagttacrgtaatcaagacagtgtagaaacacatataaatcaatagaacaaaattaagagtccagaattagacctacacataagtggtcaattgatttttc

SEQ ID NO: 816907 - DNA, 636 bp, Homo sapiens
ccgctatactcctgacatcggtgccttccggggtgcctctagagggacagggctaaaggctgaatggcaaccatctacacagactaacccatttttatagacctttcgctttttgctatatgtactttaaaaggctaaaaaagttttttatttcttcttattattatttttgagacagagtctcgttctgtcacccaggctggagtgcagtgacgcgatctcagctcactgcaacctccacctctcaggttcaagtgattctcctgcctcagcctcagagtagctgggattacaggcacacgccaccacgcccagctaatttttgcatttttagtagagacggggtctcaccatgttagccaagctggtcttgaactcctgatctcaggtgatccacccacctgggcctcccaaagcgctgggattacaggcatgagccaccgcacccagcctaaaaaagttttttataataagaatgtattactttactaacaatatagactgtattaaaaatctaatgtgtctggaattagtggtggtgatatatctattagatggatagtggattagatagttggaatagactacaaaccactgatctgtatacatacatygattgactgattgattgattga

SEQ ID NO: 816908 - DNA, 555 bp, Homo sapiens
tttatcaacagcaaaggattgttttcctgtacacagttcacatttatgaatggcttcctaggcactgagcactgtgcttggtgacttcatgtatccttccagyttgtcttcattgcataaggtctggcagaggatttttgcttttcagattgtcacctcaaaatttccattgtctccacacaaaagcttgcacatgaatcttcgtagcagcattattcataacagccaagaagtagaaacagcccaaatgtccatctgcagatgaacagatcgataaaatgtggtctatccatacagtggaatattatttagccataaaaagtatgaagtcttgacacaatgctacaacatggacgaaccttgttcataaaagcactgtgctaagggaaataatctgatggcaaaagactacctattgttaattccatttatatgaaatgtccagagtaggccaacctgtagagacagaaggaaggtgagtggttgcttgggtctggtgtgggggaaaaattgataggtaatggggagtgacagctaatgagtatgaggtttctt

SEQ ID NO: 816909 - DNA, 623 bp, Homo sapiens
taagtacttagcttaatattcagtaagcaatatttagtatgatgacttcatgctattaagaacaaaactgtttaccaaaaaataataattgagcctttttacttatgggttaygtttaccatgaatttcttagctaattcagtgacattttttctctcttcctatttttgaccactttggcatttaatgctggtgaccactcatttctcgaaattgttccttcagcttttacactttttttttttttttttgagacgaagcctcgctctgtcacccaagctggagtgcagtggtgcagtctcggctcattgcaacctctgcctcccaggttcaagcaattctcctgcctcagcctcctgagtagctgggactacaggcgtgcaccaccatgcccggctaatttttgtatttttgatagagacggggtttcattatgttggccaggctggtctcaaattcctgacctcgtgatccacccgccttggcctcccaaagtgctgggattacaggcgtgagccaccgcgcccggccaacttttacacttttttctttttaatacaagaaagtgtctgcttaccaaaaaaaaaaaaatcaactaaaaatattaaaataaaaccactttc

SEQ ID NO: 816910 - DNA, 612 bp, Homo sapiens
tacaaattttgagtcataaaagctcaagatggagaagagagagacaatggargtataaagcttatttaaagaaataatagcagaaaactttacaaatatggggaaagatataaatacacaggtaaagagggtcaaatgtctccaataaggttcaattaaacaaaactataccaagacacattataatccaaccattaaaaaccaaagagaggatcctgaaagtagcaagaaaaaagaagcaaataacatatcagagagttccaatgaaattagcaatagatttatcagcagagacttacaggccagggatagtgggatgatatattcaggatgctgaagaaaaaactctgccaaccaaaattattgtacctcaaaagctgaaatgaaggagaaatgaaggagcgatgaagaaggagagataaagactttcccagacaaaaactggaaagaatgtttacatcgctaagcttgtcttacaagaaatgctaaaggaagttcttcaagctgaaagaaaagaacactaattagtaatacaaaaacatatgaaagtgtaaaactcagtggtaaaagtaaatacacagtcaaattcagaacactctaattctgtaatgg

SEQ ID NO: 816911 - DNA, 584 bp, Homo sapiens
gtccctgaagcagattctgatctctttgtctagagcctggcaataggacttatttgagcagagcctggaaccacttccaacatctcacctccctgctgtaggggatctctatggagagcagtatctcctccgggctcagcagggtctttctgtagccagggaagaaggtgtggtccatctggacagttctcctggtgcctgtacagaagcaagatgaagaggagccaaagtgagggaaaggctgggaaccccccatggggagaaaggataaccatcagtgggattcttcatgctggtctccaatgcccacagtcagagcaaatgactggcacaattggggccaaatcctctctctgaaatccttaagcatccttaagcaatggtgtgctggtgaatctttaacaaccagttccgtgtagggggaaaagccctggtttatagcatttgccaatttctgtggtgtaaatacttccaggccaccaaagttgcrtcactgaatgtgaagctgggaagaaggcaggaaagagttagcacagcaacccggactgctgtcctctgtaggggttgcttacaaggctggccct

SEQ ID NO: 816912 - DNA, 533 bp, Homo sapiens
ccctattttaacttaattaatgctcacaacaaccctatgaggtactatgatttttctgtttatagatgaagaagctgaggcacagaaaagttaagtttcttgcccaaatcacacagctaagaataaccaaatttcagtactggaatgattattcgtgttggggtataatcgtaataaaaacatgaaagtttaacattaaaacaaaaaaggaaaatgggagggaaaacttcaaatctgtcctccagttcccactatctgcctgagttcttcaagttgtctggctttgcggggccacacatctgtgtgtggtttctggccttcctgactaaatgagtcagaagcctctgttaaacaagtgtgcctctgttccttagacccagttggctcagcacctctcccagccctgccaacagtgtatagatggaaaaggttaaaaaagaaatacctgtgacctctttgcccccscttccccccaggtgctgtttaggatttctgaagggggccctaggctttgtggatccccagattccaga

SEQ ID NO: 816913 - DNA, 613 bp, Homo sapiens
gaggagccaaccagaactcagggcttggcagctccttcaggaaccagagccaggacctgactgcttagaaggagagcatgcccctccacagcagaggtcctcagctgtcccacggtctcctccttagatcctcactaggcttgggatccagcaaagtagaaataggccatgccaggtttagaaatcgacagagattagcagggacctgggaacctctccccatctcttacagcactggggctgagaggtgcatattctgagtctcccagcctgttcaactattccaggcctcacgtcctaggtggtagcactgacagggcaggtggccatggtcataggcaacacaaacacagtcacacctggagctctcctcttctttaccttatcacatcctcccccagaaaaagtggggtggtggggtcaaaagcgacatttatggaacctctagtgtccatcagccactggcctagacactttgcttaaattagttcctcctcccttagactagaaggcccttgaaggcaaggaaccaygtccaattgagctttgtatcccaagccccttccagagtacctggctcatgctcggtgctctgtaaatgtttgtggagaga

SEQ ID NO: 816914 - DNA, 617 bp, Homo sapiens
attcaggacacaggtcattgattaccttaatacaatgccaggttaaatgattgaggaaaagtcttaaatccttcaggctcttaaagaagaataggtaagagagatttaaagtaaaatagaagaaattttagtggaatatttgcaaaaagatctgtattgtcaagtgcaaggcataatttttttcaagtggttcatgctaaatggacttattaaaaagagtggaatcttagctttggtgaggctggttggtgaggacacccttgaaagccaagtctcactagagtcaagtcttacagcaaccctggaataataagtgagccattgaccttcatgttctatccaattagccaaaaccttttaaaatatgtgtgctatggaatcacctttgtatggaaggcaaatatcatatgtgccaatttggatgcacaggcaagattgctaaaggggattagggggtacaggtctaagggtgtcaggcaaaaaacaatgtgttcttayaaaataatttgagtagtagagagataggcttttttctggtatggagggtttaaaacttattctttcttcacacttgtacatatttttaaatgtccagctcagatattacctcttccact

SEQ ID NO: 816915 - DNA, 645 bp, Homo sapiens
tgttgttaactatagacaccctattctgctatcaaacattagaacttataccttctatctgtctgtatgtttgtgcctattggccaacctctcttcattcccccgctcacccacacaccatttgcagcttctgatatttatcattctattctctaccttcatgagatcaagttttctagctcccacatgtgagtgataacgtgtgaaatttgtctttctatgtctggcttattccacttaccacaataacctccagttcctgtaaatgacaggatttcattcttttttatgcccaaataatatttcattgtgtatatatgtcaaattttctttagtaattcatccattgatgaacattcagtttgattcatatttttgctattgtgaatagtcctacaataaacatgcaagtgcagatatccctttgatatgctgatttattttcctttggaaatcccagtagtggtattgctgcatcatttggtagttctatttttagtttttgagaaatctctattttgttttccataatggttgtactaatttatattcycatcaacagtgcataggagatcccttttctctgtatcctcatcaaaatctgtaattttttttcttattagtaatagccattctaaccagagt

SEQ ID NO: 816916 - DNA, 544 bp, Homo sapiens
tcctgcaagtttactgaatttatttatcagacctaagagttgtttggtggagtctttagtttttttctagctataggatcatatcrtcaacaaagaggtacaatttgattgcttttccagtttggatgccttgccttttatttctttctcttgcctgattgctctggctaggacttccagtactatgttgactaggagtcacaaaagtgggccatacagtatgatgttttgttagctttggatttgccatatatggcctttttgttttgaggtatttaccttctatgccccatttgtttacggtttttatcacaaagcgatgttgaattttatcaaatactttttctacatcttttgagagggtcatatggtttttgtccttcattctgttgatgtgatgtatcacatttatttccctatgttgaaccatccttgcaaccctggagaaaattccacttgatcatggcatatatatgtatatatatatatatattttttgatgtgctgttggattcagtgtgctcaattcttgagaattgttgca

SEQ ID NO: 816917 - DNA, 544 bp, Homo sapiens
tcctgcaagtttactgaatttatttatcagacctaagagttgtttggtggagtctttagtttttttctagctataggatcatatcgtcaacaaagaggtacaatttgattgcttttccagtttggatgccttgccttttatttctttctcttgcctgattgctctggctaggacttccagtactatgttgactaggagtcacaaaagtgggccatacagtatgatgttttgttagctttggatttgccatatatggcctttttgttttgaggtatttaccttctatgccccatttgtttacggtttttatcacaaagcgatgttgaattttatcaaatactttttctacatcttttgagagggtcatatggtttttgtccttcattctgttgatgtgatgtatcacatttatttccctatgttgaaccatccttgcaaccctggagaaaattccacttgatcatggcatatatatgtatatatatatatatwttttttgatgtgctgttggattcagtgtgctcaattcttgagaattgttgca

SEQ ID NO: 816918 - DNA, 582 bp, Homo sapiens
tttaaattatccatgatttacctgaataaaaggagaggaagtgcctgaagattattctaattgagccagacttttcaaatcatggaaataccagcatttccaaggggaaatccaatccgttcaaattgcccccgtgagtaactcatacaaacagaaggaaagagggggctttcatttgccaatgtgggtctgatcagtgtaaattggataaatggtgagggccagaagggcatgaagctcccagagtcctctgcccatgttttcttagccaggtttgtaaaagggatcattctggagcagagggcgtttgaggaaattcctccatttcggcaccaagcctcctcctcctgttattgaaaacaggccaggcagagggtgttttctcctggctgatgcatgtccttccaacttccagcttctctgccctgaaggtctgcagataacaggcatctttaaagggyggacacggattgtctatgcctgtatttcagttaaagagttcaagacaagaagaagacaaaaacttggcatgactgcatggcctccctcctgggagaggctgaaagcctctgtatgaatgga

SEQ ID NO: 816919 - DNA, 529 bp, Homo sapiens
tgagctgcaatcttgtgactgccatttctttggagctgcagtcaaaccaggccagtgctctgggctatctagtcttctcagagtccctcctgcctgaggacaggctgtgcctgcaccctggtgttcagatgtgcagagttttgctctgtctctgtgtctcaacctactgctttacaaaaaccaagatgagatggaggaaaacctcctagagacagatgaggctcctagccaaacatccaaacctcacaggcttatactgcccagcacttggatatttggaaacctccggatgctggaactttcttgctttcacttggatactttaaaggaaaagcacgggaatgggttaaatggtaccaacgtgtaaaaatcatgtgttttctaataaattagttactaattgatcaatcaattaattcagttaatcaatcacagactgttgagcaataaataawactgttaacattaatagttattactttatggaacttatcatttacaaggcactttatacttgtgattgcactta

SEQ ID NO: 816920 - DNA, 559 bp, Homo sapiens
ttaaaatttattaggtgctacaaactagctactatcrgtatgttacatgggttgtaaagtagaccaccattatcctcaattaatcatggaggaagcagaagtcctggaggatgaaattgcttgcctatggctacgcgagctagcaggtggtgaatcagagtgggagcccagcagtccagcatctgtacccttcatgacccccataaacagcccactgtgagtgacgtgttgcagcagcacagatgtacatgacagactcctcctcagggatcatttctctgactgcataataggagccaggctggatgttgaatgagggtgcagcattatcagcaagttgtaatgacagggagcactcagcgagcattcctggcacaggtgtgggtagaggcacagaaacccatgaatgaatagttgagtattggatgtgaagggatgggagtcagtttccccccacccttgtaggtaatatctgtctcttcatcactgctgttctaaaagatggccccaaaagttcagtctctgtaaaatgtgttctaaattagtggccccttaggga

SEQ ID NO: 816921 - DNA, 626 bp, Homo sapiens
atttcttccagatacattcattcctctctctcaagctcagccttccacaaagcccttgtgcacagacacagttcagccatgctctttgccaatttgtaacaagggtagcctttactccaatttccaataccttgttcttcagttccatctgaaaccctgtaagaatggtctttactgtccatatttatttccctagtgttaacagcaaaagcaaactaaaatattttaaagaggcttattctgagccaatatgagaaatcatggctcagagaacatggtgtcaagaggtcctgagaaagtgcacctgcaatggtcaggttatagtgtggttttatacatgttagggagacaggaattgtgcgtaaaacaataaaacaatacatggaaggtacttattggtttgacctaaaaaggcagaacatctcatagtggtgacttacaagtcataggtgggttttataaattttcagttggcaattggttgaaagagttaagctttgtctgaagacttgaagtcagtaaaaaggaatgcttgagttaagatggggrgtctgctatctgccatgtgatgctataccaaattcaggttggaaagtaggtcacattatacccagttaacttcttat

SEQ ID NO: 816922 - DNA, 614 bp, Homo sapiens
taggctccaatacaatattagtaagacttattaacttagcagatcaatgtggcaatattatttatcccaggaatgttcaggtgttcgtgtgtggtgtgtctatatgattggaaacccatcractggctgtgaaagcagcagtttaggattgcccaaaagacaaagatttggaaaagctttaaaaagttttgaccacaaaggtcataaattttagtctagtgatgcagatttactggatcctgatgagcaacaggagtgaaaagcattttctagaagaaaaacctgtggtgatttctaggtaaaggacttcagatgagatcctgaagtaataacatattggcagctttagtagactcacaaacatgaggttaggcagcgatctaaggtgatagacagatgacatcagaaacaaaataagtactaggcaaggccatagccttgaatttttattagagttaggaattgaggatattctgaaccccgaggatttcaaccaagagaaagagtagcgaggcaatttagtttaaaaaataattctgatgtatattgggaaggattttattcaacttaaaatcagaaaaacaaccactaatagtttatgtgatgcttcttct

SEQ ID NO: 816923 - DNA, 578 bp, Homo sapiens
cgttttgtttctaagagtcagtctctctatgtcgcccagcctggtgtcctcccacctaagcctctcaagtagctggaactacaggcctgcaccaccgcacctgactgaaaacaytgattttttttcacttttctctccaaacttgtttttccatttttcttccagcctcttatagttcattttcatatattagtttttattactttgtaaaggcagtcgatttctttttgttctaatttatattttttcagaaattagattttaatcttgatattttttagttttgtttaatgcctacctattataaattagagatttctatgccttacttgtcaatgggaaatgttataccactattaagattaaaaagcatagtaatgaatatttttacagatgtatttgttgttcctccagaccaatatctaagcttcaatgcaaagctcagtttgattttagaaatatttcacatgttctcatacttccttatccaaacattctgaagagtttctatgcttttcatgtcctctgcctctcaactgtacttttatgacattaatgtccttagagttgtagtgttg

SEQ ID NO: 816924 - DNA, 609 bp, Homo sapiens
acctcaaacttaaaaagtaaaaataaaatgagaacccttttttgaaaaaaacctttttttaagtctttcatatcaccaggtctgatccaaaactttatgggcttggcagagttgcggctatgggcyttcatccctctcaaggaggttaggaaaacaagtggcttccattttcagcctctatagtcctagttgagcttggcctcatatagaggatttcccatacagaataagatccagcaactaagtggccacaatacaagataaatggctctatttatataagctctcaaatatttttcaatgaataaatcctaaaatatattgaatattattagagcaagtttaaaataaatacatgtaattataaattttctagtatttacctatcaatgactatttattccaattcttgtttcctcttttcagacttaaatacctgtgcttctaagcaacttgaatttccttaaccatgatgtgggcgacaatgtgaagaactttccagattccccttagatgaaggatttgtttcccagatgttgagagagtggtcagtttatacctatcatatgataggcccttctacaatggcctcaggtcccatttctgggt

SEQ ID NO: 816925 - DNA, 598 bp, Homo sapiens
agaaactgtttaagaaacaatttaatgtttgatgctctttttttttttttttttttgagacggagtctcgctctgtcgcccaggccagactgcggactgcagtggcgcaatctcggctcactgcaagctccgcttcccgggttcacgccattctcctgcctcagcctcccgagtagctgggactacaggagcccgccaccgcgcccggctaattttttgtatttttagtagagacggggtttcaccttgttagccaggatggtctcgatctcctgacctcatgatccacccgcctcggcctcccaaagtgctgggattacaggcgtgagccaacgcgcccggccgtttgatgctcttttaattttgctttaaaattcttgtgaacctacaccaagtaagtacatttgagagtaatatataactaagttacaaacactctcaagggtcacagtttgaactctttgtcccatttatttaaggaaagcraggaaacggatggaacactgaatatttccaaccaaaaactaagtagaaacctagaaatattactcaaaaccccttttctagttttatttataaatgtcactacaaagaagtc

SEQ ID NO: 816926 - DNA, 610 bp, Homo sapiens
agctgttgaagcaatccaccctgattttcccctacatttccagacctagaggaaacgccacagtaccaggagtgggattcaacagtgacctgaattacccaagttgaaagtctgagggaactagcccgtggtgaggccagtctagtaaaacaggaaatgtatatgggagaaagctccatagataaatttctcctcctttctcccttctaaagattaccctgaatcagctcctctttttaactgctctggagaagtacgacagaccagtggatacacatcctgaacacaggaaccaacacagaaatgcatcatagcacctttctctactcatgttcttcaccctcactgctggatttgtacttctcaaagaaagtgtcaacatgttaatccttgcctcaggctctgctttctggagaacatgttctaagacatgtacatttcctagactcctttgcagttgtgggaggacaaatgtccaggtttcattggtcagatgaatcttacctgayatttgaatgtagacagaagcaatatgaatgagtggctaccagtggggacatcttttggcatgtgctgttgtgagaatagtattgtggagcttctggaattc

SEQ ID NO: 816927 - DNA, 620 bp, Homo sapiens
catgttttatgctattaagaagaaatatacttcataaatccagaagggctgtcattttcccattatgggaacatctttagaattgccccatcaaaattgaagtcatatattcactttttcattgtaaggctgaaagttattgagagactaaattagcccagtgatggtgaactggagagagcaaatggattcaaatctatttacaggatagaatacacatgactcagacaataattgaattgggaagacaagggagaggcaggagttaaaataattctgaggcacccagtctgggttattggatgaatggggatgtcccctccatggagataggagaaggacacgtatttggaggaaaagagaatggagtttgtggtgtattgagtgacaggagtctgcaggacacccaggtgcagaaatttggtgggagactgtcaggagtctctgcgtgggcttcagcagatagggtgggactggggctattaatgtggaaaacrtcagcgaatacactttcatttccccctgttttgcgtaagcccccagtttggatggaataggacattagtctctgcccagtagcagagagaatacagcacagcttagtggttaagtactggact

SEQ ID NO: 816928 - DNA, 416 bp, Homo sapiens
cccctactggaccagggcacttcaaggacagaaatggtaccttatttacctttccatctgaaaggcastatagcatagtcaaggtaggactctgcagccaagatgcctgggtaaaaatccagattttgtcacttagtagtgctaactgtgcctctgtttcctcctctgtaaacaggagataattaatagtacctacctaataggatgtaatgattattaaaagtattaatatattgaaagtacttagactggtacccaccacatagtatcatgtgttagttattattgttgttattagttgaattctcagtacctacctagcagagattcagtaaatggacacgttgtgtatcagtcacagatgggcaaagtataaaggtacaaatcctcctttccctgaaattctgcctatttca

SEQ ID NO: 816929 - DNA, 602 bp, Homo sapiens
ttgttcacagttctggtctgtgccagtttatgtgtttgagcctcaggtaagttgagcgctgtggacatatgggtgtgatgaaatggtttcctctcttccctttccaccttcgaaacctaagccttcctgcaaggctcctagccttccgggtttccatagaaatcagagcctgaggccaagtttaaggtataaggctctatcccagagctggaagggtgaggggaagggagtcaatgtggggtgatatgaaccaaactggccagggtgccacagaaaccacacctgtcacagccacgcaggactctctggatgggccatatggagccaccacacttcgaaatcgtcacaggggaggaagagagaggagcttatctcctgactctctggtcaaagcgggtcctctgtggattcaactctcccccattttgggctatttaccttttaaacagtggcaaagcagccatcttctaggtccctagccagggggcaagaagcttcatctgagtctgcaagtgctgggaacagccggtrccctgtgctagggcccgggctgcaaatgcctacggctcccataaggtgggcattgtagcagccatgcctaa

SEQ ID NO: 816930 - DNA, 551 bp, Homo sapiens
atctaaaattcccacttttaggtaagtacttaaaattgaaaatagaaacttgaacagtgatttgtacatcagtatttcatggcagcattactcacaatagctgcaatgtggaaataactcaattgtcaatcaacagatgaatggataaacaaaatttggtgtatatgcacaatagaatattgctcagccttaaaaaggaatcaaattctgatatatgctacagcagatgtgaaccttgaaaacatgttaagtgatatgctagatgcaaaaaggataaataacatgtgatttcatttatatgaggtacccagaacaatttcattcatagagacagaaagtataatagtggctacatggggatggtagaagagataacagagtgattgtctaatgggtacagagtttcagttgtggataataaaaaagatagtggtgatggtgattgcacaagaatgtcagtacacttaatgccactgaattgtacacttaaaaatggtcaaaatgggctgggcrcagtggctgatgcctgtaatcccagcagtttgggaggc

SEQ ID NO: 816931 - DNA, 657 bp, Homo sapiens
ctttcctaatgctatagaagctacatcccaggagaaagtgagttttataaagtgcatttttaattttggggccacaataaaactgtctagstggaggcagaatatggtttataaaataaatcatttagagatttggttcatgtcaaaacgatgatggcttcaccttttgagcactgctgagaatcatgacactcccatgtcaatccgtttccataatttcctaatgttggtttattaatgtttctggttggaagccaattaaagaggcatctattactaaaagaggcacaaacataacttctaactagtcataccaaaagaattcctagagcactggtgtagagatcaaattggaagaaaaacttctgaaaatttgtgtttcttctcaaaatgcaagccctcttgacgtctagaactcacatccctccatatttctgaggaaaaaaaagttttttcaggtaactcaaatccctaaatatatttttagaagaatgtaggaggaagtttacctataacaaaaaaaagtgtttaatttctgtcatttagtaaaatttttcaattttataaaaagcatataaggaaaatcaatctccaaattttatgaaataccttcaaaaataaagtttaatgtctagatctttgcaaacttttgtacat

SEQ ID NO: 816932 - DNA, 421 bp, Homo sapiens
acattaagcacacatggacatgtacatgggaacggtagacactgtggactacaaaaggtgtgatgaagggtggggggatgggttgggaaactacctgttgggtactatacttactaccttggtgcaataaayccacgtaacaaacctgcacatgtaccctctgtatctaaaataaaagttgaaattaaaaaaagaatgaaagggaatgaataaagctgatgtttataggccctcccaaaatttctggctcataacatgctttcaaagattttataaaatcatttttaaatttaataatttttaaaatttggaatggttatagatttacagaaatgttgaatatcacataatataattatacctcatgctattttccttattgttatattactatggtacatttgtcaaactaatattgata

SEQ ID NO: 816933 - DNA, 477 bp, Homo sapiens
aagttctgtatatattttggatattaactccttattggatgtgtggtatacaaatattttctccstttctgtagatttctctttcatcaagcaaataaagatgagaccaatgtccaggaacttttccccatgtttcctcctaggagtttatggggccaggtcttatgttaagtctataatccactttgaattaacttttgtgattggaataagagaagcacggattctttgcatgtggatatccaatttcccaacatcatttatagacgagtctgtcctttacattgtatattcttggtaccttagttgaaaaaattagctgactgtaggtatgtgagtttagttctgagctttctattctgttttattggtatacatgtttttatgccagcaacatctgttttgattattacagttttgtaatggagttgaaatcaggaagtttaatacctctagctttgtacttatactcaagat

SEQ ID NO: 816934 - DNA, 594 bp, Homo sapiens
ttctgcatttgtttagatgatctcatggtttttatttcttattctgttaatgtggtgtagcacatttgttgattgtgtatgttggataattcttacatcccagsaataaatcctactttgtcgtgatgcaaaatctttttaatgtcctggtatatttggtttgccagtagtttgttgaggattgttggacctttgttcacaagggacattggcctataatctatatttcttgttggtgtccttatctgggtttggtatgaaggcagcgttggcattgtaaaatgagttttaaaatatcccctcctcttcaactttttggaaggattttagaaggataggtattagttcttttcaaaatatttggtagaattcaactatgaagccatcaggtcctaggattttctttgataggagattttattattgattcaatctccttactcattactgttaagattttctagctcttcatgattcagtcttgtaggctgtatgtgtctaggaatttatccatttcttctaggctatccaatcttttgacttgtaatggttcatagtattatcttatgattctttatattttttgtagcatca

SEQ ID NO: 816935 - DNA, 594 bp, Homo sapiens
ttctgcatttgtttagatgatctcatggtttttatttcttattctgttaatgtggtgtagcacatttgttgattgtgtatgttggataattcttacatcccaggaataaatcctrctttgtcgtgatgcaaaatctttttaatgtcctggtatatttggtttgccagtagtttgttgaggattgttggacctttgttcacaagggacattggcctataatctatatttcttgttggtgtccttatctgggtttggtatgaaggcagcgttggcattgtaaaatgagttttaaaatatcccctcctcttcaactttttggaaggattttagaaggataggtattagttcttttcaaaatatttggtagaattcaactatgaagccatcaggtcctaggattttctttgataggagattttattattgattcaatctccttactcattactgttaagattttctagctcttcatgattcagtcttgtaggctgtatgtgtctaggaatttatccatttcttctaggctatccaatcttttgacttgtaatggttcatagtattatcttatgattctttatattttttgtagcatca

SEQ ID NO: 816936 - DNA, 594 bp, Homo sapiens
ttctgcatttgtttagatgatctcatggtttttatttcttattctgttaatgtggtgtagcacatttgttgattgtgtatgttggataattcttacatcccaggaataaatcctactttgtcrtgatgcaaaatctttttaatgtcctggtatatttggtttgccagtagtttgttgaggattgttggacctttgttcacaagggacattggcctataatctatatttcttgttggtgtccttatctgggtttggtatgaaggcagcgttggcattgtaaaatgagttttaaaatatcccctcctcttcaactttttggaaggattttagaaggataggtattagttcttttcaaaatatttggtagaattcaactatgaagccatcaggtcctaggattttctttgataggagattttattattgattcaatctccttactcattactgttaagattttctagctcttcatgattcagtcttgtaggctgtatgtgtctaggaatttatccatttcttctaggctatccaatcttttgacttgtaatggttcatagtattatcttatgattctttatattttttgtagcatca

SEQ ID NO: 816937 - DNA, 594 bp, Homo sapiens
ttctgcatttgtttagatgatctcatggtttttatttcttattctgttaatgtggtgtagcacatttgttgattgtgtatgttggataattcttacatcccaggaataaatcctactttgtcgtgatgcaaaatctttttaatgtcctggtatatttggtttgccagtagtttgttgaggattgttggacctttgttcacaagggacattggcctataatctatatttcttgttggtgtccttatctgggtttggtatgaaggcagcgttggcattgtaaaatgagttttaaaatatcccctcctcttcaactttttggaaggattttagaaggataggtattagttcttttcaaaatatttggtagaattcaactatgaagccatcaggtcctaggattttctttgataggagattttattattgattcaatctccttactcattactgttaagattttctagctcttcatgattcagtcttgtaggctgtatgtgtctaggaatttatccatttcttctaggctatccaatcttttgacttgtaatggttcatagtattatcttatgwttctttatattttttgtagcatca

SEQ ID NO: 816938 - DNA, 583 bp, Homo sapiens
ttaaaaaattgaaaaataataaacaatataacatgtttgacaaataggaataataaaaatatagaaatcttaaagaataaaatgactgaaatgaaaatgcaatagaaagctctaagaacaggctcaatcaagcagaagggaaacaatcaataagctagagacaaaacatttaaaataattcagtcagaagagaaaaaattaaaaagattgaaaaagaataaagacagactctggatatgaagggaaactattaagacctaatattcatctaataggagttttcagaaagaaaagaaatagaaaagagaccagaaagcatatctgaagaagaaattctaaaaaactaccaaatctggagaaagttgctaacatctaaacacagcaaatgcagagttatccaaacaagtttaagccaaataggagttatccaagatgtacaataattcaaataccaaaaattaaagaaaargaaaacattttgaaaacagcaagtaattagaagcatatcacatagaagggaatatcaaaatagctgtcactggatttctcaacaaaatctcaggagaccaggagagagtaggat

SEQ ID NO: 816939 - DNA, 540 bp, Homo sapiens
tcatgggaatttaggatgtttccatatctttactattttaaaagatgctgcaatgaacatgaacatggagtgcagatatctctttgacatgttgatttcatttcctttggatacatagccagtagtgagactgctggattctacagtagattttgtttctttattttttgaggaacatttatagtattctccataaatagctgtattcatctacattttcactctccatattctgagttctgtttctgtcatttcagccatctcagccccattcagaacccctgttgaagaggtgctgcggttgtttggaggaatgagggcgccctttttgttctcatgacttttgcactggttctttctcatctttgtgggcatatccaccttcagtctttgaggttgctgacttttggatacatttttattttcttttatcctattggatgatcttgakggtttgattgtggtataaggtggattcagccaactggcttcatttctggaaaaatttaggtggtcagtgctcagctcccaacacctgga

SEQ ID NO: 816940 - DNA, 686 bp, Homo sapiens
ggagagtttttaccctcaataggttctccagcccttatgagataagagcaacatcaaacatttgtaaagatatggaaataatattttaaatagcctcaataatgcaatgaatataagcctataagtatctcaaagggtgatggagaagtcctgaaagctgggatgagggcgactcagctaagagccttgaatttagggagagttagttctacagaagttggagatccattgggtgtccatttactggagtggaatttgaaggaattgtttgaggagatcagtatgtctctgagttaaaccagcccataattaagttctattgaatggggcctaagaggcatgaagttctatcaagtggctttttctgtatccagcattgtgtgttttgaaaagtaaaatgtgtgacttggttactgtcagcaaagtatgcaattttgaaggacattagtgtcccaccaaagcctcgtattgtgaacttattatgtgcagagatatgagccacttgatttatattttcagtgtctgggaggcaagagactttcagatttccttaccctgaagacagctcttaaacaacgtctgagctgtttataataaatgtggaaatggagccattggttcgatagggcacccaatgctggtgtgactgcctgaygtctgcctaattttggggatccccagcccca

SEQ ID NO: 816941 - DNA, 686 bp, Homo sapiens
ggagagtttttaccctcaataggttctccagcccttatgagataagagcaacatcaaacatttgtaaagatatggaaataatattttaaatagcctcaataatgcaatgaatataagcctataagtatctcaaagggtgatggagaagtcctgaaagctgggatgagggcgactcagctaagagccttgaatttagggagagttagttctacagaagttggagatccattgggtgtccatttactggagtggaatttgaaggaattgtttgaggagatcagtatgtctctgagttaaaccagcccataattaagttctattgaatggggcctaagaggcatgaagttctatcaagtggctttttctgtatccagcattgtgtgttttgaaaagtaaaatgtgtgacttggttactgtcagcaaagtatgcaattttgaaggacattagtgtcccaccaaagcctcgtattgtgaacttattatgtgcagagatatgagccacttgatttatattttcagtgtctgggaggcaagagactttcagatttccttaccctgaagacagctcttaaacaacgtctgagctgtttataataaatgtggaaatggagccattggttcgatagggcacccaatgctggtgtgactgcctgatrtctgcctaattttggggatccccagcccca

SEQ ID NO: 816942 - DNA, 606 bp, Homo sapiens
caacctaacatagttggaatacttctgtaaaaagatgtgttcttcttcctattatttctttatttgatcacttattaatatgtgtattggtttatggatgtctatttcatactctgaagaagatccatgctacattattcattttatttttcaaaccaccacagctttattatgtgctgggagctcatttagtttggatcctgcatccttacagctcacctcatgcttttgtttttgaacacttccctgtttcctgctattataataaattctaaactcattttctatattatctttttcgtacatagaatcagccatttttctaaagactgcttgtttctgatgttaaagaatagtatttaaaaaattgtaatactgggtatgtgcattgttaacgtggtataagtacttgtaggacctctcaactgactggcctagtaaactatgtatctaaccttctgtaatttgattacattaaaagtgagaacacactggtctctctacccaattatgctaccacatggacctttctagccttccttccttgactgyctataaccactcactgcaaagtgaggaaccccatccaaccatatgccatttgat

SEQ ID NO: 816943 - DNA, 613 bp, Homo sapiens
aggggttaatactcataatatattaggaagtacgcaagtcaacagtaaaacaacaaacaacctgatttttacaattggcaaagattttaacagacatattcccaaaacagacatagaaatagccaacatgtatatgaaaaggtgctcaacatcatcaaccattgggaaaatgaaattaaaaccgcaatgaaacatcacctcatacctactgtaatggccattatgagaagacacatgataacaagtgttggtaaggatgtggagaaaagggaaccctttcacactattgatgggaatgtaaattggcacaggcattatggaaaacaatatagatgttcttcaaaaaataaaaaataaaacttccatatgttccagcaatctcacttctagatatatacccaaaggaaatgaaataagtatctctaaaagataactatactgctatgttcactgcagcatcattcactatagccaaaatatggaaacaacccaagtgtacatcaattgatgaatgagtataaaaattgtggtacatatatgtgatagattatcatccagccaaagaaagaaggaagttttgccmtttgcagcaacatagataaacctaatagac

SEQ ID NO: 816944 - DNA, 431 bp, Homo sapiens
cagagctggatgcaggccagggcaggacaggtcccatggctgagagcaagagcaggcgggcacggaaacctcamccctgtcccagggcccaggaaagactcgggcgtccaaccaaatccactcggcttccagaggctgccccggacagacgtcaccgggcctgggatcagggtggtgttggtgaccctcaccagcccagaaataagcacaggttccccggagtcctgccagagatgagaaaggcagcaggttgacctgggggcgcacacggccgtacctccgcgccccccacccgcagcgcgttgcctccgaagcgggaagtcccaggtgcattcattcctgagaagaggccgggcagccggagcccgccatttctgcagtcacagcgccacctcctggccgaccgcggcgtggccgtaggggccgctcca

SEQ ID NO: 816945 - DNA, 535 bp, Homo sapiens
aagagccaaaaagtagaaacgacaccaatgtctatcaactgaccaatggaatattattcagccataaaaaagaacaaagttctgatacaggctacaacatggatgagccgtgagtacaaaatgccaagtgaaagaagccagtagcgaaagaccacatggtgtgtgactccatttatatgaaatgtctagaacaggtgagtctggagagactagatttcttcagagacagcatagatcggtggtctccagggaccagggagggggaatgaggactgactgctaataggaacggggtttcccgtggggatgaaaatgttctggaattaggtggcggtaaatgttacacaactctgtgaacacgctaaaaagcactaaattgtacactttaaaggggttaatttcatggagtatgagttatatctcaataatartatttttttgaagatctggtcatacagagtggaggggttgcctcagcccaggaaggaagcagaagacccaggcagatgcaagcaggtgtgtggtgtgggggtgg

SEQ ID NO: 816946 - DNA, 584 bp, Homo sapiens
gccatggcaaggctaccaagcccggcaacagctctgcctcctgcaccctctccatttcctcctgaaagataaagcccagcctcaggcccctctcccacaggctcctctccccagcctctccagtctgctgtgggcatcttggctccgagacctcctagcttctgtaccttgcttggtgatgccctctacctaccttagcacctgcccaaggctacccatcccccaaggggcacctcaagagccacctcctccacgaagcccagatacccccaggggacagctcttctcactcctctgacctcctatgggtctctctgtctctcttgcttctgctctgagtatgcagcttgtatgaaagtcactttcctcccccatccccagggagccctggagggtggggctggggctggttacccctgtgtccccagcactcagctcagagcctggcaaacaataggtgcctgggaaacaccgtsactaacccatcaccgaggaaaccctgctctttcttccccttcctcctcctcccttggtacaggaggtagaggctgcaaaagttgtaaaactaggagagatgatccagg

SEQ ID NO: 816947 - DNA, 619 bp, Homo sapiens
gttctaaaggtggagattccagttgtcctctccctgtagagtcatggacaacattgacccctcacagcaatgatgtgtgacaagacacatggagcagtgccaaccaggaaagctcccccaagctttggtgtccacagtttttattcagacatcatgcttgactgactacatagctgaactcagtctctagctcctctggaggtcaaactgatatcccaagactcaaagcctccactgtaaatgagtttgtgtgatccaaattctcaagataaaggacattcttatcaggcaggatatgctgagggtttagagattaccaggggcaaagaaagagcaaaggccagccctgacttaaaatctatgttatataacccattactcagcttcaataacaagtatatctccaaccaccttccctttccatattgttttccattaaaactatgtggaggccaggtgctatggctcacgcctataatgccagcattttgggaggctgatgtgggaagattccttgagcccaagaatttgagaccagcctgagcaacatggcaggacattgtctgtacaaaatattaaaaaattagccgggwttggtggcacacccctgtagtcccag

SEQ ID NO: 816948 - DNA, 446 bp, Homo sapiens
ctacatgtggatatcctaatttttgtattttaccccatattccttatcctctttttgtctttatctatctagccatacatataaacacataattttttcagaactatttttcacaattattcagaatacattgcaccaatggagctcctgtaatctcttaattatcccttaatactccatgcattttcaaaaaacaagaacactctcctatgtaaccacagtacaacccccagatttaggaaattcgtattcacacatttttatcatttaatttacaagccccattcaaattttgatgatagacccaattagattcttgctaagtatagaatctaatctaggattacaaattatatttagtttttatgtttctttagytttccttaatctggaatttcccagtcattctttgtatttgatgctcttgaaacctgaaaaatgaggcc

SEQ ID NO: 816949 - DNA, 660 bp, Homo sapiens
atagtgcctgctgtgtaggacagtgatcgtcaaggtgggggaaagagagatcgcctctcctttactgagaaaygcctttaagggaactagtcttgctgatttgaatgattataaccctcagccttgatgtgaaagaaaatatatatgtagatttctaaaccagaacctatggacagatatgatttttaaaaaagatatagtacttctagagacaaaacaaagatattaatatcttagtattagcttaatgttatctaaaattaaaacatacttacctcaacagcatcaggtgttcgacaattctggtttgatgctcctacacactcttttactgtgaggggatctacaagccaaagagctactgtagaaggccagtttcctcccagattggacacggtatttaaaagggtcatgtatgttcctccaataagtggatcactaacctttgcattgaaagccattatagaaacatacatgctgtacactgtaacctacggaaaaatgtaaaacatctttagtatgattataaagcttataaagctacagtctaaattaagaacatcaaagtcataaacctgaaattaattttcatggtatttattgaactcaattcaacaaatacttatcaagcacctactataggccaggctttaagatcac

SEQ ID NO: 816950 - DNA, 633 bp, Homo sapiens
aaactaatacactagatcacagaggtgrccaaggcaccaaaatggctagctattcttatatgaggaaataatacaattactaatcaatctctttgatataagccctcaatcctgctcaacttcatgcatcaaaatatgttcagtccatatcagttgtatcaaaggaacattttcataattgctgtgaagtaagctccctttggcaatatagtcaacaaggacaaacaaaggattcttataattgttcgatttgttatcaatccagtagaggagtatatttctgaagggaaattatgaatcacttcctggtcatgaattagagtggcctcaaagagctgtttccatgttactcaagtataaaacctaccaattaggtcaatttgttaggggttgtaaagaaattaaattgaaatttaattagtagttccgccttatccataggggatacattccaaggctcccagtggatacttgaaatggtatagtactgagctccatacatattatgttcttttctatatgtatctatgatgaatgaagtttaatttataaattaggcacacaaagagatcaacaacaatgactaataataaaatagaacaattatgacaatatactatcaaggtatatgaa

SEQ ID NO: 816951 - DNA, 637 bp, Homo sapiens
gacagacatactaagagaatcattattccaaaaaatatttttataaatgaagggcatatttatggataaatactgcatcagaaagatcagaaagaaaaccaatcactcactaatttgtcttyttggtaaatctggattttcgtctgaagcacaatgcacagctaagctttcacatattttttcagaaataagaaagttgccctttaaaagtagttataggttttctacctccatagatagagaaaaaattcacctttataagaagacttctcttttcattatgagaaataattctaacatgcattttcattatgcaaagttaaagctaaaatgctactctggaatggagacaattgggacaagtagctaaactactttgcataaagatgtaaacatttgactttactgtggtaagaattacatcttgcagcaattagcctttgccacaatggtgtattacaaacaacttcaaaattcagtgactgaaaaaaattattttgtttctccagatgtttgagtcagctgggcaggttttgcttcacattgcaggtctgcaggtctgggtcttcctcacatgtctttcatcctttttggtcccattgagttattcagggtacattcctctcatggtgatggc

SEQ ID NO: 816952 - DNA, 626 bp, Homo sapiens
cattgtttgtggaaaaatgaacatactgcacgtgtccaaggaaactgagtaggaagaaacaagaaacytgaccaatgtgaaaatgcactaagttttttcattaaagcttcttactattttctgcaggaaatattgcctataacaaagcattgaaaatggaatattctcaggcatcaaacataaaggcaggattgataggttcaacaacagattatatcacaaaggactgcttaaaactcttcaatgctccacctctctgacagtactcagcacattgcattgaaactattgtattttccttgcaacccccacattaaaagaattaagagtatacagctgcatgtgttcctggtacctagcatggtgcctggcacccagtaggccctagtaaatatttgtatttggttacgtaagtaccatgttctaagtacagaggtttcaaaatgcccagatacatagtagccatcttcaagaaattcaaaccctagtgctgtgattcccaagcctgagtgatcttcagaactgctcacaaagctgtaaaagtacagatttccaagactcatctccagagatgctaattcaataggtctacataagggctcagaattctacatttttaataagct

SEQ ID NO: 816953 - DNA, 475 bp, Homo sapiens
tccctcactcttccaaggtccagaggtagaagcaaacrgggaaaaggggtgttgaggaagaagagtttaatccttccctgaagacatacacagatttacacatagttggtatgaaaataatacgactttttagaaaagattgtttttaatttttagaaaccttgtttatataagctggtgaacagaaactaaacaattatttaactaagaaagatctcgtacccatttcttacggcaaataagccgtaggtgagaacattggaaaataagcactgattcatgaaacaccaagaagtgacgcgactctgcttagtaagatttagaccctctgaccacagctctgctcttatactcactattttttagtgctttcatgtccaagatcacaaaatttgtaagaaatctgtaaggttattatgattcattgtctcctttatttttcattatttaaacgtaaaacatgatgctgttgacc

SEQ ID NO: 816954 - DNA, 589 bp, Homo sapiens
atgtaaaagaatgaaactggatccttttctctcaccttatacaaaaatcaactcaagatggatcgaagacaaatctaatacctgaaatcacaaaaattcaaggagataatctaggaaaaattcttctagacattgccttaggcaaagaattcatgactaagaccccaaaagcaaatgcaaccaaaataaaaataaataagtgggacctaattacaactaaaaatctcctgcatagcaaaagaaataatcatcagagtataacagacagagtaaacaaaaaaacctacagaatgggagaaaatatttgcaaataatacatctaataaaggacttatatccagaatctacaaggaactcaaacaaatcagcaagaaaaagtcttaataaaaagcgggcaaaggacatgaatagacatttctgaaaagaagatatacaaatggacaacaaacatattaaaaaatgctcgatgccactaatcrttagggaaatgcaagttaacacaacagtgagatactaccttacctcatctagactggccattatcaaaaagtcaaaaaacaatagatgttggcatggatatagtgaaaag

SEQ ID NO: 816955 - DNA, 593 bp, Homo sapiens
ctacatgtaaaagaatgaaactggatccttttctctcaccttatacaaaaatcaactcaagatggatcgaagacaaatctaatacctgaaatcacaaaaattcaaggagataatctaggaaaaattcttctagacattgccttaggcaaagaattcatgactaagaccccaaaagcaaatgcaaccaaaataaaaataaataagtgggacctaattacaactaaaaatctcctgcatagcaaaagaaataatcatcagagtataacagacagagtaaacaaaaaaacctacagaatgggagaaaatatttgcaaataatacatctaataaaggacttatatccagaatctacaaggaactcaaacaaatcagcaagaaaaagtcttaataaaaagcgggcaaaggacatgaatagacatttctgaaaagaagatatacaaatggacaacaaacatattaaaaaatgctcgatgccactaatcgttagggaaatgcaagttaacacaacagtgagatactaycttacctcatctagactggccattatcaaaaagtcaaaaaacaatagatgttggcatggatatagtgaaaag

SEQ ID NO: 816956 - DNA, 511 bp, Homo sapiens
ttcatggagccatgaagtcgatcaggctcccacaggtatctgctttactaaaaggcaccatcaagactgaagcagaagaaaaagagatcaaagacaccatctgatacacctgacctccttgtctgggagcattttgagggcttccctggagaatcctagatatggcagagatgagacaggtgagattttaaggagaactgtaagggatggagtagacattacccactgtctctcagtgtctgcaactcttttcttcttctgtgggtcgtaacagaaacctccaattttacctgagcacgtagcgatccaaaataaaaagagagcctgggacatatccgtgaagagaaagagttgagtgaaagctctgggaagtgtccttgaagggaaggagaatgccatatttgctttttctttcctttttccttggaatggacatgttgtcygaagctagactagccatcttggatcctgatggggaagccacatgctgagtttagcagagcagcaagat

SEQ ID NO: 816957 - DNA, 511 bp, Homo sapiens
agtagagtagtctaagcagtctcctcttgttcaaatttagttcagatttgaataacttctttcctacagtagatttccagctctggctgagagtcatgtcagcctcagagcctaactatttaaactctgggagagttttctttaatgtgtaagaaaaagtaaatgctgcctacttcaaattgagtactcatatcatccctcaccagaagagacaacaaagacccagaatagctagctctttttgggccaggagcatcctttaaagaggcttagttaagaccaaacccttccacttctctgaaggaagcggaagctctgggttccagatacagtccaacaaatgtttcttgcacatgttagaaaaataactgagaagtgggcctgasgcagtggctcacacctatcccaacacgttgggaggtcaagtcaggtggatcacttgaggccaggagtttgaggccagcctggtcaacatggtgaaacccggtctctactaaaataaaatcacaaa

SEQ ID NO: 816958 - DNA, 445 bp, Homo sapiens
ttgatatgattccatttgtccatttttgctttgattgcctatttttatatggtaatactcaaatccttgcccactctaatatcctggagagtttcctcagtgttttcttgtatttttatagtttgaggtcttagatttaaggcttcagttcatttttatttgacttttatatatggtgagatataagggtcaagttttatttttttggtatatggatattccattttcccagcaccatttattgaagagactctcttttccctaggttatgttcttggcttctttgtggaaagagagtttactgtaggtgtgtggatttgtttctgggttctctattctgttctrttagtctatgtttctttttttataccagtaccatgctgttttggttactatagctctgtagcacaattggaaatcaggtaatgtgattcctccagggttg

SEQ ID NO: 816959 - DNA, 564 bp, Homo sapiens
taggtaagctgaggtttgggaaaggggagtgattgatcacagcctagagctggctgggctcattccccttctstcttcctccccatggccctgagttgctctagtggaggggattggatggggctgtttgggacccagatgttcattttgtcttagccgctgccagctgaggtcaggtcccttctgtctgcctcagcttccttagggggctcagaatggctggaccagagcactgcagtgccctttctcatcataaagacctggccagcagcctgctcaggaatcacatttggtggggtaacaggctttttcccagggcacagtgccgccactcctagaatatgggggaggccaaggctgagaaaaatgtgctggggaagggtcattgttaatgggaggtagagagggggcagggtgggtgaggctagagggtgggcccattccttcggaggtcacaggggaggcaggacatgcagggcaacctctggggtggccccagagcaggagctgggaagctggcctggctccaggggtgggtgtgggatcctcctgggtcagcagggc

SEQ ID NO: 816960 - DNA, 628 bp, Homo sapiens
gggagttattaggttattttaggtatttgatatatggtagcatcaaagggaattgagcagagattcactgatcagaaatattctaactgtaaaaaggcarttgcagacttttatacagaggtaggttaccaatagtcattgacctctactgacttctgggcttatacagagagtgactagcttttttctatgggttgaagccatgtgtatggaccaaaactctgcatgatgctgacagtatttttctgtaagcaaaaacgataaaaaacaaaacaaaacaaaacacaaaataacccgaaactagaatgaaaggggaaaaaaaatccaaccaaaacaaaatgagagggagaatttaagaatttagatgggaaattaactttgttggtaactttgttggatggatgaataaggtaatatgtaaactcttaagcccctaaacttctaaaattagaaggctgcacgtgacaaagtaaaatacagttctgtatgtgttggctttctgatatccctaggtggtatatcaatttctataaaataaattaaacttttcttcttactcaaggcagtgttgttcatagtactttctgtgacaatggaaatgtctgacatttgcattgtccaatagtca

SEQ ID NO: 816961 - DNA, 628 bp, Homo sapiens
gggagttattaggttattttaggtatttgatatatggtagcatcaaagggaattgagcagagattcactgatcagaaatattctaactgtaaaaaggcaattgcagacttttatacagaggtaggttaccaatagtcattgacctctactgacttctgggcttatacagagagtgactagcttttttctatgggttgaagccatgtgtatggaccaaaactctgcatgatgctgacagtatttttctgtaagcaaaaacgataaaaaacaaaacaaaacaaaacacaaaataacccgaaactagaatgaaaggggaaaaaaaatccaaccaaaacaaaatgagagggagaatttaagaatttagatgggaaattaactttgttggtaactttgttggatggatgaataaggtaatatgtaaactcttaagcccctaaacttctaaaattagaaggctgcacgtgacaaagtaaaatacagttctgtatgtgttggctttctgatatccctaggtggtatatcaakttctataaaataaattaaacttttcttcttactcaaggcagtgttgttcatagtactttctgtgacaatggaaatgtctgacatttgcattgtccaatagtca

SEQ ID NO: 816962 - DNA, 588 bp, Homo sapiens
aactgatggttttataaggggcttttccaaccttcacttggcacttctccttgctgccaccatgtgaagaaggayatgtttgcttctcattccgccatgattataagttcctgaggcctccccagccatgctgaactttgtcaattaaacctctttcctttataaattactcagtctcaggtatgtccttattggcagcaagagaacggactaatacagtagtgttggtgggctatgtacttaaatgtgttttgtggtggcaggtaccagttttttgtttccatgtttaacacttccttaaggatcttttgtaaggcaggtccgatggtaatgaattcccttaggctttgcttgtctgaaaaggattttatttcctcttcacttacaaaacttgtttgtctggatatgaaactcttggttggaatttcttttttttaaggatgttaaccttgaggtgacagtgtagggagagatgttcaaatcaagcagtggcttgaagcttctgttaaactagccagacttccaaaggcccatgcgcagttcttattttctgtttccaaatttctaataattagatttagaaatgct

SEQ ID NO: 816963 - DNA, 612 bp, Homo sapiens
cctgttcctaggcagggcatggcaatattgagaagtsctatctgatctatttaaaacaaatgttttgtttctagggaaatcttcctccaggatataagatcactctgattgatataggacttgttattgaatatctcatgggaggaacctacagatgcacctatactaggaaacgttttcgattaatatataatagtcttggtggaaataatcgggtatgtaaaatttgtggggaaatctatatatatgctttaatattaacacatgcactttaattgttaagaattaacattagaacggagaaggttacactgtcataaagttgaacattttcaactaagagcaattagaaatattatgtcgtcaaaatcctaaatcagtcatattttgtgtgtgtacacaaacacatttgcacacatatataaattgattcttgaatttttataacatgtcagcacgtttaaatctataaaagctaataagatctcattttcagaggtctggccgaaatacctccagcagcactcctcagttgcgaaagagtcatgaatcttttggcaatagggcagataaaaaggaaaaaatgaggcataaccatttcattaagacagc

SEQ ID NO: 816964 - DNA, 627 bp, Homo sapiens
attgttgggtggtgaaagaaagaacactagtcacaaaaatttgttatatcctaagatataaaataaataagtaaaataaaagagagcccagttggcctgctgttttcatccctaggcgtgggtccgatatttacccccactagagcaagtgttctgattccgaacagccattcatggatgccctgacagtgtgcaatgtaaatgtgttttctcttttgggggccaccagtcctgtcacaccctctgcactcgctgagcttcttgacctgctggacagcagaacaatttcttcatcagcagctaaacaggtatgtccacactcccgacagcttctgactgtgctactgtcccaagaaatgttttctgtgacacccaaatgccatcactgagtgactttcatcatggaagtattaaatgccagtagtggtgtttttaatgctgaaaggtagaaacattttatttagcaagcgtatgaagccaatatgtgcaatgcaggcagtttgcttctcgtcatcaccgctaacctggggaaatagttattgtctggtcttgccctgaacatctccgcctgacrtgtctcctgtagcccttttacacctgagaactttccctcgtgcccaaggcagc

SEQ ID NO: 816965 - DNA, 549 bp, Homo sapiens
actaacctaagcattagaagaacaaagtgtkttggaattatgacagtcttgacaaaaagatagcttcacagcctgatctcagccttactttataagggatgcatttaagccaagaagaaaacaattcttgattttctttgtcactttgtgtgacaaggagggaagaggaggcttacaggctttttctagagtaagtcaagaagccagactcctctccctcacaaaaatatttgttctatttcctttcatccttttggttgttcagaagccagtacatcaagattaggcattaacacccaaactatgtgccatcataccccaaaatccataatagaaaatacatttcacacacctgagacctggctggcaacactataaagagacttcataactgatagttatagaaggattgcaagaaataaatatgacgagagtcatctagaaaactggcacaatgtaaaaaagtcacacagtttacaggaaaaattttctaagtatgaagtacataaaaggggagatttagggcttttaaatcataaatccttccca

SEQ ID NO: 816966 - DNA, 549 bp, Homo sapiens
actaacctaagcattagaagaacaaagtgttttggawttatgacagtcttgacaaaaagatagcttcacagcctgatctcagccttactttataagggatgcatttaagccaagaagaaaacaattcttgattttctttgtcactttgtgtgacaaggagggaagaggaggcttacaggctttttctagagtaagtcaagaagccagactcctctccctcacaaaaatatttgttctatttcctttcatccttttggttgttcagaagccagtacatcaagattaggcattaacacccaaactatgtgccatcataccccaaaatccataatagaaaatacatttcacacacctgagacctggctggcaacactataaagagacttcataactgatagttatagaaggattgcaagaaataaatatgacgagagtcatctagaaaactggcacaatgtaaaaaagtcacacagtttacaggaaaaattttctaagtatgaagtacataaaaggggagatttagggcttttaaatcataaatccttccca

SEQ ID NO: 816967 - DNA, 590 bp, Homo sapiens
ttccctttcacctatacaattactccaggactttgctccctcaatgatctacttggttgccttcatcttcccttgctgtggatctttcccttgagccagcatgtcactcaaaaagccccartgaagagacaaaaaggatcaccttctaacaactgacatctctttccagattgtctaatccaggcttgtcttcctctcctttattctttaatcaactaaaatgtgctctatgcccactctattagtgaaaatgctcttcctaaaatcaccaatgaccgtctggtcttcagaagcaaaaggtaatttttaatgccttcaatttttttttaaatttaatttctggaatacatgtgcaggatgtgcaggtttgttacataggtaaaagtgtgccatggtggtttgctgcacctatcaacccaccacctaggtattaagcccagcacacattagctgtttttcctgatactctccctctctttatccccaccccccacaacaggccccagtgtgtgttttacccctctctgagtctatgagttcacattgttcagctcccacttataagtgagaacatgcagcgtttggttttc

SEQ ID NO: 816968 - DNA, 474 bp, Homo sapiens
attaggatagaataaactttttaaagcatatttatttttctcaagaaagagacattttgaattttattttatcaggcacacaagtttggttaacagtctagagctatttaatggtgattcatctgtcttggtttacaaaaccatgcaaataatatgaattcaaacccaagcgggcatcagagaaaacctgtggttgtcaaatgtcaggtaaaagcattttttttttcttctcctgcaaccgagaaggaaacacttactcttgcttgtcgtcttttgtctctgcgtatattttccctaatgcacacattttcacttagtgttggctccttaaagtggcctgcatttttctagggctccctttattttttatttatttatttatttatttatttatttatttatttattyatttattcattgagacggagtttcgctcttgttgcacaggctggagagcaatggtgcgatgtctgc

SEQ ID NO: 816969 - DNA, 590 bp, Homo sapiens
cttacttacctttgttagggccagattaagacattccaaatccccgttctttgtcccgtaaatggtaactgattagacgaactcctcgtatccactagtcaatttgtacaaaatacctgctttctggaaatgatcaaactacggttaaaattctctcctttcccctggctcctgaaatttgatcctgaaatgcctagtcagagctagcatatagcccttccttaatggcccctctctagaataagctggcctcagggtaaaacattttctgatttactgtacaatcacactgctctccctctggaacgtcctcttacctggttctttctaagcttatttgctcttcctcataaataaaaagcctctttctgcttaaactttgagatgcacatagatcttaggttcagagcattccccctgttgcaattgtcccttctctcctcttgcaataatattttcaaataaaatattyttacctaagtctggacttggtttttatttggcactatgaaatttgtgtttcaactaagtgactctactatctcatgatttaaataatgggtcaacctctaaatgcctgacaacttaaa

SEQ ID NO: 816970 - DNA, 633 bp, Homo sapiens
  misc_feature 569, 577: n = A,T,C or G
gaagcaggcatatcgcaacgtgaaaacacagagagagagaaagagagagagagagagagataggtggggaggtggaaaggtgtacctcacgcttttaaatgaccagacttcgtgagaactcacagtcakgaagacagcaccaagcgatgagggactcacctccatgatccaaacacctcccaccagtctccaccttcagggttggggattaaaattcaacatgagatttgggtggggacaaatatccaaactatatcagcagccaacaaactacaatatatgtagaataacttgagattatggaaaactggggatttaagacatgtttacaagaaacctaaaaaatacaaaacacaaaccctcacattagagaaagtaaatgcaggatttatatcgtaaaaagtggtttcagacatgggaaaagatggagtgagaaaaagccttcccagaatacagatgaagaggtcaaagagatttctaaggttaaatcaaaaagacaacacaatagaggacagaaaatagagacgcagccttccaaaactaatattaacaaagaaaaaagtaggaanataggggnaaagcagaagcaaataagaaagttttagtgaaataacacttccctgtgataaagac

SEQ ID NO: 816971 - DNA, 590 bp, Homo sapiens
taagttctagggtacatgcgcacaacgtgcaggtttgttacatatgtatatatgtgccatgtggtgtgckgcacccattattcatcatttacattagatatatctcctaatgctctccctcccccctccccccattccacaaaagtccccggtgtgtgatgttccccaccctgtgtccaagtgttctcattgttcaattcccacctatgagtgagaacatgcggtgtttggttttctgtccttgcgatagtgtgctgagaatgatggtttccagcttcatccatgtccctacaaaggacatgaactcaaggatagatttttttaaatcactattatcgaagaccttaagatctaatttttttaaaagcaagaagaaacacataaggaaaagttacataataatgtaaagcaataatatacgattacttgccaaatgcttcaacctttcctgatgtcattagcaagatgacttctaaaagggctgcgttaattctggcttgctctactgttgacccaaaaaaggagcacatttcactcctagggactgactgctattatactcagaagtgggagggtgaatttctggctga

SEQ ID NO: 816972 - DNA, 590 bp, Homo sapiens
taagttctagggtacatgcgcacaacgtgcaggtttgttacatatgtatatatgtgccatgtggtgtgcggcacccattattcatcatttacattagatatatctcctaatgctctccctcccccctccccccattccacaaaagtccccggtgtgtgatgttccccaccctgtgtccaagtgttctcattgttcaattcccacctatgagtgagaacatgcggtgtttggttttctgtccttgcgatagtgtgctgagaatgatggtttccagcttcatccatgtccctacaaaggacatgaactcaaggatagatttttttaaatcactattatcgaagaccttaagatctaatttttttaaaagcaagaagaaacacataaggaaaagttacataataatgtaaagcaataatatacgattacttgccaaatgcttcaacctttcctgatgtcattagcaagatgacttctaaaagggctgcgttaattctggmttgctctactgttgacccaaaaaaggagcacatttcactcctagggactgactgctattatactcagaagtgggagggtgaatttctggctga

SEQ ID NO: 816973 - DNA, 603 bp, Homo sapiens
tgtctttttgggtgacacagtattatccactctgatactgaaagaaaagaatgaggtgtaaaaggtggtataaactaaggaagtatactgctttggcaaaataactcagttaaaatcgttttagtaattcatatttctttctccttttgtaaaaatttagactacattacacaaattttgtcttctaatttttgacatttcaaatgagattatattctgtataattactcagaatacggacaatatggtgtatatatcactaggaaactaagcaggattaacatgagagggagtgactggaatttgcagtatcttcacagtataccccatgaattgctgaactgatgaatgatggattgttttatatttttatgaaatgaagagtattcaaaagagtagtgataaggaaactgagctctagaacaggatcatcaactaaatcaacatgaactagttgatctctacaacaggatggacacacaatcccaagamcatgggcacagttgggaagcttgtggagaggctgaagacatggtgactaagagcacaagttcaggaccaggatagtccaaacccaagctctgctgtggaatcaagggctca

SEQ ID NO: 816974 - DNA, 624 bp, Homo sapiens
agttggaacctcagactcctcccttgcacaggcctggccagtatctactgttttttgctttttttttttttttcttgacaaggacctatccttcccccagacattttgtaagctttcacaacatttgggctcacctccgtgggtcccagtgtcggacagatcagattttgatcccacctctggccttcgataacaggcaagttactaacctttcttactttgcctcagtttcctcatctgagaaatggaaataatggtaataccaaccctgtgtccctatcaagattaactataataaatccaagaaaactgcttggtactgagactgctcattgtaaattcaataaatgttccccttttaccatcaccattacctgagtccctctaaaagccagatcaagttccttcaactgaaagtatctttcccattttcttggccatgttgccttaaattcctacaatgaatgactattatcagctctcaaattttatcaaataactttaaaaggtaaacatgtatgaatatagtgttaawtatctgcaaacatttaactattttccatgcctcagtgtaactgaatatatcagttctttggcaggcagagcaaaggtactgtaaagatt

SEQ ID NO: 816975 - DNA, 661 bp, Homo sapiens
gttctttggcaggcagagcaaaggtactgtaaagattttcaggatgattacattttaataccwggatgagggagttaaggctttatcaagtgggtaccacagtggtggccctctccatcagatactccaaggactttgctacctccaagaagtgactgaaaagcaaagtatgggtgaatgatgatgtgcagacttcttgaaaatgtccatttttaaaaatctacatttttaaactaaaaacatatctacaaggtgctccacatggtagtgcctattgtctaggacttttaattctataaacaaatccccacatgaacaattttgtttaaaacaaatggctaaagaatgcaggaaataaggggtctgaacagagtgactgtttgccctataactttcctctcatccctataaaggaagcagagtctctttttcaaaagtgtagctcaaaccatttcagtgtttggcagcaaggaggacacaggggagagaaagctgcttggacgtaaagtaccaatgtcagggtccactcaccctgaccctaggccagctgagaacagcacacaatggcagaagtctactttttaaaaataattttgtccaataatcattagtcttccttgttcaacactgaaggtgtcacgggactgtaaattgaccattt

SEQ ID NO: 816976 - DNA, 652 bp, Homo sapiens
gttttctgtgtctcaatctcattcagtccagctctgattttggttatttcttgtcttctactagcttggtgtttggtttgctcttcatcctgtggttcttttggttgtcaygttaggttgttaaattgagagctttctaactttttgatgtggacatttagtgttataaatatccctcctaatacttccttggggtttgtcccagagattctagtatgctgtgtctttgttctcattattttcaaagaacttcttgatttgtgccttaatttcattattcatccaagagtaattcaagagcaggttgtttaatttccatgtaattgcatcttgtttggtgatttttcttagtcttgatttctatttttattgtactgtggtctaagagtctttggtataattttgattgttttgtatttgctgaggattgttttgtgtattattgtgtggtgaattttagagtatgtgcattatggtgatgagaaaaatgtatattctgttgtttttgggtgcggtgttttttaaaggttcagcagattcatttggtccaatgttgagttcaggtcctgaatattgtcattaattttctgcctcaattatctgtctaatactgtctgtggggtgttaacgtctcccaccattattgtgtgga

SEQ ID NO: 816977 - DNA, 652 bp, Homo sapiens
gttttctgtgtctcaatctcattcagtccagctctgattttggttatttcttgtcttctactagcttggtgtttggtttgctcttcatcctgtggttcttttggttgtcatgttaggttgttaaattgagagctttctaactttttgatgtggacatttagtgttataaatatccctcctaatacttccttggggtttgtcccagagattctagtatgctgtgtctttgttctcattattttcaaagaacttcttgatttgtgccttaatttcattattcatccaagagtaattcaagagcaggttgtttaatttccatgtaattgcatcttgtttggtgatttttcttagtcttgatttctatttttattgtactgtggtctaagagtctttggtataattttgattgttttgtatttgctgaggattgttttgtgtattattgtgtggtgaattttagagtatgtgcattatggtgatgagaaaaatgtatattctgttgtttttgggtgcggtgttttttaaaggttcagcagattcatttggtccaatgttgagttcaggtcctgaatattrtcattaattttctgcctcaattatctgtctaatactgtctgtggggtgttaacgtctcccaccattattgtgtgga

SEQ ID NO: 816978 - DNA, 349 bp, Homo sapiens
ctcttaacctgtagcaaccactgatatgttttccatccctatagttttgccttttatcaaatgtcatacaaatggaattatacaataacyacaaaatttttttgcctggcgtctttcagttagtaaggcacatttaagttttatccagggcttttgtgtaagtaaatagcttgtttcttttctttttttaaaaaataatattccattgcatggatatatcacagtttatttatttattacttgaagaatatacaattttggtaattattaataaaactgctctaaacgtttgtttacagaagtttgagagaatacaggtttttgatgtccttggatgaatatctagaaa

SEQ ID NO: 816979 - DNA, 505 bp, Homo sapiens
catccaggacctttcggagaactgtgcttgtgcttctgtgacacaaagtagaatagcaaacaatccaagagagtttactcttgttttcgagtcaatcacaaattttgacaaaacttcctctttctcacagtgtgtctgtcctgttcaccttcaattcagagaactgtcctgacctttcttaatgaaatgtgaccctcctcttgttcagcaaataataaactcaatctctgctttagactgtttttatcctttgtgttatccctggcataggtctcatttcagtcatccctgtggccagtgagtagttactacctttccaggtgctatcaccgaactccgccttcatgtctgttcatcgggagaggttctcccaaacctcctggggggawgttgagctctgctttcttcgccaagttgctcagagggtgtccactcaaaaatgatgggcctcattgggttggtgctcatccacgtgcttttctagttgggactttttcttggctta

SEQ ID NO: 816980 - DNA, 637 bp, Homo sapiens
ctgctactgaaaaggattggttaaaagagacaactcccactccactgccgtggctttccatcagggccatgcttggcagaacctgggagttgaaagggaagagatgatgatccatgtcttgagttcctgcagactggaagcaagtggagctgggcttggggagcagaaggaactgttctgcttcatggagaaccaagtggtagtgacggaagtacctgtttcagtgactgcactttgaaattggatggagacccaaatccttaattcagggcttccttctgggctggtgcaatctgtaattttggcaggaatgagaagggcaggctggagtgaaaaaaagtcaaaagtgggagtgtagtggctcaccctgcttccagccctccctgacctgtcgtttgcagacccctacacatttagagcctgtgtatcagtcaggatctctcaggaccacagagaccctctcacagcgttaccttcagcagttgggatttatcgtaaggatatttctgaaaytaggagaccaacaaacctcagggttccataaacactgagggcagattggcctccagagcctggagtagcactccgggtgtccagtggttctggggatctggtcatttcgccagctccaaatatt

SEQ ID NO: 816981 - DNA, 646 bp, Homo sapiens
tgacctcatggcacagctcttttctccaccctgtgtttcctctctttctttgcctctagcacaacttgggactatattctctatgtcctagctttcaacaaaagagcaaaacacatccatggcttgacaatgttcagatttataaaaagagaaatgaggaacattggtatatgtttaaatttcaagacattctattattttagccatcaagcttgatcccgcctgtatcttttgtttaaataaagcctcagtttcccagtgtgtttgcctgtgatctagagctataaatcacacgatttatgaaatatcattggacagaaacaattttaattgtgtaaaatacctaatatctcattaactttactaaaacccaaaattactgttgtccagttaagtaaacaacttttttcaatgaaaaggttttctccattgtaattgccatatagctcataattccttttataatcagtcatgaagaaaaatttcttatgaaagtaaaatgcaaagtataaaaataaaaatctgtgatactgacataacagtcagaaaccaaacaatttactaatcaataattgaaatatattagttgttcattgggyaaaaagtgtacatgtagctcttaatagaagatatacacattaattct

SEQ ID NO: 816982 - DNA, 481 bp, Homo sapiens
acaataaaaatagttttgaccctatggacccattgaaaggatcttggagacctccaggattccgatggactacactttgagaaccgatgctctattttgagaaagaaaaaaactcattcactaactgaaattcacacagaggaccgaatattgccaatgccagtttccaatccacactagacaaactccaaggacatcagcagctagggactccacccactgccattcataaattaaaaggaattttcttcctcggcatgtgattcatctggaaaaagcttttagtgcaaagttctgaaagaagccaagaagcattttattataacaatctattttaatgttgagctcagttccaacaccaaagcagttttcaataaaggtttagaaaatgcatcaagataatttctcatttaccacatatgctggagtctggsttagaagggatcccaacattcctaatagctgggaaatattaataatg

SEQ ID NO: 816983 - DNA, 625 bp, Homo sapiens
gttggttcacttacctcttgtaatgggcagagcctggaggaagagccagggggtrgctgtttctccctctttggcctctggaggaggaggctgaggggagtgtgcatgagagtttccaagtcttctccatgggctctggatcaggtgtctaagcatagttaagacagtggcatctactttacaagctttacaaaggtgagggtcttcccttaagaccatgaaggtttgtaaatatgggacctctgactatttgtcctgatggtggcagaaaaggtccatctgaaggatagtattaaaatttgtacttccattctttggccaggattttcatagttatgtaaaggaaaattagttttatctttttagttttagggtttgaaagtcaaatttatttcaatttttaagggtacatttgagtgggggaaatcctggggtatggagatctggattcctggtgacctggtctattaagagtcccattcatcgtgccactgttaccaaaacaccaggagtttggtttaggtcctgctactcaccacacagaaagccaaccactgagacaacaacaatttccaaggaagaaggctttaataacatgctgcagccaaaacaggagatcagtctc

SEQ ID NO: 816984 - DNA, 656 bp, Homo sapiens
tcttccacttaccttattatccagtggatccaatgattttctaagtgtctgtggaaaataatgtgtttacagcctctggcaagcacccatagaataatcacaatgcagacatctcagatttttaaaatacatctatgccctcttctgcagataatcattctcttttttgagaaatactttctggcttgctactggctctcggaaaagattaaacatctaatcatagtgttatgggatctttggggtgtcgattttcttcccagaaacctctgtggccagtggtgcctttgcatgagttcttgtcctgcatccaggaagaatgaagtagcagacaagtgaagggtgaagaagatgaagaggagctttatttagtgttagaacagctcggaggatacctgtagtgggtatctttttgctgtaggcaggttgtcccatcaagtgttcagctctcagcagagaggacgccttggggagggtggctgctctctgcaggtaggtcattcagaggtctctgcaggtatctgaagctctcagcagagasagcagctcctctatacagctggtcatcccatcatctctcagtcttctgccctctgcctcactctggatgagcctggggcttttatggacctcagaggggaggaagtgcatggtcc

SEQ ID NO: 816985 - DNA, 656 bp, Homo sapiens
tcttccacttaccttattatccagtggatccaatgattttctaagtgtctgtggaaaataatgtgtttacagcctctggcaagcacccatagaataatcacaatgcagacatctcagatttttaaaatacatctatgccctcttctgcagataatcattctcttttttgagaaatactttctggcttgctactggctctcggaaaagattaaacatctaatcatagtgttatgggatctttggggtgtcgattttcttcccagaaacctctgtggccagtggtgcctttgcatgagttcttgtcctgcatccaggaagaatgaagtagcagacaagtgaagggtgaagaagatgaagaggagctttatttagtgttagaacagctcggaggatacctgtagtgggtatctttttgctgtaggcaggttgtcccatcaagtgttcagctctcagcagagaggacgccttggggagggtggctgctctctgcaggtaggtcattcagaggtctctgcaggtatctgaagctctcagcagagacagcarctcctctatacagctggtcatcccatcatctctcagtcttctgccctctgcctcactctggatgagcctggggcttttatggacctcagaggggaggaagtgcatggtcc

SEQ ID NO: 816986 - DNA, 668 bp, Homo sapiens
agagacagcagctcctctatacagctggtcatcccatcatctctcagtcttctgccctctgcctcactctggatgagcctggggcttttatggacctcagaggggaggaagtgcayggtccatggatggccatgggcagcctggagtgggcaccacaagtccgaactccagtccttgggactggcagcccagcccccagccttcaggccctccctggcatgagggaggggccttaccagggacccacccccttctctccaggaatctgtctgcctcccgctgccattcatggcccccaggcttggcctcaaccccacttgatatcagagcaaggactagcagaggagagaggccaggcagccctgagcctgcagggatgggggactttctccggcccctgagggtgcaagctgcagagatgcccaggtcctgcacctgggagagcagctgcagctgcacccagggagctcctacccagccaacttagaaggggtggggttcctgcttgtccccagttcctacctgctccagggagtgggaggtccaggtctgcagccatgggttgggaggctgcagctgcatttgggagggcagatcctgcctgctcctgggcacacccaacaagagcacaccaacaattggatccacagctgcaatttgggcagcta

SEQ ID NO: 816987 - DNA, 498 bp, Homo sapiens
ccaggcaaccaaacctcctcctttctcatccctcatgtgacaccaccaggccttcagtaaaatgattccagccccagaatcaggagaggagatagctgattattcctgcatgccagttgccttgttaaaaaaaatgggattgatcgctgccctttctccaccatgcaattcttagatcagttcttagctctggcctgggctcctgttcaatccctctccccctaccagcctgtcacccccaccatgtgaaaaacccagcccttcccggtgcagccaccttgtctccagggacaggatagaaaattcctatctaggctgcaaggttaatgggacaccggggctgggcctggagggggtgtggggctggggaggctggctgaggccagcatttgcatttcctgaactaggggattagaggccatactgtggccttatttgtacttctctgtgtytacatctacgaagaaagataatttttaaacagtaaaatgacagatt

SEQ ID NO: 816988 - DNA, 483 bp, Homo sapiens
acacacaggtacacatacacatccttgaattaagcaaaagatgtatttgattcttaagtagacaatatttataaagataycatttttttctaaattaatccacaaatagagaattccaatgaaataccaataggttcattttctttggaattaggcaagttgattctaaggtttacatgacaaaacaaacatctgggaagagccgtaaaatctttgaaattgaagagctacaagagaaggattagcaacacagatactaatgcacataaaggcacagtaattctttaatttttattattattatttttctatttcagtaggatttgggggaacaggtggtgtttggttatacagataaatttccttagtgatgatttctgagattttggtgcatccatcacctaagcagtgtgccctgtacccagtgtgtattcttttatgttatccccctcccacccttttcccctgagtccctagaatccg

SEQ ID NO: 816989 - DNA, 605 bp, Homo sapiens
acatttattgacttctttacataaaaattttttctttagcatgtcatactgtttgatagcattttacttacggtggagcttctttcaaaattgragtcaaccctctcaaaccctgccactgctttatcaactcagttatgtaatattctaaatcatttgttgtcattttatcaactttcacagcatctccactaggggtagattccactcaagaaaccactttctttactcgcctgtgagaagcaactcctaattcattcaacttttatcatgagatttcaggattaagtcacatattcaggttccacttctaattctagttctcttgctgtttctaccacatctgcagttacttcctctggtgaaatcttgaacctttcaaagtcatccatgagggatggaatcaacttccttcatactattcctgttaatgttgattttgacctcttcccatgaatcacaaatgctctgtggcatctagattgtgaatcttctccagaaggattttaacttactttattcacatctatcagaggatcaccatggcagctatagccttgcaatatgtattttttatgtaagacttgaaagttgaaattactact

SEQ ID NO: 816990 - DNA, 469 bp, Homo sapiens
taaatataattttatacaattttaaatgttgaatttcatagaccattagtgttatcaagaaaatggagccaagtttaggaccaagaatgatgactgatgactatttttaattgagtgttttggaggggacctccttggaaagatggcatgtgaataacccaagtgtttagcagccttatacagatctggtgagagtgaattccaggcagaacgaacaactaatataatgtctcactgaaggatagaagcttggccattcaaaacagtttggaagtgtggaaggagatgattggtataagaaaaccgttggagaggaagacaggagccagatcttgtgtgtgtaactgtgcggcaagtgacacacctttttccacctctgttggtgatagcaggggagtycatttcatggagaatagcaaatagcataatgctgccagcaggaacagcagtcccaggacatccaactcac

SEQ ID NO: 816991 - DNA, 585 bp, Homo sapiens
ttttatccttgtataaaatggaccaagtgtttgggataggagaaaggaaggcaatttcttgctatatataagtaattctaggctttgtgtcaccgtagcattgagaatcaatttcacatgatttctccaaagtgatacaagtggcttgtgacaaaattgtaaatacaaagcagatacatgtattcccatgccagcatttgacttgaaattctatatggaatcatggcagagggtacgaaacactttaaatcccttgcctaaattaggtgattacaagatacaagatatatggctcctaacagtgtttggtgcagttagcattcaatacagatttgtttatcaagaatatcttttcacttaggacattttgactgggaaacatagagtttaaatcaggcatataaaagcaaacaaaaaaaaatctttgaaattcccttattacttccggtcaaatacataatacacagtggcaaatcgacatgttagaaaacaatgcytttgaacatctccacttgtttttccctgtagttagcccacttccatgcagttaatcaaatgccactcataaaaatcactgccagttgc

SEQ ID NO: 816992 - DNA, 612 bp, Homo sapiens
catcacaacgtctctctccagttctacaaaaaccagctctgtgctattgttcttctcattttctaaaaaaaatacagccaaatacataagccaaagtgatgagttagaaacgataagcctaatgattctattcatgatagtaagataattaaacaatttaaaaattaatgctaaacttgcaagaaatattttggaaaaaatatgggaagataaaactcttcaagtagagattgcattattagagatgtatcccatgtgcttaaatgagattaaatattcccaagatgccaatacatgtaatgtttttctaatcagattagaaatgagacgttttgcgtgttttgttttcattaagcctttatgacattatcatacagttatctagcgtaactataaactattcaaaagtactcttaaaataaaaaatgagaaaagactttacttacttgatattatttgctcagaaatagacaagaaatacaatggtttaaaacagaaatctagaaactatttgaggaagaatttggtatatgataygagacacataaaatcactggggaaaagaatgaatgctttataaatggcactgtaatagatggctaaccagtacct

SEQ ID NO: 816993 - DNA, 602 bp, Homo sapiens
cttggagatgggtctttcccatgatgttcttatgatagtgaataagtcttgtgagatttgatcattttaaaaactggagtttccctgygtaagcgctatcttttggcctgctgccatccatgtaagatgtgacttgctcctccttgccttctgccatgattgtgaggcttctccatccacatagaactgtagatcgattaaacctctttcttttgtaaattgcccagtatcaggtatgtctttatcagcagcagagattggaactgagggcgatagcacatttttgtgcaactctataatttttattatttcctgaagacaaatatattttccgttgtcaatggaaagatggtgtgacttcattcctgtggctgaaattcctttcttttcttttggggaggaaataagatgattagaatcgtgttcttcagtgaaccactatatgcgaatttcaatgccagtgtttggagatcccccatggattcttgcaaaaaacttagaggtaatcttaactacatttagatctgagggattttgcctcccgatggcttcccaaaggccaatcagtaacctaagaggtggcaatggcataataatgtatt

SEQ ID NO: 816994 - DNA, 394 bp, Homo sapiens
agaacaaagtaaaaactacagggaaggaaacagaggaagttaatatgaaatgaagtctaaattgaaagtcttttctgtgagtttaaaaataggcatttccctgccaatgaaagagaacacatgtgartattcatttaggactatacagtctagtttgcttcctcaagtaagtgaactaacagttataatttgcacagttatcaacttaaaattttcactttcatcttccatttgaaaacttaaagaatttcaattacccatactaatcaagctgtggagtaatgtatacaaaactcatagtctaaaaaggaagtttcagtggtagatttagtttgaatgaggtatttttcccaagaaactttacttctgttttccaataaataattattaggaa

SEQ ID NO: 816995 - DNA, 622 bp, Homo sapiens
ggggtctagacaagtgactatgttgagatgtggggacatatgtgtatccaaagtgcctgggttattaactgtggggcagaaccaaagtcagtatgtcctcccagacccagctgtgccttctggccgtgctggttggatccaccaggtattgtcggtattgtctccacacctctgtccttttcctagcctttgcacctgatatattacaattaaaattgcttacttcctaggtagttttcattgaaaattagggtaactaagagttagcattggacttgtatacataattaaaactactacataaaaaaatttgatatcagagagtataagaaaattaagatatatttttggtaacaaagtttataaagaaggcatgagaatgcgctttttgttaaagaaaaagtaattttgtctggcttagaggtttttagaggttgtcttaactgaagaaagaaatgaaaatgatagataaaaactaaatgggtatggaaagttggggacagataatggaaaaaattctaagaggttataaaaggcttttgaaaatcttatcacatgtggtcaaagttgattgagattrgatcagtatgtgtataaggttttattaaatttggattcaata

SEQ ID NO: 816996 - DNA, 645 bp, Homo sapiens
tagaataagttgaaatgtgtatgatcagagtaaaagtttacacaatattttgcttagtggttktgtttaatttaaatcttaatttagtcttggtttgtcaggaaacaaagaagaatacctgccttcaggaacataaggaactatgtagctcatctttcccggtatatctgaatctagagtgatctctgtatttcattgttctttgagttattttacaaccctgtaagtggtagaaaactgatattaatgtaaattagtcctgtccaaagacatgcaaatgaatttttttccagtgacagtacattgatttccttaaaccttatgaaaagagccagttttgcatctgttaacaaatatttcagcgttgctttattccctagatatgtctttctttgacttctttgaatcggtttcttaacaccttcactgatccctcattaattaattagtgaaatatttgacatgagtttattttgtatttgtatgagactcatgattttactgtcatttaaaaatttatctggcaacatatcttcataatattcaatgaattattgcctcttgagagcatctaagttgagtacaatggtaatgggggtcagtatatgttccatagtgacttagtgtcaacttgctatggacaaa

SEQ ID NO: 816997 - DNA, 502 bp, Homo sapiens
aactttctctaaatactccaggagatcaaatttcttgactccatattctccagctccctccctgytggagtcctccaccttcctcctccaatctggactggttgcctactgggatttcccttcattaacctactggcttcaatctcaagtcacatctttgttggtttactcactttttttttttaaatggagtctctctctgtcacccaggctggagtgcagtggctcgatctcagctcactgtaacctctgcctcctgggttcaagcgattctcctgcctcagcctccctagtagctgggattacaggcatgcgccaccacacccggctaattttggtatttttagtagagacggggtttcaccatgttggccaggctggtctcaaactcctgacctcaagtgatctgcccgactctacctcccaaagtgctaggattacaggcctgagccacagtatccggcctagaccatgactaattcttaagagaaataagccaatg

SEQ ID NO: 816998 - DNA, 645 bp, Homo sapiens
tagaatgtgtaagtataaatagatagatttattataaggaatttggctcatgtgattatggaggtgggccaatggttttgtttcagtctgagtccaatggcctgagaaccaggagcactgatgttgtcattcctgtctgagctggcgggctcaagacctaggaatggctgatgtttcactttaagtccaaatacatggaaaacctgatatctcagctgaaaggcagccaggcaggaaagaattctctctgactgggggagaatcagcctttgtgtttgaggcccacccacattagggaagacagtctgctttactcagtctactgatttgaatgctaatctcatccagaaacacccttatagaaatactcaaaataatatttgaccaaatatctgggctccccatggcccagtcaggagaatacataacattaaacatcacaatggcatatttatccattctcctgttgatgggcatttgcttatttccagggttttgctgctataacattccagtacytgaatcctagaaaatatctaggatcacaattgctttagcagaaggtatgtgaacattaaacttaataagctaatggcagtatttcagcattttctactttgattacttttatattggccatcattt

SEQ ID NO: 816999 - DNA, 646 bp, Homo sapiens
ctgtcagggatcccagggaagacacttctgattgggatcagttcaaccagatcacctccaagattcygtgtaagaggtgaatttgacgtttagaaatgagccgtaaagaaccagggcggccagctttccatgctgaatgctgggggaggggaggaagagggttgatttgtatgtgtgtctgcaggatgagtctttttctgagttgccaagtgagaatgctggaaacatattcctattttgttctgtatttgtacaaacaaatgtgtttccactgaaacttatgtaaatatgtgcttactaatgaatgcagtcaccccaagcactgactaaccaaactgacttcctttttcagctcaaatatctaagcccagttgttttaaacgttaatcaactaaaagaaaaaaactgaagtccacatttgtctcaattcttaactatagaaactaatgataacaaagtcatgtaccttccaggtaagcagggcgagagatgtggtgggaaaggtaacagtgcatcatgagagcactgtacgacagagcccactgtttaatggaaaacacccagtggcactctcccatagtgtacacacgcaccttgacacttgttcctctaagaatcacaagaatacgcatagggctaggtcatt

SEQ ID NO: 817000 - DNA, 628 bp, Homo sapiens
cagagatgcagcatccaaatacgtagagcaattttaggagctactggatatcttctgaaagttgacctctgtccctttgtggaaaatattatcagaatgagtatattaaccacaaaagaaaatctgtttagtacttcatacttctttcatttcttttgccccaaaatgttattgcccaggttgttcacctacttttatcactaggttcagctcaaaatgattttattttataccacaaatttcagcaccattcacaggctggccatggcttagcatttgacagaacctactttagggtctatagtttctccacaaaggaagttttgagccatggaagcaaagctgggctgagcataaaacttcctaaagtgattttggtttcaaaaatcgaattcattctcttagaatcacacataacattctcagcctggggcctcctattttccctacatggtgctttcagtgaccacacctctgggacaaaccatctgctcttcctttccatgtgtggctcttggcatgagtcattgcaaaccttgaaatcagtttgwttttttttctttagcagattggattttttttaaaggtatatatttaaggtatacaatatgatgtttggatatacaca

SEQ ID NO: 817001 - DNA, 633 bp, Homo sapiens
ctattccattcaaagttgattccattcgagtccattcgataattccattctattcctttctccgatgattccattcgagtccattcgatgattccattcaattccagtcgatgatgattccattcgattccattcaatgatgattccatttgtgtccattcaatgattattccattggattccatttactgcttccattagattccattcgatgatgattgcattcgtgtccatacgatgattccatttgagtccattcgacgattccatttgattccattagatgatgactgcatttggttccattcgatgatgattccaacggattgcatttggtgactccattcgattccattcattgatgattccactcgattccattagatgatgattccattcgattccattcaatgatgattccatttgagtccattcggtgattcaattcaattccattcgaagatttctttcgattccactcaatgttggttccatatgagtatattygatgattactttcaagtgcattccatgattcctttcaattgcatctggtgatgtttccattcgagtccattcgatgattccatttgatttcattcgatgatgattccatttgattcctttcgatga

SEQ ID NO: 817002 - DNA, 633 bp, Homo sapiens
ctattccattcaaagttgattccattcgagtccattcgataattccattctattcctttctccgatgattccattcgagtccattcgatgattccattcaattccagtcgatgatgattccattcgattccattcaatgatgattccatttgtgtccattcaatgattattccattggattccatttactgcttccattagattccattcgatgatgattgcattcgtgtccatacgatgattccatttgagtccattcgacgattccatttgattccattagatgatgactgcatttggttccattcgatgatgattccaacggattgcatttggtgactccattcgattccattcattgatgattccactcgattccattagatgatgattccattcgattccattcaatgatgattccatttgagtccattcggtgattcaattcaattccattcgaagatttctttcgattccactcaatgttggttccatatgagtatattcgatgattmctttcaagtgcattccatgattcctttcaattgcatctggtgatgtttccattcgagtccattcgatgattccatttgatttcattcgatgatgattccatttgattcctttcgatga

SEQ ID NO: 817003 - DNA, 590 bp, Homo sapiens
tgtgacaggcgattctcactgcaggctgccctgtggcygatccaggagcaaggccttaaccatgtcatccccaagcgattgcttgtaaactttcttctgtgcagccttcaacccttattatgattttcttctcaggaaccaaactgctgtattcaagaaaggcagctttgtgtaatcatttatcataaatatcttaagaaaaatcctagagattcctaattttaggaaatgggagacctatggtactgatataatgtgggctgggcttgttttctgtcatttgctagataaatgaacttgagagcctactgtaaaatgtggaagcttctagattgcagaagggctggaaagacactgttcttttctcccgagtgatgggatctgtccagtatttagagctgcctctgaggccatctgattctaggagactctgcctcgttgaggatattttgaggcctaactacacattcctgcccccagagaggtcacagcctatagcaggctgatgtttctcatgtcacatggcacagaaaggcacattttcgttctcaggctaacaaagagcttcaaaaactattagaagggacagt

SEQ ID NO: 817004 - DNA, 590 bp, Homo sapiens
tgtgacaggcgattctcactgcaggctgccctgtggctratccaggagcaaggccttaaccatgtcatccccaagcgattgcttgtaaactttcttctgtgcagccttcaacccttattatgattttcttctcaggaaccaaactgctgtattcaagaaaggcagctttgtgtaatcatttatcataaatatcttaagaaaaatcctagagattcctaattttaggaaatgggagacctatggtactgatataatgtgggctgggcttgttttctgtcatttgctagataaatgaacttgagagcctactgtaaaatgtggaagcttctagattgcagaagggctggaaagacactgttcttttctcccgagtgatgggatctgtccagtatttagagctgcctctgaggccatctgattctaggagactctgcctcgttgaggatattttgaggcctaactacacattcctgcccccagagaggtcacagcctatagcaggctgatgtttctcatgtcacatggcacagaaaggcacattttcgttctcaggctaacaaagagcttcaaaaactattagaagggacagt

SEQ ID NO: 817005 - DNA, 535 bp, Homo sapiens
atatacatgagtgtataaatatgtgtgtatatacacatatgtgtatacattcatatacatatacacaaacaaatcaacaacaaaaaatatatatgcacatgtgtgcatatatatayattttttatatatatatatacacacacatacctagtaatacatatatatttgtgggttttgagagatgagattaaggaaaatcatctttttttttttttttttttttttttttgagacagagtctcgctgtcgcccaggctggagtgcagtggcgcaatctcggctcactgcagtctccgccccctggggttcacgccattctcctgcctcagcctcccaagtagctgggactacaggcgcctgccacctcgcccggctaattttttgtatttttagtagagacggggtttcaccgtgttagccaggatggtctcgatctcctgacctcgtgatccgcccgcctcggcctcccaaagtgctgggattacaggcgtgagccaccgcgcccggccggaaaatcatctttaaacagaaatca

SEQ ID NO: 817006 - DNA, 535 bp, Homo sapiens
atatacatgagtgtataaatatgtgtgtatatacacatatgtgtatacattcatatacatatacacaaacaaatcaacaacaaaaaatatatatgcacatgtgtgcatatatatacattttwtatatatatatatacacacacatacctagtaatacatatatatttgtgggttttgagagatgagattaaggaaaatcatctttttttttttttttttttttttttttgagacagagtctcgctgtcgcccaggctggagtgcagtggcgcaatctcggctcactgcagtctccgccccctggggttcacgccattctcctgcctcagcctcccaagtagctgggactacaggcgcctgccacctcgcccggctaattttttgtatttttagtagagacggggtttcaccgtgttagccaggatggtctcgatctcctgacctcgtgatccgcccgcctcggcctcccaaagtgctgggattacaggcgtgagccaccgcgcccggccggaaaatcatctttaaacagaaatca

SEQ ID NO: 817007 - DNA, 620 bp, Homo sapiens
attcctttcaagaacacagttttaaaattgcactgtatgttctaagaaataactgtggtccttgaaagtgtacacctccaaattttggttaatggcgaggagtaacttggagagctgctgcttcttcagtctgatgacacattctattacaaagataagtgacttccttcttaagtcgtgatttttcctgtaaggcaatttcttctgttagctatttctgtgagtgacacttttttttttttttttgaggcggagtctcactctatcgctcaggctggagtggtgtggtgcgatctcggctcactgcaagctccgcctcccgcgttcacaccattctcctgcctcagcctcccgagtagctgggactacaggcgcccgccaccatgcccagctacttttttgtatttttagtagagacggggtttcaccgtgttagccaggatggtctcgatctcctgacctcgtgatccgcccgcctcagcctcccaaagtgctgggattacaggcgtgagccaccgcgcccggcstgagtgacacttttaaaaacttgactattccgatgatccaattagacagagtaacacttcgggtgctgctaaagtctgcagtaatttcttgtt

SEQ ID NO: 817008 - DNA, 620 bp, Homo sapiens
attcctttcaagaacacagttttaaaattgcactgtatgttctaagaaataactgtggtccttgaaagtgtacacctccaaattttggttaatggcgaggagtaacttggagagctgctgcttcttcagtctgatgacacattctattacaaagataagtgacttccttcttaagtcgtgatttttcctgtaaggcaatttcttctgttagctatttctgtgagtgacacttttttttttttttttgaggcggagtctcactctatcgctcaggctggagtggtgtggtgcgatctcggctcactgcaagctccgcctcccgcgttcacaccattctcctgcctcagcctcccgagtagctgggactacaggcgcccgccaccatgcccagctacttttttgtatttttagtagagacggggtttcaccgtgttagccaggatggtctcgatctcctgacctcgtgatccgcccgcctcagcctcccaaagtgctgggattacaggcgtgagccaccgcgcccggcgtgagtgacamttttaaaaacttgactattccgatgatccaattagacagagtaacacttcgggtgctgctaaagtctgcagtaatttcttgtt

SEQ ID NO: 817009 - DNA, 647 bp, Homo sapiens
tgtcctacttagtgaaatatattttgctaatttctcattggattgatttttaactgttgagtgttaagtgttctatatacattatagatacaagtcattgtttagatacgtggtttataaatattttctcccaggtttttattcttttcacataggctttcacagagcaaaagttttggtgaagtcctattatcaattttttcttcccctttctagatcatgatttctgtgccaagtctaagaagtttttgcctagccatatatcgtggaagattttcatttgtctttttaaaaaggttttctaatttatgttttgcatttgtgtgtgtgatgcactttgagttagtcttttgtgtaggctgtgatgtttaggacaatgttcgttttttggcttatgaatgccaaattgttccagcgtcacttgttaaaaagacgatccttcctccattaaattgctttatcatctctgttgaaatgaattcctttattagtcagttgggcttatttgtgtgggtttayttttgggttctttatcctgttccatctatctgtgtatctattatttgctaataaacattgtcttgattattgtagctacataatatcccttattgtgtatctaataaaatatgcatacaattgaccct

SEQ ID NO: 817010 - DNA, 500 bp, Homo sapiens
accacaaaactgaaagtttattctgacttaagggaagtcaaatgagaatccgaaagttttgtggtgcatatagattcacagcaatgggaattagttagaggtcttatatgtaagttcactcagtgaatgtgtatggcccccaagcacaggcctggaaggaacttcactgacatgttttcttaaatgaccttcaacttgcatctctgattatgtcttcttgtaatccacgctggactcttttcttctaagtgacacattacttcttcaggtagatcaatatcatcaattaaaatgcaattttgtcttgtttttgcacggtctgtttttttaagtctaactttgcatacttacccacttacctacactttaactaaagtgtgtttattaaactttccaaactctgggatgccttgctttcatgcctacttataattactttatgtgtgctaaaaartcacaaatagcactttttgccctatgttcttttcttctttgtactc

SEQ ID NO: 817011 - DNA, 611 bp, Homo sapiens
taattccaaaacatttggagaataaacaacatccttttaaatagcacttagttcaaagaagccatcttaagagaaattaaaaaagtattttgaactaaataagratgaaaacaatttattaaaacttgtggaatgtagagaaaacagtacttagagatacatttataatattaaatgcttatataagaaaaggagaaagatctaaaatcaataatctaatattctaccttaggaaactagaaaaagaggagcaaattaaatccaaaatgagaagaaaagaagtataaaaattagagcataaataaattaaagcaaaaacaggaaaccagtagagaaaatcaataaaaccaacagtggtttttgaaaaatcaagaacaacaaaaaaccctgataagcctctctcaagccaaactaagaaaacagagaatgttaaatgataaacgttaaaatgataataagagaatactatgaaaaacagcatctccacaaattttgtaacatagatgaaatggaccaattccttgaaagataatcttccaaaactcacacaagaagaaataagcaatctgaataggtctgtatctattaaagaaattaaattattaattaat

SEQ ID NO: 817012 - DNA, 570 bp, Homo sapiens
agggcagaggtatttagtgaaagatgtttgcttatcgtatgtcacattttgaaaggtatttatcaaaatctggattctctagattcttagtaactttactggttcgatttggtttctgagccactatgatacgcttctgtcattgctttacaataacactaagaacagaaatagactaggaaactgcacaacttataccactattcccaccatctagcgttgtacatggtatgtaatagatgctccataaatactgattaaataaatgaaaggagaattttaagtgaactttagtaggtgagtggagtttggctacctgcaataagagtgcctagggagcagcaagatccaaggtagattagaggaagaataattttgatgctatgggcagagtgaatgttgggaagagcagttaatgagctttatcaaaggctggccttctccaacrttctttagttcaagtgctttacgttcagattcttaaattctccttctaattaaaaagtcctcattactcctatcttactaattctgaacactgaccccactaccatcatcagcctaatgtgc

SEQ ID NO: 817013 - DNA, 529 bp, Homo sapiens
gaagtaagtgaatgaataaacaaattgtggtacatctggaaaatgaaatacattattatttagcacaaaaaaggaacgagttatcaagccatgaaaagacakggcagaaacctgaatgtatattactaagcgaaagaagcccatctgcaaaggctacatactatgtaattctgattatacaagttctagaaaaggtaaaactatggagacagtaaaaagatccactattgccagggggttgtgggaagggagaaatgatagggagtgcacagggaattttagagcattgaaactattcagtatgatactataatggtgaatacttgtcattatgcattttccaaaaccagctgggcacagtggctcatgcttgtaatcctagcactttgggaggccgaggcgggtggatcacttgaggtcaggagtttgagaccagcctggccaacatggtgaaaccccgtctctactaaaaatacaaaaattagccggacgtggtagtgtgcgcctgtagtcccagctgctccggagg

SEQ ID NO: 817014 - DNA, 699 bp, Homo sapiens
gcctgaaggtgaggcttcaccagggatccacccctttctgcccaggagcctgtctgcctcctgctgccatctacatgtcatccagggcacccagactgttcatgtctacgggtgcctgcaggcccaccctgagctgccttcggcatctccagcagcctccctcccatgctagtcagcacccaaagtctggagggggctgaggcagcagggggctggcatatcagtgctgccctgagtgtgcgcgcaaccggccaggtcgccaaagcgcctgagctcatcctcaactttgatctgaaatcagagcaggtgctgggagcagaggaacccaggtaatggaagcagggaacctgcgggatacgggtggcttcccaggaccccaagggtgcagaggtgcccaggtttgtagccttggctatgcaactgcagctgcaccagggagtgaggggctcccattccaccaactaggtaggaggcggggctcctgccagctcccagcccccagtagcccaggtatgccagggtctggaaccacagctgggcagctatagctgtgcggggaaacacsgggctccggcccagaggacctggaagtgggagaggcccccactggctccgcggagcacgcagcccctctgtaccgcccccatattagccgacatcttctcagtggccatcccggacgggctgccgctgccatga

SEQ ID NO: 817015 - DNA, 460 bp, Homo sapiens
tgatttggtctcagtgtggatgtcattggtttataggaatactactgatttttgtttattggttttgtattctgaaactttgctgaaggtttttttttttcagatcaaagcacttttgggtagagaatataggtttgtctacatatagaattgtgtcatctgcaaacagggatagtctgacttcctctcttcctatttgatgccttttatttatttctcttgcctgattgatctggccaggacttccagtactatgttgaacaggagtggtgataaaggacattcttattttgttctggttttcaaggggaatgcttctagtctttgcccattcagtatgatgttagctgtgagttttttcatagrtggctcttattattttgaagtatgatccttacgtgcctagctattgacggtttttactacagaaagatgttgaatgttatagcaagacttttcc

SEQ ID NO: 817016 - DNA, 466 bp, Homo sapiens
gtctgagttaagacaaaggattgtcagaccaacattcttattatgcagatgaagtctcataygtggccacccatagagacaacaggtgacaaatgtttcatatttagacatttaaaaggtgctagactctcatttaatctcttcaagatcaggaaaagaccaggaaagggaaggggattctctacagaatgtgaattttccccacagcagagacagctttgcagggccctttcaaaataatgtcaaataaatacattttggggtcaaatatttttatttccttccaggcctgctgtctgtcatgtgatgctatactagagtcaggttggaatttggtgtcttattactaccaagagtctattttgtcttaagatctctattttaatgttgatgctggtcatatgtgcctaaactctaaaagggagagggtataatgagacatgcctgaccccctcttcccataatg

SEQ ID NO: 817017 - DNA, 520 bp, Homo sapiens
tgtgattcagaatgaaattaataatttggcatttttaactggagacagcaaaagcaagatgtcaaaagtaagtccttagaaatcaattccaaaaactcttcaaccctaacctcagccatgacttggatctgtttcatactttctggggattaacaccgtactgcatttaggtcaaactacatgaccaacagtctctgctgctgtttctttgagaacgagccagaagaaactgctctcaaataagcatggtcatcacattttatgaataaatagctgcttgtatgtcaaaaagcttaagtttcaagacttgcctaaggcatttgagaggtctccaaaacaaaagctgctgttagtgattttaaaatagaacttcttcctgtgtagtgaggatacagcaatacacatgcctagaaccaccttttgatagctaggaaaaaattaccttgctttgtagattttgacagcacgtactcttacatcatgcttgttttcctcytatctgtaatatccaatacctgtt

SEQ ID NO: 817018 - DNA, 597 bp, Homo sapiens
catgggtgtgggatccgctgagcaagtctacttggcttcctggcttcagcctcctttccaggggtgtgaacagttctgtctcgctggtattccaggtgccactggggtaggaaaaaaaacttctgcagctagctcagtgtctgcccgaacggccacccagttttgtgcttgaaacccagggccctggtggggtaggcacctgagggaatctcctggtctgcaggttgtgaagaccatgggaagagcacagtatctgggccagaatgcaccgtttctcacagcacagtccctcatgacttcccttggctaggggagggagttccccaacccctgcacttcctgggtgaggcaacaccccaccctgctttggctcgccctccttgggctgcacccactgtctaaccagccccaatgagatgaactgggtacctcagttggaaatgcagacaccactctccttctgcgttggtctcgctgggagctacagaccagagctgttcctattcggccatcttaatctctgtyccgatgttgatttaattatatacatctttcccaagccccacgggtactcccacacagtatacctcaattggt

SEQ ID NO: 817019 - DNA, 657 bp, Homo sapiens
agatgatgttcatttctgaatccctcacccccacccccttgatctgagagctctcagagagcaggaaccatgtcttttatctctttgttgaagcatgtcctcctgmcatgaagaaggagccaataattgcaagaagagaagaggggggaggaagagaaaggggaaaagaggatgaggcaggagaagatggaggaaattaaataaagaaggacagaaaaatcttctaaaaggaaaagtagaaccaccccagattatcatttttttatgacaacaaagtactacattatgaaaaattatgtgctaatgtaaagagtgatagaagagagcagagacaaccagcaaaagacctctatgaagcatgtgctgttttctctgtgctccagtaatttaacacagcagcccagagccactaggggcaaacaaaccatacggggacaagactgagtagttgctggatataaaatacagggtaaagtgggagcttggtcagagatgaaaagcatgggaaccgagttataatacttagatctggcattcaaggacttgcttaaggaggactggggccagaatcctaactggggccaagtgaatggcaccggtcgacaggcttaaagaagggcaggagcaacaagacaaggtcattatatttactcttac

SEQ ID NO: 817020 - DNA, 599 bp, Homo sapiens
tgctcttcattctatagttcttttagttatgatgtyaggatgtcgatttgagatctttctagttttttgatgtgggcatttagtgctataaatttccctcttaacactgctttagctgcattccagatattctgatacattgtctctttgttctcattagtttcaaagaacttcttgacttctgccttaattttattatttcccaggagttattcaggagcaggttgctcaatttccatgtggttgtgcggttttgagtgagtttcttaattttgagttctaatttgattgtgctgtaatctgagagactgtttgttattatttcagttcttctgcattttctgaggagtgttttacttcaattatatgatcaatttcagactaagtgccatgtgacaccaagaagaatgtatattatgttgtttttctgtggaaagttctgtagatatctatcaggtccacttggtccagagctgagttcatgtcctgtatatctttgttaattttctgtctcaatgatctgtctaatattgacagtggggtgttaaagtctcctactattattgtgtgggagtctaagtttctttgtaagtctctaa

SEQ ID NO: 817021 - DNA, 653 bp, Homo sapiens
gaatccttcaccagcaaccaaggtatccagattctcttatcaaaattgactaggaggctggcatgacccacaaagaggaggaagaacaatgtggtgcggtggaccacytgagagccacacagcgcgggggagcccactcgcccagcaaagggaggcagtgagtgagcatgctacccagccagggaaactgtgctttttccacaaaactgtgcaacccatggatcggaagatcccactcatgaaaccatacccctgggcctagcatcccaaccccagaacatgtagactcttaacaccctctcagctggaatccgcttaagtctaccaaactcccaggggaaggggcaaccaccaccgcagctgctgctacctgctgtctaagccatttgaggtccttggggaaggggcaaccaccaccgcagctgctgctacctgctgtctaagccatttgaggtccttggggaaggggcagtagccagcactgggacttgcaactgcctaacacactaagctccctggcaggggaagaggagcacccatctctatagcccaggctgtgctttttccctgctggagccagggagggtggacagcttggtcccaagacttctccccaacaacccaatacactggctgtggcagtctgtggccgg

SEQ ID NO: 817022 - DNA, 622 bp, Homo sapiens
caaccccagaacatgtagactcttaacaccctctcagctggaatccgcttaagyctaccaaactcccaggggaaggggcaaccaccaccgcagctgctgctacctgctgtctaagccatttgaggtccttggggaaggggcaaccaccaccgcagctgctgctacctgctgtctaagccatttgaggtccttggggaaggggcagtagccagcactgggacttgcaactgcctaacacactaagctccctggcaggggaagaggagcacccatctctatagcccaggctgtgctttttccctgctggagccagggagggtggacagcttggtcccaagacttctccccaacaacccaatacactggctgtggcagtctgtggccgggtgcctcttcaggcctgaccctgacccatccttcctcactgggtggggcttccctgcaggaactccaataactccagccagaggctcagggacagaaccggatctccctggtactgagcccctatgggggaagggtggccacaacctctgcagaccagcagacttagcctttcctcctggcagttctgaggaatccgagcagcccagacgagtgggtttcccttcagtgaggcaca

SEQ ID NO: 817023 - DNA, 511 bp, Homo sapiens
ccagaggtacggacagctcatcastcctccctgctgtgatggagctgactgcctcctgccagagggcgatgtattcctccggtggttctcacaaggaaagtgcagaagaactgaaagactgcccacttgtgtcaaggaaagtgagtgatggtgcagcctgctgcagttgggagctgtcgcgctgcagtcttatatcttagctgcacagtccattactctactattccccactggaaacctgctgtttcctaatacatgcaaggttttcagctggcaaagctccaagcacatcaggtctttctctactaattatccttccattataagtggacactcaaaacataatcaggaaaaaataagttttcctaaaaagaagacagaatgtgttttctttacaggaatctaaccttttttgtatcttagaatgaacgattttagacgaaactatttgtcaaaactgccttaacacaggagcatgatacacacttcctttaaaattttttctcctaac

SEQ ID NO: 817024 - DNA, 511 bp, Homo sapiens
ccagaggtacggacagctcatcactcctccctgctgtgatggagctgactgcctcctgccagagggcgatgtattcctccggtggttctcacaaggaaagtgcagaagaactgaaagactgyccacttgtgtcaaggaaagtgagtgatggtgcagcctgctgcagttgggagctgtcgcgctgcagtcttatatcttagctgcacagtccattactctactattccccactggaaacctgctgtttcctaatacatgcaaggttttcagctggcaaagctccaagcacatcaggtctttctctactaattatccttccattataagtggacactcaaaacataatcaggaaaaaataagttttcctaaaaagaagacagaatgtgttttctttacaggaatctaaccttttttgtatcttagaatgaacgattttagacgaaactatttgtcaaaactgccttaacacaggagcatgatacacacttcctttaaaattttttctcctaac

SEQ ID NO: 817025 - DNA, 569 bp, Homo sapiens
aaaattcagcagtgaagccattggatcctggacttttctctgctgggagatttttcattacatcttgtatctcattacatatcattggtctgttcatattttgggtttcttcatggttcaatcttgggaggttgtatctgtctaggaatttatccatttcttctaggtgttcaaatttattggcatatagcagcctctaatgatcctttgaatttctgtagtatcagttgtaatgtctcctatttcgtctctgattttatttgttatctcttttttctcaattaatctggctaaagatttgtcagttttgtttatcctttcaaaaacgaacttcttctttcattgatcttttgtattgtttcttcgtttcaatttcattggtttctgctctgacctttattatttctttacatctactaactttgagtttggtttggtcttgcttttctagttctttaagatgcatcattaagttgtttatttgaaatttttctatttttttcttttgatgttggttttgatggttaatacygagtgtcaacttgattggattgaaagattcaaagtat

SEQ ID NO: 817026 - DNA, 591 bp, Homo sapiens
agcaaggttgcagaatacaaagttaatatgcagaagtcaattccttttctataaaccagcaattaacaattggaattggaaatataaaacacagtatcatttacattagctgctcyccaaaactgaaatatacaggtataaatataacaaaatatatacaggatctatatgagaaactctaccaaactttgacaaaggaaagcaaatatctaaacaaatggagagatatttcatgttcatgtatagaaacactcaatatttttaagacctcaattcttcccaatatggtttataaagccaatgtaattccaacaaaaataccagcaaattgtttcatgggtatcaacaaattcattctgaagtctatatgaaaacgcagaaaacccaaaataatcaacaaaatactaaagaagaacaaagttggaagacagataatacaagatttcaagacttactataaagctacaataatcaagaccacaaggtactgttgaaagaatagacaaatagatcaatggaacagaatacagtatccatataaatatatccacacaaatgtagtcaactgatctttagtaaagaagcaaagaa

SEQ ID NO: 817027 - DNA, 649 bp, Homo sapiens
cgtgccatcaggctgcccttggagatttgacctggggctcaactgtggacatagggaaagggtgaatagggaataaagaggcaccagaagcctgtatgcctatttcacrgaaagggcaagacttggaaatttggagaatttcattaagatagagacattctttcacagcaagcctcatgttttgcatgtggacatgatgggtaaagaggtggagttcttcacccagggttcaaggccggccagctcatggctaatgtagcaggactttcagcaagaccctgatgctgtcggagtacacggggctctctgctcaccccctgattctgtgtaatgatctcagcttcttcctgccctcactctctgcccaccaagctgtccaacagaaggaggcttttatagacagatgataactagaggagaatctggagatttcacgtgggcttcctggccagccatgtctcccatacaaaccagcaggaccccagaaccagggtccccaccaagtcctgaaactcttcagtgggtatttttaagaggaatcccagttcagctctgaagtcagtgaaaccattctgaaggctctgcttgctacagaatgtttactgagaaaagacactgtgcccaacttttctggacagctgtcctttaa

SEQ ID NO: 817028 - DNA, 466 bp, Homo sapiens
ctcccatgccacataaaacatttattatgcttttctcctgttgatctttcttatgttagtttatttctcagacacagctggagcctgtgaggataaaggatggaagtaraagttttccttccttacagtttctggcaatgaggatgggaccctaagaggctggacaccccactcactccagcctatggatgagatgctgagaggcctgacaaaagcctgcaaaaggtggggggattctttccaaagccagctttcccaaatatctatggatagtgcctagctaagagaagaaggtaaaaattttttcttgtcccttcttttctaaatttgaattggcaggagaaaaacatttgtaaggttgttctctgaattgtgactcttgtgaatttggttctaggttctaacagaaatcgctctttttttttgttttttaatctctgtcttctgtgtgatttaccacaaggat

SEQ ID NO: 817029 - DNA, 466 bp, Homo sapiens
ctcccatgccacataaaacatttattatgcttttctcctgttgatctttcttatgttagtttatttctcagacacagctggagcctgtgaggataaaggatggaagtagaagttttccttccttacagtttctggcaatgaggatgggaccctaagaggctggacaccccactcactccagcctatggatgagatgctgagaggcctgacaaaagcctgcaaaaggtggggggattctttccaaagccagctttcccaaatatctatggatagtgcctagctaagagaagaaggtaaaaattttttcttgtcccttcttttctaaatttgaattggcaggaraaaaacatttgtaaggttgttctctgaattgtgactcttgtgaatttggttctaggttctaacagaaatcgctctttttttttgttttttaatctctgtcttctgtgtgatttaccacaaggat

SEQ ID NO: 817030 - DNA, 667 bp, Homo sapiens
atgaaaaaatgggttacatagttatttccttggtgggttagcatctttaaaactcatcaggattttagagccaaaaataaaattatttaaaaggattgaaacctactattcatgtttttrttagtaaatttgcatgtatttaatattttttgagtttgtattatttaagataatttgtctatttgaacaccagatctactttgtaattataatttaagatttgtaattgaaaaattaacttggacttttaaaaattaacttcattcgggttaaatttaatagtcaataaaaattacccagttaatcaagatagtaagcttactattttaggttgaaatcttacttcattgatcacagtattgaaacatttaaaaggatttaagatttgctttagttataattttctttttagattaaaaagattattttaaaagcctgatgaggctttattaagtcagcaaattgagatgcttaaaaatgaaatacatagatcatatttaaacatatttaaagagaattaaatgccaagtttatgaatcaaaccaaatatttgtgtaacacctttaaaaatgaataaaatatattaggtttattaatagaatactaaggtttttaagcgggaattgaaagaattaaagacctacttttttaatgtttacctcaaata

SEQ ID NO: 817031 - DNA, 667 bp, Homo sapiens
atgaaaaaatgggttacatagttatttccttggtgggttagcatctttaaaactcatcaggattttagagccaaaaataaaattatttaaaaggattgaaacctactattcatgtttttattagtaaatttgcatgtatttaatattttttgagtttgtattatttaagataatttgtctatttgaacaccagatctactttgtaattataatttaagatttgtaattgaaaaattaacttggacttttaaaaattaacttcattcgggttaaatttaatagtcaataaaaattacccagttaatcaagatagtaagcttactattttaggttgaaatcttacttcattgatcacagtattgaaacatttaaaaggatttaagatttgctttagttataattttctttttagattaaaaagattattttaaaagcctgatgaggctttattaagtcagcaaattgagatgcttaaaaatgaaatacatagatcatatttaaacatatttaaagagaattaaatgccaagtttatgaatcaraccaaatatttgtgtaacacctttaaaaatgaataaaatatattaggtttattaatagaatactaaggtttttaagcgggaattgaaagaattaaagacctacttttttaatgtttacctcaaata

SEQ ID NO: 817032 - DNA, 615 bp, Homo sapiens
actgattgtcaacatttgtggttcagaaaatctgaaagtgaagcctggccatctgcatttctaaaaatctcccagaaaattcagatgatgggtaagattcaggaacagctgggctggatgatcaytaagatcatttctagtcctgaggctatttaatactcatttttaacaattccctaacatgtattatctcatttatcattaacaattctatttaataaatatgaacttctttttacatgagaaacatggtacacagagctgcaataactagtccaagtacacagagataattattatgaatctaaggcagaaattcattatgtctggttccagatccatgtctttattgaccatgatctcatacctagttcacaggctttcatcctaatcactaaacttaataaaatttctaaaggaaatacggtattcaataagtaaatgtaattacaaattatcgtacattaagtggtgaaagaatttattccttgagtcatcaagatttatttattttttaaaaatttgagtaggaactctatgtcaggcaccctgttaggtgcagagcattcacttagtggctatcatatgaatggtcttggctttggaggtctcgga

SEQ ID NO: 817033 - DNA, 582 bp, Homo sapiens
ctaatttgcatatgcagtaggagttacaagccatgggctggatatggagataaatcaggaaaatttcatagaacacataatttattattattattattattggagacagcatctcactctatcacccagcctggagtgcagtggcaggatctctgctcactgtagccttgacctcctgggctcaagcaatcctcccacctccaccccacaagtagctgggactacaaacgtgcaccaccacgcctggctaatttttgtgtttttggtagagatggggtttagccatattgcccaggctggtcttgaactcctgggctcaagtgatccacctgctttggcctctaaaagtgctgggattacaggcataagtcaccatgctttgccagaagatataatttttatttgaagtgaagaaactgtcagaattttttagatggaaaaatgaaataaaaagtatttgaagcaaatggaactgcctgtgcaaaggcagagagttatgaaagwcaccgagtcttctccttctgccctccggtcttcttatcacttcttccctctccaggatcctgaaattcatccaaacta

SEQ ID NO: 817034 - DNA, 603 bp, Homo sapiens
aaaggaacaaaataatgttatttgcagcaagttggatggagcttgagaccattattctagtaacttgggaatggaaaactaaatatcatatgttctcacttgtaagtgggaactaagctatgtggatgcaaaggcataagaatgacacaatggactttggggactcaggggggaaaaggtgaggaggatgagaaataaaagcctacatattgggtatggtgcacactgctcaggtgacaggtgcaccaaaatctcagaaatcaccagtaaagaaattatcaatgtaacagaaaaccacctgtactccaaatactattgatttttttttatctcatgttgaactgtaatgagtttggatgttgtcctctctaaatctcatgttggatgtgaggcctgggagaggtgtttgagtcatgttcggtcatgggggtgaattcctcatggcttggtgcgattctccatagtgtgtttttgtgagatcttgttgcttaaaagtgtgtggcatctcctccccytcttgctctcgctctaccacgtgacatgttggctcctcttttgcctcctgtcatgattgaaatcttcctgaaggctcaccagaagctg

SEQ ID NO: 817035 - DNA, 603 bp, Homo sapiens
aaaggaacaaaataatgttatttgcagcaagttggatggagcttgagaccattattctagtaacttgggaatggaaaactaaatatcatatgttctcacttgtaagtgggaactaagctatgtggatgcaaaggcataagaatgacacaatggactttggggactcaggggggaaaaggtgaggaggatgagaaataaaagcctacatattgggtatggtgcacactgctcaggtgacaggtgcaccaaaatctcagaaatcaccagtaaagaaattatcaatgtaacagaaaaccacctgtactccaaatactattgatttttttttatctcatgttgaactgtaatgagtttggatgttgtcctctctaaatctcatgttggatgtgaggcctgggagaggtgtttgagtcatgttcggtcatgggggtgaattcctcatggcttggtgcgattctccatagtgtgtttttgtgagatcttgttgcttaaaagtgtgtggcatctcctccccctcttgctctcgctctaccacgtgacatgttggctcctcttttgcctcctgtcatgattgaaakcttcctgaaggctcaccagaagctg

SEQ ID NO: 817036 - DNA, 651 bp, Homo sapiens
aaatgatgcccttctgtgtggttcaggcaaagcctcctaatcaggcctggggaagggactcctagctggactgtattttagagctatttctttgacatcctgatctacattcccatgttcccaattagmattaattgagcgagaaagaggagaaaactggagcctccccaaagctccctgctccacaactcatggagggggtggtctctgaagagaaaatgttgataattacagaagttgtggctgtgaatcattgagctggcaccagctccctcctgggaactgttcccttgcttctcccccagcttccccagctcaattaagcagcttgttttccttctccttagcaaaacttgttagcactttgttctattcccctgagttgcttaggagaaaagttttgtgggaggatttgcctcattggataagtctagctctcatgttctttatgagatactgaggtacccatgtcctccaaataggccatgtataacagtggtagttcagcaatgggtccaaggctccactgtttggctaaagggaagaggaagcaaaaaatctagactgggtaaggatagggaagttcaatgcaactgcctcagatcaaactgataaggaaatgtttaagacctgttttgtacacattgctca

SEQ ID NO: 817037 - DNA, 404 bp, Homo sapiens
catttttttcaaagttaattacttttatcatgtcatcttcttctggaaatatgtatcaagttctcaaataggaagacgtgctttctgagttttgtctaacttttcttcttacgatttgggagcctattttggttgtctaacttgtaggttttttttaattcaaaaatgtcaacaggccacattgtatttccaatgattttgtataatataaaacagtctgttttgatcccatgactcaagtattctcaagctcagaaatattttcctttaattttacttattattttcctctgttttgttttttttctagaattytcataatcatattttgctctgtaatatctattaatacattctccatatataactttttctctttgcatgtaatatttggctcttcatgt

SEQ ID NO: 817038 - DNA, 633 bp, Homo sapiens
cagaagttgctgctgatgctctgggtaaacactggaagggttacgcagtctgaatcagtggtgggaacaaggtttcctcatgaagcaggatgtcttgacccatggccatatctgcctgctgctgggtaaggggcattcctgttatagaccagggagaactggagaaagaaaacaataatctgttcaggcgtgcattgtgaatgccaatctgagtgttctcaaattggttattgttaaaaaaggagagaaggatattcctgagctgatcctatggtgtctcatctcctggggtccaagatctagaagaatgagcaaacttttcaatctctctcaagaagatgatgtctgccactatgtcgtaagcaagcacttaaacaaagaaggtaagaaacctaggaccaaagcacccaagattcagcatcttgttcctccacgtgtcctgcagcacaaatgccagcatattactctgaagaaacagtatattaagaaaaataaggaagaggctccagaatatgctaaacttttggccaagagaatgaaggaggctaaagaaaagcaccaggaacagttgccaagagacacagaccgtcctcactgcaagcctstacttctcagtctgaatccagtcaaaaa

SEQ ID NO: 817039 - DNA, 574 bp, Homo sapiens
cacatggaaaggaaagcagccatcacaaatgtctcagtcaagctgagctcccaacagaccatctagctgaatgaatctgcatgagacagcccaggataacattgcggagccacccacctaactcaaggaattgmaagaaataatgtgattttttgttgttgttgctttaggtcagcaatagacaattgatttgtaaaatggtaccagaattggatggttgctaaaacactctcctaaaatttgtggtattggttttgagactgggcagtgagttgagaggagttgagaggaacctgctattagaggctagaaagatgttttgtagtattgaagcaatgacaaactgttctctacagtctttggagatagagaataagcctaatggttcagtaatgaatctgtggatctagctaaggagaattctaggcagagttaaaaatgtcaattttcttccttggctgtatatgatagaataaagagaaagaggcactaaaagggagattttactttataaggggaatgtaaagaatatgtaaagaagctaagagttgcttggttgaaaaatcaaaacatt

SEQ ID NO: 817040 - DNA, 621 bp, Homo sapiens
ttccactgatcatcactcatgagttaatgatattctgcatgctacagctattaaattgcattttaggtagcctgtaccagagatgtccgacttgttcacccttcacatccaactccctcatctaattggcccrctgagaaaacacttcttttaacccttatcttttttttccattccctgcataatgctaatggatataaatctgcctgacagcagttctgtaaaagtatacaacttgtccctaaagtgtacagccttttattggttgtctccctttgtgccagaatgacacaaattgccttctgacaaaagcaggatcaattaaactgataacagtagacttattatgtgagaacagtgagaggtaccttcaccataatgccagagttcattatacacatcctgtgactccacaaaggaacaaagacacatatcccctattaaaagcacttgctgctagtagttggctatgtagagaaagaacttaggggaatgcaccatatattctctttgaaagcaaaaatgctgatacctcactgagctgaggccaatgacagcagcctgagtaaggatagagaaaaggcagaataatacagactacagagagacagtcaaaacaca

SEQ ID NO: 817041 - DNA, 621 bp, Homo sapiens
ttccactgatcatcactcatgagttaatgatattctgcatgctacagctattaaattgcattttaggtagcctgtaccagagatgtccgacttgttcacccttcacatccaactccctcatctaattggcccactgagaaaacacttcttttaacccttatcttttttttccattccctgcataatgctaatggatataaatctgcctgacagcagttctgtaaaagtatacaacttgtccctaaagtgtacagccttttattggttgtctccctttgtgccagaatgacacaaattgccttctgacaaaagcaggatcaattaaactgataacagtagacttattatgtgagaacagtgagaggtaccttcaccataatgccagagttcattatacacatcctgtgactccacaaaggaacaaagacacatatcccctattaaaagcacttgctgctagtagttggctatgtagagaaagaacttaggggaatgcaccatatattctctttgaaagcaaaaatgctgatacctcactgagctgaggccaatgacagcagcctgagtaaggataragaaaaggcagaataatacagactacagagagacagtcaaaacaca

SEQ ID NO: 817042 - DNA, 613 bp, Homo sapiens
gggaatgtaaattaattcgaccattgtggaaagcagtgtgatgattccttaaagagctaaaagaaaaagaactaccatttgacccaggaatcacattgctgggtatatatccaaagtaacataaatcattctatccaaaggacatgtgtaggcttatgttcattgcatcactattcacaataggaaagacatggaatcaacctaaatgcccatcaagagcagactggataaagaaaatctggcacatatacaccatggaatactatgcagttgtaaaaaacaaaaaaagaacaagaatatgtgctttgcgagaatatggatggagctggaggccattatccttaacaaactacctcaggaacagaaaaccaaataccacatgttctcacttataagagagatctaaatgatgagaacacatggacacaaaagagagaaacaatagacattatggcctacctgatggtggagggtgggtggagggagaggttcaggaaaaataactaatgggtactaggcttaatacttgagtgatgaaatcatctgtacaacaaaccctcatgacaygaggttacctatatcacaaatgttatataggtaacatttataccta

SEQ ID NO: 817043 - DNA, 637 bp, Homo sapiens
ttagaaatataatgtatcactcagtacttgtcattactcrttaaataatataaaaggactactctttgcttggtgcactaaaggtttttagaaatacatttgttgcacctgaaaaaatgagtgtgccatataagattaatatgcataagatactgccagctgcccactccactcagagaaaaatacatgcaaatcactttggctgcaggtggtacaaggttctgaaccaactctgtccaggggcaagtcaccgccttaaattgtttagctaggttcctgcctcagaataccccgactgtggccacagaaggatagacaagaccattagatgcaaaaatgaaacctattgagggagacattcaggcccttaaatcttgagcagttcttgaaaatgaatgccattgtcaactctgtctctctagaaaagttaaataagtaccttttcaagacagtcattaaaatgaaggtatttatgtatctctcccccagctgtttggaaatgaatgctgtaaagtaaaatgagaaaatctgtgccttttaggttgctgtttaacatgaatatatttgctatagagtctttcctacaaactctattgtgaaaagctagaccaaccctgccataaataatgtaatatta

SEQ ID NO: 817044 - DNA, 607 bp, Homo sapiens
tgggctttgccatacagtaagaaaaggaaagtacaattttccatcattctagatattacccggcctaattgcagatctaccctgtrattgagccactctagagaaacagcatctttgtagtatttatgagaaggaagacacataaccagaacacaacatagggaaacctcacccttgtgaagcttatttttgatgcagcaaagcctgcagcttgccttggtgaagaggccagtgggcatcatacacagaagcaactgctagaatcagtaatgtgtcataagtgtgacttgtcaaaaccttccctgaagaagcaaaacttaaagatctaacagatcctcaagtgtctagaaaggtgacttttagtttcaatttcaaaataattcctcaacttctttggaaaatatgtatgtgttccccttgaaggtctattctgcagaacagcccaaagtttaagacatatatattagctagatagggttcctctataccttttgttgacatttaagttcttcattgacttcatagttatgttgagtcatgtataattaagctaatattgatatattgatgaacaaaggctgttactgatgaaacattgtgaaaagca

SEQ ID NO: 817045 - DNA, 631 bp, Homo sapiens
tcttcctccccttgcctcccaccccccaacaggcctcggtgtgtgatgttatgttcccctcccagtgtccatgtgttctcatttttctactcccacttattagtgagatcatgcagtgtttggttttctrttcctgcgttattttgctgagaataatggcttccagcttcatccatgtccctgcaatggacatgaactcattcttttttatgactgcatagtattctatggtgtatatgtgccacatttgctttatccagtctatcatcgatgggcatttgagttggtcccaagtctttgctattgtaaatggtgctgcaataaacacatgtgtgcaagtgtctttatagcagaataatttataatggtttggatatatacccagtaatgggattgctgggtcaaatgctatttctggttctagatccttgaggaatagccacactgtcttccataatggttgaactgatttacactcccactaacagtgtaaaagcatttctatttctccacagcctcaccagcctctgttatttcctgactttttaatgatcaccattctaactggcatgagatggtacttcactgtggttttgatttgcatttctctaatgatcagtgatgatgagct

SEQ ID NO: 817046 - DNA, 659 bp, Homo sapiens
gacagttttcagtgacacacatatatagtatatctgtagatacatacaatatacactatatttatatctgtgtatgtatatacactatatatactatatctgtatgtrtgagatatagtatatatagtatctttcctcatgaattcaaatgtctaggaaagaaggtagacattacataaataaactcaaagataaacacctaattctaaggtgaacatgatttactctttataacagaaaggaggcagtactttgggagtggataactgggagaacccagggagcactggggagttagcgatgtcctcactaaggaagtgattctgaaggaaaaatatgggcataggccatcctcccatcaatttagaaaagagctttccaggcataggaaagattccaacttgagaaagtgggatggttaatttcatatatcaacatgattggaccattgggtgtccattggtaaaacagcattctgggtgtttctgtgaggatgtttttggatgagattaacatttaaatcaataggctgaataaagaagattgccattcttaatgtgggtgagcctcacccaataggtttaaagcctgaatagatcaaaaggttgaccttgctgtgaataaggggaaattccttctgtataagtgctttgaatctg

SEQ ID NO: 817047 - DNA, 631 bp, Homo sapiens
agtatgccattgtgtggatgcagcatagtttatggratcaattcactgttaatggactactgggcggcttcctcttttgctagaaggcaataaatagtgttccaatgaatacttttatacatataatttttttcatatgtcttctgtgggttagatgcctagacttaggatttctttgtcaaaagtaaaagtacttgcccttttgataatgtgtaatagattatttgccaatatgactgcaactattcttctcactatatttatatgtccttgctttgtaactttccaactcctcccatcaacaaatacagtccatttccccacttgttgaattagccctggccttgtgacttgttttggttaatagaatatggcgaaagtgatcatgtacaattctgataccaggccaattggaggtcattgggaggtcattgaatcatgggtgccagtgtttctcatgctatttttatgatgatgagtaaatctcatgagatctgatggttttaaaaatgggagtttccctgcacaagctctctcctcttgtctgccaccatgtgagatgcttttaccttctgccatgattgtgaggcctccccagccacgtggaactgtaagtccattaaaacctctt

SEQ ID NO: 817048 - DNA, 625 bp, Homo sapiens
caccatcaatcaactagatataattgacaagtgtagattacttcatccaaccatagcagaatatacattcttctcaacctcacatggaatattccacaagagagaccaacattttgggtcataaaatacaccttcacgaatgtaaaataacagaaatcatgcaatgtctgctctcagaccataataaaattaaactaaaaataaatggcagaagtataactagaaaatccccagatacgtgaagattaaaagcaatacacttctaaataacacatgggttaagaagaaatctcaaaagaaattaaaaagtattttgaactaaataagaacgaaagcacaatttatcaaaatttgtgaaatgcagcaagagcagcacatagaaggagacttatagcatcaagtgcatatattaggaaagaataaagatctataatctaccgtctaagcttccatttcaggaaactacaaaaagaagagtgaattaaatccaaaayaaccagaagaaaagaaataagattggtagtttgataagaatagcattgaatatataaattgctttgggcaattatggccattttaacaatattgattcctcctatccatgagcatggaatgtttttacatt

SEQ ID NO: 817049 - DNA, 574 bp, Homo sapiens
accaacattgttcttggccaaaacgccaaaaggtttgtgttcctcttctctgtaattgaacttgtactgagcacacaaagattaagaaaagactttggaaacaaacacacattttaaataaaatttaycttaaaaaaactattttgagaatcccaattcattaagagaagcctcattataaatataatcaatgataatatagacttcattgaacacggcttctttcctaatatatttaattattgaaactattaaaagtatgttatggtaataaagtctaattgcaatatcattatataaaataattctaagtataatattatagtaagtttacatagttctattgttactactgagaaccttcaagatacatattgaaagaaacaatggagtgtctacattctgcttaactaatttttttttctttttttaaatgggggtgttcaaactgaggagaaatgctacaacgagaaagagaaggaattatagtctggtggaagaagaaaataatgagaggtatactactattggctgacagtaggaatcttgagagagtggggatggtaggagaaga

SEQ ID NO: 817050 - DNA, 496 bp, Homo sapiens
tagcaatgacaacaggctacccttgcactttctctgcctaagtttcacaagcagatagaaggtagacactatcctmtatagtagatgatacttgtatataatattgtatataaaacattgattcttcacaatttcatagacaagtttaatgaagtggaggcacatgttcgggaccaatttttataaacaagttatcaaattatcatcctgaaaacaaggttagggatcacctaacaattagaaccttactgaattgcactagcgtcttttaaaataaatgcctaaatactgcattgtttcaaaacactaaggcctgagtcaagcctatgagtcactatgaatagccctggatgttgggagataagaaaaccaatgaagtctccattgaaatatgcactggggttaggtagtctgtggatagttatgaggggatttgaaaacttaccggagaagacttgttttaggagacaggtgaaaaggaggcatcacaaattct

SEQ ID NO: 817051 - DNA, 491 bp, Homo sapiens
ttcccttcaaggcagcaggttccattctagctcagggtgtgtctagaaatgtcatctaggagctagggcctggaaagggggcctcaaactcttactggtgccctatctcrctgtggctgagcttgtatccaagatgtaaggcaaagtcctccccattcttccttcttctctcctcaagcatagggaaggtgtctctgtcagagaagcgagctatgcagtctggggttaggagagggataatgccagcactctcttagctgccctggatggtgtctcagtaggttataagctcccccagtccactggctcttggcccagttcagcactggggctcacctatgagttgcagtttttgtagcctagactgcttttcaagtttagtttggatccagagcactttagccaacaatagcaaggcttgtgggaactcaagtttggacctttgggactggcaattcccttctggctagggctggtttaagtgttccctc

SEQ ID NO: 817052 - DNA, 506 bp, Homo sapiens
attttatgacataaataatgcccaacaggatatttagaatatctaaaaaagtggaaaaatatatctatagggttgctatacagataaatattcttgatattttggggcatttttttaccatgttcttttgraatatagaatatttacatgatataatcaaacatattgatttaaaactgcatagaaatataatatcctgactaaaatgtacatactattaagtgctaagtttaaaaataaatatgtttcatatttttaatatgttttatggacattatataggtatgtgtgtatattatatatatatataattattaaagagataatacaggatcttcagtggtcctgcacttctaatttttcttgggaaattacaaatgttttaaataaagtaattttaaaatgatccatatgtgatatttttaatcagatttggatagctaaggatatacgtgtttacattcataaattaaatgtttgatataaaattttcagctcgcattttt

SEQ ID NO: 817053 - DNA, 478 bp, Homo sapiens
aatttttcgtctgcatctgattgtctcagaagtctcatttccaaattaaatacacaagtctcagttacttcctggacactcatggaatattcagtaaataaattttagagtagtgatcttgttcagttgcttttttttcttttttacttatttttttggaaacagagtctcgctctgtcacccaggctggagtgcagtggcgcgatcttggctcactgcaacctctgcctcccgggttcaagtgactctcctgcctcagcctcctgagtagctggaattacaggcatctgccaccatgcccggctaatttttgcatttttagtagtgacggggtttcaccatgttggccagactggtctcaaactcctgacctcaggcgatccacctgcctcggcctcccaaagtgctgggattacaggcgggagccaccgcgyccagccaactttacagttttaacaaaaaggctctctcacatctg

SEQ ID NO: 817054 - DNA, 613 bp, Homo sapiens
ggtttggttttcattcaccccttcaacactaacactgaagttaccgtaacaaaattcccttcaaggagatacactcctagtcctgctctttccactctaacagtgcctcatttcacatgyttccaattatatttttaagttattcaatgttagaagtagctttcaaataaaaacattgtattttcaaagctaaattgaaatagactttttcatccatagggaaagaagaggatagactcaaagcagttctactctaaagctataaatttaactatctgaggtgaaaaccacatctagactactattttaaaactatgggttgtgacctactaggctgggaatcaatttagagggtaatggcatggcatttttgaaaaacaaaatagaagagagagtagaaagcatcagcgtgtcctacgcataactggggtacttcctgccttgtgaactcatgtctcagtcacacacacctaagtgcgtcctaggtcacagtgctccgtgtcgtttttactgtgaaagctggtctgggccagcagtttccaaagccctagaatcagaattgcctagagctgtgtaataaacagattccctggctcaagccttctaagattct

SEQ ID NO: 817055 - DNA, 482 bp, Homo sapiens
ttcagttttacttatatgttgacttaaacagttattatgaatattaaacaagataacatatgtaaaaggggcaggtacagagaaagtgctcattaaatgttttctttcttcccccaaagttggattggcttatgagtaggaaacacaaaaataagaacaaaaaaaaaaacctctcttctccatagcaagatctttaggagaagaaaaaaaaaaggcttatggtactcagctcactggaaatttctgctactcattaaaaaaaaaaaaatccttctttaaatacatacaccaaaatttaagaagaatccaaaaaaaaaaaatcagaaatcccatatctcttttcttactgkgataaaaaactgcacaacataaaatttactatcttaaccatttctaggcgtactattcagtagtcaggcatattcacattgtgcagttaacctccagaacttttcatcttcccaaactgaaactctgcaccc

SEQ ID NO: 817056 - DNA, 451 bp, Homo sapiens
tttaggaggggcacttagtttcctgaatgaactacttgaaccatggataagggttgggtgaaggagaaaccctctggaaaaaaagatgcccakgtccaaatagttgaccatctgtagccttttctccaaatctgtagcatactccattgtagacagtcctatccaactgcttaactctagtgacctggccagggcaatgtagtcaaggggagagacaggccattatgtccctcattcctgattctgaagtgcagctgctcaaatgctgtttacttgtgaatgcattggcttctttccagccaatgtggagaaatctctgactcacagtaagaactttgcaaaatgacctcagtatagtgaatgagaaaaggcaattgaagtgtgggtgtttctgggtgcaacaaggatcctttggatgtcagcagctcatttaatatgcatagcacttgac

SEQ ID NO: 817057 - DNA, 589 bp, Homo sapiens
attggtttgctgtccatacaaatgcatttccatacttgtgggaaaggtgtgtcaacatctatagatcaccacaaagctctagttttgtccacctttgtcagacacaatcttgtgaacttgaattgacatgctctttcacataggacaaaactggggaatcaaaaatagtcctacgaagagagtgagtagtcaaggaatactcctataattgaatagagctccatgtttgttcattgctttcaatttcttacatcattttcttatctgcgatctcctttatttttaatcccagcagccttgtgtgtggggtagagaaagggtcagtgtcttcttttatacacagaggagttcatccacaaatacattaagcaacttgtctcaggtcactcagatagttactgacattgtcaggaggagagccccagctggtatccagactcctggctggcaatggatrttgttgaaagttgcaagcacagaaggaattgaaccttttaaatagcacgtttgcatctggagtggtccagggacattgctgaaaggatggaaacataacctagatggccccctgataaaaatcaaagttcta

SEQ ID NO: 817058 - DNA, 631 bp, Homo sapiens
gagcctggctggattcaccacctgcttactaaagagccttgggccttsaataaacatcaatggtagtcaagcaatagtcaccacaggccttgaggaagacccagtactgtgctgaattcaggtctgacctagtacagtcccagtgctggtggctacaggggtgcttgcatcacccctcccctaactccaggcagctcagcacaaagagaaagaaactcttgtttgtttgggggaaagtgagggaagagactctgcctggtaattcaagtaattatcctggatcttacccaagatgattgaggcagtactctaaaagtctgtaagagttgcagcattactgggtttggggtgccccataatgcagatatggctgcaatgactaaagacttacatcgcaacactcaattctctttgaatacttggaaagccttgtcaagagggatggatgagtacaagcatccatcatattctaatctttgccaacactgcaaagattagaataaatacctaactattggaggcccagacatcaacaaccatccacaagcatcagtaccatccaggaaaacataacctcaccaaaggaactaaataaggcacctggggtcaatttcagagtcaaagagatatg

SEQ ID NO: 817059 - DNA, 543 bp, Homo sapiens
cccagtgaaaagtcagagaaagcatttaaatggaaaacaagtcatgtaaattcaggcgaatgaatctttgaaagacaagaaatgatccaggtgattggagtatactatctcatgctaagtgggaaagtacatgtaatattagacttcaaaaggcacaacgtgtgtttttcaatacattttcttgcttactccatacttcagtactcattttgaattttgtattccttcgtcagtccagtttctttccttcctgccatatcaaatctatttttgccctgtgaaatataagcctctcccagagcagtatgtgaatgcgttgtctttaaagtctagtgaagcaactagtatttgttctaaatcctatctttttcaacataggaaacattactttagcacctattcataaataaccaattatttatgtattgagcaccagccctgtgcttaaatgttgcaggaaattaaaataaaaatatagtgttttgcctatgttcaggaaaaatsaaaacctacacaaaagaaaataatggcaacatcatcaaa

SEQ ID NO: 817060 - DNA, 640 bp, Homo sapiens
caaaggctgggatatgtgtctgactacacttaagatttatttcagctgggggaggtggctcacgcctgtaatcccagcactttgggaggccgagacaggcagrtcccgaggtcgggagatcgagaccatcctgactaacatggtgaaaacctgtctctactaaaatacaaaaaattagccaggcgtggtggtgggtgcctgtagtcccagcgacttgggaggctgaggcaggagaatggtgtgaacccgagaggcagagcttgcagtgagccgagatcacgccactgcactccagcctgggcgacagagtgagactctgtctcaaaaacaaaacaaaaaacaacaacaacaaaagatttatttcactccctggcatactcgccaagatgacagccaccttttttcccaaattcccatcaattccccgttcaatgagcattctctccttatgagtccagtgtgttgtttcttctgatttctaagcagtaaaactgtcagcccaacaaaccaaaaatgcatcagatggtcagcttgcagcagaatgaacttccagcagatggtagaaaattaaggaccttattactgcactgcaacttgcctctttgccagtgttttcaaattttcaaataataataatgag

SEQ ID NO: 817061 - DNA, 652 bp, Homo sapiens
ttcatgttataaattagccatgaaggatttcatagtataaaagaaaaataataaaaccattgtctccccttatactttggaagtgctaccgcacttttctcttgaacaaacaataggagaytgtagtacacatttgaatgattgacgtttgtttctcgggaacagcctattactgattgtgggaaaaggaggttgcccatacttacctattttcattcagttccacttgctaaatgagcaccattatgtaactgttgttatcagacaatagccctttttctagattttgggtaaagtttgctgggactgtacctatcattagaaagaggaaatctctttctaaggtactgtaataccagtattagtttaattttatactaagtcttttaacttcctgtaactcttttgagtagtaaggataaactctcctacctttggtctttcattagtgtattctgagtctacatcaagatctgtaaaatgcaaatgataagatgcacatcagagttgtaggtatataaataacattgaaaaaaccatacaggcaaatatatccaaatgaatcagaacctgtaattcctaatttatatgcagaattctagtatttaataggaaatcaacaaaatagcacctcactcttctggtgtccccc

SEQ ID NO: 817062 - DNA, 669 bp, Homo sapiens
tttgacattttacatgttgatgacttagaagattaaaattaaaattatgagttagagaataaaagtgaagggcaggcaattgtcatattaaaaaactccaagtcatataaatctgatgaacatgacccattcaattctgatatttgaagcattccttgatccagagtttttcagcaggaagagtatatttttcaattctacatacatctagatcaaacaccagtacctaagacttccagtattcactttctagcttactggtcttaaaatatctaaaagaaattcaacaaatcatatatatatatatgcatatatatacgtacgtatatatatgcatatatatatattttttgagacagagtctcgctctgttggccagcctggagtgcagtggcgccatctcggctcactgaagcctccacctgccaggttcaagtgattctcctgcctcagcctcccgagtagctgagattacaggcacccactatcatgcccagctaatttttgtatttttagtagagatggggtttcaccatgttggtcggggctggtctcaaactcctgaccctaggtgattcgcccgccttggcctcccaaaatgctgggattacaggcatgagtcactgtgcccagcccaaygaatcagatttttatattagtataatacaa

SEQ ID NO: 817063 - DNA, 610 bp, Homo sapiens
actggcacttaatcagcatttatggtgtgttgggtacaatattaggcaaaaatcagcatcatttaataccgtcaacttcaaggcaggtactgtgatctccatctaagcaagaggaaactgagattcccaagggccaacttacttgtgcagggctggggtgagctgtctggtcccaaagccagttcttccctctcgtcgactgttctctacaaactcatatcaattattttagagaagaagattgtactacagtcagctctgccacccatttagaagacctgttttccacttccatgctttccataggtatggctccaaaattaactttgtagctttaaaataacccagtaggcccagtgcagtggctcacgcctgtaatcccagcactttgggaggctgaggtgggtagattgcttgagcccaggagttcgagaccagcctaggccacacagcgagaacctctctacaaaaaataaaataattagccgggcatggtggcatgcgcctggggtctcagctactcaggatgctgaggtgggaggayggcttgagcctgagaggtcgaggctgcagtgagtcataactatgctactgcactccagcctgggca

SEQ ID NO: 817064 - DNA, 511 bp, Homo sapiens
gtacacatccagtgctattcaaaaactctgttttgagctgactgccattaggctctcaaaggttatataagagagacacccttgggcattggaggcaccgtagtgtgacggttaatagcatgaacttggatgtgttggacatctggacttgaatccaggcgttctcccttaatagttcttgatgctgggcaagttaatctctgcctcggtttttcactgttgctcttgttctctctgggttttttcatgcttcttcaggtcccagagccttttcctcctctctcttcacctacttacctcccacacagcatttcaaatgtcccttcaaatagcatttcagatagcatttcatttattttttattttattattattatktttttgagatggagtctcactctgtcgcccaggcagagtgagtacagtggcatgatctcggctcactgcaagctccgcctaccaggttcacaccattctcctgcctcagcctcccaagtagctgggactacag

SEQ ID NO: 817065 - DNA, 435 bp, Homo sapiens
cactcagctcaatgcatttggtggaaaattcaagtgaatagattggttatatgatatggcaaggacaaaaactttagtttaaaaatttgtcatctttgagtattggcatttcttccgcctgatgacattgcaggaacttttaataaattaaagccacatttggctgaagaagccagagaagttactgactggctaggaaataattatatgcacagtaagataagaagacacttaggcaacggtgttgctgttggatcacggtattgtttccaacacatttgtctgtatatgagtgcatgtaaaatggatttctgcatacccaaaacaacrgagaggcagagcacagaagatgggaaaatttaataggaatgctgatgtcaatgtatataaaattatagaagaattccagaaagggcagagccacggagaaaatga

SEQ ID NO: 817066 - DNA, 621 bp, Homo sapiens
gttggaaggactgaaacttaaaaggctgggagagaaaagaggtgggctttaaaagcatctgttctttcatttccaagagcagtggatccactccagaggccaccctgaagagggaactgaccctgtgccatgactcgaggaagctgctgttttgatggagggcatggctgcaaaatcttgccaggccatttttacgtgaatatcttcacaggatcctaggtgctcatgggcacagcctaggctctgaggaacaggatgactctgttgggtcattagcaaatacttgacctcaaggtgccaagggtagaaaggaagaaggcctggaggacgaggccaggtaccaggaaaataggtgagtctagtgagcatcttgtgtgtttcagggttgtgacatccttctttctctaggtaaagttccaagattgagcaggtgacataatctctccacctcctttactttctggcccctttcaaccatattcgtttgtgatcttccaatcaggagcttttatctcatccatctctgggcttagcygggtgcctgacatggaaggcactgaatatgagcttactgagccaatctgtcaccccctgttacgatgcttgcttccatgtgtgttc

SEQ ID NO: 817067 - DNA, 538 bp, Homo sapiens
atatacgcgtgcattctggaaatgaggaagccttcaaggagaagtttygctgggagtacccaaaaagctcctggccatgagacctgagagagcaaagtccttgccaactggtgctgtggggaccagagaatgcttcatggcccaaggagtagaatcttgcagccaactctggaagggttggccagggtttcatatgggagtttgcattcttcaggcggggccaagtagttggcacctatacaacaaaagcattccctaatgggaagctacatctttggcttctttgatgtatgcctttctgtctcggttatcccaagattttattagctaaggcaattttgtaaaaaaacaaaacaaaaagaaaacaaacaaagaacaataagaacaccaaggaaacatactatggtgttaaacacacagacacacagacacacacacacacacacacacacacaccccactacttaccttgtaaccagaacccaacaactaacatcttagtaccttcttcagatggctcttgcattcagaaataatt

SEQ ID NO: 817068 - DNA, 618 bp, Homo sapiens
gtgtggtcaaaaagattgggaaatgtttggttaaacaattctgaacagattcttttgcaataagacttctcagaaccttaaataggctgatatgcctggtaaatcactaagaagggccacagaggtgatattttcttaaataaacaatttcttatttgcctaaaaaaccctccttttaaaccactagatctctggccaatcatttagggaactttttcccctaaactctgacagcagagaaaaaaggattgaattaaaaaaaaaaaaaaaaacctggccaatgggagatgggttaggaggctgtggtcatactgcaaaaggaaaatgatgaggacctggactaagagaatggtgttgggaatagagataaatcaacgtaattgagtacatctaaggagacagagtcaatagaatttgatgattaactagatatagggagggaaagaaaggaaggagaaaaggatgactcaagcttttgcttgggcractaaatgggtgttggtactattcattgagatccagacagagaaagggagggcattctgagatttcagctttacatgtgttgtgtttaaagtgtttatgaaacacccccacggaggagcgtgggtctggagc

SEQ ID NO: 817069 - DNA, 618 bp, Homo sapiens
gtgtggtcaaaaagattgggaaatgtttggttaaacaattctgaacagattcttttgcaataagacttctcagaaccttaaataggctgatatgcctggtaaatcactaagaagggccacagaggtgatattttcttaaataaacaatttcttatttgcctaaaaaaccctccttttaaaccactagatctctggccaatcatttagggaactttttcccctaaactctgacagcagagaaaaaaggattgaattaaaaaaaaaaaaaaaaacctggccaatgggagatgggttaggaggctgtggtcatactgcaaaaggaaaatgatgaggacctggactaagagaatggtgttgggaatagagataaatcaacgtaattgagtacatctaaggagacagagtcaatagaatttgatgattaactagatatagggagggaaagaaaggaaggagaaaaggatgactcaagcttttgcttgggcgactaaatgggtgttggtactattcattgagatccagacagagaaagggagggcrttctgagatttcagctttacatgtgttgtgtttaaagtgtttatgaaacacccccacggaggagcgtgggtctggagc

SEQ ID NO: 817070 - DNA, 520 bp, Homo sapiens
gcagaacctggagaagggtcagtattcttggtgggagaatacaaagggggaggcgggataaagacagttctgagaaaaggtgaggcaggatctggagttagtgtcaaggccagtgatggggcagggtaaggctgaccgctgtggtaacgcttctagcaggcccaggggaagaaagaaagaggcagtaagaatgaaaaatccaatgatagagaaaggcccagcccccaggcatgataatggcttgcaggtgcctctggctttgggcaggtcacacggcccctcagtctcagtgtcctcatctggatggccaggggcttgactcatttgaccactacagcccttttcagttctaacagaccctgatcaagaagaaggggagtggagaaggagaagagaggaagacaaaggggagaagaagagagacataggagaaagggscctttcctggcagcaaaatctgcaggaggccatggggaggccaggagggaacattctgctgagcactgggctggaccaaggg

SEQ ID NO: 817071 - DNA, 337 bp, Homo sapiens
cacagagatacgacagggtggggagttcatgagtcctgcagcagctgcaaacactaggcacctgctgtgtgagagcggccagtgtaagaacccaggatgaacacgtgttccccaaaatggcttaggtgcaagggcgtagttctgaccagaactggacggtgtaaaaaaaaaaatctgacccatctgaagacacaaaatccagaaatgggttgtttttccttttatttctttctttaaagatagcatttccaaagtaggatcaaatgaatygggaaatgctgggctaggtgggtgtctttgctgcagaacttcaaataacattttttaaaatgctatt

SEQ ID NO: 817072 - DNA, 561 bp, Homo sapiens
cctccagcatggcttagttggaggcatgggctttggagtcaaacaggcctaggtcgatrtcctgacccaatcatgtacctggtcttgggccagttggggttaagccctctgagcctcggtttgctcagctgagaagataggagagaattcttcgtgttgctgtgaagattagaaccacgtggcacataagagctcaaaaacagctgtagctgtaacccattgacagatgaccagattaagagaatgtggtctatacacaccatggaatactattcagccttaaaaaggaaggcagttctggcccctgctacaacatgggtgaaccttgaaagcatgatgctaagtggaagaaactagtcacacaaggacaaatactgcatgcttccacttatatgaggttcctagaggagtcaaaatcatacagacagaaagtagaatggtggctgccagggctgggaggaggggagatgaggagttagtgtttaatgggcgaagggcttcagttgggaagatgaaaaagttctggaggtggatgtggtgatggctgcacaacaatgtaca

SEQ ID NO: 817073 - DNA, 544 bp, Homo sapiens
cgagcatgctgccttcaagcatctgtttaacaaagcacatcttgcactgcccttaatccatttaaccctgagtggacacagcrcatgtttcagagagcacaggggttgggggtaaggttatagattaacagcatcccaaggcagaaaaatttttcctagtacagaacaaaatggagtctcccatgtctacttctttctacacggacacagcaataatctgatttatctttcttttctccacatttcccccttttctatttgacaaaaccgccatcgtcatcatggcccgttctcaatgagctgttaggtacacctcccaggcggggtggcggccgggcagaggggcccctcacttcctagacggggaggccgggcagaggcgccccccacctcccggacagggcagctgccaggcagagacactcctcacttcccagacggggcggctgccaggcagagggactcctcacttctcagacggggcggccgggcagagacgctcctcacctcccagacggggtggcggtcgggcagagacactcct

SEQ ID NO: 817074 - DNA, 640 bp, Homo sapiens
acagacttaatgcttccccacttgcttttttgaaaaataactaaataaacccaagggagagttcaacagttttaaggaggatgccagaataccaagaagaaaggattcattcctaaaatagaaattctgaagcactaggagtacatgctacagaccccagttgtagaacccagggtgtaagccatttttctatgatgaagtttgagtttgttttgcttttggtttagtttggtttactgttttcctagtgagttctgactccatagggtttttgtttgtttgtttgtttgttttctgtaggacaggggttctgctgacactgttttgtttgaagggagatggggacagctgagactctggtaagcagttcttatgcacaaaagttaacagagttgtcccatagcaactggctcctgctgccagggttggctgggcctgcagagtagtgactgcaggactccaggccccctgcttctgtttccaaatgggatcctgctgctggtagcaaagctgctcccttttgtcaagccctcctggtgcatcctttacagayaagtgggctgcagcttttgccagatgggttgctgatggtgcagctgccccaactgagcagtaaactcaaaaaaaaaaaatgctgatg

SEQ ID NO: 817075 - DNA, 619 bp, Homo sapiens
aaatccttcttccaagccagtaatatcctagacacctcaggaaaagtcaactctgatcatcaaaatttattttttatttttaaatttcaacatttattttaggttcaaggcatacacgtgcagctttgttacatggtgcatattacctgatgctgaggtttgtggtacaaataatcttgtcacccaggtagtgagcatattacccgagaggtagtttttcaacccttgatcccctccctcccctctctggtagtcagtttccagcgtcttttgtttctatctttatgtccatgagtacccagtgtttgactcctacttataagtgagaatatgcagtatttttgttttctgttcctgagtttatttgcttaaggtaatggcctccagctgcatccatgttgctgcagagaacataatttcattatttattctggctgcatagtattccatagtgtataatgccacattttttaaatggaatgtactgctgatgggcatctagcttgattccatgtctttgctactgtgagtggtgctgcgatgaacatactaacgcaggtgtctttttggtaraatgatttatttttctttggataaatacccagaaatgggattgctg

SEQ ID NO: 817076 - DNA, 488 bp, Homo sapiens
gcaaatcattctctacaattacaataatgtatacgtcatttactgctgtttatatacacatgtggcctcaaaagacctrattcttttctttttttagatccaggggtatatgtgcaggtttgttacatgggtatattgtagaatgccaagatttgggtttctattgaacctatcacccaaatagtgagcacagtactcaacaggtagttttttttgttgttttttttttttaatgtgtatagtgttttccaaaatacttacttagaaattatgatttaacttattaacaataaaaagtatatatagttccaattataagttaatacacacacattaaatacaatttggaaaatactgaaaagaacaaattgattggttgcctatagactacaaaccaaaaacaaccactgttgcatttcagttccttcttttttttaaccgtcaagctagacatttttattttccaagggtatacaaatagaattact

SEQ ID NO: 817077 - DNA, 538 bp, Homo sapiens
aggcacaaggctcatgttttcctgacactgcctgtgctgcagtaatcactgaattttttyttaagcaagatatgagatgcatagtcaggaattcatataagactacagggaaaacaagaaagctaacatttattcagaacctaccatgtaccaaaatctgtagatatattgtctaaaatgaccttcaaaaccagtctgtgagatcaagatcacattctttatttcacagagcagaatgtggctaagaggcattcatacctattccagcccagaatacacagaaccaaactagaacccaggactacccaaccaaaaggctcagatcctatccatttgcacaaaccttccccagtagctctcaattcactagggttgttctcatagttacatttaaggaaaaacatgtgtgaacctaagaaagtttgcctatggcttgtttatacatgatttattttaattttgttaatgaagatataccttgtctttttccaaaaaggatttgaaacagattacaaggattagtgggtaaatatataaa

SEQ ID NO: 817078 - DNA, 550 bp, Homo sapiens
cagtaatcactgaattttttcttaagcaagatatgagatgcatagtcaggaattcatataagactacagggaaaacaagaaagctaacatttattcagmacctaccatgtaccaaaatctgtagatatattgtctaaaatgaccttcaaaaccagtctgtgagatcaagatcacattctttatttcacagagcagaatgtggctaagaggcattcatacctattccagcccagaatacacagaaccaaactagaacccaggactacccaaccaaaaggctcagatcctatccatttgcacaaaccttccccagtagctctcaattcactagggttgttctcatagttacatttaaggaaaaacatgtgtgaacctaagaaagtttgcctatggcttgtttatacatgatttattttaattttgttaatgaagatataccttgtctttttccaaaaaggatttgaaacagattacaaggattagtgggtaaatatataaacatgggctttgtcccttttaccatgaagcaaaatgttaaatacactgaaac

SEQ ID NO: 817079 - DNA, 534 bp, Homo sapiens
aatgcctacagccaggatgattcttgaataaatatcacacctgttgaggatgacacccttcactatccatgtcctcacctctagatggcatatttttagactttctgtaatgctacactgctgttttttattttaaatccagtctggcttctccccttaaagcaagaggacttttaaagcgagtggctggtagtataactggcacatatatcgaatctccttagtctgggctgttaagtaagtttaattaatttactaagttaatgttccactgctagcaacagagcctcattgccatcagctgggaagggggaattgcaagcctaaatgagctcattttttcacagttggaattagggaccagttagccagttgtgtgggttttccaatttctccatctgccctagggggattcaggcaattactccccyaacactaagtatgagtaagagcaggaagagggaaggggaaaagaaaaaaaataaaaacaaaaactctcccagacgtttgttaccctttttggaactggaagta

SEQ ID NO: 817080 - DNA, 606 bp, Homo sapiens
ggaccatggtcttgggactctgcagtgccatgtggaaggcgactacatcggtctgttagagaagtaacataattttaaagtcttatccatttctttctctgtatccggacaaaagcaattgcaagattggttctcatgaggataataataataacaataattactatttgttaagaattccctggaaaatactactatatgaaacagctcatatagaaactaatttaatgctcacatacacctgtgaagttggtggtattatttttggctttgcaggtgagaaaaattgaagttagttaccagtaaatcaatatttaaatggtgctccatctaactcgaagcctgggctcttccctgctatgcaatactgcatttgcccttttattgctagaagtccacattgctaatgatgctaaacttatgaggtgttttttttttgtttttgtttttttgtttgtttgtttgtttttgcgggggggarccactaaagaaattacaggtttgggtggtaatttgatgatattggagtctttgggcttatgaaagcaatggcctggcccagaagactcgtgcagattcctgagttaatgtgtgtttctttgtgtt

SEQ ID NO: 817081 - DNA, 525 bp, Homo sapiens
attccctcaggtgcccctatcttgtgagtgaagagaaagaaagaaatacagctccttcttgacaaaggtttacttctactaaaaacagcccctctcttgactctcccttgttagctgtcttgatatagacaagcaggagtgggtgggcatttgctatgcagattactctggaaatcccccgcaccccaaccttggcaaacccttttatggacctgtctagagccttttgttttgccaggtcctgtagcaggtgggatgcctctgtagttggtgacaccaagggtgtcctcacactgtcatgtcacacttacctcccatgctcagttaggtggttcagtacgtccccaatgaagagcactccattgcatggctttccttctgaatactccacgctgccctatgctctgctgctctgcactctctcttttctccttcaattggggtgacaactttygctattccatccacacccagccctttgccttagaataggagcctgtctacttcagtctggtcttgccatca

SEQ ID NO: 817082 - DNA, 574 bp, Homo sapiens
gcatgcaccaccatgcccagctaattttttgtattttagtagaggtggggtttctccatgttgstcaggttggtctcaaattcccgatctcaggtgatccacccgcctcggcctcccaaaatgctgggattacaggtgtgagccactgtgcctggctaacatgtctttcttataagttaaatccaatatcttttaaaaaaagttccatcgtatcagtcattcattttccttgaagctatctctgttctcctgtttcaatctagcctgcttattttctaggtttattctacagattttatcctagtacttactttgattgctttcttgagtagtcactgtttcttgggtttcagatatatatatatatttaaattattatttattttatgagataataaccataagtacatcctatgaaagagtgtgtcatagagaaattttctgagttctcacatgtctgaaagtactctcatacttgatggatagtttagctaggtatagacatttatttgaaattgccatatttttgcagaaacaattggtgtgttaattgcaaataattcttatttacccc

SEQ ID NO: 817083 - DNA, 585 bp, Homo sapiens
ccttgattctacagtgtactctgttccaagttcagcattcttctaaacatttttttgttggggtctaccacatggtaggcccttgtggttgtagtggggcgtggctagtgggsagagagtgaggagatgaggaagtttgagtctgagttgctgtagcttgattttttttcccctctagtttcatctttacctttccttttagaatagaaattataggctctggagtaaaattagaaatgtagctccaatttagctaagtttagctctaacatgaaaattccaagtttcatagcttttgatgagtattatgaaaaacataaagtctttcaaaggaatttccactgtctttttctctccttcatggttttaaacatggggacctttggttatagaattcaggatttggggctgttgttgtttttttccccatgggtttgactctttctccttgtatggaattttcatatttttctttaaggtttagtcacttaaccattgttttactaaatgggaattctctactgacagagatttttagcaacaaatgtatttttcttaaaatttgtgtaagacaaaaattacata

SEQ ID NO: 817084 - DNA, 578 bp, Homo sapiens
tggtcaggcactatggctcacacctgtaatcccatcattttggaaggtgaatcagtgaggactgcctgagcctacaagttagaccagcatgagcaacatagtgagatctccatctctrtggaaaaaaaaacccaggcatggtggtgtgtgcctgtagtcctagctactcaagaggctagatgggaggatcacttgcgcccaggaggttgaggctgcagtgagccatgattgcaccacggcactctagccttggtggcagagcaagaccctatcgcaaagcggcggggggaagcatgtgacccagtgttacctaacccatatcaacttgtacacattgaccagaaccttgcatgctaaatcctgaatggcaaaagttgactagactcccccaaaagggatcctaggatcccactgtccacaataaaactgaagagttaacaaagaggctcaaaacatagggcaaagtcttctaaaagccatatctcaaacattccccccaccaaaaagattagaccataatcccttgtcatgcaaaaacaaacaaacaaacaaaaggacctgcaggagttttttttggg

SEQ ID NO: 817085 - DNA, 606 bp, Homo sapiens
ctgggtgccaagaagggatgtccagagataaacgggcatatgtgttaatcttttagggcacagtccagtaacctgatcaaggagtgacgtgtattgtgtactaggatagaagtcagtatcagaggaaacacaaaggaaagagtggtactttctccccagggaagggatgctcagaaagagggggctgattatgtccctggttcatgagaaaaagggcattcctggctcagggagtgggaagaacaaaaccaagaaatcctggaatggcttggtgcatcagccagtctgtgagtgcagggcatggctggagttctggctttaagatgagtgggaagaaaggctggagaggaggtggatccaggaaaagttgctgggagcatttattcttttggcaatgggaagccatggaagaactgttgtaaggaggattctgtgtgatacatctgccttttagagaggtcattttatagaaaaagtagaaaatacagaccagcaaaaatttaaaaagtgaaaacaatcactgttcaagctctggtctagcactcaccagtgtttttcctacagrtgcatatacaaacatgcttttacattttatttttattttaa

SEQ ID NO: 817086 - DNA, 528 bp, Homo sapiens
agaggttgcggtgagcagagatagtgccactgcactccygcctgggcaatggagcaagattccttgtcaaaaaaaaaagggggaggataatgaggaggagcaaatagaatgaactccatgtctctccaacacttgacctgaagtaactccacttttacctcgtttattttgggaattataaatacaattttatttagtaaaaaactaggttcttttcctttaaaagtatttagaaagtgtagctataaacaatggagaaaggaataggaactatgagagatgagaacaaaaggaaacatctctattgtaaaataactcaatatggcaataaaagacagaggcagagaaatagcagcagagcggcagtaaaaatagtaatagcctgtgaatcaagaaatttggattttattctgtctctgtgctaccagccaaataactaaaaatcaagaaaaaaaaggaaccatgatagaagcagattaacaggttatccagatattagagttatcaaaggcaggctttaaaaaaaac

SEQ ID NO: 817087 - DNA, 373 bp, Homo sapiens
taatatttgtggatcccttagcatatgacctgaatattctgcatgtttttatgtatactttcttattgaatatttataatatacaactaaagtaratattaatagctctcatttactaacgagaaaactaaagctcaaagaagtgaaatgacccattaaaggatacataccaaaaaatggcaatggccataaaggggacacattcagacccaggacccctgacttttgaaaattacgtggaaaataattcaaacacaaggctgggaatttataaagccagaaataagtgaaatttatttaagaaggaaacaaggtagatatgtcttcacgaccattatttctgagttataaagacaactcatatactcacaaa

SEQ ID NO: 817088 - DNA, 523 bp, Homo sapiens
ttgctgcaaaagcaattgcagttttggacactcctttttttttttttttttttttttttttgagacagagtctcgctctgtcgcccgggctggagtgcagtggcgccatctcggctcactgcaagctccggctcactgcaagctccggctcactgcaagctccggctcactgcaagctccggctcactgcaagctccgccttcaggttcacgccattctcctgactcagcctcccgagtggctggaactacaggcacctgccgccaggcctggctaattttttgtatttttagtagagacggtgtttcgccgtgttagccagggtggtctccatctcctgacctcgtgatccgcccgcctcggcctctcaaagtgctgggattacagggcatgagccacccgcgcccggccttggaygtgacttttgatagtaaaaactgcaattacattggcaccaactgaatcattgacatacaccctttcctttgactgtgttattattctttgagtgatagaagatatt

SEQ ID NO: 817089 - DNA, 626 bp, Homo sapiens
taggaactgctatctgcatttatagataaaaatcctgagcaacagacacaagaatattgatatttatagctatccacaatttatctgcaattctgaaatcctacaagtttacaaattttttttaaaaaaaggaaatttgatataaaaatctgatctgaattggtggctatgcctagtctatatttctgccacttggggtgaacattcatacatttcacgttaaaaatattaattatcagatgctacaccagactctgctagactctttcataaaagttcatataggaatagtattatctttataaagttaaaaaaactgcctttccaaacacatcaggccctatagatgttgaataataaattatatatcttctaccaaaaagtatgaaccaaatcccatgaatgatagtgtggtctattaaaataaaactggactaatagtttgaaatttttgggtcaaatccagcttgtaagtaatgagttgggatcttaataaactttacttcactctctggatttcactttccttatcttgaycaaatatccacaaggccacatgagaaatgtagatgaaggaagccgagaaactgtagcttccgggacagcagaggccacagctaactgga

SEQ ID NO: 817090 - DNA, 630 bp, Homo sapiens
agatcaatattaatctctacaactgaaaagggcactggaattggctgcaaaatacaaaacacatgttgatacggttgttgcttactgtcaaaagaaaagtttttggagacatttggtaaagaggaaacataaacaatacttgcagtatgcagaaggtctccaaatagattgagagaaaaatcaaagccaaaattgagattgaaattacaaaagaaggagaacaatcatcaagcagccaatccagtaagagtatgggtctaaagccctacatgccatgcttatatttaagaagttttgtattttgaaatgaattctgattaactaaggataagcatgttttggctgataaaaaaaggattacctttaaataagtataagcacttgctgtgtatttaacgtaaaagtacattcagaaagatgaaaaacaaagtaatttatgtacttcttggttttatatttttctaaaccaataattagcaaaatattacggtatacttacgatatgcctgtgtagtgttaattatatttcagttttttgcccattatttcatccctgaatcttcagcctgaamaaatatgaatgctgataataaaacattgaactatttaaaaatgtatgttattattaat

SEQ ID NO: 817091 - DNA, 502 bp, Homo sapiens
atcagctacaatgcctctcacaacagtcagctcaagaaataattgtgaattcacttgaaccggatcataatagtatcaaggaaggaaaccaygtgtttgtatcatgtgccttctccctgcagccctaatcttgagttcatcacactactagcactcaataaatgttgattgacttatttggttccctatgttgaaattgccccgaggcaacacagttaaaaagccagagagtacaggcagaggcacattttttgtgtttcatgaaaacatcaataactgaagctattaatgctaagtccagtttcaccaagctgtctgtgcccagagtctttcaagaattcaaacccaaaaataatcacaatcaattcccaaaatgcattctggatggtttagttaagaaatgtttaggaaggtaactgtagcatttggcttctgattaatatttctcataaatagtttaaaatcaaaagaagtctgtgcgttttaggtaggttgcctccct

SEQ ID NO: 817092 - DNA, 548 bp, Homo sapiens
tcctgttttttttttttctttttttttctcaattcctcaaacacatcataccatttcctgcctatagaacgtggctcatgctatttcctctgcctgaggggatcttttcctttctcttagcctggctcaatgtattcattcttcaaatctcagatcaaataccatttccttagggaagccttctgtaacctctaagctgtaatgtgctctcttaacactttggattttcttctacagccattatcaaagttggaaacaatatatttgtgtaatttttaaaattaaattcctctcacccacttcactgaagacaaagaccaaatatgatttgtcactgctatatcccagacgcccagccaggaaattaaagatttattgaagaatgaaccaatgcatgaattaatgactgaaagaataaatatatataacagtctaggtttgacagaggaaaattagmccaaagacactgatttggaatcatcaggatacagatgataactgtagccaatggaactaatcaaatcactcaaaaaagagtgaaaggagta

SEQ ID NO: 817093 - DNA, 561 bp, Homo sapiens
aaacttaagaaactaggcatcgaaggaacatgccacaaaataataagagttatctatgataaacacggaggcaacatcatactgaatgggcaaaaactggaagcattcccattgacaactaaaacaagacaaggatgctcactctaaccactcctattcaacatagtactagaagtcctggtcagagtaatcaggcaagagaaaaaataaaaggcaataaaataggcaaagaagaactcaaactatctctcttcatggaaaatatgatcatatatctagaaacctctaaatattctgccaaaaggcttttggaactaacaagtgactttagtacagtttcaggatacaaagtcaaaatacaaaaaatagtagcatttctatacaacactaaaacattcaagctgagagccaaatcaagagtgcaataccatttaaaatagccataaaaaawtttttttaaaccaaaaaggtaaaccatctgtaagtggagaactacaaaatgctactaaaagaaattataggtgaaacaaacaaatgggaaaacataccatgctctataca

SEQ ID NO: 817094 - DNA, 608 bp, Homo sapiens
gagaggttgagatttggttttggttcctttttttttttttttttttttcctatttggatactcattctttcactcatttcactcattctagcaccatctgttcaagagtatcttctcttatttttcttttctttttttttttttttttttgagacgagtgtcgctctgtcacccaggctggagtgcagtggcgcgatctcggctcactgcaagctccgcctcccgggttcacgccattctcctgcctcagcctcccgagtagctgggactacaggcgcccaccatcacgcccggctaattttttgtattttcagtagagacggggtttcaccatgtcagccaggatggtctcgatctcctgacctcgtgatccgcctgcctcggcctcccaacgtgctgggattacaggcatgagccatcgcacccggccccgtctcttttcctattgggttgctttatcatttatgtcaaaaatcaaatgcccacrtttatgtgggtgtatttctattgctttcatatctttcactctcataccagtttaccactgtttgattattgtagctttataatatatcttggagtcaggtagtatatatcctcaaactttg

SEQ ID NO: 817095 - DNA, 648 bp, Homo sapiens
aataaaaaagcaatgtcagtactgtgacagaaaattaaaaatatgttaaaccagctttattcctttgttgaacctaactgacattgagttctacaacggtaacaaaaatgrgtattttaattaaggtaaatttaagaaaaacaatggaattgtgcaggactttggatgaaaactggcttgttcacatttaccaagatagttgttcctggtgataattgaacaaccttggaaatctcagcatacgtttcttattaatattttttggtaaatgtacctgtttgaaaatgaggtcaaaatagaagcttctgttttaatttaacaatatctcagtgccctttccttcaacagtgtctcttcatttttctctgtctctgcattatttcacttctgcaaccactgcctctttcctgataaggttcaatcattctggtagaggttgaacagaagttaccagcctagttcagaatcatggacagaggaatttcacatcggctcaaggaacttagtgctatgagaactgtactgcagagaagaacttcaatgactagtgaagaaagaaaataaagatgataatatcctcctcaaactgtttttccctaatcccaccattgctttatagacttgcccaaattgtggtgcatgcaagtc

SEQ ID NO: 817096 - DNA, 648 bp, Homo sapiens
aataaaaaagcaatgtcagtactgtgacagaaaattaaaaatatgttaaaccagctttattcctttgttgaacctaactgacattgagttctacaacggtaacaaaaatgggtattttaattaaggtaaatttaagaaaaacaatggaattgtgcaggactttggatgaaaactggcttgttcacatttaccaagatagttgttcctggtgataattgaacaaccttggaaatctcagcatacgtttcttattaatattttttggtaaatgtacctgtttgaaaatgaggtcaaaatagaagcttctgttttaatttaacaatatctcagtgccctttccttcaacagtgtctcttcatttttctctgtctctgcattatttcacttctgcaaccactgcctctttcctgataaggttcaatcattctggtagaggttgaacagaagttaccagcctagttcagaatcatggacagaggaatttcacatcggctcaaggaacttagtgctatgagaactgtactgcagagaagaacttcaatgactagtgaagaaagaaaataaagatgatratatcctcctcaaactgtttttccctaatcccaccattgctttatagacttgcccaaattgtggtgcatgcaagtc

SEQ ID NO: 817097 - DNA, 565 bp, Homo sapiens
tgcctttcatttcctcctcttgcctgactgctctggctaggacttctagtacatgttgaacaggagtgatgagagtgagtattcttgtcttgtcccagytccagttcccaaggaggaaggttcaagcttttaaaaatatatatatattaaatattatatattatattaaatatattattttatattatacataaatatatatgaaatatatatttaatatatattttatatatatatatacacacacacacacttgaagttctgggatacatgtgcagaatgtgcaggtttgttacataggtatacatgtgtcatggtggtttgctgtacccattaacccgtcatgtacattagctatttctcttaatgctatcccttccctagtcccccactccccaacaactccccagtgtgtgatgttcccctctctgtgtccatgtgttctcattgttcaactcccatttatgagtgagaacatgcggtgtttggttttctgttcctgtgttagtttgctgagaatgatggtttccaacttcatccatgtccctgcaaaggtcatgaactc

SEQ ID NO: 817098 - DNA, 645 bp, Homo sapiens
atatttagcatctacaagggacttaaacaaatttaaaaaaaaaaagcaaccccattaraagtaggcaaaggacatgaacagatgcttgtcaaaagaagacatacatgtggcccaccaggcgcggtgactcacgcctgtaatcccagcactttgggaggccaaggcaggcggatcacgaggtcagatcgaaaccatcctggctaacacggtgaaaccccgcctctactaaaaatacaaaaaattagccaggcgtggtggcgggcacctgcagtcccagctgaggcaggagaatggcatgaaactggaaggcagagcttgcagtgagctgagatcacaccactgcactccagcctgggcgacagagcgagacaccgtcaaaaaaaaaaaaaaaagacaacaatgtggccaacaagcacgtgagaaaaatgcttaacatcattgatcattagagaaatgcaaatcaaaaccataatgagataccatctcatatcagtcagaatagctattattaaaaagtcaaaaaataacagatactggcaaggttgtggagaaaaaggaatacttatatactgtggggttggctttgttccttactcattcacctgacatgagtgaaggacaaaggacattctaagcccggatgtt

SEQ ID NO: 817099 - DNA, 509 bp, Homo sapiens
atgtggccagctttcaacagtgtcttgatctcgttgcgcaggtcagcctgactagagaagtccagtttggggatgttcaatttgtggaagtatttagtgttgctatccagggtaagctgattgtttatcttgacaatcactccattactaagctccagtgtatttttttctgtgtgtaaacttgccactgtgtttgattttccctcaatagcatttccaaaaaacagcatttcactcccatgctccgttctcaggtacttgctggagaacttcactgactccttcagagccagcggattaatcttagggtttgagagttgtgcatttgcttgaaaatcaaaattgagaacttctaatttggactctcctttggcagtgatggaagctgcgatacctgcttcgtktgctgaggtggttccattccctatgtcagcatttgcatctaatgtgaaaagaggagattggattttcagaatactgtatagcttgccaaaagtaggtacttcaat

SEQ ID NO: 817100 - DNA, 504 bp, Homo sapiens
tcttttatctgcaatctttacctcttagtatatttgacttgtacaatattcaaattcaaattagaagtacagattaccaaaagagaaatacagttccttaaaagtcagactataagccttattaataaagggaatattggttaattaatcccttagtaaatagggaacctatagtccctatttactaagatatccgtagtgttttcacattatttttaaaagctcatgaaatacgccctttgaagagatgataaaattttaaattcaattaatcaatatatatttatctcatgtattatgtataaaatatggaggcaaactgaaagaatcattacatttattgagtttttaaccaagtaggagagaacaaaatgcaaattaagcagaatgttataaataaaccagtgcaaagtaatatacagtgacacatcmactatctagaaactcagatacagtcacatgacttagtatcccaaaaccaagtaaataaacaaggaagcttgc

SEQ ID NO: 817101 - DNA, 491 bp, Homo sapiens
tgctatgagatggatgaatctcaaaaaaattttgtttagtgaaaggagtcagacagaagagaccatatactgtgtgattccacttacataaaatattcagaaaagagcaagctttaaagacagatattagcattttcctgtagcagagggtagaggcaagacagtacatagggattaacagtaatgtgacacaggaatgacaatgcagtgataaaaatgtattgaaacttatttatagtgatagttacataacttgataaaatttaaattagtaattaacaattttcccacaaagaaaagtccatgttcagattactttactggtaaatacgattaaattttgaagaaagaaataataccaaccctacaaaaatgttttcagtcatttcccaacccaytggcatcctgatacgaaatccagacaaagacatgatttaaaaaccataaatctatataccggtattacttataaatacagatgcaaaattcct

SEQ ID NO: 817102 - DNA, 430 bp, Homo sapiens
ctaagcacaaaacagataattcagagactcaaaccaagagacattcctaaagttataaaattyaccttttccctgtgcaaaacttaatttaaatgctatttaagagataacctactgctgttctcaatttaaataatttccatttgtctgtaaactaaataaattttagtagccattaaagtgaaaatgccaaatacacattttaatcaatgattttccaccttaaatgcaaggatttagaacctgacaacatcttttattgaagcacagcagtattaattaacgataacagtcgttgttgaataataatgtaaaacggtcctaccataagaagtaaaaaaatcataccttatagaaaccattctctttaagtgaagtttgttttctttgattccataatttcattcctttcccacaagagtcataatgc

SEQ ID NO: 817103 - DNA, 391 bp, Homo sapiens
aatttcatattttttttaaaaaaaacacctttttggggtagctgtcaataaccttattctatataatctggcaagggcatcgtaaatgctacattaactttcaccaagtaaatgatgggatagagcactcagtagaacactgaggcacagcagggaggcacaactgtggcacactcataccctagtacgaacagagctggacacaagccaatttcatccaatctcaaaatgcctctatgctggagcagcttgtaacactggtcattcttggcgatgattttaaaatgaagtttcctcccatgtgcatataatggagtggctgcttcttttcacaggttccagagccgctgacrttgggccagtctcccaggtgcttttgtatccaatgaca

SEQ ID NO: 817104 - DNA, 637 bp, Homo sapiens
ttttaattctgtcttatgatgcagtgtattagtccgttttcatgctgmtgataaagatatacccaagactggggaaaaaaaagaagtttaattggacttacagttacacatggctgggaaggcctcagaattatggtggggggtgaaaggcactttttacatggctgtggcaggagaaaatgaggaagaagcaaaagcagaaacccctgataaacccatcagatctcatgagacttattcactatcacgaaaacagcaggggaaagacgggctcccatgattcaattacctcccaacaggtctctcccacaaaatgtgggaattctgggagatacaatgcaagttgagattttggtggggacacagccaaaccatgtcattccaaccctggtccctcccaaatctcatgtcctcacattttaaaaccaatcatgccttcccaacagtctgccaaagtataaactcatttcagcattaactcaaaaggccatagtctaatgtctcatctgagacaagtcacttctgcctatgagcctgtaaaatcaaaagcaagctagctaacttctagatacaatgagggtacaggtattgggtaaatacagctattccaaatgggagaaattggccaaaacaaagg

SEQ ID NO: 817105 - DNA, 538 bp, Homo sapiens
gaacttaaaacaattaagttaaaaaataaatatgaacccggaatggaaatggtcgaaatgcctgacttaaatcgcatagagtgaaaagctggattaaaagacaagacttaactgtctgttatctttatgaaacccatctcacatgtaatgacaccaacaggctcaaagaaaagaaatgaagaaagatcttctatgcaaattaaaaacaaagaagagcaggagtcactattgctatgtcagataaagcagactttaaatcaacaacaattaagaacaacaaagacattacttaattacaaaggttttaattcaacaagaatacttaactatcttaaatatatctgtactcagccttggagcacccagactcataaaagaattttttttttatttacaaaaagcctaaacacacacacacagtaatagtgggagacttcaacaccccmctgacagcattagacagatcatcaaggtggaaattctgaaattaaactttacacttgaccaactggacctaataaacatctacagaactcca

SEQ ID NO: 817106 - DNA, 532 bp, Homo sapiens
catggtttacgcagtaacactgagattcaatctttgataaatcaccgactaagaaaaacttctgattcttcatgttttactttgcatataaattgcctcttgaatatttccacataaatcagaattataatttacaacccagaataaaatggactaaatatatttacttattctttctctgacagaaaagctgcctaaacagaaacaccattgaagaaaaaagagattgcagtcttctctgtttctgccatgttgaagcttggatatattgcttttgtgtcttctgtagaagaaatcatttgatttgtttatttcttttctctgcaatatgtgaaaagtaaatgttggtggtgtctagtttattttaaaaaaaatagtgcattcctcaatgcagttggaagggctaagatttaaataacattgaaaattataactgcaataaagcagaattcctgacttttctattgtycagtaagttctgttgatttcctctgtgatatctttggcaggcagagtctcccttcattattct

SEQ ID NO: 817107 - DNA, 621 bp, Homo sapiens
ttcgtagacagtaccttgtcattatgttctcacatggtggaaggggagaacaagttcccttgggcctattttataagggcactaatcccattcatgagggctccaccctctgatctaatcacctccctaaaagtcccagctcctaacaccatcactttgggagttacaatttcaacatatgaattttaggcaggacacaaacatttagactatgtatcacctaggaaggtgctaaaacattaacttcccctcagaaaccctagtgcactaccccttacagatataagaatcctgtatgaattcgcttatatctctagtcaataaatatttattaaagacctactatgggccacacactgtgccatttcacctaactacactaaaaaataagattcatcacatttaatgtctcaggttttcaaatctgaactatccttcctaaagagtccttagtttttcctcaatgttgctgtttaaaccaaagaagcttaatttcagtgtatcatgccctgtagtcagaagtagaaccaaatgaatgagaaatgcattcattcagtcggtcaacagcatcctgagccctggytctgtatgactctaaaaatataaaaagaaataaaatgt

SEQ ID NO: 817108 - DNA, 586 bp, Homo sapiens
aggatgtggagaaataggaatgcttttacaatgttggtgggagtgtgaattagttcaatcaytgtggaagagagtgtggtgattcctccaagatctagaaccagaaataccatttgacccaccaatcccattactgggtatatactcaaaggattataaatcattctactataaagacacatacacacgtatgtttactgtggcactgatcacaatagcaaagacttggaatcacccaaatgtccataaacgatagtctggattaagaaaatgtggcacatatacaccacagaatactatgcagccataaatggatgagttcatgtccctttcagggacatagatgaagctggaaaccatcattctcaggaaactaacacaagaatagaaaaccaaataccacatgttctcactcataagtgagagtagaaaaatgagaacatttgaacacaaggaggggaacatcacacactgggacctgtcgggaggtaggggattaagggagaaatagcattaggagaaataccaaatgtagatgacagggtgatgggtgcaggaaaccatcatggcacatgtatacctatgt

SEQ ID NO: 817109 - DNA, 624 bp, Homo sapiens
tgaaggtccttgcatttggatggagctttttccttttatgttctctgagggccttgaggctctgactgtgttgtaagttggatttagtcagttggcttcatttgtggatgatttcagaaggccraggcttggcccagcactgccgtgctgcatgctctagtccttggtggctgggcccacacctgcagtttttttctctggtccctcaaagttaagaacctgctgtgttgtaggggctgagttgcttccagtgtgctgataacaatactcctactgggtggggctggggtggggagtgccatcataagcacttcagcagggtggtggtgccagcagccagttggtggtgagtacttctgatcatccaaaagtgccaatattcattcaattgacagagatataagttaaagtattcaaagtcatttttcataagaattcaatattttaaattaaaggaatgtttttaacaaataaaactattaatatcaccatctagcctacaaacaaaagaaataaagagacgttagcagtacctattataaatgtttctcaagataggaaatctaagaatttcacctctaaaacctgtaactattacatgattatgaataaaaagatctgtat

SEQ ID NO: 817110 - DNA, 624 bp, Homo sapiens
tgaaggtccttgcatttggatggagctttttccttttatgttctctgagggccttgaggctctgactgtgttgtaagttggatttagtcagttggcttcatttgtggatgatttcagaaggccaaggcttggcccagcactgccgtgctgcatgctctagtccttggtggctgggcccacacctgcagtttttttctctggtccctcaaagttaagaacctgctgtgttgtaggggctgagttgcttccagtgtgctgataacaatactcctactgggtggggctggggtggggagtgccatcataagcacttcagcagggtggtggtgccagcagccagttggtggtgagtacttctgatcatccaaaagtgccaatattcattcaattgacagagatataagttaaagtattcaaagtcatttttcataagaattcaatattttaaattaaaggaatgtttttaacaaataaaactattaatatcaccatctagcctacaaacaaaagaaataaagagacgttagcagtacctattataaatgtttctcaagataggaaatctaagaatttcaccyctaaaacctgtaactattacatgattatgaataaaaagatctgtat

SEQ ID NO: 817111 - DNA, 624 bp, Homo sapiens
tgaaggtccttgcatttggatggagctttttccttttatgttctctgagggccttgaggctctgactgtgttgtaagttggatttagtcagttggcttcatttgtggatgatttcagaaggccaaggcttggcccagcactgccgtgctgcatgctctagtccttggtggctgggcccacacctgcagtttttttctctggtccctcaaagttaagaacctgctgtgttgtaggggctgagttgcttccagtgtgctgataacaatactcctactgggtggggctggggtggggagtgccatcataagcacttcagcagggtggtggtgccagcagccagttggtggtgagtacttctgatcatccaaaagtgccaatattcattcaattgacagagatataagttaaagtattcaaagtcatttttcataagaattcaatattttaaattaaaggaatgtttttaacaaataaaactattaatatcaccatctagcctacaaacaaaagaaataaagagacgttagcagtacctattataaatgtttctcaagataggaaatctaagaatttcacctcyaaaacctgtaactattacatgattatgaataaaaagatctgtat

SEQ ID NO: 817112 - DNA, 510 bp, Homo sapiens
caagaagatcgttatccacaaaccagtaagtgggccctcaccagacactcaatctgtaggctccttaatcttggacttcccagtctccagagctatgagaaataaatttctgttgtttaagccatgccatctatggtatttcttttatagcagcctaaactgagatccagtaagaagaactttgctaggacttcagagcagtagacttgctcttccctttgtctttgaagctgacgaaatgtaagggctgtagctgtgtgacccatcttcttactgtgagaggaaattttgtttgtgaatggagccaactcagaggaaaatgaggagatacagagataattctggtgacatcatttgatcctccatatcttgctatgactgaagcaaatatcacattcaattgtggtttagagaagacaataatttctttttttactcaaccagtagagsttctgctttctgtcatttgccactggaatatttctagtggatccatctattgacctgtca

SEQ ID NO: 817113 - DNA, 598 bp, Homo sapiens
ctttgcagctatccccaccttccctccagtttcataatcctcackcctggaaggtccaagctaccccgaaagcttgaaacatgtgtgcacgtttgggcacacacacaaagactgcatgggcttctcaagtgggcttacactcatactgctaataatatatatttcctttccttttgaaataacttaatcttttttgagaggaaatagatcacttttattttcagctctatgtatatggatctacacacacacgcacgcgcgcgcgcacacacacacacacacacactcacattttggtctgtcagattttcctctccgtgccagggaacatgtgttcccacagaatggagagaagccacctccacccaccttgcatattctctcctggatccaagcttctaggaaatgagttccccaacgagaaaaatcactctcctagagccacaggcccacatggctatccatggagctcctctgctcctgtttatagaatttctactgctgaaatgtttctaacagaattaaatttgaattgtgtgtaatgaggttggcttagattgtatcatctatgccctttagcctttgcacttaggttcta

SEQ ID NO: 817114 - DNA, 633 bp, Homo sapiens
taatcaaaagaggtttaattgactcagttctgcatggcttggaaggcctcaggaaacttayaatcatggcagaaggcaaaggggaagcagatcacgtcttaaatggtggcaggagagacagcattcagggggaagtgccaggaggaaaaaagaaaaaaaggacactactgtgagaacttgttctcagagttcaggtgagacatcagggacacccagaattcttttcaaagaatctgagggcaggtagacttcacccagagcagatggtggcaaagccagggcaggcctgtcccacagctggtatcattaccctgttctcacatccacatcggggaagcctgagcacctccttggttctccacctagagctccaggatatatccttgaggattgctgtttgccactcaggaatttatttggaggttatcattttgatgataatctttaaaaaagtcagatctctactcaccatctggatgactacatcatcatgaaataccactacataattcagtgcttgcatttgtaattctgttttctgtttatgctagcatcaaatagaggataaagacatagcatactgcttgaacgtagattttgcagtagaaaaaggagtgggagaattgagctagt

SEQ ID NO: 817115 - DNA, 656 bp, Homo sapiens
aagcaatcacaacaaaggcaaaaattggcagtggggtctaattaaacttaacagcttctgcacaatgaaagaaaccattaacagagcaaatagacaacctacagaatgggagaaaatatttgcaaactatgcacctgacaaaggtctaatatccagcatccataacaaacttaaacaaatttacaagagaaaaacaaccccatcagagtgggcaaaggacatgaacagacacttctcaaaagaagacatacatgtggccaacaagcatatgataaaaacctcgatatcactgatcattagagaaatgcaaatcaaaaccacagtgagataccatctcacaccagtcagaatgactatttttaaaaaatcaaaaaataacagattctggtgaggttgcagagtaaagggaacacttacacactgttggtgggagtgtaaattagtttaaccatgtagaaagcagtatggcagttcctcaaagattagaaatatgattcaaccctgcaatcccattactgggtatatacccagagaaatataaattattctatcataaagacacatkggcatgagtgttcattgcagcaccattcacagtaacaaagacatggagtcaacccaaatgcccatcaatgacagattgaataaagaaaatg

SEQ ID NO: 817116 - DNA, 656 bp, Homo sapiens
aagcaatcacaacaaaggcaaaaattggcagtggggtctaattaaacttaacagcttctgcacaatgaaagaaaccattaacagagcaaatagacaacctacagaatgggagaaaatatttgcaaactatgcacctgacaaaggtctaatatccagcatccataacaaacttaaacaaatttacaagagaaaaacaaccccatcagagtgggcaaaggacatgaacagacacttctcaaaagaagacatacatgtggccaacaagcatatgataaaaacctcgatatcactgatcattagagaaatgcaaatcaaaaccacagtgagataccatctcacaccagtcagaatgactatttttaaaaaatcaaaaaataacagattctggtgaggttgcagagtaaagggaacacttacacactgttggtgggagtgtaaattagtttaaccatgtagaaagcagtatggcagttcctcaaagattagaaatatgattcaaccctgcaatcccattactgggtatatacccagagaaatataaattattctatcataaagacacatgggcatgagtgttcattgcagcaccattcacagtaacaaagacrtggagtcaacccaaatgcccatcaatgacagattgaataaagaaaatg

SEQ ID NO: 817117 - DNA, 542 bp, Homo sapiens
tgcaacaattctcaagaattgagcacactgaatccaacagcacatcaaaaaawatatatatatatatacatatatatgccatgatcaagtggaattttctccagggttgcaaggatggttcaacatagggaaataaatgtgatacatcacatcaacagaatgaaggacaaaaaccatatgaccctctcaaaagatgtagaaaaagtatttgataaaattcaacatcgctttgtgataaaaaccgtaaacaaatggggcatagaaggtaaatacctcaaaacaaaaaggccatatatggcaaatccaaagctaacaaaacatcatactgtatggcccacttttgtgactcctagtcaacatagtactggaagtcctagccagagcaatcaggcaagagaaagaaataaaaggcaaggcatccaaactggaaaagcaatcaaattgtacctctttgttgacgatatgatcctatagctagaaaaaaactaaagactccaccaaacaactcttaggtctgataaataaattcagtaaacttgcag

SEQ ID NO: 817118 - DNA, 542 bp, Homo sapiens
tgcaacaattctcaagaattgagcacactgaatccaacagcacatcaaaaaatatatatatatatatacatatatatgccatgatcaagtggaattttctccagggttgcaaggatggttcaacatagggaaataaatgtgatacatcacatcaacagaatgaaggacaaaaaccatatgaccctctcaaaagatgtagaaaaagtatttgataaaattcaacatcgctttgtgataaaaaccgtaaacaaatggggcatagaaggtaaatacctcaaaacaaaaaggccatatatggcaaatccaaagctaacaaaacatcatactgtatggcccacttttgtgactcctagtcaacatagtactggaagtcctagccagagcaatcaggcaagagaaagaaataaaaggcaaggcatccaaactggaaaagcaatcaaattgtacctctttgttgaygatatgatcctatagctagaaaaaaactaaagactccaccaaacaactcttaggtctgataaataaattcagtaaacttgcag

SEQ ID NO: 817119 - DNA, 561 bp, Homo sapiens
gatatttatccaaatgaattgaaaatttatgtccacacacaatcctacacatgaatgtttatagcagcattattcagaaatgccaaaaataggaagcaaccattatgtccttcgataggtgaatgggtaaataaactgcggtacatccagacaatgggacatcactgagtaataaaaatagatggaatatcaagccacagaaagacgcagagaaacctcaagtgcacgtcgctaaactaaagaagccagtctgtataattccaactatatgaccttctgaaaaaggcaaaaagtagtgacaataaaaagatcagtggttgcaaggagtatgagggagggatagacagaagggggaaagaatgaataggtggagtacaggggaattttaggaccgtgaaactattctgtatggcattaatgataggcgcataacatgatgcatttgtgaaaacccagagtaggacataacacatagagygaaccctaatataaactatgtactgcagttaataataatgtatcaatattggctcaggagctgtgacaaatgtaccgcactaa

SEQ ID NO: 817120 - DNA, 640 bp, Homo sapiens
aaactagttatattgagtctaacaagtcttttgaggttactcttttagtattacatattcagcttcttagtgtgagcatgcaaatgaatgttatgtagtttaagcttgagtcttaaaacaacaacaagamatttattctggtaatgttctctgaaagaaaatagtctttctccatgtctttataatattaaaaataattattattttagaaagcatagtgtatacaagctatacctacagtttttttttttaaataatcactttaagtaggctcttgcaaaccacttagccaagaaaaggtattaatgttctgatgttattgataatgtgcttatatattctttgctgatttcttgtggtgctctgtgcccccctactgctgctatgggcatgcaattttcattgactttgtagagagaattgcaagcaagtcagcttcgtggaagtagagagagaaaaggctagaaacagatccatggctgacaagagaagaaaaatcatgctgaaaatgggataaataataacagtcttatttggatgagtctgccacaaaataggaagccaaacaatcttaagatgggtcaaggctgctccatcacagagagtggcatgtaacattatctgatgaagggaatggatt

SEQ ID NO: 817121 - DNA, 589 bp, Homo sapiens
atgatgcatagcactttggggccagaccattaacgtgcagatgaaattytctcccgaattatctgccagttgagatggtggttgcttcaacactcagggtcctggagcgaggcagcctggggcagagtcccagccatattgtggtgctgcatatgcacgatgagcaagaaataaaacttctttctttctttctttctttctttctttctttctttctttctttctttctttctttctttaagcagagagatacactggttgtttgccaccatggaataacctggtttattctagcttattagtaagagctcagtactgaaaagagaaatgataatgatgaaagttgtaatgagcaataatactaatacatatatgtgtgtatatatgtatatatgtgtatatatgtgtatgtgtatatatatatatgtatgagacaggatctcactttgtcactcaggttggagtgcagtggcacaatcttggctcaatgtaacatctgcctcccaggttcaagcgattctcccacctcagcctccagagtagctgagattacaggtgtgcaccaccacacctggctaatttttgtatt

SEQ ID NO: 817122 - DNA, 589 bp, Homo sapiens
atgatgcatagcactttggggccagaccattaacgtgcagatgaaattctytcccgaattatctgccagttgagatggtggttgcttcaacactcagggtcctggagcgaggcagcctggggcagagtcccagccatattgtggtgctgcatatgcacgatgagcaagaaataaaacttctttctttctttctttctttctttctttctttctttctttctttctttctttctttctttaagcagagagatacactggttgtttgccaccatggaataacctggtttattctagcttattagtaagagctcagtactgaaaagagaaatgataatgatgaaagttgtaatgagcaataatactaatacatatatgtgtgtatatatgtatatatgtgtatatatgtgtatgtgtatatatatatatgtatgagacaggatctcactttgtcactcaggttggagtgcagtggcacaatcttggctcaatgtaacatctgcctcccaggttcaagcgattctcccacctcagcctccagagtagctgagattacaggtgtgcaccaccacacctggctaatttttgtatt

SEQ ID NO: 817123 - DNA, 584 bp, Homo sapiens
ctgcagtaaccagcctcttcttttaacatcagatagctaaaggacgttatcctcaaagtcatggaaaagcaggaagtttttcatgacaaatcagtttgccatagtacagttaaaaaaaaaaaaatacaggccgggcgcggtggctcacgcctgtaatcccagcactttgggaggccgaggcaggtggatcatgaggtcaggagatcgagaccatcctggctaacaaggtgaaaccccgtctctactaaaaatacaaaaaattagccgggcgcggtggcgggcgcctgtagtcccagctactggggaggctgaggcaggagaatggcgtgaacccgggaagcggagcttgcagtgagccgagattgcgccactgcagtccgcagtccggcctgggcgacagagcgaggctccgtctcaaaaaaaaaaaaaaaaaaaaaatacagtgcaagcatacctatgtattcttttttgcatgaaaatgtttaaggtttgccagagtcaatagctaaatccttctttataatttaccagtaaattattattwtttttttttttttgagaatgaaaaacatttcatgtttatt

SEQ ID NO: 817124 - DNA, 585 bp, Homo sapiens
aataactggaaggacctaaggtatgacaagcctccttggcatcctgcctgcctctccatcactgtaaggatggagattttccaaatttgtgaaaatggcagaattaagtcagacaagtgcctggagttctattatgttctcctaaaatcttgtctgcccaacatcagcatgtattaaagttaaactgatgactttaaactggaattaaatgtactttaaaaacagtttcactgaaaatggaaaaatcatgagattctgtagaactgtctgaacagattttttttagctgattacatgttggcatggtgtttgctcaggagaacaaaggctaccataacaccttatgtatatgagatccctcattaccatttagtcagcaaatcttggcaatgcttctcctgaatctttagtcagcaaatcatttagtcagcaaatctctgtaatgcttctcctgaatctttgcaygcacatagcaatattcctggtctcacatctagatttcgtcacgtatcccgttttattgtataatagtcttggatattcctcatcttaatttccctggctttggataataagtttgttaac

SEQ ID NO: 817125 - DNA, 513 bp, Homo sapiens
gcggatccgggccctagcggcgggcccagtagcggaggtggtggcggcggtggaggcggcggcatcgaggtaataggtgactratctccccgggcgctagctctgagcagatgcggactctcttcggtttcctaggcaagatcgacgaaccacacctcttcccgccggataattcacctttgccaatcgcaatctcgttaaattccatgatccagactcagcagttgtcgcaccatgtctgacaaacactgtattccttgacagagctttgataacgtaccatatgcagaaggagttattcctgataaggctaaggcttgtctctgttggcaccagctaatgcaatggcaggtcttctgcttggtgttgggctcctgcctactcctaacccacttactcagactggcgctgttccaccggctgctttgggggctcctactcttgttcctgcccttgctgcgcttgggcttcctggagcaaacttgaactcaatctgttgccacagatagttgc

SEQ ID NO: 817126 - DNA, 500 bp, Homo sapiens
tgttcccagctactcgggaggmtgaggcaggagaatcgcttgaacccgggaggcagaggttgcagtgagctgagatggtgccactgcactccagcctgggcgacagagcgagactccgtctcaaaaaaaaaccaagtgatatgtgtcagagttttgtttttagttagtgtccatttactacatcacttcaggagacgaattattggttaagtacatttaggaaatggagttgtggcttttatttgacattaatgagatatttacttgagtatataatttttacatcttatttcagaataagaagtaaaatacgggtgtcacaaatccaactacagttaaaacttgataaccaagcaaacttggttttcttaatgcttaattttagagattacaaaatactgtttttaatgtcaccatttcagggtaatagatttgtcacttgtatgaagaaggcttactagtgaaactggcttggggtcttaataatcttaattctgaaa

SEQ ID NO: 817127 - DNA, 553 bp, Homo sapiens
cttataaattactgtagattacatcaatctgtggattttataggttgatttcatggtaagaaaacttcatttttgtaaccagtggaaggataatcttagttttaaagtgctctataacatttttaggcattcctattacaaagattctattataatgcccatttacctttcccatcgttttggttacgttgtgctttttagtttatctgatatgctctagaatttgttgaacatctttgttaaatatctttttctttttttttttgagacgagtctcactctatcgcccaggctggagtgcagtggtacgatctcggctcactgcaacctctgccttgtgggttcaagcgattctccttcctcagcctcctgagtaactgggattacaggtgagtgccaccacccctggctaatttttgtttttagtagagatgcgatttcaccatgttgtccaggctggtcttgaaattccttgacctcaratgatcctcccacctgggtcttccaaagtgctgggattacaggagtgagccgccaccgcaggccatgttaa

SEQ ID NO: 817128 - DNA, 584 bp, Homo sapiens
acagtctaccctggaatgaaatcctggagggtttcttaaaggatcagggctttatagacaggtgggagtaaagcaggaagaaasgggtcaggaaagcagcctgtggcatttgaaagagcaaaagcttagattcctttggattcttccttgacatttcctaccccatggccgcaggcatataacaactcctctgagctcaatttcctcatctttgaaatgggaatagcaataggacttcggtcttgggttgttataggacttcattaacatatgtaaagctttagtatataataggagctccataaatagtagctattagaattgttaaggcattctgacctggagaactgtgagcttgggccagggtaggaggggtagcagaaggggatgaagtgttctattactaataatagcagccagcccgtgctcctcaacacaccacctccaggccctgggcaaggcactttacatgtattatcccacttaatctttataacagcaactacatattaacccatttttcgaatgaagaaactgagtctcaaagaggctgtgaactgtgctcaaggtaacccagcgagtaa

SEQ ID NO: 817129 - DNA, 438 bp, Homo sapiens
gtttctgagcaggggaccggcatgctccccaggactggccacatggtgtgcgcgtgagggaggcctgggcagacaagctcaacaccactaagggctgaatgygaaaccctcccgcagggatgtggttttgacatgagaaggcaaaagaaataacgcttccctcaaaggaaagaactgacaaacaaagctgggcgcccatgtgtcgggcacaaacactaaaggtggaagttcagacgctaggaagggcgcccgcagccacttcctctgccgcccctcttcccctgcaacaaggcctagtatagataggtgcacagctcctgggcctgaggtctaaggacagccagcctgggggaccacctgtctgtccacatgtgtgtgcaagaggtcagggagaaagggcctctgggtgcttgcttgcagggagtgcctgtccccatc

SEQ ID NO: 817130 - DNA, 353 bp, Homo sapiens
attgatattggcacaagtgttctggctagtgagtttccatgtggcttaatcctgaaatccatccttctcatttcctataaactaagttttacaatttccttaaagtttattcacacctctatcctgaattgcctatatctggagctggtgtatgtctaacatgaaaaatatgtatcagatacttttttttttgagacagagtctcgctctgtcccctaggctggagtgyggtggtatgatctcggcttactgcaacctccacctcctgaattcgtgattatcctgcctcagcctcccaagtagctgggattacagggggtaagactgaaaaacaagaggctggttaagagtgt

SEQ ID NO: 817131 - DNA, 353 bp, Homo sapiens
attgatattggcacaagtgttctggctagtgagtttccatgtggcttaatcctgaaatccatccttctcatttcctataaactaagttttacaatttccttaaagtttattcacacctctatcctgaattgcctatatctggagctggtgtatgtctaacatgaaaaatatgtatcagatacttttttttttgagacagagtctcgctctgtcccctaggctggagtgtggtggtatgatctcggyttactgcaacctccacctcctgaattcgtgattatcctgcctcagcctcccaagtagctgggattacagggggtaagactgaaaaacaagaggctggttaagagtgt

SEQ ID NO: 817132 - DNA, 614 bp, Homo sapiens
ttttgatttaaagtgagagatgtgtgactcttcctttcacttaaacacttagaggtcattgtagggttatgaattgacctaatttcaatcttgtgtctcagagaatagggaggcccaaggagagggagagagatgagagaacagcctattgttgaaacagtcagaaaacacacaacatttatcaattgagtttgccatcttatatgggtgagacttgtggcattccaaaacaattgcaatagtaacactgatcactgatcacagatcactataactgacataataataataaaaaagtttgaaatattataagaaatacctacatgtgacacagattcaagaagtgatcatatgcctttggaatatgacgcccatagacttgctagattcagggttgccacagactttcaatttgaaaaaaaaaaatgcaatgtctgtgaagtacaataaagtgaagcacaataaaacatggtattttctttatccattcatccaatgatgaacgattaaattgtttccacatcttggctattgtgaataattctgcaatgaacatgasagtgcagatatctcttcaacatactaattttactttattttttatatacccagaa

SEQ ID NO: 817133 - DNA, 625 bp, Homo sapiens
aaagaacttagtttcaacttcttcacagcttctctggaatcgttgtactttgggactccttgtttwtgcaggataatatattttcatcttttctgcggccttgttttagttacttgtttatgtcctgtgatgcaaaatgaccacatttctaagaataaatatccaaagaataataataagtagccaaagttctttaaaaattagcatatacaatcaagcagcatactttaaaatgttgtaaaataactaaattggatgccttcttgcattaataaggtgcttcagcattcaaaaactggaaacatagtatgttacatcgataaatcaaaaataaaagccaaatggctggtggtgattgagttttttcaatagatacaaaatatttaatagaattctgtatccattataaaaatgtttggtaaaataaaaataaaagaatatttcttaaatattttaaacactatttatcagaaattagtagtaaactttgtgttaaattctaaaatttaaaagcgttctgactaaagccaggaacaagataagtatgcttactgtctgtattactaagtactattttgtacaggctacagaatggaggaaatataacaaataaatgaggaaaaaa

SEQ ID NO: 817134 - DNA, 594 bp, Homo sapiens
gcttcccatccagattcttgggatcctccagaccgctgggaccatggatatggttttctccmtcatcaggcagtttggaaattctttctcaggtgaaaggcagagacttgggagccgactaaggccctggggtaattgtcttaaggaattttggcctcataattcactagctgaattgaaaatgtgagaacacaatgttacacgattaattttatttcttaattctggtgctgttttcaagaagtgacagatttcagaataactaaataatttctagtgtcacttttttctcccaatattactatcacgtgtgaaacctggtattttgagatatttcatcacccatctggttctctaggaatctttaaaaagtgcaagtacttaaaaaaagaaaagagtaagaaagaaagaaaaaagaaaaagaattgttttaaaatatacatgtatgtccatcttgcctaagtattttctaatattatcagcaggacacaatttactatgcatcattatctactcttatgaaatagtttaaatattttagcataattgatgtctccatgcattgcctagcttaaggattgattcttacattct

SEQ ID NO: 817135 - DNA, 587 bp, Homo sapiens
tcgcctacccaccaccccacttcaactggaaatctgtttccagtcagcagaaaactgaccaaagacccatcatcaattatactttgtgaggatggttgtctctgaaatatgcagagtggcccagaaattgtagaaaagaagggttgggaaggtccatgcctataaagccaacaagacactttctgcacctcaagaaaagtagtctcgctgttattgtattctgtctgatcaattttccttattttaatgacacatagttttcatgttttgtaatatttttgtcatcacacatggtaaaaagccaacccatatagtctgaggtggaggatgggaaagcataagacattcatacagtgacccttcaaacagtcacagatgacatggttcctggacagtggggcatatctcccagatgaatttcaatgaaagcaattctatagagagcagagaccattgtggcctaaacaaagagcttttcagtgacccaggaagagccaagtatwctacttcaggcacctggagcaatggatgacctgaatgtcctcaacacaatcctggatcattatctttactttcaaccagatttt

SEQ ID NO: 817136 - DNA, 533 bp, Homo sapiens
atgtagtcagtgatttgtaatcccacagtggtttgccaatkgttgctattagcaggaaatcaattcagagatgtcatttgaggatgaagctcctcggtattttgatgcctttttaggaagctaagaggagctccactaccagctcttcagaaaaaatctcctgagttgcctaatttcacctgaatttttggagcacacatttaaaaattacttgtgaatcaaattcaatttgaaaatatgcaactttttttagctcttgctttctccctgagctatttcttgaaaattgtggaggaattgcttctgctcattgggcccatttacatgaattatttatttttatatgtattacatatttgtctctcctccctcctacaagctgttccatagcaagacctctcgtccctatatatattcatggtgacattacagccatcttcaccctctgatgtctaaaggaaatggaaattctgagggtcttcgaaaagcaaaaagccaggtttcctttattctagatttctagaggatttcat

SEQ ID NO: 817137 - DNA, 512 bp, Homo sapiens
aagatgtggaggtggaagacagtgattttgacaatcctgatcttaggtaggcctcagctaatgtgtgtrtttgtgtcttcatttttaacaaagaagcttaaaaagtaaaaaaataaaaaataaaaaaataaaaaattaacatggtaaaaaagcttatagaataaggatataaagaaaatatttttattctgttgtacaatgtgtttgtgttttcagctaaatgttattacaggagttaaaaagtttaaaaaagttataaagtaaaaaatttacagcaagctaaagttaatttattattgaagaaaaaaatagtttttatacttgtaagtgtagcctaagtgtccagtgtttataaaatctacggtagtatatagtcaggtcctaggccttcacaatcactcattactcactcctgcctcacccagagcaacttccagtcctggaagctccattcatggcatgtaggtgtaccagtttttatcttttatactgtatttttactgtatcttttc

SEQ ID NO: 817138 - DNA, 565 bp, Homo sapiens
gtttgaatgcttatagctcaacaaggagcaaaaccacatagctccatagcttccagccaccccaaatgcccattgaaattagtttatagacaaaccataaatattattcccaattaagtagctcctatataacaaagcaacagaaagacattctcaggcattcatgaattcataaaatacaggacctacatcttttaattaaaaacttatgtttttatgcatatgtgtataaccaaaaggtgtctgtgtgcaggtaagtatatgtacatatactatgcattatctatgcacatatgtaatacctgagcaaagaataaaaaaatttggaattcacaatataaaaagaggcttcaaaggaggttcatccccccaaaaagatgttttaaaaagtaattacaaaacaaacataaaatccccgagagaaaaagtggaatatacattatctatttttgtgatgggcagaaggaggacaagagggaaagaaagagggaactkttaatagaagggtgcataaatcactttgaatataggggaagaaattattgttctattttttttttttttt

SEQ ID NO: 817139 - DNA, 709 bp, Homo sapiens
ctgagagtaaatgaggagaaatggatccaattgtgtcgggggtatatgtgcaagcttgtgcactgatggcctgagtgtgtgtmtacacttgcatcacacaccaccccttccccattgcccccccacacacacgtattccatgccatccccaatctaggattcctcctataaaacaagaggagaaaaacatcccaacctctcaaacaccttattctaactttcatcctccaggggaaacctaaaaagacaacaccctccccctctgtttccccccttcccatgtccttgtccactctggtttttgagatttcttcttaaaccgcatggggtgcagcccctacacaccttccccagaatccaggaggcaccagagtcttgtccctgcaaaggactgagacaaacgccaatcacgtcggggcctcttgcagtgcccattctgctatgaattcccaaggtcaaaaccattctggtgttattaaaaacataaatgttgcataccaggcagcggggggaaaaattataaggcagccagatgagagggagatggaggggccagtaattgtcttcgtcttcccagagtcaagctccacagggctggagccgcacacagaacattgctttttaatttaactcagtaaggtcagtggcagcaaatgaggcaggggaggaatggcacctcagagggagggcgccgggacctgcagagccg

SEQ ID NO: 817140 - DNA, 633 bp, Homo sapiens
acgtattatttctaactggaactttgaacccattgaccaacctctctcgattgtcttctccccaactacccttctcagcctctgataaccattattctactttcttattctatgagatcaagttttttttwaaaagttttattttgaaatatacaatacattattattagctatagtcaccttagtgtgtaatagaacaaccagaacttattatttctaactggaactttgaacccattgaccaacctctcttgactgtcctctccccaactctgcttctcagcctctgataaccattattctactttctaattctataagatcaagtttttctaaaaaaagttttaatcaacaaataataattgtacatattcatggtgtacatagagattttcaatacatataatgtatagtgatcaaatcagggtaattaacatatacatcatctcaaacgtttatcattttttatatatttatgttgggaatattcaacatcccccttttagatatttgaaactattcattattgtcgacatcctgcagtggtatagaacactagaacatattcctcctatcaagctgtaattttatagcctttaacaactttcttcctatccctccctgccctggatt

SEQ ID NO: 817141 - DNA, 526 bp, Homo sapiens
ataaattagttgccctcctaatggcctcctggctgtacattcttccctaccttcataatccatcagcatcgtgaaagcacagagggacgttgagcagagctctgtgctggcgccaccgcactctgtagcctgtaagagagcagcaaagaggaatgtgttgctcaggtatagacgggggtgggtgcatagagacttccgctgcggcatggcccttcatgtccagggtaggcatgaagcaatggactattccaggttgtgcataggaaaccacacagcactcttggagggatttttgctctaaagacaactaattcaaaataaggcgctttctacctgaaagaacagcatgaactaagaaaagagatatatagagagatctctgtgtactatgatcaggttgcacatattctgrgatttatgtattcttattagttcaattccttatttattgaccacttactgtttacaatattgtattagattcttttaggattacagttgacccttgatcaatttcaggggttgg

SEQ ID NO: 817142 - DNA, 636 bp, Homo sapiens
ttctgggcatctgcaatttcctcactgcctgtggaaggggaatttactagaatgtagatggctccaaagggttctctaccccactscaggcaagaagcctggactttctatatagcccgagtgtcactcaggctactcaagcgtgaatcttcaaaaaccttggcagaaatactcactccggctttcgtttcttgccagtttgctgggataacttttggtcgtttgtacatatggctctggaggtggcaaatcggaaatcggatggaagtagaatctgctttcccactcatctgggaagagaaacaagcagtatcttcagtgacagacaatgtgctatgaagacttacgtaacgaaaggcacagaatgaaagagagagagaaccacagacatcagtgctagtttttatgcctagaagtttacagaaaagctggaagtgctacaaaggtcacgaattagtacactgacatatatacaggcctgcaaatcaaagcaaagtggttttagtgagagtgattaggatccagccagtccctcttaggagctgggggctaaggtatgggacacctttttccccattgataacaatggcagagataggcaacttagtatctgcaggccgtcaggcctcttaccta

SEQ ID NO: 817143 - DNA, 412 bp, Homo sapiens
ataataataatttaaaagtttgaaatattgcaagaattaccaaatgtgacacagagacacaaagcragtccatgttgttgaaacacttgctcaatatggagttgccacaaaccttcaatttgtaaaaaaaaaaaaaaaaatgcaatatctgtgaagcacaataaagcaaagctacaataaaaaaaaatgcctataactgacaaagtatagtatccagaatatgaagaaacgcctccaaataacaaggaaaaccaggagtaaaactggtgaaaagacttgaacaaacacttctcaaaagagaaaatcccaacaaccaataccatatttttaaatcttcaatgtcattatttttcagggaaatgtattttaaaaccacaacgaaataccactactcatccatcagatgagcaaa

SEQ ID NO: 817144 - DNA, 619 bp, Homo sapiens
acacaacccacggagaacaaagacgagtaagrcaggagagcctcccaccaggagtggtacggagccaggagaggcccccaacatggggaaatggtgagtgagtcagagtgcctggggacccacacttctgccaggggacttttgcaacactgggctcaggagaacacccatgacctctcccaaccggggcctgcagactgacagggagagctaggtggagtctgggtggagccgccactcaggcacatgcagagtgctggtggccttggatcccagggcaacccaacaccagcggctgcagttccggcaacagggaaggtcaggctccttcccacaccaccaagatagagaccacacccacggggctgtgcagtggacaaactgcagggctcacctgcactgcacctcctcagacaaggtccactggcctgggaccttagcgtagccacccagcgccagctgatctctcaggccactagctgctctgcgcttccctgggacggagctcccagaggtagcaggcaggccgccattttcgctgctccccagcagtccctcctgttgccctcaggctctggagggagcaccgtgattacgcactcacagggacccccagtac

SEQ ID NO: 817145 - DNA, 485 bp, Homo sapiens
tgtgtgagcaaaaactcagttacatgtaaaaaacccaattccccctgaagaagagaaagagctggagtcctttaaaatcaactgcctgtttttctgtggctagtgagccttctctctccctttcccaggcattgtgaagactgtttctctagctatgcagctgtaaggtcactagacagataatctcaagtcataaaacatgttgttccttaaaaagtaaaaagtaatataatgcatgtctcagttaaataactgtctttgcttctcgtttctataataggcttccccctgcacagatctcccctcgccccacaaaatgcttaaaaggtagcttgactctttgttcaaggctsagtcctttaaatgttaatccgactcggtcggtgcatctaaataattgaataattcctcctcaacccctcggtctctctgattctttaattatcccactgcatttctggtggcccgtacaggaactggagacg

SEQ ID NO: 817146 - DNA, 485 bp, Homo sapiens
tgtgtgagcaaaaactcagttacatgtaaaaaacccaattccccctgaagaagagaaagagctggagtcctttaaaatcaactgcctgtttttctgtggctagtgagccttctctctccctttcccaggcattgtgaagactgtttctctagctatgcagctgtaaggtcactagacagataatctcaagtcataaaacatgttgttccttaaaaagtaaaaagtaatataatgcatgtctcagttaaataactgtctttgcttctcgtttctataataggcttccccctgcacagatctcccctcgccccacaaaatgcttaaaaggtagcttgactctttgttcaaggctcwgtcctttaaatgttaatccgactcggtcggtgcatctaaataattgaataattcctcctcaacccctcggtctctctgattctttaattatcccactgcatttctggtggcccgtacaggaactggagacg

SEQ ID NO: 817147 - DNA, 492 bp, Homo sapiens
aaaccagacaaaaatatttaaaacaactacttgaaggtactagaaaatactgaaggacagacagaaattcgagaagcatttacacttgaaacactggggaacaactctgagttcgtggcttgcctaccccctgtcccagaccagatgatggaaagccacagtcttccttaccagcttatggaagcagataatagattcagagcagcagaggaactagaaagcagggtgggggatattgtagaagagagagatgcagaagggttgagattctaaatctgagtatatgctctgcccagattcctgggtggatgctaaactaagcaagcaaatcggagaccccacagaacatagtgaaagagaaggcagaaagtagaggagatgctgtgcttraaagacagaggtgttcttggtgagatgtgagtctgctgtatctcttactaagtgtgttcccaacccacactcagactgggctgaagaaggcagagcccttac

SEQ ID NO: 817148 - DNA, 492 bp, Homo sapiens
aaaccagacaaaaatatttaaaacaactacttgaaggtactagaaaatactgaaggacagacagaaattcgagaagcatttacacttgaaacactggggaacaactctgagttcgtggcttgcctaccccctgtcccagaccagatgatggaaagccacagtcttccttaccagcttatggaagcagataatagattcagagcagcagaggaactagaaagcagggtgggggatattgtagaagagagagatgcagaagggttgagattctaaatctgagtatatgctctgcccagattcctgggtggatgctaaactaagcaagcaaatcggagaccccacagaacatagtgaaagagaaggcagaaagtagaggagatgctgtgcttgaaagacagaggtgttcttggtgagatgtgagtctgctgtatctcttactaagtgtgttcccaacccacaytcagactgggctgaagaaggcagagcccttac

SEQ ID NO: 817149 - DNA, 583 bp, Homo sapiens
ccaatctaaccaaaaccccttgtttttttcttgtcatttcattggcttccctattcttattgaacatgctctttsttttcttaccaagtaaactaattgttccattttactcaggtcttcagctattgccaggcttatcatgttcccatcaccactcaaaaaattcccttgactttctactttgaccaccaattaatgaccaactctatttaaataatcccttccaagtgctttctggatcaaagatcagtgcttcagaaacaaacaaacaacaacaacaacaaaaaaaccatgcagtccagatatgctataattttttttttttttaagacagagtcttgctctgtccccaggctgcagtgcagtggagccatctcggctcactgcaacctccgccacccaggttcaagtaattctgctgactcagtctcccgagtagctgggacgacaaacacgcaccaccacacccagctaacttttgtatttctagtaaagatggggtttcaccatgttggccagtctgcagatatgctataaattcttattaactactattaacttaaatctcatcattgtcttttat

SEQ ID NO: 817150 - DNA, 600 bp, Homo sapiens
acactacaaacatgaagatggctgctttggggaaatgaagtgggtggtaggacttgattgttaaaggcagctttacagatgcagctagtattttcttttcctctgctaaatggtggaatgcatgcctacattaacttatttacaattgtttacacatacataaggaggggaaatgatattttagtgtcagtttaataggttaaaatgttaagttgtcaattccattaaaatatgggtatttgttatgttctttgtattttagacaatgatagccagcattgtaggtttagtaatttgtactgaaagtgtaattatttatgtgtagtaatcagtctcttgttaggcacaaataattcagctagaagaaaaaccacttgataagataattttgggtcttctaaaaaattaacattaaacagaacatttataaagtctaacaagacactgatgtacctggcagtagctacctatatccagaggaaaatrcatgtagcttctatgaggccagctgagcaactctcagtgtataaaattacagaatatactagttatccttggtcaaaagtacaaaatccatatcctaagtgtgttcacaaaata

SEQ ID NO: 817151 - DNA, 612 bp, Homo sapiens
tttagatacagaaaagttaaatgacttgctcttggcaataagttaatgtaaatataggactaaaattcagatttgttcacttctattctagtattctttaataatctcatactttattcctgatttaataagcaggtatttaatgattctaactttatatagtcaacgaatctaatggattttcagtacagaagagtcgtctgatactttctagggcaactgaaacaaagtgtctcctcattatctacaagtaaatgatagtgattagccaggtccatattactagaaggcatatggcagacggaacctactgcaacaacccgcaactgaggaaccttttaacgtgtaatgatcatttataatttttaacttccattgttaacaatcgttaagtgattccacattttaatttctttttgaatgagtatgaacacacttgaaataatttccctatcatatatatatatatatatatatatatatatatatatatatatatatatatatatawaatttgcattactcctgacaaggcaatatacctaatacagcaaaggtttcaggtctgcgctataacttcattgttaattgtccaagtttgtatcctacaga

SEQ ID NO: 817152 - DNA, 620 bp, Homo sapiens
gcagaagctcaaaatgctgtctgtaacaggtgcagtgatgcctagttttaatgttaacttacatttgaatgacattttacagcctgtgtttgaaaaatgttcagaagcatcacacagaccttagaaacagagactccatttataattagagttgtcatttgcttcaccccaattgtcaatatctcagttaacctaaatagtaaaaccaaccccacaaaaggtcctttgaaacaggtgcagatggaaagttgttttaaggatggcttacttctggtactttatgtttagaaaatgtttgatatctacagtaaagattttttagataaattttaatatgtaaaaacttttattcatttgacataattattgagcaccactgaatgcatgtgtcaccatgatttgtaggttaaaaagaagaagaaatgagagacaagttttgggttaaaaactgctgaaatctccttaggggtaataaaaaatgatggtctcggggataggcaccttagaccaggaaaattgacatctaygagtcattggagattttgctgtaaaggtttgaaaattaaggactccattgaattaaatcacacatcttttttaaagagctaccctttaggagt

SEQ ID NO: 817153 - DNA, 620 bp, Homo sapiens
gcagaagctcaaaatgctgtctgtaacaggtgcagtgatgcctagttttaatgttaacttacatttgaatgacattttacagcctgtgtttgaaaaatgttcagaagcatcacacagaccttagaaacagagactccatttataattagagttgtcatttgcttcaccccaattgtcaatatctcagttaacctaaatagtaaaaccaaccccacaaaaggtcctttgaaacaggtgcagatggaaagttgttttaaggatggcttacttctggtactttatgtttagaaaatgtttgatatctacagtaaagattttttagataaattttaatatgtaaaaacttttattcatttgacataattattgagcaccactgaatgcatgtgtcaccatgatttgtaggttaaaaagaagaagaaatgagagacaagttttgggttaaaaactgctgaaatctccttaggggtaataaaaaatgatggtctcggggataggcaccttagaccaggaaaattgacatctatgagtcattggagattttgctgtaaaggtttgaaaattamggactccattgaattaaatcacacatcttttttaaagagctaccctttaggagt

SEQ ID NO: 817154 - DNA, 529 bp, Homo sapiens
gctaagtcaaagacctaaatttcttcttccagatacacgtagtcccaacaactttaagtgtttcatatatctctcccaaagcttattttgtgctcttattatataactgttttcatttatcaaaaaaatgataaatttgactagtttgaagtaacattatgtgtcacttcttggacttttggctaagatcaagtgaaaagcaacattattaaggtctgaaattaaatgtcaaaaataatgtcttaattcaaaaatacttttatggaacaattaaaataacataaacaatacataagccatgtacatatttccctaaaatatcatagtattattttaaaacaaaaacaaaaactgaaataaaagttagcaaaaagcattttaaacattttgccacagaggaattctatgcataaaaatgtgataaaacaaattwaaaaatttaggaactataatgaattttttttttttttcgagacagcgtctcgctctgtcacccaggctggagtacagtggcacaatctcggctcac

SEQ ID NO: 817155 - DNA, 637 bp, Homo sapiens
ccattattagtgagattgatttatagtttttgcttgyatgtttgtttcctgtttgtcttgtacttcatttcaccagttttctattaaaatgggattcataatttaaaagttagcaagtgtcactggtttgttgagaaagctgtttaagaataatattctaaaaacaaaagaatggccaaagattcaacaggaaaatttcaattaaaattttgtactaatgtcctttgctgaatattctgtgccaaaaatttgattaagcattttagttttattatgatatttagtcctcacaaagttgttgcgagcattattaccttttaccttcaggtagggttcctgaggcatcagtttcccaagacagaaaaactagtctggggaaatgcttgcattcaaacctaggttatctgaattcaaagttcgtgtttatattcatcccgttaacaaatcgcttcactagtacagattgaaaaggggtgtagcagcaagaaaataaaaactaatcaatcaaccacagttcaaatgcgggctatgccacttaaaaactctctgactgtgcacaagtcacttacctctgccaacctcagttttttatctgtaaagtggcccaggaatgtctgccttgcaacattatgtgcag

SEQ ID NO: 817156 - DNA, 637 bp, Homo sapiens
ccattattagtgagattgatttatagtttttgcttgtatgtttgtttcctgtttgtcttgtacttcatttcaccagttttctattaaaatgggattcataatttaaaagttagcaagtgtcactggtttgttgagaaagctgtttaagaataatattctaaaaacaaaagaatggccaaagattcaacaggaaaatttcaattaaaattttgtactaatgtcctttgctgaatattctgtgccaaaaatttgattaagcattttagttttattatgatatttagtcctcacaaagttgttgcgagcattattaccttttaccttcaggtagggttcctgaggcatcagtttcccaagacagaaaaactagtctggggaaatgcttgcattcaaacctaggttatctgaattcaaagttcgtgtttatattcatcccgttaacaaatcgcttcactagtacagattgaaaaggggtgtagcagcaagaaaataaaaactaatcaatcaaccacagttcaaatgcgrgctatgccacttaaaaactctctgactgtgcacaagtcacttacctctgccaacctcagttttttatctgtaaagtggcccaggaatgtctgccttgcaacattatgtgcag

SEQ ID NO: 817157 - DNA, 604 bp, Homo sapiens
ctttaaatttaaactgcagagtttataggaatttttgtagttaatagccattgatacatcagccaaaattacagacagcattgcctcagtcaacaccttcaacttgccaaatgcacttatttgtatgtaygttatacccccaatttagagaataattcagaaacaagaagctagtgtaggtgcagtgcgtttttatagtgactacaaatagtttcttcaggctactttcatcatttgtgaaagcacatttattgtttggtggaaagaatgaaatgtttgccatagcaaccatggcaaccctgggtgtcttccctattagctgtaatgcggggagcatcttcaacagcaggaaagagtcctcggcaattatcacccagatagcatccctccattttaaaagctttggctgaaactcttgggctcagaaaatttttaacatgatgtgttgatgaatggtaacaacagctattccattttggttaatttgggggagattaataagctaagtttttttactgtgggaaaaagggagctatgattttctttagacaaatttgcagaaactttaatgctaaatcattctctattttttgttttggtttgt

SEQ ID NO: 817158 - DNA, 533 bp, Homo sapiens
aggtccgcttgagcctagcaggttaaggctgcagtgaaccatgattatgccactgcacctcagcctttgcaagagagcaagactctgtcycaaaaaaaggaaaaaaaaaaaaaaaggatggatgtcaatggggaagaatacttgcgggaatctttgcatatactttgccatttctcagaaatgcacaattcacattaacatgttaggatttggggagatatttctttcttgaaataaggaaacaaatttaacaaagttcagcttagaatttccaaatacttcacaaactattggtgctacagagaacatggcattggaaacactgaaacagttggccctgcatgtccctttccaatagtaacaccattgggaagcagagcaaaagatttgctgtaattccttagacctgaatttgagatccagctttactacctcttataaaagtttcctgggaaagttcttcctactttgtgaaactcccctttatgcattcctaatatgagactgacaattaacttaaagattatataggt

SEQ ID NO: 817159 - DNA, 567 bp, Homo sapiens
tacagggaagtaaggccaatgatgtcaaaactctgcccgactctatggaatatgttactaattttgttctgcacaattagtagaaatccattgactaacttaaaagttttaatcgaagatattaaacttgactcttctatgtaagaaaaagggttatattagtaccatagaaagcctacatctgtttgttttgatttggcattcatatgcttatgcttgtatcacaacttttatgaaatatgaaaataacactaggaaaagcaatttaaagcaagaggacattggcaaatatctaccattgcagagattaaaggtggaaaacttcatactattatgtgggaagcagagatcatcagtgacttttttgagatagtttctataaaatgttagaaattggacagagtgcaagctgttggggagtggtagagcggtgacggaacagcagagcatgttgaatatattttgctgaggcagacaaggaattgtgatggaatcttgaaaagaaacggggggacttctggccrcaataagaatatagtttgtgcatttacgtattcccttcccttc

SEQ ID NO: 817160 - DNA, 460 bp, Homo sapiens
gaaagtgcttaagaaatgtrttttatacaagctgtatccataaaaaacgattacagtattctttcttttttattaagctagatctaacagtatttccatgtggcaagacattgttaacatttaattaactcactataatactcacaagcaattcaattaaaatagtgtatataaaaacattttataagtataagaatattatgcatatattatttatgtttttccgcctctaaaagtataccataaaccttgtttttttttgtaccaaaacaagcctcaatttccaaataagtaaagatttactgcagaagtatttattaattctatttgtgacttgtctcagttacaactatttcatctagacaattcagtcttttcagttgcactgtatttaagtacaaacttgaatacagaatacattatcttcaataatataaactaatccattttggcatgaaag

SEQ ID NO: 817161 - DNA, 486 bp, Homo sapiens
aacactgactggatatttattgatattcacaatgtattgttaattgtattaggtttcatgctgaaatatttatggcagaaagcaaaagatgtacaaagatgtctaagatatgcatcaaattaaaaattaacctagcaggggaaaggcgtctgtccaagtctagatcaatggttttcaagcaatactgtgcattagaatcaactgtaggacttgttaaaatgcaaattgataggtttcaccctgagtttatgattgaggaggtcgaagacagagcctgaagatttgcatttcagactggttcttgtatgttgttgatgttgctagtacaaggaccacatttttgagaatcacttgatggawgaaacaacatcgttcataagctgataattattgaaactgggagggatgtatactgaagctgggggttcattaagtcatgctgtctacttttacatgtgttctatattttccgtatttgttgaaaag

SEQ ID NO: 817162 - DNA, 635 bp, Homo sapiens
ccgattagatgggactacaggcatgtgccaccaggctgagaggtgacagagtgctggcagccctcgcagcccttgctcactctcggtgcctcctcagtctcagcgcccattccggccgcgcttgaggagccgttcagcctgccgctgcactgtgggagcccttctctgggctggccaaggccagagccagctccctcggcttgtgggtaggtgtggagggagaggcacgggtgggaactggggctgcgtgccacgtttgcgggccagcgcgagttctgggagggggtggagttggcgggccccacacttggagcagccagccggcctgcaagccccgggaagtgaggggcttagcacctgggccagcagctgctgtgctcaatttctcgcctggctgtagctgcttccccacagggcagggcttgggacctgcagcctgccatgcctgagcctccctccaccgccatgggctcctgcgcagcccgagcctccccgatgagtgcygcttcctgctccacggtgcctggtcccatcgaccgcccaagggctgaggagtgcaggcgcacggcgtggggctggcaggcagctccacctgcggccccggtgcgggatccactgggtgaagccagctgggc

SEQ ID NO: 817163 - DNA, 576 bp, Homo sapiens
tttaacatgagaaaaatggcttcatgaaaacatttattttaactgtttatacttccgtatttatgtgtgatatactcccataaaaaagagcactcatgaaaaaatagtgcagttgagatagacattttaaacctggtatctgtagttagaattattaaaccaggatgttttaatatagcagaatgaactgaagtcgctattggaacaaactgatttactcatcttgtcaggtataacagtaaaactaaagaaaacgttataaaattctaaattgtgatatatgatctctttggcctttatctgtaaaagatattttatttccaaaaagaaaataaaagttagtttttttttaaattagattttacatcagccacactaacttattctgacctcatcaaacagtatcatgctggacaacatccaattgttaaaatgtcatttcttatatataccatgttttatgaagtgtttcaacatcaaaattattacagataccctatgaattattatagacaaccattttrtaaaattcaaatcaagccactttcccagaaaacacagaaatacaaattgaat

SEQ ID NO: 817164 - DNA, 334 bp, Homo sapiens
atattgggaataccctgagtttccattttccagtcacagacttctcgataaagtatcgtgacaagttcataaaggatgaaatgaaattcctcttaacctctatctgwttatgaagaatgaggattaaacaagaatttctaaccaatgaggcattctataaattcttgctgctattgctttgtatatcagtagcctaatatgccatggagtaggactacacagcctcctaggaacatgagaacattgtcagaagaaaaaaaggttatgtataaaagtatgtcattcttttattcatacttcacttattcaatggatgttggttaaacattgttat

SEQ ID NO: 817165 - DNA, 540 bp, Homo sapiens
aaatagtatagaactgttcattgtggcagaactaacaccatgagaaaaaataaatgtaaatctgcagatttcattaaaaatatataaggagaatgttagtatagcaaatgattcacttaaaaagattgtaagccatatgatgctgaccaaggtaacgtttcacctctccctttacatagagatcatggttcaccaagcattgcctgagtggcagaaaggccatgggaggcacaagaggaatgtggcagagtccatgaccttaagcaactttaacctgcatgggacccatgcaattagctataatcagatgttatgagggtgagatcaaagcaagttgcattttgagcccagggaaaggctctaacccccagaaaggaagaagatgacatcttactggaaggttaaaggtraagaatggagagaacaacattctaagcagaggaaagagcacttacaaatgcacagtggtgcaaaaatgatcacaatctattaataaagccaaataattttattagagtaagagaggtgagaaggtgagag

SEQ ID NO: 817166 - DNA, 603 bp, Homo sapiens
gttttcaaatttcacattactttttcctccaaattttgtttcctccaaatttcgtagagatgagacataaagaacggtgtgcagtgacttccaggagacaggaaatacattacaggagttaatcaaacccagcttaattattaaattcatttctggaggaaaggatgggtcctccaaattagaatctatgagatgctctcgggaaaaagactctgcaccagaagccactgacatgcaggtgctgggtttctgatctgggagtttccattgggccataaattcattgtatgtcttagaataagttacttagtttccttaactgtaaagtgttttgatcaaaatccaaggactcttctcaattttgactagtaccactcaattatctagatacttacgtatcgaccattttattgcaaattcttcacttcacaaacctgtcttcagaaaactggagaaggtcaagcaagcattcgagatgattgaactcaaactcagtttcttaacaaacacttsatggacagataaaatgtgccagatattgagttgtacatgggtaaaaacttatctttattctgataagacaatgtcaataaagaatatata

SEQ ID NO: 817167 - DNA, 507 bp, Homo sapiens
gaaaagatggaaaggaccctgaaagcactcttgaatataggtttctaataactctaaaatcattatcatttggactgagtaagaattcctgaaactttaatgaaaagaacattgtcaggaggctttcatgcttctagatggatatcatttgttaggtcctttttctatgatttggattcagagaagcaataattagaaatgtatctcccatgatgggatctattgcagatcctactggaaaggctaaggttacacaaaaaattttaaattctcttgggaacttctgctaaataatagaattcttctagattactttctggctaaacagaagtatctgtgcagctgctggcccttgtggacaatggaaaaatatattacatcaggtattayagcgatccagttgtaggggattagcgaagatactctttagttaagagagtagagtccatccggctcattcttttgtctgtttgattttaggtggtttaatttatggggaccctgggt

SEQ ID NO: 817168 - DNA, 570 bp, Homo sapiens
gagcccagtgctttccgccaccaatgccagtctcaggactcagtgcccacagcctgaacccgacatctgctttaaagggcataagaattggcccacaccggatttcacattcctaatgagaacattccagatgaagcaacagcaaaagagctgagtctgaacatccaattccaaggacgacggcagtgttccagccccatcgcatgcctttggtcaggggccgacactgagctcacagcacacaccacaggcaggctaccacagtccctggtccccctagacactgcccctccagacagcggatttcccatcttacattcactgtctttgccgtgggtctcctgctcacatcccactgtctaatgagtctcagcaggggtccatgaaagggccagacggtaaccactgcaggctgcggggtctgtgtggccttccccgcagccaccrgctctgctgttagagctctgttgttaggcagccacagacaatacatagcctgcaggcagtgtgccaaccccagccttaaatctgcctgtgggtaaggcagagtcaactggagaggcaatgaag

SEQ ID NO: 817169 - DNA, 634 bp, Homo sapiens
gtatagacctaaaaatgatatttcaagatttttaatgtcactgatctgtgaagtccaaagcgggaaagcctggtcttttcygtgctccctcgttttgtctgtaggcattgagcacagtgaggctacatgttgttttcagagttgcccagcagcctggagactgctggagctgcatcccagggagacagtggctggagtaacaccaaccagacaatgagatgggacatctggggctttcaagagctcagggcaaatggcctaagcaggtggctctgcaggtgtggattgtgtccagctcagggaagtgcctgggcctggtggggcctggagtaaggggagaggtggggtctgatgagcttactccaggtgggaggcccaggaaggaggttgggttttcctcccggggttctctctgggtgtaggcagggaggaaagggagaaatgctgtgaattagtcgactgcttctctggcaagcacgacctatttctaaagcatgagtcactacaaaatgtagctttttaaatttaaaaatctatttacaacctaggtgagaaatctttattttaattgtgaaggaaaacacaaccccacttgacacgtggtggaattgctgctgtcctttcctgtcagagc

SEQ ID NO: 817170 - DNA, 593 bp, Homo sapiens
gctgcaaagggattgcagtggccagtggagggctagtgaaggttcaagcacactgacaattaggctaaatcggcagtggcagrttcttgcatggaagttgcatcacctgctggagtgactgtcccttgacctcctcctgtctactgggtcttcctccacctcactttaatgctgctatgctgctaatgtgaactctgaggctttaactggggaagtcgccaccgccccctccatcacccttgtcctacaggtcagggctggaatgaggagcacttgcagttgcctagtgggtgggatttcaaggaaacgggatacctttcttccccaccccttcaccttttcccagaaatggtctcatcactgtttccttttggaattctgtcattggaatttcctgcttttgcagctcttgccagcttgcgtttcttttgaaattcagtacgcttgggagcagtgacgcgaaacttcgcagacgctgacctcgctgacagagccaggccgggcaagaagaggtccgggaggatctatcaggagtgtgggggctggtggggcctgccctgtagcgaggcttagggtatgggcccctggggggt

SEQ ID NO: 817171 - DNA, 610 bp, Homo sapiens
catttctgtaaggccctgctggttgcactgggtggtcctgctcagcatggaagggatttaccaacgtrtgagtgccaggaggtgaggattgctggggccgtctaggaggctgcccaagcttgctccttagggttgtgctttttctagatgaaagctagttcatctgacccacacattcaggttatcatctgatggaagctgaagagctcaagacacactccctgagcacttgtcacgagccagacactgccagaagctctgggatgacacagtcagtgcgtgtgactctcagtgaaccctcaggtgtgcaggaaacgtgactgtcttttctgcgtgtttcccttcagctgagtggaagaaacgtattctcagtcagttctggacttcatgccccatttccctggggtcgtgtcacagacagggcatttgcaactctgcctggaaggcgcagaaagaggaccgcatgactgttttcaggcgaaggttgccatggataaagaagcgctttgcattggctgtgtaatgcggcacagcaagttagcacgaattagaggcttaaagcagcatccgtgacctccctgtgtctgtggtcagtgcctgagccgctccc

SEQ ID NO: 817172 - DNA, 611 bp, Homo sapiens
ggtgcctggcacggattctcatgggtggtttcttcccttcctttgttctctggaagtagccgggagggagcttgcacctcatggtcccatcactgcttcacagacctactccccgcccacctcagagcaagccaagcccacccagcaggcttctctatgtgcctgagttaaagacctcaggtcatgggctgtctgaggaactatttgtcctttctttctgtttttataagttcttgggagtgcaacattgaaataataaatagtattttgtgtttttgtaggatctttttatgctttttttctgtgttaaattttattttttggttccatgtaatgaaaatcagatgtctcatttgggagattaatgttcataaacaaatatggaatttgggaatttagaacaaatttaaaatatttatttggaaaacaggaagactagactaagctagtgaagagtgcatacaagggcctctaagcaagtggagaggctcaggctgaactcagccagcagccatgttttgttcagttcatacaattttcaaagatttgagttggctgcaacattttataattgggagaaytcatgtaataatatgaacttttggtctccc

SEQ ID NO: 817173 - DNA, 573 bp, Homo sapiens
ctgtgtcaaacgctgctgaccagacaaggaagatgaagactgagatgctgaccagacaagggagatgaagactgagatgctgaccagaaaaggaagatgaagactgagatgggaccattggatttagtaatatggaggtcgtgggcagaaaagaatagaagagagatgggagatacaaactgctctttaaatgagttttgctctaaaggaaggagagaaatgtagaggtaactggagggggaaacagagcgaagagagtttttctaagaagtgacatcatgtacgtgatgatgggagtagccattgcagagggaaaattgatgatgtaggacaaaatagggagaattacttgagaaatggccttgggtgggtgaggaagatattatgaagaataataattgctgtctctataggacctgcctattctggacattttatgtaaatagactcagacaacgtgtggccttttgcatgtggtttctcttagcatattttcaaggttcatccatgttrtagtgtgtatcagggattcgttcctttctaaggctgaattccattctattgtatggatcc

SEQ ID NO: 817174 - DNA, 580 bp, Homo sapiens
tcctcgtcactctggcggtctccctccaggatccacctggcagcctcctccctctctgctcgtcttcctctrggatccacctggcagcctcctccctctctgcccctacaccctccatgttatgctccttcagccaccctggtccccagccagtccatgtgcttcccggggcctctgctgcacaacgagggtctctgctcgagcccccacagcctctccacctccagggcacatgtacactgcccttccaaggcccagcgctgggaagccacccctaagctgacatcagaatcgatcatcgcccccgccggcactaagccaaattcatttggtgtccttcctactgcctacttcacacccacccaggaaactcccagcatagacaccatggtgcgggccctacctgcaccccatcccccagaaggtcgggggcctgaacctgtcaatagggcctccttccacacctaacgctgctaatccacaccctcccctccaagctgcagccccctctcccttcccaacccagacccaacttagcacagaagaggttccagcagctcagcatctgagtccactgcca

SEQ ID NO: 817175 - DNA, 598 bp, Homo sapiens
agcatgggtgacagagtgagaccctgtctcaaaataaaaataaagtgaagtaaaacttcaaaccttcttgttttttgactgttcctaaaggatggtgtaacttttaagtatgtatgtacatataaaatatatktttacatttttctgtagatattaggttttatcttgtgttattattagctttcttacttgcttgtgatatcagataatttctcttccctgaattatctctgtttccccaaaccaagttttcttttagctttatgttagttttccattttttatggcgctggttttcacagaggcattcctgttgagtcttcaaactttctaatatgcttccattacaatccgtttcttctcgatgaatctgctttagttctgagccaggaagaactctgattattttttctcacatttatcccacctcttgtggcaattatgataagggggcagatctaaatagtttgagaatgcctgcaaggctgttcttaatgttattcttaatgccaccctacaaaaccgtacatgttcagaccagctggaagaaaacctagcctgaattactcagagatgtttcaaaatacgattctattat

SEQ ID NO: 817176 - DNA, 617 bp, Homo sapiens
gccaagggccagcgcatcctctccaatgctcagctttggctcttgagacccaggacttratccgagggttccagtccttcacagtgcttgatgccctattgttaatggtggaagaggtctgagttaccctgagttaccagcggggaatccgtacacacctgcagcaacttcaattcttcctcctcaaaagaaagaattcaactgaggggccgaaagcagaaaaagagaccaagatgagttccagggcaggagtggaagtttattaaaaaggctttagtacaggaaagaaaagaaagaacccttggaagagatccaggtgggcacttgaaggtcaaagagaaaaaaagaagcttaaatgccccttttagctgtgatcctaggacttttataggctcgcctctttcccatgattcttcccctagggtggctttctgcatgcgcagagccctccttacccttgggaagtgagcacacccaatgtgtttaggaagttttatgcatgctcatctgaggctttcttcctttttctggtggagtgtagccggaatattatactttgccatttttgtctctaatgtgcatgtccaggaagtttcttctccctggggtctgtcttt

SEQ ID NO: 817177 - DNA, 580 bp, Homo sapiens
aaataaactaattacttaataaatttttaaaaaaagaaagtaaccttgagggggactgaactgcaggtgggagatggaaatatcatctagcattgaaatttacagtttcttaawccaatagtcaccactccccttcccagtgatttttaagcagaatttaaaaaaaaatgaaaatgtttgatttggctcttcgttttcctcgatgtgaaaccttctctcatagaggttctaacaggcactgaaacgagaattaagaaagggtgggagcagaataatcgctgaagggggtcattggctaccaggaaacccagaagtagctgtgttctactagacatacttgcaaggttctaaggaggtttaacttaattgagatttgactttaaaaaaaactttttattgtcaatattttgctctttggagagcagtgactaagattacattttgttaatgtttgtggggagcagaatcattgagcattgtctgctttgtaaaagtgctgtggctcccaggaatcttcagtgtcagtgaagtgagctgtcactctcagtcagggtctccttccaattaactacgataaatt

SEQ ID NO: 817178 - DNA, 559 bp, Homo sapiens
gaagtctcttgcgtatctgatatggaaacagtcatgctaaaagttattcagcrgcaaatgatatgaaagcgattcagatcttcctgagagttaatgtggcatctaatttgcaaccggggagccaggcttgcaatgaaatgctctgtcgggttggggttgtctaattgcctgcctctctcagaagagaggggaatttatgagagttctatttccagtcaggtctaaagtagagatatcattgcacaatttctagactttgttttgctgccaaaattttagtctgaggctgaagaatccaacagccgtcctgcctgttttgtttgtaaattcacaaactagattgatggcgaaagacagatcaaatgccttatcaggaaggtagtagagtggagcccagcttccaggctaagcagtggaccaataaatgacggatcagttaattgaacaatttggccagactagacaggtgtttgggaatttgttttggtactggttactggtcaggagctagtaacgctaaggtagagtctgagatttttcttttctctaagactagcct

SEQ ID NO: 817179 - DNA, 566 bp, Homo sapiens
aaaatagggaggaacccttagttccaggaattgcccgcccctgtcccagaaaactcatgartaatccaccccttgttttgtatatagtcaagaaataatcataaaaatgagtgacagtggtgtatgccactgctttgcctgtggagtaatcattctttattcctttactttcttaataggtttaacttaatttcactcttgagaattgtaaggaaacaactaggaatgcaaatatatttatgcacatgaagctcataataatattatttataataggtagaaactgggaatgacccacatttctgacacttttgaagggattaaattaaataatagtttttcatatgataacatttaaaatatgtttattaaggcttttaatgggccagggaaatgcttatgataggatattgtgtgaaaaaccaagaattcaaaaccatatgtaaagcttgaaataagattatctgaattatgaaaattgagaatggaagaattgcaaggaaaaattaagaacttcaaagcagaaaaatttttttattactttcttctttatatgcttctgtata

SEQ ID NO: 817180 - DNA, 560 bp, Homo sapiens
gagcaaaaatgaatgaaattgaaatgaaaaaaatacaaaagatcaatgagtgaaaagttggctttttgaaaagataaagaaaatttacaaacctttagccagactaagaaaaaagagaagacacaaataaataaaatcgaagatgagaaaggaaacattacaactgatactgtaggaatttaaaagatcattagtggttaatatgagaaactgtatgacaataaattgtaaaaacctgaaagaaatgggtaagttcctagacacatataacctaccaagattgaaccatgaagaaatcctaaacctgaacagcccagtaacaagtaatgagattgaagccataataaaatgtctcctggcaaagaaaagcccaggaccagatggcttcactgctgaacatttatttgatttgattttaaatattttttatctcaatagcttttggggtacaagtagtttatggttacatggatgaattgtagagtgatkaagtctgagattttagtacacctataacctgagtagtttttatcccttttatacattgaggaaagaacagt

SEQ ID NO: 817181 - DNA, 572 bp, Homo sapiens
gacataaagcttatggaatgaaagttgaaatagctgattagttaggaagtcgttgtgaggctataacactcgggatagacagtgagataataacgtgaaaatgcagggctctgcacacagcgattytggcagatcctattagaaagagcaatgacatgtgtaggagaacatgttttaaaattacaaagttgaggaccctttcttaaatccagaaaggagaaggggaggaggaggaagagaaagaaaaaagaaaagattggggaaagaaaacctacaattcatcatttatattaatagaaaacttccagcttcacttgcccaccatttcttcccaactagatgaagatgatgactgcagggcctttttcatactgaatgctaagtcaacctcccagcttttcttctcagatgagaggaggtctctgccccagggcagtatctggggagtcacagtgaggtaactgagtgctctgtggccagctctaacaagagcaagaagagaggcaaaaggcttctcacttacaggtttgggttactgtaagtgtacgtgcttttcacatctggaaaagcag

SEQ ID NO: 817182 - DNA, 650 bp, Homo sapiens
gcaagtgaaccctaacataatgtatagactctagttaacaatgacgtgttgatattggctctcaaatacaacaaacatgccacactaatgcaagatgttaacagaagaaatggcggtgggggcgtgggtggagtagatgggaactctctatacttttcactcgtttttctgtaaacttaaaactgctctgaaaaatagactttattaactaaaaaaaagagagcagggaacacaaaaaggaagaaactatgaaggaaatcatacaagaatgtttttctgaactgaagaacatgaatgctagaacagtcctacaagtatgcagcgcaatgaactaagacagacacatgccaacagatatgactatgaggcttagaacaccaggcatgaaaggattcgaacagcactggagtcttccttagcaacactgggcaccacatgaaggaatgtcttcacatttctgagggaaaagccttccactagcctggaattccagacccagccaatcgagcatgaaggtggaataaagyccggtggtagtggtcaggctggtcactaaagggctcaaagtcccttggtgactgcacagcacacacacacatacacacacacacacacgcacacagagctacccaagccgcagtcagtgatgc

SEQ ID NO: 817183 - DNA, 208 bp, Homo sapiens
tggaaggatccctcgagcccaggagttgatagtgagctatgatctcaccactacacsagagaccctgtctgaaaaaaaaaaaaacacgtataattaacattagagaatatattgttccagatgataagattatacttctgaaaatgggataatataagaatagaattaatggaatttaaaaatatgatagttgaaatattcagtaaaa

SEQ ID NO: 817184 - DNA, 611 bp, Homo sapiens
atattcatcgataaatacagtaactatttgttaaatcatgtcatttaggagatacatttccaaaacattttttacattttatgactaatatcaaaactgyaatcttgctgtgctaatagtatactcatagtgcatctgtgtacgattataaaaataacccatttgaaaataattttaatagcgtttagtgatcacagcatataaaaaagaattcaattttaatcaatgctttttttatttagaagaacatgctaggatgatcaataaaaaactttcaagcataaagaattatatagtaggataagattttgtggagtcagcgggatatgtaaattcaaggaaagaaagtaaaggtgtaaaatgttcaaatgctaaagaagaacttacttatgtatttataaatggatagtgatgggcatcaaagccttctggtatttagatttcattggctgaatttaaaagcataacgtaagaaatttatttttaaaggtcaatatttaagctatgtcagaggttacatgctttgcatcatgttcattttttagatgtgataaagatacttattgtcttaggataagagaatatccttattcataggaaatgcatgctaa

SEQ ID NO: 817185 - DNA, 581 bp, Homo sapiens
gtaaaaagaactcccagggaaataggacggcaagragacatgggtcctacccctaacaagcttacacactatttaacagatatgcaaaacacacagcagaacttgatgaagttcaagagctctcagcccagctctgcctggcatcagatcagcctccctgtctttatatcatgccaaccactttgtggtccaaagggtagggctttctgcagtgtcagagactccaaaaagctggaattcagttagaatgcatttgtatctgctggagcagacaccagtacagggccaaaggtcctcctgcaatcagctctcagcttccctttcctgggcatcacagcatcagcatcaatgggttgagtagaaagtggcatcaagctctgtgacccacctcccatccccttatgcacgtcttattagtaggtgctaaaagcagaatcagtctaaccttaaattgagtgggtttgtgggtatttgtatatagttatatgaatgtgtaaaactaatttgtgtgtaaacacaggtaagagttatgactatgcacatcaatgggcaaaggttttaggacatgtgagagggggatc

SEQ ID NO: 817186 - DNA, 487 bp, Homo sapiens
acctattaaatactttaagtaaactcagtggcaattaaagtttgtggatatttagaagaagaaaagctggtgaagtggactagcaaaaactsttaagagtttttaaaatagccatatctatcccaacttctgtttgctgatttccaagaagtatgaaaagcagtgctagggaaaaaaagcctttcctacaaattacatattatttcttgaagtaagaaaaggaaaagagccatttaataaagaataattcatttttttataattctgtattcagttgttcattgttaatcaccactatgattctcaaaggtttttttttttttttttggatgcccatcaaaactaattgacactgtgtcccaaaggttttttttaaaaaccttccaaagagagataacatcggaaaaagccttctagacattggcttaggcaaagacttcatgaccaataacccaaaagcaaatgcaacaaaaacaaagataaatag

SEQ ID NO: 817187 - DNA, 570 bp, Homo sapiens
ttatgccattgtttcaagctatatttttattctcctatttcactattacaagtacattctacatgactgtgttgactgtccaactgttcattaatgaaactatgtgtcccaattctgctgcttactgggtgaccctgtgcaagtctcttactctctgtgaacccttgtttctttacactgtgaaacagggattcaaacagtttctcatatcactgtgatgattaaatcggtacatgtgaagtgcctaacctatggtaggtgctcagagaaggttagcttctttccttgataataaagtcttaactattaaaaaaaaagccatggtatatttatacaccatattttgtctattctaagacatattttaacacctctgaatttccatgcatattacaaccaatggtgacttgtcaaagagatggcagtgatgaaacagttgtcaytgccttcatgtgcagtttgttttccttttcatgtatatacagagtgatatatgatacttacatgtgtcatttcaaacatagcatacttttttaatgacacacacattgacagtgtgttttataactg

SEQ ID NO: 817188 - DNA, 570 bp, Homo sapiens
ttatgccattgtttcaagctatatttttattctcctatttcactattacaagtacattctacatgactgtgttgactgtccaactgttcattaatgaaactatgtgtcccaattctgctgcttactgggtgaccctgtgcaagtctcttactctctgtgaacccttgtttctttacactgtgaaacagggattcaaacagtttctcatatcactgtgatgattaaatcggtacatgtgaagtgcctaacctatggtaggtgctcagagaaggttagcttctttccttgataataaagtcttaactattaaaaaaaaagccatggtatatttatacaccatattttgtctattctaagacatattttaacacctctgaatttccatgcatattacaaccaatggtgacttgtcaaagagatggcagtgatgaaacagttgtcactgccttcatgtgcagtttgttttccttttcatgtatatacagagkgatatatgatacttacatgtgtcatttcaaacatagcatacttttttaatgacacacacattgacagtgtgttttataactg

SEQ ID NO: 817189 - DNA, 626 bp, Homo sapiens
caatgtagatggattcaagagatattgccaggtcttgttgatctttctttatatacacacacttactgggttgaattgggaggtgtggtctctgaagaaaacaggaaaggaatgatgagagaagttctcagaagacaatggaatagagcatctaaagggaggagtaaggagtttcaacagtgtaagaaagaatgaagatttgtcatttttaaagttgtgggaccctctgaaaatctgatagaagcagaagccagcacacagtttcaaaagtaaacagaagaggccaggtacggtggctcacacctgtaatcccaacactttgggaggccaaggtcggcggatcttttggggccaggagttcgagaccagcatggccgacatggtgaaaccctgtctctactaaaaatacaaaaattaatgctcctgtagtcccagctgaggcacaaggctgaggcaaaagaatcgcttgaactcaggaggtggagattgcagtgagccaagatygtgccactgcactctagcctgggtgacagagcgagactccatctaaaaaaaaaaaaaaaaagtaaacagaagaatagagtgtaggagctagagaggcatgcagtttttaaatgatgatgata

SEQ ID NO: 817190 - DNA, 626 bp, Homo sapiens
caatgtagatggattcaagagatattgccaggtcttgttgatctttctttatatacacacacttactgggttgaattgggaggtgtggtctctgaagaaaacaggaaaggaatgatgagagaagttctcagaagacaatggaatagagcatctaaagggaggagtaaggagtttcaacagtgtaagaaagaatgaagatttgtcatttttaaagttgtgggaccctctgaaaatctgatagaagcagaagccagcacacagtttcaaaagtaaacagaagaggccaggtacggtggctcacacctgtaatcccaacactttgggaggccaaggtcggcggatcttttggggccaggagttcgagaccagcatggccgacatggtgaaaccctgtctctactaaaaatacaaaaattaatgctcctgtagtcccagctgaggcacaaggctgaggcaaaagaatcgcttgaactcaggaggtggagattgcagtgagccaagatcgtgccactgcactcyagcctgggtgacagagcgagactccatctaaaaaaaaaaaaaaaaagtaaacagaagaatagagtgtaggagctagagaggcatgcagtttttaaatgatgatgata

SEQ ID NO: 817191 - DNA, 553 bp, Homo sapiens
gctagagtaacaaaaacagcatggtaatggtacaaaaacattaatagacacatagactaatgcaacagaatagagacccctgaaataaagctgcacacctacaaccaactgatctttgatgaagctgacaaaagtaaacactggggaaaggatactctattcaataaatgctgcggagaaaactggctaaccataggcaaagaatgaaactggacccctttcactatatacaaaaattaactaaaggtagattaaagatctaaatgtaagacctcaaactataaaaatcctaaaagaaaacctaggaaatacttttctagacatgaacttaggcaaagaaattatgaataagtcctcaaaagcaaatgcaacacaaacaaaaattgacaattggaacattattaaactaaagggtttcttcactgcaaaataaactatcaacagagtaaagagacaacctacaaaatggaagaaaatatttgtaaactayggatcttactaagggctaatatacaaaatctataaggaactgaaacaaaccaacaagaaaaaa

SEQ ID NO: 817192 - DNA, 568 bp, Homo sapiens
atataatttggtgtatttttagcccttttcatgatgtattaagtctatttaaaaataaacttaggtaggcaggtgcggtgactcatgcttataatcccaactctttgggaggctgaggtgggcagatcacttgaggtcaggagttcaagaccagcctggccaacacggtaaaacactgtctctactaaaaatacaaaaaaaaaaaaaaaaaaaagccaggtgtgggccgggcatggtggctcatgcttgcaagcccagatactcaggaggctgaggcacgagaatggcttaaaccggaaggcagaggttgcagtgagctgagatcgtgccactacactccagtctgggtgatagggtgagtctctgtcaaaaaaaaaaaaaaaagaaagaaaagaaaaaaaagatgtaaataagattattctttatctgtattttctgtatttattcattataaaatctaggyacagagaaatttttgacttgcctgaaatgcctgttaggaatctttaaggattgtaggatttttttttaaaaaagaggtattataagccagactaaaggagatgac

SEQ ID NO: 817193 - DNA, 506 bp, Homo sapiens
attcaacccataccaaactctgttggtgcactctttcctttaaagaggaagaagtggaagttataggaaaaasaaggaaagtgtgagggaatgaggtcctcatttcacatgaggatgaaatgagactgagaagaggatcagccacagaggagtgatattgcttttggtaataggagggctttaaacccagatagatgcagatgtgtctaagcttagagagaaatttgtctgatggcttctatctttgtgggacgatgaagtgtggtagttgttagggtggagttttaaggatgattcactgaatggaagaagccagaaaaccgcaaaaaggaagttgagaatattgtcaagggagtgtctgaagtaacgaccatcaaacctatgctgggtagagaagggactaagataggaagaagttaatgggaaaaaattaatacaggtgtcatgtctctagaggtctcaagatttaggactgattaacttgaaaaatataaacctaagagatg

SEQ ID NO: 817194 - DNA, 630 bp, Homo sapiens
catttattcagaagaagcttttcataatgcaaaatataaactcattaagtagcttctctttgtcgctaagatggggattgaaatccttgacattgcacaaaggcccaggaggtgtagtctgtggctttctctgaactcttacttcctcttgtgtttcctattgttttattcatatccattggcttccttttagttccaaaaagatgtagtgcagctgtctccattatgatctcagtacatctttctccttccacctgtcatggtctgactcaactttcactcccacagctctctcccccagcatatttcttgctaaactgctgaattcaaaaatgtttttttactcagaaaccttccttgacttccaagctacatggaatctttgacccttacgccagaatattctatagcaccatgaaaactctttcataacatttatcatgggtataatttgacactcatatctgtgacattgtgtttagtgcccagccccgcccttacctacccagcctcctgccactcagactataagttctatgaaggcagagtctctctaccctttttcwcaccacaaatccaccgtctcagcaccatgtatgacaagtgctataaatatatgctgcttaatga

SEQ ID NO: 817195 - DNA, 632 bp, Homo sapiens
gactctgatggtagtttcttttgctgtgcagaaactcatcttgatgatactgttttaaagtgtttacaatagtctctaggcctgctctwacaaaagattaaaaagggggttcaaaagagcctaagaagaaaatatttacatgtgtaaataggacacccaaaatacagattcataaactattttcatttttgagttataatttctattctatttccctgaaatacttcaacactgaccgtcacattgtggtccttcctatagatccacaagcctagcctgaaacagagtgtgagttatcttccttaggatgttgtgtttccacaaacctcaagtcaaactgcccttttttcagctcccaaattcatcattgtatagatatatgttcttgaaaattacttaacatgttaatattctcagtttcttcaatctataaaaatgttgtcattatagtacctacaccatcagttttccatgaggatcaaatgatgtaatgtgaaatggaaagcatatagcaaacacataaatacatataatgttatttacctcttgtacaaatagttctgcttaattaacatttaaattataccccatcaatgcacataaatttaggttttgatgtgctgaagcaacat

SEQ ID NO: 817196 - DNA, 618 bp, Homo sapiens
ctggtctcggctggaggcacacttcccagcctgtgggttggtcaccttgcaggctgcaacactttataagaaataaattcttctctcctttcttaaatttataaattgtataatttttaagttaacagtacttaacattttagtgatcatagatccctccaaaaattaaatgacatctatggactctgtccccagaaaatacatatgtgcatacagtagtttttctaaccatctacttaatattcttgattccctttctgaaatatgccaactgattctcataaaatactgaagactcatagctagtagccttcactttagtttactcctccacatctgcttccactagctgagtggaatactccccaagagtcagttatgtttgttcccaaacttcatttccattgtatgcctcatacgtatataatttaattgaattgcatgaactgataaaatttgagtctgcaaagaaataattttctatgaaaatcaagaaaatgagtgctaataaaaatagccattgtcagacacttaggtggtttccatatcttggytactatgaatatgctgcaataaacatggaagcacagagtatcttttcagcatactgatttcatt

SEQ ID NO: 817197 - DNA, 596 bp, Homo sapiens
catacacagtttgtcagtttgtcaacattctgcatttatgaaaaacagtttgctgctcactcatttagcctccagtggtatactgagttgatcacaaccctcattctttcggcctgctatatctcctgctttttgtttttaaattaattgagcaacgcaattgcaggctgtgcagccctcaattgcaggttggtgatctggcttcatttttcttagcccttattcataatggagttgctctggtttgaatgttccttacatatttccctcttcctttttacaagaggaccttaatcctaagggttgcagaaggatgaaggtccatcttctgcaacttcttcatgcttaataggggtgtgcctaactattcctgcctaactattagggtctcttgtattcagggtagagagctcagtcagaaagcattcgtccattaagcatcaattgtacctctgagttccagtaaaaggtgaaatcctggccctccarcagtttctcagcttcttgtgtggttttctagatcggtccctatattatgggggttaatgtaagcgtgactctggtcggtcctcgttccatctttgcattcagattca

SEQ ID NO: 817198 - DNA, 533 bp, Homo sapiens
ccacctgtgaatggttattcatcattttcagtcaaaagatcatcttctgagacagaattcakaaactacatagatgctgaggagttctgctttctttatgtcacccatcagcatccagcaacagattttgaagttctagcttaaattacctttgatggtatcacctcacctctacaggattgatggaagtgggagccactgctgttctttcttccccatccagaaaaatgcaagggattctgatttctctacaggcctcttagcaattgtctaattgccttcctagagagttcaaatgcctccgtttccaagcctccatgccctttaggcctctgctgtccatactagcaatagtttcaggattgctaaaactgatgcgtcggctcaccttagctcacccaagacccaccacttctaagagtatttgttctcagagaaacagcttatgggatgacagccaggataatgagaaaatcgaataattctaaggcttacggtttccaagagatgagcatatttctttgttttgttct

SEQ ID NO: 817199 - DNA, 305 bp, Homo sapiens
attttatttcagccattctagcaggtatgaagtggtatctcattgtgtgtgtttttttctataattccctgatgggtaatgaatatcttttcatgtgcttatatgtcatttgtatatccttttgtggagcaatawctgtgcagatcctttgcccattttgtaatcatgttattaatctttttattattgatatgtatgattttaaaaatatattctacatacaagtcccttatcagatatgccatttgcaagtgttccacttattttgtgggttgcttttcacttagttgatgctatcctttgaa

SEQ ID NO: 817200 - DNA, 480 bp, Homo sapiens
ctgggaatgaaaaagtgagtttaaggccaccatctgtttgtgaggatccactactgctctgaatgcttccgtaggaacaggttgaatcttagcagagagtatcccagtttagctgactcatctcatgctggggctacttaaatcatatcttaattgtcttctgcatttgactgttcacttatcaatgttcagtatgctagttgatgtttatgttatggcctgctctctgaatgaccctacaggaaacaggatgcacaggttttggagttcaaaatactaaggtgttggtaggactagtcattttgcaggcttgaagaatgggtcttctatcagatgtgaagttaaactgaagtccacctggtctttaagaatgtgctagtttaggctgaagaaggcacaaagcctcttcccactccttgctcatcacccctcaaaataagrcaacaaatggcctctcaccattatcttcataaataccta

SEQ ID NO: 817201 - DNA, 579 bp, Homo sapiens
ccaaactttcctttccccactacctctagaggattggctgcaaacctttttcccttaagggaagttcctctaggaggagggggcattggctttgtgaatgtccccttaaccagttcagaagtccaaagcctgaaaagggaactaaaaccactcttagatgatccctatggagtagcagatcaaattgatcaattcttaggcccccacttgtatacttgggccgagttaatgtacatcctaggcatcctcttttcggaagaggaaagaagcattatctgtagggctgctatgaccttttgggagcgtgagaaccccccggtcaaaacatccctgcagctgaacagaaattccctcctcaagatccccaatggaataacaatatagcctattgaagaaatatgagagacctaagggaaataattaaaggaattagagaattggtgccctgcacccagaatattactaaagcctttaatacacaacagggaaaagatgaagggcccatggaattcctcaacagacttaaggaacagatgaagaawtatgcaggtttagatgtggagggcccacctggacaag

SEQ ID NO: 817202 - DNA, 461 bp, Homo sapiens
gctttttagaatttaacccaagtatttaggctcttctgaaaaaaatgttactttgaaatcaaamcctgatgaacactgagaagcaagctgctctgcatgtggcagaaaaatttggggataagctttgtatcacatatagcatcagggagggaggaaaactctatccaactggaagaaaggcagtatcagcaaaagaccctcgatgggattccaatgacgagatgggagtctggaagaggagacactttcaggtgcatataatgaggggcttatgtagaactaggaccaagcctcaattatagaaagctatccatgatagaccagggatttaatagaagtctcaactgccttcttggaaaggctaaaagggcccttggtaaagcacacctctctatctcctcatccagtcaaggaacaactaattatgaaggataagtttattactcaggcagcccctgata

SEQ ID NO: 817203 - DNA, 612 bp, Homo sapiens
tcttagctgattattccagtttggatccagtcactgcttttcctaagtcccaccagtgtccccatcccagttaaagggcttctgcattagtcaagaggaagaaaatggggcctgaactagataaatgtcagagaaaggtaaatacatgtttttgaggttcttctaccagaagcagtcttgaagcaccttgcatatgtgactatccttccttgtctggttcttaatttttcaaatctgtcattctgatatccttttaagataaagctgtaggcaaccaaatagatatcagtattaactgagtccattcagcatatggaggcctcttttaaggagttctgggagacataaacagacaagtcctttgagcatggatatcttagttctgaaaacaatgaacagtctggacaaaattttcactacagagcaggtcttagattctggatattaggggaagacgactggctccattcacgctcctactctgagtccttcattctgaraggagttgattttagatgaccttcaaaggaaataagatttatggacttggacatcctgtcttttccagaaaaatttaagagatgccatccattttctatgtgtgaggatggg

SEQ ID NO: 817204 - DNA, 591 bp, Homo sapiens
atggagctaaatgctgcagaatgttaatttataaaacactgtcaaggactcaaaaccagaagaattcatgcagatactaataaaacagagtcattgtgcattagattttcccgctcaaaggcatcttagagcttatctaattgaacattttatctgtgaagaaatttagtccccatgtggaagtgctataataatagtttaaggacacagaattagttaatatgatttcttgattttgtttcttcatacaattaagcagataggacttattttcacaaaaggagctgagaagagagtgtgggggaagaaaccatacctgatacattgctttacccaagagaaccctctgtcttagtccattttctgttgctataacaatacctgagactatgtaatgtacaaagaaaagggatttatttcttagggttctggaggctggaaagtccaagatcgagggaatgcatctgatgagggccttcttgctgatggggacactgcagagtctcaaggtggcccaacrcatcacatatggcgagggggctgggcatgctggctcaggtctcccttcctcctcttatgaagccatgaagg

SEQ ID NO: 817205 - DNA, 537 bp, Homo sapiens
agttgtttacatttcttcagtctaccagactcaatagacttattttgcctcgggctgtttcctttcatcatcacaaggtggttgccaaatcccgagattraaaacagccatggttaagtccagagaagaacaaggatctgtgtcttttttttccctctattttcaaaggaagagaaaaaaatctttccacaagcctccagatttcccccagtgtctaattggccagaacaggtcacatattccctcctaagccagtcactgggaccaccataattgcctggggtcatcaagattctgcttctgtaaccgcccaaggggttcaccttgccccgctgcctagcacagagccaattcatcaagacacgggaattgcaatagagaaagagtaatatacgcagagccagctgtatgggagactggagttttattattactcaaatcagtctccctgatcattggggagcagagtttttaaagataatttggtgggtgggggaaagccagtaagccaggagtactggttggtcagagatgaaa

SEQ ID NO: 817206 - DNA, 470 bp, Homo sapiens
aaaggtacttccatttcttcaaggatccaagttgtttacatttcttcagtctaccagactcaatagacttattttgcctcgggctgtttcctttcatcatcacaaggtggttgccaaatcccgagattaaaaacagccatggttaagtccagagaagaacaaggatctgtgtcttttttttccctctattttcaaaggaagagaaaaaaatctttccacaagcctccagatttcccccagtgtctaattggccagaacaggtcacatattccctcctaagccagtcactgggaccaccataattgcctggggtcatcaagattctgcttctgtaaccgcccaaggggttcaccttgccccgctgcctagcacagagccaattcatcaagacacgggaattgcaatagagaaagagtaatatacgcagagccrgctgtatgggagactggagttttattattactcaaatc

SEQ ID NO: 817207 - DNA, 580 bp, Homo sapiens
ggtgagttggtgttgccatcttgagcctgaatcctgcagggcagcaggctggaagcaggcggggtttctaccgtgaagtcttgagaatttcttctaccttgggggagctcagtatttgctctgaagatcagcacctgattggaggaggcccaccctcattagggagagtaatctgctttacatcaaagtctgctgatttaaatgttaatctcatctaaaaaatatcttcatggcaacatttagactggtggttgaccgaacaactggcacatggctgagccaagttgacacataaaattaacagtcacagcttccttttgcactcagaatgaaggccaacatcccagatgtggctacagggttctgtgtggcctagcccctgccttcctcctctctcagatctcccgcttacactgtgctctggtcacacagccctccctccatatcctcaatataacatctccctcctgtcckgggaccaggacacaagctgccccctgtgcccgaagtgcctggttccctgctcccagcgagtgtgcacacccccacacacattgtctagggaaagcctactctatca

SEQ ID NO: 817208 - DNA, 580 bp, Homo sapiens
ggtgagttggtgttgccatcttgagcctgaatcctgcagggcagcaggctggaagcaggcggggtttctaccgtgaagtcttgagaatttcttctaccttgggggagctcagtatttgctctgaagatcagcacctgattggaggaggcccaccctcattagggagagtaatctgctttacatcaaagtctgctgatttaaatgttaatctcatctaaaaaatatcttcatggcaacatttagactggtggttgaccgaacaactggcacatggctgagccaagttgacacataaaattaacagtcacagcttccttttgcactcagaatgaaggccaacatcccagatgtggctacagggttctgtgtggcctagcccctgccttcctcctctctcagatctcccgcttacactgtgctctggtcacacagccctccctccatatcctcaatataacatctccctcctgtcctgggaccaggacacaagcygccccctgtgcccgaagtgcctggttccctgctcccagcgagtgtgcacacccccacacacattgtctagggaaagcctactctatca

SEQ ID NO: 817209 - DNA, 580 bp, Homo sapiens
ggtgagttggtgttgccatcttgagcctgaatcctgcagggcagcaggctggaagcaggcggggtttctaccgtgaagtcttgagaatttcttctaccttgggggagctcagtatttgctctgaagatcagcacctgattggaggaggcccaccctcattagggagagtaatctgctttacatcaaagtctgctgatttaaatgttaatctcatctaaaaaatatcttcatggcaacatttagactggtggttgaccgaacaactggcacatggctgagccaagttgacacataaaattaacagtcacagcttccttttgcactcagaatgaaggccaacatcccagatgtggctacagggttctgtgtggcctagcccctgccttcctcctctctcagatctcccgcttacactgtgctctggtcacacagccctccctccatatcctcaatataacatctccctcctgtcctgggaccaggacacaagctgccccctgtgcccgaagtgcctggttccctgctcccagcragtgtgcacacccccacacacattgtctagggaaagcctactctatca

SEQ ID NO: 817210 - DNA, 531 bp, Homo sapiens
tcatccacatctttctgtctccttggccactgccctggcctggactctagtgccctgtcccgccctgtggggacagccccccctctcgtctccttggctctgtcgtgccaccatccagtttgttctctgctggagagacagaggacactttttgaagcatgcatttgataaggccacttttgtctcttgtcctcagataagatcaaaactcttttgcgtggcttataaggtgcctgcctaccccctggcctgttgcagccctctctgccacactgactcactctgacctgagtctccacgtcagccacacctctggtccctcgggcaggcccatcttctcctgcccgggctcagcacaggcgtcctcccacttgcacagcaacatcttcttgctaactctcctctctgtgcctggctgaccagagctcaacccaaaagggacgctrcttcctccaggttgggcatctttcccgtgtgctcccatgtgagctggactttgccgttgtgtcactcacctccctgtaccaccgg

SEQ ID NO: 817211 - DNA, 579 bp, Homo sapiens
ggagctaccttgttttcaaggactgactctggcattatttttcaaatatggcagagtactgttaacaactgtaaaatttgctaatggaaggagttatcctctttatcctgctaaaatggtagaaaccacatagctttttcttcccagcacttctttaaagaattaaattgaaggacgccaaacttgtggccattgtctgtagtttctcgggcggtgggtgtcgctgaggggtggaggaccgccatgttggtcgctcctttcccgccctcctccaaggcccaccttgatcataaggcacaaggtatacaaacaccacaactgctctcaccacaggaaataagcacgtggaggacacagactgacagcggggaagaggaaggcagcctagtaggcacctggggcccgtaagcgctgctgtgtgcctaggcagcaccgccctacccactgagggccaggcacgcaggtcctagtgccactgtgcgtgtgctamgtagagccagcacttcctccatgaatgacgccacacgcctgaaagggggacagccacaccctcaaggggaaaaggcctcttgaactccc

SEQ ID NO: 817212 - DNA, 534 bp, Homo sapiens
gctgcactgtgggagcccctttctgggctggccaaggccggagccggctccctcagcttgcagggaggtgtggagggagaggcgcgagcgggaaccggggctgcgcgccgcgcttgcgcgccagctggagttccgggtgggcgtcggcttggcggaccccgcacttggaacagccggctggccctaccggccccgggcaatgaggggcttagcacctgggccagcggctgcagagggtgtactgggtcccccagcagtgccagcccaccggcgctgcgctcaattcctcgcctgtccttagctgccttcccgtggggcagggctcgggacctgcagccgccatgcctgagcctcccataccctccgtgggctcctgtgcagcccgagcctccccgacgagtgccaccccctgctccatggcgcccagtcccatcgaccacccaagggctgaggagtgcaggtgcacggtscgggactagcaggcagctccacctgcatcccctgtgcgggatccactgggtgaagccagctggg

SEQ ID NO: 817213 - DNA, 560 bp, Homo sapiens
tttggctgtgtccccacccaratctcatcttgaattgtagcccccataatcccaacatgtcatgagaaggatgggtgggaggtaattgagtaatgggggcaggtttttcccatgccgttctcctgatagtgaataagtctcacaagatctgatagttttagaaaggggagttcccctgcacatgctctcttgcctgccaccatgtaagacgtgcctttgctcttccttcaccttccgccatgattgtgaggcctccccagccatgtggaactgtgagtccatttaacctctttttctttgtaaattacccagtctcaggtatgtctttattagcagcgtaagaacagactaatacactatcctacctcctaaaatccattttacacacatattctgagtaaacttttaaaaatatacattgacttatatgtatctcctctttaaatccttcaggagccccctcttattacgtttggaataaaacccaagtgccttccctgacccacagtggcctcacaggatccagcccctgactattccttggccttacctcctccaca

SEQ ID NO: 817214 - DNA, 507 bp, Homo sapiens
acagattgttatcttaatgtctacctcatgctgttcacagaaaaaaataaaagtgggcaaccagtttttagctccagatgacattaaaaactcatgatatgccggccagtcgcggtggctcacgcctgtaatcccggcactttgggaggccgaggcggacggatcacgaggtcaggagatcgagaccatcctggctaacacagtgaaaccccgtctctactaaaaatacaaaaaaattagccgggcgtggtggcgggcgcctgcagtcccagctactcgggaggctgaggcaggagaatggcgtcaacccaggaggcggagcttgcagtgagcagagatagcgccactgcacttcagcctgggcgacagagcgagactccgtctcaaaacaaaaaacaaacaaacaaaaaaactcatcatatgccttcccaactcacacacaggcacacacayacaccgaggaggtcagaaacatgttcttgtgcatccaacttcaaaacattaagc

SEQ ID NO: 817215 - DNA, 595 bp, Homo sapiens
aggtgttggaagactgggatacaaacccctgttgtctggggcctgttgtggggtggggggagggggagggatagctttaggagatatacctaatgtaaatgatgagttaatgggtgcagcacaccaacatggcacatgtatacatacgtaacaaacctgcacattgtgcaaatgtaccctagaacttaaagtgtaatatatatatatatatatatatatatatatatatatatatatacccgtgttgctccaattcaaatttgtgacaagtaaccagttattataggattatgctggacaatgagatacaccccctcccatattgttctaaatagatactttatacagaaaactcattatagatactcattatatagagaacacagtctttaattagagtctctgaaatagctattccccatccttaattatgtaacacataacacgaaaacttctgatcacagyctgatgggcagccaatgggcaaattccctcaaggttcagtgaccctaactgtgaagctatttttctttaattatgttacagaaaaagatgtctcaatccatggtcctcctaagcttcaagaggaaaggtt

SEQ ID NO: 817216 - DNA, 622 bp, Homo sapiens
ctggggactgaccctctcagacttccaaattcctaactgggaaaactgggaaaattaacagaacatagctcatggggttgttgtaaagatcaaattaaataattacattagcacaatgactagcaatggaaagcccttggtaaatgtgagctgttacttttaggcaatgcttcatatactgctcacagtccctataatataggtgcttgttagagttgacttaagttttctaacattaagtagctagtaaatggcagagctagaatttgaatccatattaaaaatttatgtacccaactaataattattttgtctccaactattcctctccactgtcttccctttctttaatacatattagcctgtccccttctccattctaccttcatcaatttctctttctctttcctgtccctaacctgcacacactggaggccacaaacacacactctaagcataaagctgagtgtgagattaaaacagaagaggatacaaatcagaacctattggcagtgtcttctaaagccaaacaaatgaaagaaaggagtgtttatgtctaccaaaacactcagasaataaatagagcagctttattgaaaatagccccaaactacaagctacc

SEQ ID NO: 817217 - DNA, 537 bp, Homo sapiens
gaatcagggtctccatatgttgcctaggctagtctcgaactcctaggttcaagcagtcttttcacttcggccgcccacagtgctaggattacrggcgtgagccaccatgcctggcctcccactcacaccctttgaagttaggggaactgggttgatgatgccagaaaagcgttgtggagcttaactttttaggaattgttctacagttgattgatgtgttcagaaaatgctgctgccaacagcgtgccaggaattggacaaatgacgatagcatatcttcgtccctcagggaccccctggccctcaggtagtagcagcccaggggttgcaaactggtggcctgtggatgctggtggttggaagatgatgagtgccaaatgcttactctgggcctggtaactttctaggtattctggatagattaactcattgaaacttcacaacaaccttgtgagagacatgttcttaatggtctccaatttccagatcaggaaactaagcaactcaccccaagggcatgctcatggacccttgaaa

SEQ ID NO: 817218 - DNA, 602 bp, Homo sapiens
ttcttccttcttctctccctctcttcctttatttttgttaaaagaaagagggttggtgagatcgctaaatagaatacctagctctgttcttagatctagagtcattgaggcaattaactatctggattattttaaactgttgacttaagatgaagacagtcatataaaatatatgcagcctgaatatgacatttaatgtcaactaaagaaaagcacaattgtaagtggcttctgcaaatagaaaaatgtaagacataaagaacacttggaaaaatgtaagacaaaataattctcagaaaagagtgattgaggtttcattgttcatgtgtaatgccagcttttgagaagatgtgcatcaacagaagttacgctttcttgtgagtaaatttttcatacaccgtggtatttcttggtcacctctttctactttcaatctccctaatgggggattttgagcaaatttacttcatatatatacttcagtgtgtctgtctgtcagcmggggatggtagtatgatttttctactcaggacactggttactttttgcatttggaaatagatcattaaagtatctacactctctcagaacctaagaggtta

SEQ ID NO: 817219 - DNA, 659 bp, Homo sapiens
ttccgcagttactggtacatgaacagttggaactgctgactttcctaaccaaaacaacttccttctctcctttgttgagccttttgaggggttcatgattcattaccacagttttaagagtttcagttaccattgtatgcaagagccaagcactgaatacctacataggttttctattttctttcattttaaaagcataatgacagtggaacaataatgggatatgcagaagcacccttcacaagttatttctgaatgatttttagggtaaataatacagatgccttgtttgttaactaacttgtggaaagcaggaatcagtgtctctaaggctgcatcctattaccacaatggggtgtgctataactgctggtattagagagggaactttggccctttcacgtttttcttaatgtttgtaacactacttcagaggtttataacctcaaagcagaagaagagcctcaacaacccgggacttataagttatttttatgttactagacttgcataaagattcttgttttccaactcttcattttgttgcaatgtgttattacaggatatatgaaccaattarggtttttcactacagttcttgaataaaatttaaaaatcattttttattttaattaaaaatatttcccatttatagaatg

SEQ ID NO: 817220 - DNA, 620 bp, Homo sapiens
ctattttgtaaaaagtgttgtcagtctttgcacctggaaagagtccatgaacatttccagagatcatcagaactggcatcaactttcaccacaggctctgccaactttgtagaataaaagataataactggctaatctcttgcctatgaaagagcaaacaaggtggaatgcccttacatgccaaatcaatagtgatattaatttccttcttagccataaaaagagtcaaccccacagttacatgctatgagatgatacatacatgggcatacataatgtagttggcaagtggcatcctgggatcattcatgaaccttgcaataatattacccttcagttcctgctattaaaatttccagacccttgtaggttctataatatgtgtttattcaagttcagcttaaatttgggttgagttggattagaggatgttgttgttttgttttatttttatgtttttaaaagaactacccagtatatatcacatgaggaaaagaaactatattgtgccatagaagaaaaaccaacctaagttggtttargagttgtttagtgtaacctctgctttctgaagaactatattagagaaagaagttatattctgacttcattaggatccg

SEQ ID NO: 817221 - DNA, 609 bp, Homo sapiens
cctgggacctactgaataaaaatcttcaagtgggagagtggaatagaaagcctataaatttgaattttaaatcagttctccatgtaattttcatgaacactaaaaactgtgcatcactgctctattgaataaatgcaccatcttttcccgtctactgggaagaataccttttgttaacttctttttagtgtcaggtaggatgggattactttatctgccctttttttctattccaaacacaaatttggaagaacttctttttcaaaaataacttacctctctgacctttaatcctattcccttttgcctttttcataattttttaaaacaatcctctcattttctataattttcactgcctcttcactgaatcctttcaccttgtaaaaggtatggctgtcctctttaagaaaaaaaaaggctttaatttaatataccactcctccttaagctaccatcctattttcctttcctttccctcacccagcccccaaattyttgaatggcctattttagaatacaatactctctatataggtagaatacacctctacctacatagtattgttataaatgtattcttaaacccctataatcttttttcattcc

SEQ ID NO: 817222 - DNA, 635 bp, Homo sapiens
aacaattcaaataaggttatatagagctcaaaataataaaagccatttgtgagaaacccctagacaacctcatattgaatgggcaaaagctggaagcattccccttgaaaactggcacaasgatgccctctctcaccactcctattcaacttagtattggaagtcctgaccagagcaatcaggaatgagaaagaaacaaagggcatcccaatggaacaagaggtagtcaaactatccctgtttgcagaccacatgattctacatctagaaaaccctatagtctcggtctaaaagttcttacgctgataaacaacttcagcaacatttcaggatacaaaaccaatgtacagaaattgctagcattcctatacagcaacaacagtcaaaccgagagccaaatcaggaacacaatctcattcataactgacacaaaaagaataaagcctacaagtatagcaaaccagggaggtgaaagatctctacaatgaaaactacaaaacactgctcaaagaaatcagagatgacacaaacaaatggaaatacattccatgcttatggatggataggaagaatcaatatcatttaaatggtcatactgctcaaagcaatttacagattcaatggcagtcttatca

SEQ ID NO: 817223 - DNA, 565 bp, Homo sapiens
cttccacaatggttgaactaatttacactcccaccaacagtgtaaaagcattcctatttctccacaacctctccagcatctgttgtttcctgactctttaatgattgccattctaactggcataagatggtatctcattgtggttttgatttgcatttctctaatgaccagtgatgttgagctttttttcatatgtttgttggctgtataaatgtcttcttttgagaagtgtctgttcatatcttttgcccactttttgatgcagttgtttgtttttttcttgtaaatttgtttaagttccttgtacattctggatattaacccatgtcagatggatagattgcaaaaattttctcccattctataggttggctgtttactatgatgataatttcttttgctgtgcagaatctctttagtttaactccatcccatttgtcaatattggcttttttttttgccattgcttttggtgttttaatcatgaagtctttgcccatgcctatatcctgaatggtrttccctaggttttcttctagggttttcatggttttaggtcttacac

SEQ ID NO: 817224 - DNA, 492 bp, Homo sapiens
ttacatgtaaatcttaatccatcttgagttaatttttgtatagggtataaggaagaggtccagtttcagttttctgcatatggcttgccagttttcccaacaccrtttattaaatagggaatcctttccccatttcttgtttttatcaggtttgtcaaagatcagatggttgtagatgtgtggtgttatttctgaggtgtctgttctgttctattggtctactttatccgttttggcaccagtaccatgctgttttggttactgtagccttatagtatagtttgaagtcaggcagcgtgacacctccagctttgttctttttgcttagcattgtcttggctatatgggctctttttggttccacatgaaatttaaagtagttttttctaattctgtgaagaaagtcaatggtagctggatgggataacattgaatctataaattactttgagcagtatggccaatttcatgatattgattcttcctatccat

SEQ ID NO: 817225 - DNA, 673 bp, Homo sapiens
tcagtcttggccaagtgtctccagcatgaaatgtggaccgcactacagagagacttggaactttggaatatgtgtataattaaaatgtaggcacatcacactactgcttgcaaagtgaagtggtgttcatttattaaaagccccgtcgactgtggaagtgtgaatgtgtttcagggcagttctgactactcagaataggaatctattgctgcattgcttttaaagaaataggtggaaaaaagataatccaaaccatatattacaatgtaatatacagataatacaaacatgtattctatacccattgtatagtttttagatgtacatttattttattgaggttatggtgttggaaatttatataaactgtttttgatcagaggtggatagaaggtcatttcaatcgaatcaaatgtaaaattacactatcataaatgtacaaaaaatttaggagagatggctctgggcaagatgatataagagttcattttaaaactctgtctattaaaatgttttgtaaaatatcaatacatgcagcaactttaatgtaaagttatttatttatatatactagcctagatatctttgacaaatargagtataaatcaaacaaaaattcttcacaaaatgagctttaaatttgagatgggggagaagatatgcatttagataa

SEQ ID NO: 817226 - DNA, 632 bp, Homo sapiens
accattccatctgagacggtgcaaaaaaaacaacactgaacaagaccaaacatctgttatgaggcggggggtggtccctggatccttcttgtccaagtgctacttaaagggtatgctgttgagagagctgtttccataaaagagaacgcatttttcttcacggtatcatatttataaacatttatgagtatctaaaatatattttaagatattttcttctttaaaattctgtttatttccatgttattattttcaagttccactttcacaataatttggtattatatatgtagcatttgacacttgaaaaaatggtgatgctgatagaaaaggaaattttttttatctgcacatgtggaatttctcatgggacagggtttttattaggtttcccacactgtaatattttggtttctttctttggaatatttctctgaacactgaagtacatagttgattctcagtttaatcagcacgtctttattaaacacttccatgtttcagggccctgtaatcagatttgaggtttataaatgcttctggtaccacaacctrtctgcaatagccagggcttgttggtgtcctggaataaaattacagacgacagatcactgtgtatgaagtattaggaa

SEQ ID NO: 817227 - DNA, 530 bp, Homo sapiens
aaaaaaatagaatagctcaaacattttgcgagagaagaataaagcaggagaaacagttcacctgatttcaagacttattttatatctacaacggttaagactatttggtatcggcagattggcaaagacataaacccgtatgtcaatggatcagaacaaagaacccaaaaataaacctgaacaaatatctccaatttattttcaacagattcaaaagaaattgcatagaataaaccaacaaattatgatggatcaattggatgtccatagcaaatagtaagtttaacaccttatataaaaattacctcaatgtggattacaaatataaatgtaaaatgtaaagcaattagactcttaggaaaaaaataggggaaaggcttttgagtctagggctagacagagtttctatgcttgacaccaaaattacaaaccagaaaaagataagttaataaattggatttcatamaaattaaaaactttggctgcaaaagaccgcattaagagaataaaagtgtatgctgcagactggg

SEQ ID NO: 817228 - DNA, 388 bp, Homo sapiens
tctcttgcctaagttaattaatttttgtaagtatatttaggacattttctttagaygattaaggcagttagactgagtacactttatttttatatcctctaaacaggcattttggcaaaattttttaaatggacttaattattttacagaaaaatcctttttttgaaacaaaatcaagggtgtgccttatttctactttaattttgaaacttcacaatagcaaagacttggaaccaacccaaatgtccaacaatgatagactggattaagaaaatgtggcacatgtacaccatggaatactatgcagccataaaatatgatgacttcatgtcctttgtagggacatggatgaaattggaaatcagcattctcagtaatgtatcgcaag

SEQ ID NO: 817229 - DNA, 601 bp, Homo sapiens
aggtgcagcaaaccatcatggcacatgtatatttatgtaacgaacctgcrtgttctgcacatgtattccagaacttaaataaagaacacttcacatgagatctactttcttaacaaacttgtaagtgtacaacccactattgtcagctgtaggcacaatgttgttcatcggatctccagaacatactcatcagatataacccaaaccatgtaccccttaaatagcaattctccattttcctttcttccctacacctggcaacctccattcttttctctgcttctgtgcattgtagattccccatggaaatggaatcctacggtatttgactttctgtaactgacttggttcacacagtataatgaccttgaggttcatccatattgttgctatggcaggatctcccttttgaagagtgaagagtaatcctccatgggctatatatacaccacattttctttatccatcaatcagtggacatagtaggattttttctgtacctccactgttttgaattacacagcaatgaacatgagaacacagataacctctttgacatcctgatttcctttttttttctttttttttttttttgaatatg

SEQ ID NO: 817230 - DNA, 586 bp, Homo sapiens
catacataataatgccctgtgcttcatacaatcactgcaggaagatgttaatgtgggaatgttaagaggcagtgaaatccaaactgggtcttggaaggctaaattagagtcctgtaagtgaagtagagaggaagtagaattccagctggagggataagccttcgactcaaggttctgagctctatctcattcttttagaaaactgagaaacctgtttctttcagtcttcttaccatattcctttttttttaattcgtaaactgaattaatataggtgtcatgtgatataacaggaaatgagacttatagctaaatggaatttcaatatcccatattgcgctctgttctctagtcctgagctgctgctttcttttaatcagagctatattgaaatgattcacataccacaatattgacctgaagtgtactcttcagtgctttttaatatattcctggggttatgcattcatcaccacagttatttttggaagatgtttaatgcaaaaaacccagtatccattagtacccactcactattttccctcagccccacggcccaaagsaaacactaatttattttcgtctc

SEQ ID NO: 817231 - DNA, 624 bp, Homo sapiens
catacttggtaatttgtctttttattgctgagttttaagagatctttatgtattccagatgcaagttatttatattttatataatttgcaaactttccctattctatagatctttttctgttctaatgttttttgaaatacaaagtttaaaattttgatgaattccagttaattcttttcttgtgcttttgatgtcatatctaagaagactttgcttaacatcaggttacaaagatttactcctatattttcttcaaagagtttgagctgcacttcttacatttgggtctatgatttatcaatttttttgtggatagtgtaaggaaggggtaccctcttgtggatactcagttgtctgagcaccatttattgaaaaactatttttttcttgattgttttggcatcttgtcaaaaatcaaattgacgggtaatgtcagtggtttttatctctggaacgtgaattttatttcattaatccatgtgtctaatgcaagcataatggaatcatgatcaatgcggtttcctagaaagtgctgaatcaggtaggtatgaatattgaaatttttcttttttaaagattgttttgagyattctaagtcctttgaatatccatatgcattttag

SEQ ID NO: 817232 - DNA, 634 bp, Homo sapiens
gaaaacaatggacaaagaagtgctggtgtacaggataaattgagcagaagtgagacaggacgaggaagtccttggtccgggagaaaagtggaacccagtcatcaaggacaggacacccaggccatagcaggagagatggctaggacagggccagtgaaaggcagaatgtggaaaaacaagaaaaagagcaaaattgagcatcttctgtgtattgggcatggtgcccaggttttatacatatgttatggaggttgagattgctaagtaaagaaactgggtgaggatgaagtcatttactgagatagggaacgtaggaggggaagcttgcagggctctgttatgtaaaaatgcccaaacatagctgctcccaactgcttgccaccattgtttctctttctacacccgaccctattctggcatttcttccccatactccctctctctccctctcttcccatcccattcctctcaggctgattatgttcatgatctatgtggattgctccaagatgtattctggctacagcagtgaatattgattayctctattatgggaatggctaaataattagatgagtccattgggatccaacttcctgtgactcacagacacagcctaaagacaaaaaatgac

SEQ ID NO: 817233 - DNA, 646 bp, Homo sapiens
attttcagtgttaaaaaacttttaaaaatagacattatggttacatgttcaccttgaggtgatacgagcgatacacattggtaaaagtgagaactaggaagagatcaagaacatakagaagggaacagaatttccactggacagctaagcttaggggtgatattccaggaaacctcatgcggaaccactttagttttttagttttaccacctgcccctggcaaaaatttccaagaggctttttggtactattagcattgtcttttaaaaaatatggtgagtgtggtaattgtcgtcatttccgaaagatgagtaatcgaacaataaaattgtacattcgtcgagcctcctctacttacacttttttaagtttatcacttaaatctttgaaacgttgtgacttcttagttgtgttcgtttattttcttctccttttataacacttgatacataactgcaaaagagtcttaaatcttaatttggagacttaattttggttttattaactatgagtgcactttctaaaacaagaggtcacaggagagtgtggaaaccattccttccttttccgtaaacctgtcgactttgaacaagcttagtcaagtgggaagtattacatgaaagcgttttctgttgacagagcattg

SEQ ID NO: 817234 - DNA, 500 bp, Homo sapiens
attttgcatactttttctaagagtagaaaccaggtatttgtagcttaatcattaaaatatctctcaagataagtgtatatgatttcaaaaagcaattaggttgcaataaagctttgtcagccaaggcragggtaaacaagttataaatcacgtaagagtgccttggtttcagtgctcaaataacttttaaacacggttttaccaataatcaccataaacctaaaactacaggacagtgaacctttattaaaaaaactgaataattagtacattcagtactacacttccagagtcttgtgcacacacacacacacacatttaagttgacatatataggcatataatatatacatatatgcctatatatgtggcaaaatcaatatacatgtgatacgaatgaagtattccagttacacatagtatattaataaatgcaggaatactagggtagaaatttagaaggcagagttgtagcccagttcggtcactaataagttact

SEQ ID NO: 817235 - DNA, 582 bp, Homo sapiens
caatgagaacctaagtggacttaatataaaaatgatattctgagttggggccacaggccagtccacctcattctctaatttacaaagtattccagcagtagaaggagagtggctaacactgaataattgtagaccacactgggacacaatgaacttaaacgatcagcattgcattagtcaattccatacccgtgtttcaagccactcatttttttttctgaaaaaaaaaaaaaaatagcataaaggcaatgttaccttgaatgtcagtgtttctacagtttggtttctgtagtgcgtaatccacatacaagtcctgtcgtatataatgaccagggtcctggacatctccttggcctggtgtgttgctctgctccttttgagatgctggattccaagtgcacaaaataagtggcaatttcacatcttctcaagtgggtcttgctcaacctagaaggcctttttcttttccatgtctggctaattcctcctaaggattcaagtctcctcttggaagacatcttgcctgggaagcctttcctataaacckccctcatctcctttctcactcccacaacaagttga

SEQ ID NO: 817236 - DNA, 608 bp, Homo sapiens
ttccatgctttccccctaattctagccccaagagcctaggcctggccttaatcaaaataaaatagctacagttggaagcagaagggatatttttgagtctctggacttaaatttcagggttcaaaatacatatgataaaagacaacacagagagtggtatcacatattttgatccaattctcattttttgtgttctcctgatttttctctctgctttacaataaatttaaaaagataaatttttaccttgaggaattatattatactgagtacttcataaaaactttgtcagccctaaacaattaaaaaaatgcctctcctcagctttcatttttcctccctcccatcaaagaaacaggagttaggcatagcatgctgttcttcctattaaactgccaacttttggttaaaaagcagatgaagacttccatcaggctgctaatcttttttcttgagttatttataccttgaacaagttccacataataaattatctattatgccttcactgtgggcttgaattttattattctcattragatgtcatttttagagctcttcattcatttaaatttttttttttaaaaattgcataaaagcctaggctt

SEQ ID NO: 817237 - DNA, 640 bp, Homo sapiens
tcagttaaaagggctatgtaggtgacaaaatgcatacccatagtcctagagcaagtttctgccaatggagaaaacaaaaacagcaacaacaacaaaacatcctcctctttgaattattttaaaatgtactaaaagaacattatttgtttttttgtaatacaaaggataaatgcttgaggtgatggataccacatttaccctgatgtgattattaagaattagatgcctgtatcaaaaaaatctcaaataacccataaataatacacctactatgtacccagaaacatttaaaaaagaaaatttaggtgtttctgccccctaaacaaaaaaacaaacatgaaacaaaaattgagaactagattttttaattaaatgaagtaatgagttatcaaccttgtgatatgtattgttacttcagttttgtttctaaaatgaataggagaatggtataattacttattttagtagctgtatatggaacctcataaaataaataaatagtatccgtataatttgttttttcaaatggatagttaaaatatttttgtctcagaaaattttgcaacacctacaggcatatcctaacttgataaaytctaattaagtttttttctaaaagtatcttatttatttactttta

SEQ ID NO: 817238 - DNA, 563 bp, Homo sapiens
aaagttgatctgtcctgacagatccattatgtttagagattttttcagggctttcttgattttgcttacagtatgtaayagttccaaagacctttgtgagaacacttaaaggggcaatgtggtatgaagaaatgcattcagggtagggatgttcacagcaatagaatgtgctgtagttggagaaaatctctgtatgatggtatccaactaccacagaaacaaatatgcctcattgactatggttacatcccaaataatacattttcactctaagccaaattcattgatgtttcctgcctgtggactattggtaatgtatacaaagtaataaaattctgatgatatcaggcggaaaggctacacttgatggacagagaagttcattccttcagtaaatgtgaacacctattggccaggtacaatggaaagtccttagaagacagcagaaaataggttataattcttactttcaaggagtgtatagtctagtgggagagactgaccattaaaatagcaactacatactatatgtaataaaaactactctatggtaaaatagagaa

SEQ ID NO: 817239 - DNA, 563 bp, Homo sapiens
aaagttgatctgtcctgacagatccattatgtttagagattttttcagggctttcttgattttgcttacagtatgtaacagttccaaagacctttgtgagaacacttaaaggggcaatgtgrtatgaagaaatgcattcagggtagggatgttcacagcaatagaatgtgctgtagttggagaaaatctctgtatgatggtatccaactaccacagaaacaaatatgcctcattgactatggttacatcccaaataatacattttcactctaagccaaattcattgatgtttcctgcctgtggactattggtaatgtatacaaagtaataaaattctgatgatatcaggcggaaaggctacacttgatggacagagaagttcattccttcagtaaatgtgaacacctattggccaggtacaatggaaagtccttagaagacagcagaaaataggttataattcttactttcaaggagtgtatagtctagtgggagagactgaccattaaaatagcaactacatactatatgtaataaaaactactctatggtaaaatagagaa

SEQ ID NO: 817240 - DNA, 632 bp, Homo sapiens
tatgtgcatgcatgcatgcatgtatgtatgtatgtgtgtgtgtggagagaaaggtttcccagccctcctcttgaaagctgcgaggatccttgcatgttctccatcataaacttacagtagctgtaggggtgtctcctcctattaagcctttgtttctagatctgactcccccatccctgacccatactagaagcttcattagaaatgcccaaaaaggaaggatgagatctgcttcttgacaaaatagcataaatggcattagcccaagccttggcttttccccatctctgcaccatagcccaaatgtatgcaatgagcttgtctaatgcttgtgcttccgcatgttcccccctttatccccccccgcaccgcccccctctcccttttggaaagacaaagccaaccctcagaagccagggcccaaatgtgctgatcggtatcctagcatctctgccctgcccctcccccagctccctgagccatacctctgtcaggagccttgagctggacccctgatgcgtctgtcccttttgcactccgaccaagctctaccgcgacagttccagctgagacactgttccacgggaycacacaggggaactgggccgatttcctaagatctgatttctgct

SEQ ID NO: 817241 - DNA, 508 bp, Homo sapiens
aaaaatgaaatgacttgcccaagaccactcagtgaataaataacagaattaagatgagactcaggaatcctaacttttgatcttttttcttggtcagttaagaatataatgagagtagaccyagcatgggggctcacacctgtaatcccagcactttgggaggctgaggcaggtggatcatgaggtcaagagattgagaacatcctggccaacatggtgaaaccctgtctttactgaaaatacaaaaattagctgggtgtggtggcacgctcctgtaatcccagctacttgggaggctgaggcaggagaattacttgaacccaggaggcggaggttgcagtgagccgagatcgtgccactgcactccagcctgggcgacaaagcgagagtctgtcttaaaaaaaaaaaatgagagtaaactgtacatatgacaccacagagaacatttactgagagcgtatctcaggctcctttcctgggagtgactttttctacatcaagacaagtg

SEQ ID NO: 817242 - DNA, 543 bp, Homo sapiens
gggattcatcacctgtttattaaagagtgatcggaccttgaataaacatcagcagtagccaggaaatagtctccacaggccttaggcaagacacagtactatactggcttcaggtgtgacccagtgcagtcccagcagtggcagccatgggagaaattgcatccccctccccacaactccaagcagctcagcatggagggtgtgactccatttgcttgggaagaagtaaggaaagagaacaagggactcggcttggtaatccagggagttctcccagatcatacccaaagtcattaaggtggtacctctatgagtctgcaagagtcacagcattactgggattggggtgcctcctaatgcacatatggctgcagggaccaaagacttaggtcacaatgcaattcccttttaatacatgcgaagtttycttaagacagacaggtataaacaagcccagactgcaaagactagaataaatacctaacttgtcaatgcctagacattgatgaacatccagaagcatcaagactatccaggaaaaca

SEQ ID NO: 817243 - DNA, 648 bp, Homo sapiens
aggggtgggtggtcatgccatctttctggtcattgtggatcctcccagactaggaattaatgracgcagacatcatagggtccttttctctagagaagggctaatgaggccaacagtagatagtgaagaatccatctcaccatgtaaccaggactctcaattgatgatcttcctaataccccttaaaggaattagaaaattgacgtaccttctctcatatatatgagttgacctctccaatttttcattatgatattaaatgtgcaaatactacatggtttctgtcatctctaatattttaaaataaagttgctatattaattcttaaaatatgtcaaatggaacctgaccataattaccatatacccacaataatgtatttaaataaatgaacaaactctgtttttaacatttcttcattttacccttaatgatttcaacttaaattcatatttccattaccatctcctttggactttctttccaaattatgtacttttatggaaaagttttcttagaccaataaacatgtatagctcatattttagaaggtacttttaaaaatcttttgaccacaaggcactacatgttaaaaaaaaaagtattctgtcttaggggtcattacaattgttattaataaacatttga

SEQ ID NO: 817244 - DNA, 618 bp, Homo sapiens
taatggtaatagtacctgatctgcttattgttatgaggtttacactcattaattttcattaattgcctgcatcacacatcagcacatagtaagcactacagtaatatttgttcagtaaaatgatttcagatattttattttaagcctcaagcattataagagttttctttctacccattctactttttaaaacatttctctgtatctgacaccaagaatttatactagctaaaagcattcacttttgttaaaagaagtagaaatttttccttcaacttctctatgtggattttggtcgagataggttggtggtctgggttttctcatcttcatgaaacagatggagcacagaggcacatgcaattcttgccttatcctatagcactgtgaaatgggagattccctgatccccctggcgggatgtgtgacaggagtatggctcgcctgttcagttgctgacactgctcaaagccctgatgggaggcggggcatgcagatggatagatacaggagcycaggtgagtatgtgttagtgtgcctttcagcactgccatccgtggacagtttgagtgttaaccagctcagtggacatctgcctttctgcaaggcagtgtgtga

SEQ ID NO: 817245 - DNA, 591 bp, Homo sapiens
acactgccaacgtcatattcctgcagtgccagtgtctcatgggtcacagagccctcctccatggcctgcctaactggcactcttccatcagagcgccagcctgtgggaacaggtgactccccagtggcctcactcacaaagctcatggagaaacacaatgggtggaggccattttttttttctctgccccctctacaatcacgtacaaaagcaccttctaggatcacccttcaaacttccaaagatctccccctctccaagggcactcagtgtcatggtacacttttaattttctctgcaaaggaggcaaactcaattcctcttttaacagctcccttaaaaatattaaagatctgaataaagaaacttaaaggtcaaaatgatccaaattaaatgagacaattgtttaaggattcaagggtgttacttttttttcttcttttcttttcttttttttttttgagacagagccttgctctgctgccaggctggagtgcagtgacatgatctcagctcactgcaatctccacctcccgggttcaaktagttctcctgcctcagcctccagagtagctgagactataggtgcgt

SEQ ID NO: 817246 - DNA, 491 bp, Homo sapiens
acagccctcaggagtcctgagaacatgcgcccaagggggtcaggctacaggttggttttatgtaatttaggaagatataagctatcagtcaatacatgttaagatgtgtattggttcagtctggaaaggtggaacaactggaagtggtgggtaggagggtgctttcgggtcatgggtgggttcaaagattttgcgattggcatttggttattatctaaagacttggaaccaataaaaatgaacgtccaggttgaggtaagggattgtggagaccaggcttttatcattcaggtgaagactccaggtagcaaggcttcagggagaaaagaatgtaaatgtttcttatcagacttaattaatctgttccatcagtaattctgaaagggaggaggtataatcaggcatgtccaacaccaycttcccatcaaggcctgaactcgtttttcaggttaactttggaatgcccttggttgagataagggatccattca

SEQ ID NO: 817247 - DNA, 491 bp, Homo sapiens
acagccctcaggagtcctgagaacatgcgcccaagggggtcaggctacaggttggttttatgtaatttaggaagatataagctatcagtcaatacatgttaagatgtgtattggttcagtctggaaaggtggaacaactggaagtggtgggtaggagggtgctttcgggtcatgggtgggttcaaagattttgcgattggcatttggttattatctaaagacttggaaccaataaaaatgaacgtccaggttgaggtaagggattgtggagaccaggcttttatcattcaggtgaagactccaggtagcaaggcttcagggagaaaagaatgtaaatgtttcttatcagacttaattaatctgttccatcagtaattctgaaagggaggaggtataatcaggcatgtccaacaccaccttcccatcaaggcctgaactmgtttttcaggttaactttggaatgcccttggttgagataagggatccattca

SEQ ID NO: 817248 - DNA, 631 bp, Homo sapiens
aatgtaaaaaataaataaattttaagaagagaattagctacaaataagaaaactaaagttccttagaacttaaaaaataaatcttcataaaatwaaaaaaaaaaaaagaatttgaaaactccccaaacaattaagcagtttcccatatctcaatatatacaggagggtggtaggttagaaagcagtgcagaatgacctttgtgcagtatttttcccctaaagaccagggaacttgaggatctgtgggaactgttgctctccagcaccctgacaccatctcggctggctcctctataggaaggacattaaagtgtaatatctgaggtagaaaagtcattgtagaaccctttcagttgcctcctgtcagctcaatctataagagctgtagatcatcctggaaacagtgaagcttatgattttcaattattttgagacattaaaatgcacatatgcatatacctatgtaccttttaagcagaagtttcccaaaaacttcattcttatacccattaccattggaagtttcacatcttaaataaggttctgcttttcttcttaagaggaacctgttctaactagaataataacttgaaaccttgtctttgaatgtgcatacttttttggtagagga

SEQ ID NO: 817249 - DNA, 633 bp, Homo sapiens
aagtgggatagcatcaaactaaaaagctctgcacagcaaaggaagcaatcaaaaagcaacttaatggaagaaaatatctgcaaaccatatgtctgataaggggtcaatatacaaaatatataatgaactcacagaactcaatagcctaaaccaaacaacctgattttaaaatgggcaaaggaaatgaatagacagttctcaaaagaaggtatacaaatcaccaacaggtgtatttaaaggtgctcaacatcactaatcatcagggaaatgcaaatcaaaactacaatgaaataccacctcatacctgtcagaatggctatgataaaaaagacaaaagataacaagtgtcagcaaggatgtggagaaaagggaacccttgtacactgttggtgggaatgtaaattgctacagccattacagaaaacagtatagagattccttaaactaaaaatagagccaccttatgatccagtaatcccactctaagcatatatccaaaagaagtgaaatcagtatcctgaagaaatatctgcatcctatgtttattgcarcattttcacaatagccaagatatagaaacaatctaaatacccattaagagatgaatggataaagaaaatggggcatatatac

SEQ ID NO: 817250 - DNA, 629 bp, Homo sapiens
aacttttatagaaatgatcactgacaaagcctgagtattctgctgagygcactatgctctctacaggtgttctgtgattttgattggtgattgtcatattccagctagcaacaaagtggataagagacaaatagtgaggaatggagtgagatcagaaagtctctcttaaagtaaaaaatttagtgcttttaaaaaaaattgctatggatatagaaatcttttcagaaatgtgtgtccttaactcataataagagaaagactggtaattattttttaaaatcttcattgaaactccatatatattgaaagcaaaatactttgttttagaatcataaaagcaatacatgttcattttagaaattgtagggaaataggaagaaaaaaataaactgtatcctataagcgttttacatttcccttaagtatgtttttatacttacaacatacactttaaaaaaaagtccttctaaatacttgctctgtcattttctatgtataccatgagcattccctaatatattaaatattatatgaaggcatgattttactaaattgtattctgctttaatgaggtaacaaaatttatttacctagttcccttttgttagacatttacttcgatttcttcc

SEQ ID NO: 817251 - DNA, 607 bp, Homo sapiens
ctgtttttgaaagagaaaatgtctttgaaaacttgaatatatagtatatctaaagaaattattataaaatcttgaatacattattttatgagtctctaaggaagataaccattcttgccataaaatcaaagtgaaatgaaacaaacaaaaacaaaggaatatgccctttgtgtttgttactcatagaggaagcaaagaagaaaaaaaataagaaaaagaggaacatagaatcatagaatgattagttatttttatgtctgaagcatcagtcttctatagaaatttaaggccagaagtatgtttctcatttaatttttaattagaggcaatttttaaaaatgagcagaataaacttcaactgtcagttgtaaaacagactagatttttatgaataaaggtggaatgcatagtcagctactttcatggaacatatagaaaatctgttcttgaacatgatataccacagtaaagcaattctgaagcctgaatttcttacagtaatcacagctttctctgacactgtattcagcttcaattggaagcccaggtgytaagcattcttcacagtataaagcatttgacactttgaagataaccagacctttgt

SEQ ID NO: 817252 - DNA, 640 bp, Homo sapiens
tttctttattacaagacattgaaaggaaaaacccaaaaaggcagaatggtgttattcccactgataaggaagaatcatccctctgatttgctgctttacttatcttgtgaatatttgagctctcctctggttgaatatttatgtatttatttatttatttcatgaattttatttttcatttagagcatcaagaataactacttaaaaggagctcagcataaagaattgaagtcttttatgtttttcccttttactgactctgtaaaagcagaacggttccaattgttccttcctttcttttctttttgtctgcatcagttttgttccaggcctgtgcttttcaggaagacataacaatactagatgtaggtgtaataaaccatacaaatgagtgcctcagtaatcatgttatattttagtttaaatagtctgcaccactgcttgacattgttaactttttggaataaatgtttaatgaaattcttctttactaatttaaatccaaattcagaataatatattctgtgaaattacaggtctatgaatcaggtgcagattgtcacagcattttctaaccacacattaaaaaaataaaacctttatgcccaaagktcagcaatagttatccctaaagctgaat

SEQ ID NO: 817253 - DNA, 569 bp, Homo sapiens
aacaggtgagcaaggtcatctgattcacctatttttttcaagtacatttttctttaaagaaaaartattgatttctacaagtttgaaaattacttctgtatggcctccaggtcttctcccagcattaacaggctatggatctgcattttagtcccagtgaaccctgcttagacttactctacaatttggctagagtatccattatcacccaccatcagggataaagtcctgtgaacattttatctttaaatgaggcagaacaaacacaagtcatcaaatataatttcaataatgaaccttagcattttacatttgaatacttccccaaatggttgcaatttattaatgtcagattagagggctccattcatttttcctgttcagtaaagagacagttaatgaatgatggtgacttggtcaggcttctactgaatgagtctgggagtgtgtagcctcagtgtgaagggaggcaactaatgccagaagactattgacatgtttttcatccatgtagaatatgtctccttatacaacttttggctaatgagatggtaattatgtcatcaaga

SEQ ID NO: 817254 - DNA, 627 bp, Homo sapiens
tttttgctgttgtattagcctacatcctcctcttctcatgccatcctctgaatgctaacattgctctttgacagcctctcaccagtgtaacccatcctatctgagggggacaggatcatctttctccagtaccaccactgccagttgagttctttagtgaggacttgagaaaattcagctttaccctcaagtcttcaacagacactgtggtgcaggcttttctcctaaagatgtggatgtgcagtgagacaaagccactgtatcagtcagcagaggctaagttttgctgcattaacaaaggactccaaaattttatgacttacaaaactcacagattgacagtagctctgatctttgtccaattccttctgaaacaaaggcttaatgagcactatccatttgggacatatttgtcttgaataggagaaaaaaggaaacggaggaaccacagagtggctcttagaacttctgctgggaagtggcatatgtcacktgtactcacatttgtttgcctacaacacgtcaagcctgatatcaatggggagggaaatataaacctcccagagagagcactcggtaggaagggacttggcacagagtcccttggctcagtcatgttttaaacat

SEQ ID NO: 817255 - DNA, 602 bp, Homo sapiens
agcagaaaagtagtccctggggggcggggggtaaaactgataacatgcttacaacatgagggggctggtctccaggaccagtaaaagtcaactaccaaaagacaaaagaaaaataccactgttcacagtcaccaacctagggctgggatggggcagcagggaagtactaagaggaaggtaacttctgtgattctctccagtcagtcatggtaactcactgccttttcactgaattttaatactttagaggagtaatcctcaacaagggacaattttgtccccatgggacatttgacaggtctagagacatttttggtttttgcaaacagagaaacaagtgctactggcatctagtgagtagaggccagggatgctgttaaacatcctacaatgcacagtatggccttcacaagaaagaatatctggctgcaaaggtcaatattgcccagattggaaaactctattgtacaataagcacctctttcatacagaagacaaaatacagtcagcccctctgtatccataagctccacatccacacattctgccaaccatggatcaataatattaaaaagcaaacawataaaaacaatgcaacaata

SEQ ID NO: 817256 - DNA, 622 bp, Homo sapiens
agagacggatgtgctgaatcctcatctgtacttgccagaagtgaagctgtcatctagcacagttgctgcctctgtttttgaaaagagatatgactagttgattccatcactatctgatgcagaattttcaaagatgagtagtggatcagagaaacgaaacaaaacaaagccaactgaactaaactgtgttgctagctgaaagggtctgatagtgagcaaagggccacatgtttggagttgctttcttcaattttatttcactgcttttatccattaaattgggcaacagcagcactcactggggaaaataggaacaacagattcaagttttcctatgtgctgtgacagagatgccctttttttctttcctctctcatctccttgctttttccttccctcccttcttaagctcaagctttcattatatgattttttttttaaattccaaaagaataacgatggtgtatagataaaatgtggttaatttccctactcaccatccctaatcctactyttttaaagaaatcaatattaagagtttggtttatatcaacaatccttccccaacccatgcaaataagatatgtgtctagagaaatttgtttttttaatttttacaaaa

SEQ ID NO: 817257 - DNA, 622 bp, Homo sapiens
agagacggatgtgctgaatcctcatctgtacttgccagaagtgaagctgtcatctagcacagttgctgcctctgtttttgaaaagagatatgactagttgattccatcactatctgatgcagaattttcaaagatgagtagtggatcagagaaacgaaacaaaacaaagccaactgaactaaactgtgttgctagctgaaagggtctgatagtgagcaaagggccacatgtttggagttgctttcttcaattttatttcactgcttttatccattaaattgggcaacagcagcactcactggggaaaataggaacaacagattcaagttttcctatgtgctgtgacagagatgccctttttttctttcctctctcatctccttgctttttccttccctcccttcttaagctcaagctttcattatatgattttttttttaaattccaaaagaataacgatggtgtatagataaaatgtggttaatttccctactcaccatccctaatcctacttttytaaagaaatcaatattaagagtttggtttatatcaacaatccttccccaacccatgcaaataagatatgtgtctagagaaatttgtttttttaatttttacaaaa

SEQ ID NO: 817258 - DNA, 513 bp, Homo sapiens
aatgtatatgaaaccacaaaagacccagaatagtcaaggctatcctaaaaaaggaacaaaacggaggaaatcacattacttgacttcaaattatactctagagccacagtcatcaaaacagcatggtagtagcataacaacagacacataaccaaaggaacagaatagagaactcagaaacaaatctgcacacctagagtgaactcatttttgacaaaggtgccaaaaacatacactgcaaaaaagacagtctcttcaatatgtggttctgggaaaactagatacccatatgcagaagaatgaaactagacctctatctctcactatgtacaaaactcaaataaaaatggataaaatacttaaatctaagactgctaactataaaactactatcagaaaacattgggaaaawtctccaggacacttgtctgggcataaaattcttgagcaataccccacaagtgcacataaccaaagcaaaaatggacaaacgggatcacatcaagtaaacaa

SEQ ID NO: 817259 - DNA, 628 bp, Homo sapiens; identical to SEQ ID NO: 813987

SEQ ID NO: 817260 - DNA, 575 bp, Homo sapiens; identical to SEQ ID NO: 813988

SEQ ID NO: 817261 - DNA, 600 bp, Homo sapiens; identical to SEQ ID NO: 813989

SEQ ID NO: 817262 - DNA, 613 bp, Homo sapiens
gatgaaacagaagatgccatgtaggactttcatagctagagaacagtcaatgccwggcttccaggcttcgaaggctgacgctcttgttagggactaatgtagctggtgaccttacgttgaagccagtgctcatttaccattcagaaaatcctaaggcccttgaatctgaagctaaatctacctataccctgccaatgactaacaaagcctcggcagatgacagcagatttgtttacagcaaggtttactgaacgttttaagcctactgttgagacctactgctcggaaaaaaagatttctttcaaaatattactgctcattgacaatgcacctggtcacccaagaggtctgatggagttgtacaaggagactgttgttgttttcatgcctgctaacacaacatccattctgtagcccatggatcaaggagtaagttttacttttacttaagaaatacacttcataaggctttagctgtcacaggcagtggttcctctgatggatctgggcaaagcacattgaaaaccctcaggaaaggattcaccattctagatgccattaaaaacattggtgattcatggaaggaggtcaaaatgcaacatgaacaggagtt

SEQ ID NO: 817263 - DNA, 583 bp, Homo sapiens
tattcaaggatctgctgtaattccattcatcaaggtagagccctaataacctaatcacctctcaaaggctgcacctcttaatactgtcacattggtgatgtggtttcaatgcattaattttgggargacataagtgtttagactaaaacagctttggttcagataggactcgtgaactgtgggggaaattagatttggcaacatctaaagtctgttttagttttagaatctgttcttttacatatctttgcaggattttcatggctttagggaaagcaaatctctttgcaagggcagtttattcttcagttggagttggtaggtgcagttacaatgtgtgtactcttttgctatattctagtgaagttacattttcacttctgtgtatgtcaattggatggaatatccctatattagttaacccatgtgggtgcaatgaagagaggcattcttggatccctgaagaaatgagaatttattgggaaaaagaagtcttgtttatgtagcaagcatttgtgtaaacctgaaagttcctccacaatctcagggagctaagatgttgagaaatattaggagaaagttg

SEQ ID NO: 817264 - DNA, 518 bp, Homo sapiens
ctcctgaaggaagcactgaatatggaaagacaaaactgggaccagccactgcaaaacacacgaaaatgtgaacaccaatgacactatgaagaaacggcatcaactactatgcaaagtaaccagctagcatcattatgacaggatcaaattcacacataacaatattaaccttaaatgtaaatgggctaaattccccagttaaaagacacagactggcaaattgaataaagagtcaagacacatcagtgtgctgtattcaagtgacctatcttccgtgcaaagacacacataggttcaaaataaagggatggaggaaaatttgccaagcaaatggaaagcagaagaaagcaggggttgcaatcctagtctctgataaaacagacyttaaactaacaaagatcaaaaaagacaaagaaggatattacataatggcaggtaaagggatcagtgcaacaagaagagcaaactaccctaaatatatatgcacctaatacaagagcacccagattcacaaaaca

SEQ ID NO: 817265 - DNA, 589 bp, Homo sapiens
ctcagaccacagtgcaatcaaattagaactcaggattaaaaaaacttaytcaagacaacacaactatgtggaaactgaacaatctgctcctgaattactcttgggtaaataatgaaattaaggtagaaatcaagaagttctttgaaaccaataagaacaaagagataacatgccagagtctctaggatgcagctaacacagtgttaagagggaaatttatagcactaaatgccaacatcagaaagctagaaagagctcaaattgatatgctaacatcacaattgaaagaactagagaagcaagaggaaacaaattcaaaaggtagcagaagacaaaaaataactaagagacatcaaaaacccttcaaacatcaatgaatccaggagctgttttgtgaaaaaattaataaaatcgatagaccactactcgactaataaagaaaaaagaaagaagaatcaaatagacataattaaaaaatgataaaggggttatcaccacagacctcttcgaaatacaaactgccattggagaatactgtaaacacctctacacaaatacactagaaaatctagaagaaatggataaattc

SEQ ID NO: 817266 - DNA, 558 bp, Homo sapiens
ctcccaagaaaaaaaacccaggacctgatagacttacagccgaattctactagaggtacaaagaggagctagtaccattccttctgaaattattctgaacaatagaaaaggagagactccttcctaactsattttatgagcccagcatcatcctgataccaaaacctggcagagacgcaacaaaaaaaggaaacttcaggccagtatccctaatgaacatcgatgcacaaatcctcaataaaatactggcaaatcaaatccagcagcacgttgaaaagctcacccaacatgatggagttggtttcatccctgggatgcaaggctggttcaacatatgcaaatcaataaacgtaatccatcacataaacagaaccagtgacaaaaaccacatgatgatctcaatagatgcagaaaaggccttcactaaaattcaacatcccttcatgctaaaaactctcagtaaactgggtactgatgaaacatatcctaaaaggtatttatgacaaaccaacagccaatattgtactgaatgggcaaaagctggaagcattccctttg

SEQ ID NO: 817267 - DNA, 606 bp, Homo sapiens
ctgtaaagggtcacttaggtagtaaatattttaggctttggggtccaacaccaaaatcaaggatattacaaaggcagttaaataacaggaacggaatgtccactttttttggctgataaattaaaaatatattaataattattatttttgctatacacatctactaatgaaaataatgaaatttcttctttgggagacagggtttcacttaattggggttcaaaattagtgctgctcatcatcaaatcaattataaatgttcatgtataaaaataattcttagcttataggctgtactgtaagcagacaagggagctgatttgttccatggaacacagtagactgactcctgccttaaaagagtaccttaattggtaacacgaatactttttcaaattaataatcacaatactaatcatcatcttcatataatgtagtatatcctttttagatgtccaaatgcagtagataagtggttaataacatgygctttggaatcaaaccaatctgggtacaatgcttggcctccctcactcccttctgacagtgtgacttcgggaaggtcacgttaatttccctcaggcttgattttctcatctgaaacat

SEQ ID NO: 817268 - DNA, 482 bp, Homo sapiens
accatgcccggctaatttttttgtatttttagtagagacggggtttcaccgtgttagccaggatggtctcgatctcctgacctcgtgatccacctgcctcggcctcccaaagtgctgggattacaggcatgagccaccgtgcccagccagtaagcacacttttaaaggatgtaatgaatcctgggaatataaaataagaggtttttccagtggtaacatctaaatccttacactgtaaggtgaattatgttgtagctttcattcacacatttaattttaaaaatagttaacagcaagaactttctgccagacacgtgccaagctcctgctggagtaagtggcgtcagagaagtagatagatgtagagtctgacttggttttactgtgttgtgcrttccacgctaaaacaccctggagatttgggcatttctcctgaagaactgtttttggaacttggttgctttggaaagtctttatcaaac

SEQ ID NO: 817269 - DNA, 514 bp, Homo sapiens
cagaatcttaaaatggaaacttaattttccaaaatggtatstctttttttttttgatccaaacagcttgattaccctcttaatccctatcttgcgggaaaagtttttccagtctggaagggagcctattgccatttgaatacgtcaatatgtctgcattttgaatatactacctcaaataatcctcatgaaaaatcctaatgaagaataggtttacttattcccaagtcatatttcttcttaggtttgtttccttattggaaaaataagaaaagtggactaaatgatttccaaatttccctccagctttaataatccatgattctacataaaatattctgatgtctgttcctgaggagcttataatttggttagtgaattaaagataacatgatgatttcaggcactaggaaaatatacaaataaccttaactaagcaaaaattatcaatataacttgagtagtgaatagctctgagaattgctggagattaagggagagaaggacaaagtggg

SEQ ID NO: 817270 - DNA, 634 bp, Homo sapiens
cagtaaatactgatctagtaaaaaattacagcaattatattgagaagagagagaatgagaaatgcacatgcatgtactggggactatgtgcagataagggacagtgaggaatgtgtgaaagagctaaaacagaattgaatagctaatgtcccaaactagaaatcaagatgtaatactagaagcacgtgatacggaaatatgaaagtcacaaaagagttgaaaatgaatgccccttgggaacaggacattagctgaaggtagactacaaattttatttttttttaagacaaggttttgctccgtcggccgggctagagtgcagtgggatgatcacagcgcactacagcctcgacctcctggctcaagcactccagcaacctcagtcacctgagtagctgggactgtaggcatgcaccaccatgcctagctaatttttattttttgagagatggaggtctcactatgttgcccaggctggttttggactcctgggttcaactgatcctccctccttggcctcccaaaatgctgggattacaataggtgtagtccactgccgtgactggtrgactacaacttaaaacaattttttatttttacgatttttttataacaagacttatagaatgatttg

SEQ ID NO: 817271 - DNA, 634 bp, Homo sapiens
cagtaaatactgatctagtaaaaaattacagcaattatattgagaagagagagaatgagaaatgcacatgcatgtactggggactatgtgcagataagggacagtgaggaatgtgtgaaagagctaaaacagaattgaatagctaatgtcccaaactagaaatcaagatgtaatactagaagcacgtgatacggaaatatgaaagtcacaaaagagttgaaaatgaatgccccttgggaacaggacattagctgaaggtagactacaaattttatttttttttaagacaaggttttgctccgtcggccgggctagagtgcagtgggatgatcacagcgcactacagcctcgacctcctggctcaagcactccagcaacctcagtcacctgagtagctgggactgtaggcatgcaccaccatgcctagctaatttttattttttgagagatggaggtctcactatgttgcccaggctggttttggactcctgggttcaactgatcctccctccttggcctcccaaaatgctgggattacaataggtgtagtccactgccgtgactggtggactacaacttaaaacaattttttatttttrcgatttttttataacaagacttatagaatgatttg

SEQ ID NO: 817272 - DNA, 723 bp, Homo sapiens
ttgtcgtccatgttcaccaggatcctggatggggggggacaagaccaaccaacttcactgccacttggtcctggagtcagacctagattgaccygttagctctcccacttactagttgcagcatgtgaggcaaattatttaaatctccttaagcctcaacttcctcatctataaaatggggataataatagtacccatcttataggattgctgagagaattgagttaggaggaaatcaggtgatatatttatatcatagcatttggaaaatgaaatatactggcttatttatgattattatttccagcatgtatttcatagttgtcacttggtaaatggtacttggctcatacctgtgatgccagcactttgggacgctgaggcaggagaatcacttgagcccaagagtttgagaccagcctggataacatagcaagatcccatttctacagaaaaattttaaaaactagctggacatggtggtacatgcctgtagtccctgctacttgggaagctgaggtgaaaggatggcctgagcccaggagttcaaggctacagtgagctctgattgcaccactgtactccagcctgggcgatagagtgaaaccatctctaaatgaataaagcaaaagcacatcaataacactaacttacatgatgtgaagtcacagccccctgacaaattacacactccagcaagtgagcctcaaagtttaaatgaac

SEQ ID NO: 817273 - DNA, 538 bp, Homo sapiens
ttgaggtctagagatgttaaatggctgcccaagattacatacctgactgcaatgttgcccctacaccackgctttaagactgatttgtgagtgtctgcagattcccaagtgagagaagcatgtgccatactacagatgttcttacccctatacctccccactctgttacatatgaaatactctagaggaatcacggaatcagaagacttgagttcaaaatattggagagccttgtgaccttttaaactttagttgtttaagctctataagcattagtttttcaaattgtaaaatgaagagacttatgcaaaactcagatagaagagggaaggttaaactctaatttatatggcaagccaggacagtgcacagcaaacaccaagaaaccaatccatgctattctgattcatttttgtgaaatggcttgaaaattgtaccagtccatgaaaattcaaatattatacattatgtatttgtaataaagtagctgttcttatttaaatatttctcatttatgatcaggtcttattaatagaaa

SEQ ID NO: 817274 - DNA, 658 bp, Homo sapiens
ggtcatttaggttttttccatgtaattcctcttgggaataatactgcaatgmacatgagagttttatttagaaatattttattttgtgttcaaatattgggggttatccagatttctttcttttgttgaattctaattcaatttcatagttcatagaaaacataattcgaatgattggaattaaatttggtgattctgcttccaaatttcctttgtacctaacctgtcacatcaattctttccagggtttccagcctactgacttgccctgcagatggagaacttgaagcacctacaacctgataatataattcctcgcaatctctctctctctttctctctctctctcctctcccactttatgtgcacacatatacacacatacacacacattctagctctattggttctgtttctctgcacagccttgactaaaacagattttggttttattgcctagaatattggctatcttagaaaatattcaacatagacttgaatagagtatgtgtttttctgtttttgcaaagattgttgataattgtcagtcaagttgattaatattgctgttcaagtctgtattcttatttgttttctctcttattgtatcaattattgagaaaatggtactgaagtatccaaatacaattgtggatcc

SEQ ID NO: 817275 - DNA, 632 bp, Homo sapiens
attcaatggtggcttttttttccttttgtgtaaacagtcaattaacgtggtctagtttttatggcaattctatttattgggtrgcaacttgagtctcagttctgaatttttgtccataagaaacttttagtctttttcttatacccacggttcagtgatcaatcagatttgtgggtagaataaatctgtggagtccttcttggccctttctcttctgagttcccctcactatttgattccctggtgtgagtttgctggtctcccagctgcaaagactatggggttttctttaatgatttatcctgcctctatctctacacatcatgcccatgttttaggcctaaaaattcaaaatgagaaacatatactatgcaagttgacttccctctcttacagggttctcccaagcagattctgtttagtcctatttgcactgcattttctacaagtacttgctattatattgtgtctagaattctaattgttttctaggggtgaaaaaaaccttgagtgggggttgtaatccgttgttattagccaaacctgatttaaaaaaaaaaatgcaagagttaattcccaatagcaaagatatggaatcaacctatgaacccatcaattgatgaattgatata

SEQ ID NO: 817276 - DNA, 457 bp, Homo sapiens
cgcaataactatttgctgactgcgtatattgaagaaaycaagtttcaagctaaaacagatttatcaccatttcaaaatattatagcagaaatgaaggagcttaaatgtttagcataagaagaaaaatagaataaagacaagttgaatataccttttactttttagttaaactagaaatagctgactaatgcctgttagtgatagttgtaatttaaggaaccactctgaaatgtaatccacccctggttttatagttctttttgtcagcttgcttttaaggctgacctggctttgctttgaataggagtgttttcaagaaacacacacacacacacacacctctacaacaccagcttatatggtggttgaggaagctggggtccaggttaccactggccagtcctcagctggaactctgctaccttggaattcagccttggtcatcagctctcccttg

SEQ ID NO: 817277 - DNA, 457 bp, Homo sapiens
cgcaataactatttgctgactgcgtatattgaagaaaccaagtttcaagctaaaacagatttatcaccmtttcaaaatattatagcagaaatgaaggagcttaaatgtttagcataagaagaaaaatagaataaagacaagttgaatataccttttactttttagttaaactagaaatagctgactaatgcctgttagtgatagttgtaatttaaggaaccactctgaaatgtaatccacccctggttttatagttctttttgtcagcttgcttttaaggctgacctggctttgctttgaataggagtgttttcaagaaacacacacacacacacacacctctacaacaccagcttatatggtggttgaggaagctggggtccaggttaccactggccagtcctcagctggaactctgctaccttggaattcagccttggtcatcagctctcccttg

SEQ ID NO: 817278 - DNA, 542 bp, Homo sapiens
caggataggtaagtatttgtgcttttaaagaattaataacatttaaatgtgcagtcctaactgaattattttttgctccatagaagcagttcagatgattcctgctgatttctaatttcaaccataaatatcacttaatttgttgttaaagtatttttccttaatggaatttttctcctatagctttaagacagcctctgacttgcaatttctttattaattttattttcttaaggtcacattattcctggcattttagacatttttcacgatctgtgactcttgtctcatgggcagaagctttgtcctctttcctttttcttcaccactctttgcagccctgaccctttagttaatttttcagaaaccttagcaactctgcctttggagtggcactgtacactgtggaggacaaaatataaattgatgtaagctgattaatgatttagctctactgctgaaaattccacatttgtttcctgttgtaccaagaataaartctatgtctttcctaggacttttgagacctcctgtctccttcc

SEQ ID NO: 817279 - DNA, 608 bp, Homo sapiens
aggagacatggaaggacccaggtgtcatgatggaatgagaacaagttgctcatgggacccagctgggtccagggcgtgttgtggtgrggaggggcggtggaggccacagcttctgaagcggagcagttctgggctgtgggaagaccaggcaagccatggagtgggggcccctagggctgggggtcagaggaggagacgtctatggtatgtgacaggccatgtggggaatggcaggaccaacatggggtctcctgtgaggcagatcctggtgtctggagaggaatgatggggcatgcctggaggtcagatgctgcagcggggaggagggcaggaccacgggtgggcctcaaacttccacatggggtggagaatccagaatctggaagcaacaatgggcagccagaggcagggcaattccctctgtgtcttttcccacctgccaccccctgaaagagctgtctgggagccaggattcagttatacaacaggtattctctgcatttttatacaggttcttaaacattcccaaagcagaggatgtggggcaaagaggagggattttggagctggggagaaaattctccttctttgcttactaactgcatagc

SEQ ID NO: 817280 - DNA, 608 bp, Homo sapiens
aggagacatggaaggacccaggtgtcatgatggaatgagaacaagttgctcatgggacccagctgggtccagggcgtgttgtggtgaggaggggcggtggaggmcacagcttctgaagcggagcagttctgggctgtgggaagaccaggcaagccatggagtgggggcccctagggctgggggtcagaggaggagacgtctatggtatgtgacaggccatgtggggaatggcaggaccaacatggggtctcctgtgaggcagatcctggtgtctggagaggaatgatggggcatgcctggaggtcagatgctgcagcggggaggagggcaggaccacgggtgggcctcaaacttccacatggggtggagaatccagaatctggaagcaacaatgggcagccagaggcagggcaattccctctgtgtcttttcccacctgccaccccctgaaagagctgtctgggagccaggattcagttatacaacaggtattctctgcatttttatacaggttcttaaacattcccaaagcagaggatgtggggcaaagaggagggattttggagctggggagaaaattctccttctttgcttactaactgcatagc

SEQ ID NO: 817281 - DNA, 547 bp, Homo sapiens
gaggaaggtgggaatgacccccagcgaaggctttggaccctggcccacagataccttgttgatggggatttttaaggcttggaaggctgctgaccctatgttagcatagggtcttaagggtttgggcagactgtcaatggaaaatgttagctgaggccaaaggtcttggtcagctggggatgtagaagtgggcttatcagacgacaggctgaatgcaacacaatggtgtggcaagccctgagcagcttaagggagtcctgactccatctgcttgtttcttaggagagcttccgacaaagtcctcttcaggggcaatgatactaatactaagacaattcaaggggccatagctgcctggacttactggaaacttagaaaagacaaactcagagtgctgcccatgaattctacaaacaacacccwacctggcctaaatccaaattactatgaacagtaagacttcccctctcctaagccagacaagcttcctacagccaggcatctccttaaatgtgaaccctgcaatgaacaagaaaggttactttgg

SEQ ID NO: 817282 - DNA, 597 bp, Homo sapiens
ctctacagcttaggaagttttctcaggtgctagctctaaaatgatggagggattttcattgttcatatctataatgtgggatatctctctctactgtgaatgacatcatctccaggctatctctccacagtgaaggcagcatctgctgggctgtctccacagtgaagggagcgtctgctgggctgtctccacagtgaagggagcttctctgagccatctccatggtgaaggaggcatctctgtggctgtctccacggtgaagggggcatctccagggctgtctccacagtgatgggggcttctccagggctgtccccacagtgaatgtcatcttcttgatgctgtctccacagtgaaggaggcatctcgagggctgtctctcctatgctgtctccagataggccgacagcatagcataaaagtgcagcttaggatgaactgcctctgaataagtgtaaaccaagcattttagtgcaaagcagtgaacgtcactacaaagtgctgtacaggatccactggtagcagagggtgtcagacttcagttctgattgagrggaatagcatcaatgagtctgaaggaaacagttgaaccaggtc

SEQ ID NO: 817283 - DNA, 494 bp, Homo sapiens
attagggaagtaattatctattactctctaggatactgataaaggaagggacttccatgtcaatttctaaatattcaagaggccttgaatatcccaaggtgcctgttagggtcattatttygaaactaaaagcagacctggcctcttctgattaagaaagcacacacacacacacttttcactctgactgttgacaattcaagcccatgcacagtacatgcttccttgggaatacctctcgtgtatatactctggtagggccaggcctataggggcatcctgttgccttcaatgctgaacttgacagcacgatgcactttgctgagtcgtttctgttctgcaaatcgcctcttatgcttttccaatcggcttaggccctttttaagaataccaggctagaagtagtagtttgattggagaataaaaagagattactgagaaacactgaagatccactgagcagtatttacaatgataacagaataagtgtctac

SEQ ID NO: 817284 - DNA, 461 bp, Homo sapiens
cccaaaaagacagggttcagatgggcttccagatatctgaacacggggaggttcctggagaaggcatggaagctccgtgccccttcccctgtacctcaccctacctacacctctacatctgtatccttaaaaatatcctttatagtgacacccaaaatgagtgactgaggtagacattcaatcacagaagtttattaagccaactttagggcttttcgagggaaaaaacataagccacagagccatctgtttttccaaagaggttttcaagtttagtatttagacatttccttaaagtaggggaaggtaggttggcggttaaggcgaaaaggttacatgccygtgagactttggttagtgcccagtaaatctacattttacatcagataaagtgaatgtcggaagagacaattatgcagtcatctctgggtaggtggaagaaatgagtctggacttgttct

SEQ ID NO: 817285 - DNA, 560 bp, Homo sapiens
cagtattgagaatattctagtttttaagttgggaggtaggttcacaggcatttgtcttattattatgccccaaaagtacataaatgacacctacgtattttgtacctatcaaatatcacaaatggaaattttaaaaagaaagcatacaggccaagcagaaagggacagtaagagtacttcactagctagcacttgctgaacctccccaaaatgccagtcagcatggctatgcccctaggcctggcactctactccatccaactatatcactcagagctgggggtctgaaataaagaatcagctcatttgggctctaataaaaataatgcctattttgggaaaggtggaagcctcagagagatggagtgtgtgagctcatactaagagctatggtttctattaaaagaagacatttcagacagtggccactgggtacagytgaaaagatgagtgagtgatggtccttccctgtagagagcatgcctaatttactaagaggtcaacacagcagcatcctatttcactcctacagcagccccaagggggaagtggtgacctgc

SEQ ID NO: 817286 - DNA, 635 bp, Homo sapiens
aaacatagtaatatagtcatttttgtctctactttttcaatatttataatgactctttccttctctcattgtttcagttaaaactggatattataattgtgggcatacttttttttttttttttttgagacagagtcttgacttattacccaggctggagtgcagtggcatgatctcagctcactgcaacctccatctccggggttcaagtgattctcccgcctcggcctcccaagtagctggggttacaggtgtggaccaccacgccgggctaagttttgtatttttagtagagctggggtttcaccatgttggccatgctggtctcaaattcctgaactcagatgatctgcccagctcggcctcccaaagcggtggggttacaggtgtgagccactgcgcccagccgtgggagtacttcttgatcttaattttaaaggaaatgacttcaagatgttattttctagtatagtaacatcttgattattgattgttatgattgtcacaggatttttatgagtggtctttagcatattaatatatttctttttatcccatgctttttgttgaaaatgactgaatattgatataataatrtgatcttttatcatttactgtgttgtttaataaactaa

SEQ ID NO: 817287 - DNA, 627 bp, Homo sapiens
aataatactctgatctcttcagttccatcaaagggcactaatcccatttgtgaaagttccaccctcatggcctaatcaccttccagaaactccatctcctaatrccaccacactgagaattaagttttagcatatgaattttgtggggacacaacatttagtccatagcatcctcccattttttaatatgtaaaaattcaaacatgcacaaagtttgaaaaaaataacacaatgaatacctgcacagcctcacctagactcaacaatgaacagcattttcacatgtgtattagtcagcttgagctgctagaacaaagtgccagaaacttgatggcttatacaacagaaatttactttctgacagttctggaggctgaaagtctgagatcaaggtgttggcagggttggttctgaagcttctctccttggcttgtagctggccgtcctccccctctgtcttcacagtatcctgtctctgcgtggctgtctgtgttttctcttctcttcttataagacatcagtcatattggagtagggcccaccctaaccacctcattttaatttaatcacctctttaaagagccactccaaatatagtcacattctgaggtactgggggttagtatt

SEQ ID NO: 817288 - DNA, 639 bp, Homo sapiens
agctgtgctcaaataatatgaaggatttggcgaacactcccctctgccccccaaccccccgtggaaacgaggagattcagagtraggtaggaaactcagctctttgctttccccgttgtgcctggttattgaaacacccttggggagaggcaaccggaaagccctccgtggtaaccgcatagccacagcgagttgcatatgttacctagagagcaggcggatagtaggtagggctgggggggttgattggatatttgattgctttctattagtgtggttaggatggatatttttggattccacttctattggtcatgataaaaagcaaaaaaacaacagaagccaagcacttctttgaaagtgtgagcaaaccggttgaaaaactatttccagattcccccaagggtgtatgggtaagggaggaggaacccaggcacgcacatacatgtctgcagataggtcgaatatgtgtttgtaattgcaaaacatgaccagcctttaaagaggcccccaggactctgctcagattatttgcaatatgggctgctacagattgttgtttgatgttgcatttgtgcataacaggttttgtttggagggacagtaatagatctaaaggatctgttatgcagctttttg

SEQ ID NO: 817289 - DNA, 608 bp, Homo sapiens
gtttatttctactattacaaatytctagtgcagcttggttatcaaagtttgtagtgctaaggataattttttatttttgaggaaaataccaaagtagcaatctaccaagcatagaaagcatgactttaaggtattgaagctgactatactctttaatttctattgctgactagcagagaccaaatcagcactgctttcaatgtagtcagcccatctgagaatgcttcatggtcgccaatatttttggagcctttttattgtacctatatccagcattaggtcaaaagcctcacaagataatcaagtttccttcttcatggtcacactttggtttgaaccaaaggctccattactaattacccaggctgtcctctcaggttattgacaaggcttgtaacagagtgagtttggctatttcaagaaatcctatccttcagagagaaaagatttgccactctgaagatattcaaaagaagttgatgctgactctacagacaattccaaaagagagatttctccacagcctccaccactggaagctccccaagcaggaggaagataccttattttgatgtgtatccacagtgcctggtacagcagctgtcgca

SEQ ID NO: 817290 - DNA, 608 bp, Homo sapiens
gtttatttctactattacaaatctytagtgcagcttggttatcaaagtttgtagtgctaaggataattttttatttttgaggaaaataccaaagtagcaatctaccaagcatagaaagcatgactttaaggtattgaagctgactatactctttaatttctattgctgactagcagagaccaaatcagcactgctttcaatgtagtcagcccatctgagaatgcttcatggtcgccaatatttttggagcctttttattgtacctatatccagcattaggtcaaaagcctcacaagataatcaagtttccttcttcatggtcacactttggtttgaaccaaaggctccattactaattacccaggctgtcctctcaggttattgacaaggcttgtaacagagtgagtttggctatttcaagaaatcctatccttcagagagaaaagatttgccactctgaagatattcaaaagaagttgatgctgactctacagacaattccaaaagagagatttctccacagcctccaccactggaagctccccaagcaggaggaagataccttattttgatgtgtatccacagtgcctggtacagcagctgtcgca

SEQ ID NO: 817291 - DNA, 570 bp, Homo sapiens
gtttaccttcttacacagtaatacagaagacaagtctgttgcttctagtgataaaactacaggactagaagggccctaatggaatctgaataagacctagatcagattaccatggtgagtggtgctactgttctggagaaaacatctgctggagaaagtgcactgctcacaagaaaatggagagagcttataaacagacctaatgttttattcccctttgtacagggtcaagcatgtataagtcaccctgagagcagtgaatgagtgcactaaacagaacattaagctatgtgacaggagaattgactctattcttggctctgtcagtgactatctgtctaacaatgggcaaagtccctagttggctttatcctctgattcttcataggcaaaatgagggttttactgattaaactttaaaaacttgtgtttatttcctactacgtgtgtcccaaatgcttgcgccacagcagaactcagatgggcaaagtcctttcttcgaaaatgctaacattctagagatgagggaggtgayagggagaagcaacaaataaactaaaaaagcatatg

SEQ ID NO: 817292 - DNA, 512 bp, Homo sapiens
tcactacgttctcccaagagctccctagaatagaataattattattctcactgacagataaaaaaattcatctacagggagaaactgagagactttttccaactgatacaactaataagtagtggagtctactaaattgtgggatgcataccagcaaataacatctatgtgagcacggatttctgtttagtgatatgtcctcagcaccaagaataatgtctatttaataaatacaggagtgagtgaatgagctatgatttgaatccaagtctattagatctcaaagcccaagacttttaaccattaagctactgtctttctgatgtgagggacaaggagaaactcatgcacatgtagaaaatgtaatttggcaattgaaaactgyactctacatcctcaaaggtcaaagaagaaattcaaatgaaaaatgtttaaggattagagagtaatgataacataaacatcatacaacaaaatgtgtgggatacagccaaagtggcattgagggaagt

SEQ ID NO: 817293 - DNA, 498 bp, Homo sapiens
tagcccactccagacgaggtgcgggcaccatgctgttaccatctgctgcccctctttccatctttccatcttacttcctgcgtggcccagcatccaggctgtctagggccgtgggagacctggagagccattaaaaacaacaactggcagcacacaggcattttttggcagcacacggaaactcacacggaacagacagggagccggaggtgagcagagttacctgtatttctctcaccacctgaggaaattggggttcaaaggggtaaagcaccttgtgtgttggccccaggggtgaagcaggaggggccaggcctctaggaggactggcacagttgggtcaaggacaggggagccaagaatgtggggtgcggtcaggacctgggatggccaagcagtgtgaggtgagccagaggcccaaggtctctgagatgctgcacagaggggcattgaaaggagccaggatktgaggaggagaagggaggaggtgggggagga

SEQ ID NO: 817294 - DNA, 650 bp, Homo sapiens
tacaatgttcctgaggggacgcccttcaggccctcagcatgttgtagccacctgtcctggggcagcgagtaggccagactggggccagattgaggccggttcagtgggccctcctaaggtcggctcccccacccgtctcccaccctgagcctcacagtcctcacacaagtttggatcattattctaaaagacataatcccaaacactggtccccaacattgaaatactgaaagacgcaaatctctaaagtttcaaatccctaacatctaaagtcttaaaaatcacaatcccgggatagttgcatcatgttaggtggagctactgccttgcttggggctttatttggagactgaaaatggtttaaggggatgcggatggatgccaagttgacaaggggtggacctgtggacttcattttgggtgtgaactcgactgggttaagggatacctagagacctgggagatcattattctgggcatgtctgtgaggtgtttccagagattagtgtgtgaatctgaggggcctaggtgtggaagatccascctcaatgttggtgggcagcattcaatctgctgaggcccagggagaacaaataaagaaggcaaactggtctctctctcagagctgggacaggcttttcttccactgc

SEQ ID NO: 817295 - DNA, 283 bp, Homo sapiens
aggtcatcaggagagaaaggtcaaggtctttgttggctaaaccatggcacagaatcagtaagccaagacaagtcgtgaaggtgggatgctgygccccatgacagggaagccaacctacttccgtgaattcctgagtactgcagcaggaagcacacacataggcacacacacacaggcatacataggtatacatatgggcacacacacacacaggcatacacacttgggacacacaggcacacacacagacacacaggtgtacacacaggtgcacacacacaca

SEQ ID NO: 817296 - DNA, 543 bp, Homo sapiens
tttgcagaatgacaaaatcrcctaacagtacatttctcagaatgtatccgtttcttgagggatgcatgactgtacagacagaagccatgtacaggctataaaaacatcaacttgacatacaacacaaaggctaatgccataaatcgttagtttctgctaatagaagagtacctagttctgtttgtaagactacttgaagcacattgaattattttctagctccatgaacggtaggtaaaattactgatctgaaaaaatctcccactaggttcccaatggggaaatgtttttactaacctttttgtaaaagatgaggagttaaaatgaacagacctctgatgtccacaagatgttgtccaacaattgtgctccctgataaaaagtaatttgaaattaatcagatatctgaaaaagaaaaaaaaatataaaactaatcaagaggaaaataagaggaaactctccctaattgtgttggttgtggttatgtgtaaaagtagtctaatatgtggatatttggcaatataacatttatgtttgtacatc

SEQ ID NO: 817297 - DNA, 646 bp, Homo sapiens
aaaactacatgtttaataaagcatatttgtacctacatgtagtaaaataacagttttacacataattgctgtaaaaacttttcttcagttggaggaaaaaaaaaagcatgcaggacttaactactwgttgaatctttctttacaaatctgaatgatttacccaaatcagagagttacaaatagaagagcttttctctccaagttgatctgaaagctttaagaattttatgagtataattttttgatactgttactgtttatacagaatgagttgaaattgaaacaagaactgaaatatgtgcacattatattacaatgtataaaaggagcttttaatagtagaaataaaaatccaaagtcctttaattgaaccaactaatatgagaagcagaagaaagaaatatactcagcaggtaataaaaatggcaaacaagatattttaaattcacagatttgggcacatatagaaagtgtaaactaccatggtctgtgacatagcctcaggaagtcctgagaacatgtgcccaaggtagctgggttacaacttgattttatacattttagggagacaacagttacaggcaaagacataaatcaatgcatgtaaggtatacattggcttggcccagaaaggcagaacatcttg

SEQ ID NO: 817298 - DNA, 587 bp, Homo sapiens
agacattttatagtgtcgataattattgagatgagttattgtatagagacattaaatacaagaactgtgaaatacttgaaagtgatggcctgtttgtggaggaacaaagtgagacatgaaacaaatgcccgagggcaatatactcttctgtctacagtttgtcttaactattgtgaatatttcaaataaatgaattgtggggggaaaaaaggttaaaaaagcctctgagatgaaaaaatagttggcgcataattgatatgaatttagagactccaaaaagaacatattttctttcatatattacctaagtcctatctgttctttgttagattttttaaatttttttaaagggcaatcaagaaacctttattttattcttgagtctttctctgtttgacattgaggaaaccagtttaactgtctgggcctgtgtttactcatctaaaaattgagtggaattacctttgtagtagaacccagagggaaataaattgtgcatcataataaagatggtgactagtgtttattgaaatatttastaaggtgataaagaatgcacttgtaataatttgcatagttcgttcacc

SEQ ID NO: 817299 - DNA, 521 bp, Homo sapiens
agtgaatacttatgccttatactcaaaggaatgcaccaaccacctaaagccagctctccccttgaagaagagagtggtgggaggagagtaggactagcagagaagggcctttccaggagtgatatcattatagcaattagaagtagattagatgttcacacaacagtacaaatggatgtgaaaaacatagtgtttactgaaaaacagtaagaaaaagagatgaggtatatggcacttcatcatttatgtaaattaaagaggtatgcccacaaaacaatattatacattttgcaggaacacattcatacaacatacatactaagcacattagagcagttgtccacaggaggcagggaaagaacatgactaagcaggatatgcatatatctttatatacatcgattgtgtttgtgtgtctgtgttacratcctgagcaatgacaaggacagcagcattaaatgactttttagaagccctcatacttcttggcactattcagatttcctcattttctttttttc

SEQ ID NO: 817300 - DNA, 595 bp, Homo sapiens
acagcgagaaatactgggaaacaaaaaatacgctcttaaaatttcaataacttcatatattcattctacttagctgttacgggagagaaatcaaatatcttactgttgattttcattttccaagggactttgaactatgtgtgtaggtggcagtaaataccttcgttatagctgctgggagctgcagactctgcacacacaggtgaaggtggttagacttgtgtttcctgggaagcaagggcaagtaaggagtgtctaccatgggccagctatatgcctttggtattccattcaacaccctcctccctgtgttagaggaaacatttctcctcctgcattcttcccagcctgtaacaggactttctgtcctctgggggattgggaagttatttcctgccccttcctcttttacttcttcccaagggaaagaatgacttctcttcttagggaggttggagaagggtcctaaacagcgggctctcttgtttaggctgactgtgagacaattttttcattgcttctgctttcctatggggagaacggttgaatcstagcctgggatctggaggttgatgtctctcttcttgctctccag

SEQ ID NO: 817301 - DNA, 626 bp, Homo sapiens
aaataatctgcacgcatgtgtatgagttttagcaggaggggatatgcatgtacacatatgcatatacatacaggtttatttaartgattggatctacacttttggaggctatttgaagtatcttatcaaaataaaacgcattttaagcaagaggttaaaaaagcttttcagacccgaaggccatttaatacagtaaatcttacttgggtagtttagcaaacattttttaaaatccacatccaacagattggttagtattagatacacagatttggtttcaaagctgaaatacccctggtggaataaatcttctcatgaaattcagttatattatgccacaaaacagggacacttatctattgacaacttaaatattaactcagtaggctacctggtgatataaataggaaaaaaacagtggtcatggattaggagtgagaagactatgacaccagcctaccttggactgggaccgcaaaggatgttaaaatctatcctagaatttaaaacaggaaaaatgtcaaatattccactccccatttggcccaaaccatcccccaaggaatacacccccaccccacccccacatgaggtttactaaccagctgctacagatgttactatgt

SEQ ID NO: 817302 - DNA, 589 bp, Homo sapiens
tttcagatattgattcactagatagcctttcaaatcttccagtgaagagaaatcagaactgttgaaaaatcagaacctctgacaaccatatttgctctgctcagctmatgtcagttaccgaacgtgctgctcacttgagactggacatggctctccagttcaacccagtccccacccaggggcaccaaccattttggtagcctgcttggcccctgtagatacttgagtttttgatgtccacactgaagaaaccataggacccctgagcacattgcacaatctcccaaaatgagagtcagttttttatcttctctaagatggctgagagggcacatgacaggtcaaaatgacccaccatgcacagtgctcagaacatacttacaaacaacaatagctatgggaccagatggcagggcctaattggcccttgcctcactttaaattatagaacaaagtcaacttctaatgtccgacattccttgacaaatcagattagggattatattatcctttttaaaaaatttagctactcatgcttttctcttattttattatttttctccattacactatctgaaatctgatattt

SEQ ID NO: 817303 - DNA, 589 bp, Homo sapiens
tttcagatattgattcactagatagcctttcaaatcttccagtgaagagaaatcagaactgttgaaaaatcagaacctctgacaaccatatttgctctgctcagctaatgtcagttaccgaacgtgctgctcacttgagactggacatggctctccagttcaacccagtccccacccaggggcaccaaccattttggtagcctgcttggcccctgtagatacttgagtttttgatgtccacactgaagaaaccataggacccctgagcacattgcacaatctcccaaaatgagagtcagttttttatcttctctaagatggctgagagggcacatgacaggtcaaaatgacccaccatgcacagtgctcagaacatacttacaaacaacaatagctatgggaccagatggcagggcctaattggcccttgcctcactttaaattatagaacaaagtcaacttctaatgtccgrcattccttgacaaatcagattagggattatattatcctttttaaaaaatttagctactcatgcttttctcttattttattatttttctccattacactatctgaaatctgatattt

SEQ ID NO: 817304 - DNA, 574 bp, Homo sapiens
ctgtaaggactatcctcttaaggtcaatagaagtcagttctgcacgattctgaacaagggcctgtctcagaaarctgccatcatcagtgattctgcctggtgtcagccaaagtgagagccccaggagagaaaaccaaagtcactgcaatgaactcatgcttaactggcaatgtcttattctaagcaaggcgaaaatttttaaacaacacaaaaactaagggatatgtacttttagccaataactagcttcttttttctgtacaaagtttttgagcttctgacaccatactgctaagataagaaaggagaggttggaagatgctggggctttgaggttcagatcatgtggtctacagagtgagatgtcccccatttctatccttccagacttccaagtaacaccatagacccaggttgtaagctcttctgaaccaaaaccaaaaatttagaaacattcaggcacatagtgcttgcaactatggctttcaaatggtggtgtatagaatgccctggtgtaggagtaagaatccaccgaaggatcatggcaagtctcccaagctcttcaggtctcagg

SEQ ID NO: 817305 - DNA, 554 bp, Homo sapiens
gctcacctcctcatgtcatctgcccttctgacctccccagcctcacctaccatctctttctccaccatctgcatgctccaggcttaggtggttctaagaaagaacaacattctttgacttcagatgccttgcacttgctgttctttctgcttataatttgctctccatgtcccttcacatgacaatggtcctttccccccgtgcacgtctcagtttaaatgtcatctcacaaataccttccatgaccagactagctaagggtactgacttattttccacagcattatgtttatttccttaacagcaaaaccatagattataaatagttgatttttttttggtggcataacttagtggttaagcatctggactctgtagccagactctctgaattcaaatcctggctgtgttacctccaagctgtgtgaccttggaaaagtttctaaacctttctgtacctctttccttatttytgagaggtaaaaagtaataatacctgccaccaagagttattagatgattaagtgagtcaatgcaaatgaagcacttcaaat

SEQ ID NO: 817306 - DNA, 511 bp, Homo sapiens
tgttttgccaggcagctggattaaagtgcagatgtttccagcatattcaattttatggatttgaagtatttcattccaatgcctcagatagttgtgcagtttgaacattacattctccaaaggcatcattcacactgtattctatgcaacaggtgcccatgacgttctgcagtgcacattctgggggccctgatgtaatgaccccgaatgatgatacttataaagaactactttcatgtgagccatgaaagaaaagttttattgaagaagacacagtcttaatagtctataatagtaactgttctacaggatcactgtagaaccacaaccactggaactttaaaaagatccaagagtgtggttataaagatagctcacacgtgaaattcattcacagggtcagttgtaggcaggctgtcatggcaaagaaacataagctgcgggtgcacatagtatcacagagttycattaatgtgattatatataacaggaaaagggaaatttaaaatag

SEQ ID NO: 817307 - DNA, 632 bp, Homo sapiens
tggtgacttcatgacccatagtcaaaygttcagtttctaccaaagcccagtaataggccaagagctctctctcaaaaggagactagttatctagttatctgcagaagatggcagggccttgctccaaaatcctggaggccttcactgtgattcacctatgagagcctgccaaaggctccaaacagcatccctatttgccactgacacctcaagcaccattggatctgtcgggtcatatggcccaagtggcaaagcagattgcacagcagcctggacctgttgcagagccttctcctgttctggaccccactcaaaattggcagcctttcgggtcacttgataaatgggctggagtaatacacccaaatgaggaatgtgttactttcaaaatccaaatagacccaccaggtgttgtacatctttcttggttttgggaggggccaaatgcagcaacttatccttcactttagaaagaatatcttgacaggccccacaccactggacccctagaaattttactgagatagaaagtccctgaattttagtaagatttatttctcatcctctggcatggaaatgtctcaccaacaagtccagtgcgtttgctacttctggctcactggatccaatga

SEQ ID NO: 817308 - DNA, 574 bp, Homo sapiens
gaacatactgtgggactgtcagagaccagtttaataaagcaactctgacaccagaaaactggtaaacaagcaagcaaaaaaaaccaggaacaggtcgggtgcggtagctcacacctgtaatccaagtactttgggaggctgaggcaggcggattacgaggtcaggagttcgagaccagactggccgatatggtgaaaccccgtctctactaaaaaaaacatacaaattagctgggcgtggtggcatgtgcctgtagtcccagctactcaggaggctgagacaggagaatcacttgaacccgggaggcagaggttgcagtgagccaaaatcgcgccactgcactccagcctgagtgacagagcaagactccatctcaaaaaaaacagaaagaaaaagaagaacaagggtagattaataagttggctaagaattcattatccttccatatgttgagtactagagatcaaagggaactcatgaatcatgtcatgcaccttcatgccttcatttcacagatgagaacacygaggataagcgactcaaaacaatttcaccatagcaggtcacaaattag

SEQ ID NO: 817309 - DNA, 577 bp, Homo sapiens
agtttctaattttggtgaagttcagtttatcaggttattcttttatggattgtgcttttggtgttgtatctaagaaatctttccttaaytggtcacaaatgttttttcttatgtctacttgtagaacgtttttttgagaccaggttttgctctgttgctcaggctggagtgcaatggcatgatcatgtctcactgcagcctcgaccatccaggctcaagcaatcctcccacctcagcttcctgagtagctgggactacaggaatgagcctggctaatttttattttcttatttattgtagagatggggtcttgccatgttgcccagactggtcttgaactcctgggctcagaggattctcccaccatgggcttccaaagtgctgggattacgggtgccagccactgcacacggccttacttttagaacttttaagattttctttcacatgtaggtctgtgatccattttgagttaattttgtaatatggtgtgacgtatggattgaagtttttttgtgtgtgtgtgtatgatgagccactgttccaacaccatttgttgaatagattccataaatta

SEQ ID NO: 817310 - DNA, 546 bp, Homo sapiens
tagattttttgcgcttttcttatttatcttagggaattgttaatatagttaccatttgtctactatatattctgaaatattttctccccactttattatttgttcagtagcattgtgttatttttaccatacacaaattttatattcaaatctatctctttttttttggtagagtaccatggtgacttaactgttgtaactttacaacataatgttttgttatctggcttggcaagcccctcaccaaaacttcctaacaggtctcccggtctccagttccacccttctccaatccattttccatgctgtgatcagagatacttttattgaaagaaaatcttaccatgtgtgaaattccttggggtgaagtttgaaccctttaatttatcataacgatgtccacctaccactwtggtctcttctctgcctcctttcctataatttattcctgattctcttcctttttgctgatgactcttcctcctgtctagaaacctctcctttgctttcccatcagtcatctcttacacccctaaaaactcagat

SEQ ID NO: 817311 - DNA, 509 bp, Homo sapiens
gtatgttaagtgagataagacagcacagaaagacaaacatcacatattttcacttacgtgtgggacctaaaaataaaaataattgaactcatggagttagagaatacaagaatggttaccagagggtgggaagggtagtgaggtgcggtggggaggtgggtatggttaatgggtacaaaaaaaatagttagaatgaataagacctaatatttgatagaacaacatagggactataatcaaaacaatttaattgtacatttaaaaataactaagagtattattggattgtttgaaacacaaaggataaatacttaagggatggataccccattttccatgatgtgtaatacattgcatgcctgtatcaaaacatctcatgtagcacataaatatatacacctgccacatatccaccaaaattttttaaaaaataaaaattttaaaaagataactgtgaaataatgcatatgttaataagcttgatttagtyactccacaatgtatacatg

SEQ ID NO: 817312 - DNA, 598 bp, Homo sapiens
tatacaattaagaaacattaaatatcagagaggggagtacgtttcatattgttgaaactgaataactaattcaattcccactagtatcggagaayaggaaattgctttgtaacttaaagaacttcagaaattacactttataatataataggaatgttctttgaatattgtttgaagactctgatgtaaagttcactgagataacttcccccagatgtaggaaaagtagctattgaatcagaattttacaaacatttataaatgtcaacaatctgtgtcatgtactattctaggcaatagagcatcagagaaaaaagtggagttccaaatgcgaaagatatttagaaagtataataaactaaccttggatatgggcagtgagggagagagaagagtctcagataatccccaagtctctggcttgatgactaggtgaatagtaggatcattaaagatgtctgacaagagaccactaattgcttgcctaatattcattctacccattttctatgtaactgacctatatagcattaatataaaagatagcaacatgcccagctaaaaaccacatttctctgtctccattacagataggatt

SEQ ID NO: 817313 - DNA, 613 bp, Homo sapiens
actaatcattagagaaatgcaaatcaaaactacagtgaaatactgtctcacgccagttataatgstgattattaaaaagtcaagaaacaacagatgctggtgaggctgtggagaaataggaacacttttacactgttggtaggaatgtaaattagttcaaccattgtggaagacaatgtggtgattcctcagagacctagaaccagaaatatcatttgacccagcaatcccattactgggtatatacccaaaggaatataaatcattctattataaacatacacgcatgtgtatgttcactgtagcactattcacaatagcaaagacatgggatcgacccaaatgctcatcaatgatagactagataaagaaaatgtgctatatatataccatggtatactatacagccacaaaaaggaatgggatcatgttctttgcaggaacatggatagagctggaagccattatcctcagcaaactaatgcaggaatagaaaaccaaacatagtatgttctcacttataagtgggaggtgaataatgagaacacatggacagagggaggggaacaacacgactggggccagtcgggggtaggggagcggggggagggag

SEQ ID NO: 817314 - DNA, 638 bp, Homo sapiens
actcctaggctataaacctgtatagtatgttactatactgaatactatatgcagctggaatataatggtaattatttgtgtwtctaaacatagaaaaggtaatgcattgtgcaaagacattagaacagttacatcactagatgatagaaaattgtcagctccattatcatcttatgggactaccatcatatatgcaacccaccattgaccaaaatgtcactatgtggtgcatcactgtatttatagtagagaaccattagaaattatataaagccccttcccccgaacagtggacttattaaataaataatagtataggcttacgatgcagccattaaaaataacatttttggctgggcatggtggctcacacctgtaatcccagccctttgggaggccgaagtgggaggataacttgagcctagcaagttgaagctgcagtgagccatgatggcacgactgcactccagcctgggggacagagtgagaccctgtctcaaaaacaaacaaacaaaataaacttttgctgggttccctgtcacatcagaaggtaagtataaaagacttctaagtcatgtcaaaagagactcaggaataaacctgaagatgcttccatcgatcaaagaggtgaggaagag

SEQ ID NO: 817315 - DNA, 625 bp, Homo sapiens
tgggggagtggggagggatagcattaggagatatacctaatgtaaatgaygagttaatgggtgcagcacaccaacatagcacatgtatacatatgtaacaaacctgcacgttgtgcacatgtaccctagaacttaaagtataataaaaaaaaaaaagaaagttctgctttaataaagacatcaaaaaaaaaaaaaaacattagctgggcgtggtggcacatgcctgtaatcctggctatttaggaggctgaggcaggagacttgcttgaactcaggaggcagagattgcagtgagtcgagatcgtgtcattgcactctaatttgggcaaaagagtgagactctgtctcaagagaaacaaacaaacaaacaagaaaaaacaaaaaaaatacaggtgtaagaaacattatttacattttacatgcctgtttggcagattaacactaaggcaaggatggcaaaacaaatcagagaacttttgattcaacaaatgaatgcaatgaagctacatttctaagaaaactgtattatttggctaaaagggaaattaagcactggactaagagtatagagaagggctggcaaaggaaaccaggaaggggaaaaaccaaagggtaaatttcagag

SEQ ID NO: 817316 - DNA, 555 bp, Homo sapiens
atttgatcactttttctgttattcacaatgtgacagctacagagtatacatacttttaaaaataaaactttatttcaaaatgattagaggttcacaaaagtaaaaagttatatgyggaggtcccatacacccttcacttctccacctccactgttaacaccttacatgactataggagaatataaaaaccaggaaattgacattgctacaattcacagagcttattcagatttcaccagttatatacactcatgtgtgcgtaattttatcctgtgtagcttcatgaaacttccaccatcaagatgcaaaactgttccatcaccacaaatatgcccatgttattccttcatagtcatacctgtcccattcttggcccccaaatagtaactcctggcaaccaggaatctgtgatcctttctataatttcattacatccaggatgttatataacctttcgaaactggcttttttcaatcaacataattctcctagggcctacccaagttgttgcatgtatctaatagttcatacctgttcattactgaatagtattcc

SEQ ID NO: 817317 - DNA, 495 bp, Homo sapiens
ttttaatgcattcagaatcaaaatgggatcaaaatggggaataaaattcgtacgcctgtaagcctgtgcccttacacatcagggacttgcgcggagtacagagcggacgacacactccctcttagtcagcactggcccatcccggccactgtgccatctgcttgtgtcagcaagggcctttgaagagcagtgttgtgtgactctcattttcatctgcctctgtaattactttcatggttttgaacaaccatctcagggaagtttagatggtaatacatccaatgcctgaggaaggcatttcagattctcagaaggaaggaaatggatcccaggcagactagatcatctttaatgtccagaatcttaaatttgttaccctaaaaagtaggcatgattttaagactgaaaatcaggatagctaggctttattgaatgtgtaccatgggctgggctctgttctgagtggttyatgtgtattaagtctttttgttctca

SEQ ID NO: 817318 - DNA, 599 bp, Homo sapiens
attcaagaagatgaagaaataaagtaagtattagtaactgtgagtaagaagtaacttgctatcaatgaaattaagattatagaatctcattcaaggatttccaatacaggattaatctttttttcctcctgaaatgtgttaggaatattattgtctggaggttgtgtgttaaattgagtgatgttgatttattacttcattctaattcactttctttaacaaaattggattattaaaatatttatgtgctgttgaatatatatagtcatgcccccaaggaggctgcattgcatattaaggaatggaatgtaaaatataatcagaacattgggaacaaaagggattcaatggtacaccacaagatgatgccattataattttatctgctttaaattactgagttaactcatgaaattttcattgaacattgggaaatgacaagaggttcctctgttaacaactggcacagttagggataaaagtatgctctcagtctagtaagattatgttccatatggtagatcaataaatccatctgtgcctcctctcttaccatcagcctagttgytaatgtgtaaatacagcattgctcaagcttt

SEQ ID NO: 817319 - DNA, 539 bp, Homo sapiens
tcccgtgcatacttccaccccaaatgcttgatgcttgtgtcaattaatcctcagaggtatttttgcaaacacaaagaaaatagaaaagtgcctcctagrcattttgaaaatctctagagaagtcaaataccattttaaaaatatttataaacacatatttctcttagtgcaaattgtttgctcctttttaagatttttatttaatgagattgatctgatttgtatgcacacattcatgagcttatgcataaaagtgagttttgcccacagcagagtgatcacttagacacttaatctaatgataataccattcgataaaagtatgtggaactcctttatgggacttacacgcaaaatagtttataaaccacataagaaaagaggaaagtctttgtataaagcattgttatcacctttaaaaaatgttatttgtatttaagaaaaacacataacaatattatattgttcattaatcttatttgccaggttggatccaaataactttttggctgtctgctaatatcgagtctactcttaag

SEQ ID NO: 817320 - DNA, 634 bp, Homo sapiens
tctcttgtagcacttctactttttcacttacttctaaggttattttactaacttmttccagatctatgagggcaggaacctgactggtttgcttatgctgcacttggagcacttagcacagagtccagcatactcagcaagtatgtgctgaacgaatgaacaaaagtcaaatggtctgatttatttctgtccaccccacttggtgaaccttatgtcagaacatttttgtttatttatttatttgtttgtttgtttatagacagagtcttgctctgtcacccaagttggagtgcaatggtacaatcatagctcactgtgaccttgaactcctgggttccagtgatcctcctgccttagccttcaaagtagctaggactacagacacacaccatcatgcctggcccagaatattttgtttaaatttaaatccaataatggaaatctgtgagaaaacccaatcatgtcacttggagaggcttacctgtcacaggccagccagtgacctacaccaggtgccaatgaactcaggaggcagggctccccttgaaatttctttgtatgtcaatgagactaatatgtagggtaacttagaatttggatcttaagctttcagggactttaaaatccatcagca

SEQ ID NO: 817321 - DNA, 544 bp, Homo sapiens
aaatatggatcatcaattaattaatggttattgatagcttatattcactcagaaatccaaatatagcaaaccagacatatcagatccatgtgagcattcttcatatgtctaatcaaatatccttataagccttttccccaccttgaacatgcagaattcttgtattaaaacaccacttttgccgaggtgggcagatttgaggccaggagtttgagaccagcctggccaacatggcgaaaccccactctattaaaatttaaaaattagccaggcgtgatggcacacgcctgtaatcccagctatttggggggctgaggcatgagaatcactcgaatctgggaggagatggttgcagtgagccaagatcactgcactccagcatgggcaacagaccaagactctgcctgagaaaaacaaaacaaaaataccacttttactactgacaatgaatatttcaaatgcataagagaacaggttatctctaagtgcattatatatkaaaaacaggaggaaaaatagccacaatgagtttcctaactcctaa

SEQ ID NO: 817322 - DNA, 635 bp, Homo sapiens
cgcagctaagtagttttatattccacagctctattttgagaagaatgtggcagaaagccccatacgtcatcagtacccaggaagtgatgagatgggttttgagatagtctccctgggaagatagaaaggtaraaggcagatgacctcagagcagctcttcataagcctcacatactctggggttccaagaggatcacagacgttttcccaagactcagataagctgaagtttaactgtctggctgtgtggcatatgtggctatgtatgaagttgcagcgtgccagggcagagctgttacactgcaagtaggcattcagtgagtaaatgaatacatgaatagctaaaagcccctcaattgtattgaccggtaaggaaagagaagagaagatgtaaattcacttttttggataaataatgtggttcagagcaaggagcatatggtctagaatcagactgttctaggttgtaaatgcagcctggctacttagtggctggatcaacttaggcaaataggtgctgtaaaagtagttgctataatctttattaacttcatattttatattttaatatgaaattttatatgtgcaaagagtctttgtgcatttgtcttcttctgtccccactccccatccca

SEQ ID NO: 817323 - DNA, 626 bp, Homo sapiens
ttgcctgctgccatgtgagatacgcttttcaccttctgccatgattgtgaagcctgcccagctacgtggaactatgagtccaataagcctctttcttttgtaaattgcctggtctccggtatgtcttatcagcagtgtgaaaacagactaatacaccggacaaggatccaggtaccaagagggcagggtgtaaaaggctgtcaccctgactctctactgagctggtttaacacttagccgtccacaaatggcaactactaaaagagcattaattgtaacacacccctaaacgctactggggctggagcccaaaagcactcgccccgccccagctcttgcccccgcccatccgtgtgctcgccctcccgaaaggagttcgagcctgtagtggctgagcacatgagcgacacctctgtcataagtcctgtgagggatcagggaactctcccgtttcactaacatatgctgagaaaatgggtgtcaggtgagaaagtctaagcttaagacagaagattaaaagaaaamaacaaaagatgtatgtttaaagaataaaaaggaagagaagaaaaaggcaaagaagaaggttataaggcaacaaataaaatctctcaaattaagaataaatg

SEQ ID NO: 817324 - DNA, 623 bp, Homo sapiens
taatagactgctttactctaatatgtgactctgtctgagagcatcatacctaaacatgtaggaacttcagaattataccacttattttcagtttttctctgattcctaaatacttttttctcccctttctcagaatctcatttcttttttccttctctgcttttgtttttatctctttccgcaaataatttagaagttaaaaagaagtaattcagaactatagcaaggaaggagctgtctcctttgtaaaaacttcctatctctttttgagggcttttgagactggttaaactgtgagggaatctttaaaccactttagggaaggatgtcatggttcttgctaaatatgcttataactcatctctctcttacttcagtgaaagggggattccaatagttttcatgcttgttgagatctattcctttattattcatccaaatacatcatttctcttttggaaatatattttgatttgaagttgtattcattttattttaaaatgttttaaaatttttttatttgaatgtgcttgttscattaagtctttcagatcagttaccctgaggggaggactgtgtcctctttactttcgtaaccccagcacctgtcccaatgcctgaac

SEQ ID NO: 817325 - DNA, 657 bp, Homo sapiens
atatatatatttttatctacatttcacctctgacattgtacacaacacgaaagcacaggaaaccaaaaaaatcataatgaggtagatacataacacttacagatggaggagactaagattttaaatttggcttaatactgcggtcaccaatgtatgcatttgcaatacagcagcaagcattgattcacaaggcaagaagcccagtgatctcaaatccaaaaataagccccattaaaaaaatacctgctcaaaaatgaaaaatatacatatatatttctttaagtcagggaatcagatgtgttcaattgcaaaccctgggtgaaattaaaaaagtctttgtttttgctttttgtgcccaggaaaaaaagaagtaattttaatttattttaaataggagtaacccatcccatagggttgttctatgtattcttgccaggtggggttggagcaccttgtgagctcagcagcccaacatcgatagtaagggagtcagggtttcttcatcttccctagagttagaactcamttctacagccactgtgtcagggaccactttgagcgcccttggcacctgctggctggaaatcaatttagctgtaatggatctggcccagcttttcctctcttgggtcatctgcactcatagtggttgaagca

SEQ ID NO: 817326 - DNA, 506 bp, Homo sapiens
ggggtagccaccctcccacatcacagaaacgtgcctattttacaagaccatggactcaaaggaaaaatacattgaaaatctgactcctgcaggagcaatggccaggactcatcttttatacaccaaagtcggagactcagtttcactgcagagattctaatcctgcttctgcattcttgaccatggcatcacataaaaatagatacatcttttcaagaaaactaatgcttttacatctggtctctatcaaagtaaacaagtattgagaaaacaagttacttttaagcattttgaaatgacaataacttgcattttcccacatttccattaaacacacaatacacctcaaaaaataaaataaaaaaaaatttaaatgcgacattcactgcttcataaacgttgagaatgtctgtttgctaactgtgtgccaaaacctaatgaaacaaatttaagagtaacttgaaaacttctggttccatataaaakactaccaagaaatatggtta

SEQ ID NO: 817327 - DNA, 554 bp, Homo sapiens
aagctataataatcactgcaatacattgttattttcattactttgaacgaactgattatctgttggccaggtgtggtgcctcttgcctgtaatcccagcacattgggaggctgagatgggagatcacttgagcctagcagtttaagaccagcctgggcaacataacgagaccctgtctttgcaaaaaataaaaaaattaaccaggcgtggtattgtacacctgtggccccagctacttgggctgctcaggtaggaagatcacttgagcccaagagattgaggctgcagtgagtcatgaatgcaccgctgcactccagacagggtgacagagtgagaccctgtctcaacggaaaaaaaacaaaaaaagaagaagaagaaaaataaaaatacgttttaattttgccttcacttattccttctttawttgtctttctccatgcagatctgagtttctaacctatataattttccttcactttgaagaacttcttttaacatttcttgcagggcatatctactagtgacaaattcccccgatgttttattgatctgag

SEQ ID NO: 817328 - DNA, 554 bp, Homo sapiens
agtggaaaaacccagagaaatcacacaaatagaaaatatccacatcaacttgagaagctaagcctgcgcttgaggcagttcttggagcagcttctagcaggggcccagaccaacaccatcagcaaggagctgccgggggctcggccccctgaaggaggtttttatgactggccttagctggccctcctgaggctgacaagggctccactggggaacctctgggcaagtcggtggagggcccctcagcatcatctgggccttgctggcagcaaaagtgggtctcagaaaccaactcccatgagaggagccacctggatagagagtgggcagtgagagcaggacacaggttccaccacagagcagcagagacacccagaggctcctggtccatggtgcctgggggatcagaaggactcacacccggaggggaacgggcctgtkgagaatgttaccctggccaggacccggctggcaccacacgccccaatatccctgccttggctctgtgaggagggctctgccagggtttgaggggcctgcgtgggagccagggc

SEQ ID NO: 817329 - DNA, 555 bp, Homo sapiens
ttccaatttaaggtatgcattttcccttattcacgatcttcattgctgaagttattgcaaacaaagaaaaatttactgtaaaataaaggataaaggactgagaaattatttcaagtgccgtgaaaaacactgstgatgggtcactttcctcctaaaaattttagatagttgagaattcagaagaactcaattttacgtaatatgttacagttatttttgaattacaaaatctgataattgtgagcattgcctaggttaggattgagaatgaattattactgaatgctttttggcataatctgtacctgtatgtttttagacatggaaaaagagaaagagtaacctcccaccctggctaaactccacacttctcttttactcctccaataaaaatatctttaattttttttgaaaaagtgctagattgagaactttataacccttgggaaaaaaatctgcaaaagggccagtctttgcctctgggggttataaaatatgataattaatattatatgatgacattgctcagagctatcctgttcatcaaataacttg

SEQ ID NO: 817330 - DNA, 609 bp, Homo sapiens
tctggtccaagttatcgtacattccttygggtattctctttaaaaaccttatggtatccaatgcattaaattgttttgataaaaacctgcttcaggaacattgaactacttctaacatgtttggaaatcacttaattagcctttattgagtgtgatcagcattgtgttaggcactggagagagaaacgagacaattgtgcctcaagattcctgccctcttgtatccccaaattagttgagaagctatggaaaaagttactgtgtgagcaattgtttaattttttagaggttgaaatgctttagggaaagatgcattgactgttgagtcaaggaagttttcacagaagatgaatgagcttgggccttagtggagatattagacatccgtgagcagaggagaaaataaggttttatcttaagaggaataagcaaatgaacaaaagtatagaggaagaaatgcacaaaagaggaagagcaaaaatattctctgatggtatattaataaccctacagaaaataatgtccttgtttttcacacactaaaatatataaatagtacaagcatatgttctataggaaatgttgagttgatgggacaaagtgttgact

SEQ ID NO: 817331 - DNA, 650 bp, Homo sapiens
ccagagtaagtgtaggaagcagaggtagagagaaatgaaaataaacggcatcttaccctttactttcccaacccagggttccaattggttggaatacacacctggccagggatacactgaagagcatacctgagttatatctctctattttcatttagtacttccaatttgtttcctaaaatcttgggttagtttcacattcccttttcttctctcctaccctcttaggaacctcagtaaacatcaggcactcagtgctctccagactgcagtggtggtggagctgagaggactgtgtttggaggagtaaatgtccactctcatgctattttatttctcaggccctttgtcatggccttcttagtggtaagatctggaagggtacaatatggtgatagatgtaacttttgcttttgagaggtaaggtgaagtgaggcctgagtaaagattcaccagtttaggaagacattgcagtttgtttctatttgttcaattcagtttactaggttagagaagaagatagagacttcaagcaaggcctggcacataaatcttcccttggctaaatagtcaatcattaaaatctctcttgaggatgtaaaacttttactktctacttgaccccaccataaaaaaattaaataaaataa

SEQ ID NO: 817332 - DNA, 424 bp, Homo sapiens
atcagagttctggccttggataaggggtgcagagtctatcactcacaaaaccctatgtcactcaagckcttacctttttcaaacaacctccatctactcttctccattgtggggaggatcacttctgttccgagctaacttctccaacacctgcttctacaatcccagctcactggtttaaactttaaggtacataaaagtattttcctctgcatgggctatgaacataacaaaatttttctctcctttaatggtgggagactacaagtctggccagaggtaagcacaacaatagtaggggtgagaactaaataatgtctgctacctatgtattttccccttgtcagtgtatacatatgcatccatgtcctgctcactttagggttatgtgttgccttctatgcttttgctgaatggatgggcc

SEQ ID NO: 817333 - DNA, 617 bp, Homo sapiens
gtcagaggtccccagtcatcctctgagagggaattaatttagaggggaagaggtcattttataattctctaaagctgagtattccataaagaatgcgaattgctttaaagagctgattggaaatcttcatgtcaggggtttaaaaaaacttaaaaactagagtttggtaagagaaactctatgcctggtgaaatgtcgtcctattcatctcagctaccactaggagccagagctcttatctctgagtggcttctgtgttctgtgttcttttttttttttttttttgtttccttactactgtgttttaaagtcttaacattgaatctgattgcccaataaagctctgtgggctatctgagttttacttctgtgtttagtggaaaaagtaccaggcttggaatcaggactgcaaagccatgtttgacagttgtgtgatcttgagatattgctcaatttttaaaaatagagatgtcataagattcaaataagctaaagcatataaaaatgcagcctacaaaagggtagaaaatatttaacatcaataatttagatcgcaacaccycatgacagaaaatgggtaaagtccaacaaggtgacacagaaaggaggcatagtcg

SEQ ID NO: 817334 - DNA, 623 bp, Homo sapiens
tggattttcttcctcagaagcatattgcaaaagagaagtattgattttatttcattcaggcaaaattggttatttatttttacttatgaccattataaaatagagctgagctgccttgttatgatcaagtaagaatgatctatattgtttttctggatattgagtacaatccaaaccatattgaggtcagcagtgttagacaatttcccagcattgagaggtggcgataggatgaacgtagcttgtggacagcatgtctgagtcagagcaataaactctggccgtgcatgcacctctattaggagcacaaaagaatcagaagcctcatttcagacatgataatgatgtagacttagatggccataataaacttgtaattatttttcagtcaattggtctatttgatgattcctggaatgaaacactctaatggctgcacatttagcagacacacgcatacaggcacaactaaataaagcagcacgttagtgccaaatgccttcgcctttcgatatcccaaaggacaacgcatctaaaactacataaaattaagttgcatacatattcrtcaaacatttatagaatatctgattttataattcaatatgctaatatttaggatg

SEQ ID NO: 817335 - DNA, 611 bp, Homo sapiens
atgttaaggttactaccgactttatgagaggagcctcccagactcaggtgtcatgcctgactcatgagtaattcattagagagggcccaagccatgtatttcattgtgggtttgtgagcggcctcatcttccataagatgctcatttgttgggctgatccaaggcaaagatccgagtagttgggagtagctccaaattgggatgagcccaggcctactgtgcatatctgtttggaagggcacatctgtctaccaagggctggttccagtgtattagccgagtggcactaggtaatcagtttacagtcagtttaaaaaagttgaggctatccttctcggtgattaattatggcttttagttcatactagattaaaaaaaatctttgcatctttgcaagaataatcattaacttagtttgtctatattattagccgaaagatacaacacagtgctcatgcagtgtagagaaatgagataacatctagagtttacatgtaagtagctatttgtcaggatatttattcattgattctagattcataaagcaggagtttccagaggccttgcagcaaggmataagcacctgggagattcaactgaatccccctcag

SEQ ID NO: 817336 - DNA, 355 bp, Homo sapiens
ttaccattggtaagtaaaatgagcaaatattctttttactaaaagaaacgttcttgcttacttagtaatcaaaaggacttacttgtgaaaatgtccttgctcaggtacctcaccacaatacatttaacatatttagctagaacatctggaaatgtttgaagatgttcagtatctgtaatttcaagagacataccttggtttataagtgagatttcattctaacttctgataatttttcttataggtgctgttaaagaattaggattcaaagggaaaccagcaaaacatacacatacacacacacacrcacacacacacacacacggacttgaattttcaaacttttgaacagtga

SEQ ID NO: 817337 - DNA, 615 bp, Homo sapiens
cagcctcaaactcctaggcttaagcaatcttcccacctcagcatcctgcaccctcaaagttcaataaacttttaaaaagtaataactaacayaccggaacgcaaaaagccaaaagctaaaatgcctatacaaagaggagccaaaaaaagcagaatcctaaaatgttcagaaaatgtacagatacttatgaaggtgacactaaagctaaatacagaagattatttaataattgatattacaaagagttggacctcagaatccatcctctattgagagctgactaccgctaatataacccagaatgctgcaagtctagcttatgcccttactcatctccatcaacctctatgcacacatcctaggtgaaagataaaaagattcttttacagtaaaatgactgacaccttatcctctcaaaatacccacaaatattaaggggttgccataaaatggccagtccatatttgatcgccttacagtgatgctcagcagccaaggagcccaggccacacactcagggcttccagtcagacttctaaaactcacgattaataactaacaaccaaggatcagacaggtcaagaaagcttcctaactccctaaaaatatggggta

SEQ ID NO: 817338 - DNA, 485 bp, Homo sapiens
aagatatatagcaactaaatacaatgtgtgattttgtcttggatcctgaaccagaaacattttgttgttgttgttgttataaagaacattactgggacaactggaaaactttgaataaagtgtaggttacattatagtattgactcagtgttaatttcctgtttttgttttttgagacagagtcttgctctgtcacccaggctggagtgcagtggtgcgatctcagctcactgcaacctctgcctcttgggttcaagcaattctcctgtctcatgctccggagtagtctcaagtgcataccatcatgccaggccaatttttgtatttttagtagagatggggtttttacaggtcaccctggcctcgaattcctaacctcaggtgacccacscgccttggcctcccaaagtgctgggattacgggcatgagtcaccatgcccatacaatttcctgtttgttataattgtactatggttaggtatgg

SEQ ID NO: 817339 - DNA, 508 bp, Homo sapiens
aaggccaaggtgggtggatcacctaaggtcaatagttcaagactggcctggccaaaatagtgaaaccccatctctactaaaatacaaaaattagccgggtgtggtggtgcatgcctgtgatcccagctactcgtggggctgaggcaggagaatcttttgaaccctggatgcagaagttgcagggagcccagatcgcaccactgcactccagcctggatgacagtgagactctgtctccaaaaaaattaaaattaaaattaaaaataaagtccttcaagctgcaagaaaattacatatgataactcaaattcaccagaagaaattaaaaccgccagaaatataaatacatgggtatttttaaaagactacataaatctattttctcatttctctcttaatatctttaaaagacataagggtgggccaggcatgacggctcacrcctgtaatcccagtactttgggaggccaaggcgggtggatcatgaggtcaggagttcaagaccagt

SEQ ID NO: 817340 - DNA, 508 bp, Homo sapiens
aaggccaaggtgggtggatcacctaaggtcaatagttcaagactggcctggccaaaatagtgaaaccccatctctactaaaatacaaaaattagccgggtgtggtggtgcatgcctgtgatcccagctactcgtggggctgaggcaggagaatcttttgaaccctggatgcagaagttgcagggagcccagatcgcaccactgcactccagcctggatgacagtgagactctgtctccaaaaaaattaaaattaaaattaaaaataaagtccttcaagctgcaagaaaattacatatgataactcaaattcaccagaagaaattaaaaccgccagaaatataaatacatgggtatttttaaaagactacataaatctattttctcatttctctcttaatatctttaaaagacataagggtgggccaggcatgacggctcacacctgtaatcccagyactttgggaggccaaggcgggtggatcatgaggtcaggagttcaagaccagt

SEQ ID NO: 817341 - DNA, 593 bp, Homo sapiens
attcaatctatgggtgttatacaaaatagtgttatacaacatattttttgtaatgcctgaaaacatatataacaacatgtaccgttttactcattttaaacatacagtcctacgacattaagtacattcacattgtattaccatgatccatttccagaacttctttatcttccctaactgaaactctgttgccattgaacactcactccccattgcccctccctcgcccctggcaaccatcattctagtttttgtctctatgaatttgacgtctctagggacctcatatagcatttgttcttttgtaaccggcttatttcacttcgcactataacctcaattttattgactttgtagcatgtgtcagaattgtatttcttgtttaaggctgaataatattctattgcatgtttgtaccagattttgtttatcaactgtcatctactgataggcatttgggttgcttccaccttttggccactgcgaataatgcttcagtgaatgtgggtatataaatatctctttgattccctgcttttayttattttggatgtacacccagaagtcaaattgctgccttatgtaatcatttg

SEQ ID NO: 817342 - DNA, 573 bp, Homo sapiens
aactcgaccttttctacttcatcaagtttctctaaagtggggcttttttctagtctatctactatttaaaacacttgaaactgtagtaggataatactggatgacagtaattcatgatggaaaaggaatgagtaaaattcaaaggctgatttgcaatggattggtagagaacatatactattacataaacaatagtgtatacttttcagattaaaataatagtgtatatttttcatctccatgagatagaaaacaaatgatactatataagtgaattatgttgtattattacacatatattacattatgcaccttgagtattatatataattcccatattattagtatacttcatgaaaacccattaattaaatgaaaagagatcaattaatattgcatgtctcagcaaaaatgtgttctaggagtttgaacatactccccacccccttcgtatcattaaccttccctttttcacttgtgtgacatttttcctrgagactgtgtagcaagaagccctgtcccagcaagcacagcatctgtttgaaggacatccagggacgaacagccaattgt

SEQ ID NO: 817343 - DNA, 573 bp, Homo sapiens
aactcgaccttttctacttcatcaagtttctctaaagtggggcttttttctagtctatctactatttaaaacacttgaaactgtagtaggataatactggatgacagtaattcatgatggaaaaggaatgagtaaaattcaaaggctgatttgcaatggattggtagagaacatatactattacataaacaatagtgtatacttttcagattaaaataatagtgtatatttttcatctccatgagatagaaaacaaatgatactatataagtgaattatgttgtattattacacatatattacattatgcaccttgagtattatatataattcccatattattagtatacttcatgaaaacccattaattaaatgaaaagagatcaattaatattgcatgtctcagcaaaaatgtgttctaggagtttgaacatactccccacccccttcgtatcattaaccttccctttttcacttgtgtgacatttttcctgsagactgtgtagcaagaagccctgtcccagcaagcacagcatctgtttgaaggacatccagggacgaacagccaattgt

SEQ ID NO: 817344 - DNA, 605 bp, Homo sapiens
cccattgtcctaaaaaatatatayacattttatgatttctcccctctctgaaaatccccaatacctctttccccattctcactctcagcttatgacctttcttcttacttcacaaagaaacctggagcaaccataggcgccttcaccagattcccaccatgacatctagccacctacctatcaggacctgccacccacccttctatccagctacttcaggtgacctgtccatgcttctatccaaagcccatccctctactgcatcccatctcctctcacctcctttaggatgtcactttagtagttttcccctccctccttcatcaataactttttagtcattaccaaatattcttaccatcattgaaatataatgttacttatctcatcttagagaaaacttttcattactccacccatttcaccagctcccgtttctttgccccttttttgcaacaaacctcttgaaagttctatttttccagtttctctcctctcttttctataaacccatggcaatcagacatttgctcgcaccacatcacagaaatcattgttatcaaagtcatcaaggatctcgttacttcttagatgtaggtcctgct

SEQ ID NO: 817345 - DNA, 614 bp, Homo sapiens
tccctctagctgctcaaaccaagtacccgtatgttattcttaattatctctttaccttgcttctcatatgcaatttgttaacaagtcatcttcagtctgtatccattattctccctttccagaccaccaacatgtcttgactatactgctacaatagcctcccaactcttgtcctacttaaaattcattgtaaaaaatcagtcttggccgggcacggtggctcacacctataatcccagcactttgggagtcccaggcgggcgggtcacgaggtcaagagatggagaccatcatggccaacatggtgaaaccctgtctctactataaatacaaaaaaattatctgggtgtggtggcacgtgcctgtagtcccaactactagggaggctgaggcaggagaatcgcttgaacctgggaggcggaggttgcagtgagccgagatcgcaccattgcactccagcctggcaacagagcgagactccaycccaaaacaaaacaaaacaaaacaaaacaaaaccatgtaaaacatgtctgtaaaacatgtcagatttcgtgttcagaagtcttacatgtcttttcattatgctaagataaaacccaaatgcattttcttgg

SEQ ID NO: 817346 - DNA, 619 bp, Homo sapiens
gagtaaactctaaggtgtccaacaagctagggaccatatgtgaagtgtcattggcttatctttgtagaactttattgctggtctgtataatcttcctggtctgttttagttagaaattcccttattttatagatcatgaaagtgagactatccgggtttaaattctagatcccaagcacaagtcagggagtcatagagctagaatgagggcacagatagtaatccagggtcccttctaatgcacaacgtgagaataactttctattttcatttgtctgagaaattgtggggataaaaaaagatcctagagaacgtgaggtatatatcttacttagtttgattatattttacccaatagctttgtttaaaatatttataatatctgaatatcacatttcccattaacgtaaaaagtaaattttctctttttaatccttttttatagtagcatcagaattctgagatcttacgtgtaaaattgcatttggaaaaatattttcwttttgtttatttggtaaacatatgagtgctgattacaagaaaaaaaacaattttctaggtcttgtagagagaatacaaagatttagtaaagaataaatcatgacctcaaagaacttag

SEQ ID NO: 817347 - DNA, 579 bp, Homo sapiens
tttatttacctacaactgggatccgtgttgtcaagtgctcaagcagaacataagcagcagcaaatattgcagctgccagttgcccttgccaggcttccatagattcagtcagtgaggagacaacacacccgaatgatgtagctgtttattactcacagcacagcagacagcatgagcttcaagttcacatcaaatccccatccccccaggtcctatgggggcgatgtggaggaagcctgggtagatactatacacatggcgggtctgtgccacaactgaggagcgttggaaatccagacttataaggggacttcaagcaaacctgctcatcctccactttagagaaagacattattcatattttcttggtcaggaaaccaatctgcctctgatccagagggagaccctttctctatcaccctggaacatctccaggaggggggcagacctagttttatgaccctggtgcataagcaaatctrctccctgtccccacaacagctttgtagatttcctcgaacaaagctgtcaatgcctttttcttagaggatgagcagaaataccaaattcttggagact

SEQ ID NO: 817348 - DNA, 646 bp, Homo sapiens
acatcatttttaatattgttaaatattcgaaacatagttaaggtcatttaaaaacctttttatagtgaaaaattacaaacatatgtaaaaatagggacaacaggggataattttcaccaagttttwtatatatatatatatatatataaaatgaattgcacgcagttaatatgtacaatgtgtgcactcagaaaagcaaatcacttgaaaattaagaatacatagtttcctaacaggtgagttaaagaaaaatgcaaatattaagtaagaaccacttgcaatcattgtcagcaaatattggcttgaaatactatatctcaaatacaggctacaaactggagattcaaaaataaataaaagatcacctatctacaagtagtttatagtcaaattggaaattatgctcaaaaggcaattgtaatactgtgttagaaatgttgtattgtgactaaatactggatatgtgacaaaaaacagcatttaattaatttttgaaatttcagagaaatttgactaaaggaaatatctaagaagagtaataatgtgctagtgaaatgggaagtatatgtatacttttgtgtgtgtgtgtgtgtgtgtgtgtgtgtgtctgtatgtgtgtctgtgtgtttgtttatatggaggatcc

SEQ ID NO: 817349 - DNA, 623 bp, Homo sapiens
acccaggagaaatggaatagtgactccctacatttcaagtttctggcagcgtctctcacaggacaattcagtagaagttttagcactgaaggggaggacagtggcagtgagcatcctggtggtcccttcaggctagaaataaactcctgggcatctgtattccagaaacagaagccttctcagcacagcacccttaatgtatgggtaaaatttgtgcatctccagcccagaagagaaaaaccagtaattaactcttgagttgctttatcttttcttctctttgccccttatatttctcttttgttcctccagctcttctgacactgttataatcaatataatattaatatcatatgttctgtgttcgaaataactagtgttatttttatctgattagcacatgtccaaatttcacctctctaggtttcagtacaaacaagagtgcccctaatacttaagagaaatatgtaacatagaaagctttatttcagatcaacatttgtttgggtctgtcttctgtctgctgtgcaggacattcctgtaagaagtggatggacgtgccagcaaaataaaaagggctgaactgtatggtcagaaaaaraagaggaaataatttaaactct

SEQ ID NO: 817350 - DNA, 476 bp, Homo sapiens
aacctctaataagagaatagtgtctttttggcacttgtgagtaccttgttgctcaagagtagattacccattcatttgttcaacaaatgattcacttaataacatttattgagctcaagtgcatgtgttctaaggatacaatgccaagatgtccctgcctccagcaatttccagcttagtagggaaaacagacctaagtccagacctttaggacacactgtaacatccgctgtaacagtgtttacacaagaccgaacactagcaaaaagaacagagctgcagattctgggtagattcaaaacaatgccatggaggaaaccttgaaatgagtctcaaaagataagtcaggtattttttcgtgtacacraggtcatttcagcaaagagagaaagtgatattgtcatggagaagtattagcatagaatttgcattggctgttcaggcaacactaagtagcctcatgggtcagttgtgaa

SEQ ID NO: 817351 - DNA, 578 bp, Homo sapiens
ttgtcaccacattaacattccagatgttatcattagtacatgattataacaacagcaacaagaaacggagtttatggtggtggcatcaactattaaaatgctcttctatattttcagattaatacatacaaagtagcattaacaattacttttttaaagaaatggtgtcagcatggccatgatgtccatacgataagccagaaatatcactttctttctctgaagtggtatgtactcatcacaggcaatgtttattgctaaaataactgaaaaaaattgtcaaggcaaaagaattcagataatttcaagctctgttatatgtttggtaattttgtctttatttgcttaaagcaaaatatacaagcacttagaatttttcaggaatagttatctactccttttgtttttatttacctcacatttttgaatttgtaatatagtatctatcaaasaaacaaattataatttaaagatacctttcttaacatctgacttgaggaactctaccagggtcttgtttcactcttcatctcatttctctttctgtctctgtctctgctcttctattttctctgtat

SEQ ID NO: 817352 - DNA, 665 bp, Homo sapiens
tgcagtttatataatactgcttccttagtcatgtgctcttaaatgtaactcttaattataagattgggtctttaacagaataggagcttcttgataatatcaattggctagcatgagcactaggatgtcttatggaaaaagtaggtgacaaccaataacaacccattaacagactagcatctctaatgaccctagtaacaaaagaatggtatttaaactgtttaaaattttattgtggaaatatacatataacacgaagtttaccattttaagaaagtgtacagttcagtggcattaagtacattcacaatgttgtgcaactgtcaccactatctagttccaaaactccttcatcatctcaaacagaaactctataaccattaagcaataattctcccgttccacactctcccagacctggtaacttctattctactttctgtctctatgaatttgtcttttctagctatctcatataagtggagtcatactatattgtcttttggagtctggcttctttcatttagcatagtgtttttaaggttcatcgatgttgtagcatkcatcaaaatttcattcgtctttatggctgaataatattctattatgtgtgtataccacggtttgtttattcattcatccactgatggacatttagattattt

SEQ ID NO: 817353 - DNA, 618 bp, Homo sapiens
ttataaatagccatataatagatatatagtggatataaaaatgtttcagaagtcctagtattataagaaaatatgtattgcaaatcagtgcattcacaatcaygtaatgataccctacaagtaagtaagtcacactcatgcatgcacagatgcacacactgggtagggggaagctagatggatatagactgaaatgatatcaaaagttttatctgagtgttgggattttcagttattttgttatgtaaaatttgtatttcttcctgataaataccaaaatttctacatttctactacaaatagttacttcttttaaaattcaggaaatatatattaacacacatcctatcttgaaccagtctggttcaaattggaaatcattcagaaataatttatttctgaaatcaaattagaaatcttcacctctttcccatattccttctctaattccctgtccccttgtcctctttccttgacttcactctgtgggatgtccggtcactccccttcttctctatttgcaggggccaccgatatggtcctggagggccgcccctcctcactgcagcctgcctgctccccttctgcctctgtgtccagctggagcccaatgcctgc

SEQ ID NO: 817354 - DNA, 622 bp, Homo sapiens
tcccacaacccacactcctcaactctggagcatccctctccttcactttatgtctgcctgcatctggtccccaatccccacctccaggcagttctgttggtcctgcatccctctaggactgcatcatagggtcccacttagaggttccttggtatttggtgacacaagaatattgcactgtccctgcagcctttggagtccaggcttggagaggtgggcggcccaaagccctcccattctcccctccccatgtccccctgccaacagcacagcctgtagatagctatgctgggctcccccgtacccacctctgtcctgttgtcttagcaactagaccaaggaagttggttttcttggtatccaaggttaccccgtgttcagacaaatgctgcacactgcatgtgcatatggatctacagttggttcagcgagaggaggctcacattgtatatgagttatacaggtgtgtgtaggtgacatgctgaatctgggtctgattttgagataccctttcatttgaataaccagaactcagggttataactaggaacattgggtcctctttgcaatgtttaacatgatctctcccaaatcracagaaagagctctgcttctatagggg

SEQ ID NO: 817355 - DNA, 633 bp, Homo sapiens
tggtggctcacgcctgtaatcccagcactttgggaggccaaggcaggtgggttacctgaggtcaggaatttgagaccagcctcaccaacatggtgaaactccatctctactaaaaattcaaaaattagctggatgtggtggtgtgtacctgtagtcccagctactcaacaggctgagacaggagaatcgcttgaacccaggaggtgggttgcagtgagccaagatcataccactgcactccagcctgggcgacagagtgagactctgtttcaaaaaaaaaaaaattccttcatcaagagtcatttgtaaaatgatatattagacatgtatggaaatcaaactcctaaatcataaataaaatggtgcatgcagatggtttttatattgtgattgtttctattgcaaaaatggcctttctcaaatagttttttttttgtaccacaaaagtaattacatttcttataatgcattctaccaagctccaaatgtagtaggaaaatagtgttgttatagaaaagtaattaaataatttttgtaagctmtttctcaccttgtactctatgcatatcaatgcttttacttaaaagtgtggaaatatatattttgaaattctatgaatgtgaaagagctagg

SEQ ID NO: 817356 - DNA, 577 bp, Homo sapiens
accaaggcaatgcatatcaaggacctaacacaatgctgggtacacagtgggcacgcactagaagttaattccttttttctcccctccacttggaaatgtataacataaatatgtcctggtactaatatgcaccctcactccaatctgtcctttctggacccctgtattttcatagtaatcccttcctaccacacccaatcccttaacacttaactaattttaacaaccattaataagagtgattcattgacccagaaatgaatattttctttcagcttacagaattgttagaatgatgccagcctccccccaggtccagacccacctctcagatgtggcttctgaatgacccacttggagcatggccaagccactcctatcacagctcaataccacatctacccccttcagggcaggactatgccatacttttaatttagggattattttytatgctatacttttactttaaggattatttggggggaacctctaatttgaaatgttggtgagccctctcccaccaagcagtcaatttttgttttcatacttttccaaaattttatatgtaataaac

SEQ ID NO: 817357 - DNA, 583 bp, Homo sapiens
tgctgggctaattttttgtatttttagtagagatggggttccatcgtgttaaccaggatgggggggacctcctgaccttgtgatccgcctgcctcatcctcccaaagtgctgggattacaggcatgagccaccgtgcctggcccgctctcactcttaataaaccacatagtacaggttgagtatcctttatctgaaatgtttgggaccagaagtgttttggatttgggattgttttttggatttttggatttacttactgattgagcatcccatatctgaaaatctgaaattcaaaatgctccagtgactgtcatgtagatgctcaaaatttttggcttttggagcattttggattttggattttcagatttgggatgctcagcctgtattattcctgtcagtaccagccatgagccatgagggcattataaaggcaagtcagagaacattgccatcatttgagtgccttctacatgttagattytggaaattttattaacgcatcagatccttgcaataacctcaggaggtaggtgatagtattcttactttatggaagaagaaacaagctcatagagatag

SEQ ID NO: 817358 - DNA, 654 bp, Homo sapiens
taaagcacttctgctatatatcaaaatcttatgactagaagaaaagcccttgtgtgattgtttgagatgcaatctaaactagctgctttttcatagaatctcatttttacttgaaatgatgayggacaaatgatggtatttgccaaacttaagtatttggcagacactttcttgaaaatgaacaaagtggccgggcacagtgactcacgcctgtaatcccagcactttgggaggccgaggcggacggatcatgaggtcagaagatcaagaccatcctggctaacatggtgaaaccctgtctctactaaaaatacaaaaagttagccgggtgtggtggcgggcacctgtagtcccagctactcaggaggctgaggtaggagaatggtgtgaacccgggaggcagagcttgcagtgagccaagatagtgccactgtactccagcctgggtgacagggcaagactccgtctcaaaaaaaaaaaaaaaaaaaaaagaaaaaagaaaatgaacaaagtaagcctgtcacatcaaggaaaacaactcaatgtatttgttggcagtgataaaattcaagctttcaagccaaatgtagagctttggaaaattagtttctgccaccatgacctcgtctgctctcctccactgagaaatttttc

SEQ ID NO: 817359 - DNA, 630 bp, Homo sapiens
ttttcttcttctttaaatgcccttccttcgtttgttttcttgtatcatcctttgatatttatctcagaaattcaggcctcctgcaaaacccccaaactcactgtgtcaggcaaacagtgcatctcctatgctcttaaagttatcattgtattaatcactttattaaagtaattcttttagacaatatgttcttcaatgaaggtgtggtgtctatctcatctttgtatattcaaagcttaacatactcctgtggcaatcagtaatgtgagttgattaaaatgattcaaggagcataaaattataatatcagtagagacttcatagcttctggagtagaaattccctaaatgacaagtaagaacatttttaccaagcttttaagaatcttttagtattatagctaaaattaactttagggttaccacatacaaggatggtaatgtattgcatattctacagagtcaggctttatgccttgggatatacacatggtatctcacccacttgaactgcacaggtcgtatgtggtggctcagattagctggayccaaatatgcttatacattgaagcaataactttttaagttatatattttattatggttacaaatttatagaaaaatagcaatc

SEQ ID NO: 817360 - DNA, 489 bp, Homo sapiens
ccttatttatggatttacaatgattaaaaaaaaatactgaagctgattattgaaacctattctgtagctatattggaaagataaggaatgagaaaacaaagtgtaagtgggttaaaattctcacttaccgtaacagatacataatgtctacagctaacagagaaagaaagaaagcaacatagatctactgttaaacacatggtggaaaataccagaagaaagagctaaaatatttgaagggaggtggaggtggtactttttgttacaagcagtttaacattagctaacttcttaagcaatatgcacatgcttttttttgaaaaccaaaaacaagtacattagcaaactactgtaatcaaraaaaagataatgtaatagaaaaatgagcaaataatatcaacaggtaatttaaaaaatggcttatataagcatatgagaacatggtaaaccaggatgagcaatcaagacataaacaaattaaaagagatg

SEQ ID NO: 817361 - DNA, 473 bp, Homo sapiens
tcgaattattatagtcagaattatcatctagtgatgagagtgagaattttcccaaaccatgttcacaattagaagacttcaaggtttgtaacgggaatgccagaagaggcatcaaagtcccaaagagacagagtcacttaaaggtaatcttttttttagtttctttaaatatgtatgcattttatcagtaaagataattggttttacatcaatgtagatttctctatacattctctttatagaaaaaaattaagtattttgacacccatttagattttttttactggaattaaattcaaagtagtttttttttgtttatctttgtgttttgatgctttatcttgcagtgttgtgttactttgaatgaayaccaaaaaactcaagtgtattgagaatttatgtttcaaattgaagaaaatatagaattagaaatttgagttttaagatgtttgcttttatgatcattatattgt

SEQ ID NO: 817362 - DNA, 668 bp, Homo sapiens
ttcaaatatttggagattttctaaatatcgttttgttaatgattttaaatttagttctgctctgtcattgaacatgctccataggattctagttcttttaaacttcttgagacttgttttatggcccagcatgtgttctatattactgactattttatatctacttgaaagaatgtacattctgctcttgttgaatgtagtattctataaaatgtcagttaggttaagtcggttgttattcaagtgttctataatcttactgatttttttctacttgttctatcaattgctgagataggagtattgacatccccaatgtatttgtggatttatttatgctttctgttgtatcactttttgcttcatgtattttgatccactgtgattacgtttaaatacattgaggatagttgtgatttctgataaattggtccttttgtcattattaagtacctttatcgctggtaatattctttgtcctgaagtctatgttagtagactattttagttttcttttgatagaagatttgcatggtatgtctttctttaaatwacagtgttacggagacgtaattcacctactatataattcatctatttaagacatgcaattcaatgttttttagtacacatggtgtccaacttaggatcgttcaacttacgatttt

SEQ ID NO: 817363 - DNA, 383 bp, Homo sapiens
gggttgggattcaacccaattcaacaaacaatattcagtacacattttctgtgtgtcaggcttgtactaggttaaggattgaaagattaacaaacaaacaaacaaaatatggcctcagagacctcmtagttcagttgaggcattcggtacttactcagcatgatgagtgtttaataaatatatgtaaagttctatggatcagagaggacagaataattggaaatatagaagaaaaattatttcggaaaggctccccatcccaaagtatatatcgtcttttgaaccacctatcaaaaatcagactgcagatgtgacacatcccattcatgtacacaaattagattcaattcaagttaatgttttagtgcttacagtatgcccac

SEQ ID NO: 817364 - DNA, 693 bp, Homo sapiens
cttgcaattattgaggccacaggtgaccgtagcaggaacaaccactatgttatcaacataagtggtagaggattaaatggagacgaagaagattttaagtgtagattactttcgcaagaagctcaattgtgagatgaaaggaagatttcagggtctctgaaatgtggtctgtgaccacagaaaattgactggtgtttgtgacaaatctggtgtttgtgactaaatgctacaattaactctaactgctgtcagaacctctcagggatggcatccactgatgatgtctcttaaccagtacaaactgaggttcttagccaggctggaagcccctgaccctggtaccatcatgccctgagtaaaacagcaccttaccccatgttaatcctatagcttgacatacgagaaacttacagtaacctgagcatgccatgccaatgccctcttggtcccttgtacaagctatttcccctgcctgggatgtccttcccccttgtttacctactcatctgtcaaagctcacctagaatattccccatttgttctaccctccttcaggaagttgctcgttctttagatccccatagcactcttrtaagtatgtaacactcatcactgtactatggaattccttaattttctgcttctcctattacctcattgaaatcaggatccccatttttccttcttctagtc

SEQ ID NO: 817365 - DNA, 380 bp, Homo sapiens
aatgcctccagttggatttaatgcccattttctcttgccctgttgattatatggctgtctggatgttcataggaaaacttgagacaaaatcacaattgcaataggatgaagaacatttcccaaaggaatgggatccagattgctcactgtctatttatgagttcactttttttttttttttggagactgactctcactctgtctcccaggctggagtgcagtggcatgatcttggctcactgcaacctccgcctcctgggttcaagcgactctcctggctcagccacctgactggctgggattacaggagtgtgccgtcatgmctggctaatttttgtatttttattggagacagggtttcaccatgttggccagcctgg

SEQ ID NO: 817366 - DNA, 627 bp, Homo sapiens
gttaattcaggtgtatccttaaaactagaatataactaaagaaaaacaacttatttatactgaaatgtattttttaaaacwaaacaaaacaaaaaaccctgggctaatagaagagtacggtgcttgactcaagtctaaaagaacaacaacaacaaaaaaaaacagaaaaatggatcagtactgctacaacgaatgaaggactatacagaccagccaaaacaagttttcagcttccctttgataagagaatttcagaaaacttctggcagtggcagtttctagaattaagtgtaacttaatataattaagtatattaatgtattcttaagtatataagaagaatgacaacttcaaaatataaaactcataggaatgtagatgtttcaacatggattacttttgaaagggcttattagttttaagcctttaagcattaatatttaagaattagctttaaggcttatgtagctctgaatataatttggtttgtgactttgggcaagtcacttacctctctgggcctctaattcctgcctgtaaactgaggaggttagattgtttctgagcgcagatgatctgtaggctctcctgtaagtctcatatttggttgtatgacttcaccatctc

SEQ ID NO: 817367 - DNA, 547 bp, Homo sapiens
attacccacaggggttcttaaaactcacactgatgggcctcacccttagggtttctgattcaatagcactggggtgaagcccaagttttcatttctagatgatgctgatacatttcagatgacgctgatacatttcagatgacactgatgcaaagaccacgctttggaaaccaccagaccaggccaatcaactttgatttcaaagcacgtgttcaagtaataagattcacagaattttagagcagagattagccttacagagaactctatttctcattctccaagtgagaaaatatgacattaagccagtcaacattaagcaggaggcttacagtagagtagaaagagtaaaagatgtctcatcaggacatctggattctaagccagtggctccttagcctatgggctagttgagctaactagctctggtaagtaatttaatctctgatcctcagcccctcatctgtaatcaagagaaaatacttccttgccyaattcacactgtcatagagattattaaatgaaatttgataaaatgataaactat

SEQ ID NO: 817368 - DNA, 617 bp, Homo sapiens
ggaaacacacattttacaccaacacagattatgagcttcctggcttccttaaatgtcagctactcatgagtctcttgaagccctccattgatttcacgtggaagtaggtcagggctgtttttaactggagaagcctcatgctgcaggtttcatttaagtgtgaggagtgaatattaaaaattgatatgcaaaacaaacctctgcttaattagcatctggataaagtcttttactaggaaagccattaattttgaaaaatgagaaaattgacaatgaagccatttgtgtctatagcctttcacatataaaaaacattatggatagtcacttatcatgcattgccttctctatgctagcttatctgtatttaggaggttagcattccttctgtgcatttgtggttacacacatgttttaaaataacatttgagtgttttttttctgacattccatttttcaaatgctaatcttaatttttttcatctcaaatwatcactttaaaagaaaatgagctgcttctacttgaatgtacttagaaacaacacttcacaaatcatattttttaacagtcttccatccacatactaattatttttgatattaagtacttcaactat

SEQ ID NO: 817369 - DNA, 544 bp, Homo sapiens
ataaaagagtggtttagtggttttttttcagagaaggaagacattctggtctggagtggaaaagggtggctgcatrtaaaggataggattttcttttctttttcttttagagatggggtcttgctatattgcccaggcgggtcttgaactcctggcttcaagtgatcctcctcccgtcacatcccaaagttctgggaaagggtaggattttcaaaggcagggtggcattgtgtatggcagaaagatatggggaaagcatcccaggtaacacatgaagaaagaggaaagccaaagagatgatcccaggcaagacctcagagacagaaaacagaggggcctgatttgtgcagagagtgagtggccaagagtggaagcaacggttagaaaaaaaatgttaggagtgatagcaagacgcttcaagtgaaagctaagctgcctgaattatatcaagttagattgtaaggaatcactgaaggttctccacaacagagaagaaaagaattggtaaaagtaaggcataaaaatatcatttttaaagaagtaa

SEQ ID NO: 817370 - DNA, 616 bp, Homo sapiens
ctcgttacttataaaataagcattaataagcattactcattgcttataaaataatagaggacttagcttttgtttgtggattttgagtaagaaaaacaagtggtttaatctttaaaattatacttgtgatcaaatatcagatttcttaatgcaaatattccagtacatacccagattttatttatttatttatttatttatttatttatttatttattttgtttgtttgtttgagacagagtcttgctctgttgcccaggctagagtgcagtggcacgatctcagctcactgcaacctcttcctcctgggttcaagcaattctcctgcctcagcctcccaaatagctgggattacaggctcctgccaccacacccggctaattttttgtatttttagtagagacagggtttcacatgttggccaggctcgttttgaactcctcaccccaagtgatccacctcacggtctcccaaagtgctaggattacaggtgtgagccaccatgcctggcyctgattttattattttttaatttttaaaaattattttctttttgagttggagtatcactctgcagcccaggctggagtgcagtagcgtgatctcagctcaatgc

SEQ ID NO: 817371 - DNA, 598 bp, Homo sapiens
tagctgggattataggcgtgtgccaccacgcccagctaatttttgtatttgtagcagagaaaatacaaaatgttggcaaagctggtctcgaactcctaatctcaagtgatccacctccctcacctcccaaagtgctgggattacaggcttgagccactgcacctggcctttatttttgagaaaaacaaaaaacaacagctagcaaacttggttctctttgctactttaaaagaagaaaaggaaagtacatttcacattttatctaaattttattgtccttttggcaaatttcttgaataaacctatttcacaataccatgtgtaggcaatttctatttgataatattaggcaattgtattgcctgcttaaacctatttattaagtgcaattactcagtttgaagatgctaatacagactaggaagaaaattatattgaatgaatgaatgaacagttgaaacaagggatgattgatttcaataggaagtaccatgttaaagaaaaacagttgattagaaatatttttggctccccaaaccgagttctttgtttgattgcatgaataatattcytcatgttgatgtcaattgttttcaaa

SEQ ID NO: 817372 - DNA, 645 bp, Homo sapiens
aatatttttattaactgattgccatacctctgaaataattctcctatattttttggttgcacactctttgatcatctcttccaataacattttgcaatattctctattgagagaatagaaaaataattcagtcttccctttagaaatgtagatcagaatttgtaatttattcttgaataatttggaaaagttcctttcagcttcataattcattacaggtaatgtcatataaattttttggattgacttcaaatttggaaaacttttatcaggtttcttttatatgtgagctgtaagattcagggcactgcaagatttcgtagtatttgacttgatgacacttgttaaccacattgccagggcctctcctagagccaggagatggacctataccagggtataggtagccttgaaggttaagttcaagcacttcacagtaaatccacctgagcctggcatttatatcctcaacatatttgatgcatctgtgaagtctcccagtcctttcaaataaagtgcctgttttactcagaatacctaaacttcctgatggcataattgttccatgattcagccaagactgtatcacttraggtatacacttcatttttccattgagatcacaagacaggcatgatgtttgac

SEQ ID NO: 817373 - DNA, 614 bp, Homo sapiens
gaaaactaagcagtatgattagcatatttttttaaagtcagaaasagcaggaagtcaaataataagcaaaaggtgacttgacgagtgtggaatcagtataatgtttgaatgttgaattgcatgaggctaatccacgctatgctcgtcgccataatacagctatgaatgtcaatggcactataatacccaaccattggctgaaactccttctgacctcacatgtgcttggatgatcaatatgtatatttgttctataagtatttgtgtctcaccaaattttcttctgattgtctcatctttctttagttaatgaaaattaatcagattttaattaagtataacccatctgagaagattgctaacattgatacaatatgctccactttatctctcaaggtataaacaagcctggaagttcaaaatctgccttggttctgtgtcttgcctgctgtcaaacatcatttttaatttcttaaagcaaaacgaattttttaacaattaacataaagcaataaaagtagccaataatgtatatagatatgttaaatgcacatatttaaaatatcaaagtgtctccaatattttttcttctatataaatacaggtagggtcag

SEQ ID NO: 817374 - DNA, 614 bp, Homo sapiens
gaaaactaagcagtatgattagcatatttttttaaagtcagaaacagcaggaagtcaaataataagcaaaaggtgacttgacgagtgtggaatcagtataatgtttgaatgttgaattgcatgaggctaatccaygctatgctcgtcgccataatacagctatgaatgtcaatggcactataatacccaaccattggctgaaactccttctgacctcacatgtgcttggatgatcaatatgtatatttgttctataagtatttgtgtctcaccaaattttcttctgattgtctcatctttctttagttaatgaaaattaatcagattttaattaagtataacccatctgagaagattgctaacattgatacaatatgctccactttatctctcaaggtataaacaagcctggaagttcaaaatctgccttggttctgtgtcttgcctgctgtcaaacatcatttttaatttcttaaagcaaaacgaattttttaacaattaacataaagcaataaaagtagccaataatgtatatagatatgttaaatgcacatatttaaaatatcaaagtgtctccaatattttttcttctatataaatacaggtagggtcag

SEQ ID NO: 817375 - DNA, 531 bp, Homo sapiens
aacataataaaatgttgttacgtatctagagctaaactttggtaatactcatgatgactttctacacatatatrttctagtttttccaataggcataaatgccttaaaatttgtgaaagatttggtactgtaattgattgagtaaaaagtgaaatatgtaatgtgtactctgtcagaaaaataggtcaaggcagggaaaagtcagagatttgtgatttttagggctgtacatataaggcaaagagagattaatcctttcagagatgtaattattacttttggaaggtctaaatcaaaggtattagagaagtcaataacagatgacacataccaaagactacagcattttcaggctgatgaaccaagagactttctggcttatttttcaattttatggttgttatcttgtaaagagtatagtacctgttgtcacaaagtaattaaccttaaagtacaggtggtctcattcaagagagaaaacactgacctttgccatccgaaagccctgtatgctattccaaatacaggaag

SEQ ID NO: 817376 - DNA, 595 bp, Homo sapiens
atgcaacaatatgaaactcacaacccagatgttcttcagtaataaaatgaataaatraactgtggtatggtcatatcatacaatactacacaagaagtagaagcactaactactactgcatgcaacaatatgaaactcactatcataatgttgagcaaaagaagccaagcacaatagaatgcatacacattataccacattattccatttttcaaataccagtaagctaatctagattgatggaagttagtatagtggttacattttgtggagaggttggagtgataatgttttggaggagacatagggatacttattattttgactgctcatagtgtcctacagcctgatctgaggggtggtttataatatctttccttcataaaaattcacaaaagctgtgcagtgatgaattatgtattcttcaatatagttttgttcttcaatgaaagtatttgtccaggactggtatggtggctcacacctattaccccaactacttgggaggctgaggtgggaggatagcttgacgccaggagtttgaaactagcctgagcaacatagcaaaaccctgtctctgaaaaaaaaaattaaa

SEQ ID NO: 817377 - DNA, 423 bp, Homo sapiens
gccagagtctttagaaatccaggcttctacatttctgctatattcctccattcacgactttattttcaagktctctcagttggtctaagaactgctgatgctccagccattacactggcatgcaggtctttagcgggagaaagaggaaaatgacaaaagagtgtactatccagttttctttaagcatactccatggtcttttattcttcttatttgattaatacatattaaccgattaacagattaatctattcttaatacagactaactacaatctgtaccatatttcctgccaaaattctatcctatgttgtctataataattttctatattaaatattcttttaactgtttaaatatctaatcttatcccttcttattcttcatatacatattgatattactctcctaagtataccttct

SEQ ID NO: 817378 - DNA, 615 bp, Homo sapiens
gctttgttcttttgctcaggatcccgttagccatttgaagtcttttgtggtttccatatgaattttagaatatttttttatwtctgtgaatcatgttattggtattttaagagggatcacattgaatctgcaggtctcttgggggacatgatcattttaacaatccataaacacaagatgtttttccattttggggtcttcatcaatttctttcgtcagtgtttcatagtttttatcagagatttttttggtccttgattaaattcattgctagatatttttgtagctattataaatgaaattgctttcttgttttttttaactagcttgttagtggtttctagaaatgttactgatttttgaatgttgatcttgtaccctgcaatgttactgattttttctcagttataagagtttattgatggaatcatatatgatcttcattgttttgaagtatgtttctttcaatacctactttgttaagagtttttataataaaaagatattaaattttagcaaatgttttttctgcatctgttgagaagatttatttttctccttccttctatttatgtgatatatcacatttattgatttgcatgtgttgaaccaatc

SEQ ID NO: 817379 - DNA, 532 bp, Homo sapiens
tgaagttattatatagcaccaagagatttaatcrttaataataactaatactttttaaattgtttgaaaagtactcatttttttctcctatttttaacttttaacaggtatgcttgtaagccatatattatttaacttttaagtattatggagtattaaaatgcaaattgaaaacaaaaatatcagaccttgcactcaaagaatttcaaatgaatttaagatgactgagacacacacacacacacataacaagaagatggtataatatagaatatttttcttgcaggaaaagccttgaaaatttttggagtacatatagtaagaatgcacttcactgcagcaaaagtaagtgtggctttgaacaaaagtttgcttcagtatagctgttatgtgacacctagtagctctgtggtttttgtggacacgtaaaatctgctgaactctgaaaagcatttccacagtagtctattttacataagtacactggtgccagacatttaacgctaaccacagagtgaaaaaggcagcatgc

SEQ ID NO: 817380 - DNA, 641 bp, Homo sapiens
atgttctaaccagagcaattatacaatagaaaaaaattaagtgcatccacattgaaaagaaagaagtcaaattatccttgttcgcagatgacaagagcttatatttagggaaaccaaaagactccaccraactactcttagagctgatcagccaatttatttaaattgcaggatataaaaccaacatacaaacatcatctgaaagggaaatcaagaaattccatttacaacagctaccaaaaaaaaaaaataataataaaatgcctaggaataaatttaaccaagacatgaaatatctctacaaagaaatcaacaaaagacttatgaaagagagtgaagagaccaaaaaaatagaacagatatctgcaatagtttggacatgtgtctcctgtaaatctcatgatgagttgtaatccctggtgttggaggtggtgcctggtgggaggtgattgtatcatggaggcagatttctcaggagtgatttagtgccttcctattggtgctgtcctctcaatagtgagttcttgcaagatctgatatttttcaaagtgccatttcccccgccttgcacctgctttcactatgtgtcatgcttgctcccatttcaccttctgccatgagtaaaagctccctgaggcctc

SEQ ID NO: 817381 - DNA, 553 bp, Homo sapiens
gttgagattgagactggtgtacttaggccaaacatacaaattctcatacctggaatccggacatgtgtggagttgttcatctcatccctgtcgctttctgcaggtgggattgtgacatacatctctgcccagctcctgagtgttttagctctgtttcctgtgtccagctcacagatgggattctgatatatcactgaagccagcacctagatgatgtgactcttatctcctgccttagtgctgcccacaggggacattgggacatatcacttggccttgcacctaggtaatgtatgttttctgtcttgcattagtgctactcacaggggtgttgtgatgtattgctgggtcccacatccatgttatgtgactcttctgcctgtgcccagtccacaatggccattttgacatattgttgcatccaaaacctagatgatttasctctccttcctgagctttgcctaaggggacattgtgaaatatctatgagcccatcacccatgtggtgtgattttcttctcctgcctagtccctgcttaaagaaaggattgtg

SEQ ID NO: 817382 - DNA, 570 bp, Homo sapiens
cccagtccacaatggccattttgacatattgttgcatccaaaacctagatgatttagctctccttcytgagctttgcctaaggggacattgtgaaatatctatgagcccatcacccatgtggtgtgattttcttctcctgcctagtccctgcttaaagaaaggattgtgacatatcactgtgcccagcacctagctcatgttactcttcttttgttttttaggatttgtttggaaggagattgtgatacattggtgggtccaacttctcggtgacattactctgttgactttgctctgcaagcagaaagcactgtgacacattattgggcccaacaccaaggtgagtctcctgcctgaagcctgcctacagcaatttgtaacatatggcattgggacatatctctgagcccatcaactatttgacaagattctccttttttaacaaaggctttgcccataggagagattgtgacataattctgagcccagaaaataggggatatttcttttgttttctgcttgagccccacattgtgatgtatttctcctcccaacaactgagggaaggg

SEQ ID NO: 817383 - DNA, 517 bp, Homo sapiens
agaatcctaggtaactacaattttcaactcttcctttgaatccataaaaagtataaattttgaattatttggatacaattagggcaacaacatttcaaagaaaccatattataattattaaaaagagatgtgatgagaaagttttaaggaataaaaatttaagtaatactagagaaagttttaaattatgctactgatgcattgcttctttccttacacaaaagggtaaggctgtaatctagcctttaatagaaaggtcttacatttttacatatggtaacaatataaatattgtaaatacagtataaaacattgacagataaaataaaaactggaaataaattgtactattagtcaaataaaagttgggaaaactggaagaaaatgctaatagtaatattgtgcctagagtcaattaaacatacaagccaaatattttaataattaattatataattgatacataacatatacatttgrgcatgctgttttacaacttctcaaactgaaattacag

SEQ ID NO: 817384 - DNA, 524 bp, Homo sapiens
agatcccagataagataatgtttcaccttgaactcagcctgttcttaggagggttaygtataaataagggttgtaggtttgctgaagctgtgggtgagtcaaagttcaggggctgtttggaagaagagaaacaagcaaagtttctgtaaagagtatgttattttgaccactgaagactaaattactgaatggttgttcatttttaaaaatgggaatttgcaatctgtgtccatttttgtgataggttaaaaaaacagcagggagcatcctcaaagtcatcacgggaagcacgtttctcttcactaagctgttctttgagaatgcaaagaatgggggaatttctttaaatatagctatttccaggattaccttcacccacaactgttccttgccctagacatctcttccatttggctgtttctgagttatatttttataataaagtagtaaatataattacagttatttgttgaggttttctttttagtaattctatcaaattatttaacttgaaaaggggttta

SEQ ID NO: 817385 - DNA, 596 bp, Homo sapiens
acttcctgatgccagtactatggcccttcggttttgaggaaaatatcatcttgtatgttggctaacaaggagataggagttcaaatcaaatttgttttgtcatactggctttaaggcagtgattagaaaaggcctaataggtgggttctgtaggggattgctggaaggaaagtaggaatatggaaagtcatgagacatatacagtcatctcttcttgtttcctcacaggtcacatacaaattcagggagagttagtatgaagcacacaatggaaatttgggctccaaagtctgcaaactgatgcttcatggacttcagttggccatattggttccaacaatttcagccaatgtttaaaaaacttatagcagttaaaattttagtgtttcaacaagccgtttcctatctttcattctgaagatccattttttaagtcttttttttaacagtatagggggtacaaattcagcttctctmcaatgaaacacagaaaaggatatcccttttgtattagttcaggctgctatgccaaagaaccatagataggcagcatatagacaacaggacttaatttctcatacctccagaggttcaaa

SEQ ID NO: 817386 - DNA, 618 bp, Homo sapiens
tgtataaagccagtaatctgtattatgagggtcccaccctaaggggttaattactttctacctccttatagcrttacgcccggggttacaattttaacacaaatatagaagaaaaattatagtaactctcaagttttttttctttctttctttctttctttttttttttttttttttttttttgagacacagtttcactcttgtatcccaggctggagtgcaggggtgtgatctcggcttcttggaacctttgcctcccaggttcaattgattctcctgcctcagtctcccaagtagctgggattacaggcatgcgccaccacatctggctcattttgtatttttagaagagacggtggtttcaccatgttgtccaggttggtttcaaacccttgacctcaggcgatccacacgtctcagcatcccaaagtgctgggattacaggtgtgagccaccgcaccctgtcaagatgtttttaaagctctaatttttctcctactgggtttttctcgtttgcgccctcgatctttctgtctctttttgtgtaaacctttttgtctaattctgtctattgtattcctcaaacacaggaagcaagctccaatgctatgagatgct

SEQ ID NO: 817387 - DNA, 618 bp, Homo sapiens
tgtataaagccagtaatctgtattatgagggtcccaccctaaggggttaattactttctacctccttatagcgttacgccsggggttacaattttaacacaaatatagaagaaaaattatagtaactctcaagttttttttctttctttctttctttctttttttttttttttttttttttttgagacacagtttcactcttgtatcccaggctggagtgcaggggtgtgatctcggcttcttggaacctttgcctcccaggttcaattgattctcctgcctcagtctcccaagtagctgggattacaggcatgcgccaccacatctggctcattttgtatttttagaagagacggtggtttcaccatgttgtccaggttggtttcaaacccttgacctcaggcgatccacacgtctcagcatcccaaagtgctgggattacaggtgtgagccaccgcaccctgtcaagatgtttttaaagctctaatttttctcctactgggtttttctcgtttgcgccctcgatctttctgtctctttttgtgtaaacctttttgtctaattctgtctattgtattcctcaaacacaggaagcaagctccaatgctatgagatgct

SEQ ID NO: 817388 - DNA, 643 bp, Homo sapiens
ggttgaatgtttatatatgaacacaggcctagcaccaatgtgatgtgagtctttggcctagacacttcaagcaggagrcaatgtgacatatctctgggtctatcaactatttgatatgaccttccttttttacctgagctttccccataaaagagatgtgacatatgtctagacccagcacctgggtgatgtggctcttctttattgactgagccctgtgtattttgggtattctgacatatccctgtacctaacttctggaagataagaagatccaacatgggccctgcctaaaaagtctcttgtgacaaatttctacatgaatcaccttggagatttgactcttctctcttacctgagctttgcccataagagagattgttacgtacctctgcagcaagcacctaaatgccgtgactcttctttcttgcctgggtcatgcccacagatgaaaggtggcttatcgctgtgtccagcacaccggttatgtgattatgctgcctcatctcttctcacaggagctgttgtgacaaatccctgggcccagaaattatttaatatgactctcctcaatgaccttaactttgtgcatgggataaattgtgacatacctctggatccagcaccgaggtgatgcgactct

SEQ ID NO: 817389 - DNA, 564 bp, Homo sapiens
atatttatacaggcaaacaaacagtkaaatcattgtattaacaaaagacatagggatggttcatatttgacttctgccccacactgtcttaatgcatacagagttgaatattgttatacaatattatattatacaaattaaaacttaaaacaataaactaatataaggtgccctaccctaaaacatgaaacacagaaatgtaaaattgcaaaacaaagttaaaataaacattaacccccaaattcttatttgaataatgaaattcaaaatcataataaataggtagaaagtaaaaacacaattaactgatgtgagacagcctactctaaaaaatacagaaacataaaattataaaacataattaagagaaactttaatccataaaatcctgaataaacatagtgtccaaatgaaaaagaatcccaggtaactacaatttttaactcttcctgtgaatctatgaaaagtatgaattttgaattatttggatacagttagggcaacaacatttcagagaaaacacattataattaatacaaagagctgtgatgagaaagttttaag

SEQ ID NO: 817390 - DNA, 601 bp, Homo sapiens
aagattctaagagagagggagagagagagaatgtgtgtgtgttgaaatcagaaccccaccttatgtgtttattgtggaawttgaaaatgaaagcctaaagttgaaaattaaaatcacacatgatagcacgttgcaaactgttttctgtgctagatgggtcgttctagggtgtaggaccctggaaacaccgttttcccctccttccggaaagagctactcacactgctcaaagcctgcatccacatgtaccatgtcgaagaccagctcaagagcctggacccatatgccaccttcagcagggttgactgcagcttcttgttcttcctgagcatcttctccaatggtgacctgagagttgcgggaggcattggggccaggattgaacagaggaaaaaggagcacggaggccaggtgctgaggaccaggccatctcacctggagagttctggccctgagacatccagaccagcatgatgtttaggtgcagacagctggccctgggtggccctgtgctgatcaccggcctcagcccctcaaacagtgggaaatggaagaatggcttggaaatgggccctgtcgacagtgtgtcacctgagcacat

SEQ ID NO: 817391 - DNA, 601 bp, Homo sapiens
aagattctaagagagagggagagagagagaatgtgtgtgtgttgaaatcagaaccccaccttatgtgtttattgtggaaattgraaatgaaagcctaaagttgaaaattaaaatcacacatgatagcacgttgcaaactgttttctgtgctagatgggtcgttctagggtgtaggaccctggaaacaccgttttcccctccttccggaaagagctactcacactgctcaaagcctgcatccacatgtaccatgtcgaagaccagctcaagagcctggacccatatgccaccttcagcagggttgactgcagcttcttgttcttcctgagcatcttctccaatggtgacctgagagttgcgggaggcattggggccaggattgaacagaggaaaaaggagcacggaggccaggtgctgaggaccaggccatctcacctggagagttctggccctgagacatccagaccagcatgatgtttaggtgcagacagctggccctgggtggccctgtgctgatcaccggcctcagcccctcaaacagtgggaaatggaagaatggcttggaaatgggccctgtcgacagtgtgtcacctgagcacat

SEQ ID NO: 817392 - DNA, 619 bp, Homo sapiens
ctagatggcaggttgataggtgcagcaaaccaccatggcacatgtaaaactatgtaacaaacctgcactttctgcacatgtattccagaacttaaagaaaaacaaactaacaaaaatgcactaaggctgagggggagtgggggtaagggcaggagtcaggctcgggtgggtgcgtcctggagttttatccagtcattgacactgatgtgggaaccgcccaatcaggcgcgcggtggcagaggagaggaaaggagggcgtggcttcctgcatttggcgggatctgtgtctctcgctggtgctggcacaagagcttgggatccgtctcctctttcgcctcctgcaccttgggagccccgggctactctctcacagcccctgttgccctgtgatctgtaggtcttgggggacgcatagttaaggtgccaggacatcctggaagctgggaaatggtgagtatacggggttcgccatcccgagaggggagarcagactgtgaaaccggcaggaccggcctccccacggttagctccgagtctcccgcagcttggccctcagtcccctgtggctgcaagatggccgctgggccagcagcgagggcccccacgtcccgtccggccc

SEQ ID NO: 817393 - DNA, 539 bp, Homo sapiens
cttagccctgaatttgtgggatctgtgcgaactctaagttgtgtcagaattaaattttggggcaagaaatgggtgttggagaagcagtgggttttcagggaactttacacatttaggatcaaaagtgttgtaaggagaaagacaatgtgggggcctttgctggagagagactccaggtgtctcggggaaggtaggctctgctctgcacacaggctgctacgccatgcactgccctgtggttccaggcatcctcccatggtaagaaggaccgacgactctgagggaagaagttctgagaacagatgccttctaccctcctgccaacctgaggccaccacatgtttttcacccactgaacatacacactgcatgttgacgtggtcaagcccctctcaggacaaggctttggcatcaagattgttgcccatsctacctttcctcatagactttcccaccaaaaacccacacacgtgcctacaagacccctggcatatgttctacttcagacaccgaatctgcagtggcaacctggttttttc

SEQ ID NO: 817394 - DNA, 539 bp, Homo sapiens
cttagccctgaatttgtgggatctgtgcgaactctaagttgtgtcagaattaaattttggggcaagaaatgggtgttggagaagcagtgggttttcagggaactttacacatttaggatcaaaagtgttgtaaggagaaagacaatgtgggggcctttgctggagagagactccaggtgtctcggggaaggtaggctctgctctgcacacaggctgctacgccatgcactgccctgtggttccaggcatcctcccatggtaagaaggaccgacgactctgagggaagaagttctgagaacagatgccttctaccctcctgccaacctgaggccaccacatgtttttcacccactgaacatacacactgcatgttgacgtggtcaagcccctctcaggacaaggctttggcatcaagattgttgcccatcctacctttcctcatagactttcccaccaaaaacccacacacgtgcctacaagacccctggcatatgttctacytcagacaccgaatctgcagtggcaacctggttttttc

SEQ ID NO: 817395 - DNA, 587 bp, Homo sapiens
gaattacaggcatgagccaccatgactggccctttctagctttttgatgtggacattagtgctataaatttycctcttttcttggtttctagtgattattttattctatcttggtgagtagtcagggaaataatcttaaatttacaatcaacttatagtttaaatctaaaaaattatgtgagaagaaccctttgttatttgaaggggatgtttgaagattttgtaaccgtgccttttaggtagtcctaaatttctaattgtagttaaaaacatgccattttcatttctaacattttaagtatatggtttagaagtggtaagtatagttctattttttttgcaataggttttagataatttttgtcttacaaaattaaaagtgaatactcattaattctgaaacaagttagttagcttgctttagttagatagcaagagaagggtccctggaaagtccctggcccttgggtcagtatctcatccctgcataacataaaaggaatcctggaaaaaatcaagctgcagacactaacaaggtaactagcacatggtgttgtgcttggagacctgcccatggctgcccagac

SEQ ID NO: 817396 - DNA, 597 bp, Homo sapiens
aagtcaccttacatttacttaattttattaggcagtgtctgtctaccacccaataatacttgacgattctccctccatttgcacagrcatcatagctgggaaacggattcacaagacccaggctgttccctacatatgtttcctcctccgacatcagttcatcagtcaatcaagccatgtgagagtggagcccttgtattccctattattcttgggcactctactccaagtaggaaaaggccaggaggtcctgttaaaggatgcactcagagcccgggctccctaacatatgagagtgctaaccagcaggtgtagacttttcaggagtgaagaatgaggcaggcattccaaacctggaccttcatcacctattgtttcatctcaagacaattctgagggactgttttggagcgtgtctggaaggtgaaccttgaagaagagtgtgggttttgatgtgactcagttgagatctttcatggggaggcaggaattcaatgcccagaatctgggctggtgtctttgaggtcagtaggttgcgtctttgtatccaagtccattgttactaggttggaggctggagattctaaatggcttcca

SEQ ID NO: 817397 - DNA, 535 bp, Homo sapiens
gaccttcatcacctattgtttcatctcaagacaattctgagggactgttttggagcgtgtctggaaggtgaaccttgaagaagagtgtgggttttgatgtgactcagttgagatctttcatggggaggcaggaattcaatgcccagaatctgggctggtgtctttgaggtcagtaggttgcgtctttgtatccaagtccattgttactaggttggaggctggagattctaaatggcttccagaccatctctctgattctctttgggagatggggtctgaaagacaatgtcagtagttttgggaaattctagaaagtgtgcttggaaacgtgggaagagctcttgcctagtgcctaaatgctccatttgcagctctagccaagtagatacttggtaggtatagagccgggtttgcgtttatattagcaaaacctatgtcagagttgaagaagtagtcaggaaaaagygtcttggtcgcaggccggggaacatcttaaaagcaaacttctagcctgctgactcttggcaatgagtgt

SEQ ID NO: 817398 - DNA, 447 bp, Homo sapiens
cgcccgagccagctttcttttgcgtccccaaattgctctccacccggcagccgccgccttctctggagagtgcagggcccacgcctgaggctgttgatgcgccgcagggtagcgctcccagcggtcacctcaccctgcccaggaccccagaccaggggacccacttccccccaccccgagctgcgtgtggaagcctaggttacccgcactggatgggtggagactgcagttgacttagaaaaagacaggaaggggcaactttgttcttcctgctccctttcttcccctctctctgcaacaacaactcgctcctaagtatccttggggagagtggagcttcatccccttgtcagaygccgcacttatttcttctccagcttgctcagactagcccactgggtctcagacttggctgcacactggagttacctggatcttttttctctt

SEQ ID NO: 817399 - DNA, 662 bp, Homo sapiens
gatttactgcaaacatatatgtgcgtgtatatatatatatatatatacrtgtatatatacgtgtgtgtatatatatatatatatatatatatatatatactctttctaaatttgaactaaagcaataaaaagagttaatgaacagcatcatatacttaaaatttttttgagtagctttggaaaatcgttccctcctctcccctgctctgtgactgggctacagaaacacctgttgcattgctagatattatgggaatatatgtcttcaatgctacaaaacattaaggaaccagggagcgctacatacttgtagattggctttggtttagacatgtccccaggatatatatagcacttacacactttgttgtaagcagaagtaattgattttccatataaatctacagcactgtaaaatgtaaaggatttgatcctatgattttaatgcctataagatacatggatttattgatttggctgtttaaaaaattggaaatttcagaatgctccatttgtatgttataaatattcaggtgtagatactcaaatttttttttacaatcttctatttgttagacaggtgttttttgtgtgtatgtgtttttttaatgagaataatgagacatctgcaataacaaagtaattcagagttataacaagaa

SEQ ID NO: 817400 - DNA, 579 bp, Homo sapiens
ataggatctgatgacctcagggactgtggatacaggaggataatggaatcacgggaaaatgggacacagcataaacatttctctgaaactaatatttttttgaaaatcaaatgttacctgtttccaagagagaatttcagtctaatagacaaaaaaaaaaaaatctctaaagggaggttaaaatgtgatcacctctgtctatattgtgacaatctttgaattaattcattgagaagaatcatggagaaagtgatctttcttcttccacatggacagctgttcagctgttagtaccacgaggaagcattttaggacttgtggaacacacaaggacatcagtgatgcagcgagtgtccatttgtcctgtaagcaccaaccaattatcataaaagacagctaccattttttgggacttagtttgtaccaagcattgttgccttacatcaacaacatggcagattcttgatttgtgttctggaaatgagggagatgaggaagttaagtgacttgctcaaggccatacagataggaagcagaygtgcttgagggtattccaatgggacgggttcactctttaga

SEQ ID NO: 817401 - DNA, 633 bp, Homo sapiens
ggaatctgatcagcataggagagctrctattaacaaattatgttgatataattctagccaagagcaaataagttgaacattttaagatttcttgaacatttccgaaattttgaagatcattcaatgacatgttattaatactacctttacccactagacatcctcagacccccaggtaggaaactatatgcaggattaaacaaaacgtatgaaatagacaaaaacaggaagcaatataggttctcattcattcattcatcagaaaaacaactactggatacatatcattgatcaggtactttgtcttgcataaacatactttcaagaagacatcaagaaagacccaagtcaagaaaaaataaactgtagaaagttctaagatagattttaatccctctgaagtagtagaatcaaattcacaccccactgtagctccatttcaaacatccctaccactagaaatcttttcatctcatttgaagccatgattataattgacttcacaggaggactgaaagatatttggttatgaggtgtgcaacatttgtatgtcatgactctcgtgacataaatgagatgttctcttagccccgaaggataataagcacagatgatcacagatgatcaaggttt

SEQ ID NO: 817402 - DNA, 611 bp, Homo sapiens
tttaacacagaatactagacataagcagaaacataaaaaatatcctagctccctgaataaaatgaagatgaagaaaactttactgctcagagtcggggaagattatggcaaaatagatcaaaatgttgaataaccattttccttcatttcttcttttattatcatctatctttttggtatttttctccattttctacttaaatgctcttgctcaaaggttatatattcatccttcttcacttcaagattttcataaattcattttttattcatatccatgcttcatttctgagctcttaccaatacgctaatgaatactaactctacatctttagacctgatatctgcttggtctgcagaaatacatttctgctgtattgctgcaggatatcctgccaaaactttttttctacatgcctaaaacagatttcaacatgcataatgtactattaaatatctctttctcaaaatttgtttaataaacttgtattaattttaaaaatatacaacacaactatctaacactgaaagctagaggtaaacattcttaacctctctatacacttcccttagtaaacctaaaccwtcccttccctctaaggttcatcacc

SEQ ID NO: 817403 - DNA, 538 bp, Homo sapiens
aatggaaattagtggtgaaaaatcttatcaagggaaattgcaccagaaatgagtcaattaaattctattttataaacattcattgaacatcaatcatgaggataagagtttatttgaatctagtactatgaaaagatgaatgtgatgtcatccttttaaaaagtacacagtgttacagaggaataaaacctacaaatgcctatgaataaatatatatacatatgagagggaagaatgtaatatatactgtcatacagactcaagcagaaaggaagataagatcatgttttcttggaaggtatggcaaagagattgccctctgaggctaggcaggattttaagagatggagattataaggccataggaacagcatgaagaaagcacataaggtcagaaaggctaagaatatttaggyaatggtgagcattctagtctggttgaagcctaggaagtatgtgaagggttttgatcatcatgctaagaacttggaagcttattccaatagcaaaagtactacttggatattcttgacatgtt

SEQ ID NO: 817404 - DNA, 566 bp, Homo sapiens
ttacactgttggtgggagtgtaaattagttcaaccattgtggaagacagtgtggtgattcctcaagaatctagaaccagaaataccacttgacccagcaatcccattaytgggtatatacccaaatgattataaatcactctgttataaagacacgtgcacacatatgtttactgcagcactattcacaatagcaaacacttggaaccaacccaaatgcccatcagtgataggctggataaagaaaatgtggcagatatacaccatggaatactatgcagccataaaaaagcatgagttcatgtcctttgcaggacatggatgaagctggaaaccatctttctcagcaaactaacacagaaacaaaaaaccaaacaccacatgttctcactcataagtgggagttgagccatgaaaacacatggacacaggcaggggagtatcacacaccaaggcctgtttgggggtggggggctaggggagggatagcattaggagaaatacctaatgtagatgatgagttgatgggtgcagcaaaccaccatggcatgtgtatacctatgtaac

SEQ ID NO: 817405 - DNA, 568 bp, Homo sapiens
tcatacatcataatctgatccagaaacrgttcattgttgttgcatagaataagagaaaataatactttgaaactacatttttttaattctcacttagttcatgagtcacccacttatcaagctttttcaccattccaattttcttcaaatgtcaaacgaccctagaatgttcgaccttgagttctttggcaacttctcatgtagttgtaagacgatcagcttcgatgactgctctcagttggtcattgtcaacttccaatggtcagccactgcactcctcatcttcaaggctctcgtctctttagcaaaacgtcttgaaccaccactgcactgtatgttcattagcagctcctgagccaaatgcattgttggtgttgtgagttgcctctgctcttttgtgacccatttggaacccaaataagaaaatcgctcaaatttgctttttatctaacattattctcataggctaaaataaatataaaataaacagcaagtaataagtcattcgcaaaaaacataaagcaagaaatgcacactaacatgatgtatagcataaccacatttattt

SEQ ID NO: 817406 - DNA, 580 bp, Homo sapiens
  misc_feature 29: n = A,T,C or G
caacgctgagagcacacaggagaacaagntgggaagtggatccacactgaggagggagtgtgacagctcgtgcagtgcaggaaggctgctctgctcaccccacactgcrggtgacaggatgagaggaggtggcaccgctcagaccactagggatcagtctcaccaagaaacagcatgcttccattctcaaggttgctagtgttttgtttttgtttgtgggggtgtttttttgagacagagtcttgctctgtcgcccagactggaatgcagtggtgcgatctcggctcactgcaagctccgcctcccaggttcatgccattctcctccctcagcctcccgagtagctgcgactacaggtgcccaccaccacgcccgggtaatattttgtatttttagtagagatgagtttcaccgtgctagccaggatggtctcaatctcctgaccttgtgatccgcccgcctcggcctcccaaagtgctgggattacaggcgtgagccaccgtgcctggcaggtcactagtgttttaaattattagtatgctaagtaaataccagttctactatcacttgccatttccct

SEQ ID NO: 817407 - DNA, 643 bp, Homo sapiens
cttctcattaacatcaaacaagactcttctgctccagctggattgattcataattccaggagratacattgtcattcactctgcagctttctttccctttcccctttgtggctctacaccttatctctcctttagttttttttttttttttctttttgagttggagtctcgctccgttacccaggctggagtgcagtggcgtgatcttggctcactgcaacctccacctcccgggttcaagcaattctcctgcctcagccttcctagtagctggaattacaggtgagcacccccacacccagctaatttttgtatttttagtagagatggggtttcaccatgttggccagtaggctgtctcgaactcctgacctcaggtgatccacctaccttggtgtcccaaagtgctgggattataggcatgaggcactacacccggcctcctttaaatcttgtctatatcctgcctccttaaaaattgccaatctctaaaactcagagtaccatacactttatttagcattttttcacacagcattcctaagcaaactgtgggtggaactaattcttatgtttaggtaatatagatgccttattcccagtaagcactcatgcaataaatacagaagagtaagtgacaaac

SEQ ID NO: 817408 - DNA, 580 bp, Homo sapiens
cagaaattggaagaagccgactgttttttctctttattcccagagcacctattgtaatgccaggacacattgggcgcttgatgatggcttattgagtgaaggaagaaacaccaaatagaayaattacatttttataaatttaaaaacagaagactttaaaataatttacaagatgcaataattgcacatttcagcatttcatattttcacagtatttgacctttgggaagaaatgttttgtctactttacagagaacaccctgttggttcagagttgcatttcctcaagcataacacatcttctcacttacgcatgtaagaagaacctaagatagtgtgtgcattatagaaagacagagagacatacagaatgactattggtgtagccagttttaaaagttttaatagttaaatattactgtctaatattgaacctgacaaaatacaataaattgcttgaaattattatctatttttttcagtgtgtgattacaatgcagcaacttagcagtaactagctgtagttcaaaaattaaaaccatcaatttgaataatttatgaagtgaactcattcttttca

SEQ ID NO: 817409 - DNA, 557 bp, Homo sapiens
caataccttgactttttcaccaacagaagtgacgtttattttcaaatcacatctaacttgttgcagacatcccaaaacattgcatctgctaatcattttaatataataattgtggttattaaactgccttgtagcttgcatttttaaatgtgttaaaatatatatactgctatgccacacatttattggtttagtttttttttgtttttgttttttgacacagtctggctctgttgccaggctggagtgcagtggcacaatcccggctcactgcaacttctgcctcccagttcaagcgattcccctgcttcagcctcccgagtagctgggacaacaggtgcacaccaccacgcccagctaattttttgtattttagtagagacggagtttcaccatgttgtccaggctggtcttgaactcctgaccttgtgatccacccgcctcagcctcccaaagggctgggattaccggcgtgagccacggygcccggctggttcagtattttagtaactgcatttcagtataattggtttattttgaaatcttatatattgggt

SEQ ID NO: 817410 - DNA, 496 bp, Homo sapiens
tccaggctcccacctatgctgaccactctgcctggaatgcccatcttcctctgtctatgattgggaaatttttttttttttttttttgagacggagtctcgctctgtcgccaggctggagtgcagtggcacgatctcggctcactgcaagctccgcctcccgggctgacgccattctcctgcatcagccttccgcgtagctgggactacaggcgcctgccaccacgccccgctaatttttttgtatttttagtagagacggggtttcactgtgttagccaggatggcctcgatcccctgacctcgtgatctgcccgccttggcctcccaaagtgctgggattacaggcatgagccaccgcgcccagccgattgggaaatttttcagcctggaagtgcccggcctctgtttaagaaagcagggctatgtayatgcattgtttcataggttcaaaggattagagaaacaggaagtgtaggctggtgcaaatgtcaacg

SEQ ID NO: 817411 - DNA, 611 bp, Homo sapiens
atgaggcaggaagatcacttgagcccaggaggcagaggttgtagtgagctgaaatcacaccactgcactccagcctcggcaacagaatgagactctgtctcaaaataataataaataataataataataataataataataataagtaaaataaaaaatttaaaaaaaaagaagaaaggaggcatggcttcaaggtgggaaacatcacaggtaaatttgagaacaaataataggatacacactccacctttcagaagggtagaatctattaaaagaaaatattcaactataacaaaatatgacaagtttctcttactattcttatcaggtgtaaactgcatatcctacagagcacttaggaaactgtcttgctgtcagtagacacgcacacacttcttaaattttacactggacatgtaattagatgcttaaatttagcaggtgactataaattagaataatttaacaaataacttctagaacaggtctagaagcagtagattatatatcttaaaattattttatcaaattgggacatcttacatwttatcagtactttttctagatggggaaatgcttgtaatttagtattttaaaaaacccagtagaac

SEQ ID NO: 817412 - DNA, 599 bp, Homo sapiens
ctaggagtagaatttctgggtcatatggtaattctgtgtttccctttttgaggaactgtcaaactattttcttggtaggaggtttttgaaccctgggaaatcacttgctcaatttggatcattctcttcttcagtttttcccttgagtagcttcctctctggataaaatatgcagggattttagtggcatgtgagaagaggcactgactagacaggctacagtttcctctcatctcctgtaggcatgtcaactcacctggcattagagggacccagcggatataacctgcaggggcacccacggctccattaatggttcctgttgaatgatcaatgagtctccattccagggaactgccacatggagcgagacccctctgacactgcgtgagcccttgatggctgaagcagcaccaggccccctcatggtttcctgggttctactaggagctaagtacaacaggtttgagttggagagagtaatttgcyaaagaaatgcctgggagtggcagcttctgaaacaggcgctgacagctggtgagggatttcatagggctgcccctgctccacgagcctgagaaaacaggagaaattccaac

SEQ ID NO: 817413 - DNA, 537 bp, Homo sapiens
tgttgttataaagaaatacaatgcatttttgtatactgacaatgtgtctaaaaaccttgctaagtttttaaatttattctaatgaaaattcttgtgtatattctacakgtataatcgagctatctgcaaaaaaagactatttaatttgttattcccctgactctatacatttattatatttactattattttcaatggcaaaaaccacaattacttttgcaccagtatgatgcctttttagctgtgcaggacttccagtatagtattaaataaagtagttgacattattttcttgcttgacttctcggaaataaactttttgtcatatcttcattaagtatatattagttcatcatatatattactgatcagtttaaagatgtatcctttgttactaagctgttaaaagtttttctcattagtggatgttgaattttactgaatgctctgcctctactaaaattattatatgtttatttttttccttattcttttatgtctggtttctttaacacttggtgaatttactcatctttt

SEQ ID NO: 817414 - DNA, 569 bp, Homo sapiens
cgtaatttataaacaacataaatttatgtttacagttctggaggctgggaagtccaagatcaatgtaccagcagatgtggtgtctggtgaggacttgctctgcttcataaatggcaccttcttgctgtgtccttacatgatggaagggacaagggagcttgcttttataagggcactaatcctattcatgacagtagaaccctcatgacttaatcactctccaaaggccccacttcttaataccatcatatcgggcattaagttccagcatgtgaattttaggaggatgccaacatgcagaccatagcaaaaactaactatacagctataaagttataaagacagcgtggtattgataaaagaatagacacagaaatcaatggaagaggtaagaaagtttagaaatagacacacaaatatagtcaactgatctttgacaaatagtaaaaggcaattcaataaagactagtcttkttacaagtagtactggaaaaattggatgtccatatgcaaaataataataataataataataataataataataataataatgaatctagacacag

SEQ ID NO: 817415 - DNA, 631 bp, Homo sapiens
tatttatgatatccaatcacctttaacatttgtcatttctttgtgtttggaacatttcaaatcttctagctattttgaaatatacaatatgttattaactatactcacccttctgttttcaaatactagaacttatttcttctgtctagctgtatgtttgtacccattaaccaacctctcttcatcctctccccctacacatacctttcccaatttcattctactctctctctctacctctgtgagattaaagtttttagttcccacatatgaatgaagacatgagatatttgtctttctgtgcctgactgatttcactcaacataatgacctccagttccatccatgttactgcaaatgacatgatttttttttttatggttgaacagtattccattgggtatataccacactttttaaatccattcgtctgttgatggacatgcaggttgatttcatgtcttggctattgtgaatagtgctgcaataaacatggtgcaggtatccctttgatatgctgagttcctatcatttggatamatacccagtggtgggattgctggattgtatgctagttccatttttagttttttgagaaatctctacactgttttccataatggctgtacaa

SEQ ID NO: 817416 - DNA, 623 bp, Homo sapiens
tagaaatctagagaaggggtaggtaggctagagtggccaaactaatgttatttcttagaaattgaactgaccgttttcctcattcattcttttattccatctactcatttattattaaccaccttattaataaaaagcagctaacctttatttagctgctcaggcactgagcattatatgtacaactcatttaatatgccatcgttttgcagattaggaatccgaggcatagcatttgaccaacttgataatgagtggaagagactggtgagaaaccaagtctgtgtactccagagcctggctcttaaccagcatgtcctattgttttttgcctaacatttgctgacagcttgtcaagtagtaggttcacagagacagctgggatatagagatagtggaacaaaatccctccatttgagaaaccacagaagtaagtttgaaggccaaggattctgttgcaggacagtgatggtagcttctgaattcaggggaggcacacctgtgggaacatttggagatggagagaaggaagttaatgaccaggtggtagaggactttgaaagccagaatgtggggtttttgtttcatccatagcttcacatrtcatcttaggaccctctatt

SEQ ID NO: 817417 - DNA, 626 bp, Homo sapiens
aataaaactatttttaaaaataaattatccagcctcaggtaatctgttagagcaacacaaaatgaactaatagaatggctattcactttgattctatttttttaatattatgaacaatcccgaataaatattcctgtacatgtccctttgtatacatatgagaaggtatccctagggattatacttcccatagaatttctgggtccttataaaatatgaaactttactacatatataggtgaaattttctcccaggtgtcaccaatttacattcctcagaattatgaaatttcctactgctccgtatcttcactaacacctggtgacattgaacttcacaattttgtcaatatgatagatgcgtaaaattgtataacagtgtagttttgatttgcatttccctaatccttgtcttggctgcttagtagacatttgggtttcattttaggattaactattcttatttgtcccgtcttccactgtgttacttatattatttttggtattctgaatgctaattctttgttatatttaatgttcatcatttttrttcataattataatcccttcctttgagattagtgctttttaaaatgttgtttataaactactgtccttccctatat

SEQ ID NO: 817418 - DNA, 623 bp, Homo sapiens
ttttacctcagacctcagaatccacctttggaggaaatcagtgagggctcactattactgaccacagtttctcacctgtagttggaaagactttgcatatgctaactacaagtataaccttggaaaaacttgaatgtacagagtcagagttcacccattaagcgcaaagcctcagaagacctggaacaagattctgcttctctgtgatcccaagatgtcagcccttgccccagcaatgttgaattttcttctacttggtcatcaaaaaaggagtgtaaaagaagcgaggtgcactctccatcttcttcctgaagaagagcctcctattcttctctgtcctcataaatgggcattagtgccttggacagttgaggaccactccatcctctccacagcatcccctccactccagagttgggtggcacggattttcaactggctaaccttggcttccacaactgaatttttttcagacccccattcttcatgctggaaatgagattactggacttggcagttttctttcccctcatctttcaccaggaactggactcttmatttcctcaggacagactagctgccacattatccccaccttagttctttctctctgatccctggaa

SEQ ID NO: 817419 - DNA, 508 bp, Homo sapiens
attatgcctgagtgacagagcgagactccatcgaaaaaaaaaaaaaaaagttctccccagtgtgtttttaggaagtggcatggaagtccacccatggaagcccagaggaagggagagtggatgttccctccccacagccagtcccgtagctagttaggattgaatggaaacccagacacttctgactctaatgccagtgcttgcaaattttggggtccttgggctatttaaatagcttgagaatcaaccataaaggtgaagattggcagtgggatttgcagccagagaacttgtttccctggttgctaccctgtgattttggacacatttaatctgtttcagcttccatttactcatctgtaagatggggatgatgaatgccttgcagatttgctggaattaaatgaaaagcatcaaaatctggctcataatagcactcaaagattatttatatgccattgtaggaagtaggttctcagrgcatatgttgggatccctggaaaacaag

SEQ ID NO: 817420 - DNA, 614 bp, Homo sapiens
actgaattctcaatctgtcaacagcagaggccartgtggaagtcttgctggaattatcttttatggggatcaggcagatgtctagcagtattttgaggatctggaatgctttcatgatggaaaaagcagctatttgtcctcagaggagaaatacacattctggttgtggatttgtctattccctttctgccagagctaccatttatgaacttacagaatatctcatccattgccatggtagcccacacaatacggcttccaacaagaaatacatattatgagaaggaagtgcaataatggtcttacccccatggattcactagtctgactatgtaccacatcacccaaaagaagttgccttgttagagtgatggaatggcttttggaagactcagttgtagctcctcgtgaaaataacatctgggagattggggtgctgatctactggatttactatgtcttaatctggtgaccaatgtaggaaacaagggtgagggggaagtggccactctcattacaacaaatcctctcctgaacacaatttttgttcttatcctcaagactttcagttcaatgggtttgaatgtcccagtgccccagggaggaatgctttg

SEQ ID NO: 817421 - DNA, 547 bp, Homo sapiens
atggataaaatgtaggtcattttgaacaataaagtcagggagtaaaaggaaaaagccatttgwttattaagaaagactgtctattgcatggatatagtacaggtcatacattagagttttagttttggttaaacctgtcagttatggtacatccacaaacaagtgtgtgcacaggaattagcagtgacttgggaaattcagttgctcaaattttaccactgcaagctcatggagtttaaccaaacaaatgaatctgcaatcaagaaagtaaaaaaacataaacaagctttaaacaatctttagaaaaaatgttcacatgcaagagacttcccaggcaagaaggttttgattaaaaaaaatttgagtcccgaagtagtgatttaccttcagaaatattctcatctaggattattacactccaaatgcaaagtgagctagagagggagaatgcttgcaagatgtgttcagttcatattaaataaatacaaagtatggctaaatactatgtattaagattttctagcaccaatttatagaagttcagagt

SEQ ID NO: 817422 - DNA, 606 bp, Homo sapiens
gataaaaacacaacaagattaaaaacaagtaacaaattaaaacagagataagacatcactcactgcagactcattttattaagaaaatatatctatttctggtccctgttgtgaagayatcacaggggaatattattacattgtatcctaatatttgaaaacttaattttgaattagatatgatgccaattaaaatgtgaattttagatttttttaaaatatatattcaggaaagtagcccaaatcacttttggttaatacaacacaacagaaactccctctcttcgttgtcaaacaaatttctttaatgctcctggataaaaccaaccaagatggatatagcccataagtctacgttgtaacggataatgggtccattctcatttatgtacaaaatatagattttcgtattgttttttgaaaacaaattaatggaaggtccatttagatttattattttgaaagaaatttagtaatttattttaatataagaattaagaaacaaaataatttacctgaaatccacacattattacttgtgatattattactgcctggtttaatctgataatatcagtggatacttgtgcaaaactgaaattacgt

SEQ ID NO: 817423 - DNA, 587 bp, Homo sapiens
ttttatgtttcttgaatttggaatagatttatgaaaaaaatctgtgggaaaaacaatttgttargtgggacagaaatttaatctcccaaagtaagaaagctgagcactcacctactttttacatgtatataatttaatctgaggcaaataatgataaaatctttacataaatatcttcttgtggcagctacattactgtgaccatcccagaaggccacataactctaatttatagacataggtggtcacacagtctggtcctgacgattgagaagaagcagctgcctccagtaggttcttaattgatatgaatgttgattttttcctcatgatctgtatcaatttctatatcagtaattgttgttagtataaacttgattgatacataactatgttgctgcccaaacgtgttcagatgttactgttatgtgtaatttgtaaggaaatatatttatttatatttgcaattgataaaggtaaaaatattatggctagagggcagaccccttgtttaaataatacaactgagtatttacttgtacaactacccatttagtagaatgtttataggaggccagttacatgct

SEQ ID NO: 817424 - DNA, 587 bp, Homo sapiens
ttttatgtttcttgaatttggaatagatttatgaaaaaaatctgtgggaaaaacaatttgttaggtgggacakaaatttaatctcccaaagtaagaaagctgagcactcacctactttttacatgtatataatttaatctgaggcaaataatgataaaatctttacataaatatcttcttgtggcagctacattactgtgaccatcccagaaggccacataactctaatttatagacataggtggtcacacagtctggtcctgacgattgagaagaagcagctgcctccagtaggttcttaattgatatgaatgttgattttttcctcatgatctgtatcaatttctatatcagtaattgttgttagtataaacttgattgatacataactatgttgctgcccaaacgtgttcagatgttactgttatgtgtaatttgtaaggaaatatatttatttatatttgcaattgataaaggtaaaaatattatggctagagggcagaccccttgtttaaataatacaactgagtatttacttgtacaactacccatttagtagaatgtttataggaggccagttacatgct

SEQ ID NO: 817425 - DNA, 612 bp, Homo sapiens
ggacagacccagggccctccacactcacccgcatccctccctccaacagctccaagggaagctggtaggaagttacatggtctccgtggcccctacatgtgttactaagggcactaatgaggcacacttagctgcagaggaggcactgggccaaattttcctcgtatatttaattccctcaaccactttatgaagtatagactatgtttcatcacatagagaatgaaaagcagcttcatgatgttaaggtagaaaaatattcaagaactcacagattggaagatgtacaactggggtttaaacactgttgttcatacagctgaatacaaataattgatgtttcagaggtagatgagctcgcattttctaacatttgaagtagggaagctcaaattcatgtctaagatattgacctgaatttgtgtgaccgatgaaagcagaattaaaaactgcctggatcaagaccaccagttccttygcctaagggctacgccgaaggcagcatcacttctatggtcgcgcctctctctgagagctgtcagtctaggtagcgctcggtgcctatgagactccgcaaagtggaactcagtgtataatgtgaaaaagttgata

SEQ ID NO: 817426 - DNA, 636 bp, Homo sapiens
  misc_feature 58: n = A,T,C or G
aatatatccttcattcatttttacacccaatcttctgccattcactctattctaactntctctatctcagcaaacaaaaattacaacgtcaacttttcaggtttcaggctaaaaaagtggaagtcatctgtgactcctttctctccaccctaaatccaatcacacaaaatacagacaactctgccttcaaaatcctgtatatccagatgtcaaccacttcttgccacctccaccacttctagtctggacaatagatacctaaatgttccctgttcttctcagttgtagaatttcaacagagcagcaaacgtgatcctcttaaactgaagccatcacgtcacttctttccatacctccttcttcccagggcttccctaatcacctagttgaaagcagattctcaagtccttgcaaaggcttgacctcaccatgccattctgagtacatctatcccctgacccctgtcacttcactgcagctgtgctggtctccttgctgtccctccaatacacagaccctgccacatagctttctatgtaccgtcccctctggctggcacacttgcacccacgtatccacgtagctccyggctcacatgtcacctttttcatgaagccatccttaatactctgttcc

SEQ ID NO: 817427 - DNA, 611 bp, Homo sapiens
aaagagcacaaagtttgagacagttcagtcaagtcattgtctccctgcctttgctttatatattttagcagaaaaagaaatataacttggtcatttaatttcctgttttatatcaggagactatttaggaatacaaagaaatgaagttacttttttgacattctgttaattgattgtaggaccatgatacaactggcacagaaaaagtcttttatgagataatcatgatggcataaaatcagggcaagggaaatagcatattcagattagctaaaagaactacaaacacactatacactgaaggaaaaaaactaaatgttgtgtttcatgaacaggtggctgtgataaatgtgtgaaagtgttggtgagctcaaggcagttatggaaagagatgatggtttttaatgttgtttgagctgtcacttagaatgaagaagctaatactaaagggctgcataattgctgacaatagcactgccagccatcagttaaaatgaaaaggaaggtagaaattggttytttataagaggatccttctaaaattagagcttacaaagtaacagtgtaaagaattcttcatgatttcatgaaatatctttcactgggagaat

SEQ ID NO: 817428 - DNA, 611 bp, Homo sapiens
aaagagcacaaagtttgagacagttcagtcaagtcattgtctccctgcctttgctttatatattttagcagaaaaagaaatataacttggtcatttaatttcctgttttatatcaggagactatttaggaatacaaagaaatgaagttacttttttgacattctgttaattgattgtaggaccatgatacaactggcacagaaaaagtcttttatgagataatcatgatggcataaaatcagggcaagggaaatagcatattcagattagctaaaagaactacaaacacactatacactgaaggaaaaaaactaaatgttgtgtttcatgaacaggtggctgtgataaatgtgtgaaagtgttggtgagctcaaggcagttatggaaagagatgatggtttttaatgttgtttgagctgtcacttagaatgaagaagctaatactaaagggctgcataattgctgacaatagcactgccagccatcagttaaaatgaaaaggaaggtagaaattggttctttataagaggatccttytaaaattagagcttacaaagtaacagtgtaaagaattcttcatgatttcatgaaatatctttcactgggagaat

SEQ ID NO: 817429 - DNA, 554 bp, Homo sapiens
gtgaatctatttctgtcagctcctttttatccttctttgcagaactagttattttttaactaagtacaaagtagttaaatagaaataaccggtggaataacagaagcctatatgtggaatgagggttaatatactccttggtatttggactttgggggaaaatactgcctaagaaatcagtttcctggcatatatagagattgatgatagcaactcctttgcaagattttggaaatgagcagttgagatgacacccacataccaagaacatttgcctggcccaacatgacctcaataaatagaagctaccttaatgtgttcaggcaatttttgtctactctgtgataatggtgaatcttgaatgctaattctgttagtactgtatgccaaactacatgagtttgtcttcgaaatattcattcactttagttataaatgtttactaaggaaaggcccaaggacagaacgctgtcaagcatattgactctrgctttgctctgggccagtgattttttttttttttttaagacagagtctcgctctgttgcccaggc

SEQ ID NO: 817430 - DNA, 513 bp, Homo sapiens
aaattacttaaaatattgtataaaattatctttaggctatgtgtgtaaagtgtatatraaaagtaaattttgtgtttaggcttgggtcccattcccaagaaacatcattatgtatatgcaaatacagtcttctaaaatcaaaaaaattccaaaatcccaaacacttctggtcccatgcattttggataaggggtattcaacctgtactgaagattgccagaatgtggtatgcagtttccatctgtctgcagacagtcaacatattgaggcactggctttgtttgtatatcattggattataattattttcgtggaagtatttttttttactttttgtaaagtaatagattctcacgtgtgaaaagtgagagaacaatataggaaatgatttccttatttcagtcaccctaaagatacgtagtgttagcttgcagtaagttatttttatttatttttccatctaaaccatataaatagacataaattatgtatatcttgaaaagcttagatgta

SEQ ID NO: 817431 - DNA, 513 bp, Homo sapiens
aaattacttaaaatattgtataaaattatctttaggctatgtgtgtaaagtgtatataaaaagtaaattttgtgtttaggcttgggtcccattcccaagaaacatcattatgtatatgcaaatacagtmttctaaaatcaaaaaaattccaaaatcccaaacacttctggtcccatgcattttggataaggggtattcaacctgtactgaagattgccagaatgtggtatgcagtttccatctgtctgcagacagtcaacatattgaggcactggctttgtttgtatatcattggattataattattttcgtggaagtatttttttttactttttgtaaagtaatagattctcacgtgtgaaaagtgagagaacaatataggaaatgatttccttatttcagtcaccctaaagatacgtagtgttagcttgcagtaagttatttttatttatttttccatctaaaccatataaatagacataaattatgtatatcttgaaaagcttagatgta

SEQ ID NO: 817432 - DNA, 631 bp, Homo sapiens
gagggccagtggcagctcccataggttcccagggaaaacatgtcaaacactctttccagatgacacccctgaaacctgcatctactccaactggtccccatggtccgcmtgcagctcctccacctgtgacaaaggcaagaggatgcgacagcgcatgctgaaagcacagctggacctcagcgtcccctgccctgacacccaggacttccagccctgcatgggccctggctgcagtgacgaaggtgaggagacaacccagaccagccaggggctggcaggagttcaggaagggagggtctgcctagcagtcagacagtgtccctggtgagggcacaaggaccctgacagtagatgtcagtggggtccaccttgggcaaactcctatctgcaacagtgtcttgagggctctgaacacagaatctctcttatatcaaaggaattcttgagattgaccaccccctccttcttttactgaagagctaacaaacatagatacaacttatgacaagttacagataacacatagcctgcttctgggccttaactccaatctcttcttaaggagcctgttaacagtcagcccagattgaatctagatccattgccctaattctgtcatttacagcccctc

SEQ ID NO: 817433 - DNA, 620 bp, Homo sapiens
atacccagtacttgacagcttggtgatgaggatgaagatgaggatggtggtggctggcataaaggatacacataagggtgaaagactgagggagatatgaggccggagaagtaggtggggccaaaggrtgagcccttgggctccatgctgaacaaaattgggctttacccctaaagccaaaggaagaatttcaagagtggagtagcctgatcaagtgtctgttttagaaagttctgtctgatggactgggtgcagggagtaaaacgggaggcaggaactgattttggaggctcttgcactaatgtaaagacagtgaaggcaatagacatggcacggatggagtgacggaagcctctccagggtgtggctgagggcgccattcctttatgatttctcaggctatggatgtgaattttcctaagccaggtctgctcactcacagcagggcccagctgcatggaggaatatagaatccagggtattatcattagaattaagctgcttcgttgagtccataaatgtcacactcgggcataccagcatgtctttttttctggcttacaatgtaaaaagtaacaatggttatctgtgggtagtgggattatgaattgtttttatat

SEQ ID NO: 817434 - DNA, 583 bp, Homo sapiens
atttctcttgggtaatatcttaggagttgatttctaggttatagggtaggtacatggttatgtttatactatattgccagttttccaaagtagttctgctactttatactcccaacagcaatgtatgagaacgccagttgttgtattccttgccaacacttggtattatgtctctttttaatgttgagcatggcttttttttttttttttttttttctggagaccgagtctcgctctgtcacccaggctggagtgcagtggtgcaatctcggctcactgcaacctttgcctcccggattgaagtgattttcctgcctcggcctcccaagtagctgggactacaggcacccaccaccacgcccagctaattttttgtgtttttagtagagacgaggtttcaccatgttagccaagatggtcttgatctcctgaccttgtgatgcacctgcctcagcctcccaaagtgctgggattacaggcatgagccaccgtgcccagccaatgttgagtattcttgtggttgcatagtgctatcacctggtggtttaatttgcatttctctgatgaytgatgatgttgagta

SEQ ID NO: 817435 - DNA, 487 bp, Homo sapiens
tcctggtaaaggcctgtgaagcaarctcctgcctaggtctggatgggtatcagtaaaaatttacacacaaatcctatcaaaacaatttacatgcaaatcttataaattttaatgtgggagttctctgtgaatatgtgtgatagtgaaatctgctactccatcaagaatcttttatatgctattcacacataaaatgttttcccccagagcctgatttctttttttattctcatatttctttagcaataactgaacacctgcttcatgaaaggtcttttatcatgtactacaagttgcgcaaaggggtcttgaattctgagcctcatgatctccttttattcctattttatttcaaaacagttgatacaattataattgtgtaaatggtgtatgaatagatgtccaattattaaaacatagatgcccaattactgtaattggtggaagaatgacaaaccgaaaaaaggtctagggtcatgtaggttca

SEQ ID NO: 817436 - DNA, 629 bp, Homo sapiens
ttctaaaatgtgtgcgttatatcttaatcagactctaaatagttgcccgtatcagcaatatattttaaattaataaactttattattatttatttatttatttttgagagaaagtcttgctttgtcaccgaggctggagtgcaatggcatgatcatggctcactgcagccttgaatgactgggttcaagctgttggcctatttctgcttccccagtaactgggattatacgtgtgcaccaccatgcccagctaaatttttttttttaagtagagatgaggtcttgctatattgcccaggcagaactttattttttagagcagtttcaggttcgcagcaaaattgagtggaaaagtacagcgatttcccatatccccccattcctatgcatgcctaatctttccagcagcaatatttttaaagagataactaactttatttaattgtgcctattttttcctattgcaataatttattcaaatcttatttttttacattctttcttggctctacttggataattttttctcatctcttagagtatgaagatatttcccttaattttagtcrtttgcattaaagttaagaatctctgaataaaactttggctattctcatggatatttggta

SEQ ID NO: 817437 - DNA, 463 bp, Homo sapiens
agtcagtcagagcataaatattgcatgtttcactttagaaactgattcattttagaaagcagatctggattattttgcagggtagaaatgaaggctatttctggcattcttgctcaaaaagtcaatatatgtacattaagtataaaaaagggtctctttcacctcttttgtttcgtagcattggctacataaagaacattgcttatccctaggtctagggccaagttcatttctgctaggaagttgaaatactagaagtgattagagttccatattctagattggtctttcttctggaaggaccacatcatctttcctttacttttataaaaaaaaaagtcatgagaaagcttcagttgaattggtgaaccrgcgcctcttccatagttcatgcttacaatgcccactgctgagggccagaaatactgagaatgctgtaggaacaaatacgtcaaacacagtg

SEQ ID NO: 817438 - DNA, 631 bp, Homo sapiens
tatgtgtctgtgtgtgtttgtgaggttcaaataaggttaatatagttttcttggccaaagtaagtagacatatgttaaggtttcttaacaaactcttcttccctcttctccctctctcctttcttttttttttctttctttaagactgtgaagtatgggtatatcaaacaaatctcatgtgaaattttggaagaaagcagacataccatcacaggcaaattgttcccttgcttcatggcatcaattagaaaattatggcaagggctgggcgcagtggctcacacctgtaattccagcactttgggaggctgaggcaggtggatcacttgaggttaggagtttgagaccagcctggacaacatggtgaaaccccatgtctactaaaaatacaaaaattagccaggtgtggtggtaggcgcctgtaattccagctactggggaggctgaggcaggagaatcacttgaacctgggaggctgaggttgcagtgagccaagatcgcaccattgcactccagcctgggtgacagagtgagatcccgtctcaaaraaaagaaaagaaaagaaaaatatggcaagaacttgtttcaggtatattagcatataaactcatcatttatatgctaatacatg

SEQ ID NO: 817439 - DNA, 625 bp, Homo sapiens
tggtatgtttgtattaaggtctattttgtctggcattagtgtagccactccagctttcttttggttgctctttrcatggtgtatcttttcctgccttgtactttcaacctctttgtaactttgtatctaaggtttgtctccagcagagaatatatagttgcatcatttttattttatccattctgctaacctgtctaaattgaaatgtaatgtatttatatttagtgtgattactgtaacatatttttatgtctgccatttcattgtttattttctatttttcttatatcttttttgttcctctattcctctattactgccttttgttgtgttaaatagacattttctatgtatcattttaattcacttatcatttcttttactctacatttttagttcctctacttttttgtcttagtgactaccctacagattaaaattagcatattaataatctagtttgtattaataccgacttaatttcaatagtatacaaacactttatttctatacagctctgttccctatccccgtgctgttattgtcatacaaattataccattcttacatgtgtgcctatcaacacagatttataaatattgtttgctgaagttttaaattaaat

SEQ ID NO: 817440 - DNA, 625 bp, Homo sapiens
tggtatgtttgtattaaggtctattttgtctggcattagtgtagccactccagctttcttttggttgctctttgcatggtgtatcttttcctgccttgtactttcaacctctttgtaactttgtatctaaggtttgtctccagcagagaatatatagttgcatcatttttattttatccattctgctaacctgtctaaattgaaatgtaatgtatttatatttagtgtgattactgtaacatatttttatgtctgccatttcattgtttattttctatttttcttatatcttttttgttcctctattcctctattactgccttttgttgtgttaaatagacattttctatgtatcattttaattcacttatcatttcttttactctacatttttagttcctctacttttttgtcttagtgactaccctacagattaaaattagcatattaataatctagtttgtattaataccgacttaatttcaatagtatacaaacactttatttctatacagctctgttccctayccccgtgctgttattgtcatacaaattataccattcttacatgtgtgcctatcaacacagatttataaatattgtttgctgaagttttaaattaaat

SEQ ID NO: 817441 - DNA, 562 bp, Homo sapiens
tatggttctatacaaattttaggattgttttttatatttttgtggaaagtgacattggtatcttgatagggatcacattaaatctgtagattgctttgggccatatggtcattttaatgatattaattcttctgatccattagcatggaatttctttccatttgtttgtgtccacttcaatttctttcatcagtgttttgtagtttgccttgtagggatctttcatctctttggtaaaatttattccaagtattttatcatattttttgtagctatcataaatggaattctcttcttcatttctttttcagctatttcattgttggtgaatagaaatgctacttatttctgcatattaattttgtatcctgccaagtctactgaattggcttatcagttctaagagtgttctggtggagtgtttggtttttctaaatataagattattttggaacttgctttatgagctcttgccaggaagatggcagataggagacagggctgatgtgcarccccccttggatagatagaatagtactatgttgagtaggaggggtgaaca

SEQ ID NO: 817442 - DNA, 605 bp, Homo sapiens
ctgccaacaagaatggctgtcttggaagtctgtacacagaactaaatacgtggtggaaaaaggagaaggtctattaatgtgcaatataaatgttcatgtggcctgcaactttctggggcaatcctttccctagtaattaagcagtttcaagtgcctgtctaattgcaggaattcaaatggctcactgctgtcaccagaatgtctgataattcctggacagagaagtgatgcaaatgtgtgcttacgtatggagttgatggcatctcctgcaccagcctcctgccctgggcagactgttgtggtcatttgggggcagctccccagcacagcagatttcttgctggccatcacttttcaaactctggacttctgccctttggctgggaactgctcacttcccttagaactttcccctcccgtctcctgacttctctaaatgccagagttccaacctctgtctcctgggaaattctaagctaaaatcactcttcctttatatctgcagatagtttgaaatttatacatyaaaaaaagtaactttaaaaatatataactggtctcattacactctggagcaacaattccaaatgatggtaggaaaaccc

SEQ ID NO: 817443 - DNA, 651 bp, Homo sapiens
ctgcctttggcaatagtcattctaacagttgtgagatggtatctcactgtggttttaattttcatttctctgattagctatgtcgagcatttttttcatatgcctgttggccatttgtatgtcaacttttgagaaatgtcttttcaaatcctttgctcattttaaaatcaggctgttttcttgctattgagttgtttggattcctataccccttatcaagcatatggtttgcaaatgttttgtcccattccatatgttgtctcttcactctattgattgtttctttggctgtaagaaaaacaaggtttttagtttgatataatcccatttgtctatttttgcttttgttgcctgtacttttgggattatatcaaaaaattattgcccaaactaatgtcatggagcttttcttctatgttttcttctagtagttttacagtttcaggtcttatgtgtaagcctttattctgagttgatttttgcatatggtgtgagatgacagtctagtttcattcttctacatgtggatattcagttgtcccaataccatttattgaagmgactatgctttacccattgttggttcttggcacctttgttgaaaatcaattgaccatgaatgtgtggatttgtttctgggctattttgtca

SEQ ID NO: 817444 - DNA, 627 bp, Homo sapiens
ttaatcctacactttcattttaccaaaacagtatcacagagctggcgttcaccttgttatcaggaggacttatctttaagatttgacaagttatttgacattttgatccattaattcatatcctctctattttactttcaggggaagaaatggatttcttctttaattctcaaagcaggctgggcacagtggctgacgcctgtaatcccagagctttgggaggctgaggcgggtggatcacctgaggtcaggagtttgagaccagcctggtcaacatggtgaaaccctgtctctactaaaaataccaaaacaaaaaaaaaaaaaaaaaaaaaaagccctgtgtggtggcatgtgcctgtagtcccaactactttggaggctgaggcagggaatcacttgaacccaggaggcggaggttgcagtgagccgagatcctgccactgccctccagcaaggcaacagagcaagactcagtctcaaaataaataaataaataaataaataaataaataaataaatctcaaagctatggcctttgctaccatccattcatttcygttaatttgtgatagaaaagtgatgggaatctccccacacactcattttgttctttccgtacgtgttata

SEQ ID NO: 817445 - DNA, 485 bp, Homo sapiens
aacttgattggattgaaggatgcaaagcattgttcctgggtgtgtctgtgagggtgttgccaaaggagattaacatttgagtcagtgaactgggtgatgcagacccaccctcagtctgggtaggcaccatctaatcagctgccagtgaagccaggataaaagcaggcagaggagcatggaaagactagactgactgagtcttctggcctccatctttctcccatgctggatgcttcctgcccttgaaagcttttggactcctggacctataccagtggtttgccaggagctctagggccctttggccacagactgaaagctgaactgttggcttccctactttgggggttttggtactcggactggcttccttgctcctcagcttgcagacrgcctattgtgggacttcaccttgtgatggtgtgagtcaatactctctttcctatgcatctatcctattagtctcctgtcactctagagaaccc

SEQ ID NO: 817446 - DNA, 485 bp, Homo sapiens
aacttgattggattgaaggatgcaaagcattgttcctgggtgtgtctgtgagggtgttgccaaaggagattaacatttgagtcagtgaactgggtgatgcagacccaccctcagtctgggtaggcaccatctaatcagctgccagtgaagccaggataaaagcaggcagaggagcatggaaagactagactgactgagtcttctggcctccatctttctcccatgctggatgcttcctgcccttgaaagcttttggactcctggacctataccagtggtttgccaggagctctagggccctttggccacagactgaaagctgaactgttggcttccctactttgggggttttggtactcggactggcttccttgctcctcagcttgcagacggcctattgtgggacttcaccttgtgatggtgtgagtcaatactctctttcmtatgcatctatcctattagtctcctgtcactctagagaaccc

SEQ ID NO: 817447 - DNA, 508 bp, Homo sapiens
tgatacatctagaaaatgctttgttcatagcaaycctggaaggggtagttatcaatatgtctgtactaagatcactgaggagctgtctcattggtctatcacaatagtggaactctagaatagaaaagagaacatgatataatgtgagagtataaaaacccatccctcgtgggttctgagattgtcggatgagcaaccctttcagaaaagagccccattttcccctttatgtgtttttatctagagattgtgttgtgtgcaagaaactatagaagtctaatgttgagggatggtggcagggagatttgttttccacttgcgtttaggatcttgagaggaagacgccttgccagttgccccacacccacttggggcacagccacagaaaagcagagaaacatggtcaggcaaggggaaccctaatatttagcttctccaaactgtatttggttctcatatgggattgtgactgagatgagaccttgacctgcggcccatcctcaaggct

SEQ ID NO: 817448 - DNA, 304 bp, Homo sapiens
aagcattgactgcatcagaaagcgctgttgcctgtcaatattcattttcactttcttcattagtagtgatatcccagtttttattcctgtacattgctacctgtaacagagaagagaatttccagtccaccttgctgccacatgtggccttgtgaaaaaaaaaaattctggccaatgaggtggctgcagtgttgtcacttccagaaagttgtcttaraaaaacagggcatatttttccacttttaacttccttctctatgaaatgtacacatggcagacagcgcagtctctagcagttatcaag

SEQ ID NO: 817449 - DNA, 613 bp, Homo sapiens
ttagaactaggcctttgttggtgctttgtcttttatcatatttaacagagttattccctactttcccacttcttcccagatgttttaaaggctgtaaacctttcaccatgaaaaagtctgtcttaatttatactctatgtataatgagaaacgcctagtttcaggcttatgtatccaatttacttgaaccatttaatatttagcttacaagaaaagttccagcttgtgaagaacaaatgaaatgggctgcaatttgtgctaaactattttaaccctgagtatgtttgcaattggaaaaagtgtgttatgagaatgaacaatagttctttcctaatgagagaaggaaacaagctgggttgacttggctacctttcactttaaccagcctaagggagtaactcctaggttctctctttctgttagtttagaagaaaaaattactcaacatatttagtacatttaagataatgaatcatttaggcctatcactacctcagccaacaggtagtgataggaaggacagcatagtaactgcaagaaaacaaaatgtgtaatctctstatctttcctacagatttagaacaaagccaaatgactatggcaacatttagaa

SEQ ID NO: 817450 - DNA, 671 bp, Homo sapiens
gctaaaaacatgatttcattcttttttatggctgagtagtattccatggtgtgtgtatatcatatrtatttatgtcacatgtatatatcactatatttcatatatatacatatacatatacacaccacattttctttatccagtcctctgttgatagctacttaagttgattccttatctttgctactgtaaatagtgctgtgataaacaaggtgcaggtatcttttttatataatgatttatttctctttgggtatatacccagaggttaaattgccggatcaaatggtagttatattttctgttatttgaaaaatctccattctgttttccataaatgtttcactaatttgcattcccaccagtagtgtataagtgttcccttttctccacatcgttgccaacatcttttgtttttagactttttaatgatagcaattctgactagtataagatggtatctcattgtggtctctgatgattagtgatgctaaggatttgtcaatatgttttttggcagcttatatgtcttcttttgaaaaaatgttcacatcttttgcttactttttaatagagttttttgtttatctcttgttgatttgtttgagatcctcgtaaattctagatattagccctttgtcagatgcatagtttggaagtttcttcccatt

SEQ ID NO: 817451 - DNA, 617 bp, Homo sapiens
  misc_feature 1, 2, 3, 4, 5, 6, 7, 8, 9, 10, 11, 12, 13, 14, 15, 16, 17,18, 19, 20, 21, 22, 23, 24, 25, 26, 27, 28, 29, 30, 31,32, 33, 34, 35, 36, 37, 38, 39, 40, 41, 42, 43, 44, 45: n = A,T,C or G
nnnnnnnnnnnnnnnnnnnnnnnnnnnnnnnnnnnnnnnnnnnnncatgtgattcaacattgtcttgaggcatggagtgcttgggggaaacccagactccttaagactgataatggaccagcttatacgtctcaaaaattccagcagttctgccgtcagatggacgtgacccacctgactggacttccatacaaccctcaaggacagggtattgttgagcgtgcgcatcgcaccctcaaagcctatcttataaaacagaagaggggaattgaagagattttaccccgagcaccaagagtgtcggtgtctttggcactctttacactcaattttttaaatattgatgctcatggccatactgcggctgaacgtcattgttcagagccagataggcccaatgagatggttaaatggaaaaatgtccttgataataaatggtatggcccggatcctattttgataagatccaggggagctatctgtgttttcccacagaatgaagacaacccattttggrtaccagaaagactcacccgaaaaatccagactgaccaagggaatactgatgtccatcgtcttggtgatgtccagggcgtcaataataaagagagagcagc

SEQ ID NO: 817452 - DNA, 617 bp, Homo sapiens
  misc_feature 1, 2, 3, 4, 5, 6, 7, 8, 9, 10, 11, 12, 13, 14, 15, 16, 17,18, 19, 20, 21, 22, 23, 24, 25, 26, 27, 28, 29, 30, 31,32, 33, 34, 35, 36, 37, 38, 39, 40, 41, 42, 43, 44, 45: n = A,T,C or G
nnnnnnnnnnnnnnnnnnnnnnnnnnnnnnnnnnnnnnnnnnnnncatgtgattcaacattgtcttgaggcatggagtgcttgggggaaacccagactccttaagactgataatggaccagcttatacgtctcaaaaattccagcagttctgccgtcagatggacgtgacccacctgactggacttccatacaaccctcaaggacagggtattgttgagcgtgcgcatcgcaccctcaaagcctatcttataaaacagaagaggggaattgaagagattttaccccgagcaccaagagtgtcggtgtctttggcactctttacactcaattttttaaatattgatgctcatggccatactgcggctgaacgtcattgttcagagccagataggcccaatgagatggttaaatggaaaaatgtccttgataataaatggtatggcccggatcctattttgataagatccaggggagctatctgtgttttcccacagaatgaagacaacccattttggataccagaaagactcacccgaaaaatccagactgaccaagggaatactratgtccatcgtcttggtgatgtccagggcgtcaataataaagagagagcagc

SEQ ID NO: 817453 - DNA, 617 bp, Homo sapiens
  misc_feature 1, 2, 3, 4, 5, 6, 7, 8, 9, 10, 11, 12, 13, 14, 15, 16, 17,18, 19, 20, 21, 22, 23, 24, 25, 26, 27, 28, 29, 30, 31,32, 33, 34, 35, 36, 37, 38, 39, 40, 41, 42, 43, 44, 45: n = A,T,C or G
nnnnnnnnnnnnnnnnnnnnnnnnnnnnnnnnnnnnnnnnnnnnncatgtgattcaacattgtcttgaggcatggagtgcttgggggaaacccagactccttaagactgataatggaccagcttatacgtctcaaaaattccagcagttctgccgtcagatggacgtgacccacctgactggacttccatacaaccctcaaggacagggtattgttgagcgtgcgcatcgcaccctcaaagcctatcttataaaacagaagaggggaattgaagagattttaccccgagcaccaagagtgtcggtgtctttggcactctttacactcaattttttaaatattgatgctcatggccatactgcggctgaacgtcattgttcagagccagataggcccaatgagatggttaaatggaaaaatgtccttgataataaatggtatggcccggatcctattttgataagatccaggggagctatctgtgttttcccacagaatgaagacaacccattttggataccagaaagactcacccgaaaaatccagactgaccaagggaatactgatgtccmtcgtcttggtgatgtccagggcgtcaataataaagagagagcagc

SEQ ID NO: 817454 - DNA, 387 bp, Homo sapiens
ttaacttctcatttcattataattgtggcattttaacatttaagggtagtcaaatatgttattattgttctttaraatttttctaagtctttgaggtttaaacatgtattgcccttcaatatttctgtaaagtagcaaaaatatataacatgagagctaccctcttaaatattcttatggacagttcagtgttgttaactataaacacaatgttgcacagcaaatcattaggatttttttatcttgcatgatgtaaactttatatctattggacaatacccgtttccctttctgctagcacgtggtaactaccattttctgttttgatgattttgattattttagataagtcatatatgtggaatcatgcagtgtttgtcctactgt

SEQ ID NO: 817455 - DNA, 604 bp, Homo sapiens
tccgatcgccctggccaaactctgcgctgttcctccagccatggccagtgtactcctatggcagtgcgttcctcatamgtccagtcgcacgtgtgttcctccgctgatgtgctcctctccacatccgggcacctgtgtgcttgcctgttacggtcttgggggtttgtataggcagaggatgggggcatggcaggccagggtggtcttgggaaatgcaacatttgtgcaggaaatgcctgacctcacctaggtccctggggctggagacctagccagggaccaggccctcctctacccagcacttcccttccccgcttccgatcatttaaagggaccacacccttccctttccagcaattcccttccatatcatatatatgatatataacacacataatataatatgtaaatgattttatacacataaatgtacgtataaaatcaactcctatgaaccaaagggaaacattacatattatgtcaaaattgttaatttgctgaactctatctgctttatttcaacacttaaaagttgctttatctttgtgtgggttataacagttttatgtttacagtatagcagatattttagattaaaaaaggt

SEQ ID NO: 817456 - DNA, 448 bp, Homo sapiens
tgccaactttatattttgttgtttggtttccctgacttgaaggtaaccttcatgagggcaatgtttttttaaattttttttattttgttttgtttgattcactgccatttccctaccactcggtacagtgctggacatatactagttgctgaataagtaattgctgaattaatgacttttctttcagaagtgctctctgaacctctaaggcaaactggcattccctctcttggtgtctataaaaattattacatatataaaatgtatttgttttcatatctggctgcatgacgggactcaaagtttaacgacagggacagggccagctacttacaaagctacttacatgggcctcttctaaacgcaggttgcatgcccmtaaagtcagccctgtatatcttttcatcttcatatcccaataattagcagtgtcactggtgaatgtatt

SEQ ID NO: 817457 - DNA, 631 bp, Homo sapiens
aaaaggtgacgcgattctgaggatggggacgagaagacaaccttgggtttgaaacatgccaggcaggaagatctgaaaaattaactgaaagccagggaagtccttggyatcaaggcatttaggaataactgcacatcccagctttgcttccaagcccagcgacatctgctcagtgtggaaacaaaactgctggtggtcaaataagcaaggagcacaagttcactaattcgaggagcggaagatcatttttaaagggcatttagagctggaagtgcctcacaacatgtcaggcctgcaggcatttttagcctgagaatgcaaaggggagcctactccctggtctctggggcccaaacgaaggtgacttgaagctcttgtgttatcgagtagagttcgaagaacatgaaacagccatcctacagaaaaggttcctcgaggactgtggggtcgagaagagatcagaggaccagatccccattaggggatcaaagggtaaaaaggaaggatccaggaggaagggtaataactttagacttccacgagaaagactagaatattaaggtgctaatggcatacagccggcaaacaagactgcaaataactgaatggagagagaatcatcagggtgata

SEQ ID NO: 817458 - DNA, 586 bp, Homo sapiens
gagatcgtgatgaagatatctcagaggaatagatgccagtgaaaagtttcacatcaaaagaaattgtagaactttgacagtttctcaaagaactaaaaatagaattrtcatttgtcccagtaatcccattattgggtatatacccaaagaaaaataaatcattctaccaaaaaaatacatccactcatatgtttatcattgcactatttacaattgcaaagacatggaatcactctaggtgtccattaacagtggattgaataaagaaaatatgatacatatacaccatagagtactacgcagccataaaaaatgacgaaatcatgtcctgtgcagcaacatggatgcagctggaggccatcatcctaagcaaattaacacagatagggaaaaccaaataccatgttctcacttacaaatgagagctaaatattgggtacacatggacataaagatgggaacgatagacactgaggactaccagagaggggagggaggaagagaggaaactgtttttaaaaactacctatcaggtactatgttcactatttgggtgatgagatcaatagaagctcaagcctcagca

SEQ ID NO: 817459 - DNA, 618 bp, Homo sapiens
gcaaactatcataaggacagaaaaccaaacaccgcatgttctcactcataggtgggaattgaacaaagagaacacctggatacagggtggggaacatcacacaccggggcctkttgggggtggggagcggggagggatagcattaggagaaatccctaatgtaaatgacgaattaatgggtgcagcacaccaacatggcacatgtatacatatgtaacaaacctgcatgtagtgcacatgtgccctagaacttaaagtataataataaagaagtaattaagttaaatggggtcattggagtcagccctaatccaatgatgggtgtccttgtaagaagagattaggacacagagacacacagactaaggggtgaccatgtgaagacacagtgagaaagcagccatctcaacccaaggagagaggtctcagaaaaaaaccaaacctattgacacattaaccttggacttccagcctctagaactatgagaagattaatttctgttcttgaggccatccagtctgtgacattttgtgatggcagccctagcaggaaaatacaggtgggatctgagaatctgcatttctcacattttcagtttgatgttgatggtctagagc

SEQ ID NO: 817460 - DNA, 617 bp, Homo sapiens
tattagaaatttagcagtttggccaggtgcggtggctcaggcctataataccagtattttgggaggccgaagtgggyggatcacttgaggctaggagttcgagatcagcctggcaaacatggtgaaccccgtctctactaaaaatacaaaaattagccaggcatggtggtgggcacctgtaatctcagttacccaggaggctgaggcaggataatcacttgaacccgggaaggggaagttgcagtgaggtgagatcatgccactacactccagcctgggtgacagagtgagactccaactcaaaaaaaagaaagaaagaaagaaaaagaaatttagcaacttatataatggtcttatttatttgtgagttgcacaagtaaaaatatatgcttacatttgtatagtattaaatggatgggattaaaaatataccttatataccatcattttgtttccacttgctcaattatctagatctgtcttttcatgttattgatattgccattttaatgatattgattctgcctatccatgagcatggagaagctggacttataaaacttgtttgaagaatagaactaaaccagcatacaaatttagctagctgacttcatttc

SEQ ID NO: 817461 - DNA, 411 bp, Homo sapiens
ctttgagacgtgcagattatggggattatggggattacaaatcaagataagatttggtcggggacacaaagtctaaccatatcaacctactagtataatttcytattatggaatcaagtgttgagacacgtcggtttccttgaacacttatttatttaatatttatataaatctttgtgccaggtgttgctacagctggaagatataaattgcattaatttagattggatcaacggttcacgggaatacatccatgctgtaaacaatctccgtgttgttggtgctgaggtggcttattttattgatgttctcatggtaagaagagttgatttttttttaattatattgaattggttttggatattaacactcagaagttgggacaatttaatgtctttttttattagctta

SEQ ID NO: 817462 - DNA, 520 bp, Homo sapiens
agaactcttctcaggtgaggaaatggtgctgaggcaaactgtcaaaggcctctgcaccatggatggccacaattattaagaagtgaaaaggatttctgtgaaaagcataagaattttcacaactcagatctgtcaaacgtaggtcaacaaaatggtttcatcacattctctactaaaactaacaagccacctagattgattccaaaaatgctctaactgcctacctctctctgtatccatgtcttttgcaatatggctttttagctaccttcatcaataagtagaatttatccttgaatttgaatttgccaggtgacctccttctccagtagaatgtcgtgaaaatgacactttgcttctgagcctgggcctcaagaggtcattcttacttatattcattttcttggacccctgggagtccargttcaaaagcacaggctagcatgctgaagcatgagagatcatgtggaggaaagctgatgcacacaaggctgccctaaaccattcaggcctctgccaa

SEQ ID NO: 817463 - DNA, 574 bp, Homo sapiens
aaatatataatccttttttaggagtaaatgctatttgataaaactataagctaccaggatataagttcttgattaaaattcatttagtgtgttatctgactgaatgtacttagaagaaatctttgacacgttgatcagattaaattgatttaatctcagctgaaacttaagttcggcattagtcatggataattactgtcagaaagggtatgttctagctattcatttacataatatgagctttctttggattgcatatgaattaattaaatttcgtttaattgtagcagctacatgcaacacacagcttctagctagtgtaaaatagttcattaacttctacaaaatggaaaatatcctaatataaatctctgaactagtgtagaggctttaagagaaaggatttaagagaaaatatgggaaatattgtgaccaacctatatatactagatatracatgttataggagagcattcccctaaaaattggaaaatttcactgattcataaagctacctcaatttgtgactaaaatgtaaaatgatcagactcttaaaacattagctcattcttca

SEQ ID NO: 817464 - DNA, 624 bp, Homo sapiens
ttagaaacctaatgagacatagggaggaagacctttgttatccttttaatacttgcagtattctgttgtcatagatatattaattccttayatttgtatagtgcaggatatgaaattaataagcagtagtgtagtgagcactcctgagacttttaatttaaatgggaaacaccagtttgaaaaatgctgaggcaggcagatcacgaggtcaggagtttgagaccagtctggccaatatctctactaaaaatacaaaaaattagccaggtgtggtggtacatccctatagtcccagctactcaggaggctgaggcaggagaatcacttgaacccaggaggctgaggttgcagtgagctgagatcgtgccactgactgcagcctgggcaacacagcaagactccgtctcaaaaaaaattaaattaaaagaacaactaaaaagatttaaaaatcataaattcaaaagaatgtataaaattctgaccgctaagcataacttcacagaaaaaaaactgaatacattctcaaatatgtaaaattttcttttaaaagcattaaacaaatctcacagaaaatattcaaagagttgaggaaatgactttttgtaaagaacatagaataatgta

SEQ ID NO: 817465 - DNA, 624 bp, Homo sapiens
ttagaaacctaatgagacatagggaggaagacctttgttatccttttaatacttgcagtattctgttgtcatagatatattaattccttatatttgtatagtgcaggatatgaaattrataagcagtagtgtagtgagcactcctgagacttttaatttaaatgggaaacaccagtttgaaaaatgctgaggcaggcagatcacgaggtcaggagtttgagaccagtctggccaatatctctactaaaaatacaaaaaattagccaggtgtggtggtacatccctatagtcccagctactcaggaggctgaggcaggagaatcacttgaacccaggaggctgaggttgcagtgagctgagatcgtgccactgactgcagcctgggcaacacagcaagactccgtctcaaaaaaaattaaattaaaagaacaactaaaaagatttaaaaatcataaattcaaaagaatgtataaaattctgaccgctaagcataacttcacagaaaaaaaactgaatacattctcaaatatgtaaaattttcttttaaaagcattaaacaaatctcacagaaaatattcaaagagttgaggaaatgactttttgtaaagaacatagaataatgta

SEQ ID NO: 817466 - DNA, 646 bp, Homo sapiens
aaaaaatttctaaggtttagaaagaatgactttcatttgtggttgtatgctgtggttgttgagaaacaattgtccaaattaaaacctaatgccacctaaaacccaaaccacttttgtagatcaaacagattgyacaaaaaaagcatcaaccaaaaacaaagtaatagtgagaattcaaaattgtgaaaaaaatctctgatgcccccagtattggccaaagcctggtgacattgagccaatcaagttaggggaaaaggtcatgtaaaaaggaaagccacataaaatcaagagtcataccattaagaattggtcaaaacatccaggaaagcaaagaaagaatgaatgaagcaacagaggaacgaaagcagggatttattgaaaacgaaaagtacactccacagtgtgcgagcggacccgaccagtggctcaagggcccggatacagaatctccttgggttcaaatactccctagaggtttcccattggccacttcacgttcatctcatgaaactgaagtggtagtctgccatcagtctgattggttgcagaaagcagccaaccggaagatgaagagaagttacaaaggtcacactcctgtgcaagcatctgattggttgcaaaaagcaaccaaccagaggctagggtg

SEQ ID NO: 817467 - DNA, 598 bp, Homo sapiens
atgctaatgtattaacactggcacagtgcctgggatattcatggtttgttattaggccaaggtttctcaacattgacacaactgatatttcagccagagaattctttgttctggagggctytcctatgcactgtagaatgtgtatccgacagtgacctctacctattagatgccagtaacactcacaattgtgacaatcaggaaggtcttcagacatagctgaattttctctagagggcaaaactcacctttgctttaaaaccgctgaaattagcataatctctacctagagctggggaaggtggaatgggtgtgggagtcagccataatgtcagctacagtggtattattctcattttgctgctaaaggatctgatatagattaagaaccttatttgtgatcgcacaactagtaatctggatctgcctgaatgtgaagccgatattctaacaactttaatatactttctctccttaatagttattatcacccactgagtatcttatgtttaaaagaatttgcatacatcactacattttttctcatagatgttccctgagatatgcattatttatttctttatttatttatttttga

SEQ ID NO: 817468 - DNA, 484 bp, Homo sapiens
cctttttaatttctaaaattgtattttcatctgatgtcttttagtctgggccgaaaattttttatgtgttattcacatttaatttctcagaaagagttcctcaagcttttacccctttgtaaagtggaaccaagtaaggcgaatgataccaattttaggttgtactagcaaatttataagtcacaaaataagttttaaagaagtctctatatgattatgtataaatgttacatcgtgtggtagggaataccagatgactacttcaacagccacatgaatttttatacacgaagatataaaactatgaaaattaaattttaaacattaacatcagtgacatatttaaaattgtttttcacccaatgaagaaataaatatgtaattaactacatagtacttcataaaattacacattctataaaacccaaatatkaaacatttcaaataagtacccatcttcacctgcacattaactaatatgtgc

SEQ ID NO: 817469 - DNA, 646 bp, Homo sapiens
agaaaatatattactaaggattatgctaaattattcgctgaatatactgtatctaccttttagtaatgtgtaaactataaaatgactcctggccaggaaaytattttttaatagtactgattgtataactactgacttaacttatgtgggtagctgaataaagggtcacttaaattaggatgaaataggtaataaatagatctatctttggcaaactcaaattaccaggattatgacatttttaaagtgagaagaaaattaaggctgtctgtatttgcagagtgaagattctagacaaatattttgctatacatagaataatatataattgaaatggctattttcatttttaggatacaaatattttcttaattaaatattgtctctctctctctccaagtggatatatctcatcaatgaaaagaggcaacacactattttccagatatttgaaaatacatatcagctgaaattatcatttatcacataatattgtaaacaatatgctgtttataccattctatttatagtatccagtgtttataataccataatatgtgtgatcatttaataaattctatacagtaatacatttgaatttaaatttaaaaaatatatttaagagcttagaaatgatacggacttg

SEQ ID NO: 817470 - DNA, 502 bp, Homo sapiens
gattagaaacatctagaactgaaagtatataattccaatcctatgaaaaatgttatggcctgtcagattattttcattacagttttatagtatccaaagggaaattctggaagacataagaagctacagtgtaaatatctttcctgctcgagaagtagagataaataaccactggggcaaaagaatacaacaaaaagccatcactcttctaccactacatgacccatttgaacatggttcccagtagagtttagtttctgggggagtggggcatcatatccagggccatacctccattttcacatcatggtcctttgaatagtgttcatctgcattttcccctactggtgaccgcggccgagttgaggcagtgactgacaaatctcctcgagatatgagggtacacatgtatgcgtcatgggagaagacatcatggcggatgaactcgcagaagagcagcwccaggttcacaaattccaccttttcacattcactgtttggg

SEQ ID NO: 817471 - DNA, 508 bp, Homo sapiens
cagggtttagcagagcctgcccaacaaaagtagcttcagaattggctttattctcaggaaggctcttcctggacagtggcaaacatagccatagcaaatactggctcactttctatcagccagcaaccctggtggaaagagggcctcttactcagttgtaccagcaagctgtctccaggagccggggctggagagacacccagtgctgctctaggccagtgtggctgagggtctgtctagtctgtccttgtactcacggcttccttttctcttgcagacgcccactattgcttggttctacttcctttatcccgattggccgtcggacttatgccagtgcggcggagccggtgagtggaagcccagctacccgggagccagttggatggtcagaaccctttcttytgggcccctaggccctgagctaccctcagagtggggccttagtgtttccaggacactgggagccactttctcacttaaccctcccccaaagcccctcatcagt

SEQ ID NO: 817472 - DNA, 590 bp, Homo sapiens
ctcttctacaaagcctatcctgaacccttattagaactctgatgacatttatttgtccctcttttagaagacttacaggacttctaatgattcatttagcttacatacatgcttcatttccctccatraacccccaaaatctcaggtgcctcatttccctccatgaacccccaaaatctcagacaggtctctcagttaattcagaaagtttattttgcgaaggttgaggatgtgcacctgtaacactgcctcaagcggtcctgacgacatatgcccaaggtggtcagagcacagcttggttttatacattttagagagacatgagaagcaatcaacatatgtaaaatgaacattggtttggcccagaaaggtaggacaactggaggcaaaagcaggacagggagggggcttccaggtcacgggtagatgagagacaaacaattgcactcttttgagtttctgattagcctttccaaaggaggcaattagatatgcatttttctcagtgagcagagggatgactttgaacagaacgggaggcaggttggccctaagcagttcccagcttgactcttcccttagcttagtga

SEQ ID NO: 817473 - DNA, 687 bp, Homo sapiens
aggttgaccttagggctctttttcctyaatgtaaatttgcacaaagactgtattacttccattttactctggcaaatagaggtgccataaaaccaataaggtgctctaaagggggtcattctccttgttttctcctcattctcagattgtttcctgcttctttttttttttcttaaaaggaagaattgagctgtggcctagggtttttgtgcatggatcgatgtgagctgcttgtgggcaggactccacagtgtgtcatcactgagttgtttccagcctcttatgcatctcagcttctctctccagaggtctatgacctctgagagggctcaaaatgccaggtgatcagcccttatatgcatttcctggatgacccatttttaaaattaaatttttctggggatttccctgcagggccactgcatgttgcagggggtcaactccccagacgctcccacgaggcccctggtcacccagggacgcctttcgctggaaagagcaaatgtcctttctctttggagctcagaaaactcagtttctcatttgcctatgaaaacaacagttcagttcctcagacaaatgcacacagacaaacacaattgagattaattatgggagaaaaagcaatagataagaccctttagaatgcatctccgaactagaattaggatccttaaacaacaattt

SEQ ID NO: 817474 - DNA, 563 bp, Homo sapiens
cttctttttttttttcttaaaaggaagaattgagctgtggcctagggtttttgtgcatggatcgatgtgagctgcttgtgggcaggactccacagtgtgtcatcactgagttgtttccagcctcttatgcatctcagcttctctctccagaggtctatgacctctgagagggctcaaaatgccaggtgatcagcccttatatgcatttcctggatgacccatttttaaaattaaatttttctggggatttccctgcagggccactgcatgttgcagggggtcaactccccagacgctcccacgaggcccctggtcacccagggacgcctttcgctggaaagagcaaatgtcctttctctttggagctcagaaaactcagtttctcatttgcctatgaaaacaacagttcagttcctcagacaaatgcacacagacaaacacaattgagattaattatgggagaaaaagcaatagataagaccctttagaatgcatctcygaactagaattaggatccttaaacaacaatttcctaggagagaagagaaaagaaaagaaaccag

SEQ ID NO: 817475 - DNA, 596 bp, Homo sapiens
cattccaagctgctgacactcattctgtaagttctgatgtccaccaaaaaaggagctgaatagccaaagcaatcctgagcaaaaagtacaaagctgaaggcaccataacattacccaacttcaaagtatactacaaagctacagtaaccaaaacagcatggtactggaacaaaaatagacatatagaccaatggaacataatagagaacccagaaataaagcctcacacctacaaccctctgatctgcaacaaagtcaacaaagacaagcaatggggaaaggactccctattcaataaatggtgctaggataactggctaaccatatgcagaagactgaaactggatgccttccttacaccatatacaaatatcaactcaagatggattaaagtcttcatataaaacctaaaactataaaaaagcttgaaaaaaatctaggaaatgccattctaaatgtagaccctgtcaaaatttcatgatgaagatggcaaaagcaattgtaacaagaagaaaaactgacaaatgggacttaattcaacaaaggagcgtctgcacagcaaaagaaayaatcaacaaagtaaacagacaacctat

SEQ ID NO: 817476 - DNA, 615 bp, Homo sapiens
ccaaacatctagtagttcggtgtagtcactgaaagtgtgacacgttcatgatggattctgaacagaaggtaacagactacacaactctccaagtggttggcatttagatcagtacttctcattctatttgtgatgaagagctatcctttatgtttgttttaatttccaatccattgcacactttgtggaatgcaataaaaataaagcattacaaaaaggaagtgaaaaagtaaagcaaaatataaagaaaatgaactcaattatttataactagatttgacaaacaatcacactgatcacatgctcagatatagcggcaatgtcaaagtgctgtaaaagtttctaaatgctcacacgtgacttctgttcttatcgtggactcatgacaagccattctcagaccagttgaggtcagaaggcttcactgtgatggtcatatccagagaacttgatggaggccatatcacttgttactttcctttcyagaagcacactcaggcagtacaaaaatgtcagagcttctcaagttctgggtcattatgcttggaaacttctgaaatctcagcaatttgcacaaatgctgctgattaaaagtaaactgaagcattcagaact

SEQ ID NO: 817477 - DNA, 618 bp, Homo sapiens
tcctccctgtttttaacatctcaaacaaaagcagtttcataaataagaaatattgcaagtgatgagtatttaatttttaaaggaacaattgtttgtcatttctaataaagccagggaaatatgtctaaaatcaaatgttaaattgcatttttaaaaataacaaaaccaattaccatatgtgcattatgtaagaatcattttttcagacacataaaattacacagtatcttttcttttctaaggaatagtttctacccaaaaagaaggcccaaatttatatagtcaggtttaaaaaaaaatctcattcactctaaaaggtatcttcttgatgttcatgagaacttcaaataataattaaaatacatataaaaataaaaagaaaactaagtttagtgattggctacttcactgaagaaataatcaaacctccacataaattataaatgagcttaaatgcactgataaacttacaaaaacatgaactataatccaccaaaaagtttatgtgaagaaacaaaccaagacaagtkgctgagtactttatttgacttttgtttgtggtcatttgatgaaccaggtgaacttactttgatttttaagagatattgaggacaatat

SEQ ID NO: 817478 - DNA, 623 bp, Homo sapiens
tacttgcatgatttattggtgatgaatatcactaataatttatatattaatgttctttaaatagatgcttacaattcctacatatgaatactgtatctaatttaaattttaggaagcaaaaatgtcagattatrgagcagtttcaaaattcaaaattattccattgtattgataaatttggtatggtttttgttccttaagatgcatttttttaaaaagccgtaagtatctttttgtttttaaaagctctctccagaggaactgccacccattaacccatatttagtagtatttgatatccttatcattacttatttacaataatagaatttacttcttataattagcataacctatggccaagcaatttcatgcccaaggatttatttcaggccaataatttgagatgtatgcaaagctgtataagcaaagacattcaccacaaagttattttttattggaaataaaggtacaacaatagaagactgtttaaacaaattatccatgtgatataaacataaacaatcatgttatggaaaaaatatctaactcattggagaaagttcatagtaaactacaagtgaaaaagaagatgacaaagcaatatgcatcaaatgtacgtt

SEQ ID NO: 817479 - DNA, 609 bp, Homo sapiens
tatcctactcatttttactttgcatatatttctaacaagcttccatattagtttccccsccttgagaatgaaatcaacacattagacataacacaatgttagaagcaaattcactgacaacagcaaaaaggaagaactcatagtctttagatcaaagaaagaattgaaaaagaactataagagcagaaatattttctcaaaaaatctgagaccatttaatgtaggaacacacagttcaatatttcaataatacctgacaatatgaatgaatttcagcatcattctggaattgacaatccatgatagtggccctgaatcatcaagaaaagatagaactaatttaaggtagcaaagtaagtatactgtattttagaattattctacccagaattattacaataatttttaaaatttaaaggcaagaatcttagtaatctggaaaatgtttatattaaagattatgttccttgaaaatgccagaaaaacgaggcatctctgtgactgtcagatttggaatattttagagagcagctgggtaatttcctctgagctataatctctactgctttcaaattttctgctgggaggaaagaggaaagcaccacagat

SEQ ID NO: 817480 - DNA, 641 bp, Homo sapiens
ctactacaccatcttcagcatgtctgttcctttcttggccaaaatgcccctctctctctacttgcccccaccaccaattcaaatgtgggtatattcttatggtcttttatttttacacaagctccgcctcccaggttcacaccattctcctgcctcagcctcccgagtagctgggactacaggcacccaccaccacacccaactcattttttttttcttttttgtatttttagtagagacggggtttcaccgtgttagccaggatggtctccatctcctgaccttgtgatccacccgcctcagcctcccaaagtgctgggattacaggcgtgagatactgcgcccggcaaaagtagatattttcaattacatcaaatctatagctatttctgtatctacaactatatgcatgtatgatgtggcagtgactcaatttcagtttctatattatttttttattttcactaggaaatcccgatgttgtttgccttctcatttagatactcacatctttaccccaacttaccatcttttccatgggggaaagagaaccctaaaacactgctttcmtgcttcaattcagtcttttgtgtacggaacctttggactaagtttttttgttagtttttgtttgttagttt

SEQ ID NO: 817481 - DNA, 620 bp, Homo sapiens
ggaggacaatgaaggagaggaagaaattacctaacacctctatacaaagcctatttcatcatggtagtagagtctctccccagtttgtcatgtaagtttctawtctgtctttgctatgaccaataaaatcagtccataagattccagtccatctgcccctcctctaaaattagagaagaaaagataaacctgatatcaaagcattccatatggattggtattttctgtcttcagcaggaaatgtgctcaatataaaaatgaaataatgacatggttatcttttttttttaagttgcaatactaaatcactcctctgcactctgagaagactgcattgtgtgcttttatttttcccctcaccccatgtatcatcaacactatatcctatagccataacccaagtgacaaggttttgatgattcacaagttgagagtgcatttagcttagttctctccacgtggctaggcatagctatgcttttagaaactatgagtagtagacatgcatttgtgtcatgtcacctgtgatagtctaagcctagaataaagagaatctgttccagggtttcttctgtgaggttgctgacctcaccacagggctatgaaatgtatagagtctc

SEQ ID NO: 817482 - DNA, 619 bp, Homo sapiens
gcaatgaaagctactacctagtgtgatagctataacccagaatacatatgttaggaaaaaaagaagctagaattcaatcatctcaaaaatttagggaaaataaacctggcaaattaagcccaaagaaagaaaaaggatgagaataatgtacaaaaattatcaggttaggtaaaactaatgtaaaatggagaagaccaacaaagccaaagtatgttatctggacacactaaaaaaaaaaaattgaaagacttagagtaagactaatgaaaatgaaagagagaagtgagagtgtgtaaaaatgatcagtgtcagaaaggaaaagagagacattactacagatgttttacacttttaaaagaacacaggaaatagtatgaacatttattctaataatctctaaaatttaaattacgcaaataattttttaaataactaaatggacacaagaagaagtaaaaaaacttaatccgtaaataaatcatctcacaaaaaagaaaaggaaagatgaaggaaagagaagaaggggtgggtaggagaggggagggcagaataaatgtgaagacccagatagctttackgttgattttagggaagaaattatgccagttctacttatgct

SEQ ID NO: 817483 - DNA, 638 bp, Homo sapiens
taataaacttgctttcactttgtagtgaaattagtaatttttctaattaattatttcttgcaggagattcaagaatgatctcttggggtctggattgggactcctttccggtaacaggaatacaagacaaattcttaatattcaagccttattttataactttgcataaaattatttagatttcctcatatatgctgagtggttttttaactaaatgtaaaccttggcatatttttagttttgctggtattgttaacaaaattttattcatattaacataataactggtaatattaaaaaggaaagttagaggtttaaaaaatatatatttagtatttattacattgctttactagtttcatttctagttgatgaatatttattacatatataatcaccttcaaatattaatagctgatttctctacataaacatttaatttttcattattaaattagttcacttttaaaaatttgttgactgacatagtgagagaagaattatggtcttcctcctcattttatttggaatgcatcccctatgcccctataygtgtattttgatttattaaaaaagcttaaatttttttcaattagtttttaatcacaaaaaacagcaactcttgtttttatttaaaa

SEQ ID NO: 817484 - DNA, 561 bp, Homo sapiens
ttcatgggagtaacccttttaattcctttcaagaacatttccttttcattcacaacttgaataactgtttggctcaagyggcttagctttcagtatctcttggctttcaaaatgccttcctcactcagcttaatcatttttagcttttgatagaaagtgacagatatgcaactcttcctttcacttgaatacttagaggccacggtagggttattaatagcctaatttcaatattgtgtctcagggaacagggaggcccgagaagaaggcgaaacagaggaatggctgcagcttctccatcagcagtcagcgaagaagtcagaatgcagaattgatgaggttcactctcttttatgggtgcatttgtggtattcccaaacaatgacaacagtaacatcaaagattacttatcacaaatcaccaaagcagatataataatgaaaatatttgaaatattgcaagaattaccaaaaagtgacagaaacataaagtgatcacatgcatttaaaaaaatggtgctgatagatttgctcaaaatagggttgccatagaccttcaatt

SEQ ID NO: 817485 - DNA, 623 bp, Homo sapiens
ttgtttgcagaagattttgtaaatcaggaatttwttctgtatagatgctgttacactgaagtctattttatcaacagaaataaaaatgtaaatattaggagacgagacaacattgtttttatatttctgggcaagcactttcattttcccctgaaacatacctggcatagtctttcacagctaacaaatgtcaagacattgcaaaatgtacatttataaataacatatgtaaacatagatgtgaagattataataaggacatgatctcttataccatagctacaatataaatccatgtggctttcccattattgcatatgaggggctatttttctttaatatattttttatgaaaaatctcatatgaatcaatatatacatctttctcaagaatgtatcagttctataataacatagataaaacttaatttgattattggattaagtgcaaaactagttaaaatattgtcagaaaatttgctccttaatgacttaccacaataaaatataattttaaaagtactttttatagataaaatttattcattaaggcacctagagtattgcctttagaaagtaaacagtgttgtttgatgatacttagtctattatgtaagagctac

SEQ ID NO: 817486 - DNA, 373 bp, Homo sapiens
actttgttcagatatgaagactttagctcccgatatgtgtccccaggttagttctttagccagccccgtagggtctactagcaaatgaatgcatttcaggattctgctcaggtgagaagggtgacaggagagtgagtcacactgacctcttccccttcctgttctttacttacaaaccacatgccctcggcatgaatgggccctatttcacctctttagttctttcttatataaaacactggacctgatagcggggtgcagtggctcacgcctgtaatcccaacatgttgcgaggtcaagacrggaggatcgcttgaggtcaggacttaaagaccagcctggtctccaccaaaataaaaaaacacacacacat

SEQ ID NO: 817487 - DNA, 495 bp, Homo sapiens
ggccaggccaggtcttggaggtgccccgtggggctgagattctcctgagtgaaaagaggcagttggagataacccctggatcctgggcagaggagggagcctgaagaggcctctgcttacccaccctcatcttcctgccagttttggaaggcatgagggaaaaagcatgaaatgcctatcctaggacacagtaaaaccttgtgacaacactccccacagcagtgcaaattctaatatattgtggcagtttgctcccagactcctggggtacacagcttggtgactgtgtgtacttaatctagccatttttctaatcttctgataatgtgaccttgcgtttcatactttttggattcacctatagttttttagcagggttttcactgwacacatcaagggctcctatcccaaagtcaggaaacaaaataggatgaaagcaccaaactccaaactgacctctttgtgccttgctccagggcaagagtgcaatgggca

SEQ ID NO: 817488 - DNA, 553 bp, Homo sapiens
gttctccaagaaaccttccagctgaaggataactaatccatgctgctcatgaactatgtttaagaagttttcttatatagacttctatagacttatgcaaattttcttctatacacaactagaacttgttggtttaattccattcaaaaactgaagtttcagaagaagtagatattaatgtaaagaaattccaagattcatgtcatttaccactgaactcatctctccaaggtatgcatcatcctacaatataaaagttaatgagattaactcccatgtggctggttgatgtagtgacaaacttattttctgccacaatagattctaatctctatttttagatttctgtaggtgctacagaaggtttatataatataatgttacagaaaaatgaaagttcagttaagaagttgcctcccccatgtttcttttatttattgttttgttttgagtctcttgcttgtaagcatgtgtaattggtgctgtatgaagtggtgagtttaccaatggtggaagccagatgctatawccatcaataaatggctatagcatt

SEQ ID NO: 817489 - DNA, 665 bp, Homo sapiens
ttcttgcacagtcactcccaaatctactatcatgttgtttctttgtcatttctgctattccgctgaaactgcccttgctcaagccacaaatcactggacttggccaaaacaaatgaacacgtttctctccttatctttgttgccttctctgcagcactccatattctgacactgtcctctggaagctcttatctgcgctaggctcttacttggttttcctcttttctctacagaagtttcctccttaatgccattcttcagttcttttttctcagttcatttcctaaatgttggcattttccagacctcctgttcttctcactctatacactcaacctggaggacctaattacttatatgttcataaatctgaaaattcatctccagccagagctcccttattcatctccaaaatagcaactctccatttagaagtcctattgatatcgtaaattaaatatgtccaaaactcatccgttttcacttctaagcttgttcttccttcttaattatctcagtgaatgccatcttcatcttctcatccatgccagaaacttcaaagtcattctygcctctctctcctcattgctgacatccaactaaacatccaactaaacttggtgtttatggatccttcctttgtaatatctcctatgtctacccac

SEQ ID NO: 817490 - DNA, 552 bp, Homo sapiens
catatctccttctgaaaactttccagggcataataaccagctctgcctatatttgggagaatttttytacattaggtcaaatgtcaacctgaatctgaatcctagaacccaaaatggattcaaacaaaatgaaatcagaagaaccactcttttactcaacagacatatattacgcacctgcacccaacatgtattagaaatttgagtgaccctcagccttaccctgcagaggctcccagatacataaaccactaaacacagcaatatgagaagggccatgttagagccattatcagttactttaggagcccagaagttgagcactggccctgcctataaagttcaatcatgaagataaagaatggaaataaaagaacaccgtacacactgtctgtgtgtatatttgcactcctgtatatttatagtttcttgtattataatgtcataagttatttgtcactggacacataatacccaccacataggtaaatttttactaatgtaatttttttaggtcacataattgattagatgtgatacttttaagcggac

SEQ ID NO: 817491 - DNA, 637 bp, Homo sapiens
cagtggttccatatgagtgtgaagttacatcagagaccctgagcaaaaacaaccctataagtttcccgaaaaagcatatgaaaaacattgctatttaagactttctgtgactcakgaaagctagcacttttaccctatatttgcatagttatcatttacaggtattttcctctaattaatttgggttaatttatttcagcccatacaggtataaatgttatccactttatatataagggaaactgagactttgagaggtagagtgatgtgcttaaggtcccatactgctagatgagaccagctacagaatttgcagagtgtcttgttaaaaacaaatgaataaataaatccaagaatttcaagacgacaatagcagagcattaaaccaacttgtagtccctctaagcagggagcccatgtgacaatcacgacccggctactagacagacacggagccaggaatcacatgcaaacctttgaagtccaagtccatctttctcatcaccctctggctggattaggattcagtccctggctttcctccattcatggctgtgacattgcccatacactgcttaagtgacatggatcccagcttctcctcctataaatcaagggattagagaaaattgtcacc

SEQ ID NO: 817492 - DNA, 669 bp, Homo sapiens
gtacttagcctcaaatcatattgttagtaaaatgacatttcttatgactttggctgtcttgaatttcagaataaaagcaatttctagaccattcaggaaataaacctgcaaatggactggagggaaaaagattggattctagatgaatctacatgagctgaattatcccggcagtataccagtctcctgcattattttaactgtatagacattactgaagtctttattcagaattatcaaagcctgtcactactcagttcctgaaaccataacccaccctatcaaagctgactccagtaagcaaatgcttcaaaatgactcttaagattccacattccaaaaagccaagtccctgaagcgacagaataaagtcaacagccctactatatgttttctatttttatttttaaagggagttaataatgaggtttctccctccaggatcaactctgattctgtggccaatattcagtttaagcagatatttttactcatctaataataatagatatatctaagtggaaaaaatagtttcatgatagagagcttaatccattagacagagcacctgagaaagtcatgatgaayggtaacagaagctagaattagactctggctctatcttaggagtgatattttgccaagcaaagtgtgcaagatagggcaaaa

SEQ ID NO: 817493 - DNA, 508 bp, Homo sapiens
ctccctccatctcctgcactctccctttcaactagaacaataaggttttgaagatggatatgtagtaacagcagcatcttcagttctctctmtgactcctcattataaggttattttcttctgtttggaaatagaaatgctgcctttgatgctaccacttaaattttcttttttctttttctaaagaaagtgtccctatttattacctacccttgtcaccttggcacaatgtggtaaatagcattctaaataaatattttctaatatgccttcaagtacgacgttccttttgagtgcaaataggataattggacagagaggaagaaagcagcattgaaggcactgttttaagggagaagagtgtgatttttgtttggttgctctgatgtagggctcatcagcaatttccaagactgcctggtgaactcatgaacattttagtgattgggctgcctgtatttggagctcagcaggggcaaagatttgagacattcttctaactagaaag

SEQ ID NO: 817494 - DNA, 630 bp, Homo sapiens
aaaaataaaagactttgagggtttcaagttaccatattaaagggcatcactaattctwatgtaaatatgtttttaaattattcaaactatttctcaaaatgtttataatggatcagaaatgtatttcttttaaataagagctcatgccaccatctaatttggagtaagataaagcaaatggtttgttagagagtaatctttagttgctctcttcaaaataacttttatttacagagctgtgttgggaaggatgataagtgatatggttgccaagggaaactctttcctgattggaagagaggtcatcacaggtttttacaaagaaaggagaagagatggctttatttcctaagatttttattttctgctcttacagtggaagaaaaaagcagcagaaacaaaaattgtgttgtctgctccttattcactctctgaattcacagaaagtctctaggtaatgagcctctagaggtgcaaacccccatgacaagttttcttagcattgcttaaattattatttgactgtgatgttgtttacccctgtgtttatgtttgttctgtccaattagaatgcatagtaggtatagctaaggtttacatttcataattggtgtgttgcccaggtgcctt

SEQ ID NO: 817495 - DNA, 508 bp, Homo sapiens
agcgagagtgcacttgaaaagcatctagcacagccctggaatgagagaagttatagctgttattatcaccctcagatgagggatggcagggaggtgatggaagaacattgcaggggaaggatttggtttyaccattttgtaagtataataaaatcagctagacttggggtccaattagatataggggttgagaatggctagaaacccctcccagttttttttatgtgtacagctagttggctattaatacctttcggagagattgggatccagaggaggaggaggaagaagaagagtttgatgactgagttaagggcaatgtatgagaacccttcgggtttcactctgttgacctggcagtcactaatctgtattaagggtaatgtggtttgtctaggacagtggtgtggggctgctgcctccccctggaaactctcccatctacaccctggctgggagtgcaggaggagctcctgctttgtaagatgcgggcccactatcaaggtga

SEQ ID NO: 817496 - DNA, 612 bp, Homo sapiens
atgatttacaattttctgagaagagttcctattaaataggtaactcccttcctgccccagtcccctttgacctggcaggctaaatgagacctgaagctatgatcataatgccctttttttggtttagagctttgtcccctcttaaaatgcacatagttcgatagggatttgttattgttgttttaagtcttattaaacactaaagcccgagtgtgaatacgtttattcaggctccgtcccagatcccaatgataacagtgcagtttacgaagcaggcccacccttgacctcagccaatcctcacggccccccaggaaggtaggcagatcatatggccccctcttatgagatgaaaaaagtgaagttgagagaggtcatttagccatgaactgcgaaagtcagcttcaaagctagggcccccagtgactgctccggttaaggcaggaggggacttggtgaggggtggggattcgatttactgtggaccagctgctacttttggcaggtgacttcagctstccaaaccactatttttctacctgtaaagtggagtggataggatccttggaatgctgttgtgaggatgaaatcagaccagaccacgggtatata

SEQ ID NO: 817497 - DNA, 661 bp, Homo sapiens
aaaaaaaaacaacaaaacaaacaaaaaaccctatgcctaggcatattattttccaattacagaaaaccaaagataaagaaaaagtccagaaggaagccagaggaaaagaacacyttacctatagaggagcaaagagaaggattacctctgatttctcagaaaccatacaagcaagaagagactggagtgaaatacttaaagagttgagaaaagcctcccatcaacaagaattctgtaccttatgaaactgtccttcaaaagtgaaggagcaataaatactttcttagataaacaaaaattgagggaatttgttactggtagacctgcattgtactagatgttaaaagtagtttcttgacgggtgcggtggctcatgcctgtaatcccagcattttgggaggctgaggcaggtggatcacctgagatcaggagttcgagaccagcctgatcaatatggagaaaccccgtctctgctaaaaatacaaaaattagccgggtgtggtggtgcgtgcctgtgatcccagctactcggaaggctgagacaggagaatcgcttgaacccgggaggcagaggttgcagtgagccgagatcgcgccattgcactccagcctgggcaacagagcaagactccgtctcaaaaaaaaaaaaaaaaaaaaaaaa

SEQ ID NO: 817498 - DNA, 595 bp, Homo sapiens
caacatcttagccacagaatagagcaccagtcagatttctaagagtttttattccactccttggctcctggatggcctctctagacctgccaagggcctsaggaaacacgctaccctgaagggaaggacataagccttactggcttcgccaactgctgatggtagagccctagggccttgagtgaatatagagagtagccaggtagtggttatagcaggccttgggtgagacccagtgctgtgctggcttcagatctgacccagcacagtcccaatggtggtggccacataggtgcttgtgtctccctacacccagctccaggtggttcagcacagagagagagagagcaacataccatttgtttgggacaaagtaatggaagaaaacaagagtctccacctggtaaccaacagaattcttccagatcttatccaagaccaccaaggcagtacctctatgagtctacaagaaccaaagcattatgggcttgggatgccccctaatccagatacagcttagatcacaatagccagtcccttcaaatacctggaaagccttcccaagacagatgggcacaaataagcccagactgtg

SEQ ID NO: 817499 - DNA, 587 bp, Homo sapiens
gggaattgtgaggtactggtaacgttttacttcttgacatgggtggtaggcatgtgagatyaaaaaaaattgtttcttaacctgtacatataaattacatatactcatgtttattgatccattgtataatacaaattctaaaaacctttaatataaataaaatcaaagcaaatgattattgaaaactaaagtcattctataacacaggctattgtagaaataaatggcctattttcaaaatgactgtgaggttggtaatatgtaacttgctttcttttgacaatgataattgtttgttggtggagaaatgctctctctaaagtcagttttccaaaaagtaggctaaccagtcttatttttttggagacagagtctcactctgtcacccagggtggagtgcagtggtgctattttggctcactgcaacctctgcctcctgggttgggttcaagcaattttcctgcctcagcttcctgagtagctgggattacaggtgtgtgccaccatgcccagctaatgtttgtgtttttagtagagacaatgtttcaccatgttggccaggctgatctcaaactcctgacctcagg

SEQ ID NO: 817500 - DNA, 597 bp, Homo sapiens
gaaggaatgaaaaataaggtcatttaatactagttacaaatatataaaagaaayttgcaaatgttgtaatctggtaagttacttactaatacttcaattcccagggtaaaggctaacaggtacccaacaaaatggctcagaggataggtcaacactgatacaacaaggtcctgaataacttgaaatctgtttcaaataaaaagactgattgaattttaaagttaggtcatacatagtataacaatacaaactttgcacaaagctaaaacactacataattttccatttatagattattcaaaaactaaaataagctctaacggatttgtttcaagggctttatttacctatttttttttaatctagaagtattttagggaaaatgtaatttctgaattaatttgaaaacgatcagccaggtgcagtggctcaggcctgtaatcccagcactttgggaggctgaagagggcggatcacctgaggtcacaagtttgagaccagcctggccaacatggtgaaaccccatctcactaaaaatacaaaattagccaggcgtgatggcacatgcctgtaatcccagctactcaggaggctgag

SEQ ID NO: 817501 - DNA, 576 bp, Homo sapiens
cagttataaatgaagtgagagggactggaggtttgaaagtacagtattataaatatatttgatgacttatggtacagaaatctactgcattttaaayacagatttaactgtcaatgaagtgaaaaaacaaggcagcaagatgcattacttactctcttagaaccgcataccatattggcagtggcaacaaaccatatacataatatgtccagggacaggcttgaatcagcagaaaaaatgctactaaaatgccaatagctacaaaactacaaggcaggagatggcttggtttctgaaaaatcaaacaaaacattgaaacacttccaaaccaatggtaattgataggttttaaaagagattttataaagtaaagaaaacctattactttctttcaatggttatactactagatgattaatcaaagagctgcattaagacaaggaaaaaaatctattatttgaggagcatattagagaggaaaaacctagataacctggaattgctgcaattaagcaattctcaacttaaaagtgactatggccttaaagtttgtttgcaagtaacttgttcagaatt

SEQ ID NO: 817502 - DNA, 231 bp, Homo sapiens
gtatacaactgcttccttggggatgccagaaaaatagtccacacagacgataacacttggaaacaaaatacatttatcctttgcttaggtcacrtgagtggaattacatagatgatgacagcagtagccttaatgtgcaggtcagtggcatgagttaaagtaagacattgcattaatcagcagataattcaatatcctctcctagtcaagcagagtggggatacaaagtat

SEQ ID NO: 817503 - DNA, 541 bp, Homo sapiens
gttctcttgcctcagcctcccaagtagctgggattacaggcgctggcyacaatgcctagctaatttttgtatttttttgtttgtttgttttgagacggtgtcttgctctgtcgcccaggctggagtgcagtggctctatctaggctcactgcaagctctgcctcccgggttcacaccattctcctgcctcagcctcctgagtagctgggactacaggtgcccgccaccacgcccggctaattttttgtatttttagtagagatggggtttcaccacgttggccaggctgatctcgaactctgggcctcaagtgatctgcccgtctcagcctaccaaagtgctgtgattacaggcatgagccactgtgcctggcctgtggaagacccacttctaagaaagctcactcacagggttggtaaattgatgctgctttttggcagaaagcctcacttgctcaccatgcagaattctccatggggtacttgagtgtctttgtgacatggtaactgggttctcccagagtgagtgatggaagagaaac

SEQ ID NO: 817504 - DNA, 403 bp, Homo sapiens
gggttcttggtcatgaagtctttgcctaagccattgtctaaaagggttcttccaatgttgtcttctagaattcttatggtttcagttcttaaatttaagcctttgatccatcttgttgatttttgtataaggtgagaaatgagaatccagtttcattcttctacatgtggcttgccaattatcccagcaccatttattgaatatggtattctttccccactttacgtttttgtttggtttgtcaaagatcagttgaccataagtatttggctttatttccgggttctctrttcttgttccattggtctatatgcctattttcataccagtaccatgctgtcttggtggctagagaaagtgaccaaaaaggaggaattgctaaagtgaactaaaaatggcctga

SEQ ID NO: 817505 - DNA, 477 bp, Homo sapiens
aaaatatctttcaaacaaggagaaataaagactttcctagacaatcaaaagctgagggatttcatcaacaccagacctctcctgcaaaaaatgctgaagggagtacttcagtcataaagaaagggatatcagtgagcaataggtaatcacctaaaagtataaaagtcattggtaatagtaagtacacagaaaaaaacacaggatattacaacactgtgagtgtagtatgtatattactcttatccctagcagaatgactaaaggatgaacgagtaacaacaaaacaacaaaaagaactacaacaacttttcgagacatagacagtacaataacgtataaatagaaacaaaaaagttaargagcagggggacaaagttaagatgtagagtatttgtcagttttctttttgcttatttgcttgtttatttgtttaagcaaacagttttaagttgttattagcttaaaataatgggttat

SEQ ID NO: 817506 - DNA, 477 bp, Homo sapiens
aaaatatctttcaaacaaggagaaataaagactttcctagacaatcaaaagctgagggatttcatcaacaccagacctctcctgcaaaaaatgctgaagggagtacttcagtcataaagaaagggatatcagtgagcaataggtaatcacctaaaagtataaaagtcattggtaatagtaagtacacagaaaaaaacacaggatattacaacactgtgagtgtagtatgtatattactcttatccctagcagaatgactaaaggatgaacgagtaacaacaaaacaacaaaaagaactacaacaacttttcgagacatagacagtacaataacgtataaatagaaacaaaaaagttaaagagcagggggacaaagttaagrtgtagagtatttgtcagttttctttttgcttatttgcttgtttatttgtttaagcaaacagttttaagttgttattagcttaaaataatgggttat

SEQ ID NO: 817507 - DNA, 618 bp, Homo sapiens
catcctattttttttttcaataaatgtagacataagtcaaatgttttttttccttttcactcccaggtttccacctggatcattcagtactttgaggagtgccagaggcactttaractcctcacaaaggctgccggagcagtcccctgaggctgtgcaagtcagactgtgggtgattctgggactagcatacttgccttccaagcatcaccaaagatgcaaaccaacaggaagccctggggaacattgactcttccacctctgaaaggctgatgtgcctttcacacatcagatatagtcttagctagagaaaactggtatgttggctgcaactccaggcaggcttgtctcctagttgtttacatgacacattaagaatgaaatatgagggatcattacccatcctcatttgagagctggaaatgttagaaaccccatttagaatctccttcagggaggtggatgttttcctctcattcttaatcattgttcttactatcaactaatataaaaccaataaactttactcttcttgcttaaggggacacttgttattatggcaaattactggatccatattatgtatcttcccttctcctttcccttcctggggcctct

SEQ ID NO: 817508 - DNA, 653 bp, Homo sapiens
actcacactctactgtatgtatggaccacattttctttatccgttcatccatccatggcattggcttgtttctaccttttgactacgatgaataatgctgttatgaacacgtgtgtacaaatacctgaggcttctttgcagatttcctggctgagtccactgaggttccttagatactgccccatctcttacttgagccaaatatgaggaagataagaaattgattaataatctggcaaagtttagaattaagtcacagctaggcacattggcccacgcctgtaattccagcacttggagaggctgaggcaagaggatagtgcatgcttataatgccagctactcaggaggctgaggcgggaggaccttcaggagcccaggagtttgaggctgcagcgagtgcctcaagcctgggcgctgcactccagcctgggcgacagaacgagaccctgtctctaaaaaataatgaaaattttaaaaatgagaattaagttactagttcaggtatgggttctgggctgtagttaaatggtaagtttttctatcactcccaactcttgctcctgaaaactccctcctcaaagtatattccgcaggaaggggygcatgcgtgtctcgtacagtgccaggctcctagcccctgggactctggc

SEQ ID NO: 817509 - DNA, 597 bp, Homo sapiens
cagaatcccaagcaaactaccacacgcagcacatcacaccttccgtggccagaatgcaggactcctggcacaggttagcaggtcctttgctcagtctcatgaggctccaatctgttagttgggctacattctcatgtcatctggggcagaatctgtgttggcagaactcacttcctcgtggctgtgttactgaaggccacctggaggccacccacagttcccttccatgaggccctctccataataaataaaaatcagaaaaatgttatctccacaacatagtggtttgctttctcacaatcagcaggggaatctttctccctccatctagtaagacagagtctaatatgaggtagcttcatcatgggagggacatttcatcacctttgctgtattctgctgattagaagcaggtcacaggttctgctctcactgaagaaaagggatgacatgagggcgtgactcctcarggttacattagtgtgtggtcatctcaacaaccatccactgcacactgccctcgacttactctcatgaatcaggaagataattcccaccataaaaaaaaatgtactgtagtatggagattttgcaaaa

SEQ ID NO: 817510 - DNA, 587 bp, Homo sapiens
tcctcagggttacattagtgtgtggtcatctcaacaaccatccactgcacactgccctcgacttactctcatgaatcaggaagataattcccaccataaaaaaaaatgtactgtagtatggagattttgcaaaaagctaaaaatagaactaccatttgatccagcaatcccactactgggtatttaccaaaaggaaaagaaatcattatttcaaaaaggcacctgcactcatatgtttatcacagctctactcaaaagagcaaaaacacgagatcaacctaaaagtgcatcggtggattaaaaaatgtggtatatatacaccatggataatatggtttggctgtgtgtccccattcaaatcacatctctaattgtaagccccacatgtccagggagggacctggtgggaggtgattggaccatgagggtggtttcccccatgctgttctcatgatagtgagggkgttctcacgagatctgatggtttaaaagtatgacacttcccctttgctctctcttcctcccgccaccttctgaagaaggtgctttcttctcctttgccttccaacatgatagtgagtttcatg

SEQ ID NO: 817511 - DNA, 650 bp, Homo sapiens
gataccacagaaaaatgaaaatgaaagtcaatgattgaaaaaaaaatagaaccactgctctcttcaaagctgtcagacagggacatttaagtctgcaaaggttactgctgtctttttgtttgtctgtgscctgcccccagaggtggagcctacagaggcaggcaggcctccttgagctgtgctgggctccacccagttcgagtttcctggctgctttgtttacgtaagcgagcctcagcaatggcgggcgcccctcccccagcctcgctgccgccttgcagtttgctctcagactgctgtgctagcaatcagcgagactccgtgagcataggactctcctagccaggtgcgggatataattctcctggtgcgccgtttcctaagcccgtcagaaaagcgcagtattcgggtgggagtgacccgattttccaggtgctgtcacccctttccttgaccaggaaagggaactccctgacctcttgcacgtcccgagtgaggcaatgcctcgcgctgctttggctcatgcacggtgcgctgcacccactgtcctgcgcccactgtctggcactccccagtgagatgaacccggtacctcagatggaaatgcagaaatcacccatcttctgcgtcactcacgctgggagctgtag

SEQ ID NO: 817512 - DNA, 483 bp, Homo sapiens
agctttagtaaatacatttttcatttatttttgaatgaataaatttaaatcaggattatatatatacatatgtawgtatatttgattcattcatttctgaactaatatatgccagatcctgttctagggggtccatcctacctattcagaacaacattcctataattaattcctcacttgttgcgtagacttgctccatgcctggtatggagaaggtgcttatcagtgataattggtatcatgatcacaagtccctgaagggtaagtagattgccttaggcagcatagttaataaattttgaatccaggatggaacctaggtctgatttcaaagtccaggtcttttttccagcagattttacgtgtaaagccttccactctaaggaacaaaatgtcctcaagcactctttgttagttaagttgaacttctatattcacagtcattaaatgtatcatattatggagagataataaaatagcaca

SEQ ID NO: 817513 - DNA, 555 bp, Homo sapiens
tggaatactattcagtaatgaacaggtatgaactattagatacatgcaacaacttgggtaggccctaggagaattatgttgattgaaaaaagccagtttcgaaaggttatataacatcctggatgtaatgaaattatagaaaggatcacagattcctggttgccaggagttactatttgggggccaagaatgggacaggtatgactatgaaggaataacatgggcatatttgtggtgatggaacagttttgcatcttgatggtggaagtttcatgaagctacacaggataaaattacgcacacatgagtgtatataactggtgaaatctgaataagctctgtgaattgtagcaatgtcaatttcctggtttttatattctcctatagtcatgtaaggtgttaacagtggaggtggagaagtgaagggtgtatgggacctccrcatataactttttacttttgtgaacctctaatcattttgaaataaagttttatttttaaaagtatgtatactctgtagctgtcacattgtgaataacagaaaaagtgatcaaa

SEQ ID NO: 817514 - DNA, 522 bp, Homo sapiens
attctattgaattttctgcctactggatttagtttaacttgatgtaatgctattactttttccagtagtcaatgttgtcttacacatttagtaaacagtcacattatattattgttttatgggattttagcctgctgttgaaatctggcagcactgggatcagaaaaagaagaaaaggacaaatagcaattgaataagcccatcttacagggaccactgcttttggtactgtgactttctttgtagttgtggccctcctctgaaatgggagtcaactccatcatcacgttattgttaaactcccattccaccataaacatagacctgcatcttaattttttgtaaagatttacaaaccctatgatgtatctcaccaaatctaactttaataatactataatctctaaagcaggacacgtggcattcttaatattttacattcatgtggttctttgcatattatgaataatattttatatacctaawcttacttaatcttcaaataaattccatgagaatgga

SEQ ID NO: 817515 - DNA, 554 bp, Homo sapiens
agggaaaagatcagtaggaaagaaaaggttttggagaccccaacattggtatagaagaaacttctagttatttcagccagatagtcaggtgctatagagcaggatccagaaagatttttacccatttataggacttccccatgttttctcccttaaatcttgtcttttctcttgtaataatggacatgaaagtctcaaaatgaagagggtctgtcagcttgtgttccgggaccacaaggaatggtggccgaaggagaccatcttccctcagcccatcttggagggacgagaaatgccatagtctggatgggtggtcacagctaccaagaggagaggagagcaggggaggccctggggccctgccatggtgaaaagggagggctgtgaggagcctgcctggcacctgtgaactgcccggggactcaggagaaaggggttttgcaaatgcagtgacagataagcgttgcatggtaatagggttaaatttgaaactgttacaggtgagatgtgactagcccattcttgtrtcatagagagctaggccttttcttcat

SEQ ID NO: 817516 - DNA, 528 bp, Homo sapiens
ccttcgtctgtcactcccacagatgaggctgcaatggcagagaatctattagcctgggtccctggtgaggatgctgtggagcagagccccctggcaacttgtgatgaatggagggtrgcatgagtgagaaaactttgttgttttaatcactgagtgatatggtttggctgtgtccctagccaaatctcatcttgaattctcacatgtgggagggacccggtgggaggtaattgcatcatattgacaggtctttcccttgctgttctcgtgatagtgaataagtctcacaagatctgacggcttaataaggtggaatttccctgcacaatctgtcttttttctttgcctgccactatccatgtaagacgtgacttgctcctccttgtcttccaccatgattgtgaggcctttccagccatgtggaactgtaagtccattaaacctcgttttcttccaagtcttgggtatgtctttatctgcagtgtgaaacagactaatacactgagattttagaagtgtttgttacca

SEQ ID NO: 817517 - DNA, 539 bp, Homo sapiens
ctttttttttcacttaaaatcacattatgaacatctttctatgaggtacatgtcattcagcctcrtgttaccatctgcctctcatcactgggctctccactcctgccccatcaggtcttcgctaagatgcgagtcctcagcatttgtattcattagaagtcttggttggttgtaagaggaaccggctttatttcattttttaaaaagagagggcatttattataaagaccctggggttctgatggaactggagaacagagacggaattaagcctcagagacaactaggatcagggttctccaatcttcctcctctctgtatgcctgttcgattcttctccctccaaacttgtttcctctgcttccccaaccactcccaaggcttacatattacaggctcatctaccgagagagagcctgatttgtctctatcctaattcccatattcctaaggaaggggattatggttatgccaccacttgtggctggccatgttagaaaaattggctacacctgtaacaaacatggaagtgagagatg

SEQ ID NO: 817518 - DNA, 597 bp, Homo sapiens
cgggacacaagggaactgtggatatatttggacctctgtgtttcttatggtaaaataytggccttttgctcctcctattctgcagggctctggttgctttaggtctaatcctcatccaggtacttatgctgggctgcttttccactcaaaccatttgggctctcggggcaaggaggagtagtagctcgatgtatttttgctaaagctgcactgatggacagtgggccagagctgggctctctcagaagagctttcaaggtggcctggggtcaaggtgcattttaatttctccacgcttaactttcatacctttgcttaatacctgtgatattccctgcccttatagtcaaaaatcaagttttcctttattcttccatttcatccttccccgcttccttctctttgttattttccttccacaaatatctcctgctgaactctaagttctgtaacaacacaaatcaaggcttttattcatcactatgtcccattacccagcttggtacttagcacatagtagaggcttaatatatataggttgaatagagttggatatgagacctgaaccatattagatgctgaggaggaaggagtgag

SEQ ID NO: 817519 - DNA, 597 bp, Homo sapiens
cgggacacaagggaactgtggatatatttggacctctgtgtttcttatggtaaaatactggccttttgctsctcctattctgcagggctctggttgctttaggtctaatcctcatccaggtacttatgctgggctgcttttccactcaaaccatttgggctctcggggcaaggaggagtagtagctcgatgtatttttgctaaagctgcactgatggacagtgggccagagctgggctctctcagaagagctttcaaggtggcctggggtcaaggtgcattttaatttctccacgcttaactttcatacctttgcttaatacctgtgatattccctgcccttatagtcaaaaatcaagttttcctttattcttccatttcatccttccccgcttccttctctttgttattttccttccacaaatatctcctgctgaactctaagttctgtaacaacacaaatcaaggcttttattcatcactatgtcccattacccagcttggtacttagcacatagtagaggcttaatatatataggttgaatagagttggatatgagacctgaaccatattagatgctgaggaggaaggagtgag

SEQ ID NO: 817520 - DNA, 604 bp, Homo sapiens
tgtagtgccaaaaaggaagcgctaaacaccaaccccctgcccactcccctcccccacacataatgttgagagtttgtaaatgggatgaaagatccaattgaaagaggttcgcatgaccaaggttggaataaagtagtattttatcataatccaaagtataaaataaatatccaagagtccatcctgatatataagtaaatagaatagataaatctcccattcaaaaaattccaaattatttgtatagatacctcaaggaggtaaagcatagattcccactccttaagagtgaagtgtgcacagtggctttcatttaatgagtacagtatggtaaggggagcgaaaagagtcactttaaagtggagaacccttataaacactacctcattcaggtgatcactgttaatatcagcagagataagtcacgttgatagtatatctttgatatgatgtgatgagaataggactttacctctgtggtctaccctctgaaaccyatatgtattaggctgttcttgcattgctataaagaaatacctgagactgggtaacttataaagaaaagaggtttaattggctgtacaggaagtataacacaggtatt

SEQ ID NO: 817521 - DNA, 622 bp, Homo sapiens
actacactaaaataatagaaacccaaggtaaatttctaacaatcccaaatcaaatcaatatttttataaattyttgttaccttttaatccttgttcagtgtgtagctgtttttacatgtgttcagtaatctcatagaattgtatgttctcattttcacttaacatactggtgcattattttttcatgttactgtagtctttttgtctatttccttttcccttcttcctttacctacttctccaagttaaaccaatattaggagccttgtatatttgtcatacactttatggatgtatcaatttattaaaccattttgtatttctggtaatttagattatttccagtttttttgccactacaatactgatatgttcaatatccttgaatacagagtgatgcttttttttctataggttagatttcttaccaatttatagaagcacttactatgttcaggttatatgttacaagtatgtcttgtggcatatcttttaactattgttcttgtgttttattatacttagatattgaatatttgtgtaatcaaatataaagtgtcaaaaaatttcagagaatgaccctaatattaacaaattagtggtgatagggcttattacagaa

SEQ ID NO: 817522 - DNA, 635 bp, Homo sapiens
gaacaatgagaacacatggacacagggaggggaacatcayacaccagggcctgtcagggggtcaggggcaaggggagggatagcattaggagaaatacctaatgtagataacgggttgatgggtgtagcaaaccaccatggcatatgtatacctatgtagcaaacctgaaccttctacacatgtatcccagaacttaaagtataataataataataaaaaacctaataaaaatctatgaaattttaaagctaaaaaagaaaaaaaagggcgagaaaccagattgcaaaacagtcctgagacggcccagcaacaacctggacgtcgggggaggctatgaaaacaacactggatttcccccaagttctttgagtccaggtctcaggttgatccggggggtgtttctactacccagtcactgaacagtgacctcactttacatttcacaatatgtgtatcgtataagcagtgccgctgaatgatttcctgtaaatacttacaatggtttgaggcaccagggccagtccccagtggttctgggaaaggcttttttaaaaatgagaaaagaaggagccacacactggacactgtaatttcacagcagaggtcaaagacggggcaataatcagcctcagga

SEQ ID NO: 817523 - DNA, 605 bp, Homo sapiens
aattttaaaaagaaagaaaacctagtaaatacttttcttgacatgggttttggcaaataatttatggccaagttcctaatagcaattgcaaaaaaaaaaaaaaaaaaaaattgacaaatgagwcctaattaaagtaaagggcttctgtgcaataaaataaattaccaatagaatcaacaaacagtaacagaatgggagaaaatatttgcaaactatacatccaacaaaggcctactatccagaacctacaaaaaacttaacaaatcaacgtgcaaaaaagaaaccacctgaacaaccacatgttgggtactatgtttatgacctggaagataggatcactagaacctcaagccacagcatcatacaatttactcaagtaacaaatctacatgatgtataccatttaatatataataaaagttgaaattaacaaaaaaaacaatgacaacaaaaacaaaatcaggcaatagaatcattcttttatcttggacttagaagacaaataatacaatgaggatatttaaggatattcagacaactaaagaaaaccatgttctaagaatcaaaagatggaatgacagtattttattaaatagagactatca

SEQ ID NO: 817524 - DNA, 590 bp, Homo sapiens
caatgccttgtgtaaggaaaaggcaaagtcctacaaactaaattattgcaaggagctgaagagtcctgctcctgaggtacgatattgtattgcttgctttgttagctgaaacaaactgcttccggctgtctttactaacagacataggaaaaaaaaaacattcttttagtcaatagctctctaccagataccaggggatgtgttaatttgctctagcagtgaacccacatttggcacaacagctgtttggagttatcatctcatcaagctcacaataatccattgtcattctccaggatccatctgttttctgcacaggccaaataggagatatgtgagttaaatggggatgtgatgggaattaccacccctgcatcctttaagttcttgatggaactggtctttgcaatccctccaggaaggcagtactgattttggtttactattttcctagataggagcagttttagttgyttctatttatcctctaccatgacaacagcactcactccataggtcagggaagtgatgtgggaattctgccagttgctgagtatatctattcaaattatgcactgcagagctgagga

SEQ ID NO: 817525 - DNA, 484 bp, Homo sapiens
aaggattataaatcattctactataaagacacatgttcatgtatgtttattgaagcactgttcacaatagcaaagacttggaaccagcccaaatgcccatcaatgatagactggttaaagaaaatgtggcaaatatacaccatggaatactatgcagccataaaaaaaggatacgtttatgtcttttgcagggacatggatgaatctgctctactttttattatttctttccttcagataaggttggctttatagtgttcttctttgcctagtcccttgaggtgaaaagttaggtagttagtttgagatcttttttttttttaaattttatttaaaaaattgtattgtattttggtaagaacatttaacatgacayctaccctcttaactgatttttaagtttccaaacagtagtcttcatttgggcacaatactttacagcagatctctagtatttattcatcttgcataaccaaaactttat

SEQ ID NO: 817526 - DNA, 552 bp, Homo sapiens
ctttgtgcacatgtgggagtattttcatatggtaaatttgttaaagtggaattgtttgattaagtaagcacatgtgaaatattgatggaacctgccaagttgtcttacaaaaatttgtaccaggttatactcctgggagagtatgagaccacctccctcttcatgttatttcagttagcattaataaggttttttttcagtacattacatttgtttattacattagaaacatgtcaattttcatacgattggccaccttagaactgtttagttttttccctaattacaaaagtaatatatgcaatgattaaaaaaaaaaagaggaaaatatacgaactaggtgttcacatcttgagttatttccttgagtgggcaattgtccaaacgagcctctctgctcatctggctctctctccttgkgtccagatgaaccatgtggatcattggcaattacccatcttttaaatgtttcctaatcgggaaggagaaacttagcatcttcttgttttaaaattattattattttattgagacagggtctcgctctgttgc

SEQ ID NO: 817527 - DNA, 577 bp, Homo sapiens
gctttgctcagaatgctttgggctcagcccaaggccctgtactccacagtacacagagatccagggaaatgcaagctgacaggaaagcagcctccgtgaaagatgcagctgtgctcatccstgagcgcagctccactcagtgcatgtgtgtggattcgtcagaaagcaccaggccctgtgttattgctgagcagacaataaggtccacgagacgcagcccctggcttcaagaagctggtagtgtagttaaatgacctaaagaagaaatatcctttaggttgcagtcactcaataactcttaactcttctgcacagaagtctgggctgggggtccagggccattcaggcctccctgaagtcccctgcagtgcctgtgctgttactgtcctatgctggggatctggtgtgcacagcacagtgtacaggcaaagctgaggcttgctctccctgcacaaggcgggtggtgaagcattggctgtatgtggcagagaagctgcagtttctagatcttcaggcatgctggccaaatgctgacacttggggaaataaagctagttagaacatctgggactcttct

SEQ ID NO: 817528 - DNA, 606 bp, Homo sapiens
ttgaattacaaaaagaaaaaaccagcatctgcatgataatatatgataygttatttgaagtctacctctgctaagagcagactgttgaatttgcccataattatccagtgtcttgtgctcttataataactcaagtcataatataaaaaatggaaagagaactacagtacattgcatcacctcactcatctcttgtgcctcaaggagtagcaccagaattaatcacgcttggaaaaacaaccaccagatatttggtgaaacattattctgggtatgcctgtgatcgtggttttggatactattaacatttgaattggtagattgagtaaagcaagttacccttcctaatgtgagtggctgtcatccactcagttgaaggcttggatagaaaaaaaaaaggttaaccttttaagttagaggaaattttcatgcctactgagatggatccttagtcttttcttgtctttgaactagaactaaaacatcagctcttcttacgtcttgagacgattggcttttctactggaatttacactgtcaattctcctggttctaaagcctttggactcggactggaactacacaataagttcttctgagtaatcg

SEQ ID NO: 817529 - DNA, 495 bp, Homo sapiens
cttcttttctatgaattaaatacattttatggtttcatcttatctccttttttacttgagaattaaaactctctatattgttaattttaatggttgyttttgagtttgtagtatacatctataactcatcacattctaccttcaaattataatatactactttacatacagtatcatgaagtaacattttcattattttatcctgttgttctgttattgtcatgtaatttatttttatataggttgtaaactcattataaattgttattattcttgtttacattcgaggttaataatgttgttttcttctctctctttctttttttttttttttttgagacagagtctagctttgtaccaggctggagtgcagtggtgccatctcagctcactgcaacctctgcctcccgggttcaagcgattgtcctgcctcagcctcccgagtagctgggattacaggcatgtgccaccacacccagctaatgtttgtatttt

SEQ ID NO: 817530 - DNA, 495 bp, Homo sapiens
cttcttttctatgaattaaatacattttatggtttcatcttatctccttttttacttgagaattaaaactctctatattgttaattttaatggttgcttttgagtttgtagtatacatctwtaactcatcacattctaccttcaaattataatatactactttacatacagtatcatgaagtaacattttcattattttatcctgttgttctgttattgtcatgtaatttatttttatataggttgtaaactcattataaattgttattattcttgtttacattcgaggttaataatgttgttttcttctctctctttctttttttttttttttttgagacagagtctagctttgtaccaggctggagtgcagtggtgccatctcagctcactgcaacctctgcctcccgggttcaagcgattgtcctgcctcagcctcccgagtagctgggattacaggcatgtgccaccacacccagctaatgtttgtatttt

SEQ ID NO: 817531 - DNA, 630 bp, Homo sapiens
aaataagaggtcttaagtgtcattttcacaacaaaaataaacggagaaaaaagtaaaggccttcatttctcaaagtattcttgcctttcactagcactcatggtttggagaatggagaacttttccctccactgctggccattcattgtacaaatgtcaaacttcacaatctaggcaacaatacagcatccactcttgcagccaatcctgttggttttgtcttcaaaatctattaaaattatgactactccttatcttctccattgcaatcatcatgtgtcaagcaactgacatcatctttcacctagatttacactattcctcaccacttgtcttcctgctcttgctgttgtactcttacctgttcttcacacagcaatttattatctcagttctttttaagaccctccattatctttctatattccttagaatgaaatgcaaacacttatagtaatcgaaaagggtttaattgaatctctttaataatcttcaaaaatatcaactataatttgattcagacttgaatacttaatatcatcacagtttttaaatggtaaactgagtttcgaaagwgttgagctacttgcctaggagcacactgtttaaggcagagtagaaagtcaactc

SEQ ID NO: 817532 - DNA, 645 bp, Homo sapiens
agaatccctatgaagcaattttcatgaactttgaaatgttacatttaatgacatggggggagatcattctttaacrtgggttggtcttgcaatttattattattagccatagtcttcttactaaaaaggaaattagaactcataaaatgaggccaatatttaagggatccaaatctatgccctaagaatcaattatagcattctccagcaaagcagtgaaaccataaaagttgattcctctcgctacacactctagagatgctcaggactccactccttaccacacctattaagctgtcccacaaaacccgctctgcggaaaagatgtgcaagggagaattttcctcctgaaatagcagggcttggacaattcctcagtccatctaagaaagtacagaggacagagagcagtggtgactctagttgatggagcttgataaatgttatttcagcatccacagatcttaggtgtgtatgcgttcataagggatggaatattttgtattcagatatggggtacttcttttattaaaaatgtgtcttagtcacccccacaatgaattggtttttaatcagagaaggtttttttttaaatattatgttaacttcaacattccttaagaagaaaattaagactgttcactt

SEQ ID NO: 817533 - DNA, 610 bp, Homo sapiens
ctgttctcaacctagtcacctgatgtacttgaaataagcttgtgtctcttcaacagtcttttctgccattgaataaatagtaacatcattcttgaatttctaaaatactatgaaattcattgacatgaaatattttgtaaaagattcatggtcattcaacctttgaaatttgtgatggttaattttatgtgtcaccttgagtggaccaaaggatgccaagacagctgttaaagcattatttctagctgtgtctgtgaggttgtttctggaagagattcacatttgcatcagtaggctgagtaaagaagatctacctcaccaatgtgggccaacagcatccaatccaaatagaataaaaaggaaggtaaaggaagggtacgttttctctctttcttcttaagttggggcacccatcttttcctgccctcagacgttggatattggagctactgggtgtctggccttcaaactaggattgaattacaccaccagccttcttggttctccagcttgcagatggcatattgtgagactttacaacttccgtaattatgtgagctaattgccataacaaatmttcttgtatctatatctatagctaactgtctac

SEQ ID NO: 817534 - DNA, 583 bp, Homo sapiens
tttctctagcctactttatcrtaagaatacggtataaaatacatgtaacatacaaaacatgtgatcaactgtttatgttatcggtaaggcttccggtcaacagcaggctattagtcaagttttgggggagtcaaagttatacatagatatttgactgtgggggttggtcctcctaactcccacactgtccaagagtcaactggactaaaaaccaatgaactgtacattaaaggtgaactttagggtatgtagattttatgtcaatacagctgtttaaaaattttcattctgccatttattggctgtgtgatatcacagttacttaacctctatccctcagtttccccatttgtgaaatggaaaaaggataccaactttttgatgacatatgtaaagcattttgcatggcatacagtagctgctaatttgtatctgcaaacactaattattgaatacaagagaggtaagtaccaacagtggtaaaaccacccaaactgattaagttatacaactctatgtggtcattattagtacatacaactttattaactggcatgagaagatgggtaagacattaccgaat

SEQ ID NO: 817535 - DNA, 548 bp, Homo sapiens
gcatgcattgaaaatctagtgaatgttaataaccatttgccatgtttttcatttatgaactcccaataccaaggyttttgtttcaatttaaggcaatggttgttctttttggtttgaatgttttctttgttaaaacatgacagttttctgtatatgcaccttgttcttccagaaaaacaaaaaaagcaaaagggaaaaagggaataagatttcctcatgggttccatttgcagcattttaatagcgttcttcttaaaaccctatatattctggtgctcttaaaataaaaatggacctcaaaaatgccacagaattttataatagttttacaattatgactataaaaggacaattatactctgccattcttacacagcatcttataacaacaggaaatttcattttcaactcatttttaacttgtgattcactgtggctcctacagtcttatttgaatccagccatttttatgatgacatgtggcttagtttccttttaaaattaaataccttgtagtttcatttaattttacttgctttctttgtgat

SEQ ID NO: 817536 - DNA, 527 bp, Homo sapiens
ctttataaatggaagacttctcggtcgggcgcggtggctcatgcctgtaataccaccactttgggaggtcagggtgggctgatcacttgagcgcrtgagttcgagaccagcctggataacatggtgaaaccccgtctctactaaaaacaaaaaaattagccaggtatggtggcacacacctgtaatgccagctacttggcaggctgaggcacgagaatcgcttgaacctgggaggcagaggttgcagtgagctgagatcgtgctactgcactccaacctgaatgacagagtgagactccatctcaaaaaataaaaataaataaataaataaaataaaataaatgggaatcttctctcctgcttcctgcacacactcacggctgaggtccctgggcatgccggcaaggcggccaccacaaggcatccacttgcgcctgtgccattccctgtttaaatatttgaaatatcccttgttgaatatatacgtttttattttactattaggttgttcatcccttgaagacaat

SEQ ID NO: 817537 - DNA, 611 bp, Homo sapiens
tatctaagtggtatgattaagaccacctttttgcattttgacgacacttgcattttgccaataatccttaaggctatttttatttcttaaagattatagtcatgtgagctaaaaaatattttaagtgcttatttttctttaatcaattagagctctttttgtagacattacgcataacacatatatagcaacacagaattcagaactagtatgatttttcatttgccagtttcttattgggattattggcttcagggcggagcccttggaggaacagggccaggaaggcatgcatttctagggcataaaaaacaggcacagctgaaggcaaagacagaccccccaaaaatattggtgccgttttataatggattttggatccccaaaaggagggagagcctatgggagaagagagtatggtaattttaccatgcatttcattgcaaggcaacccaaatccattcagcttattttgtaatcagcccaacccccacatgattcttatstcttgggggagtggggaagtttgtatgtttcaggtgaccaagagtatgcttctctgattcaaaagtgcaaagagttaactatccttccgtaactacgattagaca

SEQ ID NO: 817538 - DNA, 655 bp, Homo sapiens
aaggttgggctctcacttctggggcttccaaacccacgatgtcctgcctgacattgtcaccatggctaaagggattgggaatggctttcccatggcagcagtcataaccactccagggtaggacccacaggcagtttgtgtttgcttctgggcctcgtacattgggctatggtataacacgtgtgttggaacttgtgtagattggagacaatcatggaaaccacatgatgcatttcccaagcaaatgaaagagagaaacagtctgtctgcctgactgtgaaacagttggaagaaagccagccttttttttttttttttgagacagagtcttgctctgtcacccaggcttgagtgcagtggcacaatcttggctcattgcaccctctgcctccgcaggtgcaagcaattctcctgcctcagcctcctgagtagctgcgattacaggtgcgcaccaccacgcccagctaatttttgtatttttagtagaaacggagtttcaccatgttggccaggctggtctcaaactcctgacctcaggtgtttgaccttggcctcccaaagtgatgggattacaggcgtgagccactrcacccctatccgaaagccagcccattctgatctacctgtagggaagactaattctcccatgcctatg

SEQ ID NO: 817539 - DNA, 628 bp, Homo sapiens
atgaagctcgggtacaaaaaaaaaaaaggcggagacagtgcagctctcaggccactagggggcgctgagtgaaaatggtttggttgtcgcggctctttggggtaaagatagaggcagacagaggatggtcaaagcggacaactaacagtatggatgataaacatcacagtcatgcagtaaataatctatctcctgtataattaattctaacccctgtgaaagcaattctggccgttcttagctcagccccgggctctgacttggtgaccctgctaagccttagtggcctctgtggctgggagcaacacgacagcacctgcaggcccgggtgacgcctgtcggagagatggaggaccacctgggcatagcccccattgccaaactcaaaatcagccagagccagtgtccttcacccttaggctgggagattcagaggtcgagccctccccactcccttccttgaaaagccatgcccagctccacagtcaggaccctggcttgccctgcacacactgcccgagaggctgcccctcacagcaacagcctctccccagggatgggctacagggtggagacttaagagagaaggtaacttctgytcctccctaatttgtcctgtcctttgtta

SEQ ID NO: 817540 - DNA, 539 bp, Homo sapiens
tagcattcacaactcttttttttcaagacaaggtctgtctctgttgtccaggctacagtgcagtggctccatcacagctcacttgcagcctcaacttcccaggatcaagcaatcctcttgcctccatctcctsagtagctggtattacaggcatgtgccaccatgcctagctatttttttatttttttattttttgtagaaacagggtctggttgtgttgcccaggctggtcttgaactcccgggctcgaagatcttcctgccttggcctcccgaagtgctgggattacaggcatgagccaccacatctggccctgcattcacacctttgggttaagaaggtttcaatatcctaaaagacttatgtataaatgtcctaataccctgaacaaatcataatggacaggtaaaaaactgattttgaattaacattatagtttttcttttaagctgaatactggggataaatacatagaagcacacagaaaccagtaaataatccttttattttgttcccacaactaaagtggtatgtgaaaa

SEQ ID NO: 817541 - DNA, 566 bp, Homo sapiens
cttctacaatggaaagaagaccattttaaactgcagcaagaaagccttaacgatttggagaaatgtattctcttagcgtgcagttaatcattttagttactgagggaggttttgaaatctctttccckgcagatatttttttaattggatagattttaattttctagaatgtcatgttagaattctgccctacgagggcaagaaggagggagtgaggatggagattatctcaacaaggtccctcatccagggaccagggcttccaatctttccttctccccccagtcaatttcccttctttctcctttttcttctctctctttctctcatgacattaagttggtttgtgcttacatgagaagcaataaactttgtttctctttgctttatttctcatgaccacatgctttcacctatgtccattctataatgtgccacagattgcaaaatttaatggtaggaacagtgtgtatgtgtatgtaggtgtgtgtatctgtgtagggatgtgtgtgtacgtcggtggggtggggaatagtggggtggagctagaaagggagtctcaccat

SEQ ID NO: 817542 - DNA, 632 bp, Homo sapiens
ccagctgcagatttttcctagcaggcttgaacccaaaccgggccttgaacattcccaggcactgataaatctgtctaggttgttccctaaaacactaaaagaaactggcactgggccgggcgcagtggctcacgcctgtaatcccaacactttgggaggccgaggcgggtggatcacctgagatcaggcattcaagaccagcctggccaacatggtgaaaccccgtctcaactaaaaaaaaaaaaaaaaatacaaaaaaattagctgggcatggtggcgggtgcctgtaatctcagttagtcgggaagctgaagcaggagaattgcttaagcccaggaggcggaggttgcagtgagccaaaatcatgccattgcactccagcctgggtcacagcaagactctcattgcactccagcctgggtgacagcaagactctgtctcaaaaaaaaaaaaaaaaaaaaagaaaaagaaaaaagaaactggctctggccctgagccaaattcctttaactgtcatagaaactccctcactgctgatatacctgggcagaacaccccttttctctctcaacsattgctgcagcactctgtaaggaagttcctctaataaatgctttggattgatcaccctg

SEQ ID NO: 817543 - DNA, 607 bp, Homo sapiens
attgcattgaatccataaatcaatttgagagaacagacatctttatgatgttctgtttatgaaaaaggtatgtcttagctaggtgtggygattcacgcctacaatccaagcacttttggaggccgaggcaggaggattacttggggccagaagttcgagaccagcctgggaaagatggtgataccaagtctctacacaaaatacaaaattagctgggcatgatggaacatgcctgtagtcccagctacttgggaggctgaggcaagaggattgctttagcccagaagattgaggcagcagtgagccgtgcttgcaccattgcactccagcctgggctaagagtgagaacttacctcaaaaaaaaaaaaaaaaaacaaacaaccagatgtgtctttccatttatatttgtggtagacagaataataccccctgctaagacgtccatgtcctaatgcccagagcctgtgatatgttacattgcatctgagttatctagatgggcccaatgtaatcacaagggttttataagagggagacaagagggtcaaagtcagagagaagatgtgaggactgaagcagggtttgaatttgaagatcaagaaagggg

SEQ ID NO: 817544 - DNA, 460 bp, Homo sapiens
taaaaaaacaacaacaacaaccaaaaaaaaaaacaaagaggggccatgccacttctccaatatkccctcccctgtcccctttcttatcctgctgtggacatggtggcatccttggccaagtggacttcaagccataccccacaccctagggatggtgagacaactagttagaagaggactaggtcccagattaccatagtgagcacagctaccatactaatcagccagggccctgatcatcactgaacatcctttttggatatgccaaagaggcaaaaagaaatggcctgaccgctctttagttggccatttcccagggttacgtttccatgagtagccttgagggatgaggtaacatctcccagacagaaagcaggcttgcttgccactctgtaaaaatggtagatttcagctgcaacgtgagtccactatgtgtacagtgttcacctggttccctctg

SEQ ID NO: 817545 - DNA, 460 bp, Homo sapiens
taaaaaaacaacaacaacaaccaaaaaaaaaaacaaagaggggccatgccacttctccaatatgccctcccctgtcccctttcttatcctgytgtggacatggtggcatccttggccaagtggacttcaagccataccccacaccctagggatggtgagacaactagttagaagaggactaggtcccagattaccatagtgagcacagctaccatactaatcagccagggccctgatcatcactgaacatcctttttggatatgccaaagaggcaaaaagaaatggcctgaccgctctttagttggccatttcccagggttacgtttccatgagtagccttgagggatgaggtaacatctcccagacagaaagcaggcttgcttgccactctgtaaaaatggtagatttcagctgcaacgtgagtccactatgtgtacagtgttcacctggttccctctg

SEQ ID NO: 817546 - DNA, 460 bp, Homo sapiens
taaaaaaacaacaacaacaaccaaaaaaaaaaacaaagaggggccatgccacttctccaatatgccctcccctgtcccctttcttatcctgctgtggacatggtggcwtccttggccaagtggacttcaagccataccccacaccctagggatggtgagacaactagttagaagaggactaggtcccagattaccatagtgagcacagctaccatactaatcagccagggccctgatcatcactgaacatcctttttggatatgccaaagaggcaaaaagaaatggcctgaccgctctttagttggccatttcccagggttacgtttccatgagtagccttgagggatgaggtaacatctcccagacagaaagcaggcttgcttgccactctgtaaaaatggtagatttcagctgcaacgtgagtccactatgtgtacagtgttcacctggttccctctg

SEQ ID NO: 817547 - DNA, 460 bp, Homo sapiens
taaaaaaacaacaacaacaaccaaaaaaaaaaacaaagaggggccatgccacttctccaatatgccctcccctgtcccctttcttatcctgctgtggacatggtggcatccttggccaagtggacttcaagccataccccacaccctagggatggtgagacaactagttagaagaggactaggtcccagattaccatagtgagcacagctaccatactaatcagccagggccctgatcatcactgaacatcctttttggatatgccaaagaggcaaaaagaaatggcctgaccgctctttagttggccatttcccagggttacgtttccatgagtagccttgagggatgaggtaacatctcccagacaraaagcaggcttgcttgccactctgtaaaaatggtagatttcagctgcaacgtgagtccactatgtgtacagtgttcacctggttccctctg

SEQ ID NO: 817548 - DNA, 592 bp, Homo sapiens
tgctgattggtccattttacagagagctgattggtctgtttacaatcctttagctagacacaaatgttctccaagtccccactagattagctagacacagagcactgattggtgtgttgacaaacattgagctagacacaaagtgctgattggtgcatttacaatcctccagctagacataaaagttctccaagtccccacccgcctcgggagcccagctggcttcacctagtggatccctccccagggccgcaggaggagcctgtgcagtcccatgctgcgctgccagcactcctcagtccttgggcggttcgatggaactgggcgcggcggagcatggggtggcgccaatcagggaggctccggccgtgctggagcccaccaggggtgggggtctcaggcatggcaggccgcaagtccagagccctgccccgcgaggaggcagctgaggcccagcgagygctgtgcgggcaggccagcactgctgggggacccagggcaccctccgcagctgctatcccgggtgctaagcccctcactgcctggggctggcggtgccggccggctgctcggagtgcggggcccgttgagc

SEQ ID NO: 817549 - DNA, 538 bp, Homo sapiens
atacaattccagattattttttagaataagatatatctgtcagagaaaaaaaaatctaactataatgccaagctctggaacatgcctctaggaaatgttaaaagctgctctaaatcagyaaaagaggaaacatataatttaactttagagcagaactactacccaagcaaaaattttaatattttgatctcaagacaatagcctcaaatacaaaaattcaagatgtgccgcagaacatttaataatgatcattttcaaagtgtcaaaataggacaaaccatgtgtattatatatttacataccttattttctttaattctcataaaaactctatgacatattattttccttttcaaaatgagaaaaccaatgctataaaggttaactcaagtcccacacctacgaggatagctggaaataaaaaccctgtctgattcctaagtccatttctttctatgactctatactctgaggcttgtatggcttcatgaaaagccataattttttaaatacccattttagctaatactccaaatgt

SEQ ID NO: 817550 - DNA, 538 bp, Homo sapiens
atacaattccagattattttttagaataagatatatctgtcagagaaaaaaaaatctaactataatgccaagctctggaacatgcctctaggaaatgttaaaagctgctctaaatcagcaaaagaggaaacatataatttaactttagagcagaactactacccaagcaaaaattttaatattttgatctcaagacaatagcctcaaatacaaaaattcaagatgtgccgcagaacatttaataatgatcattttcaaagtgtcaaaataggacaaaccatgtgtattatatatttacataccttattttctttaattctcataaaaactctatgacatattattttccttttcaaaatgagaaaaccaatgctataaaggttaactcaagtcccacacctacgaggatagctggaaataaaaaccctgtctgattcctaagtccatttctttctatgactctatactctgargcttgtatggcttcatgaaaagccataattttttaaatacccattttagctaatactccaaatgt

SEQ ID NO: 817551 - DNA, 600 bp, Homo sapiens
aagcagggtcagggaccatatttaaggcccatggttgccttctgcgggatcctagtggcctaaaacaaatgttctgttattccagggcttccatcacctgcgcccagcttcaccttccagctttaccttctgctcctactagctgtcccctccatggttacccactggccgctctcctcctgccaccaagcctcacagggttactgattgcatctcattctcacctactttttgggaggctgttcttctatttgaaatgctctttcctctgctcttcctagcaaccttaccttcgaggtgtagttccaacatcttgtttcctgacttggacttttgtgttccacacactctgctctcagtgtataggatatcagtggtcacggtccctctttgtgggtctacatctctgtggactctgagcttcttcagaatgggtcgtgctctcctttgacctctcagtatcctgtatttagcagccacctaatggaagtctgctgagtgaaggatggagaagaaagagagtgccgctctccctggcctcagggggccccgctccstatgttaaccagacccttcccctgtagagtggtgaggagtctc

SEQ ID NO: 817552 - DNA, 509 bp, Homo sapiens
accctgggcacatcccatcagctcagtaatccttcattctcaacagcagacatccaatttggatccaaagcctgaccattcacaggaggatcgtytggggagataaaagtagagcctgctttgggagcagggaggtggttatgccagagttgagtcactatcactcttcaagaggccggagcacttgtactcagcactggggaggggaagcgtctggtgcttgtgttctcccagaactccgtccctgcctacagagggctccagccagcatcccttgattaacactgcccacctccactcactcctttctctctgggccaggcccaggccacagcagttttcttttgttatctcatttaaaccttaaatagtggtcttgggaaacatgttttctgtgtctttattctccacaaatgaggaatcacagcctccagatatatcaggtgcccatttagggcatgctagtaataatcacaaagtctaatgtgtatcgagcccttactccatgt

SEQ ID NO: 817553 - DNA, 480 bp, Homo sapiens
ctttttgttctgcttgcttggtgttatttttaattttagttagaagtagattttctgttgtggggattccaaatagacatttacccaagggacaccatttaatagacatcctttgcaataaacattggattttcttcataattctttataggtagccttgtggtaaattgttacatattacttttattttatgaacaactcaacaacttttcattagctcctattatgaggaggattctccactaaggggtgatgcagaaacatggctcttgctccccagaaagtctcagcctagaggcctgatgagaggagcaaatagagatgactggaatgcatgtgctcagctggctggtctcttggcrtaggttctgggaattctgggaacatagagaagggtcaggaaggggctcgccctccccacagacagtggcggtaaaactgagtcacctaggctgaggaagagttggctagatagagaag

SEQ ID NO: 817554 - DNA, 446 bp, Homo sapiens
ttggaggtttagaagcaacttagatggaggccttaccctctaatcttgtggcaaagtctaacttgacatccaaaactgaagktttttttaaccaactccttggccaaaacactgtcagagaacgcatttttgaatcaggttatcttttggacatgataggataatgtatgtattggagaagtcatgtctagcacttctgtgttccactgtgtctagtacagtgctgaatgcatattaattattcaataaatactcattaccaaattggtttttatataatgattattctcaaatttgcatgaaatctgaagtttctttctgcatgagcttcacaaagttcagttcaggatattgtaaatttcaggattactcagctattacttgcctcttctttagaggtttattctgttttctttttctctctccccttcttttgcctgattttt

SEQ ID NO: 817555 - DNA, 624 bp, Homo sapiens
gagttaattactgttaaaattttgataaacattgcatgtgtttattcttaatagtaaataaattatattgcatatgctggcataacttaaaaaaagcttagccatctattatgaatgcaattaaaagaccaaagttttctaagagttgggagggaacttggaaatctgctagattcattttctggtgaggaaaacatttattacatagcattcctccgaagatcctctagcttcctccttaataccaccaagggcaggttccacagccttattatgcctctgccttaaattatttttggattagttattctagaactttctgttctactcttctcacctgttgcttactcattgatcctggttttgcccttcttagtatgagtggaagtgggccaggaagggcaggcttagaggcagtgaggaggtggcatggtgaagtcagtggccattgtctttcatgagcaaaacagtccttggtcatgagactgaatgagtktcttgggtgatccttttcacctcctactcccactatattttttcttcagagacttacattgggggacttatgccttttttgtcatagcagaaaactctaaatatgtagaaagtttaaaagaaataaat

SEQ ID NO: 817556 - DNA, 449 bp, Homo sapiens
gggcctggcagatggcaattggaccattcgcagtgtggttttatggcagacactggggacacaggagtgacccagcctgactcctcccaggtaatgtcactcactggtcagactcctccactcctagagaagagtcctggccttttctaagcctgtcccttctctctcccagggacggcaggggcaggggaagaaagcagggcaacatagtaaagccacttccttctttaacccggtgtctgagggattttgtccacggctcatcctgctacaataggagacagccaagctgatctcactgggaacccacttggaccaaggaggaggtacactgagaagcaggggcccagttctctaccttgtccatgggagccctcgtttggtgatgccagccccaaggtgactgcttctccttcwgcctctgtcccagtgtggacgtgttgtcgctc

SEQ ID NO: 817557 - DNA, 344 bp, Homo sapiens
atgctcccacatgactggtatcagggttgcaacctgacagcagtaaacgtgcagctgagaagagaagcatggtcacacaccattacgtagcattgctaccrtggggctaggtaatatccatcattaggcatcaataataataaaatgtggtgagataattagaaaatgagttttgtgcatttatcatctttcctttgaatatgattcgttttattgtaaatttacataatttaattgttaatcctggctatacttaacaactggctcacaatattcctgaaattttcacagttggctctcatgagcccatgcaaaccagatccagcaccactggatgaagggcc

SEQ ID NO: 817558 - DNA, 650 bp, Homo sapiens
aaagaacctgcaaagttccaattcttaaaacttgtctatggatcaagatggctctgtccagggtcagaatgcaagaagtagcaacaagagttgcagcaatcacgaaaatgagccaccragatctgctgtaggaacatggttgacttgcagccccagatgccacttctctggatccaccactgtattctcatagaggctacacttcctgcaggctgctcccagtccaggcctgagcactgtgggcatactgatgaaagcccattcctgtcattcagtctagctctgagcactgtgggtgtattattgaaagcccataccagtccttcagtggttgtagcccaggctgtgtctctgctggcattgcaaatttctgaaagaagtaactcttggattgtgtcttcattgaccctagcagctggagcctggggagagctgagaggttatggcagaagctcttctccatggggttacctgtacagttttcttcgtgagccaagtgggaagggaaaatgccttaccacggggctgcaaactttaaagtatcaggaaatcttgctcctggcccctctccagtttctcatcttcattagcttccccaagacccacccccatcctctgtcaacatagcgttaagcagctagtaccagact

SEQ ID NO: 817559 - DNA, 579 bp, Homo sapiens
tgtacattgaaagaaataagtgccgtggagaaaagaaatccacgccccatgccctgtggaatttgcagtaaaggcracagctgcctactccttcttattgtaaatttccctgaaacaagcgtacatttttctgcttttctttttgggtttcatgtcctcaaagctatcaatgatacattttgtcatttctgatgtcaataatctaggtatacagcgatctttcttgttgctgttcaaatgacacgtatacagatggccctaggtgggcactgcagccttccacagcctcctaggcaaagctatggggaagaaggcactctgtgggcctagcccggccatgtagtcctactgttcagccttccgcaacaatcacaggcagcctccagggatcagcatagccagagaattgattaacctccccagttgtttctgcacagtgagggggccgctgggtcacccaccagaaagcaaaacccacaactagctgcttcctgggaaaacataggtggcatcatgggaagccagagaatgacatagagttagcccaggaggcaatggagacttaacagagatcaccaa

SEQ ID NO: 817560 - DNA, 586 bp, Homo sapiens
aggaagctaaggcatgagaatcacttgagcccgggagaaggaggttgcagtgagtggagatcgtgccattgcattccagcctgggtgacagagcgtgtctccatctaaaaaaaaaaaaatatatatatatatatctagctttgctttggttttttgtgcttttggggtctgatctaagaacgtttgcccaactgaaggtcataaagatttactcctatttattttctaagagttttataattttagctcttacatatgagtctgtgattcatgttgagttaatttttgtatatgatgtaagatacaggtccaacttctttctttttcgtgtagatatccagctatccctgcaccatttgttgaaaagacaagtctttccccattgaatatcttggcatccttgtcaaaaatcaatggaccatagatgtacggggttatctccagacactcaattctatttcattgaccaatatgtctgtcttcacactaataacacactattttcrtagctatccctttgtgataagttttgaaaatgggaagtatgagtgttccaactttgttcttattgttaaagataattttg

SEQ ID NO: 817561 - DNA, 632 bp, Homo sapiens
tttttctatttctgtaaaaaaggaagctgagatcttgataagatttgcatcgaatttatagactgttttggagagtatttccacttaagcaataataagttttccagtccataaacacggattrgaaacggaattatttttccatttatttaggtcttctttaatttttttgcaatattttatagtttttggtgttcaagtctttccctccttctgctaaattcattcctgaacattttattatttttatgctatcgtaaatggaattttcttctaaaatttcatgttgacattgttcattgttcagtgtagagaaatataattgatcttttaatattgatcttgtatcctgaaaccttgttgtattcatttattaattccattcatttttttgggtaaattccttagaattttctatgtacaagatcatgccatctacaaatagagataattttacttatttctcaatctggatgacttttttctctttctcttgcctaattgccctggctacaacctccaatacaatgttgaatagaagtggcaagagcagacatctttgtcttgttcctgattttatgggaaaatttttcagtctttcactattaaggatgattagtagtgtgttttaa

SEQ ID NO: 817562 - DNA, 632 bp, Homo sapiens
tttttctatttctgtaaaaaaggaagctgagatcttgataagatttgcatcgaatttatagactgttttggagagtatttccacttaagcaataataagttttccagtccataaacacggattagaaacggaattatttttccatttatttaggtcttctttaatttttttgcaatattttatagtttttggtgttcaagtctttccctccttctgctaaattcattcctgaacattttattatttttatgctatcgtaaatggaattttcttctaaaatttcatgttgacattgttcattgttcagtgtagagaaatataattgatcttttaatattgatcttgtatcctgaaaccttgttgtattcatttattaattccattcatttttttgggtaaattccttagaattttctatgtacaagatcatgccatctacaaatagagataattttacttatttctcaatctggatgacttttttctctttctcttgcctaattgccctggctacaacctccaatacaatgttgaataraagtggcaagagcagacatctttgtcttgttcctgattttatgggaaaatttttcagtctttcactattaaggatgattagtagtgtgttttaa

SEQ ID NO: 817563 - DNA, 552 bp, Homo sapiens
aatgggggacatagataaaaaggaattagttatatgtygataactgttaaagctgggtgatgagaacctaagagtgcattctgctgtaatgaactctaattttgtgtatgcttgaaaatttctctaataaaacttaaaaaaacccatcagacacacattctccactcagttcccaggcccctacagataattgactaagggctttagaattgaatggagcctcagttgggtatgactactcattaaatgatgtaaccaatgccctgccctaagttcccatgcaggaggaacactggctggagtatacagtcactgtatctcagcacaggcctggtccctttaggagaccggggtgcacaaatgatcaggccctggatgagcaaagtttcagtgaaagagtagatggtcttagtccatcttccctggatgcaggctttgggtggagaaggggtggagtggccccagtagtttgtttgagaggtaatcctagaaaacagtagtaaagagtggggaagtgaaatagggaagagaggaaggaaatccaatactgga

SEQ ID NO: 817564 - DNA, 622 bp, Homo sapiens
tccacggtcttaggtgtgggcatctgggctgtaatatttggctattacaagcagtgctgtaaagaatcatcttggcttagatttatagttcaaaaggtaaacayatttgtatttttgttggatattgccaatttcccttccataaaagttgtaccaattttcattctgattaccaatatcagagagagcctgtttcctcacagttttgccaatataatgtgttgtcatacttgtaaatttttgccactctgatgtatgaggaatggaaatcttagtgtagtcttatttatttttattttggggactgtatatatcttcatttatttagatcttcaaattcttacagcaacattttgtagcttgaagtgcagaggctttgcacatattttgttaaacttattactaagcatttatctctttgtctttatgtcttgcaagatttccacttttctactgatgagctgcagggtgtcagccatgtgctttgaaggaagtggtttgacagttttctttttagtctttgcataggtaatcaatttgttttcctccctaataaaaaagtggttcccacccctgcccctggcaaatattcattctagtgatgcatttagggttatgggac

SEQ ID NO: 817565 - DNA, 507 bp, Homo sapiens
ggttttccatcatctgtgaaaggctgaagtcataaggagaagaaaaagggagaaacaaacaaaagaaagaaggaaaataaacaactgttygagttccctaataaacatagttcactgctgttgtcagtgaaaattcaatgaccattaacatcaccactctaaaagaaaaattaccctcacttcatctatcaaatcaatatctgcacagaagagggaaagtatcatagattttaaacagcaagcagctcaataaattgtctgaggttcccaagccacattaatcagatgcttgttttaactgatattactgcaacacattcagaaattgcattggatattaacccctgttatttcaaagatatttttaaaacccctattatttaaaataataaaattatgtttataattatatggaggtgagggacaagggtggtgaagcatttacatatctccttagtaacattcaaagtttatttaaaattttatgatgcatgaattaaataaata

SEQ ID NO: 817566 - DNA, 542 bp, Homo sapiens
aaggttaatctaggcatggtcagtggtttatataacagcttgtgctgtgtttgtttagatctagcccatgcatgtgcggctgaagacttggtatacccatgagtccaggacttgagtttttgtgcacacagaattagtgaataaaattctttagcttcctccactttttcttttttatttttctctacattttccatatcccagaatgtccttttcttagttaatctagttagaaggaaagatttatttcagagttttagttcctgtgcacttgtacatctgtgtgcaactgggctgccctatagacaacatagtaattaaaaagagtgaaaaaaagagtttccaacacatataagctggttctcaggagacaattttcttgatttctctggccagaggggttgatttttctctctggatttcacatacccacactattatttttattggkgtagtgtagctggcaaagagattaatctcaagtcaaagctggaaattaaagaaaaaaataaacaggaaagttgacagtgatttttgttttt

SEQ ID NO: 817567 - DNA, 460 bp, Homo sapiens
aagctatttccaggctccaagccttttttctattactgtaaaatgaggttaataatagcacctagccgacagataatctataacaagtgctaatcmtggtgtctggcacccaattaatgctcaaaaaaaatgttagctgttatttctgtgaagcaagcttctggaacgtcctcaactcaaaattttaagccatcctccttcacatctgtttctaggggacagcaaaagatgtcccttcttagaaggccctccttgacccaactgtcccaggtggacccagaattaaagaaaaagcagggggctgagacgaagcatactgtaggtataccatgccgtttcaacaggtaagaaaccagagagaggttcagagaggaaaagtgacttgcccagtgccacacagctaacaagaggcagagcctggattcaaacccaggaccactggacctgttctcctaccctg

SEQ ID NO: 817568 - DNA, 712 bp, Homo sapiens
ggatgttctgagccgatgattgaagtttaatagaggagtttctatgtagcctacaatgaagtcaggagtcctgctgtggccgaaggaatcctcctccacactcttgaacattgcagtcaaataaggccagggcatggcccgggagccctcacagctgaaggagcagcctctggattgaaaaaaaatgctttcaaaaggggggggggaaagatgtttctttattaagcagctgcagctacatttattttgtaatggaaataaatgagtgtgcccagcacctttgaaagagaaatttgaggtgagactatttaagaatggagtgaatcgtcaaggtaagtgtgtccactgtgcggagaaagattcctggcaccttctgaggtgagcattgtgaattcctcagactcggggtcacaaggtgccgctcccccatccgacccctggggtttaaaagctagggtgcattgatttttaaatttatttttagtgaaaagttatagcaagtgtcacagagtcaaatgcccctggaccaggcaggtcggtgagcagagctggttacacaaggtgaggcccttccggtgggggggagggggkgggcatctctgctaagccccagctcatcgttggcatcaggatgccaattatttttaagagaactgagaaacccagatttttatgtggaaactcagttttcgagtgacgaattcagagctgt

SEQ ID NO: 817569 - DNA, 399 bp, Homo sapiens
tgggcatctataaaaacctactttagctaacacaatgcttaacaataaaaaactgaactctatgattgggaacatggcaaaaaatattcactaatttcttctattcaacattgtactggagggacctactcagaatagtgaggaagaaaaaaaataaaaagaatacagattggaaggaaagaaataaagctgtctttatttgtggatgacatcaatatgcaaaagaaaatccaaaaaaatctaaaaaaatctattagaactaataagtaaatttagcwaatttgcaatacacaaattcaatacacaaagattgatttttttataggcaatagcaacagacaattggaaaattaaatttaaaagtcatggtagtgtcacaaaccataaaatacttggaga

SEQ ID NO: 817570 - DNA, 577 bp, Homo sapiens
gggggaacaactgaccagactttgcctgggtttggcctctgggggtgtggggctacccytgctctccctgtcacgccatctgttgcaggataccctccctgtcaccagggaccacctagctgatggagctggaatcaccagaaaacatgctgtcatcatctatgcacttcggtggggcccgtggcagcagaatctgacagggagtggtgggcggtagatccaatgatttgctgtcacggttgtggctctccaggagccaaagatgggagactcaggcccatttgccatctgctctcctgctggatttcatctttgtgtttttgggcatgtcactcccccggcccccgtgcctgggcctcctgggccctgccaggagggtctcttggggccctgccaagggactaggccactcagagggtcctggggagatctggcttgaggtcctggagccctcacgagagctagttggcccagcagagtccttggccttcacccagcctacccctcccttgagacctagtgctgaccaatcaccattgttttctttctctctcctgtcccccacccagcagaaagc

SEQ ID NO: 817571 - DNA, 608 bp, Homo sapiens
acaaaaaacactcaactccatgatgcgaggattcatttagggactcatttgtcatggagatcatcagctcctgtcacaaagctgctctcaaatgcacccagaaacagggtgacattcttctcgcttgggccaagctggcctctcagaccaaactgtccgatgcaaatctagaatccccagagggtggaggccaggctctactaggcccaggtgagcccccgtgtcgctgctctctgctctttccagcaccccagcagcacattacacaggagggcttatggccatttttcagctagagactgaagtcttggtgggaagaggcagagcccagtctggggctcaccctgcaaggcagcgtggcacagtactgaggtggagcggagatgagaaagaaggtctgtgaggaaggaggttcttcttatatcacatgacaatcatctatcattgctccacttgtaccccacgcagaggaaaagccagatgggtccagggcctgttgtgaaatttttsccaacagagcttgctgtccatctataattaaaacatgagtggaggccataggactcattacatttcccaaaattctccatgcagagatcattgaattc

SEQ ID NO: 817572 - DNA, 610 bp, Homo sapiens
agtatttagtccttctaccatgatgtgacactctcattatattactcattagctgtgatataatgagaaaagcacgggatttagggtgagaagttttatatctgtgtcttggttccaccacttttatttactcattcaacaaatagtttttctgagactattctaggctagctgcctgaaattcaggggtggagaagatacagtccttgtcctcaaagagtttgtatagccaaacaagacaaagcaaaaataacaaatctggaggcaccacattacctgacttcaaacataccgcaaggctacagtcaccaaaacagcatggtactggtataaaaataggcacatagacagtggaacagaatagagaacccagaaataaagccaaaaacaccaacagatcttccataaagcaaacaaaaacataaagtgggaaaaggacacccattcaacaaatggtgcttggataactggcaagccacatagaaaaggatgaccctcatctctcaacttttacaaaaatcaagatttawatctaagacctgaaatcataaaaattctagaagataacattagaaaaactcttctagacattggcttaggcaaagacttc

SEQ ID NO: 817573 - DNA, 495 bp, Homo sapiens
ggttcagcatccttacatttccattcttggaacttttaatttccttttctgagaagtatttttcaatatgacttacacaatttcctactgcgtggttttatctttttcttataggttaaagttcttrcaaattctggattccaatctgctatctccttgtttgttactgatcatataactcccaaacagttactgctatgtaaacactttaaattttcataaaatcaaatatgtcagtgtcttcttctgattgttcttgcatttctgtgtcttaataaatctctcttcaagaaataagaatactcttcttgttttcttttaatggttttaatattttgtttgtttacactgaggactttgatccatctagcatgtattactaagcaggatgaatataagcaatctttgcccttttgggatggctaattgatccaacactatctcctgagtgactggcacccgttgacacacagatttacatgcttcctttatcac

SEQ ID NO: 817574 - DNA, 570 bp, Homo sapiens
tttactataaagaagtgccttcggccacccccaaaactgcagctctcaccagtgacggcagscatcacacacacggaggttaagtcctgtcccacagtacaatgtaatctccagggccccaaagccaagagatcaggtcacgcagcacagaatgcggtttcagacctgacaggaccctgcccgtgactctctagactgcacaggaagacagaagaccccggaaagcagtgagtggggccttttcctgcgctcattaaggtgtctgaggcatgagatgtcccctccagatcctttcacgtggaaccaaagaggaaggaggagcaggaagaagaacaggcagagccgttcttgagaaaggaagtgaacacagaggaaccaaacacgtaagttttttaaaaaacggtttcaatctactgaaaaagaatttccaaaacgagaccccaagagcaatagcagaaaggccttaaacacacacacacacacgtacacatatagcttgaatatcagttttaattaagctgaccatagagctttaaaaaaaaaacaaaaaaaaactgcccgggcgcgggg

SEQ ID NO: 817575 - DNA, 605 bp, Homo sapiens
tttattaaacagggaatcctttctccattgcttgtttttgtcaggtttgtcaaagatcagatgattgtaggtgtgcaatcttgtttctggttctctattctgttccattggtctatgtgtgtgtccttgtaccagtaccatgctgtttgggttactgtagttttgtagtgtagtttgaagttgggtagcatgatgcctccagctttgttctttttgcttaggattgccttggctattcaggctcttttttggtttcatgtgagttttaaaatgtttttttttctgattctgtgaagaatgtcaatggtggtttaatgggaatagcattgaatctataaaatgctttgggcagtatggccattttcatgatattgattctcccatccatgagcatggactgtttttccatttgtttgtgtcatctctgatttctctgagcagtggtttgtagttctccttgaagaggtccttcacttccattgttagctgtatttttaggtattttattctttttgtggcaattgggaawgggagttcattcatgatttggctctcagcttgcctgtacagcaacagtttttatttcattttattactacttttaa

SEQ ID NO: 817576 - DNA, 637 bp, Homo sapiens
gttcttcaggcctgctgcattgtttcttggagacctatcttgattttaggtaggctagagcttcagaatttagatgcaagacctgtgtttgtgcccattcttcttcctaccaccstcaccaccaccctcacttctgccctaacattcagtctcaatggtcctgaacctgtgaggactcagcttctcttaaagccgaggcctagaggctcaagattaaatatattaatagatataaagaacagtgctgggacatagtactaaaaagtgtttgctatgaaaattattattgaagtacctaatacagagcaaaatatccttaaaactcttgacacaaccaagtccctaaagtcccacgttgggtggcaggtgccccaacctctcatctctttctctccctaacactcctgactcctttgctgataccctctacctgcccttcaggtatcttcttcacatttcccatccctgtaagctcaagctctttcatatataatatagtttacctggtctctacttctcttgtttctttagtaagcaaccttttctcctatcagcctaacagaagttatcaaggggttggggaggcagaagattgtggaatgtttttgtctcagacacatacatatatacataatat

SEQ ID NO: 817577 - DNA, 637 bp, Homo sapiens
gttcttcaggcctgctgcattgtttcttggagacctatcttgattttaggtaggctagagcttcagaatttagatgcaagacctgtgtttgtgcccattcttcttcctaccaccctsaccaccaccctcacttctgccctaacattcagtctcaatggtcctgaacctgtgaggactcagcttctcttaaagccgaggcctagaggctcaagattaaatatattaatagatataaagaacagtgctgggacatagtactaaaaagtgtttgctatgaaaattattattgaagtacctaatacagagcaaaatatccttaaaactcttgacacaaccaagtccctaaagtcccacgttgggtggcaggtgccccaacctctcatctctttctctccctaacactcctgactcctttgctgataccctctacctgcccttcaggtatcttcttcacatttcccatccctgtaagctcaagctctttcatatataatatagtttacctggtctctacttctcttgtttctttagtaagcaaccttttctcctatcagcctaacagaagttatcaaggggttggggaggcagaagattgtggaatgtttttgtctcagacacatacatatatacataatat

SEQ ID NO: 817578 - DNA, 489 bp, Homo sapiens
aatccaattatataatgaaattgtgaatttggaaatgttcccagggtacagccttttctattcagaaatcaactccccaaccrctgggcttgagtccacactgaggacctgcagttatgtattgccaaaggggtaagaaaagggggatgcaggactgagctgaaaccccatcaccaattgcgtggaaataaataggcatgagatggactagaacagctaatctgtcccagttatcagcaattctttctctccggctattttagcagttaatttcccagctcagctgcagcagcttctcttctctaggaaaacagatgacatttcactttgaagaaagaacccattgttccctgaaatgtgatgaactgaaagccaacatttccttttatatatataaacaaatctttccaacaaaacaatgtcattagtccaagttccagatgactttaccaccttaggaactatatcttcctttatatattttccttt

SEQ ID NO: 817579 - DNA, 489 bp, Homo sapiens
aatccaattatataatgaaattgtgaatttggaaatgttcccagggtacagccttttctattcagaaatcaactccccaaccgytgggcttgagtccacactgaggacctgcagttatgtattgccaaaggggtaagaaaagggggatgcaggactgagctgaaaccccatcaccaattgcgtggaaataaataggcatgagatggactagaacagctaatctgtcccagttatcagcaattctttctctccggctattttagcagttaatttcccagctcagctgcagcagcttctcttctctaggaaaacagatgacatttcactttgaagaaagaacccattgttccctgaaatgtgatgaactgaaagccaacatttccttttatatatataaacaaatctttccaacaaaacaatgtcattagtccaagttccagatgactttaccaccttaggaactatatcttcctttatatattttccttt

SEQ ID NO: 817580 - DNA, 648 bp, Homo sapiens
gactcaattaaacctcttttcttcataaattacccagtctcgggtagttctttatagcagtgtgaaaacagactaatacaaacatcaaatgtagaactcactagtgaattaaattaatccaattcagctgtaaagatggtttagctttaaaccatctttcaagttcctgaaattaaaattttcagtccattggttatttcatcatctactcatggaattcaacaatatttttatctgatagccattccagttattgtttatatctacaatattcctgtatgagagctttagatctacccacttcaaaatatttggcttggcagattagctctcctctagtttcaaagatttctttgaaaaataatagtacttcattcattcagggacagaactgaaaaattctggggtacttaaggtagaatgattcctaaagatgtcatcatccagttgttttcaaatggggcagggatatgtgagtagggaatgctcaaatactcgatgataggcaaagatttccagggcattgttttaagaaatttaatgtcacaatcctgaaaaataggtgtatccagctcaaaattaattcttctggtaaactgattgtttcataaccttttttttttttttcaraagaaagattcttaatgt

SEQ ID NO: 817581 - DNA, 644 bp, Homo sapiens
caaagctttgatacacatatgcttttatttttcttgaccaaataggagtggaattcctgaattataagggaggtagttgcttaagttaatgagacagcctaagataacattttacaatctatggtagagggaatcatggtcctctaaagatatcctaatccccagaatttgaaaatgttaccttacatgacaaaagggattttgcagatgtgattaaattaagaatcttgagatgggggattatcctgggttatccttgtgggcctaatttaattacaagtaattccttataagaaggaggcaggaaagtcaaaatcagagagaggagatatgatgatgggagaaaaggctggaataatacactttaaagatggaagaaggagccataagccgaagaatgcaggcggcttttagaacctagggaagtcagagaaattgattatgtcctaagcctccagaagaaagatagcactgctgataccttggttttagacttcagacctgtaacctcgaaaattgcatgacagtaaatttgtattgttataagcccctaagaagtatttttattttacagcagcaagaaamaaataattaatacacattggtactatcaatgtgtgatagttacaattaaattgcatctc

SEQ ID NO: 817582 - DNA, 631 bp, Homo sapiens
attttcaaaactaaacatgcaaatgtccaacaggtttatgaaaaaatgctcaatatcactaatcatcagaaaagcaaaaataaaaactacaacgagatatcgtattgctgcagttaaaatagctcttattaaaaagacaaaacataataacaacagatgctggcaaggatgtggataaaaaggaaattctcatatactgttggtgagaatgtaaattagtacaaccactatagaaaacagtatggaggttttttttttttttttttgagacggagtctcgcactgtcgtccaggctggagtgcagtggagtgatctcggctcactgcaagctccgccccatgggttcacaccattctcctgcctcagcctcccgagtagctgggactgcaggtgcccaccaccacgcccggctaggttttgtatttttagtagagacggggtttcactgtgttagccaggatggtcttgctctcctgacctcatgatccacccgcctcagcctcccaaagtgctgctataacaggggtgagccactrtgccaggctggaggtttttcaaaacattgaaaatagaagtacaataccatccagcaatcccactactggctatctacccaaaggaaatcagtat

SEQ ID NO: 817583 - DNA, 612 bp, Homo sapiens
ttctatgccctcctcagaggttactggtgaggctacatyctagctgtcaacaggagtgaccttgataataatgcaccctgcattgcatttcttcctctcctccctctccttggttcctcagccatgctacttggatctcctgctgagtcaaccagcagcacacaagtccttgactcgggattcactttagggggtactcaagtcatcatatagtttctcagaaagctcatatctaagcctcctttcagtctgggttccaagaattagctcaaagttttaatagtaatctatatagtgttaaatgtaagataaaataaaaattttcataatttttagcttaatttttaaagacacaaccctaatcaaatcttttcttgcttattcattataacacttttttaatattttaagtggatttactttaaatgatcttttcctgtcagaaaatgggagccatatatatatatatggaatactcccatctggaattttttttttttgagttggagttttgctctcattgcccaggctggagtgcaatggcaagatcttggctcaacacaacctctgcctcccaggttcaagcgattctcctgcctcagccttctgagt

SEQ ID NO: 817584 - DNA, 619 bp, Homo sapiens
tttaagtctttgacattaaaatcatttttttttgaagcatcactaaccttactttttttctttcattatttgggaattggctacytctgcccatacttcttggtcagtggcttagctgcctgaattaatgcagcctccaacatcactttcactgacctcatgaaatccctcattaattaccagatttgcaatttcattttgccatatatttgcacagcatttgcaaataaggtcagatattgtgggtatcagaccatcaggaaggtacagacctgtgcttctggcaagaaggagtgcttgtgttaattgaaaggaggtttggagtagggaccaatgtgtgagtatttttgcgatatgaaaccttcaccatcttgtgccataccatatttcaggcccttgcataatgaatgctccagtgacagggccttccttttatatttgtacagtgtttctaagtttacaaagcactttgacatttcatttgattcttaccgctgcctattgaggaaccaccattttccaaatgacttttctgagagccagaaaggttaagtgacttgcccaaggttccagagctgcttgagacgcagagccagggttggaactcaggtgtgttggt

SEQ ID NO: 817585 - DNA, 262 bp, Homo sapiens
atttctgccttgttttttccatgacatttcttgtatgccacataaactagaaaacaatacacagayagttaagtaaattttataataataaactgcaaaattactttgcatagagattataacctatgattcacatggcagatcacattttctgtagactggaggctgcttagagaaagaaatcaccattcttagttctatggctactcatggcgagagggatgactgcacttcaggaagacctagcataaatctttaggag

SEQ ID NO: 817586 - DNA, 628 bp, Homo sapiens
tgtgtgtgtgtatagtgcaatagaacacagaagtttggaggtttaccctttataattcagacattatttactttgctgaagaatgccttcagagtcttattacactctaggtcattgaaaatatagtattgcacacatatcattttagtatgaaatatatatattatatgtaataatatgtgtattatatctgcattcatatatattatatatacactgaaaatacctagacaaatttctcttaaccctaaaacaaaaagaattaggaagccaagccgggaaaatttgatagccctttgattgttggccattttatagctgaaaaacggcttaattattgttacaagtacacactaaaataaaaagcaaatattgtttccttaaagttgaagggaggattgattgaaaagctccactggccaaaaatatttggaagagtttgtcatcatctgcttcagcctgttgaatggcagaaattcaatgcactggctctccaatgttttgaaaaaaaaggattctaatctatcattacctcaccattgaatcccccyaccaccaccatgttatcatatagaagatattcggtcaatgtctattaaatcaataaatgaatgtttcaccttataat

SEQ ID NO: 817587 - DNA, 645 bp, Homo sapiens
cgataggtaatttctcaattctcaccctcctcccaccttccaccctcaagtaggcactggtattttttgttcccttctttgtgtcctcaaatagacattttaaaaattcatacaaaaacattaggttatggctgggtgccgtggctcatgcctgtaatctcagcagtttgggaggccgaggcgggcggatcacctttgtttgggaattcaagaccagcctgaccaatatggagaaaccccatctctactaaaaatacaaaattagccaggcatggtggcacatgcctgtaatcccagctactcaggaggctgaggcaggagaatctcttgaacccaggaggcagaggttgcggtgagccaagattgtgccgttggactccagcctgggcaactagtgaaactctgtctcaaaaaaaaaaaaaaaaaaattaggtttttgtgatggttgatagtttcctaaaaatatcaccctggaaatgtttgattttcatggagttttatcaagcactcatcaatcaaccaacaaaccaatcagttaatcagtatatacatatttttgagtgcctattatatgtccaggatttyattaatgaatgaatgaataaatttacttacttgacaaatatttattaatttccttctttg

SEQ ID NO: 817588 - DNA, 642 bp, Homo sapiens
gtaatagcagccattatcagttgatccccctgtctttggaaagaatcatttcattcattgtggagagaaggaggggcaatttsaaatggcctgaggtaagtggcatttcatatattgccaatcaaattaaccttgaacctttctctgctacttagaattcctgttctttttcttctttctccatcattgagaattaagatgatgtgtataaaaccacttttctctctgcaatactgcacttcatcttcccctccctccccagggaggagggagaggaacagttctgtgcatcaatcaaactgactgagacttacagtggagaaaagtgagactctgtcaccgaatgcaggagatacaatggtgtctccgatgcaacccagtaattgcttctcccaaactccccttccctccagcactggattcgcaaatgcagcttgatctgagtcaggctgcgtgagcctcagatcagagctgccaaacatgcccttataaaatgttacaggagtgtggatctgagactctttcgtttcctggttctcacacgtggaatttggatctttgatagagtaggtctctttggagctcctggctgattttctctttatctgagcagaaagaaaacattgtagaaatgtgtgtggt

SEQ ID NO: 817589 - DNA, 584 bp, Homo sapiens
tgtttactaagtgaatacacctaccagccactccaaaaaatggcgctttacctagacacttgacttgtgctgccctaggtattaagccctccaaagggcaaatscctattttgacctctcatcatagatcagttttgtttgagttccataaaaatggatacatatacgttcttttgtgcctgcttaacttgcataatagtatgtttaagacaagcatctatgttatttttatttttgtatattcttccatagcatttattcctaaattttctaggtattattccgaaaattatctactctattattgatggatatttgagttgttcccaatgttttaataggaatgtgttaatgagttcttacatctgccttttggagcacatatattcatttatattgggtataaatttagaagtagaattattagatcgtaaaaaatagatgttaagttttggtagacttggcaaaaaagttttccaaagcgaatgttcaaatatacgttcccactagttctcaatttgctctaaatccttagatttgtcattttcttaaattttagcaattctagtgggtgtgtagttata

SEQ ID NO: 817590 - DNA, 629 bp, Homo sapiens
ccacattttttaaagatttccataatttctaggaacagtggattaaatattttggcctaatgatatacatgttacctgtggtttgttatgactcaaatagtatttgtatctttattagaattctcagcccatagtaatcatttgctcatcctggtctttctattgccttcacaaaatcttgagtttaaaaaaaaaatcaatctatttttagagatggctatttagtaggctggtcccaaatgacagtttctgaaaactagggcacatgagatcagcagcaccccttgtataatatttctttagtgagaattattcttgtttggccctgcactacatccacatgagtgaagccaccaccttactcaataatggcaggatcaaataaaatggcaccattgccagatctcctgcttggagaactttcttagcttttctcccgacaggaaacagggattgcacacaagtgtagtttccagcatataggtcatcaggattttaataaagaggactttacaaacatgtttcctattaagataactaattctagttctttgtcagtatcaggcagatgtcatstttcatgtgacttctcagcttttccacctctactcacaactttatatatctca

SEQ ID NO: 817591 - DNA, 624 bp, Homo sapiens
atgtcttttgatagagaaaatttagcccaacatggaagcagagactttcatgaacatctcggatattggcaagagaaaattctagaaaaatctagaaaaatgtgtcaatctgctgctaattcagtattttcactggtatatggttttaagtgcaagtggaatatttgaccagaattgggataatattttcagggcaaaaataaagaaagaacaaagctgggagaagaaaaggcaaacccaggcacacatgaatgactaaatctggagaagattttgtatatttagtttgtcttctcaaaaaatcctaacagaattttcaaacgcagcctccagtaggctgagtaatgactcgacactttattaacgataccaaaagcaggtctcataaaagttaggttgccatttcccttctagaagccttatggcagaggtcacattacaatctataatttttgtggtctaatggccatatcagtaattcctaatatattttgggccacatttaaacaattttaccttttaaatcatatacatatatataattatatatatgtgtgtatatatatatatatatatayacacacacacacacatatatgttggtaatgtctattttcattaatt

SEQ ID NO: 817592 - DNA, 381 bp, Homo sapiens
ctgagactcttactcattttgaggggtaaaacagtttatttctgtttttcagattgggtaaatgttattgattttgagaagtgaagccaggtggacttcctgggtcgagcrtggacttggagaactattctgtcttacaagaggtttgtaaaatgcaccaatcagtgttctgtaaaaatgcactaatcagcactctgtagctaactagaggtttatacaatggaccaatcagcaccctgtaaaatggaccaatcagcactctgtaaaatggaccaatcagcaggacatgagcagggacaaataagggaatgaaagctggccaccccagcctgcagcagcaacccgctctggcccccttccatgctgtggaagctttgttct

SEQ ID NO: 817593 - DNA, 395 bp, Homo sapiens
agctaattactaaaaagtatttatctatgaagattaaatttactggaacattagagagggtttctgcttctgcttatttaggaaaaggtttatatagtaaamataaaatcactaaagataaaaaaaaggtttacgtaagccagcagcattggcattcagctatactgctatctaagctactgctaatcacccattatgaagtgtgaaggctcatcagtcttctaggtcacataactggatttttcagagactcattaatctgcattgagccatgttcattcatttattcattcttcattcattcaataaatgctagctctctaccagttgccaggcactgaagaaatagttaggaatctctgccctcaaggagattacagttcatcttggagaac

SEQ ID NO: 817594 - DNA, 472 bp, Homo sapiens
ggactgagcgcagcgagtctctgggatcctcctagtcctctgtccatctgacgggtttgatcagcyctctggactgatgaacacagaggggcaatgagtgctatctgatcatctggcgtcaagctggcatacaagactgggttttgtggtcctaaccatgggctttggacactaaagtccccatttgtcttctgcttaggctctctttgtctctctccaaagcatcaaagaacagctggaagccctgcacacccctgcaggcatgggagcaaagagctcggcctgcgccacgccatccttcaatcactgtggcactatttcctctacaacatgctgcagatggccaagttgcaccctaccctgtaatgcccaatatcattgccctttgtcttcctttcattttgctgttccatatctcagaggaaaagggaaatacttctaatttctccatatctctaaactctgagttcca

SEQ ID NO: 817595 - DNA, 589 bp, Homo sapiens
cttgcaaggtggaaattattacataatatttctctgtgacagcctcctctttggggtcatgaaaataacatttaccttaaatgatccatgccaacatcgctatacaatcaatagcaacactgtgtggttttgaatcagatgtacttctgataactgccgtataaaatgcatgagcctcacttttccaacccaaaatgaaagtcgacatagaaaaacagcaaaagatgtcaacagactgaactcacacagaggggaaaaaaggaaaaaaacttagacaatgaagggttggctttgaagtggtccattctttattaagctaagggacagcctgaatccctagcatagtttacttaatccaggtccttaaaaagttttggattcgattcagatatggtgagctcctaagctgaacatttccacagctgacatgacttcctggctagtgagctcggcattagaaatgtctgcaggatacagtccacagtggcacagcacagaaaaccggcgctcctccctcctattcccaggctcctgagtgatacaatcaagagggaactgggatttrtaagaaagaaacagaatcgacctc

SEQ ID NO: 817596 - DNA, 537 bp, Homo sapiens
ctggattatgccatatcttgtgcaaaagagggctaaaaggcattttgaaatgacaatgcaaagggtctttgaaatcaggcamaaatgtcttcactttactaagttaatagggagcttctggagattatttggttgggaaaataataaactaagattcagacaataggaaaattactatgacagtggtttatgaatgagtttgaagaaagaatgatgtagaaatgagaggaatatggcaaaagcccaggaaaaataagaatgaagacctgcctggaagtgttagtgggagaaaggtaaacacaggaatggataggaggattatttccaaagtagaagcaaaaagacaaaaggaccacaggcatagcacacggtcaactgttgagagggaaacagggagactcgttaaaatttattctaaaatttcaagcctgggtgtgaggaaaccaatggcagcatcaacagaaatgtggaagagcctgctccacagatatgtggagtaagaagtggtgtgggtgagaagaacgcaatttccatttc

SEQ ID NO: 817597 - DNA, 543 bp, Homo sapiens
aacaacacaggataaaaacataccatcataatgcttatattcttttgsgtaaataagataaaaaaataaatatataatatagcagctcatgataaaggctattttaaaatttaaaccaaactaagggactggaaaagatgggtggaaatgagctatcttagatagagtgatcagtgaaatccctatggggaggagatatttaaacagagatgaaatataggtagaagtaattctggcccaaacaaacctcctcaaacattttttactttcttttttcctctaactcttgagtggatattgacccaacagcaagctttaaggtggcagagagtgtccttcagactgagcctgtcattattgctttaaacagagagtcctcttccccattacctcccataatgtgccactcccataatgaacatcctaatactttataaatgtaatgctgtatgtagtgtatatatatatatataatatatatgtgattctgtacatgataagtatagtatatttaatgaaggtaaaatagatttctgatttttt

SEQ ID NO: 817598 - DNA, 512 bp, Homo sapiens
aaatgacagataatgttatagttgaaatagggtatcagtgtggccttttccatgatcatagagacaacttaaatgaataatggtgattttatgcccatagtaaagcacaaggatacttttactccttggttgagttatatccaatgtcgtcaaattcagtttgtgtgccaaaacagccagtgtcagagggcataattgttggtagtgttacagtaagtagctagtcaggtatgagtggggcattagaggactccccgccatccaccaggaatgtccggcgaccatcaggtgatggtctggcagctgccatactaaaatgataattggtcatacttggagccagggagaagcaatttcccaatacattaaaaacacttgaaattggtattaggcagcttccagtaaactctcaggaattaggtgagtgggcacgagcatgtgtgttaagagatgaagtggtggagtatgrccttccgggggcattccgccagaagagggaagaacacctcagg

SEQ ID NO: 817599 - DNA, 555 bp, Homo sapiens
cttaaaatatgcagaagatgaaaaaatggctagacttgtggattcactagatgatgaacaataaagatggggtgaaacattgttatgaggttgaaaactaaagaaatttttagtcatgttacccaaggtgaagaaaatgctaaactgttcttggctagtgttttattataaaaaaaataagcactgcatataattatttgtaagaaatatatattcattaagatatctttaaacagaaagacctgttaaaaaagtattaatggttgaattgattggtaaatagtctaaatgttgtgaccagaggttaatagaaacccagtagtgcatttctcctcagagcaatgacagtatttgatgaacaatcttcatcattcatggaaactttgtataacataactactgtgaatgtcgagaatttcctatagcttgcatttgtcyttaaagccccaaagtgagacatataatttcttcttacattttattgtccaaagcaagtcacatgtccattataggcttcaatgcactaaggaagaataattttactaccggtaaggg

SEQ ID NO: 817600 - DNA, 602 bp, Homo sapiens
atattacacacacacacacacacacacacacacacacaaactactgtaactaaggcagctttaaatgagatgacatattaagctttcagcatagtgttgaaaacttgtgatatgttcaataaaagtgctttgcyctattgacctttatctttttcttaacaaaatcttcaatcagcaaattcatataacatgagctggtaatttgctttcacagcggttttaggctttttgtttcctgatcttgaatatcggtatgtttgctgctaattcagtgacgattagatcagttacacagtaaaatgttgttaaaataccttaaggctttcataattaaactattaaataagaaaaatgtattagtttgatattgtttttcaaattttttttaaaagtttctcttctttgttgtttagatattatttttacctattacttgatggaggaaatatttacatttgggcatcctttgatgattctacttgtattttcagtattctatatatttctttttgctctttcatgaatagctaatgactggttttctaccttaagttccctagctggacagtgtaaactgtgttagggttaccaaaggtaacact

SEQ ID NO: 817601 - DNA, 620 bp, Homo sapiens
agcattacatataagttatcttattccatatcaaatcttttgagtgaggtactcttatttctctattttaaagcrtagttaacaaaagtttgcagaatcaggtaaatgtttaagtttacatagttaataaataacaaactattaatatagccatgtatggctgactaggaaaatcaatgttttcataatagagttgtttgaaatagcaattactgtaattttaagtcttcccttagagggagtttgtacccattaatagcaccagtttgtgctggttatgagcaccagtttttgaagctaggctgcctgggatctgattcctagagccatcaccttcaagctatggtgtattgggtaagttacctaattatatttgcctcattctcatcatattcaaaaggtgataacatctacatgttaataattttgtaaaaattaaatgatgtaatacacacaaacaagtacacacacacacatagacacacacacacacacgtatgctaaaaatttcctgacacttacacactcaataaatgcaggtggtttcagttattttaatgtgcatttgctgttagttacttactttgtttatttatatctctttactgaaaccttttaca

SEQ ID NO: 817602 - DNA, 601 bp, Homo sapiens
atcttgtattttaaagccatctaaatcaggtatgagtgagacttggggtataatccatcttggagcaaagtcattattcatttgtgaatctgtgaaactaaaaaacaagttatcttcttcaaaaatgccatrgtggaacaaacattgaataggcattctaattccaaaaggaaaaaaaaaagggaagggataaagaggttactggtcccaagcaagtttgaaatccagcaaggaatgttccactaggttacaagacatgagaataatcctctgtggctcaaggctctaccctctgggctcacagcagctctgtcctctgcctctgtgcctgctgtctcttcctcagccccactggcttctgctccttccatgtcagactcggcctctgcactggctacatcagacccacaaacccaggtggcctctgttcacagcagttctgtcattggagttattctttctgtttcttgaaggacagcttaggtttgtagccaagtaattctgttagttcactcctgtttgtacaatcctagaaatctgacagccttctgtatttcatctcttctctgtctccttcagctcaagctggcagtatttctgc

SEQ ID NO: 817603 - DNA, 591 bp, Homo sapiens
ctgtctaccattaagtattagctttacggtgtaaasaggtaggaggatgttacacagaacaaataaaagagattcttgctccttttgtactgaaaaatcttaagagtaggaagaataagagacataagaatagaaagagggtgggacaggtagatcctgaacttttctttctgtgtttagcccagagaaaggaaagtgtattaaaaagttgagagaaacaaaaaaagttgaagagttttgcccaatgtaagttttaagatttaaaaacatgtcctttaatgttagcttcttgttacctctaattcttactcccaaatcctgtccctgaatgaatttggagagcaactccatggcaagtgaacttggcacctcagtggttaagaaattaaataactaatgtttaactgtcttaaactgtccttcctatgttgtaaggatgtgactcagaggttttcagtctccttgggattgggtgcacagtatggagttggagctttccaagggcactggggagactgaggagtggacaccttgtcagggtctagatgaaaggtatggtgaagcattggaaagggctttttcacctatgca

SEQ ID NO: 817604 - DNA, 531 bp, Homo sapiens
gctatattaagcacagtttttccaaacactgagcacctttgttggattcaatgttaggctttcaacatttatccaatatcttaatattgtcatatttttatcatactctcagaattaaatgaagcaaatatmcattcccacatctgtgaaagtaaatgtttattccgtctacttacaatgctcagaacatttgtcacctacatgcaggggaaagagacatatttttgtagagttaatttatttgaaaagttacacacattgcataaatcacctgatttacttttgtaataagataaaacatgagatttctccagaaggtagaagactgagattgaattggcaattttgttagattaataatactaacttcttacattaactttaggtttactcttggtttaaaattaagttattattcaggaagcttaataatcatcatttcaaagttctgaattcacattataacacagtagggaggggttgttccatggttgttctccttaatttaatttttctgaagtgataacaaca

SEQ ID NO: 817605 - DNA, 519 bp, Homo sapiens
ctttctctctccagttccatctccttaatgatatgaaatatgcgtaaatgctgctgcctggcagttgctgatgcgatttgaaggaacgcttgctgtttccctaataagsgagggcgaatatgcaatggtcattttttagatgctccaattagttttcatgtgtgtgtttaataatcatatcctccgtgaaccttctcttcaccgagaaagccataaagaacttagcagctctcattgatcagcaactccaatccgcatcatgaaagattgtcttactcggaagaaacgaggcactagtgcagtcggagggagtgcgctacctacaaacgctcctggtcgaggagaaatcaaataacaagtggcaaaaatcgtgtacttctccccagaaacctctgcgctaaacaccgggtcccacggaatcccgggtcctgccctgagcccagcgtggagaggggtcgcccgagggacccgggggacagcaaccccccacagacgcacacgtcccgggggtcggcgcgc

SEQ ID NO: 817606 - DNA, 780 bp, Homo sapiens
tgctgaattattcaccatgaaaagatttgaagtgtgaatttgcttaatttgtttagaaataatctggagagggtagggagaagtggatgggattctacataaagccaaataggccctgagctgataattactaaagctggataatgagcacatgtaagtttgctctactattctattttttatatgttctacatgctccatagatctcttttttccagtttttaaaattaatatttttcaactgttccaaatattgttagagccaggattctggacagggtgtgtcttcactgactatttcagccaaaatactaaggtcataatcaggtgagcagcatctgctacagaatcttctcttgggcctatttccatctgaaggtgtttactcattatccttgcagagtgctttcattatagtttcattattataaattatactttcattattaaattatagtttcattaaaatgaatcaagtaagattttggtttatcattttctccaatgagaatagggagaaagtgtagggtgatggttaaggatttgggctctggagtcagacatctccattcaagtccaattctaccatctggatatgtgaccctgggcaagttatttatctcttaacatctcagtttacttatctttaaaataggcatggataataaaacacatttcataaatatgttgtgagaattcgatgaactggagaatgtatgtaaagtgattataatacataccacatagygttatgggatccttggagtgtcacttggccat

SEQ ID NO: 817607 - DNA, 605 bp, Homo sapiens
acaaaatacttgaagagggagtgaatgstgccaaccatcttggctgccatattgcctctccccctgcaataggcaagaggttctacccagggactagaaaatgaagaatgagcatatttcccctggaaggccagaaacactttcaagagatataaattatactattttgctgtgatcacagcttctattttaaaatccttgagatacttgttagattcttgagattgtgaagcatccagaagcaaataataaatcactgctccgagcagttgttctaattccataattcctgatttattgcagttctttgaatgacggggttggggggaatggaattaacagatttcaacaagtcttcaaataacttacgagccttagttactcaataagcagtgctaccccaaaacacctcacattttggatttaaagtatttttatgctggttattgttcttctcattcatattgaagcccatacatttaccacatttactaaaaagttcacattgcaatttttttttcttgccagaagttccttcacactgtttgttaaatcatctctttacagccctttctccagtcctcctttgccatttgggtacatta

SEQ ID NO: 817608 - DNA, 605 bp, Homo sapiens
acaaaatacttgaagagggagtgaatgctgccaaccatcttggctgccatattgcctctccccctgcaataggcaagaggttctacccagggactagaaaatgaagaatgagcatatttcccctggaaggccagaaacactttcaagagatataaattatactattttgctgtgatcacagcttctattttaaaatccttgagatacttgttagattcttgagattgtgaagcatccagaagcaaataataaatcactgctccgagcagttgttctaattccataattcctgatttattgcagttctttgaatgacggggttggggggaatggaattaacagatttcaacaagtcttcaaataacttacgagccttagttactcaataagcagtgctaccccaaaacacctcacattttggatttaaagtatttttatgctggttattgttcttctcattcatattgaagcccatamatttaccacatttactaaaaagttcacattgcaatttttttttcttgccagaagttccttcacactgtttgttaaatcatctctttacagccctttctccagtcctcctttgccatttgggtacatta

SEQ ID NO: 817609 - DNA, 631 bp, Homo sapiens
agcagggatctgctcagtgactgggctgctctcttcctgctttaggccaatgcgggggagaggagaccactgtgactctccccagtgcccttggagcgcagaatgaagtgaggggaggaggagggtcacgagccctggagcgctgggaagacaggctgtaggccacaggccccgatcctgcctgggacgaggttcaacagaagtaggatggtttcatcatgacctggcaggaaaaccaccagacctggaattttgcttttacaactgtttaacttctgtttcatacaggatgaaaaccggtgaattgtaatctcacataaccgagcaagatctagtagtcataagcactttgtcagagcaaagcagacaaggcaaagtgttggaaatgtcatcggatcttcacagaaccttagccaagcagcctttcaatgcgagaaacaaaataacatggatttttatctagtaatgaagtcaacaccattgtccaccctgggttaacacattcacatctcaaagcgaatggggctgcagacactcrtgttagagagccttggaatgtcctgcctttttacgtttaattaaaattaaataaaatatacaaaattcagttcatcagttgttctagtggcat

SEQ ID NO: 817610 - DNA, 533 bp, Homo sapiens
aaattgacatataggttttaagaaaagctttattttaaaccattttaagcttgctttgtgaacaatcttgcttcttttgggttgcagagggctcacagctcctgatgctgaaatgctgtacatgcaggaggtagagagaatggatggctatggagaagagagctaccctgctaaggtaagtgtggcttggcggctggggctctttaaagttaggcttacaaatttgagaaaatcatggggaaatccaaggatgtccttatgtgcaaaggctgaggacgtgcaaaactctggaaacttaaaagctgaggtcctggtgaccaaagttttgtggtaaaacacattcccattttgtggttcatactttgaaatggtcttgaaatagagttcctaaggagggccaaactttttcaatttttatacttacctataagatcatagatctcattcagacttttgtcttcctkaatagttactctgtaggtcttcggaactttctacatctgggaaaccagtccagggaactctagcagcag

SEQ ID NO: 817611 - DNA, 631 bp, Homo sapiens
tagactcttcagaggataagaacagagtccctggaccaagagacaccagccatgatgaaagaagtactggactgacaatggttgggggagggttaaatmaacattacataataattaatggtgaggtgcctcccccagccttctttccccacttaagctcgcagaactctgactaccaggctattacttgaaaaactttgttttggagaagctgaccagcctgagaggaaagtcttgaaggcagtgacatcagggtgcccacaaaccagacaggcaggacaaatcactttccaccacagggtctagtttcaaacagaaagtcaaagtgccccatgccccaactcatgaacccagaataccagtgaccttctgagtgctccactcttaaatgtaagaccacctaggatccccagacatcagaggggaacctccagcataaaagacagccaaaacagaccacttagagaaaacaagacgaagcagggaggggaaaaatgtcaaaaccacctttcagaccacagagaaataacaaagagtattgtgtacacaaaatcagtatgtttttagaaaattaatagaatatgcagaaacaaagggatcttagaataaaaaatgtgataggagctaagga

SEQ ID NO: 817612 - DNA, 342 bp, Homo sapiens
gtatccacaaagtaagatactatgaaaaatagaacaagaaaaagtttgtggaaattaaaaaatatgcttgcctacatttttaaaatgttcagtaaggagactaaagatcaagtcaagcaagtattcaagagtagaccaacaagatcaagtcaaaaatcaagagagaaaaaatatacaactgacagattaaagtaagggcttatcatccaactaacagaatttccaccagagaacaatgaaaacaaggacarcaaattttaaaacaaataatgcaagagtatttcccacacggaagagaatgaattttcaaattaaaagggtacctaatgtacctaactagca

SEQ ID NO: 817613 - DNA, 592 bp, Homo sapiens
tattttcttaattgccatgggcaaaatcacaactggttggtgaatgaaatatttatgctttraagaattggtgttctaattcctttctatttatactgatgatcaattatttctcagtgaggaggaggcgaattttttctgtgatctatgtgcttctaaatgactaatgaagtcaatctgggcctggcagattttgccaccacttggacagacgtagcagtcgtggacgttgtgttacttctcagcttgctggttccctgttccctttgcaatgatctcattattggcattttgttttcaaagtgttatcgttcccattttgcattatgcctctgtgtgctctgtgtggagtggtgtttttttttttttttttttttttcagatggagtcttgtcttgctctgtcacccaggctggagtgcagtggcatggtcttggctcactgcaacctccgtctcccgggttcaagtgattctcctgcctcagcctccagagtagcttaaggcactgcctgccactgttctttcaaccaagtttatcttcttcaagaatattctgaagattaaatgtctttgattagcaaattctttttt

SEQ ID NO: 817614 - DNA, 607 bp, Homo sapiens
aagagagtaggtcttaagtgttctcaccacacacaaataaggtaactatgtgaagacatgcatatattaattatcttgatttttaaatcaactcactatgtatatgtatatcaaaacctcacactgtgcatcttaaaaatatatgatttcaatttttaaaaagaaatttgagttttctaacttgaattaaaatctatgctgagcaagactcaaccctttcaattccacttcattatttggcaaagggtcctagtaaagtcacagcatccagcatctttctatttctgtggattttttcctcttttctggtggaatattgacatgacactagagccctggaaacttgacaagcttctagaagcacttttgagtataagagcactgttttgtatattcggggcagcaaaaatcataccaatacataatattctttataatctttatatgcttgccagacattgtgcaagtattgtcccatttaatcctcttgaagtgttaagaggyaactattattatcatccttttttaaaattttttttattatactttaagttctgggatacatgtgcagaacgtgtaggtttgttacataggtatacacatgcca

SEQ ID NO: 817615 - DNA, 592 bp, Homo sapiens
aatactaacctcatgtcgggaacttgacatgtgtgcacaagaattgtgcatgctcttggacctgttcaagctttgacctttgtttctgaaatgtcaaggtatctcttgtgtcatcatgagcctcctcccccagcccctcatagttgtaccactgaatggacataacctatgccagaaacgataagacctgagatttgctgaacaccaccaattcttctgtcaacattcctgtcctgaaatctccttttacttaacaaacctagatcactttctgtttatggcacaagagagaagaaagtggaggcaaataatcaattacttctctccaaaagataattcttaggaaggaaactgataccacctgtctagtttatcatgcactgtctgggttcactttttctttgtcattgtcacaagctgctccacctgcataccacccaaactgctaacaagaatggaagctcatccggggcaaaatctgacttttcaatttattttatattccctgttatgagtcaacgaattcartttcagcccccatgcacatcaggaactcaacatgcttgttaagcaagaggtgaacaccccagtt

SEQ ID NO: 817616 - DNA, 630 bp, Homo sapiens
cccacagtcctgggattccatctgtccatgtctctcaggaytggcccacttcgtaagaagcccccgtcacctggtctggcctcctgggctctggagtgaactaaactgaccacagatcccgcagtaagctcaaactgctcaacctcagcaactgaagctgagcctcagacacaccatcctgcacctggcctcctggccttcttctccatcctctgatggcgtgctatccagacatccatattttaatccaggttgccacccattagtacctggtcaattctgcttatcaccctaaacctctgagtcatcatctgttaaactgggtttacaatgcctctgtctcaggaatgtcgtaaggactaaatatggaactacatgcaaaggctttctagcacagagcctggctcagaggttgtgatttctctgtgttctgtgtttcctccctgcctgcgtggtttgcctgaggcatctttataaatgctctcaagagctgattctaagtgagtcaggtcctatttctcagctgtggctggctagtattgcttccttagaagagtgtgagtttcaggaaccaagtttacaagggagcacctgaagtcaggactgctgcctgccagatgtaactagacc

SEQ ID NO: 817617 - DNA, 634 bp, Homo sapiens
atagtattttgttaatatctaggacattatcattatcatgtatcattatcgctgcagttcatttgttttaaatgccatattatattccattggataaacattctattgtttatatagtcactctcttttgatgggcatttgagtcttttccagaattttgtcattgtaaacagttctgaacattctgacacacgaacattcttatatatgcaagacttccattaggtatatatgaaaagcagaatttctgggtcagaatattcactgtcatgagaaagttatatctatcagctctaagtgtcccctcctctgtgaaatatctattcctagtttttcccatttttcttttgggtgtttgtatttttctcatcaacctctttggcctgcttcctgcctgtagaatactatcgctcaagatcctttcatgtccttaaaaatcagtcttatttaacctaggctggcagcactttcagcaatgtaactctctcgaaaacccttttcgaratgtcagtagccaaatccacaattcattttgagacatgtcttgctctccctctatatgtagtttcaagtactctgacatcatcaggctttaggagacctttccatgagacattctgtctaatggacagga

SEQ ID NO: 817618 - DNA, 638 bp, Homo sapiens
tctaattctcattagttgactttcagtaatcgatgttggccccakgcagatgttttaaatcactaacacaaacattgctgtctttggtattcttgcagtgttttcatttatgagaaaacctgcagaagaaactgcttgaaccaaagcaaagtagcaaggaaacaggttactatataatcagaaggccctaagaaaggtagcagcaggtcatataattacctccttgtggataaaatccctgtcctcaaactacgcaacctactacctgtacttcttccttaggaaccaattttttcttgccagtcttctacttggcagatgccctttaaagaaacctgtgaaattaagccaccttttttgatttttttttccaaattcaaaccagttagaattgtttcacagatgcttttaaaaagttattggccatatgatgttcatcaaaaccacaaatgcatttgcttaaaaccaaacttcaaataagttaggaaggggcgaaagtaattcaattacattagaagatgcaaaccagtagtctaagcctcagcccaccatatattgttggagcacatattttattgaaagcgtttaatcttcaaaattcaaacatcaaatctcataaaatctccggccttccttga

SEQ ID NO: 817619 - DNA, 553 bp, Homo sapiens
tcagtcatggtggatgctaaagggatccatgaaagagtgttaatggagagtgaggagtgcaggggctcccatccgctatggccttcctacattactggtggayggtgcaaggtcagaagcctgggtgcagaggctgcatgtgctcctgggcagggtaggggctatgacctagtaacactagtaacaatagtagttagggatatgacctagtaacattagtaacactgctatgttacatacgatgggagcccaggctagagtgcagtggtgcgatctcagcttactgccagctccgcctcctgggttcacgccattctcctgcctcagcctcccgagtagctgggactacaggtgcccgccaccatgcctggctaattttttgtatttttagtagagacagggtttcaccgtgttagccaggatggtctccatctcctgaccttgtgatcttcccaccttggtctcccaaagtgctgagattacaggcgtgagccaccgcgcccagccccctatttccttctttctgttgagagagttttgctggggaaagaac

SEQ ID NO: 817620 - DNA, 549 bp, Homo sapiens
gctgtatgctgagggttacatctgacagcacaagtgagagccttagcccaggacctggcacccaytgggcactcagtaaagcttagctctttttcctctcccttctttcttgtcaggagagtgtaggaggaagttgggatcaaaccctggagggagaggtcccaaagggtggagaaagtgaaggggaagagtaccgtgaaagtcaggctggcagcccagcctgtttcatcaggacacccccagagagctgccccttgctgagcagaggtatccagtgagccatccatcagaagcactggcagtgctggtaaaatcacagcttccatagccccatcacactctattctctaaatccccatgcagtaggcctgggcatgacctgggagtcagcattataacatatatcccaggaggccccactgcttagctgggtttgggaagccctgctcagtgaatttgcctttgataagcagcccagaagcctccttaaactgaagctattccttggccatctttttggtagataaaaagtggcagcaacagggaatt

SEQ ID NO: 817621 - DNA, 317 bp, Homo sapiens
cgtggtggcatgcctgtaatcccagctactcaggaggctgaggcaggggaatcatttgaacccagaaggcggaggttgcagtgagccaagattgcgccactgcactccatcctgggcgagagagcaacactccatctcaaaaaaaaaaaaaaaaaaaaagaaattttaagttatgtatgctttttgtaaaaraaaaaaaaagttctaaacaataaaaaatgtaggaagcgattattcattactcagagattgtgtaaatattgttgtctggtgtaaatatttttgcagacttcatgcatatacaaacttacgtttta

SEQ ID NO: 817622 - DNA, 386 bp, Homo sapiens
ccttggcctcccaaagtgctgggattataggtatgagacaccgcacccggccaaacgtttttctaattagtttctaaacaaactcatcttaacagcacaacccctattttctagacatcaatattattgtacttactgatttggatctgatccataatccaccagaacatcaacgaatttcctaaggcccaataacgccgcaacaaaaagtgctgtttggcccaaggagttaactgcatcaacataaattcctgcaaaggaaatatcagaatcaatgcaaatatcagaaaatttcctgagaaggaactgggtagggggtgggggaattacatatttttatagtgtactttcatayattgctgtgagcttttttttaaaaaaagtac

SEQ ID NO: 817623 - DNA, 608 bp, Homo sapiens
cttgtatatggccatgacttttcagagtccacatgtcaatttcctrtacaaaatgctacgcactaaagaattttaactgtgtataaagtggatagaagagttatgttattttagtaatcaaaactcatatgtaggtccaaatgactcaaattctaaaccagataaaatatattcaagtagaatttataaaacccataattgaactaaaaaacgaaatatttctattttttgtgaaacataatgaagacaatctagatattattcataagtcatgccatctttacacaagatgcttttccatttctttgttaaatattgtaagaaaggggaaagccaattctgttacctaaattagtagttacttaccatatgaagggggaaaataaacttcaattccattttcataacttagtcaagaatgcttgatgaagaggcctctttcatgtgcttcttgattattataaaacctaggaaagagatatatacaagcatggaatgtttcactatcaagaagaaaaccactcaaacaatattagtttctcatgtcagtgattatttctcatgagaatgagaagtatgccagccaactacatgccatttacaagtct

SEQ ID NO: 817624 - DNA, 625 bp, Homo sapiens
tgtgtgtgtgtgtgtgtgtgtgtgtgtgtgtgtgtgtgtgtgtgtgtgtgtgtgttaaggctatagagctatatatagctgctgcttttaagttcccatctacagtgaaacacagcttccggctttctctgaaaaaggggctcgagcttgcaaacaggcccagtcactgagaaatacctacatccagattagaattggttgcatttttttaaaccataggcaaaactaatcttatgtggggaaaatgtaatcctttcccctctgttacttctcctgcttaaccctcaatcccctccatccctgcagtcatataaaggtgttccggagtgttacctattaggatgaaaagagaattcgtatctggcctttagctcttgttaagtggttttctaatgttgagcacccatattttcactggttttaaataaacacttacagagtgaagcacactggacttgaagaaagaagagagaacattcacattccagcatcatactggagtttggggatgttggtcaagttacttttgtttccacatctgtacatgycatgggaaaatttaaaaagatatatagaagtgttaacagtaagtaactggttagtaaggacttggagttagttgaac

SEQ ID NO: 817625 - DNA, 488 bp, Homo sapiens
tccataattataaagtgtactgtttgtccatgtatgtgtgtttatgccataacaagaactctgcmtatgtagatttatactgattaattaaattaaatggaaaatgctttcattttagatgtacatgtatggttatattattgatgatcaagcttgaataaaatctttaactataacatgaaagattaaactattaaaaacatcttatcttgtaatagataattagatgctctttttttgtggtacttgcggttgcatgttcattttttaagataatttcttaagtaaataagcttgtgtatggcctgttgtcctcctgagcattacctcatatgttacttttattcttataatgctaggtttttttacactccgagaagtaaaaataatttcagttctgtgttaactttaacaggtcatttgaatcatacatttatttatacttgtgtggtcctctttattaagataacagctttgtcaaatgtcag

SEQ ID NO: 817626 - DNA, 488 bp, Homo sapiens
tccataattataaagtgtactgtttgtccatgtatgtgtgtttatgccataacaagaactctgcctrtgtagatttatactgattaattaaattaaatggaaaatgctttcattttagatgtacatgtatggttatattattgatgatcaagcttgaataaaatctttaactataacatgaaagattaaactattaaaaacatcttatcttgtaatagataattagatgctctttttttgtggtacttgcggttgcatgttcattttttaagataatttcttaagtaaataagcttgtgtatggcctgttgtcctcctgagcattacctcatatgttacttttattcttataatgctaggtttttttacactccgagaagtaaaaataatttcagttctgtgttaactttaacaggtcatttgaatcatacatttatttatacttgtgtggtcctctttattaagataacagctttgtcaaatgtcag

SEQ ID NO: 817627 - DNA, 638 bp, Homo sapiens
aatccctggcaggaagctaacaattcaggaataggcaaaagagacctagcaacaaacagtaggaacaatccctagagaaaattatataatctttgaccttttggtttcttcctatgtatgacttccttttagggaagctatcataatttgtgatctacagccaattggaatccataagtagatacatctgttttgtgtacattgtggaaatgccttgtgaattaattgattattattgttttatgaataaaggtccctaatggtatctttccaaaagctcacctcaaagagcacttgtcaaacagaaatatttcattattaaatattttttctaaaacatcacattatactccgtaaatatgtacaagtattatttgtcaactaaaaatttaaaaaagaaaaataaattttctcaagttggtaaagaattaatgcccagcatgtcaatgactcaagcacattgacagtggactaaatgtcacattaaaaatctactgagctcttgccctatargttagcaattttggttctgctgcacacaaaaacataaaataactaccattttttaatacctacttgatatcaagcacttaactgagacatagtcctactatataccagacacttaaacaagtcat

SEQ ID NO: 817628 - DNA, 283 bp, Homo sapiens
cctccaaactgggaaaagttaatgtcccaaaccttaagctggttggcttaggactaggctcagcggaagggaacccagaagcctgatgtaccatcaaaagggtaaaaktttttttttttttttttttttttttttttagccaatcaggctttttgcccccttctccccatacaaactggtaaaagcccctgggatttttgagctgtccttaccacacactcttatttcatatttatacgtgttttctaataactcagtttgtctcttcttcaggccatgaaac

SEQ ID NO: 817629 - DNA, 524 bp, Homo sapiens
ttaagagaagttatacaatatttaccagcaggtcactacttacagagtccaggctaacagcctccaggacctgcatgcaaccagaaatttagaactggatctgtacccagttagcattggttgccytggaaataatgcatttctcctcaactgatatgaacaaggagattcaagtgtcagagaggtgcatagaacaaatgagcttgaagcctactccctactttgagattctgcattcttattctaaaaatatttatggaggattttggccaggcatggtggctcaagcctgtaatcccagcactttgggaggccaaggcgggtggatcacaaggtcaggagatagagaccatcctggctaacgtggcgaaaccccgtctctactaaaaatacaaaaaattagccggacatggtggcaggcacctgtagtctcagctacttgagaggctgaggcagcagaatggcgtgaacctgggaggcagagcttgcagtgagctgagattgcaccagtgcactccagcctg

SEQ ID NO: 817630 - DNA, 612 bp, Homo sapiens
cttagcagggattaggagacaagaagaaagctggtttctccaacartcttcctcagattccctagaatcccccctttttgcacagcttctctggagctatgaagttcaaagcattgaatccaaactcgaagtccccattcaacccactcagccttgactgggctgattggatcattgccattttgatgtagaacctttgctctcattttcatgttcaattttctatagtttccaagctaggaagcatttctgtctgtatagagttgtttgcagggatgaaatcaggtattttattttcctggtagacatagtttgaagggacctctgatgtttgagacctctagattcctagcattttgatggcagaaactgtggttttcttatctctgaacttccagtgcactgcaaagttctgggcatatattggtgcttaataaaccctgttaaatgaataaacaaatgattttttctttattacacccccatttcagtagcatggaattatgaggatgattttgccaaattatgagtaggtcctattagattaggtttttctacaggaaattattctttcaaactacagtgtctaggaagtaccttgcacaaaataga

SEQ ID NO: 817631 - DNA, 475 bp, Homo sapiens
agtctgtaaagcagagaactctctcttcttccaccacaaaatagcctgtgctcacaccactctagagaaatgcasaagcaacacgtcctagaaactctcacgagtgaaacagcaacctgtgctgtctttgctagtttctgagggcaaaaaggcacagtactgtgagaactcataaaatagcatcatgctcactcaccatacttctcccaaatgaccatatacactgagtttttatttattatttgtttattttttaattaattaattaatttaatttttttatttttttttgagatggagtctcactctgttaccctggctggagagcagtggtgcgatctcggctcactgcaagctctgcctcctgggttatttatttatttttaatagaggtgggatctccctatgttgcccaggctgatctcaaactcctggcctcagtgatcctcctgcaggaggatctcaaagtgctggg

SEQ ID NO: 817632 - DNA, 642 bp, Homo sapiens
attaagaaattattttagacagatagggaggaaaagggtccttgggaagttayttttcttttaaagcagctccagaaatgtttcttgtctagcaggaaagccctggctcttaaagctgggctggcaagctttggtatgcaaatacaggccattagaaactgtgtccacccaaacattgcgattcccgctgtcttcttgcccttgccccaacatctgtctgacaacatggccgcccccacatatccccatgtgtgcagaacatcatggcgccctgaatttgcatattaaaaggctagagtgggagggcaagtcccccccgcccaggctacatgaatgacatgcctggtcaaaccaatcccctgagccctatgcaaatcagacaccacctcctccaaccttctcatataagcagctacttctccccccacaaacgaggttttctctttgttggaatcccccctctttctgtgtctgtatgggggagctgtttttcttccttccttctttcttgcctactaaacttttcgcactttaaaaccactccatgtgtgtccatgtcattttatccaaacccgtgtgagaccaagaaccctgatgttcctccagtcattggagccatattattaccaggggtccttgctc

SEQ ID NO: 817633 - DNA, 332 bp, Homo sapiens
caaacacggaccagaagagtgcagttgcaagatttaatagagtgaaatagagtgaaaacagagctcccatacaaggggaggggacccaaagsgggttgcccttgccagctcgaatgcctgggtttatatcctgatccttgtccctcctgctgtgctctcaggcaatagatgattggctatttctttacttcctgtttttgcctaattagtattttagtgagctctctgattggttgggtgtgagctaagttgcaagctctgtgtttaaaggtggatgcggtcaccttcccaactaggcttagggattcttagtcagcctaggaaatccagct

SEQ ID NO: 817634 - DNA, 595 bp, Homo sapiens
tagcacaggctcacacctccctgccgctgtaggaagtgccctaagtggtgttgcatggagtctattatcatgaaaactgagctcaatctggaatagactgtactgttcttctgtaaacctcacaggtactttctcttagacctctgcataaggatatcaagtgactagacttaatcccaaagcccccacttatcttgtttcctatgaaaraaaaatcatcggtgaaagataattttaaatggtgacaatttggaataatttcaaaaattaaaagagattatttatacatgagcatttggtgtgtattttgctacataacatattttatgtattttactagcaattccctctcctcaaaaccacataaacatctaattactactttttaaaataacctatttgtgtatgctgttttattctaaatataaatcaatagtctctgggtatagaaaaagtgataacaattgtagccatataaatatttatgttattatactatgtaatacattgaggtacctctgaaagaataatacatcataaggcagttgtaaatgttcttatgtttttatcatgtaatcattaaaaaatgtaatga

SEQ ID NO: 817635 - DNA, 482 bp, Homo sapiens
ctgcttcccttttaaatataagtttcagtttcagataatctctttgcacatgcatatgagtgtacactcttagaagcagccaggccacatcttgaatgcttgctacttaaaaatttcttcagccagataccytaaattatctctctcaagttcagaattccacagatatatagagcagaaacgcaatgccaccagtctctttggtaaagcacagcaagagtgacctttactctagttccaaatgagtttctcaccttcatctgagacctcctcagcctggacttcactgttcttgtcactatcagcatttggtcacaattttacatgtctctaggaggttccaaacttttcctcatgttcctgtcttcttctgagccctcaaaactgttccaacctgtgcccattgcccagttccatagctgctgccacattttcaggtattgttatagcaatgccccacttctctggtaccaattttctgg

SEQ ID NO: 817636 - DNA, 564 bp, Homo sapiens
tttcaaattgacacccaagcaaagcacacaaacatcacacttgagcaacactagctacaataactaggtagcctttctcattagggctgaggtcttatacagcattgcaatgaacttcatctgaatactagcttgtatgccaactacaggtcaaactccaaggacttcttgctctgtgcctctttccacaactttccttattgtgtgcaattgtctcaggtactcagagcaatgtaggctgacttccaattagtcctccaaagttttaaggacttacataaatgactatatggaaacaatactctctaaggaatcttactaccctggaaacaagatatagctacccagtcaatttctattcctcatgtaaattccataaccttttagttaaaactatcacatattctcaagatctactttatattgcactgatcctcagccaaagtcagtccaacactctaggcattttgaygttgccattctttgaacaagtaaaagtataagaaaagtataagaggaatatatatatatatatatatatatatatatatatatatatatgac

SEQ ID NO: 817637 - DNA, 564 bp, Homo sapiens
ttctgtgtgaatctgtagtttttatcaggccctccaaatggatttagagcttataagcaagggtgggggaaaacasacatgtagataaataattcaatgtaactcctcagagtttgagtgggagcaggtcaaaagcttcacagaagaggtgatattcgaccacttcagccaagcaggtggaaagagcattccagggatagggataggatatgcaaaggtataaaacgataaaagagcatactgcatttgggaaactacaaatagtttgatatggcaggaacatgagaccagaggcagcatgccaactccagactgacaccctcctgcattcactccacttatggaatatcaccaactgcttatagattcatccacagtgtccccacactgcaatagctgcttagaagagatgactagtaggcagatgttccccacagaacctggcccttatctcagaattttaaagtgagaagcaatgaaagaaggtttgaaaaagtagctttattctcctatcacatttggattcctagtttgggcacttaggaaatcaccagtggtaaatgg

SEQ ID NO: 817638 - DNA, 478 bp, Homo sapiens
tctttatttctgcctttctttcgtcgtgtacctatcgcggggcctgccctgataatcacgtaggttcttttctgttttcctaagcgtcgactggcttgagaaataaaaggacagagtacaaaagagagaaattttaaagctgggtgtccgggggagacatcacactttggtaggatccgtgatgccccacaaaccacaaaaccagtaagtttttattagggagtttcaaaaggggagggagtatatgaataggtgtgggtgacagatatcaagtatttaacagtgtaatagaatatcacaaggcaagtggagacagggcgagatcacaggaccacaggaccgaagtkaaattaaaattgcttatgaagttttgtcaccattgtcatttataacatcttatcaggaaacagggttttgagaacaactggtctgaccaaagtttattaggtgggaatttcctccccctaataagcctggg

SEQ ID NO: 817639 - DNA, 478 bp, Homo sapiens
tctttatttctgcctttctttcgtcgtgtacctatcgcggggcctgccctgataatcacgtaggttcttttctgttttcctaagcgtcgactggcttgagaaataaaaggacagagtacaaaagagagaaattttaaagctgggtgtccgggggagacatcacactttggtaggatccgtgatgccccacaaaccacaaaaccagtaagtttttattagggagtttcaaaaggggagggagtatatgaataggtgtgggtgacagatatcaagtatttaacagtgtaatagaatatcacaaggcaagtggagacagggcgagatcacaggaccacaggaccgaagttaaattaaaattgcttatgaagttttgtcaccattgtcatttataacatcttatcaggaaacaggrttttgagaacaactggtctgaccaaagtttattaggtgggaatttcctccccctaataagcctggg

SEQ ID NO: 817640 - DNA, 633 bp, Homo sapiens
tatttggggtattttttggttccatatgaattttagagtagatttatttctaatcctgtgaggaatgacatggtagtttaatagaaatagcattcaatctgtaaattactttgggcagtatggccattttaatatttatttttccaatccatgagcatggaatgtttttccacttatttgtgttgtctgtgatttctttcagcagtgtttcatagttctttttgtagagaattcccatctccttgggtggctgtattcctaggtatttcattttctttatggctattgtaaatgggattgtattcttcatttgactctcagcctgggtattattggtgtataaaaatactactcattcctgttgattgattttgtatcctgaaaccttgctaaaatcacttatgagttatagcagccttctgaaagagtctttcaggttttctaagtacagaattatatagtcagtgaggagagatagtttgacttcttttcgtatttgratgttcagattctatttctgatttgacttctcttgctatttctaccacatctgcagttatttattccactaaaaatttaaagctctcaaagtcaaccatgaatgttagaatcaacttcttccaaagtcctgtt

SEQ ID NO: 817641 - DNA, 613 bp, Homo sapiens
ccactagtatttctcatcatctttgaaatcagaaaaaacaattttgcttccctttaggaacgtcagcccatacagttgtcagggtcttcacggagttgacctctgtttaaaggaatagagctactgctacttgaaaacatacgttagtgtttgttaaaaaaaaaaaggccgggcgcggtagctcacgcctgtaatcccagcactttgggaggctgaggcgggcggatcacgaggtcaggagatcaagaccatcctggctaacacattgaaaccccgtctctactaaaaacacaaaaaattaaccgggcatggtggcgggcgcctgtggtcccagctgctcaggaggctgaggcaggagaatggcatgaacccgggaggcggagcttgcagtgagcagagatcgcgccactgcactccagcctgggcgacagagagagactccgtctcaaaaaaagaaaaagaaaaagaaaaaaaaattcagctgaattaaatttaawggagtttaattgagcaatgaacgattcgcaaatcgggcagcctcctgagacacagcgggctcagagactctagcgcagccacatggtggcataagatttacagacaggaaaaggaa

SEQ ID NO: 817642 - DNA, 629 bp, Homo sapiens
gtgtggctacacaatctgcctacagagggatcctatttcctgtgaacacagagaaccagtatcataggagaagatatttgttgggttgatttgatttgccatgacctttctcaatgtaccgctaaagaattaagtaattttgatgtctatctaagaatacactaagaagttgcatctattttcctccctctcaaaagttcagttctatcaactaaatgaatactggttctagtcaaactgtcctggataattgcacctattttcctctttgttcatgttgttaacttgaaatgttctgactggtgaataatcaaccagcatttatacatgttatgtggctgctgcacttcacagatagaaaacttgaaatctattacctaagtaataacggcttgaaccatcttagtgggtttctcagataagaagacttcaagtattcactggactgtattcattttcatgtgaacattatagatgagattttagcccttattattgatttagkattgttcctatctgcataaagtgccttttttctcttcttgcataaagttattctagcctcagggtaatgaggacatttctctccaggaggtagaatatgatgtggcaaatgtatctgcatatcc

SEQ ID NO: 817643 - DNA, 612 bp, Homo sapiens
aaaaaatatcaataccttgatttgtaattgcattgagtaagttattaaaatggatgatttgtacattcaggcataaagtaaagaattaaagaaacacartgaataaatttgtcagaatagactaaagacatgaacaatattatttttagagaggctaatctgaaaaactaaaatatcgggagatatccaacatctggggagaggaccaaatattattttatccatgaaagttttgtcattctgactttattaaattatattcaatatatttatttacaaaattgataagcgttagttttttaatattaattttattaattttaccctgaattcacacatcaggttttctggaccagagacaaatatttattaataaatgcaagtcagacatgctggctcacacctgttatcctagaactttgggaggccaacgtagacagaccgcttgagcccagaggttcaagtccaacctgggcaacatggcaaaaccatgtctctacataaaatacaaaaattatccaggtacactggcacataactgtagtcccagctactcaggaggctgaggtgtgaggatcaccagaccctggggaggtggaagctgcagtgagc

SEQ ID NO: 817644 - DNA, 607 bp, Homo sapiens
gtatacagacacagagtcaatcctcattattcataaattatatatttgtgaatttgcctaatcactaaaatttgttcatgaccctcaaatcaatacttggtggctccattgcagtcattcatggatgtgcttggagcagtaagaaagttagtagccaatctcagctgaggttgaacaagggcacactctgccttcttgttgcagctctcttactggaaacctatctccttttctgcagtttactttgtgtcatgagtttcatgaaattgtggggtttgcgttgatggttttgatgcttggatgtcctgcaaggatagtgttgatgtgctatctagtcttcccaagcacaagaaggctgtgaggtgctttatggaaaaaaaaatgcatgtgttagataagcctcattcaggcatgagttacaatgctgttggctggctgggcacagtggctcacgcctgtaatcccagcacttcaggagtctgagatgagtgggctgcttgagcccaggagtttgagacttgcctgggcaacgtggtgaaacctgtctccacaaaaaraaaaaaaaaaatacaaaaattagccaggcgtggtggcatacgcctgtagt

SEQ ID NO: 817645 - DNA, 606 bp, Homo sapiens
gagttctaagtttttactttgtgttcttatttaagaaattattactgtaatatacttattcatatcatttctaaacaaggtggactataaacctrtaagtaatatttaagggggaaatgacaaccttttgactcagtgttatggcataagcttttatatatactatgtataagaagcatcagtataaaagtttttctgtccgatatacaaaattttataggaataaattacttcatgtattttctgtgccttatttgtctttatattgaaacacatggaacaaatttttctttcctctttgttcccaggaaatttttaaaaatattctttcatatatctttacatatataaaaaagagaaataaatgttgacttctaattaattcacccaaaacaccatatgataactacttaccttaagtctttttggtggtctcctatattattttaattaaaaaatttagtattattattaatattaagctgcctgaaataatttttaagaagctgatcatactttctaaaaggctcataactaggagacatgtatcatagatcattaaatgtaaaaatatttttggaaatattctttagcttataaaataaa

SEQ ID NO: 817646 - DNA, 602 bp, Homo sapiens
aatattccagatcttgtattatagtttaacatagttttaaagtgatgttctgaaaactaataaaaagttaaattctgtggacrtagcctaacttcacagccaaggacagaaaagacatataattctttgcagtgaactctgcacaccctagtaacaatctattactgtcaatctgaggttgagtgaatatcagacaatgctagtgcaaactccatctttcattcctaaagctatccttctgttgatttgagctgcatcaaggattacaataaaaattgaagcactcataagtaatacctcttcagacaggaaaatgtgaactgtccttctgggaatatttaatgtcaaaatctaatacaatgcttctcatcttctttgactatgactaaacctatatgctgagtggactgaccacttgctgttacacctgctttgtggcaactcactcaaaaaagaaatcaacaaaaagccatggaacaaaaagtgataaatttaaagtttcttctagtagtaaaattcaggtcaagatccaacgtttaattttaaaatgggttatgacctcgttgctacaggatcagacaaccaagtggaaagataaaata

SEQ ID NO: 817647 - DNA, 582 bp, Homo sapiens
aagctccactgagaacttaggatccctttctaacccagagtcatgagaactaaaaatatctcaaatamctctattttgaaacattggaattgagtcaagaagtaatatattttgggactgccaagtgactccaacattattcataggaacttaagagcatttggagaaaggctgtgatttatatctaaatcacagtgcttatgtgataagctaaataaggttcctcaaactctatggtaaaagacaagaatgttttacaatttccaataaattatggaccaatagttttagaaataaaagtgttgcagtgatgttgacttgctagaaaggtttctatacatacactttcactttctccacagagacagctaatagtttgtagactggcaccagcctgtgggtcactctttgagcaaccttgattcagagcactgaatctggagccagactgtttgtgtttgaatgctggctccatcattgttggctgggtggtccttttttttttttttttctcatcattcaacttgaaagctgggtggtcttaagggagctttttgattcggtattctcatttgtaaaatg

SEQ ID NO: 817648 - DNA, 551 bp, Homo sapiens
ttagaagttcttgtcagtgaggtgggaaaggccagctagtgttttgatatgccaacagccacgtagatccctcacactgggacaggccggtaggagaagaacaaattaaattcattctcttttccagcctgcactgagattcaacccagatgcctcggtctgttgaccacagtctgtgtgccccagtgccttggtggggagaaggcacgttgctggaatcgcttgagggatggaaatggccaggggttttggaataaaggatatttgcagtagaatgaaaatgattgttgacttgctttgctagtttttctcaatacttaaataagaatatgggtgtttttaactgattttaaaagtttggaggaagaggagcctcactaggcacgctgtttacagcgttaatttcctgggtaccattgttcttcctcagaaaacccagatgatacaaacaaaatgaccattttttttttcactgytgctgagaaagaatttgatttgtaacaagaagtatactccacttataggtgacatttttatttttgtttttccca

SEQ ID NO: 817649 - DNA, 570 bp, Homo sapiens
tttatgtaaagatgtctaaaagtgacagagaacatcatgaacaaaaatattctaagaatatttctcatttattcattaactcagtgtttactgaatccctacatgtggtaagtgcagcgctcactgttgggatatgaagatgaaaagagggttcctgtattcaaggaactcagagtctggctggagagagcaatcaatatgcatctcagtccaagacatgcgtctaactgaggctcagcacaagttctgtgtcagccaagagaaagagtgactaagtgcctgaaggagcaagcaaagtcttcatgaatgctgaccaaaaacgataaaaatagtactgactgtaaatgtaaaatataagcatgttatatatgctctgcttatttataacagctattttggggtgagaaaaaagaattgttttgtaggaaaaggtagtatacrggacaagccattagatttgtcccttacacattcacatttccccacactccctgtcactgagaaacccagctttattcaagacagctacacacaggctggctctccagacatactgggtggcattacctt

SEQ ID NO: 817650 - DNA, 598 bp, Homo sapiens
ctattctgacactgtctacctggaggtagcctcagatgccacaggttgagggctcagtttctgagaccgttcccctcatcccaccttgggttcgattaatttgctggagttgctcagagaactcggacatacttacttcatttgccaggttattacaaaggttatggttgggaagctatatagggcaaggcacgtaggaaggggcacagagcttccatggcctccctgggtgcacctccctccagggatctccttgtgttcagctctctagaagttctccaaaccctgtgctttggagtttttactggaggcttcattacataggcatgattggtttaccaactggcgatgggtgagcaacttatcttttgatccctctcccttccctgaaggtcaggaatggggctgcaagtcccaatcctctactactgctttggtctttctggtgacccatcctgaagctacctctgggctggcrgccatcaagtcaatcatgagcatacaagaagacctccatggagatcctaaggattgtaggagtagtaggtcaggaaatggagggggagaattgaagaccacatatgtattttgtaatatc

SEQ ID NO: 817651 - DNA, 649 bp, Homo sapiens
catcgtccgatggaaagatctggcaagccacgtatgtaaccttaaactttcttgcagccacgttaataaaaagggggaaaaaaccaggttgaacttggtttgaagagtctrttttgctcaatacatctaaaacagtatgattccaacattctgttttcatgctaggtcttcaaaatccaatgaactcactgcacatctcaagttggacaccagattttcatcggcaacatgatctgtgtaggtttcataaaatgtacagctattcacataccaaagctgttccaaaatgatgtggaaaaagtgcaaagtctttacgcactgaatcacatattagctttcaaatgtaaattcaactgaaaggatctaacatgaaagattcagctcccctgtcacactcaccacgctaaagcgctcaataggctagaccggacggcaagggctcacactgccccgcattacgaatgggtctctcgccctgttcttaccccacagcaaacattccaagtcccccttaggacaaagacgctgttccccaagctggttttccaggaccttctcacctcattgctcaccatccccaatcctgcactctacacgccagcacaccaggccctcagcagcccccaggccttctcaatttctatgttcc

SEQ ID NO: 817652 - DNA, 649 bp, Homo sapiens
catcgtccgatggaaagatctggcaagccacgtatgtaaccttaaactttcttgcagccacgttaataaaaagggggaaaaaaccaggttgaacttggtttgaagagtctattttgctcaatacatctaaaacagtatgattccaacattctgttttcatgctaggtcttcaaaatccaatgaactcactgcacatctcaagttggacaccagattttcatcggcaacatgatctgtgtaggtttcataaaatgtacagctattcacataccaaagctgttccaaaatgatgtggaaaaagtgcaaagtctttacgcactgaatcacatattagctttcaaatgtaaattcaactgaaaggatctaacatgaaagattcagctcccctgtcacactcaccacgctaaagcgctcaataggctagaccggacggcaagggctcacactgccccgcattacgaatgggtctctcgccctgttcttaccccacagcaaacattccaagtcccccttaggacaaagacgctgttccccaagctggttttccaggaccttctcacctcattgctcaccatccccaatcctgcrctctacacgccagcacaccaggccctcagcagcccccaggccttctcaatttctatgttcc

SEQ ID NO: 817653 - DNA, 542 bp, Homo sapiens
aagatgctggaggcagagacagcaggatttgggggctgagatggaaggttggggcttagagaggtctgaaaggactttgactggagggattggaaggagtgggaggaaagaacatggtgtgtggggggccagcagcctgaaggggcccagccgccagtgctgggtggaaaggctggtgatgcggatggcccgcctgccaagggcctggagtgctcggtgcttatcatgaggacactggggagccatggaaggattgtgagcaggcaaggggcagcatccagggggaagaggagctggaccccagctgtagagaagagagaagagggcaggagagatctggcagacagtggatgtcagggtgaggaggcaggaggaatgcctccaggatctccctgggtgactggatggatgacaaagccgtcggcagcttgggaccctgrtgaggggcaggcacctgcagggggcattaatcaccccagcgtggggcaggcatgagcaacctctatctgtgggcccccagggccatccaggaagtttggaaa

SEQ ID NO: 817654 - DNA, 510 bp, Homo sapiens
atctcagactgctgtgctagcaatgagtgaggctctgtgggcgtaggaccctctgagccaggcgcgggaatctcccggtgtgccrtttgctaagactgttggaaaagtgcggtattagggtgggagtgacccgattttccaggtgccatctgtcacccctttccttggctaggaaagagaattccctgaccctttgcttttcctgggtgaggcaatgcctcgccctgctttggctcacactcagtgtgctgcacccactgtcctgcaccctctgtccaacaatcccccgtgagatgaacccagtatctcagttggaaatgcagaaatcatccgtcttctgcatcgcttatgctaggagccttagactggaggtgttcctattcggccatctttgaactgccccctctgcaagcaaattcttaaggaattcctggtatgaagaatgtcttgtttaatcaggaaatcaactgacaattgaacttttgtctttttaaaactttatggctgcat

SEQ ID NO: 817655 - DNA, 565 bp, Homo sapiens
tggtaacagtttttagatgaaataagaatcttcaggcctttgattcrtactctttcctctgtcagtcagtgttctcccttatccatcttggatgccatggtcaagttcttaaattactatcttgtaaaaatattaagcaacattatttttctatctaaaaatgggtaagtaaataaataacaagaaataaatgaaggtaagatgggtggcagacagaagaattcattcctgaggggaaacagcatgtgcaaatgagctggggcaggagagaacgcagatgatttgaagtgctaaaagtgcagagtagttgaagaagaaagagctagagaaagaaaggtttgagaggaatataatgcagtggccactcatgcagggcctctcaggcagcatcaaagattcagacgttgaggaatgatattactaagatggcagattaagggttaccagccctaatcctcctccaaaaagaaaaaaaatatagagataaatggctattcacaaaccaaaatagcccaaagaggactcaatggctcaataaagaatctatagtaacacagtgaagcaa

SEQ ID NO: 817656 - DNA, 640 bp, Homo sapiens
ttatgtttaaaattattctacagttttgatttctgagaatgctatgccatcaatatccataaaactcaactcatccactgattcttaatgttaaataaacmcctacacttatccttggcccccatctgagttcaccagaagctacagtagactacttaaatgctgaaatctcccatctcaggtgcctctctgcttccctatctgaaggattctctgacatcaggagagctgtacctgaaggaccagtattgctgaatctgagcgcaaacctaaaccaatgttccagcttcccaagagatgttaatcccatgttaatatcccaagagattaatctaaagcatatgtcacctggtttctggcattcacctgaacatccatgcactttgtaatggctttcccccttccttccctttcgttcgacccttccaccttccacaccaccactcctccccaacgcacactctctcacatgttcttcctggaattaccttctgaataaacaacttgctcccaatgtccttgactctggtatgctttggagtgacccaaaactagggtttgtttgtttgtttatttgttgtggattaaggggaacttagcacattttgcaaaagtttagcctcttatgtttttgtttcta

SEQ ID NO: 817657 - DNA, 587 bp, Homo sapiens
gctttttcacaggcccacagctggccggtacagtggcagagaaggcgaggctgaggtggggctggggaagccagcaggggcctgatcatggagcgccttgagctgcatcccacaggtactgagaaagcatggagagctgtcccccagcccccagcatcttattagaaaatattgaaacataacagaaaacatgaagggttttatgttcatattttcattttagagagatcattctgcttgaaatataacacctactgagtactgctgaggacttaccatgtgccgggttctgttcttagcatgtgacatgtattggcctatttgattctcctacataatcctggaagattggttgtgggagtgggtgatcatgacctgaacagcctaaccatgtttagggaacactctgtgttatgcgttccaccacacaattcatgtcacagctgaatgtcccagtttcccttgcagctaggacacaacrggagacccaagctttccaaacatatgccccaggcaacactttgatacacaaggaataacactggatgctgggtgtgcacagaattcaaattcaggaatggagggaa

SEQ ID NO: 817658 - DNA, 590 bp, Homo sapiens
ctgttactaacaagggaaggaagactttaggatcagttaggggcaaacagaggacttcttggtggtgatagtgctctagttcttcacctggataggtatcacacagatgtttatttaataactgakgtatccctatctttgtttgcatatttcacaataagaatgaaatagaggaaaggaaggtgaatggaaagagatttctccattcatccaaattttaaagtcatgtttttcctcaggttcttctccaagttctatctgaaatggtgaaagcaaccaagtgcggtggctcacgcctataatctcagcacttttgggaggtaacacagtgagactctgcctaaaaaaaataaaaatagagaacaacagagtagttatcaggtagagaggaagggaggaaataaggacatgtgggtcagagatacacagtagcagatatgtaagatgaacaatcctatacatctatatacaacatgaggactataggtaataaaattgtactgtatatgggattcatgctaaataagattttaccttcccttgccacaagaaaaaatgtgtgtatctgtgatagatatggtaatttgctt

SEQ ID NO: 817659 - DNA, 589 bp, Homo sapiens
tttctactggtgtaacttttattagaagcatctcatcataactagtaggatcatctcaaaggggttacaacacattagcaggtaatgaaatcaaygtagtgtttcctgaacggtattggatgggtggggggggaaaggaatacacacagacacacagaggaaggggtaaaagagaataagagatatcaaagtgcataacacatggataagtaagtattgttaagtacaactcttgcttcagttacacatatgtgtgtgctgggctgcaatgtaaaaatgcatttctcaatggattgggtcaaaatagttttcaagtcactgacttaagattttatcctaggggatgaggaaattagtctaagtgattacctctttctggtgggatgtttgtttaatctgtcatcttagaaaacactgctgagttcctattttcagttcattattgtatactaccaaagctgctactcaaaggctgagcttatcttctatttgcttgttctgcgtggtgcccactggtccttactgcttttgatatagttatctactttttaaagacagtttagcactcacatatttttgttcaatcttt

SEQ ID NO: 817660 - DNA, 356 bp, Homo sapiens
aggaatgaaacaaagttagagtaaaattataaaatcaaagctaaggacaatttccagaaagggtaatatcatttaatatcatagaagtttaggagcacaagatggaaaaatggcctgtgggtaactgacattgaggcgatctttagggaaactccatttccgatagagaagtagacagaaagtcagcttgaagcagggactaggtgaagaagctgttggctggtcgcatggggaaataaataagggatygcatatgccatatttctgggtttctttctttcttgcccagcctctatatatgcctagagtttggcgaaaacttacaaaaaataaaaatgaaaccaatttcgtttgta

SEQ ID NO: 817661 - DNA, 620 bp, Homo sapiens
catagaggtgtacgtcagaatcacacctgcaggaaggtccctggatgagattaacaatcccacatagaggtrtacatgagaatctcgcctgcaggaaggtccctgggtgagattaacaatcccacataaatgccggttctgggtatgagagtcaaggcctcctgtatgttgcatgtatgtacataagtcacaatctcaatggtggaatggatttttccatgagagccttaatgccttttgaaaattgagttatcttagtggagtcacagcctcacaagtgttttggatcttggtcagggagtcacaaacccacttgtggacaacatccacttatgagagccaaatttccaacttttgactgtctctgggtgtgagattcagaacctcaattatgggctgtgtccatgtgggagaatgataatttttactgatcgctgggctcaggcaggagcctttcatcctgcaggctttgagataaatgatacatcacagtacccaaaatatgctgggtgcaggcaaaagaggagagtcatattagctggttgctaggtccagtcatatgtcaccacctctgtttttggcagggctaaggcagaagaggagagtcagagctaaagaaa

SEQ ID NO: 817662 - DNA, 532 bp, Homo sapiens
tgggaattttaagtgctaagtaagtattgagtatttcttttgaaggatatattttaataacaaaaagatacttgagtgctgtgcaaaagttgtgcccagctggagagaaagcaggaaggttgattttggctgaccagtcattacaaacagagctagacctagtcagaggttaaccacttaaggaactaggcaacacctccccctagtgccaaaagtaacacatcattagctttaaatcaccccaaacacaaactagagcactccaactactcttaagttttaagtcagccagcataagtcaatgaagacttaaagataaaaactggacaaaatgaaaggcccagaaaacaaaaggtaaaactatatctaggccctcacagatactggaggcctcgtaaagccataattctggtgaatcataacttgcctgccccrtaaagtcagttaaaatttttcagtgccagctgggaacttatccctagaaaaatgctaagctgcagaaaagaaacaagggagagtgggagagagggaa

SEQ ID NO: 817663 - DNA, 592 bp, Homo sapiens
ctggtggctagtcagtcaggatcccccagtcatcacaggcctgcctgactgcccaaggactgaacaggtcaatatcttggcacaactgtaacttcttcatttacaccaaatgggaaactctgactacatagctcatttccacttcttcttgagccttctgacacttttaaacatagcttcccatacttggcaatacatcatcaaaacctacaagttgtaaaaattataacccagataaacgaggcttgctaaccttccactgaaaagcaagagggagaaaggtccctctccaaaacttgagggagtacaggaagatagctatgggtagtttaggtgccacaaacccagtcatatgctcccatgaaactctgcctacatgggtcttagtgttttggctgtatacctttaggcctgcaggcatcatgcacgtagggcctcactctcactttttcaaatggaagtagaatttcacatttttgcttcaaatgaaatacttaaraagaaaactatgcatttgatgaacattctgggataacactgacaaccacagaaacaaatgtgacaggtaattcagtaatccagatacttacca

SEQ ID NO: 817664 - DNA, 486 bp, Homo sapiens
  misc_feature 1, 2, 3, 4, 5, 6, 7, 8, 9, 10, 11, 12: n = A,T,C or G
nnnnnnnnnnnngcagtgaagaagaggatccagctgtggatgcccccggaagagtggaattttagaaatggtaagattcattttcagcaggtaagggatgagggaaaggacaggaatggaaaagagkgacaattagaagaagaaatgcagtgggaaactcagaatcagcctaggttgtttccaccactgggattcagatctgtctgtgtataccagaagcctagtgggtggacccatcaggaatttgtgtgtttgagggactaagcagcattctgggaaaagtcaaccagtcagacatgtctgaccccttaacaaaactcttgacaactttttaaaaaacagtggattggcccggtgtggtggctcatgcctgtaatcccagcactttagaaggctgaggtgggtggatcacttgaggccaggaattcaagacaagcctggccaacatggagaaacctcatctctacttacaaatacaaaaattag

SEQ ID NO: 817665 - DNA, 612 bp, Homo sapiens
agaagagcaaaatgggctatactactaggatgaggacaagaagcaaaatgtcaagtggacttctaaaaaataacagctttcataccaaaggtatcgaaagaaaaaaataaaaaataagagcctctgaaagycccggtgagacaacccaaaaagtaggagaccagaaggtcctattatgcctcttttttaacaaatgcaaacaacagttctagtactggtagctaaatattgtatgtttagatatggttaagaagccctggataaataagaaaaaggttaaactactctttggttaaaaatgccaaacagctgggtacagtggcgcatacctgcagtcccagctacttgggagactgaggtaggaggctcacctgagcccaggatttcaaggctgtagtgcgccactatgatgataatgtctgtgaatagccactgcactctactctcggcaacacaacaagaccctgtctctaaaaatactactactactaaatgccaaacagtggatgcagataattaagttcagttgccctccctatcggtggattctgcatatgtggattcaaacaacagatggaaaactgcagatggaaaaatctttaaaataaaaat

SEQ ID NO: 817666 - DNA, 644 bp, Homo sapiens
gttatccaaataaaagaagaaaaactgagtccaggcgcggtggctcaagcctgtaatcccagcactttcgggagccgaggtgggcggatcacgaggtcagaagatcaagaccatcctggctaacacggtgaaactccgtcactactaaaaatacaaaaaattggccgggcgtgatggcgggtgcctgtagtcccagctactcgggaggctgaggcgggagaatggcctgaacccgggaggcggagcttgtagcgagccgagatcgcaccactgcactccagcctgggtgacaagccagactctgtctcaaaaaaaaaaaaaaaaaaaaaaaaaaagaagaagaagaagaaaaactcacggcctgtaatctcagcactctaggagggcgaggcgggaggatcatgaggtcatgagatggagaccatcctggccaatatggtgaaaccccttctctagtaaagataaaaaaaattagctaggcatggtggcatgcgcctgtagtcccagccactagggagactgaggcaggagaatcacttgaactcgsgaggtggaggttgcagtgacctgggatcacgccactgcactccagcctggcggcagagtgaggctccatctcaaaaaaaaaaaaaaaaaaaagaaga

SEQ ID NO: 817667 - DNA, 474 bp, Homo sapiens
aaataattgaagtgggcacccaccaagcccttcatccctgggaaccctggtyactggaaccacattaatttgggcccaggagttctctggtgccttttgtcagctattttggatgcgtcatcattacttacgccttaataaaaccaccctccttttttattgtcatcagatgtgttagcagtttgtatctcatctatctgtccttcagctcctaaggacattctggaggagggacattccctccccatcctgcccccaaccctcacacacactgtggttcatagggtttgggtaaagactaaaagagttgctccatgcgaagtgtttggcacaggggctcacgtggttaagggctcaatgtattgtcagttatggtgttttagtatatgcagttctgttgtttaacctcttgatctttctcagatctctgcttccctctccaccccacttccttagagcaaccctcactgcctc

SEQ ID NO: 817668 - DNA, 616 bp, Homo sapiens
tgataatgagatttattcacttcagaagatgaattcttgtccagaaaaggaatagaaatgctagaaaactagagtcagaaaaatttatagctaagtaaacattttaaatatgtttgaataaccaccagaagaacagaaatataatccctattttcccaactagcagaaataagagggtaaggaagaagacgaccagtccaacaaaaagtaggaagatgaaaaataagaaagacaggggaaatcaaggaagaatatactgggcaatgaataaatacttcctagattttcctagcttccagtatgatcaaccaaaacccaagtttaccagactagtgacctttctcaatgtcagcaaaaacaccttcaggtaggacctagtagagtttacaatggaattttatgtgaagagaggctagttttccttttaacccacattgggaacccagatatttacccattatcatctgaagcccactatgcaggaagcacctgccttaggactgtcattacsaagcacaacatccctcaaggaggtaggtttgtttggtgaactctcagggaaactctaacgaataaatataagggtagcactaaaatctggacaaccaattgtacc

SEQ ID NO: 817669 - DNA, 616 bp, Homo sapiens
tgataatgagatttattcacttcagaagatgaattcttgtccagaaaaggaatagaaatgctagaaaactagagtcagaaaaatttatagctaagtaaacattttaaatatgtttgaataaccaccagaagaacagaaatataatccctattttcccaactagcagaaataagagggtaaggaagaagacgaccagtccaacaaaaagtaggaagatgaaaaataagaaagacaggggaaatcaaggaagaatatactgggcaatgaataaatacttcctagattttcctagcttccagtatgatcaaccaaaacccaagtttaccagactagtgacctttctcaatgtcagcaaaaacaccttcaggtaggacctagtagagtttacaatggaattttatgtgaagagaggctagttttccttttaacccacattgggaacccagatatttacccattatcatctgaagcccactatgcaggaagcacctgccttaggactgtcattacgaagcacarcatccctcaaggaggtaggtttgtttggtgaactctcagggaaactctaacgaataaatataagggtagcactaaaatctggacaaccaattgtacc

SEQ ID NO: 817670 - DNA, 482 bp, Homo sapiens
gcagtggctcacgtctgtaatcccagcactttgggaggctgagatgggcagatcacaaggtcaggagttcragaccagcctgaccaacatagtgaaaccctgtctctactaaaagtacaaaaattagccagtcgtggtgatgttgtgcctgtaatcccagctactcaggaggctgaggcaggagaatcgcttgaacccaggaggcaaagatcatgccactgcactccagcctgggtgacagagtgaaactccatctcaaaaaaaaaaaaaaaagcaaagtagaactttcaaattaacaaggcatcgggggtgtgtatggggaataggataaagagcagcttgagcaaaccaacaaatataagaaaataacactataaaataacttttatatctctaatttgagtttctctaatgccttctccatggttagatggggctctgggattttggaaagaatactacaaaagtgaaatgcccctctt

SEQ ID NO: 817671 - DNA, 656 bp, Homo sapiens
aaatgattatctcagaagaatgaaaataactgaggtttttagaaaggaatattttatcaaaggctttagtcataaaatttctgaaaatttatatactgaaatgattatcccttgtggaattagtctgcatgtgtttgatgtggacttattcttttttactttgtgttctaagtaatttctacttttttcctctgtgaacaaaactcatgggtttttttttaaatagaataatcaggaaagtaatgattgacaagtaacatttaattaaatatctggttcagtgtagcagcattgaaggaaataagtggatatctggagtgatttcctggcaaaacaaataagttttgaggtataattgacaaaaaaattgtgtatatttaagctattcaatatgatgatttgatatacatatgtgttgtgtaatgattaccacaattaaattaatcaacacatttatcaccacactgttaccgtgtgagtgtgtgtgtgggtgtgtgtgtgtgtgtgtgtgtgtgtgtgtgtgtgtgtatgtatggtgaggaaacaagatatactcttctagcaaatttcaaataaacaatgtatcattagtaactatagtcacmattctgtacactagatctctagaatgtattcatcgtatagctgactcactt

SEQ ID NO: 817672 - DNA, 483 bp, Homo sapiens
tctaaactacttcaggaatttaaaattataaattccataagaataaacaaaatgttataaattatctgttcaacagttattarcaagataccaaaagagtaatacttgatattgatttgcctcttccagtaagaaaataaatattctaatataattctaatgcattactgagtcttgagatatggtgatatcacttattattcccttgaagggactcagagtctaaattttataattgtaaaagtggtctggcatgtttgctgctttgtagatatattaaacttgatcgaagtggtccttaatgcagattaatccctcttgggccttattctggtaatagaagtagctgctggttgacattgcatatgtgcacacaaatggattactcagtagacaggtaactaacctagagttcagagcatttgatattgaatgtagtgctgtattaaaataaatgtactgtattttaactctgtatggtta

SEQ ID NO: 817673 - DNA, 536 bp, Homo sapiens
aaaatgaatgagaaataaattgcagtagtgtttgctgcttggggtataaactggcacaccactttggaaaactgtttgatatttgctcctaaagtcttacatatggctcccccaggacaccgcaatcccctcctagatgtacacccaggagaagtgagtgcatttgtcctccaaaagatgtgtgcaagactgcttacaattgtcaagaacccacatttctatcagaaaccaataaatgtatggtggcatattcatacggcagaatagtccccagcaacaaaaataaaagaacaaaccactggctcaacaacaatgtgggtggacctcacagacataacatcgagcaggagaggccagacacaaaggagtagggactgtgtgactccttccccacacacttcaagartaggcagcactgatccaaggtgacagaccccagatccatcgttccctcctggacagggactgtctgcaaggggcagagggagccatctggtgtgagggagatgccctctgtcttgccctaggtgttagtt

SEQ ID NO: 817674 - DNA, 536 bp, Homo sapiens
aaaatgaatgagaaataaattgcagtagtgtttgctgcttggggtataaactggcacaccactttggaaaactgtttgatatttgctcctaaagtcttacatatggctcccccaggacaccgcaatcccctcctagatgtacacccaggagaagtgagtgcatttgtcctccaaaagatgtgtgcaagactgcttacaattgtcaagaacccacatttctatcagaaaccaataaatgtatggtggcatattcatacggcagaatagtccccagcaacaaaaataaaagaacaaaccactggctcaacaacaatgtgggtggacctcacagacataacatcgagcaggagaggccagacacaaaggagtagggactgtgtgactccttccccacacacttcaagagtaggcagcactgatccraggtgacagaccccagatccatcgttccctcctggacagggactgtctgcaaggggcagagggagccatctggtgtgagggagatgccctctgtcttgccctaggtgttagtt

SEQ ID NO: 817675 - DNA, 536 bp, Homo sapiens
aaaatgaatgagaaataaattgcagtagtgtttgctgcttggggtataaactggcacaccactttggaaaactgtttgatatttgctcctaaagtcttacatatggctcccccaggacaccgcaatcccctcctagatgtacacccaggagaagtgagtgcatttgtcctccaaaagatgtgtgcaagactgcttacaattgtcaagaacccacatttctatcagaaaccaataaatgtatggtggcatattcatacggcagaatagtccccagcaacaaaaataaaagaacaaaccactggctcaacaacaatgtgggtggacctcacagacataacatcgagcaggagaggccagacacaaaggagtagggactgtgtgactccttccccacacacttcaagagtaggcagcactgatccaaggtgacagaccccagatccatcgttccctcctggacagggactgtctgcaagggrcagagggagccatctggtgtgagggagatgccctctgtcttgccctaggtgttagtt

SEQ ID NO: 817676 - DNA, 617 bp, Homo sapiens
ctcatttttattgttctggggaaaatactcaagggcttgattagaagaggcagttttgtattcagtactcctttagcatctgaaaatactgtcgtgwttttctccacaaacggaaagttcctggctcttgctttgctcacagtttttccctcagagatgtgtggctgcccctccaatgcctcccactggtgttcctgagagctgtgacactgttttctgttcctttatgcataatctgatgctttttatattttttaggagactttaaatttatctataattttttcagtgcacagtgctcactgcttccattgcgactttaaattcaagaatcatattcttaaactctgtgactacaacaatcatacccatcattttttgagtgttcctgaccaaatccaggcactgggctaggtggcatttacccagaatcacacagcctatcaagaaatttgaaccagggttttgaaaccaatctacccacctcgaaagcctatgctctgaccacctctctccataacattgagtactgggatcagtattagtttatctcagattgtcctattttcagaaagtctttctctagatcagaggttatgatgtttcattttatgtgt

SEQ ID NO: 817677 - DNA, 613 bp, Homo sapiens
ttgtttgcagaagattttgtaaatcaggaatttwttctgtatagatgctgttacactgaagtctattttatcaacagaaataaaaatgtaaatattaggagacgagacaacattgtttttatatttctgggcaagcactttcattttcccctgaaacatacctggcatagtctttcacagctaacaaatgtcaagacattgcaaaatgtacatttataaataacatatgtaaacatagatgtgaagattataataaggacatgatctcttataccatagctacaatataaatccatgtggctttcccattattgcatatgaggggctatttttctttaatatattttttatgaaaaatctcatatgaatcaatatatacatctttctcaagaatgtatcagttctataataacatagataaaacttaatttgattattggattaagtgcaaaactagttaaaatattgtcagaaaatttgctccttaatgacttaccacaataaaatataattttaaaagtactttttatagataaaatttattcattaaggcacctagagtattgcctttagaaagtaaacagtgttgtttgatgatacttagtctattatg

SEQ ID NO: 817678 - DNA, 522 bp, Homo sapiens
taattaagaatcagttcaccccttcattcattgatattttcaaargcaattttagcaaatattctgaagcatacttacaaatttaaatttgttacaaagtaaagaagttacaaagaaaggaactgtttcccactcattttatgacatttgaatctaagacagaatgaggaaggaaattaaaagctaatatcaagtactagcatagatgtaaaattataagcaaatactaggaaatcatatcctgatatgtatgtatatctactgcattatgacaaagttgtatgatatctcaaatatacaaggatgactcaatatcaggatatttataatagaataaatctatcaaaggagaacatatataaaaataatttgttaaatgtgtcattaaaagcaaaaaataaaggcagttgataagagagcaaaaaacatataacagtacaaaaaaactttagcaaaccagacacataatgatgaaaattagaaccattcctttgattcaggaatgatccaaaatgctcacaa

SEQ ID NO: 817679 - DNA, 487 bp, Homo sapiens
taccagaaatgtgcttccctctaggaatcacaatctctcataaaatatttttacttttctttsttttatttgctaccatagcaatttcacaatatttgtgtgaatacttgaacagttcgtgtcttttctgctatacaatatgatagagactataggcaaagattatgaaagcttttgctgaattttgcataggtggtatttagcacagtgtctggtatatacgtttatgtgtcttttatctatttgttcttagcacaccagactaacacttagtggctttaatcagcaataagttactgtttctcatatttctgtcaattagtctggcagttttttagcaacagtaatctggtggatgagctggaggcgaagcccagccaggatactgtgtctccctctcctagtggttttccatcctgggcttattaacatggaggtctcatgacaatgctccaagagggggaaggtggcatttatgaaccccatg

SEQ ID NO: 817680 - DNA, 547 bp, Homo sapiens
actcatacagagcatgcctagttttagcagctgtgcagaggcagtggacaggagagaacaagagtttagaaggttctgcgaacactgcaatacagaaattgtccacaaatactcraaaagagaaggtcttaccttgagtgggattctcagcaagtaaatattgtgaaaataacagtaaaaaggagaaggcttctgactccaatttatggctgagtagaataaaaatatctcagccacacactaagagaaaatgggaagatcagaaggtactgggtggcttatgtactcaaataactcagaaatagccaataaaatatctttcctgaggaaaacacttccgtgaagaaaattcaaattgagcaggatagaaactctgagagtaaatccaatattttgacgaccttacaatgcctttgttgtttgttgagagaaaaagatcaaacactgggaggtcaggtgggtctccagagaaggcacatctctggaagtgggtgtgacgacacaaaggccatccacgtctacatgtgtatcttaatctgtctgctat

SEQ ID NO: 817681 - DNA, 496 bp, Homo sapiens
atttcctaaaagtacagaacacctgattttgtttatacaaaagcaacagaaaggagatggtcgaacacaaaacaagtacactattataaagaaaataaactaaataatgaaaaaatgggtagttaatatgtaccagaaaagacataatttaaaaaaatgaaaactaaataatataacaaaattaatggaagcaaattaagaaaataatggaaactataaagtaacagcatatattagaaccaggaaactcagagacgagatggctaaacatgaattggggactgatataattcagaactggagttgagtcactggtccatttccaatttatcctttttcataaaatgtggtctcttgtggtcccaattgaaagcctagtgttttcrtgtttcggtttttgttttattttagatctcatcctccttgtgcagctcagaactccaattttcccctcaactccttgagtctattgaaagttttgttcaaattctcatcc

SEQ ID NO: 817682 - DNA, 525 bp, Homo sapiens
actgtgtctctttaccttcactcaagctcctttccccagaagtatctctctctgtttggccaactaaagtcyctcatttcagcctctggggacttcttcctcctatgaaatacacttgtatcctctcatttgacacttatcccacactttctattatcattgaaccatagaatgtttgagatggaaaaaaatgattcactcaaacctgtcattttacagctggtgtaacagaggtcccattaggataaattatttcccaaggccatatctttaaaacatagaccaggtcacaacttggtctcctaactctcagtctctatgtctacaacgtgattttaagtacttaacagaattcctgcacacaattctcagtagtttactggcttcttgcatgaattcttaaaatatactgtgctcagtcagtaatttttagagccaaatccaagaactttgcttgtcatagtgcctaagctcttgtcattctccaagattaaagaaacgatactcagacctgtcaaaatataa

SEQ ID NO: 817683 - DNA, 633 bp, Homo sapiens
aggagatatacctaatgctaaatgatgagttaatgtgtgcagcacaccagcatgacacatgtatacatatgtaactaacctgcacattgtgcacatgtaccctaaaacttaaagtataataataataataataaaaaggtgaggcttgggaaaagtaaggattttagtaactatggagatggaaacgataatgtagcacagccctttgagcaaatggggtagggctacatatactactaaaacatattaacaaactagacatacattatgtgttttttcagtgactgtcccattttaggccttttaaatccacctcatctggccgtaaatccacttcatctgggtattgtgaaacagcacccacctgtcagtgctatgccccagccccttgctgtctccttcccttgcttcccaatgcaatcccctctcaatgtagctccttgagttctaaaggacctccagtttttcctggcattgacaatttactgaaaaaacataaaaactgtcagacatattcttataactgtcctccaacrccaaatgtcaagtatactgaaataaaactatcttttaccttctacattttcccactaatgctcatcgtattctcattagaaaacagtgatgagatat

SEQ ID NO: 817684 - DNA, 557 bp, Homo sapiens
gtgaaacctcatctctactaaaaatacaaaaattcgccaggtgtggtggtgcgagcctgtcgtcccacctactcatgagatcgaggcaggagaatcacttgagaccgggaggcggaractgcagtgagccaagattgtgccactgtactccatcctccgtctcaaaaaataaaaagtaaatttcatagaagtagggaccctgtcttgttttctgtaatatctttgtgcaatttgatgaattttaagaaatgaatacatttgtatagttactatctggatcatgatatagaacattacaagtcccccaaaacctcccttcgtgtccattcagaccctaccagaagtaactggtaatctgacctctaacattgcatattagttttgcctgtttctgaaaatcctgtagatggaatatagtatgtactatcttgttcattcttgttcattgctctcatattccattatatgaatatgtcacaaattgcttaattgttaaggacatttagatgactttcactttttagctattataaataaaactacttctgaacattctt

SEQ ID NO: 817685 - DNA, 588 bp, Homo sapiens
taagagacatgaaggcagaaccctgtgaatcatctccttacctggctttgcccactttagccgctagcatcttgaccacggtcaggcagggccaatcactttaggtgtctgtaaagaagaacctgaagacctttcgaaactcaagaccctatgatggtgataaaagcattggctgacattgactaaggacacactctagaatgtacttagttgcactgaacaaactacacaaggccatgcagtgacatcagacaccaaattcacagatctcctctcactacggagctggtaaacacctttactgaaagtgggtaagggtatagtttcagtgcataactaggttgacctcacccacgtaagctggtcggacaagactgtccatttctgtcattaagccctcattactggtagcagataccttttagtctttgcttgctaaccttaagattgtacagcaccgaayctttccttctttaacttgaactctttagtggtcttctcactgagacaatggaaaggaacttttaaaacctcttttcctacttggaatccaaactgaatcatggaccttcatttccataagggtca

SEQ ID NO: 817686 - DNA, 568 bp, Homo sapiens
atccacctaccctatgtaggaaatactttaggtgccctattctgtaaggaatggaggaacttcctgaagaggctcrggagggttatacataaacaggtaaacaaaaacacccaaatctttagatactgaaggaggctcacttactcaagtttacagttaggaacatacccatagaaacaacagttaggtggtgtttactttttcagaagaggaaacgacttaatattgccaaagattgactccagttttgaaaacaagtactgaatatttaattaaagcaaccttccatttcctaggagtaaggaaaaggggaaaaaaaagtaattcatttacatattgttgctacctcactacgaatcactatttatcagattcccttatactctaggaaaatataatagaccatattcacaatcactgccctagctatagagaattatattaataatttctttctgaggcaaagcactggttcaaacatggccatttcagagtgaaaaaaaagtatgtaaaataaatgtagaacctatttctcttttttttttttaaaatttttcttccaactaat

SEQ ID NO: 817687 - DNA, 670 bp, Homo sapiens
cagtgagctgagatcatgccactgcactccagcctgggcgacagagcgagactccctcttaaaaaaaaaaaaaaagaaagaaagaaaaggaagaaaaaaagaaaactgggcttgcatgacatacagcagtgaactccttagctgtactccatgggattctattaaatccgctgcagtttcccagtgaagaaatactgtagctagacacccttcatctgcgcaggaactgagtttttcatttcacagctcagcctctttcctagtaataaattgacccgaactggagtcctaagactgtcaatttgcactttccttttgtatcacctcttctctcctgttacaaatgtgtagaaccatgacgggagattaatattgaaagagaactttttcccagttacatttgatctgcctacttctgccttctatttctttctccaagacttattttagttcagcaaaagcctccaggttaatttaacaaagaattcttccctgagcttaccggagtttcctgcccatgggtgacctgttcttccaccaattgagatttgtcactgagcgattctgaatgttgatcttgcttctttaagagggaacagtrtgccttcaggtcaatatccctcctaaccacaacagaatgtaagcctcattctcagacagaaagcaatgc

SEQ ID NO: 817688 - DNA, 509 bp, Homo sapiens
agtgttgattggggtaaatgttagaactgcaacttctttatcagcagataactttttaagaatttatttttaattgacaaataattgtatatacttatggggtacaatgcatttcaatgcagatacacttttttaataatcaaatcaggataattaacatatttggcatctcaaacatttatcatttctttgtggtgagaacatttagaatcctttcttttagctattttaaaatatacagtatgttattaatcactatattccctctaatgtgcaaaaagatcttcaaaacttatttctcccaattgtaactttgtactcacaaaccaacagctcttctttccccagtcaccctcccccacacctcactcagactctagtaaccaccattctattctctacttgtataaggtcaactcttccagatatcaartatgactgagatcatacattatttgtctctttgtccctgtctctctgtgacactatttcacttaacatagtctcct

SEQ ID NO: 817689 - DNA, 623 bp, Homo sapiens
gctgaacggtgggctttgctgaaccaggtggtctttatttttacagactcacgtccagtttgctgtctgtcatcacaggacttaatgttgagaactgacaggtttcaaatattgatggggaaatgctggtggattcagaaacttggaacttgaccaaaatatccaaatctcacaagtctataacatcagcctggaaagcaggctgttttataaaatgtccttggtcgccctattttcacatggaataaaataaaatgccacaggagaaaactgcttctttgatattttaacacatgaattttttggagtttcagcacctggatttacagcctagtttaaaacaggtaatacatctctgcaagagagacagaatgagtttcttcaaatgtatttgacacttaaaaattttacttgagagtattttttattcattttgtttcctttgatgcttttttttctatatttttctacatccatgatgcttaagaatatgaaattcactcagcacttcagaaagtgtcatgacctctcaaataagcctcctktctctatggtcttgtcttcttttgtgacaattatactacctagagctgtgtctgtctcaatgaaatccctgttccttt

SEQ ID NO: 817690 - DNA, 606 bp, Homo sapiens
cctccctagtagctgagattacaggtacatgcctctgcacccagctgacaatgtgtgttttttgtttttttgagatagagtttcgctctyttgcccaggctggactgcagtggcacgatctcggctcactgcaacctacggcccctgggttcaagtgattctcctgcctcagactccctggtagctggtattacaggcacccaccaccacgccctgctaatttttgtatttttggtagagacggggtttcaccatgttggccaggctggtctcgaattcctggcctcaggtgatccacctgcctcggcctcccaaagtgctgggattacaggcatgaagccaccacgcctggccaaagctgacaatgttttttaaccaaagaactcattctatgcctagccaaactatcaatgaaatgtctatgaaacagaaagacgtattaggacttgcaaaatgaaaaatgagccaactaataactgagcaaacaaacgtatgtgccttttctcagaagctactgtgcaccacagttagaaactggccagttcagactgcagcaagaggacagacgacagaggctctaggatggatgctttgagaaaaacaatg

SEQ ID NO: 817691 - DNA, 606 bp, Homo sapiens
cctccctagtagctgagattacaggtacatgcctctgcacccagctgacaatgtgtgttttttgtttttttgagatagagtttcgctctcttgcccaggctggactgcagtggcacgatctcggctcactgcaacctacggcccctgggttcaagtgattctcctgcctcagactccctggtagctggtattacaggcacccaccaccacgccctgctaatttttgtatttttggtagagacggggtttcaccatgttggccaggctggtctcgaattcctggcctcaggtgatccacctgcctcggcctcccaaagtgctgggattacaggcatgaagccaccacgcctggccaaagctgacaatgttttttaaccaaagaactcattctatgcctagccaaactatcaatgaaatgtctatgaaacagaaagacgtattaggacttgcaaaatgaaaaatgagccaactaataactgagcaaacaaacgtatgtgccttttctcagaagctactgtgcaccacagttagaaacyggccagttcagactgcagcaagaggacagacgacagaggctctaggatggatgctttgagaaaaacaatg

SEQ ID NO: 817692 - DNA, 586 bp, Homo sapiens
tagcaaacaaaagtttgcaamgtataaaaagttttatacaccatgaccaggtgagatttatctcaaggatggaaggtaggttcaatatatgaaaatcgattaatatactacatcatatcaataaaataaaggacaaaaactatgcgatcatctcaatacaattaggaaaagcactggacaaaatctaacaccctttcgtgacaaaacatacttaataaattagaaatggaagggaattctcaacctgataaggggcatctctgaaaaacccatagttaatagcataattaacggtgaaagactagatgctttccccctaaggtcaggagcaagacaaggatgttcaccaattgtagtcagcatagtactggaggatccaaccagggcaattaggctacaatatgtaataaaagccatcaggatgaaaaggtagaagtaaagctatcttgatttgcaaatcttatatatagaaaatcgtaaggaatctagtaaaaaaattattagaacttgcccaggagcggtggctcatgcctgtaatcccagcactttgggaggccgaggctggtggatcatgaggtcaggcggt

SEQ ID NO: 817693 - DNA, 632 bp, Homo sapiens
gagtggcagggttatggagaggaggaggcgttccattcccgtagctattctgtatcaaccgctggggtcagaggctctcagctggagtccacccacagacagaattcagggaagctccaaaawcctgaatggaaagaaattacattttattttcactaactgaaaattggcattttcttcaattatgaatgtagactataaaccacagggacattaacagttctcatgactgtcaccagtagcaattgcaaagtgcatttttaaaaaatgtttgtgggtacatagtacaccgatgtatttataggtacatgaaagcaaagttaattttttacagtgtggtagagtcattgtaaatgtcttgatatactgttatccttagcaattcttaatacttcagaattaaggttgttatgagattcgctgctaggtcttatttaatatgttaattaaatattaccatggtggaaaatataaaatattttgataactgcattttactgtaattggtttcctttgcaatgctgtgtatttaatttgtgcatttagcatcattctgtggaggcctctgtgggcttccctagcctaccaaggagtggtctgtggcattgaagaggatagggatccttggtttg

SEQ ID NO: 817694 - DNA, 634 bp, Homo sapiens
aatagcagctctctataacaggggtgagcagagtcactggattctttgtctacttctacataagcaactatttctcccttttcgtttatcattctgtgtatttgtactttctctatttttttkttgttgttgttaaggtcactttacagtttatattatattgttactgtgttcctaagatatttgacaaggatgccaaaaatacacagtgaatttttgtatttttagtagagacggggtttcaccatgttggcaaggatgatctcgatctcttgacctcgtgatcctcctgcctcggcctctcaaagttctgggattacaggcgcgagccactgtgcccggtcatttaatagtattttcttgaggattttagcatctatgttaatcagggatattggcctgtatcttgctttccttgtagtgtttgtgtctggttttggcatcagggtgatgctagcctcataaaatgagtttcaaagtgttatctctgctcttttttggaagagttttacaaaaattgatattaattatttttgaatgtttggtaaaactcaccaacaatgctatctggtcctgtgcttttctttgttgggaggtttttgattgtgagtcaatctccttatttgtttttggt

SEQ ID NO: 817695 - DNA, 661 bp, Homo sapiens
tatttttgctgcggatctcctatttacaatggactccattatgagattcttcttctttgttggtrtattaaataaacatattaccttattttaagtttcgataaaatactgtggaagactttgccaaattttatatgattgtgacaagttttttggggtaggtgcacttttttgtttgtttctttaatttttaaaaggctgcaaacacagctcatgaaggctggtttcttttatctctgaggtatgggcctgggattaagtgagtcatgcctaggaaatagaagcaactgatccaaggatataacattgaaagtagttgaattctattttgagatgggtctgataaccacaatgtaattctctttctatttgaggaaaatataaattttagtatttcagagcatcagattttttgttaattcacaacactttccctctagaaattcagcacctgcatcgcccttcttagtaagtttggttttatttgggggcagctatgattaagcagataacattgggtatattgaaataaaggaacaattcctaacattttaggaatactacaacagctatttcctttcctttcaggtgatgattttcatacttgtgttgtgttctttctacagaacaaagactaaataatgacataatcctcagctga

SEQ ID NO: 817696 - DNA, 579 bp, Homo sapiens
ggcagttacaggagttgaagtaatttacgtggtcataagggagtaaaattctgccctggaatgtgcatgtgtattcaagcctccccctctgtggtttgccacaggaaagcatggcaggtctgaggtctttggaagccttgctcatgattgcaaacgagaccaggccagggtctgtgagagcttagccatgcacccaacctcattgtgatgtcctgacatcttctagattgcaaacatcaacgtgttcctttgcatgagaccactggggtgggagggttactcttagctctgagatacccagtgagaagcgtgagggcaccttccccactcagtagtgcatctgaggttggtaggttcccaggctagcccaccacactgactgacatgatcttgtctgatggagacccaggggtttccatcccacatccgagcatgttgttattcatgccccagcctttgcacagggccrtgctgtttgcacaccaagccctccgcagtgtgggggtggtagtggagggctcagttaatagctgctgctttgatatcaggctgtgaaggacactcttggggctctggagc

SEQ ID NO: 817697 - DNA, 596 bp, Homo sapiens
ctacaggcacatgccaccaagcccagctaatttttgtatttttttgtagagatgaggtttctccatgttgcccaggctggtcttgaactcccaggctcaagtaatctgctcgctttggcctcccaatgtgttgggattacaggtgtgagccaccgcacccagccatgatggtctatttttatgtgtaaagtcaggcatttgtctgtgccttagaaaactaaggttataaacggattgtttttattttaagctatccataacaattcacagaaactaaacaagaattactcagtacttttcattagggcctgaaatctggcaaatgttgcatttggttataccagtaagaacacaaccatggattaatgactgtaaattcttattgctagtctccagtaatttctgacagacttttttttaaagtggtataactgcattttcccagcaattcgcttaagccacacaagtttatagtaatttttaaaggattaaagagtaagttatgcaattctrttttggattaaaattacttatctatgcatatataaaatgtacattttatgtgactattctctatatatacacagtgcttaatt

SEQ ID NO: 817698 - DNA, 582 bp, Homo sapiens
tctacctgacaaatatttcacttttgctattaggaagactgtttgcagaagacctggaacagttcttactacagtctccaggactgagatgcaacgcctgagaartggacaaagaggttgcccaggacttgcaggctaaacaaaacaaatcagcagatcattttataagtgtaaaaataatatttacctaaaataaacatatattaattttagtataactaaccaagctatatacatttttctaaaatttctttgatttaacttattttgtaatacctttattatgacttaactaatactaatttatttccctgggatctatgaacagacaatgcaaataatggctcttgttcagcaaaataattatgaaactattatacaattctaaatggataacatatcaagtgggtattatctattcaaaagttttatcagagaaatatatctgttaaaggaaagataactgagaggtacagtttcttgctagaactgacagagtcaaggcagtaagtgttcgaattctagatttgccttgtgatttgctcaattcaattactttcattatcccctagagtattgtaa

SEQ ID NO: 817699 - DNA, 442 bp, Homo sapiens
gtattaatgagaggtgacaacctgctagcagcactcactcgctcttggcgtctcctcggcctcggtgtccactctggcagtgcttgaggagcccttcagcccgccgctgcactgtgggagcctgtctctgggctggccaaggcggagccgctccctctgcttgcggggaggtgtggagggagaggcgcgggcgggaaccggggctgcggttggcgctggcgggcccgcgcgagttccaggtgggcgcggctcccgcccgcacttggagcggcgggtcggcaccgctggcccgaggcagtgaggggcttarcacccgagccagcagctgcggagagtgcaccgggtcccccagcactgccagcctgcccctgcggcgctcgaattctcacggggcctcagccgcctcccgcgcggcagggctcgggacctgcagcccgtcatg

SEQ ID NO: 817700 - DNA, 626 bp, Homo sapiens
gactcaaacaggtattcgtacaccaacattcatagcagcaaccttcacaatasacagaaaaagtggaaagagcccacatgtccattgtgtttgaatagataatcaaaatgtagtatgtacatataaaggaatattgtatattgtatgtctgccataaaaaaagaaaattttgacatacactacaacatggatgaactgtgaagacattataccaagtgaaatatgccagacacaaaaggaaaaatgctgtgtgatacagcttacagaggtgcctagaataaattcatcaacatagaaagtagaatgatggttgccaggggctccgggaagaggaatgaggaacgaggaactggtgtacagacttcagtttggaatggcaaaaacgcaaaacgttgatggataacggtgatgacttacacaacaatgcgaatgcatttaatgccactgaacagtacacttaaaaatggttaagatgatgaattttgtgttatatatgtttcaccacaatacaaaatattctttaaaaaagacttttggaaatactgtatctacttaattacaggatgtcaaactaatacaggctgatagtatcatttgtccccttgacacacaatcttgggtccaga

SEQ ID NO: 817701 - DNA, 573 bp, Homo sapiens
ttacacagtgtggtacttgcataaagatagatatatagataaacagaataaagttaagtccagaattaaagcctcacattgatttttggcaagagtgataagatcatccaatgggggaaagaatagtcttttcaacagatgatgctgggacaactggatatccatatgtaaaagaatgaatgtggacccatacctcataccatatatacacagtaacacaaaatggatcacaaacttacaggtaccagccaaagctctaaaccaggggtgtccaatcttttgacttccttgggccacgttagaagaagaattgtcttgagccacacataaaatacactaacactaaaggtagctgatgagctaaaaaaaaaaattgcaaaacaaatctcataatgctttaagaaagtttacaaatttgttttgggccacattcaaagccatcctgggctgcctgtggcctgcaggccacaggttggacaygcttgctctaaactcttagaagaaaagaggtataaatcttcatgaccttggattaggcaacagattcttagatatgacacctaaagcacaagg

SEQ ID NO: 817702 - DNA, 578 bp, Homo sapiens
aggcaccagagggagttttacggagctgaaaaaagkaagagaataatggcagggaggaaaaaaaatgggtgttagaaacttgcattagaaatagtaggcaatagttaatcaaagataattctgctcccttagagggaatgagtagaaaatcaagaggaagattttcaaataacctgtgaaattagagaggctatatatgaaagtacatagaaaaagggttcaaatgctgaagtggcatctaactaggcaacaactggtgatgatgccactgctaattaggaggtcattagtgacttttgtgattccagctgcactgtggagaagtgagggcataagctggaatgcaagagtctgaatgaattaaagtcattaggaagagcaaattaaacctaaagccaacagaaatttaaaaactaacaataaagattagaggagaaatgaataaaattaaaaacataaaaatagagaaaaatcaataaaaccaaaagctggttctttaaaaatatcaatacaattgatagctctctaaccagaccaataaagcaaaaaagaaaaaagacacaaattatcaatatcag

SEQ ID NO: 817703 - DNA, 644 bp, Homo sapiens
ccatatttttgctattttgactaattctgcaatgaacrtgtgagtgcaattatttctctaatatattgatttctttccctttgggtagatatacagttgtgagattgctggatcaaatcataattctagttctagatttttgagaaatctccatactgtttttcatggtggctttactagtttgtgttcccaccaacagtgtaatagagttcccttttctctgaatccttaccaacatctgttatttttttttctttttaataacttctctattactctaacccaccaactcattgaaatcgttgtctttttttgtctctcatgtaaggaccactcctgtgatacagttttctcttttccaggtgagaaactatagaaccgatgcaaaaattaaacttatatctcatttttccatgacattgtttgcccactaaatcatacagctttccattgccactttaattaaatgggttagattcatactgagttcaagtatttttaacattcctttatctatctatctatctagctattgtccttcttcttatctatcatctgtttttctatcatttatcattctatctactaagtagctccaaatacacaagtatatccctgaaaagtggccatttttctaaaatctg

SEQ ID NO: 817704 - DNA, 547 bp, Homo sapiens
  misc_feature 89: n = A,T,C or G
gacactaatcacaaaattcaacagggaagtggtagtaacatgaaatactcaacatgtagtctttgctttataggagcctccaggtcgtnatgatccttgagtgtccrttcgcctcgcttgctgtgataatttcccgtgactgctactttggtgatccttatataagcccagaagaaagtcttgggtttccccagtatctcaagactccacctctgtccctgtctggctagtttgctcatatctgcatctggtttatatgtgcctctactcaaatcttctagatttatctagtttcagagatagggaagaaatgccatgcttggcttgtgatctgacatgacagtgaccctttgctacctcttctccatgcagacgttatgggccatgggttcttttttactctgtacctccacacgaatggtggctgatttccaaggggctgaaagagtggagagaacattggatcaaaggcagccctctagtgtgtgtggtggtggtgtttgatgacttttctccttcctttggccaaatacaatagatagataga

SEQ ID NO: 817705 - DNA, 558 bp, Homo sapiens
gggccatgggttcttttttactctgtacctccacacgaatggtggctgatttccaaggggctgaaagagtggagagaacattggatcaaaggcagccctctagtgtgtgtggtggtggtgtttgatgacttttctccttcctttggccaaatacaatagatagatagatatggatatagaaatatagatatctcactgcttgtcctgagattcatcccagtcttaaaatctattcagtcttctaccctctttcctctgtatgccatatgtctacatcatatccttgatattcataaaaggtcaaagcagataaagactcaggacccagccctccctcatgccgtgagcctctgtgccttccaccccggtgactcccacaggggcacacaccacagctatgacagaagcactgcagacttttcaagaaaaacgcrttttaaagaatagtaatagtttcaagattttaatagaagcacagtacttcggaaatgaggcgttcaatgaacgtgtgatgaatgaaagaatgaatgaatgaatgagtggcaagcttccaagtgt

SEQ ID NO: 817706 - DNA, 587 bp, Homo sapiens
tctacaaagtattccaacaactgtttaaacaaaaaaagacatactagataaaggcaaaataacaatcataaagaacaygtccaactgatgtttgtgaaacctgttaatcaagcgtcacttctcatgacttttaaacttacagattttcaaaaactgttaagtaataaaaatattaaacagtaaaaacgttaatttgaaatggtgggtgatgagataggtttgagctaggttttaaaagatggaaccatttggatgtgtcagaagaaatttcaatgaggaaaagatccaatgaagagagatgggagaacgagcagaattgagaataggttttgataaattaggaatacgaacatatttgtaatctgaggagacagagttaagtaaggcaaaggagaatgaagattcaagaaagaaaaggggtaactgataaaccaagatcctgatgtggggtgggaggatagaaattaaaaacacaaataattagctatgttggtttaaaatttccctaaataacctggcagtacttctacttagctatcattagcattaactaaaaatacaaggcaaaaaataaaaaatattgcatt

SEQ ID NO: 817707 - DNA, 594 bp, Homo sapiens
ttcattgccatgtaactacaaactgtgctttctccttcccctacattctcatcataatatttctggattgccacatctgtcttgcaagatagaaaagttatatttggttgaaatttgagccactggattgagaaacgcttgttatctgactcctccaggtttacaagaatgtggatccaaactctccttcttgcatacggatgaggaagatagcacgtttttatcctccgcttagctctgctctaagggggaaaaatgccctgtcttaaatatttgatcctctttacaaaagattccctactgaacagacagctatagtatttttaactggcgaaaaccactctggtgtcacttttaaagtagaaaaggaaaagcaatattcacacaatatggagaactattgaccccagaatagtgccattttctttcttgatgggttcaaattaagcaaaacctagacattttgctccacgtagaggcatctcagtgcaggccagcttgtagattctgcaccaggctctgcaggttactagcgatataacctccctgagcctcaggttccttgtyagtcaaagatagcattgaaagtcactc

SEQ ID NO: 817708 - DNA, 568 bp, Homo sapiens
accaaggcattcccacggcgagttcaagaaacaatgcctgtagcatagataacccttcgcagagatgtgtatctaacttccctagcagccatgagtctaaagtgtgaccagctgcccatactttaccctaaaakcttactatagaaaggatactttctggagggtggatcgccgtcttgcagcagcagccccagacatggctgctattcccaagttccctattaaatgcttccttctgagaaactgaatttgtcaggctctttcttccccctctcagcatccttggcctttggagataggtctgcaggttggcatagacctgctcaacatggcaagtcatatagggagtgggtgctgtgtgaacctattgaagtgagagtggcatcagccacatccactttctcaggcagcgtggatgaggttcctgtagtagcattcagtgctccaggcctgggtgttgatggggtgagccctcgtgagcccaggagtggcaagaacgctgactccccaggaccacttttgtggagtgatttggggcgttattccagctgcccagcctctaggcttg

SEQ ID NO: 817709 - DNA, 590 bp, Homo sapiens
gctcaacgggccccgcactccgagcagccggccggcaccgccagccccaggcagtgaggggcttagcacccgggatagcagctgcggagggtgccctgggtcccccagcagtgctggcctgcccgcacagcrctcgctgggcctcagctgcctcctcgcggggcagggctctggacttgcggcctgccatgcctgagacccccacccctggtgggctccagcacggccggagcctccctgattggcgccaccccatgctccgccgcgcccagttccatcgaaccgcccaaggactgaggagtgctggcagcgcagcatgggactgcacaggctcctcctgcggccctggggagggatccactaggtgaagccagctgggctcccgaggcgggtggggacttggagaacttttatgtctagctggaggattgtaaatgcaccaatcagcactttgtgtctagctcaatgtttgtcaacacaccaatcagtgctctgtgtctagctaatctagtggggacttggagaacatttgtgtctagctaaaggattgtaaacagaccaatcagctctctgtaaaatggaccaatcag

SEQ ID NO: 817710 - DNA, 619 bp, Homo sapiens
aaaaatgcaaataaaagggattatagtcatctctggtgatttatgctaataagattaaacccagaagaagaaatcaattattgctaaatgttagttttggcaaaaattatttrgaaatgattagtaagtgagatatatactgttcctcatgtccacttctatctttgactcctttatcccagtcctagataaactcaattcttcagataaagcaagttacatgaaggcagcttcacaattacatattttcactggcttctctctgctcaagaatcacaagaaatgcatcctaatagtccttatggtaatataggtagtatagcacatcttaaagtaaaccttgtccttaattaaaatggcttactaaccaataaccccctcccacatggcagaggttttttcctgtatttatttcctcaacctacaaaatgccaaaagcaacatcaaaaattagtcgtaaatagtataacagtcttatttttttttagtggtacatttattcaaatagggccaagtttttttgagtaaaagtgaaccataactgtgatataattttatgttactacattactctgtaattttggtccaatccagtgttttcaaattgtgctctgcaggg

SEQ ID NO: 817711 - DNA, 603 bp, Homo sapiens
gaaaaccccatcatctcatccccaaatctccttaagctgataagcaatttcagcaatgtctcagcatacaaaataaatgtgcaaaamttacaagtattcctatacaccaataacagacaaatggagagccaaatcattagtgaactcccattcacaattgctacaaagagaataaaatacctggaaataaaacttaaagggatgtgaaggacctcttcaaggagaactacaaaccactgttcaaggaaatgagagaggacacaaacaaatggaaaaacattccatgctcatgggtaggaagaatcaatatcatgaaaatggccacactgcccaaggtaatttatagattcaatgctatccccatcaagctaccattgactttcttcacatgattggagaaaacaacttcaaacttcatatggagccaaaaaagagcccacatagcaaagacaatcctcagaaaaaaagaacaaagctggaggcatcatgctacctgacttcagactatactgcaaggttacagtaaccaaaacagcatggtattggtaccaaaacaggtatatagttcaatggaacagaacagaggcctcagaaataatacca

SEQ ID NO: 817712 - DNA, 602 bp, Homo sapiens
aaaaagaaagacactcaacagttggtttagattcataccaagactcagccctggttgtccacttttgctccccatccacattccaattaattgacttttattaatacrtacatgttgtataagtcataattttagaaatcataattcatgagctaagtggtgggttaggagcttcagcaaggctcagtatgatctttttttgactttaatgactagtcaattagactattacaaagttgttagttgctgacaattttgttcattttattaattatcagtgtaggtacagtctgtgattctctttaactctaatgcttaaaatgatggttaaattttattattgacttgaaaactgtaaaccaaaaataaaaattctaagcttctcacccaaccatccaaatggacttcctcctcagccagaggaagttaaaatttaacctgagagtctgtttcaggccatgatgggaaatgagggtcaaatatgccttagtatacctctctggcattagcatcaacacagactttcagtctgataagaaacgtttcacaacctattctctctgaagcctactacctgaaggcttcctctgcaaataaggact

SEQ ID NO: 817713 - DNA, 619 bp, Homo sapiens
atccctaaagaggactttgagttcacacttagacaaaactctcaacttactgctctgtccacacagttccctcgatatctgtaaaattattttgaagtataaaatctgggagaaaaatccatsaaattataaagtagaactaataatgctttcatgggtaagcaatgaaacaaaccaaaaggtaaaccagcgttttaaagattgatatttctttaagaagagaatggaaaataaattaaaatatacattttatattgattatcatgaagttttctagtttcttacctgaagtttcctggaggaactttaacagcactcatttgacattaggaagaagccgaatgtaaataaatcctaggtggataagcataatataatgagtaatatgatcttaaatggaaaaaagattatgtaaagttgtttatacttaacattttccacccactacactgtgaagcagattaaccttttgtcaaaggtgtaaccttctgttggttccctagcaactatttgccctgaattttgcatttactatcatggtctctgcccctaccccaactaaccaagtatgccaggatatatctaaaataagattgacaataattagtaatcttgagat

SEQ ID NO: 817714 - DNA, 572 bp, Homo sapiens
gttattaattataatctcagttgaaggcatgatctgaaactcaattttatgcagaaaaagataggatggttaaaattattcagctcarcacatcattggtgtatctctacttggctaaaatatattgggaaatcctcctggtatatcaggtctgatcaatttaaaggccctgtaattaagtttgactccaaagaaataagaaagatgggtgacattttgagattgtaatttagacaaggctttgaaatcacttggtttaaaaatgttattcttttatcaatgccttaaagcaatgtccttttttttgaacataaaaacacaaaaatagtcctattgataattagaaagagctttctatgatatcccattcttttaaatgtttacattaaattcataactgttaattttgtggtatattttcacttagattgctcttgcttgtgagtatagggaatatttttaaatggtctggctaccattacagcactcttctttctaaagcattactgttgattcagatataacctctggaagggaaagaaattgatgttataaaatatgaatgttaggcc

SEQ ID NO: 817715 - DNA, 623 bp, Homo sapiens
ctcagttatattgcatgttttaaaataaaccagtgctatcatttcccaatacatcaaaccaatttaacatgtgatagtgtatttaaattagtaacttcttgagggagatgtgatgaactttgagatgaatgaaatctccaggtagaacttgttttgctactgaggtactaatgctttgaagagctaagaacctataattagtgaactttgggttcactgaaaaatataagtgaaaatcagaactcagagaaagaagagtgagagagttctataatggctatgttgaggtaataacctgtttagaaaacctgaaaagtaaagtgtgaaatggggaaataggaaaagcaaagatggagagaaaagaacctagcatacacacatcaaaaagatgattcagggaaggaaccgagggaagatgatggtagagatcacaaaacgtgaacggcactggctatttagctattgctttaatgaatatttatagagtgccagatgtgtatcaggtgaggggatttgtgtagcagataaagtgtgcctcatgttctcktcttagagaatctcattgtccagtaagacaaatcaatgaacagttgaagtacagaatggtaagagttatgatagca

SEQ ID NO: 817716 - DNA, 592 bp, Homo sapiens
gtgcctctactatgccaatactctttcaaatttatgcataactaatagtaaaattaccttctctttcctgcaaagtgcatgcttcttggttcattggagcaagtgttgcatyatacatttttaaaaaaacgtttcatgatgtacaaggtaggagcttaagaaatgtttgatgaaaatttttaatgaatacatttcaggggacccagactgggttcattgatctaaaaagaaatcctgaagaaaggtaagcatggactggggtgtggtttgactagcttgattgtcagatgcagaaatattaaactggactaatttattatttatttttaaatactttactatttattattttgacctaatctctctctctttccccacatttattccaattagctgataaacacaaaagtcaggtttggagcataactagattgtttggtgaagacactagaaaatttcatagtaagctcttgctaaatgcttcttcttaatggtgctggtgatatatagtttatcatttacatgtaactccttgcaagatgagatctcattgcaacaaaactagcaatgatattagggaagcagagtctgt

SEQ ID NO: 817717 - DNA, 470 bp, Homo sapiens
tgagtataactactctctgggttttsacttcttttctgtgaagcccctacacatgtaaaaatattaacatcaacaaaagctgtatgcgtttactcctgttgatctgtcttttgtcagtttaattcacaggcttcagccactgaatatataagtagaggaaaagtttctttttccctacatgaggaaacagaaacattacataaattcatttctttatgggccagaactatggttttcaaactgtgtcttgaggagacaatctagagcaggggtgtccaatcttttggcttccttgggccacattggaagaagaattgtcttgggccatatataaaatacactgaggatagctgatgagctaaaaaataaaaattgtaaaaaaataccttgaaatgttttaagaaagtttacaaatttgtgttgggccacatttaatgccatcctgggccacatgtggcctgcaggctgtg

SEQ ID NO: 817718 - DNA, 470 bp, Homo sapiens
tgagtataactactctctgggttttcacttcttttctgtgaagcccctacacatgtaaaaatattaacatcaacaaaagctgtatgcgtttactcctgttgatytgtcttttgtcagtttaattcacaggcttcagccactgaatatataagtagaggaaaagtttctttttccctacatgaggaaacagaaacattacataaattcatttctttatgggccagaactatggttttcaaactgtgtcttgaggagacaatctagagcaggggtgtccaatcttttggcttccttgggccacattggaagaagaattgtcttgggccatatataaaatacactgaggatagctgatgagctaaaaaataaaaattgtaaaaaaataccttgaaatgttttaagaaagtttacaaatttgtgttgggccacatttaatgccatcctgggccacatgtggcctgcaggctgtg

SEQ ID NO: 817719 - DNA, 470 bp, Homo sapiens
tgagtataactactctctgggttttcacttcttttctgtgaagcccctacacatgtaaaaatattaacatcaacaaaagctgtatgcgtttactcctgttgatctgtcttttgtcagtttaattcacaggcttcagccactgaatatataagtagaggaaaagtttctttttccctacatgaggaaacagaaacattacataaattcatttctttatgggccagaactatggttttcaaactgtgtcttgaggagacaatctagagcaggggtgtccaatcttttggcttccttgggccacattggaagaagaattgtcttgggccatatataaaatacactgaggatagctgatgagctaaaaaataaaaattgtaaaaaaataccttgwaatgttttaagaaagtttacaaatttgtgttgggccacatttaatgccatcctgggccacatgtggcctgcaggctgtg

SEQ ID NO: 817720 - DNA, 629 bp, Homo sapiens
gcaccatatcaatgggatgaaggatgaaaaccacatggtaatttcaattgctgctgtaaaagcccttgataaaattcaacatccctttatgagaaaaaccttccaaaacyagaggtagaaagaacatacctcaacacaataaaagctatacatgacagacacccagctagcatcatactgagtggggaaaaactgaaagcctttcctgtaagatctggaacaaggcaaagatgcccactttcgctactgttcttcgacatagtattggaactcttagcaagagcagttagacaagagaaataaataaagggtatccaaactggaaaagatttcaaattatccttgtttgctgcagatgatatgatcttatattttgaaaaacgtaaagactctatcaaaagactattagaactgataaacaaattcagtaaagttgcagtagacaaaatcaacatacaaaaatcacttgaatttctagatgccaacagtgaacaatctgaaaaagaaatcagtaaactaatcccatttataattgctacaaataaaataaaatacctaggaataacattaaccaaagaagtgaaagatctctgaaatggaagtataaaacattgatgaaaaaaattgaa

SEQ ID NO: 817721 - DNA, 551 bp, Homo sapiens
aatctcttgacctcgtgattcacccrcctgggcctctcaaagtgctgggattacaggtgtgagccaccgcacccagccttctgatttcttaagacatgaatttgaggctgccgttgccaaattacgtagtcaatttatcagttgaattcataggactgctctgtctcaggtgaaacttagggcactgacctcgatgagaatgagacagtgtcatatgggaagatatggacaatttagaggccccccccgcccccgcccccgcccccgccccaacaacatctactccaccgcgcctcctagtggcagaagcagtccttgctcctctacctgcggaggctcctgctgccttgcccgaagatcttgcaatgaccttgcctggaagttatcctgcagcgttttagttatttattgctgagtaacaggccactccacatgtagtgacttaattgggtttgctcagatgactgcaatcactggatgctgggctcagctgggatagttggaatggctgatgctgggcctctctgtctacagcatcctccttcccagtt

SEQ ID NO: 817722 - DNA, 471 bp, Homo sapiens
atgtgtgcaagtcatggaggaagaaaagccagaaaaaagtgtggcagaatcagatccatggctttggttgtcaaatctttcaagtcgcgcctacaaacttggaaatgcctcctggcatttcaacttctcgagctgcccctgatgttccatgttctatgggccactaaagcactctgagactcagtctgcccaacagtaacatgctctgctgcttcatgggtttgttgccccagaactcaatgataagaggatctgctgattgtaggtgctatggaagtacatatatccttaattaaatgttgctcatgacaccaaatataatattaacaacaaacctgcatctcaccatgtagatatttcaaatgatataataggtatagatatttgaaatggtagtaatcatgatatttataatagcaataatcttttaagcatttacaatatgycacagaaattaatactttacatatt

SEQ ID NO: 817723 - DNA, 642 bp, Homo sapiens
aaacatctcaaactcagtgtactcaagactgaattcattatcttgccttctaacatcttcacatcacctactttacctcctataatctcatataatctcctctgtggtgaatatcaagcatccatccagamaccaagtgaaacattttgaagttatgccacaaattcttgttataagacttttacctactcttgcattagtcctctcccttctctaatgtgccttactgtccttgttgagattaccttgttcagaggagtacagtagcctgttttctttttttttctttcttttttttttttttttttttgagacagagttttgctctgttgcccaggctggagtgcagtggcacaatctctgctcactgcaacttccgcctcctggtttcaagagattctcctgcctcagcctcccgagtaactgggattacaggtgcccgctaccaggcctggctaatttttgtatttttagtagaaatagagtttcaccatgttggccaagctggtctcaaactcccaacctcaggtgattcacctgcctcagtctcccaaattgctgggattacaggcatgagccaccgtgcctggccctacaatagcctcttaattggtctccctgtgatattgtttggctgtgtcc

SEQ ID NO: 817724 - DNA, 626 bp, Homo sapiens
ccattacgtaactgaatattgtggtggaatatcatgaatgatttaaaaagtcgaatgtgataactctaagctcccttcccaaatttggaactttacgattttaagcttattgatcattgaaaagacatcttgtatctcttttagcttttgttttgaccacattatctaaaacatcttaaatgagtactatgaatactaaaaatgaattactgaatgaataaatcagccataacagcagcaaatatgctatgaatggccttttgccttttctgccttgtctataattaatgcagctatgcaccttaaaagaggtgtgtgtgtgtgtctgtgtgtgtgtgcatgcacacacatgtgtgtagtagacaagttggagaagataatctgttaaattcaagcactggaagtgatttcttattcagggtaagtaaaatcctccaatgcctcaattcagtgacaccctgggaatgttttatggatcaggtttcatcacttgttagcagtcggactgaaaggctragctacttttgatggatgacccttctgagtctgtttttaaaagagcacccttggctcaccccttcttaactactccatttatgtggcattctgataattttccttctgct

SEQ ID NO: 817725 - DNA, 628 bp, Homo sapiens
tttttgctgtatgcaatgtactagtacccaagcttggagcaaaatcacctgtcacgtactactctcctggcctgactcatattatatcctggaggaagacacaaatgctattacacccctggctcatgtaaartccttctagccccacttccaaagagcacccttactttatctctaataaatgctctaggactctcactgcaaaggctactgcagaacttccttctccatgtcccaataagcacttttaattgatcttgattcccacttcactgaaacaatagaagccatctggtgtgaccacctcctctttacaaagctttgccacttttgttgccaaaaatacatgctttcctattctcatcttaatctttgaccatttcttctctttctcctttgtcttctggacattcctgaagacttagtcatatgtgcttctagtcttctagcttttctcaaatgttgtatgtagtaaatacatccgttcctgtagagttaacaatcacttttgtccacatgagttaaagtcagtatctttggtttgctctcttttacaagctccagtttttcatatccagctgccctctggacatttcaagattactctgtgttggttagaacatggtat

SEQ ID NO: 817726 - DNA, 592 bp, Homo sapiens
cacagccgaattctaccagaggtacaaagaggagctggtaccattccttctgaaactattccaatcaatagaaaaagagggactcctccctaactcattttatgaggccagcatcatcctgataccaaaacctggcagagacacaacaaaaaaaagaaaatttcaggccaatatccctgatgaacattgatgcaaaaatcctcaataaaatactggcaaactgaatccagcagcacatcaaaaagcttatccaccacaatgaagttggcttcatccccaggatgcaaggctggttcaacatatgcaaattaataaacataatccatcacataaacagaaccgtgacaaaaaccataagattatctcaatagatgcagaaaaggccttcagtaaacttaaacagcccttcatgctaaaaactctcaataaactaggtattgatggaacggatctcaaaatartaagagatatttatgacaaacccacagccaatatcatactgaatgggcaaaagctggaagcatttcctctgaacactggcacaagacaaggatgccctccctcaccattcctattcaacatagtgttggaa

SEQ ID NO: 817727 - DNA, 592 bp, Homo sapiens
cacagccgaattctaccagaggtacaaagaggagctggtaccattccttctgaaactattccaatcaatagaaaaagagggactcctccctaactcattttatgaggccagcatcatcctgataccaaaacctggcagagacacaacaaaaaaaagaaaatttcaggccaatatccctgatgaacattgatgcaaaaatcctcaataaaatactggcaaactgaatccagcagcacatcaaaaagcttatccaccacaatgaagttggcttcatccccaggatgcaaggctggttcaacatatgcaaattaataaacataatccatcacataaacagaaccgtgacaaaaaccataagattatctcaatagatgcagaaaaggccttcagtaaacttaaacagcccttcatgctaaaaactctcaataaactaggtattgatggaacggatctcaaaatagtaagagatatttatgacaaacccacagccaatatcatactgaatgggcaaaagctggaagcatttcctytgaacactggcacaagacaaggatgccctccctcaccattcctattcaacatagtgttggaa

SEQ ID NO: 817728 - DNA, 606 bp, Homo sapiens
tgcagtatattaagcttgtccaacccaccttactttgttgttgttgttgttgttgtgttttgttgttttaggcttttagcagcctgaaaccatgkttttttagtttctgtctctaatgataagtggaaaagggggatgaggaaggggctttctcctggcttaaccagaaatagaaactaagaacccatgactctatctgctcccttggatacccctgttgggtatataatacatataacatacaaaatatgtgttaattggctatttatgttatcagtaatgcttccagtcaagagtagactattagttaagtttttagggagtcaaaagtcatatgctgatttgtgactgcataggggggttggcatcccaaaccccacattgttcaagagtcaactgtatttgattgtaactcaaagtataagataaatatacatgagtccatattgttataaatgaatgataaacattgatgaatgataaattttggataaatggaggagaggggacaaatcttccttacagtagaattctaaataatttatgtaaatatatgcccctccaagaggtagagattaataccccttaactgtgagctggacttaa

SEQ ID NO: 817729 - DNA, 598 bp, Homo sapiens
atttttcagcacttcttaatcagttattacctctaggactggcaactaaagtaagtaatccctcagcaggctcaaatcctcttaatcatttcagatgctaagagtttacttatggcatcttcctatgaaattcatgatcatttctttacgaattcacacatgatcatgatcattaaaactggaaaggaataattatatttaaattggaaataaataattatatggaaaagaatgctattcaaaagagagccatcagccaggcatagtggctcacacccgtaatccctgcactttgggaagtcaaggtgggaggattgcttgagcccaggagttcaaaaccagcctgggcaacatagtgaggcccccgtctctacaaaaaataaaaaattaaaattaaaataaaatagagtcaacccagcataaaaagaaaaaaaaatgaaatttcagtaaaagatatcactaatagatagtattttagagctggacttagatcaaccaatactaacttcatcttcttgttttattaatgagtacattgagatacrttctaacattctaagaagaaaggattgtgtcctacaggttaaatctctctctc

SEQ ID NO: 817730 - DNA, 493 bp, Homo sapiens
gtttgttaggcctcctgtctctcagcaagtcacattgggtcaagagcaggagtcaatattgttgaacactgaagttatgatgcttcaagactttgtttggattagaatttgtacagcaaactaaaatgtaatctggatgctgcttggtctgccttctttacatgttggtggattatggaactggaaataatgggactgccataggactggggtcaagcagtcctcagaatgcaagtatgtgggcatgtcctcaccacctggagcagttatggaagtacgcctcctgtggcaatttgaatattggaagaactattagaagaagcattttcctggagctgtctggtagtgttcattacaccactccaaagcctcaagtttaaggaagcaaaattamttcctggccaccgcaactgcaaaagtgaggggacccagtgtttccgtatctgttacacccattgctggttcaaagctcacgttggttaagtctataaaa

SEQ ID NO: 817731 - DNA, 550 bp, Homo sapiens
tctcttactcttatttctcattgaytttgttttaatgcttaattctatttttcgcaataacgttcacagatgattttatttttctcgcatagattacaaacccttttatggccagaagtaccctagtttttttgtatttcctgcatttggctgcatccaacaccaagtatcaagtataacatcaagaaatcccttaccctctgattgttaatagcactccactgtggaagctgggtgagatacatacagaggaatcattgacatattccacacatgagatggggctgacctcccctcccaagactatggctttgtggattcatatatttatccaaagtgaatatttgagatgtctttctaacaggacaagataattcctttatgatatttatttcgtaagaataaatatatgaaatgtgtcaatgcacgtagcctgcaatggtgaaaatgcaatacttcccaggcttgtatttttcagtcattgcacagtgcatttactgtcgtctaattaggcattctaaaaacctgaagtccccttgtgtttaccctg

SEQ ID NO: 817732 - DNA, 622 bp, Homo sapiens
aacccctggtagggtcccatggtagtcctgtctctttttggcagccagttaggttctgctgaggtctagctcccgacacacacrtggcatttgtacagtcactcattgctcctgcaaacaaggctgtactgttcccactgctgctggtttctctggtcactgccaacctttataccatcactatggatggctgctggtgctcacgctatcactcagtactgccatgctctccccagcagggataagacattcgcagttttcccagagggaagcctccagtttccatggtgctcctgctgtttcagctctatcttttttttttttttttaattgagactgagtctcgctctgtcgcccaggctggagtgcagtggtgcaatctcagctcactgcaacctctgccacccaggttcaagcaattctcatgtcttagtgtctcaagcagctgggactacaggcatgtgccaccacccccagctaattttttttgtatttttagtacagatggggtttcaccatgttggccaggctgttcttgaactcctgacctcaggtgatacgcctgcctcggcctcccaaagtgctgggattacaggtgtgagccactatgcccagcccatct

SEQ ID NO: 817733 - DNA, 564 bp, Homo sapiens; identical to SEQ ID NO: 815899

SEQ ID NO: 817734 - DNA, 610 bp, Homo sapiens
cagttttccaaaagtatatcaattcttggtaaagaccaagtgaccacttcttgctaaaattctaaatcttacaaagtaaaaatcttccctcaatttatacaacaattgcattcctggagaatgcattatatacaaaaatcatgtaaaaatacattgtgttttttatgtatagcagaattatctgcttaattataaacaggcttttttagccatataaatgtccagcaggacatttaagggttacgcaggaggtgggtgggacaagtcctcatcccatggggctgtctcacatggtgcaggacctctcgcctatcatctgagcccccagcctctctgtgccagtaaccctaacctggcattatgctaaccaaaaatgtccctgcatttccaaaacaccccggttaaaaaccactgagataaataatcagcttgttttcagcacgaattattagaaatgagacctctacattttattaamtataacaaatcgcatgcagcaccaggaaaatgttcaagataaattcaaaagttttattgcaccaaatgccacagaaaaatggatcaaaataatacataaacaagttaaaaaaaattcccacacaatgacatt

SEQ ID NO: 817735 - DNA, 582 bp, Homo sapiens
gttaattcttattaatacttatttataattaataattcttattaatgcttatctgttaattaatgyttattaataaccaaatgagacgggtagaatttttttccccagtttatgtatggggaaaatgaaagattggttacttgtccagaattatagctaacaagctctttgtacccagacaggctgatgcgaaggttgggctcttaattgacccattaaactgctttgtatataatcaacttaatacagacatgggctggatgtggtggtttatgcctgtaatcccagcactttgggaggccaaggtgggtgcatcgcttgaactcaggaatctgagaccagcctggataacttctgagaccctgtctctacaaaaaataaaaattagccaggcatggtggcacacacctgtggtcccagctatttgggagatggaggtaagaggattgcttaagcccaggaggtggaggctgcagtgagctatgactgtgccactgcactccagcttgggcaatagagcaaggccacctcaaaaaaaaaaaaaaaaaaaaaaagacatgatatatactaaaatttatccca

SEQ ID NO: 817736 - DNA, 415 bp, Homo sapiens
cttcagaatgtgaacaggatttcagttgggccgtgaggaggagaccctacyacctagggaacagatgatctcagccagggcacactgaaggaagagctgggaaggccagtgtggctggggctcgggtggcaggaggtgcgtgcttcaagattgagaaagatcataaagccggctgagaattttggactccattctaaagggagtcagaagcctgtttcacatgccccacaataccctgaacttctctgtagaacttaccacacttgcccttgttctctctctttcccactggattttaagccccatgagggcagggaccatgtcttcttgttcatcagttattcccaggacttggctcagtgccccatgagtgtcagttgggtggtcagacaaactaatcctctgtacagtccgg

SEQ ID NO: 817737 - DNA, 624 bp, Homo sapiens
gtttactgactctttatcttattcctcaattggttcagaggttaatcagcaaagacggggctaattcctaggcttcctaaaagaccccaacaacctgtattagcacagttaacctacagggcaatccaattgggaaagcgttatcaatgtccctataaacaaccggaaactctgcccaggcaacagagccaaagcctgaactctcatttcctagctcaagatcctatacttttttcttaaaaaaagatcatccaactggctttgtgaccccctccagttactattccaaaattctattttacaaattcacagggatcagtgatcattttgtctttttcaagacaggaaattcatgtttcccataaggagtgatgtaggcctgacccagataaaaccaagtgggctgtctctggatcttactttcccctagattcacagagccaggagcaaatgctgagaaggaagtgtgccttagcacagggtacattggattcctgagtcttccttaattaaaaggggatttagggaatttatttttatcaagatcctcagatgattcagaaaacaaatttttttgagataaatgatcaygttactgggaataacaggagatattattagggg

SEQ ID NO: 817738 - DNA, 599 bp, Homo sapiens
tgtcacataattatactgaaattttaagaaagcagtgggatccccaaacataccagtttttcctgaaaacagtatattcacagcacccaatccaagagagatcaggccacccaagtcagtgtaacaaggaagtcccctgtgcttttacccttacaagaaaagaaacctgaaataacctaatgtgcacaatagcattttttttctattatcctgtgttgttgtttttaccttacaaatcccactgttctgtcaattgcccagtgggagctttcatctatttgatagaataaaggctgcccaatccatgaatcatgaataaaagccaactagatctttaacaaaatttattctaattttgtctttcaacagattgcagccttaggctagcactataatccatcttttcaggaggggagtttgaataagagtattattcagtgacatgttttaatgcaactttcacctataagaaaagagtctcgttgtattggcttgcttaacatttgagttttgaggattactgtacctacwtaaacaactctctaattaccacttccattgtcataagctgtgtttctctgtattattcataatcttat

SEQ ID NO: 817739 - DNA, 619 bp, Homo sapiens
aatattagtatgttcatatacagaatattcaagttttacattaaaagatgtctgtttttttctgttaaatctatgccatttgtgtgtcaacagcgcacagactgcaaggatttaaaaacaacaacaaaaaatcaaataacaaaaattagtgctaaatatttgtcgttaccaaattattttattgaatatcaggtgtctctgtgaatcttagtaaaatttttcaaaagtaaaactaaaacatagaaagtataattaatactttagcaattatatttgttttaatccaatgtccaaaataagttttttattgttatttcattgaagtaaaaaaagactttgtccatgacaggtgtgacatttcaaaatttactataactactcaataaaattccatgtttaaaattacttttcccaagattttaaatgttagaaagattaatactctctatgtgattatatacatgacataaatcaaatgattttttaaaatagttttttstgcttttttctgtaaaagttttatttttctctccctttcttagtattacatatttatgttattattacaacattcttaagaaaaatgtattcacaatttgtagtctctaatttccagcct

SEQ ID NO: 817740 - DNA, 493 bp, Homo sapiens
tatttttataacagcaaagacatgatatcaacctaaatgcccatcaacagtaaactgaataaagaaaatgtagtatatatacactacagaatattacacggccataaaaatgaacaagatcatgtcctttgcagcaacactgatggaactagaggacattatcctcagtgagctcatacaggaacagaaaaccagctaccatgttctcacttttaagtgggagctaaacatcgagtacacctggacacaaagaaaggaagaaacagacactgagacctactggaggatggagggtaggaggagggtttcaaaaaactttgtattagttactatgcttattacctggattatgaaagaaatctgtacacaaaactctgatgaaacacaatttacctatataacaaacctgtacatgtatccctgaayctaaaataagttaagaataaaataaatgtgatgttgcattctacaaaacatttcttactctgcataa

SEQ ID NO: 817741 - DNA, 547 bp, Homo sapiens
tgatttatccagagagtgttatagaatttaccagcagcatgaaaccatgttaccaaaattgtgttattgcacaaacttaactttttcccaaatgtgatttgcagagctgaraatcctgtctgtggccatctgtcctatcctagtccccagaggcgtggcggaggagtgtgagaagccaccaggtgccatgtaaattcagccacccatgtcacatatccatcaaggagaccagcatttgctagggataagtatgcagcttggcatgcaaaagaggctcccagatccatccggcccaaacattcccagagccttcctctgtgccaggcataaggctaagagaacgccacagaatagggaagatgttctcaccagtatatgctccccaaatgtttcctcctttgggctgggatgggactgttggctgaaaaggcaatacaaaggactataggcactcttagctgcctgtatgacaggcacaagtcctttaaccagaatcagtttcctcatgtatcaagcagagataacatacatcccacatgcctcatgt

SEQ ID NO: 817742 - DNA, 631 bp, Homo sapiens
tacttataagccaagcccctggctatgagaacagaaaaatggtgacaggattaattaaaagtacggtgctaaacaaggctacagatttttatgtcataaagctatatggagaaagatgccttacgacccaagtcttcaatgttgggtaatacttattcaactttcatatggaattctaatttttctgttggtattaaaaagtgtatattcatttatgctgtaaagatttttatgaaataatttctattatgtagccattaaaaatgcatttaaaaatccctcagttatattagttatctcttactatagcttaagtaaaatagaaagattaaaagttgtctaaaagcaatataatactgagaaaattggaataaatacaccaaaatgttagtacatctagttatctctggatggaaggattacacatgatgtaagtttctttgtatatgcttctttaatttataaattttctgaaataaattaaaattaaaattaaaatttttttaraaaaaagttctatcagtataaatgccaccaaatgacaggtaggagtctttccaccctcaaataattttttattataatttatcaaaatcagcatgctggggttactgtaaatagctcacctgat

SEQ ID NO: 817743 - DNA, 478 bp, Homo sapiens
catccttcttgatgaggaaaattcattctccatctctatatgcttgttgatctcatcctggtacttactcttgaagtcctccaccagcccctgcatgttgtcaagctccacctccaccttcagcttctggtcccatgtgtccagctgccgcagcaagttgttgatgcagctctccatgttgtccacgttctcccagctgtcttctgctgctgcaggctccacatggtctccagcatcttgttctgctgctccaggaaccacactttgtcaatgaaggaggcaaacttgttcagggtcttgatctgcttcttctcctgggtgttcacagcatggatgttgggatccacctccacytttagggagctcagcagactctgggtcacagtgaaaattgtgatgcctcccatatcaccagccccagcatagacctcacccagacccatgctggtgcccaggccacccagaaagctgctaccta

SEQ ID NO: 817744 - DNA, 639 bp, Homo sapiens
cgcctcctccactccctctgccttttaaaatgaatgacactcttagccctttttgtgttcccatagcactgtgttcctaactttaatgcactacctaatttattctcctagctgtggttccatttgttctaggacagtatcagagccttgttcaccactgtgtctcagtgtttgttgaaggaatcaattagtaaatatgctgtttatagatgtatatccattacataatatatgaaacatagcaggaattcattaaatattttggagtgaatgaacgaatgattctactaactttatgagtccaagtaacatctttatgctgtacttaagatgtaaaccaaaagtaaagttgtattttaggtttataatcagtccttttccttaggatctattgaccccacctaagtgggaaaacttctctaagtcctaagaagtgagtaggatgcctttaatttaaatggaatgtccctcttagggttctacaggcaaagaattggtgataaaatgtgagttctcttcctgatacaaatacatttcacagaaataagaagtaaatattcaaaggtaaacattgaagaagggaggatwctggctttatttaattataaaatgacaaatgggaaagaaccttttaagaaa

SEQ ID NO: 817745 - DNA, 601 bp, Homo sapiens
actgcctgagttcattccaccttctcctttgacacaattctttccttgtctggtgaagttagtgtggccccagaaatgttaggtatctaggaggaatttgggttggtcaaacctttatttgaaatataatgggttgtattgtgtgatggcagtctcttctaactataaaacatgcaaaatggttagcagacaattctgttcccattgatgcgaagtgaatatagaaatttctccctgccaggaataaacttaacatagcataaataatttaaacaaccgcaggacatttttcccccatgggaatatagagaaaaagatctatcagaattcctgtctttgtaagacacaaacctgtagaagtactataaacagcaagtaagtgtgtgtgaagttgcatgttttatgcattccagtgtttcagatcgtatctttttatccaacagctcttctcttgctgaactcttgatctttcagataaaatactaactagatcatacttaaaacagtaaaatcctgaagaagaaagatamatttcttatagaagtaacaaatagacttctggattgtttgataatccagtaaatgaagaggaattcattat

SEQ ID NO: 817746 - DNA, 604 bp, Homo sapiens
aatttattttgtagctgaactgtatcagtttgttcaggggtcctaatttctgaagaattctttcttaaacttgaatatttaacagagtccttctaggaaatgaggaaccatgtcctaaatgaggaactgtgtcctaaattctacttctaggtcctatattgaatgatgaaagagtaaatccatcaactcatcaataagtgttagaagaattaatgatcactttcaattgtgtctactcactaatttttggttagcaaacaaactagagatggagtgcttatatgaatcaaacttatttgtgccctactgtgtttgagatgtcttcaactactcatctactcatttgttcagaatatattttcatgccagaatattttggctgggatacagtagaaaataaaaagaaataatctctgggtttataatatttgtcttcatatgattatccctgacaatcataattctggctgggaaacagacaataawcagattgataatataacaagtgtcaaattctaataaaaataaaacaaaataagagtgataaagcatcctggggtttggccaggaaattattttgcattttaatgatcaccaaattgat

SEQ ID NO: 817747 - DNA, 620 bp, Homo sapiens
atttcattaattcaacaagtatttattgagggcctagtctgtgccaggcactagagaggcaacagagagcaaaacaagcatgttctttctatggatgtgtttggaagagaaatagcaatcttgcaatagctccaatacatgcaaaaattggtaactactacacatttttttggcatcccgtgcacatatcaattcatttttatggtgactcacacatacatactatgtccttgaattggataatagtggctctgttgtgcttactgctgtaattctttaatcaatcacccagaatacaagagacattctggggacttagaaagtaaacctaagtaattccagtggcaaaaccttgactcaggttagtcgtcaaactaaatctactcttccttcaattacacggatcattgctttaactctttacctggctttagtggcaagaaccttacatcttagaataagataacatcagatgtgatcatttcttaaagatgaatataaaatatatttctcatataccataatatctgctttaactttccaaagcraaaataaaataaaatagcaaaggaaaaataaacattaaaaaaatcaagatatattacaacaatcaatattgg

SEQ ID NO: 817748 - DNA, 580 bp, Homo sapiens
ataaacatgatggttgtggacaatgtcacaagtacacaggaagacccagtaacaagacatgcaaggtgagggcaaggggcgctgagctgctctagcatttcaaaaccaggactgtagctttccatacatttagcggggtaggagaagggatgtgcagagctgatgacttcactggctcctcagcagcatgtacattcaaattgaagatgtcttgagagccccactatacccaaatcgtgagtctggtcactcctctagcagagcttggtgcagtgacagctagaaaagctgagttccaattgagtctgttgcaccagagttcttttgaagatgctcagcaaagtaattattttcttttgagcagatgtacagcacatccatgagaaggccaagtaaaggatgctctccagcccagtcaaatgatccaatccccctactatctcagacccctctgagtttcttcctatggccgccctcactgtacagaaatagyggagcagcatcagggtgagtcatcaatggtgggcagccagaagaccatgctggaacacgcactggcaaaagtcatgaacttggggtt

SEQ ID NO: 817749 - DNA, 646 bp, Homo sapiens
aagcacattgttgctattactattttgaacaaactgcctactgtcacaccaattaaaaatgagaaaaatgaaagtttttattttaccttaaaaaaaaaaagacattaatttaactggagtcattaagtgatttctacttggatgcttatagaggtactaaattatttctaattttcttctggattattgatttaatgaattaaaatatttgccacacattcaagattgcctaccaaagttaatgagttaattctcttttttttttgccaattttgacaagctctatagaaataaaccaatatacatattttagagctaaacatacattgttaatgttttaaaattttaaaatgtaatatcaaatataaaattatttttcaaaatgttcaaacatttctaggaatttgattttatttacaataagtgaatcatgtgtgttccatatgaaaacactttatataaatctttcatcatattttattttagcaaaattagctgtaattttcttaattattccaaatttcatgaaataaataaggaatctgagaagcatatgaaaatatatttcataaattttcccaagtttgattaaygaagcaagaatattattcactattcacaaaatgaagttttcagtctatcagac

SEQ ID NO: 817750 - DNA, 571 bp, Homo sapiens
ctagtcattctttacctatcaaatgaagataatttatcagtctttccaggaggaggaaaattattcccgttttgtacaacaataagcacacctctcacttctactcccagaactgtttgtttgaaaaggattagttccctgaagaaaacccgggatttcttcagacagtaagtatccacctagtgttggggatagctgagaacgtagcaggaagaataatgatctccctcaaaaaatgccgacgcccaaaagctccagatcctgtgcatgtgttaggttacgtgacaagggacaattaagaatttaaaaggtttcagatcgaattgtttgctaattaactagccttaaaataaaatagattattctggatcatccagatagatacaatgcaatcacaatggttccttaaatgcaaaatagggaagcagaagagagtcagagtgtgggatgtgaagaaaacttggttggctatttgcatccagaaagacatgtagccctgctgatatcttgatttyagttgattcataccagttttggacttctgatattcagaacagtacaataataaata

SEQ ID NO: 817751 - DNA, 560 bp, Homo sapiens
aaggtcagatgaacaaagtcattcatgctggtaccagagcttctattgtcagcaaagtgatgaacatcactggaggtccatttccagtctttcagtggttgccaaaatgtccatcttaaatgacatgcagaaaatatgatttggtatagcatttatttgagcacaaaacgtaaggatatccacctgggaaacaactctaaataaaagaggtcagcattctgaaggagaaaagttaaggtttcacttatgtaggcagaaacaaagaagttttagcggattacaacattttttcatacccagaccagtgcatattttacagtgatttgattggttacagattgctacattctaaagattattactttattactccataaggaggaatagtgatagagagggtgtgtcttatatctggtcctgcttggtattcctaattatttacagaaaaaaaaaaaaaaamaaaaaaaaaaacaaggcaggagttgtagcagcatgccatgtgacagataaccacattcgtttcaaggctcagaataatttaaagttccaacaattttaag

SEQ ID NO: 817752 - DNA, 645 bp, Homo sapiens
taagttctttaaaaatactattataggctgggcgtggtggctcatgtctgtaatcccagcattttgggaggccraggcgggcaaatcaggaggtcaggagatcaagaccatcctggctaacacggtgaaaccccgtctctactaaaaatacaaaaaaattagccgggtgtggtggtgggcgcctgtagtcccagctactccggaggctgaggcaggagaatggcgtgaacccagatggcagagcttgccgtgagacaagatcaccccactgcactccagcctgggcgacacagcgagactccgtctcaaacaaaaacaaaaacaaaaacaaaaacaaaaaacaaaccaaaaaaaaaaaactattatatgtccataatatgatggggaattactattgaatgtttgattgaaaagagaaggttcatattcatccagctaattaatacagcccagattgttcttatagttgaagatatgttttgggtttcgtttccctgaattaacatgtataagcaacagtgaagagcttgattgcagcttatttgcaaaaggtttaaattttcttttaaaataattcactttaatcaattaaaatgtttcagccatttaactactttgactgctaaaccctttcttgtgttacca

SEQ ID NO: 817753 - DNA, 645 bp, Homo sapiens
taagttctttaaaaatactattataggctgggcgtggtggctcatgtctgtaatcccagcattttgggaggccgaggcgggcaaatcaggaggtcaggagatcaagaccatcctggctaacacggtgaaamcccgtctctactaaaaatacaaaaaaattagccgggtgtggtggtgggcgcctgtagtcccagctactccggaggctgaggcaggagaatggcgtgaacccagatggcagagcttgccgtgagacaagatcaccccactgcactccagcctgggcgacacagcgagactccgtctcaaacaaaaacaaaaacaaaaacaaaaacaaaaaacaaaccaaaaaaaaaaaactattatatgtccataatatgatggggaattactattgaatgtttgattgaaaagagaaggttcatattcatccagctaattaatacagcccagattgttcttatagttgaagatatgttttgggtttcgtttccctgaattaacatgtataagcaacagtgaagagcttgattgcagcttatttgcaaaaggtttaaattttcttttaaaataattcactttaatcaattaaaatgtttcagccatttaactactttgactgctaaaccctttcttgtgttacca

SEQ ID NO: 817754 - DNA, 645 bp, Homo sapiens
taagttctttaaaaatactattataggctgggcgtggtggctcatgtctgtaatcccagcattttgggaggccgaggcgggcaaatcaggaggtcaggagatcaagaccatcctggctaacacggtgaaaccccgtctctactaaaaatacaaaaaaattagccgggtgtggtggtgggcgcctgtagtcccagctactccggaggctgaggcaggagaatggcgtgaacccagatggcagagcttgccgtgagacaagatcaccccactgcactccagcctgggcgacacagcgagactccgtctcaaacaaaaacaaaaacaaaaacaaaaacaaaaaacaaaccaaaaaaaaaaaactattatatgtccataatatgatggggaattactattgaatgtttgattgaaaagagaaggttcatattcatccagctaattaatacagcccagattgttcttatagttgaagatatgttttgggtttcgtttccctgaattaacatgtataagcaacagtgaagagcttgattgcagcttatttgcaaaaggtttaaattttcttttaaaataattcactttaatcaattaaaatgtttsagccatttaactactttgactgctaaaccctttcttgtgttacca

SEQ ID NO: 817755 - DNA, 624 bp, Homo sapiens
ctgggagtactttcaggttggtttctgtgtcactttgacatttcccaacctgttttgtaagcactatattactttttggtagtataaggtgctctagggtcatcttrtattttccctgttctggccctacaatcagccatttctctgaaaatatctggtttcttttattggagaatagtatttgagcactggctgctgttcatatttgtcatttttttccccactgtgtgattcacattgggtcctttgtttccctctatcttcatgtattctgactcttctgacctttctgtttcactgttaaacctgtttacctctcagagatctggtcagactatatagggaattttctcaatccagacttccaactagtttactttttatgtttttttcttctctactgagactctatgtttgttcattcatttaaaatatatttttctttttttaatttccttgaacatagttatggctgctttaaaatttttgtttactacaaccaatatttgcatcatcttgaggtttgtctcgtgttggaggctgaaggactgagggtcgtgatcaactcagtataccactggaggctacatgagtaagcagcaagctgtttctcataaatgcaga

SEQ ID NO: 817756 - DNA, 509 bp, Homo sapiens
atcaacggagcagtccaaaatgactgcccacacagataacttcgctttagctgtctcgttattcagtttaatgatgtggtgttggctaactcttctgatatcttctagcaggagagaagatgatacagttttaaaatcctgttttaagaacatccttaaagtaagcagatcatactaccatctgtattggtttcatgatgctataactagttctgatcagttctcagatataatttctccttgtagctgttgaccctgtatgggtgaatatgccatggagacatcatctgcagacaagctgggcataacaccaactgaggagagatggagaaactcaagtctccattccgcagtggaaggggcagtgactttacttagaaaagtcatttttttcytgtttcatacattttattacttaatttttgtaatttttaaattaataattcctagaataaaggcagaggatgcttagaaatgttggaatttgcaatttattgtataggaaaatt

SEQ ID NO: 817757 - DNA, 335 bp, Homo sapiens
tcaggacagactggaacctgatcatgggtccatttctgcagagtagaacttccattattaagtgggaagtggagatttttgacagctatgcagaaaggaaacagcatgatcacattcgtgttttagatcacattcgtttctcacatgttctgagaacttacaaagttcaatgaatttgaggtgtttaacacagattagcatgaaatttcagaggcagaagatattatttccagttggcagaaaccaggaaagaactgtggattattaaaaggctcytataatgggccttgtagttgaaaggacaaaattttgaaatagcaatttgagtaaagaca

SEQ ID NO: 817758 - DNA, 635 bp, Homo sapiens
gtgccattttattattttcctatattcttattattctctcttttcttatcttcctataggttgagtattttttagaagtccrttgtgatttatttctaacgtttttctgtatctcattttggatagttttcttagtggttatatgggtatcacaatgtacatatatgatactttgaagtgtagaaaccttacttccatttaggttcctttccttttctacttctaaaatgtaattgttttacatatttcttctacattcactgagtagcacataaagttacaatttttgcatcaaccatcacatatgaacctcaacagaagtttgattgtgtattatatttgcccctatttttctgcgctccaacattcttttctttctaaagtccgggtttttattctattatttctgtttagaatattttatgcagctcttccccaataggacaggtttgctaacatcttttcctacctttctgtcatttaggaacatcttgattttcctttcatttttgaaggatgtttttaccagatgcaaaatttgctgtacacagttcttttcttttggtgattgaaaaatttgctacttcctcccagcctccatagtttcgaatgactgctgtcattttcacctgccc

SEQ ID NO: 817759 - DNA, 556 bp, Homo sapiens
gcttatcgtatgttaaataaaaatagtgtacacacctacatgcacacacacacacatacacacataccccttcrcacacagagcagaatccctgtgggagagttggaaattccaagggtttaagtagggtggccagaaaagtcttcactaagaaaaggatatttgaaaaaagtacaaaattagccacccagatttcttgaagaagtcataagaaacaaacatcccagaggccaagaggtgcaggaatccttggtatgtccagggaacagaagtaggtaaaagatgaggttagagaagcaaaaagaacaaagttgaagcatcacattacccaacttcaaactatactacaaggcctaagaaactaaaatagcatggtatgaatacaaaagtagacacacagaccaatggagcagaacccagaaataaagccacacacctacaaccatctgatcaacaaagtcaacaaaaataagcaatggagtaaagattccctattcaataaatgttgctaggataatgggatatccatatgcagaagaataaaattgaactcctt

SEQ ID NO: 817760 - DNA, 635 bp, Homo sapiens
gcacttatccattcatccataccatgctgacacagtttctcaaagacctggtgtgaacagatgcctgctgcctgaaggatttttaagggccaccctgcagaacaactccaagatattgtagtatctccaagacaactgcctctcttctcactgtaggatggtcaggggagacagtgtagttcataactctgggtgtgcattgcctcagggattccggccagtgtaggaagacagagcaagcatgtcaccaccacctccttctctgctcatgggagacattgataactgatcccagagctctgtctcacatcactgttagattggagctaacattcaaggtgaaaagcctttttggtaccttgactttgcccaacccagagtgatatgttttcaatgaaactgagagataaatcacagtcagggatgacaaggttttcgtggggctcacagcaatacctggcagagacagacagtacccaacacacggagatggctctgtggctcctggggcttgtagctcacttgkatttcaaacaggctccgcaccctccatgcacacctgtctaccccagaggcagagcggccacaactattagcccctaactatcagcccctaactcaggtccctagagtga

SEQ ID NO: 817761 - DNA, 583 bp, Homo sapiens
tatagactgaactcagctttaatttgtrtagaagaaaaagtctccagtgtagactgaactcagcttcaatttgtatagaaattagtgagtatttaaattaagaatgagggaatagggagaggagagagttagggatcagttgaatcagggaagtgaaaaattacaaagggtcacccagagtaaatggtattaagctagctctgtctgccagcaagcaattatcaaagttagtattctatcctcacacagagacgggaagacagaggccctatcctcaggtgttggctgaaatcaactgtaaaattttggggccagacttgagtcttctcaggcaggcacgttaacgggggcttgaattatgttagggatgtggccttgagctgttagaacctatgttaatgttttttcaagtctttatagcaaacgtggaggcctagtcaagaaaagggctcagaagagcctggcttacgtttggtcaaggagagaaatttctcgcttaagagtacatatcataactagccagtgacaaatctactctcgaattaagtattaaggcactttccaaaatatatgcatttaaaca

SEQ ID NO: 817762 - DNA, 640 bp, Homo sapiens
ataaaatttcttataattaaaattgtctatttaagctgataaaaatttaatttcacttgcatacaaaaactctgtaatcatacatctccytccttcacatgatatgctatgacatcacaatttacatctatttatgttgtgtaccctttaacataatttagtcttagttattctaatattttttatgttttaatttttacactaaagttaacagcaatttacccaccatcattatagtaatacagtattctggttttatctatctatttacctttacaaagagtttcatacttcttatgctcttatattgctgtttaacatttttttgttccaacttgaatacttgctttagcatttttggtaaagcaggtccagtggtgatgaaatcatttagtttttgtttggaaaagcctttatgtttccttcatttttgaagaatagatttgttgtgtatagtattcttggttgacagtttgctatcgcactttgaatataccatctcagtcacttttagcctgcaagatttcttgggaaaaatctgctgatagtcttatagtcattttattgtatgtaaaaagtctctttctcttgcttctttcataattccatgtatttaacttttgacaatttgattataatg

SEQ ID NO: 817763 - DNA, 641 bp, Homo sapiens
ataagagagagccctctgagctttgatgattttcagaagatctgtaaagttggagggtacaatgcttgaatttgttagcgaaattccaattagctttcaaagttagggttggctacctgctctgcacaccgtggtccattttgctgtacagtttctcatgtttataaaatgaagttacaattttttatatcaaatataatcagtattttttcctatgaaatgcacatatatattcttatgaaaatcctaaattgttatctaaaataatgagaatgtttttctttattttaaagcagggtttgctaaactttataaagaggcagatgataaatactttagactttttgggccatattttatttttatccatgtttcttctccttctctttcctttttctcttttcctcctcctcttcttttttttctttaactttaaaaatctagaaaccattccctgccaatctctattttaaaggttcggtaaaggcctcagtatgactggctgattgtcttctgtctacaaatattttcarttcttatctcttaagagtttaacggattctgtatccaattggtaaaatgtatgcatttgtatagccactaggtagactctgatttacggcatttcatgtatatttaag

SEQ ID NO: 817764 - DNA, 636 bp, Homo sapiens
ttaattaaatgggatatatatctttgtatgatggattagtaaaatatggtgtcaaatcatataaatatatttgctttggggaattcccttttggacccttttattttttatcatctcawagcatatcacaagtccccagaaatatgccatgctaatattgccaactgagtttttccaagcaaagatgacatcagccatctgtcacacagtactaatgctgagaagcaaagccaactatagagaaaataaatacctttcatattgattagccaaatatttatgttgagaatgaaatgattaaaatctcactattcaagctaattactgtaagtgaatatttgcctccaagtgaatgacataccagcagtgtattttctttattgctttcctaaaaccaaatttcattgtgaacctgtgtgctgcatgaggggcttgtgctagactttgcaaggtgttgcaatacactgccatagcgatctttcagcctgcaggtgtatctcctgctgccttggtagatttgatatacactgtgctgcactggtttccagatggctgcactcttgttctattttaagttactctgtctcttaaagtctgttacactggagccggtcattgcagggtcaaacaatcggt

SEQ ID NO: 817765 - DNA, 608 bp, Homo sapiens
ctttcactttttataaagttaggcacatgattatgatataatacaatattccctctcctaggtatttacctaggagactaggagatatgaaaatatttgttcacacaaaaactagtacaagtatatttatagcagctctattttaatcatcaaaaactagaaaaaacttagatgtccctcaataaataaaatgataaatagtggaacatacatacgatggaatattactcagtgatttaaaaaaaagcaattaactaggcttcatctacataatatgaaccttggtctccacaaccccttatcttaacccagacactcccttctattgatttcaggtcttcagctacctatcccctggaagccccggcttcaagctgtccttcctttccagatcaaatcaatgtacatcttacatgtattgattgatgtcttatgtcttcctaaaatgtaagctgtagtctgaccaccttgggcacatgttctcaggatctcctggggctgtttcatgagccatgrtcactcatatttggcttaataaatttcttcaaatactaaaaaacataattaactgttgatatgtgcaataacataaatgaatatcaagtata

SEQ ID NO: 817766 - DNA, 598 bp, Homo sapiens
ggttttacacaagactcacccaagttatactatggagtagctatcacaggttttagaatgctgtggtgcatacttgctgcacaagcctaagcacaatttgtgaatccccaaattgyatatcttccattcacatcagacccacgactttccttatcatttaactggacatggatatgataatatgtttatatttgctcccagaaagtatataaactgtgattctaaaagttggatcactaccccaatggcaccaaactaaaaacacatttaaattgttattttttcttaaattcaacttaaaagtataaatgtacgtgtggcatgactgttgaaagtaatgttgcctcttcaggatttctacagtagtccctgattgtaatatttattcatttgggacacttatttaccaaaattattctttacagttttatgttttcatgtgtcactgtcttgattagataataagcatgaagctggttaacaagcttaaccatagccttacttgattgaaatccttctttgagcttgtcacacaggttatgcacattgtaggtctcaataagaggttaatttctccaatttttttagaataaaaaag
